(19) United States
(12) Patent Application Publication
(10) Pub. No.: US 2017/0268071 A1
(43) Pub. Date: Sep. 21, 2017

(54) COMPOSITIONS AND METHODS OF USING TRANSFER RNAS (tRNAs)

(71) Applicant: THOMAS JEFFERSON UNIVERSITY, Philadelphia, PA (US)

(72) Inventor: Isidore RIGOUTSOS, New York, NY (US)

(73) Assignee: Thomas Jefferson University

(21) Appl. No.: 15/521,828

(22) PCT Filed: Oct. 27, 2015
(86) PCT No.: PCT/US2015/057643

§ 371 Date: Apr. 25, 2017

Related U.S. Application Data
(60) Provisional application No. 62/122,711, filed on Oct. 28, 2014.

(51) Int. Cl. C12Q 1/68

(52) U.S. Cl. CPC C12Q 1/6886; C12Q 2600/106; C12Q 2600/178

(57) ABSTRACT

The present invention includes a method for analyzing tRNA fragments. In one aspect, the present invention includes Sa method of identifying a subject in need of therapeutic intervention to treat a disease or disease progression comprises characterizing the identity of tRNA fragments. The invention further includes diagnosing identifying or monitoring a disease or condition, a panel of engineered oligonucleotides, a kit for a high-throughput assay, and a method and system for identifying tRNA fragments.

### CROSS-REFERENCE TO RELATED APPLICATION

[0001] The present application is entitled to priority under 35 U.S.C. §119(e) to U.S. Provisional Patent Application No. 62/122,711, filed Oct. 28, 2014, which is hereby incorporated by reference in its entirety herein.

### BACKGROUND OF THE INVENTION

[0002] Transfer RNAs (tRNAs) are ancient non-coding RNAs (ncRNAs) with a central role in the process of translation of a messenger RNA (mRNA) into an amino acid sequence. As such, tRNAs are present in archaea, bacteria, and eukaryotes. The conventional understanding had been that genomic loci harboring tRNAs produce a single precursor transcript that is processed to produce the mature tRNA. Recent reports suggest that “tRNA fragments” (tRFs) represent a novel and potentially important group of ncRNAs. However, knowledge about their biogenesis, roles and potential functions remains limited and fragmented. Studies with human cell lines have shown that tRNAs can be cleaved at the anticodon loop to produce “tRNA halves” that are (30-35 nts in length) a process that seems to be facilitated by the enzyme, Angiogenin, following induction of stress.

[0003] tRNA fragments (tRFs) have also been found to originate from cleavage of either the mature tRNA or the tRNA precursor molecule. In the latter case, RNase Z cleaves the 3′ part of the tRNA precursor as part of the maturation process and the resulting fragment is considered to be a tRF with reported functions. tRFs from the mature tRNA molecule emerge after cleavage at either the D-loop (giving rise to 5′-tRFs) or the T-loop (giving rise to 3′-tRFs with the CCA addition present) and are about 20 nucleotides long. Further investigation into the enzymes responsible for the fragments have been shown to be Dicer-dependent, angiogenin-dependent (cleaving the tRNA at the T-loop) or RNase-Z-dependent (producing 5′-tRFs).

[0004] The available evidence indicates that tRFs are not random degradation products. Indeed, some 3′-tRFs have been reported to be loaded onto Argonaute thereby exhibiting behavior akin to a microRNA (miRNA). Also, their involvement in regulation of gene expression affected physiological processes like cell proliferation and cellular responses to DNA damage. 3′-tRF have also been described to emerge in human MT4 T-cells after HIV infection from the host cell. Further supporting the non-random nature of tRFs is the fact that they have been described in mouse, in the yeast S. pombe, in the fruitfly D. melanogaster, in the protozoans G. lamblia and T. thermophile, in the bacterium S. coelicolor, and in the archaeon H. volcanii. Specifically in H. volcanii, four classes of fragments have been described. However, there is limited information detailing these non-coding RNAs (ncRNAs).

[0005] Therefore, a need exists for determining the full complement of tRNA fragments, and their regulatory roles and functions in diseased and healthy cells.

### SUMMARY OF THE INVENTION

[0006] As described herein, the present invention relates to methods characterizing fragments of tRNAs.

[0007] In one aspect, the invention includes a method of identifying a subject in need of therapeutic intervention to treat a disease or condition, disease recurrence, or disease progression comprising isolating fragments of tRNAs from a sample obtained from the subject and characterizing the tRNA fragments and their relative abundance in the sample to identify a signature, wherein when the signature is indicative of a diagnosis of the disease treatment of the subject is recommended.

[0008] In another aspect, the invention includes a method of diagnosing, identifying or monitoring breast cancer in a subject in need thereof, the method comprising isolating tRNA fragments from a cell obtained from the subject, hybridizing the tRNA fragments to a panel of oligonucleotides engineered to detect tRNA fragments, analyzing levels of the tRNA fragments present in the cell; wherein a differential in the measured tRNA fragments' levels to the reference is indicative of a diagnosis or identification of breast cancer in the subject, and providing a treatment regimen to the subject dependent on the differential in measured tRNA fragments' levels to the reference.

[0009] In yet another aspect, the invention includes a panel of engineered oligonucleotides comprising a mixture of oligonucleotides that are about 15 to about 40 nucleotides in length and capable of hybridizing tRNA fragments, wherein the tRNAs are less than 80 nucleotides in length.

[0010] In still another aspect, the invention includes a kit for high-throughput analysis of tRNAs fragments in a sample comprising the panel of engineered oligonucleotides as described herein, hybridization reagents, and tRNA isolation reagents.

[0011] In another aspect, the invention includes a method of identifying a cell's tissue of origin to treat a disease or condition, disease recurrence, or disease progression in a subject in need thereof comprising isolating fragments of tRNAs from a cell obtained from the subject, characterizing the identity of the tRNA fragments and their relative abundance in the cell to identify a signature, wherein the signature is indicative of the cell's tissue of origin, and providing a treatment regimen to the subject dependent on the cell's tissue of origin.

[0012] In yet another aspect, the invention includes a method for identifying tRNA fragments comprising defining tRNA loci, sequencing a population of RNA fragments, mapping the sequenced RNA fragments to at least one tRNA genomic loci comprising disregarding mapped RNA fragments that differ in sequence from the tRNA genomic loci by at least an insertion, deletion, or replacement of a nucleotide, adding back mapped RNA fragments that are post-transcriptionally modified that differ in sequence from the tRNA genomic loci only at the post-transcriptional modification, excluding mapped RNA fragments that map to locations in the genome outside of the tRNA genomic loci, and disregarding mapped RNA fragments with tRNA intron sequences, and characterizing the mapped RNA fragments.

[0013] In still another aspect, the invention includes a system for identifying tRNA fragments according to the method described herein comprising a processor capable of analyzing the tRNA fragments.

[0014] In various embodiments of the above aspects or any other aspect of the invention delineated herein, the sample is isolated from a cell, tissue or body fluid obtained from the subject. Examples of body fluid include amniotic fluid, aqueous humour and vitreous humour, bile, blood serum, breast milk, cerebrospinal fluid, cerumen, chyle, chyme, endolymph and perilymph, exudates, feces, female ejaculate, gastric acid, gastric juice, lymph, mucus, pericardial fluid, peritoneal fluid, pleural fluid, pus, rheum, saliva, sebum, serous fluid, semen, smegma, sputum, synovial fluid, sweat, tears, urine, vaginal secretion, and vomit. In one embodiment, the sample is selected from the group consisting of a peripheral blood cell, a tumor cell, a circulating tumor cell, an exosome, a bone marrow cell, a breast cell, a lung cell, and a pancreatic cell.

[0015] In another embodiment, the tRNA fragments are isolated by a method selected from the group consisting of size selection, sequencing, and amplification. In yet another embodiment, the step of isolating the tRNA fragments comprises isolating tRNA fragments with a length in the range of about 15 nucleotides to about 80 nucleotides. In still another embodiment, the step of isolating the tRNA fragments comprises isolating tRNA fragments having a predominant length of 16, 17, 26, or 29 nucleotides is indicative of a breast cancer subtype.

[0016] In one embodiment, the signature is obtained through sequence-specific methods that preserve at least one terminus of the tRNA fragments. In another embodiment, the signature is obtained by hybridization to a panel of oligonucleotides. In still another embodiment, the tRNA fragments are enriched prior to the hybridization. In yet another embodiment, the oligonucleotide panel comprises at least two or more polynucleotides that selectively hybridize to the tRNA fragments.

[0017] In one embodiment, the signature comprises at least one sequence with identifiers selected from the group consisting of SEQ ID NOs: 1-1802 to analyze brain; SEQ ID NOs: 8538-8852 to analzye breast tissue; SEQ ID NOs: 12462-14475 to analyze blood cells; SEQ ID NOs: 24833-25945 to analyze blood cells; SEQ ID NOs: 36100-37466 to analyze pancreatic cancer; SEQ ID NOs: 42349-43721 to analyze prostate tissue; and SEQ ID NOs: 51286-51793 to analyze platelets.

[0018] In one embodiment, the signature comprises at least one sequence with identifiers selected from the group consisting of SEQ ID NOs: 11, 18, 19, 28, 31, 34, 43, 51, 59, 83, 189, 194, 209, 268, 305, 306, 307, 316, 320, 398, 404, 611, 632, 653, 696, 751, 768, 816, 817, 860, 869, 870, 871, 920, 921, 925, 951, 960, 967, 989, 1005, 1030, 1133, 1201, 1202, 1223, 1229, 1230, 1231, 1240, 1248, 1298, 1318, 1406, 1412, 1421, 1425, 1453, 1510, 1577, 1582, 1631, 1637, 1645, 1661, 1695, 1727 and 1794 to distinguish Alzheimer's disease brain from normal brain.

[0019] In one embodiment, the signature comprises at least one sequence with identifiers selected from the group consisting of SEQ ID NO:8613 and SEQ ID NO: 8823 to distinguish triple negative breast cancer from HER2+ breast cancer.

[0020] In one embodiment, the signature comprises at least one sequence with identifiers selected from the group consisting of SEQ ID NOs: 8542, 8543, 8566, 8579, 8582, 8587, 8589, 8590, 8594, 8671-8673, 8707, 8731, 8774-8778, 8803, 8827-8828, 8831-8832, 8837-8838, and 8852 to distinguish triple negative breast cancer from normal.

[0021] In one embodiment, the signature comprises at least one sequence with identifiers selected from the group consisting of SEQ ID NOs: 8596, 8601, 8622, 8657, 8664, and 8811 to distinguish triple positive breast cancer from triple negative breast cancer.

[0022] In one embodiment, the signature comprises at least one sequence with identifiers selected from the group consisting of SEQ ID NOs: 8582, 8599-8601, 8622-8623, 8634, 8657, 8663-8665, 8676, 8698, 8703-8706, 8718-8720, 8722, 8724, 8738, 8745, 8758, 8761, 8767-8772, and 8840 to distinguish breast cancer from normal tissue.

[0023] In one embodiment, the signature comprises at least one sequence with identifiers selected from the group consisting of SEQ ID NOs: 12462, 12463, 12464, 12465, 12466, 12467, 12468, 12469, 12470, 12471, 12472, 12473, 12474, 12475, 12476, 12477, 12478, 12479, 12480, 12481, 12482, 12483, 12484, 12485, 12486, 12487, 12488, 12489, 12490, 12492, 12493, 12494, 12495, 12496, 12497, 12498, 12499, 12500, 12501, 12502, 12503, 12504, 12505, 12506, 12507, 12508, 12509, 12510, 12511, 12512, 12513, 12514, 12515, 12516, 12517, 12518, 12519, 12520, 12522, 12523, 12524, 12525, 12526, 12527, 12529, 12530, 12531, 12532, 12533, 12534, 12536, 12537, 12538, 12540, 12541, 12542, 12543, 12544, 12545, 12546, 12547, 12548, 12549, 12550, 12551, 12552, 12553, 12554, 12555, 12556, 12557, 12558, 12559, 12560, 12561, 12562, 12563, 12564, 12565, 12566, 12567, 12568, 12569, 12570, 12572, 12573, 12574, 12575, 12576, 12577, 12578, 12580, 12581, 12582, 12584, 12585, 12586, 12587, 12588, 12589, 12590, 12591, 12592, 12593, 12594, 12595, 12596, 12597, 12598, 12599, 12600, 12601, 12602, 12603, 12604, 12607, 12608, 12609, 12614, 12615, 12616, 12617, 12618, 12619, 12620, 12621, 12622, 12623, 12624, 12625, 12626, 12627, 12628, 12629, 12631, 12632, 12633, 12634, 12635, 12636, 12637, 12638, 12639, 12640, 12641, 12642, 12643, 12645, 12647, 12648, 12649, 12652, 12653, 12654, 12655, 12657, 12658, 12659, 12660, 12661, 12663, 12664, 12665, 12666, 12667, 12668, 12669, 12670, 12671, 12672, 12674, 12677, 12678, 12679, 12680, 12682, 12684, 12685, 12686, 12687, 12688, 12689, 12690, 12691, 12692, 12693, 12694, 12695, 12696, 12697, 12698, 12699, 12700, 12703, 12704, 12705, 12706, 12708, 12710, 12711, 12712, 12713, 12714, 12715, 12716, 12717, 12718, 12719, 12720, 12721, 12724, 12726, 12727, 12728, 12729, 12730, 12731, 12732, 12733, 12734, 12736, 12738, 12739, 12740, 12741, 12742, 12743, 12744, 12745, 12746, 12747, 12749, 12750, 12751, 12754, 12756, 12758, 12760, 12761, 12763, 12764, 12765, 12766, 12767, 12768, 12769, 12770, 12771, 12773, 12774, 12776, 12777, 12779, 12780, 12781, 12782, 12783, 12785, 12786, 12788, 12789, 12790, 12791, 12792, 12795, 12799, 12800, 12801, 12802, 12803, 12804, 12805, 12806, 12807, 12809, 12811, 12812, 12813, 12814, 12815, 12817, 12818, 12819, 12820, 12821, 12824, 12825, 12826, 12827, 12828, 12829, 12831, 12832, 12833, 12834, 12835, 12836, 12837, 12838, 12840, 12841, 12842, 12843, 12844, 12846, 12847, 12848, 12849, 12850, 12851, 12852, 12853, 12854, 12855, 12856, 12857, 12858, 12859, 12860, 12861, 12864, 12865, 12867, 12868, 12869, 12870, 12871, 12872, 12873, 12874, 12875, 12876, 12877, 12878, 12879, 12880, 12881, 12882, 12883, 12884, 12885, 12886, 12887, 12888, 12889, 12890, 12891, 12892, 12893, 12894, 12895, 12896, 12897, 12899, 12900, 12901, 12902, 12903, 12904, 12905, 12906, 12907, 12909, 12910, 12911, 12912, 12913, 12914, 12916, 12918, 12919, 12920, 12922, 12923, 12924, 12925, 12926, 12927, 12928, 12929, 12930, 12931, 12932, 12933, 12934, 12935, 12936, 12937, 12938, 12939, 12940, 12941, 12942, 12943, 12944, 12946, 12947, 12948, 12949, 12950, 12951, 12954, 12955, 12956, 12957, 12958, 12959, 12960, 12961, 12962, 12963, 12965, 12966, 12967, 12968, 12969, 12970, 12971, 12972, 12973, 12974, 12975, 12978, 12979, 12980, 12981, 12982, 12983, 12984, 12985, 12986, 12987, 12988, 12990, 12991, 12992, 12993, 12994, 12996, 12997, 12998, 12999, 13000, 13001, 13002, 13003, 13004, 13005, 13006, 13007, 13008, 13009, 13011, 13012, 13013, 13014, 13016, 13017, 13018, 13019, 13020, 13021, 13022, 13023, 13024, 13025, 13028, 13029, 13030, 13031, 13033, 13034, 13035, 13036, 13037, 13038, 13039, 13040, 13044, 13045, 13046, 13047, 13049, 13050, 13051, 13052, 13053, 13054, 13055, 13056, 13057, 13058, 13059, 13061, 13063, 13065, 13066, 13067, 13068, 13069, 13070, 13071, 13072, 13073, 13074, 13075, 13076, 13077, 13078, 13079, 13080, 13081, 13082, 13083, 13084, 13085, 13086, 13087, 13088, 13089, 13090, 13091, 13092, 13093, 13094, 13095, 13096, 13097, 13098, 13100, 13101, 13102, 13103, 13104, 13105, 13106, 13107, 13110, 13112, 13113, 13114, 13117, 13118, 13119, 13120, 13121, 13122, 13123, 13124, 13125, 13127, 13128, 13129, 13130, 13131, 13132, 13133, 13134, 13135, 13136, 13137, 13138, 13139, 13140, 13141, 13142, 13143, 13145, 13146, 13148, 13149, 13150, 13151, 13152, 13153, 13154, 13155, 13157, 13158, 13159, 13160, 13161, 13162, 13163, 13164, 13165, 13166, 13167, 13168, 13169, 13170, 13171, 13174, 13175, 13177, 13178, 13179, 13181, 13182, 13183, 13184, 13185, 13186, 13187, 13189, 13190, 13191, 13193, 13195, 13196, 13198, 13199, 13200, 13201, 13202, 13203, 13204, 13205, 13206, 13207, 13208, 13209, 13210, 13211, 13212, 13213, 13214, 13215, 13216, 13217, 13218, 13219, 13221, 13222, 13223, 13225, 13228, 13230, 13231, 13232, 13233, 13234, 13236, 13237, 13238, 13239, 13240, 13241, 13242, 13243, 13245, 13246, 13247, 13248, 13249, 13250, 13251, 13252, 13253, 13255, 13256, 13257, 13258, 13259, 13260, 13261, 13262, 13263, 13264, 13268, 13269, 13270, 13271, 13273, 13274, 13275, 13276, 13277, 13278, 13279, 13280, 13281, 13283, 13285, 13286, 13287, 13288, 13289, 13290, 13292, 13293, 13294, 13295, 13296, 13297, 13298, 13299, 13300, 13301, 13302, 13303, 13304, 13306, 13309, 13310, 13312, 13313, 13314, 13315, 13316, 13317, 13318, 13319, 13320, 13323, 13324, 13325, 13326, 13327, 13328, 13329, 13330, 13331, 13332, 13333, 13334, 13335, 13336, 13337, 13338, 13339, 13340, 13341, 13342, 13343, 13345, 13346, 13347, 13348, 13349, 13350, 13351, 13352, 13353, 13354, 13355, 13357, 13358, 13359, 13360, 13361, 13362, 13363, 13364, 13365, 13366, 13367, 13369, 13370, 13371, 13372, 13373, 13374, 13375, 13376, 13377, 13378, 13379, 13380, 13381, 13382, 13383, 13384, 13385, 13386, 13387, 13388, 13389, 13390, 13391, 13392, 13393, 13394, 13395, 13396, 13397, 13398, 13399, 13400, 13401, 13402, 13403, 13404, 13405, 13406, 13407, 13408, 13409, 13410, 13411, 13412, 13413, 13414, 13415, 13416, 13417, 13421, 13422, 13424, 13426, 13427, 13428, 13429, 13430, 13431, 13432, 13433, 13434, 13436, 13437, 13438, 13439, 13440, 13441, 13442, 13443, 13445, 13446, 13447, 13448, 13449, 13450, 13452, 13453, 13454, 13455, 13456, 13457, 13458, 13459, 13460, 13461, 13462, 13463, 13464, 13465, 13466, 13467, 13468, 13469, 13470, 13471, 13472, 13473, 13474, 13475, 13476, 13477, 13478, 13479, 13480, 13481, 13482, 13484, 13485, 13486, 13488, 13489, 13491, 13492, 13493, 13494, 13495, 13496, 13498, 13500, 13501, 13503, 13504, 13505, 13506, 13507, 13508, 13509, 13510, 13511, 13512, 13513, 13514, 13516, 13517, 13519, 13520, 13522, 13523, 13524, 13525, 13528, 13529, 13530, 13531, 13532, 13533, 13534, 13535, 13536, 13537, 13538, 13539, 13540, 13541, 13542, 13543, 13544, 13545, 13546, 13547, 13548, 13550, 13551, 13552, 13553, 13554, 13556, 13557, 13558, 13559, 13560, 13561, 13562, 13563, 13567, 13568, 13569, 13570, 13571, 13572, 13573, 13574, 13576, 13577, 13578, 13579, 13580, 13581, 13582, 13583, 13584, 13585, 13586, 13587, 13588, 13589, 13590, 13591, 13592, 13593, 13594, 13595, 13596, 13597, 13598, 13599, 13600, 13601, 13602, 13603, 13604, 13605, 13606, 13607, 13608, 13609, 13610, 13611, 13612, 13613, 13614, 13615, 13616, 13617, 13619, 13620, 13621, 13622, 13623, 13624, 13626, 13627, 13628, 13629, 13632, 13633, 13634, 13635, 13636, 13637, 13638, 13639, 13640, 13641, 13642, 13643, 13644, 13645, 13646, 13647, 13648, 13649, 13650, 13651, 13654, 13655, 13656, 13657, 13658, 13659, 13660, 13661, 13662, 13663, 13664, 13665, 13666, 13667, 13668, 13669, 13670, 13671, 13672, 13673, 13674, 13675, 13676, 13677, 13678, 13679, 13680, 13681, 13682, 13683, 13684, 13685, 13687, 13688, 13690, 13691, 13693, 13695, 13696, 13697, 13699, 13700, 13702, 13703, 13704, 13706, 13707, 13708, 13709, 13710, 13711, 13712, 13713, 13714, 13716, 13717, 13718, 13719, 13720, 13721, 13722, 13723, 13724, 13725, 13726, 13727, 13728, 13729, 13730, 13731, 13732, 13733, 13734, 13735, 13737, 13738, 13739, 13740, 13741, 13742, 13743, 13744, 13745, 13746, 13747, 13748, 13749, 13750, 13751, 13752, 13754, 13755, 13756, 13757, 13758, 13759, 13760, 13762, 13763, 13764, 13765, 13766, 13767, 13768, 13769, 13770, 13771, 13772, 13774, 13775, 13776, 13777, 13778, 13779, 13780, 13781, 13782, 13783, 13784, 13785, 13786, 13787, 13788, 13789, 13790, 13792, 13793, 13794, 13795, 13796, 13799, 13801, 13802, 13803, 13804, 13806, 13807, 13808, 13809, 13810, 13811, 13812, 13813, 13815, 13816, 13817, 13818, 13819, 13820, 13821, 13822, 13823, 13824, 13825, 13826, 13827, 13828, 13829, 13830, 13831, 13833, 13834, 13835, 13836, 13837, 13838, 13839, 13841, 13842, 13843, 13844, 13845, 13846, 13849, 13850, 13851, 13852, 13853, 13854, 13855, 13856, 13857, 13858, 13859, 13860, 13861, 13862, 13863, 13864, 13865, 13866, 13868, 13869, 13870, 13871, 13873, 13874, 13875, 13876, 13878, 13879, 13880, 13881, 13882, 13884, 13885, 13887, 13888, 13889, 13890, 13893, 13895, 13896, 13897, 13898, 13899, 13900, 13901, 13902, 13903, 13904, 13905, 13906, 13908, 13909, 13910, 13911, 13912, 13914, 13915, 13916, 13917, 13919, 13920, 13921, 13922, 13923, 13924, 13925, 13926, 13928, 13929, 13930, 13931, 13932, 13933, 13934, 13935, 13936, 13937, 13938, 13939, 13940, 13941, 13942, 13944, 13945, 13946, 13948, 13950, 13952, 13953, 13954, 13955, 13956, 13960, 13961, 13962, 13963, 13964, 13965, 13966, 13967, 13968, 13970, 13971, 13972, 13973, 13974, 13975, 13976, 13977, 13978, 13979, 13980, 13982, 13983, 13984, 13985, 13986, 13987, 13988, 13989, 13990, 13991, 13992, 13993, 13994, 13995, 13996, 13997, 13998, 13999, 14000, 14001, 14002, 14003, 14004, 14005, 14006, 14007, 14008, 14010, 14011, 14012, 14013, 14014, 14015, 14016, 14017, 14018, 14019, 14020, 14021, 14022, 14023, 14024, 14025, 14026, 14027, 14028, 14030, 14031, 14032, 14034, 14035, 14037, 14038, 14039, 14040, 14041, 14042, 14043, 14044, 14045, 14046, 14047, 14048, 14049, 14050, 14051, 14052, 14053, 14055, 14059, 14060, 14061, 14062, 14064, 14065, 14067, 14068, 14069, 14070, 14071, 14072, 14073, 14074, 14075, 14076, 14077, 14078, 14079, 14080, 14082, 14084, 14085, 14086, 14088, 14089, 14090, 14092, 14093, 14095, 14096, 14097, 14098, 14099, 14100, 14103, 14104, 14105, 14108, 14109, 14110, 14111, 14112, 14113, 14116, 14117, 14118, 14119, 14121, 14122, 14123, 14124, 14125, 14126, 14127, 14128, 14129, 14130, 14131, 14132, 14133, 14135, 14136, 14137, 14139, 14141, 14142, 14143, 14144, 14145, 14146, 14147, 14148, 14151, 14152, 14153, 14154, 14155, 14156, 14157, 14158, 14159, 14160, 14161, 14162, 14163, 14166, 14167, 14168, 14169, 14170, 14171, 14172, 14173, 14175, 14176, 14177, 14178, 14179, 14180, 14181, 14182, 14183, 14185, 14186, 14187, 14188, 14190, 14191, 14192, 14193, 14194, 14195, 14197, 14198, 14199, 14201, 14204, 14205, 14207, 14208, 14212, 14213, 14215, 14216, 14217, 14218, 14219, 14222, 14223, 14224, 14225, 14226, 14227, 14228, 14229, 14230, 14231, 14232, 14233, 14234, 14235, 14236, 14237, 14238, 14239, 14240, 14241, 14242, 14243, 14244, 14245, 14246, 14247, 14248, 14249, 14250, 14251, 14252, 14253, 14254, 14255, 14256, 14257, 14258, 14259, 14260, 14261, 14262, 14263, 14265, 14266, 14267, 14268, 14271, 14273, 14274, 14276, 14280, 14281, 14282, 14283, 14284, 14285, 14287, 14288, 14290, 14292, 14293, 14294, 14295, 14296, 14297, 14298, 14299, 14300, 14301, 14302, 14303, 14304, 14305, 14306, 14307, 14308, 14309, 14310, 14311, 14313, 14314, 14315, 14316, 14317, 14320, 14321, 14322, 14323, 14324, 14325, 14326, 14328, 14329, 14330, 14331, 14332, 14333, 14334, 14335, 14336, 14338, 14339, 14340, 14342, 14343, 14344, 14346, 14347, 14348, 14349, 14350, 14351, 14353, 14354, 14355, 14356, 14357, 14358, 14359, 14360, 14361, 14363, 14365, 14366, 14367, 14368, 14369, 14370, 14371, 14372, 14373, 14374, 14375, 14376, 14377, 14378, 14379, 14380, 14382, 14383, 14384, 14385, 14386, 14389, 14390, 14391, 14392, 14393, 14394, 14395, 14396, 14397, 14399, 14400, 14401, 14402, 14403, 14404, 14405, 14406, 14407, 14408, 14409, 14410, 14411, 14412, 14413, 14415, 14416, 14417, 14418, 14419, 14420, 14421, 14422, 14424, 14427, 14428, 14429, 14430, 14432, 14434, 14435, 14436, 14437, 14438, 14440, 14441, 14442, 14443, 14444, 14445, 14446, 14447, 14448, 14450, 14451, 14452, 14453, 14454, 14455, 14456, 14457, 14458, 14459, 14460, 14461, 14463, 14465, 14467, 14469, 14470, 14471, 14473, 14475 to distinguish chronic lymphocytic leukemia from normal B-cells.

[0024] In one embodiment, the signature comprises at least one sequence with identifiers selected from the group consisting of SEQ ID NOs: 24995-24996, 25025, 25031, 25033, 25087-25091, 25093-25094, 25128, 25150, 25161-25162, 25165, 25182, 25219-25220, 25230, 25277-25278, 25284, 25316, 25356-25357, 25359-25360, 25363-25364, 25397-25398, 25415, 25424, 25432, 25480, 25484-25486, 25498-25499, 25505, 25524, 25550-25552, 25570, 25580, 25583, 25609-25610, 25619, 25646-25647, 25685-25687, 25691, 25714, 25720, 25727-25728, 25731, 25741, 25746-25747, 25846-25847, 25868, 25882, 25904, 25908-25912, and 25914-25915 to distinguish B-cells from breast cells.

[0025] In one embodiment, the signature comprises at least one sequence with identifiers selected from the group consisting of SEQ ID NOs: 24880-24883, 24896-24897, 24959-24963, 24965, 24973, 25006, 25027, 25052, 25054, 25102-25103, 25110-25111, 25118, 25123, 25150, 25152-25153, 25183-25184, 25188, 25198, 25202, 25204-25206, 25210, 25212-25214, 25224-25225, 25245, 25252-25254, 25257, 25259-25261, 25270, 25273, 25286, 25294, 25296, 25313-25314, 25334, 25416, 25425, 25449-25450, 25454, 25476-25478, 25583, 25609-25612, 25665, 25667, 25705, 25714, 25786, 25894, and 25896-25897 to distinguish B-cells from white people from B-cells from black people.

[0026] In one embodiment, the signature comprises at least one sequence with identifiers selected from the group consisting of SEQ ID NO: 24881, 24926, 24952, 24981, 24990, 24995, 24998, 25010, 25047, 25051, 25075, 25101-25102, 2511 25111, 25118, 25121, 25149, 25211, 25218, 25238, 25309, 25359, 25373, 25376, 25386-25387, 25402, 25410, 25415-25416, 25420-25421, 25468, 25474, 25476, 25484-25487, 25493, 25524, 25536, 25560, 25596, 25604, 25620, 25631, 25651, 25662, 25664, 25714, 25723, 25803, 25829, 25850-25851, 25886-25887, 25898, 25902-25903, 25905, 25914, 25921, 25923, 25937 to distinguish B-cells from men from B-cells from women.

[0027] In one embodiment, the signature comprises at least one sequence with identifiers selected from the group consisting of SEQ ID NOs: 36100, 36101, 36105, 36107, 36111, 36112, 36114, 36115, 36116, 36119, 36120, 36121, 36122, 36123, 36139, 36143, 36146, 36147, 36148, 36149, 36155, 36156, 36157, 36163, 36171, 36173, 36176, 36177, 36178, 36179, 36180, 36181, 36182, 36183, 36188, 36189, 36194, 36197, 36200, 36203, 36204, 36215, 36217, 36218, 36219, 36222, 36223, 36227, 36228, 36230, 36231, 36234, 36238, 36239, 36240, 36241, 36242, 36243, 36246, 36248, 36252, 36254, 36262, 36265, 36266, 36269, 36270, 36271, 36272, 36273, 36276, 36278, 36279, 36282, 36285, 36287, 36288, 36289, 36293, 36294, 36295, 36296, 36297, 36298, 36299, 36303, 36304, 36305, 36306, 36307, 36308, 36313, 36319, 36320, 36322, 36323, 36326, 36327, 36331, 36332, 36333, 36335, 36336, 36338, 36339, 36341, 36342, 36344, 36347, 36355, 36356, 36357, 36372, 36373, 36374, 36375, 36376, 36378, 36378, 36384, 36387, 36391, 36392, 36395, 36397, 36399, 36400, 36401, 36405, 36406, 36408, 36409, 36428, 36429, 36430, 36431, 36432, 36433, 36435, 36436, 36437, 36444, 36450, 36451, 36452, 36453, 36455, 36456, 36457, 36460, 36461, 36462, 36463, 36464, 36465, 36466, 36467, 36468, 36469, 36470, 36471, 36472, 36478, 36485, 36490, 36491, 36498, 36499, 36504, 36505, 36506, 36507, 36508, 36509, 36510, 36511, 36512, 36513, 36517, 36520, 36521, 36523, 36524, 36529, 36530, 36533, 36534, 36535, 36538, 36539, 36541, 36542, 36543, 36544, 36545, 36546, 36547, 36550, 36553, 36554, 36561, 36562, 36572, 36573, 36574, 36575, 36578, 36579, 36580, 36581, 36582, 36584, 36586, 36589, 36590, 36591, 36593, 36594, 36597, 36599, 36600, 36601, 36607, 36608, 36609, 36610, 36611, 36612, 36614, 36615, 36616, 36617, 36618, 36619, 36620, 36621, 36627, 36628, 36629, 36637, 36638, 36639, 36640, 36641, 36642, 36643, 36644, 36645, 36646, 36647, 36649, 36650, 36658, 36665, 36669, 36670, 36671, 36673, 36674, 36675, 36676, 36677, 36678, 36679, 36680, 36682, 36683, 36684, 36689, 36690, 36691, 36692, 36693, 36694, 36695, 36696, 36697, 36698, 36701, 36702, 36703, 36705, 36706, 36707, 36708, 36709, 36710, 36711, 36712, 36714, 36715, 36716, 36718, 36719, 36720, 36721, 36722, 36726, 36727, 36728, 36729, 36730, 36731, 36732, 36733, 36734, 36735, 36738, 36739, 36741, 36742, 3674 5, 36746, 36747, 36749, 36751, 36754, 36755, 36756, 36757, 36759, 36760, 36761, 36762, 36763, 36764, 36765, 36768, 36769, 36770, 36771, 36772, 36775, 36776, 36777, 36778, 36788, 36789, 36793, 36794, 36796, 36797, 36798, 36799, 36800, 36803, 36805, 36806, 36809, 36810, 36812, 36814, 36817, 36825, 36826, 36827, 36829, 36830, 36831, 36832, 36834, 36835, 36838, 36839, 36841, 36844, 36846, 36848, 36849, 36851, 36854, 36855, 36857, 36859, 36860, 36861, 36862, 36863, 36864, 36868, 36869, 36871, 36872, 36877, 36878, 36879, 36880, 36881, 36883, 36884, 36885, 36886, 36887, 36889, 36890, 36891, 36892, 36895, 36897, 36901, 36902, 36903, 36904, 36905, 36907, 36909, 36910, 36911, 36913, 36914, 36915, 36916, 36917, 36918, 36919, 36925, 36931, 36938, 36939, 36941, 36942, 36945, 36946, 36948, 36952, 36953, 36955, 36956, 36957, 36958, 36961, 36963, 36964, 36965, 36967, 36968, 36973, 36976, 36977, 36978, 36979, 36980, 36981, 36982, 36983, 36985, 36988, 36989, 36990, 36991, 36992, 36997, 36998, 36999, 37001, 37004, 37005, 37008, 37009, 37012, 37013, 37014, 37021, 37022, 37023, 37024, 37025, 37026, 37029, 37032, 37033, 37036, 37039, 37044, 37046, 37048, 37049, 37050, 37051, 37054, 37055, 37056, 37057, 37058, 37059, 37060, 37063, 37065, 37066, 37075, 37077, 37078, 37079, 37080, 37081, 37083, 37087, 37088, 37089, 37090, 37091, 37094, 37095, 37099, 37100, 37101, 37110, 37115, 37116, 37117, 37119, 37120, 37121, 37123, 37124, 37125, 37127, 37132, 37133, 37134, 37135, 37137, 37138, 37139, 37141, 37142, 37143, 37144, 37145, 37146, 37149, 37150, 37151, 37152, 37155, 37157, 37160, 37161, 37162, 37163, 37164, 37165, 37166, 37167, 37168, 37169, 37171, 37174, 37175, 37177, 37178, 37181, 37182, 37183, 37184, 37185, 37187, 37193, 37194, 37195, 37196, 37197, 37198, 37199, 37201, 37202, 37203, 37206, 37207, 37208, 37209, 37211, 37213, 37214, 37216, 37217, 37226, 37227, 37228, 37229, 37230, 37231, 37234, 37235, 37237, 37244, 37245, 37247, 37248, 37249, 37251, 37253, 37254, 37255, 37261, 37262, 37265, 37271, 37272, 37273, 37274, 37278, 37279, 37283, 37303, 37304, 37305, 37306, 37307, 37308, 37312, 37316, 37319, 37321, 37323, 37324, 37325, 37326, 37327, 37334, 37335, 37336, 37337, 37338, 37339, 37340, 37341, 37342, 37348, 37356, 37363, 37365, 37368, 37369, 37370, 37372, 37374, 37375, 37376, 37382, 37383, 37385, 37386, 37388, 37391, 37394, 37395, 37398, 37400, 37401, 37402, 37403, 37404, 37405, 37407, 37408, 37410, 37419, 37420, 37422, 37423, 37424, 37425, 37426, 37429, 37430, 37431, 37432, 37433, 37445, 37446, 37448, 37449, 37453, 37454, 37456, 37461, 37462, 37463, 37464, and 37466 to distinguish normal pancreas from pancreatic cancer.

[0028] In one embodiment, the signature comprises at least one sequence with identifiers selected from the group consisting of SEQ ID NOs: 51377-51378, 51406, 51438, 51496, 51565, 51691, 51699, 51736-51737, 51745, and 51759 to distinguish platelets from people with a propensity to clot vs. platelets from people with a propensity to hemorrhage.

[0029] In one embodiment, the signature comprises at least one sequence with identifiers selected from the group consisting of SEQ ID NOs: 42434, 42520, 42537, 42577, 42751, 42979, 43019, 43090, 43128, 43156, 43310, 43352, 43398, 43426, 43437 to distinguish normal prostate from prostate cancer.

[0030] In one embodiment, the step of characterizing the tRNA fragments comprises at least one assessment selected from the group consisting of sequencing the tRNA fragments, measuring overall abundance of one of the tRNA fragments mapped to the genome, measuring a relative abundance of the one tRNA fragment to a reference, assessing a length of the one tRNA fragment, identifying starting and ending points of the one tRNA fragment, identifying genomic origin of the one tRNA fragment, and identifying a terminal modification of the one tRNA fragment. In another embodiment, the step of characterizing the mapped RNA fragments comprises at least one assessment selected from the group consisting of identifying one or more of the mapped RNA fragments in a population, measuring an overall abundance of one or more of the mapped RNA fragments, measuring a relative abundance of one or more of the mapped RNA fragments to a reference, assessing a length of one or more of the mapped RNA fragments, identifying starting and ending points of one or more of the mapped RNA fragments, identifying genomic origin of one or more of the mapped RNA fragments, and identifying a terminal modification of one or more of the mapped RNA fragments.

[0031] In one embodiment, the disease or condition, disease recurrence, or disease progression is selected from the group consisting of a cancer, and genetically predisposed disease or condition.

[0032] In another embodiment, the tRNA genomic loci comprise mitochondrial tRNA sequences from the mitochondrial genome, nuclear tRNA sequences from the nuclear genome, and mitochondria tRNA sequences from the nuclear genome. In another embodiment, the mapped RNA fragments post-transcriptionally modified comprises at least one modified with a CCA trinucleotide at a 3′ end.

### BRIEF DESCRIPTION OF THE DRAWINGS

[0033] FIG. 1 is an illustration showing the typical tRNA cloverleaf secondary structure and the five categories of tRNA fragments that are known currently as a result of the discovery that is discussed herein. In practice, a typical tRNA may produce more than just 11 distinct fragments or fewer.

[0034] FIG. 2 shows breast cancer (BRCA) subgroups and receptor expressions. In HER2 negative Luminal-type, the level of Ki67, an indicator of cell proliferation rate, is used to further classify Luminal A (low level) and Luminal B (high level).

[0035] FIGS. 3A-3D are graphs showing atypical tRNA fragment lengths in the 452 analyzed lymphoblastoid cell line (LCL) samples. Shown are the length distributions for all fragments supported by reads that land solely in the tRNA space and can be positioned anywhere along the length of a mature tRNA. FIG. 3A shows the length distribution for internal tRNA fragments (i-tRFs) only. FIG. 3B shows the length distribution for “+1” tRNA fragments only. FIG. 3C shows the length distribution for “CCA-ending” tRNA fragments. FIG. 3D shows the length distribution for all these tRNA fragments combined. See also text for a detailed explanation of these three shown regions. Error bars capture standard error across the 452 samples.

[0036] FIG. 4A-4D are graphs showing atypical tRNA fragment lengths in the 311 analyzed breast samples from The Cancer Genome Atlas repository. Shown are the length distributions for all fragments supported by reads that land solely in the tRNA space and can be positioned anywhere along the length of a mature tRNA. FIG. 4A shows the length distribution for internal tRNA fragments (i-tRFs) only. FIG. 4B shows the length distribution for “+1” tRNA fragments only. FIG. 4C shows the length distribution for “CCA-ending” tRNA fragments. FIG. 4D shows the length distribution for all these tRNA fragments combined. Error bars capture standard error across the 311 samples. Note the right most label of the X-axis: it was labeled in such a way to indicate the possibility that some of the observed 30-mers have arisen from longer length fragments, as discussed elsewhere herein.

[0037] FIG. 5A-5B are 3D graphs showing the distribution of starting position and lengths for internal tRNA fragments (i-tRFs), their span and lengths in the LCL (A) and BRCA (B) datasets. The positions are numbered with reference to the +1 position of the mature tRNA. The representative positions for the D- and T-loops as well as for the anticodon loop are highlighted with green boxes. The coloring of each bar is proportional to the relative abundance of each length of the fragments starting at that specific position as indicated by the respective color-key below each graph. The thickness of the projections on the right wall of the graph is proportional to the number of fragments spanning the specific position. For the LCL dataset, only the top 50% most expressed internal fragments are shown.

[0038] FIG. 6A-6B are graphs showing the relative abundance of fragments from nuclear and mitochondrial tRNAs as a function of their length for the LCLs samples (A) and the BRCA samples (B). Error bars capture the standard error across the analyzed samples. The statistically significant difference in abundance (P-value; Mann-Whitney U-test) is indicated for two cases in each dataset.

[0039] FIGS. 7A-7B show heatmaps of the Pearson correlation coefficient for statistically significant fragments. FIG. 7A shows tRNA fragments that arise from the nuclear AspGTC (trna10 on chromosome 12) anticodon in the LCL dataset. FIG. 7B shows tRNA fragments that arise from the mitochondrial GluTTC anticodon in the BRCA dataset. Several mini-clusters are evident in each heatmap: however, there was correlation across the mini-clusters of the same tRNA (see text for a detailed explanation). Orange-colored labels mark the i-tRFs.

[0040] FIGS. 8A-8D show atypical tRNA fragment lengths in normal and tumor breast samples. FIG. 8A shows length distribution for the internal tRNA fragments (i-tRFs).

[0041] FIG. 8B shows length distributions for fragments in the “+1” region. FIG. 8C shows length distribution for “CCA-ending” fragments. FIG. 8D shows length distributions for the all the fragments. Green curve: normal sample fragments. Red curve: tumor sample fragments.

[0042] FIGS. 9A-9B show common tRNA fragments have tissue- and tissue-state specific abundances. FIG. 9A shows that a principal components analysis (PCA) of the abundance levels of the ˜200 tRNA fragments, which were common to female LCL samples and to normal breast samples, can distinguish between the two groups. FIG. 9B shows that a partial Least Squares-Discriminant Analysis (PLS-DA) of the abundance levels of the 437 tRNA fragments found in normal breast and breast cancer samples can distinguish between the two groups.

[0043] FIGS. 10A-10C show race-dependent expression profiles for statistically significant tRNA fragments. FIG. 10A shows a PCA of fragment expression in LCLs. The CEU population (white) is represented by the yellow points whereas the YRI population (black) is represented by the magenta points. Both men and women from each of the two populations were included in this analysis. FIG. 10B shows a PLS-DA on the tRNA fragments in the 78 triple-negative-breast-cancer samples. The yellow points represent white patients where the magenta dots represent black patients. FIG. 10C shows relative abundances of CCA-ending 18-mers and 33-mers for the CEU and YRI samples. The differences for both 18-mers and 36-mers were statistically significant as indicated by the asterisks (p-val≦10⁻⁴ using Student's t-test). Error bars capture the standard error of the relative abundance of each type of fragments for n=93 (CEU) and n=95 (YRI) samples.

[0044] FIGS. 11A-11C show differences in the abundance of tRNA fragments between men and women. FIG. 11A shows a detail from the length distributions for YRI men and women for internal fragments. FIG. 11B shows a detail from the length distributions for TSI men and women for CCA-ending fragments. FIG. 11C shows a PLS-DA graph of TSI men and TSI women showing a trend for gender-specific tRNA profiles.

[0045] FIGS. 12A-12D show differences in the tRNA profiles among normal and different disease states. FIG. 12A shows a PLS-DA for the discrimination of normal against triple positive samples. FIG. 12B shows a PLS-DA graph for the discrimination of normal against triple negative samples. FIG. 12C shows PLS-DA discriminated between the triple positive and triple negative subtypes. FIG. 12D shows that the fragments that were important for each separation can be used to identify disease subtype-specific abundance changes. The number of fragments with higher (↑) or lower (←) expression is indicated next to each arrow. Each arrow represents a comparison between two groups: the start of the arrow indicates the “control” group compared to which the fragments in the “target” group (end of arrow) have altered expression.

[0046] FIG. 13 is a graph showing differential Ago-loading of tRNA fragments in three breast cancer model cell lines using only fragments with lengths<=30 nucleotides (nts). Note the difference in lengths of the Ago-loaded fragments across the three cell lines.

[0047] FIG. 14A-14B are graphs showing the experimental verification of internal fragments in breast samples and breast model cell lines. (A): Quantification of the i-tRF from the nuclear AspGTC anticodon in 11 breast tumor and 11 adjacent normal breast samples. N.D.: not determined; in this case, the fragment's expression was too low to be detected. Astericks indicate statistically significant changes in abundance (p-val<0.01; Student's t-test) between the tumor and adjacent normal tissue of the same subject. In all cases there were n=3 repetitions of the experiments. Error bars show the standard deviation. (B): Quantification of the i-tRF from the nuclear GlyTCC anticodon in eight different normal and breast cancer cell lines using an assay based on the FIREPLEX® (Firefly BioWorks, Boston, Mass.) method. Column height represents the average expression value and error bars the standard deviation of at least 10 independent measurements in each sample. On the right hand-side of (A) and (B), the tested fragment is highlighted. The anticodon triplet is indicated by the black rectangle. The genomic coordinates of the depicted AspGTC tRNA are from 125424264 to 125424193, inclusive, on chromosome 12, wherease for the depicted GlyTCC tRNA are from 8124866 to 8124937, inclusive, on chromosome 17. ER: Estrogen Receptor, PR: Progesterone Receptor, HER2: Human Epidermal Growth Factor Receptor 2.

[0048] FIG. 15 is a graph showing nuclear AspGTC tRNA as an example of the diversity of fragments that can arise from the same tRNA sequence.

### DETAILED DESCRIPTION OF THE INVENTION

### Definitions

[0049] Unless defined otherwise, all technical and scientific terms used herein have the same meaning as commonly understood by one of ordinary skill in the art to which the invention pertains. Although any methods and materials similar or equivalent to those described herein may be used in the practice for testing of the present invention, the preferred materials and methods are described herein. In describing and claiming the present invention, the following terminology will be used.

[0050] It is also to be understood that the terminology used herein is for the purpose of describing particular embodiments only, and is not intended to be limiting.

[0051] As used herein, the articles “a” and “an” are used to refer to one or to more than one (i.e., to at least one) of the grammatical object of the article. By way of example, “an element” means one element or more than one element.

[0052] As used herein when referring to a measurable value such as an amount, a temporal duration, and the like, the term “about” is meant to encompass variations of ±20% or within 10%, 9%, 8%, 7%, 6%, 5%, 4%, 3%, 2%, 1%, 0.5%, 0.1%, 0.05%, or 0.01% of the specified value, as such variations are appropriate to perform the disclosed methods. Unless otherwise clear from context, all numerical values provided herein are modified by the term about.

[0053] “About” as used herein when referring to a measurable value such as an amount, a temporal duration, and the like, is meant to encompass variations of ±20% or ±10%, more preferably ±5%, even more preferably ±1%, and still more preferably ±0.1% from the specified value, as such variations are appropriate to perform the disclosed methods.

[0054] By “alteration” is meant a change (increase or decrease) in the expression levels or activity of a gene or polypeptide as detected by standard art known methods such as those described herein. As used herein, an alteration includes a 10% change in expression levels, preferably a 25% change, more preferably a 40% change, and most preferably a 50% or greater change in expression levels.

[0055] By “complementary sequence” or “complement” is meant a nucleic acid base sequence that can form a double-stranded structure by matching base pairs to another polynucleotide sequence. Base pairing occurs through the formation of hydrogen bonds, which may be Watson-Crick, Hoogsteen or reversed Hoogsteen hydrogen bonding, between complementary nucleobases. For example, adenine and thymine are complementary nucleobases that pair through the formation of hydrogen bonds.

[0056] In this disclosure, “comprises,” “comprising,” “containing” and “having” and the like can have the meaning ascribed to them in U.S. Patent law and can mean “includes,” “including,” and the like; “consisting essentially of” or “consists essentially” likewise has the meaning ascribed in U.S. Patent law and the term is open-ended, allowing for the presence of more than that which is recited so long as basic or novel characteristics of that which is recited is not changed by the presence of more than that which is recited, but excludes prior art embodiments.

[0057] The term “cancer” as used herein is defined as disease characterized by the rapid and uncontrolled growth of aberrant cells. Cancer cells can spread locally or through the bloodstream and lymphatic system to other parts of the body. Examples of various cancers include but are not limited to, breast cancer, prostate cancer, ovarian cancer, cervical cancer, skin cancer, pancreatic cancer, colorectal cancer, renal cancer, liver cancer, brain cancer, lymphoma, leukemia, lung cancer and the like.

[0058] “Detect” refers to identifying the presence, absence or amount of the biomarker to be detected.

[0059] The phrase “differentially present” refers to differences in the quantity and/or the frequency of a biomarker present in a sample taken from subjects having a disease as compared to a control subject. A biomarker can be differentially present in terms of quantity, frequency or both. A polypeptide or polynucleotide is differentially present between two samples if the amount or frequency of the polypeptide or polynucleotide in one sample is statistically significantly different (either higher or lower) from the amount of the polypeptide or polynucleotide in the other sample, such as reference or control samples. Alternatively or additionally, a polypeptide or polynucleotide is differentially present between two sets of samples if the amount or frequency of the polypeptide or polynucleotide in samples of the first set, such as diseased subjects' samples, is statistically significantly (either higher or lower) from the amount of the polypeptide or polynucleotide in samples of the second set, such reference or control samples. A biomarker that is present in one sample, but undetectable in another sample is differentially present.

[0060] A “disease” is a state of health of an animal wherein the animal cannot maintain homeostasis, and wherein if the disease is not ameliorated then the animal's health continues to deteriorate. A “disease subtype” is a state of health of an animal wherein animals with the disease manifest different clinical features or symptoms. For example, Alzheimer's disease includes at least three subtypes, inflammatory, non-inflammatory, and cortical.

[0061] A “disorder” as used herein, is used interchangeably with “condition,” and refers to a state of health in an animal, wherein the animal is able to maintain homeostasis, but in which the animal's state of health is less favorable than it would be in the absence of the disorder. Left untreated, a disorder does not necessarily cause a further decrease in the animal's state of health.

[0062] By “effective amount” is meant the amount required to reduce or improve at least one symptom of a disease relative to an untreated patient. The effective amount of active compound(s) used to practice the present invention for therapeutic treatment of a disease varies depending upon the manner of administration, the age, body weight, and general health of the subject.

[0063] As used herein “endogenous” refers to any material from or produced inside an organism, cell, tissue or system.

[0064] The term “expression” as used herein is defined as the transcription and/or translation of a particular nucleotide sequence driven by its promoter.

[0065] By “fragment” is meant a portion of a polynucleotide or nucleic acid molecule. This portion contains, preferably, at least 10%, 20%, 30%, 40%, 50%, 60%, 70%, 80%, 90%/a, 91%, 92%, 93%, 94%, 95%, 96%, 97%, 98%, or 99% of the entire length of the reference nucleic acids. A fragment may contain 10, 20, 30, 40, 50, 60, 70, 80, 90, or 100, 200, 300, 400, 500, 600, 700, 800, 900, 1000, 1500, 2000 or 2500 (and any integer value in between) nucleotides. The fragment, as applied to a nucleic acid molecule, refers to a subsequence of a larger nucleic acid. The fragment can be an autonomous and functional molecule. A fragment may contain modifications at neither, one or both of its termini. A modification can include but is not limited to a phosphate, a cyclic phosphate, a hydroxyl, and an amino acid. A “fragment” of a nucleic acid molecule may be at least about 15 nucleotides in length; for example, at least about 50 nucleotides to about 100 nucleotides; at least about 100 to about 500 nucleotides, at least about 500 to about 1000 nucleotides, at least about 1000 nucleotides to about 1500 nucleotides; or about 1500 nucleotides to about 2500 nucleotides; or about 2500 nucleotides (and any integer value in between).

[0066] “Similar” refers to the sequence similarity or sequence identity between two polypeptides or between two nucleic acid molecules. When a position in both of the two compared sequences is occupied by the same base or amino acid monomer subunit, e.g., if a position in each of two DNA molecules is occupied by adenine, then the molecules are similar at that position. The percent of similarity between two sequences is a function of the number of matching or similar positions shared by the two sequences divided by the number of positions compared X 100. For example, if 6 of 10 of the positions in two sequences are matched or similar then the two sequences are 60% similar. By way of example, the DNA sequences ATTGCC and TATGGC share 50% similarity. Generally, a comparison is made when two sequences are aligned in a way that maximizes their similarity.

[0067] As used herein, the term “inhibit” is meant to refer to a decrease in biological state. For example, the term “inhibit” may be construed to refer to the ability to negatively regulate the expression, stability or activity of a protein, including but not limited to transcription of a protein mRNA, stability of a protein mRNA, translation of a protein mRNA, stability of a protein polypeptide, a protein post-translational modifications, a protein activity, a protein signaling pathway or any combination thereof.

[0068] Further, the term “inhibit” may be construed to refer to the ability to negatively affect the expression, stability or activity of a miRNA, wherein such inhibition of the miRNA may result in the modulation of a gene, a protein's mRNA abundance, the stability of a protein's mRNA, the translation of a protein's mRNA, the stability of a protein, the post-translational modifications of a protein, and/or the activity of a protein.

[0069] “Instructional material,” as that term is used herein, includes a publication, a recording, a diagram, or any other medium of expression that may be used to communicate the usefulness of the compounds of the invention. In some instances, the instructional material may be part of a kit useful for effecting alleviating or treating the various diseases or conditions recited herein. Optionally, or alternately, the instructional material may describe one or more methods of alleviating the diseases or conditions in a cell or a tissue of a mammal. The instructional material of the kit may, for example, be affixed to a container that contains the compounds of the invention or be shipped together with a container that contains the compounds. Alternatively, the instructional material may be shipped separately from the container with the intention that the recipient uses the instructional material and the compound cooperatively. For example, the instructional material is for use of a kit; instructions for use of the compound; or instructions for use of a formulation of the compound.

[0070] “Isolated” means altered or removed from the natural state. For example, a nucleic acid or a peptide naturally present in a living animal is not “isolated,” but the same nucleic acid or peptide partially or completely separated from the coexisting materials of its natural state is “isolated.” An isolated nucleic acid or protein can exist in substantially purified form, or can exist in a non-native environment such as, for example, a host cell.

[0071] The term “mitochondrial tRNAs” is used to refer to tRNAs encoded in the mitochondrial genome. The term “nuclear tRNAs” is used to refer to tRNAs encoded in the nuclear genome. The distinction of the origin of the DNA precursor template may not be entirely accurate from a biological standpoint: as it was recently reported, the nuclear genome contains numerous full-length lookalikes of mitochondrial tRNAs. It is currently unclear whether these nuclear lookalike sequences are transcribed or whether they act as tRNAs; thus, special consideration is needed to discard sequencing reads that may map to those lookalikes and to the tRNA space, which are defined elsewhere herein.

[0072] Unless otherwise specified, a “nucleotide sequence encoding an amino acid sequence” includes all nucleotide sequences that are degenerate versions of each other and that encode the same amino acid sequence. The phrase nucleotide sequence that encodes a protein or an RNA may also include introns to the extent that the nucleotide sequence encoding the protein may in some version contain an intron(s).

[0073] By “isolated polynucleotide” is meant a nucleic acid (e.g., a DNA or an RNA) that is free of the genes which, in the naturally-occurring genome of the organism from which the nucleic acid molecule of the invention is derived, flank the gene. The term therefore includes, for example, a recombinant DNA that is incorporated into a vector, into an autonomously replicating plasmid or virus; or into the genomic DNA of a prokaryote or eukaryote; or that exists as a separate molecule (for example, a tRNA, cDNA or a genomic or cDNA fragment produced by PCR or restriction endonuclease digestion) independent of other sequences. In addition, the term includes an RNA molecule that is transcribed from a DNA molecule, as well as a recombinant DNA that is part of a hybrid gene encoding additional polypeptide sequence.

[0074] The term “oligonucleotide panel” or “panel of oligonucleotides” refers to a collection of one or more oligonucleotides that may be used to identify DNA (e.g. genomic segments comprising a specific sequence, DNA sequences bound by particular protein, etc.) or RNA (e.g. mRNAs, microRNAs, tRNAs, etc.) through hybridization of complementary regions between the oligonucleotides and the DNA or RNA. If the sought molecule is RNA, it is commonly converted to DNA through a reverse transcription step). The oligonucleotides may include complementary sequences to known DNA or known RNA sequences. The oligonucleotides may be engineered to be between about 5 nucleotides to about 40 nucleotides, or about 5 nucleotides to about 30 nucleotides, or about 5 nucleotides to about 20 nucleotides, or about 5 nucleotides to about 15 nucleotides in length. The term “oligonucleotide panel” or “panel of oligonucleotides” could also refer to a system and accompanying collection of reagents that, in addition to being able to hybridize to molecules containing a complementary sequence, can also ensure that the identified molecule's 3′ terminus matches precisely the 3′ terminus of the sought molecule, or that the identified molecule's 5′ terminus matches precisely the 5′ terminus of the sought molecule, or both: this ability is unlike what can be achieved by conventional assays such as e.g. Affymetrix chips and methods (e.g. “dumbbell-PCR”) and systems (e.g. the Fireplex system of Firefly BioWorks) that can achieve this are now beginning to be available.

[0075] The term “operably linked” refers to functional linkage between a regulatory sequence and a heterologous nucleic acid sequence resulting in expression of the latter. For example, a first nucleic acid sequence is operably linked with a second nucleic acid sequence when the first nucleic acid sequence is placed in a functional relationship with the second nucleic acid sequence. For instance, a promoter is operably linked to a coding sequence if the promoter affects the transcription or expression of the coding sequence. Generally, operably linked DNA sequences are contiguous and, where necessary to join two protein coding regions, in the same reading frame.

[0076] The term “overexpressed” tumor antigen or “overexpression” of the tumor antigen is intended to indicate an abnormally high level of expression of the tumor antigen in a cell from a disease area like a solid tumor within a specific tissue or organ of the patient relative to the level of expression in a normal cell from that tissue or organ. Patients having solid tumors or a hematological malignancy characterized by overexpression of the tumor antigen can be determined by standard assays known in the art. The term “underexpressed” tumor antigen or “underexpression” of the tumor antigen is completely analogous.

[0077] The term “overexpressed” tumor promoter or “overexpression” of the tumor promoter is intended to indicate an abnormally high level of expression of the tumor promoter RNA or protein in a cell from a disease area like a solid tumor within a specific tissue or organ of the patient relative to the level of expression in a normal cell from that tissue or organ. Patients having solid tumors or a hematological malignancy characterized by overexpression of the tumor promoter can be determined by standard assays known in the art. The term “underexpressed” tumor promoter or “underexpression” of the tumor promoter is completely analogous.

[0078] The term “overexpressed” tumor suppressor or “overexpression” of the tumor suppressor is intended to indicate an abnormally high level of expression of the tumor suppressor RNA or protein in a cell from a specific area within a specific tissue or organ of an individual relative to the level of expression under typical circumstances in a cell from that tissue or organ. Individuals having characteristic overexpression of the tumor suppressor can be determined by standard assays known in the art. The term “underexpressed” tumor suppressor or “underexpression” of the tumor suppressor is completely analogous.

[0079] The terms “patient,” “subject,” “individual,” and the like are used interchangeably herein, and refer to a human or non-human mammal, or cells thereof whether in vitro or in situ, amenable to the methods described herein. Non-human mammals include, for example, livestock and pets, such as ovine, bovine, porcine, canine, feline and murine mammals. The term “subject” is intended to include living organisms in which an immune response can be elicited (e.g., mammals). Examples of subjects include humans, dogs, cats, mice, rats, and transgenic species thereof. In certain non-limiting embodiments, the patient, subject or individual is a human.

[0080] The term “polynucleotide” as used herein is defined as a chain of nucleotides. Furthermore, nucleic acids are polymers of nucleotides. Thus, nucleic acids and polynucleotides as used herein are interchangeable. One skilled in the art has the general knowledge that nucleic acids are polynucleotides, which may be hydrolyzed into the monomeric “nucleotides.” The monomeric nucleotides may be hydrolyzed into nucleosides. As used herein polynucleotides include, but are not limited to, all nucleic acid sequences that are obtained by any means available in the art, including, without limitation, recombinant means, i.e., the cloning of nucleic acid sequences from a recombinant library or a cell genome, using ordinary cloning technology and PCR™, and the like, and by synthetic means. The following abbreviations for the commonly occurring nucleic acid bases are used. “A” refers to adenosine, “C” refers to cytosine, “G” refers to guanosine, “T” refers to thymidine, and “U” refers to uridine. The term “RNA” as used herein is defined as ribonucleic acid. The term “recombinant DNA” as used herein is defined as DNA produced by joining pieces of DNA from different sources.

[0081] As used herein, the terms “prevent,” “preventing,” “prevention,” and the like refer to reducing the probability of developing a disease or condition in a subject, who does not have, but is at risk of or susceptible to developing a disease or condition.

[0082] As used herein, the term “promoter/regulatory sequence” means a nucleic acid sequence which is required for expression of a gene product operably linked to the promoter/regulatory sequence. In some instances, this sequence may be the core promoter sequence and in other instances, this sequence may also include an enhancer sequence and other regulatory elements which are required for expression of the gene product. The promoter/regulatory sequence may, for example, be one which expresses the gene product in a tissue specific manner.

[0083] The terms “purified,” or “biologically pure” refer to material that is free to varying degrees from components which normally accompany it as found in its native state. “Purify” denotes a degree of separation that is higher than isolation. A “purified” or “biologically pure” protein is sufficiently free of other materials such that any impurities do not materially affect the biological properties of the protein or cause other adverse consequences. That is, a nucleic acid or peptide of this invention is purified if it is substantially free of cellular material, viral material, or culture medium when produced by recombinant DNA techniques, or chemical precursors or other chemicals when chemically synthesized. Purity and homogeneity are typically determined using analytical chemistry techniques, for example, polyacrylamide gel electrophoresis or high performance liquid chromatography. The term “purified” can denote that a nucleic acid or protein gives rise to essentially one band in an electrophoretic gel. For a protein that can be subjected to modifications, for example, phosphorylation or glycosylation, different modifications may give rise to different isolated proteins, which can be separately purified.

[0084] A “recyclable tRNA” refers to a tRNA that is aminoacylated and can be repeatedly reaminoacylated with an amino acid (e.g., an unnatural amino acid) for the incorporation of the amino acid (e.g., the unnatural amino acid) into one or more polypeptide chains during translation.

[0085] By “reduces” or “decreases” is meant a negative alteration of at least 10%, 25%, 50%, 75%, or 100/%.

[0086] By “reference” is meant a standard or control. A “reference” is also a defined standard or control used as a basis for comparison.

[0087] As used herein, “relative abundance” refers to the ratio of the quantities of two or more molecules of interest (e.g. tRNAs, tRNA fragments, miRNAs, etc.) present in a sample. The relative abundance of two or more molecules of interest in a given sample may differ from the relative abundance of the same two or more molecules in a second sample.

[0088] As used herein, “sample” or “biological sample” refers to anything, which may contain the biomarker (e.g., polypeptide, polynucleotide, or fragment thereof) for which a biomarker assay is desired. The sample may be a biological sample, such as a biological fluid or a biological tissue. In one embodiment, a biological sample is a tissue sample including pulmonary vascular cells. Such a sample may include diverse cells, proteins, and genetic material. Examples of biological tissues also include organs, tumors, lymph nodes, arteries and individual cell(s). Examples of biological fluids include urine, blood, plasma, serum, saliva, semen, stool, sputum, cerebral spinal fluid, tears, mucus, amniotic fluid or the like.

[0089] As used herein, the term “sensitivity” is the percentage of biomarker-detected subjects with a particular disease.

[0090] As used herein, “sample” or “biological sample” refers to anything, which may contain the biomarker (e.g., polypeptide, polynucleotide, or fragment thereof) for which a biomarker assay is desired. The sample may be a biological sample, such as a biological fluid or a biological tissue. In one embodiment, a biological sample is a tissue sample including pulmonary vascular cells. Such a sample may include diverse cells, proteins, and genetic material. Examples of biological tissues also include organs, tumors, lymph nodes, arteries and individual cell(s). Examples of biological fluids include urine, blood, plasma, serum, saliva, semen, stool, sputum, cerebral spinal fluid, tears, mucus, amniotic fluid or the like.

[0091] As used herein, the term “sensitivity” is the percentage of biomarker-detected subjects with a particular disease.

[0092] The terms “short RNA profile” or “RNA profile” or “tRNA fragment profile” are used interchangeably and refer to a genetic makeup of the RNA molecules that are present in a sample, such as a cell, tissue, or subject. Optionally, the abundance of an RNA molecule that is part of an RNA profile may also be sought. Optionally, other attributes of an RNA molecule that is part of an RNA profile may also be sought and include but are not limited to a molecule's location within the genomic locus of origin, the molecule's starting point, the molecule's ending point, the molecule's length, the identity of the molecule's terminal modifications, etc. The RNA molecules that can be used to form such a profile can be miRNAs, mRNAs, tRNAs, tRNA fragments, etc. as well as combinations thereof.

[0093] The term “signature” or “RNA signature” as used herein refers to a subset of an RNA profile and comprises the identity of one or more molecules that are selected from an RNA profile and optionally one or more of the attributes of the one or more molecules that are selected from the RNA profile.

[0094] By “substantially identical” is meant a polypeptide or nucleic acid molecule exhibiting at least 50% identity to a reference amino acid sequence (for example, any one of the amino acid sequences described herein) or nucleic acid sequence (for example, any one of the nucleic acid sequences described herein). Preferably, such a sequence is at least 60%/a, more preferably 80% or 85%, and more preferably 90%, 95% or even 99% identical at the amino acid level or nucleic acid to the sequence used for comparison.

[0095] A “suppressor tRNA” refers to a tRNA that alters the reading of a messenger RNA (mRNA) in a given translation system, e.g., by providing a mechanism for incorporating an amino acid into a polypeptide chain in response to a selector codon. For example, a suppressor tRNA can read through, e.g., a stop codon, a four base codon, a rare codon, and/or the like

[0096] The term “therapeutically effective amount” refers to the amount of the subject compound that will elicit the biological or medical response of a tissue, system, or subject that is being sought by the researcher, veterinarian, medical doctor or other clinician. The term “therapeutically effective amount” includes that amount of a compound that, when administered, is sufficient to prevent development of, or alleviate to some extent, one or more of the signs or symptoms of the disease or condition being treated. The therapeutically effective amount will vary depending on the compound, the disease and its severity and the age, weight, etc., of the subject to be treated.

[0097] The term “therapeutic” as used herein means a treatment and/or prophylaxis. A therapeutic effect is obtained by suppression, remission, or eradication of a disease state.

[0098] As used herein, the terms “treat,” treating,” “treatment,” and the like refer to reducing or improving a disease or condition and/or symptom associated therewith. It will be appreciated that, although not precluded, treating a disease or condition does not require that the disease, condition or symptoms associated therewith be completely ameliorated or eliminated.

[0099] The terms “tRNA fragment” or “tRF” (occasionally also referred to by us as “kuroko-RNA” or “kRNA”) are all used to refer to functional short non-coding RNAs generated from a tRNA locus. tRNA fragments have lengths that range from 10 to 40 or more nucleotides. Five structural categories of tRNA fragments include, the 5′-tRFs, the i-tRFs, the 3′-tRFs, the 5′-halves and the 3′-halves. The term “tRNA locus” refers to the genomic region that includes a tRNA gene and gives rise to the tRNA transcript. A given tRNA locus can produce zero, one, or more molecules belonging to zero, one, or more of the five structural categories.

[0100] Ranges provided herein are understood to be shorthand for all of the values within the range. For example, a range of 1 to 50 is understood to include any number, combination of numbers, or sub-range from the group consisting 1, 2, 3, 4, 5, 6, 7, 8, 9, 10, 11, 12, 13, 14, 15, 16, 17, 18, 19, 20, 21, 22, 23, 24, 25, 26, 27, 28, 29, 30, 31, 32, 33, 34, 35, 36, 37, 38, 39, 40, 41, 42, 43, 44, 45, 46, 47, 48, 49, or 50.

[0101] The recitation of an embodiment for a variable or aspect herein includes that embodiment as any single embodiment or in combination with any other embodiments or portions thereof.

[0102] Any compositions or methods provided herein can be combined with one or more of any of the other compositions and methods provided herein.

### Description

[0103] The present invention includes methods and compositions of analyzing tRNA fragments. tRNAs are ancient non-coding RNAs (ncRNAs) that have been heretofore understood to be molecules with well-defined roles confined to the translation of messenger RNA (mRNA) into amino acid sequences. As such, tRNAs are present in archaea, bacteria, and eukaryotes. The conventional understanding had been that a genomic tRNA locus produces a single transcript that is processed to give rise to the mature tRNA. Described herein, tRNA loci also produce fragments that are important novel regulators with roles in regulation, cellular physiology, post-transcriptional regulation, etc. The specifics of how tRNAs and tRFs effect these roles are currently understood poorly. The present invention utilizes tRNA fragment profiling to identify subjects in need of therapeutic intervention.

[0104] In one aspect, a method of identifying a subject in need of therapeutic intervention to treat a disease or disease progression comprising, isolating fragments of tRNAs from a cell obtained from the subject; characterizing the fragments of tRNA and their relative abundance in the cell to identify a signature, wherein when the signature is indicative of a diagnosis of the disease or of a disease subtype treatment of the subject is recommended.

[0105] In another aspect, a method of identifying a cell's tissue of origin to treat a disease or disease progression or disease recurrence in a subject in need thereof comprising, isolating fragments of tRNAs from a cell obtained from the subject characterizing the fragments of tRNA and their relative abundance in the cell to identify a signature, wherein the signature is indicative of the cell's tissue of origin, or the disease status of the tissue of origin; and providing a treatment regimen to the subject dependent on the cell's tissue of origin, or the disease status of the tissue of origin.

tRNA Fragments

[0106] Analysis of tRNA fragment profiles or signatures in one or more cells can lead to the discovery of tRNA signatures present in healthy cells or diseased cells. tRNA signatures of one or more cells, or a tissue may be used to identify a diseased cell, disease progression, or disease recurrence in a subject. Thus, the subject may be identified as in need of therapeutic intervention to delay the onset of, reduce, improve, and/or treat a disease or condition, such as breast cancer, in a subject in need thereof.

[0107] Also provided is a panel of engineered oligonucleotides comprising a mixture of oligonucleotides that are about 5 to about 15 nucleotides (nts) in length and capable of hybridizing tRNA fragments and/or tRNAs, wherein the tRNA fragments are generally at least 15 nts in length and the tRNAs are generally less than 80 nts in length. The panel may include one or more oligonucleotides that may be used to identify tRNA fragments or tRNAs through hybridization of complementary regions between the oligonucleotides and the tRNAs, or related techniques that are well known to those skilled in the art. The oligonucleotides may include complementary sequences to known tRNA sequences, such as tRNA fragments. The oligonucleotides may be engineered to be between about 5 nucleotides to about 40 nucleotides, or about 5 nucleotides to about 30 nucleotides, or about 5 nucleotides to about 20 nucleotides, or about 5 nucleotides to about 15 nucleotides in length. The panel may include engineered oligonucleotides that are specific to a cell type, disease type, disease subtype, stage of disease, a patient's gender, a patient's population of origin, a patient's race or other aspect that may differentiate tRNA fragment signatures. The kits and oligonucleotide panel may also be used to identify agents that modulate disease, or progression of disease, or disease recurrence, in patient samples, and/or in in vitro or in vivo animal models for the disease at hand.

[0108] In another aspect, the invention includes a method for identifying tRNA fragments from sequenced reads, typically obtained through next generation sequencing approaches. The method comprises the steps of defining tRNA loci; mapping the sequenced reads to at least one tRNA genomic locus comprising disregarding map locations that differ from the tRNA fragments by at least an insertion, deletion, or replacement of a nucleotide, excluding tRNA fragments that map to locations outside of the tRNA loci and disregarding sequenced reads with tRNA intron sequences; mapping sequenced reads that are post-transcriptionally modified; and characterizing the remaining sequenced reads.

[0109] Known tRNA loci include the mitochondrial genome loci of mitochondrial tRNA sequences, the nuclear genome loci of nuclear tRNA sequences, and the nuclear genome loci of some mitochondrial tRNA sequences. Currently, there are the 22 known human mitochondrial tRNA sequences in the mitochondrial genome. There are 610 (508 true tRNAs and 102 pseudo-tRNAs) nuclear tRNA sequences in the nuclear genome, as per the public genomic tRNA database “GtRNAdb.” Selenocysteine tRNAs, tRNAs with undetermined anticodon identity, and tRNAs mapping to contigs that were not part of the human chromosome assembly are excluded from the collection of tRNA sequences considered here. Including the selenocysteine tRNAs, tRNAs with undetermined anticodon identity, and tRNAs mapping to contigs not part of the human chromosome assembly would render 625 nuclear tRNA sequences. There are also eight intervals in the nuclear genome, chr1:+:566062-566129, chr1:+:568843-568912, chr1:−:564879-564950, chr1:−:566137-566205, chr14:+:32954252-32954320, chr1:−:566207-566279, chr1:−: 567997-568065, and, chr5:−:93905172-93905240, that correspond to identical instances of seven mitochondrial tRNAs TrpTCA, LysTTT, GlnTTG, AlaTGC (×2), AsnGTT, SerTGA, and, GluTTC, respectively.

[0110] The sequenced reads are further mapped to at least one tRNA genomic locus. Sequenced reads that differ from the map location by at least an insertion, deletion, or replacement of a nucleotide are disregarded. Thusly, for examples, two distinct 5′-tRF molecules that would otherwise be indistinguishable can then be differentiated from one another and properly mapped. Also, the misidentification of the genomic origin of a sequenced read that would lead to erroneous results can be avoided.

[0111] The human genome is also riddled with many nuclear and mitochondrial tRNA-lookalikes, as well as partial tRNA sequences. Excluding sequenced reads that map to locations outside of the tRNA loci prevents the tRNA-like fragments from being included and considered further.

[0112] Also disregarding sequenced reads with tRNA intron sequences improves identification of bonafide tRNA fragments. Many tRNAs include intronic sequences. Sequenced reads that include only exonic sequences of an intron-containing tRNA are included. Sequenced reads that straddle a tRNA's exon-exon junction are further examined for possible mapping outside tRNA loci: any such reads that map outside tRNA loci are discarded to avoid erroneous results.

[0113] tRNA fragments are also prone to post-transcriptional modifications. Mature tRNAs are commonly modified with a CCA trinucleotide added to the 3′ end. Without explicit provisions to include these tRNA fragments, they would be inadvertently excluded from consideration by lacking an exact genomic map location. However, simply allowing an adequate number of mismatches (e.g. replacements) during mapping the nontemplated CCA is not adequate. Prior to mapping, a modification to the genome is created where the trinucleotide CCA is used to replace the three genomic nucleotides immediately downstream of each of the reference mature tRNAs. Special care must be taken. Otherwise, a careless replacement of the genomic sequence downstream from a tRNA by the CCA trinucleotide could inadvertently “erase” part of an adjacent tRNA's sequence as is the case, for example, for some tRNAs in the mitochondrial genome.

[0114] The tRNA fragments thusly identified are characterized. The tRNA fragments can be assessed for one or more of, sequence of the tRNA fragments, the overall abundance of the tRNA fragments based on the number of sequenced reads that mapped to tRNA loci, the relative abundance of a tRNA fragment to a reference, the length of a tRNA fragment, the starting and ending points of a tRNA fragment, the genomic origin of a tRNA fragment, the terminal modifications of a tRNA fragment, and other analyses known in the art.

[0115] In another aspect, a system is described herein to perform the method of identifying tRNA fragments. In one embodiment, the system comprises a processor that aligns sequenced reads with a genome and processes the alignment. The processor of the system processes the alignments and disregards data from the alignments when the mapped sequenced reads differ from the genome by at least an insertion, deletion, or replacement of a nucleotide; the mapped sequenced reads align to locations in the genome that reside outside of designated tRNA loci; the sequenced reads map to locations in the genome that reside both inside and outside of designated tRNA loci; or the mapped sequenced reads span intron sequences of tRNAs. The portion of the algorithm that is run by the processor of the system and which processes the alignments may also have provisions to include sequenced reads that correspond to post-transcriptionally modified molecules and would otherwise not align perfectly with the genome.

### Diagnostics

[0116] Samples from subjects suffering from a disease or a condition have a specific tRNA fragment profile in the cell or cells that are diseased, including metastastic cancer cells. Identifying the cellular origin or tissue origin of a cancer metastasis, or a propensity for a cell to metasize by identifying a tRNA fragment profile associated with the cellular origin or tissue origin or a propensity to metasize in a sample obtained from the subject allows the subject to undergo a recommended treatment. In one aspect, the invention includes a method of identifying a cell's tissue of origin to treat a disease or disease progression, or disease recurrence in a subject in need thereof comprising isolating fragments of tRNAs from a cell obtained from the subject; characterizing the fragments of tRNA, which can include assessing one or more of, overall abundance, relative abundance, length of the fragment, starting and ending points of the fragment, terminal modifications, etc., in the cell to identify a signature, wherein the signature is indicative of the cell's tissue of origin, and/or disease status of the tissue of origin; and providing a treatment regimen to the subject dependent on the cell's tissue of origin and/or disease status of the tissue of origin.

[0117] In another embodiment, characterizing the tRNA fragments that are present in the RNA profile can identify subjects in need of treatment.

[0118] In one embodiment, analyzing the length of tRNA fragments in a cell, tissue or body fluid is used to identify subjects in need of treatment. In a particular embodiment, a subset of tRNA fragments in breast tissue are analyzed as having a length of 19 nt or 20 nt. A predominance of 19 nt tRNA fragments in breast tissue is indicative of a breast tumor. In contrast, a predominance of 20 nt tRNA fragments in breast tissue is indicative of healthy breast tissue.

[0119] In another embodiment, analyzing the length of tRNA fragments in cell, tissue or body fluid is used to identify subjects with a disease subtype. In a particular embodiment, a subset of tRNA fragments in breast tumor tissue are analyzed as having a length of 16 nt, 17 nt, 26 nt, or 29 nt. A predominance of 16 nt and 17 nt tRNA fragments in breast tumor tissue is indicative of a triple negative breast cancer. A predominance of 17 nt and 29 nt tRNA fragments in breast tumor tissue is indicative of ER-positive breast cancer. A predominance of 26 nt tRNA fragments in breast tumor tissue is indicative of HER2-positive breast cancer.

[0120] In yet another embodiment, the relative abundance of the tRNA fragments that are present in the RNA profile can identify subjects in need of treatment. In another approach, diagnostic methods are used to assess tRNA fragment profiles in a biological sample relative to a reference (e.g., tRNA fragment profile in a healthy cell or tissue or body fluid in a corresponding control sample). Examples of a body fluid may include, but are not limited to, amniotic fluid, aqueous humour and vitreous humour, bile, blood serum, breast milk, cerebrospinal fluid, cerumen, chyle, chyme, endolymph and perilymph, exudates, feces, female ejaculate, gastric acid, gastric juice, lymph, mucus, pericardial fluid, peritoneal fluid, pleural fluid, pus, rheum, saliva, sebum, serous fluid, semen, smegma, sputum, synovial fluid, sweat, tears, urine, vaginal secretion, and vomit.

[0121] In one embodiment, the sample, such as a cell or tissue or body fluid is obtained from the subject. In another embodiment, the cell or tissue or body fluid is isolated from the sample. In another embodiment, the cell or tissue is isolated from a body fluid. The sample may be a peripheral blood cell, a tumor cell, a circulating tumor cell, an exosome, a bone marrow cell, a breast cell, a lung cell, a pancreatic cell, or other cell of the body.

[0122] In another embodiment, a signature of tRNA fragments or a presence or absence of specific tRNA fragments are indicative a diagnosis of a disease or condition. In a particular embodiment, the methods or assays described herein can comprise analyzing the presence or absence or the signature of tRNA fragments to analyze brain can include, without limitations, at least one of the sequences with identifiers SEQ ID NOs: 1-1802.

[0123] In another embodiment, the methods or assays described herein can comprise analyzing the presence or absence or the signature of tRNA fragments to analyze breast tissue can include, without limitations, at least one of the sequences with identifiers SEQ ID NOs: 8538-8852.

[0124] In yet another embodiment, the methods or assays described herein can comprise analyzing the presence or absence or the signature of tRNA fragments to analyze blood cells can include, without limitations, at least one of the sequences with identifiers SEQ ID NOs: 12462-14475.

[0125] In still another embodiment, the methods or assays described herein can comprise analyzing the presence or absence or the signature of tRNA fragments to analyze blood cells can include, without limitations, at least one of the sequences with identifiers SEQ ID NOs: 24833-25945.

[0126] In another embodiment, the methods or assays described herein can comprise analyzing the presence or absence or the signature of tRNA fragments to analyze pancreatic tissue can include, without limitations, at least one of the sequences with identifiers SEQ ID NOs: 36100-37466.

[0127] In another embodiment, the methods or assays described herein can comprise analyzing the presence or absence or the signature of tRNA fragments to analyze prostate tissue can include, without limitations, at least one of the sequences with identifiers SEQ ID NOs: 42349-43721.

[0128] In another embodiment, the methods or assays described herein can comprise analyzing the presence or absence or the signature of tRNA fragments to analyze platelets can include, without limitations, at least one of the sequences with identifiers SEQ ID NOs: 51286-51793.

[0129] In one embodiment, the methods or assays described herein can comprise detecting the presence or absence of one or more tRNA fragments to distinguish Alzheimer's disease brain from normal brain can include, without limitations, at least one of the sequences with identifiers SEQ ID NOs: 11, 18, 19, 28, 31, 34, 43, 51, 59, 83, 189, 194, 209, 268, 305, 306, 307, 316, 320, 398, 404, 611, 632, 653, 696, 751, 768, 816, 817, 860, 869, 870, 871, 920, 921, 925, 951, 960, 967, 989, 1005, 1030, 1133, 1201, 1202, 1223, 1229, 1230, 1231, 1240, 1248, 1298, 1318, 1406, 1412, 1421, 1425, 1453, 1510, 1577, 1582, 1631, 1637, 1645, 1661, 1695, 1727, 1794, or any combinations comprising two or more of these sequences.

[0130] In another embodiment, the methods or assays described herein can comprise detecting the presence or absence of one or more tRNA fragments to distinguish triple negative breast cancer from HER2+ breast cancer can include, without limitations, at least one of the sequences with identifiers SEQ ID NO:8613 or SEQ ID NO: 8823 or a combination comprising these sequences.

[0131] In yet another embodiment, the methods or assays described herein can comprise detecting the presence or absence of one or more tRNA fragments to distinguish triple negative breast cancer from normal can include, without limitations, at least one of the sequences with identifiers SEQ ID NOs: 8542, 8543, 8566, 8579, 8582, 8587, 8589, 8590, 8594, 8671-8673, 8707, 8731, 8774-8778, 8803, 8827-8828, 8831-8832, 8837-8838, 8852, or any combinations comprising two or more of these sequences.

[0132] In still another embodiment, the methods or assays described herein can comprise detecting the presence or absence of one or more tRNA fragments distinguish triple positive breast cancer from normal can include, without limitations, at least one of the sequences with identifiers SEQ ID NOs: 8540, 8566, 8575, 8579, 8589-8590, 8593-8594, 8775-8776, 8803, 8827-8828, 8837-8838, 8852, or any combinations comprising two or more of these sequences.

[0133] In another embodiment, the methods or assays described herein can comprise detecting the presence or absence of one or more tRNA fragments to distinguish triple positive breast cancer from triple negative breast cancer can include, without limitations, at least one of the sequences with identifiers SEQ ID NOs: 8596, 8601, 8622, 8657, 8664, 8811, or any combinations comprising two or more of these sequences.

[0134] In yet another embodiment, the methods or assays described herein can comprise detecting the presence or absence of one or more tRNA fragments to distinguish breast cancer from normal tissue can include, without limitations, at least one of the sequences with identifiers SEQ ID NOs: 8582, 8599-8601, 8622-8623, 8634, 8657, 8663-8665, 8676, 8698, 8703-8706, 8718-8720, 8722, 8724, 8738, 8745, 8758, 8761, 8767-8772, 8840, or any combinations comprising two or more of these sequences.

[0135] In still another embodiment, the methods or assays described herein can comprise detecting the presence or absence of one or more tRNA fragments to distinguish chronic lymphocytic leukemia from normal B-cells can include, without limitations, at least one of the sequences with identifiers SEQ ID NOs: 12462, 12463, 12464, 12465, 12466, 12467, 12468, 12469, 12470, 12471, 12472, 12473, 12474, 12475, 12476, 12477, 12478, 12479, 12480, 12481, 12482, 12483, 12484, 12485, 12486, 12487, 12488, 12489, 12490, 12492, 12493, 12494, 12495, 12496, 12497, 12498, 12499, 12500, 12501, 12502, 12503, 12504, 12505, 12506, 12507, 12508, 12509, 12510, 12511, 12512, 12513, 12514, 12515, 12516, 12517, 12518, 12519, 12520, 12522, 12523, 12524, 12525, 12526, 12527, 12529, 12530, 12531, 12532, 12533, 12534, 12536, 12537, 12538, 12540, 12541, 12542, 12543, 12544, 12545, 12546, 12547, 12548, 12549, 12550, 12551, 12552, 12553, 12554, 12555, 12556, 12557, 12558, 12559, 12560, 12561, 12562, 12563, 12564, 12565, 12566, 12567, 12568, 12569, 12570, 12572, 12573, 12574, 12575, 12576, 12577, 12578, 12580, 12581, 12582, 12584, 12585, 12586, 12587, 12588, 12589, 12590, 12591, 12592, 12593, 12594, 12595, 12596, 12597, 12598, 12599, 12600, 12601, 12602, 12603, 12604, 12607, 12608, 12609, 12614, 12615, 12616, 12617, 12618, 12619, 12620, 12621, 12622, 12623, 12624, 12625, 12626, 12627, 12628, 12629, 12631, 12632, 12633, 12634, 12635, 12636, 12637, 12638, 12639, 12640, 12641, 12642, 12643, 12645, 12647, 12648, 12649, 12652, 12653, 12654, 12655, 12657, 12658, 12659, 12660, 12661, 12663, 12664, 12665, 12666, 12667, 12668, 12669, 12670, 12671, 12672, 12674, 12677, 12678, 12679, 12680, 12682, 12684, 12685, 12686, 12687, 12688, 12689, 12690, 12691, 12692, 12693, 12694, 12695, 12696, 12697, 12698, 12699, 12700, 12703, 12704, 12705, 12706, 12708, 12710, 12711, 12712, 12713, 12714, 12715, 12716, 12717, 12718, 12719, 12720, 12721, 12724, 12726, 12727, 12728, 12729, 12730, 12731, 12732, 12733, 12734, 12736, 12738, 12739, 12740, 12741, 12742, 12743, 12744, 12745, 12746, 12747, 12749, 12750, 12751, 12754, 12756, 12758, 12760, 12761, 12763, 12764, 12765, 12766, 12767, 12768, 12769, 12770, 12771, 12773, 12774, 12776, 12777, 12779, 12780, 12781, 12782, 12783, 12785, 12786, 12788, 12789, 12790, 12791, 12792, 12795, 12799, 12800, 12801, 12802, 12803, 12804, 12805, 12806, 12807, 12809, 12811, 12812, 12813, 12814, 12815, 12817, 12818, 12819, 12820, 12821, 12824, 12825, 12826, 12827, 12828, 12829, 12831, 12832, 12833, 12834, 12835, 12836, 12837, 12838, 12840, 12841, 12842, 12843, 12844, 12846, 12847, 12848, 12849, 12850, 12851, 12852, 12853, 12854, 12855, 12856, 12857, 12858, 12859, 12860, 12861, 12864, 12865, 12867, 12868, 12869, 12870, 12871, 12872, 12873, 12874, 12875, 12876, 12877, 12878, 12879, 12880, 12881, 12882, 12883, 12884, 12885, 12886, 12887, 12888, 12889, 12890, 12891, 12892, 12893, 12894, 12895, 12896, 12897, 12899, 12900, 12901, 12902, 12903, 12904, 12905, 12906, 12907, 12909, 12910, 12911, 12912, 12913, 12914, 12916, 12918, 12919, 12920, 12922, 12923, 12924, 12925, 12926, 12927, 12928, 12929, 12930, 12931, 12932, 12933, 12934, 12935, 12936, 12937, 12938, 12939, 12940, 12941, 12942, 12943, 12944, 12946, 12947, 12948, 12949, 12950, 12951, 12954, 12955, 12956, 12957, 12958, 12959, 12960, 12961, 12962, 12963, 12965, 12966, 12967, 12968, 12969, 12970, 12971, 12972, 12973, 12974, 12975, 12978, 12979, 12980, 12981, 12982, 12983, 12984, 12985, 12986, 12987, 12988, 12990, 12991, 12992, 12993, 12994, 12996, 12997, 12998, 12999, 13000, 13001, 13002, 13003, 13004, 13005, 13006, 13007, 13008, 13009, 13011, 13012, 13013, 13014, 13016, 13017, 13018, 13019, 13020, 13021, 13022, 13023, 13024, 13025, 13028, 13029, 13030, 13031, 13033, 13034, 13035, 13036, 13037, 13038, 13039, 13040, 13044, 13045, 13046, 13047, 13049, 13050, 13051, 13052, 13053, 13054, 13055, 13056, 13057, 13058, 13059, 13061, 13063, 13065, 13066, 13067, 13068, 13069, 13070, 13071, 13072, 13073, 13074, 13075, 13076, 13077, 13078, 13079, 13080, 13081, 13082, 13083, 13084, 13085, 13086, 13087, 13088, 13089, 13090, 13091, 13092, 13093, 13094, 13095, 13096, 13097, 13098, 13100, 13101, 13102, 13103, 13104, 13105, 13106, 13107, 13110, 13112, 13113, 13114, 13117, 13118, 13119, 13120, 13121, 13122, 13123, 13124, 13125, 13127, 13128, 13129, 13130, 13131, 13132, 13133, 13134, 13135, 13136, 13137, 13138, 13139, 13140, 13141, 13142, 13143, 13145, 13146, 13148, 13149, 13150, 13151, 13152, 13153, 13154, 13155, 13157, 13158, 13159, 13160, 13161, 13162, 13163, 13164, 13165, 13166, 13167, 13168, 13169, 13170, 13171, 13174, 13175, 13177, 13178, 13179, 13181, 13182, 13183, 13184, 13185, 13186, 13187, 13189, 13190, 13191, 13193, 13195, 13196, 13198, 13199, 13200, 13201, 13202, 13203, 13204, 13205, 13206, 13207, 13208, 13209, 13210, 13211, 13212, 13213, 13214, 13215, 13216, 13217, 13218, 13219, 13221, 13222, 13223, 13225, 13228, 13230, 13231, 13232, 13233, 13234, 13236, 13237, 13238, 13239, 13240, 13241, 13242, 13243, 13245, 13246, 13247, 13248, 13249, 13250, 13251, 13252, 13253, 13255, 13256, 13257, 13258, 13259, 13260, 13261, 13262, 13263, 13264, 13268, 13269, 13270, 13271, 13273, 13274, 13275, 13276, 13277, 13278, 13279, 13280, 13281, 13283, 13285, 13286, 13287, 13288, 13289, 13290, 13292, 13293, 13294, 13295, 13296, 13297, 13298, 13299, 13300, 13301, 13302, 13303, 13304, 13306, 13309, 13310, 13312, 13313, 13314, 13315, 13316, 13317, 13318, 13319, 13320, 13323, 13324, 13325, 13326, 13327, 13328, 13329, 13330, 13331, 13332, 13333, 13334, 13335, 13336, 13337, 13338, 13339, 13340, 13341, 13342, 13343, 13345, 13346, 13347, 13348, 13349, 13350, 13351, 13352, 13353, 13354, 13355, 13357, 13358, 13359, 13360, 13361, 13362, 13363, 13364, 13365, 13366, 13367, 13369, 13370, 13371, 13372, 13373, 13374, 13375, 13376, 13377, 13378, 13379, 13380, 13381, 13382, 13383, 13384, 13385, 13386, 13387, 13388, 13389, 13390, 13391, 13392, 13393, 13394, 13395, 13396, 13397, 13398, 13399, 13400, 13401, 13402, 13403, 13404, 13405, 13406, 13407, 13408, 13409, 13410, 13411, 13412, 13413, 13414, 13415, 13416, 13417, 13421, 13422, 13424, 13426, 13427, 13428, 13429, 13430, 13431, 13432, 13433, 13434, 13436, 13437, 13438, 13439, 13440, 13441, 13442, 13443, 13445, 13446, 13447, 13448, 13449, 13450, 13452, 13453, 13454, 13455, 13456, 13457, 13458, 13459, 13460, 13461, 13462, 13463, 13464, 13465, 13466, 13467, 13468, 13469, 13470, 13471, 13472, 13473, 13474, 13475, 13476, 13477, 13478, 13479, 13480, 13481, 13482, 13484, 13485, 13486, 13488, 13489, 13491, 13492, 13493, 13494, 13495, 13496, 13498, 13500, 13501, 13503, 13504, 13505, 13506, 13507, 13508, 13509, 13510, 13511, 13512, 13513, 13514, 13516, 13517, 13519, 13520, 13522, 13523, 13524, 13525, 13528, 13529, 13530, 13531, 13532, 13533, 13534, 13535, 13536, 13537, 13538, 13539, 13540, 13541, 13542, 13543, 13544, 13545, 13546, 13547, 13548, 13550, 13551, 13552, 13553, 13554, 13556, 13557, 13558, 13559, 13560, 13561, 13562, 13563, 13567, 13568, 13569, 13570, 13571, 13572, 13573, 13574, 13576, 13577, 13578, 13579, 13580, 13581, 13582, 13583, 13584, 13585, 13586, 13587, 13588, 13589, 13590, 13591, 13592, 13593, 13594, 13595, 13596, 13597, 13598, 13599, 13600, 13601, 13602, 13603, 13604, 13605, 13606, 13607, 13608, 13609, 13610, 13611, 13612, 13613, 13614, 13615, 13616, 13617, 13619, 13620, 13621, 13622, 13623, 13624, 13626, 13627, 13628, 13629, 13632, 13633, 13634, 13635, 13636, 13637, 13638, 13639, 13640, 13641, 13642, 13643, 13644, 13645, 13646, 13647, 13648, 13649, 13650, 13651, 13654, 13655, 13656, 13657, 13658, 13659, 13660, 13661, 13662, 13663, 13664, 13665, 13666, 13667, 13668, 13669, 13670, 13671, 13672, 13673, 13674, 13675, 13676, 13677, 13678, 13679, 13680, 13681, 13682, 13683, 13684, 13685, 13687, 13688, 13690, 13691, 13693, 13695, 13696, 13697, 13699, 13700, 13702, 13703, 13704, 13706, 13707, 13708, 13709, 13710, 13711, 13712, 13713, 13714, 13716, 13717, 13718, 13719, 13720, 13721, 13722, 13723, 13724, 13725, 13726, 13727, 13728, 13729, 13730, 13731, 13732, 13733, 13734, 13735, 13737, 13738, 13739, 13740, 13741, 13742, 13743, 13744, 13745, 13746, 13747, 13748, 13749, 13750, 13751, 13752, 13754, 13755, 13756, 13757, 13758, 13759, 13760, 13762, 13763, 13764, 13765, 13766, 13767, 13768, 13769, 13770, 13771, 13772, 13774, 13775, 13776, 13777, 13778, 13779, 13780, 13781, 13782, 13783, 13784, 13785, 13786, 13787, 13788, 13789, 13790, 13792, 13793, 13794, 13795, 13796, 13799, 13801, 13802, 13803, 13804, 13806, 13807, 13808, 13809, 13810, 13811, 13812, 13813, 13815, 13816, 13817, 13818, 13819, 13820, 13821, 13822, 13823, 13824, 13825, 13826, 13827, 13828, 13829, 13830, 13831, 13833, 13834, 13835, 13836, 13837, 13838, 13839, 13841, 13842, 13843, 13844, 13845, 13846, 13849, 13850, 13851, 13852, 13853, 13854, 13855, 13856, 13857, 13858, 13859, 13860, 13861, 13862, 13863, 13864, 13865, 13866, 13868, 13869, 13870, 13871, 13873, 13874, 13875, 13876, 13878, 13879, 13880, 13881, 13882, 13884, 13885, 13887, 13888, 13889, 13890, 13893, 13895, 13896, 13897, 13898, 13899, 13900, 13901, 13902, 13903, 13904, 13905, 13906, 13908, 13909, 13910, 13911, 13912, 13914, 13915, 13916, 13917, 13919, 13920, 13921, 13922, 13923, 13924, 13925, 13926, 13928, 13929, 13930, 13931, 13932, 13933, 13934, 13935, 13936, 13937, 13938, 13939, 13940, 13941, 13942, 13944, 13945, 13946, 13948, 13950, 13952, 13953, 13954, 13955, 13956, 13960, 13961, 13962, 13963, 13964, 13965, 13966, 13967, 13968, 13970, 13971, 13972, 13973, 13974, 13975, 13976, 13977, 13978, 13979, 13980, 13982, 13983, 13984, 13985, 13986, 13987, 13988, 13989, 13990, 13991, 13992, 13993, 13994, 13995, 13996, 13997, 13998, 13999, 14000, 14001, 14002, 14003, 14004, 14005, 14006, 14007, 14008, 14010, 14011, 14012, 14013, 14014, 14015, 14016, 14017, 14018, 14019, 14020, 14021, 14022, 14023, 14024, 14025, 14026, 14027, 14028, 14030, 14031, 14032, 14034, 14035, 14037, 14038, 14039, 14040, 14041, 14042, 14043, 14044, 14045, 14046, 14047, 14048, 14049, 14050, 14051, 14052, 14053, 14055, 14059, 14060, 14061, 14062, 14064, 14065, 14067, 14068, 14069, 14070, 14071, 14072, 14073, 14074, 14075, 14076, 14077, 14078, 14079, 14080, 14082, 14084, 14085, 14086, 14088, 14089, 14090, 14092, 14093, 14095, 14096, 14097, 14098, 14099, 14100, 14103, 14104, 14105, 14108, 14109, 14110, 14111, 14112, 14113, 14116, 14117, 14118, 14119, 14121, 14122, 14123, 14124, 14125, 14126, 14127, 14128, 14129, 14130, 14131, 14132, 14133, 14135, 14136, 14137, 14139, 14141, 14142, 14143, 14144, 14145, 14146, 14147, 14148, 14151, 14152, 14153, 14154, 14155, 14156, 14157, 14158, 14159, 14160, 14161, 14162, 14163, 14166, 14167, 14168, 14169, 14170, 14171, 14172, 14173, 14175, 14176, 14177, 14178, 14179, 14180, 14181, 14182, 14183, 14185, 14186, 14187, 14188, 14190, 14191, 14192, 14193, 14194, 14195, 14197, 14198, 14199, 14201, 14204, 14205, 14207, 14208, 14212, 14213, 14215, 14216, 14217, 14218, 14219, 14222, 14223, 14224, 14225, 14226, 14227, 14228, 14229, 14230, 14231, 14232, 14233, 14234, 14235, 14236, 14237, 14238, 14239, 14240, 14241, 14242, 14243, 14244, 14245, 14246, 14247, 14248, 14249, 14250, 14251, 14252, 14253, 14254, 14255, 14256, 14257, 14258, 14259, 14260, 14261, 14262, 14263, 14265, 14266, 14267, 14268, 14271, 14273, 14274, 14276, 14280, 14281, 14282, 14283, 14284, 14285, 14287, 14288, 14290, 14292, 14293, 14294, 14295, 14296, 14297, 14298, 14299, 14300, 14301, 14302, 14303, 14304, 14305, 14306, 14307, 14308, 14309, 14310, 14311, 14313, 14314, 14315, 14316, 14317, 14320, 14321, 14322, 14323, 14324, 14325, 14326, 14328, 14329, 14330, 14331, 14332, 14333, 14334, 14335, 14336, 14338, 14339, 14340, 14342, 14343, 14344, 14346, 14347, 14348, 14349, 14350, 14351, 14353, 14354, 14355, 14356, 14357, 14358, 14359, 14360, 14361, 14363, 14365, 14366, 14367, 14368, 14369, 14370, 14371, 14372, 14373, 14374, 14375, 14376, 14377, 14378, 14379, 14380, 14382, 14383, 14384, 14385, 14386, 14389, 14390, 14391, 14392, 14393, 14394, 14395, 14396, 14397, 14399, 14400, 14401, 14402, 14403, 14404, 14405, 14406, 14407, 14408, 14409, 14410, 14411, 14412, 14413, 14415, 14416, 14417, 14418, 14419, 14420, 14421, 14422, 14424, 14427, 14428, 14429, 14430, 14432, 14434, 14435, 14436, 14437, 14438, 14440, 14441, 14442, 14443, 14444, 14445, 14446, 14447, 14448, 14450, 14451, 14452, 14453, 14454, 14455, 14456, 14457, 14458, 14459, 14460, 14461, 14463, 14465, 14467, 14469, 14470, 14471, 14473, 14475, or any combinations comprising two or more of these sequences.

[0136] In another embodiment, the methods or assays described herein can comprise detecting the presence or absence of one or more tRNA fragments to distinguish B-cells from breast cells can include, without limitations, at least one of the sequences with identifiers SEQ ID NOs: 24995-24996, 25025, 25031, 25033, 25087-25091, 25093-25094, 25128, 25150, 25161-25162, 25165, 25182, 25219-25220, 25230, 25277-25278, 25284, 25316, 25356-25357, 25359-25360, 25363-25364, 25397-25398, 25415, 25424, 25432, 25480, 25484-25486, 25498-25499, 25505, 25524, 25550-25552, 25570, 25580, 25583, 25609-25610, 25619, 25646-25647, 25685-25687, 25691, 25714, 25720, 25727-25728, 25731, 25741, 25746-25747, 25846-25847, 25868, 25882, 25904, 25908-25912, 25914-25915, or any combinations comprising two or more of these sequences.

[0137] In yet another embodiment, the methods or assays described herein can comprise detecting the presence or absence of one or more tRNA fragments to distinguish B-cells from white people from B-cells from black people can include, without limitations, at least one of the sequences with identifiers SEQ ID NOs: 24880-24883, 24896-24897, 24959-24963, 24965, 24973, 25006, 25027, 25052, 25054, 25102-25103, 25110-25111, 25118, 25123, 25150, 25152-25153, 25183-25184, 25188, 25198, 25202, 25204-25206, 25210, 25212-25214, 25224-25225, 25245, 25252-25254, 25257, 25259-25261, 25270, 25273, 25286, 25294, 25296, 25313-25314, 25334, 25416, 25425, 25449-25450, 25454, 25476-25478, 25583, 25609-25612, 25665, 25667, 25705, 25714, 25786, 25894, 25896-25897, or any combinations comprising two or more of these sequences.

[0138] In still another embodiment, the methods or assays described herein can comprise detecting the presence or absence of one or more tRNA fragments to distinguish B-cells from men from B-cells from women can include, without limitations, at least one of the sequences with identifiers SEQ ID NO: 24881, 24926, 24952, 24981, 24990, 24995, 24998, 25010, 25047, 25051, 25075, 25101-25102, 2511 25111, 25118, 25121, 25149, 25211, 25218, 25238, 25309, 25359, 25373, 25376, 25386-25387, 25402, 25410, 25415-25416, 25420-25421, 25468, 25474, 25476, 25484-25487, 25493, 25524, 25536, 25560, 25596, 25604, 25620, 25631, 25651, 25662, 25664, 25714, 25723, 25803, 25829, 25850-25851, 25886-25887, 25898, 25902-25903, 25905, 25914, 25921, 25923, 25937, or any combinations comprising two or more of these sequences.

[0139] In another embodiment, the methods or assays described herein can comprise detecting the presence or absence of one or more tRNA fragments to distinguish normal pancreas from pancreatic cancer can include, without limitations, at least one of the sequences with identifiers SEQ ID NOs: 36100, 36101, 36105, 36107, 36111, 36112, 36114, 36115, 36116, 36119, 36120, 36121, 36122, 36123, 36139, 36143, 36146, 36147, 36148, 36149, 36155, 36156, 36157, 36163, 36171, 36173, 36176, 36177, 36178, 36179, 36180, 36181, 36182, 36183, 36188, 36189, 36194, 36197, 36200, 36203, 36204, 36215, 36217, 36218, 36219, 36222, 36223, 36227, 36228, 36230, 36231, 36234, 36238, 36239, 36240, 36241, 36242, 36243, 36246, 36248, 36252, 36254, 36262, 36265, 36266, 36269, 36270, 36271, 36272, 36273, 36276, 36278, 36279, 36282, 36285, 36287, 36288, 36289, 36293, 36294, 36295, 36296, 36297, 36298, 36299, 36303, 36304, 36305, 36306, 36307, 36308, 36313, 36319, 36320, 36322, 36323, 36326, 36327, 36331, 36332, 36333, 36335, 36336, 36338, 36339, 36341, 36342, 36344, 36347, 36355, 36356, 36357, 36372, 36373, 36374, 36375, 36376, 36378, 36381, 36384, 36387, 36391, 36392, 36395, 36397, 36399, 36400, 36401, 36405, 36406, 36408, 36409, 36428, 36429, 36430, 36431, 36432, 36433, 36435, 36436, 36437, 36444, 36450, 36451, 36452, 36453, 36455, 36456, 36457, 36460, 36461, 36462, 36463, 36464, 36465, 36466, 36467, 36468, 36469, 36470, 36471, 36472, 36478, 36485, 36490, 36491, 36498, 36499, 36504, 36505, 36506, 36507, 36508, 36509, 36510, 36511, 36512, 36513, 36517, 36520, 36521, 36523, 36524, 36529, 36530, 36533, 36534, 36535, 36538, 36539, 36541, 36542, 36543, 36544, 36545, 36546, 36547, 36550, 36553, 36554, 36561, 36562, 36572, 36573, 36574, 36575, 36578, 36579, 36580, 36581, 36582, 36584, 36586, 36589, 36590, 36591, 36593, 36594, 36597, 36599, 36600, 36601, 36607, 36608, 36609, 36610, 36611, 36612, 36614, 36615, 36616, 36617, 36618, 36619, 36620, 36621, 36627, 36628, 36629, 36637, 36638, 36639, 36640, 36641, 36642, 36643, 36644, 36645, 36646, 36647, 36649, 36650, 36658, 36665, 36669, 36670, 36671, 36673, 36674, 36675, 36676, 36677, 36678, 36679, 36680, 36682, 36683, 36684, 36689, 36690, 36691, 36692, 36693, 36694, 36695, 36696, 36697, 36698, 36701, 36702, 36703, 36705, 36706, 36707, 36708, 36709, 36710, 36711, 36712, 36714, 36715, 36716, 36718, 36719, 36720, 36721, 36722, 36726, 36727, 36728, 36729, 36730, 36731, 36732, 36733, 36734, 36735, 36738, 36739, 36741, 36742, 36744, 36745, 36746, 36747, 36749, 36751, 36754, 36755, 36756, 36757, 36759, 36760, 36761, 36762, 36763, 36764, 36765, 36768, 36769, 36770, 36771, 36772, 36775, 36776, 36777, 36778, 36788, 36789, 36793, 36794, 36796, 36797, 36798, 36799, 36800, 36803, 36805, 36806, 36809, 36810, 36812, 36814, 36817, 36825, 36826, 36827, 36829, 36830, 36831, 36832, 36834, 36835, 36838, 36839, 36841, 36844, 36846, 36848, 36849, 36851, 36854, 36855, 36857, 36859, 36860, 36861, 36862, 36863, 36864, 36868, 36869, 36871, 36872, 36877, 36878, 36879, 36880, 36881, 36883, 36884, 36885, 36886, 36887, 36889, 36890, 36891, 36892, 36895, 36897, 36901, 36902, 36903, 36904, 36905, 36907, 36909, 36910, 36911, 36913, 36914, 36915, 36916, 36917, 36918, 36919, 36925, 36931, 36938, 36939, 36941, 36942, 36945, 36946, 36948, 36952, 36953, 36955, 36956, 36957, 36958, 36961, 36963, 36964, 36965, 36967, 36968, 36973, 36976, 36977, 36978, 36979, 36980, 36981, 36982, 36983, 36985, 36988, 36989, 36990, 36991, 36992, 36997, 36998, 36999, 37001, 37004, 37005, 37008, 37009, 37012, 37013, 37014, 37021, 37022, 37023, 37024, 37025, 37026, 37029, 37032, 37033, 37036, 37039, 37044, 37046, 37048, 37049, 37050, 37051, 37054, 37055, 37056, 37057, 37058, 37059, 37060, 37063, 37065, 37066, 37075, 37077, 37078, 37079, 37080, 37081, 37083, 37087, 37088, 37089, 37090, 37091, 37094, 37095, 37099, 37100, 37101, 37110, 37115, 37116, 37117, 37119, 37120, 37121, 37123, 37124, 37125, 37127, 37132, 37133, 37134, 37135, 37137, 37138, 37139, 37141, 37142, 37143, 37144, 37145, 37146, 37149, 37150, 37151, 37152, 37155, 37157, 37160, 37161, 37162, 37163, 37164, 37165, 37166, 37167, 37168, 37169, 37171, 37174, 37175, 37177, 37178, 37181, 37182, 37183, 37184, 37185, 37187, 37193, 37194, 37195, 37196, 37197, 37198, 37199, 37201, 37202, 37203, 37206, 37207, 37208, 37209, 37211, 37213, 37214, 37216, 37217, 37226, 37227, 37228, 37229, 37230, 37231, 37234, 37235, 37237, 37244, 37245, 37247, 37248, 37249, 37251, 37253, 37254, 37255, 37261, 37262, 37265, 37271, 37272, 37273, 37274, 37278, 37279, 37283, 37303, 37304, 37305, 37306, 37307, 37308, 37312, 37316, 37319, 37321, 37323, 37324, 37325, 37326, 37327, 37334, 37335, 37336, 37337, 37338, 37339, 37340, 37341, 37342, 37348, 37356, 37363, 37365, 37368, 37369, 37370, 37372, 37374, 37375, 37376, 37382, 37383, 37385, 37386, 37388, 37391, 37394, 37395, 37398, 37400, 37401, 37402, 37403, 37404, 37405, 37407, 37408, 37410, 37419, 37420, 37422, 37423, 37424, 37425, 37426, 37429, 37430, 37431, 37432, 37433, 37445, 37446, 37448, 37449, 37453, 37454, 37456, 37461, 37462, 37463, 37464, 37466, or any combinations comprising two or more of these sequences.

[0140] In yet another embodiment, the methods or assays described herein can comprise detecting the presence or absence of one or more tRNA fragments to distinguish platelets from people with a propensity to clot vs. platelets from people with a propensity to hemorrhage can include, without limitations, at least one of the sequences with identifiers SEQ ID NOs: 51377-51378, 51406, 51438, 51496, 51565, 51691, 51699, 51736-51737, 51745, 51759, or any combinations comprising two or more of these sequences.

[0141] In still another embodiment, the methods or assays described herein can comprise detecting the presence or absence of one or more tRNA fragments to distinguish normal prostate from prostate cancer can include, without limitations, at least one of the sequences with identifiers SEQ ID NOs: 42434, 42520, 42537, 42577, 42751, 42979, 43019, 43090, 43128, 43156, 43310, 43352, 43398, 43426, 43437, or any combinations comprising two or more of these sequences.

[0142] In general, characterizing the tRNA fragments identifies a signature that may be indicative of a diagnosis of a disease or condition. The character of the tRNA fragments in the sample may be compared with a reference, such as other tRNAs present within the cell, a healthy cell or a diseased cell will yield a relative abundance of the tRNA fragments to identify a signature. The signature may be established by comparing the tRNA fragments' locations within the genomic loci of origin, the starting and ending points of the fragments, the length of the fragment, and any other feature of the fragments as compared to other tRNA fragments within the same sample or another sample or reference to distinguish a diseased state, a propensity to develop a disease or condition, and/or the absence of a disease or condition. The skilled artisan will appreciate that the diagnostic can be adjusted to increase sensitivity or specificity of the assay. In general, any significant increase (e.g., at least about 10%, 15%, 30%, 50%, 60%, 75%, 80%, or 90%) in the level of a polynucleotide or polypeptide biomarker in the subject sample relative to a reference may be used to diagnose a diseased state, a propensity to develop a disease or condition, and/or the absence of a disease or condition.

[0143] Accordingly, a tRNA fragment profile may be obtained from a sample from a subject and compared to a reference tRNA fragment profile obtained from a reference cell or tissue or body fluid, so that it is possible to classify the subject as belonging to or not belonging to the reference population. The correlation may take into account the presence or absence of one or more tRNA fragments in a test sample and the frequency of detection of the tRNA fragments in a test sample compared to a control. The correlation may take into account both of such factors to facilitate a diagnosis of a disease or condition. In one embodiment, the reference is the identity and abundance level of the tRNA fragments present in a control sample, such as non-diseased cell, a cell obtained from a patient that does not have the disease or condition at issue or a propensity to develop such a disease or condition. In another embodiment, the reference is a baseline level of the tRNA fragment presence and abundance in a biologic sample derived from the patient prior to, during, or after treatment for the disease or condition. In yet another embodiment, the reference is a standardized curve.

### Methods of Use

[0144] The method described herein includes diagnosing, identifying or monitoring a disease or condition, such as breast cancer, in a subject in need of therapeutic intervention. In one embodiment, the method includes isolating tRNA fragments from a cell, tissue or body fluid obtained from the subject; hybridizing the tRNA fragments to a panel of oligonucleotides engineered to detect tRNA fragments; analyzing an identity and levels of the tRNA fragments present in the cell; wherein a differential in the identity or measured tRNA fragments' levels to the reference is indicative of a diagnosis or identification of breast cancer in the subject; and providing a treatment regimen to the subject dependent on the differential in the identity and measured tRNA fragments' levels to the reference. The tRNAs may be isolated by a method known in the art or selected from the group consisting of size selection, sequencing, amplification, dumbbell-PCR and FIREPLEX®. In some embodiments, the size of the tRNA fragments is in the range of about 10 nucleotides to about 80 nucleotides are isolated. The range of sizes may include, but are not limited to, from about 15 nucleotides to about 55 nucleotides, and from about 17 nucleotides to about 52 nucleotides. The size of the tRNAs may be about 10 nucleotides, 11, 12, 13, 14, 15, 16, 17, 18, 19, 20, 21, 22, 23, 24, 25, 26, 27, 28, 29, 30, 31, 32, 33, 34, 35, 36, 37, 38, 39, 40, 41, 42, 43, 44, 45, 46, 47, 48, 49, 50, 51, 52, 53, 54, 55, 56, 57, 58, 59, 60, 61, 62, 63, 64, 65, 66, 67, 68, 69, 70, 71, 72, 73, 74, 75, 76, 77, 78, 79 or about 80 nucleotides.

[0145] The signature is a tRNA fragment profile that comprises the identity, abundance and relative abundance of tRNA fragments. The tRNA fragments' location within the genomic loci of origin, the starting and ending points of the fragments, the length of the fragments, and any other feature of the fragments as compared to other tRNA fragments within the same sample or another sample or reference may be included in the tRNA fragment signature. In one embodiment, the signature is obtained by hybridization to a single oligonucleotide, or to a panel of oligonucleotides, such as those that comprise at least two or more oligonucleotides that selectively hybridize to the tRNAs. To prepare the sample for characterization, the tRNAs and tRNA fragments may be amplified prior to the hybridization.

[0146] The therapeutic methods (which include prophylactic treatments) to treat a disease or condition, such as a disease selected from the group consisting of a cancer, and genetically predisposed disease, in a subject include administering a therapeutically effective amount of an agent or therapeutic to a subject (e.g., animal, human) in need thereof, including a mammal, particularly a human. Such treatment will be suitably administered to subjects, particularly humans, suffering from, having, susceptible to, or at risk for the disease or condition or a symptom thereof. The agent may be identified in a screening using tRNA signatures or relative abundance of tRNAs in in vitro or in vivo animal model for the disease or condition.

### Monitoring

[0147] Methods of monitoring subjects that are at high risk of developing a disease or condition, or are at risk of disease or condition recurrence, or who are receiving therapeutic intervention to reduce, improve, or treat a symptom of the disease or condition, such as breast cancer, are also useful in determining whether to administer treatment and in managing treatment. Provided are methods where the tRNA fragments are measured and characterized. In some cases, the tRNA fragments are measured and characterized as part of a routine course of action. In other cases, the tRNA fragments are measured and characterized before and again after subject management or treatment. In these cases, the methods are used to monitor the onset of a disease or condition, the recurrence of the disease or condition, the status of the disease or condition, or a propensity to develop such disease or condition, e.g., breast cancer.

[0148] For example, characterization of tRNA fragments or signatures can be used to monitor a subject's response to certain treatments. Such characterization can be used to monitor for the presence or absence of the disease or condition. The changes in the relative abundance or tRNA signature delineated herein before treatment, during treatment, or following the conclusion of a treatment regimen may be indicative of the course of the disease or condition, progression of disease or condition, or response to treatment. In some embodiments, characterization of tRNA fragments or signatures may be assessed at one or more times (e.g., 2, 3, 4, 5). Analysis of the tRNA fragments are made, for example, using a size selection, sequencing, and amplification, or other standard method to determine the tRNA fragment profile. If desired, tRNA fragment profile is compared to a reference to determine if any alteration in the tRNA fragment profile is present. Such monitoring may be useful, for example, in assessing the efficacy of a particular treatment in a patient. Therapeutics that normalize the tRNA fragment profile are taken as particularly useful.

### Kits

[0149] Kits for diagnosing, identifying or monitoring a disease or condition, such as breast cancer, are included. In one aspect, the invention includes a panel of engineered oligonucleotides comprising a mixture of oligonucleotides that are about 5 to about 15 nucleotides (nts) in length and capable of hybridizing tRNAs and tRNA fragments, wherein the tRNAs and tRNA fragments are less than about 80 nts in length. In another aspect, the invention includes a kit for high-throughput analysis of tRNA or tRNA fragments in a sample comprising the panel of engineered oligonucleotides of claim 12; hybridization reagents; and tRNA isolation reagents. Other kits with variations on the components and olignucleotide panels may be used in the context of the present invention. For example, the panel of engineered oligonucleotides may be specific to a cell type, disease type, stage of disease, or other aspect that may differentiate tRNA signatures. The kits and oligonucleotide panel may also be used to identify agents that modulate disease, or progression of disease in in vitro or in vivo animal models for the disease.

[0150] The practice of the present invention employs, unless otherwise indicated, conventional techniques of molecular biology (including recombinant techniques), microbiology, cell biology, biochemistry and immunology, which are well within the purview of the skilled artisan. Such techniques are explained fully in the literature, such as, “Molecular Cloning: A Laboratory Manual”, fourth edition (Sambrook, 2012); “Oligonucleotide Synthesis” (Gait, 1984); “Culture of Animal Cells” (Freshney, 2010); “Methods in Enzymology” “Handbook of Experimental Immunology” (Weir, 1997); “Gene Transfer Vectors for Mammalian Cells” (Miller and Calos, 1987); “Short Protocols in Molecular Biology” (Ausubel, 2002); “Polymerase Chain Reaction: Principles, Applications and Troubleshooting”, (Babar, 2011); “Current Protocols in Immunology” (Coligan, 2002). These techniques are applicable to the production of the polynucleotides and polypeptides of the invention, and, as such, may be considered in making and practicing the invention. Particularly useful techniques for particular embodiments will be discussed in the sections that follow.

[0151] It is to be understood that wherever values and ranges are provided herein, all values and ranges encompassed by these values and ranges, are meant to be encompassed within the scope of the present invention. Moreover, all values that fall within these ranges, as well as the upper or lower limits of a range of values, are also contemplated by the present application.

[0152] The following examples further illustrate aspects of the present invention. However, they are in no way a limitation of the teachings or disclosure of the present invention as set forth herein.

### Examples

[0153] The invention is further described in detail by reference to the following experimental examples. These examples are provided for purposes of illustration only, and are not intended to be limiting unless otherwise specified. Thus, the invention should in no way be construed as being limited to the following examples, but rather, should be construed to encompass any and all variations which become evident as a result of the teaching provided herein.

[0154] Without further description, it is believed that one of ordinary skill in the art can, using the preceding description and the following illustrative examples, make and utilize the compounds of the present invention and practice the claimed methods. The following working examples therefore, specifically point out the preferred embodiments of the present invention, and are not to be construed as limiting in any way the remainder of the disclosure.

[0155] The Results of the experiments disclosed herein are now described.

[0156] Transfer RNAs (tRNAs) are a class of non-coding RNAs (ncRNAs) and an integral component of the process of translating messenger RNAs (mRNAs) into the respective amino acid sequences. Each tRNA locus had been thought to give rise to a single transcript with a concrete single concrete role during the mRNA translation. However, recent studies have provided evidence that additional, functional short ncRNAs (“tRNA fragments” or “tRFs”) can also be generated from tRNA loci. TRNAs have traditionally been thought as producing a single transcript, the tRNA, a molecule that is an integral component of the process of translation of a messenger RNA (mRNA) into an amino acid sequence.

[0157] The present invention described herein includes two large datasets of short RNA profiles. Collections of tRNA fragments were generated and analyzed for several datasets. The results of the analyses were summarized in 7 tables on compact disc (CD) created on Oct. 27, 2014 that were submitted in the Provisional Patent Application No. 62/122,711, filed Oct. 28, 2014, where the results are in files: 205961-7006P2_Excel_Breast_TCGA.csv; 205961-7006P2_Excel_Brain_2N_2D.csv; 205961-7006P2_Excel_CLL.csv; 205961-7006P2_Excel_EBI_LCLs.csv; 205961-7006P2_Excel_Pancreas.csv; 205961-7006P2_Excel_Platelets.csv; and 205961-7006P2_Excel_Prostate.csv, all of which are incorporated by reference.

[0158] The two large public datasets of short RNA profiles that were systematically analyzed include: a first set that corresponds to lymphoblastoid cell lines derived from 452 individuals, men and women, from five different populations; and a second set that corresponds to 311 breast cancer samples from The Cancer Genome Atlas repository.

[0159] Nearly every known tRNA locus of the human genome gives rise to multiple and overlapping tRNA fragments with each fragment having concrete endpoints and a distinct length. Many of the discovered fragments are internal to the mature tRNA locus, i.e., they differ from previously reported 5′ and 3′ tRFs. The relative abundance and the endpoints of these tRNA fragments remain characteristically consistent across individuals, thus indicating a constitutive nature and a presumed participation in the molecular biology of the corresponding tissue through currently unknown interactions.

[0160] Importantly, the abundance and the choice of endpoints for these constitutive tRNA fragments depend on several features including tissue type, gender, population, ethnic background, and disease subtype. For a given locus, the choice of endpoints varied as a function of the amino acid and of the anticodon at hand. Independent experimental investigation of several previously unreported fragments found them to be present in model cell lines and in human tissues. Based on the findings, tRNA loci are rich sources of many distinct shorter tRNA fragments that can be functional molecules in addition to giving rise to mature tRNAs.

[0161] tRNAs are ancient non-coding RNAs (ncRNAs) that are present in archaea, bacteria, and eukaryotes. The role of tRNAs has been long presumed to be confined to the process of translation of a messenger RNA (mRNA) into an amino acid sequence. There is increasing evidence that tRNAs and tRNA fragments also have roles in cellular physiology, post-transcriptional regulation, etc. The specifics of how tRNAs and tRNA fragments effect these other events remains largely unclear.

[0162] The conventional understanding had been that genomic loci harboring tRNAs produce a single precursor transcript that is eventually processed and gives rise to the mature tRNA. Recent evidence, however, suggests that tRNA fragments, which presumably arise from the processing of the longer tRNA transcript, represent a novel and potentially important group of ncRNAs. Currently, the knowledge about the biogenesis of these fragments, their roles, and their potential function remains limited.

[0163] Studies with human cell lines have shown that tRNAs can be cleaved at the anticodon loop to produce “tRNA halves” that are (30-35 nts in length) a process that seems to be facilitated by the enzyme, Angiogenin, following induction of stress. Referred to as “tRFs,” tRNA fragments have also been found to originate from cleavage of either the mature tRNA or the tRNA precursor molecule. In the latter case, RNase Z cleaves the 3′ part of the tRNA precursor as part of the maturation process and the resulting fragment is considered to be a tRF with reported functions. tRFs that are derived from mature tRNAs emerge after cleavage at either the D-loop (giving rise to 5′-tRFs) or the T-loop (giving rise to 3′-tRFs with the CCA addition present) and are about 20 nucleotides long. Further investigation into the enzymes responsible for the fragments has shown that the process is Dicer-dependent, Angiogenin-dependent (cleaving the tRNA at the T-loop) or RNase-Z-dependent (producing 5′-tRFs).

[0164] tRFs are likely not random degradation products. Some 3′-tRFs are loaded on Argonaute, thereby, admitting a miRNA-like behavior and are involved in regulation of gene expression affecting physiological processes like cell growth, cell proliferation and cellular responses to DNA damage. These fragments have also been shown to have regulatory roles in translation initiation and stress granule formation, so it is reasonable to anticipate that additional functions await discovery. 3′-tRFs have also been described to emerge in human MT4 T-cells after HIV infection from the host cell.

[0165] Further adding to the likelihood that they are not random in nature is the fact that tRFs have been described in mouse, a yeast, two protozoans, a bacterium, and an archaeon. As described herein, the presence of tRNA fragments is discussed in different human tissues.

[0166] Unlike previous studies that focused on 5′-tRFs, 3′-tRFs, and on tRFs overlapping with the 3′ of the precursor tRNA transcripts in what follows, no restrictions were imposed on the sought fragments in terms of their relative position with respect to the span of a mature tRNA. tRNA fragments were systematically studied by analyzing 452 short RNA profiles from lymphoblastoid cell lines and 311 breast samples from The Cancer Genome Atlas (TCGA) repository at the National Institutes of Health (NIH).

[0167] Four previously known categories were observed, namely 5′-tRFs, 3′-tRFs, 5′-halves and 3′-halves, in the two human tissues types (all previous reports were based on model cell lines). A fifth structural category of tRFs was found, the internal-tRFs or “i-tRFs,”in human tissues. The i-tRFs begin and end anywhere along the interior of the mature tRNA. The i-tRF category was found to be rich and diverse, with numerous tRNA genomic loci producing many distinct i-tRFs. The 5′-tRF and 3′-tRF categories were found to be more diverse than previously thought: each contained multiple tRFs with distinct, quantized lengths that changed from tissue to tissue, and between health and disease.

[0168] The tRFs from nuclear tRNA loci were also found to differ greatly from mitochondrial (mt or MT) tRFs. Within a tissue, the lengths and abundances of 5′-tRFs, i-tRFs, and 3′-tRFs depended on the genomic origin (i.e. nuclear vs. mitochondrial) of the parent tRNA locus. Notably, this observation held true even for tRFs from the same anticodon, i.e. nuclear AspGTC vs mitochondrial AspGTC.

[0169] The tissue type and disease type/sub-type appeared to shape the tRF population. All tRF categories exhibited diversities and abundances that were tissue-specific, specific between health and disease, and dependent on disease subtype.

[0170] Moreover, it was surprising to find that gender, population, and enthicity shaped the tRF population. In fact, the tRFs had gender-, population- and ethnicity-dependent differences at the molecular, cellular, and tissue levels, in healthy and diseased tissues.

[0171] The tRFs also loaded on Argonaut (Ago) in a cell-line-specific manner. The analyses of Ago CLIP-seq data from cell lines modeling three BRCA subtypes showed that different populations of tRFs were Ago-loaded in each cell line.

[0172] The i-tRFs were also present in clinical samples. Using sequence-specific amplification methods, the presence of several novel molecules was independently confirmed in clinical samples from BRCA patients.

[0173] The analysis of tRNA sequences required a number of special considerations that went beyond what is typically done when mapping RNA-seq data for the purpose of e.g., profiling the expression of miRNAs or mRNAs. These considerations stemmed from the observations that tRNAs are in fact repeat elements. In addition to bonafide tRNAs having multiple copies, tRNA segments appeared elsewhere on the genome outside of tRNA space, the latter being the full complement of genomic locations harboring tRNA genes.

Method for Identifying Bona Fide tRNA Fragments from Deep Sequencing Transcriptomic Data

[0174] The proper analysis and handling of tRNA sequences and identification of tRNA fragments in deep sequencing data required several considerations that went beyond typical protocols to map RNA-seq data for the purpose of e.g., profiling the expression of miRNAs or mRNAs. These considerations stemmed from the fact that tRNAs are repeat elements. Considering the logical hierarchy that pertains to tRNA sequences, where each amino acid (few amino acids; at the top of the pyramid) has multiple associated anticodons (more isoacceptors than amino acids; in the middle of the pyramid) and each anticodon has multiple associated genomic instances (a multitude of isodecoders; at the bottom of the pyramid), the presented analyses sought to unravel, for each tRNA fragment, details at the lowest possible level of the hierarchy. It is stressed that the nature of the sequences at hand is such that achieving this goal is unattainable in some instances. As many isodecoders have indistinguishable sequences, results were reported at the anticodon level, an intermediate level between isoacceptors and isodecoders. Also, the method kept track of the genomic origins of all the reported fragments.

Defining the tRNA Space

[0175] All shown sequences are in 5′→3′ orientation. Directly linked to the mapping is the definition of what constitutes the genome's tRNA space. For the purposes of the method described herein, the following sequences were combined to make up the tRNA space:

[0176] a) the 22 known human mitochondrial tRNA sequences (NCBI entry NC_012920.1

[0177] b) 610 (508 true tRNAs and 102 pseudo-tRNAs) of the 625 nuclear tRNA sequences from the genomic tRNA database (GtRNAdb); excluded from the 625 nuclear tRNAs listed in GtRNAdb were the entries that included the selenocysteine tRNAs, tRNAs with undetermined anticodon identity, and tRNAs mapping to contigs that were not part of the human chromosome assembly;

[0178] c) the eight genomic intervals chr1:+:566062-566129, chr1:+:568843-568912, chr1:−:564879-564950, chr1:−:566137-566205, chr14:+:32954252-32954320, chr1:−: 566207-566279, chr1:−:567997-568065, and, chr5:−:93905172-93905240—all coordinates were from the hg19 assembly of the human genome—that corresponded to identical instances of seven mitochondrial tRNAs TrpTCA, LysTTT, GlnTTG, AlaTGC (×2), AsnGTT, SerTGA, and, GluTTC, respectively.

[0179] In total, the reference tRNA space used to implement the method described herein included 640 sequences.

Sequenced Reads were Mapped “Exactly” Since Mapping with Mismatches Generated Erroneous Results

[0180] Multiple sequence alignments of the genomic copies for a given anticodon revealed many instances of sequence segments that were shared among these copies and made to look like one another if one permitted a small number of insertions, deletions, or replacements. These segments were found across the length of the mature tRNA, and were present in tRNA fragments. Moreover, these segments were found in the sequences of distinct anticodons of the same amino acid. Consequently, permitting insertions, deletions or replacements during read mapping misidentified the genomic origin of a read and led to erroneous results. Problems occurred even if indels were excluded and a single replacement allowed.

[0181] For example, the following 5′-tRF sequence GGGGAATTAGCTCAAG-T-GGTAGAGCGCTTGCT (SEQ ID NO:55729) appeared at five genomic locations, all of which were instances of the AlaAGC anticodon sequence.

[0182] By contrast, the 32 nt sequence GGGGAATTAGCTCAAG-C-GGTAGAGCGCTTGCT (SEQ ID NO:55730), differed from the previous sequence at a single location (T→C), a 5′-tRF of AlaAGC, but appeared at two different genomic locations that were distinct from the previous five. If read mapping with a single mismatch was allowed, these two distinct 5′-tRF molecules would become indistinguishable, thereby, confounding any transcriptional differences that potentially exist among the seven full length loci that comprise GGGGAATTAGCTCAAG-N-GGTAGAGCGCTTGCT (SEQ ID NO:55731).

[0183] This problem was accentuated further when the typically shorter reads contained in “short RNA-seq” datasets were mapped. The 22 nt sequence GGGGGTGTAG-A-TCAGTGGTAGA (SEQ ID NO:55732) is a 5′-tRF from the AlaAGC anticodon (trna117 on chromosome 6). Allowing for exactly one mismatch made this 5′-tRF indistinguishable from GGGGGTGTAG-C-TCAGTGGTAGA (SEQ ID NO:55733), which appeared in 11 isodecoders of three Ala anticodons (AlaAGC, AlaCGC, AlaTGC) as well as in two non-Ala anticodons, namely CysGCA (trna7 on chromosome 3) and ValAAC (trna115 on chromosome 6). Thus, if a single replacement was allowed during mapping, reads from any one of these 14 genomic locations were indistinguishable, and led to cross-talk and consequent erroneous estimates about the abundance of 5′-tRFs arising from the tRNAs. To avoid such confounding events, insertions, deletions, or replacements were not permitted.

Sequenced Reads were Mapped on the Full Genome (Nuclear and Mitochondrial) Since Mapping on tRNA Space Alone Generated Erroneous Results

[0184] It was tempting to consider compiling a database of tRNA sequences (e.g. by combining all the spliced nuclear and mitochondrial tRNA sequences into a single collection) and then mapping the sequenced reads on this subset of the genomic real estate. Such an approach would be easy to implement, fast to execute, and seemingly adequate. Unfortunately, this approach was error-prone and led to misrepresentation of expressed tRNA fragments and miscalculation of the relative abundances of the various tRNA anticodons.

[0185] In addition to the multiple instances of bonafide nuclear tRNAs, the human genome is also riddled with many instances of nuclear and mitochondrial tRNA-lookalikes, as well as partial tRNA sequences. Thus, any and all reads that simultaneously land inside and outside tRNA space were excluded from consideration since their integrity could not be guaranteed.

[0186] To achieve this objective all sequenced reads were mapped on the entire genome. The 24 nt sequence GCTCCAGTGGCGCAATCGGTTAGC (SEQ ID NO:55734) helped illustrate the reasoning for this requirement. The sequence is a 5′-tRF of the IleTAT anticodon and appeared identical to five genomic locations. However, this sequence also appeared outside tRNA space on the forward strand of chromosome 7, between locations 44465584 and 44465607 inclusive (GCh37). This sequence forms part of the 38 nt sequence GCTCCAGTGGCGCAATCGGTTAGCATGCGGTACTTATA (SEQ ID NO:55735) (note the underline segment) that spans locations 44465584 through 44465621. Even though this 38-mer is labeled as a “tRNA” by RepeatMasker, it is much shorter than the 93 nt of the typical IleTAT and thus not a bonafide tRNA. Consequently, the sequenced reads were mapped on the whole genome, which allowed the identification of such events. Since the integrity of the reads that fall in this category could not be established unambiguously, all reads that landed simultaneously inside and outside tRNA space were discarded and excluded from further consideration.

Sequenced Reads were Mapped Using Exact Multi-Mapping Since Mapping Uniquely Generated Erroneous Results

[0187] Typical pipelines that map deep-sequencing datasets report reads that can be mapped either unambiguously to a single location (“unique-mapping”) or only to handful of genomic locations. However, considering that the typical tRNA anticodon has multiple genomic instances, neither of these two choices was appropriate under the circumstances.

[0188] As an example, the 72 nt AspGTC sequence TCCTCGTAGTATAGTGGTGAGTATCCCCGCCTGTCACGCGGGAGACCGGGGT TCGATTCCCCGACGGGGAG (SEQ ID NO:55736) was presented. This sequence appeared identically at 11 genomic loci: five on chromosome 1, two on chromosome 6, three on chromosome 12 and one on chromosome 17. The typical read for short RNA-seq profiles was shorter than 72 nt, which increased the chance that a read was present at multiple genomic locations some of which were not related to tRNAs. The multiple instances of tRNA anticodons, the existence of the previously reported tRNA lookalikes, and the existence of repeating elements, like the previously reported pyknons, required “exact multi-mapping” (i.e. no indels, no replacements) to be carried out. A sequenced read was permitted to map as many locations as practically possible. The resulting maps were post-processed and any sequenced reads with one or more of instances outside the tRNA space were discarded and excluded from further consideration. On the other hand, sequenced reads with all of instances exclusively inside tRNA space were kept. In an example case, the method only read counts from one of the multiple genomic loci to avoid mis-counting the fragment's abundance.

Sequenced Reads were Mapped “Exactly” while Accounting for the Nontemplated CCA Addition

[0189] As shown in FIG. 1, mature tRNA sequences contain the CCA trinucleotide that is added post-transcriptionally to the 3′ end of mature tRNAs. Since this CCA “tail” of the mature tRNA has no counterpart in the genomic DNA, from which the precursor tRNA sequence was transcribed, explicit provisions were made to map such reads or they would be inadvertently excluded from consideration and from reporting. These provisions were necessary since the method presented herein required a strict-exact mapping of the sequenced reads. Consequently, the nontemplated CCA's presence in a read could not simply be accommodated by allowing an adequate number of mismatches (e.g. replacements) during mapping. Prior to mapping, a modified instance of the genome was created where the trinucleotide CCA was used to replace the three genomic nucleotides immediately downstream (in the 5′→3′ direction) of each of the 640 reference mature tRNAs.

[0190] Special bookkeeping was required in the case of mitochondrial tRNAs, some of which are either very close to one another (e.g. MT_AlaTGC and MT_AsnGTT) or overlapping (e.g. MT_CysGCA and MT_TyrGTA). A careless replacement of the genomic sequence downstream from a tRNA by the CCA trinucleotide would inadvertently “erase” part of another tRNA's sequence.

[0191] Lastly, it was important to realize that depending on its length, a sequenced read that ended in CCA could simply be a transcript that originated elsewhere on the genome from a location that was outside tRNA space. In such an event, the reads that fall in this category could not be established unambiguously and these particular CCA-ending reads were discarded and excluded from further consideration.

Sequenced Reads were Mapped Using Special Provisions for Intron-Containing tRNAs

[0192] An abundance of tRNAs contains introns. The method described herein focuses on mature tRNAs. Sequenced reads that mapped on the genome under the above constraints yet straddled a tRNA exon-intron or a tRNA intron-exon boundary were discarded and excluded from further consideration. At the same time, the sequence space on which reads were mapped needed to be augmented to include spliced versions of all intron-containing tRNAs.

[0193] However, attention was required as follows: a) mapped reads that were wholly in an exon of an intron-containing tRNA were counted once (e.g. only their genome instances were counted and not their spliced-tRNA instances; or vice versa); and, b) mapped reads that straddled a tRNA exon-exon junction were examined for possible instances outside tRNA space. The mapped reads that straddled such a junction but also had instances outside tRNA space were discarded and excluded from further consideration.

[0194] As a specific example of a tRNA fragment that highlighted the need for this step, the following TyrGTA sequence is described. The tRNA fragment's sequence comprises the tail of the first exon and the head of the second exon, which indicates that the fragment arose from a mature or semi-mature tRNA molecule. Specifically, the 19-nucleotide fragment trna14_nTyrGTA_6_+_26569086_26569176@32.50.19_1_0_12 is an internal fragment that maps solely on the 12 genes of the nuclear TyrGTA anticodon and spans the exon-exon junction in all 12 cases. This 19-mer, which does not appear elsewhere in the genome, would have been discarded if special provisions were not made for handling tRNA introns.

Distinguishing Among Three Regions of the Mature tRNA that were Sources of tRNA Fragments

[0195] For each of the considered tRNAs, and for the reads with instances exclusively in tRNA space, three categories of tRNA fragments were identified that arose from three regions of the tRNA: a) fragments whose 5′ terminus began exactly at the 1^{st} nucleotide of the corresponding mature tRNA (“+1” fragments; the category comprises 5′-tRFs and 5′-halves); b) fragments that were strictly internal to the mature tRNA sequence, i.e. whose 5′ terminus began at the 2^{nd} nucleotide or further to the right and whose 3′ terminus ends to the left of the first “C” of the nontemplated “CCA” addition to the mature tRNA (“internal” fragments or i-tRFs); and, c) fragments whose 3′ terminus coincided with any of the bases of the “CCA” terminal addition (“CCA-ending” fragments; the category comprised 3′-tRFs and 3′-halves). It was also recognized that there were instances of mature tRNAs, e.g. the histidine (His) tRNA, that gave rise to fragments that started at the “−1” position i.e. one position to the left of the start of the mature tRNA. For simplicity of presentation, these were considered subsumed by the “+1” region and were not treated separately.

[0196] The categories of fragments starting at position +1, and the ones ending at the CCA tail have been described previously. However, until now, i-tRFs had not been described as a distinct and rich category of abundant tRFs, in either cell lines or in human tissues.

### Analyzed Datasets

[0197] The first analyzed dataset contained the short-RNA sequencing profiles of lymphoblastoid cell lines (LCLs) from 452 men and women belonging to five different populations: Utah residents with Northern- and Western-European ancestry (CEU), Finnish (FIN), British (GBR), Toscani Italians (TSI) and Yoruba African from the city of Ibadan (YRI). The second analyzed dataset was drawn from The Cancer Genome Atlas (TCGA) repository at the National Institutes of Health (NIH) and comprised 17 normal and 294 breast cancer samples covering the basic hormone profiles (FIG. 2).

[0198] In what follows, LCL refers to both the analyzed 452 primary datasets and the corresponding collection of 1,113 statistically significant tRNA fragments. Analogously, BRCA is used to refer both to the analyzed 311 primary datasets and the corresponding collection of statistically significant tRNA fragments.

[0199] Sequenced reads were mapped as mentioned above and all tRNA fragments that were supported by at least one read in at least one of each collection's analyzed samples were collected. Then, filtering criteria were applied that ensured that each tRNA fragment had enough statistical support. For the LCL dataset, the filtering led to 1,113 statistically significant tRNA fragments, SEQ ID NOs: 24833-25945. For the BRCA dataset, the filtering led to 315 statistically significant tRNA fragments, SEQ ID NOs: 8538-8852. For the Brain dataset, the filtering led to 1802 statistically significant tRNA fragments, SEQ ID NOs: 1-1802. For the CLL dataset, the filtering led to 2014 statistically significant tRNA fragments, SEQ ID NOs: 12462-14475. For the Pancreas dataset, the filtering led to 1367 statistically significant tRNA fragments, SEQ ID NOs: 36100-37466. For the Platelets dataset, the filtering led to 508 statistically significant tRNA fragments, SEQ ID NOs: 51286-51793. For the Prostate dataset, the filtering led to 1373 statistically significant tRNA fragments, SEQ ID NOs: 42349-43721.

[0200] Breast cancer is the most frequently diagnosed cancer and the leading cause of cancer death among women. In the United States, one in eight women will develop breast cancer during her lifetime. In 2013 alone, nearly 300,000 individuals were diagnosed with either invasive or non-invasive breast cancer whereas 40,000 died from breast cancer. Breast cancer is also a heterogeneous disease. The discovery of specific prognostic and predictive biomarkers in the past decades has enabled the clinical classification of breast cancer into three basic therapeutic subgroups (FIG. 2). The estrogen receptor (ER) positive group, known as Luminal-type breast cancer, represents the most frequently occurring and diverse type, and its treatment often includes endocrine therapy. The Basal-like subgroup, also termed “triple-negative”, lacks transcription from either the ER, the progesterone receptor (PR) or the epidermal growth factor receptor 2 (HER2) locus: this is a group with poorer prognosis and chemotherapy is the only option in this case. It is standard practice for pathological features (e.g. hormone receptor positivity, tumor stage and node positivity) to be used to guide clinicians in prescribing the appropriate therapy. Sustained efforts in understanding further the molecular etiology behind the onset and development of breast cancer are necessary before improved biomarkers of risk and of therapy response can be developed and applied towards higher-quality diagnosis and treatment approaches.

Exact Multi-Mapping Reveals Atypical tRNA Length Fragments

[0201] The lengths of the reads mapping to the internal region were plotted on a histogram and compared to the two known categories of tRNA fragments (5′-tRFs and 3′-tRFs). FIGS. 3A-3D show the length distributions for the 452 individuals of the LCL dataset. As can be seen from FIG. 3A, i-tRFs are dominated by a single length, namely 36 nt. The 5′ terminus of the i-tRFs begins at position +2 of the mature tRNA, or further to the right. Consequently, the internal 36-mers comprise the full anticodon triplet (typically centered at position +34 of the mature tRNA sequence) and thus they straddle the point that has been typically associated with the terminus of tRNA halves.

[0202] FIGS. 3B-3C show the length distributions for the +1 and the CCA-ending regions. In FIG. 3D, the combined length distribution is shown. Each of the three tRNA regions gave rise to fragments with characteristic length profiles and specific relative abundances. Importantly, the very small standard errors (too small to be visible in the four panels) indicate that the lengths of these fragments persisted across each of the three regions and across the 452 individuals and, thus, were not random degradation products.

[0203] In the tRNA literature, the 5′-tRFs have been associated with lengths of 18, 22, and 32 nt. In addition to identifying fragments with these lengths, the analysis of the LCL datasets revealed a prevalence for fragments with lengths of 20, 26, 33 and 36 nt. These lengths have not been previously associated with 5′-tRFs.

[0204] Similarly in the LCL datasets, the CCA-ending fragments (3′-tRFs) show prevalence for lengths of 18, 22, 33 and 36 nt. More than half of these 33-mers and 36-mers start after the anticodon, which makes many of these fragments distinct from the typical tRNA-halves and complementary to the previously reported length-families of 3′-tRFs. It is also worth noting that all the 3′-tRF 33-mers and more than half of the 3′-tRF 36-mers (26 out of 43) originated in mitochondrial tRNA genes.

[0205] The same analysis was repeated for the 311 TCGA BRCA datasets. FIG. 4A-4D show the corresponding length distributions. The i-tRF distribution (FIG. 4A) is significantly different from those of the 5′-tRFs (FIG. 4B) and the 3′-tRFs (FIG. 4C). The i-tRFs comprise fragments that are 20 nt long and virtually no fragments 230 nt, whereas the +1 category is characterized by a prevalence of fragments with lengths 19, 20, 24 and ≧230 nt. Similar to the LCLs, the lengths of the fragments that arise from the three regions have characteristic profiles and specific relative abundances.

[0206] Moreover, the small standard error for each length indicates that atypical lengths of these fragments are rare across the analyzed datasets. It is important to emphasize that these NIH-TCGA datasets were obtained through deep sequencing PCR with a total of 30 sequencing cycles. Consequently, short fragments or fragments longer than 30 nt that may exist in each sample's milieu were represented by a 30-mer “proxy”.

[0207] A considerable portion of the CCA-ending fragments in the BRCA datasets have lengths that have not been previously associated with 3′-tRFs. In all, these datasets revealed several length families that have not been previously reported. These families comprise fragments with lengths of 16, 20, 21, and 23-29 nt and collectively account for 21.2% of all tRNA fragments in the BRCA datasets. In FIG. 4D, the combined length distribution is shown.

i-tRFs Represent a Diverse New Family of tRNA Fragments

[0208] The analyses described herein reveal that i-tRFs are a surprisingly rich category with many of its members having 5′ termini that are away from the 5′ end of the mature tRNA. The i-tRFs represented 27.5% of all fragments in the LCL and 21.0% of all fragments in the BRCA dataset.

[0209] FIG. 5 shows the distribution of the starting positions of the i-tRFs for the LCL (A) and BRCA datasets (B). For each starting position, the length distribution is also shown as bars, with the intensity of each bar representing the average expression of the respective fragment in the LCL or BRCA dataset.

[0210] For the LCL dataset, internal 36-mers began anywhere within the D loop of the mature tRNA (generally positions 12-22) or immediately after it (in 5′→3′ orientation). No specific position is singled out as the preferred starting position of internal fragments in this dataset (FIG. 5A). On the contrary, in the BRCA dataset, there are two main “clusters” of starting positions for the i-tRFs: a first cluster spanning positions 11-17 that generally reside in the D loop and a second cluster spanning positions 32-43 comprising the anticodon loop and the variable loop of the mature tRNA (FIG. 5B). Each of the starting positions exhibited its own associated range of lengths for the fragments that began there. Fragments that began at position 13 were 23, 22 or 21 nt long, whereas fragments that began at position 15 or 16 were slightly shorter with lengths 19, 20, or 21 nt.

[0211] These fragment lengths recurred in both the LCL and BRCA datasets and have small standard deviations. It is thought that the mechanisms behind the production of these fragments have specific preferences for the starting and ending positions and/or the length of the tRNA fragment. The 30-mers in FIG. 2B, starting at positions 2-6, 34 and 36, are likely tRNA-halves that cannot be “seen” due to the 30-PCR-cycle limitation in the breast datasets mentioned herein.

tRFs Differ Between Nuclearly- and Mitochondrially-Encoded tRNAs

[0212] The relationship between tRNA fragment lengths and abundances, and their genomic origin (i.e. whether nuclearly-encoded vs. mitochondrially-encoded) was examined. To this end, the graphs of FIGS. 3D and 4D were decomposed into their nuclear and the mitochondrial contributions (FIG. 6A-6B). Several statistically significant differences were identified in the expression of nuclear and mitochondrial tRNAs in both the LCL (A) and the BRCA dataset (B). Notably, the 36-mers in the LCL dataset were predominantly from mitochondrially encoded tRNAs, while the 33-mers were from nuclearly encoded ones.

tRFs from all Three Regions Exhibit Diversities and Abundances that Depend Strongly on the Choice of Anticodon

[0213] For each of the two collections of analyzed datasets, and separately for each anticodon, the fragments arising from all of the bonafide genomic instances of the anticodon being considered each time were enumerated. In each case, the number of fragments arising from each of the three regions of the mature tRNA, namely “+1”, “internal,” or “CCA-ending” was determined. The fragments originating from pseudo-tRNAs and from sequences of potential pseudo-tRNA origin were also enumerated and found to be considerably fewer than those from true tRNAs.

[0214] In the LCL collection, 63 anticodons (from a possible total of 75 nuclear and mitochondrial ones) that generated fragments with abundance levels that meet the mapping and filtering criteria were found. The mitochondrial tRNA GluTTC generated the highest number of distinct tRNA fragments followed by the nuclear LysCTT. Notably, the diversity of fragments that arose from each of the three regions of the mature tRNA strongly depended on the anticodon at hand. For some anticodons, the “+1” region gave rise to the most diverse set of tRNA fragments (e.g. nuclear GluTTC), whereas for other anticodons most of the diversity was encountered in the internal (e.g. mitochondrial HisGTG) or the CCA-ending regions (e.g. mitochondrial ValTAC).

[0215] Analogously, in the BRCA collection, 52 of the 75 possible nuclear and mitochondrial anticodons generated fragments satisfying the filtering criteria. As with the LCL datasets, the diversity of fragments that arose from each of the three regions of the mature tRNA strongly depended on the considered anticodon. Similarly to the LCL collection, the mitochondrial GluTTC produced the highest number of distinct fragments as well, whereas the mitochondrial ValTAC gave rise mainly to CCA-ending fragments.

[0216] The analysis of these two different types of datasets also revealed examples of anticodons where the fragment profile changed with the tissue type (see also below). For example, in the LCL datasets, the nuclear AlaACG generated predominantly CCA-ending fragments. On the other hand, in the BRCA datasets the anticodon's 5′-tRFs were favored as well and were produced at a ratio of 1:1 compared to the 3′-tRFs.

[0217] Additionally, the abundance of the tRNA fragments exhibited anticodon-dependencies as well. In fact, from this standpoint the differences between the LCL and the BRCA collections were more pronounced. In the LCL dataset, the relative abundances of different fragment lengths were due to fragments from different anticodons. For example, the mitochondrial SerGTC anticodon was responsible for 68.7% and 80.4% of the contribution to fragments with the previously unreported lengths of 20 and 26 nt. On the other hand, for fragments of length 36 nt, it was the nuclear GluCTC, nuclear GluTTC, and the mitochondrial GluTTC anticodons that accounted for 37.9% of all 36-mers, with the rest being contributed by an assortment of anticodons. Interestingly, in the BRCA datasets, the mitochondrial ValTAC anticodon generated approximately 30.0% of the fragments with lengths of 20-23 nt.

The Fragments Arising from Different Regions of the Same Anticodon have Uncorrelated Abundances

[0218] Considering the richness of fragments that can arise from a given anticodon, it was investigated whether the abundances of the fragments were correlated. FIG. 7A shows a Pearson correlation heatmap for the fragments that arose from the nuclear AspGTC in the LCL datasets. FIG. 7B shows the analogous heatmap for the mitochondrial GluTTC in the BRCA datasets. This anticodon produced the largest number of fragments in the BRCA datasets and most of them were internal, i.e. i-tRFs. The abundances of reads originating from the three tRNA regions (i.e., “+1,” “internal,” “CCA-ending”) have a poor correlation.

[0219] A poor correlation also characterizes the fragments that arise from the same anticodon, yet are of different lengths. Several small clusters of poorly correlated regions are apparent in the heatmaps.

[0220] For the nuclear AspGTC (LCL datasets—FIG. 7A), cluster 1a comprises internal and CCA-ending 36-mers, whereas cluster 1b captures mainly internal 32-mers and 33-mers. Cluster 2 comprises CCA-ending fragments that are 37 nt or longer. Cluster 3b contains CCA-ending fragments between 24 and 27 nt, whereas cluster 3c comprises internal fragments between 17 and 23 nt.

[0221] Analogous observations can be made for the fragments for the mitochondrial GluTTC fragments (BRCA datasets—FIG. 7B). Short internal fragments, generally of length 21 nt or shorter, form cluster 3, while internal fragments of intermediate length (21-27 nt) comprise cluster 1. On the other hand, cluster 2 contains long internal fragments and all of the CCA-ending fragments from this anticodon. A mini sub-cluster of cluster 2 comprises shorter CCA-ending fragments (22-25 nt).

[0222] Examination of the Pearson correlation maps for the other anticodons shows that they are qualitatively similar to the ones shown in the two panels of FIG. 7. Two general observations are apparent. First, evidence was found in all anticodons for well-defined mini-clusters, each containing only a few of the anticodon's fragments. The members of each such mini-cluster had correlated abundances.

[0223] Second, when a given anticodon's mini-clusters was compared with another, a characteristic absence of correlation was observed, even in cases where fragments from two mini-clusters overlapped on the mature tRNA sequence from which they originated (see, for example, the mini-clusters 1a and 2 in FIG. 7A, or clusters 1 and 3 in FIG. 7B). These observations, in conjunction with the small standard error across the 452 (LCL) and 311 (BRCA) individuals shown in FIG. 1, lend more weight to the view that the fragments from all three regions of the mature tRNA are constitutive in nature and not random degradation products.

The tRNA Fragments have Lengths that are Specific to Tissue and Tissue-State

[0224] Inspection of the distributions shown in FIGS. 3 and 4 indicates that the specifics of 5′-tRFs, i-tRFs, and 3′-tRFs depend strongly on the tissue. Looking at the BRCA datasets (and without distinguishing between the normal and tumor datasets), it was evident that the dominant fragments have lengths between 19 and 24 nt and account for 60.2% of all tRNA fragments in this collection. By contrast, the LCL datasets have dominant fragments with lengths of 18, 33, and 36 nt and account for nearly 50% of all tRFs.

[0225] To increase the resolution, the BRCA fragment distributions of FIG. 4A-4D were further decomposed into their two constituent parts, namely the subset of normal datasets and that of the tumor datasets (FIG. 4).

[0226] The tissue-type differences that existed between the normal BRCA and the normal LCL datasets were now more evident. In the internal region, 36-mers i-tRFs were the lion's share in the LCL set (FIG. 3A), whereas in the BRCA set, 20-mer i-tRFs provided a modest contribution to the total pool of fragments in the normal breast datasets (FIG. 8A).

[0227] In the +1 region, 5′-tRFs with length 19 nt (FIG. 8B) were the dominant population in normal breast (compare this with the 33-mers and 36-mers in the +1 region in LCLs, shown in FIG. 3B).

[0228] Lastly, the CCA-ending region was dominated by 17-mer, 18-mer and 33-mer 3′-tRFs in LCL (FIG. 3C), yet a fairly uniform distribution was found in i-tRFs with lengths between 17-24 nt in normal breast (FIG. 8C).

[0229] Having decomposed the BRCA distribution into its normal (17 datasets) and tumor (294) components, the similarities and differences that might depend on tissue state were identified. The most striking differences were among the i′-tRFs and the 5′-tRFs, suggesting an intriguing and currently unexplored interconnection between the two categories of fragments.

[0230] As can be seen from FIG. 8, the proportion of internal fragments with 20 nt length was nearly halved in the tumor datasets compared to normal (p-val<10⁻³). The proportion of 5′-tRFs with 19 nt length and with lengths≧30 nt were more than doubled in the tumor datasets (p-val<10⁻³ for both comparisons). It appears as if the normal datasets preferentially produced i-tRFs while also reducing the expression of the 5′-tRFs, with a reversal of this situation occurring in the tumor. Notably, the relative abundance for the rest of the i-tRFs and 5′-tRFs remained largely unchanged between normal and tumor.

The tRNA Fragments have Relative Abundances that are Tissue-Specific and Tissue-State-Specific

[0231] In the context of messenger RNA (mRNA) expression studies, the abundance profiles of mRNAs that are common to two tissues can be used to tell the tissues apart (tissue-specific mRNA “signatures”). Similarly, for a given tissue, mRNA abundance profiles can distinguish between normal and disease states (tissue-state-specific mRNA “signatures”). It was determined whether tRFs possess similar properties.

[0232] To investigate the possibility of a tissue-specific profile, 200 tRFs common to the datasets were focused on: a) the subset of 253 female datasets from the LCL dataset (all of whom are healthy), and b) the 17 normal (female) datasets from the BRCA dataset.

[0233] In FIG. 9A, a principal component analysis (unsupervised) of the abundances of the 200 fragments is shown to distinguish between the two tissues. It is important to note how characteristically tight each of the two point clusters is. This indicates that the abundance profiles of these 200 tRNA fragments were very similar across all datasets belonging to the same cluster. The within-group similarity of the tRF abundance profiles further supports the view that these fragments were constitutive in nature and not degradation products.

[0234] As the LCL and BRCA datasets come from two distinct studies, the possibility that the differences were due to biases caused by either the sequencing methods and/or by the whole experimental handling of the datasets needed to be excluded. Due to the lack of standard datasets that were common to both studies, the data was truncated by rank-normalizing the two datasets. By ranking the expression in each dataset, much of the quantitative information was lost and only the relative ordering based on abundance was retained.

[0235] By performing PCA on this truncated dataset, the two datasets were easily distinguished, which indicates that the differences in the abundance profiles were of a biological basis, not due to experimental biases. SAM, a non-parametric significance analysis method, was used to identify quantitative differences between the two datasets. Most of the fragments were differentially abundant between the two tissues. More than 30% of the significantly differentiated fragments were i-tRFs, which further argues for the importance of this novel category of tRFs.

[0236] To investigate the possibility of a tissue-state-specific profile, a single group was formed by combining all tumor datasets, independent of hormone status. Unlike the above example, this dataset has an artificially increased underlying heterogeneity, the result of having combined all breast cancer subtypes into a single group of datasets. A supervised clustering approach was used, namely PLS-DA. FIG. 9B shows that PLS-DA can easily distinguish between the two sets based on the abundance levels of these tRFs. It is also worth noting that the tumor dataset heterogeneity is reflected by the lack of tightness in the formed tumor cluster of FIG. 9B.

The tRNA Fragments Exhibit Race-Dependent Differences at the Tissue, Cellular, and Molecular Levels

[0237] In recent work, transcripts whose abundance differed across human races, between males and females, or between population groups was reported. Considering that both the LCL and the BRCA samples included individuals belonging to different races, it was determined whether the abundance profiles of the tRNA fragments exhibited any differences along this dimension.

[0238] The transcriptional profiles in the LCL samples of the 93 samples originating from the CEU (white) group vs those of the 95 from the YRI (black) group were compared. FIG. 10A shows the results of the (unsupervised) Principal Component Analysis (PCA) for the CEU/YRI subset of the LCL dataset. The 1^{st} and 3^{rd} principal component provided a good separation of the two groups with modest cross-talk, indicating that the tRNA fragments exhibited race-dependent transcriptional differences at the cellular level (EBV-immortalized B-cells).

[0239] The subset of 78 triple negative breast cancer samples from the BRCA dataset were examined. This subset contained adequate numbers of black (16) and white (51) patients to permit statistical analyses. Because of the underlying heterogeneity of the analyzed cells, a supervised approach (Partial Least Squares-Discriminant Analysis, PLS-DA) was used. FIG. 10B shows the results: as with the LCL samples, there was an evident separation between the white and the black patients that was characterized by only modest cross-talk, indicating that the tRNA fragment profile differed between human races at the tissue level as well.

[0240] To investigate the possibility that differences existed among different populations, the graphs of FIGS. A-3D were decomposed into their constituent population components to determine if the curves of all five populations followed a similar pattern. However, a closer look allowed the identification of significant differences in the length distributions among races. FIG. 10C shows a detail for the CEU and YRI populations. As can be seen, there were nearly twice as many 18-mers among the fragments of the YRI population compared to the CEU population (p-val≦10⁻⁴). For fragments with a length of 33 nts, the situation was reversed with the CEU population making twice as many compared to the YRI (p-val≦10⁻⁴). In other words, even though the curves of the five populations were qualitatively similar, there were quantitative and statistically significant differences in the lengths and abundances of the fragments produced by members of the CEU and YRI groups at the molecular level as well.

[0241] In light of these observations, identification of which tRNA fragments had significantly different abundances between the two populations was determined. SAM, a nonparametric clustering method, was used. At a strict FDR of 0.00%, SAM identified 93 differentially expressed tRNA fragments: 48 had lower expression in the YRI samples compared to the CEU ones, whereas the remaining 45 had higher expression. Interestingly, the vast majority of the tRNA fragments with lower expression in the YRI group were of mitochondrial origin. Specifically, they were i-tRFs of the mitochondrial SerGCT tRNA that started around position +13 and ended around position +43. Mitochondrial tRNAs, ValTAC and PheGAA, also contributed significantly to the list of fragments that were differentially expressed between CEU and YRI.

[0242] Among the fragments that had higher expression in the YRI samples compared to the CEU ones and were identified by SAM, those originating from the LysCTT anticodon were dominant. Of the 45 tRNA fragments emerging from the template, 30 were statistically significant. An additional 5 statistically significant fragments in this category came from the LysTTT anticodon. The majority of the LysCTT fragments began before position +8 of the mature tRNA and ended just before the anticodon triplet (nucleotide 33 using trna13 of LysCTT on chromosome 14 as a reference). Only 2 of the 30 were classic 5′ tRNA halves (they start at position +1), whereas the rest were novel internal fragments. The 5′ terminus of these fragments was located between positions +1 and +7 inclusive and there was no consensus length: their length ranged between 21 and 33 nts.

The tRNA Fragments Exhibit Gender-Dependencies

[0243] The possibility that the tRNA fragments showed differences across gender boundaries was examined. Among the 452 LCL samples, men and women as well as the five populations (CEU, FIN, GBR, TSI, YRI) were evenly represented. There was a tendency for separation, but not a clear discrimination of the two genders. Specifically, the read length distributions of FIGS. 3A-3D were decomposed, but separately for men and women and for the five populations.

[0244] FIG. 11A shows the distributions for i-tRFs from men and women (YRI datasets only) for the internal 36-mers. These i-tRFs are less abundant in YRI males compared to YRI females (p-val=0.036). FIG. 11B shows analogously a portion of the distribution for CCA-ending fragments from men and women (TSI datasets only).

[0245] In the TSI population, these 22-mers were more abundant in women compared to men with the difference statistically significant (p-val=0.018). Using PLS-DA on the TSI men and women, a trend is seen for separation of the two genders (FIG. 11C). Among the fragments that are significant for the construction of the PLS-DA-driven separation (VIP scores>1.5), more than half (49 out of 94) are i-tRFs.

The tRNA Fragments Exhibit Abundances that Depend on Disease Subtype

[0246] The different tumor subtypes captured by the BRCA datasets were analyzed to investigate whether the profiles of tRFs differed between tumor subcategories. For this analysis, three subsets were used: the normal breast datasets, the ER−/PR−/HER2− (triple negative) datasets, and the ER+/PR+/HER2+(triple positive) datasets. Since the tRF profiles have been shown to be ethnicity-dependent, a single race was chosen, in particular white women who were represented in the BRCA collection at adequately high numbers (15 normal, 24 triple positive and 51 triple negative datasets).

[0247] Pair-wise PLS-DA analyses were performed. In all three cases, the two categories being compared were distinguished clearly from one another (FIG. 12A-12C). Importantly, the ability to discriminate the two tumor subtypes based on tRNA fragment abundance suggests a potentially significant role for these fragments in the respective biology of breast cancer subtypes.

[0248] All of the statistically significant tRFs had lower abundance in the tumor datasets compared to the normal datasets (FIG. 12D). The findings were cross-validated through an independent SAM analysis. In concordance with the PLS-DA model, SAM also identified the same 17 fragments as having lower abundance in each tumor subtype compared to the normal datasets. Triple negative tumors were characterized by an additional 19 fragments with lower abundances in the tumor compared to the normal datasets (for a total of 36 fragments in the triple negative subtype).

[0249] It is important to note that the majority of differentially abundant tRFs in the two normal vs. tumor comparisons were from the internal region, i.e. i-tRFs (FIG. 12D). In the intra-tumor comparison, the differentially abundant tRFs were all 5′-tRFs and most of them were 19-mers from different genomic loci of the nuclear ArgTCG anticodon. These findings are in concordance with FIGS. 4A and 4B, validated by two independent statistical methods (PLS-DA and SAM), which in turn suggests the existence of concrete differences in the abundance of the tRNA fragment population in the two disease subtypes.

### TRFs are Loaded on Argonaute in a Cell-Line-Specific Manner

[0250] Previous work demonstrated that tRFs could be loaded on Argonaute (Ago), which indicates that one tRF function is through the RNAi pathway. No previous reports have examined differential Ago-loading of tRFs as a function of tissue, disease-state, ethnicity, or disease subtype.

[0251] To this end, publicly available Ago HITS-CLIP datasets were analyzed for three different breast cancer cell lines, each of which models specific breast cancer categories: MDA-MB-231 (ER−/PR−/HER2−), MCF7 (ER+), and BT-474 (HER2+). For consistency, and since the TCGA-BRCA dataset contained only reads≦30 nt, the HITS-CLIP datasets were analyzed using only sequenced reads that were ≦30 nt long.

[0252] 70 of the abundant fragments originated in the internal (i-tRFs) and 68 in the CCA-ending (3′-tRFs) regions. By comparison, only 25 abundant 5′-tRFs were loaded on Argonaute.

[0253] The length distributions of all Ago-loaded tRFs with length≦30 nt were analyzed in the three cell lines. Interestingly, each cell line was found to have its own distinct profile of Ago-loaded fragments (FIG. 13). In particular, BT-474 cells exhibited a peak for 26-mers that mainly included i-tRFs. On the other hand, MDA-MB-231 had a prevalence for Ago-loaded 16-mers, 17-mers, and 21-mers 3′-tRFs and 23-mers from the internal origin (i-tRFs). MCF-7 cells exhibited a prevalence for Ago-loaded 17-mers and 29-mers. These findings support a model where the tRNA fragments are preferentially Ago-loaded in a manner that is cell-line-specific, presumably reflecting disease-subtype specificity. Also, the results further corroborate the functional roles for the shorter tRFs through their participation in the RNAi pathway as miRNA-like entities.

Fragment-Specific PCR-Based Validation of Internal tRNA Fragments in Clinical Samples and Cell Lines

[0254] The tRFs that arise from the internal region of mature tRNAs represent a novel category of tRFs. Independent experimental validation was sought for these novel molecules. For this purpose, one i-tRF was selected that begins within the loop region of the D-loop of AspGTC and ends at the anticodon (FIG. 14A) and one that starts just before the anticodon loop and ends at the T-loop of GlyTCC (FIG. 14B). Both fragments were identified repeatedly in the analyses of the BRCA datasets. The quantification task challenging is due to the requirement that the fragment must be amplified while ensuring that the amplified molecule has the same endpoints captured by the RNA-seq datasets. To this end, the “dumbbell-PCR” was used to detect RNA molecules with a specified length and specified endpoints.

[0255] The FIREPLEX® (Firefly BioWorks, Boston, Mass.) approach, a method with single nucleotide specificity, for quantification of the second tRF, was also used. Total RNA extracted from 11 breast tumor and 11 adjacent normal breast samples was used for starting material. Quantification of the AspGTC tRNA fragment and total RNA from eight different normal or breast cancer cell lines, as well as quantification of the GlyTCC-derived fragment, was performed.

[0256] The tRF from the AspGTC anticodon was specifically amplified and its expression was quantified in 21 of the 22 experiments (FIG. 14A). In five of the 11 analyzed pairs, there was a statistically significant decrease in the tumor sample (p-val<0.01; Student's t-test). In two other samples, the fragment's expression was statistically significantly increased in the tumor (p-val<0.01; Student's t-test).

[0257] These results validate the existence of the novel i-tRFs in independent samples and provide initial evidence that such fragments have differential abundancies in healthy and breast tumor tissue. The results further agree with the analysis of the BRCA datasets. The second i-tRF, from the GlyTCC tRNA, spanning the anticodon triplet was quantified in eight different normal and breast cancer cell lines using the multiplex miRNA assay, which is based on the FIREPLEX® approach (FIG. 14B). In all of the cases, the i-tRF was detected and present at significantly increased levels over the background threshold.

A Single Locus can Give Rise to Many tRNA Fragments in a Single Tissue

[0258] In the analysis of the breast samples from the TCGA repository, many short RNAs were identified that were statistically significant, and present in the samples of multiple individuals. Even though the specifics may have differed slightly from one isodecoder to the next (e.g. nuclear trna78-AspGTC vs. nuclear trna144-AspGTC), the basic behavior for instances of the same tRNA anticodon remained the same. For example, nuclear AspGTC gave rise to diverse fragments (FIG. 15).

Targeting by tRFs

[0259] Loading of tRNA fragments on Argonaute indicates that they act as miRNA-like guide-RNAs for Ago and possibly participate in the RNA interference pathway. The targets of these miRNA-like tRNA fragments are referred to as “interlocked” targets. In addition, others have published work where it was shown that a transcript A can “target” and modulate the abundance of another transcript B simply by acting as a molecular decoy for a miRNA or an RNA binding protein (RBP) that would otherwise interact with B. In this case, B is a “decoyed” target of A (and vice versa). Clearly, both modes of targeting are of interest in the tRNA fragment setting. To this end, two algorithms were devised: one for predicting interlocked targets and one for predicting decoyed targets.

### Algorithm for Predicting Interlocked Targets

[0260] The methodology used to design rna22, a very popular miRNA target prediction algorithm, was used. Briefly: a) a list was made of the sequences of all tRFs that were statistically significant across all analyzed datasets for the cancer being studied; b) the sequences were analyzed with Teiresias, a publicly available pattern discovery algorithm, to identify salient sequence features that were shared by two or more tRFs—the similarity in the isodecoder sequences guaranteed that such patterns do exist; c) the patterns were reverse-complemented and populated with a hash-table; d) the hash-table was used to process the transcripts of all mRNAs and ncRNAs whose abundance was above the threshold in the long RNA-seq datasets of the cancer's samples. A target site contained in an mRNA or ncRNA led to a pattern accumulation at that site and the formation of a “bump;” e) using a threshold obtained through a Monte Carlo simulation with random strings, the bumps with low heights were filtered out (support by only a few patterns); f) for each putative target site, the RNAfold or a similar algorithm was used to generate patterns of each tRFs to form the final candidate tRF:target heteroduplexes. Table 1 shows an example target.

TABLE 1
Examples of predicted tRF mRNA interactions from
the TCGA BRCA analyses.

| | |
|---|---|
| A) | RAB34:AspGTC tRF [positions 31-53] |
| | 5′→ATTCT--TCTTCCGTGTGGCAGC→3′ |
| | \|::\|: \|\|\|:\|\|\|:\|\|\|:\|\|\|\| |
| | 3′←TGGGGCCAGAGGGCGCACTGTCC←5′ |
| B) | SIKE1:GLnTTG tRF [positions 1-30] |
| | 5′→GGCCCCATTGTGTAATAGTTAGCACTCTAA→3′ |
| | \|\| \|\|\|\|\| \|\|\|\|\|\|\| \|\|\|\|\|\|\|\|\|\|\| |
| | 5′→GGTCCCATGGTGTAATGGTTAGCACTCTGG→3′ |

A) an interlocked target prediction (RAB34).
B) a decoyed target prediction (SIKE1).

### Algorithm for Predicting Decoyed Targets.

[0261] For this, the steps of the interlocked-target algorithm were followed with the following key modifications: i) in step c) the patterns were not reverse-complemented prior to populating the hash-table; ii) in step f) any of a number of standard algorithms were used, such as BLAST, FASTA etc., to search the patterns generated by each of the tRFs to see which matched the target site the best (=best local alignment). Unlike the previous algorithm, in this algorithm a “bump” indicated that the mRNA or ncRNA sequence fragment under it resembled a similarly-sized segment among the tRFs at hand. Table 1 shows one such example target.

[0262] The Materials and Methods used in the performance of the experiments disclosed herein, which have not been covered already, are now described.

[0263] Notation

[0264] To facilitate the discussion, the notation that is used by tRNAscan-SE was augmented. In particular, the existing labels were tagged with fragment-specific information, namely the relative positions inside a reference tRNA and the number of appearances in other tRNAs of the same or different anticodons. For example, the augmented label

[0265] trna116_GluCTC_1_-_14539923_1453999304@23.45.23_1_0_8 refers to the tRNA fragment that has length of 23 and spans positions 23 through 45 inclusive of the mature trna116 of GluCTC. The latter being located on the reverse (negative) strand of chromosome 1 between positions 145399233 and 145399304 inclusive. In the cases where more than one genomic tRNA loci produces the fragment, only one tRNA locus was chosen to serve as a source-proxy.

[0266] The last three numbers of the augmented label that follow the double underscore captured the following information: a) the number of different anticodons that may give rise to this fragment (1 in the above example), the number of pseudo tRNAs that also contain this fragment sequence (0 in the example), and the total number of genomic loci within the tRNA space (see below) that are possible sources of the fragment (8 in this case). Lastly, for fragments whose 3′ end is within the span of the terminal CCA, the infix “CCA” was added before the double underscore, e.g., trna75_MetCAT_6_+_28912352_28912424@57.76.20.CCA_1_0_2.

[0267] Defining the tRNA Space

[0268] Directly linked to mapping is the definition of what constitutes the genome's tRNA space. For the purposes described herein, the following were combined:

[0269] a) the 22 known human mitochondrial tRNA sequences (NCBI entry NC_012920.1);

[0270] b) 610 (508 true tRNAs and 102 pseudo-tRNAs) of the 625 nuclear tRNA sequences from gtRNAdb. The selenocysteine tRNAs were excluded from the considered gtRNAdb entries, tRNAs with undetermined anticodon identity, and tRNAs mapping to contigs that were not part of the human chromosome assembly;

[0271] c) the eight genomic intervals chr1:+:566062-566129, chr1:+:568843-568912, chr1:−:564879-564950, chr1:−:566137-566205, chr14:+:32954252-32954320, chr1:−: 566207-566279, chr1:−:567997-568065, and, chr5:−:93905172-93905240—all coordinates were from the hg19 assembly of the human genome—that corresponded to identical instances of seven mitochondrial tRNAs TrpTCA, LysTTT, GlnTTG, AlaTGC (×2), AsnGTT, SerTGA, and, GluTTC respectively.

[0272] In total, the tRNA space included 640 sequences.

[0273] Mapping on the Genome

[0274] The repeating nature of tRNA sequences required that special steps be taken when mapping the RNA-seq data on the genome.

[0275] i) Multiple hits: To account for any given tRNA anticodon having multiple genomic locations and properly mapping the sequenced reads arising from such loci, any given sequenced read was permitted to potentially map up to 10,000 distinct genomic locations.

[0276] ii) Exact matches: To accommodate the possibility of occasional errors manifested in the form of nucleotide replacements, nucleotide insertions or deletions (indels), or various combinations thereof, a small number of indels and mismatches was permitted during the mapping step of the deep sequencing. More flexibility and improved mapping rates translated into localization errors, when working with tRNAs. Therefore, a conservative mapping strategy and exact mapping of reads on the genome was employed to map without any insertions or deletions.

[0277] iii) Mapping the full genome: As disclosed herein, compiling a database of all known tRNA sequences and then mapping the sequenced reads would miss the fact that some segments of the known tRNAs also appear inside non-tRNA sequences, and lead to incorrect conclusions. Mapping the sequenced reads on the full genome then post-processing each mapped read and discarding those that map both inside and outside the known tRNAs.

[0278] iv) Presence of terminal CCA: Any sequenced reads that corresponded to the 3′ of mature tRNAs included the post-transcriptionally added terminal triplet CCA. Exact mapping of the reads did not accommodate CCA's presence. Instead, prior to mapping, a modified instance of the genome was created where CCA was used to replace the three genomic nucleotides immediately downstream of each of the 640 reference mature tRNAs.

### Other Embodiments

[0279] The recitation of a listing of elements in any definition of a variable herein includes definitions of that variable as any single element or combination (or subcombination) of listed elements. The recitation of an embodiment herein includes that embodiment as any single embodiment or in combination with any other embodiments or portions thereof.

[0280] The disclosures of each and every patent, patent application, and publication cited herein are hereby incorporated herein by reference in their entirety. While this invention has been disclosed with reference to specific embodiments, it is apparent that other embodiments and variations of this invention may be devised by others skilled in the art without departing from the true spirit and scope of the invention. The appended claims are intended to be construed to include all such embodiments and equivalent variations.

The application's sequence listing, which the Patent Office published only in electronic form, follows.

SEQUENCE LISTING (55736 sequences)

SEQ ID NO: 1 - DNA, 43 bp, Artificial Sequence
  Probe
aaaacatcagattgtgaatctgacaacagaggcttacgacccc

SEQ ID NO: 2 - DNA, 45 bp, Artificial Sequence
  Probe
aaaacatcagattgtgaatctgacaacagaggcttacgacccctt

SEQ ID NO: 3 - DNA, 46 bp, Artificial Sequence
  Probe
aaaacatcagattgtgaatctgacaacagaggcttacgacccctta

SEQ ID NO: 4 - DNA, 50 bp, Artificial Sequence
  Probe
aaaacatcagattgtgaatctgacaacagaggcttacgaccccttattta

SEQ ID NO: 5 - DNA, 28 bp, Artificial Sequence
  Probe
aaaacttaaaactttacagtcagaggtt

SEQ ID NO: 6 - DNA, 39 bp, Artificial Sequence
  Probe
aaaacttaaaactttacagtcagaggttcaattcctctt

SEQ ID NO: 7 - DNA, 40 bp, Artificial Sequence
  Probe
aaaacttaaaactttacagtcagaggttcaattcctcttc

SEQ ID NO: 8 - DNA, 21 bp, Artificial Sequence
  Probe
aaaactttacagtcagaggtt

SEQ ID NO: 9 - DNA, 33 bp, Artificial Sequence
  Probe
aaaactttacagtcagaggttcaattcctcttc

SEQ ID NO: 10 - DNA, 22 bp, Artificial Sequence
  Probe
aaaatgtttagacgggctcaca

SEQ ID NO: 11 - DNA, 23 bp, Artificial Sequence
  Probe
aaaatgtttagacgggctcacat

SEQ ID NO: 12 - DNA, 44 bp, Artificial Sequence
  Probe
aaacatcagattgtgaatctgacaacagaggcttacgacccctt

SEQ ID NO: 13 - DNA, 45 bp, Artificial Sequence
  Probe
aaacatcagattgtgaatctgacaacagaggcttacgacccctta

SEQ ID NO: 14 - DNA, 50 bp, Artificial Sequence
  Probe
aaacatcagattgtgaatctgacaacagaggcttacgaccccttatttac

SEQ ID NO: 15 - DNA, 32 bp, Artificial Sequence
  Probe
aaaccggagatgaaaacctttttccaaggaca

SEQ ID NO: 16 - DNA, 39 bp, Artificial Sequence
  Probe
aaacttaaaactttacagtcagaggttcaattcctcttc

SEQ ID NO: 17 - DNA, 32 bp, Artificial Sequence
  Probe
aaactttacagtcagaggttcaattcctcttc

SEQ ID NO: 18 - DNA, 20 bp, Artificial Sequence
  Probe
aaagacaggggttaggcctc

SEQ ID NO: 19 - DNA, 29 bp, Artificial Sequence
  Probe
aaagacaggggttaggcctctttttacca

SEQ ID NO: 20 - DNA, 34 bp, Artificial Sequence
  Probe
aaagcaatacactgaaaatgtttagacgggctca

SEQ ID NO: 21 - DNA, 36 bp, Artificial Sequence
  Probe
aaagcaatacactgaaaatgtttagacgggctcaca

SEQ ID NO: 22 - DNA, 44 bp, Artificial Sequence
  Probe
aaagcaatacactgaaaatgtttagacgggctcacatcacccca

SEQ ID NO: 23 - DNA, 45 bp, Artificial Sequence
  Probe
aaagcaatacactgaaaatgtttagacgggctcacatcaccccat

SEQ ID NO: 24 - DNA, 49 bp, Artificial Sequence
  Probe
aaagcaatacactgaaaatgtttagacgggctcacatcaccccataaac

SEQ ID NO: 25 - DNA, 50 bp, Artificial Sequence
  Probe
aaagcaatacactgaaaatgtttagacgggctcacatcaccccataaaca

SEQ ID NO: 26 - DNA, 19 bp, Artificial Sequence
  Probe
aaagctcacaagaactgct

SEQ ID NO: 27 - DNA, 23 bp, Artificial Sequence
  Probe
aaagctcacaagaactgctaact

SEQ ID NO: 28 - DNA, 24 bp, Artificial Sequence
  Probe
aaagctcacaagaactgctaactc

SEQ ID NO: 29 - DNA, 25 bp, Artificial Sequence
  Probe
aaagctcacaagaactgctaactca

SEQ ID NO: 30 - DNA, 28 bp, Artificial Sequence
  Probe
aaagctcacaagaactgctaactcatgc

SEQ ID NO: 31 - DNA, 29 bp, Artificial Sequence
  Probe
aaagctcacaagaactgctaactcatgcc

SEQ ID NO: 32 - DNA, 50 bp, Artificial Sequence
  Probe
aaagctcacaagaactgctaactcatgcccccatgtctaacaacatggct

SEQ ID NO: 33 - DNA, 34 bp, Artificial Sequence
  Probe
aaatctaaagacaggggttaggcctctttttacc

SEQ ID NO: 34 - DNA, 35 bp, Artificial Sequence
  Probe
aaatctaaagacaggggttaggcctctttttacca

SEQ ID NO: 35 - DNA, 21 bp, Artificial Sequence
  Probe
aaatgtttagacgggctcaca

SEQ ID NO: 36 - DNA, 50 bp, Artificial Sequence
  Probe
aaattagaatcttagctttgggtgctaatggtggagttaaagactttttc

SEQ ID NO: 37 - DNA, 41 bp, Artificial Sequence
  Probe
aacacaaagcacccaacttacacttaggagatttcaactta

SEQ ID NO: 38 - DNA, 43 bp, Artificial Sequence
  Probe
aacacaaagcacccaacttacacttaggagatttcaacttaac

SEQ ID NO: 39 - DNA, 50 bp, Artificial Sequence
  Probe
aacacaaagcacccaacttacacttaggagatttcaacttaacttgaccg

SEQ ID NO: 40 - DNA, 43 bp, Artificial Sequence
  Probe
aacatcagattgtgaatctgacaacagaggcttacgacccctt

SEQ ID NO: 41 - DNA, 44 bp, Artificial Sequence
  Probe
aacatcagattgtgaatctgacaacagaggcttacgacccctta

SEQ ID NO: 42 - DNA, 50 bp, Artificial Sequence
  Probe
aacatcagattgtgaatctgacaacagaggcttacgaccccttatttacc

SEQ ID NO: 43 - DNA, 40 bp, Artificial Sequence
  Probe
aaccaaaacatcagattgtgaatctgacaacagaggctta

SEQ ID NO: 44 - DNA, 43 bp, Artificial Sequence
  Probe
aaccaaaacatcagattgtgaatctgacaacagaggcttacga

SEQ ID NO: 45 - DNA, 46 bp, Artificial Sequence
  Probe
aaccaaaacatcagattgtgaatctgacaacagaggcttacgaccc

SEQ ID NO: 46 - DNA, 49 bp, Artificial Sequence
  Probe
aaccaaaacatcagattgtgaatctgacaacagaggcttacgacccctt

SEQ ID NO: 47 - DNA, 50 bp, Artificial Sequence
  Probe
aaccaaaacatcagattgtgaatctgacaacagaggcttacgacccctta

SEQ ID NO: 48 - DNA, 21 bp, Artificial Sequence
  Probe
aaccgaagatcacgggttcga

SEQ ID NO: 49 - DNA, 21 bp, Artificial Sequence
  Probe
aaccgaagatcgcgggttcga

SEQ ID NO: 50 - DNA, 17 bp, Artificial Sequence
  Probe
aaccggagatgaaaacc

SEQ ID NO: 51 - DNA, 29 bp, Artificial Sequence
  Probe
aaccggagatgaaaacctttttccaagga

SEQ ID NO: 52 - DNA, 30 bp, Artificial Sequence
  Probe
aaccggagatgaaaacctttttccaaggac

SEQ ID NO: 53 - DNA, 31 bp, Artificial Sequence
  Probe
aaccggagatgaaaacctttttccaaggaca

SEQ ID NO: 54 - DNA, 17 bp, Artificial Sequence
  Probe
aaccgggcggaaacacc

SEQ ID NO: 55 - DNA, 35 bp, Artificial Sequence
  Probe
aactaagtgtttgtgggtttaagtcccattggtct

SEQ ID NO: 56 - DNA, 36 bp, Artificial Sequence
  Probe
aactaagtgtttgtgggtttaagtcccattggtcta

SEQ ID NO: 57 - DNA, 26 bp, Artificial Sequence
  Probe
aacttaaaactttacagtcagaggtt

SEQ ID NO: 58 - DNA, 27 bp, Artificial Sequence
  Probe
aacttaaaactttacagtcagaggttc

SEQ ID NO: 59 - DNA, 28 bp, Artificial Sequence
  Probe
aacttaaaactttacagtcagaggttca

SEQ ID NO: 60 - DNA, 37 bp, Artificial Sequence
  Probe
aacttaaaactttacagtcagaggttcaattcctctt

SEQ ID NO: 61 - DNA, 38 bp, Artificial Sequence
  Probe
aacttaaaactttacagtcagaggttcaattcctcttc

SEQ ID NO: 62 - DNA, 39 bp, Artificial Sequence
  Probe
aacttaaaactttacagtcagaggttcaattcctcttct

SEQ ID NO: 63 - DNA, 19 bp, Artificial Sequence
  Probe
aactttacagtcagaggtt

SEQ ID NO: 64 - DNA, 30 bp, Artificial Sequence
  Probe
aactttacagtcagaggttcaattcctctt

SEQ ID NO: 65 - DNA, 31 bp, Artificial Sequence
  Probe
aactttacagtcagaggttcaattcctcttc

SEQ ID NO: 66 - DNA, 41 bp, Artificial Sequence
  Probe
aagaactgctaactcatgcccccatgtctaacaacatggct

SEQ ID NO: 67 - DNA, 43 bp, Artificial Sequence
  Probe
aagaactgctaactcatgcccccatgtctaacaacatggcttt

SEQ ID NO: 68 - DNA, 44 bp, Artificial Sequence
  Probe
aagaactgctaactcatgcccccatgtctaacaacatggctttc

SEQ ID NO: 69 - DNA, 45 bp, Artificial Sequence
  Probe
aagaactgctaactcatgcccccatgtctaacaacatggctttct

SEQ ID NO: 70 - DNA, 46 bp, Artificial Sequence
  Probe
aagaactgctaactcatgcccccatgtctaacaacatggctttctc

SEQ ID NO: 71 - DNA, 22 bp, Artificial Sequence
  Probe
aagacaggggttaggcctcttt

SEQ ID NO: 72 - DNA, 29 bp, Artificial Sequence
  Probe
aagattctaggttcgactcctggctggct

SEQ ID NO: 73 - DNA, 24 bp, Artificial Sequence
  Probe
aagattgagggttcgagtcccttc

SEQ ID NO: 74 - DNA, 25 bp, Artificial Sequence
  Probe
aagattgagggttcgagtcccttcg

SEQ ID NO: 75 - DNA, 29 bp, Artificial Sequence
  Probe
aagattgagggttcgagtcccttcgtggt

SEQ ID NO: 76 - DNA, 24 bp, Artificial Sequence
  Probe
aagattgcaggttcgagtcctgcc

SEQ ID NO: 77 - DNA, 35 bp, Artificial Sequence
  Probe
aagcaatacactgaaaatgtttagacgggctcaca

SEQ ID NO: 78 - DNA, 43 bp, Artificial Sequence
  Probe
aagcaatacactgaaaatgtttagacgggctcacatcacccca

SEQ ID NO: 79 - DNA, 21 bp, Artificial Sequence
  Probe
aagccagggattgtgggttcg

SEQ ID NO: 80 - DNA, 50 bp, Artificial Sequence
  Probe
aagctatcgggcccataccccgaaaatgttggttatacccttcccgtact

SEQ ID NO: 81 - DNA, 17 bp, Artificial Sequence
  Probe
aagctcacaagaactgc

SEQ ID NO: 82 - DNA, 21 bp, Artificial Sequence
  Probe
aagctcacaagaactgctaac

SEQ ID NO: 83 - DNA, 23 bp, Artificial Sequence
  Probe
aagctcacaagaactgctaactc

SEQ ID NO: 84 - DNA, 50 bp, Artificial Sequence
  Probe
aagctcacaagaactgctaactcatgcccccatgtctaacaacatggctt

SEQ ID NO: 85 - DNA, 18 bp, Artificial Sequence
  Probe
aaggtattagaaaaacca

SEQ ID NO: 86 - DNA, 31 bp, Artificial Sequence
  Probe
aagtgtttgtgggtttaagtcccattggtct

SEQ ID NO: 87 - DNA, 19 bp, Artificial Sequence
  Probe
aatccagcgatccgagttc

SEQ ID NO: 88 - DNA, 20 bp, Artificial Sequence
  Probe
aatccagcgatccgagttca

SEQ ID NO: 89 - DNA, 21 bp, Artificial Sequence
  Probe
aatccagcgatccgagttcaa

SEQ ID NO: 90 - DNA, 22 bp, Artificial Sequence
  Probe
aatccagcgatccgagttcaaa

SEQ ID NO: 91 - DNA, 23 bp, Artificial Sequence
  Probe
aatccagcgatccgagttcaaat

SEQ ID NO: 92 - DNA, 24 bp, Artificial Sequence
  Probe
aatccagcgatccgagttcaaatc

SEQ ID NO: 93 - DNA, 36 bp, Artificial Sequence
  Probe
aatccagcgatccgagttcaaatctcggtggaacct

SEQ ID NO: 94 - DNA, 35 bp, Artificial Sequence
  Probe
aatccagcgatccgagttcaaatctcggtgggacc

SEQ ID NO: 95 - DNA, 36 bp, Artificial Sequence
  Probe
aatccagcgatccgagttcaaatctcggtgggacct

SEQ ID NO: 96 - DNA, 37 bp, Artificial Sequence
  Probe
aatccagcgatccgagttcaaatctcggtgggacctc

SEQ ID NO: 97 - DNA, 21 bp, Artificial Sequence
  Probe
aatccagcgatccgagttcga

SEQ ID NO: 98 - DNA, 23 bp, Artificial Sequence
  Probe
aatccagcgatccgagttcgagt

SEQ ID NO: 99 - DNA, 23 bp, Artificial Sequence
  Probe
aatccattggggtctccccgcgc

SEQ ID NO: 100 - DNA, 36 bp, Artificial Sequence
  Probe
aatcgcataaaacttaaaactttacagtcagaggtt

SEQ ID NO: 101 - DNA, 50 bp, Artificial Sequence
  Probe
aatcgcataaaacttaaaactttacagtcagaggttcaattcctcttctt

SEQ ID NO: 102 - DNA, 33 bp, Artificial Sequence
  Probe
aatctaaagacaggggttaggcctctttttacc

SEQ ID NO: 103 - DNA, 34 bp, Artificial Sequence
  Probe
aatctaaagacaggggttaggcctctttttacca

SEQ ID NO: 104 - DNA, 27 bp, Artificial Sequence
  Probe
aatctgacaacagaggcttacgacccc

SEQ ID NO: 105 - DNA, 29 bp, Artificial Sequence
  Probe
aatctgacaacagaggcttacgacccctt

SEQ ID NO: 106 - DNA, 30 bp, Artificial Sequence
  Probe
aatctgacaacagaggcttacgacccctta

SEQ ID NO: 107 - DNA, 31 bp, Artificial Sequence
  Probe
aatctgacaacagaggcttacgaccccttat

SEQ ID NO: 108 - DNA, 32 bp, Artificial Sequence
  Probe
aatctgacaacagaggcttacgaccccttatt

SEQ ID NO: 109 - DNA, 34 bp, Artificial Sequence
  Probe
aatctgacaacagaggcttacgaccccttattta

SEQ ID NO: 110 - DNA, 35 bp, Artificial Sequence
  Probe
aatctgacaacagaggcttacgaccccttatttac

SEQ ID NO: 111 - DNA, 36 bp, Artificial Sequence
  Probe
aatctgacaacagaggcttacgaccccttatttacc

SEQ ID NO: 112 - DNA, 20 bp, Artificial Sequence
  Probe
aatgtttagacgggctcaca

SEQ ID NO: 113 - DNA, 50 bp, Artificial Sequence
  Probe
aattagaatcttagctttgggtgctaatggtggagttaaagactttttct

SEQ ID NO: 114 - DNA, 37 bp, Artificial Sequence
  Probe
acaaagcacccaacttacacttaggagatttcaactt

SEQ ID NO: 115 - DNA, 38 bp, Artificial Sequence
  Probe
acaaagcacccaacttacacttaggagatttcaactta

SEQ ID NO: 116 - DNA, 40 bp, Artificial Sequence
  Probe
acaaagcacccaacttacacttaggagatttcaacttaac

SEQ ID NO: 117 - DNA, 50 bp, Artificial Sequence
  Probe
acaaagcacccaacttacacttaggagatttcaacttaacttgaccgctc

SEQ ID NO: 118 - DNA, 50 bp, Artificial Sequence
  Probe
acaacgatggtttttcatatcattggtcgtggttgtagtccgtgcgagaa

SEQ ID NO: 119 - DNA, 43 bp, Artificial Sequence
  Probe
acaagaactgctaactcatgcccccatgtctaacaacatggct

SEQ ID NO: 120 - DNA, 44 bp, Artificial Sequence
  Probe
acaagaactgctaactcatgcccccatgtctaacaacatggctt

SEQ ID NO: 121 - DNA, 45 bp, Artificial Sequence
  Probe
acaagaactgctaactcatgcccccatgtctaacaacatggcttt

SEQ ID NO: 122 - DNA, 46 bp, Artificial Sequence
  Probe
acaagaactgctaactcatgcccccatgtctaacaacatggctttc

SEQ ID NO: 123 - DNA, 49 bp, Artificial Sequence
  Probe
acacaaagcacccaacttacacttaggagatttcaacttaacttgaccg

SEQ ID NO: 124 - DNA, 50 bp, Artificial Sequence
  Probe
acacaaagcacccaacttacacttaggagatttcaacttaacttgaccgc

SEQ ID NO: 125 - DNA, 18 bp, Artificial Sequence
  Probe
acacgcgaaaggtccccg

SEQ ID NO: 126 - DNA, 19 bp, Artificial Sequence
  Probe
acacgcgaaaggtccccgg

SEQ ID NO: 127 - DNA, 20 bp, Artificial Sequence
  Probe
acacgcgaaaggtccccggt

SEQ ID NO: 128 - DNA, 18 bp, Artificial Sequence
  Probe
acagaccaagagccttca

SEQ ID NO: 129 - DNA, 50 bp, Artificial Sequence
  Probe
acagaccaagagccttcaaagccctcagtaagttgcaatacttaatttct

SEQ ID NO: 130 - DNA, 17 bp, Artificial Sequence
  Probe
acagctatccattggtc

SEQ ID NO: 131 - DNA, 25 bp, Artificial Sequence
  Probe
acagtcagaggttcaattcctcttc

SEQ ID NO: 132 - DNA, 42 bp, Artificial Sequence
  Probe
acatcagattgtgaatctgacaacagaggcttacgacccctt

SEQ ID NO: 133 - DNA, 43 bp, Artificial Sequence
  Probe
acatcagattgtgaatctgacaacagaggcttacgacccctta

SEQ ID NO: 134 - DNA, 26 bp, Artificial Sequence
  Probe
acatggtctagcggttaggattcctg

SEQ ID NO: 135 - DNA, 32 bp, Artificial Sequence
  Probe
acatggtctagcggttaggattcctggttttc

SEQ ID NO: 136 - DNA, 46 bp, Artificial Sequence
  Probe
accaaaacatcagattgtgaatctgacaacagaggcttacgacccc

SEQ ID NO: 137 - DNA, 49 bp, Artificial Sequence
  Probe
accaaaacatcagattgtgaatctgacaacagaggcttacgacccctta

SEQ ID NO: 138 - DNA, 50 bp, Artificial Sequence
  Probe
accaaaacatcagattgtgaatctgacaacagaggcttacgaccccttat

SEQ ID NO: 139 - DNA, 24 bp, Artificial Sequence
  Probe
accagaatggccgagtggttaagg

SEQ ID NO: 140 - DNA, 16 bp, Artificial Sequence
  Probe
accaggatggccgagt

SEQ ID NO: 141 - DNA, 17 bp, Artificial Sequence
  Probe
accaggatggccgagtg

SEQ ID NO: 142 - DNA, 18 bp, Artificial Sequence
  Probe
accaggatggccgagtgg

SEQ ID NO: 143 - DNA, 19 bp, Artificial Sequence
  Probe
accaggatggccgagtggt

SEQ ID NO: 144 - DNA, 20 bp, Artificial Sequence
  Probe
accaggatggccgagtggtt

SEQ ID NO: 145 - DNA, 23 bp, Artificial Sequence
  Probe
accaggatggccgagtggttaag

SEQ ID NO: 146 - DNA, 24 bp, Artificial Sequence
  Probe
accaggatggccgagtggttaagg

SEQ ID NO: 147 - DNA, 20 bp, Artificial Sequence
  Probe
acccagaggtcgatggatcg

SEQ ID NO: 148 - DNA, 21 bp, Artificial Sequence
  Probe
acccagaggtcgatggatcga

SEQ ID NO: 149 - DNA, 35 bp, Artificial Sequence
  Probe
acccaggcggcccgggttcgactcccggtgtggga

SEQ ID NO: 150 - DNA, 36 bp, Artificial Sequence
  Probe
acccaggcggcccgggttcgactcccggtgtgggaa

SEQ ID NO: 151 - DNA, 37 bp, Artificial Sequence
  Probe
acccaggcggcccgggttcgactcccggtgtgggaac

SEQ ID NO: 152 - DNA, 37 bp, Artificial Sequence
  Probe
acccaggtggcccgggttcgactcccggtatgggaac

SEQ ID NO: 153 - DNA, 32 bp, Artificial Sequence
  Probe
accccgaaaatgttggttatacccttcccgta

SEQ ID NO: 154 - DNA, 33 bp, Artificial Sequence
  Probe
accccgaaaatgttggttatacccttcccgtac

SEQ ID NO: 155 - DNA, 34 bp, Artificial Sequence
  Probe
accccgaaaatgttggttatacccttcccgtact

SEQ ID NO: 156 - DNA, 35 bp, Artificial Sequence
  Probe
accccgaaaatgttggttatacccttcccgtacta

SEQ ID NO: 157 - DNA, 34 bp, Artificial Sequence
  Probe
accgaaaggttggtggttcgagcccacccaggga

SEQ ID NO: 158 - DNA, 36 bp, Artificial Sequence
  Probe
accgaaaggttggtggttcgagcccacccagggacg

SEQ ID NO: 159 - DNA, 37 bp, Artificial Sequence
  Probe
accgaaaggttggtggttcgagcccacccagggacgc

SEQ ID NO: 160 - DNA, 16 bp, Artificial Sequence
  Probe
accggagatgaaaacc

SEQ ID NO: 161 - DNA, 17 bp, Artificial Sequence
  Probe
accggagatgaaaacct

SEQ ID NO: 162 - DNA, 18 bp, Artificial Sequence
  Probe
accggagatgaaaacctt

SEQ ID NO: 163 - DNA, 28 bp, Artificial Sequence
  Probe
accggagatgaaaacctttttccaagga

SEQ ID NO: 164 - DNA, 29 bp, Artificial Sequence
  Probe
accggagatgaaaacctttttccaaggac

SEQ ID NO: 165 - DNA, 30 bp, Artificial Sequence
  Probe
accggagatgaaaacctttttccaaggaca

SEQ ID NO: 166 - DNA, 37 bp, Artificial Sequence
  Probe
acgcagaaggtcctgggttcgagccccagtggaacca

SEQ ID NO: 167 - DNA, 38 bp, Artificial Sequence
  Probe
acgcagaaggtcctgggttcgagccccagtggaaccac

SEQ ID NO: 168 - DNA, 19 bp, Artificial Sequence
  Probe
acgccaaggtcgcgggttc

SEQ ID NO: 169 - DNA, 16 bp, Artificial Sequence
  Probe
acgcgaaaggtccccg

SEQ ID NO: 170 - DNA, 17 bp, Artificial Sequence
  Probe
acgcgaaaggtccccgg

SEQ ID NO: 171 - DNA, 18 bp, Artificial Sequence
  Probe
acgcgaaaggtccccggt

SEQ ID NO: 172 - DNA, 19 bp, Artificial Sequence
  Probe
acgcgaaaggtccccggtt

SEQ ID NO: 173 - DNA, 39 bp, Artificial Sequence
  Probe
acgcgaaaggtccccggttcgaaaccgggcggaaacacc

SEQ ID NO: 174 - DNA, 17 bp, Artificial Sequence
  Probe
acgcgggagaccggggt

SEQ ID NO: 175 - DNA, 18 bp, Artificial Sequence
  Probe
acgcgggagaccggggtt

SEQ ID NO: 176 - DNA, 31 bp, Artificial Sequence
  Probe
acgcgggagaccggggttcaattccccgacg

SEQ ID NO: 177 - DNA, 32 bp, Artificial Sequence
  Probe
acgcgggagaccggggttcaattccccgacgg

SEQ ID NO: 178 - DNA, 33 bp, Artificial Sequence
  Probe
acgcgggagaccggggttcaattccccgacggg

SEQ ID NO: 179 - DNA, 34 bp, Artificial Sequence
  Probe
acgcgggagaccggggttcaattccccgacgggg

SEQ ID NO: 180 - DNA, 36 bp, Artificial Sequence
  Probe
acgcgggagaccggggttcaattccccgacggggag

SEQ ID NO: 181 - DNA, 29 bp, Artificial Sequence
  Probe
acgcgggagaccggggttcgattccccga

SEQ ID NO: 182 - DNA, 30 bp, Artificial Sequence
  Probe
acgcgggagaccggggttcgattccccgac

SEQ ID NO: 183 - DNA, 31 bp, Artificial Sequence
  Probe
acgcgggagaccggggttcgattccccgacg

SEQ ID NO: 184 - DNA, 32 bp, Artificial Sequence
  Probe
acgcgggagaccggggttcgattccccgacgg

SEQ ID NO: 185 - DNA, 33 bp, Artificial Sequence
  Probe
acgcgggagaccggggttcgattccccgacggg

SEQ ID NO: 186 - DNA, 34 bp, Artificial Sequence
  Probe
acgcgggagaccggggttcgattccccgacgggg

SEQ ID NO: 187 - DNA, 35 bp, Artificial Sequence
  Probe
acgcgggagaccggggttcgattccccgacgggga

SEQ ID NO: 188 - DNA, 36 bp, Artificial Sequence
  Probe
acgcgggagaccggggttcgattccccgacggggag

SEQ ID NO: 189 - DNA, 19 bp, Artificial Sequence
  Probe
acgcgggaggcccgggttc

SEQ ID NO: 190 - DNA, 20 bp, Artificial Sequence
  Probe
acgcgggaggcccgggttcg

SEQ ID NO: 191 - DNA, 33 bp, Artificial Sequence
  Probe
actaagtgtttgtgggtttaagtcccattggtc

SEQ ID NO: 192 - DNA, 34 bp, Artificial Sequence
  Probe
actaagtgtttgtgggtttaagtcccattggtct

SEQ ID NO: 193 - DNA, 35 bp, Artificial Sequence
  Probe
actaagtgtttgtgggtttaagtcccattggtcta

SEQ ID NO: 194 - DNA, 21 bp, Artificial Sequence
  Probe
actctgaatccagcgatccga

SEQ ID NO: 195 - DNA, 32 bp, Artificial Sequence
  Probe
actcttttagtataaatagtaccgttaacttc

SEQ ID NO: 196 - DNA, 33 bp, Artificial Sequence
  Probe
actcttttagtataaatagtaccgttaacttcc

SEQ ID NO: 197 - DNA, 34 bp, Artificial Sequence
  Probe
actcttttagtataaatagtaccgttaacttcca

SEQ ID NO: 198 - DNA, 37 bp, Artificial Sequence
  Probe
actcttttagtataaatagtaccgttaacttccaatt

SEQ ID NO: 199 - DNA, 50 bp, Artificial Sequence
  Probe
actcttttagtataaatagtaccgttaacttccaattaactagttttgac

SEQ ID NO: 200 - DNA, 37 bp, Artificial Sequence
  Probe
acttaaaactttacagtcagaggttcaattcctcttc

SEQ ID NO: 201 - DNA, 50 bp, Artificial Sequence
  Probe
acttagcattaaccttttaagttaaagattaagagaaccaacacctcttt

SEQ ID NO: 202 - DNA, 30 bp, Artificial Sequence
  Probe
actttacagtcagaggttcaattcctcttc

SEQ ID NO: 203 - DNA, 37 bp, Artificial Sequence
  Probe
actttgatagagtaaataataggagcttaaaccccct

SEQ ID NO: 204 - DNA, 38 bp, Artificial Sequence
  Probe
actttgatagagtaaataataggagcttaaaccccctt

SEQ ID NO: 205 - DNA, 39 bp, Artificial Sequence
  Probe
actttgatagagtaaataataggagcttaaaccccctta

SEQ ID NO: 206 - DNA, 45 bp, Artificial Sequence
  Probe
actttgatagagtaaataataggagcttaaacccccttatttcta

SEQ ID NO: 207 - DNA, 27 bp, Artificial Sequence
  Probe
acttttaaaggataacagctatccatt

SEQ ID NO: 208 - DNA, 28 bp, Artificial Sequence
  Probe
acttttaaaggataacagctatccattg

SEQ ID NO: 209 - DNA, 30 bp, Artificial Sequence
  Probe
acttttaaaggataacagctatccattggt

SEQ ID NO: 210 - DNA, 31 bp, Artificial Sequence
  Probe
acttttaaaggataacagctatccattggtc

SEQ ID NO: 211 - DNA, 32 bp, Artificial Sequence
  Probe
acttttaaaggataacagctatccattggtct

SEQ ID NO: 212 - DNA, 34 bp, Artificial Sequence
  Probe
acttttaaaggataacagctatccattggtctta

SEQ ID NO: 213 - DNA, 27 bp, Artificial Sequence
  Probe
agaaagctcacaagaactgctaactca

SEQ ID NO: 214 - DNA, 29 bp, Artificial Sequence
  Probe
agaaagctcacaagaactgctaactcatg

SEQ ID NO: 215 - DNA, 49 bp, Artificial Sequence
  Probe
agaaagctcacaagaactgctaactcatgcccccatgtctaacaacatg

SEQ ID NO: 216 - DNA, 50 bp, Artificial Sequence
  Probe
agaaagctcacaagaactgctaactcatgcccccatgtctaacaacatgg

SEQ ID NO: 217 - DNA, 50 bp, Artificial Sequence
  Probe
agaaatatgtctgataaaagagttactttgatagagtaaataataggagc

SEQ ID NO: 218 - DNA, 40 bp, Artificial Sequence
  Probe
agaactgctaactcatgcccccatgtctaacaacatggct

SEQ ID NO: 219 - DNA, 41 bp, Artificial Sequence
  Probe
agaactgctaactcatgcccccatgtctaacaacatggctt

SEQ ID NO: 220 - DNA, 42 bp, Artificial Sequence
  Probe
agaactgctaactcatgcccccatgtctaacaacatggcttt

SEQ ID NO: 221 - DNA, 43 bp, Artificial Sequence
  Probe
agaactgctaactcatgcccccatgtctaacaacatggctttc

SEQ ID NO: 222 - DNA, 44 bp, Artificial Sequence
  Probe
agaactgctaactcatgcccccatgtctaacaacatggctttct

SEQ ID NO: 223 - DNA, 45 bp, Artificial Sequence
  Probe
agaactgctaactcatgcccccatgtctaacaacatggctttctc

SEQ ID NO: 224 - DNA, 46 bp, Artificial Sequence
  Probe
agaactgctaactcatgcccccatgtctaacaacatggctttctca

SEQ ID NO: 225 - DNA, 31 bp, Artificial Sequence
  Probe
agaagattccaggttcgactcctggctggct

SEQ ID NO: 226 - DNA, 31 bp, Artificial Sequence
  Probe
agaagattctaggttcgactcctggctggct

SEQ ID NO: 227 - DNA, 17 bp, Artificial Sequence
  Probe
agaagattgagggttcg

SEQ ID NO: 228 - DNA, 26 bp, Artificial Sequence
  Probe
agaagattgagggttcgagtcccttc

SEQ ID NO: 229 - DNA, 27 bp, Artificial Sequence
  Probe
agaagattgagggttcgagtcccttcg

SEQ ID NO: 230 - DNA, 31 bp, Artificial Sequence
  Probe
agaagattgagggttcgagtcccttcgtggt

SEQ ID NO: 231 - DNA, 33 bp, Artificial Sequence
  Probe
agaagattgagggttcgagtcccttcgtggtcg

SEQ ID NO: 232 - DNA, 34 bp, Artificial Sequence
  Probe
agaaggtcctgggttcgagccccagtggaaccac

SEQ ID NO: 233 - DNA, 29 bp, Artificial Sequence
  Probe
agaatcttagctttgggtgctaatggtgg

SEQ ID NO: 234 - DNA, 49 bp, Artificial Sequence
  Probe
agaatcttagctttgggtgctaatggtggagttaaagactttttctctg

SEQ ID NO: 235 - DNA, 50 bp, Artificial Sequence
  Probe
agaatcttagctttgggtgctaatggtggagttaaagactttttctctga

SEQ ID NO: 236 - DNA, 34 bp, Artificial Sequence
  Probe
agaccaagagccttcaaagccctcagtaagttgc

SEQ ID NO: 237 - DNA, 35 bp, Artificial Sequence
  Probe
agaccaagagccttcaaagccctcagtaagttgca

SEQ ID NO: 238 - DNA, 22 bp, Artificial Sequence
  Probe
agaccggggttcaattccccga

SEQ ID NO: 239 - DNA, 23 bp, Artificial Sequence
  Probe
agaccggggttcaattccccgac

SEQ ID NO: 240 - DNA, 29 bp, Artificial Sequence
  Probe
agaccggggttcaattccccgacggggag

SEQ ID NO: 241 - DNA, 23 bp, Artificial Sequence
  Probe
agaccggggttcgattccccgac

SEQ ID NO: 242 - DNA, 24 bp, Artificial Sequence
  Probe
agaccggggttcgattccccgacg

SEQ ID NO: 243 - DNA, 27 bp, Artificial Sequence
  Probe
agaccggggttcgattccccgacgggg

SEQ ID NO: 244 - DNA, 28 bp, Artificial Sequence
  Probe
agaccggggttcgattccccgacgggga

SEQ ID NO: 245 - DNA, 29 bp, Artificial Sequence
  Probe
agaccggggttcgattccccgacggggag

SEQ ID NO: 246 - DNA, 50 bp, Artificial Sequence
  Probe
agagcatgagactcttaatctcagggtcgtgggttcgagccccacgttgg

SEQ ID NO: 247 - DNA, 26 bp, Artificial Sequence
  Probe
agagcccggtaatcgcataaaactta

SEQ ID NO: 248 - DNA, 31 bp, Artificial Sequence
  Probe
agagcccggtaatcgcataaaacttaaaact

SEQ ID NO: 249 - DNA, 46 bp, Artificial Sequence
  Probe
agagcccggtaatcgcataaaacttaaaactttacagtcagaggtt

SEQ ID NO: 250 - DNA, 28 bp, Artificial Sequence
  Probe
agagtaaataataggagcttaaaccccc

SEQ ID NO: 251 - DNA, 30 bp, Artificial Sequence
  Probe
agagtaaataataggagcttaaaccccctt

SEQ ID NO: 252 - DNA, 31 bp, Artificial Sequence
  Probe
agagtaaataataggagcttaaaccccctta

SEQ ID NO: 253 - DNA, 32 bp, Artificial Sequence
  Probe
agagtaaataataggagcttaaacccccttat

SEQ ID NO: 254 - DNA, 35 bp, Artificial Sequence
  Probe
agagtaaataataggagcttaaacccccttatttc

SEQ ID NO: 255 - DNA, 36 bp, Artificial Sequence
  Probe
agagtaaataataggagcttaaacccccttatttct

SEQ ID NO: 256 - DNA, 37 bp, Artificial Sequence
  Probe
agagtaaataataggagcttaaacccccttatttcta

SEQ ID NO: 257 - DNA, 32 bp, Artificial Sequence
  Probe
agagtggcgcagcggaagcgtgctgggcccat

SEQ ID NO: 258 - DNA, 23 bp, Artificial Sequence
  Probe
agattctaggttcgactcctggc

SEQ ID NO: 259 - DNA, 28 bp, Artificial Sequence
  Probe
agattctaggttcgactcctggctggct

SEQ ID NO: 260 - DNA, 22 bp, Artificial Sequence
  Probe
agattgagggttcgagtccctt

SEQ ID NO: 261 - DNA, 23 bp, Artificial Sequence
  Probe
agattgagggttcgagtcccttc

SEQ ID NO: 262 - DNA, 24 bp, Artificial Sequence
  Probe
agattgagggttcgagtcccttcg

SEQ ID NO: 263 - DNA, 25 bp, Artificial Sequence
  Probe
agattgagggttcgagtcccttcgt

SEQ ID NO: 264 - DNA, 28 bp, Artificial Sequence
  Probe
agattgagggttcgagtcccttcgtggt

SEQ ID NO: 265 - DNA, 28 bp, Artificial Sequence
  Probe
agattgcaggttcgagtcctgccgcggt

SEQ ID NO: 266 - DNA, 37 bp, Artificial Sequence
  Probe
agattgtgaatctgacaacagaggcttacgacccctt

SEQ ID NO: 267 - DNA, 38 bp, Artificial Sequence
  Probe
agattgtgaatctgacaacagaggcttacgacccctta

SEQ ID NO: 268 - DNA, 39 bp, Artificial Sequence
  Probe
agattgtgaatctgacaacagaggcttacgaccccttat

SEQ ID NO: 269 - DNA, 29 bp, Artificial Sequence
  Probe
agcactctggactctgaatccagcgatcc

SEQ ID NO: 270 - DNA, 30 bp, Artificial Sequence
  Probe
agcactctggactctgaatccagcgatccg

SEQ ID NO: 271 - DNA, 31 bp, Artificial Sequence
  Probe
agcactctggactctgaatccagcgatccga

SEQ ID NO: 272 - DNA, 50 bp, Artificial Sequence
  Probe
agcactctggactctgaatccagcgatccgagttcaaatctcggtggaac

SEQ ID NO: 273 - DNA, 50 bp, Artificial Sequence
  Probe
agcactctggactttgaatccagcgatccgagttcaaatctcggtgggac

SEQ ID NO: 274 - DNA, 24 bp, Artificial Sequence
  Probe
agcagagtggcgcagcggaagcgt

SEQ ID NO: 275 - DNA, 31 bp, Artificial Sequence
  Probe
agcagagtggcgcagcggaagcgtgctgggc

SEQ ID NO: 276 - DNA, 32 bp, Artificial Sequence
  Probe
agcagagtggcgcagcggaagcgtgctgggcc

SEQ ID NO: 277 - DNA, 33 bp, Artificial Sequence
  Probe
agcagagtggcgcagcggaagcgtgctgggccc

SEQ ID NO: 278 - DNA, 34 bp, Artificial Sequence
  Probe
agcagagtggcgcagcggaagcgtgctgggccca

SEQ ID NO: 279 - DNA, 35 bp, Artificial Sequence
  Probe
agcagagtggcgcagcggaagcgtgctgggcccat

SEQ ID NO: 280 - DNA, 35 bp, Artificial Sequence
  Probe
agcattaaccttttaagttaaagattaagagaacc

SEQ ID NO: 281 - DNA, 36 bp, Artificial Sequence
  Probe
agcattaaccttttaagttaaagattaagagaacca

SEQ ID NO: 282 - DNA, 37 bp, Artificial Sequence
  Probe
agcattaaccttttaagttaaagattaagagaaccaa

SEQ ID NO: 283 - DNA, 39 bp, Artificial Sequence
  Probe
agcattaaccttttaagttaaagattaagagaaccaaca

SEQ ID NO: 284 - DNA, 42 bp, Artificial Sequence
  Probe
agcattaaccttttaagttaaagattaagagaaccaacacct

SEQ ID NO: 285 - DNA, 50 bp, Artificial Sequence
  Probe
agcattaaccttttaagttaaagattaagagaaccaacacctctttacag

SEQ ID NO: 286 - DNA, 20 bp, Artificial Sequence
  Probe
agccagggattgtgggttcg

SEQ ID NO: 287 - DNA, 34 bp, Artificial Sequence
  Probe
agccagggattgtgggttcgagtcccatctgggg

SEQ ID NO: 288 - DNA, 36 bp, Artificial Sequence
  Probe
agccagggattgtgggttcgagtcccatctggggtg

SEQ ID NO: 289 - DNA, 34 bp, Artificial Sequence
  Probe
agcccggctagctcagtcggtagagcatgggact

SEQ ID NO: 290 - DNA, 17 bp, Artificial Sequence
  Probe
agcccggtaatcgcata

SEQ ID NO: 291 - DNA, 24 bp, Artificial Sequence
  Probe
agcccggtaatcgcataaaactta

SEQ ID NO: 292 - DNA, 38 bp, Artificial Sequence
  Probe
agcccggtaatcgcataaaacttaaaactttacagtca

SEQ ID NO: 293 - DNA, 46 bp, Artificial Sequence
  Probe
agcccggtaatcgcataaaacttaaaactttacagtcagaggttca

SEQ ID NO: 294 - DNA, 17 bp, Artificial Sequence
  Probe
agccctcagtaagttgc

SEQ ID NO: 295 - DNA, 31 bp, Artificial Sequence
  Probe
agcgatccgagttcaaatctcggtggaacct

SEQ ID NO: 296 - DNA, 29 bp, Artificial Sequence
  Probe
agcgatccgagttcaaatctcggtgggac

SEQ ID NO: 297 - DNA, 30 bp, Artificial Sequence
  Probe
agcgatccgagttcaaatctcggtgggacc

SEQ ID NO: 298 - DNA, 31 bp, Artificial Sequence
  Probe
agcgatccgagttcaaatctcggtgggacct

SEQ ID NO: 299 - DNA, 32 bp, Artificial Sequence
  Probe
agcgatccgagttcaaatctcggtgggacctc

SEQ ID NO: 300 - DNA, 20 bp, Artificial Sequence
  Probe
agcggaagcgtgctgggccc

SEQ ID NO: 301 - DNA, 30 bp, Artificial Sequence
  Probe
agcgtgctgggcccataacccagaggtcga

SEQ ID NO: 302 - DNA, 32 bp, Artificial Sequence
  Probe
agcgtgctgggcccataacccagaggtcgatg

SEQ ID NO: 303 - DNA, 50 bp, Artificial Sequence
  Probe
agctatcgggcccataccccgaaaatgttggttatacccttcccgtacta

SEQ ID NO: 304 - DNA, 17 bp, Artificial Sequence
  Probe
agctcacaagaactgct

SEQ ID NO: 305 - DNA, 19 bp, Artificial Sequence
  Probe
agctcacaagaactgctaa

SEQ ID NO: 306 - DNA, 20 bp, Artificial Sequence
  Probe
agctcacaagaactgctaac

SEQ ID NO: 307 - DNA, 23 bp, Artificial Sequence
  Probe
agctcacaagaactgctaactca

SEQ ID NO: 308 - DNA, 24 bp, Artificial Sequence
  Probe
agctcacaagaactgctaactcat

SEQ ID NO: 309 - DNA, 25 bp, Artificial Sequence
  Probe
agctcacaagaactgctaactcatg

SEQ ID NO: 310 - DNA, 27 bp, Artificial Sequence
  Probe
agctcacaagaactgctaactcatgcc

SEQ ID NO: 311 - DNA, 50 bp, Artificial Sequence
  Probe
agctcacaagaactgctaactcatgcccccatgtctaacaacatggcttt

SEQ ID NO: 312 - DNA, 25 bp, Artificial Sequence
  Probe
agctcagtcggtagagcatgggact

SEQ ID NO: 313 - DNA, 28 bp, Artificial Sequence
  Probe
agctcagtcggtagagcatgggactctt

SEQ ID NO: 314 - DNA, 30 bp, Artificial Sequence
  Probe
agctccgaggtgattttcatattgaattgc

SEQ ID NO: 315 - DNA, 31 bp, Artificial Sequence
  Probe
agctccgaggtgattttcatattgaattgca

SEQ ID NO: 316 - DNA, 32 bp, Artificial Sequence
  Probe
agctccgaggtgattttcatattgaattgcaa

SEQ ID NO: 317 - DNA, 17 bp, Artificial Sequence
  Probe
aggagatcctgggttcg

SEQ ID NO: 318 - DNA, 33 bp, Artificial Sequence
  Probe
aggagatcctgggttcgaatcccagcggtgcct

SEQ ID NO: 319 - DNA, 19 bp, Artificial Sequence
  Probe
aggagcttaaaccccctta

SEQ ID NO: 320 - DNA, 21 bp, Artificial Sequence
  Probe
aggatggccgagtggtctaag

SEQ ID NO: 321 - DNA, 29 bp, Artificial Sequence
  Probe
aggattcggcgctctcaccgccgcggccc

SEQ ID NO: 322 - DNA, 29 bp, Artificial Sequence
  Probe
aggcattggcctcctaagccagggattgt

SEQ ID NO: 323 - DNA, 24 bp, Artificial Sequence
  Probe
aggccccgggttcaatccccggca

SEQ ID NO: 324 - DNA, 29 bp, Artificial Sequence
  Probe
aggcggcccgggttcgactcccggtgtgg

SEQ ID NO: 325 - DNA, 31 bp, Artificial Sequence
  Probe
aggcggcccgggttcgactcccggtgtggga

SEQ ID NO: 326 - DNA, 32 bp, Artificial Sequence
  Probe
aggcggcccgggttcgactcccggtgtgggaa

SEQ ID NO: 327 - DNA, 33 bp, Artificial Sequence
  Probe
aggcggcccgggttcgactcccggtgtgggaac

SEQ ID NO: 328 - DNA, 16 bp, Artificial Sequence
  Probe
agggattgtgggttcg

SEQ ID NO: 329 - DNA, 22 bp, Artificial Sequence
  Probe
agggattgtgggttcgagtccc

SEQ ID NO: 330 - DNA, 25 bp, Artificial Sequence
  Probe
agggattgtgggttcgagtcccatc

SEQ ID NO: 331 - DNA, 26 bp, Artificial Sequence
  Probe
agggattgtgggttcgagtcccatct

SEQ ID NO: 332 - DNA, 16 bp, Artificial Sequence
  Probe
aggggtcgcgagttca

SEQ ID NO: 333 - DNA, 31 bp, Artificial Sequence
  Probe
agggtcgtgggttcgagccccacgttgggcg

SEQ ID NO: 334 - DNA, 50 bp, Artificial Sequence
  Probe
agggtgcttagctgttaactaagtgtttgtgggtttaagtcccattggtc

SEQ ID NO: 335 - DNA, 23 bp, Artificial Sequence
  Probe
aggttccgggttcgagtcccggc

SEQ ID NO: 336 - DNA, 29 bp, Artificial Sequence
  Probe
agtaaataataggagcttaaaccccctta

SEQ ID NO: 337 - DNA, 50 bp, Artificial Sequence
  Probe
agtaccgttaacttccaattaactagttttgacaacattcaaaaaagagt

SEQ ID NO: 338 - DNA, 23 bp, Artificial Sequence
  Probe
agtcagaggttcaattcctcttc

SEQ ID NO: 339 - DNA, 16 bp, Artificial Sequence
  Probe
agtcggtagagcatca

SEQ ID NO: 340 - DNA, 17 bp, Artificial Sequence
  Probe
agtcggtagagcatcag

SEQ ID NO: 341 - DNA, 18 bp, Artificial Sequence
  Probe
agtcggtagagcatcaga

SEQ ID NO: 342 - DNA, 19 bp, Artificial Sequence
  Probe
agtcggtagagcatcagac

SEQ ID NO: 343 - DNA, 20 bp, Artificial Sequence
  Probe
agtcggtagagcatcagact

SEQ ID NO: 344 - DNA, 27 bp, Artificial Sequence
  Probe
agtcggtagagcatgagactcttaatc

SEQ ID NO: 345 - DNA, 28 bp, Artificial Sequence
  Probe
agtcggtagagcatgagactcttaatct

SEQ ID NO: 346 - DNA, 36 bp, Artificial Sequence
  Probe
agtcggtagagcatgagactcttaatctcagggtcg

SEQ ID NO: 347 - DNA, 39 bp, Artificial Sequence
  Probe
agtcggtagagcatgagactcttaatctcagggtcgtgg

SEQ ID NO: 348 - DNA, 16 bp, Artificial Sequence
  Probe
agtcggtagagcatgg

SEQ ID NO: 349 - DNA, 17 bp, Artificial Sequence
  Probe
agtcggtagagcatggg

SEQ ID NO: 350 - DNA, 19 bp, Artificial Sequence
  Probe
agtcggtagagcatgggac

SEQ ID NO: 351 - DNA, 20 bp, Artificial Sequence
  Probe
agtcggtagagcatgggact

SEQ ID NO: 352 - DNA, 21 bp, Artificial Sequence
  Probe
agtcggtagagcatgggactc

SEQ ID NO: 353 - DNA, 29 bp, Artificial Sequence
  Probe
agtcggtagagcatgggactcttaatccc

SEQ ID NO: 354 - DNA, 36 bp, Artificial Sequence
  Probe
agtcggtagagcatgggactcttaatcccagggtcg

SEQ ID NO: 355 - DNA, 38 bp, Artificial Sequence
  Probe
agtcggtagagcatgggactcttaatcccagggtcgtg

SEQ ID NO: 356 - DNA, 22 bp, Artificial Sequence
  Probe
agtctcataatctgaaggtcgt

SEQ ID NO: 357 - DNA, 23 bp, Artificial Sequence
  Probe
agtctcataatctgaaggtcgtg

SEQ ID NO: 358 - DNA, 24 bp, Artificial Sequence
  Probe
agtctcataatctgaaggtcgtga

SEQ ID NO: 359 - DNA, 23 bp, Artificial Sequence
  Probe
agtctcttcgggggcgtgggttc

SEQ ID NO: 360 - DNA, 20 bp, Artificial Sequence
  Probe
agtggttaggattcggcgct

SEQ ID NO: 361 - DNA, 36 bp, Artificial Sequence
  Probe
agtggttaggattcggcgctctcaccgccgcggccc

SEQ ID NO: 362 - DNA, 25 bp, Artificial Sequence
  Probe
agtggttatcacgttcgcctcacac

SEQ ID NO: 363 - DNA, 39 bp, Artificial Sequence
  Probe
agtggttatcacgttcgcctcacacgcgaaaggtccccg

SEQ ID NO: 364 - DNA, 43 bp, Artificial Sequence
  Probe
agttgattagggtgcttagctgttaactaagtgtttgtgggtt

SEQ ID NO: 365 - DNA, 50 bp, Artificial Sequence
  Probe
agttgattagggtgcttagctgttaactaagtgtttgtgggtttaagtcc

SEQ ID NO: 366 - DNA, 50 bp, Artificial Sequence
  Probe
agtttaaccaaaacatcagattgtgaatctgacaacagaggcttacgacc

SEQ ID NO: 367 - DNA, 32 bp, Artificial Sequence
  Probe
atagagtaaataataggagcttaaaccccctt

SEQ ID NO: 368 - DNA, 33 bp, Artificial Sequence
  Probe
atagagtaaataataggagcttaaaccccctta

SEQ ID NO: 369 - DNA, 34 bp, Artificial Sequence
  Probe
atagagtaaataataggagcttaaacccccttat

SEQ ID NO: 370 - DNA, 38 bp, Artificial Sequence
  Probe
atagagtaaataataggagcttaaacccccttatttct

SEQ ID NO: 371 - DNA, 39 bp, Artificial Sequence
  Probe
atagagtaaataataggagcttaaacccccttatttcta

SEQ ID NO: 372 - DNA, 36 bp, Artificial Sequence
  Probe
atatcattggtcgtggttgtagtccgtgcgagaata

SEQ ID NO: 373 - DNA, 20 bp, Artificial Sequence
  Probe
atcagaagattccaggttcg

SEQ ID NO: 374 - DNA, 34 bp, Artificial Sequence
  Probe
atcagaagattccaggttcgactcctggctggct

SEQ ID NO: 375 - DNA, 34 bp, Artificial Sequence
  Probe
atcagaagattctaggttcgactcctggctggct

SEQ ID NO: 376 - DNA, 18 bp, Artificial Sequence
  Probe
atccagcgatccgagttc

SEQ ID NO: 377 - DNA, 19 bp, Artificial Sequence
  Probe
atccagcgatccgagttca

SEQ ID NO: 378 - DNA, 21 bp, Artificial Sequence
  Probe
atccagcgatccgagttcaaa

SEQ ID NO: 379 - DNA, 35 bp, Artificial Sequence
  Probe
atccagcgatccgagttcaaatctcggtggaacct

SEQ ID NO: 380 - DNA, 35 bp, Artificial Sequence
  Probe
atccagcgatccgagttcaaatctcggtgggacct

SEQ ID NO: 381 - DNA, 17 bp, Artificial Sequence
  Probe
atcccagcggtgcctcc

SEQ ID NO: 382 - DNA, 19 bp, Artificial Sequence
  Probe
atccccggcacctccacca

SEQ ID NO: 383 - DNA, 16 bp, Artificial Sequence
  Probe
atccgggtgccccctc

SEQ ID NO: 384 - DNA, 29 bp, Artificial Sequence
  Probe
atcgcataaaacttaaaactttacagtca

SEQ ID NO: 385 - DNA, 26 bp, Artificial Sequence
  Probe
atcgtatagtggttagtactctgcgt

SEQ ID NO: 386 - DNA, 32 bp, Artificial Sequence
  Probe
atctaaagacaggggttaggcctctttttacc

SEQ ID NO: 387 - DNA, 33 bp, Artificial Sequence
  Probe
atctaaagacaggggttaggcctctttttacca

SEQ ID NO: 388 - DNA, 20 bp, Artificial Sequence
  Probe
atctaaaggtccctggttcg

SEQ ID NO: 389 - DNA, 21 bp, Artificial Sequence
  Probe
atctaaaggtccctggttcga

SEQ ID NO: 390 - DNA, 22 bp, Artificial Sequence
  Probe
atctaaaggtccctggttcgat

SEQ ID NO: 391 - DNA, 23 bp, Artificial Sequence
  Probe
atctaaaggtccctggttcgatc

SEQ ID NO: 392 - DNA, 24 bp, Artificial Sequence
  Probe
atctaaaggtccctggttcgatcc

SEQ ID NO: 393 - DNA, 36 bp, Artificial Sequence
  Probe
atctaaaggtccctggttcgatcccgggtttcggca

SEQ ID NO: 394 - DNA, 37 bp, Artificial Sequence
  Probe
atctaaaggtccctggttcgatcccgggtttcggcac

SEQ ID NO: 395 - DNA, 28 bp, Artificial Sequence
  Probe
atctgacaacagaggcttacgacccctt

SEQ ID NO: 396 - DNA, 29 bp, Artificial Sequence
  Probe
atctgacaacagaggcttacgacccctta

SEQ ID NO: 397 - DNA, 30 bp, Artificial Sequence
  Probe
atctgacaacagaggcttacgaccccttat

SEQ ID NO: 398 - DNA, 31 bp, Artificial Sequence
  Probe
atctgacaacagaggcttacgaccccttatt

SEQ ID NO: 399 - DNA, 35 bp, Artificial Sequence
  Probe
atctgacaacagaggcttacgaccccttatttacc

SEQ ID NO: 400 - DNA, 19 bp, Artificial Sequence
  Probe
atctgagggtccagggttt

SEQ ID NO: 401 - DNA, 27 bp, Artificial Sequence
  Probe
atgggtggttcagtggtagaattctcg

SEQ ID NO: 402 - DNA, 29 bp, Artificial Sequence
  Probe
atgggtggttcagtggtagaattctcgcc

SEQ ID NO: 403 - DNA, 30 bp, Artificial Sequence
  Probe
atgggtggttcagtggtagaattctcgcct

SEQ ID NO: 404 - DNA, 31 bp, Artificial Sequence
  Probe
atgggtggttcagtggtagaattctcgcctg

SEQ ID NO: 405 - DNA, 32 bp, Artificial Sequence
  Probe
atgggtggttcagtggtagaattctcgcctgc

SEQ ID NO: 406 - DNA, 33 bp, Artificial Sequence
  Probe
atgggtggttcagtggtagaattctcgcctgcc

SEQ ID NO: 407 - DNA, 34 bp, Artificial Sequence
  Probe
atgggtggttcagtggtagaattctcgcctgcca

SEQ ID NO: 408 - DNA, 17 bp, Artificial Sequence
  Probe
atgtttagacgggctca

SEQ ID NO: 409 - DNA, 18 bp, Artificial Sequence
  Probe
atgtttagacgggctcac

SEQ ID NO: 410 - DNA, 19 bp, Artificial Sequence
  Probe
atgtttagacgggctcaca

SEQ ID NO: 411 - DNA, 20 bp, Artificial Sequence
  Probe
atgtttagacgggctcacat

SEQ ID NO: 412 - DNA, 21 bp, Artificial Sequence
  Probe
atgtttagacgggctcacatc

SEQ ID NO: 413 - DNA, 22 bp, Artificial Sequence
  Probe
atgtttagacgggctcacatca

SEQ ID NO: 414 - DNA, 25 bp, Artificial Sequence
  Probe
atgtttagacgggctcacatcaccc

SEQ ID NO: 415 - DNA, 26 bp, Artificial Sequence
  Probe
atgtttagacgggctcacatcacccc

SEQ ID NO: 416 - DNA, 27 bp, Artificial Sequence
  Probe
atgtttagacgggctcacatcacccca

SEQ ID NO: 417 - DNA, 28 bp, Artificial Sequence
  Probe
atgtttagacgggctcacatcaccccat

SEQ ID NO: 418 - DNA, 29 bp, Artificial Sequence
  Probe
atgtttagacgggctcacatcaccccata

SEQ ID NO: 419 - DNA, 30 bp, Artificial Sequence
  Probe
atgtttagacgggctcacatcaccccataa

SEQ ID NO: 420 - DNA, 50 bp, Artificial Sequence
  Probe
attagaatcttagctttgggtgctaatggtggagttaaagactttttctc

SEQ ID NO: 421 - DNA, 50 bp, Artificial Sequence
  Probe
attagggtgcttagctgttaactaagtgtttgtgggtttaagtcccattg

SEQ ID NO: 422 - DNA, 21 bp, Artificial Sequence
  Probe
attcttgcgacccgggttcga

SEQ ID NO: 423 - DNA, 22 bp, Artificial Sequence
  Probe
attcttgcgacccgggttcgat

SEQ ID NO: 424 - DNA, 23 bp, Artificial Sequence
  Probe
attcttgcgacccgggttcgatt

SEQ ID NO: 425 - DNA, 23 bp, Artificial Sequence
  Probe
attggtcgtggttgtagtccgtg

SEQ ID NO: 426 - DNA, 31 bp, Artificial Sequence
  Probe
attggtcgtggttgtagtccgtgcgagaata

SEQ ID NO: 427 - DNA, 36 bp, Artificial Sequence
  Probe
caaaacatcagattgtgaatctgacaacagaggctt

SEQ ID NO: 428 - DNA, 37 bp, Artificial Sequence
  Probe
caaaacatcagattgtgaatctgacaacagaggctta

SEQ ID NO: 429 - DNA, 39 bp, Artificial Sequence
  Probe
caaaacatcagattgtgaatctgacaacagaggcttacg

SEQ ID NO: 430 - DNA, 40 bp, Artificial Sequence
  Probe
caaaacatcagattgtgaatctgacaacagaggcttacga

SEQ ID NO: 431 - DNA, 41 bp, Artificial Sequence
  Probe
caaaacatcagattgtgaatctgacaacagaggcttacgac

SEQ ID NO: 432 - DNA, 42 bp, Artificial Sequence
  Probe
caaaacatcagattgtgaatctgacaacagaggcttacgacc

SEQ ID NO: 433 - DNA, 43 bp, Artificial Sequence
  Probe
caaaacatcagattgtgaatctgacaacagaggcttacgaccc

SEQ ID NO: 434 - DNA, 44 bp, Artificial Sequence
  Probe
caaaacatcagattgtgaatctgacaacagaggcttacgacccc

SEQ ID NO: 435 - DNA, 45 bp, Artificial Sequence
  Probe
caaaacatcagattgtgaatctgacaacagaggcttacgacccct

SEQ ID NO: 436 - DNA, 46 bp, Artificial Sequence
  Probe
caaaacatcagattgtgaatctgacaacagaggcttacgacccctt

SEQ ID NO: 437 - DNA, 50 bp, Artificial Sequence
  Probe
caaaacatcagattgtgaatctgacaacagaggcttacgaccccttattt

SEQ ID NO: 438 - DNA, 35 bp, Artificial Sequence
  Probe
caaagcaatacactgaaaatgtttagacgggctca

SEQ ID NO: 439 - DNA, 37 bp, Artificial Sequence
  Probe
caaagcaatacactgaaaatgtttagacgggctcaca

SEQ ID NO: 440 - DNA, 38 bp, Artificial Sequence
  Probe
caaagcaatacactgaaaatgtttagacgggctcacat

SEQ ID NO: 441 - DNA, 45 bp, Artificial Sequence
  Probe
caaagcaatacactgaaaatgtttagacgggctcacatcacccca

SEQ ID NO: 442 - DNA, 50 bp, Artificial Sequence
  Probe
caaagcaatacactgaaaatgtttagacgggctcacatcaccccataaac

SEQ ID NO: 443 - DNA, 37 bp, Artificial Sequence
  Probe
caaagcacccaacttacacttaggagatttcaactta

SEQ ID NO: 444 - DNA, 39 bp, Artificial Sequence
  Probe
caaagcacccaacttacacttaggagatttcaacttaac

SEQ ID NO: 445 - DNA, 44 bp, Artificial Sequence
  Probe
caaagcacccaacttacacttaggagatttcaacttaacttgac

SEQ ID NO: 446 - DNA, 46 bp, Artificial Sequence
  Probe
caaagcacccaacttacacttaggagatttcaacttaacttgaccg

SEQ ID NO: 447 - DNA, 50 bp, Artificial Sequence
  Probe
caaagcacccaacttacacttaggagatttcaacttaacttgaccgctct

SEQ ID NO: 448 - DNA, 29 bp, Artificial Sequence
  Probe
caacagaggcttacgaccccttatttacc

SEQ ID NO: 449 - DNA, 42 bp, Artificial Sequence
  Probe
caagaactgctaactcatgcccccatgtctaacaacatggct

SEQ ID NO: 450 - DNA, 44 bp, Artificial Sequence
  Probe
caagaactgctaactcatgcccccatgtctaacaacatggcttt

SEQ ID NO: 451 - DNA, 45 bp, Artificial Sequence
  Probe
caagaactgctaactcatgcccccatgtctaacaacatggctttc

SEQ ID NO: 452 - DNA, 46 bp, Artificial Sequence
  Probe
caagaactgctaactcatgcccccatgtctaacaacatggctttct

SEQ ID NO: 453 - DNA, 20 bp, Artificial Sequence
  Probe
caagcagttgacccgggttc

SEQ ID NO: 454 - DNA, 21 bp, Artificial Sequence
  Probe
caagcagttgacccgggttcg

SEQ ID NO: 455 - DNA, 22 bp, Artificial Sequence
  Probe
caagcagttgacccgggttcga

SEQ ID NO: 456 - DNA, 23 bp, Artificial Sequence
  Probe
caagcagttgacccgggttcgat

SEQ ID NO: 457 - DNA, 31 bp, Artificial Sequence
  Probe
caagcagttgacccgggttcgattcccggcc

SEQ ID NO: 458 - DNA, 21 bp, Artificial Sequence
  Probe
caatccccggcacctccacca

SEQ ID NO: 459 - DNA, 25 bp, Artificial Sequence
  Probe
caattaactagttttgacaacattc

SEQ ID NO: 460 - DNA, 36 bp, Artificial Sequence
  Probe
caattaactagttttgacaacattcaaaaaagagta

SEQ ID NO: 461 - DNA, 41 bp, Artificial Sequence
  Probe
cacaaagcacccaacttacacttaggagatttcaacttaac

SEQ ID NO: 462 - DNA, 50 bp, Artificial Sequence
  Probe
cacaaagcacccaacttacacttaggagatttcaacttaacttgaccgct

SEQ ID NO: 463 - DNA, 44 bp, Artificial Sequence
  Probe
cacaagaactgctaactcatgcccccatgtctaacaacatggct

SEQ ID NO: 464 - DNA, 45 bp, Artificial Sequence
  Probe
cacaagaactgctaactcatgcccccatgtctaacaacatggctt

SEQ ID NO: 465 - DNA, 46 bp, Artificial Sequence
  Probe
cacaagaactgctaactcatgcccccatgtctaacaacatggcttt

SEQ ID NO: 466 - DNA, 50 bp, Artificial Sequence
  Probe
cacaagaactgctaactcatgcccccatgtctaacaacatggctttctca

SEQ ID NO: 467 - DNA, 27 bp, Artificial Sequence
  Probe
cacatggtctagcggttaggattcctg

SEQ ID NO: 468 - DNA, 28 bp, Artificial Sequence
  Probe
cacatggtctagcggttaggattcctgg

SEQ ID NO: 469 - DNA, 30 bp, Artificial Sequence
  Probe
cacatggtctagcggttaggattcctggtt

SEQ ID NO: 470 - DNA, 31 bp, Artificial Sequence
  Probe
cacatggtctagcggttaggattcctggttt

SEQ ID NO: 471 - DNA, 32 bp, Artificial Sequence
  Probe
cacatggtctagcggttaggattcctggtttt

SEQ ID NO: 472 - DNA, 33 bp, Artificial Sequence
  Probe
cacatggtctagcggttaggattcctggttttc

SEQ ID NO: 473 - DNA, 23 bp, Artificial Sequence
  Probe
cacgcgaaaggtccccggttcga

SEQ ID NO: 474 - DNA, 19 bp, Artificial Sequence
  Probe
cacgcgggagaccggggtt

SEQ ID NO: 475 - DNA, 32 bp, Artificial Sequence
  Probe
cacgcgggagaccggggttcaattccccgacg

SEQ ID NO: 476 - DNA, 33 bp, Artificial Sequence
  Probe
cacgcgggagaccggggttcaattccccgacgg

SEQ ID NO: 477 - DNA, 36 bp, Artificial Sequence
  Probe
cacgcgggagaccggggttcaattccccgacgggga

SEQ ID NO: 478 - DNA, 37 bp, Artificial Sequence
  Probe
cacgcgggagaccggggttcaattccccgacggggag

SEQ ID NO: 479 - DNA, 30 bp, Artificial Sequence
  Probe
cacgcgggagaccggggttcgattccccga

SEQ ID NO: 480 - DNA, 31 bp, Artificial Sequence
  Probe
cacgcgggagaccggggttcgattccccgac

SEQ ID NO: 481 - DNA, 32 bp, Artificial Sequence
  Probe
cacgcgggagaccggggttcgattccccgacg

SEQ ID NO: 482 - DNA, 33 bp, Artificial Sequence
  Probe
cacgcgggagaccggggttcgattccccgacgg

SEQ ID NO: 483 - DNA, 34 bp, Artificial Sequence
  Probe
cacgcgggagaccggggttcgattccccgacggg

SEQ ID NO: 484 - DNA, 35 bp, Artificial Sequence
  Probe
cacgcgggagaccggggttcgattccccgacgggg

SEQ ID NO: 485 - DNA, 36 bp, Artificial Sequence
  Probe
cacgcgggagaccggggttcgattccccgacgggga

SEQ ID NO: 486 - DNA, 37 bp, Artificial Sequence
  Probe
cacgcgggagaccggggttcgattccccgacggggag

SEQ ID NO: 487 - DNA, 27 bp, Artificial Sequence
  Probe
cactctggactctgaatccagcgatcc

SEQ ID NO: 488 - DNA, 28 bp, Artificial Sequence
  Probe
cactctggactctgaatccagcgatccg

SEQ ID NO: 489 - DNA, 23 bp, Artificial Sequence
  Probe
cactgtaaagctaacttagcatt

SEQ ID NO: 490 - DNA, 27 bp, Artificial Sequence
  Probe
cactgtaaagctaacttagcattaacc

SEQ ID NO: 491 - DNA, 28 bp, Artificial Sequence
  Probe
cactgtaaagctaacttagcattaacct

SEQ ID NO: 492 - DNA, 29 bp, Artificial Sequence
  Probe
cactgtaaagctaacttagcattaacctt

SEQ ID NO: 493 - DNA, 30 bp, Artificial Sequence
  Probe
cactgtaaagctaacttagcattaaccttt

SEQ ID NO: 494 - DNA, 31 bp, Artificial Sequence
  Probe
cactgtaaagctaacttagcattaacctttt

SEQ ID NO: 495 - DNA, 32 bp, Artificial Sequence
  Probe
cactgtaaagctaacttagcattaacctttta

SEQ ID NO: 496 - DNA, 34 bp, Artificial Sequence
  Probe
cactgtaaagctaacttagcattaaccttttaag

SEQ ID NO: 497 - DNA, 35 bp, Artificial Sequence
  Probe
cactgtaaagctaacttagcattaaccttttaagt

SEQ ID NO: 498 - DNA, 36 bp, Artificial Sequence
  Probe
cactgtaaagctaacttagcattaaccttttaagtt

SEQ ID NO: 499 - DNA, 39 bp, Artificial Sequence
  Probe
cactgtaaagctaacttagcattaaccttttaagttaaa

SEQ ID NO: 500 - DNA, 41 bp, Artificial Sequence
  Probe
cactgtaaagctaacttagcattaaccttttaagttaaaga

SEQ ID NO: 501 - DNA, 43 bp, Artificial Sequence
  Probe
cactgtaaagctaacttagcattaaccttttaagttaaagatt

SEQ ID NO: 502 - DNA, 50 bp, Artificial Sequence
  Probe
cactgtaaagctaacttagcattaaccttttaagttaaagattaagagaa

SEQ ID NO: 503 - DNA, 17 bp, Artificial Sequence
  Probe
cagaagattccaggttc

SEQ ID NO: 504 - DNA, 32 bp, Artificial Sequence
  Probe
cagaagattccaggttcgactcctggctggct

SEQ ID NO: 505 - DNA, 32 bp, Artificial Sequence
  Probe
cagaagattctaggttcgactcctggctggct

SEQ ID NO: 506 - DNA, 35 bp, Artificial Sequence
  Probe
cagaagattctaggttcgactcctggctggctcgc

SEQ ID NO: 507 - DNA, 17 bp, Artificial Sequence
  Probe
cagaagattgagggttc

SEQ ID NO: 508 - DNA, 18 bp, Artificial Sequence
  Probe
cagaagattgagggttcg

SEQ ID NO: 509 - DNA, 27 bp, Artificial Sequence
  Probe
cagaagattgagggttcgagtcccttc

SEQ ID NO: 510 - DNA, 28 bp, Artificial Sequence
  Probe
cagaagattgagggttcgagtcccttcg

SEQ ID NO: 511 - DNA, 32 bp, Artificial Sequence
  Probe
cagaagattgagggttcgagtcccttcgtggt

SEQ ID NO: 512 - DNA, 17 bp, Artificial Sequence
  Probe
cagaccaagagccttca

SEQ ID NO: 513 - DNA, 36 bp, Artificial Sequence
  Probe
cagaccaagagccttcaaagccctcagtaagttgca

SEQ ID NO: 514 - DNA, 50 bp, Artificial Sequence
  Probe
cagaccaagagccttcaaagccctcagtaagttgcaatacttaatttctg

SEQ ID NO: 515 - DNA, 24 bp, Artificial Sequence
  Probe
cagagaatagtttaaattagaatc

SEQ ID NO: 516 - DNA, 27 bp, Artificial Sequence
  Probe
cagagaatagtttaaattagaatctta

SEQ ID NO: 517 - DNA, 28 bp, Artificial Sequence
  Probe
cagagaatagtttaaattagaatcttag

SEQ ID NO: 518 - DNA, 29 bp, Artificial Sequence
  Probe
cagagaatagtttaaattagaatcttagc

SEQ ID NO: 519 - DNA, 30 bp, Artificial Sequence
  Probe
cagagaatagtttaaattagaatcttagct

SEQ ID NO: 520 - DNA, 31 bp, Artificial Sequence
  Probe
cagagaatagtttaaattagaatcttagctt

SEQ ID NO: 521 - DNA, 32 bp, Artificial Sequence
  Probe
cagagaatagtttaaattagaatcttagcttt

SEQ ID NO: 522 - DNA, 33 bp, Artificial Sequence
  Probe
cagagaatagtttaaattagaatcttagctttg

SEQ ID NO: 523 - DNA, 34 bp, Artificial Sequence
  Probe
cagagaatagtttaaattagaatcttagctttgg

SEQ ID NO: 524 - DNA, 40 bp, Artificial Sequence
  Probe
cagagaatagtttaaattagaatcttagctttgggtgcta

SEQ ID NO: 525 - DNA, 43 bp, Artificial Sequence
  Probe
cagagaatagtttaaattagaatcttagctttgggtgctaatg

SEQ ID NO: 526 - DNA, 50 bp, Artificial Sequence
  Probe
cagagaatagtttaaattagaatcttagctttgggtgctaatggtggagt

SEQ ID NO: 527 - DNA, 32 bp, Artificial Sequence
  Probe
cagagtggcgcagcggaagcgtgctgggccca

SEQ ID NO: 528 - DNA, 33 bp, Artificial Sequence
  Probe
cagagtggcgcagcggaagcgtgctgggcccat

SEQ ID NO: 529 - DNA, 31 bp, Artificial Sequence
  Probe
cagcgatccgagttcaaatctcggtggaacc

SEQ ID NO: 530 - DNA, 32 bp, Artificial Sequence
  Probe
cagcgatccgagttcaaatctcggtggaacct

SEQ ID NO: 531 - DNA, 32 bp, Artificial Sequence
  Probe
cagcgatccgagttcaaatctcggtgggacct

SEQ ID NO: 532 - DNA, 50 bp, Artificial Sequence
  Probe
cagctaaataagctatcgggcccataccccgaaaatgttggttataccct

SEQ ID NO: 533 - DNA, 34 bp, Artificial Sequence
  Probe
caggcggcccgggttcgactcccggtgtgggaac

SEQ ID NO: 534 - DNA, 30 bp, Artificial Sequence
  Probe
cagggtcgtgggttcgagccccacgttggg

SEQ ID NO: 535 - DNA, 24 bp, Artificial Sequence
  Probe
cagtcagaggttcaattcctcttc

SEQ ID NO: 536 - DNA, 17 bp, Artificial Sequence
  Probe
cagtcggtagagcatca

SEQ ID NO: 537 - DNA, 17 bp, Artificial Sequence
  Probe
cagtcggtagagcatgg

SEQ ID NO: 538 - DNA, 50 bp, Artificial Sequence
  Probe
cagttgattagggtgcttagctgttaactaagtgtttgtgggtttaagtc

SEQ ID NO: 539 - DNA, 29 bp, Artificial Sequence
  Probe
catatcattggtcgtggttgtagtccgtg

SEQ ID NO: 540 - DNA, 31 bp, Artificial Sequence
  Probe
catatcattggtcgtggttgtagtccgtgcg

SEQ ID NO: 541 - DNA, 33 bp, Artificial Sequence
  Probe
catatggtctagcggttaggattcctggttttc

SEQ ID NO: 542 - DNA, 33 bp, Artificial Sequence
  Probe
catgggtggttcagtggtagaattctcgcctgc

SEQ ID NO: 543 - DNA, 19 bp, Artificial Sequence
  Probe
cattcttgcgacccgggtt

SEQ ID NO: 544 - DNA, 20 bp, Artificial Sequence
  Probe
cattcttgcgacccgggttc

SEQ ID NO: 545 - DNA, 22 bp, Artificial Sequence
  Probe
cattcttgcgacccgggttcga

SEQ ID NO: 546 - DNA, 23 bp, Artificial Sequence
  Probe
cattcttgcgacccgggttcgat

SEQ ID NO: 547 - DNA, 24 bp, Artificial Sequence
  Probe
cattcttgcgacccgggttcgatt

SEQ ID NO: 548 - DNA, 32 bp, Artificial Sequence
  Probe
cattggtcgtggttgtagtccgtgcgagaata

SEQ ID NO: 549 - DNA, 37 bp, Artificial Sequence
  Probe
ccaaaacatcagattgtgaatctgacaacagaggctt

SEQ ID NO: 550 - DNA, 38 bp, Artificial Sequence
  Probe
ccaaaacatcagattgtgaatctgacaacagaggctta

SEQ ID NO: 551 - DNA, 39 bp, Artificial Sequence
  Probe
ccaaaacatcagattgtgaatctgacaacagaggcttac

SEQ ID NO: 552 - DNA, 40 bp, Artificial Sequence
  Probe
ccaaaacatcagattgtgaatctgacaacagaggcttacg

SEQ ID NO: 553 - DNA, 41 bp, Artificial Sequence
  Probe
ccaaaacatcagattgtgaatctgacaacagaggcttacga

SEQ ID NO: 554 - DNA, 42 bp, Artificial Sequence
  Probe
ccaaaacatcagattgtgaatctgacaacagaggcttacgac

SEQ ID NO: 555 - DNA, 43 bp, Artificial Sequence
  Probe
ccaaaacatcagattgtgaatctgacaacagaggcttacgacc

SEQ ID NO: 556 - DNA, 44 bp, Artificial Sequence
  Probe
ccaaaacatcagattgtgaatctgacaacagaggcttacgaccc

SEQ ID NO: 557 - DNA, 45 bp, Artificial Sequence
  Probe
ccaaaacatcagattgtgaatctgacaacagaggcttacgacccc

SEQ ID NO: 558 - DNA, 46 bp, Artificial Sequence
  Probe
ccaaaacatcagattgtgaatctgacaacagaggcttacgacccct

SEQ ID NO: 559 - DNA, 16 bp, Artificial Sequence
  Probe
ccaaggtcgcgggttc

SEQ ID NO: 560 - DNA, 27 bp, Artificial Sequence
  Probe
ccacatggtctagcggttaggattcct

SEQ ID NO: 561 - DNA, 28 bp, Artificial Sequence
  Probe
ccacatggtctagcggttaggattcctg

SEQ ID NO: 562 - DNA, 29 bp, Artificial Sequence
  Probe
ccacatggtctagcggttaggattcctgg

SEQ ID NO: 563 - DNA, 31 bp, Artificial Sequence
  Probe
ccacatggtctagcggttaggattcctggtt

SEQ ID NO: 564 - DNA, 32 bp, Artificial Sequence
  Probe
ccacatggtctagcggttaggattcctggttt

SEQ ID NO: 565 - DNA, 33 bp, Artificial Sequence
  Probe
ccacatggtctagcggttaggattcctggtttt

SEQ ID NO: 566 - DNA, 34 bp, Artificial Sequence
  Probe
ccacatggtctagcggttaggattcctggttttc

SEQ ID NO: 567 - DNA, 35 bp, Artificial Sequence
  Probe
ccacatggtctagcggttaggattcctggttttca

SEQ ID NO: 568 - DNA, 20 bp, Artificial Sequence
  Probe
ccacgcgggaggcccgggtt

SEQ ID NO: 569 - DNA, 16 bp, Artificial Sequence
  Probe
ccagcgatccgagttc

SEQ ID NO: 570 - DNA, 17 bp, Artificial Sequence
  Probe
ccagcgatccgagttca

SEQ ID NO: 571 - DNA, 33 bp, Artificial Sequence
  Probe
ccagcgatccgagttcaaatctcggtgggacct

SEQ ID NO: 572 - DNA, 35 bp, Artificial Sequence
  Probe
ccaggcggcccgggttcgactcccggtgtgggaac

SEQ ID NO: 573 - DNA, 17 bp, Artificial Sequence
  Probe
ccagggtcgtgggttcg

SEQ ID NO: 574 - DNA, 27 bp, Artificial Sequence
  Probe
ccatatggtctagcggttaggattcct

SEQ ID NO: 575 - DNA, 32 bp, Artificial Sequence
  Probe
ccatatggtctagcggttaggattcctggttt

SEQ ID NO: 576 - DNA, 33 bp, Artificial Sequence
  Probe
ccatatggtctagcggttaggattcctggtttt

SEQ ID NO: 577 - DNA, 34 bp, Artificial Sequence
  Probe
ccatatggtctagcggttaggattcctggttttc

SEQ ID NO: 578 - DNA, 20 bp, Artificial Sequence
  Probe
ccattggggtttccccgcgc

SEQ ID NO: 579 - DNA, 29 bp, Artificial Sequence
  Probe
cccacatggtctagcggttaggattcctg

SEQ ID NO: 580 - DNA, 32 bp, Artificial Sequence
  Probe
cccacatggtctagcggttaggattcctggtt

SEQ ID NO: 581 - DNA, 33 bp, Artificial Sequence
  Probe
cccacatggtctagcggttaggattcctggttt

SEQ ID NO: 582 - DNA, 34 bp, Artificial Sequence
  Probe
cccacatggtctagcggttaggattcctggtttt

SEQ ID NO: 583 - DNA, 35 bp, Artificial Sequence
  Probe
cccacatggtctagcggttaggattcctggttttc

SEQ ID NO: 584 - DNA, 19 bp, Artificial Sequence
  Probe
cccagaggtcgatggatcg

SEQ ID NO: 585 - DNA, 32 bp, Artificial Sequence
  Probe
cccaggcggcccgggttcgactcccggtgtgg

SEQ ID NO: 586 - DNA, 36 bp, Artificial Sequence
  Probe
cccaggcggcccgggttcgactcccggtgtgggaac

SEQ ID NO: 587 - DNA, 33 bp, Artificial Sequence
  Probe
cccagtggcctaatggataaggcatcagcctcc

SEQ ID NO: 588 - DNA, 19 bp, Artificial Sequence
  Probe
cccataacccagaggtcga

SEQ ID NO: 589 - DNA, 21 bp, Artificial Sequence
  Probe
cccataacccagaggtcgatg

SEQ ID NO: 590 - DNA, 32 bp, Artificial Sequence
  Probe
cccatatggtctagcggttaggattcctggtt

SEQ ID NO: 591 - DNA, 34 bp, Artificial Sequence
  Probe
cccatatggtctagcggttaggattcctggtttt

SEQ ID NO: 592 - DNA, 35 bp, Artificial Sequence
  Probe
cccatatggtctagcggttaggattcctggttttc

SEQ ID NO: 593 - DNA, 21 bp, Artificial Sequence
  Probe
cccattcttgcgacccgggtt

SEQ ID NO: 594 - DNA, 22 bp, Artificial Sequence
  Probe
cccattcttgcgacccgggttc

SEQ ID NO: 595 - DNA, 24 bp, Artificial Sequence
  Probe
cccattcttgcgacccgggttcga

SEQ ID NO: 596 - DNA, 26 bp, Artificial Sequence
  Probe
cccattcttgcgacccgggttcgatt

SEQ ID NO: 597 - DNA, 29 bp, Artificial Sequence
  Probe
cccattcttgcgacccgggttcgattccc

SEQ ID NO: 598 - DNA, 35 bp, Artificial Sequence
  Probe
cccattcttgcgacccgggttcgattcccgggcgg

SEQ ID NO: 599 - DNA, 37 bp, Artificial Sequence
  Probe
cccattcttgcgacccgggttcgattcccgggcggcg

SEQ ID NO: 600 - DNA, 39 bp, Artificial Sequence
  Probe
cccattcttgcgacccgggttcgattcccgggcggcgca

SEQ ID NO: 601 - DNA, 34 bp, Artificial Sequence
  Probe
ccccatggtgtaatggttagcactctggactttg

SEQ ID NO: 602 - DNA, 31 bp, Artificial Sequence
  Probe
ccccgaaaatgttggttatacccttcccgta

SEQ ID NO: 603 - DNA, 33 bp, Artificial Sequence
  Probe
ccccgaaaatgttggttatacccttcccgtact

SEQ ID NO: 604 - DNA, 34 bp, Artificial Sequence
  Probe
ccccgaaaatgttggttatacccttcccgtacta

SEQ ID NO: 605 - DNA, 21 bp, Artificial Sequence
  Probe
ccccgcgcaggttcgaatcct

SEQ ID NO: 606 - DNA, 17 bp, Artificial Sequence
  Probe
ccccggcacctccacca

SEQ ID NO: 607 - DNA, 24 bp, Artificial Sequence
  Probe
ccccgggttcaatccccggcacct

SEQ ID NO: 608 - DNA, 27 bp, Artificial Sequence
  Probe
ccccgggttcaatccccggcacctcca

SEQ ID NO: 609 - DNA, 27 bp, Artificial Sequence
  Probe
ccccgggttcaatccccggcatctcca

SEQ ID NO: 610 - DNA, 27 bp, Artificial Sequence
  Probe
ccccgggttcgatccccggcatctcca

SEQ ID NO: 611 - DNA, 30 bp, Artificial Sequence
  Probe
cccgaaaatgttggttatacccttcccgta

SEQ ID NO: 612 - DNA, 31 bp, Artificial Sequence
  Probe
cccgaaaatgttggttatacccttcccgtac

SEQ ID NO: 613 - DNA, 32 bp, Artificial Sequence
  Probe
cccgaaaatgttggttatacccttcccgtact

SEQ ID NO: 614 - DNA, 33 bp, Artificial Sequence
  Probe
cccgaaaatgttggttatacccttcccgtacta

SEQ ID NO: 615 - DNA, 30 bp, Artificial Sequence
  Probe
cccggatagctcagtcggtagagcatcaga

SEQ ID NO: 616 - DNA, 31 bp, Artificial Sequence
  Probe
cccggatagctcagtcggtagagcatcagac

SEQ ID NO: 617 - DNA, 32 bp, Artificial Sequence
  Probe
cccggatagctcagtcggtagagcatcagact

SEQ ID NO: 618 - DNA, 33 bp, Artificial Sequence
  Probe
cccggatagctcagtcggtagagcatcagactt

SEQ ID NO: 619 - DNA, 34 bp, Artificial Sequence
  Probe
cccggatagctcagtcggtagagcatcagacttt

SEQ ID NO: 620 - DNA, 35 bp, Artificial Sequence
  Probe
cccggatagctcagtcggtagagcatcagactttt

SEQ ID NO: 621 - DNA, 31 bp, Artificial Sequence
  Probe
cccggctagctcagtcggtagagcatgagac

SEQ ID NO: 622 - DNA, 32 bp, Artificial Sequence
  Probe
cccggctagctcagtcggtagagcatgagact

SEQ ID NO: 623 - DNA, 33 bp, Artificial Sequence
  Probe
cccggctagctcagtcggtagagcatgagactc

SEQ ID NO: 624 - DNA, 34 bp, Artificial Sequence
  Probe
cccggctagctcagtcggtagagcatgagactct

SEQ ID NO: 625 - DNA, 35 bp, Artificial Sequence
  Probe
cccggctagctcagtcggtagagcatgagactctt

SEQ ID NO: 626 - DNA, 31 bp, Artificial Sequence
  Probe
cccggctagctcagtcggtagagcatgggac

SEQ ID NO: 627 - DNA, 32 bp, Artificial Sequence
  Probe
cccggctagctcagtcggtagagcatgggact

SEQ ID NO: 628 - DNA, 33 bp, Artificial Sequence
  Probe
cccggctagctcagtcggtagagcatgggactc

SEQ ID NO: 629 - DNA, 34 bp, Artificial Sequence
  Probe
cccggctagctcagtcggtagagcatgggactct

SEQ ID NO: 630 - DNA, 35 bp, Artificial Sequence
  Probe
cccggctagctcagtcggtagagcatgggactctt

SEQ ID NO: 631 - DNA, 26 bp, Artificial Sequence
  Probe
cccgggttcgatccccagcatctcca

SEQ ID NO: 632 - DNA, 50 bp, Artificial Sequence
  Probe
cccggtaatcgcataaaacttaaaactttacagtcagaggttcaattcct

SEQ ID NO: 633 - DNA, 31 bp, Artificial Sequence
  Probe
ccctggtggtctagtggctaggattcggcgc

SEQ ID NO: 634 - DNA, 32 bp, Artificial Sequence
  Probe
ccctggtggtctagtggctaggattcggcgct

SEQ ID NO: 635 - DNA, 34 bp, Artificial Sequence
  Probe
ccctggtggtctagtggctaggattcggcgcttt

SEQ ID NO: 636 - DNA, 35 bp, Artificial Sequence
  Probe
ccctggtggtctagtggctaggattcggcgctttc

SEQ ID NO: 637 - DNA, 30 bp, Artificial Sequence
  Probe
ccctggtggtctagtggttaggattcggcg

SEQ ID NO: 638 - DNA, 31 bp, Artificial Sequence
  Probe
ccctggtggtctagtggttaggattcggcgc

SEQ ID NO: 639 - DNA, 32 bp, Artificial Sequence
  Probe
ccctggtggtctagtggttaggattcggcgct

SEQ ID NO: 640 - DNA, 33 bp, Artificial Sequence
  Probe
ccctggtggtctagtggttaggattcggcgctc

SEQ ID NO: 641 - DNA, 34 bp, Artificial Sequence
  Probe
ccctggtggtctagtggttaggattcggcgctct

SEQ ID NO: 642 - DNA, 35 bp, Artificial Sequence
  Probe
ccctggtggtctagtggttaggattcggcgctctc

SEQ ID NO: 643 - DNA, 36 bp, Artificial Sequence
  Probe
ccctggtggtctagtggttaggattcggcgctctca

SEQ ID NO: 644 - DNA, 30 bp, Artificial Sequence
  Probe
ccgaaaatgttggttatacccttcccgtac

SEQ ID NO: 645 - DNA, 33 bp, Artificial Sequence
  Probe
ccgaaaggttggtggttcgagcccacccaggga

SEQ ID NO: 646 - DNA, 35 bp, Artificial Sequence
  Probe
ccgaaaggttggtggttcgagcccacccagggacg

SEQ ID NO: 647 - DNA, 16 bp, Artificial Sequence
  Probe
ccgaagatcacgggtt

SEQ ID NO: 648 - DNA, 17 bp, Artificial Sequence
  Probe
ccgaagatcacgggttc

SEQ ID NO: 649 - DNA, 16 bp, Artificial Sequence
  Probe
ccgaagatcgcgggtt

SEQ ID NO: 650 - DNA, 17 bp, Artificial Sequence
  Probe
ccgaagatcgcgggttc

SEQ ID NO: 651 - DNA, 18 bp, Artificial Sequence
  Probe
ccgcagcaacctcggttc

SEQ ID NO: 652 - DNA, 23 bp, Artificial Sequence
  Probe
ccgctggtgtagtggtatcatgc

SEQ ID NO: 653 - DNA, 25 bp, Artificial Sequence
  Probe
ccgctggtgtagtggtatcatgcaa

SEQ ID NO: 654 - DNA, 26 bp, Artificial Sequence
  Probe
ccgctggtgtagtggtatcatgcaag

SEQ ID NO: 655 - DNA, 27 bp, Artificial Sequence
  Probe
ccgctggtgtagtggtatcatgcaaga

SEQ ID NO: 656 - DNA, 29 bp, Artificial Sequence
  Probe
ccgctggtgtagtggtatcatgcaagatt

SEQ ID NO: 657 - DNA, 30 bp, Artificial Sequence
  Probe
ccgctggtgtagtggtatcatgcaagattc

SEQ ID NO: 658 - DNA, 31 bp, Artificial Sequence
  Probe
ccgctggtgtagtggtatcatgcaagattcc

SEQ ID NO: 659 - DNA, 32 bp, Artificial Sequence
  Probe
ccgctggtgtagtggtatcatgcaagattccc

SEQ ID NO: 660 - DNA, 33 bp, Artificial Sequence
  Probe
ccgctggtgtagtggtatcatgcaagattccca

SEQ ID NO: 661 - DNA, 16 bp, Artificial Sequence
  Probe
ccggagatgaaaacct

SEQ ID NO: 662 - DNA, 23 bp, Artificial Sequence
  Probe
ccggagatgaaaacctttttcca

SEQ ID NO: 663 - DNA, 27 bp, Artificial Sequence
  Probe
ccggagatgaaaacctttttccaagga

SEQ ID NO: 664 - DNA, 28 bp, Artificial Sequence
  Probe
ccggagatgaaaacctttttccaaggac

SEQ ID NO: 665 - DNA, 29 bp, Artificial Sequence
  Probe
ccggagatgaaaacctttttccaaggaca

SEQ ID NO: 666 - DNA, 27 bp, Artificial Sequence
  Probe
ccggatagctcagtcggtagagcatca

SEQ ID NO: 667 - DNA, 29 bp, Artificial Sequence
  Probe
ccggatagctcagtcggtagagcatcaga

SEQ ID NO: 668 - DNA, 30 bp, Artificial Sequence
  Probe
ccggatagctcagtcggtagagcatcagac

SEQ ID NO: 669 - DNA, 31 bp, Artificial Sequence
  Probe
ccggatagctcagtcggtagagcatcagact

SEQ ID NO: 670 - DNA, 32 bp, Artificial Sequence
  Probe
ccggatagctcagtcggtagagcatcagactt

SEQ ID NO: 671 - DNA, 33 bp, Artificial Sequence
  Probe
ccggatagctcagtcggtagagcatcagacttt

SEQ ID NO: 672 - DNA, 34 bp, Artificial Sequence
  Probe
ccggatagctcagtcggtagagcatcagactttt

SEQ ID NO: 673 - DNA, 27 bp, Artificial Sequence
  Probe
ccggctagctcagtcggtagagcatga

SEQ ID NO: 674 - DNA, 29 bp, Artificial Sequence
  Probe
ccggctagctcagtcggtagagcatgaga

SEQ ID NO: 675 - DNA, 30 bp, Artificial Sequence
  Probe
ccggctagctcagtcggtagagcatgagac

SEQ ID NO: 676 - DNA, 31 bp, Artificial Sequence
  Probe
ccggctagctcagtcggtagagcatgagact

SEQ ID NO: 677 - DNA, 32 bp, Artificial Sequence
  Probe
ccggctagctcagtcggtagagcatgagactc

SEQ ID NO: 678 - DNA, 27 bp, Artificial Sequence
  Probe
ccggctagctcagtcggtagagcatgg

SEQ ID NO: 679 - DNA, 29 bp, Artificial Sequence
  Probe
ccggctagctcagtcggtagagcatggga

SEQ ID NO: 680 - DNA, 30 bp, Artificial Sequence
  Probe
ccggctagctcagtcggtagagcatgggac

SEQ ID NO: 681 - DNA, 31 bp, Artificial Sequence
  Probe
ccggctagctcagtcggtagagcatgggact

SEQ ID NO: 682 - DNA, 32 bp, Artificial Sequence
  Probe
ccggctagctcagtcggtagagcatgggactc

SEQ ID NO: 683 - DNA, 33 bp, Artificial Sequence
  Probe
ccggctagctcagtcggtagagcatgggactct

SEQ ID NO: 684 - DNA, 34 bp, Artificial Sequence
  Probe
ccggctagctcagtcggtagagcatgggactctt

SEQ ID NO: 685 - DNA, 50 bp, Artificial Sequence
  Probe
ccggtaatcgcataaaacttaaaactttacagtcagaggttcaattcctc

SEQ ID NO: 686 - DNA, 29 bp, Artificial Sequence
  Probe
ccgtgatcgtatagtggttagtactctgc

SEQ ID NO: 687 - DNA, 31 bp, Artificial Sequence
  Probe
ccgtgatcgtatagtggttagtactctgcgt

SEQ ID NO: 688 - DNA, 33 bp, Artificial Sequence
  Probe
ccgtgatcgtatagtggttagtactctgcgttg

SEQ ID NO: 689 - DNA, 34 bp, Artificial Sequence
  Probe
ccgtgatcgtatagtggttagtactctgcgttgt

SEQ ID NO: 690 - DNA, 35 bp, Artificial Sequence
  Probe
ccgtgatcgtatagtggttagtactctgcgttgtg

SEQ ID NO: 691 - DNA, 50 bp, Artificial Sequence
  Probe
cctcaaagcaatacactgaaaatgtttagacgggctcacatcaccccata

SEQ ID NO: 692 - DNA, 22 bp, Artificial Sequence
  Probe
cctcctcaaagcaatacactga

SEQ ID NO: 693 - DNA, 33 bp, Artificial Sequence
  Probe
cctcgttagtatagtggtgagtatccccgcctg

SEQ ID NO: 694 - DNA, 34 bp, Artificial Sequence
  Probe
cctcgttagtatagtggtgagtatccccgcctgt

SEQ ID NO: 695 - DNA, 35 bp, Artificial Sequence
  Probe
cctcgttagtatagtggtgagtatccccgcctgtc

SEQ ID NO: 696 - DNA, 33 bp, Artificial Sequence
  Probe
cctggtggtctagtggctaggattcggcgcttt

SEQ ID NO: 697 - DNA, 34 bp, Artificial Sequence
  Probe
cctggtggtctagtggctaggattcggcgctttc

SEQ ID NO: 698 - DNA, 29 bp, Artificial Sequence
  Probe
cctggtggtctagtggttaggattcggcg

SEQ ID NO: 699 - DNA, 30 bp, Artificial Sequence
  Probe
cctggtggtctagtggttaggattcggcgc

SEQ ID NO: 700 - DNA, 31 bp, Artificial Sequence
  Probe
cctggtggtctagtggttaggattcggcgct

SEQ ID NO: 701 - DNA, 32 bp, Artificial Sequence
  Probe
cctggtggtctagtggttaggattcggcgctc

SEQ ID NO: 702 - DNA, 33 bp, Artificial Sequence
  Probe
cctggtggtctagtggttaggattcggcgctct

SEQ ID NO: 703 - DNA, 34 bp, Artificial Sequence
  Probe
cctggtggtctagtggttaggattcggcgctctc

SEQ ID NO: 704 - DNA, 35 bp, Artificial Sequence
  Probe
cctggtggtctagtggttaggattcggcgctctca

SEQ ID NO: 705 - DNA, 37 bp, Artificial Sequence
  Probe
cctggtggtctagtggttaggattcggcgctctcacc

SEQ ID NO: 706 - DNA, 42 bp, Artificial Sequence
  Probe
cctgtcacgcgggagaccggggttcgattccccgacggggag

SEQ ID NO: 707 - DNA, 28 bp, Artificial Sequence
  Probe
cgaaaatgttggttatacccttcccgta

SEQ ID NO: 708 - DNA, 29 bp, Artificial Sequence
  Probe
cgaaaatgttggttatacccttcccgtac

SEQ ID NO: 709 - DNA, 30 bp, Artificial Sequence
  Probe
cgaaaatgttggttatacccttcccgtact

SEQ ID NO: 710 - DNA, 31 bp, Artificial Sequence
  Probe
cgaaaatgttggttatacccttcccgtacta

SEQ ID NO: 711 - DNA, 32 bp, Artificial Sequence
  Probe
cgaaaggttggtggttcgagcccacccaggga

SEQ ID NO: 712 - DNA, 18 bp, Artificial Sequence
  Probe
cgattctcatagtcctag

SEQ ID NO: 713 - DNA, 17 bp, Artificial Sequence
  Probe
cgcagcaacctcggttc

SEQ ID NO: 714 - DNA, 26 bp, Artificial Sequence
  Probe
cgcataaaacttaaaactttacagtc

SEQ ID NO: 715 - DNA, 27 bp, Artificial Sequence
  Probe
cgcataaaacttaaaactttacagtca

SEQ ID NO: 716 - DNA, 33 bp, Artificial Sequence
  Probe
cgcataaaacttaaaactttacagtcagaggtt

SEQ ID NO: 717 - DNA, 44 bp, Artificial Sequence
  Probe
cgcataaaacttaaaactttacagtcagaggttcaattcctctt

SEQ ID NO: 718 - DNA, 45 bp, Artificial Sequence
  Probe
cgcataaaacttaaaactttacagtcagaggttcaattcctcttc

SEQ ID NO: 719 - DNA, 33 bp, Artificial Sequence
  Probe
cgcccggatagctcagtcggtagagcatcagac

SEQ ID NO: 720 - DNA, 34 bp, Artificial Sequence
  Probe
cgcccggatagctcagtcggtagagcatcagact

SEQ ID NO: 721 - DNA, 34 bp, Artificial Sequence
  Probe
cgcccggctagctcagtcggtagagcatgggact

SEQ ID NO: 722 - DNA, 31 bp, Artificial Sequence
  Probe
cgccgctggtgtagtggtatcatgcaagatt

SEQ ID NO: 723 - DNA, 32 bp, Artificial Sequence
  Probe
cgccgctggtgtagtggtatcatgcaagattc

SEQ ID NO: 724 - DNA, 34 bp, Artificial Sequence
  Probe
cgccgctggtgtagtggtatcatgcaagattccc

SEQ ID NO: 725 - DNA, 41 bp, Artificial Sequence
  Probe
cgcctgtcacgcgggagaccggggttcgattccccgacggg

SEQ ID NO: 726 - DNA, 19 bp, Artificial Sequence
  Probe
cgcgaaaggtccccggttc

SEQ ID NO: 727 - DNA, 32 bp, Artificial Sequence
  Probe
cgcgggagaccggggttcaattccccgacggg

SEQ ID NO: 728 - DNA, 34 bp, Artificial Sequence
  Probe
cgcgggagaccggggttcaattccccgacgggga

SEQ ID NO: 729 - DNA, 35 bp, Artificial Sequence
  Probe
cgcgggagaccggggttcaattccccgacggggag

SEQ ID NO: 730 - DNA, 30 bp, Artificial Sequence
  Probe
cgcgggagaccggggttcgattccccgacg

SEQ ID NO: 731 - DNA, 31 bp, Artificial Sequence
  Probe
cgcgggagaccggggttcgattccccgacgg

SEQ ID NO: 732 - DNA, 32 bp, Artificial Sequence
  Probe
cgcgggagaccggggttcgattccccgacggg

SEQ ID NO: 733 - DNA, 33 bp, Artificial Sequence
  Probe
cgcgggagaccggggttcgattccccgacgggg

SEQ ID NO: 734 - DNA, 34 bp, Artificial Sequence
  Probe
cgcgggagaccggggttcgattccccgacgggga

SEQ ID NO: 735 - DNA, 35 bp, Artificial Sequence
  Probe
cgcgggagaccggggttcgattccccgacggggag

SEQ ID NO: 736 - DNA, 19 bp, Artificial Sequence
  Probe
cgcgggaggcccgggttcg

SEQ ID NO: 737 - DNA, 31 bp, Artificial Sequence
  Probe
cgctggtgtagtggtatcatgcaagattccc

SEQ ID NO: 738 - DNA, 17 bp, Artificial Sequence
  Probe
cggaagcgtgctgggcc

SEQ ID NO: 739 - DNA, 18 bp, Artificial Sequence
  Probe
cggaagcgtgctgggccc

SEQ ID NO: 740 - DNA, 19 bp, Artificial Sequence
  Probe
cggaagcgtgctgggccca

SEQ ID NO: 741 - DNA, 20 bp, Artificial Sequence
  Probe
cggaagcgtgctgggcccat

SEQ ID NO: 742 - DNA, 23 bp, Artificial Sequence
  Probe
cggaagcgtgctgggcccataac

SEQ ID NO: 743 - DNA, 24 bp, Artificial Sequence
  Probe
cggaagcgtgctgggcccataacc

SEQ ID NO: 744 - DNA, 25 bp, Artificial Sequence
  Probe
cggaagcgtgctgggcccataaccc

SEQ ID NO: 745 - DNA, 32 bp, Artificial Sequence
  Probe
cggaagcgtgctgggcccataacccagaggtc

SEQ ID NO: 746 - DNA, 33 bp, Artificial Sequence
  Probe
cggaagcgtgctgggcccataacccagaggtcg

SEQ ID NO: 747 - DNA, 34 bp, Artificial Sequence
  Probe
cggaagcgtgctgggcccataacccagaggtcga

SEQ ID NO: 748 - DNA, 35 bp, Artificial Sequence
  Probe
cggaagcgtgctgggcccataacccagaggtcgat

SEQ ID NO: 749 - DNA, 36 bp, Artificial Sequence
  Probe
cggaagcgtgctgggcccataacccagaggtcgatg

SEQ ID NO: 750 - DNA, 37 bp, Artificial Sequence
  Probe
cggaagcgtgctgggcccataacccagaggtcgatgg

SEQ ID NO: 751 - DNA, 38 bp, Artificial Sequence
  Probe
cggaagcgtgctgggcccataacccagaggtcgatgga

SEQ ID NO: 752 - DNA, 39 bp, Artificial Sequence
  Probe
cggaagcgtgctgggcccataacccagaggtcgatggat

SEQ ID NO: 753 - DNA, 41 bp, Artificial Sequence
  Probe
cggaagcgtgctgggcccataacccagaggtcgatggatcg

SEQ ID NO: 754 - DNA, 26 bp, Artificial Sequence
  Probe
cggagatgaaaacctttttccaagga

SEQ ID NO: 755 - DNA, 27 bp, Artificial Sequence
  Probe
cggagatgaaaacctttttccaaggac

SEQ ID NO: 756 - DNA, 28 bp, Artificial Sequence
  Probe
cggagatgaaaacctttttccaaggaca

SEQ ID NO: 757 - DNA, 25 bp, Artificial Sequence
  Probe
cggatagctcagtcggtagagcatc

SEQ ID NO: 758 - DNA, 26 bp, Artificial Sequence
  Probe
cggatagctcagtcggtagagcatca

SEQ ID NO: 759 - DNA, 27 bp, Artificial Sequence
  Probe
cggatagctcagtcggtagagcatcag

SEQ ID NO: 760 - DNA, 28 bp, Artificial Sequence
  Probe
cggatagctcagtcggtagagcatcaga

SEQ ID NO: 761 - DNA, 29 bp, Artificial Sequence
  Probe
cggatagctcagtcggtagagcatcagac

SEQ ID NO: 762 - DNA, 30 bp, Artificial Sequence
  Probe
cggatagctcagtcggtagagcatcagact

SEQ ID NO: 763 - DNA, 31 bp, Artificial Sequence
  Probe
cggatagctcagtcggtagagcatcagactt

SEQ ID NO: 764 - DNA, 32 bp, Artificial Sequence
  Probe
cggatagctcagtcggtagagcatcagacttt

SEQ ID NO: 765 - DNA, 33 bp, Artificial Sequence
  Probe
cggatagctcagtcggtagagcatcagactttt

SEQ ID NO: 766 - DNA, 30 bp, Artificial Sequence
  Probe
cggcccgggttcgactcccggtgtgggaac

SEQ ID NO: 767 - DNA, 25 bp, Artificial Sequence
  Probe
cggctagctcagtcggtagagcatg

SEQ ID NO: 768 - DNA, 26 bp, Artificial Sequence
  Probe
cggctagctcagtcggtagagcatga

SEQ ID NO: 769 - DNA, 28 bp, Artificial Sequence
  Probe
cggctagctcagtcggtagagcatgaga

SEQ ID NO: 770 - DNA, 29 bp, Artificial Sequence
  Probe
cggctagctcagtcggtagagcatgagac

SEQ ID NO: 771 - DNA, 30 bp, Artificial Sequence
  Probe
cggctagctcagtcggtagagcatgagact

SEQ ID NO: 772 - DNA, 31 bp, Artificial Sequence
  Probe
cggctagctcagtcggtagagcatgagactc

SEQ ID NO: 773 - DNA, 32 bp, Artificial Sequence
  Probe
cggctagctcagtcggtagagcatgagactct

SEQ ID NO: 774 - DNA, 33 bp, Artificial Sequence
  Probe
cggctagctcagtcggtagagcatgagactctt

SEQ ID NO: 775 - DNA, 26 bp, Artificial Sequence
  Probe
cggctagctcagtcggtagagcatgg

SEQ ID NO: 776 - DNA, 28 bp, Artificial Sequence
  Probe
cggctagctcagtcggtagagcatggga

SEQ ID NO: 777 - DNA, 29 bp, Artificial Sequence
  Probe
cggctagctcagtcggtagagcatgggac

SEQ ID NO: 778 - DNA, 30 bp, Artificial Sequence
  Probe
cggctagctcagtcggtagagcatgggact

SEQ ID NO: 779 - DNA, 31 bp, Artificial Sequence
  Probe
cggctagctcagtcggtagagcatgggactc

SEQ ID NO: 780 - DNA, 32 bp, Artificial Sequence
  Probe
cggctagctcagtcggtagagcatgggactct

SEQ ID NO: 781 - DNA, 33 bp, Artificial Sequence
  Probe
cggctagctcagtcggtagagcatgggactctt

SEQ ID NO: 782 - DNA, 27 bp, Artificial Sequence
  Probe
cgggagaccggggttcaattccccgac

SEQ ID NO: 783 - DNA, 32 bp, Artificial Sequence
  Probe
cgggagaccggggttcaattccccgacgggga

SEQ ID NO: 784 - DNA, 33 bp, Artificial Sequence
  Probe
cgggagaccggggttcaattccccgacggggag

SEQ ID NO: 785 - DNA, 29 bp, Artificial Sequence
  Probe
cgggagaccggggttcgattccccgacgg

SEQ ID NO: 786 - DNA, 30 bp, Artificial Sequence
  Probe
cgggagaccggggttcgattccccgacggg

SEQ ID NO: 787 - DNA, 31 bp, Artificial Sequence
  Probe
cgggagaccggggttcgattccccgacgggg

SEQ ID NO: 788 - DNA, 32 bp, Artificial Sequence
  Probe
cgggagaccggggttcgattccccgacgggga

SEQ ID NO: 789 - DNA, 33 bp, Artificial Sequence
  Probe
cgggagaccggggttcgattccccgacggggag

SEQ ID NO: 790 - DNA, 34 bp, Artificial Sequence
  Probe
cggtaatcgcataaaacttaaaactttacagtca

SEQ ID NO: 791 - DNA, 50 bp, Artificial Sequence
  Probe
cggtaatcgcataaaacttaaaactttacagtcagaggttcaattcctct

SEQ ID NO: 792 - DNA, 28 bp, Artificial Sequence
  Probe
cgtatagtggttagtactctgcgttgtg

SEQ ID NO: 793 - DNA, 28 bp, Artificial Sequence
  Probe
cgtgatcgtatagtggttagtactctgc

SEQ ID NO: 794 - DNA, 32 bp, Artificial Sequence
  Probe
cgtgatcgtatagtggttagtactctgcgttg

SEQ ID NO: 795 - DNA, 33 bp, Artificial Sequence
  Probe
cgtgatcgtatagtggttagtactctgcgttgt

SEQ ID NO: 796 - DNA, 34 bp, Artificial Sequence
  Probe
cgtgatcgtatagtggttagtactctgcgttgtg

SEQ ID NO: 797 - DNA, 22 bp, Artificial Sequence
  Probe
cgtgctgggcccataacccaga

SEQ ID NO: 798 - DNA, 27 bp, Artificial Sequence
  Probe
cgtgctgggcccataacccagaggtcg

SEQ ID NO: 799 - DNA, 28 bp, Artificial Sequence
  Probe
cgtgctgggcccataacccagaggtcga

SEQ ID NO: 800 - DNA, 29 bp, Artificial Sequence
  Probe
cgtgctgggcccataacccagaggtcgat

SEQ ID NO: 801 - DNA, 30 bp, Artificial Sequence
  Probe
cgtgctgggcccataacccagaggtcgatg

SEQ ID NO: 802 - DNA, 31 bp, Artificial Sequence
  Probe
cgtgctgggcccataacccagaggtcgatgg

SEQ ID NO: 803 - DNA, 32 bp, Artificial Sequence
  Probe
cgttagtatagtggtgagtatccccgcctgtc

SEQ ID NO: 804 - DNA, 50 bp, Artificial Sequence
  Probe
ctaaataagctatcgggcccataccccgaaaatgttggttatacccttcc

SEQ ID NO: 805 - DNA, 23 bp, Artificial Sequence
  Probe
ctaagccagggattgtgggttcg

SEQ ID NO: 806 - DNA, 50 bp, Artificial Sequence
  Probe
ctaatacaccagtcttgtaaaccggagatgaaaacctttttccaaggaca

SEQ ID NO: 807 - DNA, 30 bp, Artificial Sequence
  Probe
ctagctcagtcggtagagcatgggactctt

SEQ ID NO: 808 - DNA, 22 bp, Artificial Sequence
  Probe
ctagtggttaggattcggcgct

SEQ ID NO: 809 - DNA, 46 bp, Artificial Sequence
  Probe
ctcaaagcaatacactgaaaatgtttagacgggctcacatcacccc

SEQ ID NO: 810 - DNA, 21 bp, Artificial Sequence
  Probe
ctcacaagaactgctaactca

SEQ ID NO: 811 - DNA, 46 bp, Artificial Sequence
  Probe
ctcacaagaactgctaactcatgcccccatgtctaacaacatggct

SEQ ID NO: 812 - DNA, 49 bp, Artificial Sequence
  Probe
ctcacaagaactgctaactcatgcccccatgtctaacaacatggctttc

SEQ ID NO: 813 - DNA, 50 bp, Artificial Sequence
  Probe
ctcacaagaactgctaactcatgcccccatgtctaacaacatggctttct

SEQ ID NO: 814 - DNA, 19 bp, Artificial Sequence
  Probe
ctcacacgcgaaaggtccc

SEQ ID NO: 815 - DNA, 23 bp, Artificial Sequence
  Probe
ctcacacgcgaaaggtccccggt

SEQ ID NO: 816 - DNA, 32 bp, Artificial Sequence
  Probe
ctcagggatgggttcgattctcatagtcctag

SEQ ID NO: 817 - DNA, 28 bp, Artificial Sequence
  Probe
ctccgaggtgattttcatattgaattgc

SEQ ID NO: 818 - DNA, 29 bp, Artificial Sequence
  Probe
ctccgaggtgattttcatattgaattgca

SEQ ID NO: 819 - DNA, 33 bp, Artificial Sequence
  Probe
ctcgttagtatagtggtgagtatccccgcctgt

SEQ ID NO: 820 - DNA, 34 bp, Artificial Sequence
  Probe
ctcgttagtatagtggtgagtatccccgcctgtc

SEQ ID NO: 821 - DNA, 35 bp, Artificial Sequence
  Probe
ctcgttagtatagtggtgagtatccccgcctgtca

SEQ ID NO: 822 - DNA, 34 bp, Artificial Sequence
  Probe
ctcgttagtatagtggttagtatccccgcctgtc

SEQ ID NO: 823 - DNA, 18 bp, Artificial Sequence
  Probe
ctctgaatccagcgatcc

SEQ ID NO: 824 - DNA, 19 bp, Artificial Sequence
  Probe
ctctgaatccagcgatccg

SEQ ID NO: 825 - DNA, 20 bp, Artificial Sequence
  Probe
ctctgaatccagcgatccga

SEQ ID NO: 826 - DNA, 24 bp, Artificial Sequence
  Probe
ctctgaatccagcgatccgagttc

SEQ ID NO: 827 - DNA, 25 bp, Artificial Sequence
  Probe
ctctgaatccagcgatccgagttca

SEQ ID NO: 828 - DNA, 18 bp, Artificial Sequence
  Probe
ctgaaggtcgtgagttcg

SEQ ID NO: 829 - DNA, 18 bp, Artificial Sequence
  Probe
ctgaatccagcgatccga

SEQ ID NO: 830 - DNA, 19 bp, Artificial Sequence
  Probe
ctgaatccagcgatccgag

SEQ ID NO: 831 - DNA, 22 bp, Artificial Sequence
  Probe
ctgaatccagcgatccgagttc

SEQ ID NO: 832 - DNA, 23 bp, Artificial Sequence
  Probe
ctgaatccagcgatccgagttca

SEQ ID NO: 833 - DNA, 39 bp, Artificial Sequence
  Probe
ctgaatccagcgatccgagttcaaatctcggtggaacct

SEQ ID NO: 834 - DNA, 27 bp, Artificial Sequence
  Probe
ctgacaacagaggcttacgacccctta

SEQ ID NO: 835 - DNA, 32 bp, Artificial Sequence
  Probe
ctgacaacagaggcttacgaccccttatttac

SEQ ID NO: 836 - DNA, 33 bp, Artificial Sequence
  Probe
ctgacaacagaggcttacgaccccttatttacc

SEQ ID NO: 837 - DNA, 28 bp, Artificial Sequence
  Probe
ctggtggtctagtggttaggattcggcg

SEQ ID NO: 838 - DNA, 29 bp, Artificial Sequence
  Probe
ctggtggtctagtggttaggattcggcgc

SEQ ID NO: 839 - DNA, 30 bp, Artificial Sequence
  Probe
ctggtggtctagtggttaggattcggcgct

SEQ ID NO: 840 - DNA, 31 bp, Artificial Sequence
  Probe
ctggtggtctagtggttaggattcggcgctc

SEQ ID NO: 841 - DNA, 32 bp, Artificial Sequence
  Probe
ctggtggtctagtggttaggattcggcgctct

SEQ ID NO: 842 - DNA, 33 bp, Artificial Sequence
  Probe
ctggtggtctagtggttaggattcggcgctctc

SEQ ID NO: 843 - DNA, 29 bp, Artificial Sequence
  Probe
ctggtgtagtggtatcatgcaagattccc

SEQ ID NO: 844 - DNA, 50 bp, Artificial Sequence
  Probe
ctgtaaagctaacttagcattaaccttttaagttaaagattaagagaacc

SEQ ID NO: 845 - DNA, 22 bp, Artificial Sequence
  Probe
ctgtcacgcgggagaccggggt

SEQ ID NO: 846 - DNA, 39 bp, Artificial Sequence
  Probe
ctgtcacgcgggagaccggggttcaattccccgacgggg

SEQ ID NO: 847 - DNA, 21 bp, Artificial Sequence
  Probe
ctgttaaccgaaaggttggtg

SEQ ID NO: 848 - DNA, 24 bp, Artificial Sequence
  Probe
cttaaaactttacagtcagaggtt

SEQ ID NO: 849 - DNA, 50 bp, Artificial Sequence
  Probe
cttaacacaaagcacccaacttacacttaggagatttcaacttaacttga

SEQ ID NO: 850 - DNA, 50 bp, Artificial Sequence
  Probe
cttagcattaaccttttaagttaaagattaagagaaccaacacctcttta

SEQ ID NO: 851 - DNA, 17 bp, Artificial Sequence
  Probe
ctttacagtcagaggtt

SEQ ID NO: 852 - DNA, 29 bp, Artificial Sequence
  Probe
ctttacagtcagaggttcaattcctcttc

SEQ ID NO: 853 - DNA, 18 bp, Artificial Sequence
  Probe
gaaaaagtcatggaggcc

SEQ ID NO: 854 - DNA, 19 bp, Artificial Sequence
  Probe
gaaaaagtcatggaggcca

SEQ ID NO: 855 - DNA, 21 bp, Artificial Sequence
  Probe
gaaaaagtcatggaggccatg

SEQ ID NO: 856 - DNA, 26 bp, Artificial Sequence
  Probe
gaaaaagtcatggaggccatggggtt

SEQ ID NO: 857 - DNA, 27 bp, Artificial Sequence
  Probe
gaaaaagtcatggaggccatggggttg

SEQ ID NO: 858 - DNA, 28 bp, Artificial Sequence
  Probe
gaaaaagtcatggaggccatggggttgg

SEQ ID NO: 859 - DNA, 23 bp, Artificial Sequence
  Probe
gaaaatgtttagacgggctcaca

SEQ ID NO: 860 - DNA, 24 bp, Artificial Sequence
  Probe
gaaaatgtttagacgggctcacat

SEQ ID NO: 861 - DNA, 30 bp, Artificial Sequence
  Probe
gaaaatgtttagacgggctcacatcacccc

SEQ ID NO: 862 - DNA, 31 bp, Artificial Sequence
  Probe
gaaaatgtttagacgggctcacatcacccca

SEQ ID NO: 863 - DNA, 32 bp, Artificial Sequence
  Probe
gaaaatgtttagacgggctcacatcaccccat

SEQ ID NO: 864 - DNA, 33 bp, Artificial Sequence
  Probe
gaaaatgtttagacgggctcacatcaccccata

SEQ ID NO: 865 - DNA, 17 bp, Artificial Sequence
  Probe
gaaagctcacaagaact

SEQ ID NO: 866 - DNA, 19 bp, Artificial Sequence
  Probe
gaaagctcacaagaactgc

SEQ ID NO: 867 - DNA, 20 bp, Artificial Sequence
  Probe
gaaagctcacaagaactgct

SEQ ID NO: 868 - DNA, 21 bp, Artificial Sequence
  Probe
gaaagctcacaagaactgcta

SEQ ID NO: 869 - DNA, 23 bp, Artificial Sequence
  Probe
gaaagctcacaagaactgctaac

SEQ ID NO: 870 - DNA, 24 bp, Artificial Sequence
  Probe
gaaagctcacaagaactgctaact

SEQ ID NO: 871 - DNA, 25 bp, Artificial Sequence
  Probe
gaaagctcacaagaactgctaactc

SEQ ID NO: 872 - DNA, 26 bp, Artificial Sequence
  Probe
gaaagctcacaagaactgctaactca

SEQ ID NO: 873 - DNA, 27 bp, Artificial Sequence
  Probe
gaaagctcacaagaactgctaactcat

SEQ ID NO: 874 - DNA, 28 bp, Artificial Sequence
  Probe
gaaagctcacaagaactgctaactcatg

SEQ ID NO: 875 - DNA, 29 bp, Artificial Sequence
  Probe
gaaagctcacaagaactgctaactcatgc

SEQ ID NO: 876 - DNA, 31 bp, Artificial Sequence
  Probe
gaaagctcacaagaactgctaactcatgccc

SEQ ID NO: 877 - DNA, 41 bp, Artificial Sequence
  Probe
gaaagctcacaagaactgctaactcatgcccccatgtctaa

SEQ ID NO: 878 - DNA, 49 bp, Artificial Sequence
  Probe
gaaagctcacaagaactgctaactcatgcccccatgtctaacaacatgg

SEQ ID NO: 879 - DNA, 50 bp, Artificial Sequence
  Probe
gaaagctcacaagaactgctaactcatgcccccatgtctaacaacatggc

SEQ ID NO: 880 - DNA, 31 bp, Artificial Sequence
  Probe
gaaaggttggtggttcgagcccacccaggga

SEQ ID NO: 881 - DNA, 32 bp, Artificial Sequence
  Probe
gaaaggttggtggttcgagcccacccagggac

SEQ ID NO: 882 - DNA, 30 bp, Artificial Sequence
  Probe
gaagattccaggttcgactcctggctggct

SEQ ID NO: 883 - DNA, 30 bp, Artificial Sequence
  Probe
gaagattctaggttcgactcctggctggct

SEQ ID NO: 884 - DNA, 31 bp, Artificial Sequence
  Probe
gaagattctaggttcgactcctggctggctc

SEQ ID NO: 885 - DNA, 32 bp, Artificial Sequence
  Probe
gaagattctaggttcgactcctggctggctcg

SEQ ID NO: 886 - DNA, 33 bp, Artificial Sequence
  Probe
gaagattctaggttcgactcctggctggctcgc

SEQ ID NO: 887 - DNA, 16 bp, Artificial Sequence
  Probe
gaagattgagggttcg

SEQ ID NO: 888 - DNA, 25 bp, Artificial Sequence
  Probe
gaagattgagggttcgagtcccttc

SEQ ID NO: 889 - DNA, 26 bp, Artificial Sequence
  Probe
gaagattgagggttcgagtcccttcg

SEQ ID NO: 890 - DNA, 30 bp, Artificial Sequence
  Probe
gaagattgagggttcgagtcccttcgtggt

SEQ ID NO: 891 - DNA, 31 bp, Artificial Sequence
  Probe
gaaggtcctgggttcgagccccagtggaacc

SEQ ID NO: 892 - DNA, 33 bp, Artificial Sequence
  Probe
gaaggtcctgggttcgagccccagtggaaccac

SEQ ID NO: 893 - DNA, 16 bp, Artificial Sequence
  Probe
gaatccagcgatccga

SEQ ID NO: 894 - DNA, 20 bp, Artificial Sequence
  Probe
gaatccagcgatccgagttc

SEQ ID NO: 895 - DNA, 21 bp, Artificial Sequence
  Probe
gaatccagcgatccgagttca

SEQ ID NO: 896 - DNA, 31 bp, Artificial Sequence
  Probe
gaatccagcgatccgagttcaaatctcggtg

SEQ ID NO: 897 - DNA, 37 bp, Artificial Sequence
  Probe
gaatccagcgatccgagttcaaatctcggtggaacct

SEQ ID NO: 898 - DNA, 30 bp, Artificial Sequence
  Probe
gaatctgacaacagaggcttacgacccctt

SEQ ID NO: 899 - DNA, 31 bp, Artificial Sequence
  Probe
gaatctgacaacagaggcttacgacccctta

SEQ ID NO: 900 - DNA, 32 bp, Artificial Sequence
  Probe
gaatctgacaacagaggcttacgaccccttat

SEQ ID NO: 901 - DNA, 37 bp, Artificial Sequence
  Probe
gaatctgacaacagaggcttacgaccccttatttacc

SEQ ID NO: 902 - DNA, 25 bp, Artificial Sequence
  Probe
gacaacagaggcttacgacccctta

SEQ ID NO: 903 - DNA, 31 bp, Artificial Sequence
  Probe
gacaacagaggcttacgaccccttatttacc

SEQ ID NO: 904 - DNA, 31 bp, Artificial Sequence
  Probe
gacccagtggcctaatggataaggcatcagc

SEQ ID NO: 905 - DNA, 32 bp, Artificial Sequence
  Probe
gacccagtggcctaatggataaggcatcagcc

SEQ ID NO: 906 - DNA, 33 bp, Artificial Sequence
  Probe
gacccagtggcctaatggataaggcatcagcct

SEQ ID NO: 907 - DNA, 34 bp, Artificial Sequence
  Probe
gacccagtggcctaatggataaggcatcagcctc

SEQ ID NO: 908 - DNA, 35 bp, Artificial Sequence
  Probe
gacccagtggcctaatggataaggcatcagcctcc

SEQ ID NO: 909 - DNA, 36 bp, Artificial Sequence
  Probe
gacccagtggcctaatggataaggcatcagcctccg

SEQ ID NO: 910 - DNA, 19 bp, Artificial Sequence
  Probe
gaccgcgtggcctaatgga

SEQ ID NO: 911 - DNA, 27 bp, Artificial Sequence
  Probe
gaccggggttcgattccccgacgggga

SEQ ID NO: 912 - DNA, 28 bp, Artificial Sequence
  Probe
gaccggggttcgattccccgacggggag

SEQ ID NO: 913 - DNA, 18 bp, Artificial Sequence
  Probe
gacctcgtggcgcaacgg

SEQ ID NO: 914 - DNA, 18 bp, Artificial Sequence
  Probe
gacctcgtggcgcaatgg

SEQ ID NO: 915 - DNA, 21 bp, Artificial Sequence
  Probe
gacctcgtggcgcaatggtag

SEQ ID NO: 916 - DNA, 23 bp, Artificial Sequence
  Probe
gacctcgtggcgcaatggtagcg

SEQ ID NO: 917 - DNA, 24 bp, Artificial Sequence
  Probe
gacctcgtggcgcaatggtagcgc

SEQ ID NO: 918 - DNA, 24 bp, Artificial Sequence
  Probe
gacgaggtggccgagtggttaagg

SEQ ID NO: 919 - DNA, 25 bp, Artificial Sequence
  Probe
gacgaggtggccgagtggttaaggc

SEQ ID NO: 920 - DNA, 18 bp, Artificial Sequence
  Probe
gagaaagctcacaagaac

SEQ ID NO: 921 - DNA, 19 bp, Artificial Sequence
  Probe
gagaaagctcacaagaact

SEQ ID NO: 922 - DNA, 20 bp, Artificial Sequence
  Probe
gagaaagctcacaagaactg

SEQ ID NO: 923 - DNA, 21 bp, Artificial Sequence
  Probe
gagaaagctcacaagaactgc

SEQ ID NO: 924 - DNA, 22 bp, Artificial Sequence
  Probe
gagaaagctcacaagaactgct

SEQ ID NO: 925 - DNA, 23 bp, Artificial Sequence
  Probe
gagaaagctcacaagaactgcta

SEQ ID NO: 926 - DNA, 24 bp, Artificial Sequence
  Probe
gagaaagctcacaagaactgctaa

SEQ ID NO: 927 - DNA, 25 bp, Artificial Sequence
  Probe
gagaaagctcacaagaactgctaac

SEQ ID NO: 928 - DNA, 26 bp, Artificial Sequence
  Probe
gagaaagctcacaagaactgctaact

SEQ ID NO: 929 - DNA, 27 bp, Artificial Sequence
  Probe
gagaaagctcacaagaactgctaactc

SEQ ID NO: 930 - DNA, 28 bp, Artificial Sequence
  Probe
gagaaagctcacaagaactgctaactca

SEQ ID NO: 931 - DNA, 29 bp, Artificial Sequence
  Probe
gagaaagctcacaagaactgctaactcat

SEQ ID NO: 932 - DNA, 30 bp, Artificial Sequence
  Probe
gagaaagctcacaagaactgctaactcatg

SEQ ID NO: 933 - DNA, 31 bp, Artificial Sequence
  Probe
gagaaagctcacaagaactgctaactcatgc

SEQ ID NO: 934 - DNA, 32 bp, Artificial Sequence
  Probe
gagaaagctcacaagaactgctaactcatgcc

SEQ ID NO: 935 - DNA, 33 bp, Artificial Sequence
  Probe
gagaaagctcacaagaactgctaactcatgccc

SEQ ID NO: 936 - DNA, 34 bp, Artificial Sequence
  Probe
gagaaagctcacaagaactgctaactcatgcccc

SEQ ID NO: 937 - DNA, 35 bp, Artificial Sequence
  Probe
gagaaagctcacaagaactgctaactcatgccccc

SEQ ID NO: 938 - DNA, 36 bp, Artificial Sequence
  Probe
gagaaagctcacaagaactgctaactcatgccccca

SEQ ID NO: 939 - DNA, 37 bp, Artificial Sequence
  Probe
gagaaagctcacaagaactgctaactcatgcccccat

SEQ ID NO: 940 - DNA, 38 bp, Artificial Sequence
  Probe
gagaaagctcacaagaactgctaactcatgcccccatg

SEQ ID NO: 941 - DNA, 39 bp, Artificial Sequence
  Probe
gagaaagctcacaagaactgctaactcatgcccccatgt

SEQ ID NO: 942 - DNA, 40 bp, Artificial Sequence
  Probe
gagaaagctcacaagaactgctaactcatgcccccatgtc

SEQ ID NO: 943 - DNA, 41 bp, Artificial Sequence
  Probe
gagaaagctcacaagaactgctaactcatgcccccatgtct

SEQ ID NO: 944 - DNA, 42 bp, Artificial Sequence
  Probe
gagaaagctcacaagaactgctaactcatgcccccatgtcta

SEQ ID NO: 945 - DNA, 43 bp, Artificial Sequence
  Probe
gagaaagctcacaagaactgctaactcatgcccccatgtctaa

SEQ ID NO: 946 - DNA, 44 bp, Artificial Sequence
  Probe
gagaaagctcacaagaactgctaactcatgcccccatgtctaac

SEQ ID NO: 947 - DNA, 45 bp, Artificial Sequence
  Probe
gagaaagctcacaagaactgctaactcatgcccccatgtctaaca

SEQ ID NO: 948 - DNA, 46 bp, Artificial Sequence
  Probe
gagaaagctcacaagaactgctaactcatgcccccatgtctaacaa

SEQ ID NO: 949 - DNA, 49 bp, Artificial Sequence
  Probe
gagaaagctcacaagaactgctaactcatgcccccatgtctaacaacat

SEQ ID NO: 950 - DNA, 50 bp, Artificial Sequence
  Probe
gagaaagctcacaagaactgctaactcatgcccccatgtctaacaacatg

SEQ ID NO: 951 - DNA, 31 bp, Artificial Sequence
  Probe
gagaatagtttaaattagaatcttagctttg

SEQ ID NO: 952 - DNA, 32 bp, Artificial Sequence
  Probe
gagaatagtttaaattagaatcttagctttgg

SEQ ID NO: 953 - DNA, 24 bp, Artificial Sequence
  Probe
gagaccggggttcaattccccgac

SEQ ID NO: 954 - DNA, 29 bp, Artificial Sequence
  Probe
gagaccggggttcaattccccgacgggga

SEQ ID NO: 955 - DNA, 24 bp, Artificial Sequence
  Probe
gagaccggggttcgattccccgac

SEQ ID NO: 956 - DNA, 29 bp, Artificial Sequence
  Probe
gagaccggggttcgattccccgacgggga

SEQ ID NO: 957 - DNA, 30 bp, Artificial Sequence
  Probe
gagaccggggttcgattccccgacggggag

SEQ ID NO: 958 - DNA, 18 bp, Artificial Sequence
  Probe
gagcccggtaatcgcata

SEQ ID NO: 959 - DNA, 25 bp, Artificial Sequence
  Probe
gagcccggtaatcgcataaaactta

SEQ ID NO: 960 - DNA, 30 bp, Artificial Sequence
  Probe
gagcccggtaatcgcataaaacttaaaact

SEQ ID NO: 961 - DNA, 31 bp, Artificial Sequence
  Probe
gagcccggtaatcgcataaaacttaaaactt

SEQ ID NO: 962 - DNA, 38 bp, Artificial Sequence
  Probe
gagcccggtaatcgcataaaacttaaaactttacagtc

SEQ ID NO: 963 - DNA, 39 bp, Artificial Sequence
  Probe
gagcccggtaatcgcataaaacttaaaactttacagtca

SEQ ID NO: 964 - DNA, 45 bp, Artificial Sequence
  Probe
gagcccggtaatcgcataaaacttaaaactttacagtcagaggtt

SEQ ID NO: 965 - DNA, 50 bp, Artificial Sequence
  Probe
gagcccggtaatcgcataaaacttaaaactttacagtcagaggttcaatt

SEQ ID NO: 966 - DNA, 17 bp, Artificial Sequence
  Probe
gagcttaaaccccctta

SEQ ID NO: 967 - DNA, 23 bp, Artificial Sequence
  Probe
gagcttaaacccccttatttcta

SEQ ID NO: 968 - DNA, 29 bp, Artificial Sequence
  Probe
gagtaaataataggagcttaaaccccctt

SEQ ID NO: 969 - DNA, 30 bp, Artificial Sequence
  Probe
gagtaaataataggagcttaaaccccctta

SEQ ID NO: 970 - DNA, 31 bp, Artificial Sequence
  Probe
gagtaaataataggagcttaaacccccttat

SEQ ID NO: 971 - DNA, 35 bp, Artificial Sequence
  Probe
gagtaaataataggagcttaaacccccttatttct

SEQ ID NO: 972 - DNA, 36 bp, Artificial Sequence
  Probe
gagtaaataataggagcttaaacccccttatttcta

SEQ ID NO: 973 - DNA, 50 bp, Artificial Sequence
  Probe
gataaaagagttactttgatagagtaaataataggagcttaaaccccctt

SEQ ID NO: 974 - DNA, 33 bp, Artificial Sequence
  Probe
gatagagtaaataataggagcttaaaccccctt

SEQ ID NO: 975 - DNA, 34 bp, Artificial Sequence
  Probe
gatagagtaaataataggagcttaaaccccctta

SEQ ID NO: 976 - DNA, 40 bp, Artificial Sequence
  Probe
gatagagtaaataataggagcttaaacccccttatttcta

SEQ ID NO: 977 - DNA, 50 bp, Artificial Sequence
  Probe
gattagggtgcttagctgttaactaagtgtttgtgggtttaagtcccatt

SEQ ID NO: 978 - DNA, 17 bp, Artificial Sequence
  Probe
gattccggatcagaaga

SEQ ID NO: 979 - DNA, 22 bp, Artificial Sequence
  Probe
gattgagggttcgagtcccttc

SEQ ID NO: 980 - DNA, 23 bp, Artificial Sequence
  Probe
gattgagggttcgagtcccttcg

SEQ ID NO: 981 - DNA, 27 bp, Artificial Sequence
  Probe
gattgagggttcgagtcccttcgtggt

SEQ ID NO: 982 - DNA, 33 bp, Artificial Sequence
  Probe
gattgtgaatctgacaacagaggcttacgaccc

SEQ ID NO: 983 - DNA, 34 bp, Artificial Sequence
  Probe
gattgtgaatctgacaacagaggcttacgacccc

SEQ ID NO: 984 - DNA, 37 bp, Artificial Sequence
  Probe
gattgtgaatctgacaacagaggcttacgacccctta

SEQ ID NO: 985 - DNA, 38 bp, Artificial Sequence
  Probe
gattgtgaatctgacaacagaggcttacgaccccttat

SEQ ID NO: 986 - DNA, 39 bp, Artificial Sequence
  Probe
gattgtgaatctgacaacagaggcttacgaccccttatt

SEQ ID NO: 987 - DNA, 42 bp, Artificial Sequence
  Probe
gattgtgaatctgacaacagaggcttacgaccccttatttac

SEQ ID NO: 988 - DNA, 43 bp, Artificial Sequence
  Probe
gattgtgaatctgacaacagaggcttacgaccccttatttacc

SEQ ID NO: 989 - DNA, 33 bp, Artificial Sequence
  Probe
gcaatacactgaaaatgtttagacgggctcaca

SEQ ID NO: 990 - DNA, 30 bp, Artificial Sequence
  Probe
gcactctggactctgaatccagcgatccga

SEQ ID NO: 991 - DNA, 32 bp, Artificial Sequence
  Probe
gcactggtggttcagtggtagaattctcgcct

SEQ ID NO: 992 - DNA, 35 bp, Artificial Sequence
  Probe
gcagaaggtcctgggttcgagccccagtggaacca

SEQ ID NO: 993 - DNA, 36 bp, Artificial Sequence
  Probe
gcagaaggtcctgggttcgagccccagtggaaccac

SEQ ID NO: 994 - DNA, 17 bp, Artificial Sequence
  Probe
gcagcaacctcggttcg

SEQ ID NO: 995 - DNA, 24 bp, Artificial Sequence
  Probe
gcagcgatggccgagtggttaagg

SEQ ID NO: 996 - DNA, 25 bp, Artificial Sequence
  Probe
gcagcgatggccgagtggttaaggc

SEQ ID NO: 997 - DNA, 24 bp, Artificial Sequence
  Probe
gcagcggaagcgtgctgggcccat

SEQ ID NO: 998 - DNA, 26 bp, Artificial Sequence
  Probe
gcataaaacttaaaactttacagtca

SEQ ID NO: 999 - DNA, 44 bp, Artificial Sequence
  Probe
gcataaaacttaaaactttacagtcagaggttcaattcctcttc

SEQ ID NO: 1000 - DNA, 28 bp, Artificial Sequence
  Probe
gcatgggtggttcagtggtagaattctc

SEQ ID NO: 1001 - DNA, 29 bp, Artificial Sequence
  Probe
gcatgggtggttcagtggtagaattctcg

SEQ ID NO: 1002 - DNA, 30 bp, Artificial Sequence
  Probe
gcatgggtggttcagtggtagaattctcgc

SEQ ID NO: 1003 - DNA, 31 bp, Artificial Sequence
  Probe
gcatgggtggttcagtggtagaattctcgcc

SEQ ID NO: 1004 - DNA, 32 bp, Artificial Sequence
  Probe
gcatgggtggttcagtggtagaattctcgcct

SEQ ID NO: 1005 - DNA, 33 bp, Artificial Sequence
  Probe
gcatgggtggttcagtggtagaattctcgcctg

SEQ ID NO: 1006 - DNA, 34 bp, Artificial Sequence
  Probe
gcatgggtggttcagtggtagaattctcgcctgc

SEQ ID NO: 1007 - DNA, 35 bp, Artificial Sequence
  Probe
gcatgggtggttcagtggtagaattctcgcctgcc

SEQ ID NO: 1008 - DNA, 36 bp, Artificial Sequence
  Probe
gcatgggtggttcagtggtagaattctcgcctgcca

SEQ ID NO: 1009 - DNA, 38 bp, Artificial Sequence
  Probe
gcatgggtggttcagtggtagaattctcgcctgccacg

SEQ ID NO: 1010 - DNA, 50 bp, Artificial Sequence
  Probe
gcatgggtggttcagtggtagaattctcgcctgccacgcgggaggcccgg

SEQ ID NO: 1011 - DNA, 34 bp, Artificial Sequence
  Probe
gcattaaccttttaagttaaagattaagagaacc

SEQ ID NO: 1012 - DNA, 50 bp, Artificial Sequence
  Probe
gcattaaccttttaagttaaagattaagagaaccaacacctctttacagt

SEQ ID NO: 1013 - DNA, 32 bp, Artificial Sequence
  Probe
gcattggtggttcaatggtagaattctcgcct

SEQ ID NO: 1014 - DNA, 38 bp, Artificial Sequence
  Probe
gcattggtggttcagtggtagaattctcgcctgccacg

SEQ ID NO: 1015 - DNA, 39 bp, Artificial Sequence
  Probe
gcattggtggttcagtggtagaattctcgcctgccacgc

SEQ ID NO: 1016 - DNA, 40 bp, Artificial Sequence
  Probe
gcattggtggttcagtggtagaattctcgcctgccacgcg

SEQ ID NO: 1017 - DNA, 41 bp, Artificial Sequence
  Probe
gcattggtggttcagtggtagaattctcgcctgccacgcgg

SEQ ID NO: 1018 - DNA, 44 bp, Artificial Sequence
  Probe
gcattggtggttcagtggtagaattctcgcctgccacgcgggag

SEQ ID NO: 1019 - DNA, 49 bp, Artificial Sequence
  Probe
gcattggtggttcagtggtagaattctcgcctgccacgcgggaggcccg

SEQ ID NO: 1020 - DNA, 50 bp, Artificial Sequence
  Probe
gcattggtggttcagtggtagaattctcgcctgccacgcgggaggcccgg

SEQ ID NO: 1021 - DNA, 17 bp, Artificial Sequence
  Probe
gccaaggtcgcgggttc

SEQ ID NO: 1022 - DNA, 23 bp, Artificial Sequence
  Probe
gccacgcgggaggcccgggttcg

SEQ ID NO: 1023 - DNA, 19 bp, Artificial Sequence
  Probe
gccagggattgtgggttcg

SEQ ID NO: 1024 - DNA, 50 bp, Artificial Sequence
  Probe
gccagttgattagggtgcttagctgttaactaagtgtttgtgggtttaag

SEQ ID NO: 1025 - DNA, 36 bp, Artificial Sequence
  Probe
gccccagtggcctaatggataaggcattggcctcct

SEQ ID NO: 1026 - DNA, 19 bp, Artificial Sequence
  Probe
gccccggtggcctaatgga

SEQ ID NO: 1027 - DNA, 18 bp, Artificial Sequence
  Probe
gcccggatagctcagtcg

SEQ ID NO: 1028 - DNA, 19 bp, Artificial Sequence
  Probe
gcccggatagctcagtcgg

SEQ ID NO: 1029 - DNA, 20 bp, Artificial Sequence
  Probe
gcccggatagctcagtcggt

SEQ ID NO: 1030 - DNA, 21 bp, Artificial Sequence
  Probe
gcccggatagctcagtcggta

SEQ ID NO: 1031 - DNA, 22 bp, Artificial Sequence
  Probe
gcccggatagctcagtcggtag

SEQ ID NO: 1032 - DNA, 23 bp, Artificial Sequence
  Probe
gcccggatagctcagtcggtaga

SEQ ID NO: 1033 - DNA, 24 bp, Artificial Sequence
  Probe
gcccggatagctcagtcggtagag

SEQ ID NO: 1034 - DNA, 25 bp, Artificial Sequence
  Probe
gcccggatagctcagtcggtagagc

SEQ ID NO: 1035 - DNA, 26 bp, Artificial Sequence
  Probe
gcccggatagctcagtcggtagagca

SEQ ID NO: 1036 - DNA, 28 bp, Artificial Sequence
  Probe
gcccggatagctcagtcggtagagcatc

SEQ ID NO: 1037 - DNA, 29 bp, Artificial Sequence
  Probe
gcccggatagctcagtcggtagagcatca

SEQ ID NO: 1038 - DNA, 30 bp, Artificial Sequence
  Probe
gcccggatagctcagtcggtagagcatcag

SEQ ID NO: 1039 - DNA, 31 bp, Artificial Sequence
  Probe
gcccggatagctcagtcggtagagcatcaga

SEQ ID NO: 1040 - DNA, 32 bp, Artificial Sequence
  Probe
gcccggatagctcagtcggtagagcatcagac

SEQ ID NO: 1041 - DNA, 33 bp, Artificial Sequence
  Probe
gcccggatagctcagtcggtagagcatcagact

SEQ ID NO: 1042 - DNA, 34 bp, Artificial Sequence
  Probe
gcccggatagctcagtcggtagagcatcagactt

SEQ ID NO: 1043 - DNA, 35 bp, Artificial Sequence
  Probe
gcccggatagctcagtcggtagagcatcagacttt

SEQ ID NO: 1044 - DNA, 36 bp, Artificial Sequence
  Probe
gcccggatagctcagtcggtagagcatcagactttt

SEQ ID NO: 1045 - DNA, 37 bp, Artificial Sequence
  Probe
gcccggatagctcagtcggtagagcatcagactttta

SEQ ID NO: 1046 - DNA, 50 bp, Artificial Sequence
  Probe
gcccggatagctcagtcggtagagcatcagacttttaatctgagggtcca

SEQ ID NO: 1047 - DNA, 16 bp, Artificial Sequence
  Probe
gcccggctagctcagt

SEQ ID NO: 1048 - DNA, 17 bp, Artificial Sequence
  Probe
gcccggctagctcagtc

SEQ ID NO: 1049 - DNA, 18 bp, Artificial Sequence
  Probe
gcccggctagctcagtcg

SEQ ID NO: 1050 - DNA, 31 bp, Artificial Sequence
  Probe
gcccggctagctcagtcgatagagcatgaga

SEQ ID NO: 1051 - DNA, 33 bp, Artificial Sequence
  Probe
gcccggctagctcagtcgatagagcatgagact

SEQ ID NO: 1052 - DNA, 19 bp, Artificial Sequence
  Probe
gcccggctagctcagtcgg

SEQ ID NO: 1053 - DNA, 21 bp, Artificial Sequence
  Probe
gcccggctagctcagtcggta

SEQ ID NO: 1054 - DNA, 22 bp, Artificial Sequence
  Probe
gcccggctagctcagtcggtag

SEQ ID NO: 1055 - DNA, 23 bp, Artificial Sequence
  Probe
gcccggctagctcagtcggtaga

SEQ ID NO: 1056 - DNA, 24 bp, Artificial Sequence
  Probe
gcccggctagctcagtcggtagag

SEQ ID NO: 1057 - DNA, 25 bp, Artificial Sequence
  Probe
gcccggctagctcagtcggtagagc

SEQ ID NO: 1058 - DNA, 26 bp, Artificial Sequence
  Probe
gcccggctagctcagtcggtagagca

SEQ ID NO: 1059 - DNA, 27 bp, Artificial Sequence
  Probe
gcccggctagctcagtcggtagagcat

SEQ ID NO: 1060 - DNA, 28 bp, Artificial Sequence
  Probe
gcccggctagctcagtcggtagagcatg

SEQ ID NO: 1061 - DNA, 29 bp, Artificial Sequence
  Probe
gcccggctagctcagtcggtagagcatga

SEQ ID NO: 1062 - DNA, 30 bp, Artificial Sequence
  Probe
gcccggctagctcagtcggtagagcatgag

SEQ ID NO: 1063 - DNA, 31 bp, Artificial Sequence
  Probe
gcccggctagctcagtcggtagagcatgaga

SEQ ID NO: 1064 - DNA, 32 bp, Artificial Sequence
  Probe
gcccggctagctcagtcggtagagcatgagac

SEQ ID NO: 1065 - DNA, 33 bp, Artificial Sequence
  Probe
gcccggctagctcagtcggtagagcatgagacc

SEQ ID NO: 1066 - DNA, 34 bp, Artificial Sequence
  Probe
gcccggctagctcagtcggtagagcatgagaccc

SEQ ID NO: 1067 - DNA, 35 bp, Artificial Sequence
  Probe
gcccggctagctcagtcggtagagcatgagaccct

SEQ ID NO: 1068 - DNA, 36 bp, Artificial Sequence
  Probe
gcccggctagctcagtcggtagagcatgagaccctt

SEQ ID NO: 1069 - DNA, 37 bp, Artificial Sequence
  Probe
gcccggctagctcagtcggtagagcatgagaccctta

SEQ ID NO: 1070 - DNA, 33 bp, Artificial Sequence
  Probe
gcccggctagctcagtcggtagagcatgagact

SEQ ID NO: 1071 - DNA, 34 bp, Artificial Sequence
  Probe
gcccggctagctcagtcggtagagcatgagactc

SEQ ID NO: 1072 - DNA, 35 bp, Artificial Sequence
  Probe
gcccggctagctcagtcggtagagcatgagactct

SEQ ID NO: 1073 - DNA, 36 bp, Artificial Sequence
  Probe
gcccggctagctcagtcggtagagcatgagactctt

SEQ ID NO: 1074 - DNA, 37 bp, Artificial Sequence
  Probe
gcccggctagctcagtcggtagagcatgagactctta

SEQ ID NO: 1075 - DNA, 39 bp, Artificial Sequence
  Probe
gcccggctagctcagtcggtagagcatgagactcttaat

SEQ ID NO: 1076 - DNA, 40 bp, Artificial Sequence
  Probe
gcccggctagctcagtcggtagagcatgagactcttaatc

SEQ ID NO: 1077 - DNA, 42 bp, Artificial Sequence
  Probe
gcccggctagctcagtcggtagagcatgagactcttaatctc

SEQ ID NO: 1078 - DNA, 50 bp, Artificial Sequence
  Probe
gcccggctagctcagtcggtagagcatgagactcttaatctcagggtcgt

SEQ ID NO: 1079 - DNA, 29 bp, Artificial Sequence
  Probe
gcccggctagctcagtcggtagagcatgg

SEQ ID NO: 1080 - DNA, 30 bp, Artificial Sequence
  Probe
gcccggctagctcagtcggtagagcatggg

SEQ ID NO: 1081 - DNA, 31 bp, Artificial Sequence
  Probe
gcccggctagctcagtcggtagagcatggga

SEQ ID NO: 1082 - DNA, 32 bp, Artificial Sequence
  Probe
gcccggctagctcagtcggtagagcatgggac

SEQ ID NO: 1083 - DNA, 33 bp, Artificial Sequence
  Probe
gcccggctagctcagtcggtagagcatgggact

SEQ ID NO: 1084 - DNA, 34 bp, Artificial Sequence
  Probe
gcccggctagctcagtcggtagagcatgggactc

SEQ ID NO: 1085 - DNA, 35 bp, Artificial Sequence
  Probe
gcccggctagctcagtcggtagagcatgggactct

SEQ ID NO: 1086 - DNA, 36 bp, Artificial Sequence
  Probe
gcccggctagctcagtcggtagagcatgggactctt

SEQ ID NO: 1087 - DNA, 37 bp, Artificial Sequence
  Probe
gcccggctagctcagtcggtagagcatgggactctta

SEQ ID NO: 1088 - DNA, 40 bp, Artificial Sequence
  Probe
gcccggctagctcagtcggtagagcatgggactcttaatc

SEQ ID NO: 1089 - DNA, 42 bp, Artificial Sequence
  Probe
gcccggctagctcagtcggtagagcatgggactcttaatccc

SEQ ID NO: 1090 - DNA, 45 bp, Artificial Sequence
  Probe
gcccggctagctcagtcggtagagcatgggactcttaatcccagg

SEQ ID NO: 1091 - DNA, 50 bp, Artificial Sequence
  Probe
gcccggctagctcagtcggtagagcatgggactcttaatcccagggtcgt

SEQ ID NO: 1092 - DNA, 23 bp, Artificial Sequence
  Probe
gcccggtaatcgcataaaactta

SEQ ID NO: 1093 - DNA, 37 bp, Artificial Sequence
  Probe
gcccggtaatcgcataaaacttaaaactttacagtca

SEQ ID NO: 1094 - DNA, 17 bp, Artificial Sequence
  Probe
gccctcagtaagttgca

SEQ ID NO: 1095 - DNA, 24 bp, Artificial Sequence
  Probe
gccgctggtgtagtggtatcatgc

SEQ ID NO: 1096 - DNA, 25 bp, Artificial Sequence
  Probe
gccgctggtgtagtggtatcatgca

SEQ ID NO: 1097 - DNA, 26 bp, Artificial Sequence
  Probe
gccgctggtgtagtggtatcatgcaa

SEQ ID NO: 1098 - DNA, 27 bp, Artificial Sequence
  Probe
gccgctggtgtagtggtatcatgcaag

SEQ ID NO: 1099 - DNA, 28 bp, Artificial Sequence
  Probe
gccgctggtgtagtggtatcatgcaaga

SEQ ID NO: 1100 - DNA, 30 bp, Artificial Sequence
  Probe
gccgctggtgtagtggtatcatgcaagatt

SEQ ID NO: 1101 - DNA, 31 bp, Artificial Sequence
  Probe
gccgctggtgtagtggtatcatgcaagattc

SEQ ID NO: 1102 - DNA, 32 bp, Artificial Sequence
  Probe
gccgctggtgtagtggtatcatgcaagattcc

SEQ ID NO: 1103 - DNA, 33 bp, Artificial Sequence
  Probe
gccgctggtgtagtggtatcatgcaagattccc

SEQ ID NO: 1104 - DNA, 34 bp, Artificial Sequence
  Probe
gccgctggtgtagtggtatcatgcaagattccca

SEQ ID NO: 1105 - DNA, 30 bp, Artificial Sequence
  Probe
gccgtgatcgtatagtggttagtactctgc

SEQ ID NO: 1106 - DNA, 31 bp, Artificial Sequence
  Probe
gccgtgatcgtatagtggttagtactctgcg

SEQ ID NO: 1107 - DNA, 32 bp, Artificial Sequence
  Probe
gccgtgatcgtatagtggttagtactctgcgt

SEQ ID NO: 1108 - DNA, 33 bp, Artificial Sequence
  Probe
gccgtgatcgtatagtggttagtactctgcgtt

SEQ ID NO: 1109 - DNA, 34 bp, Artificial Sequence
  Probe
gccgtgatcgtatagtggttagtactctgcgttg

SEQ ID NO: 1110 - DNA, 35 bp, Artificial Sequence
  Probe
gccgtgatcgtatagtggttagtactctgcgttgt

SEQ ID NO: 1111 - DNA, 36 bp, Artificial Sequence
  Probe
gccgtgatcgtatagtggttagtactctgcgttgtg

SEQ ID NO: 1112 - DNA, 32 bp, Artificial Sequence
  Probe
gcctcgttagcgcagtaggtagcgcgtcagtc

SEQ ID NO: 1113 - DNA, 33 bp, Artificial Sequence
  Probe
gcctcgttagcgcagtaggtagcgcgtcagtct

SEQ ID NO: 1114 - DNA, 35 bp, Artificial Sequence
  Probe
gcctcgttagcgcagtaggtagcgcgtcagtctca

SEQ ID NO: 1115 - DNA, 31 bp, Artificial Sequence
  Probe
gcctggatagctcagtcggtagagcatcaga

SEQ ID NO: 1116 - DNA, 32 bp, Artificial Sequence
  Probe
gcctggatagctcagtcggtagagcatcagac

SEQ ID NO: 1117 - DNA, 33 bp, Artificial Sequence
  Probe
gcctggatagctcagtcggtagagcatcagact

SEQ ID NO: 1118 - DNA, 35 bp, Artificial Sequence
  Probe
gcctggatagctcagtcggtagagcatcagacttt

SEQ ID NO: 1119 - DNA, 36 bp, Artificial Sequence
  Probe
gcctggatagctcagtcggtagagcatcagactttt

SEQ ID NO: 1120 - DNA, 31 bp, Artificial Sequence
  Probe
gcctggatagctcagttggtagagcatcaga

SEQ ID NO: 1121 - DNA, 32 bp, Artificial Sequence
  Probe
gcctggatagctcagttggtagagcatcagac

SEQ ID NO: 1122 - DNA, 33 bp, Artificial Sequence
  Probe
gcctggatagctcagttggtagagcatcagact

SEQ ID NO: 1123 - DNA, 34 bp, Artificial Sequence
  Probe
gcctggatagctcagttggtagagcatcagactt

SEQ ID NO: 1124 - DNA, 35 bp, Artificial Sequence
  Probe
gcctggatagctcagttggtagagcatcagacttt

SEQ ID NO: 1125 - DNA, 36 bp, Artificial Sequence
  Probe
gcctggatagctcagttggtagagcatcagactttt

SEQ ID NO: 1126 - DNA, 31 bp, Artificial Sequence
  Probe
gcctgggtagctcagtcggtagagcatcaga

SEQ ID NO: 1127 - DNA, 32 bp, Artificial Sequence
  Probe
gcctgggtagctcagtcggtagagcatcagac

SEQ ID NO: 1128 - DNA, 33 bp, Artificial Sequence
  Probe
gcctgggtagctcagtcggtagagcatcagact

SEQ ID NO: 1129 - DNA, 35 bp, Artificial Sequence
  Probe
gcctgggtagctcagtcggtagagcatcagacttt

SEQ ID NO: 1130 - DNA, 36 bp, Artificial Sequence
  Probe
gcctgggtagctcagtcggtagagcatcagactttt

SEQ ID NO: 1131 - DNA, 40 bp, Artificial Sequence
  Probe
gcctgtcacgcgggagaccggggttcgattccccgacggg

SEQ ID NO: 1132 - DNA, 43 bp, Artificial Sequence
  Probe
gcctgtcacgcgggagaccggggttcgattccccgacggggag

SEQ ID NO: 1133 - DNA, 16 bp, Artificial Sequence
  Probe
gcgaaaggtccccggt

SEQ ID NO: 1134 - DNA, 17 bp, Artificial Sequence
  Probe
gcgaaaggtccccggtt

SEQ ID NO: 1135 - DNA, 25 bp, Artificial Sequence
  Probe
gcgcagcggaagcgtgctgggccca

SEQ ID NO: 1136 - DNA, 16 bp, Artificial Sequence
  Probe
gcgccgctggtgtagt

SEQ ID NO: 1137 - DNA, 17 bp, Artificial Sequence
  Probe
gcgccgctggtgtagtg

SEQ ID NO: 1138 - DNA, 18 bp, Artificial Sequence
  Probe
gcgccgctggtgtagtgg

SEQ ID NO: 1139 - DNA, 20 bp, Artificial Sequence
  Probe
gcgccgctggtgtagtggta

SEQ ID NO: 1140 - DNA, 21 bp, Artificial Sequence
  Probe
gcgccgctggtgtagtggtat

SEQ ID NO: 1141 - DNA, 22 bp, Artificial Sequence
  Probe
gcgccgctggtgtagtggtatc

SEQ ID NO: 1142 - DNA, 23 bp, Artificial Sequence
  Probe
gcgccgctggtgtagtggtatca

SEQ ID NO: 1143 - DNA, 24 bp, Artificial Sequence
  Probe
gcgccgctggtgtagtggtatcat

SEQ ID NO: 1144 - DNA, 25 bp, Artificial Sequence
  Probe
gcgccgctggtgtagtggtatcatg

SEQ ID NO: 1145 - DNA, 26 bp, Artificial Sequence
  Probe
gcgccgctggtgtagtggtatcatgc

SEQ ID NO: 1146 - DNA, 27 bp, Artificial Sequence
  Probe
gcgccgctggtgtagtggtatcatgca

SEQ ID NO: 1147 - DNA, 28 bp, Artificial Sequence
  Probe
gcgccgctggtgtagtggtatcatgcaa

SEQ ID NO: 1148 - DNA, 29 bp, Artificial Sequence
  Probe
gcgccgctggtgtagtggtatcatgcaag

SEQ ID NO: 1149 - DNA, 30 bp, Artificial Sequence
  Probe
gcgccgctggtgtagtggtatcatgcaaga

SEQ ID NO: 1150 - DNA, 31 bp, Artificial Sequence
  Probe
gcgccgctggtgtagtggtatcatgcaagat

SEQ ID NO: 1151 - DNA, 32 bp, Artificial Sequence
  Probe
gcgccgctggtgtagtggtatcatgcaagatt

SEQ ID NO: 1152 - DNA, 33 bp, Artificial Sequence
  Probe
gcgccgctggtgtagtggtatcatgcaagattc

SEQ ID NO: 1153 - DNA, 34 bp, Artificial Sequence
  Probe
gcgccgctggtgtagtggtatcatgcaagattcc

SEQ ID NO: 1154 - DNA, 35 bp, Artificial Sequence
  Probe
gcgccgctggtgtagtggtatcatgcaagattccc

SEQ ID NO: 1155 - DNA, 36 bp, Artificial Sequence
  Probe
gcgccgctggtgtagtggtatcatgcaagattccca

SEQ ID NO: 1156 - DNA, 37 bp, Artificial Sequence
  Probe
gcgccgctggtgtagtggtatcatgcaagattcccat

SEQ ID NO: 1157 - DNA, 39 bp, Artificial Sequence
  Probe
gcgccgctggtgtagtggtatcatgcaagattcccattc

SEQ ID NO: 1158 - DNA, 40 bp, Artificial Sequence
  Probe
gcgccgctggtgtagtggtatcatgcaagattcccattct

SEQ ID NO: 1159 - DNA, 41 bp, Artificial Sequence
  Probe
gcgccgctggtgtagtggtatcatgcaagattcccattctt

SEQ ID NO: 1160 - DNA, 46 bp, Artificial Sequence
  Probe
gcgccgctggtgtagtggtatcatgcaagattcccattcttgcgac

SEQ ID NO: 1161 - DNA, 50 bp, Artificial Sequence
  Probe
gcgccgctggtgtagtggtatcatgcaagattcccattcttgcgacccgg

SEQ ID NO: 1162 - DNA, 21 bp, Artificial Sequence
  Probe
gcggaagcgtgctgggcccat

SEQ ID NO: 1163 - DNA, 35 bp, Artificial Sequence
  Probe
gcggaagcgtgctgggcccataacccagaggtcga

SEQ ID NO: 1164 - DNA, 37 bp, Artificial Sequence
  Probe
gcggaagcgtgctgggcccataacccagaggtcgatg

SEQ ID NO: 1165 - DNA, 31 bp, Artificial Sequence
  Probe
gcggcccgggttcgactcccggtgtgggaac

SEQ ID NO: 1166 - DNA, 28 bp, Artificial Sequence
  Probe
gcgggagaccggggttcaattccccgac

SEQ ID NO: 1167 - DNA, 34 bp, Artificial Sequence
  Probe
gcgggagaccggggttcaattccccgacggggag

SEQ ID NO: 1168 - DNA, 28 bp, Artificial Sequence
  Probe
gcgggagaccggggttcgattccccgac

SEQ ID NO: 1169 - DNA, 30 bp, Artificial Sequence
  Probe
gcgggagaccggggttcgattccccgacgg

SEQ ID NO: 1170 - DNA, 31 bp, Artificial Sequence
  Probe
gcgggagaccggggttcgattccccgacggg

SEQ ID NO: 1171 - DNA, 32 bp, Artificial Sequence
  Probe
gcgggagaccggggttcgattccccgacgggg

SEQ ID NO: 1172 - DNA, 33 bp, Artificial Sequence
  Probe
gcgggagaccggggttcgattccccgacgggga

SEQ ID NO: 1173 - DNA, 34 bp, Artificial Sequence
  Probe
gcgggagaccggggttcgattccccgacggggag

SEQ ID NO: 1174 - DNA, 23 bp, Artificial Sequence
  Probe
gcgtgctgggcccataacccaga

SEQ ID NO: 1175 - DNA, 28 bp, Artificial Sequence
  Probe
gcgtgctgggcccataacccagaggtcg

SEQ ID NO: 1176 - DNA, 29 bp, Artificial Sequence
  Probe
gcgtgctgggcccataacccagaggtcga

SEQ ID NO: 1177 - DNA, 30 bp, Artificial Sequence
  Probe
gcgtgctgggcccataacccagaggtcgat

SEQ ID NO: 1178 - DNA, 31 bp, Artificial Sequence
  Probe
gcgtgctgggcccataacccagaggtcgatg

SEQ ID NO: 1179 - DNA, 24 bp, Artificial Sequence
  Probe
gcgttggtggtatagtggtaagca

SEQ ID NO: 1180 - DNA, 26 bp, Artificial Sequence
  Probe
gcgttggtggtatagtggtaagcata

SEQ ID NO: 1181 - DNA, 27 bp, Artificial Sequence
  Probe
gcgttggtggtatagtggtaagcatag

SEQ ID NO: 1182 - DNA, 29 bp, Artificial Sequence
  Probe
gcgttggtggtatagtggtaagcatagct

SEQ ID NO: 1183 - DNA, 30 bp, Artificial Sequence
  Probe
gcgttggtggtatagtggtaagcatagctg

SEQ ID NO: 1184 - DNA, 31 bp, Artificial Sequence
  Probe
gcgttggtggtatagtggtaagcatagctgc

SEQ ID NO: 1185 - DNA, 32 bp, Artificial Sequence
  Probe
gcgttggtggtatagtggtaagcatagctgcc

SEQ ID NO: 1186 - DNA, 33 bp, Artificial Sequence
  Probe
gcgttggtggtatagtggtaagcatagctgcct

SEQ ID NO: 1187 - DNA, 34 bp, Artificial Sequence
  Probe
gcgttggtggtatagtggtaagcatagctgcctt

SEQ ID NO: 1188 - DNA, 35 bp, Artificial Sequence
  Probe
gcgttggtggtatagtggtaagcatagctgccttc

SEQ ID NO: 1189 - DNA, 36 bp, Artificial Sequence
  Probe
gcgttggtggtatagtggtaagcatagctgccttcc

SEQ ID NO: 1190 - DNA, 37 bp, Artificial Sequence
  Probe
gcgttggtggtatagtggtaagcatagctgccttcca

SEQ ID NO: 1191 - DNA, 44 bp, Artificial Sequence
  Probe
gcgttggtggtatagtggtaagcatagctgccttccaagcagtt

SEQ ID NO: 1192 - DNA, 50 bp, Artificial Sequence
  Probe
gcgttggtggtatagtggtaagcatagctgccttccaagcagttgacccg

SEQ ID NO: 1193 - DNA, 40 bp, Artificial Sequence
  Probe
gcgttggtggtatagtggtgagcatagctgccttccaagc

SEQ ID NO: 1194 - DNA, 44 bp, Artificial Sequence
  Probe
gcgttggtggtatagtggtgagcatagctgccttccaagcagtt

SEQ ID NO: 1195 - DNA, 50 bp, Artificial Sequence
  Probe
gcgttggtggtatagtggtgagcatagctgccttccaagcagttgacccg

SEQ ID NO: 1196 - DNA, 44 bp, Artificial Sequence
  Probe
gcgttggtggtatagtggttagcatagctgccttccaagcagtt

SEQ ID NO: 1197 - DNA, 50 bp, Artificial Sequence
  Probe
gcgttggtggtatagtggttagcatagctgccttccaagcagttgacccg

SEQ ID NO: 1198 - DNA, 32 bp, Artificial Sequence
  Probe
gctaatggtggagttaaagactttttctctga

SEQ ID NO: 1199 - DNA, 29 bp, Artificial Sequence
  Probe
gctagctcagtcggtagagcatgggactc

SEQ ID NO: 1200 - DNA, 31 bp, Artificial Sequence
  Probe
gctagctcagtcggtagagcatgggactctt

SEQ ID NO: 1201 - DNA, 19 bp, Artificial Sequence
  Probe
gctcacaagaactgctaac

SEQ ID NO: 1202 - DNA, 21 bp, Artificial Sequence
  Probe
gctcacaagaactgctaactc

SEQ ID NO: 1203 - DNA, 23 bp, Artificial Sequence
  Probe
gctcacaagaactgctaactcat

SEQ ID NO: 1204 - DNA, 24 bp, Artificial Sequence
  Probe
gctcacaagaactgctaactcatg

SEQ ID NO: 1205 - DNA, 50 bp, Artificial Sequence
  Probe
gctcacaagaactgctaactcatgcccccatgtctaacaacatggctttc

SEQ ID NO: 1206 - DNA, 30 bp, Artificial Sequence
  Probe
gctccgaggtgattttcatattgaattgca

SEQ ID NO: 1207 - DNA, 30 bp, Artificial Sequence
  Probe
gctggtgtagtggtatcatgcaagattccc

SEQ ID NO: 1208 - DNA, 16 bp, Artificial Sequence
  Probe
gcttacgaccccttat

SEQ ID NO: 1209 - DNA, 23 bp, Artificial Sequence
  Probe
gcttctgtagtgtagtggttatc

SEQ ID NO: 1210 - DNA, 24 bp, Artificial Sequence
  Probe
gcttctgtagtgtagtggttatca

SEQ ID NO: 1211 - DNA, 25 bp, Artificial Sequence
  Probe
gcttctgtagtgtagtggttatcac

SEQ ID NO: 1212 - DNA, 28 bp, Artificial Sequence
  Probe
gcttctgtagtgtagtggttatcacgtt

SEQ ID NO: 1213 - DNA, 31 bp, Artificial Sequence
  Probe
gcttctgtagtgtagtggttatcacgttcgc

SEQ ID NO: 1214 - DNA, 32 bp, Artificial Sequence
  Probe
gcttctgtagtgtagtggttatcacgttcgcc

SEQ ID NO: 1215 - DNA, 33 bp, Artificial Sequence
  Probe
gcttctgtagtgtagtggttatcacgttcgcct

SEQ ID NO: 1216 - DNA, 34 bp, Artificial Sequence
  Probe
gcttctgtagtgtagtggttatcacgttcgcctc

SEQ ID NO: 1217 - DNA, 35 bp, Artificial Sequence
  Probe
gcttctgtagtgtagtggttatcacgttcgcctca

SEQ ID NO: 1218 - DNA, 36 bp, Artificial Sequence
  Probe
gcttctgtagtgtagtggttatcacgttcgcctcac

SEQ ID NO: 1219 - DNA, 50 bp, Artificial Sequence
  Probe
gcttctgtagtgtagtggttatcacgttcgcctcacacgcgaaaggtccc

SEQ ID NO: 1220 - DNA, 17 bp, Artificial Sequence
  Probe
ggaagcgtgctgggccc

SEQ ID NO: 1221 - DNA, 19 bp, Artificial Sequence
  Probe
ggaagcgtgctgggcccat

SEQ ID NO: 1222 - DNA, 24 bp, Artificial Sequence
  Probe
ggaagcgtgctgggcccataaccc

SEQ ID NO: 1223 - DNA, 27 bp, Artificial Sequence
  Probe
ggaagcgtgctgggcccataacccaga

SEQ ID NO: 1224 - DNA, 31 bp, Artificial Sequence
  Probe
ggaagcgtgctgggcccataacccagaggtc

SEQ ID NO: 1225 - DNA, 32 bp, Artificial Sequence
  Probe
ggaagcgtgctgggcccataacccagaggtcg

SEQ ID NO: 1226 - DNA, 33 bp, Artificial Sequence
  Probe
ggaagcgtgctgggcccataacccagaggtcga

SEQ ID NO: 1227 - DNA, 34 bp, Artificial Sequence
  Probe
ggaagcgtgctgggcccataacccagaggtcgat

SEQ ID NO: 1228 - DNA, 35 bp, Artificial Sequence
  Probe
ggaagcgtgctgggcccataacccagaggtcgatg

SEQ ID NO: 1229 - DNA, 36 bp, Artificial Sequence
  Probe
ggaagcgtgctgggcccataacccagaggtcgatgg

SEQ ID NO: 1230 - DNA, 38 bp, Artificial Sequence
  Probe
ggaagcgtgctgggcccataacccagaggtcgatggat

SEQ ID NO: 1231 - DNA, 40 bp, Artificial Sequence
  Probe
ggaagcgtgctgggcccataacccagaggtcgatggatcg

SEQ ID NO: 1232 - DNA, 24 bp, Artificial Sequence
  Probe
ggagaccggggttcaattccccga

SEQ ID NO: 1233 - DNA, 25 bp, Artificial Sequence
  Probe
ggagaccggggttcaattccccgac

SEQ ID NO: 1234 - DNA, 29 bp, Artificial Sequence
  Probe
ggagaccggggttcaattccccgacgggg

SEQ ID NO: 1235 - DNA, 30 bp, Artificial Sequence
  Probe
ggagaccggggttcaattccccgacgggga

SEQ ID NO: 1236 - DNA, 31 bp, Artificial Sequence
  Probe
ggagaccggggttcaattccccgacggggag

SEQ ID NO: 1237 - DNA, 25 bp, Artificial Sequence
  Probe
ggagaccggggttcgattccccgac

SEQ ID NO: 1238 - DNA, 27 bp, Artificial Sequence
  Probe
ggagaccggggttcgattccccgacgg

SEQ ID NO: 1239 - DNA, 28 bp, Artificial Sequence
  Probe
ggagaccggggttcgattccccgacggg

SEQ ID NO: 1240 - DNA, 29 bp, Artificial Sequence
  Probe
ggagaccggggttcgattccccgacgggg

SEQ ID NO: 1241 - DNA, 30 bp, Artificial Sequence
  Probe
ggagaccggggttcgattccccgacgggga

SEQ ID NO: 1242 - DNA, 31 bp, Artificial Sequence
  Probe
ggagaccggggttcgattccccgacggggag

SEQ ID NO: 1243 - DNA, 26 bp, Artificial Sequence
  Probe
ggagatgaaaacctttttccaaggac

SEQ ID NO: 1244 - DNA, 27 bp, Artificial Sequence
  Probe
ggagatgaaaacctttttccaaggaca

SEQ ID NO: 1245 - DNA, 17 bp, Artificial Sequence
  Probe
ggagcttaaaccccctt

SEQ ID NO: 1246 - DNA, 18 bp, Artificial Sequence
  Probe
ggagcttaaaccccctta

SEQ ID NO: 1247 - DNA, 19 bp, Artificial Sequence
  Probe
ggagcttaaacccccttat

SEQ ID NO: 1248 - DNA, 23 bp, Artificial Sequence
  Probe
ggagcttaaacccccttatttct

SEQ ID NO: 1249 - DNA, 24 bp, Artificial Sequence
  Probe
ggagcttaaacccccttatttcta

SEQ ID NO: 1250 - DNA, 28 bp, Artificial Sequence
  Probe
ggatagctcagtcggtagagcatcagac

SEQ ID NO: 1251 - DNA, 29 bp, Artificial Sequence
  Probe
ggatagctcagtcggtagagcatcagact

SEQ ID NO: 1252 - DNA, 31 bp, Artificial Sequence
  Probe
ggatagctcagtcggtagagcatcagacttt

SEQ ID NO: 1253 - DNA, 32 bp, Artificial Sequence
  Probe
ggatagctcagtcggtagagcatcagactttt

SEQ ID NO: 1254 - DNA, 34 bp, Artificial Sequence
  Probe
ggatggggtgtgataggtggcacggagaattttg

SEQ ID NO: 1255 - DNA, 28 bp, Artificial Sequence
  Probe
ggattcggcgctctcaccgccgcggccc

SEQ ID NO: 1256 - DNA, 23 bp, Artificial Sequence
  Probe
ggattgtgggttcgagtcccatc

SEQ ID NO: 1257 - DNA, 24 bp, Artificial Sequence
  Probe
ggattgtgggttcgagtcccatct

SEQ ID NO: 1258 - DNA, 28 bp, Artificial Sequence
  Probe
ggcatcagcctccggagctggggattgt

SEQ ID NO: 1259 - DNA, 30 bp, Artificial Sequence
  Probe
ggcatcagcctccggagctggggattgtgg

SEQ ID NO: 1260 - DNA, 36 bp, Artificial Sequence
  Probe
ggccccatggtgtaatggtcagcactctggactctg

SEQ ID NO: 1261 - DNA, 23 bp, Artificial Sequence
  Probe
ggccccatggtgtaatggttagc

SEQ ID NO: 1262 - DNA, 32 bp, Artificial Sequence
  Probe
ggccccatggtgtaatggttagcactctggac

SEQ ID NO: 1263 - DNA, 33 bp, Artificial Sequence
  Probe
ggccccatggtgtaatggttagcactctggact

SEQ ID NO: 1264 - DNA, 36 bp, Artificial Sequence
  Probe
ggccccatggtgtaatggttagcactctggactttg

SEQ ID NO: 1265 - DNA, 37 bp, Artificial Sequence
  Probe
ggccccatggtgtaatggttagcactctggactttga

SEQ ID NO: 1266 - DNA, 29 bp, Artificial Sequence
  Probe
ggcccgggttcgactcccggtgtgggaac

SEQ ID NO: 1267 - DNA, 30 bp, Artificial Sequence
  Probe
ggccctatagctcaggggttagagcactgg

SEQ ID NO: 1268 - DNA, 31 bp, Artificial Sequence
  Probe
ggccctatagctcaggggttagagcactggt

SEQ ID NO: 1269 - DNA, 32 bp, Artificial Sequence
  Probe
ggccctatagctcaggggttagagcactggtc

SEQ ID NO: 1270 - DNA, 33 bp, Artificial Sequence
  Probe
ggccctatagctcaggggttagagcactggtct

SEQ ID NO: 1271 - DNA, 36 bp, Artificial Sequence
  Probe
ggccctatagctcaggggttagagcactggtcttgt

SEQ ID NO: 1272 - DNA, 50 bp, Artificial Sequence
  Probe
ggccctatagctcaggggttagagcactggtcttgtaaaccaggggtcgc

SEQ ID NO: 1273 - DNA, 19 bp, Artificial Sequence
  Probe
ggccgcgtggcctaatgga

SEQ ID NO: 1274 - DNA, 18 bp, Artificial Sequence
  Probe
ggcctcgtggcgcaacgg

SEQ ID NO: 1275 - DNA, 26 bp, Artificial Sequence
  Probe
ggcgccgtggcttagttggttaaagc

SEQ ID NO: 1276 - DNA, 24 bp, Artificial Sequence
  Probe
ggcgcggtggccaagtggtaaggc

SEQ ID NO: 1277 - DNA, 28 bp, Artificial Sequence
  Probe
ggcggcccgggttcgactcccggtgtgg

SEQ ID NO: 1278 - DNA, 30 bp, Artificial Sequence
  Probe
ggcggcccgggttcgactcccggtgtggga

SEQ ID NO: 1279 - DNA, 31 bp, Artificial Sequence
  Probe
ggcggcccgggttcgactcccggtgtgggaa

SEQ ID NO: 1280 - DNA, 32 bp, Artificial Sequence
  Probe
ggcggcccgggttcgactcccggtgtgggaac

SEQ ID NO: 1281 - DNA, 24 bp, Artificial Sequence
  Probe
ggctagctcagtcggtagagcatg

SEQ ID NO: 1282 - DNA, 25 bp, Artificial Sequence
  Probe
ggctagctcagtcggtagagcatga

SEQ ID NO: 1283 - DNA, 28 bp, Artificial Sequence
  Probe
ggctagctcagtcggtagagcatgagac

SEQ ID NO: 1284 - DNA, 29 bp, Artificial Sequence
  Probe
ggctagctcagtcggtagagcatgagact

SEQ ID NO: 1285 - DNA, 30 bp, Artificial Sequence
  Probe
ggctagctcagtcggtagagcatgagactc

SEQ ID NO: 1286 - DNA, 31 bp, Artificial Sequence
  Probe
ggctagctcagtcggtagagcatgagactct

SEQ ID NO: 1287 - DNA, 32 bp, Artificial Sequence
  Probe
ggctagctcagtcggtagagcatgagactctt

SEQ ID NO: 1288 - DNA, 25 bp, Artificial Sequence
  Probe
ggctagctcagtcggtagagcatgg

SEQ ID NO: 1289 - DNA, 27 bp, Artificial Sequence
  Probe
ggctagctcagtcggtagagcatggga

SEQ ID NO: 1290 - DNA, 28 bp, Artificial Sequence
  Probe
ggctagctcagtcggtagagcatgggac

SEQ ID NO: 1291 - DNA, 29 bp, Artificial Sequence
  Probe
ggctagctcagtcggtagagcatgggact

SEQ ID NO: 1292 - DNA, 30 bp, Artificial Sequence
  Probe
ggctagctcagtcggtagagcatgggactc

SEQ ID NO: 1293 - DNA, 31 bp, Artificial Sequence
  Probe
ggctagctcagtcggtagagcatgggactct

SEQ ID NO: 1294 - DNA, 32 bp, Artificial Sequence
  Probe
ggctagctcagtcggtagagcatgggactctt

SEQ ID NO: 1295 - DNA, 33 bp, Artificial Sequence
  Probe
ggctagctcagtcggtagagcatgggactctta

SEQ ID NO: 1296 - DNA, 50 bp, Artificial Sequence
  Probe
ggctccatagctcaggggttagagcactggtcttgtaaaccaggggtcgc

SEQ ID NO: 1297 - DNA, 25 bp, Artificial Sequence
  Probe
ggctccatagctcagtggttagagc

SEQ ID NO: 1298 - DNA, 31 bp, Artificial Sequence
  Probe
ggctccatagctcagtggttagagcactggt

SEQ ID NO: 1299 - DNA, 32 bp, Artificial Sequence
  Probe
ggctccatagctcagtggttagagcactggtc

SEQ ID NO: 1300 - DNA, 33 bp, Artificial Sequence
  Probe
ggctccatagctcagtggttagagcactggtct

SEQ ID NO: 1301 - DNA, 36 bp, Artificial Sequence
  Probe
ggctccatagctcagtggttagagcactggtcttgt

SEQ ID NO: 1302 - DNA, 26 bp, Artificial Sequence
  Probe
ggctccgtagcttagttggttaaagc

SEQ ID NO: 1303 - DNA, 19 bp, Artificial Sequence
  Probe
ggctccgtggcgcaatgga

SEQ ID NO: 1304 - DNA, 32 bp, Artificial Sequence
  Probe
ggctccgtggcgcaatggatagcgcattggac

SEQ ID NO: 1305 - DNA, 26 bp, Artificial Sequence
  Probe
ggctccgtggcttagctggttaaagc

SEQ ID NO: 1306 - DNA, 33 bp, Artificial Sequence
  Probe
ggctcgttggtctaggggtatgattctcgcttc

SEQ ID NO: 1307 - DNA, 33 bp, Artificial Sequence
  Probe
ggctcgttggtctaggggtatgattctcgcttt

SEQ ID NO: 1308 - DNA, 32 bp, Artificial Sequence
  Probe
ggctcgttggtctaggggtatgattctcggtt

SEQ ID NO: 1309 - DNA, 25 bp, Artificial Sequence
  Probe
gggagaccggggttcaattccccga

SEQ ID NO: 1310 - DNA, 26 bp, Artificial Sequence
  Probe
gggagaccggggttcaattccccgac

SEQ ID NO: 1311 - DNA, 27 bp, Artificial Sequence
  Probe
gggagaccggggttcaattccccgacg

SEQ ID NO: 1312 - DNA, 30 bp, Artificial Sequence
  Probe
gggagaccggggttcaattccccgacgggg

SEQ ID NO: 1313 - DNA, 26 bp, Artificial Sequence
  Probe
gggagaccggggttcgattccccgac

SEQ ID NO: 1314 - DNA, 29 bp, Artificial Sequence
  Probe
gggagaccggggttcgattccccgacggg

SEQ ID NO: 1315 - DNA, 30 bp, Artificial Sequence
  Probe
gggagaccggggttcgattccccgacgggg

SEQ ID NO: 1316 - DNA, 31 bp, Artificial Sequence
  Probe
gggagaccggggttcgattccccgacgggga

SEQ ID NO: 1317 - DNA, 32 bp, Artificial Sequence
  Probe
gggagaccggggttcgattccccgacggggag

SEQ ID NO: 1318 - DNA, 28 bp, Artificial Sequence
  Probe
gggatgggttcgattctcatagtcctag

SEQ ID NO: 1319 - DNA, 21 bp, Artificial Sequence
  Probe
gggattgtgggttcgagtccc

SEQ ID NO: 1320 - DNA, 24 bp, Artificial Sequence
  Probe
gggattgtgggttcgagtcccacc

SEQ ID NO: 1321 - DNA, 24 bp, Artificial Sequence
  Probe
gggattgtgggttcgagtcccatc

SEQ ID NO: 1322 - DNA, 25 bp, Artificial Sequence
  Probe
gggattgtgggttcgagtcccatct

SEQ ID NO: 1323 - DNA, 32 bp, Artificial Sequence
  Probe
gggcatagctcagtggtagagcatttgactgc

SEQ ID NO: 1324 - DNA, 33 bp, Artificial Sequence
  Probe
gggcatagctcagtggtagagcatttgactgca

SEQ ID NO: 1325 - DNA, 23 bp, Artificial Sequence
  Probe
ggggaattagctcaaatggtaga

SEQ ID NO: 1326 - DNA, 25 bp, Artificial Sequence
  Probe
ggggaattagctcaaatggtagagc

SEQ ID NO: 1327 - DNA, 25 bp, Artificial Sequence
  Probe
ggggaattagctcaagtggtagagc

SEQ ID NO: 1328 - DNA, 16 bp, Artificial Sequence
  Probe
ggggatgtagctcagt

SEQ ID NO: 1329 - DNA, 17 bp, Artificial Sequence
  Probe
ggggatgtagctcagtg

SEQ ID NO: 1330 - DNA, 18 bp, Artificial Sequence
  Probe
ggggatgtagctcagtgg

SEQ ID NO: 1331 - DNA, 19 bp, Artificial Sequence
  Probe
ggggatgtagctcagtggt

SEQ ID NO: 1332 - DNA, 20 bp, Artificial Sequence
  Probe
ggggatgtagctcagtggta

SEQ ID NO: 1333 - DNA, 22 bp, Artificial Sequence
  Probe
ggggatgtagctcagtggtaga

SEQ ID NO: 1334 - DNA, 24 bp, Artificial Sequence
  Probe
ggggatgtagctcagtggtagagc

SEQ ID NO: 1335 - DNA, 30 bp, Artificial Sequence
  Probe
ggggatgtagctcagtggtagagcgcatgc

SEQ ID NO: 1336 - DNA, 31 bp, Artificial Sequence
  Probe
ggggatgtagctcagtggtagagcgcatgct

SEQ ID NO: 1337 - DNA, 32 bp, Artificial Sequence
  Probe
ggggatgtagctcagtggtagagcgcatgctt

SEQ ID NO: 1338 - DNA, 33 bp, Artificial Sequence
  Probe
ggggatgtagctcagtggtagagcgcatgcttt

SEQ ID NO: 1339 - DNA, 35 bp, Artificial Sequence
  Probe
ggggatgtagctcagtggtagagcgcatgctttgc

SEQ ID NO: 1340 - DNA, 32 bp, Artificial Sequence
  Probe
ggggatgtagctcagtggtagagcgcgcgctt

SEQ ID NO: 1341 - DNA, 16 bp, Artificial Sequence
  Probe
ggggattgtgggttcg

SEQ ID NO: 1342 - DNA, 22 bp, Artificial Sequence
  Probe
ggggattgtgggttcgagtccc

SEQ ID NO: 1343 - DNA, 25 bp, Artificial Sequence
  Probe
ggggattgtgggttcgagtcccatc

SEQ ID NO: 1344 - DNA, 26 bp, Artificial Sequence
  Probe
ggggattgtgggttcgagtcccatct

SEQ ID NO: 1345 - DNA, 19 bp, Artificial Sequence
  Probe
gggggattagctcaaatgg

SEQ ID NO: 1346 - DNA, 20 bp, Artificial Sequence
  Probe
gggggattagctcaaatggt

SEQ ID NO: 1347 - DNA, 21 bp, Artificial Sequence
  Probe
gggggattagctcaaatggta

SEQ ID NO: 1348 - DNA, 23 bp, Artificial Sequence
  Probe
gggggattagctcaaatggtaga

SEQ ID NO: 1349 - DNA, 24 bp, Artificial Sequence
  Probe
gggggattagctcaaatggtagag

SEQ ID NO: 1350 - DNA, 25 bp, Artificial Sequence
  Probe
gggggattagctcaaatggtagagc

SEQ ID NO: 1351 - DNA, 32 bp, Artificial Sequence
  Probe
gggggcatagctcagtggtagagcatttgact

SEQ ID NO: 1352 - DNA, 33 bp, Artificial Sequence
  Probe
gggggcatagctcagtggtagagcatttgactg

SEQ ID NO: 1353 - DNA, 34 bp, Artificial Sequence
  Probe
gggggcatagctcagtggtagagcatttgactgc

SEQ ID NO: 1354 - DNA, 35 bp, Artificial Sequence
  Probe
gggggcatagctcagtggtagagcatttgactgca

SEQ ID NO: 1355 - DNA, 32 bp, Artificial Sequence
  Probe
gggggtatagctcaggggtagagcatttgact

SEQ ID NO: 1356 - DNA, 33 bp, Artificial Sequence
  Probe
gggggtatagctcaggggtagagcatttgactg

SEQ ID NO: 1357 - DNA, 34 bp, Artificial Sequence
  Probe
gggggtatagctcaggggtagagcatttgactgc

SEQ ID NO: 1358 - DNA, 35 bp, Artificial Sequence
  Probe
gggggtatagctcagtgggtagagcatttgactgc

SEQ ID NO: 1359 - DNA, 50 bp, Artificial Sequence
  Probe
gggggtatagctcagtggtagagcatttgactgcagatcaagaggtcccc

SEQ ID NO: 1360 - DNA, 32 bp, Artificial Sequence
  Probe
gggggtatagcttagcggtagagcatttgact

SEQ ID NO: 1361 - DNA, 19 bp, Artificial Sequence
  Probe
gggggtgtagctcagtggt

SEQ ID NO: 1362 - DNA, 22 bp, Artificial Sequence
  Probe
gggggtgtagctcagtggtaga

SEQ ID NO: 1363 - DNA, 23 bp, Artificial Sequence
  Probe
gggggtgtagctcagtggtagag

SEQ ID NO: 1364 - DNA, 24 bp, Artificial Sequence
  Probe
gggggtgtagctcagtggtagagc

SEQ ID NO: 1365 - DNA, 32 bp, Artificial Sequence
  Probe
gggggtgtagctcagtggtagagcatttgact

SEQ ID NO: 1366 - DNA, 34 bp, Artificial Sequence
  Probe
gggggtgtagctcagtggtagagcatttgactgc

SEQ ID NO: 1367 - DNA, 30 bp, Artificial Sequence
  Probe
gggggtgtagctcagtggtagagcgcgtgc

SEQ ID NO: 1368 - DNA, 31 bp, Artificial Sequence
  Probe
gggggtgtagctcagtggtagagcgcgtgct

SEQ ID NO: 1369 - DNA, 32 bp, Artificial Sequence
  Probe
gggggtgtagctcagtggtagagcgcgtgctt

SEQ ID NO: 1370 - DNA, 31 bp, Artificial Sequence
  Probe
gggtatagctcaggggtagagcatttgactg

SEQ ID NO: 1371 - DNA, 32 bp, Artificial Sequence
  Probe
gggtatagctcaggggtagagcatttgactgc

SEQ ID NO: 1372 - DNA, 33 bp, Artificial Sequence
  Probe
gggtatagctcaggggtagagcatttgactgca

SEQ ID NO: 1373 - DNA, 33 bp, Artificial Sequence
  Probe
gggtatagctcagtgggtagagcatttgactgc

SEQ ID NO: 1374 - DNA, 33 bp, Artificial Sequence
  Probe
gggtatagcttagcggtagagcatttgactgca

SEQ ID NO: 1375 - DNA, 27 bp, Artificial Sequence
  Probe
gggtggttcagtggtagaattctcgcc

SEQ ID NO: 1376 - DNA, 31 bp, Artificial Sequence
  Probe
gggtggttcagtggtagaattctcgcctgcc

SEQ ID NO: 1377 - DNA, 31 bp, Artificial Sequence
  Probe
gggtgtagctcagtggtagagcatttgactg

SEQ ID NO: 1378 - DNA, 32 bp, Artificial Sequence
  Probe
gggtgtagctcagtggtagagcatttgactgc

SEQ ID NO: 1379 - DNA, 33 bp, Artificial Sequence
  Probe
gggtgtagctcagtggtagagcatttgactgca

SEQ ID NO: 1380 - DNA, 23 bp, Artificial Sequence
  Probe
gggttcgatccccggcatctcca

SEQ ID NO: 1381 - DNA, 33 bp, Artificial Sequence
  Probe
ggtaatcgcataaaacttaaaactttacagtca

SEQ ID NO: 1382 - DNA, 25 bp, Artificial Sequence
  Probe
ggtagagcatgagactcttaatctc

SEQ ID NO: 1383 - DNA, 23 bp, Artificial Sequence
  Probe
ggtagagcatgggactcttaatc

SEQ ID NO: 1384 - DNA, 25 bp, Artificial Sequence
  Probe
ggtagagcatgggactcttaatccc

SEQ ID NO: 1385 - DNA, 16 bp, Artificial Sequence
  Probe
ggtagcgtggccgagc

SEQ ID NO: 1386 - DNA, 17 bp, Artificial Sequence
  Probe
ggtagcgtggccgagcg

SEQ ID NO: 1387 - DNA, 18 bp, Artificial Sequence
  Probe
ggtagcgtggccgagcgg

SEQ ID NO: 1388 - DNA, 19 bp, Artificial Sequence
  Probe
ggtagcgtggccgagcggt

SEQ ID NO: 1389 - DNA, 20 bp, Artificial Sequence
  Probe
ggtagcgtggccgagcggtc

SEQ ID NO: 1390 - DNA, 21 bp, Artificial Sequence
  Probe
ggtagcgtggccgagcggtct

SEQ ID NO: 1391 - DNA, 22 bp, Artificial Sequence
  Probe
ggtagcgtggccgagcggtcta

SEQ ID NO: 1392 - DNA, 23 bp, Artificial Sequence
  Probe
ggtagcgtggccgagcggtctaa

SEQ ID NO: 1393 - DNA, 24 bp, Artificial Sequence
  Probe
ggtagcgtggccgagcggtctaag

SEQ ID NO: 1394 - DNA, 25 bp, Artificial Sequence
  Probe
ggtagcgtggccgagcggtctaagg

SEQ ID NO: 1395 - DNA, 26 bp, Artificial Sequence
  Probe
ggtagcgtggccgagcggtctaaggc

SEQ ID NO: 1396 - DNA, 16 bp, Artificial Sequence
  Probe
ggtagcgtggccgagt

SEQ ID NO: 1397 - DNA, 19 bp, Artificial Sequence
  Probe
ggtagcgtggccgagtggt

SEQ ID NO: 1398 - DNA, 20 bp, Artificial Sequence
  Probe
ggtagcgtggccgagtggtc

SEQ ID NO: 1399 - DNA, 22 bp, Artificial Sequence
  Probe
ggtagcgtggccgagtggtcta

SEQ ID NO: 1400 - DNA, 23 bp, Artificial Sequence
  Probe
ggtagcgtggccgagtggtctaa

SEQ ID NO: 1401 - DNA, 24 bp, Artificial Sequence
  Probe
ggtagcgtggccgagtggtctaag

SEQ ID NO: 1402 - DNA, 25 bp, Artificial Sequence
  Probe
ggtagcgtggccgagtggtctaagg

SEQ ID NO: 1403 - DNA, 26 bp, Artificial Sequence
  Probe
ggtagcgtggccgagtggtctaaggc

SEQ ID NO: 1404 - DNA, 34 bp, Artificial Sequence
  Probe
ggtagcgtggccgagtggtctaaggcgctggatt

SEQ ID NO: 1405 - DNA, 35 bp, Artificial Sequence
  Probe
ggtagcgtggccgagtggtctaaggcgctggattt

SEQ ID NO: 1406 - DNA, 25 bp, Artificial Sequence
  Probe
ggtagtgtggccgagcggtctaagg

SEQ ID NO: 1407 - DNA, 33 bp, Artificial Sequence
  Probe
ggtatgattctcgctttgggtgcgagaggtccc

SEQ ID NO: 1408 - DNA, 33 bp, Artificial Sequence
  Probe
ggtatgattctcggtttgggtccgagaggtccc

SEQ ID NO: 1409 - DNA, 34 bp, Artificial Sequence
  Probe
ggtatgattctcggtttgggtccgagaggtcccg

SEQ ID NO: 1410 - DNA, 50 bp, Artificial Sequence
  Probe
ggtcagctaaataagctatcgggcccataccccgaaaatgttggttatac

SEQ ID NO: 1411 - DNA, 19 bp, Artificial Sequence
  Probe
ggtcccatggtgtaatggt

SEQ ID NO: 1412 - DNA, 23 bp, Artificial Sequence
  Probe
ggtcccatggtgtaatggttagc

SEQ ID NO: 1413 - DNA, 29 bp, Artificial Sequence
  Probe
ggtcccatggtgtaatggttagcactctg

SEQ ID NO: 1414 - DNA, 32 bp, Artificial Sequence
  Probe
ggtcccatggtgtaatggttagcactctggac

SEQ ID NO: 1415 - DNA, 33 bp, Artificial Sequence
  Probe
ggtcccatggtgtaatggttagcactctggact

SEQ ID NO: 1416 - DNA, 36 bp, Artificial Sequence
  Probe
ggtcccatggtgtaatggttagcactctggactttg

SEQ ID NO: 1417 - DNA, 50 bp, Artificial Sequence
  Probe
ggtcccatggtgtaatggttagcactctggactttgaatccagcgatccg

SEQ ID NO: 1418 - DNA, 28 bp, Artificial Sequence
  Probe
ggtcgtggttgtagtccgtgcgagaata

SEQ ID NO: 1419 - DNA, 25 bp, Artificial Sequence
  Probe
ggtctagtggttaggattcggcgct

SEQ ID NO: 1420 - DNA, 17 bp, Artificial Sequence
  Probe
ggtggagttaaagactt

SEQ ID NO: 1421 - DNA, 26 bp, Artificial Sequence
  Probe
ggtggagttaaagactttttctctga

SEQ ID NO: 1422 - DNA, 25 bp, Artificial Sequence
  Probe
ggttcaatccccggcacctccacca

SEQ ID NO: 1423 - DNA, 16 bp, Artificial Sequence
  Probe
ggttccatagtgtagc

SEQ ID NO: 1424 - DNA, 17 bp, Artificial Sequence
  Probe
ggttccatagtgtagcg

SEQ ID NO: 1425 - DNA, 19 bp, Artificial Sequence
  Probe
ggttccatagtgtagcggt

SEQ ID NO: 1426 - DNA, 22 bp, Artificial Sequence
  Probe
ggttccatagtgtagcggttat

SEQ ID NO: 1427 - DNA, 23 bp, Artificial Sequence
  Probe
ggttccatagtgtagcggttatc

SEQ ID NO: 1428 - DNA, 24 bp, Artificial Sequence
  Probe
ggttccatagtgtagcggttatca

SEQ ID NO: 1429 - DNA, 25 bp, Artificial Sequence
  Probe
ggttccatagtgtagcggttatcac

SEQ ID NO: 1430 - DNA, 28 bp, Artificial Sequence
  Probe
ggttccatagtgtagcggttatcacgtc

SEQ ID NO: 1431 - DNA, 29 bp, Artificial Sequence
  Probe
ggttccatagtgtagcggttatcacgtct

SEQ ID NO: 1432 - DNA, 31 bp, Artificial Sequence
  Probe
ggttccatagtgtagcggttatcacgtctgc

SEQ ID NO: 1433 - DNA, 32 bp, Artificial Sequence
  Probe
ggttccatagtgtagcggttatcacgtctgct

SEQ ID NO: 1434 - DNA, 33 bp, Artificial Sequence
  Probe
ggttccatagtgtagcggttatcacgtctgctt

SEQ ID NO: 1435 - DNA, 34 bp, Artificial Sequence
  Probe
ggttccatagtgtagcggttatcacgtctgcttt

SEQ ID NO: 1436 - DNA, 36 bp, Artificial Sequence
  Probe
ggttccatagtgtagcggttatcacgtctgctttac

SEQ ID NO: 1437 - DNA, 22 bp, Artificial Sequence
  Probe
ggttccatagtgtagtggttat

SEQ ID NO: 1438 - DNA, 23 bp, Artificial Sequence
  Probe
ggttccatagtgtagtggttatc

SEQ ID NO: 1439 - DNA, 24 bp, Artificial Sequence
  Probe
ggttccatagtgtagtggttatca

SEQ ID NO: 1440 - DNA, 25 bp, Artificial Sequence
  Probe
ggttccatagtgtagtggttatcac

SEQ ID NO: 1441 - DNA, 26 bp, Artificial Sequence
  Probe
ggttccatagtgtagtggttatcaca

SEQ ID NO: 1442 - DNA, 29 bp, Artificial Sequence
  Probe
ggttccatagtgtagtggttatcacatct

SEQ ID NO: 1443 - DNA, 31 bp, Artificial Sequence
  Probe
ggttccatagtgtagtggttatcacatctgc

SEQ ID NO: 1444 - DNA, 32 bp, Artificial Sequence
  Probe
ggttccatagtgtagtggttatcacatctgct

SEQ ID NO: 1445 - DNA, 33 bp, Artificial Sequence
  Probe
ggttccatagtgtagtggttatcacatctgctt

SEQ ID NO: 1446 - DNA, 34 bp, Artificial Sequence
  Probe
ggttccatagtgtagtggttatcacatctgcttt

SEQ ID NO: 1447 - DNA, 26 bp, Artificial Sequence
  Probe
ggttccatagtgtagtggttatcacg

SEQ ID NO: 1448 - DNA, 27 bp, Artificial Sequence
  Probe
ggttccatagtgtagtggttatcacgt

SEQ ID NO: 1449 - DNA, 28 bp, Artificial Sequence
  Probe
ggttccatagtgtagtggttatcacgtc

SEQ ID NO: 1450 - DNA, 29 bp, Artificial Sequence
  Probe
ggttccatagtgtagtggttatcacgtct

SEQ ID NO: 1451 - DNA, 30 bp, Artificial Sequence
  Probe
ggttccatagtgtagtggttatcacgtctg

SEQ ID NO: 1452 - DNA, 31 bp, Artificial Sequence
  Probe
ggttccatagtgtagtggttatcacgtctgc

SEQ ID NO: 1453 - DNA, 32 bp, Artificial Sequence
  Probe
ggttccatagtgtagtggttatcacgtctgct

SEQ ID NO: 1454 - DNA, 33 bp, Artificial Sequence
  Probe
ggttccatagtgtagtggttatcacgtctgctt

SEQ ID NO: 1455 - DNA, 34 bp, Artificial Sequence
  Probe
ggttccatagtgtagtggttatcacgtctgcttt

SEQ ID NO: 1456 - DNA, 36 bp, Artificial Sequence
  Probe
ggttccatagtgtagtggttatcacgtctgctttac

SEQ ID NO: 1457 - DNA, 50 bp, Artificial Sequence
  Probe
ggttccatagtgtagtggttatcacgtctgctttacacgcagaaggtcct

SEQ ID NO: 1458 - DNA, 33 bp, Artificial Sequence
  Probe
ggttccatggtgtaatggttagcactctggact

SEQ ID NO: 1459 - DNA, 34 bp, Artificial Sequence
  Probe
ggttccatggtgtaatggttagcactctggactc

SEQ ID NO: 1460 - DNA, 36 bp, Artificial Sequence
  Probe
ggttccatggtgtaatggttagcactctggactctg

SEQ ID NO: 1461 - DNA, 37 bp, Artificial Sequence
  Probe
ggttccatggtgtaatggttagcactctggactctga

SEQ ID NO: 1462 - DNA, 22 bp, Artificial Sequence
  Probe
ggttcgattctcatagtcctag

SEQ ID NO: 1463 - DNA, 33 bp, Artificial Sequence
  Probe
gtaaaccggagatgaaaacctttttccaaggac

SEQ ID NO: 1464 - DNA, 34 bp, Artificial Sequence
  Probe
gtaaaccggagatgaaaacctttttccaaggaca

SEQ ID NO: 1465 - DNA, 50 bp, Artificial Sequence
  Probe
gtaccgttaacttccaattaactagttttgacaacattcaaaaaagagta

SEQ ID NO: 1466 - DNA, 16 bp, Artificial Sequence
  Probe
gtagtcgtggccgagt

SEQ ID NO: 1467 - DNA, 23 bp, Artificial Sequence
  Probe
gtagtcgtggccgagtggttaag

SEQ ID NO: 1468 - DNA, 24 bp, Artificial Sequence
  Probe
gtagtcgtggccgagtggttaagg

SEQ ID NO: 1469 - DNA, 25 bp, Artificial Sequence
  Probe
gtagtcgtggccgagtggttaaggc

SEQ ID NO: 1470 - DNA, 26 bp, Artificial Sequence
  Probe
gtatagtggtgagtatccccgcctgt

SEQ ID NO: 1471 - DNA, 23 bp, Artificial Sequence
  Probe
gtatagtggttagtactctgcgt

SEQ ID NO: 1472 - DNA, 32 bp, Artificial Sequence
  Probe
gtatgattctcgctttgggtgcgagaggtccc

SEQ ID NO: 1473 - DNA, 32 bp, Artificial Sequence
  Probe
gtatgattctcggtttgggtccgagaggtccc

SEQ ID NO: 1474 - DNA, 39 bp, Artificial Sequence
  Probe
gtcacgcgggagaccggggttcgattccccgacggggag

SEQ ID NO: 1475 - DNA, 23 bp, Artificial Sequence
  Probe
gtcacggtggccgagtggttaag

SEQ ID NO: 1476 - DNA, 24 bp, Artificial Sequence
  Probe
gtcacggtggccgagtggttaagg

SEQ ID NO: 1477 - DNA, 25 bp, Artificial Sequence
  Probe
gtcacggtggccgagtggttaaggc

SEQ ID NO: 1478 - DNA, 50 bp, Artificial Sequence
  Probe
gtcagctaaataagctatcgggcccataccccgaaaatgttggttatacc

SEQ ID NO: 1479 - DNA, 34 bp, Artificial Sequence
  Probe
gtcaggatggccgagcggtctaaggcgctgcgtt

SEQ ID NO: 1480 - DNA, 35 bp, Artificial Sequence
  Probe
gtcaggatggccgagcggtctaaggcgctgcgttc

SEQ ID NO: 1481 - DNA, 25 bp, Artificial Sequence
  Probe
gtcaggatggccgagtggtctaagg

SEQ ID NO: 1482 - DNA, 18 bp, Artificial Sequence
  Probe
gtccttgtagtataaact

SEQ ID NO: 1483 - DNA, 26 bp, Artificial Sequence
  Probe
gtccttgtagtataaactaatacacc

SEQ ID NO: 1484 - DNA, 27 bp, Artificial Sequence
  Probe
gtccttgtagtataaactaatacacca

SEQ ID NO: 1485 - DNA, 28 bp, Artificial Sequence
  Probe
gtccttgtagtataaactaatacaccag

SEQ ID NO: 1486 - DNA, 29 bp, Artificial Sequence
  Probe
gtccttgtagtataaactaatacaccagt

SEQ ID NO: 1487 - DNA, 30 bp, Artificial Sequence
  Probe
gtccttgtagtataaactaatacaccagtc

SEQ ID NO: 1488 - DNA, 31 bp, Artificial Sequence
  Probe
gtccttgtagtataaactaatacaccagtct

SEQ ID NO: 1489 - DNA, 50 bp, Artificial Sequence
  Probe
gtccttgtagtataaactaatacaccagtcttgtaaaccggagatgaaaa

SEQ ID NO: 1490 - DNA, 18 bp, Artificial Sequence
  Probe
gtcggtagagcatcagac

SEQ ID NO: 1491 - DNA, 27 bp, Artificial Sequence
  Probe
gtcggtagagcatgagactcttaatct

SEQ ID NO: 1492 - DNA, 35 bp, Artificial Sequence
  Probe
gtcggtagagcatgagactcttaatctcagggtcg

SEQ ID NO: 1493 - DNA, 37 bp, Artificial Sequence
  Probe
gtcggtagagcatgagactcttaatctcagggtcgtg

SEQ ID NO: 1494 - DNA, 18 bp, Artificial Sequence
  Probe
gtcggtagagcatgggac

SEQ ID NO: 1495 - DNA, 35 bp, Artificial Sequence
  Probe
gtcggtagagcatgggactcttaatcccagggtcg

SEQ ID NO: 1496 - DNA, 27 bp, Artificial Sequence
  Probe
gtcgtggttgtagtccgtgcgagaata

SEQ ID NO: 1497 - DNA, 24 bp, Artificial Sequence
  Probe
gtctagcggttaggattcctggtt

SEQ ID NO: 1498 - DNA, 24 bp, Artificial Sequence
  Probe
gtctagtggttaggattcggcgct

SEQ ID NO: 1499 - DNA, 26 bp, Artificial Sequence
  Probe
gtctagtggttaggattcggcgctct

SEQ ID NO: 1500 - DNA, 23 bp, Artificial Sequence
  Probe
gtctcataatctgaaggtcgtga

SEQ ID NO: 1501 - DNA, 33 bp, Artificial Sequence
  Probe
gtgaatctgacaacagaggcttacgacccctta

SEQ ID NO: 1502 - DNA, 39 bp, Artificial Sequence
  Probe
gtgaatctgacaacagaggcttacgaccccttatttacc

SEQ ID NO: 1503 - DNA, 28 bp, Artificial Sequence
  Probe
gtgatcgtatagtggttagtactctgcg

SEQ ID NO: 1504 - DNA, 29 bp, Artificial Sequence
  Probe
gtgatcgtatagtggttagtactctgcgt

SEQ ID NO: 1505 - DNA, 30 bp, Artificial Sequence
  Probe
gtgatcgtatagtggttagtactctgcgtt

SEQ ID NO: 1506 - DNA, 31 bp, Artificial Sequence
  Probe
gtgatcgtatagtggttagtactctgcgttg

SEQ ID NO: 1507 - DNA, 32 bp, Artificial Sequence
  Probe
gtgatcgtatagtggttagtactctgcgttgt

SEQ ID NO: 1508 - DNA, 33 bp, Artificial Sequence
  Probe
gtgatcgtatagtggttagtactctgcgttgtg

SEQ ID NO: 1509 - DNA, 26 bp, Artificial Sequence
  Probe
gtggtctagtggttaggattcggcgc

SEQ ID NO: 1510 - DNA, 27 bp, Artificial Sequence
  Probe
gtggtctagtggttaggattcggcgct

SEQ ID NO: 1511 - DNA, 21 bp, Artificial Sequence
  Probe
gtggtgagtatccccgcctgt

SEQ ID NO: 1512 - DNA, 22 bp, Artificial Sequence
  Probe
gtggtgagtatccccgcctgtc

SEQ ID NO: 1513 - DNA, 19 bp, Artificial Sequence
  Probe
gtggttaggattcggcgct

SEQ ID NO: 1514 - DNA, 23 bp, Artificial Sequence
  Probe
gtggttaggattcggcgctctca

SEQ ID NO: 1515 - DNA, 18 bp, Artificial Sequence
  Probe
gtggttagtactctgcgt

SEQ ID NO: 1516 - DNA, 20 bp, Artificial Sequence
  Probe
gtggttagtactctgcgttg

SEQ ID NO: 1517 - DNA, 21 bp, Artificial Sequence
  Probe
gtggttagtactctgcgttgt

SEQ ID NO: 1518 - DNA, 29 bp, Artificial Sequence
  Probe
gtgtttgtgggtttaagtcccattggtct

SEQ ID NO: 1519 - DNA, 30 bp, Artificial Sequence
  Probe
gtgtttgtgggtttaagtcccattggtcta

SEQ ID NO: 1520 - DNA, 21 bp, Artificial Sequence
  Probe
gttaagatggcagagcccggt

SEQ ID NO: 1521 - DNA, 30 bp, Artificial Sequence
  Probe
gttaagatggcagagcccggtaatcgcata

SEQ ID NO: 1522 - DNA, 34 bp, Artificial Sequence
  Probe
gttaagatggcagagcccggtaatcgcataaaac

SEQ ID NO: 1523 - DNA, 37 bp, Artificial Sequence
  Probe
gttaagatggcagagcccggtaatcgcataaaactta

SEQ ID NO: 1524 - DNA, 42 bp, Artificial Sequence
  Probe
gttaagatggcagagcccggtaatcgcataaaacttaaaact

SEQ ID NO: 1525 - DNA, 18 bp, Artificial Sequence
  Probe
gttcaaatccgggtgccc

SEQ ID NO: 1526 - DNA, 21 bp, Artificial Sequence
  Probe
gttcaaatccgggtgccccct

SEQ ID NO: 1527 - DNA, 24 bp, Artificial Sequence
  Probe
gttcaatccccggcacctccacca

SEQ ID NO: 1528 - DNA, 46 bp, Artificial Sequence
  Probe
gttcttgtagttgaaatacaacgatggtttttcatatcattggtcg

SEQ ID NO: 1529 - DNA, 50 bp, Artificial Sequence
  Probe
gttcttgtagttgaaatacaacgatggtttttcatatcattggtcgtggt

SEQ ID NO: 1530 - DNA, 50 bp, Artificial Sequence
  Probe
gtttaaattagaatcttagctttgggtgctaatggtggagttaaagactt

SEQ ID NO: 1531 - DNA, 50 bp, Artificial Sequence
  Probe
gtttaaccaaaacatcagattgtgaatctgacaacagaggcttacgaccc

SEQ ID NO: 1532 - DNA, 19 bp, Artificial Sequence
  Probe
gtttatgtagcttacctcc

SEQ ID NO: 1533 - DNA, 20 bp, Artificial Sequence
  Probe
gtttatgtagcttacctcct

SEQ ID NO: 1534 - DNA, 27 bp, Artificial Sequence
  Probe
gtttatgtagcttacctcctcaaagca

SEQ ID NO: 1535 - DNA, 29 bp, Artificial Sequence
  Probe
gtttatgtagcttacctcctcaaagcaat

SEQ ID NO: 1536 - DNA, 30 bp, Artificial Sequence
  Probe
gtttatgtagcttacctcctcaaagcaata

SEQ ID NO: 1537 - DNA, 33 bp, Artificial Sequence
  Probe
gtttatgtagcttacctcctcaaagcaatacac

SEQ ID NO: 1538 - DNA, 34 bp, Artificial Sequence
  Probe
gtttatgtagcttacctcctcaaagcaatacact

SEQ ID NO: 1539 - DNA, 35 bp, Artificial Sequence
  Probe
gtttatgtagcttacctcctcaaagcaatacactg

SEQ ID NO: 1540 - DNA, 36 bp, Artificial Sequence
  Probe
gtttatgtagcttacctcctcaaagcaatacactga

SEQ ID NO: 1541 - DNA, 37 bp, Artificial Sequence
  Probe
gtttatgtagcttacctcctcaaagcaatacactgaa

SEQ ID NO: 1542 - DNA, 16 bp, Artificial Sequence
  Probe
gtttccgtagtgtagc

SEQ ID NO: 1543 - DNA, 23 bp, Artificial Sequence
  Probe
gtttccgtagtgtagcggttatc

SEQ ID NO: 1544 - DNA, 24 bp, Artificial Sequence
  Probe
gtttccgtagtgtagcggttatca

SEQ ID NO: 1545 - DNA, 28 bp, Artificial Sequence
  Probe
gtttccgtagtgtagcggttatcacatt

SEQ ID NO: 1546 - DNA, 29 bp, Artificial Sequence
  Probe
gtttccgtagtgtagcggttatcacattc

SEQ ID NO: 1547 - DNA, 31 bp, Artificial Sequence
  Probe
gtttccgtagtgtagcggttatcacattcgc

SEQ ID NO: 1548 - DNA, 32 bp, Artificial Sequence
  Probe
gtttccgtagtgtagcggttatcacattcgcc

SEQ ID NO: 1549 - DNA, 33 bp, Artificial Sequence
  Probe
gtttccgtagtgtagcggttatcacattcgcct

SEQ ID NO: 1550 - DNA, 34 bp, Artificial Sequence
  Probe
gtttccgtagtgtagcggttatcacattcgcctc

SEQ ID NO: 1551 - DNA, 35 bp, Artificial Sequence
  Probe
gtttccgtagtgtagcggttatcacattcgcctca

SEQ ID NO: 1552 - DNA, 36 bp, Artificial Sequence
  Probe
gtttccgtagtgtagcggttatcacattcgcctcac

SEQ ID NO: 1553 - DNA, 20 bp, Artificial Sequence
  Probe
gtttccgtagtgtagtggtc

SEQ ID NO: 1554 - DNA, 23 bp, Artificial Sequence
  Probe
gtttccgtagtgtagtggtcatc

SEQ ID NO: 1555 - DNA, 24 bp, Artificial Sequence
  Probe
gtttccgtagtgtagtggtcatca

SEQ ID NO: 1556 - DNA, 25 bp, Artificial Sequence
  Probe
gtttccgtagtgtagtggtcatcac

SEQ ID NO: 1557 - DNA, 28 bp, Artificial Sequence
  Probe
gtttccgtagtgtagtggtcatcacgtt

SEQ ID NO: 1558 - DNA, 29 bp, Artificial Sequence
  Probe
gtttccgtagtgtagtggtcatcacgttc

SEQ ID NO: 1559 - DNA, 31 bp, Artificial Sequence
  Probe
gtttccgtagtgtagtggtcatcacgttcgc

SEQ ID NO: 1560 - DNA, 32 bp, Artificial Sequence
  Probe
gtttccgtagtgtagtggtcatcacgttcgcc

SEQ ID NO: 1561 - DNA, 33 bp, Artificial Sequence
  Probe
gtttccgtagtgtagtggtcatcacgttcgcct

SEQ ID NO: 1562 - DNA, 34 bp, Artificial Sequence
  Probe
gtttccgtagtgtagtggttatcacgttcgccta

SEQ ID NO: 1563 - DNA, 38 bp, Artificial Sequence
  Probe
gtttccgtagtgtagtggttatcacgttcgcctcacac

SEQ ID NO: 1564 - DNA, 50 bp, Artificial Sequence
  Probe
gtttccgtagtgtagtggttatcacgttcgcctcacacgcgaaaggtccc

SEQ ID NO: 1565 - DNA, 23 bp, Artificial Sequence
  Probe
gtttccgtagtgtagtggttatt

SEQ ID NO: 1566 - DNA, 22 bp, Artificial Sequence
  Probe
gtttgtgggtttaagtcccatt

SEQ ID NO: 1567 - DNA, 50 bp, Artificial Sequence
  Probe
taaattagaatcttagctttgggtgctaatggtggagttaaagacttttt

SEQ ID NO: 1568 - DNA, 50 bp, Artificial Sequence
  Probe
taacacaaagcacccaacttacacttaggagatttcaacttaacttgacc

SEQ ID NO: 1569 - DNA, 50 bp, Artificial Sequence
  Probe
taaccaaaacatcagattgtgaatctgacaacagaggcttacgacccctt

SEQ ID NO: 1570 - DNA, 40 bp, Artificial Sequence
  Probe
taaccgaaaggttggtggttcgagcccacccagggacgcc

SEQ ID NO: 1571 - DNA, 44 bp, Artificial Sequence
  Probe
taagctatcgggcccataccccgaaaatgttggttatacccttc

SEQ ID NO: 1572 - DNA, 45 bp, Artificial Sequence
  Probe
taagctatcgggcccataccccgaaaatgttggttatacccttcc

SEQ ID NO: 1573 - DNA, 50 bp, Artificial Sequence
  Probe
taagctatcgggcccataccccgaaaatgttggttatacccttcccgtac

SEQ ID NO: 1574 - DNA, 50 bp, Artificial Sequence
  Probe
tacaacgatggtttttcatatcattggtcgtggttgtagtccgtgcgaga

SEQ ID NO: 1575 - DNA, 26 bp, Artificial Sequence
  Probe
tacagtcagaggttcaattcctcttc

SEQ ID NO: 1576 - DNA, 35 bp, Artificial Sequence
  Probe
taccccgaaaatgttggttatacccttcccgtact

SEQ ID NO: 1577 - DNA, 36 bp, Artificial Sequence
  Probe
taccccgaaaatgttggttatacccttcccgtacta

SEQ ID NO: 1578 - DNA, 18 bp, Artificial Sequence
  Probe
tacctcctcaaagcaata

SEQ ID NO: 1579 - DNA, 50 bp, Artificial Sequence
  Probe
tacctcctcaaagcaatacactgaaaatgtttagacgggctcacatcacc

SEQ ID NO: 1580 - DNA, 50 bp, Artificial Sequence
  Probe
tagaatcttagctttgggtgctaatggtggagttaaagactttttctctg

SEQ ID NO: 1581 - DNA, 32 bp, Artificial Sequence
  Probe
tagagtaaataataggagcttaaaccccctta

SEQ ID NO: 1582 - DNA, 50 bp, Artificial Sequence
  Probe
tagattgaagccagttgattagggtgcttagctgttaactaagtgtttgt

SEQ ID NO: 1583 - DNA, 50 bp, Artificial Sequence
  Probe
tagcactctggactttgaatccagcgatccgagttcaaatctcggtggga

SEQ ID NO: 1584 - DNA, 36 bp, Artificial Sequence
  Probe
tagcattaaccttttaagttaaagattaagagaacc

SEQ ID NO: 1585 - DNA, 49 bp, Artificial Sequence
  Probe
tagcattaaccttttaagttaaagattaagagaaccaacacctctttac

SEQ ID NO: 1586 - DNA, 50 bp, Artificial Sequence
  Probe
tagcattaaccttttaagttaaagattaagagaaccaacacctctttaca

SEQ ID NO: 1587 - DNA, 27 bp, Artificial Sequence
  Probe
tagctcagtcggtagagcatgggactc

SEQ ID NO: 1588 - DNA, 28 bp, Artificial Sequence
  Probe
tagctcagtcggtagagcatgggactct

SEQ ID NO: 1589 - DNA, 29 bp, Artificial Sequence
  Probe
tagctcagtcggtagagcatgggactctt

SEQ ID NO: 1590 - DNA, 21 bp, Artificial Sequence
  Probe
taggatggggtgtgataggtg

SEQ ID NO: 1591 - DNA, 29 bp, Artificial Sequence
  Probe
taggatggggtgtgataggtggcacggag

SEQ ID NO: 1592 - DNA, 30 bp, Artificial Sequence
  Probe
taggatggggtgtgataggtggcacggaga

SEQ ID NO: 1593 - DNA, 32 bp, Artificial Sequence
  Probe
taggatggggtgtgataggtggcacggagaat

SEQ ID NO: 1594 - DNA, 33 bp, Artificial Sequence
  Probe
taggatggggtgtgataggtggcacggagaatt

SEQ ID NO: 1595 - DNA, 36 bp, Artificial Sequence
  Probe
taggatggggtgtgataggtggcacggagaattttg

SEQ ID NO: 1596 - DNA, 50 bp, Artificial Sequence
  Probe
tagggtgcttagctgttaactaagtgtttgtgggtttaagtcccattggt

SEQ ID NO: 1597 - DNA, 35 bp, Artificial Sequence
  Probe
tagtaccgttaacttccaattaactagttttgaca

SEQ ID NO: 1598 - DNA, 23 bp, Artificial Sequence
  Probe
tagtggtgagtatccccgcctgt

SEQ ID NO: 1599 - DNA, 21 bp, Artificial Sequence
  Probe
tagtggttaggattcggcgct

SEQ ID NO: 1600 - DNA, 23 bp, Artificial Sequence
  Probe
tagtggttaggattcggcgctct

SEQ ID NO: 1601 - DNA, 25 bp, Artificial Sequence
  Probe
tagtggttaggattcggcgctctca

SEQ ID NO: 1602 - DNA, 19 bp, Artificial Sequence
  Probe
tagtggttagtactctgcg

SEQ ID NO: 1603 - DNA, 20 bp, Artificial Sequence
  Probe
tagtggttagtactctgcgt

SEQ ID NO: 1604 - DNA, 37 bp, Artificial Sequence
  Probe
tcaaagcaatacactgaaaatgtttagacgggctcac

SEQ ID NO: 1605 - DNA, 50 bp, Artificial Sequence
  Probe
tcaaagcaatacactgaaaatgtttagacgggctcacatcaccccataaa

SEQ ID NO: 1606 - DNA, 22 bp, Artificial Sequence
  Probe
tcaatccccggcacctccacca

SEQ ID NO: 1607 - DNA, 45 bp, Artificial Sequence
  Probe
tcacaagaactgctaactcatgcccccatgtctaacaacatggct

SEQ ID NO: 1608 - DNA, 46 bp, Artificial Sequence
  Probe
tcacaagaactgctaactcatgcccccatgtctaacaacatggctt

SEQ ID NO: 1609 - DNA, 49 bp, Artificial Sequence
  Probe
tcacaagaactgctaactcatgcccccatgtctaacaacatggctttct

SEQ ID NO: 1610 - DNA, 50 bp, Artificial Sequence
  Probe
tcacaagaactgctaactcatgcccccatgtctaacaacatggctttctc

SEQ ID NO: 1611 - DNA, 19 bp, Artificial Sequence
  Probe
tcacacgcgaaaggtcccc

SEQ ID NO: 1612 - DNA, 22 bp, Artificial Sequence
  Probe
tcacacgcgaaaggtccccggt

SEQ ID NO: 1613 - DNA, 20 bp, Artificial Sequence
  Probe
tcacgcgggagaccggggtt

SEQ ID NO: 1614 - DNA, 33 bp, Artificial Sequence
  Probe
tcacgcgggagaccggggttcaattccccgacg

SEQ ID NO: 1615 - DNA, 34 bp, Artificial Sequence
  Probe
tcacgcgggagaccggggttcaattccccgacgg

SEQ ID NO: 1616 - DNA, 36 bp, Artificial Sequence
  Probe
tcacgcgggagaccggggttcaattccccgacgggg

SEQ ID NO: 1617 - DNA, 38 bp, Artificial Sequence
  Probe
tcacgcgggagaccggggttcaattccccgacggggag

SEQ ID NO: 1618 - DNA, 32 bp, Artificial Sequence
  Probe
tcacgcgggagaccggggttcgattccccgac

SEQ ID NO: 1619 - DNA, 33 bp, Artificial Sequence
  Probe
tcacgcgggagaccggggttcgattccccgacg

SEQ ID NO: 1620 - DNA, 34 bp, Artificial Sequence
  Probe
tcacgcgggagaccggggttcgattccccgacgg

SEQ ID NO: 1621 - DNA, 35 bp, Artificial Sequence
  Probe
tcacgcgggagaccggggttcgattccccgacggg

SEQ ID NO: 1622 - DNA, 36 bp, Artificial Sequence
  Probe
tcacgcgggagaccggggttcgattccccgacgggg

SEQ ID NO: 1623 - DNA, 38 bp, Artificial Sequence
  Probe
tcacgcgggagaccggggttcgattccccgacggggag

SEQ ID NO: 1624 - DNA, 33 bp, Artificial Sequence
  Probe
tcagaagattctaggttcgactcctggctggct

SEQ ID NO: 1625 - DNA, 17 bp, Artificial Sequence
  Probe
tccagcgatccgagttc

SEQ ID NO: 1626 - DNA, 18 bp, Artificial Sequence
  Probe
tccagcgatccgagttca

SEQ ID NO: 1627 - DNA, 34 bp, Artificial Sequence
  Probe
tccagcgatccgagttcaaatctcggtggaacct

SEQ ID NO: 1628 - DNA, 34 bp, Artificial Sequence
  Probe
tccagcgatccgagttcaaatctcggtgggacct

SEQ ID NO: 1629 - DNA, 28 bp, Artificial Sequence
  Probe
tccatagtgtagtggttatcacgtctgc

SEQ ID NO: 1630 - DNA, 33 bp, Artificial Sequence
  Probe
tccatagtgtagtggttatcacgtctgctttac

SEQ ID NO: 1631 - DNA, 21 bp, Artificial Sequence
  Probe
tccattggggtttccccgcgc

SEQ ID NO: 1632 - DNA, 18 bp, Artificial Sequence
  Probe
tcccacatggtctagcgg

SEQ ID NO: 1633 - DNA, 19 bp, Artificial Sequence
  Probe
tcccacatggtctagcggt

SEQ ID NO: 1634 - DNA, 20 bp, Artificial Sequence
  Probe
tcccacatggtctagcggtt

SEQ ID NO: 1635 - DNA, 22 bp, Artificial Sequence
  Probe
tcccacatggtctagcggttag

SEQ ID NO: 1636 - DNA, 23 bp, Artificial Sequence
  Probe
tcccacatggtctagcggttagg

SEQ ID NO: 1637 - DNA, 24 bp, Artificial Sequence
  Probe
tcccacatggtctagcggttagga

SEQ ID NO: 1638 - DNA, 25 bp, Artificial Sequence
  Probe
tcccacatggtctagcggttaggat

SEQ ID NO: 1639 - DNA, 26 bp, Artificial Sequence
  Probe
tcccacatggtctagcggttaggatt

SEQ ID NO: 1640 - DNA, 27 bp, Artificial Sequence
  Probe
tcccacatggtctagcggttaggattc

SEQ ID NO: 1641 - DNA, 28 bp, Artificial Sequence
  Probe
tcccacatggtctagcggttaggattcc

SEQ ID NO: 1642 - DNA, 29 bp, Artificial Sequence
  Probe
tcccacatggtctagcggttaggattcct

SEQ ID NO: 1643 - DNA, 30 bp, Artificial Sequence
  Probe
tcccacatggtctagcggttaggattcctg

SEQ ID NO: 1644 - DNA, 31 bp, Artificial Sequence
  Probe
tcccacatggtctagcggttaggattcctgg

SEQ ID NO: 1645 - DNA, 32 bp, Artificial Sequence
  Probe
tcccacatggtctagcggttaggattcctggt

SEQ ID NO: 1646 - DNA, 33 bp, Artificial Sequence
  Probe
tcccacatggtctagcggttaggattcctggtt

SEQ ID NO: 1647 - DNA, 34 bp, Artificial Sequence
  Probe
tcccacatggtctagcggttaggattcctggttt

SEQ ID NO: 1648 - DNA, 35 bp, Artificial Sequence
  Probe
tcccacatggtctagcggttaggattcctggtttt

SEQ ID NO: 1649 - DNA, 36 bp, Artificial Sequence
  Probe
tcccacatggtctagcggttaggattcctggttttc

SEQ ID NO: 1650 - DNA, 37 bp, Artificial Sequence
  Probe
tcccacatggtctagcggttaggattcctggttttca

SEQ ID NO: 1651 - DNA, 40 bp, Artificial Sequence
  Probe
tcccacatggtctagcggttaggattcctggttttcaccc

SEQ ID NO: 1652 - DNA, 17 bp, Artificial Sequence
  Probe
tcccatatggtctagcg

SEQ ID NO: 1653 - DNA, 18 bp, Artificial Sequence
  Probe
tcccatatggtctagcgg

SEQ ID NO: 1654 - DNA, 19 bp, Artificial Sequence
  Probe
tcccatatggtctagcggt

SEQ ID NO: 1655 - DNA, 23 bp, Artificial Sequence
  Probe
tcccatatggtctagcggttagg

SEQ ID NO: 1656 - DNA, 26 bp, Artificial Sequence
  Probe
tcccatatggtctagcggttaggatt

SEQ ID NO: 1657 - DNA, 28 bp, Artificial Sequence
  Probe
tcccatatggtctagcggttaggattcc

SEQ ID NO: 1658 - DNA, 29 bp, Artificial Sequence
  Probe
tcccatatggtctagcggttaggattcct

SEQ ID NO: 1659 - DNA, 30 bp, Artificial Sequence
  Probe
tcccatatggtctagcggttaggattcctg

SEQ ID NO: 1660 - DNA, 31 bp, Artificial Sequence
  Probe
tcccatatggtctagcggttaggattcctgg

SEQ ID NO: 1661 - DNA, 32 bp, Artificial Sequence
  Probe
tcccatatggtctagcggttaggattcctggt

SEQ ID NO: 1662 - DNA, 33 bp, Artificial Sequence
  Probe
tcccatatggtctagcggttaggattcctggtt

SEQ ID NO: 1663 - DNA, 34 bp, Artificial Sequence
  Probe
tcccatatggtctagcggttaggattcctggttt

SEQ ID NO: 1664 - DNA, 35 bp, Artificial Sequence
  Probe
tcccatatggtctagcggttaggattcctggtttt

SEQ ID NO: 1665 - DNA, 36 bp, Artificial Sequence
  Probe
tcccatatggtctagcggttaggattcctggttttc

SEQ ID NO: 1666 - DNA, 37 bp, Artificial Sequence
  Probe
tcccatatggtctagcggttaggattcctggttttca

SEQ ID NO: 1667 - DNA, 34 bp, Artificial Sequence
  Probe
tcccatggtgtaatggttagcactctggactttg

SEQ ID NO: 1668 - DNA, 22 bp, Artificial Sequence
  Probe
tccccgcgcaggttcgaatcct

SEQ ID NO: 1669 - DNA, 17 bp, Artificial Sequence
  Probe
tccccggcacctccacc

SEQ ID NO: 1670 - DNA, 18 bp, Artificial Sequence
  Probe
tccccggcacctccacca

SEQ ID NO: 1671 - DNA, 31 bp, Artificial Sequence
  Probe
tccctggtggtctagtggctaggattcggcg

SEQ ID NO: 1672 - DNA, 32 bp, Artificial Sequence
  Probe
tccctggtggtctagtggctaggattcggcgc

SEQ ID NO: 1673 - DNA, 33 bp, Artificial Sequence
  Probe
tccctggtggtctagtggctaggattcggcgct

SEQ ID NO: 1674 - DNA, 34 bp, Artificial Sequence
  Probe
tccctggtggtctagtggctaggattcggcgctt

SEQ ID NO: 1675 - DNA, 35 bp, Artificial Sequence
  Probe
tccctggtggtctagtggctaggattcggcgcttt

SEQ ID NO: 1676 - DNA, 36 bp, Artificial Sequence
  Probe
tccctggtggtctagtggctaggattcggcgctttc

SEQ ID NO: 1677 - DNA, 37 bp, Artificial Sequence
  Probe
tccctggtggtctagtggctaggattcggcgctttca

SEQ ID NO: 1678 - DNA, 50 bp, Artificial Sequence
  Probe
tccctggtggtctagtggctaggattcggcgctttcaccgccgcggcccg

SEQ ID NO: 1679 - DNA, 31 bp, Artificial Sequence
  Probe
tccctggtggtctagtggttaggattcggcg

SEQ ID NO: 1680 - DNA, 32 bp, Artificial Sequence
  Probe
tccctggtggtctagtggttaggattcggcgc

SEQ ID NO: 1681 - DNA, 33 bp, Artificial Sequence
  Probe
tccctggtggtctagtggttaggattcggcgct

SEQ ID NO: 1682 - DNA, 34 bp, Artificial Sequence
  Probe
tccctggtggtctagtggttaggattcggcgctc

SEQ ID NO: 1683 - DNA, 35 bp, Artificial Sequence
  Probe
tccctggtggtctagtggttaggattcggcgctct

SEQ ID NO: 1684 - DNA, 36 bp, Artificial Sequence
  Probe
tccctggtggtctagtggttaggattcggcgctctc

SEQ ID NO: 1685 - DNA, 37 bp, Artificial Sequence
  Probe
tccctggtggtctagtggttaggattcggcgctctca

SEQ ID NO: 1686 - DNA, 38 bp, Artificial Sequence
  Probe
tccctggtggtctagtggttaggattcggcgctctcac

SEQ ID NO: 1687 - DNA, 39 bp, Artificial Sequence
  Probe
tccctggtggtctagtggttaggattcggcgctctcacc

SEQ ID NO: 1688 - DNA, 40 bp, Artificial Sequence
  Probe
tccctggtggtctagtggttaggattcggcgctctcaccg

SEQ ID NO: 1689 - DNA, 42 bp, Artificial Sequence
  Probe
tccctggtggtctagtggttaggattcggcgctctcaccgcc

SEQ ID NO: 1690 - DNA, 49 bp, Artificial Sequence
  Probe
tccctggtggtctagtggttaggattcggcgctctcaccgccgcggccc

SEQ ID NO: 1691 - DNA, 50 bp, Artificial Sequence
  Probe
tccctggtggtctagtggttaggattcggcgctctcaccgccgcggcccg

SEQ ID NO: 1692 - DNA, 33 bp, Artificial Sequence
  Probe
tccgtagtgtagcggttatcacattcgcctcac

SEQ ID NO: 1693 - DNA, 29 bp, Artificial Sequence
  Probe
tccgtagtgtagtggtcatcacgttcgcc

SEQ ID NO: 1694 - DNA, 50 bp, Artificial Sequence
  Probe
tcctcaaagcaatacactgaaaatgtttagacgggctcacatcaccccat

SEQ ID NO: 1695 - DNA, 22 bp, Artificial Sequence
  Probe
tcctcgttagtatagtggtgag

SEQ ID NO: 1696 - DNA, 23 bp, Artificial Sequence
  Probe
tcctcgttagtatagtggtgagt

SEQ ID NO: 1697 - DNA, 24 bp, Artificial Sequence
  Probe
tcctcgttagtatagtggtgagta

SEQ ID NO: 1698 - DNA, 26 bp, Artificial Sequence
  Probe
tcctcgttagtatagtggtgagtatc

SEQ ID NO: 1699 - DNA, 28 bp, Artificial Sequence
  Probe
tcctcgttagtatagtggtgagtatccc

SEQ ID NO: 1700 - DNA, 29 bp, Artificial Sequence
  Probe
tcctcgttagtatagtggtgagtatcccc

SEQ ID NO: 1701 - DNA, 30 bp, Artificial Sequence
  Probe
tcctcgttagtatagtggtgagtatccccg

SEQ ID NO: 1702 - DNA, 31 bp, Artificial Sequence
  Probe
tcctcgttagtatagtggtgagtatccccgc

SEQ ID NO: 1703 - DNA, 32 bp, Artificial Sequence
  Probe
tcctcgttagtatagtggtgagtatccccgcc

SEQ ID NO: 1704 - DNA, 33 bp, Artificial Sequence
  Probe
tcctcgttagtatagtggtgagtatccccgcct

SEQ ID NO: 1705 - DNA, 34 bp, Artificial Sequence
  Probe
tcctcgttagtatagtggtgagtatccccgcctg

SEQ ID NO: 1706 - DNA, 35 bp, Artificial Sequence
  Probe
tcctcgttagtatagtggtgagtatccccgcctgt

SEQ ID NO: 1707 - DNA, 36 bp, Artificial Sequence
  Probe
tcctcgttagtatagtggtgagtatccccgcctgtc

SEQ ID NO: 1708 - DNA, 37 bp, Artificial Sequence
  Probe
tcctcgttagtatagtggtgagtatccccgcctgtca

SEQ ID NO: 1709 - DNA, 38 bp, Artificial Sequence
  Probe
tcctcgttagtatagtggtgagtatccccgcctgtcac

SEQ ID NO: 1710 - DNA, 39 bp, Artificial Sequence
  Probe
tcctcgttagtatagtggtgagtatccccgcctgtcacg

SEQ ID NO: 1711 - DNA, 50 bp, Artificial Sequence
  Probe
tcctcgttagtatagtggtgagtatccccgcctgtcacgcgggagaccgg

SEQ ID NO: 1712 - DNA, 24 bp, Artificial Sequence
  Probe
tcctcgttagtatagtggttagta

SEQ ID NO: 1713 - DNA, 28 bp, Artificial Sequence
  Probe
tcctcgttagtatagtggttagtatccc

SEQ ID NO: 1714 - DNA, 32 bp, Artificial Sequence
  Probe
tcctcgttagtatagtggttagtatccccgcc

SEQ ID NO: 1715 - DNA, 33 bp, Artificial Sequence
  Probe
tcctcgttagtatagtggttagtatccccgcct

SEQ ID NO: 1716 - DNA, 34 bp, Artificial Sequence
  Probe
tcctcgttagtatagtggttagtatccccgcctg

SEQ ID NO: 1717 - DNA, 35 bp, Artificial Sequence
  Probe
tcctcgttagtatagtggttagtatccccgcctgt

SEQ ID NO: 1718 - DNA, 36 bp, Artificial Sequence
  Probe
tcctcgttagtatagtggttagtatccccgcctgtc

SEQ ID NO: 1719 - DNA, 37 bp, Artificial Sequence
  Probe
tcctcgttagtatagtggttagtatccccgcctgtca

SEQ ID NO: 1720 - DNA, 19 bp, Artificial Sequence
  Probe
tcgaatccgagtcacggca

SEQ ID NO: 1721 - DNA, 20 bp, Artificial Sequence
  Probe
tcgactcccggtgtgggaac

SEQ ID NO: 1722 - DNA, 28 bp, Artificial Sequence
  Probe
tcgcataaaacttaaaactttacagtca

SEQ ID NO: 1723 - DNA, 19 bp, Artificial Sequence
  Probe
tcgggtgcgagaggtcccg

SEQ ID NO: 1724 - DNA, 27 bp, Artificial Sequence
  Probe
tcggtagagcatgggactcttaatccc

SEQ ID NO: 1725 - DNA, 33 bp, Artificial Sequence
  Probe
tcgttagtatagtggtgagtatccccgcctgtc

SEQ ID NO: 1726 - DNA, 33 bp, Artificial Sequence
  Probe
tctcagggatgggttcgattctcatagtcctag

SEQ ID NO: 1727 - DNA, 31 bp, Artificial Sequence
  Probe
tcttttagtataaatagtaccgttaacttcc

SEQ ID NO: 1728 - DNA, 21 bp, Artificial Sequence
  Probe
tgaatccagcgatccgagttc

SEQ ID NO: 1729 - DNA, 22 bp, Artificial Sequence
  Probe
tgaatccagcgatccgagttca

SEQ ID NO: 1730 - DNA, 25 bp, Artificial Sequence
  Probe
tgaatctgacaacagaggcttacga

SEQ ID NO: 1731 - DNA, 27 bp, Artificial Sequence
  Probe
tgaatctgacaacagaggcttacgacc

SEQ ID NO: 1732 - DNA, 28 bp, Artificial Sequence
  Probe
tgaatctgacaacagaggcttacgaccc

SEQ ID NO: 1733 - DNA, 29 bp, Artificial Sequence
  Probe
tgaatctgacaacagaggcttacgacccc

SEQ ID NO: 1734 - DNA, 30 bp, Artificial Sequence
  Probe
tgaatctgacaacagaggcttacgacccct

SEQ ID NO: 1735 - DNA, 31 bp, Artificial Sequence
  Probe
tgaatctgacaacagaggcttacgacccctt

SEQ ID NO: 1736 - DNA, 32 bp, Artificial Sequence
  Probe
tgaatctgacaacagaggcttacgacccctta

SEQ ID NO: 1737 - DNA, 33 bp, Artificial Sequence
  Probe
tgaatctgacaacagaggcttacgaccccttat

SEQ ID NO: 1738 - DNA, 34 bp, Artificial Sequence
  Probe
tgaatctgacaacagaggcttacgaccccttatt

SEQ ID NO: 1739 - DNA, 35 bp, Artificial Sequence
  Probe
tgaatctgacaacagaggcttacgaccccttattt

SEQ ID NO: 1740 - DNA, 36 bp, Artificial Sequence
  Probe
tgaatctgacaacagaggcttacgaccccttattta

SEQ ID NO: 1741 - DNA, 37 bp, Artificial Sequence
  Probe
tgaatctgacaacagaggcttacgaccccttatttac

SEQ ID NO: 1742 - DNA, 38 bp, Artificial Sequence
  Probe
tgaatctgacaacagaggcttacgaccccttatttacc

SEQ ID NO: 1743 - DNA, 26 bp, Artificial Sequence
  Probe
tgacaacagaggcttacgacccctta

SEQ ID NO: 1744 - DNA, 31 bp, Artificial Sequence
  Probe
tgacaacagaggcttacgaccccttatttac

SEQ ID NO: 1745 - DNA, 32 bp, Artificial Sequence
  Probe
tgacaacagaggcttacgaccccttatttacc

SEQ ID NO: 1746 - DNA, 32 bp, Artificial Sequence
  Probe
tgatcgtatagtggttagtactctgcgttgtg

SEQ ID NO: 1747 - DNA, 18 bp, Artificial Sequence
  Probe
tgccgtgatcgtatagtg

SEQ ID NO: 1748 - DNA, 19 bp, Artificial Sequence
  Probe
tgccgtgatcgtatagtgg

SEQ ID NO: 1749 - DNA, 20 bp, Artificial Sequence
  Probe
tgccgtgatcgtatagtggt

SEQ ID NO: 1750 - DNA, 21 bp, Artificial Sequence
  Probe
tgccgtgatcgtatagtggtt

SEQ ID NO: 1751 - DNA, 22 bp, Artificial Sequence
  Probe
tgccgtgatcgtatagtggtta

SEQ ID NO: 1752 - DNA, 23 bp, Artificial Sequence
  Probe
tgccgtgatcgtatagtggttag

SEQ ID NO: 1753 - DNA, 24 bp, Artificial Sequence
  Probe
tgccgtgatcgtatagtggttagt

SEQ ID NO: 1754 - DNA, 33 bp, Artificial Sequence
  Probe
tgccgtgatcgtatagtggttagtactctgcgt

SEQ ID NO: 1755 - DNA, 35 bp, Artificial Sequence
  Probe
tgccgtgatcgtatagtggttagtactctgcgttg

SEQ ID NO: 1756 - DNA, 36 bp, Artificial Sequence
  Probe
tgccgtgatcgtatagtggttagtactctgcgttgt

SEQ ID NO: 1757 - DNA, 37 bp, Artificial Sequence
  Probe
tgccgtgatcgtatagtggttagtactctgcgttgtg

SEQ ID NO: 1758 - DNA, 33 bp, Artificial Sequence
  Probe
tgctaatggtggagttaaagactttttctctga

SEQ ID NO: 1759 - DNA, 23 bp, Artificial Sequence
  Probe
tggccgcagcaacctcggttcga

SEQ ID NO: 1760 - DNA, 17 bp, Artificial Sequence
  Probe
tggggattgtgggttcg

SEQ ID NO: 1761 - DNA, 23 bp, Artificial Sequence
  Probe
tggggattgtgggttcgagtccc

SEQ ID NO: 1762 - DNA, 26 bp, Artificial Sequence
  Probe
tggggattgtgggttcgagtcccatc

SEQ ID NO: 1763 - DNA, 27 bp, Artificial Sequence
  Probe
tggggattgtgggttcgagtcccatct

SEQ ID NO: 1764 - DNA, 29 bp, Artificial Sequence
  Probe
tgggtggttcagtggtagaattctcgcct

SEQ ID NO: 1765 - DNA, 30 bp, Artificial Sequence
  Probe
tgggtggttcagtggtagaattctcgcctg

SEQ ID NO: 1766 - DNA, 31 bp, Artificial Sequence
  Probe
tgggtggttcagtggtagaattctcgcctgc

SEQ ID NO: 1767 - DNA, 32 bp, Artificial Sequence
  Probe
tgggtggttcagtggtagaattctcgcctgcc

SEQ ID NO: 1768 - DNA, 33 bp, Artificial Sequence
  Probe
tggtagaattctcgcctgccacgcgggaggccc

SEQ ID NO: 1769 - DNA, 42 bp, Artificial Sequence
  Probe
tggtatagtggtaagcatagctgccttccaagcagttgaccc

SEQ ID NO: 1770 - DNA, 42 bp, Artificial Sequence
  Probe
tggtatagtggttagcatagctgccttccaagcagttgaccc

SEQ ID NO: 1771 - DNA, 36 bp, Artificial Sequence
  Probe
tggtatatagtttaaacaaaacgaatgatttcgact

SEQ ID NO: 1772 - DNA, 37 bp, Artificial Sequence
  Probe
tggtatatagtttaaacaaaacgaatgatttcgactc

SEQ ID NO: 1773 - DNA, 50 bp, Artificial Sequence
  Probe
tggtatatagtttaaacaaaacgaatgatttcgactcattaaattatgat

SEQ ID NO: 1774 - DNA, 31 bp, Artificial Sequence
  Probe
tggtggtctagtggttaggattcggcgctct

SEQ ID NO: 1775 - DNA, 32 bp, Artificial Sequence
  Probe
tggtggtctagtggttaggattcggcgctctc

SEQ ID NO: 1776 - DNA, 22 bp, Artificial Sequence
  Probe
tggttaggattcggcgctctca

SEQ ID NO: 1777 - DNA, 23 bp, Artificial Sequence
  Probe
tggttaggattcggcgctctcac

SEQ ID NO: 1778 - DNA, 23 bp, Artificial Sequence
  Probe
tggttcaaatccgggtgccccct

SEQ ID NO: 1779 - DNA, 34 bp, Artificial Sequence
  Probe
tgtaaaccggagatgaaaacctttttccaaggac

SEQ ID NO: 1780 - DNA, 35 bp, Artificial Sequence
  Probe
tgtaaaccggagatgaaaacctttttccaaggaca

SEQ ID NO: 1781 - DNA, 23 bp, Artificial Sequence
  Probe
tgtagcggttatcacattcgcct

SEQ ID NO: 1782 - DNA, 40 bp, Artificial Sequence
  Probe
tgtcacgcgggagaccggggttcgattccccgacggggag

SEQ ID NO: 1783 - DNA, 34 bp, Artificial Sequence
  Probe
tgtgaatctgacaacagaggcttacgacccctta

SEQ ID NO: 1784 - DNA, 49 bp, Artificial Sequence
  Probe
ttaaccaaaacatcagattgtgaatctgacaacagaggcttacgacccc

SEQ ID NO: 1785 - DNA, 50 bp, Artificial Sequence
  Probe
ttaaccaaaacatcagattgtgaatctgacaacagaggcttacgacccct

SEQ ID NO: 1786 - DNA, 37 bp, Artificial Sequence
  Probe
ttaaccgaaaggttggtggttcgagcccacccaggga

SEQ ID NO: 1787 - DNA, 41 bp, Artificial Sequence
  Probe
ttaaccgaaaggttggtggttcgagcccacccagggacgcc

SEQ ID NO: 1788 - DNA, 33 bp, Artificial Sequence
  Probe
ttaactaagtgtttgtgggtttaagtcccattg

SEQ ID NO: 1789 - DNA, 36 bp, Artificial Sequence
  Probe
ttaactaagtgtttgtgggtttaagtcccattggtc

SEQ ID NO: 1790 - DNA, 37 bp, Artificial Sequence
  Probe
ttaactaagtgtttgtgggtttaagtcccattggtct

SEQ ID NO: 1791 - DNA, 38 bp, Artificial Sequence
  Probe
ttaactaagtgtttgtgggtttaagtcccattggtcta

SEQ ID NO: 1792 - DNA, 27 bp, Artificial Sequence
  Probe
ttacagtcagaggttcaattcctcttc

SEQ ID NO: 1793 - DNA, 50 bp, Artificial Sequence
  Probe
ttagaatcttagctttgggtgctaatggtggagttaaagactttttctct

SEQ ID NO: 1794 - DNA, 23 bp, Artificial Sequence
  Probe
ttagagccagactgcctgggttt

SEQ ID NO: 1795 - DNA, 50 bp, Artificial Sequence
  Probe
ttagcattaaccttttaagttaaagattaagagaaccaacacctctttac

SEQ ID NO: 1796 - DNA, 35 bp, Artificial Sequence
  Probe
ttcagttgatgcagagtggggttttgcagtcctta

SEQ ID NO: 1797 - DNA, 29 bp, Artificial Sequence
  Probe
ttccatagtgtagtggttatcacgtctgc

SEQ ID NO: 1798 - DNA, 23 bp, Artificial Sequence
  Probe
ttccccgcacaggttcgaatcct

SEQ ID NO: 1799 - DNA, 35 bp, Artificial Sequence
  Probe
ttgtaaaccggagatgaaaacctttttccaaggac

SEQ ID NO: 1800 - DNA, 36 bp, Artificial Sequence
  Probe
ttgtaaaccggagatgaaaacctttttccaaggaca

SEQ ID NO: 1801 - DNA, 50 bp, Artificial Sequence
  Probe
tttaaccaaaacatcagattgtgaatctgacaacagaggcttacgacccc

SEQ ID NO: 1802 - DNA, 19 bp, Artificial Sequence
  Probe
tttgggtgcgagaggtccc

SEQ ID NO: 1803 - DNA, 25 bp, Artificial Sequence
  Probe
aaaaattttggtgcaactccaaata

SEQ ID NO: 1804 - DNA, 25 bp, Artificial Sequence
  Probe
aaaacatcagattgtgaatctgaca

SEQ ID NO: 1805 - DNA, 33 bp, Artificial Sequence
  Probe
aaaacatcagattgtgaatctgacaacagaggc

SEQ ID NO: 1806 - DNA, 34 bp, Artificial Sequence
  Probe
aaaacatcagattgtgaatctgacaacagaggct

SEQ ID NO: 1807 - DNA, 35 bp, Artificial Sequence
  Probe
aaaacatcagattgtgaatctgacaacagaggctt

SEQ ID NO: 1808 - DNA, 38 bp, Artificial Sequence
  Probe
aaaacatcagattgtgaatctgacaacagaggcttacg

SEQ ID NO: 1809 - DNA, 40 bp, Artificial Sequence
  Probe
aaaacatcagattgtgaatctgacaacagaggcttacgac

SEQ ID NO: 1810 - DNA, 44 bp, Artificial Sequence
  Probe
aaaacatcagattgtgaatctgacaacagaggcttacgacccct

SEQ ID NO: 1811 - DNA, 48 bp, Artificial Sequence
  Probe
aaaacatcagattgtgaatctgacaacagaggcttacgaccccttatt

SEQ ID NO: 1812 - DNA, 49 bp, Artificial Sequence
  Probe
aaaacatcagattgtgaatctgacaacagaggcttacgaccccttattt

SEQ ID NO: 1813 - DNA, 23 bp, Artificial Sequence
  Probe
aaaacctttttccaaggacaaat

SEQ ID NO: 1814 - DNA, 33 bp, Artificial Sequence
  Probe
aaaacgaatgatttcgactcattaaattatgat

SEQ ID NO: 1815 - DNA, 34 bp, Artificial Sequence
  Probe
aaaacgaatgatttcgactcattaaattatgata

SEQ ID NO: 1816 - DNA, 46 bp, Artificial Sequence
  Probe
aaaacgaatgatttcgactcattaaattatgataatcatatttacc

SEQ ID NO: 1817 - DNA, 49 bp, Artificial Sequence
  Probe
aaaacgaatgatttcgactcattaaattatgataatcatatttaccaaa

SEQ ID NO: 1818 - DNA, 50 bp, Artificial Sequence
  Probe
aaaacgaatgatttcgactcattaaattatgataatcatatttaccaaat

SEQ ID NO: 1819 - DNA, 17 bp, Artificial Sequence
  Probe
aaaacttaaaactttac

SEQ ID NO: 1820 - DNA, 29 bp, Artificial Sequence
  Probe
aaaacttaaaactttacagtcagaggttc

SEQ ID NO: 1821 - DNA, 30 bp, Artificial Sequence
  Probe
aaaacttaaaactttacagtcagaggttca

SEQ ID NO: 1822 - DNA, 31 bp, Artificial Sequence
  Probe
aaaacttaaaactttacagtcagaggttcaa

SEQ ID NO: 1823 - DNA, 41 bp, Artificial Sequence
  Probe
aaaacttaaaactttacagtcagaggttcaattcctcttct

SEQ ID NO: 1824 - DNA, 42 bp, Artificial Sequence
  Probe
aaaacttaaaactttacagtcagaggttcaattcctcttctt

SEQ ID NO: 1825 - DNA, 43 bp, Artificial Sequence
  Probe
aaaacttaaaactttacagtcagaggttcaattcctcttctta

SEQ ID NO: 1826 - DNA, 44 bp, Artificial Sequence
  Probe
aaaacttaaaactttacagtcagaggttcaattcctcttcttaa

SEQ ID NO: 1827 - DNA, 45 bp, Artificial Sequence
  Probe
aaaacttaaaactttacagtcagaggttcaattcctcttcttaac

SEQ ID NO: 1828 - DNA, 46 bp, Artificial Sequence
  Probe
aaaacttaaaactttacagtcagaggttcaattcctcttcttaaca

SEQ ID NO: 1829 - DNA, 49 bp, Artificial Sequence
  Probe
aaaacttaaaactttacagtcagaggttcaattcctcttcttaacaaca

SEQ ID NO: 1830 - DNA, 50 bp, Artificial Sequence
  Probe
aaaacttaaaactttacagtcagaggttcaattcctcttcttaacaacat

SEQ ID NO: 1831 - DNA, 34 bp, Artificial Sequence
  Probe
aaaactttacagtcagaggttcaattcctcttct

SEQ ID NO: 1832 - DNA, 35 bp, Artificial Sequence
  Probe
aaaactttacagtcagaggttcaattcctcttctt

SEQ ID NO: 1833 - DNA, 38 bp, Artificial Sequence
  Probe
aaaactttacagtcagaggttcaattcctcttcttaac

SEQ ID NO: 1834 - DNA, 39 bp, Artificial Sequence
  Probe
aaaactttacagtcagaggttcaattcctcttcttaaca

SEQ ID NO: 1835 - DNA, 40 bp, Artificial Sequence
  Probe
aaaactttacagtcagaggttcaattcctcttcttaacaa

SEQ ID NO: 1836 - DNA, 41 bp, Artificial Sequence
  Probe
aaaactttacagtcagaggttcaattcctcttcttaacaac

SEQ ID NO: 1837 - DNA, 42 bp, Artificial Sequence
  Probe
aaaactttacagtcagaggttcaattcctcttcttaacaaca

SEQ ID NO: 1838 - DNA, 50 bp, Artificial Sequence
  Probe
aaaagagttactttgatagagtaaataataggagcttaaacccccttatt

SEQ ID NO: 1839 - DNA, 25 bp, Artificial Sequence
  Probe
aaaatgtttagacgggctcacatca

SEQ ID NO: 1840 - DNA, 31 bp, Artificial Sequence
  Probe
aaaatgtttagacgggctcacatcaccccat

SEQ ID NO: 1841 - DNA, 39 bp, Artificial Sequence
  Probe
aaaatgtttagacgggctcacatcaccccataaacaaat

SEQ ID NO: 1842 - DNA, 40 bp, Artificial Sequence
  Probe
aaaatgtttagacgggctcacatcaccccataaacaaata

SEQ ID NO: 1843 - DNA, 24 bp, Artificial Sequence
  Probe
aaaattttggtgcaactccaaata

SEQ ID NO: 1844 - DNA, 32 bp, Artificial Sequence
  Probe
aaaattttggtgcaactccaaataaaagtaat

SEQ ID NO: 1845 - DNA, 37 bp, Artificial Sequence
  Probe
aaacaaaacgaatgatttcgactcattaaattatgat

SEQ ID NO: 1846 - DNA, 50 bp, Artificial Sequence
  Probe
aaacaaaacgaatgatttcgactcattaaattatgataatcatatttacc

SEQ ID NO: 1847 - DNA, 40 bp, Artificial Sequence
  Probe
aaacaggagatcctgggttcgaatcccagcggtgcctccg

SEQ ID NO: 1848 - DNA, 24 bp, Artificial Sequence
  Probe
aaacatcagattgtgaatctgaca

SEQ ID NO: 1849 - DNA, 27 bp, Artificial Sequence
  Probe
aaacatcagattgtgaatctgacaaca

SEQ ID NO: 1850 - DNA, 32 bp, Artificial Sequence
  Probe
aaacatcagattgtgaatctgacaacagaggc

SEQ ID NO: 1851 - DNA, 43 bp, Artificial Sequence
  Probe
aaacatcagattgtgaatctgacaacagaggcttacgacccct

SEQ ID NO: 1852 - DNA, 46 bp, Artificial Sequence
  Probe
aaacatcagattgtgaatctgacaacagaggcttacgaccccttat

SEQ ID NO: 1853 - DNA, 49 bp, Artificial Sequence
  Probe
aaacatcagattgtgaatctgacaacagaggcttacgaccccttattta

SEQ ID NO: 1854 - DNA, 40 bp, Artificial Sequence
  Probe
aaaccaggggtcgcgagttcaattctcgctggggcctgtg

SEQ ID NO: 1855 - DNA, 17 bp, Artificial Sequence
  Probe
aaaccatttcataactt

SEQ ID NO: 1856 - DNA, 20 bp, Artificial Sequence
  Probe
aaaccatttcataactttgt

SEQ ID NO: 1857 - DNA, 21 bp, Artificial Sequence
  Probe
aaaccatttcataactttgtc

SEQ ID NO: 1858 - DNA, 23 bp, Artificial Sequence
  Probe
aaaccatttcataactttgtcaa

SEQ ID NO: 1859 - DNA, 24 bp, Artificial Sequence
  Probe
aaaccatttcataactttgtcaaa

SEQ ID NO: 1860 - DNA, 25 bp, Artificial Sequence
  Probe
aaaccatttcataactttgtcaaag

SEQ ID NO: 1861 - DNA, 26 bp, Artificial Sequence
  Probe
aaaccatttcataactttgtcaaagt

SEQ ID NO: 1862 - DNA, 27 bp, Artificial Sequence
  Probe
aaaccatttcataactttgtcaaagtt

SEQ ID NO: 1863 - DNA, 28 bp, Artificial Sequence
  Probe
aaaccatttcataactttgtcaaagtta

SEQ ID NO: 1864 - DNA, 29 bp, Artificial Sequence
  Probe
aaaccatttcataactttgtcaaagttaa

SEQ ID NO: 1865 - DNA, 30 bp, Artificial Sequence
  Probe
aaaccatttcataactttgtcaaagttaaa

SEQ ID NO: 1866 - DNA, 32 bp, Artificial Sequence
  Probe
aaaccatttcataactttgtcaaagttaaatt

SEQ ID NO: 1867 - DNA, 39 bp, Artificial Sequence
  Probe
aaaccatttcataactttgtcaaagttaaattataggct

SEQ ID NO: 1868 - DNA, 45 bp, Artificial Sequence
  Probe
aaaccatttcataactttgtcaaagttaaattataggctaaatcc

SEQ ID NO: 1869 - DNA, 46 bp, Artificial Sequence
  Probe
aaaccatttcataactttgtcaaagttaaattataggctaaatcct

SEQ ID NO: 1870 - DNA, 49 bp, Artificial Sequence
  Probe
aaaccatttcataactttgtcaaagttaaattataggctaaatcctata

SEQ ID NO: 1871 - DNA, 50 bp, Artificial Sequence
  Probe
aaaccatttcataactttgtcaaagttaaattataggctaaatcctatat

SEQ ID NO: 1872 - DNA, 15 bp, Artificial Sequence
  Probe
aaacccactccacct

SEQ ID NO: 1873 - DNA, 31 bp, Artificial Sequence
  Probe
aaaccggagatgaaaacctttttccaaggac

SEQ ID NO: 1874 - DNA, 33 bp, Artificial Sequence
  Probe
aaaccggagatgaaaacctttttccaaggacaa

SEQ ID NO: 1875 - DNA, 34 bp, Artificial Sequence
  Probe
aaaccggagatgaaaacctttttccaaggacaaa

SEQ ID NO: 1876 - DNA, 35 bp, Artificial Sequence
  Probe
aaaccggagatgaaaacctttttccaaggacaaat

SEQ ID NO: 1877 - DNA, 36 bp, Artificial Sequence
  Probe
aaaccggagatgaaaacctttttccaaggacaaatc

SEQ ID NO: 1878 - DNA, 19 bp, Artificial Sequence
  Probe
aaaccgggcggaaacacct

SEQ ID NO: 1879 - DNA, 20 bp, Artificial Sequence
  Probe
aaaccgggcggaaacacgtt

SEQ ID NO: 1880 - DNA, 20 bp, Artificial Sequence
  Probe
aaaccgggcggaaacaggta

SEQ ID NO: 1881 - DNA, 27 bp, Artificial Sequence
  Probe
aaacctagccccaaacccactccacct

SEQ ID NO: 1882 - DNA, 29 bp, Artificial Sequence
  Probe
aaacctgccggggcttctcccgccttttt

SEQ ID NO: 1883 - DNA, 45 bp, Artificial Sequence
  Probe
aaacgaatgatttcgactcattaaattatgataatcatatttacc

SEQ ID NO: 1884 - DNA, 49 bp, Artificial Sequence
  Probe
aaacgaatgatttcgactcattaaattatgataatcatatttaccaaat

SEQ ID NO: 1885 - DNA, 50 bp, Artificial Sequence
  Probe
aaacgaatgatttcgactcattaaattatgataatcatatttaccaaatg

SEQ ID NO: 1886 - DNA, 40 bp, Artificial Sequence
  Probe
aaacttaaaactttacagtcagaggttcaattcctcttct

SEQ ID NO: 1887 - DNA, 41 bp, Artificial Sequence
  Probe
aaacttaaaactttacagtcagaggttcaattcctcttctt

SEQ ID NO: 1888 - DNA, 44 bp, Artificial Sequence
  Probe
aaacttaaaactttacagtcagaggttcaattcctcttcttaac

SEQ ID NO: 1889 - DNA, 49 bp, Artificial Sequence
  Probe
aaacttaaaactttacagtcagaggttcaattcctcttcttaacaacat

SEQ ID NO: 1890 - DNA, 50 bp, Artificial Sequence
  Probe
aaacttaaaactttacagtcagaggttcaattcctcttcttaacaacata

SEQ ID NO: 1891 - DNA, 31 bp, Artificial Sequence
  Probe
aaactttacagtcagaggttcaattcctctt

SEQ ID NO: 1892 - DNA, 33 bp, Artificial Sequence
  Probe
aaactttacagtcagaggttcaattcctcttct

SEQ ID NO: 1893 - DNA, 34 bp, Artificial Sequence
  Probe
aaactttacagtcagaggttcaattcctcttctt

SEQ ID NO: 1894 - DNA, 35 bp, Artificial Sequence
  Probe
aaactttacagtcagaggttcaattcctcttctta

SEQ ID NO: 1895 - DNA, 38 bp, Artificial Sequence
  Probe
aaactttacagtcagaggttcaattcctcttcttaaca

SEQ ID NO: 1896 - DNA, 39 bp, Artificial Sequence
  Probe
aaactttacagtcagaggttcaattcctcttcttaacaa

SEQ ID NO: 1897 - DNA, 40 bp, Artificial Sequence
  Probe
aaactttacagtcagaggttcaattcctcttcttaacaac

SEQ ID NO: 1898 - DNA, 41 bp, Artificial Sequence
  Probe
aaactttacagtcagaggttcaattcctcttcttaacaaca

SEQ ID NO: 1899 - DNA, 39 bp, Artificial Sequence
  Probe
aaagaacagagaatagtttaaattagaatcttagctttg

SEQ ID NO: 1900 - DNA, 16 bp, Artificial Sequence
  Probe
aaagacaccccccaca

SEQ ID NO: 1901 - DNA, 17 bp, Artificial Sequence
  Probe
aaagacaccccccacag

SEQ ID NO: 1902 - DNA, 19 bp, Artificial Sequence
  Probe
aaagacaccccccacagtt

SEQ ID NO: 1903 - DNA, 21 bp, Artificial Sequence
  Probe
aaagacaccccccacagttta

SEQ ID NO: 1904 - DNA, 27 bp, Artificial Sequence
  Probe
aaagacaccccccacagtttatgtagc

SEQ ID NO: 1905 - DNA, 28 bp, Artificial Sequence
  Probe
aaagacaccccccacagtttatgtagct

SEQ ID NO: 1906 - DNA, 29 bp, Artificial Sequence
  Probe
aaagacaccccccacagtttatgtagctt

SEQ ID NO: 1907 - DNA, 30 bp, Artificial Sequence
  Probe
aaagacaccccccacagtttatgtagctta

SEQ ID NO: 1908 - DNA, 32 bp, Artificial Sequence
  Probe
aaagacaccccccacagtttatgtagcttacc

SEQ ID NO: 1909 - DNA, 33 bp, Artificial Sequence
  Probe
aaagacaccccccacagtttatgtagcttacct

SEQ ID NO: 1910 - DNA, 35 bp, Artificial Sequence
  Probe
aaagacaccccccacagtttatgtagcttacctcc

SEQ ID NO: 1911 - DNA, 36 bp, Artificial Sequence
  Probe
aaagacaccccccacagtttatgtagcttacctcct

SEQ ID NO: 1912 - DNA, 37 bp, Artificial Sequence
  Probe
aaagacaccccccacagtttatgtagcttacctcctc

SEQ ID NO: 1913 - DNA, 38 bp, Artificial Sequence
  Probe
aaagacaccccccacagtttatgtagcttacctcctca

SEQ ID NO: 1914 - DNA, 39 bp, Artificial Sequence
  Probe
aaagacaccccccacagtttatgtagcttacctcctcaa

SEQ ID NO: 1915 - DNA, 43 bp, Artificial Sequence
  Probe
aaagacaccccccacagtttatgtagcttacctcctcaaagca

SEQ ID NO: 1916 - DNA, 46 bp, Artificial Sequence
  Probe
aaagacaccccccacagtttatgtagcttacctcctcaaagcaata

SEQ ID NO: 1917 - DNA, 49 bp, Artificial Sequence
  Probe
aaagacaccccccacagtttatgtagcttacctcctcaaagcaatacac

SEQ ID NO: 1918 - DNA, 50 bp, Artificial Sequence
  Probe
aaagacaccccccacagtttatgtagcttacctcctcaaagcaatacact

SEQ ID NO: 1919 - DNA, 22 bp, Artificial Sequence
  Probe
aaagacaggggttaggcctctt

SEQ ID NO: 1920 - DNA, 23 bp, Artificial Sequence
  Probe
aaagacaggggttaggcctcttt

SEQ ID NO: 1921 - DNA, 24 bp, Artificial Sequence
  Probe
aaagacaggggttaggcctctttt

SEQ ID NO: 1922 - DNA, 25 bp, Artificial Sequence
  Probe
aaagacaggggttaggcctcttttt

SEQ ID NO: 1923 - DNA, 28 bp, Artificial Sequence
  Probe
aaagacaggggttaggcctctttttacc

SEQ ID NO: 1924 - DNA, 31 bp, Artificial Sequence
  Probe
aaagacaggggttaggcctctttttaccagc

SEQ ID NO: 1925 - DNA, 32 bp, Artificial Sequence
  Probe
aaagacaggggttaggcctctttttaccagct

SEQ ID NO: 1926 - DNA, 33 bp, Artificial Sequence
  Probe
aaagattaagagaaccaacacctctttacagtg

SEQ ID NO: 1927 - DNA, 34 bp, Artificial Sequence
  Probe
aaagattaagagaaccaacacctctttacagtga

SEQ ID NO: 1928 - DNA, 35 bp, Artificial Sequence
  Probe
aaagattaagagaaccaacacctctttacagtgaa

SEQ ID NO: 1929 - DNA, 36 bp, Artificial Sequence
  Probe
aaagattaagagaaccaacacctctttacagtgaaa

SEQ ID NO: 1930 - DNA, 37 bp, Artificial Sequence
  Probe
aaagattaagagaaccaacacctctttacagtgaaat

SEQ ID NO: 1931 - DNA, 16 bp, Artificial Sequence
  Probe
aaagcaatacactgaa

SEQ ID NO: 1932 - DNA, 29 bp, Artificial Sequence
  Probe
aaagcaatacactgaaaatgtttagacgg

SEQ ID NO: 1933 - DNA, 31 bp, Artificial Sequence
  Probe
aaagcaatacactgaaaatgtttagacgggc

SEQ ID NO: 1934 - DNA, 32 bp, Artificial Sequence
  Probe
aaagcaatacactgaaaatgtttagacgggct

SEQ ID NO: 1935 - DNA, 33 bp, Artificial Sequence
  Probe
aaagcaatacactgaaaatgtttagacgggctc

SEQ ID NO: 1936 - DNA, 37 bp, Artificial Sequence
  Probe
aaagcaatacactgaaaatgtttagacgggctcacat

SEQ ID NO: 1937 - DNA, 38 bp, Artificial Sequence
  Probe
aaagcaatacactgaaaatgtttagacgggctcacatc

SEQ ID NO: 1938 - DNA, 39 bp, Artificial Sequence
  Probe
aaagcaatacactgaaaatgtttagacgggctcacatca

SEQ ID NO: 1939 - DNA, 43 bp, Artificial Sequence
  Probe
aaagcaatacactgaaaatgtttagacgggctcacatcacccc

SEQ ID NO: 1940 - DNA, 46 bp, Artificial Sequence
  Probe
aaagcaatacactgaaaatgtttagacgggctcacatcaccccata

SEQ ID NO: 1941 - DNA, 48 bp, Artificial Sequence
  Probe
aaagcaatacactgaaaatgtttagacgggctcacatcaccccataaa

SEQ ID NO: 1942 - DNA, 16 bp, Artificial Sequence
  Probe
aaagcacccaacttac

SEQ ID NO: 1943 - DNA, 17 bp, Artificial Sequence
  Probe
aaagcacccaacttaca

SEQ ID NO: 1944 - DNA, 18 bp, Artificial Sequence
  Probe
aaagcacccaacttacac

SEQ ID NO: 1945 - DNA, 19 bp, Artificial Sequence
  Probe
aaagcacccaacttacact

SEQ ID NO: 1946 - DNA, 20 bp, Artificial Sequence
  Probe
aaagcacccaacttacactt

SEQ ID NO: 1947 - DNA, 21 bp, Artificial Sequence
  Probe
aaagcacccaacttacactta

SEQ ID NO: 1948 - DNA, 23 bp, Artificial Sequence
  Probe
aaagcacccaacttacacttagg

SEQ ID NO: 1949 - DNA, 24 bp, Artificial Sequence
  Probe
aaagcacccaacttacacttagga

SEQ ID NO: 1950 - DNA, 25 bp, Artificial Sequence
  Probe
aaagcacccaacttacacttaggag

SEQ ID NO: 1951 - DNA, 26 bp, Artificial Sequence
  Probe
aaagcacccaacttacacttaggaga

SEQ ID NO: 1952 - DNA, 28 bp, Artificial Sequence
  Probe
aaagcacccaacttacacttaggagatt

SEQ ID NO: 1953 - DNA, 30 bp, Artificial Sequence
  Probe
aaagcacccaacttacacttaggagatttc

SEQ ID NO: 1954 - DNA, 31 bp, Artificial Sequence
  Probe
aaagcacccaacttacacttaggagatttca

SEQ ID NO: 1955 - DNA, 33 bp, Artificial Sequence
  Probe
aaagcacccaacttacacttaggagatttcaac

SEQ ID NO: 1956 - DNA, 37 bp, Artificial Sequence
  Probe
aaagcacccaacttacacttaggagatttcaacttaa

SEQ ID NO: 1957 - DNA, 39 bp, Artificial Sequence
  Probe
aaagcacccaacttacacttaggagatttcaacttaact

SEQ ID NO: 1958 - DNA, 43 bp, Artificial Sequence
  Probe
aaagcacccaacttacacttaggagatttcaacttaacttgac

SEQ ID NO: 1959 - DNA, 45 bp, Artificial Sequence
  Probe
aaagcacccaacttacacttaggagatttcaacttaacttgaccg

SEQ ID NO: 1960 - DNA, 46 bp, Artificial Sequence
  Probe
aaagcacccaacttacacttaggagatttcaacttaacttgaccgc

SEQ ID NO: 1961 - DNA, 49 bp, Artificial Sequence
  Probe
aaagcacccaacttacacttaggagatttcaacttaacttgaccgctct

SEQ ID NO: 1962 - DNA, 50 bp, Artificial Sequence
  Probe
aaagcacccaacttacacttaggagatttcaacttaacttgaccgctctg

SEQ ID NO: 1963 - DNA, 20 bp, Artificial Sequence
  Probe
aaagcatgctccagtggcgc

SEQ ID NO: 1964 - DNA, 24 bp, Artificial Sequence
  Probe
aaagcatgctccagtggcgcaatc

SEQ ID NO: 1965 - DNA, 50 bp, Artificial Sequence
  Probe
aaagctaacttagcattaaccttttaagttaaagattaagagaaccaaca

SEQ ID NO: 1966 - DNA, 27 bp, Artificial Sequence
  Probe
aaagctcacaagaactgctaactcatg

SEQ ID NO: 1967 - DNA, 33 bp, Artificial Sequence
  Probe
aaagctcacaagaactgctaactcatgccccca

SEQ ID NO: 1968 - DNA, 31 bp, Artificial Sequence
  Probe
aaaggttggtggttcgagcccacccagggac

SEQ ID NO: 1969 - DNA, 50 bp, Artificial Sequence
  Probe
aaagtaaggtcagctaaataagctatcgggcccataccccgaaaatgttg

SEQ ID NO: 1970 - DNA, 23 bp, Artificial Sequence
  Probe
aaagtcatggaggccatggggtt

SEQ ID NO: 1971 - DNA, 24 bp, Artificial Sequence
  Probe
aaagtcatggaggccatggggttg

SEQ ID NO: 1972 - DNA, 30 bp, Artificial Sequence
  Probe
aaagttaaattataggctaaatcctatata

SEQ ID NO: 1973 - DNA, 32 bp, Artificial Sequence
  Probe
aaagttaaattataggctaaatcctatatatc

SEQ ID NO: 1974 - DNA, 19 bp, Artificial Sequence
  Probe
aaataagctatcgggccca

SEQ ID NO: 1975 - DNA, 22 bp, Artificial Sequence
  Probe
aaataagctatcgggcccatac

SEQ ID NO: 1976 - DNA, 24 bp, Artificial Sequence
  Probe
aaataagctatcgggcccataccc

SEQ ID NO: 1977 - DNA, 25 bp, Artificial Sequence
  Probe
aaataagctatcgggcccatacccc

SEQ ID NO: 1978 - DNA, 26 bp, Artificial Sequence
  Probe
aaataagctatcgggcccataccccg

SEQ ID NO: 1979 - DNA, 27 bp, Artificial Sequence
  Probe
aaataagctatcgggcccataccccga

SEQ ID NO: 1980 - DNA, 28 bp, Artificial Sequence
  Probe
aaataagctatcgggcccataccccgaa

SEQ ID NO: 1981 - DNA, 29 bp, Artificial Sequence
  Probe
aaataagctatcgggcccataccccgaaa

SEQ ID NO: 1982 - DNA, 30 bp, Artificial Sequence
  Probe
aaataagctatcgggcccataccccgaaaa

SEQ ID NO: 1983 - DNA, 31 bp, Artificial Sequence
  Probe
aaataagctatcgggcccataccccgaaaat

SEQ ID NO: 1984 - DNA, 32 bp, Artificial Sequence
  Probe
aaataagctatcgggcccataccccgaaaatg

SEQ ID NO: 1985 - DNA, 33 bp, Artificial Sequence
  Probe
aaataagctatcgggcccataccccgaaaatgt

SEQ ID NO: 1986 - DNA, 36 bp, Artificial Sequence
  Probe
aaataagctatcgggcccataccccgaaaatgttgg

SEQ ID NO: 1987 - DNA, 39 bp, Artificial Sequence
  Probe
aaataagctatcgggcccataccccgaaaatgttggtta

SEQ ID NO: 1988 - DNA, 49 bp, Artificial Sequence
  Probe
aaataagctatcgggcccataccccgaaaatgttggttatacccttccc

SEQ ID NO: 1989 - DNA, 50 bp, Artificial Sequence
  Probe
aaataagctatcgggcccataccccgaaaatgttggttatacccttcccg

SEQ ID NO: 1990 - DNA, 33 bp, Artificial Sequence
  Probe
aaataataggagcttaaacccccttatttctag

SEQ ID NO: 1991 - DNA, 21 bp, Artificial Sequence
  Probe
aaatacagaccaagagccttc

SEQ ID NO: 1992 - DNA, 50 bp, Artificial Sequence
  Probe
aaatagtaccgttaacttccaattaactagttttgacaacattcaaaaaa

SEQ ID NO: 1993 - DNA, 40 bp, Artificial Sequence
  Probe
aaatatagtttaaccaaaacatcagattgtgaatctgaca

SEQ ID NO: 1994 - DNA, 27 bp, Artificial Sequence
  Probe
aaatctaaagacaggggttaggcctct

SEQ ID NO: 1995 - DNA, 29 bp, Artificial Sequence
  Probe
aaatctaaagacaggggttaggcctcttt

SEQ ID NO: 1996 - DNA, 30 bp, Artificial Sequence
  Probe
aaatctaaagacaggggttaggcctctttt

SEQ ID NO: 1997 - DNA, 31 bp, Artificial Sequence
  Probe
aaatctaaagacaggggttaggcctcttttt

SEQ ID NO: 1998 - DNA, 32 bp, Artificial Sequence
  Probe
aaatctaaagacaggggttaggcctcttttta

SEQ ID NO: 1999 - DNA, 33 bp, Artificial Sequence
  Probe
aaatctaaagacaggggttaggcctctttttac

SEQ ID NO: 2000 - DNA, 36 bp, Artificial Sequence
  Probe
aaatctaaagacaggggttaggcctctttttaccag

SEQ ID NO: 2001 - DNA, 37 bp, Artificial Sequence
  Probe
aaatctaaagacaggggttaggcctctttttaccagc

SEQ ID NO: 2002 - DNA, 38 bp, Artificial Sequence
  Probe
aaatctaaagacaggggttaggcctctttttaccagct

SEQ ID NO: 2003 - DNA, 39 bp, Artificial Sequence
  Probe
aaatctaaagacaggggttaggcctctttttaccagctc

SEQ ID NO: 2004 - DNA, 27 bp, Artificial Sequence
  Probe
aaatgtttagacgggctcacatcaccc

SEQ ID NO: 2005 - DNA, 39 bp, Artificial Sequence
  Probe
aaatgtttagacgggctcacatcaccccataaacaaata

SEQ ID NO: 2006 - DNA, 31 bp, Artificial Sequence
  Probe
aaattcgaagaagcagcttcaaacctgccgg

SEQ ID NO: 2007 - DNA, 37 bp, Artificial Sequence
  Probe
aaattcgaagaagcagcttcaaacctgccggggcttc

SEQ ID NO: 2008 - DNA, 38 bp, Artificial Sequence
  Probe
aaattcgaagaagcagcttcaaacctgccggggcttct

SEQ ID NO: 2009 - DNA, 39 bp, Artificial Sequence
  Probe
aaattcgaagaagcagcttcaaacctgccggggcttctc

SEQ ID NO: 2010 - DNA, 50 bp, Artificial Sequence
  Probe
aaattcgaagaagcagcttcaaacctgccggggcttctcccgcctttttt

SEQ ID NO: 2011 - DNA, 23 bp, Artificial Sequence
  Probe
aaattttggtgcaactccaaata

SEQ ID NO: 2012 - DNA, 49 bp, Artificial Sequence
  Probe
aacaaaacgaatgatttcgactcattaaattatgataatcatatttacc

SEQ ID NO: 2013 - DNA, 50 bp, Artificial Sequence
  Probe
aacaaaacgaatgatttcgactcattaaattatgataatcatatttacca

SEQ ID NO: 2014 - DNA, 20 bp, Artificial Sequence
  Probe
aacaacatggctttctcaac

SEQ ID NO: 2015 - DNA, 16 bp, Artificial Sequence
  Probe
aacacaaagcacccaa

SEQ ID NO: 2016 - DNA, 17 bp, Artificial Sequence
  Probe
aacacaaagcacccaac

SEQ ID NO: 2017 - DNA, 18 bp, Artificial Sequence
  Probe
aacacaaagcacccaact

SEQ ID NO: 2018 - DNA, 19 bp, Artificial Sequence
  Probe
aacacaaagcacccaactt

SEQ ID NO: 2019 - DNA, 21 bp, Artificial Sequence
  Probe
aacacaaagcacccaacttac

SEQ ID NO: 2020 - DNA, 22 bp, Artificial Sequence
  Probe
aacacaaagcacccaacttaca

SEQ ID NO: 2021 - DNA, 24 bp, Artificial Sequence
  Probe
aacacaaagcacccaacttacact

SEQ ID NO: 2022 - DNA, 25 bp, Artificial Sequence
  Probe
aacacaaagcacccaacttacactt

SEQ ID NO: 2023 - DNA, 26 bp, Artificial Sequence
  Probe
aacacaaagcacccaacttacactta

SEQ ID NO: 2024 - DNA, 27 bp, Artificial Sequence
  Probe
aacacaaagcacccaacttacacttag

SEQ ID NO: 2025 - DNA, 28 bp, Artificial Sequence
  Probe
aacacaaagcacccaacttacacttagg

SEQ ID NO: 2026 - DNA, 29 bp, Artificial Sequence
  Probe
aacacaaagcacccaacttacacttagga

SEQ ID NO: 2027 - DNA, 30 bp, Artificial Sequence
  Probe
aacacaaagcacccaacttacacttaggag

SEQ ID NO: 2028 - DNA, 31 bp, Artificial Sequence
  Probe
aacacaaagcacccaacttacacttaggaga

SEQ ID NO: 2029 - DNA, 32 bp, Artificial Sequence
  Probe
aacacaaagcacccaacttacacttaggagat

SEQ ID NO: 2030 - DNA, 33 bp, Artificial Sequence
  Probe
aacacaaagcacccaacttacacttaggagatt

SEQ ID NO: 2031 - DNA, 36 bp, Artificial Sequence
  Probe
aacacaaagcacccaacttacacttaggagatttca

SEQ ID NO: 2032 - DNA, 37 bp, Artificial Sequence
  Probe
aacacaaagcacccaacttacacttaggagatttcaa

SEQ ID NO: 2033 - DNA, 38 bp, Artificial Sequence
  Probe
aacacaaagcacccaacttacacttaggagatttcaac

SEQ ID NO: 2034 - DNA, 39 bp, Artificial Sequence
  Probe
aacacaaagcacccaacttacacttaggagatttcaact

SEQ ID NO: 2035 - DNA, 40 bp, Artificial Sequence
  Probe
aacacaaagcacccaacttacacttaggagatttcaactt

SEQ ID NO: 2036 - DNA, 49 bp, Artificial Sequence
  Probe
aacacaaagcacccaacttacacttaggagatttcaacttaacttgacc

SEQ ID NO: 2037 - DNA, 20 bp, Artificial Sequence
  Probe
aacacctctttacagtgaaa

SEQ ID NO: 2038 - DNA, 21 bp, Artificial Sequence
  Probe
aacacctctttacagtgaaat

SEQ ID NO: 2039 - DNA, 31 bp, Artificial Sequence
  Probe
aacagaggcttacgaccccttatttaccgag

SEQ ID NO: 2040 - DNA, 25 bp, Artificial Sequence
  Probe
aacagctaaggactgcaaaacccca

SEQ ID NO: 2041 - DNA, 17 bp, Artificial Sequence
  Probe
aacagctatccattggt

SEQ ID NO: 2042 - DNA, 19 bp, Artificial Sequence
  Probe
aacagctatccattggtct

SEQ ID NO: 2043 - DNA, 20 bp, Artificial Sequence
  Probe
aacagctatccattggtctt

SEQ ID NO: 2044 - DNA, 50 bp, Artificial Sequence
  Probe
aacagctatccattggtcttaggccccaaaaattttggtgcaactccaaa

SEQ ID NO: 2045 - DNA, 21 bp, Artificial Sequence
  Probe
aacaggagatcctgggttcga

SEQ ID NO: 2046 - DNA, 39 bp, Artificial Sequence
  Probe
aacaggagatcctgggttcgaatcccagcggggccttac

SEQ ID NO: 2047 - DNA, 33 bp, Artificial Sequence
  Probe
aacaggagatcctgggttcgaatcccagcggtg

SEQ ID NO: 2048 - DNA, 34 bp, Artificial Sequence
  Probe
aacaggagatcctgggttcgaatcccagcggtgc

SEQ ID NO: 2049 - DNA, 36 bp, Artificial Sequence
  Probe
aacaggagatcctgggttcgaatcccagcggtgcct

SEQ ID NO: 2050 - DNA, 37 bp, Artificial Sequence
  Probe
aacaggagatcctgggttcgaatcccagcggtgcctc

SEQ ID NO: 2051 - DNA, 39 bp, Artificial Sequence
  Probe
aacaggagatcctgggttcgaatcccagcggtgcctccg

SEQ ID NO: 2052 - DNA, 39 bp, Artificial Sequence
  Probe
aacaggagatcctgggttcgactcccagcggggccttgg

SEQ ID NO: 2053 - DNA, 23 bp, Artificial Sequence
  Probe
aacatcagattgtgaatctgaca

SEQ ID NO: 2054 - DNA, 32 bp, Artificial Sequence
  Probe
aacatcagattgtgaatctgacaacagaggct

SEQ ID NO: 2055 - DNA, 33 bp, Artificial Sequence
  Probe
aacatcagattgtgaatctgacaacagaggctt

SEQ ID NO: 2056 - DNA, 41 bp, Artificial Sequence
  Probe
aacatcagattgtgaatctgacaacagaggcttacgacccc

SEQ ID NO: 2057 - DNA, 42 bp, Artificial Sequence
  Probe
aacatcagattgtgaatctgacaacagaggcttacgacccct

SEQ ID NO: 2058 - DNA, 45 bp, Artificial Sequence
  Probe
aacatcagattgtgaatctgacaacagaggcttacgaccccttat

SEQ ID NO: 2059 - DNA, 46 bp, Artificial Sequence
  Probe
aacatcagattgtgaatctgacaacagaggcttacgaccccttatt

SEQ ID NO: 2060 - DNA, 49 bp, Artificial Sequence
  Probe
aacatcagattgtgaatctgacaacagaggcttacgaccccttatttac

SEQ ID NO: 2061 - DNA, 24 bp, Artificial Sequence
  Probe
aaccaaaacatcagattgtgaatc

SEQ ID NO: 2062 - DNA, 29 bp, Artificial Sequence
  Probe
aaccaaaacatcagattgtgaatctgaca

SEQ ID NO: 2063 - DNA, 30 bp, Artificial Sequence
  Probe
aaccaaaacatcagattgtgaatctgacaa

SEQ ID NO: 2064 - DNA, 31 bp, Artificial Sequence
  Probe
aaccaaaacatcagattgtgaatctgacaac

SEQ ID NO: 2065 - DNA, 32 bp, Artificial Sequence
  Probe
aaccaaaacatcagattgtgaatctgacaaca

SEQ ID NO: 2066 - DNA, 33 bp, Artificial Sequence
  Probe
aaccaaaacatcagattgtgaatctgacaacag

SEQ ID NO: 2067 - DNA, 36 bp, Artificial Sequence
  Probe
aaccaaaacatcagattgtgaatctgacaacagagg

SEQ ID NO: 2068 - DNA, 37 bp, Artificial Sequence
  Probe
aaccaaaacatcagattgtgaatctgacaacagaggc

SEQ ID NO: 2069 - DNA, 38 bp, Artificial Sequence
  Probe
aaccaaaacatcagattgtgaatctgacaacagaggct

SEQ ID NO: 2070 - DNA, 39 bp, Artificial Sequence
  Probe
aaccaaaacatcagattgtgaatctgacaacagaggctt

SEQ ID NO: 2071 - DNA, 47 bp, Artificial Sequence
  Probe
aaccaaaacatcagattgtgaatctgacaacagaggcttacgacccc

SEQ ID NO: 2072 - DNA, 48 bp, Artificial Sequence
  Probe
aaccaaaacatcagattgtgaatctgacaacagaggcttacgacccct

SEQ ID NO: 2073 - DNA, 23 bp, Artificial Sequence
  Probe
aaccaacacctctttacagtgaa

SEQ ID NO: 2074 - DNA, 24 bp, Artificial Sequence
  Probe
aaccaacacctctttacagtgaaa

SEQ ID NO: 2075 - DNA, 25 bp, Artificial Sequence
  Probe
aaccaacacctctttacagtgaaat

SEQ ID NO: 2076 - DNA, 50 bp, Artificial Sequence
  Probe
aaccagagtgtagcttaacacaaagcacccaacttacacttaggagattt

SEQ ID NO: 2077 - DNA, 19 bp, Artificial Sequence
  Probe
aaccagctttggggggttc

SEQ ID NO: 2078 - DNA, 37 bp, Artificial Sequence
  Probe
aaccaggggtcgcgagttcaaatctcgctggggcctc

SEQ ID NO: 2079 - DNA, 39 bp, Artificial Sequence
  Probe
aaccaggggtcgcgagttcaaatctcgctggggcctcgg

SEQ ID NO: 2080 - DNA, 39 bp, Artificial Sequence
  Probe
aaccaggggtcgcgagttcaattctcgctggggcctgtg

SEQ ID NO: 2081 - DNA, 39 bp, Artificial Sequence
  Probe
aaccaggggtcgcgagttcgatcctcgctggggcctcct

SEQ ID NO: 2082 - DNA, 19 bp, Artificial Sequence
  Probe
aaccatttcataactttgt

SEQ ID NO: 2083 - DNA, 23 bp, Artificial Sequence
  Probe
aaccatttcataactttgtcaaa

SEQ ID NO: 2084 - DNA, 25 bp, Artificial Sequence
  Probe
aaccatttcataactttgtcaaagt

SEQ ID NO: 2085 - DNA, 49 bp, Artificial Sequence
  Probe
aaccatttcataactttgtcaaagttaaattataggctaaatcctatat

SEQ ID NO: 2086 - DNA, 40 bp, Artificial Sequence
  Probe
aacccagaggtcgatggatcgaaaccatcctctgctaggt

SEQ ID NO: 2087 - DNA, 15 bp, Artificial Sequence
  Probe
aacccatccctgaga

SEQ ID NO: 2088 - DNA, 40 bp, Artificial Sequence
  Probe
aaccgaaaggttggtggttcgagcccacccagggacgcct

SEQ ID NO: 2089 - DNA, 22 bp, Artificial Sequence
  Probe
aaccgaagatcacgggttcgaa

SEQ ID NO: 2090 - DNA, 39 bp, Artificial Sequence
  Probe
aaccgaagatcacgggttcgaaccccgtccgtgcctgat

SEQ ID NO: 2091 - DNA, 22 bp, Artificial Sequence
  Probe
aaccgaagatcgcgggttcgaa

SEQ ID NO: 2092 - DNA, 21 bp, Artificial Sequence
  Probe
aaccgagcgtccaagctcttt

SEQ ID NO: 2093 - DNA, 22 bp, Artificial Sequence
  Probe
aaccgagcgtccaagctctttc

SEQ ID NO: 2094 - DNA, 23 bp, Artificial Sequence
  Probe
aaccgagcgtccaagctctttcc

SEQ ID NO: 2095 - DNA, 24 bp, Artificial Sequence
  Probe
aaccgagcgtccaagctctttcca

SEQ ID NO: 2096 - DNA, 25 bp, Artificial Sequence
  Probe
aaccgagcgtccaagctctttccat

SEQ ID NO: 2097 - DNA, 26 bp, Artificial Sequence
  Probe
aaccgagcgtccaagctctttccatt

SEQ ID NO: 2098 - DNA, 27 bp, Artificial Sequence
  Probe
aaccgagcgtccaagctctttccattt

SEQ ID NO: 2099 - DNA, 23 bp, Artificial Sequence
  Probe
aaccggagatgaaaacctttttc

SEQ ID NO: 2100 - DNA, 25 bp, Artificial Sequence
  Probe
aaccggagatgaaaacctttttcca

SEQ ID NO: 2101 - DNA, 27 bp, Artificial Sequence
  Probe
aaccggagatgaaaacctttttccaag

SEQ ID NO: 2102 - DNA, 32 bp, Artificial Sequence
  Probe
aaccggagatgaaaacctttttccaaggacaa

SEQ ID NO: 2103 - DNA, 33 bp, Artificial Sequence
  Probe
aaccggagatgaaaacctttttccaaggacaaa

SEQ ID NO: 2104 - DNA, 34 bp, Artificial Sequence
  Probe
aaccggagatgaaaacctttttccaaggacaaat

SEQ ID NO: 2105 - DNA, 35 bp, Artificial Sequence
  Probe
aaccggagatgaaaacctttttccaaggacaaatc

SEQ ID NO: 2106 - DNA, 36 bp, Artificial Sequence
  Probe
aaccggagatgaaaacctttttccaaggacaaatca

SEQ ID NO: 2107 - DNA, 19 bp, Artificial Sequence
  Probe
aaccgggcggaaacacact

SEQ ID NO: 2108 - DNA, 18 bp, Artificial Sequence
  Probe
aaccgggcggaaacacct

SEQ ID NO: 2109 - DNA, 19 bp, Artificial Sequence
  Probe
aaccgggcggaaacacctc

SEQ ID NO: 2110 - DNA, 20 bp, Artificial Sequence
  Probe
aaccgggcggaaacacctcc

SEQ ID NO: 2111 - DNA, 21 bp, Artificial Sequence
  Probe
aaccgggcggaaacacctcct

SEQ ID NO: 2112 - DNA, 19 bp, Artificial Sequence
  Probe
aaccgggcggaaacacgtt

SEQ ID NO: 2113 - DNA, 20 bp, Artificial Sequence
  Probe
aaccgggcggaaacacgttt

SEQ ID NO: 2114 - DNA, 21 bp, Artificial Sequence
  Probe
aaccgggcggaaacacgtttt

SEQ ID NO: 2115 - DNA, 22 bp, Artificial Sequence
  Probe
aaccgggcggaaacacgttttt

SEQ ID NO: 2116 - DNA, 23 bp, Artificial Sequence
  Probe
aaccgggcggaaacacgtttttt

SEQ ID NO: 2117 - DNA, 26 bp, Artificial Sequence
  Probe
aacctagccccaaacccactccacct

SEQ ID NO: 2118 - DNA, 31 bp, Artificial Sequence
  Probe
aacctcggttcgaatccgagtcacggcaggt

SEQ ID NO: 2119 - DNA, 31 bp, Artificial Sequence
  Probe
aacctcggttcgaatccgagtcacggcattg

SEQ ID NO: 2120 - DNA, 29 bp, Artificial Sequence
  Probe
aaccttttaagttaaagattaagagaacc

SEQ ID NO: 2121 - DNA, 50 bp, Artificial Sequence
  Probe
aaccttttaagttaaagattaagagaaccaacacctctttacagtgaaat

SEQ ID NO: 2122 - DNA, 32 bp, Artificial Sequence
  Probe
aacgaatgatttcgactcattaaattatgata

SEQ ID NO: 2123 - DNA, 48 bp, Artificial Sequence
  Probe
aacgaatgatttcgactcattaaattatgataatcatatttaccaaat

SEQ ID NO: 2124 - DNA, 49 bp, Artificial Sequence
  Probe
aacgaatgatttcgactcattaaattatgataatcatatttaccaaatg

SEQ ID NO: 2125 - DNA, 50 bp, Artificial Sequence
  Probe
aacgaatgatttcgactcattaaattatgataatcatatttaccaaatgc

SEQ ID NO: 2126 - DNA, 20 bp, Artificial Sequence
  Probe
aactaagtgtttgtgggttt

SEQ ID NO: 2127 - DNA, 31 bp, Artificial Sequence
  Probe
aactaagtgtttgtgggtttaagtcccattg

SEQ ID NO: 2128 - DNA, 33 bp, Artificial Sequence
  Probe
aactaagtgtttgtgggtttaagtcccattggt

SEQ ID NO: 2129 - DNA, 34 bp, Artificial Sequence
  Probe
aactaagtgtttgtgggtttaagtcccattggtc

SEQ ID NO: 2130 - DNA, 39 bp, Artificial Sequence
  Probe
aactaagtgtttgtgggtttaagtcccattggtctagta

SEQ ID NO: 2131 - DNA, 40 bp, Artificial Sequence
  Probe
aactaagtgtttgtgggtttaagtcccattggtctagtaa

SEQ ID NO: 2132 - DNA, 32 bp, Artificial Sequence
  Probe
aactagttttgacaacattcaaaaaagagtaa

SEQ ID NO: 2133 - DNA, 17 bp, Artificial Sequence
  Probe
aactcatgcccccatgt

SEQ ID NO: 2134 - DNA, 18 bp, Artificial Sequence
  Probe
aactcatgcccccatgtc

SEQ ID NO: 2135 - DNA, 19 bp, Artificial Sequence
  Probe
aactcatgcccccatgtct

SEQ ID NO: 2136 - DNA, 20 bp, Artificial Sequence
  Probe
aactcatgcccccatgtcta

SEQ ID NO: 2137 - DNA, 21 bp, Artificial Sequence
  Probe
aactcatgcccccatgtctaa

SEQ ID NO: 2138 - DNA, 23 bp, Artificial Sequence
  Probe
aactcatgcccccatgtctaaca

SEQ ID NO: 2139 - DNA, 30 bp, Artificial Sequence
  Probe
aactcatgcccccatgtctaacaacatggc

SEQ ID NO: 2140 - DNA, 31 bp, Artificial Sequence
  Probe
aactcatgcccccatgtctaacaacatggct

SEQ ID NO: 2141 - DNA, 32 bp, Artificial Sequence
  Probe
aactcatgcccccatgtctaacaacatggctt

SEQ ID NO: 2142 - DNA, 33 bp, Artificial Sequence
  Probe
aactcatgcccccatgtctaacaacatggcttt

SEQ ID NO: 2143 - DNA, 34 bp, Artificial Sequence
  Probe
aactcatgcccccatgtctaacaacatggctttc

SEQ ID NO: 2144 - DNA, 35 bp, Artificial Sequence
  Probe
aactcatgcccccatgtctaacaacatggctttct

SEQ ID NO: 2145 - DNA, 36 bp, Artificial Sequence
  Probe
aactcatgcccccatgtctaacaacatggctttctc

SEQ ID NO: 2146 - DNA, 37 bp, Artificial Sequence
  Probe
aactcatgcccccatgtctaacaacatggctttctca

SEQ ID NO: 2147 - DNA, 38 bp, Artificial Sequence
  Probe
aactcatgcccccatgtctaacaacatggctttctcaa

SEQ ID NO: 2148 - DNA, 39 bp, Artificial Sequence
  Probe
aactcatgcccccatgtctaacaacatggctttctcaac

SEQ ID NO: 2149 - DNA, 40 bp, Artificial Sequence
  Probe
aactcatgcccccatgtctaacaacatggctttctcaact

SEQ ID NO: 2150 - DNA, 44 bp, Artificial Sequence
  Probe
aactcatgcccccatgtctaacaacatggctttctcaactttta

SEQ ID NO: 2151 - DNA, 46 bp, Artificial Sequence
  Probe
aactcatgcccccatgtctaacaacatggctttctcaacttttaaa

SEQ ID NO: 2152 - DNA, 37 bp, Artificial Sequence
  Probe
aactgcccggctagctcagtcggtagagcatgggact

SEQ ID NO: 2153 - DNA, 15 bp, Artificial Sequence
  Probe
aactgctaactcatg

SEQ ID NO: 2154 - DNA, 20 bp, Artificial Sequence
  Probe
aactgctaactcatgccccc

SEQ ID NO: 2155 - DNA, 27 bp, Artificial Sequence
  Probe
aactgctaactcatgcccccatgtcta

SEQ ID NO: 2156 - DNA, 37 bp, Artificial Sequence
  Probe
aactgctaactcatgcccccatgtctaacaacatggc

SEQ ID NO: 2157 - DNA, 38 bp, Artificial Sequence
  Probe
aactgctaactcatgcccccatgtctaacaacatggct

SEQ ID NO: 2158 - DNA, 39 bp, Artificial Sequence
  Probe
aactgctaactcatgcccccatgtctaacaacatggctt

SEQ ID NO: 2159 - DNA, 40 bp, Artificial Sequence
  Probe
aactgctaactcatgcccccatgtctaacaacatggcttt

SEQ ID NO: 2160 - DNA, 41 bp, Artificial Sequence
  Probe
aactgctaactcatgcccccatgtctaacaacatggctttc

SEQ ID NO: 2161 - DNA, 42 bp, Artificial Sequence
  Probe
aactgctaactcatgcccccatgtctaacaacatggctttct

SEQ ID NO: 2162 - DNA, 43 bp, Artificial Sequence
  Probe
aactgctaactcatgcccccatgtctaacaacatggctttctc

SEQ ID NO: 2163 - DNA, 44 bp, Artificial Sequence
  Probe
aactgctaactcatgcccccatgtctaacaacatggctttctca

SEQ ID NO: 2164 - DNA, 45 bp, Artificial Sequence
  Probe
aactgctaactcatgcccccatgtctaacaacatggctttctcaa

SEQ ID NO: 2165 - DNA, 46 bp, Artificial Sequence
  Probe
aactgctaactcatgcccccatgtctaacaacatggctttctcaac

SEQ ID NO: 2166 - DNA, 49 bp, Artificial Sequence
  Probe
aactgctaactcatgcccccatgtctaacaacatggctttctcaacttt

SEQ ID NO: 2167 - DNA, 50 bp, Artificial Sequence
  Probe
aactgctaactcatgcccccatgtctaacaacatggctttctcaactttt

SEQ ID NO: 2168 - DNA, 20 bp, Artificial Sequence
  Probe
aacttaaaactttacagtca

SEQ ID NO: 2169 - DNA, 29 bp, Artificial Sequence
  Probe
aacttaaaactttacagtcagaggttcaa

SEQ ID NO: 2170 - DNA, 30 bp, Artificial Sequence
  Probe
aacttaaaactttacagtcagaggttcaat

SEQ ID NO: 2171 - DNA, 32 bp, Artificial Sequence
  Probe
aacttaaaactttacagtcagaggttcaattc

SEQ ID NO: 2172 - DNA, 33 bp, Artificial Sequence
  Probe
aacttaaaactttacagtcagaggttcaattcc

SEQ ID NO: 2173 - DNA, 40 bp, Artificial Sequence
  Probe
aacttaaaactttacagtcagaggttcaattcctcttctt

SEQ ID NO: 2174 - DNA, 41 bp, Artificial Sequence
  Probe
aacttaaaactttacagtcagaggttcaattcctcttctta

SEQ ID NO: 2175 - DNA, 42 bp, Artificial Sequence
  Probe
aacttaaaactttacagtcagaggttcaattcctcttcttaa

SEQ ID NO: 2176 - DNA, 43 bp, Artificial Sequence
  Probe
aacttaaaactttacagtcagaggttcaattcctcttcttaac

SEQ ID NO: 2177 - DNA, 44 bp, Artificial Sequence
  Probe
aacttaaaactttacagtcagaggttcaattcctcttcttaaca

SEQ ID NO: 2178 - DNA, 45 bp, Artificial Sequence
  Probe
aacttaaaactttacagtcagaggttcaattcctcttcttaacaa

SEQ ID NO: 2179 - DNA, 46 bp, Artificial Sequence
  Probe
aacttaaaactttacagtcagaggttcaattcctcttcttaacaac

SEQ ID NO: 2180 - DNA, 50 bp, Artificial Sequence
  Probe
aacttaaaactttacagtcagaggttcaattcctcttcttaacaacatac

SEQ ID NO: 2181 - DNA, 17 bp, Artificial Sequence
  Probe
aacttaacttgaccgct

SEQ ID NO: 2182 - DNA, 20 bp, Artificial Sequence
  Probe
aacttaacttgaccgctctg

SEQ ID NO: 2183 - DNA, 21 bp, Artificial Sequence
  Probe
aacttaacttgaccgctctga

SEQ ID NO: 2184 - DNA, 22 bp, Artificial Sequence
  Probe
aacttaacttgaccgctctgag

SEQ ID NO: 2185 - DNA, 23 bp, Artificial Sequence
  Probe
aacttaacttgaccgctctgagc

SEQ ID NO: 2186 - DNA, 24 bp, Artificial Sequence
  Probe
aacttaacttgaccgctctgagct

SEQ ID NO: 2187 - DNA, 29 bp, Artificial Sequence
  Probe
aacttacacttaggagatttcaacttaac

SEQ ID NO: 2188 - DNA, 36 bp, Artificial Sequence
  Probe
aacttacacttaggagatttcaacttaacttgaccg

SEQ ID NO: 2189 - DNA, 37 bp, Artificial Sequence
  Probe
aacttacacttaggagatttcaacttaacttgaccgc

SEQ ID NO: 2190 - DNA, 38 bp, Artificial Sequence
  Probe
aacttacacttaggagatttcaacttaacttgaccgct

SEQ ID NO: 2191 - DNA, 39 bp, Artificial Sequence
  Probe
aacttacacttaggagatttcaacttaacttgaccgctc

SEQ ID NO: 2192 - DNA, 42 bp, Artificial Sequence
  Probe
aacttacacttaggagatttcaacttaacttgaccgctctga

SEQ ID NO: 2193 - DNA, 43 bp, Artificial Sequence
  Probe
aacttacacttaggagatttcaacttaacttgaccgctctgag

SEQ ID NO: 2194 - DNA, 44 bp, Artificial Sequence
  Probe
aacttacacttaggagatttcaacttaacttgaccgctctgagc

SEQ ID NO: 2195 - DNA, 45 bp, Artificial Sequence
  Probe
aacttacacttaggagatttcaacttaacttgaccgctctgagct

SEQ ID NO: 2196 - DNA, 46 bp, Artificial Sequence
  Probe
aacttacacttaggagatttcaacttaacttgaccgctctgagcta

SEQ ID NO: 2197 - DNA, 50 bp, Artificial Sequence
  Probe
aacttacacttaggagatttcaacttaacttgaccgctctgagctaaacc

SEQ ID NO: 2198 - DNA, 18 bp, Artificial Sequence
  Probe
aacttagcattaaccttt

SEQ ID NO: 2199 - DNA, 19 bp, Artificial Sequence
  Probe
aacttagcattaacctttt

SEQ ID NO: 2200 - DNA, 44 bp, Artificial Sequence
  Probe
aacttagcattaaccttttaagttaaagattaagagaaccaaca

SEQ ID NO: 2201 - DNA, 50 bp, Artificial Sequence
  Probe
aacttagcattaaccttttaagttaaagattaagagaaccaacacctctt

SEQ ID NO: 2202 - DNA, 44 bp, Artificial Sequence
  Probe
aacttccaattaactagttttgacaacattcaaaaaagagtaat

SEQ ID NO: 2203 - DNA, 45 bp, Artificial Sequence
  Probe
aacttccaattaactagttttgacaacattcaaaaaagagtaata

SEQ ID NO: 2204 - DNA, 17 bp, Artificial Sequence
  Probe
aacttgaccgctctgag

SEQ ID NO: 2205 - DNA, 18 bp, Artificial Sequence
  Probe
aacttgaccgctctgagc

SEQ ID NO: 2206 - DNA, 32 bp, Artificial Sequence
  Probe
aactttacagtcagaggttcaattcctcttct

SEQ ID NO: 2207 - DNA, 33 bp, Artificial Sequence
  Probe
aactttacagtcagaggttcaattcctcttctt

SEQ ID NO: 2208 - DNA, 34 bp, Artificial Sequence
  Probe
aactttacagtcagaggttcaattcctcttctta

SEQ ID NO: 2209 - DNA, 35 bp, Artificial Sequence
  Probe
aactttacagtcagaggttcaattcctcttcttaa

SEQ ID NO: 2210 - DNA, 36 bp, Artificial Sequence
  Probe
aactttacagtcagaggttcaattcctcttcttaac

SEQ ID NO: 2211 - DNA, 37 bp, Artificial Sequence
  Probe
aactttacagtcagaggttcaattcctcttcttaaca

SEQ ID NO: 2212 - DNA, 38 bp, Artificial Sequence
  Probe
aactttacagtcagaggttcaattcctcttcttaacaa

SEQ ID NO: 2213 - DNA, 39 bp, Artificial Sequence
  Probe
aactttacagtcagaggttcaattcctcttcttaacaac

SEQ ID NO: 2214 - DNA, 40 bp, Artificial Sequence
  Probe
aactttacagtcagaggttcaattcctcttcttaacaaca

SEQ ID NO: 2215 - DNA, 31 bp, Artificial Sequence
  Probe
aacttttaaaggataacagctatccattggt

SEQ ID NO: 2216 - DNA, 37 bp, Artificial Sequence
  Probe
aagaacagggtttgttaagatggcagagcccggtaat

SEQ ID NO: 2217 - DNA, 38 bp, Artificial Sequence
  Probe
aagaacagggtttgttaagatggcagagcccggtaatc

SEQ ID NO: 2218 - DNA, 18 bp, Artificial Sequence
  Probe
aagaactgctaactcatg

SEQ ID NO: 2219 - DNA, 23 bp, Artificial Sequence
  Probe
aagaactgctaactcatgccccc

SEQ ID NO: 2220 - DNA, 24 bp, Artificial Sequence
  Probe
aagaactgctaactcatgccccca

SEQ ID NO: 2221 - DNA, 27 bp, Artificial Sequence
  Probe
aagaactgctaactcatgcccccatgt

SEQ ID NO: 2222 - DNA, 29 bp, Artificial Sequence
  Probe
aagaactgctaactcatgcccccatgtct

SEQ ID NO: 2223 - DNA, 30 bp, Artificial Sequence
  Probe
aagaactgctaactcatgcccccatgtcta

SEQ ID NO: 2224 - DNA, 32 bp, Artificial Sequence
  Probe
aagaactgctaactcatgcccccatgtctaac

SEQ ID NO: 2225 - DNA, 33 bp, Artificial Sequence
  Probe
aagaactgctaactcatgcccccatgtctaaca

SEQ ID NO: 2226 - DNA, 40 bp, Artificial Sequence
  Probe
aagaactgctaactcatgcccccatgtctaacaacatggc

SEQ ID NO: 2227 - DNA, 42 bp, Artificial Sequence
  Probe
aagaactgctaactcatgcccccatgtctaacaacatggctt

SEQ ID NO: 2228 - DNA, 48 bp, Artificial Sequence
  Probe
aagaactgctaactcatgcccccatgtctaacaacatggctttctcaa

SEQ ID NO: 2229 - DNA, 49 bp, Artificial Sequence
  Probe
aagaactgctaactcatgcccccatgtctaacaacatggctttctcaac

SEQ ID NO: 2230 - DNA, 50 bp, Artificial Sequence
  Probe
aagaactgctaactcatgcccccatgtctaacaacatggctttctcaact

SEQ ID NO: 2231 - DNA, 29 bp, Artificial Sequence
  Probe
aagaagcagcttcaaacctgccggggctt

SEQ ID NO: 2232 - DNA, 31 bp, Artificial Sequence
  Probe
aagaagcagcttcaaacctgccggggcttct

SEQ ID NO: 2233 - DNA, 32 bp, Artificial Sequence
  Probe
aagaagcagcttcaaacctgccggggcttctc

SEQ ID NO: 2234 - DNA, 18 bp, Artificial Sequence
  Probe
aagacaccccccacagtt

SEQ ID NO: 2235 - DNA, 27 bp, Artificial Sequence
  Probe
aagacaccccccacagtttatgtagct

SEQ ID NO: 2236 - DNA, 31 bp, Artificial Sequence
  Probe
aagacaccccccacagtttatgtagcttacc

SEQ ID NO: 2237 - DNA, 32 bp, Artificial Sequence
  Probe
aagacaccccccacagtttatgtagcttacct

SEQ ID NO: 2238 - DNA, 33 bp, Artificial Sequence
  Probe
aagacaccccccacagtttatgtagcttacctc

SEQ ID NO: 2239 - DNA, 34 bp, Artificial Sequence
  Probe
aagacaccccccacagtttatgtagcttacctcc

SEQ ID NO: 2240 - DNA, 37 bp, Artificial Sequence
  Probe
aagacaccccccacagtttatgtagcttacctcctca

SEQ ID NO: 2241 - DNA, 50 bp, Artificial Sequence
  Probe
aagacaccccccacagtttatgtagcttacctcctcaaagcaatacactg

SEQ ID NO: 2242 - DNA, 23 bp, Artificial Sequence
  Probe
aagacaggggttaggcctctttt

SEQ ID NO: 2243 - DNA, 24 bp, Artificial Sequence
  Probe
aagacaggggttaggcctcttttt

SEQ ID NO: 2244 - DNA, 27 bp, Artificial Sequence
  Probe
aagacaggggttaggcctctttttacc

SEQ ID NO: 2245 - DNA, 28 bp, Artificial Sequence
  Probe
aagacaggggttaggcctctttttacca

SEQ ID NO: 2246 - DNA, 30 bp, Artificial Sequence
  Probe
aagacaggggttaggcctctttttaccagc

SEQ ID NO: 2247 - DNA, 31 bp, Artificial Sequence
  Probe
aagacaggggttaggcctctttttaccagct

SEQ ID NO: 2248 - DNA, 27 bp, Artificial Sequence
  Probe
aagagaaccaacacctctttacagtga

SEQ ID NO: 2249 - DNA, 28 bp, Artificial Sequence
  Probe
aagagaaccaacacctctttacagtgaa

SEQ ID NO: 2250 - DNA, 29 bp, Artificial Sequence
  Probe
aagagaaccaacacctctttacagtgaaa

SEQ ID NO: 2251 - DNA, 30 bp, Artificial Sequence
  Probe
aagagaaccaacacctctttacagtgaaat

SEQ ID NO: 2252 - DNA, 16 bp, Artificial Sequence
  Probe
aagagccttcaaagcc

SEQ ID NO: 2253 - DNA, 17 bp, Artificial Sequence
  Probe
aagagccttcaaagccc

SEQ ID NO: 2254 - DNA, 50 bp, Artificial Sequence
  Probe
aagagccttcaaagccctcagtaagttgcaatacttaatttctgtaacag

SEQ ID NO: 2255 - DNA, 17 bp, Artificial Sequence
  Probe
aagaggtccccggttca

SEQ ID NO: 2256 - DNA, 50 bp, Artificial Sequence
  Probe
aagagttactttgatagagtaaataataggagcttaaacccccttatttc

SEQ ID NO: 2257 - DNA, 32 bp, Artificial Sequence
  Probe
aagattaagagaaccaacacctctttacagtg

SEQ ID NO: 2258 - DNA, 33 bp, Artificial Sequence
  Probe
aagattaagagaaccaacacctctttacagtga

SEQ ID NO: 2259 - DNA, 34 bp, Artificial Sequence
  Probe
aagattaagagaaccaacacctctttacagtgaa

SEQ ID NO: 2260 - DNA, 36 bp, Artificial Sequence
  Probe
aagattaagagaaccaacacctctttacagtgaaat

SEQ ID NO: 2261 - DNA, 34 bp, Artificial Sequence
  Probe
aagattctaggttcgactcctggctggctcgcga

SEQ ID NO: 2262 - DNA, 34 bp, Artificial Sequence
  Probe
aagattctaggttcgactcctggctggctcgggt

SEQ ID NO: 2263 - DNA, 26 bp, Artificial Sequence
  Probe
aagattgagggttcgagtcccttcgt

SEQ ID NO: 2264 - DNA, 28 bp, Artificial Sequence
  Probe
aagattgagggttcgagtcccttcgtgg

SEQ ID NO: 2265 - DNA, 31 bp, Artificial Sequence
  Probe
aagattgagggttcgagtcccttcgtggtcg

SEQ ID NO: 2266 - DNA, 34 bp, Artificial Sequence
  Probe
aagattgagggttcgagtcccttcgtggtcgttg

SEQ ID NO: 2267 - DNA, 34 bp, Artificial Sequence
  Probe
aagcaatacactgaaaatgtttagacgggctcac

SEQ ID NO: 2268 - DNA, 44 bp, Artificial Sequence
  Probe
aagcaatacactgaaaatgtttagacgggctcacatcaccccat

SEQ ID NO: 2269 - DNA, 48 bp, Artificial Sequence
  Probe
aagcaatacactgaaaatgtttagacgggctcacatcaccccataaac

SEQ ID NO: 2270 - DNA, 49 bp, Artificial Sequence
  Probe
aagcaatacactgaaaatgtttagacgggctcacatcaccccataaaca

SEQ ID NO: 2271 - DNA, 50 bp, Artificial Sequence
  Probe
aagcaatacactgaaaatgtttagacgggctcacatcaccccataaacaa

SEQ ID NO: 2272 - DNA, 19 bp, Artificial Sequence
  Probe
aagcacccaacttacactt

SEQ ID NO: 2273 - DNA, 20 bp, Artificial Sequence
  Probe
aagcacccaacttacactta

SEQ ID NO: 2274 - DNA, 24 bp, Artificial Sequence
  Probe
aagcacccaacttacacttaggag

SEQ ID NO: 2275 - DNA, 25 bp, Artificial Sequence
  Probe
aagcacccaacttacacttaggaga

SEQ ID NO: 2276 - DNA, 29 bp, Artificial Sequence
  Probe
aagcacccaacttacacttaggagatttc

SEQ ID NO: 2277 - DNA, 30 bp, Artificial Sequence
  Probe
aagcacccaacttacacttaggagatttca

SEQ ID NO: 2278 - DNA, 32 bp, Artificial Sequence
  Probe
aagcacccaacttacacttaggagatttcaac

SEQ ID NO: 2279 - DNA, 33 bp, Artificial Sequence
  Probe
aagcacccaacttacacttaggagatttcaact

SEQ ID NO: 2280 - DNA, 44 bp, Artificial Sequence
  Probe
aagcacccaacttacacttaggagatttcaacttaacttgaccg

SEQ ID NO: 2281 - DNA, 48 bp, Artificial Sequence
  Probe
aagcacccaacttacacttaggagatttcaacttaacttgaccgctct

SEQ ID NO: 2282 - DNA, 49 bp, Artificial Sequence
  Probe
aagcacccaacttacacttaggagatttcaacttaacttgaccgctctg

SEQ ID NO: 2283 - DNA, 50 bp, Artificial Sequence
  Probe
aagcacccaacttacacttaggagatttcaacttaacttgaccgctctga

SEQ ID NO: 2284 - DNA, 26 bp, Artificial Sequence
  Probe
aagcagcttcaaacctgccggggctt

SEQ ID NO: 2285 - DNA, 27 bp, Artificial Sequence
  Probe
aagcagcttcaaacctgccggggcttc

SEQ ID NO: 2286 - DNA, 28 bp, Artificial Sequence
  Probe
aagcagcttcaaacctgccggggcttct

SEQ ID NO: 2287 - DNA, 29 bp, Artificial Sequence
  Probe
aagcagcttcaaacctgccggggcttctc

SEQ ID NO: 2288 - DNA, 39 bp, Artificial Sequence
  Probe
aagcagttgacccgggttcgattcccggccaacgcaagt

SEQ ID NO: 2289 - DNA, 39 bp, Artificial Sequence
  Probe
aagcagttgacccgggttcgattcccggccaacgcagtg

SEQ ID NO: 2290 - DNA, 43 bp, Artificial Sequence
  Probe
aagcattggactgtaaatctaaagacaggggttaggcctcttt

SEQ ID NO: 2291 - DNA, 50 bp, Artificial Sequence
  Probe
aagcattggactgtaaatctaaagacaggggttaggcctctttttaccag

SEQ ID NO: 2292 - DNA, 40 bp, Artificial Sequence
  Probe
aagccagggattgtgggttcgagtcccacccggggtaaag

SEQ ID NO: 2293 - DNA, 40 bp, Artificial Sequence
  Probe
aagccagggattgtgggttcgagtcccacctggggtgtcg

SEQ ID NO: 2294 - DNA, 39 bp, Artificial Sequence
  Probe
aagccagggattgtgggttcgagtcccatctggggtggc

SEQ ID NO: 2295 - DNA, 40 bp, Artificial Sequence
  Probe
aagccagggattgtgggttcgagtcccatctggggtggcc

SEQ ID NO: 2296 - DNA, 17 bp, Artificial Sequence
  Probe
aagctatcgggcccata

SEQ ID NO: 2297 - DNA, 21 bp, Artificial Sequence
  Probe
aagctatcgggcccatacccc

SEQ ID NO: 2298 - DNA, 22 bp, Artificial Sequence
  Probe
aagctatcgggcccataccccg

SEQ ID NO: 2299 - DNA, 23 bp, Artificial Sequence
  Probe
aagctatcgggcccataccccga

SEQ ID NO: 2300 - DNA, 24 bp, Artificial Sequence
  Probe
aagctatcgggcccataccccgaa

SEQ ID NO: 2301 - DNA, 25 bp, Artificial Sequence
  Probe
aagctatcgggcccataccccgaaa

SEQ ID NO: 2302 - DNA, 26 bp, Artificial Sequence
  Probe
aagctatcgggcccataccccgaaaa

SEQ ID NO: 2303 - DNA, 27 bp, Artificial Sequence
  Probe
aagctatcgggcccataccccgaaaat

SEQ ID NO: 2304 - DNA, 28 bp, Artificial Sequence
  Probe
aagctatcgggcccataccccgaaaatg

SEQ ID NO: 2305 - DNA, 29 bp, Artificial Sequence
  Probe
aagctatcgggcccataccccgaaaatgt

SEQ ID NO: 2306 - DNA, 30 bp, Artificial Sequence
  Probe
aagctatcgggcccataccccgaaaatgtt

SEQ ID NO: 2307 - DNA, 31 bp, Artificial Sequence
  Probe
aagctatcgggcccataccccgaaaatgttg

SEQ ID NO: 2308 - DNA, 32 bp, Artificial Sequence
  Probe
aagctatcgggcccataccccgaaaatgttgg

SEQ ID NO: 2309 - DNA, 33 bp, Artificial Sequence
  Probe
aagctatcgggcccataccccgaaaatgttggt

SEQ ID NO: 2310 - DNA, 34 bp, Artificial Sequence
  Probe
aagctatcgggcccataccccgaaaatgttggtt

SEQ ID NO: 2311 - DNA, 35 bp, Artificial Sequence
  Probe
aagctatcgggcccataccccgaaaatgttggtta

SEQ ID NO: 2312 - DNA, 39 bp, Artificial Sequence
  Probe
aagctatcgggcccataccccgaaaatgttggttatacc

SEQ ID NO: 2313 - DNA, 44 bp, Artificial Sequence
  Probe
aagctatcgggcccataccccgaaaatgttggttatacccttcc

SEQ ID NO: 2314 - DNA, 49 bp, Artificial Sequence
  Probe
aagctatcgggcccataccccgaaaatgttggttatacccttcccgtac

SEQ ID NO: 2315 - DNA, 24 bp, Artificial Sequence
  Probe
aagctcacaagaactgctaactca

SEQ ID NO: 2316 - DNA, 25 bp, Artificial Sequence
  Probe
aagctcacaagaactgctaactcat

SEQ ID NO: 2317 - DNA, 26 bp, Artificial Sequence
  Probe
aagctcacaagaactgctaactcatg

SEQ ID NO: 2318 - DNA, 27 bp, Artificial Sequence
  Probe
aagctcacaagaactgctaactcatgc

SEQ ID NO: 2319 - DNA, 29 bp, Artificial Sequence
  Probe
aagctcacaagaactgctaactcatgccc

SEQ ID NO: 2320 - DNA, 32 bp, Artificial Sequence
  Probe
aagctcacaagaactgctaactcatgccccca

SEQ ID NO: 2321 - DNA, 49 bp, Artificial Sequence
  Probe
aagctcacaagaactgctaactcatgcccccatgtctaacaacatggct

SEQ ID NO: 2322 - DNA, 26 bp, Artificial Sequence
  Probe
aagggcttagcttaattaaagtggct

SEQ ID NO: 2323 - DNA, 28 bp, Artificial Sequence
  Probe
aagggcttagcttaattaaagtggctga

SEQ ID NO: 2324 - DNA, 29 bp, Artificial Sequence
  Probe
aagggcttagcttaattaaagtggctgat

SEQ ID NO: 2325 - DNA, 31 bp, Artificial Sequence
  Probe
aagggcttagcttaattaaagtggctgattt

SEQ ID NO: 2326 - DNA, 32 bp, Artificial Sequence
  Probe
aagggcttagcttaattaaagtggctgatttg

SEQ ID NO: 2327 - DNA, 33 bp, Artificial Sequence
  Probe
aagggcttagcttaattaaagtggctgatttgc

SEQ ID NO: 2328 - DNA, 17 bp, Artificial Sequence
  Probe
aaggtattagaaaaacc

SEQ ID NO: 2329 - DNA, 25 bp, Artificial Sequence
  Probe
aaggtattagaaaaaccatttcata

SEQ ID NO: 2330 - DNA, 32 bp, Artificial Sequence
  Probe
aaggtattagaaaaaccatttcataactttgt

SEQ ID NO: 2331 - DNA, 33 bp, Artificial Sequence
  Probe
aaggtattagaaaaaccatttcataactttgtc

SEQ ID NO: 2332 - DNA, 34 bp, Artificial Sequence
  Probe
aaggtattagaaaaaccatttcataactttgtca

SEQ ID NO: 2333 - DNA, 37 bp, Artificial Sequence
  Probe
aaggtattagaaaaaccatttcataactttgtcaaag

SEQ ID NO: 2334 - DNA, 42 bp, Artificial Sequence
  Probe
aaggtattagaaaaaccatttcataactttgtcaaagttaaa

SEQ ID NO: 2335 - DNA, 48 bp, Artificial Sequence
  Probe
aaggtattagaaaaaccatttcataactttgtcaaagttaaattatag

SEQ ID NO: 2336 - DNA, 24 bp, Artificial Sequence
  Probe
aaggtcagctaaataagctatcgg

SEQ ID NO: 2337 - DNA, 25 bp, Artificial Sequence
  Probe
aaggtcagctaaataagctatcggg

SEQ ID NO: 2338 - DNA, 26 bp, Artificial Sequence
  Probe
aaggtcagctaaataagctatcgggc

SEQ ID NO: 2339 - DNA, 27 bp, Artificial Sequence
  Probe
aaggtcagctaaataagctatcgggcc

SEQ ID NO: 2340 - DNA, 28 bp, Artificial Sequence
  Probe
aaggtcagctaaataagctatcgggccc

SEQ ID NO: 2341 - DNA, 29 bp, Artificial Sequence
  Probe
aaggtcagctaaataagctatcgggccca

SEQ ID NO: 2342 - DNA, 30 bp, Artificial Sequence
  Probe
aaggtcagctaaataagctatcgggcccat

SEQ ID NO: 2343 - DNA, 31 bp, Artificial Sequence
  Probe
aaggtcagctaaataagctatcgggcccata

SEQ ID NO: 2344 - DNA, 32 bp, Artificial Sequence
  Probe
aaggtcagctaaataagctatcgggcccatac

SEQ ID NO: 2345 - DNA, 33 bp, Artificial Sequence
  Probe
aaggtcagctaaataagctatcgggcccatacc

SEQ ID NO: 2346 - DNA, 34 bp, Artificial Sequence
  Probe
aaggtcagctaaataagctatcgggcccataccc

SEQ ID NO: 2347 - DNA, 37 bp, Artificial Sequence
  Probe
aaggtcagctaaataagctatcgggcccataccccga

SEQ ID NO: 2348 - DNA, 39 bp, Artificial Sequence
  Probe
aaggtcagctaaataagctatcgggcccataccccgaaa

SEQ ID NO: 2349 - DNA, 40 bp, Artificial Sequence
  Probe
aaggtcagctaaataagctatcgggcccataccccgaaaa

SEQ ID NO: 2350 - DNA, 41 bp, Artificial Sequence
  Probe
aaggtcagctaaataagctatcgggcccataccccgaaaat

SEQ ID NO: 2351 - DNA, 42 bp, Artificial Sequence
  Probe
aaggtcagctaaataagctatcgggcccataccccgaaaatg

SEQ ID NO: 2352 - DNA, 43 bp, Artificial Sequence
  Probe
aaggtcagctaaataagctatcgggcccataccccgaaaatgt

SEQ ID NO: 2353 - DNA, 44 bp, Artificial Sequence
  Probe
aaggtcagctaaataagctatcgggcccataccccgaaaatgtt

SEQ ID NO: 2354 - DNA, 45 bp, Artificial Sequence
  Probe
aaggtcagctaaataagctatcgggcccataccccgaaaatgttg

SEQ ID NO: 2355 - DNA, 46 bp, Artificial Sequence
  Probe
aaggtcagctaaataagctatcgggcccataccccgaaaatgttgg

SEQ ID NO: 2356 - DNA, 48 bp, Artificial Sequence
  Probe
aaggtcagctaaataagctatcgggcccataccccgaaaatgttggtt

SEQ ID NO: 2357 - DNA, 49 bp, Artificial Sequence
  Probe
aaggtcagctaaataagctatcgggcccataccccgaaaatgttggtta

SEQ ID NO: 2358 - DNA, 50 bp, Artificial Sequence
  Probe
aaggtcagctaaataagctatcgggcccataccccgaaaatgttggttat

SEQ ID NO: 2359 - DNA, 32 bp, Artificial Sequence
  Probe
aaggtcctgggttcgagccccagtggaaccac

SEQ ID NO: 2360 - DNA, 34 bp, Artificial Sequence
  Probe
aaggtcctgggttcgagccccagtggaaccacgg

SEQ ID NO: 2361 - DNA, 34 bp, Artificial Sequence
  Probe
aaggtcgcgggttcgatccccgtacgggccacga

SEQ ID NO: 2362 - DNA, 34 bp, Artificial Sequence
  Probe
aaggtcgcgggttcgatccccgtacgggccactg

SEQ ID NO: 2363 - DNA, 24 bp, Artificial Sequence
  Probe
aaggttccgggttcgagtcccggc

SEQ ID NO: 2364 - DNA, 33 bp, Artificial Sequence
  Probe
aagtaaggtcagctaaataagctatcgggccca

SEQ ID NO: 2365 - DNA, 35 bp, Artificial Sequence
  Probe
aagtaaggtcagctaaataagctatcgggcccata

SEQ ID NO: 2366 - DNA, 36 bp, Artificial Sequence
  Probe
aagtaaggtcagctaaataagctatcgggcccatac

SEQ ID NO: 2367 - DNA, 50 bp, Artificial Sequence
  Probe
aagtaaggtcagctaaataagctatcgggcccataccccgaaaatgttgg

SEQ ID NO: 2368 - DNA, 15 bp, Artificial Sequence
  Probe
aagtattgcaactta

SEQ ID NO: 2369 - DNA, 23 bp, Artificial Sequence
  Probe
aagtcatggaggccatggggttg

SEQ ID NO: 2370 - DNA, 15 bp, Artificial Sequence
  Probe
aagtgtactggaaag

SEQ ID NO: 2371 - DNA, 21 bp, Artificial Sequence
  Probe
aagtgtactggaaagtgcact

SEQ ID NO: 2372 - DNA, 23 bp, Artificial Sequence
  Probe
aagtgtactggaaagtgcacttg

SEQ ID NO: 2373 - DNA, 24 bp, Artificial Sequence
  Probe
aagtgtactggaaagtgcacttgg

SEQ ID NO: 2374 - DNA, 25 bp, Artificial Sequence
  Probe
aagtgtactggaaagtgcacttgga

SEQ ID NO: 2375 - DNA, 26 bp, Artificial Sequence
  Probe
aagtgtactggaaagtgcacttggac

SEQ ID NO: 2376 - DNA, 27 bp, Artificial Sequence
  Probe
aagtgtactggaaagtgcacttggacg

SEQ ID NO: 2377 - DNA, 28 bp, Artificial Sequence
  Probe
aagtgtactggaaagtgcacttggacga

SEQ ID NO: 2378 - DNA, 29 bp, Artificial Sequence
  Probe
aagtgtactggaaagtgcacttggacgaa

SEQ ID NO: 2379 - DNA, 30 bp, Artificial Sequence
  Probe
aagtgtactggaaagtgcacttggacgaac

SEQ ID NO: 2380 - DNA, 31 bp, Artificial Sequence
  Probe
aagtgtactggaaagtgcacttggacgaacc

SEQ ID NO: 2381 - DNA, 32 bp, Artificial Sequence
  Probe
aagtgtactggaaagtgcacttggacgaacca

SEQ ID NO: 2382 - DNA, 33 bp, Artificial Sequence
  Probe
aagtgtactggaaagtgcacttggacgaaccag

SEQ ID NO: 2383 - DNA, 34 bp, Artificial Sequence
  Probe
aagtgtactggaaagtgcacttggacgaaccaga

SEQ ID NO: 2384 - DNA, 35 bp, Artificial Sequence
  Probe
aagtgtactggaaagtgcacttggacgaaccagag

SEQ ID NO: 2385 - DNA, 36 bp, Artificial Sequence
  Probe
aagtgtactggaaagtgcacttggacgaaccagagt

SEQ ID NO: 2386 - DNA, 37 bp, Artificial Sequence
  Probe
aagtgtactggaaagtgcacttggacgaaccagagtg

SEQ ID NO: 2387 - DNA, 39 bp, Artificial Sequence
  Probe
aagtgtactggaaagtgcacttggacgaaccagagtgta

SEQ ID NO: 2388 - DNA, 28 bp, Artificial Sequence
  Probe
aagtgtttgtgggtttaagtcccattgg

SEQ ID NO: 2389 - DNA, 29 bp, Artificial Sequence
  Probe
aagtgtttgtgggtttaagtcccattggt

SEQ ID NO: 2390 - DNA, 30 bp, Artificial Sequence
  Probe
aagtgtttgtgggtttaagtcccattggtc

SEQ ID NO: 2391 - DNA, 32 bp, Artificial Sequence
  Probe
aagtgtttgtgggtttaagtcccattggtcta

SEQ ID NO: 2392 - DNA, 33 bp, Artificial Sequence
  Probe
aagtgtttgtgggtttaagtcccattggtctag

SEQ ID NO: 2393 - DNA, 34 bp, Artificial Sequence
  Probe
aagtgtttgtgggtttaagtcccattggtctagt

SEQ ID NO: 2394 - DNA, 35 bp, Artificial Sequence
  Probe
aagtgtttgtgggtttaagtcccattggtctagta

SEQ ID NO: 2395 - DNA, 38 bp, Artificial Sequence
  Probe
aagttaaagattaagagaaccaacacctctttacagtg

SEQ ID NO: 2396 - DNA, 39 bp, Artificial Sequence
  Probe
aagttaaagattaagagaaccaacacctctttacagtga

SEQ ID NO: 2397 - DNA, 40 bp, Artificial Sequence
  Probe
aagttaaagattaagagaaccaacacctctttacagtgaa

SEQ ID NO: 2398 - DNA, 41 bp, Artificial Sequence
  Probe
aagttaaagattaagagaaccaacacctctttacagtgaaa

SEQ ID NO: 2399 - DNA, 42 bp, Artificial Sequence
  Probe
aagttaaagattaagagaaccaacacctctttacagtgaaat

SEQ ID NO: 2400 - DNA, 44 bp, Artificial Sequence
  Probe
aagttaaagattaagagaaccaacacctctttacagtgaaatgc

SEQ ID NO: 2401 - DNA, 49 bp, Artificial Sequence
  Probe
aagttaaagattaagagaaccaacacctctttacagtgaaatgccccaa

SEQ ID NO: 2402 - DNA, 50 bp, Artificial Sequence
  Probe
aagttaaagattaagagaaccaacacctctttacagtgaaatgccccaac

SEQ ID NO: 2403 - DNA, 21 bp, Artificial Sequence
  Probe
aataagctatcgggcccatac

SEQ ID NO: 2404 - DNA, 25 bp, Artificial Sequence
  Probe
aataagctatcgggcccataccccg

SEQ ID NO: 2405 - DNA, 27 bp, Artificial Sequence
  Probe
aataagctatcgggcccataccccgaa

SEQ ID NO: 2406 - DNA, 29 bp, Artificial Sequence
  Probe
aataagctatcgggcccataccccgaaaa

SEQ ID NO: 2407 - DNA, 30 bp, Artificial Sequence
  Probe
aataagctatcgggcccataccccgaaaat

SEQ ID NO: 2408 - DNA, 31 bp, Artificial Sequence
  Probe
aataagctatcgggcccataccccgaaaatg

SEQ ID NO: 2409 - DNA, 35 bp, Artificial Sequence
  Probe
aataagctatcgggcccataccccgaaaatgttgg

SEQ ID NO: 2410 - DNA, 48 bp, Artificial Sequence
  Probe
aataagctatcgggcccataccccgaaaatgttggttatacccttccc

SEQ ID NO: 2411 - DNA, 50 bp, Artificial Sequence
  Probe
aataagctatcgggcccataccccgaaaatgttggttatacccttcccgt

SEQ ID NO: 2412 - DNA, 33 bp, Artificial Sequence
  Probe
aataataggagcttaaacccccttatttctagg

SEQ ID NO: 2413 - DNA, 49 bp, Artificial Sequence
  Probe
aatacaccagtcttgtaaaccggagatgaaaacctttttccaaggacaa

SEQ ID NO: 2414 - DNA, 50 bp, Artificial Sequence
  Probe
aatacaccagtcttgtaaaccggagatgaaaacctttttccaaggacaaa

SEQ ID NO: 2415 - DNA, 48 bp, Artificial Sequence
  Probe
aatacactgaaaatgtttagacgggctcacatcaccccataaacaaat

SEQ ID NO: 2416 - DNA, 49 bp, Artificial Sequence
  Probe
aatacactgaaaatgtttagacgggctcacatcaccccataaacaaata

SEQ ID NO: 2417 - DNA, 50 bp, Artificial Sequence
  Probe
aatacactgaaaatgtttagacgggctcacatcaccccataaacaaatag

SEQ ID NO: 2418 - DNA, 20 bp, Artificial Sequence
  Probe
aatacagaccaagagccttc

SEQ ID NO: 2419 - DNA, 31 bp, Artificial Sequence
  Probe
aataggagcttaaacccccttatttctagga

SEQ ID NO: 2420 - DNA, 20 bp, Artificial Sequence
  Probe
aataggtttggtcctagcct

SEQ ID NO: 2421 - DNA, 23 bp, Artificial Sequence
  Probe
aataggtttggtcctagcctttc

SEQ ID NO: 2422 - DNA, 24 bp, Artificial Sequence
  Probe
aataggtttggtcctagcctttct

SEQ ID NO: 2423 - DNA, 27 bp, Artificial Sequence
  Probe
aataggtttggtcctagcctttctatt

SEQ ID NO: 2424 - DNA, 30 bp, Artificial Sequence
  Probe
aataggtttggtcctagcctttctattagc

SEQ ID NO: 2425 - DNA, 50 bp, Artificial Sequence
  Probe
aatagtaccgttaacttccaattaactagttttgacaacattcaaaaaag

SEQ ID NO: 2426 - DNA, 39 bp, Artificial Sequence
  Probe
aatatagtttaaccaaaacatcagattgtgaatctgaca

SEQ ID NO: 2427 - DNA, 40 bp, Artificial Sequence
  Probe
aatatagtttaaccaaaacatcagattgtgaatctgacaa

SEQ ID NO: 2428 - DNA, 24 bp, Artificial Sequence
  Probe
aatccagcaatccgagttcgaatc

SEQ ID NO: 2429 - DNA, 25 bp, Artificial Sequence
  Probe
aatccagcgatccgagttcaaatct

SEQ ID NO: 2430 - DNA, 37 bp, Artificial Sequence
  Probe
aatccagcgatccgagttcaaatctcggtggaacctg

SEQ ID NO: 2431 - DNA, 38 bp, Artificial Sequence
  Probe
aatccagcgatccgagttcaaatctcggtggaacctgc

SEQ ID NO: 2432 - DNA, 39 bp, Artificial Sequence
  Probe
aatccagcgatccgagttcaaatctcggtggaacctgca

SEQ ID NO: 2433 - DNA, 40 bp, Artificial Sequence
  Probe
aatccagcgatccgagttcaaatctcggtggaacctgcat

SEQ ID NO: 2434 - DNA, 41 bp, Artificial Sequence
  Probe
aatccagcgatccgagttcaaatctcggtggaacctgcatt

SEQ ID NO: 2435 - DNA, 38 bp, Artificial Sequence
  Probe
aatccagcgatccgagttcaaatctcggtggaacctgt

SEQ ID NO: 2436 - DNA, 37 bp, Artificial Sequence
  Probe
aatccagcgatccgagttcaaatctcggtggaacctt

SEQ ID NO: 2437 - DNA, 38 bp, Artificial Sequence
  Probe
aatccagcgatccgagttcaaatctcggtggaaccttt

SEQ ID NO: 2438 - DNA, 39 bp, Artificial Sequence
  Probe
aatccagcgatccgagttcaaatctcggtggaacctttc

SEQ ID NO: 2439 - DNA, 33 bp, Artificial Sequence
  Probe
aatccagcgatccgagttcaaatctcggtggga

SEQ ID NO: 2440 - DNA, 34 bp, Artificial Sequence
  Probe
aatccagcgatccgagttcaaatctcggtgggac

SEQ ID NO: 2441 - DNA, 38 bp, Artificial Sequence
  Probe
aatccagcgatccgagttcaaatctcggtgggacctca

SEQ ID NO: 2442 - DNA, 39 bp, Artificial Sequence
  Probe
aatccagcgatccgagttcaaatctcggtgggacctcac

SEQ ID NO: 2443 - DNA, 37 bp, Artificial Sequence
  Probe
aatccagcgatccgagttcaaatctcggtgggacctt

SEQ ID NO: 2444 - DNA, 40 bp, Artificial Sequence
  Probe
aatccagcgatccgagttcaaatctcggtgggaccttctt

SEQ ID NO: 2445 - DNA, 22 bp, Artificial Sequence
  Probe
aatccagcgatccgagttcgag

SEQ ID NO: 2446 - DNA, 37 bp, Artificial Sequence
  Probe
aatccagcgatccgagttcgagtctcggtggaacctt

SEQ ID NO: 2447 - DNA, 39 bp, Artificial Sequence
  Probe
aatccagcgatccgagttcgagtctcggtggaacctttg

SEQ ID NO: 2448 - DNA, 25 bp, Artificial Sequence
  Probe
aatccattggggtctccccgcgcag

SEQ ID NO: 2449 - DNA, 20 bp, Artificial Sequence
  Probe
aatccccggcacctccacca

SEQ ID NO: 2450 - DNA, 17 bp, Artificial Sequence
  Probe
aatcccggacgagccca

SEQ ID NO: 2451 - DNA, 17 bp, Artificial Sequence
  Probe
aatcccggacgagccct

SEQ ID NO: 2452 - DNA, 19 bp, Artificial Sequence
  Probe
aatccgggtgccccctcaa

SEQ ID NO: 2453 - DNA, 19 bp, Artificial Sequence
  Probe
aatcctatatatcttaatg

SEQ ID NO: 2454 - DNA, 19 bp, Artificial Sequence
  Probe
aatcctgccgactacggca

SEQ ID NO: 2455 - DNA, 19 bp, Artificial Sequence
  Probe
aatcctgccgactacgtca

SEQ ID NO: 2456 - DNA, 22 bp, Artificial Sequence
  Probe
aatcgcataaaacttaaaactt

SEQ ID NO: 2457 - DNA, 25 bp, Artificial Sequence
  Probe
aatcgcataaaacttaaaactttac

SEQ ID NO: 2458 - DNA, 29 bp, Artificial Sequence
  Probe
aatcgcataaaacttaaaactttacagtc

SEQ ID NO: 2459 - DNA, 30 bp, Artificial Sequence
  Probe
aatcgcataaaacttaaaactttacagtca

SEQ ID NO: 2460 - DNA, 37 bp, Artificial Sequence
  Probe
aatcgcataaaacttaaaactttacagtcagaggttc

SEQ ID NO: 2461 - DNA, 39 bp, Artificial Sequence
  Probe
aatcgcataaaacttaaaactttacagtcagaggttcaa

SEQ ID NO: 2462 - DNA, 49 bp, Artificial Sequence
  Probe
aatcgcataaaacttaaaactttacagtcagaggttcaattcctcttct

SEQ ID NO: 2463 - DNA, 27 bp, Artificial Sequence
  Probe
aatctaaagacaggggttaggcctctt

SEQ ID NO: 2464 - DNA, 29 bp, Artificial Sequence
  Probe
aatctaaagacaggggttaggcctctttt

SEQ ID NO: 2465 - DNA, 30 bp, Artificial Sequence
  Probe
aatctaaagacaggggttaggcctcttttt

SEQ ID NO: 2466 - DNA, 36 bp, Artificial Sequence
  Probe
aatctaaagacaggggttaggcctctttttaccagc

SEQ ID NO: 2467 - DNA, 37 bp, Artificial Sequence
  Probe
aatctaaagacaggggttaggcctctttttaccagct

SEQ ID NO: 2468 - DNA, 38 bp, Artificial Sequence
  Probe
aatctaaagacaggggttaggcctctttttaccagctc

SEQ ID NO: 2469 - DNA, 39 bp, Artificial Sequence
  Probe
aatctgaaggtcgtgagttcgagcctcacacggggcagt

SEQ ID NO: 2470 - DNA, 37 bp, Artificial Sequence
  Probe
aatctgaaggtcgtgagttcgatcctcacacggggca

SEQ ID NO: 2471 - DNA, 39 bp, Artificial Sequence
  Probe
aatctgaaggtcgtgagttcgatcctcacacggggcaca

SEQ ID NO: 2472 - DNA, 40 bp, Artificial Sequence
  Probe
aatctgaaggtcgtgagttcgatcctcacacggggcacaa

SEQ ID NO: 2473 - DNA, 46 bp, Artificial Sequence
  Probe
aatctgaaggtcgtgagttcgatcctcacacggggcacaataattt

SEQ ID NO: 2474 - DNA, 24 bp, Artificial Sequence
  Probe
aatctgacaacagaggcttacgac

SEQ ID NO: 2475 - DNA, 25 bp, Artificial Sequence
  Probe
aatctgacaacagaggcttacgacc

SEQ ID NO: 2476 - DNA, 28 bp, Artificial Sequence
  Probe
aatctgacaacagaggcttacgacccct

SEQ ID NO: 2477 - DNA, 33 bp, Artificial Sequence
  Probe
aatctgacaacagaggcttacgaccccttattt

SEQ ID NO: 2478 - DNA, 37 bp, Artificial Sequence
  Probe
aatctgacaacagaggcttacgaccccttatttaccg

SEQ ID NO: 2479 - DNA, 38 bp, Artificial Sequence
  Probe
aatctgacaacagaggcttacgaccccttatttaccga

SEQ ID NO: 2480 - DNA, 39 bp, Artificial Sequence
  Probe
aatctgacaacagaggcttacgaccccttatttaccgag

SEQ ID NO: 2481 - DNA, 40 bp, Artificial Sequence
  Probe
aatctgacaacagaggcttacgaccccttatttaccgaga

SEQ ID NO: 2482 - DNA, 32 bp, Artificial Sequence
  Probe
aatcttagctttgggtgctaatggtggagtta

SEQ ID NO: 2483 - DNA, 50 bp, Artificial Sequence
  Probe
aatcttagctttgggtgctaatggtggagttaaagactttttctctgatt

SEQ ID NO: 2484 - DNA, 45 bp, Artificial Sequence
  Probe
aatgatttcgactcattaaattatgataatcatatttaccaaatg

SEQ ID NO: 2485 - DNA, 19 bp, Artificial Sequence
  Probe
aatgccccaactaaatact

SEQ ID NO: 2486 - DNA, 20 bp, Artificial Sequence
  Probe
aatgccccaactaaatacta

SEQ ID NO: 2487 - DNA, 21 bp, Artificial Sequence
  Probe
aatgccccaactaaatactac

SEQ ID NO: 2488 - DNA, 22 bp, Artificial Sequence
  Probe
aatgccccaactaaatactacc

SEQ ID NO: 2489 - DNA, 23 bp, Artificial Sequence
  Probe
aatgccccaactaaatactaccg

SEQ ID NO: 2490 - DNA, 24 bp, Artificial Sequence
  Probe
aatgccccaactaaatactaccgt

SEQ ID NO: 2491 - DNA, 25 bp, Artificial Sequence
  Probe
aatgccccaactaaatactaccgta

SEQ ID NO: 2492 - DNA, 26 bp, Artificial Sequence
  Probe
aatgccccaactaaatactaccgtat

SEQ ID NO: 2493 - DNA, 27 bp, Artificial Sequence
  Probe
aatgccccaactaaatactaccgtatg

SEQ ID NO: 2494 - DNA, 29 bp, Artificial Sequence
  Probe
aatgccccaactaaatactaccgtatggc

SEQ ID NO: 2495 - DNA, 25 bp, Artificial Sequence
  Probe
aatggtggagttaaagactttttct

SEQ ID NO: 2496 - DNA, 29 bp, Artificial Sequence
  Probe
aatggtggagttaaagactttttctctga

SEQ ID NO: 2497 - DNA, 31 bp, Artificial Sequence
  Probe
aatggtggagttaaagactttttctctgatt

SEQ ID NO: 2498 - DNA, 32 bp, Artificial Sequence
  Probe
aatggtggagttaaagactttttctctgattt

SEQ ID NO: 2499 - DNA, 34 bp, Artificial Sequence
  Probe
aatggtggagttaaagactttttctctgatttgt

SEQ ID NO: 2500 - DNA, 36 bp, Artificial Sequence
  Probe
aatggtggagttaaagactttttctctgatttgtcc

SEQ ID NO: 2501 - DNA, 37 bp, Artificial Sequence
  Probe
aatgtttagacgggctcacatcaccccataaacaaat

SEQ ID NO: 2502 - DNA, 37 bp, Artificial Sequence
  Probe
aattaactagttttgacaacattcaaaaaagagtaat

SEQ ID NO: 2503 - DNA, 38 bp, Artificial Sequence
  Probe
aattaactagttttgacaacattcaaaaaagagtaata

SEQ ID NO: 2504 - DNA, 33 bp, Artificial Sequence
  Probe
aattagaatcttagctttgggtgctaatggtgg

SEQ ID NO: 2505 - DNA, 49 bp, Artificial Sequence
  Probe
aattagaatcttagctttgggtgctaatggtggagttaaagactttttc

SEQ ID NO: 2506 - DNA, 20 bp, Artificial Sequence
  Probe
aattcccggtcagggaacca

SEQ ID NO: 2507 - DNA, 37 bp, Artificial Sequence
  Probe
aattcgaagaagcagcttcaaacctgccggggcttct

SEQ ID NO: 2508 - DNA, 38 bp, Artificial Sequence
  Probe
aattcgaagaagcagcttcaaacctgccggggcttctc

SEQ ID NO: 2509 - DNA, 39 bp, Artificial Sequence
  Probe
aattcgaagaagcagcttcaaacctgccggggcttctcc

SEQ ID NO: 2510 - DNA, 31 bp, Artificial Sequence
  Probe
aattgcaaattcgaagaagcagcttcaaacc

SEQ ID NO: 2511 - DNA, 32 bp, Artificial Sequence
  Probe
aattgcaaattcgaagaagcagcttcaaacct

SEQ ID NO: 2512 - DNA, 36 bp, Artificial Sequence
  Probe
aattgcaaattcgaagaagcagcttcaaacctgccg

SEQ ID NO: 2513 - DNA, 37 bp, Artificial Sequence
  Probe
aattgcaaattcgaagaagcagcttcaaacctgccgg

SEQ ID NO: 2514 - DNA, 38 bp, Artificial Sequence
  Probe
aattgcaaattcgaagaagcagcttcaaacctgccggg

SEQ ID NO: 2515 - DNA, 39 bp, Artificial Sequence
  Probe
aattgcaaattcgaagaagcagcttcaaacctgccgggg

SEQ ID NO: 2516 - DNA, 40 bp, Artificial Sequence
  Probe
aattgcaaattcgaagaagcagcttcaaacctgccggggc

SEQ ID NO: 2517 - DNA, 41 bp, Artificial Sequence
  Probe
aattgcaaattcgaagaagcagcttcaaacctgccggggct

SEQ ID NO: 2518 - DNA, 42 bp, Artificial Sequence
  Probe
aattgcaaattcgaagaagcagcttcaaacctgccggggctt

SEQ ID NO: 2519 - DNA, 43 bp, Artificial Sequence
  Probe
aattgcaaattcgaagaagcagcttcaaacctgccggggcttc

SEQ ID NO: 2520 - DNA, 44 bp, Artificial Sequence
  Probe
aattgcaaattcgaagaagcagcttcaaacctgccggggcttct

SEQ ID NO: 2521 - DNA, 45 bp, Artificial Sequence
  Probe
aattgcaaattcgaagaagcagcttcaaacctgccggggcttctc

SEQ ID NO: 2522 - DNA, 46 bp, Artificial Sequence
  Probe
aattgcaaattcgaagaagcagcttcaaacctgccggggcttctcc

SEQ ID NO: 2523 - DNA, 50 bp, Artificial Sequence
  Probe
aattgcaaattcgaagaagcagcttcaaacctgccggggcttctcccgcc

SEQ ID NO: 2524 - DNA, 22 bp, Artificial Sequence
  Probe
aattttggtgcaactccaaata

SEQ ID NO: 2525 - DNA, 50 bp, Artificial Sequence
  Probe
acaaaacgaatgatttcgactcattaaattatgataatcatatttaccaa

SEQ ID NO: 2526 - DNA, 16 bp, Artificial Sequence
  Probe
acaaagcacccaactt

SEQ ID NO: 2527 - DNA, 17 bp, Artificial Sequence
  Probe
acaaagcacccaactta

SEQ ID NO: 2528 - DNA, 18 bp, Artificial Sequence
  Probe
acaaagcacccaacttac

SEQ ID NO: 2529 - DNA, 19 bp, Artificial Sequence
  Probe
acaaagcacccaacttaca

SEQ ID NO: 2530 - DNA, 21 bp, Artificial Sequence
  Probe
acaaagcacccaacttacact

SEQ ID NO: 2531 - DNA, 22 bp, Artificial Sequence
  Probe
acaaagcacccaacttacactt

SEQ ID NO: 2532 - DNA, 23 bp, Artificial Sequence
  Probe
acaaagcacccaacttacactta

SEQ ID NO: 2533 - DNA, 24 bp, Artificial Sequence
  Probe
acaaagcacccaacttacacttag

SEQ ID NO: 2534 - DNA, 26 bp, Artificial Sequence
  Probe
acaaagcacccaacttacacttagga

SEQ ID NO: 2535 - DNA, 27 bp, Artificial Sequence
  Probe
acaaagcacccaacttacacttaggag

SEQ ID NO: 2536 - DNA, 28 bp, Artificial Sequence
  Probe
acaaagcacccaacttacacttaggaga

SEQ ID NO: 2537 - DNA, 30 bp, Artificial Sequence
  Probe
acaaagcacccaacttacacttaggagatt

SEQ ID NO: 2538 - DNA, 33 bp, Artificial Sequence
  Probe
acaaagcacccaacttacacttaggagatttca

SEQ ID NO: 2539 - DNA, 34 bp, Artificial Sequence
  Probe
acaaagcacccaacttacacttaggagatttcaa

SEQ ID NO: 2540 - DNA, 35 bp, Artificial Sequence
  Probe
acaaagcacccaacttacacttaggagatttcaac

SEQ ID NO: 2541 - DNA, 39 bp, Artificial Sequence
  Probe
acaaagcacccaacttacacttaggagatttcaacttaa

SEQ ID NO: 2542 - DNA, 41 bp, Artificial Sequence
  Probe
acaaagcacccaacttacacttaggagatttcaacttaact

SEQ ID NO: 2543 - DNA, 43 bp, Artificial Sequence
  Probe
acaaagcacccaacttacacttaggagatttcaacttaacttg

SEQ ID NO: 2544 - DNA, 45 bp, Artificial Sequence
  Probe
acaaagcacccaacttacacttaggagatttcaacttaacttgac

SEQ ID NO: 2545 - DNA, 46 bp, Artificial Sequence
  Probe
acaaagcacccaacttacacttaggagatttcaacttaacttgacc

SEQ ID NO: 2546 - DNA, 49 bp, Artificial Sequence
  Probe
acaaagcacccaacttacacttaggagatttcaacttaacttgaccgct

SEQ ID NO: 2547 - DNA, 15 bp, Artificial Sequence
  Probe
acaacagaggcttac

SEQ ID NO: 2548 - DNA, 16 bp, Artificial Sequence
  Probe
acaacagaggcttacg

SEQ ID NO: 2549 - DNA, 17 bp, Artificial Sequence
  Probe
acaacagaggcttacga

SEQ ID NO: 2550 - DNA, 18 bp, Artificial Sequence
  Probe
acaacagaggcttacgac

SEQ ID NO: 2551 - DNA, 19 bp, Artificial Sequence
  Probe
acaacagaggcttacgacc

SEQ ID NO: 2552 - DNA, 20 bp, Artificial Sequence
  Probe
acaacagaggcttacgaccc

SEQ ID NO: 2553 - DNA, 21 bp, Artificial Sequence
  Probe
acaacagaggcttacgacccc

SEQ ID NO: 2554 - DNA, 22 bp, Artificial Sequence
  Probe
acaacagaggcttacgacccct

SEQ ID NO: 2555 - DNA, 23 bp, Artificial Sequence
  Probe
acaacagaggcttacgacccctt

SEQ ID NO: 2556 - DNA, 24 bp, Artificial Sequence
  Probe
acaacagaggcttacgacccctta

SEQ ID NO: 2557 - DNA, 25 bp, Artificial Sequence
  Probe
acaacagaggcttacgaccccttat

SEQ ID NO: 2558 - DNA, 26 bp, Artificial Sequence
  Probe
acaacagaggcttacgaccccttatt

SEQ ID NO: 2559 - DNA, 27 bp, Artificial Sequence
  Probe
acaacagaggcttacgaccccttattt

SEQ ID NO: 2560 - DNA, 28 bp, Artificial Sequence
  Probe
acaacagaggcttacgaccccttattta

SEQ ID NO: 2561 - DNA, 29 bp, Artificial Sequence
  Probe
acaacagaggcttacgaccccttatttac

SEQ ID NO: 2562 - DNA, 30 bp, Artificial Sequence
  Probe
acaacagaggcttacgaccccttatttacc

SEQ ID NO: 2563 - DNA, 31 bp, Artificial Sequence
  Probe
acaacagaggcttacgaccccttatttaccg

SEQ ID NO: 2564 - DNA, 32 bp, Artificial Sequence
  Probe
acaacagaggcttacgaccccttatttaccga

SEQ ID NO: 2565 - DNA, 33 bp, Artificial Sequence
  Probe
acaacagaggcttacgaccccttatttaccgag

SEQ ID NO: 2566 - DNA, 34 bp, Artificial Sequence
  Probe
acaacagaggcttacgaccccttatttaccgaga

SEQ ID NO: 2567 - DNA, 35 bp, Artificial Sequence
  Probe
acaacagaggcttacgaccccttatttaccgagaa

SEQ ID NO: 2568 - DNA, 36 bp, Artificial Sequence
  Probe
acaacagaggcttacgaccccttatttaccgagaaa

SEQ ID NO: 2569 - DNA, 37 bp, Artificial Sequence
  Probe
acaacagaggcttacgaccccttatttaccgagaaag

SEQ ID NO: 2570 - DNA, 38 bp, Artificial Sequence
  Probe
acaacagaggcttacgaccccttatttaccgagaaagc

SEQ ID NO: 2571 - DNA, 39 bp, Artificial Sequence
  Probe
acaacagaggcttacgaccccttatttaccgagaaagct

SEQ ID NO: 2572 - DNA, 40 bp, Artificial Sequence
  Probe
acaacagaggcttacgaccccttatttaccgagaaagctc

SEQ ID NO: 2573 - DNA, 41 bp, Artificial Sequence
  Probe
acaacagaggcttacgaccccttatttaccgagaaagctca

SEQ ID NO: 2574 - DNA, 42 bp, Artificial Sequence
  Probe
acaacagaggcttacgaccccttatttaccgagaaagctcac

SEQ ID NO: 2575 - DNA, 17 bp, Artificial Sequence
  Probe
acaacatggctttctca

SEQ ID NO: 2576 - DNA, 19 bp, Artificial Sequence
  Probe
acaacatggctttctcaac

SEQ ID NO: 2577 - DNA, 17 bp, Artificial Sequence
  Probe
acaagaactgctaactc

SEQ ID NO: 2578 - DNA, 20 bp, Artificial Sequence
  Probe
acaagaactgctaactcatg

SEQ ID NO: 2579 - DNA, 23 bp, Artificial Sequence
  Probe
acaagaactgctaactcatgccc

SEQ ID NO: 2580 - DNA, 24 bp, Artificial Sequence
  Probe
acaagaactgctaactcatgcccc

SEQ ID NO: 2581 - DNA, 25 bp, Artificial Sequence
  Probe
acaagaactgctaactcatgccccc

SEQ ID NO: 2582 - DNA, 26 bp, Artificial Sequence
  Probe
acaagaactgctaactcatgccccca

SEQ ID NO: 2583 - DNA, 29 bp, Artificial Sequence
  Probe
acaagaactgctaactcatgcccccatgt

SEQ ID NO: 2584 - DNA, 31 bp, Artificial Sequence
  Probe
acaagaactgctaactcatgcccccatgtct

SEQ ID NO: 2585 - DNA, 32 bp, Artificial Sequence
  Probe
acaagaactgctaactcatgcccccatgtcta

SEQ ID NO: 2586 - DNA, 48 bp, Artificial Sequence
  Probe
acaagaactgctaactcatgcccccatgtctaacaacatggctttctc

SEQ ID NO: 2587 - DNA, 49 bp, Artificial Sequence
  Probe
acaagaactgctaactcatgcccccatgtctaacaacatggctttctca

SEQ ID NO: 2588 - DNA, 50 bp, Artificial Sequence
  Probe
acaagaactgctaactcatgcccccatgtctaacaacatggctttctcaa

SEQ ID NO: 2589 - DNA, 16 bp, Artificial Sequence
  Probe
acacaaagcacccaac

SEQ ID NO: 2590 - DNA, 17 bp, Artificial Sequence
  Probe
acacaaagcacccaact

SEQ ID NO: 2591 - DNA, 21 bp, Artificial Sequence
  Probe
acacaaagcacccaacttaca

SEQ ID NO: 2592 - DNA, 23 bp, Artificial Sequence
  Probe
acacaaagcacccaacttacact

SEQ ID NO: 2593 - DNA, 24 bp, Artificial Sequence
  Probe
acacaaagcacccaacttacactt

SEQ ID NO: 2594 - DNA, 25 bp, Artificial Sequence
  Probe
acacaaagcacccaacttacactta

SEQ ID NO: 2595 - DNA, 26 bp, Artificial Sequence
  Probe
acacaaagcacccaacttacacttag

SEQ ID NO: 2596 - DNA, 29 bp, Artificial Sequence
  Probe
acacaaagcacccaacttacacttaggag

SEQ ID NO: 2597 - DNA, 31 bp, Artificial Sequence
  Probe
acacaaagcacccaacttacacttaggagat

SEQ ID NO: 2598 - DNA, 35 bp, Artificial Sequence
  Probe
acacaaagcacccaacttacacttaggagatttca

SEQ ID NO: 2599 - DNA, 37 bp, Artificial Sequence
  Probe
acacaaagcacccaacttacacttaggagatttcaac

SEQ ID NO: 2600 - DNA, 39 bp, Artificial Sequence
  Probe
acacaaagcacccaacttacacttaggagatttcaactt

SEQ ID NO: 2601 - DNA, 43 bp, Artificial Sequence
  Probe
acacaaagcacccaacttacacttaggagatttcaacttaact

SEQ ID NO: 2602 - DNA, 46 bp, Artificial Sequence
  Probe
acaccagtcttgtaaaccggagatgaaaacctttttccaaggacaa

SEQ ID NO: 2603 - DNA, 50 bp, Artificial Sequence
  Probe
acaccagtcttgtaaaccggagatgaaaacctttttccaaggacaaatca

SEQ ID NO: 2604 - DNA, 23 bp, Artificial Sequence
  Probe
acacccacccaagaacagggttt

SEQ ID NO: 2605 - DNA, 24 bp, Artificial Sequence
  Probe
acacccacccaagaacagggtttg

SEQ ID NO: 2606 - DNA, 25 bp, Artificial Sequence
  Probe
acacccacccaagaacagggtttgt

SEQ ID NO: 2607 - DNA, 26 bp, Artificial Sequence
  Probe
acacccacccaagaacagggtttgtt

SEQ ID NO: 2608 - DNA, 27 bp, Artificial Sequence
  Probe
acacccacccaagaacagggtttgtta

SEQ ID NO: 2609 - DNA, 23 bp, Artificial Sequence
  Probe
acacctcagaaggtctcactttt

SEQ ID NO: 2610 - DNA, 18 bp, Artificial Sequence
  Probe
acacctctttacagtgaa

SEQ ID NO: 2611 - DNA, 19 bp, Artificial Sequence
  Probe
acacctctttacagtgaaa

SEQ ID NO: 2612 - DNA, 20 bp, Artificial Sequence
  Probe
acacctctttacagtgaaat

SEQ ID NO: 2613 - DNA, 42 bp, Artificial Sequence
  Probe
acacgcagaaggtcctgggttcgagccccagtggaaccacgg

SEQ ID NO: 2614 - DNA, 24 bp, Artificial Sequence
  Probe
acacgcgaaaggtccccggttcga

SEQ ID NO: 2615 - DNA, 19 bp, Artificial Sequence
  Probe
acacggggcacaataattt

SEQ ID NO: 2616 - DNA, 28 bp, Artificial Sequence
  Probe
acactgaaaatgtttagacgggctcaca

SEQ ID NO: 2617 - DNA, 29 bp, Artificial Sequence
  Probe
acactgaaaatgtttagacgggctcacat

SEQ ID NO: 2618 - DNA, 44 bp, Artificial Sequence
  Probe
acactgaaaatgtttagacgggctcacatcaccccataaacaaa

SEQ ID NO: 2619 - DNA, 45 bp, Artificial Sequence
  Probe
acactgaaaatgtttagacgggctcacatcaccccataaacaaat

SEQ ID NO: 2620 - DNA, 46 bp, Artificial Sequence
  Probe
acactgaaaatgtttagacgggctcacatcaccccataaacaaata

SEQ ID NO: 2621 - DNA, 50 bp, Artificial Sequence
  Probe
acactgaaaatgtttagacgggctcacatcaccccataaacaaataggtt

SEQ ID NO: 2622 - DNA, 17 bp, Artificial Sequence
  Probe
acacttaggagatttca

SEQ ID NO: 2623 - DNA, 19 bp, Artificial Sequence
  Probe
acacttaggagatttcaac

SEQ ID NO: 2624 - DNA, 29 bp, Artificial Sequence
  Probe
acacttaggagatttcaacttaacttgac

SEQ ID NO: 2625 - DNA, 31 bp, Artificial Sequence
  Probe
acacttaggagatttcaacttaacttgaccg

SEQ ID NO: 2626 - DNA, 32 bp, Artificial Sequence
  Probe
acacttaggagatttcaacttaacttgaccgc

SEQ ID NO: 2627 - DNA, 33 bp, Artificial Sequence
  Probe
acacttaggagatttcaacttaacttgaccgct

SEQ ID NO: 2628 - DNA, 34 bp, Artificial Sequence
  Probe
acacttaggagatttcaacttaacttgaccgctc

SEQ ID NO: 2629 - DNA, 37 bp, Artificial Sequence
  Probe
acacttaggagatttcaacttaacttgaccgctctga

SEQ ID NO: 2630 - DNA, 38 bp, Artificial Sequence
  Probe
acacttaggagatttcaacttaacttgaccgctctgag

SEQ ID NO: 2631 - DNA, 39 bp, Artificial Sequence
  Probe
acacttaggagatttcaacttaacttgaccgctctgagc

SEQ ID NO: 2632 - DNA, 40 bp, Artificial Sequence
  Probe
acacttaggagatttcaacttaacttgaccgctctgagct

SEQ ID NO: 2633 - DNA, 41 bp, Artificial Sequence
  Probe
acacttaggagatttcaacttaacttgaccgctctgagcta

SEQ ID NO: 2634 - DNA, 42 bp, Artificial Sequence
  Probe
acacttaggagatttcaacttaacttgaccgctctgagctaa

SEQ ID NO: 2635 - DNA, 43 bp, Artificial Sequence
  Probe
acacttaggagatttcaacttaacttgaccgctctgagctaaa

SEQ ID NO: 2636 - DNA, 17 bp, Artificial Sequence
  Probe
acagaccaagagccttc

SEQ ID NO: 2637 - DNA, 24 bp, Artificial Sequence
  Probe
acagaccaagagccttcaaagccc

SEQ ID NO: 2638 - DNA, 28 bp, Artificial Sequence
  Probe
acagaggcttacgaccccttatttaccg

SEQ ID NO: 2639 - DNA, 29 bp, Artificial Sequence
  Probe
acagaggcttacgaccccttatttaccga

SEQ ID NO: 2640 - DNA, 30 bp, Artificial Sequence
  Probe
acagaggcttacgaccccttatttaccgag

SEQ ID NO: 2641 - DNA, 16 bp, Artificial Sequence
  Probe
acagctatccattggt

SEQ ID NO: 2642 - DNA, 18 bp, Artificial Sequence
  Probe
acagctatccattggtct

SEQ ID NO: 2643 - DNA, 49 bp, Artificial Sequence
  Probe
acagctatccattggtcttaggccccaaaaattttggtgcaactccaaa

SEQ ID NO: 2644 - DNA, 50 bp, Artificial Sequence
  Probe
acagctatccattggtcttaggccccaaaaattttggtgcaactccaaat

SEQ ID NO: 2645 - DNA, 33 bp, Artificial Sequence
  Probe
acaggagatcctgggttcgaatcccagcggtgc

SEQ ID NO: 2646 - DNA, 35 bp, Artificial Sequence
  Probe
acaggagatcctgggttcgaatcccagcggtgcct

SEQ ID NO: 2647 - DNA, 37 bp, Artificial Sequence
  Probe
acaggagatcctgggttcgaatcccagcggtgcctcc

SEQ ID NO: 2648 - DNA, 38 bp, Artificial Sequence
  Probe
acaggagatcctgggttcgaatcccagcggtgcctccg

SEQ ID NO: 2649 - DNA, 23 bp, Artificial Sequence
  Probe
acagtcagaggttcaattcctct

SEQ ID NO: 2650 - DNA, 24 bp, Artificial Sequence
  Probe
acagtcagaggttcaattcctctt

SEQ ID NO: 2651 - DNA, 26 bp, Artificial Sequence
  Probe
acagtcagaggttcaattcctcttct

SEQ ID NO: 2652 - DNA, 27 bp, Artificial Sequence
  Probe
acagtcagaggttcaattcctcttctt

SEQ ID NO: 2653 - DNA, 28 bp, Artificial Sequence
  Probe
acagtcagaggttcaattcctcttctta

SEQ ID NO: 2654 - DNA, 31 bp, Artificial Sequence
  Probe
acagtcagaggttcaattcctcttcttaaca

SEQ ID NO: 2655 - DNA, 33 bp, Artificial Sequence
  Probe
acagtcagaggttcaattcctcttcttaacaac

SEQ ID NO: 2656 - DNA, 34 bp, Artificial Sequence
  Probe
acagtcagaggttcaattcctcttcttaacaaca

SEQ ID NO: 2657 - DNA, 19 bp, Artificial Sequence
  Probe
acatacccatggccaacct

SEQ ID NO: 2658 - DNA, 20 bp, Artificial Sequence
  Probe
acatacccatggccaacctc

SEQ ID NO: 2659 - DNA, 21 bp, Artificial Sequence
  Probe
acatacccatggccaacctcc

SEQ ID NO: 2660 - DNA, 22 bp, Artificial Sequence
  Probe
acatacccatggccaacctcct

SEQ ID NO: 2661 - DNA, 23 bp, Artificial Sequence
  Probe
acatacccatggccaacctccta

SEQ ID NO: 2662 - DNA, 24 bp, Artificial Sequence
  Probe
acatacccatggccaacctcctac

SEQ ID NO: 2663 - DNA, 25 bp, Artificial Sequence
  Probe
acatacccatggccaacctcctact

SEQ ID NO: 2664 - DNA, 26 bp, Artificial Sequence
  Probe
acatacccatggccaacctcctactc

SEQ ID NO: 2665 - DNA, 27 bp, Artificial Sequence
  Probe
acatacccatggccaacctcctactcc

SEQ ID NO: 2666 - DNA, 28 bp, Artificial Sequence
  Probe
acatacccatggccaacctcctactcct

SEQ ID NO: 2667 - DNA, 29 bp, Artificial Sequence
  Probe
acatacccatggccaacctcctactcctc

SEQ ID NO: 2668 - DNA, 30 bp, Artificial Sequence
  Probe
acatacccatggccaacctcctactcctca

SEQ ID NO: 2669 - DNA, 20 bp, Artificial Sequence
  Probe
acatatgtccgcgtgggttc

SEQ ID NO: 2670 - DNA, 16 bp, Artificial Sequence
  Probe
acatcaccccataaac

SEQ ID NO: 2671 - DNA, 17 bp, Artificial Sequence
  Probe
acatcaccccataaaca

SEQ ID NO: 2672 - DNA, 18 bp, Artificial Sequence
  Probe
acatcaccccataaacaa

SEQ ID NO: 2673 - DNA, 19 bp, Artificial Sequence
  Probe
acatcaccccataaacaaa

SEQ ID NO: 2674 - DNA, 20 bp, Artificial Sequence
  Probe
acatcaccccataaacaaat

SEQ ID NO: 2675 - DNA, 22 bp, Artificial Sequence
  Probe
acatcagattgtgaatctgaca

SEQ ID NO: 2676 - DNA, 31 bp, Artificial Sequence
  Probe
acatcagattgtgaatctgacaacagaggct

SEQ ID NO: 2677 - DNA, 32 bp, Artificial Sequence
  Probe
acatcagattgtgaatctgacaacagaggctt

SEQ ID NO: 2678 - DNA, 33 bp, Artificial Sequence
  Probe
acatcagattgtgaatctgacaacagaggctta

SEQ ID NO: 2679 - DNA, 39 bp, Artificial Sequence
  Probe
acatcagattgtgaatctgacaacagaggcttacgaccc

SEQ ID NO: 2680 - DNA, 40 bp, Artificial Sequence
  Probe
acatcagattgtgaatctgacaacagaggcttacgacccc

SEQ ID NO: 2681 - DNA, 41 bp, Artificial Sequence
  Probe
acatcagattgtgaatctgacaacagaggcttacgacccct

SEQ ID NO: 2682 - DNA, 44 bp, Artificial Sequence
  Probe
acatcagattgtgaatctgacaacagaggcttacgaccccttat

SEQ ID NO: 2683 - DNA, 45 bp, Artificial Sequence
  Probe
acatcagattgtgaatctgacaacagaggcttacgaccccttatt

SEQ ID NO: 2684 - DNA, 46 bp, Artificial Sequence
  Probe
acatcagattgtgaatctgacaacagaggcttacgaccccttattt

SEQ ID NO: 2685 - DNA, 50 bp, Artificial Sequence
  Probe
acatcagattgtgaatctgacaacagaggcttacgaccccttatttaccg

SEQ ID NO: 2686 - DNA, 25 bp, Artificial Sequence
  Probe
acatgcagcgcaagtaggtctacaa

SEQ ID NO: 2687 - DNA, 25 bp, Artificial Sequence
  Probe
acatggtctagcggttaggattcct

SEQ ID NO: 2688 - DNA, 29 bp, Artificial Sequence
  Probe
acatggtctagcggttaggattcctggtt

SEQ ID NO: 2689 - DNA, 30 bp, Artificial Sequence
  Probe
acatggtctagcggttaggattcctggttt

SEQ ID NO: 2690 - DNA, 31 bp, Artificial Sequence
  Probe
acatggtctagcggttaggattcctggtttt

SEQ ID NO: 2691 - DNA, 33 bp, Artificial Sequence
  Probe
acatggtctagcggttaggattcctggttttca

SEQ ID NO: 2692 - DNA, 28 bp, Artificial Sequence
  Probe
accaaaacatcagattgtgaatctgaca

SEQ ID NO: 2693 - DNA, 29 bp, Artificial Sequence
  Probe
accaaaacatcagattgtgaatctgacaa

SEQ ID NO: 2694 - DNA, 30 bp, Artificial Sequence
  Probe
accaaaacatcagattgtgaatctgacaac

SEQ ID NO: 2695 - DNA, 31 bp, Artificial Sequence
  Probe
accaaaacatcagattgtgaatctgacaaca

SEQ ID NO: 2696 - DNA, 35 bp, Artificial Sequence
  Probe
accaaaacatcagattgtgaatctgacaacagagg

SEQ ID NO: 2697 - DNA, 37 bp, Artificial Sequence
  Probe
accaaaacatcagattgtgaatctgacaacagaggct

SEQ ID NO: 2698 - DNA, 38 bp, Artificial Sequence
  Probe
accaaaacatcagattgtgaatctgacaacagaggctt

SEQ ID NO: 2699 - DNA, 40 bp, Artificial Sequence
  Probe
accaaaacatcagattgtgaatctgacaacagaggcttac

SEQ ID NO: 2700 - DNA, 45 bp, Artificial Sequence
  Probe
accaaaacatcagattgtgaatctgacaacagaggcttacgaccc

SEQ ID NO: 2701 - DNA, 48 bp, Artificial Sequence
  Probe
accaaaacatcagattgtgaatctgacaacagaggcttacgacccctt

SEQ ID NO: 2702 - DNA, 21 bp, Artificial Sequence
  Probe
accaacacctctttacagtga

SEQ ID NO: 2703 - DNA, 23 bp, Artificial Sequence
  Probe
accaacacctctttacagtgaaa

SEQ ID NO: 2704 - DNA, 24 bp, Artificial Sequence
  Probe
accaacacctctttacagtgaaat

SEQ ID NO: 2705 - DNA, 25 bp, Artificial Sequence
  Probe
accaacacctctttacagtgaaatg

SEQ ID NO: 2706 - DNA, 17 bp, Artificial Sequence
  Probe
accaagagccttcaaag

SEQ ID NO: 2707 - DNA, 23 bp, Artificial Sequence
  Probe
accagaatggccgagtggttaag

SEQ ID NO: 2708 - DNA, 17 bp, Artificial Sequence
  Probe
accagctttggggggtt

SEQ ID NO: 2709 - DNA, 18 bp, Artificial Sequence
  Probe
accagctttggggggttc

SEQ ID NO: 2710 - DNA, 19 bp, Artificial Sequence
  Probe
accagctttggggggttcg

SEQ ID NO: 2711 - DNA, 20 bp, Artificial Sequence
  Probe
accagctttggggggttcga

SEQ ID NO: 2712 - DNA, 29 bp, Artificial Sequence
  Probe
accagctttggggggttcgattccttcct

SEQ ID NO: 2713 - DNA, 31 bp, Artificial Sequence
  Probe
accagctttggggggttcgattccttccttt

SEQ ID NO: 2714 - DNA, 32 bp, Artificial Sequence
  Probe
accagctttggggggttcgattccttcctttt

SEQ ID NO: 2715 - DNA, 33 bp, Artificial Sequence
  Probe
accagctttggggggttcgattccttccttttt

SEQ ID NO: 2716 - DNA, 34 bp, Artificial Sequence
  Probe
accagctttggggggttcgattccttcctttttt

SEQ ID NO: 2717 - DNA, 35 bp, Artificial Sequence
  Probe
accagctttggggggttcgattccttccttttttg

SEQ ID NO: 2718 - DNA, 36 bp, Artificial Sequence
  Probe
accagctttggggggttcgattccttccttttttgt

SEQ ID NO: 2719 - DNA, 37 bp, Artificial Sequence
  Probe
accagctttggggggttcgattccttccttttttgtc

SEQ ID NO: 2720 - DNA, 38 bp, Artificial Sequence
  Probe
accagctttggggggttcgattccttccttttttgtct

SEQ ID NO: 2721 - DNA, 39 bp, Artificial Sequence
  Probe
accagctttggggggttcgattccttccttttttgtcta

SEQ ID NO: 2722 - DNA, 21 bp, Artificial Sequence
  Probe
accaggatggccgagtggtta

SEQ ID NO: 2723 - DNA, 22 bp, Artificial Sequence
  Probe
accaggatggccgagtggttaa

SEQ ID NO: 2724 - DNA, 25 bp, Artificial Sequence
  Probe
accaggatggccgagtggttaaggc

SEQ ID NO: 2725 - DNA, 19 bp, Artificial Sequence
  Probe
accaggggtcgcgagttca

SEQ ID NO: 2726 - DNA, 37 bp, Artificial Sequence
  Probe
accaggggtcgcgagttcaaatctcgctggggcctcg

SEQ ID NO: 2727 - DNA, 38 bp, Artificial Sequence
  Probe
accaggggtcgcgagttcaaatctcgctggggcctcgg

SEQ ID NO: 2728 - DNA, 38 bp, Artificial Sequence
  Probe
accaggggtcgcgagttcaattctcgctggggcctgtg

SEQ ID NO: 2729 - DNA, 46 bp, Artificial Sequence
  Probe
accagtcttgtaaaccggagatgaaaacctttttccaaggacaaat

SEQ ID NO: 2730 - DNA, 24 bp, Artificial Sequence
  Probe
accatttcataactttgtcaaagt

SEQ ID NO: 2731 - DNA, 20 bp, Artificial Sequence
  Probe
acccaacttacacttaggag

SEQ ID NO: 2732 - DNA, 21 bp, Artificial Sequence
  Probe
acccaacttacacttaggaga

SEQ ID NO: 2733 - DNA, 22 bp, Artificial Sequence
  Probe
acccaacttacacttaggagat

SEQ ID NO: 2734 - DNA, 23 bp, Artificial Sequence
  Probe
acccaacttacacttaggagatt

SEQ ID NO: 2735 - DNA, 25 bp, Artificial Sequence
  Probe
acccaacttacacttaggagatttc

SEQ ID NO: 2736 - DNA, 26 bp, Artificial Sequence
  Probe
acccaacttacacttaggagatttca

SEQ ID NO: 2737 - DNA, 28 bp, Artificial Sequence
  Probe
acccaacttacacttaggagatttcaac

SEQ ID NO: 2738 - DNA, 29 bp, Artificial Sequence
  Probe
acccaacttacacttaggagatttcaact

SEQ ID NO: 2739 - DNA, 30 bp, Artificial Sequence
  Probe
acccaacttacacttaggagatttcaactt

SEQ ID NO: 2740 - DNA, 31 bp, Artificial Sequence
  Probe
acccaacttacacttaggagatttcaactta

SEQ ID NO: 2741 - DNA, 33 bp, Artificial Sequence
  Probe
acccaacttacacttaggagatttcaacttaac

SEQ ID NO: 2742 - DNA, 38 bp, Artificial Sequence
  Probe
acccaacttacacttaggagatttcaacttaacttgac

SEQ ID NO: 2743 - DNA, 40 bp, Artificial Sequence
  Probe
acccaacttacacttaggagatttcaacttaacttgaccg

SEQ ID NO: 2744 - DNA, 42 bp, Artificial Sequence
  Probe
acccaacttacacttaggagatttcaacttaacttgaccgct

SEQ ID NO: 2745 - DNA, 43 bp, Artificial Sequence
  Probe
acccaacttacacttaggagatttcaacttaacttgaccgctc

SEQ ID NO: 2746 - DNA, 45 bp, Artificial Sequence
  Probe
acccaacttacacttaggagatttcaacttaacttgaccgctctg

SEQ ID NO: 2747 - DNA, 46 bp, Artificial Sequence
  Probe
acccaacttacacttaggagatttcaacttaacttgaccgctctga

SEQ ID NO: 2748 - DNA, 49 bp, Artificial Sequence
  Probe
acccaacttacacttaggagatttcaacttaacttgaccgctctgagct

SEQ ID NO: 2749 - DNA, 50 bp, Artificial Sequence
  Probe
acccaacttacacttaggagatttcaacttaacttgaccgctctgagcta

SEQ ID NO: 2750 - DNA, 25 bp, Artificial Sequence
  Probe
acccacacccacccaagaacagggt

SEQ ID NO: 2751 - DNA, 26 bp, Artificial Sequence
  Probe
acccacacccacccaagaacagggtt

SEQ ID NO: 2752 - DNA, 27 bp, Artificial Sequence
  Probe
acccacacccacccaagaacagggttt

SEQ ID NO: 2753 - DNA, 28 bp, Artificial Sequence
  Probe
acccacacccacccaagaacagggtttg

SEQ ID NO: 2754 - DNA, 29 bp, Artificial Sequence
  Probe
acccacacccacccaagaacagggtttgt

SEQ ID NO: 2755 - DNA, 31 bp, Artificial Sequence
  Probe
acccacacccacccaagaacagggtttgtta

SEQ ID NO: 2756 - DNA, 22 bp, Artificial Sequence
  Probe
acccacccaagaacagggtttg

SEQ ID NO: 2757 - DNA, 23 bp, Artificial Sequence
  Probe
acccacccaagaacagggtttgt

SEQ ID NO: 2758 - DNA, 25 bp, Artificial Sequence
  Probe
acccacccaagaacagggtttgtta

SEQ ID NO: 2759 - DNA, 19 bp, Artificial Sequence
  Probe
acccagaggtcgatggatc

SEQ ID NO: 2760 - DNA, 39 bp, Artificial Sequence
  Probe
acccagaggtcgatggatcgaaaccatcctctgctaggt

SEQ ID NO: 2761 - DNA, 38 bp, Artificial Sequence
  Probe
acccagaggtcgatggatcgaaaccatcctctgctatc

SEQ ID NO: 2762 - DNA, 33 bp, Artificial Sequence
  Probe
acccagatagctcagtcagtagagcatcagact

SEQ ID NO: 2763 - DNA, 33 bp, Artificial Sequence
  Probe
acccaggcggcccgggttcgactcccggtgtgg

SEQ ID NO: 2764 - DNA, 39 bp, Artificial Sequence
  Probe
acccaggcggcccgggttcgactcccggtgtgggaacgc

SEQ ID NO: 2765 - DNA, 36 bp, Artificial Sequence
  Probe
acccaggtggcccgggttcgactcccggtatgggaa

SEQ ID NO: 2766 - DNA, 39 bp, Artificial Sequence
  Probe
acccaggtggcccgggttcgactcccggtatgggaacaa

SEQ ID NO: 2767 - DNA, 27 bp, Artificial Sequence
  Probe
accccgaaaatgttggttatacccttc

SEQ ID NO: 2768 - DNA, 29 bp, Artificial Sequence
  Probe
accccgaaaatgttggttatacccttccc

SEQ ID NO: 2769 - DNA, 30 bp, Artificial Sequence
  Probe
accccgaaaatgttggttatacccttcccg

SEQ ID NO: 2770 - DNA, 31 bp, Artificial Sequence
  Probe
accccgaaaatgttggttatacccttcccgt

SEQ ID NO: 2771 - DNA, 36 bp, Artificial Sequence
  Probe
accccgaaaatgttggttatacccttcccgtactaa

SEQ ID NO: 2772 - DNA, 37 bp, Artificial Sequence
  Probe
accccgaaaatgttggttatacccttcccgtactaat

SEQ ID NO: 2773 - DNA, 38 bp, Artificial Sequence
  Probe
accccgaaaatgttggttatacccttcccgtactaatt

SEQ ID NO: 2774 - DNA, 22 bp, Artificial Sequence
  Probe
accccgacatcattaccgggtt

SEQ ID NO: 2775 - DNA, 23 bp, Artificial Sequence
  Probe
accccgacatcattaccgggttt

SEQ ID NO: 2776 - DNA, 24 bp, Artificial Sequence
  Probe
accccgacatcattaccgggtttt

SEQ ID NO: 2777 - DNA, 25 bp, Artificial Sequence
  Probe
accccgacatcattaccgggttttc

SEQ ID NO: 2778 - DNA, 26 bp, Artificial Sequence
  Probe
accccgacatcattaccgggttttcc

SEQ ID NO: 2779 - DNA, 27 bp, Artificial Sequence
  Probe
accccgacatcattaccgggttttcct

SEQ ID NO: 2780 - DNA, 28 bp, Artificial Sequence
  Probe
accccgacatcattaccgggttttcctc

SEQ ID NO: 2781 - DNA, 29 bp, Artificial Sequence
  Probe
accccgacatcattaccgggttttcctct

SEQ ID NO: 2782 - DNA, 30 bp, Artificial Sequence
  Probe
accccgacatcattaccgggttttcctctt

SEQ ID NO: 2783 - DNA, 18 bp, Artificial Sequence
  Probe
accctgtggtctagtggt

SEQ ID NO: 2784 - DNA, 22 bp, Artificial Sequence
  Probe
accctgtggtctagtggttagg

SEQ ID NO: 2785 - DNA, 23 bp, Artificial Sequence
  Probe
accctgtggtctagtggttagga

SEQ ID NO: 2786 - DNA, 23 bp, Artificial Sequence
  Probe
accgaaaggttggtggttcgagc

SEQ ID NO: 2787 - DNA, 39 bp, Artificial Sequence
  Probe
accgaaaggttggtggttcgagcccacccagggacgcct

SEQ ID NO: 2788 - DNA, 19 bp, Artificial Sequence
  Probe
accgaagatcacgggttcg

SEQ ID NO: 2789 - DNA, 17 bp, Artificial Sequence
  Probe
accgaagatcgcgggtt

SEQ ID NO: 2790 - DNA, 18 bp, Artificial Sequence
  Probe
accgaagatcgcgggttc

SEQ ID NO: 2791 - DNA, 39 bp, Artificial Sequence
  Probe
accgccgcagcccgggttcgattcccggtcatggaacca

SEQ ID NO: 2792 - DNA, 37 bp, Artificial Sequence
  Probe
accgccgcggcccgggttcgattcccggtcagggaaa

SEQ ID NO: 2793 - DNA, 37 bp, Artificial Sequence
  Probe
accgccgcggcccgggttcgattcccggtcagggaag

SEQ ID NO: 2794 - DNA, 39 bp, Artificial Sequence
  Probe
accgccgcggcccgggttcgattcccggtcagggaagcc

SEQ ID NO: 2795 - DNA, 39 bp, Artificial Sequence
  Probe
accgccgcggcccgggttcgattcccggtcagggaagtt

SEQ ID NO: 2796 - DNA, 37 bp, Artificial Sequence
  Probe
accgccgcggcccgggttcgattcccggtcagggaat

SEQ ID NO: 2797 - DNA, 39 bp, Artificial Sequence
  Probe
accgccgcggcccgggttcgattcccggtcagggaattg

SEQ ID NO: 2798 - DNA, 19 bp, Artificial Sequence
  Probe
accggagatgaaaaccttt

SEQ ID NO: 2799 - DNA, 24 bp, Artificial Sequence
  Probe
accggagatgaaaacctttttcca

SEQ ID NO: 2800 - DNA, 25 bp, Artificial Sequence
  Probe
accggagatgaaaacctttttccaa

SEQ ID NO: 2801 - DNA, 27 bp, Artificial Sequence
  Probe
accggagatgaaaacctttttccaagg

SEQ ID NO: 2802 - DNA, 31 bp, Artificial Sequence
  Probe
accggagatgaaaacctttttccaaggacaa

SEQ ID NO: 2803 - DNA, 32 bp, Artificial Sequence
  Probe
accggagatgaaaacctttttccaaggacaaa

SEQ ID NO: 2804 - DNA, 33 bp, Artificial Sequence
  Probe
accggagatgaaaacctttttccaaggacaaat

SEQ ID NO: 2805 - DNA, 34 bp, Artificial Sequence
  Probe
accggagatgaaaacctttttccaaggacaaatc

SEQ ID NO: 2806 - DNA, 17 bp, Artificial Sequence
  Probe
accgggcggaaacacct

SEQ ID NO: 2807 - DNA, 19 bp, Artificial Sequence
  Probe
accgggcggaaacacctcc

SEQ ID NO: 2808 - DNA, 30 bp, Artificial Sequence
  Probe
accggggttcaattccccgacggggaggtg

SEQ ID NO: 2809 - DNA, 29 bp, Artificial Sequence
  Probe
accggggttcgattccccgacggggagac

SEQ ID NO: 2810 - DNA, 29 bp, Artificial Sequence
  Probe
accggggttcgattccccgacggggaggc

SEQ ID NO: 2811 - DNA, 30 bp, Artificial Sequence
  Probe
accggggttcgattccccgacggggaggca

SEQ ID NO: 2812 - DNA, 24 bp, Artificial Sequence
  Probe
accgttaacttccaattaactagt

SEQ ID NO: 2813 - DNA, 25 bp, Artificial Sequence
  Probe
accgttaacttccaattaactagtt

SEQ ID NO: 2814 - DNA, 31 bp, Artificial Sequence
  Probe
accgttaacttccaattaactagttttgaca

SEQ ID NO: 2815 - DNA, 50 bp, Artificial Sequence
  Probe
accgttaacttccaattaactagttttgacaacattcaaaaaagagtaat

SEQ ID NO: 2816 - DNA, 25 bp, Artificial Sequence
  Probe
acctagccccaaacccactccacct

SEQ ID NO: 2817 - DNA, 15 bp, Artificial Sequence
  Probe
acctattctcaaact

SEQ ID NO: 2818 - DNA, 16 bp, Artificial Sequence
  Probe
acctattctcaaactt

SEQ ID NO: 2819 - DNA, 17 bp, Artificial Sequence
  Probe
acctattctcaaacttt

SEQ ID NO: 2820 - DNA, 18 bp, Artificial Sequence
  Probe
acctattctcaaacttta

SEQ ID NO: 2821 - DNA, 20 bp, Artificial Sequence
  Probe
acctattctcaaactttaaa

SEQ ID NO: 2822 - DNA, 21 bp, Artificial Sequence
  Probe
acctattctcaaactttaaat

SEQ ID NO: 2823 - DNA, 22 bp, Artificial Sequence
  Probe
acctattctcaaactttaaatg

SEQ ID NO: 2824 - DNA, 23 bp, Artificial Sequence
  Probe
acctattctcaaactttaaatgg

SEQ ID NO: 2825 - DNA, 26 bp, Artificial Sequence
  Probe
acctattctcaaactttaaatgggca

SEQ ID NO: 2826 - DNA, 27 bp, Artificial Sequence
  Probe
acctattctcaaactttaaatgggcaa

SEQ ID NO: 2827 - DNA, 32 bp, Artificial Sequence
  Probe
acctattctcaaactttaaatgggcaagaagc

SEQ ID NO: 2828 - DNA, 33 bp, Artificial Sequence
  Probe
acctattctcaaactttaaatgggcaagaagcc

SEQ ID NO: 2829 - DNA, 36 bp, Artificial Sequence
  Probe
acctattctcaaactttaaatgggcaagaagcccag

SEQ ID NO: 2830 - DNA, 37 bp, Artificial Sequence
  Probe
acctattctcaaactttaaatgggcaagaagcccagc

SEQ ID NO: 2831 - DNA, 39 bp, Artificial Sequence
  Probe
acctattctcaaactttaaatgggcaagaagcccagcta

SEQ ID NO: 2832 - DNA, 20 bp, Artificial Sequence
  Probe
acctcagaaggtctcacttt

SEQ ID NO: 2833 - DNA, 21 bp, Artificial Sequence
  Probe
acctcagaaggtctcactttt

SEQ ID NO: 2834 - DNA, 25 bp, Artificial Sequence
  Probe
acctcagagggggcagctgccattt

SEQ ID NO: 2835 - DNA, 22 bp, Artificial Sequence
  Probe
acctcctcaaagcaatacactg

SEQ ID NO: 2836 - DNA, 23 bp, Artificial Sequence
  Probe
acctcctcaaagcaatacactga

SEQ ID NO: 2837 - DNA, 24 bp, Artificial Sequence
  Probe
acctcctcaaagcaatacactgaa

SEQ ID NO: 2838 - DNA, 40 bp, Artificial Sequence
  Probe
acctcctcaaagcaatacactgaaaatgtttagacgggct

SEQ ID NO: 2839 - DNA, 46 bp, Artificial Sequence
  Probe
accttttaagttaaagattaagagaaccaacacctctttacagtga

SEQ ID NO: 2840 - DNA, 50 bp, Artificial Sequence
  Probe
accttttaagttaaagattaagagaaccaacacctctttacagtgaaatg

SEQ ID NO: 2841 - DNA, 50 bp, Artificial Sequence
  Probe
acgaatgatttcgactcattaaattatgataatcatatttaccaaatgcc

SEQ ID NO: 2842 - DNA, 18 bp, Artificial Sequence
  Probe
acgaccccttatttaccg

SEQ ID NO: 2843 - DNA, 50 bp, Artificial Sequence
  Probe
acgatggtttttcatatcattggtcgtggttgtagtccgtgcgagaataa

SEQ ID NO: 2844 - DNA, 36 bp, Artificial Sequence
  Probe
acgcagaaggtcctgggttcgagccccagtggaacc

SEQ ID NO: 2845 - DNA, 39 bp, Artificial Sequence
  Probe
acgcagaaggtcctgggttcgagccccagtggaaccacg

SEQ ID NO: 2846 - DNA, 40 bp, Artificial Sequence
  Probe
acgcagaaggtcctgggttcgagccccagtggaaccacgg

SEQ ID NO: 2847 - DNA, 40 bp, Artificial Sequence
  Probe
acgcagaaggtcctgggttcgagccccagtggaaccatag

SEQ ID NO: 2848 - DNA, 18 bp, Artificial Sequence
  Probe
acgccaaggtcgcgggtt

SEQ ID NO: 2849 - DNA, 39 bp, Artificial Sequence
  Probe
acgccaaggtcgcgggttcgatccccgtacgggccacga

SEQ ID NO: 2850 - DNA, 39 bp, Artificial Sequence
  Probe
acgccaaggtcgcgggttcgatccccgtacgggccactg

SEQ ID NO: 2851 - DNA, 39 bp, Artificial Sequence
  Probe
acgccaaggtcgcgggttcgatccccgtacgggccagga

SEQ ID NO: 2852 - DNA, 39 bp, Artificial Sequence
  Probe
acgccaaggtcgcgggttcgatccccgtacgggccaggc

SEQ ID NO: 2853 - DNA, 39 bp, Artificial Sequence
  Probe
acgccaaggtcgcgggttcgatccccgtactggccacgt

SEQ ID NO: 2854 - DNA, 40 bp, Artificial Sequence
  Probe
acgcgaaaggtccccggttcgaaaccgggcggaaacacct

SEQ ID NO: 2855 - DNA, 40 bp, Artificial Sequence
  Probe
acgcgaaaggtccccggttcgatcccgggcggaaacaggt

SEQ ID NO: 2856 - DNA, 40 bp, Artificial Sequence
  Probe
acgcgaaaggtccctggatcaaaaccaggcggaaacaagt

SEQ ID NO: 2857 - DNA, 19 bp, Artificial Sequence
  Probe
acgcgggagaccggggttc

SEQ ID NO: 2858 - DNA, 29 bp, Artificial Sequence
  Probe
acgcgggagaccggggttcaattccccga

SEQ ID NO: 2859 - DNA, 37 bp, Artificial Sequence
  Probe
acgcgggagaccggggttcaattccccgacggggagg

SEQ ID NO: 2860 - DNA, 38 bp, Artificial Sequence
  Probe
acgcgggagaccggggttcaattccccgacggggaggt

SEQ ID NO: 2861 - DNA, 39 bp, Artificial Sequence
  Probe
acgcgggagaccggggttcaattccccgacggggaggtg

SEQ ID NO: 2862 - DNA, 40 bp, Artificial Sequence
  Probe
acgcgggagaccggggttcaattccccgacggggaggtgt

SEQ ID NO: 2863 - DNA, 23 bp, Artificial Sequence
  Probe
acgcgggagaccggggttcgatt

SEQ ID NO: 2864 - DNA, 39 bp, Artificial Sequence
  Probe
acgcgggagaccggggttcgattccccaacggggaggct

SEQ ID NO: 2865 - DNA, 37 bp, Artificial Sequence
  Probe
acgcgggagaccggggttcgattccccgacggggaga

SEQ ID NO: 2866 - DNA, 38 bp, Artificial Sequence
  Probe
acgcgggagaccggggttcgattccccgacggggagaa

SEQ ID NO: 2867 - DNA, 39 bp, Artificial Sequence
  Probe
acgcgggagaccggggttcgattccccgacggggagaaa

SEQ ID NO: 2868 - DNA, 49 bp, Artificial Sequence
  Probe
acgcgggagaccggggttcgattccccgacggggagaaaagttgctttt

SEQ ID NO: 2869 - DNA, 38 bp, Artificial Sequence
  Probe
acgcgggagaccggggttcgattccccgacggggagac

SEQ ID NO: 2870 - DNA, 39 bp, Artificial Sequence
  Probe
acgcgggagaccggggttcgattccccgacggggagacg

SEQ ID NO: 2871 - DNA, 39 bp, Artificial Sequence
  Probe
acgcgggagaccggggttcgattccccgacggggagagt

SEQ ID NO: 2872 - DNA, 37 bp, Artificial Sequence
  Probe
acgcgggagaccggggttcgattccccgacggggagg

SEQ ID NO: 2873 - DNA, 38 bp, Artificial Sequence
  Probe
acgcgggagaccggggttcgattccccgacggggaggc

SEQ ID NO: 2874 - DNA, 39 bp, Artificial Sequence
  Probe
acgcgggagaccggggttcgattccccgacggggaggca

SEQ ID NO: 2875 - DNA, 47 bp, Artificial Sequence
  Probe
acgcgggagaccggggttcgattccccgacggggaggcacagtaatt

SEQ ID NO: 2876 - DNA, 49 bp, Artificial Sequence
  Probe
acgcgggagaccggggttcgattccccgacggggaggcacagtaattgt

SEQ ID NO: 2877 - DNA, 39 bp, Artificial Sequence
  Probe
acgcgggagaccggggttcgattccccgacggggaggcc

SEQ ID NO: 2878 - DNA, 50 bp, Artificial Sequence
  Probe
acgcgggagaccggggttcgattccccgacggggaggccgggtactttcg

SEQ ID NO: 2879 - DNA, 17 bp, Artificial Sequence
  Probe
acgcgggaggcccgggt

SEQ ID NO: 2880 - DNA, 36 bp, Artificial Sequence
  Probe
acgcgggaggcccgggttcgattcccggccaatgca

SEQ ID NO: 2881 - DNA, 39 bp, Artificial Sequence
  Probe
acgcgggaggcccgggttcgattcccggccaatgcaagt

SEQ ID NO: 2882 - DNA, 39 bp, Artificial Sequence
  Probe
acgcgggaggcccgggttcgattcccggccaatgcacga

SEQ ID NO: 2883 - DNA, 39 bp, Artificial Sequence
  Probe
acgcgggaggcccgggttcgattcccggccaatgcagca

SEQ ID NO: 2884 - DNA, 34 bp, Artificial Sequence
  Probe
acgcgggaggcccgggttcgattcccggcccatg

SEQ ID NO: 2885 - DNA, 38 bp, Artificial Sequence
  Probe
acgcgggaggcccgggttcgattcccggcccatgcagc

SEQ ID NO: 2886 - DNA, 39 bp, Artificial Sequence
  Probe
acgcgggaggcccgggttcgattcccggcccatgcagca

SEQ ID NO: 2887 - DNA, 23 bp, Artificial Sequence
  Probe
acgcgtgggttcgaatcccatcc

SEQ ID NO: 2888 - DNA, 21 bp, Artificial Sequence
  Probe
acgggctcacatcaccccata

SEQ ID NO: 2889 - DNA, 22 bp, Artificial Sequence
  Probe
acgggctcacatcaccccataa

SEQ ID NO: 2890 - DNA, 25 bp, Artificial Sequence
  Probe
acgggctcacatcaccccataaaca

SEQ ID NO: 2891 - DNA, 27 bp, Artificial Sequence
  Probe
acgggctcacatcaccccataaacaaa

SEQ ID NO: 2892 - DNA, 28 bp, Artificial Sequence
  Probe
acgggctcacatcaccccataaacaaat

SEQ ID NO: 2893 - DNA, 19 bp, Artificial Sequence
  Probe
actaagtgtttgtgggttt

SEQ ID NO: 2894 - DNA, 36 bp, Artificial Sequence
  Probe
actaagtgtttgtgggtttaagtcccattggtctag

SEQ ID NO: 2895 - DNA, 37 bp, Artificial Sequence
  Probe
actaagtgtttgtgggtttaagtcccattggtctagt

SEQ ID NO: 2896 - DNA, 38 bp, Artificial Sequence
  Probe
actaagtgtttgtgggtttaagtcccattggtctagta

SEQ ID NO: 2897 - DNA, 39 bp, Artificial Sequence
  Probe
actaagtgtttgtgggtttaagtcccattggtctagtaa

SEQ ID NO: 2898 - DNA, 40 bp, Artificial Sequence
  Probe
actaagtgtttgtgggtttaagtcccattggtctagtaag

SEQ ID NO: 2899 - DNA, 41 bp, Artificial Sequence
  Probe
actaagtgtttgtgggtttaagtcccattggtctagtaagg

SEQ ID NO: 2900 - DNA, 42 bp, Artificial Sequence
  Probe
actaagtgtttgtgggtttaagtcccattggtctagtaaggg

SEQ ID NO: 2901 - DNA, 50 bp, Artificial Sequence
  Probe
actaatacaccagtcttgtaaaccggagatgaaaacctttttccaaggac

SEQ ID NO: 2902 - DNA, 32 bp, Artificial Sequence
  Probe
actagttttgacaacattcaaaaaagagtaat

SEQ ID NO: 2903 - DNA, 18 bp, Artificial Sequence
  Probe
actcatgcccccatgtct

SEQ ID NO: 2904 - DNA, 19 bp, Artificial Sequence
  Probe
actcatgcccccatgtcta

SEQ ID NO: 2905 - DNA, 29 bp, Artificial Sequence
  Probe
actcatgcccccatgtctaacaacatggc

SEQ ID NO: 2906 - DNA, 30 bp, Artificial Sequence
  Probe
actcatgcccccatgtctaacaacatggct

SEQ ID NO: 2907 - DNA, 31 bp, Artificial Sequence
  Probe
actcatgcccccatgtctaacaacatggctt

SEQ ID NO: 2908 - DNA, 32 bp, Artificial Sequence
  Probe
actcatgcccccatgtctaacaacatggcttt

SEQ ID NO: 2909 - DNA, 33 bp, Artificial Sequence
  Probe
actcatgcccccatgtctaacaacatggctttc

SEQ ID NO: 2910 - DNA, 34 bp, Artificial Sequence
  Probe
actcatgcccccatgtctaacaacatggctttct

SEQ ID NO: 2911 - DNA, 35 bp, Artificial Sequence
  Probe
actcatgcccccatgtctaacaacatggctttctc

SEQ ID NO: 2912 - DNA, 36 bp, Artificial Sequence
  Probe
actcatgcccccatgtctaacaacatggctttctca

SEQ ID NO: 2913 - DNA, 37 bp, Artificial Sequence
  Probe
actcatgcccccatgtctaacaacatggctttctcaa

SEQ ID NO: 2914 - DNA, 38 bp, Artificial Sequence
  Probe
actcatgcccccatgtctaacaacatggctttctcaac

SEQ ID NO: 2915 - DNA, 39 bp, Artificial Sequence
  Probe
actcatgcccccatgtctaacaacatggctttctcaact

SEQ ID NO: 2916 - DNA, 33 bp, Artificial Sequence
  Probe
actcattaaattatgataatcatatttaccaaa

SEQ ID NO: 2917 - DNA, 35 bp, Artificial Sequence
  Probe
actcattaaattatgataatcatatttaccaaatg

SEQ ID NO: 2918 - DNA, 19 bp, Artificial Sequence
  Probe
actcccggtgtgggaacgc

SEQ ID NO: 2919 - DNA, 50 bp, Artificial Sequence
  Probe
actctggactctgaatccagcgatccgagttcaaatctcggtggaacctg

SEQ ID NO: 2920 - DNA, 50 bp, Artificial Sequence
  Probe
actctggactctgaatccagcgatccgagttcaaatctcggtggaacctt

SEQ ID NO: 2921 - DNA, 50 bp, Artificial Sequence
  Probe
actctggactttgaatccagcgatccgagttcaaatctcggtgggacctc

SEQ ID NO: 2922 - DNA, 24 bp, Artificial Sequence
  Probe
actcttttagtataaatagtaccg

SEQ ID NO: 2923 - DNA, 25 bp, Artificial Sequence
  Probe
actcttttagtataaatagtaccgt

SEQ ID NO: 2924 - DNA, 26 bp, Artificial Sequence
  Probe
actcttttagtataaatagtaccgtt

SEQ ID NO: 2925 - DNA, 27 bp, Artificial Sequence
  Probe
actcttttagtataaatagtaccgtta

SEQ ID NO: 2926 - DNA, 29 bp, Artificial Sequence
  Probe
actcttttagtataaatagtaccgttaac

SEQ ID NO: 2927 - DNA, 30 bp, Artificial Sequence
  Probe
actcttttagtataaatagtaccgttaact

SEQ ID NO: 2928 - DNA, 31 bp, Artificial Sequence
  Probe
actcttttagtataaatagtaccgttaactt

SEQ ID NO: 2929 - DNA, 43 bp, Artificial Sequence
  Probe
actcttttagtataaatagtaccgttaacttccaattaactag

SEQ ID NO: 2930 - DNA, 44 bp, Artificial Sequence
  Probe
actcttttagtataaatagtaccgttaacttccaattaactagt

SEQ ID NO: 2931 - DNA, 45 bp, Artificial Sequence
  Probe
actcttttagtataaatagtaccgttaacttccaattaactagtt

SEQ ID NO: 2932 - DNA, 46 bp, Artificial Sequence
  Probe
actcttttagtataaatagtaccgttaacttccaattaactagttt

SEQ ID NO: 2933 - DNA, 49 bp, Artificial Sequence
  Probe
actcttttagtataaatagtaccgttaacttccaattaactagttttga

SEQ ID NO: 2934 - DNA, 26 bp, Artificial Sequence
  Probe
actgaaaatgtttagacgggctcaca

SEQ ID NO: 2935 - DNA, 27 bp, Artificial Sequence
  Probe
actgaaaatgtttagacgggctcacat

SEQ ID NO: 2936 - DNA, 33 bp, Artificial Sequence
  Probe
actgaaaatgtttagacgggctcacatcacccc

SEQ ID NO: 2937 - DNA, 42 bp, Artificial Sequence
  Probe
actgaaaatgtttagacgggctcacatcaccccataaacaaa

SEQ ID NO: 2938 - DNA, 43 bp, Artificial Sequence
  Probe
actgaaaatgtttagacgggctcacatcaccccataaacaaat

SEQ ID NO: 2939 - DNA, 44 bp, Artificial Sequence
  Probe
actgaaaatgtttagacgggctcacatcaccccataaacaaata

SEQ ID NO: 2940 - DNA, 45 bp, Artificial Sequence
  Probe
actgaaaatgtttagacgggctcacatcaccccataaacaaatag

SEQ ID NO: 2941 - DNA, 50 bp, Artificial Sequence
  Probe
actgaaaatgtttagacgggctcacatcaccccataaacaaataggtttg

SEQ ID NO: 2942 - DNA, 19 bp, Artificial Sequence
  Probe
actgctaactcatgccccc

SEQ ID NO: 2943 - DNA, 23 bp, Artificial Sequence
  Probe
actgctaactcatgcccccatgt

SEQ ID NO: 2944 - DNA, 24 bp, Artificial Sequence
  Probe
actgctaactcatgcccccatgtc

SEQ ID NO: 2945 - DNA, 25 bp, Artificial Sequence
  Probe
actgctaactcatgcccccatgtct

SEQ ID NO: 2946 - DNA, 26 bp, Artificial Sequence
  Probe
actgctaactcatgcccccatgtcta

SEQ ID NO: 2947 - DNA, 37 bp, Artificial Sequence
  Probe
actgctaactcatgcccccatgtctaacaacatggct

SEQ ID NO: 2948 - DNA, 38 bp, Artificial Sequence
  Probe
actgctaactcatgcccccatgtctaacaacatggctt

SEQ ID NO: 2949 - DNA, 39 bp, Artificial Sequence
  Probe
actgctaactcatgcccccatgtctaacaacatggcttt

SEQ ID NO: 2950 - DNA, 40 bp, Artificial Sequence
  Probe
actgctaactcatgcccccatgtctaacaacatggctttc

SEQ ID NO: 2951 - DNA, 41 bp, Artificial Sequence
  Probe
actgctaactcatgcccccatgtctaacaacatggctttct

SEQ ID NO: 2952 - DNA, 42 bp, Artificial Sequence
  Probe
actgctaactcatgcccccatgtctaacaacatggctttctc

SEQ ID NO: 2953 - DNA, 43 bp, Artificial Sequence
  Probe
actgctaactcatgcccccatgtctaacaacatggctttctca

SEQ ID NO: 2954 - DNA, 44 bp, Artificial Sequence
  Probe
actgctaactcatgcccccatgtctaacaacatggctttctcaa

SEQ ID NO: 2955 - DNA, 45 bp, Artificial Sequence
  Probe
actgctaactcatgcccccatgtctaacaacatggctttctcaac

SEQ ID NO: 2956 - DNA, 46 bp, Artificial Sequence
  Probe
actgctaactcatgcccccatgtctaacaacatggctttctcaact

SEQ ID NO: 2957 - DNA, 49 bp, Artificial Sequence
  Probe
actgctaactcatgcccccatgtctaacaacatggctttctcaactttt

SEQ ID NO: 2958 - DNA, 50 bp, Artificial Sequence
  Probe
actgctaactcatgcccccatgtctaacaacatggctttctcaactttta

SEQ ID NO: 2959 - DNA, 29 bp, Artificial Sequence
  Probe
actgtaaagctaacttagcattaaccttt

SEQ ID NO: 2960 - DNA, 43 bp, Artificial Sequence
  Probe
actgtaaatctaaagacaggggttaggcctctttttaccagct

SEQ ID NO: 2961 - DNA, 25 bp, Artificial Sequence
  Probe
acttaaaactttacagtcagaggtt

SEQ ID NO: 2962 - DNA, 38 bp, Artificial Sequence
  Probe
acttaaaactttacagtcagaggttcaattcctcttct

SEQ ID NO: 2963 - DNA, 39 bp, Artificial Sequence
  Probe
acttaaaactttacagtcagaggttcaattcctcttctt

SEQ ID NO: 2964 - DNA, 40 bp, Artificial Sequence
  Probe
acttaaaactttacagtcagaggttcaattcctcttctta

SEQ ID NO: 2965 - DNA, 41 bp, Artificial Sequence
  Probe
acttaaaactttacagtcagaggttcaattcctcttcttaa

SEQ ID NO: 2966 - DNA, 42 bp, Artificial Sequence
  Probe
acttaaaactttacagtcagaggttcaattcctcttcttaac

SEQ ID NO: 2967 - DNA, 43 bp, Artificial Sequence
  Probe
acttaaaactttacagtcagaggttcaattcctcttcttaaca

SEQ ID NO: 2968 - DNA, 44 bp, Artificial Sequence
  Probe
acttaaaactttacagtcagaggttcaattcctcttcttaacaa

SEQ ID NO: 2969 - DNA, 45 bp, Artificial Sequence
  Probe
acttaaaactttacagtcagaggttcaattcctcttcttaacaac

SEQ ID NO: 2970 - DNA, 46 bp, Artificial Sequence
  Probe
acttaaaactttacagtcagaggttcaattcctcttcttaacaaca

SEQ ID NO: 2971 - DNA, 16 bp, Artificial Sequence
  Probe
acttaacttgaccgct

SEQ ID NO: 2972 - DNA, 17 bp, Artificial Sequence
  Probe
acttaacttgaccgctc

SEQ ID NO: 2973 - DNA, 18 bp, Artificial Sequence
  Probe
acttaacttgaccgctct

SEQ ID NO: 2974 - DNA, 20 bp, Artificial Sequence
  Probe
acttaacttgaccgctctga

SEQ ID NO: 2975 - DNA, 21 bp, Artificial Sequence
  Probe
acttaacttgaccgctctgag

SEQ ID NO: 2976 - DNA, 22 bp, Artificial Sequence
  Probe
acttaacttgaccgctctgagc

SEQ ID NO: 2977 - DNA, 23 bp, Artificial Sequence
  Probe
acttaacttgaccgctctgagct

SEQ ID NO: 2978 - DNA, 21 bp, Artificial Sequence
  Probe
acttacacttaggagatttca

SEQ ID NO: 2979 - DNA, 22 bp, Artificial Sequence
  Probe
acttacacttaggagatttcaa

SEQ ID NO: 2980 - DNA, 23 bp, Artificial Sequence
  Probe
acttacacttaggagatttcaac

SEQ ID NO: 2981 - DNA, 33 bp, Artificial Sequence
  Probe
acttacacttaggagatttcaacttaacttgac

SEQ ID NO: 2982 - DNA, 35 bp, Artificial Sequence
  Probe
acttacacttaggagatttcaacttaacttgaccg

SEQ ID NO: 2983 - DNA, 36 bp, Artificial Sequence
  Probe
acttacacttaggagatttcaacttaacttgaccgc

SEQ ID NO: 2984 - DNA, 37 bp, Artificial Sequence
  Probe
acttacacttaggagatttcaacttaacttgaccgct

SEQ ID NO: 2985 - DNA, 39 bp, Artificial Sequence
  Probe
acttacacttaggagatttcaacttaacttgaccgctct

SEQ ID NO: 2986 - DNA, 40 bp, Artificial Sequence
  Probe
acttacacttaggagatttcaacttaacttgaccgctctg

SEQ ID NO: 2987 - DNA, 41 bp, Artificial Sequence
  Probe
acttacacttaggagatttcaacttaacttgaccgctctga

SEQ ID NO: 2988 - DNA, 42 bp, Artificial Sequence
  Probe
acttacacttaggagatttcaacttaacttgaccgctctgag

SEQ ID NO: 2989 - DNA, 43 bp, Artificial Sequence
  Probe
acttacacttaggagatttcaacttaacttgaccgctctgagc

SEQ ID NO: 2990 - DNA, 44 bp, Artificial Sequence
  Probe
acttacacttaggagatttcaacttaacttgaccgctctgagct

SEQ ID NO: 2991 - DNA, 45 bp, Artificial Sequence
  Probe
acttacacttaggagatttcaacttaacttgaccgctctgagcta

SEQ ID NO: 2992 - DNA, 50 bp, Artificial Sequence
  Probe
acttacacttaggagatttcaacttaacttgaccgctctgagctaaacct

SEQ ID NO: 2993 - DNA, 43 bp, Artificial Sequence
  Probe
acttagcattaaccttttaagttaaagattaagagaaccaaca

SEQ ID NO: 2994 - DNA, 45 bp, Artificial Sequence
  Probe
acttagcattaaccttttaagttaaagattaagagaaccaacacc

SEQ ID NO: 2995 - DNA, 17 bp, Artificial Sequence
  Probe
acttaggagatttcaac

SEQ ID NO: 2996 - DNA, 18 bp, Artificial Sequence
  Probe
acttaggagatttcaact

SEQ ID NO: 2997 - DNA, 27 bp, Artificial Sequence
  Probe
acttaggagatttcaacttaacttgac

SEQ ID NO: 2998 - DNA, 29 bp, Artificial Sequence
  Probe
acttaggagatttcaacttaacttgaccg

SEQ ID NO: 2999 - DNA, 31 bp, Artificial Sequence
  Probe
acttaggagatttcaacttaacttgaccgct

SEQ ID NO: 3000 - DNA, 32 bp, Artificial Sequence
  Probe
acttaggagatttcaacttaacttgaccgctc

SEQ ID NO: 3001 - DNA, 33 bp, Artificial Sequence
  Probe
acttaggagatttcaacttaacttgaccgctct

SEQ ID NO: 3002 - DNA, 35 bp, Artificial Sequence
  Probe
acttaggagatttcaacttaacttgaccgctctga

SEQ ID NO: 3003 - DNA, 36 bp, Artificial Sequence
  Probe
acttaggagatttcaacttaacttgaccgctctgag

SEQ ID NO: 3004 - DNA, 37 bp, Artificial Sequence
  Probe
acttaggagatttcaacttaacttgaccgctctgagc

SEQ ID NO: 3005 - DNA, 38 bp, Artificial Sequence
  Probe
acttaggagatttcaacttaacttgaccgctctgagct

SEQ ID NO: 3006 - DNA, 39 bp, Artificial Sequence
  Probe
acttaggagatttcaacttaacttgaccgctctgagcta

SEQ ID NO: 3007 - DNA, 40 bp, Artificial Sequence
  Probe
acttaggagatttcaacttaacttgaccgctctgagctaa

SEQ ID NO: 3008 - DNA, 41 bp, Artificial Sequence
  Probe
acttaggagatttcaacttaacttgaccgctctgagctaaa

SEQ ID NO: 3009 - DNA, 43 bp, Artificial Sequence
  Probe
acttccaattaactagttttgacaacattcaaaaaagagtaat

SEQ ID NO: 3010 - DNA, 44 bp, Artificial Sequence
  Probe
acttccaattaactagttttgacaacattcaaaaaagagtaata

SEQ ID NO: 3011 - DNA, 19 bp, Artificial Sequence
  Probe
actttacagtcagaggttc

SEQ ID NO: 3012 - DNA, 20 bp, Artificial Sequence
  Probe
actttacagtcagaggttca

SEQ ID NO: 3013 - DNA, 31 bp, Artificial Sequence
  Probe
actttacagtcagaggttcaattcctcttct

SEQ ID NO: 3014 - DNA, 32 bp, Artificial Sequence
  Probe
actttacagtcagaggttcaattcctcttctt

SEQ ID NO: 3015 - DNA, 33 bp, Artificial Sequence
  Probe
actttacagtcagaggttcaattcctcttctta

SEQ ID NO: 3016 - DNA, 35 bp, Artificial Sequence
  Probe
actttacagtcagaggttcaattcctcttcttaac

SEQ ID NO: 3017 - DNA, 37 bp, Artificial Sequence
  Probe
actttacagtcagaggttcaattcctcttcttaacaa

SEQ ID NO: 3018 - DNA, 38 bp, Artificial Sequence
  Probe
actttacagtcagaggttcaattcctcttcttaacaac

SEQ ID NO: 3019 - DNA, 39 bp, Artificial Sequence
  Probe
actttacagtcagaggttcaattcctcttcttaacaaca

SEQ ID NO: 3020 - DNA, 21 bp, Artificial Sequence
  Probe
actttgaatccagcgatccga

SEQ ID NO: 3021 - DNA, 29 bp, Artificial Sequence
  Probe
actttgatagagtaaataataggagctta

SEQ ID NO: 3022 - DNA, 33 bp, Artificial Sequence
  Probe
actttgatagagtaaataataggagcttaaacc

SEQ ID NO: 3023 - DNA, 34 bp, Artificial Sequence
  Probe
actttgatagagtaaataataggagcttaaaccc

SEQ ID NO: 3024 - DNA, 35 bp, Artificial Sequence
  Probe
actttgatagagtaaataataggagcttaaacccc

SEQ ID NO: 3025 - DNA, 36 bp, Artificial Sequence
  Probe
actttgatagagtaaataataggagcttaaaccccc

SEQ ID NO: 3026 - DNA, 40 bp, Artificial Sequence
  Probe
actttgatagagtaaataataggagcttaaacccccttat

SEQ ID NO: 3027 - DNA, 41 bp, Artificial Sequence
  Probe
actttgatagagtaaataataggagcttaaacccccttatt

SEQ ID NO: 3028 - DNA, 42 bp, Artificial Sequence
  Probe
actttgatagagtaaataataggagcttaaacccccttattt

SEQ ID NO: 3029 - DNA, 43 bp, Artificial Sequence
  Probe
actttgatagagtaaataataggagcttaaacccccttatttc

SEQ ID NO: 3030 - DNA, 44 bp, Artificial Sequence
  Probe
actttgatagagtaaataataggagcttaaacccccttatttct

SEQ ID NO: 3031 - DNA, 46 bp, Artificial Sequence
  Probe
actttgatagagtaaataataggagcttaaacccccttatttctag

SEQ ID NO: 3032 - DNA, 49 bp, Artificial Sequence
  Probe
actttgatagagtaaataataggagcttaaacccccttatttctaggac

SEQ ID NO: 3033 - DNA, 50 bp, Artificial Sequence
  Probe
actttgatagagtaaataataggagcttaaacccccttatttctaggact

SEQ ID NO: 3034 - DNA, 29 bp, Artificial Sequence
  Probe
acttttaaaggataacagctatccattgg

SEQ ID NO: 3035 - DNA, 33 bp, Artificial Sequence
  Probe
acttttaaaggataacagctatccattggtctt

SEQ ID NO: 3036 - DNA, 39 bp, Artificial Sequence
  Probe
acttttaaaggataacagctatccattggtcttaggccc

SEQ ID NO: 3037 - DNA, 41 bp, Artificial Sequence
  Probe
acttttaaaggataacagctatccattggtcttaggcccca

SEQ ID NO: 3038 - DNA, 43 bp, Artificial Sequence
  Probe
acttttaaaggataacagctatccattggtcttaggccccaaa

SEQ ID NO: 3039 - DNA, 50 bp, Artificial Sequence
  Probe
acttttaaaggataacagctatccattggtcttaggccccaaaaattttg

SEQ ID NO: 3040 - DNA, 32 bp, Artificial Sequence
  Probe
agaaagctcacaagaactgctaactcatgccc

SEQ ID NO: 3041 - DNA, 33 bp, Artificial Sequence
  Probe
agaaagctcacaagaactgctaactcatgcccc

SEQ ID NO: 3042 - DNA, 35 bp, Artificial Sequence
  Probe
agaaagctcacaagaactgctaactcatgccccca

SEQ ID NO: 3043 - DNA, 44 bp, Artificial Sequence
  Probe
agaaatatgtctgataaaagagttactttgatagagtaaataat

SEQ ID NO: 3044 - DNA, 31 bp, Artificial Sequence
  Probe
agaaatttaggttaaatacagaccaagagcc

SEQ ID NO: 3045 - DNA, 32 bp, Artificial Sequence
  Probe
agaaatttaggttaaatacagaccaagagcct

SEQ ID NO: 3046 - DNA, 33 bp, Artificial Sequence
  Probe
agaaatttaggttaaatacagaccaagagcctt

SEQ ID NO: 3047 - DNA, 34 bp, Artificial Sequence
  Probe
agaaatttaggttaaatacagaccaagagccttc

SEQ ID NO: 3048 - DNA, 35 bp, Artificial Sequence
  Probe
agaaatttaggttaaatacagaccaagagccttca

SEQ ID NO: 3049 - DNA, 43 bp, Artificial Sequence
  Probe
agaaatttaggttaaatacagaccaagagccttcaaagccctc

SEQ ID NO: 3050 - DNA, 44 bp, Artificial Sequence
  Probe
agaaatttaggttaaatacagaccaagagccttcaaagccctca

SEQ ID NO: 3051 - DNA, 49 bp, Artificial Sequence
  Probe
agaaatttaggttaaatacagaccaagagccttcaaagccctcagtaag

SEQ ID NO: 3052 - DNA, 50 bp, Artificial Sequence
  Probe
agaaatttaggttaaatacagaccaagagccttcaaagccctcagtaagt

SEQ ID NO: 3053 - DNA, 37 bp, Artificial Sequence
  Probe
agaacagggtttgttaagatggcagagcccggtaatc

SEQ ID NO: 3054 - DNA, 39 bp, Artificial Sequence
  Probe
agaacagggtttgttaagatggcagagcccggtaatcgc

SEQ ID NO: 3055 - DNA, 24 bp, Artificial Sequence
  Probe
agaaccaacacctctttacagtga

SEQ ID NO: 3056 - DNA, 25 bp, Artificial Sequence
  Probe
agaaccaacacctctttacagtgaa

SEQ ID NO: 3057 - DNA, 26 bp, Artificial Sequence
  Probe
agaaccaacacctctttacagtgaaa

SEQ ID NO: 3058 - DNA, 27 bp, Artificial Sequence
  Probe
agaaccaacacctctttacagtgaaat

SEQ ID NO: 3059 - DNA, 17 bp, Artificial Sequence
  Probe
agaactgctaactcatg

SEQ ID NO: 3060 - DNA, 23 bp, Artificial Sequence
  Probe
agaactgctaactcatgccccca

SEQ ID NO: 3061 - DNA, 24 bp, Artificial Sequence
  Probe
agaactgctaactcatgcccccat

SEQ ID NO: 3062 - DNA, 26 bp, Artificial Sequence
  Probe
agaactgctaactcatgcccccatgt

SEQ ID NO: 3063 - DNA, 27 bp, Artificial Sequence
  Probe
agaactgctaactcatgcccccatgtc

SEQ ID NO: 3064 - DNA, 28 bp, Artificial Sequence
  Probe
agaactgctaactcatgcccccatgtct

SEQ ID NO: 3065 - DNA, 29 bp, Artificial Sequence
  Probe
agaactgctaactcatgcccccatgtcta

SEQ ID NO: 3066 - DNA, 32 bp, Artificial Sequence
  Probe
agaactgctaactcatgcccccatgtctaaca

SEQ ID NO: 3067 - DNA, 39 bp, Artificial Sequence
  Probe
agaactgctaactcatgcccccatgtctaacaacatggc

SEQ ID NO: 3068 - DNA, 48 bp, Artificial Sequence
  Probe
agaactgctaactcatgcccccatgtctaacaacatggctttctcaac

SEQ ID NO: 3069 - DNA, 49 bp, Artificial Sequence
  Probe
agaactgctaactcatgcccccatgtctaacaacatggctttctcaact

SEQ ID NO: 3070 - DNA, 50 bp, Artificial Sequence
  Probe
agaactgctaactcatgcccccatgtctaacaacatggctttctcaactt

SEQ ID NO: 3071 - DNA, 17 bp, Artificial Sequence
  Probe
agaagattccaggttcg

SEQ ID NO: 3072 - DNA, 33 bp, Artificial Sequence
  Probe
agaagattccaggttcgactcctggctggctcg

SEQ ID NO: 3073 - DNA, 36 bp, Artificial Sequence
  Probe
agaagattccaggttcgactcctggctggctcgttc

SEQ ID NO: 3074 - DNA, 32 bp, Artificial Sequence
  Probe
agaagattctaggttcgactcctggctggctc

SEQ ID NO: 3075 - DNA, 33 bp, Artificial Sequence
  Probe
agaagattctaggttcgactcctggctggctcg

SEQ ID NO: 3076 - DNA, 36 bp, Artificial Sequence
  Probe
agaagattctaggttcgactcctggctggctcgcga

SEQ ID NO: 3077 - DNA, 36 bp, Artificial Sequence
  Probe
agaagattctaggttcgactcctggctggctcgctt

SEQ ID NO: 3078 - DNA, 16 bp, Artificial Sequence
  Probe
agaagattgagggttc

SEQ ID NO: 3079 - DNA, 27 bp, Artificial Sequence
  Probe
agaagattgagggttcgaatcccttcg

SEQ ID NO: 3080 - DNA, 25 bp, Artificial Sequence
  Probe
agaagattgagggttcgagtccctt

SEQ ID NO: 3081 - DNA, 32 bp, Artificial Sequence
  Probe
agaagattgagggttcgagtcccttcgtggtc

SEQ ID NO: 3082 - DNA, 36 bp, Artificial Sequence
  Probe
agaagattgagggttcgagtcccttcgtggtcgttg

SEQ ID NO: 3083 - DNA, 17 bp, Artificial Sequence
  Probe
agaagattgcaggttcg

SEQ ID NO: 3084 - DNA, 31 bp, Artificial Sequence
  Probe
agaagattgcaggttcgagtcctgccgcggt

SEQ ID NO: 3085 - DNA, 32 bp, Artificial Sequence
  Probe
agaagattgcaggttcgagtcctgccgcggtc

SEQ ID NO: 3086 - DNA, 33 bp, Artificial Sequence
  Probe
agaagattgcaggttcgagtcctgccgcggtcg

SEQ ID NO: 3087 - DNA, 36 bp, Artificial Sequence
  Probe
agaagattgcaggttcgagtcctgccgcggtcgaag

SEQ ID NO: 3088 - DNA, 28 bp, Artificial Sequence
  Probe
agaagcagcttcaaacctgccggggctt

SEQ ID NO: 3089 - DNA, 29 bp, Artificial Sequence
  Probe
agaagcagcttcaaacctgccggggcttc

SEQ ID NO: 3090 - DNA, 30 bp, Artificial Sequence
  Probe
agaagcagcttcaaacctgccggggcttct

SEQ ID NO: 3091 - DNA, 31 bp, Artificial Sequence
  Probe
agaagcagcttcaaacctgccggggcttctc

SEQ ID NO: 3092 - DNA, 32 bp, Artificial Sequence
  Probe
agaagcagcttcaaacctgccggggcttctcc

SEQ ID NO: 3093 - DNA, 32 bp, Artificial Sequence
  Probe
agaaggtcctgggttcgagccccagtggaacc

SEQ ID NO: 3094 - DNA, 33 bp, Artificial Sequence
  Probe
agaaggtcctgggttcgagccccagtggaacca

SEQ ID NO: 3095 - DNA, 35 bp, Artificial Sequence
  Probe
agaaggtcctgggttcgagccccagtggaaccacg

SEQ ID NO: 3096 - DNA, 36 bp, Artificial Sequence
  Probe
agaaggtcctgggttcgagccccagtggaaccacgg

SEQ ID NO: 3097 - DNA, 31 bp, Artificial Sequence
  Probe
agaatcttagctttgggtgctaatggtggag

SEQ ID NO: 3098 - DNA, 34 bp, Artificial Sequence
  Probe
agaatcttagctttgggtgctaatggtggagtta

SEQ ID NO: 3099 - DNA, 48 bp, Artificial Sequence
  Probe
agaatcttagctttgggtgctaatggtggagttaaagactttttctct

SEQ ID NO: 3100 - DNA, 22 bp, Artificial Sequence
  Probe
agacaggggttaggcctctttt

SEQ ID NO: 3101 - DNA, 23 bp, Artificial Sequence
  Probe
agacaggggttaggcctcttttt

SEQ ID NO: 3102 - DNA, 19 bp, Artificial Sequence
  Probe
agaccaagagccttcaaag

SEQ ID NO: 3103 - DNA, 22 bp, Artificial Sequence
  Probe
agaccaagagccttcaaagccc

SEQ ID NO: 3104 - DNA, 23 bp, Artificial Sequence
  Probe
agaccaagagccttcaaagccct

SEQ ID NO: 3105 - DNA, 28 bp, Artificial Sequence
  Probe
agaccaagagccttcaaagccctcagta

SEQ ID NO: 3106 - DNA, 31 bp, Artificial Sequence
  Probe
agaccaagagccttcaaagccctcagtaagt

SEQ ID NO: 3107 - DNA, 46 bp, Artificial Sequence
  Probe
agaccaagagccttcaaagccctcagtaagttgcaatacttaattt

SEQ ID NO: 3108 - DNA, 48 bp, Artificial Sequence
  Probe
agaccaagagccttcaaagccctcagtaagttgcaatacttaatttct

SEQ ID NO: 3109 - DNA, 49 bp, Artificial Sequence
  Probe
agaccaagagccttcaaagccctcagtaagttgcaatacttaatttctg

SEQ ID NO: 3110 - DNA, 50 bp, Artificial Sequence
  Probe
agaccaagagccttcaaagccctcagtaagttgcaatacttaatttctgt

SEQ ID NO: 3111 - DNA, 30 bp, Artificial Sequence
  Probe
agaccggggttcaattccccgacggggagg

SEQ ID NO: 3112 - DNA, 32 bp, Artificial Sequence
  Probe
agaccggggttcaattccccgacggggaggtg

SEQ ID NO: 3113 - DNA, 25 bp, Artificial Sequence
  Probe
agaccggggttcgattccccgacgg

SEQ ID NO: 3114 - DNA, 30 bp, Artificial Sequence
  Probe
agaccggggttcgattccccgacggggaga

SEQ ID NO: 3115 - DNA, 31 bp, Artificial Sequence
  Probe
agaccggggttcgattccccgacggggagaa

SEQ ID NO: 3116 - DNA, 32 bp, Artificial Sequence
  Probe
agaccggggttcgattccccgacggggagaaa

SEQ ID NO: 3117 - DNA, 31 bp, Artificial Sequence
  Probe
agaccggggttcgattccccgacggggagac

SEQ ID NO: 3118 - DNA, 32 bp, Artificial Sequence
  Probe
agaccggggttcgattccccgacggggagacg

SEQ ID NO: 3119 - DNA, 32 bp, Artificial Sequence
  Probe
agaccggggttcgattccccgacggggagagt

SEQ ID NO: 3120 - DNA, 30 bp, Artificial Sequence
  Probe
agaccggggttcgattccccgacggggagg

SEQ ID NO: 3121 - DNA, 31 bp, Artificial Sequence
  Probe
agaccggggttcgattccccgacggggaggc

SEQ ID NO: 3122 - DNA, 32 bp, Artificial Sequence
  Probe
agaccggggttcgattccccgacggggaggca

SEQ ID NO: 3123 - DNA, 32 bp, Artificial Sequence
  Probe
agaccggggttcgattccccgacggggaggcc

SEQ ID NO: 3124 - DNA, 19 bp, Artificial Sequence
  Probe
agacgggctcacatcaccc

SEQ ID NO: 3125 - DNA, 20 bp, Artificial Sequence
  Probe
agacgggctcacatcacccc

SEQ ID NO: 3126 - DNA, 21 bp, Artificial Sequence
  Probe
agacgggctcacatcacccca

SEQ ID NO: 3127 - DNA, 22 bp, Artificial Sequence
  Probe
agacgggctcacatcaccccat

SEQ ID NO: 3128 - DNA, 23 bp, Artificial Sequence
  Probe
agacgggctcacatcaccccata

SEQ ID NO: 3129 - DNA, 24 bp, Artificial Sequence
  Probe
agacgggctcacatcaccccataa

SEQ ID NO: 3130 - DNA, 25 bp, Artificial Sequence
  Probe
agacgggctcacatcaccccataaa

SEQ ID NO: 3131 - DNA, 26 bp, Artificial Sequence
  Probe
agacgggctcacatcaccccataaac

SEQ ID NO: 3132 - DNA, 27 bp, Artificial Sequence
  Probe
agacgggctcacatcaccccataaaca

SEQ ID NO: 3133 - DNA, 28 bp, Artificial Sequence
  Probe
agacgggctcacatcaccccataaacaa

SEQ ID NO: 3134 - DNA, 29 bp, Artificial Sequence
  Probe
agacgggctcacatcaccccataaacaaa

SEQ ID NO: 3135 - DNA, 30 bp, Artificial Sequence
  Probe
agacgggctcacatcaccccataaacaaat

SEQ ID NO: 3136 - DNA, 31 bp, Artificial Sequence
  Probe
agacgggctcacatcaccccataaacaaata

SEQ ID NO: 3137 - DNA, 32 bp, Artificial Sequence
  Probe
agacgggctcacatcaccccataaacaaatag

SEQ ID NO: 3138 - DNA, 27 bp, Artificial Sequence
  Probe
agagaaccaacacctctttacagtgaa

SEQ ID NO: 3139 - DNA, 29 bp, Artificial Sequence
  Probe
agagaaccaacacctctttacagtgaaat

SEQ ID NO: 3140 - DNA, 30 bp, Artificial Sequence
  Probe
agagcatgagactcttaatctcagggtcgt

SEQ ID NO: 3141 - DNA, 29 bp, Artificial Sequence
  Probe
agagcatgggactcttaatcccagggtcg

SEQ ID NO: 3142 - DNA, 31 bp, Artificial Sequence
  Probe
agagcatgggactcttaatcccagggtcgtg

SEQ ID NO: 3143 - DNA, 19 bp, Artificial Sequence
  Probe
agagcccggtaatcgcata

SEQ ID NO: 3144 - DNA, 32 bp, Artificial Sequence
  Probe
agagcccggtaatcgcataaaacttaaaactt

SEQ ID NO: 3145 - DNA, 40 bp, Artificial Sequence
  Probe
agagcccggtaatcgcataaaacttaaaactttacagtca

SEQ ID NO: 3146 - DNA, 50 bp, Artificial Sequence
  Probe
agagcccggtaatcgcataaaacttaaaactttacagtcagaggttcaat

SEQ ID NO: 3147 - DNA, 16 bp, Artificial Sequence
  Probe
agagccttcaaagccc

SEQ ID NO: 3148 - DNA, 29 bp, Artificial Sequence
  Probe
agagccttcaaagccctcagtaagttgca

SEQ ID NO: 3149 - DNA, 16 bp, Artificial Sequence
  Probe
agaggtccccggttca

SEQ ID NO: 3150 - DNA, 16 bp, Artificial Sequence
  Probe
agaggtccctggttca

SEQ ID NO: 3151 - DNA, 25 bp, Artificial Sequence
  Probe
agaggttccgggttcgagtcccggc

SEQ ID NO: 3152 - DNA, 18 bp, Artificial Sequence
  Probe
agagtaaataataggagc

SEQ ID NO: 3153 - DNA, 23 bp, Artificial Sequence
  Probe
agagtaaataataggagcttaaa

SEQ ID NO: 3154 - DNA, 27 bp, Artificial Sequence
  Probe
agagtaaataataggagcttaaacccc

SEQ ID NO: 3155 - DNA, 29 bp, Artificial Sequence
  Probe
agagtaaataataggagcttaaaccccct

SEQ ID NO: 3156 - DNA, 33 bp, Artificial Sequence
  Probe
agagtaaataataggagcttaaacccccttatt

SEQ ID NO: 3157 - DNA, 38 bp, Artificial Sequence
  Probe
agagtaaataataggagcttaaacccccttatttctag

SEQ ID NO: 3158 - DNA, 39 bp, Artificial Sequence
  Probe
agagtaaataataggagcttaaacccccttatttctagg

SEQ ID NO: 3159 - DNA, 40 bp, Artificial Sequence
  Probe
agagtaaataataggagcttaaacccccttatttctagga

SEQ ID NO: 3160 - DNA, 41 bp, Artificial Sequence
  Probe
agagtaaataataggagcttaaacccccttatttctaggac

SEQ ID NO: 3161 - DNA, 31 bp, Artificial Sequence
  Probe
agagtggcgcagcggaagcgtgctgggccca

SEQ ID NO: 3162 - DNA, 23 bp, Artificial Sequence
  Probe
agagtggggttttgcagtcctta

SEQ ID NO: 3163 - DNA, 24 bp, Artificial Sequence
  Probe
agagtggggttttgcagtccttag

SEQ ID NO: 3164 - DNA, 25 bp, Artificial Sequence
  Probe
agagtggggttttgcagtccttagc

SEQ ID NO: 3165 - DNA, 26 bp, Artificial Sequence
  Probe
agagtggggttttgcagtccttagct

SEQ ID NO: 3166 - DNA, 27 bp, Artificial Sequence
  Probe
agagtgtagcttaacacaaagcaccca

SEQ ID NO: 3167 - DNA, 30 bp, Artificial Sequence
  Probe
agagtgtagcttaacacaaagcacccaact

SEQ ID NO: 3168 - DNA, 32 bp, Artificial Sequence
  Probe
agagtgtagcttaacacaaagcacccaactta

SEQ ID NO: 3169 - DNA, 38 bp, Artificial Sequence
  Probe
agagtgtagcttaacacaaagcacccaacttacactta

SEQ ID NO: 3170 - DNA, 44 bp, Artificial Sequence
  Probe
agagtgtagcttaacacaaagcacccaacttacacttaggagat

SEQ ID NO: 3171 - DNA, 50 bp, Artificial Sequence
  Probe
agagttactttgatagagtaaataataggagcttaaacccccttatttct

SEQ ID NO: 3172 - DNA, 27 bp, Artificial Sequence
  Probe
agatgaaaacctttttccaaggacaaa

SEQ ID NO: 3173 - DNA, 28 bp, Artificial Sequence
  Probe
agatgaaaacctttttccaaggacaaat

SEQ ID NO: 3174 - DNA, 20 bp, Artificial Sequence
  Probe
agattaagagaaccaacacc

SEQ ID NO: 3175 - DNA, 31 bp, Artificial Sequence
  Probe
agattaagagaaccaacacctctttacagtg

SEQ ID NO: 3176 - DNA, 32 bp, Artificial Sequence
  Probe
agattaagagaaccaacacctctttacagtga

SEQ ID NO: 3177 - DNA, 33 bp, Artificial Sequence
  Probe
agattaagagaaccaacacctctttacagtgaa

SEQ ID NO: 3178 - DNA, 34 bp, Artificial Sequence
  Probe
agattaagagaaccaacacctctttacagtgaaa

SEQ ID NO: 3179 - DNA, 35 bp, Artificial Sequence
  Probe
agattaagagaaccaacacctctttacagtgaaat

SEQ ID NO: 3180 - DNA, 23 bp, Artificial Sequence
  Probe
agattccaggttcgactcctggc

SEQ ID NO: 3181 - DNA, 28 bp, Artificial Sequence
  Probe
agattccaggttcgactcctggctggct

SEQ ID NO: 3182 - DNA, 32 bp, Artificial Sequence
  Probe
agattccaggttcgactcctggctggctcgtt

SEQ ID NO: 3183 - DNA, 32 bp, Artificial Sequence
  Probe
agattctaggttcgactcctggctggctcgcg

SEQ ID NO: 3184 - DNA, 33 bp, Artificial Sequence
  Probe
agattctaggttcgactcctggctggctcgcga

SEQ ID NO: 3185 - DNA, 32 bp, Artificial Sequence
  Probe
agattctaggttcgactcctggctggctcgct

SEQ ID NO: 3186 - DNA, 18 bp, Artificial Sequence
  Probe
agattgagggttcgagtc

SEQ ID NO: 3187 - DNA, 27 bp, Artificial Sequence
  Probe
agattgagggttcgagtcccttcgtgg

SEQ ID NO: 3188 - DNA, 29 bp, Artificial Sequence
  Probe
agattgagggttcgagtcccttcgtggtc

SEQ ID NO: 3189 - DNA, 31 bp, Artificial Sequence
  Probe
agattgagggttcgagtcccttcgtggtcgg

SEQ ID NO: 3190 - DNA, 31 bp, Artificial Sequence
  Probe
agattgagggttcgagtcccttcgtggtcgt

SEQ ID NO: 3191 - DNA, 33 bp, Artificial Sequence
  Probe
agattgagggttcgagtcccttcgtggtcgttg

SEQ ID NO: 3192 - DNA, 23 bp, Artificial Sequence
  Probe
agattgcaggttcgagtcctgcc

SEQ ID NO: 3193 - DNA, 32 bp, Artificial Sequence
  Probe
agattgcaggttcgagtcctgccgcggtcgaa

SEQ ID NO: 3194 - DNA, 33 bp, Artificial Sequence
  Probe
agattgcaggttcgagtcctgccgcggtcgaag

SEQ ID NO: 3195 - DNA, 17 bp, Artificial Sequence
  Probe
agattgtgaatctgaca

SEQ ID NO: 3196 - DNA, 35 bp, Artificial Sequence
  Probe
agattgtgaatctgacaacagaggcttacgacccc

SEQ ID NO: 3197 - DNA, 36 bp, Artificial Sequence
  Probe
agattgtgaatctgacaacagaggcttacgacccct

SEQ ID NO: 3198 - DNA, 40 bp, Artificial Sequence
  Probe
agattgtgaatctgacaacagaggcttacgaccccttatt

SEQ ID NO: 3199 - DNA, 41 bp, Artificial Sequence
  Probe
agattgtgaatctgacaacagaggcttacgaccccttattt

SEQ ID NO: 3200 - DNA, 42 bp, Artificial Sequence
  Probe
agattgtgaatctgacaacagaggcttacgaccccttattta

SEQ ID NO: 3201 - DNA, 43 bp, Artificial Sequence
  Probe
agattgtgaatctgacaacagaggcttacgaccccttatttac

SEQ ID NO: 3202 - DNA, 44 bp, Artificial Sequence
  Probe
agattgtgaatctgacaacagaggcttacgaccccttatttacc

SEQ ID NO: 3203 - DNA, 46 bp, Artificial Sequence
  Probe
agattgtgaatctgacaacagaggcttacgaccccttatttaccga

SEQ ID NO: 3204 - DNA, 49 bp, Artificial Sequence
  Probe
agattgtgaatctgacaacagaggcttacgaccccttatttaccgagaa

SEQ ID NO: 3205 - DNA, 50 bp, Artificial Sequence
  Probe
agattgtgaatctgacaacagaggcttacgaccccttatttaccgagaaa

SEQ ID NO: 3206 - DNA, 21 bp, Artificial Sequence
  Probe
agatttcaacttaacttgacc

SEQ ID NO: 3207 - DNA, 23 bp, Artificial Sequence
  Probe
agatttcaacttaacttgaccgc

SEQ ID NO: 3208 - DNA, 24 bp, Artificial Sequence
  Probe
agatttcaacttaacttgaccgct

SEQ ID NO: 3209 - DNA, 25 bp, Artificial Sequence
  Probe
agatttcaacttaacttgaccgctc

SEQ ID NO: 3210 - DNA, 26 bp, Artificial Sequence
  Probe
agatttcaacttaacttgaccgctct

SEQ ID NO: 3211 - DNA, 27 bp, Artificial Sequence
  Probe
agatttcaacttaacttgaccgctctg

SEQ ID NO: 3212 - DNA, 28 bp, Artificial Sequence
  Probe
agatttcaacttaacttgaccgctctga

SEQ ID NO: 3213 - DNA, 29 bp, Artificial Sequence
  Probe
agatttcaacttaacttgaccgctctgag

SEQ ID NO: 3214 - DNA, 30 bp, Artificial Sequence
  Probe
agatttcaacttaacttgaccgctctgagc

SEQ ID NO: 3215 - DNA, 31 bp, Artificial Sequence
  Probe
agatttcaacttaacttgaccgctctgagct

SEQ ID NO: 3216 - DNA, 31 bp, Artificial Sequence
  Probe
agcaacctcggttcgaatccgagtcacggca

SEQ ID NO: 3217 - DNA, 33 bp, Artificial Sequence
  Probe
agcaacctcggttcgaatccgagtcacggcaaa

SEQ ID NO: 3218 - DNA, 33 bp, Artificial Sequence
  Probe
agcaacctcggttcgaatccgagtcacggcagg

SEQ ID NO: 3219 - DNA, 34 bp, Artificial Sequence
  Probe
agcaacctcggttcgaatccgagtcacggcaggt

SEQ ID NO: 3220 - DNA, 33 bp, Artificial Sequence
  Probe
agcaacctcggttcgaatccgagtcacggcatt

SEQ ID NO: 3221 - DNA, 34 bp, Artificial Sequence
  Probe
agcaacctcggttcgaatccgagtcacggcattg

SEQ ID NO: 3222 - DNA, 31 bp, Artificial Sequence
  Probe
agcaatacactgaaaatgtttagacgggctc

SEQ ID NO: 3223 - DNA, 32 bp, Artificial Sequence
  Probe
agcaatacactgaaaatgtttagacgggctca

SEQ ID NO: 3224 - DNA, 33 bp, Artificial Sequence
  Probe
agcaatacactgaaaatgtttagacgggctcac

SEQ ID NO: 3225 - DNA, 34 bp, Artificial Sequence
  Probe
agcaatacactgaaaatgtttagacgggctcaca

SEQ ID NO: 3226 - DNA, 42 bp, Artificial Sequence
  Probe
agcaatacactgaaaatgtttagacgggctcacatcacccca

SEQ ID NO: 3227 - DNA, 43 bp, Artificial Sequence
  Probe
agcaatacactgaaaatgtttagacgggctcacatcaccccat

SEQ ID NO: 3228 - DNA, 49 bp, Artificial Sequence
  Probe
agcaatacactgaaaatgtttagacgggctcacatcaccccataaacaa

SEQ ID NO: 3229 - DNA, 50 bp, Artificial Sequence
  Probe
agcaatacactgaaaatgtttagacgggctcacatcaccccataaacaaa

SEQ ID NO: 3230 - DNA, 17 bp, Artificial Sequence
  Probe
agcacccaacttacact

SEQ ID NO: 3231 - DNA, 18 bp, Artificial Sequence
  Probe
agcacccaacttacactt

SEQ ID NO: 3232 - DNA, 19 bp, Artificial Sequence
  Probe
agcacccaacttacactta

SEQ ID NO: 3233 - DNA, 20 bp, Artificial Sequence
  Probe
agcacccaacttacacttag

SEQ ID NO: 3234 - DNA, 21 bp, Artificial Sequence
  Probe
agcacccaacttacacttagg

SEQ ID NO: 3235 - DNA, 22 bp, Artificial Sequence
  Probe
agcacccaacttacacttagga

SEQ ID NO: 3236 - DNA, 23 bp, Artificial Sequence
  Probe
agcacccaacttacacttaggag

SEQ ID NO: 3237 - DNA, 24 bp, Artificial Sequence
  Probe
agcacccaacttacacttaggaga

SEQ ID NO: 3238 - DNA, 25 bp, Artificial Sequence
  Probe
agcacccaacttacacttaggagat

SEQ ID NO: 3239 - DNA, 26 bp, Artificial Sequence
  Probe
agcacccaacttacacttaggagatt

SEQ ID NO: 3240 - DNA, 29 bp, Artificial Sequence
  Probe
agcacccaacttacacttaggagatttca

SEQ ID NO: 3241 - DNA, 31 bp, Artificial Sequence
  Probe
agcacccaacttacacttaggagatttcaac

SEQ ID NO: 3242 - DNA, 32 bp, Artificial Sequence
  Probe
agcacccaacttacacttaggagatttcaact

SEQ ID NO: 3243 - DNA, 33 bp, Artificial Sequence
  Probe
agcacccaacttacacttaggagatttcaactt

SEQ ID NO: 3244 - DNA, 36 bp, Artificial Sequence
  Probe
agcacccaacttacacttaggagatttcaacttaac

SEQ ID NO: 3245 - DNA, 39 bp, Artificial Sequence
  Probe
agcacccaacttacacttaggagatttcaacttaacttg

SEQ ID NO: 3246 - DNA, 43 bp, Artificial Sequence
  Probe
agcacccaacttacacttaggagatttcaacttaacttgaccg

SEQ ID NO: 3247 - DNA, 44 bp, Artificial Sequence
  Probe
agcacccaacttacacttaggagatttcaacttaacttgaccgc

SEQ ID NO: 3248 - DNA, 45 bp, Artificial Sequence
  Probe
agcacccaacttacacttaggagatttcaacttaacttgaccgct

SEQ ID NO: 3249 - DNA, 46 bp, Artificial Sequence
  Probe
agcacccaacttacacttaggagatttcaacttaacttgaccgctc

SEQ ID NO: 3250 - DNA, 49 bp, Artificial Sequence
  Probe
agcacccaacttacacttaggagatttcaacttaacttgaccgctctga

SEQ ID NO: 3251 - DNA, 50 bp, Artificial Sequence
  Probe
agcacccaacttacacttaggagatttcaacttaacttgaccgctctgag

SEQ ID NO: 3252 - DNA, 24 bp, Artificial Sequence
  Probe
agcactctggactctgaatccagc

SEQ ID NO: 3253 - DNA, 25 bp, Artificial Sequence
  Probe
agcactctggactctgaatccagcg

SEQ ID NO: 3254 - DNA, 32 bp, Artificial Sequence
  Probe
agcactctggactctgaatccagcgatccgag

SEQ ID NO: 3255 - DNA, 21 bp, Artificial Sequence
  Probe
agcagagtggcgcagcggaag

SEQ ID NO: 3256 - DNA, 22 bp, Artificial Sequence
  Probe
agcagagtggcgcagcggaagc

SEQ ID NO: 3257 - DNA, 29 bp, Artificial Sequence
  Probe
agcagagtggcgcagcggaagcgtgctgg

SEQ ID NO: 3258 - DNA, 50 bp, Artificial Sequence
  Probe
agcagagtggcgcagcggaagcgtgctgggcccataacccagaggtcgat

SEQ ID NO: 3259 - DNA, 25 bp, Artificial Sequence
  Probe
agcagcttcaaacctgccggggctt

SEQ ID NO: 3260 - DNA, 26 bp, Artificial Sequence
  Probe
agcagcttcaaacctgccggggcttc

SEQ ID NO: 3261 - DNA, 27 bp, Artificial Sequence
  Probe
agcagcttcaaacctgccggggcttct

SEQ ID NO: 3262 - DNA, 29 bp, Artificial Sequence
  Probe
agcatagctgccttccaagcagttgaccc

SEQ ID NO: 3263 - DNA, 30 bp, Artificial Sequence
  Probe
agcatagctgccttccaagcagttgacccg

SEQ ID NO: 3264 - DNA, 50 bp, Artificial Sequence
  Probe
agcatagctgccttccaagcagttgacccgggttcgattcccggccaacg

SEQ ID NO: 3265 - DNA, 27 bp, Artificial Sequence
  Probe
agcatgagactcttaatctcagggtcg

SEQ ID NO: 3266 - DNA, 29 bp, Artificial Sequence
  Probe
agcatgagactcttaatctcagggtcgtg

SEQ ID NO: 3267 - DNA, 25 bp, Artificial Sequence
  Probe
agcatgggactcttaatcccagggt

SEQ ID NO: 3268 - DNA, 27 bp, Artificial Sequence
  Probe
agcatgggactcttaatcccagggtcg

SEQ ID NO: 3269 - DNA, 29 bp, Artificial Sequence
  Probe
agcatgggactcttaatcccagggtcgtg

SEQ ID NO: 3270 - DNA, 30 bp, Artificial Sequence
  Probe
agcatgggactcttaatcccagggtcgtgg

SEQ ID NO: 3271 - DNA, 17 bp, Artificial Sequence
  Probe
agcattaaccttttaag

SEQ ID NO: 3272 - DNA, 18 bp, Artificial Sequence
  Probe
agcattaaccttttaagt

SEQ ID NO: 3273 - DNA, 38 bp, Artificial Sequence
  Probe
agcattaaccttttaagttaaagattaagagaaccaac

SEQ ID NO: 3274 - DNA, 40 bp, Artificial Sequence
  Probe
agcattaaccttttaagttaaagattaagagaaccaacac

SEQ ID NO: 3275 - DNA, 41 bp, Artificial Sequence
  Probe
agcattaaccttttaagttaaagattaagagaaccaacacc

SEQ ID NO: 3276 - DNA, 43 bp, Artificial Sequence
  Probe
agcattaaccttttaagttaaagattaagagaaccaacacctc

SEQ ID NO: 3277 - DNA, 46 bp, Artificial Sequence
  Probe
agcattaaccttttaagttaaagattaagagaaccaacacctcttt

SEQ ID NO: 3278 - DNA, 47 bp, Artificial Sequence
  Probe
agcattaaccttttaagttaaagattaagagaaccaacacctcttta

SEQ ID NO: 3279 - DNA, 48 bp, Artificial Sequence
  Probe
agcattaaccttttaagttaaagattaagagaaccaacacctctttac

SEQ ID NO: 3280 - DNA, 49 bp, Artificial Sequence
  Probe
agcattaaccttttaagttaaagattaagagaaccaacacctctttaca

SEQ ID NO: 3281 - DNA, 50 bp, Artificial Sequence
  Probe
agcattggactgtaaatctaaagacaggggttaggcctctttttaccagc

SEQ ID NO: 3282 - DNA, 33 bp, Artificial Sequence
  Probe
agcattggtggttcagtggtagaattctcgcct

SEQ ID NO: 3283 - DNA, 34 bp, Artificial Sequence
  Probe
agcattggtggttcagtggtagaattctcgcctg

SEQ ID NO: 3284 - DNA, 39 bp, Artificial Sequence
  Probe
agccagggattgtgggttcgagtcccacccggggtaaag

SEQ ID NO: 3285 - DNA, 39 bp, Artificial Sequence
  Probe
agccagggattgtgggttcgagtcccacctggggtgtcg

SEQ ID NO: 3286 - DNA, 29 bp, Artificial Sequence
  Probe
agccagggattgtgggttcgagtcccatc

SEQ ID NO: 3287 - DNA, 39 bp, Artificial Sequence
  Probe
agccagggattgtgggttcgagtcccatctggggtggcc

SEQ ID NO: 3288 - DNA, 50 bp, Artificial Sequence
  Probe
agccagttgattagggtgcttagctgttaactaagtgtttgtgggtttaa

SEQ ID NO: 3289 - DNA, 33 bp, Artificial Sequence
  Probe
agcccggctagctcagtcggtagagcatgggac

SEQ ID NO: 3290 - DNA, 22 bp, Artificial Sequence
  Probe
agcccggtaatcgcataaaact

SEQ ID NO: 3291 - DNA, 37 bp, Artificial Sequence
  Probe
agcccggtaatcgcataaaacttaaaactttacagtc

SEQ ID NO: 3292 - DNA, 40 bp, Artificial Sequence
  Probe
agcccggtaatcgcataaaacttaaaactttacagtcaga

SEQ ID NO: 3293 - DNA, 44 bp, Artificial Sequence
  Probe
agcccggtaatcgcataaaacttaaaactttacagtcagaggtt

SEQ ID NO: 3294 - DNA, 45 bp, Artificial Sequence
  Probe
agcccggtaatcgcataaaacttaaaactttacagtcagaggttc

SEQ ID NO: 3295 - DNA, 49 bp, Artificial Sequence
  Probe
agcccggtaatcgcataaaacttaaaactttacagtcagaggttcaatt

SEQ ID NO: 3296 - DNA, 50 bp, Artificial Sequence
  Probe
agcccggtaatcgcataaaacttaaaactttacagtcagaggttcaattc

SEQ ID NO: 3297 - DNA, 23 bp, Artificial Sequence
  Probe
agccctcagtaagttgcaatact

SEQ ID NO: 3298 - DNA, 32 bp, Artificial Sequence
  Probe
agccctcagtaagttgcaatacttaatttctg

SEQ ID NO: 3299 - DNA, 15 bp, Artificial Sequence
  Probe
agcctttctattagc

SEQ ID NO: 3300 - DNA, 29 bp, Artificial Sequence
  Probe
agcgatccgagttcaaatctcggtggaac

SEQ ID NO: 3301 - DNA, 32 bp, Artificial Sequence
  Probe
agcgatccgagttcaaatctcggtggaacctg

SEQ ID NO: 3302 - DNA, 33 bp, Artificial Sequence
  Probe
agcgatccgagttcaaatctcggtggaacctgc

SEQ ID NO: 3303 - DNA, 34 bp, Artificial Sequence
  Probe
agcgatccgagttcaaatctcggtggaacctgca

SEQ ID NO: 3304 - DNA, 32 bp, Artificial Sequence
  Probe
agcgatccgagttcaaatctcggtggaacctt

SEQ ID NO: 3305 - DNA, 33 bp, Artificial Sequence
  Probe
agcgatccgagttcaaatctcggtgggacctca

SEQ ID NO: 3306 - DNA, 34 bp, Artificial Sequence
  Probe
agcgatccgagttcaaatctcggtgggacctcac

SEQ ID NO: 3307 - DNA, 29 bp, Artificial Sequence
  Probe
agcgatccgagttcgagtctcggtggaac

SEQ ID NO: 3308 - DNA, 31 bp, Artificial Sequence
  Probe
agcgatccgagttcgagtctcggtggaacct

SEQ ID NO: 3309 - DNA, 33 bp, Artificial Sequence
  Probe
agcgatccgagttcgagtctcggtggaaccttt

SEQ ID NO: 3310 - DNA, 33 bp, Artificial Sequence
  Probe
agcgccgctggtgtagtggtatcatgcaagatt

SEQ ID NO: 3311 - DNA, 37 bp, Artificial Sequence
  Probe
agcgccgctggtgtagtggtatcatgcaagattccca

SEQ ID NO: 3312 - DNA, 50 bp, Artificial Sequence
  Probe
agcgcgttcggctgttaaccgaaaggttggtggttcgagcccacccaggg

SEQ ID NO: 3313 - DNA, 22 bp, Artificial Sequence
  Probe
agcggaagcgtgctgggcccat

SEQ ID NO: 3314 - DNA, 44 bp, Artificial Sequence
  Probe
agcggagccttcgatagctcagttggtagagcggaggactgtag

SEQ ID NO: 3315 - DNA, 31 bp, Artificial Sequence
  Probe
agctaaacctagccccaaacccactccacct

SEQ ID NO: 3316 - DNA, 23 bp, Artificial Sequence
  Probe
agctaaataagctatcgggccca

SEQ ID NO: 3317 - DNA, 24 bp, Artificial Sequence
  Probe
agctaaataagctatcgggcccat

SEQ ID NO: 3318 - DNA, 25 bp, Artificial Sequence
  Probe
agctaaataagctatcgggcccata

SEQ ID NO: 3319 - DNA, 26 bp, Artificial Sequence
  Probe
agctaaataagctatcgggcccatac

SEQ ID NO: 3320 - DNA, 27 bp, Artificial Sequence
  Probe
agctaaataagctatcgggcccatacc

SEQ ID NO: 3321 - DNA, 29 bp, Artificial Sequence
  Probe
agctaaataagctatcgggcccatacccc

SEQ ID NO: 3322 - DNA, 35 bp, Artificial Sequence
  Probe
agctaaataagctatcgggcccataccccgaaaat

SEQ ID NO: 3323 - DNA, 39 bp, Artificial Sequence
  Probe
agctaaataagctatcgggcccataccccgaaaatgttg

SEQ ID NO: 3324 - DNA, 43 bp, Artificial Sequence
  Probe
agctaaataagctatcgggcccataccccgaaaatgttggtta

SEQ ID NO: 3325 - DNA, 50 bp, Artificial Sequence
  Probe
agctaaataagctatcgggcccataccccgaaaatgttggttataccctt

SEQ ID NO: 3326 - DNA, 50 bp, Artificial Sequence
  Probe
agctatccattggtcttaggccccaaaaattttggtgcaactccaaataa

SEQ ID NO: 3327 - DNA, 20 bp, Artificial Sequence
  Probe
agctatcgggcccatacccc

SEQ ID NO: 3328 - DNA, 21 bp, Artificial Sequence
  Probe
agctatcgggcccataccccg

SEQ ID NO: 3329 - DNA, 22 bp, Artificial Sequence
  Probe
agctatcgggcccataccccga

SEQ ID NO: 3330 - DNA, 23 bp, Artificial Sequence
  Probe
agctatcgggcccataccccgaa

SEQ ID NO: 3331 - DNA, 24 bp, Artificial Sequence
  Probe
agctatcgggcccataccccgaaa

SEQ ID NO: 3332 - DNA, 25 bp, Artificial Sequence
  Probe
agctatcgggcccataccccgaaaa

SEQ ID NO: 3333 - DNA, 26 bp, Artificial Sequence
  Probe
agctatcgggcccataccccgaaaat

SEQ ID NO: 3334 - DNA, 27 bp, Artificial Sequence
  Probe
agctatcgggcccataccccgaaaatg

SEQ ID NO: 3335 - DNA, 28 bp, Artificial Sequence
  Probe
agctatcgggcccataccccgaaaatgt

SEQ ID NO: 3336 - DNA, 29 bp, Artificial Sequence
  Probe
agctatcgggcccataccccgaaaatgtt

SEQ ID NO: 3337 - DNA, 30 bp, Artificial Sequence
  Probe
agctatcgggcccataccccgaaaatgttg

SEQ ID NO: 3338 - DNA, 31 bp, Artificial Sequence
  Probe
agctatcgggcccataccccgaaaatgttgg

SEQ ID NO: 3339 - DNA, 32 bp, Artificial Sequence
  Probe
agctatcgggcccataccccgaaaatgttggt

SEQ ID NO: 3340 - DNA, 33 bp, Artificial Sequence
  Probe
agctatcgggcccataccccgaaaatgttggtt

SEQ ID NO: 3341 - DNA, 34 bp, Artificial Sequence
  Probe
agctatcgggcccataccccgaaaatgttggtta

SEQ ID NO: 3342 - DNA, 40 bp, Artificial Sequence
  Probe
agctatcgggcccataccccgaaaatgttggttataccct

SEQ ID NO: 3343 - DNA, 41 bp, Artificial Sequence
  Probe
agctatcgggcccataccccgaaaatgttggttataccctt

SEQ ID NO: 3344 - DNA, 43 bp, Artificial Sequence
  Probe
agctatcgggcccataccccgaaaatgttggttatacccttcc

SEQ ID NO: 3345 - DNA, 45 bp, Artificial Sequence
  Probe
agctatcgggcccataccccgaaaatgttggttatacccttcccg

SEQ ID NO: 3346 - DNA, 46 bp, Artificial Sequence
  Probe
agctatcgggcccataccccgaaaatgttggttatacccttcccgt

SEQ ID NO: 3347 - DNA, 48 bp, Artificial Sequence
  Probe
agctatcgggcccataccccgaaaatgttggttatacccttcccgtac

SEQ ID NO: 3348 - DNA, 49 bp, Artificial Sequence
  Probe
agctatcgggcccataccccgaaaatgttggttatacccttcccgtact

SEQ ID NO: 3349 - DNA, 26 bp, Artificial Sequence
  Probe
agctcacaagaactgctaactcatgc

SEQ ID NO: 3350 - DNA, 28 bp, Artificial Sequence
  Probe
agctcacaagaactgctaactcatgccc

SEQ ID NO: 3351 - DNA, 31 bp, Artificial Sequence
  Probe
agctcacaagaactgctaactcatgccccca

SEQ ID NO: 3352 - DNA, 25 bp, Artificial Sequence
  Probe
agctcagtcggtagagcatcagact

SEQ ID NO: 3353 - DNA, 25 bp, Artificial Sequence
  Probe
agctcagtcggtagagcatgagact

SEQ ID NO: 3354 - DNA, 26 bp, Artificial Sequence
  Probe
agctcagtcggtagagcatgagactc

SEQ ID NO: 3355 - DNA, 27 bp, Artificial Sequence
  Probe
agctcagtcggtagagcatgagactct

SEQ ID NO: 3356 - DNA, 26 bp, Artificial Sequence
  Probe
agctcagtcggtagagcatgggactc

SEQ ID NO: 3357 - DNA, 27 bp, Artificial Sequence
  Probe
agctcagtcggtagagcatgggactct

SEQ ID NO: 3358 - DNA, 18 bp, Artificial Sequence
  Probe
agctccgaggtgattttc

SEQ ID NO: 3359 - DNA, 19 bp, Artificial Sequence
  Probe
agctccgaggtgattttca

SEQ ID NO: 3360 - DNA, 23 bp, Artificial Sequence
  Probe
agctccgaggtgattttcatatt

SEQ ID NO: 3361 - DNA, 28 bp, Artificial Sequence
  Probe
agctccgaggtgattttcatattgaatt

SEQ ID NO: 3362 - DNA, 29 bp, Artificial Sequence
  Probe
agctccgaggtgattttcatattgaattg

SEQ ID NO: 3363 - DNA, 33 bp, Artificial Sequence
  Probe
agctccgaggtgattttcatattgaattgcaaa

SEQ ID NO: 3364 - DNA, 35 bp, Artificial Sequence
  Probe
agctccgaggtgattttcatattgaattgcaaatt

SEQ ID NO: 3365 - DNA, 37 bp, Artificial Sequence
  Probe
agctccgaggtgattttcatattgaattgcaaattcg

SEQ ID NO: 3366 - DNA, 38 bp, Artificial Sequence
  Probe
agctccgaggtgattttcatattgaattgcaaattcga

SEQ ID NO: 3367 - DNA, 39 bp, Artificial Sequence
  Probe
agctccgaggtgattttcatattgaattgcaaattcgaa

SEQ ID NO: 3368 - DNA, 40 bp, Artificial Sequence
  Probe
agctccgaggtgattttcatattgaattgcaaattcgaag

SEQ ID NO: 3369 - DNA, 44 bp, Artificial Sequence
  Probe
agctccgaggtgattttcatattgaattgcaaattcgaagaagc

SEQ ID NO: 3370 - DNA, 45 bp, Artificial Sequence
  Probe
agctccgaggtgattttcatattgaattgcaaattcgaagaagca

SEQ ID NO: 3371 - DNA, 46 bp, Artificial Sequence
  Probe
agctccgaggtgattttcatattgaattgcaaattcgaagaagcag

SEQ ID NO: 3372 - DNA, 48 bp, Artificial Sequence
  Probe
agctccgaggtgattttcatattgaattgcaaattcgaagaagcagct

SEQ ID NO: 3373 - DNA, 49 bp, Artificial Sequence
  Probe
agctccgaggtgattttcatattgaattgcaaattcgaagaagcagctt

SEQ ID NO: 3374 - DNA, 50 bp, Artificial Sequence
  Probe
agctccgaggtgattttcatattgaattgcaaattcgaagaagcagcttc

SEQ ID NO: 3375 - DNA, 39 bp, Artificial Sequence
  Probe
agctggggattgtgggttcgagtcccatctgggtcgcgt

SEQ ID NO: 3376 - DNA, 27 bp, Artificial Sequence
  Probe
agctgttaactaagtgtttgtgggttt

SEQ ID NO: 3377 - DNA, 43 bp, Artificial Sequence
  Probe
agctgttaactaagtgtttgtgggtttaagtcccattggtcta

SEQ ID NO: 3378 - DNA, 23 bp, Artificial Sequence
  Probe
agcttaaacccccttatttctag

SEQ ID NO: 3379 - DNA, 24 bp, Artificial Sequence
  Probe
agcttaaacccccttatttctagg

SEQ ID NO: 3380 - DNA, 25 bp, Artificial Sequence
  Probe
agcttaaacccccttatttctagga

SEQ ID NO: 3381 - DNA, 21 bp, Artificial Sequence
  Probe
agcttcaaacctgccggggct

SEQ ID NO: 3382 - DNA, 23 bp, Artificial Sequence
  Probe
agcttcaaacctgccggggcttc

SEQ ID NO: 3383 - DNA, 24 bp, Artificial Sequence
  Probe
agcttcaaacctgccggggcttct

SEQ ID NO: 3384 - DNA, 25 bp, Artificial Sequence
  Probe
agcttcaaacctgccggggcttctc

SEQ ID NO: 3385 - DNA, 28 bp, Artificial Sequence
  Probe
agctttggggggttcgattccttccttt

SEQ ID NO: 3386 - DNA, 29 bp, Artificial Sequence
  Probe
agctttggggggttcgattccttcctttt

SEQ ID NO: 3387 - DNA, 31 bp, Artificial Sequence
  Probe
agctttggggggttcgattccttcctttttt

SEQ ID NO: 3388 - DNA, 32 bp, Artificial Sequence
  Probe
agctttggggggttcgattccttccttttttg

SEQ ID NO: 3389 - DNA, 33 bp, Artificial Sequence
  Probe
agctttggggggttcgattccttccttttttgt

SEQ ID NO: 3390 - DNA, 34 bp, Artificial Sequence
  Probe
agctttggggggttcgattccttccttttttgtc

SEQ ID NO: 3391 - DNA, 35 bp, Artificial Sequence
  Probe
agctttggggggttcgattccttccttttttgtct

SEQ ID NO: 3392 - DNA, 45 bp, Artificial Sequence
  Probe
agctttgggtgctaatggtggagttaaagactttttctctgattt

SEQ ID NO: 3393 - DNA, 50 bp, Artificial Sequence
  Probe
agctttgggtgctaatggtggagttaaagactttttctctgatttgtcct

SEQ ID NO: 3394 - DNA, 26 bp, Artificial Sequence
  Probe
aggagatcctgggttcgaatcccagc

SEQ ID NO: 3395 - DNA, 27 bp, Artificial Sequence
  Probe
aggagatcctgggttcgaatcccagcg

SEQ ID NO: 3396 - DNA, 33 bp, Artificial Sequence
  Probe
aggagatcctgggttcgaatcccagcggggcct

SEQ ID NO: 3397 - DNA, 31 bp, Artificial Sequence
  Probe
aggagatcctgggttcgaatcccagcggtgc

SEQ ID NO: 3398 - DNA, 32 bp, Artificial Sequence
  Probe
aggagatcctgggttcgaatcccagcggtgcc

SEQ ID NO: 3399 - DNA, 35 bp, Artificial Sequence
  Probe
aggagatcctgggttcgaatcccagcggtgcctcc

SEQ ID NO: 3400 - DNA, 36 bp, Artificial Sequence
  Probe
aggagatcctgggttcgaatcccagcggtgcctccg

SEQ ID NO: 3401 - DNA, 33 bp, Artificial Sequence
  Probe
aggagatcctgggttcgactcccagtggggcct

SEQ ID NO: 3402 - DNA, 17 bp, Artificial Sequence
  Probe
aggagatttcaacttaa

SEQ ID NO: 3403 - DNA, 23 bp, Artificial Sequence
  Probe
aggagatttcaacttaacttgac

SEQ ID NO: 3404 - DNA, 24 bp, Artificial Sequence
  Probe
aggagatttcaacttaacttgacc

SEQ ID NO: 3405 - DNA, 25 bp, Artificial Sequence
  Probe
aggagatttcaacttaacttgaccg

SEQ ID NO: 3406 - DNA, 26 bp, Artificial Sequence
  Probe
aggagatttcaacttaacttgaccgc

SEQ ID NO: 3407 - DNA, 27 bp, Artificial Sequence
  Probe
aggagatttcaacttaacttgaccgct

SEQ ID NO: 3408 - DNA, 28 bp, Artificial Sequence
  Probe
aggagatttcaacttaacttgaccgctc

SEQ ID NO: 3409 - DNA, 29 bp, Artificial Sequence
  Probe
aggagatttcaacttaacttgaccgctct

SEQ ID NO: 3410 - DNA, 30 bp, Artificial Sequence
  Probe
aggagatttcaacttaacttgaccgctctg

SEQ ID NO: 3411 - DNA, 31 bp, Artificial Sequence
  Probe
aggagatttcaacttaacttgaccgctctga

SEQ ID NO: 3412 - DNA, 32 bp, Artificial Sequence
  Probe
aggagatttcaacttaacttgaccgctctgag

SEQ ID NO: 3413 - DNA, 33 bp, Artificial Sequence
  Probe
aggagatttcaacttaacttgaccgctctgagc

SEQ ID NO: 3414 - DNA, 34 bp, Artificial Sequence
  Probe
aggagatttcaacttaacttgaccgctctgagct

SEQ ID NO: 3415 - DNA, 27 bp, Artificial Sequence
  Probe
aggagcttaaacccccttatttctagg

SEQ ID NO: 3416 - DNA, 21 bp, Artificial Sequence
  Probe
aggatggccgagcggtctaag

SEQ ID NO: 3417 - DNA, 48 bp, Artificial Sequence
  Probe
aggattcctggttttcacccaggcggcccgggttcgactcccggtgtg

SEQ ID NO: 3418 - DNA, 50 bp, Artificial Sequence
  Probe
aggattcctggttttcacccaggcggcccgggttcgactcccggtgtggg

SEQ ID NO: 3419 - DNA, 50 bp, Artificial Sequence
  Probe
aggattcggcgctctcaccgccgcggcccgggttcgattcccggtcaggg

SEQ ID NO: 3420 - DNA, 27 bp, Artificial Sequence
  Probe
aggcatcagcctccggagctggggatt

SEQ ID NO: 3421 - DNA, 29 bp, Artificial Sequence
  Probe
aggcatcagcctccggagctggggattgt

SEQ ID NO: 3422 - DNA, 16 bp, Artificial Sequence
  Probe
aggcattggcctccta

SEQ ID NO: 3423 - DNA, 25 bp, Artificial Sequence
  Probe
aggcattggcctcctaagccaggga

SEQ ID NO: 3424 - DNA, 31 bp, Artificial Sequence
  Probe
aggcattggcctcctaagccagggattgtgg

SEQ ID NO: 3425 - DNA, 23 bp, Artificial Sequence
  Probe
aggccccgggttcaatccccggc

SEQ ID NO: 3426 - DNA, 30 bp, Artificial Sequence
  Probe
aggcggcccgggttcgactcccggtgtggg

SEQ ID NO: 3427 - DNA, 35 bp, Artificial Sequence
  Probe
aggcggcccgggttcgactcccggtgtgggaacgc

SEQ ID NO: 3428 - DNA, 25 bp, Artificial Sequence
  Probe
aggctaaatcctatatatcttaatg

SEQ ID NO: 3429 - DNA, 17 bp, Artificial Sequence
  Probe
aggcttacgacccctta

SEQ ID NO: 3430 - DNA, 24 bp, Artificial Sequence
  Probe
aggcttacgaccccttatttaccg

SEQ ID NO: 3431 - DNA, 25 bp, Artificial Sequence
  Probe
aggcttacgaccccttatttaccga

SEQ ID NO: 3432 - DNA, 31 bp, Artificial Sequence
  Probe
agggatgggttcgattctcatagtcctagaa

SEQ ID NO: 3433 - DNA, 32 bp, Artificial Sequence
  Probe
agggatgggttcgattctcatagtcctagaaa

SEQ ID NO: 3434 - DNA, 25 bp, Artificial Sequence
  Probe
agggattgtgggttcgagtcccacc

SEQ ID NO: 3435 - DNA, 26 bp, Artificial Sequence
  Probe
agggattgtgggttcgagtcccacct

SEQ ID NO: 3436 - DNA, 32 bp, Artificial Sequence
  Probe
agggattgtgggttcgagtcccatctggggtg

SEQ ID NO: 3437 - DNA, 33 bp, Artificial Sequence
  Probe
agggattgtgggttcgagtcccatctggggtgg

SEQ ID NO: 3438 - DNA, 17 bp, Artificial Sequence
  Probe
aggggtatgattctcgc

SEQ ID NO: 3439 - DNA, 18 bp, Artificial Sequence
  Probe
aggggtatgattctcgct

SEQ ID NO: 3440 - DNA, 33 bp, Artificial Sequence
  Probe
aggggtcgcgagttcaaatctcgctggggcctc

SEQ ID NO: 3441 - DNA, 25 bp, Artificial Sequence
  Probe
aggggtcgcgagttcaattctcgct

SEQ ID NO: 3442 - DNA, 35 bp, Artificial Sequence
  Probe
aggggtcgcgagttcaattctcgctggggcctgtg

SEQ ID NO: 3443 - DNA, 25 bp, Artificial Sequence
  Probe
agggtcgtgggttcgagccccacgt

SEQ ID NO: 3444 - DNA, 29 bp, Artificial Sequence
  Probe
agggtcgtgggttcgagccccacgttggg

SEQ ID NO: 3445 - DNA, 34 bp, Artificial Sequence
  Probe
agggtcgtgggttcgagccccacgttgggcgggt

SEQ ID NO: 3446 - DNA, 18 bp, Artificial Sequence
  Probe
agggtgcgagaggtcccg

SEQ ID NO: 3447 - DNA, 19 bp, Artificial Sequence
  Probe
agggtgcgagaggtcccgg

SEQ ID NO: 3448 - DNA, 23 bp, Artificial Sequence
  Probe
aggtcagctaaataagctatcgg

SEQ ID NO: 3449 - DNA, 24 bp, Artificial Sequence
  Probe
aggtcagctaaataagctatcggg

SEQ ID NO: 3450 - DNA, 26 bp, Artificial Sequence
  Probe
aggtcagctaaataagctatcgggcc

SEQ ID NO: 3451 - DNA, 27 bp, Artificial Sequence
  Probe
aggtcagctaaataagctatcgggccc

SEQ ID NO: 3452 - DNA, 28 bp, Artificial Sequence
  Probe
aggtcagctaaataagctatcgggccca

SEQ ID NO: 3453 - DNA, 29 bp, Artificial Sequence
  Probe
aggtcagctaaataagctatcgggcccat

SEQ ID NO: 3454 - DNA, 30 bp, Artificial Sequence
  Probe
aggtcagctaaataagctatcgggcccata

SEQ ID NO: 3455 - DNA, 31 bp, Artificial Sequence
  Probe
aggtcagctaaataagctatcgggcccatac

SEQ ID NO: 3456 - DNA, 32 bp, Artificial Sequence
  Probe
aggtcagctaaataagctatcgggcccatacc

SEQ ID NO: 3457 - DNA, 33 bp, Artificial Sequence
  Probe
aggtcagctaaataagctatcgggcccataccc

SEQ ID NO: 3458 - DNA, 34 bp, Artificial Sequence
  Probe
aggtcagctaaataagctatcgggcccatacccc

SEQ ID NO: 3459 - DNA, 35 bp, Artificial Sequence
  Probe
aggtcagctaaataagctatcgggcccataccccg

SEQ ID NO: 3460 - DNA, 36 bp, Artificial Sequence
  Probe
aggtcagctaaataagctatcgggcccataccccga

SEQ ID NO: 3461 - DNA, 37 bp, Artificial Sequence
  Probe
aggtcagctaaataagctatcgggcccataccccgaa

SEQ ID NO: 3462 - DNA, 38 bp, Artificial Sequence
  Probe
aggtcagctaaataagctatcgggcccataccccgaaa

SEQ ID NO: 3463 - DNA, 39 bp, Artificial Sequence
  Probe
aggtcagctaaataagctatcgggcccataccccgaaaa

SEQ ID NO: 3464 - DNA, 40 bp, Artificial Sequence
  Probe
aggtcagctaaataagctatcgggcccataccccgaaaat

SEQ ID NO: 3465 - DNA, 41 bp, Artificial Sequence
  Probe
aggtcagctaaataagctatcgggcccataccccgaaaatg

SEQ ID NO: 3466 - DNA, 42 bp, Artificial Sequence
  Probe
aggtcagctaaataagctatcgggcccataccccgaaaatgt

SEQ ID NO: 3467 - DNA, 43 bp, Artificial Sequence
  Probe
aggtcagctaaataagctatcgggcccataccccgaaaatgtt

SEQ ID NO: 3468 - DNA, 44 bp, Artificial Sequence
  Probe
aggtcagctaaataagctatcgggcccataccccgaaaatgttg

SEQ ID NO: 3469 - DNA, 45 bp, Artificial Sequence
  Probe
aggtcagctaaataagctatcgggcccataccccgaaaatgttgg

SEQ ID NO: 3470 - DNA, 46 bp, Artificial Sequence
  Probe
aggtcagctaaataagctatcgggcccataccccgaaaatgttggt

SEQ ID NO: 3471 - DNA, 47 bp, Artificial Sequence
  Probe
aggtcagctaaataagctatcgggcccataccccgaaaatgttggtt

SEQ ID NO: 3472 - DNA, 48 bp, Artificial Sequence
  Probe
aggtcagctaaataagctatcgggcccataccccgaaaatgttggtta

SEQ ID NO: 3473 - DNA, 49 bp, Artificial Sequence
  Probe
aggtcagctaaataagctatcgggcccataccccgaaaatgttggttat

SEQ ID NO: 3474 - DNA, 50 bp, Artificial Sequence
  Probe
aggtcagctaaataagctatcgggcccataccccgaaaatgttggttata

SEQ ID NO: 3475 - DNA, 27 bp, Artificial Sequence
  Probe
aggtcccgggttcgatccccagcatct

SEQ ID NO: 3476 - DNA, 33 bp, Artificial Sequence
  Probe
aggtcccgggttcgatccccagcatctccagtg

SEQ ID NO: 3477 - DNA, 32 bp, Artificial Sequence
  Probe
aggtcctgggttcgagccccagtggaaccacg

SEQ ID NO: 3478 - DNA, 33 bp, Artificial Sequence
  Probe
aggtcctgggttcgagccccagtggaaccacgg

SEQ ID NO: 3479 - DNA, 33 bp, Artificial Sequence
  Probe
aggtcgatggatcgaaaccatcctctgctaggt

SEQ ID NO: 3480 - DNA, 23 bp, Artificial Sequence
  Probe
aggtcgcgggttcgatccccgta

SEQ ID NO: 3481 - DNA, 32 bp, Artificial Sequence
  Probe
aggtcgcgggttcgatccccgtacgggccaca

SEQ ID NO: 3482 - DNA, 32 bp, Artificial Sequence
  Probe
aggtcgcgggttcgatccccgtacgggccacg

SEQ ID NO: 3483 - DNA, 33 bp, Artificial Sequence
  Probe
aggtcgcgggttcgatccccgtacgggccacga

SEQ ID NO: 3484 - DNA, 32 bp, Artificial Sequence
  Probe
aggtcgcgggttcgatccccgtacgggccact

SEQ ID NO: 3485 - DNA, 33 bp, Artificial Sequence
  Probe
aggtcgcgggttcgatccccgtacgggccactg

SEQ ID NO: 3486 - DNA, 33 bp, Artificial Sequence
  Probe
aggtcgtgagttcgatcctcacacggggcacaa

SEQ ID NO: 3487 - DNA, 29 bp, Artificial Sequence
  Probe
aggtgcctcgttagcgcagtaggtagcgc

SEQ ID NO: 3488 - DNA, 32 bp, Artificial Sequence
  Probe
aggtggcccgggttcgactcccggtatgggaa

SEQ ID NO: 3489 - DNA, 33 bp, Artificial Sequence
  Probe
aggtggcccgggttcgactcccggtatgggaac

SEQ ID NO: 3490 - DNA, 35 bp, Artificial Sequence
  Probe
aggtggcccgggttcgactcccggtatgggaacaa

SEQ ID NO: 3491 - DNA, 24 bp, Artificial Sequence
  Probe
aggttccgggttcgagtcccggca

SEQ ID NO: 3492 - DNA, 27 bp, Artificial Sequence
  Probe
aggttccgggttcgagtcccggcggag

SEQ ID NO: 3493 - DNA, 23 bp, Artificial Sequence
  Probe
aggttcgactcctggctggctcg

SEQ ID NO: 3494 - DNA, 26 bp, Artificial Sequence
  Probe
aggttcgactcctggctggctcgcga

SEQ ID NO: 3495 - DNA, 33 bp, Artificial Sequence
  Probe
aggttgcgtgttcaaatcacgtcggggtcaaca

SEQ ID NO: 3496 - DNA, 33 bp, Artificial Sequence
  Probe
aggttggtggttcgagcccacccagggacgcct

SEQ ID NO: 3497 - DNA, 23 bp, Artificial Sequence
  Probe
aggttgtgggttcgagtcccacc

SEQ ID NO: 3498 - DNA, 27 bp, Artificial Sequence
  Probe
aggtttggtcctagcctttctattagc

SEQ ID NO: 3499 - DNA, 37 bp, Artificial Sequence
  Probe
agtaaataataggagcttaaacccccttatttctagg

SEQ ID NO: 3500 - DNA, 38 bp, Artificial Sequence
  Probe
agtaaataataggagcttaaacccccttatttctagga

SEQ ID NO: 3501 - DNA, 16 bp, Artificial Sequence
  Probe
agtaaggtcagctaaa

SEQ ID NO: 3502 - DNA, 17 bp, Artificial Sequence
  Probe
agtaaggtcagctaaat

SEQ ID NO: 3503 - DNA, 18 bp, Artificial Sequence
  Probe
agtaaggtcagctaaata

SEQ ID NO: 3504 - DNA, 20 bp, Artificial Sequence
  Probe
agtaaggtcagctaaataag

SEQ ID NO: 3505 - DNA, 21 bp, Artificial Sequence
  Probe
agtaaggtcagctaaataagc

SEQ ID NO: 3506 - DNA, 22 bp, Artificial Sequence
  Probe
agtaaggtcagctaaataagct

SEQ ID NO: 3507 - DNA, 23 bp, Artificial Sequence
  Probe
agtaaggtcagctaaataagcta

SEQ ID NO: 3508 - DNA, 24 bp, Artificial Sequence
  Probe
agtaaggtcagctaaataagctat

SEQ ID NO: 3509 - DNA, 25 bp, Artificial Sequence
  Probe
agtaaggtcagctaaataagctatc

SEQ ID NO: 3510 - DNA, 26 bp, Artificial Sequence
  Probe
agtaaggtcagctaaataagctatcg

SEQ ID NO: 3511 - DNA, 27 bp, Artificial Sequence
  Probe
agtaaggtcagctaaataagctatcgg

SEQ ID NO: 3512 - DNA, 28 bp, Artificial Sequence
  Probe
agtaaggtcagctaaataagctatcggg

SEQ ID NO: 3513 - DNA, 29 bp, Artificial Sequence
  Probe
agtaaggtcagctaaataagctatcgggc

SEQ ID NO: 3514 - DNA, 30 bp, Artificial Sequence
  Probe
agtaaggtcagctaaataagctatcgggcc

SEQ ID NO: 3515 - DNA, 31 bp, Artificial Sequence
  Probe
agtaaggtcagctaaataagctatcgggccc

SEQ ID NO: 3516 - DNA, 32 bp, Artificial Sequence
  Probe
agtaaggtcagctaaataagctatcgggccca

SEQ ID NO: 3517 - DNA, 33 bp, Artificial Sequence
  Probe
agtaaggtcagctaaataagctatcgggcccat

SEQ ID NO: 3518 - DNA, 34 bp, Artificial Sequence
  Probe
agtaaggtcagctaaataagctatcgggcccata

SEQ ID NO: 3519 - DNA, 35 bp, Artificial Sequence
  Probe
agtaaggtcagctaaataagctatcgggcccatac

SEQ ID NO: 3520 - DNA, 36 bp, Artificial Sequence
  Probe
agtaaggtcagctaaataagctatcgggcccatacc

SEQ ID NO: 3521 - DNA, 37 bp, Artificial Sequence
  Probe
agtaaggtcagctaaataagctatcgggcccataccc

SEQ ID NO: 3522 - DNA, 38 bp, Artificial Sequence
  Probe
agtaaggtcagctaaataagctatcgggcccatacccc

SEQ ID NO: 3523 - DNA, 39 bp, Artificial Sequence
  Probe
agtaaggtcagctaaataagctatcgggcccataccccg

SEQ ID NO: 3524 - DNA, 40 bp, Artificial Sequence
  Probe
agtaaggtcagctaaataagctatcgggcccataccccga

SEQ ID NO: 3525 - DNA, 41 bp, Artificial Sequence
  Probe
agtaaggtcagctaaataagctatcgggcccataccccgaa

SEQ ID NO: 3526 - DNA, 42 bp, Artificial Sequence
  Probe
agtaaggtcagctaaataagctatcgggcccataccccgaaa

SEQ ID NO: 3527 - DNA, 43 bp, Artificial Sequence
  Probe
agtaaggtcagctaaataagctatcgggcccataccccgaaaa

SEQ ID NO: 3528 - DNA, 44 bp, Artificial Sequence
  Probe
agtaaggtcagctaaataagctatcgggcccataccccgaaaat

SEQ ID NO: 3529 - DNA, 45 bp, Artificial Sequence
  Probe
agtaaggtcagctaaataagctatcgggcccataccccgaaaatg

SEQ ID NO: 3530 - DNA, 46 bp, Artificial Sequence
  Probe
agtaaggtcagctaaataagctatcgggcccataccccgaaaatgt

SEQ ID NO: 3531 - DNA, 47 bp, Artificial Sequence
  Probe
agtaaggtcagctaaataagctatcgggcccataccccgaaaatgtt

SEQ ID NO: 3532 - DNA, 48 bp, Artificial Sequence
  Probe
agtaaggtcagctaaataagctatcgggcccataccccgaaaatgttg

SEQ ID NO: 3533 - DNA, 49 bp, Artificial Sequence
  Probe
agtaaggtcagctaaataagctatcgggcccataccccgaaaatgttgg

SEQ ID NO: 3534 - DNA, 50 bp, Artificial Sequence
  Probe
agtaaggtcagctaaataagctatcgggcccataccccgaaaatgttggt

SEQ ID NO: 3535 - DNA, 27 bp, Artificial Sequence
  Probe
agtaccgttaacttccaattaactagt

SEQ ID NO: 3536 - DNA, 32 bp, Artificial Sequence
  Probe
agtaccgttaacttccaattaactagttttga

SEQ ID NO: 3537 - DNA, 34 bp, Artificial Sequence
  Probe
agtaccgttaacttccaattaactagttttgaca

SEQ ID NO: 3538 - DNA, 37 bp, Artificial Sequence
  Probe
agtaccgttaacttccaattaactagttttgacaaca

SEQ ID NO: 3539 - DNA, 23 bp, Artificial Sequence
  Probe
agtactagcagttttgaaacttc

SEQ ID NO: 3540 - DNA, 50 bp, Artificial Sequence
  Probe
agtatccccgcctgtcacgcgggagaccggggttcaattccccgacgggg

SEQ ID NO: 3541 - DNA, 50 bp, Artificial Sequence
  Probe
agtatccccgcctgtcacgcgggagaccggggttcgattccccgacgggg

SEQ ID NO: 3542 - DNA, 22 bp, Artificial Sequence
  Probe
agtcagaggttcaattcctctt

SEQ ID NO: 3543 - DNA, 24 bp, Artificial Sequence
  Probe
agtcagaggttcaattcctcttct

SEQ ID NO: 3544 - DNA, 25 bp, Artificial Sequence
  Probe
agtcagaggttcaattcctcttctt

SEQ ID NO: 3545 - DNA, 29 bp, Artificial Sequence
  Probe
agtcagaggttcaattcctcttcttaaca

SEQ ID NO: 3546 - DNA, 32 bp, Artificial Sequence
  Probe
agtcagaggttcaattcctcttcttaacaaca

SEQ ID NO: 3547 - DNA, 19 bp, Artificial Sequence
  Probe
agtccgtgcgagaataatg

SEQ ID NO: 3548 - DNA, 37 bp, Artificial Sequence
  Probe
agtcgatagagcatgagactcttaatctcagggtcgt

SEQ ID NO: 3549 - DNA, 23 bp, Artificial Sequence
  Probe
agtcggtagagcatcagactttt

SEQ ID NO: 3550 - DNA, 16 bp, Artificial Sequence
  Probe
agtcggtagagcatga

SEQ ID NO: 3551 - DNA, 17 bp, Artificial Sequence
  Probe
agtcggtagagcatgag

SEQ ID NO: 3552 - DNA, 18 bp, Artificial Sequence
  Probe
agtcggtagagcatgaga

SEQ ID NO: 3553 - DNA, 19 bp, Artificial Sequence
  Probe
agtcggtagagcatgagac

SEQ ID NO: 3554 - DNA, 21 bp, Artificial Sequence
  Probe
agtcggtagagcatgagactc

SEQ ID NO: 3555 - DNA, 23 bp, Artificial Sequence
  Probe
agtcggtagagcatgagactctt

SEQ ID NO: 3556 - DNA, 37 bp, Artificial Sequence
  Probe
agtcggtagagcatgagactcttaatctcagggtcgt

SEQ ID NO: 3557 - DNA, 41 bp, Artificial Sequence
  Probe
agtcggtagagcatgagactcttaatctcagggtcgtgggt

SEQ ID NO: 3558 - DNA, 37 bp, Artificial Sequence
  Probe
agtcggtagagcatgggactcttaatcccagggtcgt

SEQ ID NO: 3559 - DNA, 39 bp, Artificial Sequence
  Probe
agtcggtagagcatgggactcttaatcccagggtcgtgg

SEQ ID NO: 3560 - DNA, 22 bp, Artificial Sequence
  Probe
agtctcataatctgaaggtcct

SEQ ID NO: 3561 - DNA, 23 bp, Artificial Sequence
  Probe
agtctcataatctgaaggtcctg

SEQ ID NO: 3562 - DNA, 24 bp, Artificial Sequence
  Probe
agtctcataatctgaaggtcctga

SEQ ID NO: 3563 - DNA, 25 bp, Artificial Sequence
  Probe
agtctcataatctgaaggtcctgag

SEQ ID NO: 3564 - DNA, 21 bp, Artificial Sequence
  Probe
agtctcataatctgaaggtcg

SEQ ID NO: 3565 - DNA, 22 bp, Artificial Sequence
  Probe
agtctcttcgggggcgtgggtt

SEQ ID NO: 3566 - DNA, 24 bp, Artificial Sequence
  Probe
agtctcttcgggggcgtgggttcg

SEQ ID NO: 3567 - DNA, 23 bp, Artificial Sequence
  Probe
agtctcttcgggggcgtgggttt

SEQ ID NO: 3568 - DNA, 40 bp, Artificial Sequence
  Probe
agtcttgtaaaccggagatgaaaacctttttccaaggaca

SEQ ID NO: 3569 - DNA, 43 bp, Artificial Sequence
  Probe
agtcttgtaaaccggagatgaaaacctttttccaaggacaaat

SEQ ID NO: 3570 - DNA, 23 bp, Artificial Sequence
  Probe
agtggggttttgcagtccttagc

SEQ ID NO: 3571 - DNA, 24 bp, Artificial Sequence
  Probe
agtggggttttgcagtccttagct

SEQ ID NO: 3572 - DNA, 17 bp, Artificial Sequence
  Probe
agtggtagaattctcgc

SEQ ID NO: 3573 - DNA, 18 bp, Artificial Sequence
  Probe
agtggtagaattctcgcc

SEQ ID NO: 3574 - DNA, 19 bp, Artificial Sequence
  Probe
agtggtagaattctcgcct

SEQ ID NO: 3575 - DNA, 20 bp, Artificial Sequence
  Probe
agtggtagaattctcgcctg

SEQ ID NO: 3576 - DNA, 21 bp, Artificial Sequence
  Probe
agtggtagaattctcgcctgc

SEQ ID NO: 3577 - DNA, 22 bp, Artificial Sequence
  Probe
agtggtagaattctcgcctgcc

SEQ ID NO: 3578 - DNA, 17 bp, Artificial Sequence
  Probe
agtggtagagcatttga

SEQ ID NO: 3579 - DNA, 20 bp, Artificial Sequence
  Probe
agtggtagagcatttgactg

SEQ ID NO: 3580 - DNA, 21 bp, Artificial Sequence
  Probe
agtggtagagcatttgactgc

SEQ ID NO: 3581 - DNA, 17 bp, Artificial Sequence
  Probe
agtggtagagcgcatgc

SEQ ID NO: 3582 - DNA, 18 bp, Artificial Sequence
  Probe
agtggtgagtatccccgc

SEQ ID NO: 3583 - DNA, 23 bp, Artificial Sequence
  Probe
agtggtgagtatccccgcctgtc

SEQ ID NO: 3584 - DNA, 50 bp, Artificial Sequence
  Probe
agtggtgagtatccccgcctgtcacgcgggagaccggggttcgattcccc

SEQ ID NO: 3585 - DNA, 22 bp, Artificial Sequence
  Probe
agtggttaggattcggcgctct

SEQ ID NO: 3586 - DNA, 23 bp, Artificial Sequence
  Probe
agtggttaggattcggcgctctc

SEQ ID NO: 3587 - DNA, 24 bp, Artificial Sequence
  Probe
agtggttaggattcggcgctctca

SEQ ID NO: 3588 - DNA, 17 bp, Artificial Sequence
  Probe
agtggttagtactctgc

SEQ ID NO: 3589 - DNA, 18 bp, Artificial Sequence
  Probe
agtggttagtactctgcg

SEQ ID NO: 3590 - DNA, 22 bp, Artificial Sequence
  Probe
agtggttagtactctgcgttgt

SEQ ID NO: 3591 - DNA, 17 bp, Artificial Sequence
  Probe
agtggttatcacgttcg

SEQ ID NO: 3592 - DNA, 18 bp, Artificial Sequence
  Probe
agtggttatcacgttcgc

SEQ ID NO: 3593 - DNA, 27 bp, Artificial Sequence
  Probe
agtggttatcacgttcgcctcacacgc

SEQ ID NO: 3594 - DNA, 40 bp, Artificial Sequence
  Probe
agtggttatcacgttcgcctcacacgcgaaaggtccccgg

SEQ ID NO: 3595 - DNA, 23 bp, Artificial Sequence
  Probe
agtgtagtggttatcacgttcgc

SEQ ID NO: 3596 - DNA, 25 bp, Artificial Sequence
  Probe
agtgtagtggttatcacgttcgcct

SEQ ID NO: 3597 - DNA, 27 bp, Artificial Sequence
  Probe
agtgtttgtgggtttaagtcccattgg

SEQ ID NO: 3598 - DNA, 29 bp, Artificial Sequence
  Probe
agtgtttgtgggtttaagtcccattggtc

SEQ ID NO: 3599 - DNA, 30 bp, Artificial Sequence
  Probe
agtgtttgtgggtttaagtcccattggtct

SEQ ID NO: 3600 - DNA, 31 bp, Artificial Sequence
  Probe
agtgtttgtgggtttaagtcccattggtcta

SEQ ID NO: 3601 - DNA, 34 bp, Artificial Sequence
  Probe
agtgtttgtgggtttaagtcccattggtctagta

SEQ ID NO: 3602 - DNA, 23 bp, Artificial Sequence
  Probe
agttaaagactttttctctgatt

SEQ ID NO: 3603 - DNA, 24 bp, Artificial Sequence
  Probe
agttaaagactttttctctgattt

SEQ ID NO: 3604 - DNA, 37 bp, Artificial Sequence
  Probe
agttaaagattaagagaaccaacacctctttacagtg

SEQ ID NO: 3605 - DNA, 38 bp, Artificial Sequence
  Probe
agttaaagattaagagaaccaacacctctttacagtga

SEQ ID NO: 3606 - DNA, 39 bp, Artificial Sequence
  Probe
agttaaagattaagagaaccaacacctctttacagtgaa

SEQ ID NO: 3607 - DNA, 40 bp, Artificial Sequence
  Probe
agttaaagattaagagaaccaacacctctttacagtgaaa

SEQ ID NO: 3608 - DNA, 41 bp, Artificial Sequence
  Probe
agttaaagattaagagaaccaacacctctttacagtgaaat

SEQ ID NO: 3609 - DNA, 43 bp, Artificial Sequence
  Probe
agttaaagattaagagaaccaacacctctttacagtgaaatgc

SEQ ID NO: 3610 - DNA, 50 bp, Artificial Sequence
  Probe
agttaaagattaagagaaccaacacctctttacagtgaaatgccccaact

SEQ ID NO: 3611 - DNA, 24 bp, Artificial Sequence
  Probe
agttcaaatctcggtggaacctgc

SEQ ID NO: 3612 - DNA, 25 bp, Artificial Sequence
  Probe
agttcaattctcgctggggcctgtg

SEQ ID NO: 3613 - DNA, 25 bp, Artificial Sequence
  Probe
agttcgatcctcacacggggcacaa

SEQ ID NO: 3614 - DNA, 32 bp, Artificial Sequence
  Probe
agttgatgcagagtggggttttgcagtcctta

SEQ ID NO: 3615 - DNA, 33 bp, Artificial Sequence
  Probe
agttgatgcagagtggggttttgcagtccttag

SEQ ID NO: 3616 - DNA, 35 bp, Artificial Sequence
  Probe
agttgatgcagagtggggttttgcagtccttagct

SEQ ID NO: 3617 - DNA, 44 bp, Artificial Sequence
  Probe
agttgattagggtgcttagctgttaactaagtgtttgtgggttt

SEQ ID NO: 3618 - DNA, 50 bp, Artificial Sequence
  Probe
agtttaaattagaatcttagctttgggtgctaatggtggagttaaagact

SEQ ID NO: 3619 - DNA, 34 bp, Artificial Sequence
  Probe
agtttaaccaaaacatcagattgtgaatctgaca

SEQ ID NO: 3620 - DNA, 35 bp, Artificial Sequence
  Probe
agtttaaccaaaacatcagattgtgaatctgacaa

SEQ ID NO: 3621 - DNA, 37 bp, Artificial Sequence
  Probe
agtttaaccaaaacatcagattgtgaatctgacaaca

SEQ ID NO: 3622 - DNA, 42 bp, Artificial Sequence
  Probe
ataaaacttaaaactttacagtcagaggttcaattcctcttc

SEQ ID NO: 3623 - DNA, 44 bp, Artificial Sequence
  Probe
ataaaacttaaaactttacagtcagaggttcaattcctcttctt

SEQ ID NO: 3624 - DNA, 50 bp, Artificial Sequence
  Probe
ataaaacttaaaactttacagtcagaggttcaattcctcttcttaacaac

SEQ ID NO: 3625 - DNA, 30 bp, Artificial Sequence
  Probe
ataaacttcgccttaattttaataatcaac

SEQ ID NO: 3626 - DNA, 25 bp, Artificial Sequence
  Probe
ataaccatgcacactactataacca

SEQ ID NO: 3627 - DNA, 26 bp, Artificial Sequence
  Probe
ataaccatgcacactactataaccac

SEQ ID NO: 3628 - DNA, 27 bp, Artificial Sequence
  Probe
ataaccatgcacactactataaccacc

SEQ ID NO: 3629 - DNA, 28 bp, Artificial Sequence
  Probe
ataaccatgcacactactataaccaccc

SEQ ID NO: 3630 - DNA, 29 bp, Artificial Sequence
  Probe
ataaccatgcacactactataaccaccct

SEQ ID NO: 3631 - DNA, 30 bp, Artificial Sequence
  Probe
ataaccatgcacactactataaccacccta

SEQ ID NO: 3632 - DNA, 23 bp, Artificial Sequence
  Probe
ataacccagaggtcgatggatcg

SEQ ID NO: 3633 - DNA, 24 bp, Artificial Sequence
  Probe
ataacccagaggtcgatggatcga

SEQ ID NO: 3634 - DNA, 42 bp, Artificial Sequence
  Probe
ataacccagaggtcgatggatcgaaaccatcctctgctaggt

SEQ ID NO: 3635 - DNA, 19 bp, Artificial Sequence
  Probe
ataagctatcgggcccata

SEQ ID NO: 3636 - DNA, 20 bp, Artificial Sequence
  Probe
ataagctatcgggcccatac

SEQ ID NO: 3637 - DNA, 24 bp, Artificial Sequence
  Probe
ataagctatcgggcccataccccg

SEQ ID NO: 3638 - DNA, 25 bp, Artificial Sequence
  Probe
ataagctatcgggcccataccccga

SEQ ID NO: 3639 - DNA, 26 bp, Artificial Sequence
  Probe
ataagctatcgggcccataccccgaa

SEQ ID NO: 3640 - DNA, 27 bp, Artificial Sequence
  Probe
ataagctatcgggcccataccccgaaa

SEQ ID NO: 3641 - DNA, 28 bp, Artificial Sequence
  Probe
ataagctatcgggcccataccccgaaaa

SEQ ID NO: 3642 - DNA, 29 bp, Artificial Sequence
  Probe
ataagctatcgggcccataccccgaaaat

SEQ ID NO: 3643 - DNA, 30 bp, Artificial Sequence
  Probe
ataagctatcgggcccataccccgaaaatg

SEQ ID NO: 3644 - DNA, 31 bp, Artificial Sequence
  Probe
ataagctatcgggcccataccccgaaaatgt

SEQ ID NO: 3645 - DNA, 32 bp, Artificial Sequence
  Probe
ataagctatcgggcccataccccgaaaatgtt

SEQ ID NO: 3646 - DNA, 33 bp, Artificial Sequence
  Probe
ataagctatcgggcccataccccgaaaatgttg

SEQ ID NO: 3647 - DNA, 34 bp, Artificial Sequence
  Probe
ataagctatcgggcccataccccgaaaatgttgg

SEQ ID NO: 3648 - DNA, 36 bp, Artificial Sequence
  Probe
ataagctatcgggcccataccccgaaaatgttggtt

SEQ ID NO: 3649 - DNA, 37 bp, Artificial Sequence
  Probe
ataagctatcgggcccataccccgaaaatgttggtta

SEQ ID NO: 3650 - DNA, 39 bp, Artificial Sequence
  Probe
ataagctatcgggcccataccccgaaaatgttggttata

SEQ ID NO: 3651 - DNA, 49 bp, Artificial Sequence
  Probe
ataagctatcgggcccataccccgaaaatgttggttatacccttcccgt

SEQ ID NO: 3652 - DNA, 50 bp, Artificial Sequence
  Probe
ataagctatcgggcccataccccgaaaatgttggttatacccttcccgta

SEQ ID NO: 3653 - DNA, 20 bp, Artificial Sequence
  Probe
ataatcatatttaccaaatg

SEQ ID NO: 3654 - DNA, 50 bp, Artificial Sequence
  Probe
atacaccagtcttgtaaaccggagatgaaaacctttttccaaggacaaat

SEQ ID NO: 3655 - DNA, 46 bp, Artificial Sequence
  Probe
atacactgaaaatgtttagacgggctcacatcaccccataaacaaa

SEQ ID NO: 3656 - DNA, 49 bp, Artificial Sequence
  Probe
atacactgaaaatgtttagacgggctcacatcaccccataaacaaatag

SEQ ID NO: 3657 - DNA, 50 bp, Artificial Sequence
  Probe
atacactgaaaatgtttagacgggctcacatcaccccataaacaaatagg

SEQ ID NO: 3658 - DNA, 50 bp, Artificial Sequence
  Probe
atacagaccaagagccttcaaagccctcagtaagttgcaatacttaattt

SEQ ID NO: 3659 - DNA, 29 bp, Artificial Sequence
  Probe
atacccacacccacccaagaacagggttt

SEQ ID NO: 3660 - DNA, 30 bp, Artificial Sequence
  Probe
atacccacacccacccaagaacagggtttg

SEQ ID NO: 3661 - DNA, 31 bp, Artificial Sequence
  Probe
atacccacacccacccaagaacagggtttgt

SEQ ID NO: 3662 - DNA, 32 bp, Artificial Sequence
  Probe
atacccacacccacccaagaacagggtttgtt

SEQ ID NO: 3663 - DNA, 33 bp, Artificial Sequence
  Probe
atacccacacccacccaagaacagggtttgtta

SEQ ID NO: 3664 - DNA, 32 bp, Artificial Sequence
  Probe
ataccccgaaaatgttggttatacccttcccg

SEQ ID NO: 3665 - DNA, 34 bp, Artificial Sequence
  Probe
ataccccgaaaatgttggttatacccttcccgta

SEQ ID NO: 3666 - DNA, 39 bp, Artificial Sequence
  Probe
ataccccgaaaatgttggttatacccttcccgtactaat

SEQ ID NO: 3667 - DNA, 40 bp, Artificial Sequence
  Probe
ataccccgaaaatgttggttatacccttcccgtactaatt

SEQ ID NO: 3668 - DNA, 37 bp, Artificial Sequence
  Probe
atagagtaaataataggagcttaaacccccttatttc

SEQ ID NO: 3669 - DNA, 40 bp, Artificial Sequence
  Probe
atagagtaaataataggagcttaaacccccttatttctag

SEQ ID NO: 3670 - DNA, 41 bp, Artificial Sequence
  Probe
atagagtaaataataggagcttaaacccccttatttctagg

SEQ ID NO: 3671 - DNA, 42 bp, Artificial Sequence
  Probe
atagagtaaataataggagcttaaacccccttatttctagga

SEQ ID NO: 3672 - DNA, 43 bp, Artificial Sequence
  Probe
atagagtaaataataggagcttaaacccccttatttctaggac

SEQ ID NO: 3673 - DNA, 27 bp, Artificial Sequence
  Probe
atagctcagtcggtagagcatcagact

SEQ ID NO: 3674 - DNA, 49 bp, Artificial Sequence
  Probe
atagctgccttccaagcagttgacccgggttcgattcccggccaacgca

SEQ ID NO: 3675 - DNA, 17 bp, Artificial Sequence
  Probe
ataggtttggtcctagc

SEQ ID NO: 3676 - DNA, 18 bp, Artificial Sequence
  Probe
ataggtttggtcctagcc

SEQ ID NO: 3677 - DNA, 19 bp, Artificial Sequence
  Probe
ataggtttggtcctagcct

SEQ ID NO: 3678 - DNA, 20 bp, Artificial Sequence
  Probe
ataggtttggtcctagcctt

SEQ ID NO: 3679 - DNA, 21 bp, Artificial Sequence
  Probe
ataggtttggtcctagccttt

SEQ ID NO: 3680 - DNA, 22 bp, Artificial Sequence
  Probe
ataggtttggtcctagcctttc

SEQ ID NO: 3681 - DNA, 23 bp, Artificial Sequence
  Probe
ataggtttggtcctagcctttct

SEQ ID NO: 3682 - DNA, 24 bp, Artificial Sequence
  Probe
ataggtttggtcctagcctttcta

SEQ ID NO: 3683 - DNA, 25 bp, Artificial Sequence
  Probe
ataggtttggtcctagcctttctat

SEQ ID NO: 3684 - DNA, 26 bp, Artificial Sequence
  Probe
ataggtttggtcctagcctttctatt

SEQ ID NO: 3685 - DNA, 27 bp, Artificial Sequence
  Probe
ataggtttggtcctagcctttctatta

SEQ ID NO: 3686 - DNA, 29 bp, Artificial Sequence
  Probe
ataggtttggtcctagcctttctattagc

SEQ ID NO: 3687 - DNA, 50 bp, Artificial Sequence
  Probe
atagtaccgttaacttccaattaactagttttgacaacattcaaaaaaga

SEQ ID NO: 3688 - DNA, 36 bp, Artificial Sequence
  Probe
atagtttaaccaaaacatcagattgtgaatctgaca

SEQ ID NO: 3689 - DNA, 39 bp, Artificial Sequence
  Probe
atagtttaaccaaaacatcagattgtgaatctgacaaca

SEQ ID NO: 3690 - DNA, 50 bp, Artificial Sequence
  Probe
atagtttaaccaaaacatcagattgtgaatctgacaacagaggcttacga

SEQ ID NO: 3691 - DNA, 39 bp, Artificial Sequence
  Probe
atatagtttaaccaaaacatcagattgtgaatctgacaa

SEQ ID NO: 3692 - DNA, 24 bp, Artificial Sequence
  Probe
atatcattggtcgtggttgtagtc

SEQ ID NO: 3693 - DNA, 28 bp, Artificial Sequence
  Probe
atatcattggtcgtggttgtagtccgtg

SEQ ID NO: 3694 - DNA, 30 bp, Artificial Sequence
  Probe
atatcattggtcgtggttgtagtccgtgcg

SEQ ID NO: 3695 - DNA, 39 bp, Artificial Sequence
  Probe
atatcattggtcgtggttgtagtccgtgcgagaataatg

SEQ ID NO: 3696 - DNA, 32 bp, Artificial Sequence
  Probe
atatggtctagcggttaggattcctggttttc

SEQ ID NO: 3697 - DNA, 18 bp, Artificial Sequence
  Probe
atatgtccgcgtgggttc

SEQ ID NO: 3698 - DNA, 50 bp, Artificial Sequence
  Probe
atattgaattgcaaattcgaagaagcagcttcaaacctgccggggcttct

SEQ ID NO: 3699 - DNA, 20 bp, Artificial Sequence
  Probe
atcaagaggtccccggttca

SEQ ID NO: 3700 - DNA, 39 bp, Artificial Sequence
  Probe
atcaagaggtccctggttcaaatccgggtgccccctcaa

SEQ ID NO: 3701 - DNA, 23 bp, Artificial Sequence
  Probe
atcagaagattccaggttcgact

SEQ ID NO: 3702 - DNA, 37 bp, Artificial Sequence
  Probe
atcagaagattccaggttcgactcctggctggctcgg

SEQ ID NO: 3703 - DNA, 39 bp, Artificial Sequence
  Probe
atcagaagattccaggttcgactcctggctggctcggtg

SEQ ID NO: 3704 - DNA, 37 bp, Artificial Sequence
  Probe
atcagaagattccaggttcgactcctggctggctcgt

SEQ ID NO: 3705 - DNA, 38 bp, Artificial Sequence
  Probe
atcagaagattccaggttcgactcctggctggctcgtt

SEQ ID NO: 3706 - DNA, 39 bp, Artificial Sequence
  Probe
atcagaagattccaggttcgactcctggctggctcgttc

SEQ ID NO: 3707 - DNA, 39 bp, Artificial Sequence
  Probe
atcagaagattctaggttcgactcctggctggctcgcga

SEQ ID NO: 3708 - DNA, 39 bp, Artificial Sequence
  Probe
atcagaagattctaggttcgactcctggctggctcgggt

SEQ ID NO: 3709 - DNA, 20 bp, Artificial Sequence
  Probe
atcagaagattgagggttcg

SEQ ID NO: 3710 - DNA, 39 bp, Artificial Sequence
  Probe
atcagaagattgagggttcgagtcccttcgtggtcgttg

SEQ ID NO: 3711 - DNA, 23 bp, Artificial Sequence
  Probe
atcagaagattgcaggttcgagt

SEQ ID NO: 3712 - DNA, 39 bp, Artificial Sequence
  Probe
atcagaaggttgcgtgttcaaatcacgtcggggtcaaac

SEQ ID NO: 3713 - DNA, 39 bp, Artificial Sequence
  Probe
atcagaaggttgcgtgttcaaatcacgtcggggtcaaca

SEQ ID NO: 3714 - DNA, 50 bp, Artificial Sequence
  Probe
atcagattgtgaatctgacaacagaggcttacgaccccttatttaccgag

SEQ ID NO: 3715 - DNA, 50 bp, Artificial Sequence
  Probe
atcatgcaagattcccattcttgcgacccgggttcgattcccgggcggcg

SEQ ID NO: 3716 - DNA, 23 bp, Artificial Sequence
  Probe
atcattggtcgtggttgtagtcc

SEQ ID NO: 3717 - DNA, 26 bp, Artificial Sequence
  Probe
atcattggtcgtggttgtagtccgtg

SEQ ID NO: 3718 - DNA, 37 bp, Artificial Sequence
  Probe
atcattggtcgtggttgtagtccgtgcgagaataatg

SEQ ID NO: 3719 - DNA, 23 bp, Artificial Sequence
  Probe
atccaatggacatatgtccgcgt

SEQ ID NO: 3720 - DNA, 39 bp, Artificial Sequence
  Probe
atccagaggttccgggttcgagtcccggcagagatggtc

SEQ ID NO: 3721 - DNA, 23 bp, Artificial Sequence
  Probe
atccagcgatccgagttcaaatc

SEQ ID NO: 3722 - DNA, 37 bp, Artificial Sequence
  Probe
atccagcgatccgagttcaaatctcggtggaacctgc

SEQ ID NO: 3723 - DNA, 38 bp, Artificial Sequence
  Probe
atccagcgatccgagttcaaatctcggtggaacctgca

SEQ ID NO: 3724 - DNA, 38 bp, Artificial Sequence
  Probe
atccagcgatccgagttcaaatctcggtgggacctcac

SEQ ID NO: 3725 - DNA, 22 bp, Artificial Sequence
  Probe
atccattggggtttccccgcgc

SEQ ID NO: 3726 - DNA, 23 bp, Artificial Sequence
  Probe
atccattggggtttccccgcgca

SEQ ID NO: 3727 - DNA, 45 bp, Artificial Sequence
  Probe
atccattggtcttaggccccaaaaattttggtgcaactccaaata

SEQ ID NO: 3728 - DNA, 49 bp, Artificial Sequence
  Probe
atccattggtcttaggccccaaaaattttggtgcaactccaaataaaag

SEQ ID NO: 3729 - DNA, 17 bp, Artificial Sequence
  Probe
atcccaccgctgccaca

SEQ ID NO: 3730 - DNA, 18 bp, Artificial Sequence
  Probe
atcccaccgctgccacac

SEQ ID NO: 3731 - DNA, 19 bp, Artificial Sequence
  Probe
atcccaccgctgccacacc

SEQ ID NO: 3732 - DNA, 20 bp, Artificial Sequence
  Probe
atcccaccgctgccacacct

SEQ ID NO: 3733 - DNA, 21 bp, Artificial Sequence
  Probe
atcccaccgctgccacacctc

SEQ ID NO: 3734 - DNA, 20 bp, Artificial Sequence
  Probe
atcccaccgctgccaggttt

SEQ ID NO: 3735 - DNA, 21 bp, Artificial Sequence
  Probe
atcccaccgctgccaggttta

SEQ ID NO: 3736 - DNA, 22 bp, Artificial Sequence
  Probe
atcccaccgctgccaggtttat

SEQ ID NO: 3737 - DNA, 23 bp, Artificial Sequence
  Probe
atcccacttctgacacatacttt

SEQ ID NO: 3738 - DNA, 18 bp, Artificial Sequence
  Probe
atcccagcggtgcctccg

SEQ ID NO: 3739 - DNA, 17 bp, Artificial Sequence
  Probe
atcccatcctcgtcgct

SEQ ID NO: 3740 - DNA, 50 bp, Artificial Sequence
  Probe
atccccgcctgtcacgcgggagaccggggttcgattccccgacggggaga

SEQ ID NO: 3741 - DNA, 20 bp, Artificial Sequence
  Probe
atccccggcacctccaccag

SEQ ID NO: 3742 - DNA, 17 bp, Artificial Sequence
  Probe
atcccggacgagccccc

SEQ ID NO: 3743 - DNA, 18 bp, Artificial Sequence
  Probe
atccggctcgaaggacga

SEQ ID NO: 3744 - DNA, 17 bp, Artificial Sequence
  Probe
atccgggtgccccctca

SEQ ID NO: 3745 - DNA, 18 bp, Artificial Sequence
  Probe
atccgggtgccccctcaa

SEQ ID NO: 3746 - DNA, 19 bp, Artificial Sequence
  Probe
atccgggtgccccctcaat

SEQ ID NO: 3747 - DNA, 20 bp, Artificial Sequence
  Probe
atccgggtgccccctcaatg

SEQ ID NO: 3748 - DNA, 21 bp, Artificial Sequence
  Probe
atccgggtgccccctcaatgg

SEQ ID NO: 3749 - DNA, 20 bp, Artificial Sequence
  Probe
atccgggtgccccctcacag

SEQ ID NO: 3750 - DNA, 17 bp, Artificial Sequence
  Probe
atccgggtgccccctcg

SEQ ID NO: 3751 - DNA, 17 bp, Artificial Sequence
  Probe
atccgggtgccccctct

SEQ ID NO: 3752 - DNA, 23 bp, Artificial Sequence
  Probe
atccttaggtcgctggttcgatt

SEQ ID NO: 3753 - DNA, 50 bp, Artificial Sequence
  Probe
atccttaggtcgctggttcgattccggctcgaaggacttcgtctgtaatt

SEQ ID NO: 3754 - DNA, 23 bp, Artificial Sequence
  Probe
atcgaaaccatcctctgctaggt

SEQ ID NO: 3755 - DNA, 23 bp, Artificial Sequence
  Probe
atcgatgcccgcatcctccactc

SEQ ID NO: 3756 - DNA, 28 bp, Artificial Sequence
  Probe
atcgcataaaacttaaaactttacagtc

SEQ ID NO: 3757 - DNA, 35 bp, Artificial Sequence
  Probe
atcgcataaaacttaaaactttacagtcagaggtt

SEQ ID NO: 3758 - DNA, 49 bp, Artificial Sequence
  Probe
atcgcataaaacttaaaactttacagtcagaggttcaattcctcttctt

SEQ ID NO: 3759 - DNA, 50 bp, Artificial Sequence
  Probe
atcgcataaaacttaaaactttacagtcagaggttcaattcctcttctta

SEQ ID NO: 3760 - DNA, 50 bp, Artificial Sequence
  Probe
atcgggcccataccccgaaaatgttggttatacccttcccgtactaatta

SEQ ID NO: 3761 - DNA, 28 bp, Artificial Sequence
  Probe
atcgtatagtggttagtactctgcgttg

SEQ ID NO: 3762 - DNA, 29 bp, Artificial Sequence
  Probe
atcgtatagtggttagtactctgcgttgt

SEQ ID NO: 3763 - DNA, 27 bp, Artificial Sequence
  Probe
atctaaagacaggggttaggcctcttt

SEQ ID NO: 3764 - DNA, 29 bp, Artificial Sequence
  Probe
atctaaagacaggggttaggcctcttttt

SEQ ID NO: 3765 - DNA, 35 bp, Artificial Sequence
  Probe
atctaaagacaggggttaggcctctttttaccagc

SEQ ID NO: 3766 - DNA, 36 bp, Artificial Sequence
  Probe
atctaaagacaggggttaggcctctttttaccagct

SEQ ID NO: 3767 - DNA, 19 bp, Artificial Sequence
  Probe
atctaaaggtccctggttc

SEQ ID NO: 3768 - DNA, 20 bp, Artificial Sequence
  Probe
atctaaaggtccctggttca

SEQ ID NO: 3769 - DNA, 23 bp, Artificial Sequence
  Probe
atctaaaggtccctggttcaatc

SEQ ID NO: 3770 - DNA, 39 bp, Artificial Sequence
  Probe
atctaaaggtccctggttcaatcccgggtttcggcagcg

SEQ ID NO: 3771 - DNA, 25 bp, Artificial Sequence
  Probe
atctaaaggtccctggttcgatccc

SEQ ID NO: 3772 - DNA, 33 bp, Artificial Sequence
  Probe
atctaaaggtccctggttcgatcccgggtttcg

SEQ ID NO: 3773 - DNA, 38 bp, Artificial Sequence
  Probe
atctaaaggtccctggttcgatcccgggtttcggcact

SEQ ID NO: 3774 - DNA, 39 bp, Artificial Sequence
  Probe
atctaaaggtccctggttcgatcccgggtttcggcactt

SEQ ID NO: 3775 - DNA, 39 bp, Artificial Sequence
  Probe
atctaaaggtccctggttcgatcccgggtttcggcagac

SEQ ID NO: 3776 - DNA, 39 bp, Artificial Sequence
  Probe
atctaaaggtccctggttcgatcccgggtttcggcagct

SEQ ID NO: 3777 - DNA, 39 bp, Artificial Sequence
  Probe
atctaaaggtccctggttcgatcccgggtttcggcaggg

SEQ ID NO: 3778 - DNA, 37 bp, Artificial Sequence
  Probe
atctgaaggtcctgagttcgaacctcagagggggcaa

SEQ ID NO: 3779 - DNA, 37 bp, Artificial Sequence
  Probe
atctgaaggtcctgagttcgaacctcagagggggcag

SEQ ID NO: 3780 - DNA, 39 bp, Artificial Sequence
  Probe
atctgaaggtcctgagttcgaacctcagagggggcagct

SEQ ID NO: 3781 - DNA, 39 bp, Artificial Sequence
  Probe
atctgaaggtcctgagttcgagcctcagagagggcagct

SEQ ID NO: 3782 - DNA, 37 bp, Artificial Sequence
  Probe
atctgaaggtcgtgagttcgagcctcacacggggcag

SEQ ID NO: 3783 - DNA, 39 bp, Artificial Sequence
  Probe
atctgaaggtcgtgagttcgatcctcacacggggcacaa

SEQ ID NO: 3784 - DNA, 45 bp, Artificial Sequence
  Probe
atctgaaggtcgtgagttcgatcctcacacggggcacaataattt

SEQ ID NO: 3785 - DNA, 25 bp, Artificial Sequence
  Probe
atctgacaacagaggcttacgaccc

SEQ ID NO: 3786 - DNA, 26 bp, Artificial Sequence
  Probe
atctgacaacagaggcttacgacccc

SEQ ID NO: 3787 - DNA, 27 bp, Artificial Sequence
  Probe
atctgacaacagaggcttacgacccct

SEQ ID NO: 3788 - DNA, 32 bp, Artificial Sequence
  Probe
atctgacaacagaggcttacgaccccttattt

SEQ ID NO: 3789 - DNA, 33 bp, Artificial Sequence
  Probe
atctgacaacagaggcttacgaccccttattta

SEQ ID NO: 3790 - DNA, 36 bp, Artificial Sequence
  Probe
atctgacaacagaggcttacgaccccttatttaccg

SEQ ID NO: 3791 - DNA, 37 bp, Artificial Sequence
  Probe
atctgacaacagaggcttacgaccccttatttaccga

SEQ ID NO: 3792 - DNA, 38 bp, Artificial Sequence
  Probe
atctgacaacagaggcttacgaccccttatttaccgag

SEQ ID NO: 3793 - DNA, 19 bp, Artificial Sequence
  Probe
atctgagggtccagggttc

SEQ ID NO: 3794 - DNA, 39 bp, Artificial Sequence
  Probe
atctgagggtccagggttcaagtccctgttcgggcggca

SEQ ID NO: 3795 - DNA, 31 bp, Artificial Sequence
  Probe
atcttagctttgggtgctaatggtggagtta

SEQ ID NO: 3796 - DNA, 49 bp, Artificial Sequence
  Probe
atcttagctttgggtgctaatggtggagttaaagactttttctctgatt

SEQ ID NO: 3797 - DNA, 50 bp, Artificial Sequence
  Probe
atcttagctttgggtgctaatggtggagttaaagactttttctctgattt

SEQ ID NO: 3798 - DNA, 25 bp, Artificial Sequence
  Probe
atgaaaacctttttccaaggacaaa

SEQ ID NO: 3799 - DNA, 26 bp, Artificial Sequence
  Probe
atgaaaacctttttccaaggacaaat

SEQ ID NO: 3800 - DNA, 23 bp, Artificial Sequence
  Probe
atgataatcatatttaccaaatg

SEQ ID NO: 3801 - DNA, 31 bp, Artificial Sequence
  Probe
atgattctcgcttagggtgcgagaggtcccg

SEQ ID NO: 3802 - DNA, 31 bp, Artificial Sequence
  Probe
atgattctcgcttcgggtgcgagaggtcccg

SEQ ID NO: 3803 - DNA, 32 bp, Artificial Sequence
  Probe
atgattctcgcttcgggtgcgagaggtcccgg

SEQ ID NO: 3804 - DNA, 31 bp, Artificial Sequence
  Probe
atgattctcgctttgggtgcgagaggtcccg

SEQ ID NO: 3805 - DNA, 44 bp, Artificial Sequence
  Probe
atgatttcgactcattaaattatgataatcatatttaccaaatg

SEQ ID NO: 3806 - DNA, 28 bp, Artificial Sequence
  Probe
atgcagagtggggttttgcagtccttag

SEQ ID NO: 3807 - DNA, 30 bp, Artificial Sequence
  Probe
atgcagagtggggttttgcagtccttagct

SEQ ID NO: 3808 - DNA, 23 bp, Artificial Sequence
  Probe
atgccccaactaaatactaccgt

SEQ ID NO: 3809 - DNA, 24 bp, Artificial Sequence
  Probe
atgccccaactaaatactaccgta

SEQ ID NO: 3810 - DNA, 28 bp, Artificial Sequence
  Probe
atgccccaactaaatactaccgtatggc

SEQ ID NO: 3811 - DNA, 16 bp, Artificial Sequence
  Probe
atgcccccatgtctaa

SEQ ID NO: 3812 - DNA, 17 bp, Artificial Sequence
  Probe
atgcccccatgtctaac

SEQ ID NO: 3813 - DNA, 25 bp, Artificial Sequence
  Probe
atgcccccatgtctaacaacatggc

SEQ ID NO: 3814 - DNA, 26 bp, Artificial Sequence
  Probe
atgcccccatgtctaacaacatggct

SEQ ID NO: 3815 - DNA, 27 bp, Artificial Sequence
  Probe
atgcccccatgtctaacaacatggctt

SEQ ID NO: 3816 - DNA, 28 bp, Artificial Sequence
  Probe
atgcccccatgtctaacaacatggcttt

SEQ ID NO: 3817 - DNA, 29 bp, Artificial Sequence
  Probe
atgcccccatgtctaacaacatggctttc

SEQ ID NO: 3818 - DNA, 30 bp, Artificial Sequence
  Probe
atgcccccatgtctaacaacatggctttct

SEQ ID NO: 3819 - DNA, 31 bp, Artificial Sequence
  Probe
atgcccccatgtctaacaacatggctttctc

SEQ ID NO: 3820 - DNA, 32 bp, Artificial Sequence
  Probe
atgcccccatgtctaacaacatggctttctca

SEQ ID NO: 3821 - DNA, 33 bp, Artificial Sequence
  Probe
atgcccccatgtctaacaacatggctttctcaa

SEQ ID NO: 3822 - DNA, 34 bp, Artificial Sequence
  Probe
atgcccccatgtctaacaacatggctttctcaac

SEQ ID NO: 3823 - DNA, 35 bp, Artificial Sequence
  Probe
atgcccccatgtctaacaacatggctttctcaact

SEQ ID NO: 3824 - DNA, 27 bp, Artificial Sequence
  Probe
atgcccctcatttacataaatattata

SEQ ID NO: 3825 - DNA, 30 bp, Artificial Sequence
  Probe
atgcccctcatttacataaatattatacta

SEQ ID NO: 3826 - DNA, 19 bp, Artificial Sequence
  Probe
atgccgaggttgtgagttc

SEQ ID NO: 3827 - DNA, 16 bp, Artificial Sequence
  Probe
atggcacatgcagcgc

SEQ ID NO: 3828 - DNA, 17 bp, Artificial Sequence
  Probe
atggcacatgcagcgca

SEQ ID NO: 3829 - DNA, 18 bp, Artificial Sequence
  Probe
atggcacatgcagcgcaa

SEQ ID NO: 3830 - DNA, 19 bp, Artificial Sequence
  Probe
atggcacatgcagcgcaag

SEQ ID NO: 3831 - DNA, 20 bp, Artificial Sequence
  Probe
atggcacatgcagcgcaagt

SEQ ID NO: 3832 - DNA, 21 bp, Artificial Sequence
  Probe
atggcacatgcagcgcaagta

SEQ ID NO: 3833 - DNA, 22 bp, Artificial Sequence
  Probe
atggcacatgcagcgcaagtag

SEQ ID NO: 3834 - DNA, 23 bp, Artificial Sequence
  Probe
atggcacatgcagcgcaagtagg

SEQ ID NO: 3835 - DNA, 24 bp, Artificial Sequence
  Probe
atggcacatgcagcgcaagtaggt

SEQ ID NO: 3836 - DNA, 25 bp, Artificial Sequence
  Probe
atggcacatgcagcgcaagtaggtc

SEQ ID NO: 3837 - DNA, 26 bp, Artificial Sequence
  Probe
atggcacatgcagcgcaagtaggtct

SEQ ID NO: 3838 - DNA, 27 bp, Artificial Sequence
  Probe
atggcacatgcagcgcaagtaggtcta

SEQ ID NO: 3839 - DNA, 28 bp, Artificial Sequence
  Probe
atggcacatgcagcgcaagtaggtctac

SEQ ID NO: 3840 - DNA, 29 bp, Artificial Sequence
  Probe
atggcacatgcagcgcaagtaggtctaca

SEQ ID NO: 3841 - DNA, 30 bp, Artificial Sequence
  Probe
atggcacatgcagcgcaagtaggtctacaa

SEQ ID NO: 3842 - DNA, 25 bp, Artificial Sequence
  Probe
atgggtggttcagtggtagaattct

SEQ ID NO: 3843 - DNA, 28 bp, Artificial Sequence
  Probe
atgggtggttcagtggtagaattctcgc

SEQ ID NO: 3844 - DNA, 28 bp, Artificial Sequence
  Probe
atggtggagttaaagactttttctctga

SEQ ID NO: 3845 - DNA, 29 bp, Artificial Sequence
  Probe
atggtggagttaaagactttttctctgat

SEQ ID NO: 3846 - DNA, 30 bp, Artificial Sequence
  Probe
atggtggagttaaagactttttctctgatt

SEQ ID NO: 3847 - DNA, 31 bp, Artificial Sequence
  Probe
atggtggagttaaagactttttctctgattt

SEQ ID NO: 3848 - DNA, 33 bp, Artificial Sequence
  Probe
atggtggagttaaagactttttctctgatttgt

SEQ ID NO: 3849 - DNA, 35 bp, Artificial Sequence
  Probe
atggtggagttaaagactttttctctgatttgtcc

SEQ ID NO: 3850 - DNA, 29 bp, Artificial Sequence
  Probe
atggtggttcagtggtagaattctcgcct

SEQ ID NO: 3851 - DNA, 19 bp, Artificial Sequence
  Probe
atggttagcactctggact

SEQ ID NO: 3852 - DNA, 20 bp, Artificial Sequence
  Probe
atggttagcactctggactc

SEQ ID NO: 3853 - DNA, 25 bp, Artificial Sequence
  Probe
atgtcgttagtctaggctgtcagct

SEQ ID NO: 3854 - DNA, 17 bp, Artificial Sequence
  Probe
atgtctaacaacatggc

SEQ ID NO: 3855 - DNA, 18 bp, Artificial Sequence
  Probe
atgtctaacaacatggct

SEQ ID NO: 3856 - DNA, 19 bp, Artificial Sequence
  Probe
atgtctaacaacatggctt

SEQ ID NO: 3857 - DNA, 23 bp, Artificial Sequence
  Probe
atgtctaacaacatggctttctc

SEQ ID NO: 3858 - DNA, 24 bp, Artificial Sequence
  Probe
atgtctaacaacatggctttctca

SEQ ID NO: 3859 - DNA, 26 bp, Artificial Sequence
  Probe
atgtctaacaacatggctttctcaac

SEQ ID NO: 3860 - DNA, 27 bp, Artificial Sequence
  Probe
atgtctaacaacatggctttctcaact

SEQ ID NO: 3861 - DNA, 29 bp, Artificial Sequence
  Probe
atgttggttatacccttcccgtactaatt

SEQ ID NO: 3862 - DNA, 23 bp, Artificial Sequence
  Probe
atgtttagacgggctcacatcac

SEQ ID NO: 3863 - DNA, 31 bp, Artificial Sequence
  Probe
atgtttagacgggctcacatcaccccataaa

SEQ ID NO: 3864 - DNA, 32 bp, Artificial Sequence
  Probe
atgtttagacgggctcacatcaccccataaac

SEQ ID NO: 3865 - DNA, 33 bp, Artificial Sequence
  Probe
atgtttagacgggctcacatcaccccataaaca

SEQ ID NO: 3866 - DNA, 35 bp, Artificial Sequence
  Probe
atgtttagacgggctcacatcaccccataaacaaa

SEQ ID NO: 3867 - DNA, 36 bp, Artificial Sequence
  Probe
atgtttagacgggctcacatcaccccataaacaaat

SEQ ID NO: 3868 - DNA, 37 bp, Artificial Sequence
  Probe
atgtttagacgggctcacatcaccccataaacaaata

SEQ ID NO: 3869 - DNA, 38 bp, Artificial Sequence
  Probe
atgtttagacgggctcacatcaccccataaacaaatag

SEQ ID NO: 3870 - DNA, 50 bp, Artificial Sequence
  Probe
attaaccttttaagttaaagattaagagaaccaacacctctttacagtga

SEQ ID NO: 3871 - DNA, 37 bp, Artificial Sequence
  Probe
attaactagttttgacaacattcaaaaaagagtaata

SEQ ID NO: 3872 - DNA, 32 bp, Artificial Sequence
  Probe
attaagagaaccaacacctctttacagtgaaa

SEQ ID NO: 3873 - DNA, 33 bp, Artificial Sequence
  Probe
attaagagaaccaacacctctttacagtgaaat

SEQ ID NO: 3874 - DNA, 20 bp, Artificial Sequence
  Probe
attaatcccctggcccaacc

SEQ ID NO: 3875 - DNA, 23 bp, Artificial Sequence
  Probe
attaatcccctggcccaacccgt

SEQ ID NO: 3876 - DNA, 24 bp, Artificial Sequence
  Probe
attaatcccctggcccaacccgtc

SEQ ID NO: 3877 - DNA, 30 bp, Artificial Sequence
  Probe
attaatcccctggcccaacccgtcatctac

SEQ ID NO: 3878 - DNA, 23 bp, Artificial Sequence
  Probe
attcaaaggttccgggttcgagt

SEQ ID NO: 3879 - DNA, 20 bp, Artificial Sequence
  Probe
attcccgggcggcgcactta

SEQ ID NO: 3880 - DNA, 48 bp, Artificial Sequence
  Probe
attcctggttttcacccaggcggcccgggttcgactcccggtgtggga

SEQ ID NO: 3881 - DNA, 49 bp, Artificial Sequence
  Probe
attcctggttttcacccaggcggcccgggttcgactcccggtgtgggaa

SEQ ID NO: 3882 - DNA, 50 bp, Artificial Sequence
  Probe
attcctggttttcacccaggcggcccgggttcgactcccggtgtgggaac

SEQ ID NO: 3883 - DNA, 50 bp, Artificial Sequence
  Probe
attcctggttttcacccaggcggcccgggttcgactcccggtgtgggaat

SEQ ID NO: 3884 - DNA, 31 bp, Artificial Sequence
  Probe
attcgaagaagcagcttcaaacctgccgggg

SEQ ID NO: 3885 - DNA, 33 bp, Artificial Sequence
  Probe
attcgaagaagcagcttcaaacctgccggggct

SEQ ID NO: 3886 - DNA, 35 bp, Artificial Sequence
  Probe
attcgaagaagcagcttcaaacctgccggggcttc

SEQ ID NO: 3887 - DNA, 36 bp, Artificial Sequence
  Probe
attcgaagaagcagcttcaaacctgccggggcttct

SEQ ID NO: 3888 - DNA, 37 bp, Artificial Sequence
  Probe
attcgaagaagcagcttcaaacctgccggggcttctc

SEQ ID NO: 3889 - DNA, 39 bp, Artificial Sequence
  Probe
attcgaagaagcagcttcaaacctgccggggcttctccc

SEQ ID NO: 3890 - DNA, 31 bp, Artificial Sequence
  Probe
attctaggttcgactcctggctggctcgcga

SEQ ID NO: 3891 - DNA, 23 bp, Artificial Sequence
  Probe
attctcagggatgggttcgattc

SEQ ID NO: 3892 - DNA, 37 bp, Artificial Sequence
  Probe
attctcagggatgggttcgattctcatagtcctagaa

SEQ ID NO: 3893 - DNA, 38 bp, Artificial Sequence
  Probe
attctcagggatgggttcgattctcatagtcctagaaa

SEQ ID NO: 3894 - DNA, 37 bp, Artificial Sequence
  Probe
attcttgcgacccgggttcgattcccgggcggcgcac

SEQ ID NO: 3895 - DNA, 38 bp, Artificial Sequence
  Probe
attcttgcgacccgggttcgattcccgggcggcgcact

SEQ ID NO: 3896 - DNA, 39 bp, Artificial Sequence
  Probe
attcttgcgacccgggttcgattcccgggcggcgcactt

SEQ ID NO: 3897 - DNA, 40 bp, Artificial Sequence
  Probe
attcttgcgacccgggttcgattcccgggcggcgcactta

SEQ ID NO: 3898 - DNA, 39 bp, Artificial Sequence
  Probe
attcttgcgacccgggttcgattcccgggcggcgcatag

SEQ ID NO: 3899 - DNA, 49 bp, Artificial Sequence
  Probe
attgaattgcaaattcgaagaagcagcttcaaacctgccggggcttctc

SEQ ID NO: 3900 - DNA, 50 bp, Artificial Sequence
  Probe
attgaattgcaaattcgaagaagcagcttcaaacctgccggggcttctcc

SEQ ID NO: 3901 - DNA, 35 bp, Artificial Sequence
  Probe
attgcaaattcgaagaagcagcttcaaacctgccg

SEQ ID NO: 3902 - DNA, 37 bp, Artificial Sequence
  Probe
attgcaaattcgaagaagcagcttcaaacctgccggg

SEQ ID NO: 3903 - DNA, 40 bp, Artificial Sequence
  Probe
attgcaaattcgaagaagcagcttcaaacctgccggggct

SEQ ID NO: 3904 - DNA, 41 bp, Artificial Sequence
  Probe
attgcaaattcgaagaagcagcttcaaacctgccggggctt

SEQ ID NO: 3905 - DNA, 43 bp, Artificial Sequence
  Probe
attgcaaattcgaagaagcagcttcaaacctgccggggcttct

SEQ ID NO: 3906 - DNA, 44 bp, Artificial Sequence
  Probe
attgcaaattcgaagaagcagcttcaaacctgccggggcttctc

SEQ ID NO: 3907 - DNA, 45 bp, Artificial Sequence
  Probe
attgcaaattcgaagaagcagcttcaaacctgccggggcttctcc

SEQ ID NO: 3908 - DNA, 25 bp, Artificial Sequence
  Probe
attggtcgtggttgtagtccgtgcg

SEQ ID NO: 3909 - DNA, 29 bp, Artificial Sequence
  Probe
attggtcgtggttgtagtccgtgcgagaa

SEQ ID NO: 3910 - DNA, 33 bp, Artificial Sequence
  Probe
attggtcgtggttgtagtccgtgcgagaataat

SEQ ID NO: 3911 - DNA, 34 bp, Artificial Sequence
  Probe
attggtcgtggttgtagtccgtgcgagaataatg

SEQ ID NO: 3912 - DNA, 25 bp, Artificial Sequence
  Probe
attggtggttcagtggtagaattct

SEQ ID NO: 3913 - DNA, 27 bp, Artificial Sequence
  Probe
attggtggttcagtggtagaattctcg

SEQ ID NO: 3914 - DNA, 28 bp, Artificial Sequence
  Probe
attggtggttcagtggtagaattctcgc

SEQ ID NO: 3915 - DNA, 29 bp, Artificial Sequence
  Probe
attggtggttcagtggtagaattctcgcc

SEQ ID NO: 3916 - DNA, 30 bp, Artificial Sequence
  Probe
attggtggttcagtggtagaattctcgcct

SEQ ID NO: 3917 - DNA, 31 bp, Artificial Sequence
  Probe
attggtggttcagtggtagaattctcgcctc

SEQ ID NO: 3918 - DNA, 33 bp, Artificial Sequence
  Probe
attggtggttcagtggtagaattctcgcctccc

SEQ ID NO: 3919 - DNA, 31 bp, Artificial Sequence
  Probe
attggtggttcagtggtagaattctcgcctg

SEQ ID NO: 3920 - DNA, 32 bp, Artificial Sequence
  Probe
attggtggttcagtggtagaattctcgcctgc

SEQ ID NO: 3921 - DNA, 33 bp, Artificial Sequence
  Probe
attggtggttcagtggtagaattctcgcctgcc

SEQ ID NO: 3922 - DNA, 34 bp, Artificial Sequence
  Probe
attggtggttcagtggtagaattctcgcctgcca

SEQ ID NO: 3923 - DNA, 31 bp, Artificial Sequence
  Probe
attgtgaatctgacaacagaggcttacgacc

SEQ ID NO: 3924 - DNA, 32 bp, Artificial Sequence
  Probe
attgtgaatctgacaacagaggcttacgaccc

SEQ ID NO: 3925 - DNA, 33 bp, Artificial Sequence
  Probe
attgtgaatctgacaacagaggcttacgacccc

SEQ ID NO: 3926 - DNA, 34 bp, Artificial Sequence
  Probe
attgtgaatctgacaacagaggcttacgacccct

SEQ ID NO: 3927 - DNA, 35 bp, Artificial Sequence
  Probe
attgtgaatctgacaacagaggcttacgacccctt

SEQ ID NO: 3928 - DNA, 39 bp, Artificial Sequence
  Probe
attgtgaatctgacaacagaggcttacgaccccttattt

SEQ ID NO: 3929 - DNA, 42 bp, Artificial Sequence
  Probe
attgtgaatctgacaacagaggcttacgaccccttatttacc

SEQ ID NO: 3930 - DNA, 43 bp, Artificial Sequence
  Probe
attgtgaatctgacaacagaggcttacgaccccttatttaccg

SEQ ID NO: 3931 - DNA, 44 bp, Artificial Sequence
  Probe
attgtgaatctgacaacagaggcttacgaccccttatttaccga

SEQ ID NO: 3932 - DNA, 45 bp, Artificial Sequence
  Probe
attgtgaatctgacaacagaggcttacgaccccttatttaccgag

SEQ ID NO: 3933 - DNA, 46 bp, Artificial Sequence
  Probe
attgtgaatctgacaacagaggcttacgaccccttatttaccgaga

SEQ ID NO: 3934 - DNA, 50 bp, Artificial Sequence
  Probe
attgtgaatctgacaacagaggcttacgaccccttatttaccgagaaagc

SEQ ID NO: 3935 - DNA, 25 bp, Artificial Sequence
  Probe
atttcaacttaacttgaccgctctg

SEQ ID NO: 3936 - DNA, 26 bp, Artificial Sequence
  Probe
atttcaacttaacttgaccgctctga

SEQ ID NO: 3937 - DNA, 27 bp, Artificial Sequence
  Probe
atttcaacttaacttgaccgctctgag

SEQ ID NO: 3938 - DNA, 28 bp, Artificial Sequence
  Probe
atttcaacttaacttgaccgctctgagc

SEQ ID NO: 3939 - DNA, 29 bp, Artificial Sequence
  Probe
atttcaacttaacttgaccgctctgagct

SEQ ID NO: 3940 - DNA, 25 bp, Artificial Sequence
  Probe
atttgtggtccagtggtagaattct

SEQ ID NO: 3941 - DNA, 26 bp, Artificial Sequence
  Probe
caaaaattttggtgcaactccaaata

SEQ ID NO: 3942 - DNA, 23 bp, Artificial Sequence
  Probe
caaaacatcagattgtgaatctg

SEQ ID NO: 3943 - DNA, 25 bp, Artificial Sequence
  Probe
caaaacatcagattgtgaatctgac

SEQ ID NO: 3944 - DNA, 26 bp, Artificial Sequence
  Probe
caaaacatcagattgtgaatctgaca

SEQ ID NO: 3945 - DNA, 27 bp, Artificial Sequence
  Probe
caaaacatcagattgtgaatctgacaa

SEQ ID NO: 3946 - DNA, 28 bp, Artificial Sequence
  Probe
caaaacatcagattgtgaatctgacaac

SEQ ID NO: 3947 - DNA, 29 bp, Artificial Sequence
  Probe
caaaacatcagattgtgaatctgacaaca

SEQ ID NO: 3948 - DNA, 30 bp, Artificial Sequence
  Probe
caaaacatcagattgtgaatctgacaacag

SEQ ID NO: 3949 - DNA, 32 bp, Artificial Sequence
  Probe
caaaacatcagattgtgaatctgacaacagag

SEQ ID NO: 3950 - DNA, 33 bp, Artificial Sequence
  Probe
caaaacatcagattgtgaatctgacaacagagg

SEQ ID NO: 3951 - DNA, 34 bp, Artificial Sequence
  Probe
caaaacatcagattgtgaatctgacaacagaggc

SEQ ID NO: 3952 - DNA, 35 bp, Artificial Sequence
  Probe
caaaacatcagattgtgaatctgacaacagaggct

SEQ ID NO: 3953 - DNA, 47 bp, Artificial Sequence
  Probe
caaaacatcagattgtgaatctgacaacagaggcttacgacccctta

SEQ ID NO: 3954 - DNA, 48 bp, Artificial Sequence
  Probe
caaaacatcagattgtgaatctgacaacagaggcttacgaccccttat

SEQ ID NO: 3955 - DNA, 49 bp, Artificial Sequence
  Probe
caaaacatcagattgtgaatctgacaacagaggcttacgaccccttatt

SEQ ID NO: 3956 - DNA, 32 bp, Artificial Sequence
  Probe
caaaacgaatgatttcgactcattaaattatg

SEQ ID NO: 3957 - DNA, 49 bp, Artificial Sequence
  Probe
caaaacgaatgatttcgactcattaaattatgataatcatatttaccaa

SEQ ID NO: 3958 - DNA, 50 bp, Artificial Sequence
  Probe
caaaacgaatgatttcgactcattaaattatgataatcatatttaccaaa

SEQ ID NO: 3959 - DNA, 18 bp, Artificial Sequence
  Probe
caaacctgccggggcttc

SEQ ID NO: 3960 - DNA, 31 bp, Artificial Sequence
  Probe
caaagacaccccccacagtttatgtagctta

SEQ ID NO: 3961 - DNA, 33 bp, Artificial Sequence
  Probe
caaagacaccccccacagtttatgtagcttacc

SEQ ID NO: 3962 - DNA, 36 bp, Artificial Sequence
  Probe
caaagacaccccccacagtttatgtagcttacctcc

SEQ ID NO: 3963 - DNA, 37 bp, Artificial Sequence
  Probe
caaagacaccccccacagtttatgtagcttacctcct

SEQ ID NO: 3964 - DNA, 49 bp, Artificial Sequence
  Probe
caaagacaccccccacagtttatgtagcttacctcctcaaagcaataca

SEQ ID NO: 3965 - DNA, 50 bp, Artificial Sequence
  Probe
caaagacaccccccacagtttatgtagcttacctcctcaaagcaatacac

SEQ ID NO: 3966 - DNA, 17 bp, Artificial Sequence
  Probe
caaagcaatacactgaa

SEQ ID NO: 3967 - DNA, 40 bp, Artificial Sequence
  Probe
caaagcaatacactgaaaatgtttagacgggctcacatca

SEQ ID NO: 3968 - DNA, 44 bp, Artificial Sequence
  Probe
caaagcaatacactgaaaatgtttagacgggctcacatcacccc

SEQ ID NO: 3969 - DNA, 46 bp, Artificial Sequence
  Probe
caaagcaatacactgaaaatgtttagacgggctcacatcaccccat

SEQ ID NO: 3970 - DNA, 49 bp, Artificial Sequence
  Probe
caaagcaatacactgaaaatgtttagacgggctcacatcaccccataaa

SEQ ID NO: 3971 - DNA, 17 bp, Artificial Sequence
  Probe
caaagcacccaacttac

SEQ ID NO: 3972 - DNA, 18 bp, Artificial Sequence
  Probe
caaagcacccaacttaca

SEQ ID NO: 3973 - DNA, 20 bp, Artificial Sequence
  Probe
caaagcacccaacttacact

SEQ ID NO: 3974 - DNA, 21 bp, Artificial Sequence
  Probe
caaagcacccaacttacactt

SEQ ID NO: 3975 - DNA, 22 bp, Artificial Sequence
  Probe
caaagcacccaacttacactta

SEQ ID NO: 3976 - DNA, 23 bp, Artificial Sequence
  Probe
caaagcacccaacttacacttag

SEQ ID NO: 3977 - DNA, 25 bp, Artificial Sequence
  Probe
caaagcacccaacttacacttagga

SEQ ID NO: 3978 - DNA, 27 bp, Artificial Sequence
  Probe
caaagcacccaacttacacttaggaga

SEQ ID NO: 3979 - DNA, 28 bp, Artificial Sequence
  Probe
caaagcacccaacttacacttaggagat

SEQ ID NO: 3980 - DNA, 29 bp, Artificial Sequence
  Probe
caaagcacccaacttacacttaggagatt

SEQ ID NO: 3981 - DNA, 32 bp, Artificial Sequence
  Probe
caaagcacccaacttacacttaggagatttca

SEQ ID NO: 3982 - DNA, 33 bp, Artificial Sequence
  Probe
caaagcacccaacttacacttaggagatttcaa

SEQ ID NO: 3983 - DNA, 34 bp, Artificial Sequence
  Probe
caaagcacccaacttacacttaggagatttcaac

SEQ ID NO: 3984 - DNA, 35 bp, Artificial Sequence
  Probe
caaagcacccaacttacacttaggagatttcaact

SEQ ID NO: 3985 - DNA, 36 bp, Artificial Sequence
  Probe
caaagcacccaacttacacttaggagatttcaactt

SEQ ID NO: 3986 - DNA, 43 bp, Artificial Sequence
  Probe
caaagcacccaacttacacttaggagatttcaacttaacttga

SEQ ID NO: 3987 - DNA, 49 bp, Artificial Sequence
  Probe
caaagcacccaacttacacttaggagatttcaacttaacttgaccgctc

SEQ ID NO: 3988 - DNA, 31 bp, Artificial Sequence
  Probe
caaagttaaattataggctaaatcctatata

SEQ ID NO: 3989 - DNA, 31 bp, Artificial Sequence
  Probe
caaattcgaagaagcagcttcaaacctgccg

SEQ ID NO: 3990 - DNA, 32 bp, Artificial Sequence
  Probe
caaattcgaagaagcagcttcaaacctgccgg

SEQ ID NO: 3991 - DNA, 35 bp, Artificial Sequence
  Probe
caaattcgaagaagcagcttcaaacctgccggggc

SEQ ID NO: 3992 - DNA, 36 bp, Artificial Sequence
  Probe
caaattcgaagaagcagcttcaaacctgccggggct

SEQ ID NO: 3993 - DNA, 37 bp, Artificial Sequence
  Probe
caaattcgaagaagcagcttcaaacctgccggggctt

SEQ ID NO: 3994 - DNA, 39 bp, Artificial Sequence
  Probe
caaattcgaagaagcagcttcaaacctgccggggcttct

SEQ ID NO: 3995 - DNA, 40 bp, Artificial Sequence
  Probe
caaattcgaagaagcagcttcaaacctgccggggcttctc

SEQ ID NO: 3996 - DNA, 20 bp, Artificial Sequence
  Probe
caacacctctttacagtgaa

SEQ ID NO: 3997 - DNA, 21 bp, Artificial Sequence
  Probe
caacacctctttacagtgaaa

SEQ ID NO: 3998 - DNA, 22 bp, Artificial Sequence
  Probe
caacacctctttacagtgaaat

SEQ ID NO: 3999 - DNA, 23 bp, Artificial Sequence
  Probe
caacagaggcttacgacccctta

SEQ ID NO: 4000 - DNA, 25 bp, Artificial Sequence
  Probe
caacagaggcttacgaccccttatt

SEQ ID NO: 4001 - DNA, 30 bp, Artificial Sequence
  Probe
caacagaggcttacgaccccttatttaccg

SEQ ID NO: 4002 - DNA, 31 bp, Artificial Sequence
  Probe
caacagaggcttacgaccccttatttaccga

SEQ ID NO: 4003 - DNA, 32 bp, Artificial Sequence
  Probe
caacagaggcttacgaccccttatttaccgag

SEQ ID NO: 4004 - DNA, 15 bp, Artificial Sequence
  Probe
caaccccatggcctc

SEQ ID NO: 4005 - DNA, 15 bp, Artificial Sequence
  Probe
caacccgtcatctac

SEQ ID NO: 4006 - DNA, 31 bp, Artificial Sequence
  Probe
caacctcggttcgaatccgagtcacggcaaa

SEQ ID NO: 4007 - DNA, 31 bp, Artificial Sequence
  Probe
caacctcggttcgaatccgagtcacggcagg

SEQ ID NO: 4008 - DNA, 32 bp, Artificial Sequence
  Probe
caacctcggttcgaatccgagtcacggcaggt

SEQ ID NO: 4009 - DNA, 31 bp, Artificial Sequence
  Probe
caacctcggttcgaatccgagtcacggcatt

SEQ ID NO: 4010 - DNA, 32 bp, Artificial Sequence
  Probe
caacctcggttcgaatccgagtcacggcattg

SEQ ID NO: 4011 - DNA, 50 bp, Artificial Sequence
  Probe
caacgatggtttttcatatcattggtcgtggttgtagtccgtgcgagaat

SEQ ID NO: 4012 - DNA, 17 bp, Artificial Sequence
  Probe
caacttaacttgaccgc

SEQ ID NO: 4013 - DNA, 18 bp, Artificial Sequence
  Probe
caacttaacttgaccgct

SEQ ID NO: 4014 - DNA, 19 bp, Artificial Sequence
  Probe
caacttaacttgaccgctc

SEQ ID NO: 4015 - DNA, 22 bp, Artificial Sequence
  Probe
caacttaacttgaccgctctga

SEQ ID NO: 4016 - DNA, 23 bp, Artificial Sequence
  Probe
caacttaacttgaccgctctgag

SEQ ID NO: 4017 - DNA, 24 bp, Artificial Sequence
  Probe
caacttaacttgaccgctctgagc

SEQ ID NO: 4018 - DNA, 25 bp, Artificial Sequence
  Probe
caacttaacttgaccgctctgagct

SEQ ID NO: 4019 - DNA, 17 bp, Artificial Sequence
  Probe
caacttacacttaggag

SEQ ID NO: 4020 - DNA, 20 bp, Artificial Sequence
  Probe
caacttacacttaggagatt

SEQ ID NO: 4021 - DNA, 22 bp, Artificial Sequence
  Probe
caacttacacttaggagatttc

SEQ ID NO: 4022 - DNA, 23 bp, Artificial Sequence
  Probe
caacttacacttaggagatttca

SEQ ID NO: 4023 - DNA, 25 bp, Artificial Sequence
  Probe
caacttacacttaggagatttcaac

SEQ ID NO: 4024 - DNA, 33 bp, Artificial Sequence
  Probe
caacttacacttaggagatttcaacttaacttg

SEQ ID NO: 4025 - DNA, 35 bp, Artificial Sequence
  Probe
caacttacacttaggagatttcaacttaacttgac

SEQ ID NO: 4026 - DNA, 37 bp, Artificial Sequence
  Probe
caacttacacttaggagatttcaacttaacttgaccg

SEQ ID NO: 4027 - DNA, 39 bp, Artificial Sequence
  Probe
caacttacacttaggagatttcaacttaacttgaccgct

SEQ ID NO: 4028 - DNA, 41 bp, Artificial Sequence
  Probe
caacttacacttaggagatttcaacttaacttgaccgctct

SEQ ID NO: 4029 - DNA, 43 bp, Artificial Sequence
  Probe
caacttacacttaggagatttcaacttaacttgaccgctctga

SEQ ID NO: 4030 - DNA, 44 bp, Artificial Sequence
  Probe
caacttacacttaggagatttcaacttaacttgaccgctctgag

SEQ ID NO: 4031 - DNA, 45 bp, Artificial Sequence
  Probe
caacttacacttaggagatttcaacttaacttgaccgctctgagc

SEQ ID NO: 4032 - DNA, 46 bp, Artificial Sequence
  Probe
caacttacacttaggagatttcaacttaacttgaccgctctgagct

SEQ ID NO: 4033 - DNA, 49 bp, Artificial Sequence
  Probe
caacttacacttaggagatttcaacttaacttgaccgctctgagctaaa

SEQ ID NO: 4034 - DNA, 50 bp, Artificial Sequence
  Probe
caacttacacttaggagatttcaacttaacttgaccgctctgagctaaac

SEQ ID NO: 4035 - DNA, 39 bp, Artificial Sequence
  Probe
caagaacagggtttgttaagatggcagagcccggtaatc

SEQ ID NO: 4036 - DNA, 19 bp, Artificial Sequence
  Probe
caagaactgctaactcatg

SEQ ID NO: 4037 - DNA, 20 bp, Artificial Sequence
  Probe
caagaactgctaactcatgc

SEQ ID NO: 4038 - DNA, 29 bp, Artificial Sequence
  Probe
caagaactgctaactcatgcccccatgtc

SEQ ID NO: 4039 - DNA, 31 bp, Artificial Sequence
  Probe
caagaactgctaactcatgcccccatgtcta

SEQ ID NO: 4040 - DNA, 41 bp, Artificial Sequence
  Probe
caagaactgctaactcatgcccccatgtctaacaacatggc

SEQ ID NO: 4041 - DNA, 43 bp, Artificial Sequence
  Probe
caagaactgctaactcatgcccccatgtctaacaacatggctt

SEQ ID NO: 4042 - DNA, 48 bp, Artificial Sequence
  Probe
caagaactgctaactcatgcccccatgtctaacaacatggctttctca

SEQ ID NO: 4043 - DNA, 49 bp, Artificial Sequence
  Probe
caagaactgctaactcatgcccccatgtctaacaacatggctttctcaa

SEQ ID NO: 4044 - DNA, 50 bp, Artificial Sequence
  Probe
caagaactgctaactcatgcccccatgtctaacaacatggctttctcaac

SEQ ID NO: 4045 - DNA, 16 bp, Artificial Sequence
  Probe
caagagccttcaaagc

SEQ ID NO: 4046 - DNA, 17 bp, Artificial Sequence
  Probe
caagagccttcaaagcc

SEQ ID NO: 4047 - DNA, 18 bp, Artificial Sequence
  Probe
caagagccttcaaagccc

SEQ ID NO: 4048 - DNA, 20 bp, Artificial Sequence
  Probe
caagagccttcaaagccctc

SEQ ID NO: 4049 - DNA, 30 bp, Artificial Sequence
  Probe
caagagccttcaaagccctcagtaagttgc

SEQ ID NO: 4050 - DNA, 50 bp, Artificial Sequence
  Probe
caagagccttcaaagccctcagtaagttgcaatacttaatttctgtaaca

SEQ ID NO: 4051 - DNA, 17 bp, Artificial Sequence
  Probe
caagaggtccccggttc

SEQ ID NO: 4052 - DNA, 24 bp, Artificial Sequence
  Probe
caagcagttgacccgggttcgatt

SEQ ID NO: 4053 - DNA, 40 bp, Artificial Sequence
  Probe
caatacactgaaaatgtttagacgggctcacatcacccca

SEQ ID NO: 4054 - DNA, 49 bp, Artificial Sequence
  Probe
caatacactgaaaatgtttagacgggctcacatcaccccataaacaaat

SEQ ID NO: 4055 - DNA, 50 bp, Artificial Sequence
  Probe
caatacactgaaaatgtttagacgggctcacatcaccccataaacaaata

SEQ ID NO: 4056 - DNA, 17 bp, Artificial Sequence
  Probe
caatggacatatgtccg

SEQ ID NO: 4057 - DNA, 45 bp, Artificial Sequence
  Probe
caatggggtttccccgcacaggttcgaatcctgttcgtgacgggt

SEQ ID NO: 4058 - DNA, 33 bp, Artificial Sequence
  Probe
caattaactagttttgacaacattcaaaaaaga

SEQ ID NO: 4059 - DNA, 37 bp, Artificial Sequence
  Probe
caattaactagttttgacaacattcaaaaaagagtaa

SEQ ID NO: 4060 - DNA, 38 bp, Artificial Sequence
  Probe
caattaactagttttgacaacattcaaaaaagagtaat

SEQ ID NO: 4061 - DNA, 39 bp, Artificial Sequence
  Probe
caattaactagttttgacaacattcaaaaaagagtaata

SEQ ID NO: 4062 - DNA, 21 bp, Artificial Sequence
  Probe
caattccccgacggggaggtg

SEQ ID NO: 4063 - DNA, 21 bp, Artificial Sequence
  Probe
caattcccggtcagggaacca

SEQ ID NO: 4064 - DNA, 16 bp, Artificial Sequence
  Probe
cacaaagcacccaact

SEQ ID NO: 4065 - DNA, 17 bp, Artificial Sequence
  Probe
cacaaagcacccaactt

SEQ ID NO: 4066 - DNA, 19 bp, Artificial Sequence
  Probe
cacaaagcacccaacttac

SEQ ID NO: 4067 - DNA, 20 bp, Artificial Sequence
  Probe
cacaaagcacccaacttaca

SEQ ID NO: 4068 - DNA, 22 bp, Artificial Sequence
  Probe
cacaaagcacccaacttacact

SEQ ID NO: 4069 - DNA, 23 bp, Artificial Sequence
  Probe
cacaaagcacccaacttacactt

SEQ ID NO: 4070 - DNA, 24 bp, Artificial Sequence
  Probe
cacaaagcacccaacttacactta

SEQ ID NO: 4071 - DNA, 25 bp, Artificial Sequence
  Probe
cacaaagcacccaacttacacttag

SEQ ID NO: 4072 - DNA, 27 bp, Artificial Sequence
  Probe
cacaaagcacccaacttacacttagga

SEQ ID NO: 4073 - DNA, 29 bp, Artificial Sequence
  Probe
cacaaagcacccaacttacacttaggaga

SEQ ID NO: 4074 - DNA, 31 bp, Artificial Sequence
  Probe
cacaaagcacccaacttacacttaggagatt

SEQ ID NO: 4075 - DNA, 33 bp, Artificial Sequence
  Probe
cacaaagcacccaacttacacttaggagatttc

SEQ ID NO: 4076 - DNA, 34 bp, Artificial Sequence
  Probe
cacaaagcacccaacttacacttaggagatttca

SEQ ID NO: 4077 - DNA, 35 bp, Artificial Sequence
  Probe
cacaaagcacccaacttacacttaggagatttcaa

SEQ ID NO: 4078 - DNA, 36 bp, Artificial Sequence
  Probe
cacaaagcacccaacttacacttaggagatttcaac

SEQ ID NO: 4079 - DNA, 38 bp, Artificial Sequence
  Probe
cacaaagcacccaacttacacttaggagatttcaactt

SEQ ID NO: 4080 - DNA, 39 bp, Artificial Sequence
  Probe
cacaaagcacccaacttacacttaggagatttcaactta

SEQ ID NO: 4081 - DNA, 45 bp, Artificial Sequence
  Probe
cacaaagcacccaacttacacttaggagatttcaacttaacttga

SEQ ID NO: 4082 - DNA, 46 bp, Artificial Sequence
  Probe
cacaaagcacccaacttacacttaggagatttcaacttaacttgac

SEQ ID NO: 4083 - DNA, 47 bp, Artificial Sequence
  Probe
cacaaagcacccaacttacacttaggagatttcaacttaacttgacc

SEQ ID NO: 4084 - DNA, 48 bp, Artificial Sequence
  Probe
cacaaagcacccaacttacacttaggagatttcaacttaacttgaccg

SEQ ID NO: 4085 - DNA, 49 bp, Artificial Sequence
  Probe
cacaaagcacccaacttacacttaggagatttcaacttaacttgaccgc

SEQ ID NO: 4086 - DNA, 20 bp, Artificial Sequence
  Probe
cacaagaactgctaactcat

SEQ ID NO: 4087 - DNA, 21 bp, Artificial Sequence
  Probe
cacaagaactgctaactcatg

SEQ ID NO: 4088 - DNA, 27 bp, Artificial Sequence
  Probe
cacaagaactgctaactcatgccccca

SEQ ID NO: 4089 - DNA, 31 bp, Artificial Sequence
  Probe
cacaagaactgctaactcatgcccccatgtc

SEQ ID NO: 4090 - DNA, 32 bp, Artificial Sequence
  Probe
cacaagaactgctaactcatgcccccatgtct

SEQ ID NO: 4091 - DNA, 47 bp, Artificial Sequence
  Probe
cacaagaactgctaactcatgcccccatgtctaacaacatggctttc

SEQ ID NO: 4092 - DNA, 48 bp, Artificial Sequence
  Probe
cacaagaactgctaactcatgcccccatgtctaacaacatggctttct

SEQ ID NO: 4093 - DNA, 49 bp, Artificial Sequence
  Probe
cacaagaactgctaactcatgcccccatgtctaacaacatggctttctc

SEQ ID NO: 4094 - DNA, 24 bp, Artificial Sequence
  Probe
cacacccacccaagaacagggttt

SEQ ID NO: 4095 - DNA, 25 bp, Artificial Sequence
  Probe
cacacccacccaagaacagggtttg

SEQ ID NO: 4096 - DNA, 27 bp, Artificial Sequence
  Probe
cacacccacccaagaacagggtttgtt

SEQ ID NO: 4097 - DNA, 28 bp, Artificial Sequence
  Probe
cacacccacccaagaacagggtttgtta

SEQ ID NO: 4098 - DNA, 20 bp, Artificial Sequence
  Probe
cacacggggcacaataattt

SEQ ID NO: 4099 - DNA, 18 bp, Artificial Sequence
  Probe
cacatcaccccataaaca

SEQ ID NO: 4100 - DNA, 19 bp, Artificial Sequence
  Probe
cacatcaccccataaacaa

SEQ ID NO: 4101 - DNA, 20 bp, Artificial Sequence
  Probe
cacatcaccccataaacaaa

SEQ ID NO: 4102 - DNA, 21 bp, Artificial Sequence
  Probe
cacatcaccccataaacaaat

SEQ ID NO: 4103 - DNA, 26 bp, Artificial Sequence
  Probe
cacatggtctagcggttaggattcct

SEQ ID NO: 4104 - DNA, 29 bp, Artificial Sequence
  Probe
cacatggtctagcggttaggattcctggt

SEQ ID NO: 4105 - DNA, 34 bp, Artificial Sequence
  Probe
cacatggtctagcggttaggattcctggttttca

SEQ ID NO: 4106 - DNA, 17 bp, Artificial Sequence
  Probe
cacccaacttacactta

SEQ ID NO: 4107 - DNA, 23 bp, Artificial Sequence
  Probe
cacccaacttacacttaggagat

SEQ ID NO: 4108 - DNA, 27 bp, Artificial Sequence
  Probe
cacccaacttacacttaggagatttca

SEQ ID NO: 4109 - DNA, 32 bp, Artificial Sequence
  Probe
cacccaacttacacttaggagatttcaactta

SEQ ID NO: 4110 - DNA, 39 bp, Artificial Sequence
  Probe
cacccaacttacacttaggagatttcaacttaacttgac

SEQ ID NO: 4111 - DNA, 41 bp, Artificial Sequence
  Probe
cacccaacttacacttaggagatttcaacttaacttgaccg

SEQ ID NO: 4112 - DNA, 48 bp, Artificial Sequence
  Probe
cacccaacttacacttaggagatttcaacttaacttgaccgctctgag

SEQ ID NO: 4113 - DNA, 49 bp, Artificial Sequence
  Probe
cacccaacttacacttaggagatttcaacttaacttgaccgctctgagc

SEQ ID NO: 4114 - DNA, 50 bp, Artificial Sequence
  Probe
cacccaacttacacttaggagatttcaacttaacttgaccgctctgagct

SEQ ID NO: 4115 - DNA, 23 bp, Artificial Sequence
  Probe
cacccacccaagaacagggtttg

SEQ ID NO: 4116 - DNA, 26 bp, Artificial Sequence
  Probe
cacccacccaagaacagggtttgtta

SEQ ID NO: 4117 - DNA, 22 bp, Artificial Sequence
  Probe
cacctcagaaggtctcactttt

SEQ ID NO: 4118 - DNA, 17 bp, Artificial Sequence
  Probe
cacctctttacagtgaa

SEQ ID NO: 4119 - DNA, 23 bp, Artificial Sequence
  Probe
cacgcagaaggtcctgggttcga

SEQ ID NO: 4120 - DNA, 24 bp, Artificial Sequence
  Probe
cacgcagaaggtcctgggttcgag

SEQ ID NO: 4121 - DNA, 40 bp, Artificial Sequence
  Probe
cacgcagaaggtcctgggttcgagccccagtggaaccacg

SEQ ID NO: 4122 - DNA, 41 bp, Artificial Sequence
  Probe
cacgcagaaggtcctgggttcgagccccagtggaaccacgg

SEQ ID NO: 4123 - DNA, 24 bp, Artificial Sequence
  Probe
cacgcgaaaggtccccggttcgaa

SEQ ID NO: 4124 - DNA, 24 bp, Artificial Sequence
  Probe
cacgcgaaaggtccccggttcgat

SEQ ID NO: 4125 - DNA, 20 bp, Artificial Sequence
  Probe
cacgcgggagaccggggttc

SEQ ID NO: 4126 - DNA, 30 bp, Artificial Sequence
  Probe
cacgcgggagaccggggttcaattccccga

SEQ ID NO: 4127 - DNA, 31 bp, Artificial Sequence
  Probe
cacgcgggagaccggggttcaattccccgac

SEQ ID NO: 4128 - DNA, 34 bp, Artificial Sequence
  Probe
cacgcgggagaccggggttcaattccccgacggg

SEQ ID NO: 4129 - DNA, 38 bp, Artificial Sequence
  Probe
cacgcgggagaccggggttcaattccccgacggggagg

SEQ ID NO: 4130 - DNA, 39 bp, Artificial Sequence
  Probe
cacgcgggagaccggggttcaattccccgacggggaggt

SEQ ID NO: 4131 - DNA, 40 bp, Artificial Sequence
  Probe
cacgcgggagaccggggttcaattccccgacggggaggtg

SEQ ID NO: 4132 - DNA, 41 bp, Artificial Sequence
  Probe
cacgcgggagaccggggttcaattccccgacggggaggtgt

SEQ ID NO: 4133 - DNA, 22 bp, Artificial Sequence
  Probe
cacgcgggagaccggggttcga

SEQ ID NO: 4134 - DNA, 23 bp, Artificial Sequence
  Probe
cacgcgggagaccggggttcgat

SEQ ID NO: 4135 - DNA, 24 bp, Artificial Sequence
  Probe
cacgcgggagaccggggttcgatt

SEQ ID NO: 4136 - DNA, 49 bp, Artificial Sequence
  Probe
cacgcgggagaccggggttcgattccccaacggggaggctaataatgtt

SEQ ID NO: 4137 - DNA, 38 bp, Artificial Sequence
  Probe
cacgcgggagaccggggttcgattccccgacggggaga

SEQ ID NO: 4138 - DNA, 39 bp, Artificial Sequence
  Probe
cacgcgggagaccggggttcgattccccgacggggagaa

SEQ ID NO: 4139 - DNA, 40 bp, Artificial Sequence
  Probe
cacgcgggagaccggggttcgattccccgacggggagaaa

SEQ ID NO: 4140 - DNA, 41 bp, Artificial Sequence
  Probe
cacgcgggagaccggggttcgattccccgacggggagaaaa

SEQ ID NO: 4141 - DNA, 46 bp, Artificial Sequence
  Probe
cacgcgggagaccggggttcgattccccgacggggagaaaagttgc

SEQ ID NO: 4142 - DNA, 48 bp, Artificial Sequence
  Probe
cacgcgggagaccggggttcgattccccgacggggagaaaagttgctt

SEQ ID NO: 4143 - DNA, 50 bp, Artificial Sequence
  Probe
cacgcgggagaccggggttcgattccccgacggggagaaaagttgctttt

SEQ ID NO: 4144 - DNA, 39 bp, Artificial Sequence
  Probe
cacgcgggagaccggggttcgattccccgacggggagac

SEQ ID NO: 4145 - DNA, 40 bp, Artificial Sequence
  Probe
cacgcgggagaccggggttcgattccccgacggggagacg

SEQ ID NO: 4146 - DNA, 39 bp, Artificial Sequence
  Probe
cacgcgggagaccggggttcgattccccgacggggagag

SEQ ID NO: 4147 - DNA, 40 bp, Artificial Sequence
  Probe
cacgcgggagaccggggttcgattccccgacggggagagt

SEQ ID NO: 4148 - DNA, 41 bp, Artificial Sequence
  Probe
cacgcgggagaccggggttcgattccccgacggggagagta

SEQ ID NO: 4149 - DNA, 38 bp, Artificial Sequence
  Probe
cacgcgggagaccggggttcgattccccgacggggagg

SEQ ID NO: 4150 - DNA, 39 bp, Artificial Sequence
  Probe
cacgcgggagaccggggttcgattccccgacggggagga

SEQ ID NO: 4151 - DNA, 40 bp, Artificial Sequence
  Probe
cacgcgggagaccggggttcgattccccgacggggaggag

SEQ ID NO: 4152 - DNA, 41 bp, Artificial Sequence
  Probe
cacgcgggagaccggggttcgattccccgacggggaggagg

SEQ ID NO: 4153 - DNA, 50 bp, Artificial Sequence
  Probe
cacgcgggagaccggggttcgattccccgacggggaggaggcttaaactt

SEQ ID NO: 4154 - DNA, 39 bp, Artificial Sequence
  Probe
cacgcgggagaccggggttcgattccccgacggggaggc

SEQ ID NO: 4155 - DNA, 40 bp, Artificial Sequence
  Probe
cacgcgggagaccggggttcgattccccgacggggaggca

SEQ ID NO: 4156 - DNA, 41 bp, Artificial Sequence
  Probe
cacgcgggagaccggggttcgattccccgacggggaggcac

SEQ ID NO: 4157 - DNA, 43 bp, Artificial Sequence
  Probe
cacgcgggagaccggggttcgattccccgacggggaggcacag

SEQ ID NO: 4158 - DNA, 46 bp, Artificial Sequence
  Probe
cacgcgggagaccggggttcgattccccgacggggaggcacagtaa

SEQ ID NO: 4159 - DNA, 47 bp, Artificial Sequence
  Probe
cacgcgggagaccggggttcgattccccgacggggaggcacagtaat

SEQ ID NO: 4160 - DNA, 48 bp, Artificial Sequence
  Probe
cacgcgggagaccggggttcgattccccgacggggaggcacagtaatt

SEQ ID NO: 4161 - DNA, 49 bp, Artificial Sequence
  Probe
cacgcgggagaccggggttcgattccccgacggggaggcacagtaattg

SEQ ID NO: 4162 - DNA, 50 bp, Artificial Sequence
  Probe
cacgcgggagaccggggttcgattccccgacggggaggcacagtaattgt

SEQ ID NO: 4163 - DNA, 41 bp, Artificial Sequence
  Probe
cacgcgggagaccggggttcgattccccgacggggaggcag

SEQ ID NO: 4164 - DNA, 43 bp, Artificial Sequence
  Probe
cacgcgggagaccggggttcgattccccgacggggaggcagcc

SEQ ID NO: 4165 - DNA, 40 bp, Artificial Sequence
  Probe
cacgcgggagaccggggttcgattccccgacggggaggcc

SEQ ID NO: 4166 - DNA, 41 bp, Artificial Sequence
  Probe
cacgcgggagaccggggttcgattccccgacggggaggccg

SEQ ID NO: 4167 - DNA, 42 bp, Artificial Sequence
  Probe
cacgcgggagaccggggttcgattccccgacggggaggccgg

SEQ ID NO: 4168 - DNA, 43 bp, Artificial Sequence
  Probe
cacgcgggagaccggggttcgattccccgacggggaggccggg

SEQ ID NO: 4169 - DNA, 44 bp, Artificial Sequence
  Probe
cacgcgggagaccggggttcgattccccgacggggaggccgggt

SEQ ID NO: 4170 - DNA, 50 bp, Artificial Sequence
  Probe
cacgcgggagaccggggttcgattccccgacggggaggccgggtactttc

SEQ ID NO: 4171 - DNA, 18 bp, Artificial Sequence
  Probe
cacggggcacaataattt

SEQ ID NO: 4172 - DNA, 22 bp, Artificial Sequence
  Probe
cactctggactctgaatccagc

SEQ ID NO: 4173 - DNA, 29 bp, Artificial Sequence
  Probe
cactctggactctgaatccagcgatccga

SEQ ID NO: 4174 - DNA, 30 bp, Artificial Sequence
  Probe
cactctggactctgaatccagcgatccgag

SEQ ID NO: 4175 - DNA, 49 bp, Artificial Sequence
  Probe
cactctggactctgaatccagcgatccgagttcaaatctcggtggaacc

SEQ ID NO: 4176 - DNA, 50 bp, Artificial Sequence
  Probe
cactctggactctgaatccagcgatccgagttcaaatctcggtggaacct

SEQ ID NO: 4177 - DNA, 27 bp, Artificial Sequence
  Probe
cactgaaaatgtttagacgggctcaca

SEQ ID NO: 4178 - DNA, 20 bp, Artificial Sequence
  Probe
cactgtaaagctaacttagc

SEQ ID NO: 4179 - DNA, 21 bp, Artificial Sequence
  Probe
cactgtaaagctaacttagca

SEQ ID NO: 4180 - DNA, 33 bp, Artificial Sequence
  Probe
cactgtaaagctaacttagcattaaccttttaa

SEQ ID NO: 4181 - DNA, 37 bp, Artificial Sequence
  Probe
cactgtaaagctaacttagcattaaccttttaagtta

SEQ ID NO: 4182 - DNA, 40 bp, Artificial Sequence
  Probe
cactgtaaagctaacttagcattaaccttttaagttaaag

SEQ ID NO: 4183 - DNA, 42 bp, Artificial Sequence
  Probe
cactgtaaagctaacttagcattaaccttttaagttaaagat

SEQ ID NO: 4184 - DNA, 44 bp, Artificial Sequence
  Probe
cactgtaaagctaacttagcattaaccttttaagttaaagatta

SEQ ID NO: 4185 - DNA, 45 bp, Artificial Sequence
  Probe
cactgtaaagctaacttagcattaaccttttaagttaaagattaa

SEQ ID NO: 4186 - DNA, 48 bp, Artificial Sequence
  Probe
cactgtaaagctaacttagcattaaccttttaagttaaagattaagag

SEQ ID NO: 4187 - DNA, 49 bp, Artificial Sequence
  Probe
cactgtaaagctaacttagcattaaccttttaagttaaagattaagaga

SEQ ID NO: 4188 - DNA, 21 bp, Artificial Sequence
  Probe
cacttaggagatttcaactta

SEQ ID NO: 4189 - DNA, 23 bp, Artificial Sequence
  Probe
cacttaggagatttcaacttaac

SEQ ID NO: 4190 - DNA, 24 bp, Artificial Sequence
  Probe
cacttaggagatttcaacttaact

SEQ ID NO: 4191 - DNA, 26 bp, Artificial Sequence
  Probe
cacttaggagatttcaacttaacttg

SEQ ID NO: 4192 - DNA, 27 bp, Artificial Sequence
  Probe
cacttaggagatttcaacttaacttga

SEQ ID NO: 4193 - DNA, 28 bp, Artificial Sequence
  Probe
cacttaggagatttcaacttaacttgac

SEQ ID NO: 4194 - DNA, 29 bp, Artificial Sequence
  Probe
cacttaggagatttcaacttaacttgacc

SEQ ID NO: 4195 - DNA, 30 bp, Artificial Sequence
  Probe
cacttaggagatttcaacttaacttgaccg

SEQ ID NO: 4196 - DNA, 31 bp, Artificial Sequence
  Probe
cacttaggagatttcaacttaacttgaccgc

SEQ ID NO: 4197 - DNA, 32 bp, Artificial Sequence
  Probe
cacttaggagatttcaacttaacttgaccgct

SEQ ID NO: 4198 - DNA, 33 bp, Artificial Sequence
  Probe
cacttaggagatttcaacttaacttgaccgctc

SEQ ID NO: 4199 - DNA, 34 bp, Artificial Sequence
  Probe
cacttaggagatttcaacttaacttgaccgctct

SEQ ID NO: 4200 - DNA, 35 bp, Artificial Sequence
  Probe
cacttaggagatttcaacttaacttgaccgctctg

SEQ ID NO: 4201 - DNA, 36 bp, Artificial Sequence
  Probe
cacttaggagatttcaacttaacttgaccgctctga

SEQ ID NO: 4202 - DNA, 37 bp, Artificial Sequence
  Probe
cacttaggagatttcaacttaacttgaccgctctgag

SEQ ID NO: 4203 - DNA, 38 bp, Artificial Sequence
  Probe
cacttaggagatttcaacttaacttgaccgctctgagc

SEQ ID NO: 4204 - DNA, 39 bp, Artificial Sequence
  Probe
cacttaggagatttcaacttaacttgaccgctctgagct

SEQ ID NO: 4205 - DNA, 40 bp, Artificial Sequence
  Probe
cacttaggagatttcaacttaacttgaccgctctgagcta

SEQ ID NO: 4206 - DNA, 41 bp, Artificial Sequence
  Probe
cacttaggagatttcaacttaacttgaccgctctgagctaa

SEQ ID NO: 4207 - DNA, 42 bp, Artificial Sequence
  Probe
cacttaggagatttcaacttaacttgaccgctctgagctaaa

SEQ ID NO: 4208 - DNA, 44 bp, Artificial Sequence
  Probe
cacttaggagatttcaacttaacttgaccgctctgagctaaacc

SEQ ID NO: 4209 - DNA, 37 bp, Artificial Sequence
  Probe
cagaagattccaggttcgactcctggctggctcgttc

SEQ ID NO: 4210 - DNA, 17 bp, Artificial Sequence
  Probe
cagaagattctaggttc

SEQ ID NO: 4211 - DNA, 33 bp, Artificial Sequence
  Probe
cagaagattctaggttcgactcctggctggctc

SEQ ID NO: 4212 - DNA, 34 bp, Artificial Sequence
  Probe
cagaagattctaggttcgactcctggctggctcg

SEQ ID NO: 4213 - DNA, 37 bp, Artificial Sequence
  Probe
cagaagattctaggttcgactcctggctggctcgcga

SEQ ID NO: 4214 - DNA, 16 bp, Artificial Sequence
  Probe
cagaagattgagggtt

SEQ ID NO: 4215 - DNA, 31 bp, Artificial Sequence
  Probe
cagaagattgagggttcgagtcccttcgtgg

SEQ ID NO: 4216 - DNA, 33 bp, Artificial Sequence
  Probe
cagaagattgagggttcgagtcccttcgtggtc

SEQ ID NO: 4217 - DNA, 34 bp, Artificial Sequence
  Probe
cagaagattgagggttcgagtcccttcgtggtcg

SEQ ID NO: 4218 - DNA, 37 bp, Artificial Sequence
  Probe
cagaagattgagggttcgagtcccttcgtggtcgttg

SEQ ID NO: 4219 - DNA, 17 bp, Artificial Sequence
  Probe
cagaagattgcaggttc

SEQ ID NO: 4220 - DNA, 32 bp, Artificial Sequence
  Probe
cagaagattgcaggttcgagtcctgccgcggt

SEQ ID NO: 4221 - DNA, 36 bp, Artificial Sequence
  Probe
cagaaggtcctgggttcgagccccagtggaaccacg

SEQ ID NO: 4222 - DNA, 37 bp, Artificial Sequence
  Probe
cagaaggtcctgggttcgagccccagtggaaccacgg

SEQ ID NO: 4223 - DNA, 16 bp, Artificial Sequence
  Probe
cagaccaagagccttc

SEQ ID NO: 4224 - DNA, 29 bp, Artificial Sequence
  Probe
cagaccaagagccttcaaagccctcagta

SEQ ID NO: 4225 - DNA, 32 bp, Artificial Sequence
  Probe
cagaccaagagccttcaaagccctcagtaagt

SEQ ID NO: 4226 - DNA, 35 bp, Artificial Sequence
  Probe
cagaccaagagccttcaaagccctcagtaagttgc

SEQ ID NO: 4227 - DNA, 49 bp, Artificial Sequence
  Probe
cagaccaagagccttcaaagccctcagtaagttgcaatacttaatttct

SEQ ID NO: 4228 - DNA, 18 bp, Artificial Sequence
  Probe
cagagaatagtttaaatt

SEQ ID NO: 4229 - DNA, 21 bp, Artificial Sequence
  Probe
cagagaatagtttaaattaga

SEQ ID NO: 4230 - DNA, 23 bp, Artificial Sequence
  Probe
cagagaatagtttaaattagaat

SEQ ID NO: 4231 - DNA, 25 bp, Artificial Sequence
  Probe
cagagaatagtttaaattagaatct

SEQ ID NO: 4232 - DNA, 35 bp, Artificial Sequence
  Probe
cagagaatagtttaaattagaatcttagctttggg

SEQ ID NO: 4233 - DNA, 36 bp, Artificial Sequence
  Probe
cagagaatagtttaaattagaatcttagctttgggt

SEQ ID NO: 4234 - DNA, 37 bp, Artificial Sequence
  Probe
cagagaatagtttaaattagaatcttagctttgggtg

SEQ ID NO: 4235 - DNA, 38 bp, Artificial Sequence
  Probe
cagagaatagtttaaattagaatcttagctttgggtgc

SEQ ID NO: 4236 - DNA, 39 bp, Artificial Sequence
  Probe
cagagaatagtttaaattagaatcttagctttgggtgct

SEQ ID NO: 4237 - DNA, 44 bp, Artificial Sequence
  Probe
cagagaatagtttaaattagaatcttagctttgggtgctaatgg

SEQ ID NO: 4238 - DNA, 45 bp, Artificial Sequence
  Probe
cagagaatagtttaaattagaatcttagctttgggtgctaatggt

SEQ ID NO: 4239 - DNA, 46 bp, Artificial Sequence
  Probe
cagagaatagtttaaattagaatcttagctttgggtgctaatggtg

SEQ ID NO: 4240 - DNA, 49 bp, Artificial Sequence
  Probe
cagagaatagtttaaattagaatcttagctttgggtgctaatggtggag

SEQ ID NO: 4241 - DNA, 27 bp, Artificial Sequence
  Probe
cagagcccggtaatcgcataaaactta

SEQ ID NO: 4242 - DNA, 50 bp, Artificial Sequence
  Probe
cagagcccggtaatcgcataaaacttaaaactttacagtcagaggttcaa

SEQ ID NO: 4243 - DNA, 17 bp, Artificial Sequence
  Probe
cagaggtcgatggatcg

SEQ ID NO: 4244 - DNA, 16 bp, Artificial Sequence
  Probe
cagaggttccgggttc

SEQ ID NO: 4245 - DNA, 17 bp, Artificial Sequence
  Probe
cagaggttccgggttcg

SEQ ID NO: 4246 - DNA, 27 bp, Artificial Sequence
  Probe
cagaggttccgggttcgagtcccggca

SEQ ID NO: 4247 - DNA, 31 bp, Artificial Sequence
  Probe
cagagtggcgcagcggaagcgtgctgggccc

SEQ ID NO: 4248 - DNA, 37 bp, Artificial Sequence
  Probe
cagagtggcgcagcggaagcgtgctgggcccataacc

SEQ ID NO: 4249 - DNA, 24 bp, Artificial Sequence
  Probe
cagagtggggttttgcagtcctta

SEQ ID NO: 4250 - DNA, 25 bp, Artificial Sequence
  Probe
cagagtggggttttgcagtccttag

SEQ ID NO: 4251 - DNA, 26 bp, Artificial Sequence
  Probe
cagagtggggttttgcagtccttagc

SEQ ID NO: 4252 - DNA, 27 bp, Artificial Sequence
  Probe
cagagtggggttttgcagtccttagct

SEQ ID NO: 4253 - DNA, 19 bp, Artificial Sequence
  Probe
cagagtgtagcttaacaca

SEQ ID NO: 4254 - DNA, 20 bp, Artificial Sequence
  Probe
cagagtgtagcttaacacaa

SEQ ID NO: 4255 - DNA, 23 bp, Artificial Sequence
  Probe
cagagtgtagcttaacacaaagc

SEQ ID NO: 4256 - DNA, 24 bp, Artificial Sequence
  Probe
cagagtgtagcttaacacaaagca

SEQ ID NO: 4257 - DNA, 25 bp, Artificial Sequence
  Probe
cagagtgtagcttaacacaaagcac

SEQ ID NO: 4258 - DNA, 26 bp, Artificial Sequence
  Probe
cagagtgtagcttaacacaaagcacc

SEQ ID NO: 4259 - DNA, 27 bp, Artificial Sequence
  Probe
cagagtgtagcttaacacaaagcaccc

SEQ ID NO: 4260 - DNA, 28 bp, Artificial Sequence
  Probe
cagagtgtagcttaacacaaagcaccca

SEQ ID NO: 4261 - DNA, 29 bp, Artificial Sequence
  Probe
cagagtgtagcttaacacaaagcacccaa

SEQ ID NO: 4262 - DNA, 30 bp, Artificial Sequence
  Probe
cagagtgtagcttaacacaaagcacccaac

SEQ ID NO: 4263 - DNA, 31 bp, Artificial Sequence
  Probe
cagagtgtagcttaacacaaagcacccaact

SEQ ID NO: 4264 - DNA, 32 bp, Artificial Sequence
  Probe
cagagtgtagcttaacacaaagcacccaactt

SEQ ID NO: 4265 - DNA, 33 bp, Artificial Sequence
  Probe
cagagtgtagcttaacacaaagcacccaactta

SEQ ID NO: 4266 - DNA, 34 bp, Artificial Sequence
  Probe
cagagtgtagcttaacacaaagcacccaacttac

SEQ ID NO: 4267 - DNA, 35 bp, Artificial Sequence
  Probe
cagagtgtagcttaacacaaagcacccaacttaca

SEQ ID NO: 4268 - DNA, 36 bp, Artificial Sequence
  Probe
cagagtgtagcttaacacaaagcacccaacttacac

SEQ ID NO: 4269 - DNA, 37 bp, Artificial Sequence
  Probe
cagagtgtagcttaacacaaagcacccaacttacact

SEQ ID NO: 4270 - DNA, 38 bp, Artificial Sequence
  Probe
cagagtgtagcttaacacaaagcacccaacttacactt

SEQ ID NO: 4271 - DNA, 39 bp, Artificial Sequence
  Probe
cagagtgtagcttaacacaaagcacccaacttacactta

SEQ ID NO: 4272 - DNA, 40 bp, Artificial Sequence
  Probe
cagagtgtagcttaacacaaagcacccaacttacacttag

SEQ ID NO: 4273 - DNA, 41 bp, Artificial Sequence
  Probe
cagagtgtagcttaacacaaagcacccaacttacacttagg

SEQ ID NO: 4274 - DNA, 42 bp, Artificial Sequence
  Probe
cagagtgtagcttaacacaaagcacccaacttacacttagga

SEQ ID NO: 4275 - DNA, 43 bp, Artificial Sequence
  Probe
cagagtgtagcttaacacaaagcacccaacttacacttaggag

SEQ ID NO: 4276 - DNA, 44 bp, Artificial Sequence
  Probe
cagagtgtagcttaacacaaagcacccaacttacacttaggaga

SEQ ID NO: 4277 - DNA, 45 bp, Artificial Sequence
  Probe
cagagtgtagcttaacacaaagcacccaacttacacttaggagat

SEQ ID NO: 4278 - DNA, 46 bp, Artificial Sequence
  Probe
cagagtgtagcttaacacaaagcacccaacttacacttaggagatt

SEQ ID NO: 4279 - DNA, 48 bp, Artificial Sequence
  Probe
cagagtgtagcttaacacaaagcacccaacttacacttaggagatttc

SEQ ID NO: 4280 - DNA, 49 bp, Artificial Sequence
  Probe
cagagtgtagcttaacacaaagcacccaacttacacttaggagatttca

SEQ ID NO: 4281 - DNA, 50 bp, Artificial Sequence
  Probe
cagagtgtagcttaacacaaagcacccaacttacacttaggagatttcaa

SEQ ID NO: 4282 - DNA, 38 bp, Artificial Sequence
  Probe
cagattgtgaatctgacaacagaggcttacgacccctt

SEQ ID NO: 4283 - DNA, 49 bp, Artificial Sequence
  Probe
cagattgtgaatctgacaacagaggcttacgaccccttatttaccgaga

SEQ ID NO: 4284 - DNA, 50 bp, Artificial Sequence
  Probe
cagattgtgaatctgacaacagaggcttacgaccccttatttaccgagaa

SEQ ID NO: 4285 - DNA, 32 bp, Artificial Sequence
  Probe
cagcaacctcggttcgaatccgagtcacggca

SEQ ID NO: 4286 - DNA, 34 bp, Artificial Sequence
  Probe
cagcaacctcggttcgaatccgagtcacggcaaa

SEQ ID NO: 4287 - DNA, 34 bp, Artificial Sequence
  Probe
cagcaacctcggttcgaatccgagtcacggcagg

SEQ ID NO: 4288 - DNA, 35 bp, Artificial Sequence
  Probe
cagcaacctcggttcgaatccgagtcacggcaggt

SEQ ID NO: 4289 - DNA, 34 bp, Artificial Sequence
  Probe
cagcaacctcggttcgaatccgagtcacggcatt

SEQ ID NO: 4290 - DNA, 35 bp, Artificial Sequence
  Probe
cagcaacctcggttcgaatccgagtcacggcattg

SEQ ID NO: 4291 - DNA, 33 bp, Artificial Sequence
  Probe
cagcgatccgagttcaaatctcggtggaacctg

SEQ ID NO: 4292 - DNA, 34 bp, Artificial Sequence
  Probe
cagcgatccgagttcaaatctcggtggaacctgc

SEQ ID NO: 4293 - DNA, 35 bp, Artificial Sequence
  Probe
cagcgatccgagttcaaatctcggtggaacctgca

SEQ ID NO: 4294 - DNA, 33 bp, Artificial Sequence
  Probe
cagcgatccgagttcaaatctcggtggaacctt

SEQ ID NO: 4295 - DNA, 29 bp, Artificial Sequence
  Probe
cagcgatccgagttcaaatctcggtggga

SEQ ID NO: 4296 - DNA, 31 bp, Artificial Sequence
  Probe
cagcgatccgagttcaaatctcggtgggacc

SEQ ID NO: 4297 - DNA, 33 bp, Artificial Sequence
  Probe
cagcgatccgagttcaaatctcggtgggacctc

SEQ ID NO: 4298 - DNA, 35 bp, Artificial Sequence
  Probe
cagcgatccgagttcaaatctcggtgggacctcac

SEQ ID NO: 4299 - DNA, 32 bp, Artificial Sequence
  Probe
cagcgatccgagttcgagtctcggtggaacct

SEQ ID NO: 4300 - DNA, 33 bp, Artificial Sequence
  Probe
cagcgatccgagttcgagtctcggtggaacctt

SEQ ID NO: 4301 - DNA, 23 bp, Artificial Sequence
  Probe
cagcggaagcgtgctgggcccat

SEQ ID NO: 4302 - DNA, 24 bp, Artificial Sequence
  Probe
cagctaaataagctatcgggccca

SEQ ID NO: 4303 - DNA, 25 bp, Artificial Sequence
  Probe
cagctaaataagctatcgggcccat

SEQ ID NO: 4304 - DNA, 26 bp, Artificial Sequence
  Probe
cagctaaataagctatcgggcccata

SEQ ID NO: 4305 - DNA, 27 bp, Artificial Sequence
  Probe
cagctaaataagctatcgggcccatac

SEQ ID NO: 4306 - DNA, 29 bp, Artificial Sequence
  Probe
cagctaaataagctatcgggcccataccc

SEQ ID NO: 4307 - DNA, 31 bp, Artificial Sequence
  Probe
cagctaaataagctatcgggcccataccccg

SEQ ID NO: 4308 - DNA, 32 bp, Artificial Sequence
  Probe
cagctaaataagctatcgggcccataccccga

SEQ ID NO: 4309 - DNA, 33 bp, Artificial Sequence
  Probe
cagctaaataagctatcgggcccataccccgaa

SEQ ID NO: 4310 - DNA, 34 bp, Artificial Sequence
  Probe
cagctaaataagctatcgggcccataccccgaaa

SEQ ID NO: 4311 - DNA, 35 bp, Artificial Sequence
  Probe
cagctaaataagctatcgggcccataccccgaaaa

SEQ ID NO: 4312 - DNA, 36 bp, Artificial Sequence
  Probe
cagctaaataagctatcgggcccataccccgaaaat

SEQ ID NO: 4313 - DNA, 37 bp, Artificial Sequence
  Probe
cagctaaataagctatcgggcccataccccgaaaatg

SEQ ID NO: 4314 - DNA, 39 bp, Artificial Sequence
  Probe
cagctaaataagctatcgggcccataccccgaaaatgtt

SEQ ID NO: 4315 - DNA, 40 bp, Artificial Sequence
  Probe
cagctaaataagctatcgggcccataccccgaaaatgttg

SEQ ID NO: 4316 - DNA, 41 bp, Artificial Sequence
  Probe
cagctaaataagctatcgggcccataccccgaaaatgttgg

SEQ ID NO: 4317 - DNA, 43 bp, Artificial Sequence
  Probe
cagctaaataagctatcgggcccataccccgaaaatgttggtt

SEQ ID NO: 4318 - DNA, 44 bp, Artificial Sequence
  Probe
cagctaaataagctatcgggcccataccccgaaaatgttggtta

SEQ ID NO: 4319 - DNA, 49 bp, Artificial Sequence
  Probe
cagctaaataagctatcgggcccataccccgaaaatgttggttataccc

SEQ ID NO: 4320 - DNA, 15 bp, Artificial Sequence
  Probe
cagctatccattggt

SEQ ID NO: 4321 - DNA, 17 bp, Artificial Sequence
  Probe
cagctatccattggtct

SEQ ID NO: 4322 - DNA, 26 bp, Artificial Sequence
  Probe
cagctatccattggtcttaggcccca

SEQ ID NO: 4323 - DNA, 27 bp, Artificial Sequence
  Probe
cagctatccattggtcttaggccccaa

SEQ ID NO: 4324 - DNA, 29 bp, Artificial Sequence
  Probe
cagctatccattggtcttaggccccaaaa

SEQ ID NO: 4325 - DNA, 23 bp, Artificial Sequence
  Probe
cagcttcaaacctgccggggctt

SEQ ID NO: 4326 - DNA, 24 bp, Artificial Sequence
  Probe
cagcttcaaacctgccggggcttc

SEQ ID NO: 4327 - DNA, 25 bp, Artificial Sequence
  Probe
cagcttcaaacctgccggggcttct

SEQ ID NO: 4328 - DNA, 26 bp, Artificial Sequence
  Probe
cagcttcaaacctgccggggcttctc

SEQ ID NO: 4329 - DNA, 17 bp, Artificial Sequence
  Probe
cagctttggggggttcg

SEQ ID NO: 4330 - DNA, 18 bp, Artificial Sequence
  Probe
cagctttggggggttcga

SEQ ID NO: 4331 - DNA, 29 bp, Artificial Sequence
  Probe
cagctttggggggttcgattccttccttt

SEQ ID NO: 4332 - DNA, 30 bp, Artificial Sequence
  Probe
cagctttggggggttcgattccttcctttt

SEQ ID NO: 4333 - DNA, 32 bp, Artificial Sequence
  Probe
cagctttggggggttcgattccttcctttttt

SEQ ID NO: 4334 - DNA, 33 bp, Artificial Sequence
  Probe
cagctttggggggttcgattccttccttttttg

SEQ ID NO: 4335 - DNA, 34 bp, Artificial Sequence
  Probe
cagctttggggggttcgattccttccttttttgt

SEQ ID NO: 4336 - DNA, 35 bp, Artificial Sequence
  Probe
cagctttggggggttcgattccttccttttttgtc

SEQ ID NO: 4337 - DNA, 36 bp, Artificial Sequence
  Probe
cagctttggggggttcgattccttccttttttgtct

SEQ ID NO: 4338 - DNA, 37 bp, Artificial Sequence
  Probe
caggagatcctgggttcgaatcccagcggtgcctccg

SEQ ID NO: 4339 - DNA, 33 bp, Artificial Sequence
  Probe
caggcggcccgggttcgactcccggtgtgggaa

SEQ ID NO: 4340 - DNA, 36 bp, Artificial Sequence
  Probe
caggcggcccgggttcgactcccggtgtgggaacgc

SEQ ID NO: 4341 - DNA, 28 bp, Artificial Sequence
  Probe
cagggatgggttcgattctcatagtcct

SEQ ID NO: 4342 - DNA, 29 bp, Artificial Sequence
  Probe
cagggatgggttcgattctcatagtccta

SEQ ID NO: 4343 - DNA, 31 bp, Artificial Sequence
  Probe
cagggatgggttcgattctcatagtcctaga

SEQ ID NO: 4344 - DNA, 32 bp, Artificial Sequence
  Probe
cagggatgggttcgattctcatagtcctagaa

SEQ ID NO: 4345 - DNA, 33 bp, Artificial Sequence
  Probe
cagggatgggttcgattctcatagtcctagaaa

SEQ ID NO: 4346 - DNA, 26 bp, Artificial Sequence
  Probe
cagggattgtgggttcgagtcccatc

SEQ ID NO: 4347 - DNA, 31 bp, Artificial Sequence
  Probe
cagggattgtgggttcgagtcccatctgggg

SEQ ID NO: 4348 - DNA, 17 bp, Artificial Sequence
  Probe
caggggtcgcgagttca

SEQ ID NO: 4349 - DNA, 33 bp, Artificial Sequence
  Probe
caggggtcgcgagttcaattctcgctggggcct

SEQ ID NO: 4350 - DNA, 27 bp, Artificial Sequence
  Probe
caggggttaggcctctttttaccagct

SEQ ID NO: 4351 - DNA, 16 bp, Artificial Sequence
  Probe
cagggtcgtgggttcg

SEQ ID NO: 4352 - DNA, 31 bp, Artificial Sequence
  Probe
cagggtcgtgggttcgagccccacgttgggc

SEQ ID NO: 4353 - DNA, 32 bp, Artificial Sequence
  Probe
cagggtcgtgggttcgagccccacgttgggcg

SEQ ID NO: 4354 - DNA, 36 bp, Artificial Sequence
  Probe
caggtggcccgggttcgactcccggtatgggaacaa

SEQ ID NO: 4355 - DNA, 23 bp, Artificial Sequence
  Probe
cagtcagaggttcaattcctctt

SEQ ID NO: 4356 - DNA, 25 bp, Artificial Sequence
  Probe
cagtcagaggttcaattcctcttct

SEQ ID NO: 4357 - DNA, 27 bp, Artificial Sequence
  Probe
cagtcagaggttcaattcctcttctta

SEQ ID NO: 4358 - DNA, 30 bp, Artificial Sequence
  Probe
cagtcagaggttcaattcctcttcttaaca

SEQ ID NO: 4359 - DNA, 32 bp, Artificial Sequence
  Probe
cagtcagaggttcaattcctcttcttaacaac

SEQ ID NO: 4360 - DNA, 33 bp, Artificial Sequence
  Probe
cagtcagaggttcaattcctcttcttaacaaca

SEQ ID NO: 4361 - DNA, 44 bp, Artificial Sequence
  Probe
cagtcatttcgatggcgtgggttcgaatcccaccgctgccacac

SEQ ID NO: 4362 - DNA, 16 bp, Artificial Sequence
  Probe
cagtcggtagagcatc

SEQ ID NO: 4363 - DNA, 17 bp, Artificial Sequence
  Probe
cagtcggtagagcatga

SEQ ID NO: 4364 - DNA, 20 bp, Artificial Sequence
  Probe
cagtcggtagagcatgagac

SEQ ID NO: 4365 - DNA, 22 bp, Artificial Sequence
  Probe
cagtcggtagagcatgagactc

SEQ ID NO: 4366 - DNA, 23 bp, Artificial Sequence
  Probe
cagtcggtagagcatgagactct

SEQ ID NO: 4367 - DNA, 24 bp, Artificial Sequence
  Probe
cagtcggtagagcatgagactctt

SEQ ID NO: 4368 - DNA, 37 bp, Artificial Sequence
  Probe
cagtcggtagagcatgagactcttaatctcagggtcg

SEQ ID NO: 4369 - DNA, 21 bp, Artificial Sequence
  Probe
cagtcggtagagcatgggact

SEQ ID NO: 4370 - DNA, 37 bp, Artificial Sequence
  Probe
cagtcggtagagcatgggactcttaatcccagggtcg

SEQ ID NO: 4371 - DNA, 50 bp, Artificial Sequence
  Probe
cagtctcataatctgaaggtcgtgagttcgatcctcacacggggcacaat

SEQ ID NO: 4372 - DNA, 24 bp, Artificial Sequence
  Probe
cagtctcttcgggggcgtgggttc

SEQ ID NO: 4373 - DNA, 25 bp, Artificial Sequence
  Probe
cagtcttgtaaaccggagatgaaaa

SEQ ID NO: 4374 - DNA, 44 bp, Artificial Sequence
  Probe
cagtcttgtaaaccggagatgaaaacctttttccaaggacaaat

SEQ ID NO: 4375 - DNA, 17 bp, Artificial Sequence
  Probe
cagtggtagaattctcg

SEQ ID NO: 4376 - DNA, 20 bp, Artificial Sequence
  Probe
cagtggtagaattctcgcct

SEQ ID NO: 4377 - DNA, 23 bp, Artificial Sequence
  Probe
cagtggtagaattctcgcctgcc

SEQ ID NO: 4378 - DNA, 23 bp, Artificial Sequence
  Probe
cagtggtagagcatttgactgca

SEQ ID NO: 4379 - DNA, 33 bp, Artificial Sequence
  Probe
cagttgatgcagagtggggttttgcagtcctta

SEQ ID NO: 4380 - DNA, 34 bp, Artificial Sequence
  Probe
cagttgatgcagagtggggttttgcagtccttag

SEQ ID NO: 4381 - DNA, 36 bp, Artificial Sequence
  Probe
cagttgatgcagagtggggttttgcagtccttagct

SEQ ID NO: 4382 - DNA, 41 bp, Artificial Sequence
  Probe
cagtttatgtagcttacctcctcaaagcaatacactgaaaa

SEQ ID NO: 4383 - DNA, 43 bp, Artificial Sequence
  Probe
cataaaacttaaaactttacagtcagaggttcaattcctcttc

SEQ ID NO: 4384 - DNA, 44 bp, Artificial Sequence
  Probe
cataaaacttaaaactttacagtcagaggttcaattcctcttct

SEQ ID NO: 4385 - DNA, 45 bp, Artificial Sequence
  Probe
cataaaacttaaaactttacagtcagaggttcaattcctcttctt

SEQ ID NO: 4386 - DNA, 46 bp, Artificial Sequence
  Probe
cataaaacttaaaactttacagtcagaggttcaattcctcttctta

SEQ ID NO: 4387 - DNA, 50 bp, Artificial Sequence
  Probe
cataaaacttaaaactttacagtcagaggttcaattcctcttcttaacaa

SEQ ID NO: 4388 - DNA, 17 bp, Artificial Sequence
  Probe
cataacccagaggtcga

SEQ ID NO: 4389 - DNA, 23 bp, Artificial Sequence
  Probe
cataacccagaggtcgatggatc

SEQ ID NO: 4390 - DNA, 24 bp, Artificial Sequence
  Probe
cataacccagaggtcgatggatcg

SEQ ID NO: 4391 - DNA, 43 bp, Artificial Sequence
  Probe
cataacccagaggtcgatggatcgaaaccatcctctgctaggt

SEQ ID NO: 4392 - DNA, 43 bp, Artificial Sequence
  Probe
cataatctgaaggtcgtgagttcgatcctcacacggggcacaa

SEQ ID NO: 4393 - DNA, 32 bp, Artificial Sequence
  Probe
cataccccgaaaatgttggttatacccttccc

SEQ ID NO: 4394 - DNA, 33 bp, Artificial Sequence
  Probe
cataccccgaaaatgttggttatacccttcccg

SEQ ID NO: 4395 - DNA, 35 bp, Artificial Sequence
  Probe
cataccccgaaaatgttggttatacccttcccgta

SEQ ID NO: 4396 - DNA, 40 bp, Artificial Sequence
  Probe
cataccccgaaaatgttggttatacccttcccgtactaat

SEQ ID NO: 4397 - DNA, 41 bp, Artificial Sequence
  Probe
cataccccgaaaatgttggttatacccttcccgtactaatt

SEQ ID NO: 4398 - DNA, 24 bp, Artificial Sequence
  Probe
catatcattggtcgtggttgtagt

SEQ ID NO: 4399 - DNA, 25 bp, Artificial Sequence
  Probe
catatcattggtcgtggttgtagtc

SEQ ID NO: 4400 - DNA, 27 bp, Artificial Sequence
  Probe
catatcattggtcgtggttgtagtccg

SEQ ID NO: 4401 - DNA, 39 bp, Artificial Sequence
  Probe
catatcattggtcgtggttgtagtccgtgcgagaataat

SEQ ID NO: 4402 - DNA, 31 bp, Artificial Sequence
  Probe
catatggtctagcggttaggattcctggttt

SEQ ID NO: 4403 - DNA, 32 bp, Artificial Sequence
  Probe
catatggtctagcggttaggattcctggtttt

SEQ ID NO: 4404 - DNA, 18 bp, Artificial Sequence
  Probe
catatgtccgcgtgggtt

SEQ ID NO: 4405 - DNA, 19 bp, Artificial Sequence
  Probe
catatgtccgcgtgggttc

SEQ ID NO: 4406 - DNA, 50 bp, Artificial Sequence
  Probe
catattgaattgcaaattcgaagaagcagcttcaaacctgccggggcttc

SEQ ID NO: 4407 - DNA, 16 bp, Artificial Sequence
  Probe
catcaccccataaaca

SEQ ID NO: 4408 - DNA, 17 bp, Artificial Sequence
  Probe
catcaccccataaacaa

SEQ ID NO: 4409 - DNA, 18 bp, Artificial Sequence
  Probe
catcaccccataaacaaa

SEQ ID NO: 4410 - DNA, 19 bp, Artificial Sequence
  Probe
catcaccccataaacaaat

SEQ ID NO: 4411 - DNA, 33 bp, Artificial Sequence
  Probe
catcagattgtgaatctgacaacagaggcttac

SEQ ID NO: 4412 - DNA, 39 bp, Artificial Sequence
  Probe
catcagattgtgaatctgacaacagaggcttacgacccc

SEQ ID NO: 4413 - DNA, 40 bp, Artificial Sequence
  Probe
catcagattgtgaatctgacaacagaggcttacgacccct

SEQ ID NO: 4414 - DNA, 41 bp, Artificial Sequence
  Probe
catcagattgtgaatctgacaacagaggcttacgacccctt

SEQ ID NO: 4415 - DNA, 43 bp, Artificial Sequence
  Probe
catcagattgtgaatctgacaacagaggcttacgaccccttat

SEQ ID NO: 4416 - DNA, 44 bp, Artificial Sequence
  Probe
catcagattgtgaatctgacaacagaggcttacgaccccttatt

SEQ ID NO: 4417 - DNA, 45 bp, Artificial Sequence
  Probe
catcagattgtgaatctgacaacagaggcttacgaccccttattt

SEQ ID NO: 4418 - DNA, 49 bp, Artificial Sequence
  Probe
catcagattgtgaatctgacaacagaggcttacgaccccttatttaccg

SEQ ID NO: 4419 - DNA, 50 bp, Artificial Sequence
  Probe
catcagattgtgaatctgacaacagaggcttacgaccccttatttaccga

SEQ ID NO: 4420 - DNA, 40 bp, Artificial Sequence
  Probe
catcctaaagtaaggtcagctaaataagctatcgggccca

SEQ ID NO: 4421 - DNA, 37 bp, Artificial Sequence
  Probe
catgaggtcccgggttcgatccccagcatctccagtg

SEQ ID NO: 4422 - DNA, 50 bp, Artificial Sequence
  Probe
catgcaagattcccattcttgcgacccgggttcgattcccgggcggcgca

SEQ ID NO: 4423 - DNA, 16 bp, Artificial Sequence
  Probe
catgcccccatgtcta

SEQ ID NO: 4424 - DNA, 17 bp, Artificial Sequence
  Probe
catgcccccatgtctaa

SEQ ID NO: 4425 - DNA, 18 bp, Artificial Sequence
  Probe
catgcccccatgtctaac

SEQ ID NO: 4426 - DNA, 22 bp, Artificial Sequence
  Probe
catgcccccatgtctaacaaca

SEQ ID NO: 4427 - DNA, 23 bp, Artificial Sequence
  Probe
catgcccccatgtctaacaacat

SEQ ID NO: 4428 - DNA, 25 bp, Artificial Sequence
  Probe
catgcccccatgtctaacaacatgg

SEQ ID NO: 4429 - DNA, 26 bp, Artificial Sequence
  Probe
catgcccccatgtctaacaacatggc

SEQ ID NO: 4430 - DNA, 27 bp, Artificial Sequence
  Probe
catgcccccatgtctaacaacatggct

SEQ ID NO: 4431 - DNA, 28 bp, Artificial Sequence
  Probe
catgcccccatgtctaacaacatggctt

SEQ ID NO: 4432 - DNA, 29 bp, Artificial Sequence
  Probe
catgcccccatgtctaacaacatggcttt

SEQ ID NO: 4433 - DNA, 30 bp, Artificial Sequence
  Probe
catgcccccatgtctaacaacatggctttc

SEQ ID NO: 4434 - DNA, 31 bp, Artificial Sequence
  Probe
catgcccccatgtctaacaacatggctttct

SEQ ID NO: 4435 - DNA, 32 bp, Artificial Sequence
  Probe
catgcccccatgtctaacaacatggctttctc

SEQ ID NO: 4436 - DNA, 33 bp, Artificial Sequence
  Probe
catgcccccatgtctaacaacatggctttctca

SEQ ID NO: 4437 - DNA, 34 bp, Artificial Sequence
  Probe
catgcccccatgtctaacaacatggctttctcaa

SEQ ID NO: 4438 - DNA, 35 bp, Artificial Sequence
  Probe
catgcccccatgtctaacaacatggctttctcaac

SEQ ID NO: 4439 - DNA, 36 bp, Artificial Sequence
  Probe
catgcccccatgtctaacaacatggctttctcaact

SEQ ID NO: 4440 - DNA, 33 bp, Artificial Sequence
  Probe
catggggttggcttgaaaccagctttggggggt

SEQ ID NO: 4441 - DNA, 50 bp, Artificial Sequence
  Probe
catggggttggcttgaaaccagctttggggggttcgattccttccttttt

SEQ ID NO: 4442 - DNA, 31 bp, Artificial Sequence
  Probe
catgggtggttcagtggtagaattctcgcct

SEQ ID NO: 4443 - DNA, 32 bp, Artificial Sequence
  Probe
catgggtggttcagtggtagaattctcgcctg

SEQ ID NO: 4444 - DNA, 34 bp, Artificial Sequence
  Probe
catgggtggttcagtggtagaattctcgcctgcc

SEQ ID NO: 4445 - DNA, 27 bp, Artificial Sequence
  Probe
catgtctaacaacatggctttctcaac

SEQ ID NO: 4446 - DNA, 28 bp, Artificial Sequence
  Probe
catgtctaacaacatggctttctcaact

SEQ ID NO: 4447 - DNA, 32 bp, Artificial Sequence
  Probe
cattaaattatgataatcatatttaccaaatg

SEQ ID NO: 4448 - DNA, 50 bp, Artificial Sequence
  Probe
cattaaccttttaagttaaagattaagagaaccaacacctctttacagtg

SEQ ID NO: 4449 - DNA, 37 bp, Artificial Sequence
  Probe
cattcttgcgacccgggttcgattcccgggcggcgca

SEQ ID NO: 4450 - DNA, 39 bp, Artificial Sequence
  Probe
cattcttgcgacccgggttcgattcccgggcggcgcact

SEQ ID NO: 4451 - DNA, 40 bp, Artificial Sequence
  Probe
cattcttgcgacccgggttcgattcccgggcggcgcactt

SEQ ID NO: 4452 - DNA, 41 bp, Artificial Sequence
  Probe
cattcttgcgacccgggttcgattcccgggcggcgcactta

SEQ ID NO: 4453 - DNA, 50 bp, Artificial Sequence
  Probe
cattcttgcgacccgggttcgattcccgggcggcgcacttagtttttttt

SEQ ID NO: 4454 - DNA, 39 bp, Artificial Sequence
  Probe
cattcttgcgacccgggttcgattcccgggcggcgcata

SEQ ID NO: 4455 - DNA, 40 bp, Artificial Sequence
  Probe
cattcttgcgacccgggttcgattcccgggcggcgcatag

SEQ ID NO: 4456 - DNA, 50 bp, Artificial Sequence
  Probe
cattggactgtaaatctaaagacaggggttaggcctctttttaccagctc

SEQ ID NO: 4457 - DNA, 23 bp, Artificial Sequence
  Probe
cattggtcgtggttgtagtccgt

SEQ ID NO: 4458 - DNA, 24 bp, Artificial Sequence
  Probe
cattggtcgtggttgtagtccgtg

SEQ ID NO: 4459 - DNA, 26 bp, Artificial Sequence
  Probe
cattggtcgtggttgtagtccgtgcg

SEQ ID NO: 4460 - DNA, 33 bp, Artificial Sequence
  Probe
cattggtcgtggttgtagtccgtgcgagaataa

SEQ ID NO: 4461 - DNA, 35 bp, Artificial Sequence
  Probe
cattggtcgtggttgtagtccgtgcgagaataatg

SEQ ID NO: 4462 - DNA, 30 bp, Artificial Sequence
  Probe
cattggtggttcagtggtagaattctcgcc

SEQ ID NO: 4463 - DNA, 31 bp, Artificial Sequence
  Probe
cattggtggttcagtggtagaattctcgcct

SEQ ID NO: 4464 - DNA, 32 bp, Artificial Sequence
  Probe
cattggtggttcagtggtagaattctcgcctg

SEQ ID NO: 4465 - DNA, 33 bp, Artificial Sequence
  Probe
cattggtggttcagtggtagaattctcgcctgc

SEQ ID NO: 4466 - DNA, 34 bp, Artificial Sequence
  Probe
cattggtggttcagtggtagaattctcgcctgcc

SEQ ID NO: 4467 - DNA, 17 bp, Artificial Sequence
  Probe
catttcataactttgtc

SEQ ID NO: 4468 - DNA, 27 bp, Artificial Sequence
  Probe
ccaaaaattttggtgcaactccaaata

SEQ ID NO: 4469 - DNA, 23 bp, Artificial Sequence
  Probe
ccaaaacatcagattgtgaatct

SEQ ID NO: 4470 - DNA, 27 bp, Artificial Sequence
  Probe
ccaaaacatcagattgtgaatctgaca

SEQ ID NO: 4471 - DNA, 28 bp, Artificial Sequence
  Probe
ccaaaacatcagattgtgaatctgacaa

SEQ ID NO: 4472 - DNA, 29 bp, Artificial Sequence
  Probe
ccaaaacatcagattgtgaatctgacaac

SEQ ID NO: 4473 - DNA, 30 bp, Artificial Sequence
  Probe
ccaaaacatcagattgtgaatctgacaaca

SEQ ID NO: 4474 - DNA, 31 bp, Artificial Sequence
  Probe
ccaaaacatcagattgtgaatctgacaacag

SEQ ID NO: 4475 - DNA, 32 bp, Artificial Sequence
  Probe
ccaaaacatcagattgtgaatctgacaacaga

SEQ ID NO: 4476 - DNA, 33 bp, Artificial Sequence
  Probe
ccaaaacatcagattgtgaatctgacaacagag

SEQ ID NO: 4477 - DNA, 34 bp, Artificial Sequence
  Probe
ccaaaacatcagattgtgaatctgacaacagagg

SEQ ID NO: 4478 - DNA, 35 bp, Artificial Sequence
  Probe
ccaaaacatcagattgtgaatctgacaacagaggc

SEQ ID NO: 4479 - DNA, 36 bp, Artificial Sequence
  Probe
ccaaaacatcagattgtgaatctgacaacagaggct

SEQ ID NO: 4480 - DNA, 48 bp, Artificial Sequence
  Probe
ccaaaacatcagattgtgaatctgacaacagaggcttacgacccctta

SEQ ID NO: 4481 - DNA, 49 bp, Artificial Sequence
  Probe
ccaaaacatcagattgtgaatctgacaacagaggcttacgaccccttat

SEQ ID NO: 4482 - DNA, 50 bp, Artificial Sequence
  Probe
ccaaaacatcagattgtgaatctgacaacagaggcttacgaccccttatt

SEQ ID NO: 4483 - DNA, 17 bp, Artificial Sequence
  Probe
ccaaacccactccacct

SEQ ID NO: 4484 - DNA, 40 bp, Artificial Sequence
  Probe
ccaaagacaccccccacagtttatgtagcttacctcctca

SEQ ID NO: 4485 - DNA, 50 bp, Artificial Sequence
  Probe
ccaaagacaccccccacagtttatgtagcttacctcctcaaagcaataca

SEQ ID NO: 4486 - DNA, 19 bp, Artificial Sequence
  Probe
ccaacacctctttacagtg

SEQ ID NO: 4487 - DNA, 20 bp, Artificial Sequence
  Probe
ccaacacctctttacagtga

SEQ ID NO: 4488 - DNA, 21 bp, Artificial Sequence
  Probe
ccaacacctctttacagtgaa

SEQ ID NO: 4489 - DNA, 22 bp, Artificial Sequence
  Probe
ccaacacctctttacagtgaaa

SEQ ID NO: 4490 - DNA, 23 bp, Artificial Sequence
  Probe
ccaacacctctttacagtgaaat

SEQ ID NO: 4491 - DNA, 17 bp, Artificial Sequence
  Probe
ccaacttacacttagga

SEQ ID NO: 4492 - DNA, 18 bp, Artificial Sequence
  Probe
ccaacttacacttaggag

SEQ ID NO: 4493 - DNA, 19 bp, Artificial Sequence
  Probe
ccaacttacacttaggaga

SEQ ID NO: 4494 - DNA, 21 bp, Artificial Sequence
  Probe
ccaacttacacttaggagatt

SEQ ID NO: 4495 - DNA, 24 bp, Artificial Sequence
  Probe
ccaacttacacttaggagatttca

SEQ ID NO: 4496 - DNA, 25 bp, Artificial Sequence
  Probe
ccaacttacacttaggagatttcaa

SEQ ID NO: 4497 - DNA, 26 bp, Artificial Sequence
  Probe
ccaacttacacttaggagatttcaac

SEQ ID NO: 4498 - DNA, 29 bp, Artificial Sequence
  Probe
ccaacttacacttaggagatttcaactta

SEQ ID NO: 4499 - DNA, 31 bp, Artificial Sequence
  Probe
ccaacttacacttaggagatttcaacttaac

SEQ ID NO: 4500 - DNA, 35 bp, Artificial Sequence
  Probe
ccaacttacacttaggagatttcaacttaacttga

SEQ ID NO: 4501 - DNA, 36 bp, Artificial Sequence
  Probe
ccaacttacacttaggagatttcaacttaacttgac

SEQ ID NO: 4502 - DNA, 38 bp, Artificial Sequence
  Probe
ccaacttacacttaggagatttcaacttaacttgaccg

SEQ ID NO: 4503 - DNA, 39 bp, Artificial Sequence
  Probe
ccaacttacacttaggagatttcaacttaacttgaccgc

SEQ ID NO: 4504 - DNA, 43 bp, Artificial Sequence
  Probe
ccaacttacacttaggagatttcaacttaacttgaccgctctg

SEQ ID NO: 4505 - DNA, 44 bp, Artificial Sequence
  Probe
ccaacttacacttaggagatttcaacttaacttgaccgctctga

SEQ ID NO: 4506 - DNA, 45 bp, Artificial Sequence
  Probe
ccaacttacacttaggagatttcaacttaacttgaccgctctgag

SEQ ID NO: 4507 - DNA, 46 bp, Artificial Sequence
  Probe
ccaacttacacttaggagatttcaacttaacttgaccgctctgagc

SEQ ID NO: 4508 - DNA, 48 bp, Artificial Sequence
  Probe
ccaacttacacttaggagatttcaacttaacttgaccgctctgagcta

SEQ ID NO: 4509 - DNA, 49 bp, Artificial Sequence
  Probe
ccaacttacacttaggagatttcaacttaacttgaccgctctgagctaa

SEQ ID NO: 4510 - DNA, 50 bp, Artificial Sequence
  Probe
ccaacttacacttaggagatttcaacttaacttgaccgctctgagctaaa

SEQ ID NO: 4511 - DNA, 19 bp, Artificial Sequence
  Probe
ccaagaacagggtttgtta

SEQ ID NO: 4512 - DNA, 16 bp, Artificial Sequence
  Probe
ccaagagccttcaaag

SEQ ID NO: 4513 - DNA, 32 bp, Artificial Sequence
  Probe
ccaagagccttcaaagccctcagtaagttgca

SEQ ID NO: 4514 - DNA, 50 bp, Artificial Sequence
  Probe
ccaagagccttcaaagccctcagtaagttgcaatacttaatttctgtaac

SEQ ID NO: 4515 - DNA, 36 bp, Artificial Sequence
  Probe
ccaaggtcgcgggttcgatccccgtacgggccacga

SEQ ID NO: 4516 - DNA, 36 bp, Artificial Sequence
  Probe
ccaaggtcgcgggttcgatccccgtacgggccactg

SEQ ID NO: 4517 - DNA, 25 bp, Artificial Sequence
  Probe
ccaattaactagttttgacaacatt

SEQ ID NO: 4518 - DNA, 27 bp, Artificial Sequence
  Probe
ccaattaactagttttgacaacattca

SEQ ID NO: 4519 - DNA, 37 bp, Artificial Sequence
  Probe
ccaattaactagttttgacaacattcaaaaaagagta

SEQ ID NO: 4520 - DNA, 38 bp, Artificial Sequence
  Probe
ccaattaactagttttgacaacattcaaaaaagagtaa

SEQ ID NO: 4521 - DNA, 39 bp, Artificial Sequence
  Probe
ccaattaactagttttgacaacattcaaaaaagagtaat

SEQ ID NO: 4522 - DNA, 40 bp, Artificial Sequence
  Probe
ccaattaactagttttgacaacattcaaaaaagagtaata

SEQ ID NO: 4523 - DNA, 24 bp, Artificial Sequence
  Probe
ccacacccacccaagaacagggtt

SEQ ID NO: 4524 - DNA, 25 bp, Artificial Sequence
  Probe
ccacacccacccaagaacagggttt

SEQ ID NO: 4525 - DNA, 26 bp, Artificial Sequence
  Probe
ccacacccacccaagaacagggtttg

SEQ ID NO: 4526 - DNA, 27 bp, Artificial Sequence
  Probe
ccacacccacccaagaacagggtttgt

SEQ ID NO: 4527 - DNA, 29 bp, Artificial Sequence
  Probe
ccacacccacccaagaacagggtttgtta

SEQ ID NO: 4528 - DNA, 26 bp, Artificial Sequence
  Probe
ccacatggtctagcggttaggattcc

SEQ ID NO: 4529 - DNA, 23 bp, Artificial Sequence
  Probe
ccacccaagaacagggtttgtta

SEQ ID NO: 4530 - DNA, 17 bp, Artificial Sequence
  Probe
ccacgcgggaggcccgg

SEQ ID NO: 4531 - DNA, 41 bp, Artificial Sequence
  Probe
ccacgcgggaggcccgggttcgattcccggccaatgcacga

SEQ ID NO: 4532 - DNA, 41 bp, Artificial Sequence
  Probe
ccacgcgggaggcccgggttcgattcccggccaatgcagca

SEQ ID NO: 4533 - DNA, 40 bp, Artificial Sequence
  Probe
ccacgcgggaggcccgggttcgattcccggcccatgcagc

SEQ ID NO: 4534 - DNA, 41 bp, Artificial Sequence
  Probe
ccacgcgggaggcccgggttcgattcccggcccatgcagca

SEQ ID NO: 4535 - DNA, 29 bp, Artificial Sequence
  Probe
ccactgtaaagctaacttagcattaacct

SEQ ID NO: 4536 - DNA, 31 bp, Artificial Sequence
  Probe
ccactgtaaagctaacttagcattaaccttt

SEQ ID NO: 4537 - DNA, 33 bp, Artificial Sequence
  Probe
ccactgtaaagctaacttagcattaacctttta

SEQ ID NO: 4538 - DNA, 17 bp, Artificial Sequence
  Probe
ccagaggtcgatggatc

SEQ ID NO: 4539 - DNA, 18 bp, Artificial Sequence
  Probe
ccagaggtcgatggatcg

SEQ ID NO: 4540 - DNA, 16 bp, Artificial Sequence
  Probe
ccagaggttccgggtt

SEQ ID NO: 4541 - DNA, 17 bp, Artificial Sequence
  Probe
ccagaggttccgggttc

SEQ ID NO: 4542 - DNA, 18 bp, Artificial Sequence
  Probe
ccagaggttccgggttcg

SEQ ID NO: 4543 - DNA, 29 bp, Artificial Sequence
  Probe
ccagagtgtagcttaacacaaagcaccca

SEQ ID NO: 4544 - DNA, 33 bp, Artificial Sequence
  Probe
ccagagtgtagcttaacacaaagcacccaactt

SEQ ID NO: 4545 - DNA, 39 bp, Artificial Sequence
  Probe
ccagagtgtagcttaacacaaagcacccaacttacactt

SEQ ID NO: 4546 - DNA, 44 bp, Artificial Sequence
  Probe
ccagagtgtagcttaacacaaagcacccaacttacacttaggag

SEQ ID NO: 4547 - DNA, 45 bp, Artificial Sequence
  Probe
ccagagtgtagcttaacacaaagcacccaacttacacttaggaga

SEQ ID NO: 4548 - DNA, 46 bp, Artificial Sequence
  Probe
ccagagtgtagcttaacacaaagcacccaacttacacttaggagat

SEQ ID NO: 4549 - DNA, 50 bp, Artificial Sequence
  Probe
ccagagtgtagcttaacacaaagcacccaacttacacttaggagatttca

SEQ ID NO: 4550 - DNA, 32 bp, Artificial Sequence
  Probe
ccagcgatccgagttcaaatctcggtggaacc

SEQ ID NO: 4551 - DNA, 33 bp, Artificial Sequence
  Probe
ccagcgatccgagttcaaatctcggtggaacct

SEQ ID NO: 4552 - DNA, 36 bp, Artificial Sequence
  Probe
ccagcgatccgagttcaaatctcggtggaacctgca

SEQ ID NO: 4553 - DNA, 32 bp, Artificial Sequence
  Probe
ccagcgatccgagttcaaatctcggtgggacc

SEQ ID NO: 4554 - DNA, 36 bp, Artificial Sequence
  Probe
ccagcgatccgagttcaaatctcggtgggacctcac

SEQ ID NO: 4555 - DNA, 33 bp, Artificial Sequence
  Probe
ccagcgatccgagttcgagtctcggtggaacct

SEQ ID NO: 4556 - DNA, 17 bp, Artificial Sequence
  Probe
ccagctttggggggttc

SEQ ID NO: 4557 - DNA, 32 bp, Artificial Sequence
  Probe
ccagctttggggggttcgattccttccttttt

SEQ ID NO: 4558 - DNA, 35 bp, Artificial Sequence
  Probe
ccagctttggggggttcgattccttccttttttgt

SEQ ID NO: 4559 - DNA, 36 bp, Artificial Sequence
  Probe
ccagctttggggggttcgattccttccttttttgtc

SEQ ID NO: 4560 - DNA, 37 bp, Artificial Sequence
  Probe
ccagctttggggggttcgattccttccttttttgtct

SEQ ID NO: 4561 - DNA, 31 bp, Artificial Sequence
  Probe
ccaggcggcccgggttcgactcccggtgtgg

SEQ ID NO: 4562 - DNA, 34 bp, Artificial Sequence
  Probe
ccaggcggcccgggttcgactcccggtgtgggaa

SEQ ID NO: 4563 - DNA, 37 bp, Artificial Sequence
  Probe
ccaggcggcccgggttcgactcccggtgtgggaacgc

SEQ ID NO: 4564 - DNA, 18 bp, Artificial Sequence
  Probe
ccagggattgtgggttcg

SEQ ID NO: 4565 - DNA, 37 bp, Artificial Sequence
  Probe
ccagggattgtgggttcgagtcccatctggggtggcc

SEQ ID NO: 4566 - DNA, 37 bp, Artificial Sequence
  Probe
ccaggggtcgcgagttcaaatctcgctggggcctcgg

SEQ ID NO: 4567 - DNA, 37 bp, Artificial Sequence
  Probe
ccaggggtcgcgagttcaattctcgctggggcctgtg

SEQ ID NO: 4568 - DNA, 16 bp, Artificial Sequence
  Probe
ccagggtcgtgggttc

SEQ ID NO: 4569 - DNA, 31 bp, Artificial Sequence
  Probe
ccagggtcgtgggttcgagccccacgttggg

SEQ ID NO: 4570 - DNA, 33 bp, Artificial Sequence
  Probe
ccagggtcgtgggttcgagccccacgttgggcg

SEQ ID NO: 4571 - DNA, 37 bp, Artificial Sequence
  Probe
ccaggtggcccgggttcgactcccggtatgggaacaa

SEQ ID NO: 4572 - DNA, 45 bp, Artificial Sequence
  Probe
ccagtcatttcgatggcgtgggttcgaatcccaccgctgccacac

SEQ ID NO: 4573 - DNA, 45 bp, Artificial Sequence
  Probe
ccagtcttgtaaaccggagatgaaaacctttttccaaggacaaat

SEQ ID NO: 4574 - DNA, 50 bp, Artificial Sequence
  Probe
ccagttgattagggtgcttagctgttaactaagtgtttgtgggtttaagt

SEQ ID NO: 4575 - DNA, 44 bp, Artificial Sequence
  Probe
ccataacccagaggtcgatggatcgaaaccatcctctgctaggt

SEQ ID NO: 4576 - DNA, 32 bp, Artificial Sequence
  Probe
ccataccccgaaaatgttggttatacccttcc

SEQ ID NO: 4577 - DNA, 41 bp, Artificial Sequence
  Probe
ccataccccgaaaatgttggttatacccttcccgtactaat

SEQ ID NO: 4578 - DNA, 42 bp, Artificial Sequence
  Probe
ccataccccgaaaatgttggttatacccttcccgtactaatt

SEQ ID NO: 4579 - DNA, 27 bp, Artificial Sequence
  Probe
ccatagtgtagtggttatcacgtctgc

SEQ ID NO: 4580 - DNA, 29 bp, Artificial Sequence
  Probe
ccatagtgtagtggttatcacgtctgctt

SEQ ID NO: 4581 - DNA, 32 bp, Artificial Sequence
  Probe
ccatagtgtagtggttatcacgtctgctttac

SEQ ID NO: 4582 - DNA, 31 bp, Artificial Sequence
  Probe
ccatatggtctagcggttaggattcctggtt

SEQ ID NO: 4583 - DNA, 50 bp, Artificial Sequence
  Probe
ccatggggttggcttgaaaccagctttggggggttcgattccttcctttt

SEQ ID NO: 4584 - DNA, 29 bp, Artificial Sequence
  Probe
ccatgtctaacaacatggctttctcaact

SEQ ID NO: 4585 - DNA, 39 bp, Artificial Sequence
  Probe
ccattcttgcgacccgggttcgattcccgggcggcgcac

SEQ ID NO: 4586 - DNA, 40 bp, Artificial Sequence
  Probe
ccattcttgcgacccgggttcgattcccgggcggcgcact

SEQ ID NO: 4587 - DNA, 41 bp, Artificial Sequence
  Probe
ccattcttgcgacccgggttcgattcccgggcggcgcactt

SEQ ID NO: 4588 - DNA, 43 bp, Artificial Sequence
  Probe
ccattcttgcgacccgggttcgattcccgggcggcgcacttag

SEQ ID NO: 4589 - DNA, 24 bp, Artificial Sequence
  Probe
ccattgtgctttgcacgcgtgggt

SEQ ID NO: 4590 - DNA, 19 bp, Artificial Sequence
  Probe
ccatttcataactttgtca

SEQ ID NO: 4591 - DNA, 24 bp, Artificial Sequence
  Probe
cccaaaaattttggtgcaactcca

SEQ ID NO: 4592 - DNA, 27 bp, Artificial Sequence
  Probe
cccaaaaattttggtgcaactccaaat

SEQ ID NO: 4593 - DNA, 28 bp, Artificial Sequence
  Probe
cccaaaaattttggtgcaactccaaata

SEQ ID NO: 4594 - DNA, 37 bp, Artificial Sequence
  Probe
cccaaaaattttggtgcaactccaaataaaagtaata

SEQ ID NO: 4595 - DNA, 18 bp, Artificial Sequence
  Probe
cccaaacccactccacct

SEQ ID NO: 4596 - DNA, 31 bp, Artificial Sequence
  Probe
cccaaagacaccccccacagtttatgtagct

SEQ ID NO: 4597 - DNA, 50 bp, Artificial Sequence
  Probe
cccaaagacaccccccacagtttatgtagcttacctcctcaaagcaatac

SEQ ID NO: 4598 - DNA, 24 bp, Artificial Sequence
  Probe
cccaactaaatactaccgtatggc

SEQ ID NO: 4599 - DNA, 17 bp, Artificial Sequence
  Probe
cccaacttacacttagg

SEQ ID NO: 4600 - DNA, 20 bp, Artificial Sequence
  Probe
cccaacttacacttaggaga

SEQ ID NO: 4601 - DNA, 22 bp, Artificial Sequence
  Probe
cccaacttacacttaggagatt

SEQ ID NO: 4602 - DNA, 25 bp, Artificial Sequence
  Probe
cccaacttacacttaggagatttca

SEQ ID NO: 4603 - DNA, 26 bp, Artificial Sequence
  Probe
cccaacttacacttaggagatttcaa

SEQ ID NO: 4604 - DNA, 27 bp, Artificial Sequence
  Probe
cccaacttacacttaggagatttcaac

SEQ ID NO: 4605 - DNA, 32 bp, Artificial Sequence
  Probe
cccaacttacacttaggagatttcaacttaac

SEQ ID NO: 4606 - DNA, 39 bp, Artificial Sequence
  Probe
cccaacttacacttaggagatttcaacttaacttgaccg

SEQ ID NO: 4607 - DNA, 40 bp, Artificial Sequence
  Probe
cccaacttacacttaggagatttcaacttaacttgaccgc

SEQ ID NO: 4608 - DNA, 44 bp, Artificial Sequence
  Probe
cccaacttacacttaggagatttcaacttaacttgaccgctctg

SEQ ID NO: 4609 - DNA, 45 bp, Artificial Sequence
  Probe
cccaacttacacttaggagatttcaacttaacttgaccgctctga

SEQ ID NO: 4610 - DNA, 46 bp, Artificial Sequence
  Probe
cccaacttacacttaggagatttcaacttaacttgaccgctctgag

SEQ ID NO: 4611 - DNA, 48 bp, Artificial Sequence
  Probe
cccaacttacacttaggagatttcaacttaacttgaccgctctgagct

SEQ ID NO: 4612 - DNA, 49 bp, Artificial Sequence
  Probe
cccaacttacacttaggagatttcaacttaacttgaccgctctgagcta

SEQ ID NO: 4613 - DNA, 50 bp, Artificial Sequence
  Probe
cccaacttacacttaggagatttcaacttaacttgaccgctctgagctaa

SEQ ID NO: 4614 - DNA, 24 bp, Artificial Sequence
  Probe
cccacacccacccaagaacagggt

SEQ ID NO: 4615 - DNA, 25 bp, Artificial Sequence
  Probe
cccacacccacccaagaacagggtt

SEQ ID NO: 4616 - DNA, 26 bp, Artificial Sequence
  Probe
cccacacccacccaagaacagggttt

SEQ ID NO: 4617 - DNA, 27 bp, Artificial Sequence
  Probe
cccacacccacccaagaacagggtttg

SEQ ID NO: 4618 - DNA, 29 bp, Artificial Sequence
  Probe
cccacacccacccaagaacagggtttgtt

SEQ ID NO: 4619 - DNA, 30 bp, Artificial Sequence
  Probe
cccacacccacccaagaacagggtttgtta

SEQ ID NO: 4620 - DNA, 31 bp, Artificial Sequence
  Probe
cccacacccacccaagaacagggtttgttaa

SEQ ID NO: 4621 - DNA, 19 bp, Artificial Sequence
  Probe
cccacccaagaacagggtt

SEQ ID NO: 4622 - DNA, 20 bp, Artificial Sequence
  Probe
cccacccaagaacagggttt

SEQ ID NO: 4623 - DNA, 21 bp, Artificial Sequence
  Probe
cccacccaagaacagggtttg

SEQ ID NO: 4624 - DNA, 23 bp, Artificial Sequence
  Probe
cccacccaagaacagggtttgtt

SEQ ID NO: 4625 - DNA, 24 bp, Artificial Sequence
  Probe
cccacccaagaacagggtttgtta

SEQ ID NO: 4626 - DNA, 16 bp, Artificial Sequence
  Probe
cccacccagggacgcc

SEQ ID NO: 4627 - DNA, 34 bp, Artificial Sequence
  Probe
cccaccgctgccacacctcagaaggtctcacttt

SEQ ID NO: 4628 - DNA, 17 bp, Artificial Sequence
  Probe
cccagaggtcgatggat

SEQ ID NO: 4629 - DNA, 18 bp, Artificial Sequence
  Probe
cccagaggtcgatggatc

SEQ ID NO: 4630 - DNA, 37 bp, Artificial Sequence
  Probe
cccagaggtcgatggatcgaaaccatcctctgctatc

SEQ ID NO: 4631 - DNA, 37 bp, Artificial Sequence
  Probe
cccaggcggcccgggttcgactcccggtgtgggaacg

SEQ ID NO: 4632 - DNA, 38 bp, Artificial Sequence
  Probe
cccaggcggcccgggttcgactcccggtgtgggaacgc

SEQ ID NO: 4633 - DNA, 37 bp, Artificial Sequence
  Probe
cccaggtggcccgggttcgactcccggtatgggaaca

SEQ ID NO: 4634 - DNA, 37 bp, Artificial Sequence
  Probe
cccaggtggcccgggttcgactcccggtatgggaacg

SEQ ID NO: 4635 - DNA, 20 bp, Artificial Sequence
  Probe
cccataccccgaaaatgttg

SEQ ID NO: 4636 - DNA, 21 bp, Artificial Sequence
  Probe
cccataccccgaaaatgttgg

SEQ ID NO: 4637 - DNA, 23 bp, Artificial Sequence
  Probe
cccataccccgaaaatgttggtt

SEQ ID NO: 4638 - DNA, 24 bp, Artificial Sequence
  Probe
cccataccccgaaaatgttggtta

SEQ ID NO: 4639 - DNA, 29 bp, Artificial Sequence
  Probe
cccataccccgaaaatgttggttataccc

SEQ ID NO: 4640 - DNA, 32 bp, Artificial Sequence
  Probe
cccataccccgaaaatgttggttatacccttc

SEQ ID NO: 4641 - DNA, 33 bp, Artificial Sequence
  Probe
cccataccccgaaaatgttggttatacccttcc

SEQ ID NO: 4642 - DNA, 41 bp, Artificial Sequence
  Probe
cccataccccgaaaatgttggttatacccttcccgtactaa

SEQ ID NO: 4643 - DNA, 42 bp, Artificial Sequence
  Probe
cccataccccgaaaatgttggttatacccttcccgtactaat

SEQ ID NO: 4644 - DNA, 43 bp, Artificial Sequence
  Probe
cccataccccgaaaatgttggttatacccttcccgtactaatt

SEQ ID NO: 4645 - DNA, 33 bp, Artificial Sequence
  Probe
cccatatggtctagcggttaggattcctggttt

SEQ ID NO: 4646 - DNA, 25 bp, Artificial Sequence
  Probe
cccatctggggtggcctgtgacttt

SEQ ID NO: 4647 - DNA, 33 bp, Artificial Sequence
  Probe
cccatggtgtaatggttagcactctggactttg

SEQ ID NO: 4648 - DNA, 21 bp, Artificial Sequence
  Probe
cccatgtctaacaacatggct

SEQ ID NO: 4649 - DNA, 29 bp, Artificial Sequence
  Probe
cccatgtctaacaacatggctttctcaac

SEQ ID NO: 4650 - DNA, 30 bp, Artificial Sequence
  Probe
cccatgtctaacaacatggctttctcaact

SEQ ID NO: 4651 - DNA, 25 bp, Artificial Sequence
  Probe
cccattcttgcgacccgggttcgat

SEQ ID NO: 4652 - DNA, 36 bp, Artificial Sequence
  Probe
cccattcttgcgacccgggttcgattcccgggcggc

SEQ ID NO: 4653 - DNA, 38 bp, Artificial Sequence
  Probe
cccattcttgcgacccgggttcgattcccgggcggcgc

SEQ ID NO: 4654 - DNA, 40 bp, Artificial Sequence
  Probe
cccattcttgcgacccgggttcgattcccgggcggcgcac

SEQ ID NO: 4655 - DNA, 41 bp, Artificial Sequence
  Probe
cccattcttgcgacccgggttcgattcccgggcggcgcact

SEQ ID NO: 4656 - DNA, 42 bp, Artificial Sequence
  Probe
cccattcttgcgacccgggttcgattcccgggcggcgcactt

SEQ ID NO: 4657 - DNA, 43 bp, Artificial Sequence
  Probe
cccattcttgcgacccgggttcgattcccgggcggcgcactta

SEQ ID NO: 4658 - DNA, 44 bp, Artificial Sequence
  Probe
cccattcttgcgacccgggttcgattcccgggcggcgcacttag

SEQ ID NO: 4659 - DNA, 45 bp, Artificial Sequence
  Probe
cccattcttgcgacccgggttcgattcccgggcggcgcacttagt

SEQ ID NO: 4660 - DNA, 49 bp, Artificial Sequence
  Probe
cccattcttgcgacccgggttcgattcccgggcggcgcacttagttttt

SEQ ID NO: 4661 - DNA, 50 bp, Artificial Sequence
  Probe
cccattcttgcgacccgggttcgattcccgggcggcgcacttagtttttt

SEQ ID NO: 4662 - DNA, 40 bp, Artificial Sequence
  Probe
cccattcttgcgacccgggttcgattcccgggcggcgcat

SEQ ID NO: 4663 - DNA, 43 bp, Artificial Sequence
  Probe
cccattcttgcgacccgggttcgattcccgggcggcgcatagg

SEQ ID NO: 4664 - DNA, 44 bp, Artificial Sequence
  Probe
cccattcttgcgacccgggttcgattcccgggcggcgcataggc

SEQ ID NO: 4665 - DNA, 45 bp, Artificial Sequence
  Probe
cccattcttgcgacccgggttcgattcccgggcggcgcataggcg

SEQ ID NO: 4666 - DNA, 50 bp, Artificial Sequence
  Probe
cccattcttgcgacccgggttcgattcccgggcggcgcataggcgttttg

SEQ ID NO: 4667 - DNA, 24 bp, Artificial Sequence
  Probe
ccccaaaaattttggtgcaactcc

SEQ ID NO: 4668 - DNA, 25 bp, Artificial Sequence
  Probe
ccccaaaaattttggtgcaactcca

SEQ ID NO: 4669 - DNA, 26 bp, Artificial Sequence
  Probe
ccccaaaaattttggtgcaactccaa

SEQ ID NO: 4670 - DNA, 27 bp, Artificial Sequence
  Probe
ccccaaaaattttggtgcaactccaaa

SEQ ID NO: 4671 - DNA, 29 bp, Artificial Sequence
  Probe
ccccaaaaattttggtgcaactccaaata

SEQ ID NO: 4672 - DNA, 37 bp, Artificial Sequence
  Probe
ccccaaaaattttggtgcaactccaaataaaagtaat

SEQ ID NO: 4673 - DNA, 38 bp, Artificial Sequence
  Probe
ccccaaaaattttggtgcaactccaaataaaagtaata

SEQ ID NO: 4674 - DNA, 25 bp, Artificial Sequence
  Probe
ccccaactaaatactaccgtatggc

SEQ ID NO: 4675 - DNA, 17 bp, Artificial Sequence
  Probe
ccccatgtctaacaaca

SEQ ID NO: 4676 - DNA, 21 bp, Artificial Sequence
  Probe
ccccatgtctaacaacatggc

SEQ ID NO: 4677 - DNA, 22 bp, Artificial Sequence
  Probe
ccccatgtctaacaacatggct

SEQ ID NO: 4678 - DNA, 23 bp, Artificial Sequence
  Probe
ccccatgtctaacaacatggctt

SEQ ID NO: 4679 - DNA, 24 bp, Artificial Sequence
  Probe
ccccatgtctaacaacatggcttt

SEQ ID NO: 4680 - DNA, 25 bp, Artificial Sequence
  Probe
ccccatgtctaacaacatggctttc

SEQ ID NO: 4681 - DNA, 27 bp, Artificial Sequence
  Probe
ccccatgtctaacaacatggctttctc

SEQ ID NO: 4682 - DNA, 28 bp, Artificial Sequence
  Probe
ccccatgtctaacaacatggctttctca

SEQ ID NO: 4683 - DNA, 30 bp, Artificial Sequence
  Probe
ccccatgtctaacaacatggctttctcaac

SEQ ID NO: 4684 - DNA, 31 bp, Artificial Sequence
  Probe
ccccatgtctaacaacatggctttctcaact

SEQ ID NO: 4685 - DNA, 18 bp, Artificial Sequence
  Probe
cccccatgtctaacaaca

SEQ ID NO: 4686 - DNA, 22 bp, Artificial Sequence
  Probe
cccccatgtctaacaacatggc

SEQ ID NO: 4687 - DNA, 23 bp, Artificial Sequence
  Probe
cccccatgtctaacaacatggct

SEQ ID NO: 4688 - DNA, 24 bp, Artificial Sequence
  Probe
cccccatgtctaacaacatggctt

SEQ ID NO: 4689 - DNA, 25 bp, Artificial Sequence
  Probe
cccccatgtctaacaacatggcttt

SEQ ID NO: 4690 - DNA, 26 bp, Artificial Sequence
  Probe
cccccatgtctaacaacatggctttc

SEQ ID NO: 4691 - DNA, 27 bp, Artificial Sequence
  Probe
cccccatgtctaacaacatggctttct

SEQ ID NO: 4692 - DNA, 28 bp, Artificial Sequence
  Probe
cccccatgtctaacaacatggctttctc

SEQ ID NO: 4693 - DNA, 29 bp, Artificial Sequence
  Probe
cccccatgtctaacaacatggctttctca

SEQ ID NO: 4694 - DNA, 30 bp, Artificial Sequence
  Probe
cccccatgtctaacaacatggctttctcaa

SEQ ID NO: 4695 - DNA, 31 bp, Artificial Sequence
  Probe
cccccatgtctaacaacatggctttctcaac

SEQ ID NO: 4696 - DNA, 32 bp, Artificial Sequence
  Probe
cccccatgtctaacaacatggctttctcaact

SEQ ID NO: 4697 - DNA, 23 bp, Artificial Sequence
  Probe
ccccgaaaatgttggttataccc

SEQ ID NO: 4698 - DNA, 28 bp, Artificial Sequence
  Probe
ccccgaaaatgttggttatacccttccc

SEQ ID NO: 4699 - DNA, 29 bp, Artificial Sequence
  Probe
ccccgaaaatgttggttatacccttcccg

SEQ ID NO: 4700 - DNA, 30 bp, Artificial Sequence
  Probe
ccccgaaaatgttggttatacccttcccgt

SEQ ID NO: 4701 - DNA, 32 bp, Artificial Sequence
  Probe
ccccgaaaatgttggttatacccttcccgtac

SEQ ID NO: 4702 - DNA, 35 bp, Artificial Sequence
  Probe
ccccgaaaatgttggttatacccttcccgtactaa

SEQ ID NO: 4703 - DNA, 37 bp, Artificial Sequence
  Probe
ccccgaaaatgttggttatacccttcccgtactaatt

SEQ ID NO: 4704 - DNA, 50 bp, Artificial Sequence
  Probe
ccccgcctgtcacgcgggagaccggggttcgattccccgacggggaggca

SEQ ID NO: 4705 - DNA, 29 bp, Artificial Sequence
  Probe
ccccgcgcaggttcgaatcctgccgacta

SEQ ID NO: 4706 - DNA, 15 bp, Artificial Sequence
  Probe
ccccgctgttgctct

SEQ ID NO: 4707 - DNA, 20 bp, Artificial Sequence
  Probe
ccccgggttcaatccccggc

SEQ ID NO: 4708 - DNA, 21 bp, Artificial Sequence
  Probe
ccccgggttcaatccccggca

SEQ ID NO: 4709 - DNA, 23 bp, Artificial Sequence
  Probe
ccccgggttcaatccccggcacc

SEQ ID NO: 4710 - DNA, 28 bp, Artificial Sequence
  Probe
ccccgggttcaatccccggcacctccag

SEQ ID NO: 4711 - DNA, 29 bp, Artificial Sequence
  Probe
ccccgggttcaatccccggcacctccagc

SEQ ID NO: 4712 - DNA, 28 bp, Artificial Sequence
  Probe
ccccgggttcaatccccggcacctccat

SEQ ID NO: 4713 - DNA, 24 bp, Artificial Sequence
  Probe
ccccgggttcaatccccggcatct

SEQ ID NO: 4714 - DNA, 20 bp, Artificial Sequence
  Probe
ccccgggttcgatccccggc

SEQ ID NO: 4715 - DNA, 21 bp, Artificial Sequence
  Probe
ccccgggttcgatccccggca

SEQ ID NO: 4716 - DNA, 24 bp, Artificial Sequence
  Probe
ccccgggttcgatccccggcatct

SEQ ID NO: 4717 - DNA, 28 bp, Artificial Sequence
  Probe
ccccgggttcgatccccggcatctccaa

SEQ ID NO: 4718 - DNA, 28 bp, Artificial Sequence
  Probe
ccccgggttcgatccccggcatctccag

SEQ ID NO: 4719 - DNA, 28 bp, Artificial Sequence
  Probe
ccccgggttcgatccccggcatctccat

SEQ ID NO: 4720 - DNA, 29 bp, Artificial Sequence
  Probe
ccccgggttcgatccccggcatctccatt

SEQ ID NO: 4721 - DNA, 30 bp, Artificial Sequence
  Probe
ccccgggttcgatccccggcatctccattg

SEQ ID NO: 4722 - DNA, 32 bp, Artificial Sequence
  Probe
cccctggcggtctagtggttaggattcggcgc

SEQ ID NO: 4723 - DNA, 33 bp, Artificial Sequence
  Probe
cccctggcggtctagtggttaggattcggcgct

SEQ ID NO: 4724 - DNA, 34 bp, Artificial Sequence
  Probe
cccctggcggtctagtggttaggattcggcgctc

SEQ ID NO: 4725 - DNA, 35 bp, Artificial Sequence
  Probe
cccctggcggtctagtggttaggattcggcgctct

SEQ ID NO: 4726 - DNA, 36 bp, Artificial Sequence
  Probe
cccctggcggtctagtggttaggattcggcgctctc

SEQ ID NO: 4727 - DNA, 37 bp, Artificial Sequence
  Probe
cccctggcggtctagtggttaggattcggcgctctca

SEQ ID NO: 4728 - DNA, 17 bp, Artificial Sequence
  Probe
cccgaaaatgttggtta

SEQ ID NO: 4729 - DNA, 25 bp, Artificial Sequence
  Probe
cccgaaaatgttggttatacccttc

SEQ ID NO: 4730 - DNA, 26 bp, Artificial Sequence
  Probe
cccgaaaatgttggttatacccttcc

SEQ ID NO: 4731 - DNA, 27 bp, Artificial Sequence
  Probe
cccgaaaatgttggttatacccttccc

SEQ ID NO: 4732 - DNA, 28 bp, Artificial Sequence
  Probe
cccgaaaatgttggttatacccttcccg

SEQ ID NO: 4733 - DNA, 29 bp, Artificial Sequence
  Probe
cccgaaaatgttggttatacccttcccgt

SEQ ID NO: 4734 - DNA, 34 bp, Artificial Sequence
  Probe
cccgaaaatgttggttatacccttcccgtactaa

SEQ ID NO: 4735 - DNA, 35 bp, Artificial Sequence
  Probe
cccgaaaatgttggttatacccttcccgtactaat

SEQ ID NO: 4736 - DNA, 50 bp, Artificial Sequence
  Probe
cccgcctgtcacgcgggagaccggggttcaattccccgacggggaggtgt

SEQ ID NO: 4737 - DNA, 50 bp, Artificial Sequence
  Probe
cccgcctgtcacgcgggagaccggggttcgattccccgacggggaggcac

SEQ ID NO: 4738 - DNA, 22 bp, Artificial Sequence
  Probe
cccgccttttttcccggcggcg

SEQ ID NO: 4739 - DNA, 27 bp, Artificial Sequence
  Probe
cccgccttttttcccggcggcgggaga

SEQ ID NO: 4740 - DNA, 28 bp, Artificial Sequence
  Probe
cccgccttttttcccggcggcgggagaa

SEQ ID NO: 4741 - DNA, 29 bp, Artificial Sequence
  Probe
cccgccttttttcccggcggcgggagaag

SEQ ID NO: 4742 - DNA, 30 bp, Artificial Sequence
  Probe
cccgccttttttcccggcggcgggagaagt

SEQ ID NO: 4743 - DNA, 31 bp, Artificial Sequence
  Probe
cccgccttttttcccggcggcgggagaagta

SEQ ID NO: 4744 - DNA, 32 bp, Artificial Sequence
  Probe
cccgccttttttcccggcggcgggagaagtag

SEQ ID NO: 4745 - DNA, 16 bp, Artificial Sequence
  Probe
cccggcacctccacca

SEQ ID NO: 4746 - DNA, 16 bp, Artificial Sequence
  Probe
cccggcggcgggagaa

SEQ ID NO: 4747 - DNA, 24 bp, Artificial Sequence
  Probe
cccggctagctcagtcggtagagc

SEQ ID NO: 4748 - DNA, 30 bp, Artificial Sequence
  Probe
cccggctagctcagtcggtagagcatgaga

SEQ ID NO: 4749 - DNA, 28 bp, Artificial Sequence
  Probe
cccggctagctcagtcggtagagcatgg

SEQ ID NO: 4750 - DNA, 30 bp, Artificial Sequence
  Probe
cccggctagctcagtcggtagagcatggga

SEQ ID NO: 4751 - DNA, 29 bp, Artificial Sequence
  Probe
cccgggttcaaatcccggacgagccccct

SEQ ID NO: 4752 - DNA, 29 bp, Artificial Sequence
  Probe
cccgggttcaatccccggcacctccacca

SEQ ID NO: 4753 - DNA, 29 bp, Artificial Sequence
  Probe
cccgggttcaattcccggtcagggaacca

SEQ ID NO: 4754 - DNA, 27 bp, Artificial Sequence
  Probe
cccgggttcgatccccagcatctccag

SEQ ID NO: 4755 - DNA, 29 bp, Artificial Sequence
  Probe
cccgggttcgatccccagcatctccagtg

SEQ ID NO: 4756 - DNA, 29 bp, Artificial Sequence
  Probe
cccgggttcgatccccggcatctccattg

SEQ ID NO: 4757 - DNA, 29 bp, Artificial Sequence
  Probe
cccgggttcgattcccggtcatggaacca

SEQ ID NO: 4758 - DNA, 36 bp, Artificial Sequence
  Probe
cccggtaatcgcataaaacttaaaactttacagtca

SEQ ID NO: 4759 - DNA, 43 bp, Artificial Sequence
  Probe
cccggtaatcgcataaaacttaaaactttacagtcagaggttc

SEQ ID NO: 4760 - DNA, 16 bp, Artificial Sequence
  Probe
cccggtcagggaacca

SEQ ID NO: 4761 - DNA, 31 bp, Artificial Sequence
  Probe
ccctcagtaagttgcaatacttaatttctgt

SEQ ID NO: 4762 - DNA, 32 bp, Artificial Sequence
  Probe
ccctcagtaagttgcaatacttaatttctgta

SEQ ID NO: 4763 - DNA, 33 bp, Artificial Sequence
  Probe
ccctcagtaagttgcaatacttaatttctgtaa

SEQ ID NO: 4764 - DNA, 33 bp, Artificial Sequence
  Probe
ccctggtggtctagtggctaggattcggcgctt

SEQ ID NO: 4765 - DNA, 22 bp, Artificial Sequence
  Probe
ccctggtggtctagtggttagg

SEQ ID NO: 4766 - DNA, 23 bp, Artificial Sequence
  Probe
ccctggtggtctagtggttagga

SEQ ID NO: 4767 - DNA, 25 bp, Artificial Sequence
  Probe
ccctggtggtctagtggttaggatt

SEQ ID NO: 4768 - DNA, 26 bp, Artificial Sequence
  Probe
ccctggtggtctagtggttaggattc

SEQ ID NO: 4769 - DNA, 27 bp, Artificial Sequence
  Probe
ccctggtggtctagtggttaggattcg

SEQ ID NO: 4770 - DNA, 28 bp, Artificial Sequence
  Probe
ccctggtggtctagtggttaggattcgg

SEQ ID NO: 4771 - DNA, 29 bp, Artificial Sequence
  Probe
ccctggtggtctagtggttaggattcggc

SEQ ID NO: 4772 - DNA, 50 bp, Artificial Sequence
  Probe
ccctggtggtctagtggttaggattcggcgctctcaccgccgcggcccgg

SEQ ID NO: 4773 - DNA, 27 bp, Artificial Sequence
  Probe
ccctggttcaaatccgggtgccccctc

SEQ ID NO: 4774 - DNA, 29 bp, Artificial Sequence
  Probe
ccctggttcaaatccgggtgccccctcaa

SEQ ID NO: 4775 - DNA, 26 bp, Artificial Sequence
  Probe
ccctggttcgatcccgggtttcggca

SEQ ID NO: 4776 - DNA, 24 bp, Artificial Sequence
  Probe
ccgaaaatgttggttatacccttc

SEQ ID NO: 4777 - DNA, 25 bp, Artificial Sequence
  Probe
ccgaaaatgttggttatacccttcc

SEQ ID NO: 4778 - DNA, 26 bp, Artificial Sequence
  Probe
ccgaaaatgttggttatacccttccc

SEQ ID NO: 4779 - DNA, 27 bp, Artificial Sequence
  Probe
ccgaaaatgttggttatacccttcccg

SEQ ID NO: 4780 - DNA, 28 bp, Artificial Sequence
  Probe
ccgaaaatgttggttatacccttcccgt

SEQ ID NO: 4781 - DNA, 29 bp, Artificial Sequence
  Probe
ccgaaaatgttggttatacccttcccgta

SEQ ID NO: 4782 - DNA, 31 bp, Artificial Sequence
  Probe
ccgaaaatgttggttatacccttcccgtact

SEQ ID NO: 4783 - DNA, 33 bp, Artificial Sequence
  Probe
ccgaaaatgttggttatacccttcccgtactaa

SEQ ID NO: 4784 - DNA, 34 bp, Artificial Sequence
  Probe
ccgaaaggttggtggttcgagcccacccagggac

SEQ ID NO: 4785 - DNA, 37 bp, Artificial Sequence
  Probe
ccgaaaggttggtggttcgagcccacccagggacgcc

SEQ ID NO: 4786 - DNA, 18 bp, Artificial Sequence
  Probe
ccgaagatcacgggttcg

SEQ ID NO: 4787 - DNA, 36 bp, Artificial Sequence
  Probe
ccgaggttgtgagttcgagcctcacctggagcattg

SEQ ID NO: 4788 - DNA, 17 bp, Artificial Sequence
  Probe
ccgcagcaacctcggtt

SEQ ID NO: 4789 - DNA, 19 bp, Artificial Sequence
  Probe
ccgcagcaacctcggttcg

SEQ ID NO: 4790 - DNA, 32 bp, Artificial Sequence
  Probe
ccgcagcaacctcggttcgaatccgagtcacg

SEQ ID NO: 4791 - DNA, 33 bp, Artificial Sequence
  Probe
ccgcagcaacctcggttcgaatccgagtcacgg

SEQ ID NO: 4792 - DNA, 37 bp, Artificial Sequence
  Probe
ccgcagcaacctcggttcgaatccgagtcacggcaaa

SEQ ID NO: 4793 - DNA, 37 bp, Artificial Sequence
  Probe
ccgcagcaacctcggttcgaatccgagtcacggcagg

SEQ ID NO: 4794 - DNA, 38 bp, Artificial Sequence
  Probe
ccgcagcaacctcggttcgaatccgagtcacggcaggt

SEQ ID NO: 4795 - DNA, 37 bp, Artificial Sequence
  Probe
ccgcagcaacctcggttcgaatccgagtcacggcatt

SEQ ID NO: 4796 - DNA, 38 bp, Artificial Sequence
  Probe
ccgcagcaacctcggttcgaatccgagtcacggcattg

SEQ ID NO: 4797 - DNA, 36 bp, Artificial Sequence
  Probe
ccgccgcggcccgggttcgattcccggtcagggaaa

SEQ ID NO: 4798 - DNA, 36 bp, Artificial Sequence
  Probe
ccgccgcggcccgggttcgattcccggtcagggaag

SEQ ID NO: 4799 - DNA, 37 bp, Artificial Sequence
  Probe
ccgccgcggcccgggttcgattcccggtcagggaagc

SEQ ID NO: 4800 - DNA, 36 bp, Artificial Sequence
  Probe
ccgccgcggcccgggttcgattcccggtcagggaat

SEQ ID NO: 4801 - DNA, 37 bp, Artificial Sequence
  Probe
ccgccgcggcccgggttcgattcccggtcagggaatt

SEQ ID NO: 4802 - DNA, 38 bp, Artificial Sequence
  Probe
ccgccgcggcccgggttcgattcccggtcagggaattg

SEQ ID NO: 4803 - DNA, 49 bp, Artificial Sequence
  Probe
ccgcctgtcacgcgggagaccggggttcgattccccgacggggaggcac

SEQ ID NO: 4804 - DNA, 50 bp, Artificial Sequence
  Probe
ccgcctgtcacgcgggagaccggggttcgattccccgacggggaggcaca

SEQ ID NO: 4805 - DNA, 27 bp, Artificial Sequence
  Probe
ccgccttttttcccggcggcgggagaa

SEQ ID NO: 4806 - DNA, 29 bp, Artificial Sequence
  Probe
ccgccttttttcccggcggcgggagaagt

SEQ ID NO: 4807 - DNA, 31 bp, Artificial Sequence
  Probe
ccgcggcccgggttcgattcccggtcaggga

SEQ ID NO: 4808 - DNA, 32 bp, Artificial Sequence
  Probe
ccgcggcccgggttcgattcccggtcagggaa

SEQ ID NO: 4809 - DNA, 33 bp, Artificial Sequence
  Probe
ccgcggcccgggttcgattcccggtcagggaaa

SEQ ID NO: 4810 - DNA, 33 bp, Artificial Sequence
  Probe
ccgcggcccgggttcgattcccggtcagggaag

SEQ ID NO: 4811 - DNA, 33 bp, Artificial Sequence
  Probe
ccgcggcccgggttcgattcccggtcagggaat

SEQ ID NO: 4812 - DNA, 35 bp, Artificial Sequence
  Probe
ccgcggcccgggttcgattcccggtcagggaattg

SEQ ID NO: 4813 - DNA, 19 bp, Artificial Sequence
  Probe
ccgctggtgtagtggtatc

SEQ ID NO: 4814 - DNA, 28 bp, Artificial Sequence
  Probe
ccgctggtgtagtggtatcatgcaagat

SEQ ID NO: 4815 - DNA, 25 bp, Artificial Sequence
  Probe
ccggagatgaaaacctttttccaag

SEQ ID NO: 4816 - DNA, 30 bp, Artificial Sequence
  Probe
ccggagatgaaaacctttttccaaggacaa

SEQ ID NO: 4817 - DNA, 31 bp, Artificial Sequence
  Probe
ccggagatgaaaacctttttccaaggacaaa

SEQ ID NO: 4818 - DNA, 32 bp, Artificial Sequence
  Probe
ccggagatgaaaacctttttccaaggacaaat

SEQ ID NO: 4819 - DNA, 33 bp, Artificial Sequence
  Probe
ccggagatgaaaacctttttccaaggacaaatc

SEQ ID NO: 4820 - DNA, 26 bp, Artificial Sequence
  Probe
ccggatagctcagtcggtagagcatc

SEQ ID NO: 4821 - DNA, 15 bp, Artificial Sequence
  Probe
ccggcggcgggagaa

SEQ ID NO: 4822 - DNA, 17 bp, Artificial Sequence
  Probe
ccggcggcgggagaagt

SEQ ID NO: 4823 - DNA, 25 bp, Artificial Sequence
  Probe
ccggctagctcagtcggtagagcat

SEQ ID NO: 4824 - DNA, 26 bp, Artificial Sequence
  Probe
ccggctagctcagtcggtagagcatg

SEQ ID NO: 4825 - DNA, 33 bp, Artificial Sequence
  Probe
ccggctagctcagtcggtagagcatgagactct

SEQ ID NO: 4826 - DNA, 50 bp, Artificial Sequence
  Probe
ccggctagctcagtcggtagagcatgagactcttaatctcagggtcgtgg

SEQ ID NO: 4827 - DNA, 28 bp, Artificial Sequence
  Probe
ccggctagctcagtcggtagagcatggg

SEQ ID NO: 4828 - DNA, 50 bp, Artificial Sequence
  Probe
ccggctagctcagtcggtagagcatgggactcttaatcccagggtcgtgg

SEQ ID NO: 4829 - DNA, 29 bp, Artificial Sequence
  Probe
ccggggttcaattccccgacggggaggtg

SEQ ID NO: 4830 - DNA, 29 bp, Artificial Sequence
  Probe
ccggggttcgattccccgacggggaggca

SEQ ID NO: 4831 - DNA, 27 bp, Artificial Sequence
  Probe
ccggtaatcgcataaaacttaaaactt

SEQ ID NO: 4832 - DNA, 35 bp, Artificial Sequence
  Probe
ccggtaatcgcataaaacttaaaactttacagtca

SEQ ID NO: 4833 - DNA, 24 bp, Artificial Sequence
  Probe
ccgtagtgtagtggtcatcacgtt

SEQ ID NO: 4834 - DNA, 27 bp, Artificial Sequence
  Probe
ccgtagtgtagtggtcatcacgttcgc

SEQ ID NO: 4835 - DNA, 31 bp, Artificial Sequence
  Probe
ccgtagtgtagtggtcatcacgttcgcctaa

SEQ ID NO: 4836 - DNA, 32 bp, Artificial Sequence
  Probe
ccgtagtgtagtggtcatcacgttcgcctaac

SEQ ID NO: 4837 - DNA, 23 bp, Artificial Sequence
  Probe
ccgtagtgtagtggttatcacgt

SEQ ID NO: 4838 - DNA, 24 bp, Artificial Sequence
  Probe
ccgtagtgtagtggttatcacgtt

SEQ ID NO: 4839 - DNA, 27 bp, Artificial Sequence
  Probe
ccgtagtgtagtggttatcacgttcgc

SEQ ID NO: 4840 - DNA, 28 bp, Artificial Sequence
  Probe
ccgtagtgtagtggttatcacgttcgcc

SEQ ID NO: 4841 - DNA, 29 bp, Artificial Sequence
  Probe
ccgtagtgtagtggttatcacgttcgcct

SEQ ID NO: 4842 - DNA, 50 bp, Artificial Sequence
  Probe
ccgtagtgtagtggttatcacgttcgcctaacacgcgaaaggtccccggt

SEQ ID NO: 4843 - DNA, 30 bp, Artificial Sequence
  Probe
ccgtagtgtagtggttatcacgttcgcctc

SEQ ID NO: 4844 - DNA, 31 bp, Artificial Sequence
  Probe
ccgtagtgtagtggttatcacgttcgcctca

SEQ ID NO: 4845 - DNA, 32 bp, Artificial Sequence
  Probe
ccgtagtgtagtggttatcacgttcgcctcac

SEQ ID NO: 4846 - DNA, 33 bp, Artificial Sequence
  Probe
ccgtagtgtagtggttatcacgttcgcctcaca

SEQ ID NO: 4847 - DNA, 50 bp, Artificial Sequence
  Probe
ccgtagtgtagtggttatcacgttcgcctcacacgcgaaaggtccccggt

SEQ ID NO: 4848 - DNA, 25 bp, Artificial Sequence
  Probe
ccgtgatcgtatagtggttagtact

SEQ ID NO: 4849 - DNA, 26 bp, Artificial Sequence
  Probe
ccgtgatcgtatagtggttagtactc

SEQ ID NO: 4850 - DNA, 27 bp, Artificial Sequence
  Probe
ccgtgatcgtatagtggttagtactct

SEQ ID NO: 4851 - DNA, 28 bp, Artificial Sequence
  Probe
ccgtgatcgtatagtggttagtactctg

SEQ ID NO: 4852 - DNA, 23 bp, Artificial Sequence
  Probe
ccgttaacttccaattaactagt

SEQ ID NO: 4853 - DNA, 29 bp, Artificial Sequence
  Probe
ccgttaacttccaattaactagttttgac

SEQ ID NO: 4854 - DNA, 30 bp, Artificial Sequence
  Probe
ccgttaacttccaattaactagttttgaca

SEQ ID NO: 4855 - DNA, 50 bp, Artificial Sequence
  Probe
ccgttaacttccaattaactagttttgacaacattcaaaaaagagtaata

SEQ ID NO: 4856 - DNA, 43 bp, Artificial Sequence
  Probe
cctaagccagggattgtgggttcgagtcccatctggggtggcc

SEQ ID NO: 4857 - DNA, 24 bp, Artificial Sequence
  Probe
cctagccccaaacccactccacct

SEQ ID NO: 4858 - DNA, 18 bp, Artificial Sequence
  Probe
cctagcctttctattagc

SEQ ID NO: 4859 - DNA, 17 bp, Artificial Sequence
  Probe
cctcaaagcaatacact

SEQ ID NO: 4860 - DNA, 19 bp, Artificial Sequence
  Probe
cctcaaagcaatacactga

SEQ ID NO: 4861 - DNA, 32 bp, Artificial Sequence
  Probe
cctcaaagcaatacactgaaaatgtttagacg

SEQ ID NO: 4862 - DNA, 37 bp, Artificial Sequence
  Probe
cctcaaagcaatacactgaaaatgtttagacgggctc

SEQ ID NO: 4863 - DNA, 48 bp, Artificial Sequence
  Probe
cctcaaagcaatacactgaaaatgtttagacgggctcacatcacccca

SEQ ID NO: 4864 - DNA, 49 bp, Artificial Sequence
  Probe
cctcaaagcaatacactgaaaatgtttagacgggctcacatcaccccat

SEQ ID NO: 4865 - DNA, 25 bp, Artificial Sequence
  Probe
cctcagtaagttgcaatacttaatt

SEQ ID NO: 4866 - DNA, 29 bp, Artificial Sequence
  Probe
cctcagtaagttgcaatacttaatttctg

SEQ ID NO: 4867 - DNA, 32 bp, Artificial Sequence
  Probe
cctcagtaagttgcaatacttaatttctgtaa

SEQ ID NO: 4868 - DNA, 39 bp, Artificial Sequence
  Probe
cctcctcaaagcaatacactgaaaatgtttagacgggct

SEQ ID NO: 4869 - DNA, 22 bp, Artificial Sequence
  Probe
cctcgttagtatagtggtgagt

SEQ ID NO: 4870 - DNA, 32 bp, Artificial Sequence
  Probe
cctcgttagtatagtggtgagtatccccgcct

SEQ ID NO: 4871 - DNA, 35 bp, Artificial Sequence
  Probe
cctcgttagtatagtggttagtatccccgcctgtc

SEQ ID NO: 4872 - DNA, 29 bp, Artificial Sequence
  Probe
cctggtggtctagtggctaggattcggcg

SEQ ID NO: 4873 - DNA, 31 bp, Artificial Sequence
  Probe
cctggtggtctagtggctaggattcggcgct

SEQ ID NO: 4874 - DNA, 25 bp, Artificial Sequence
  Probe
cctggtggtctagtggttaggattc

SEQ ID NO: 4875 - DNA, 26 bp, Artificial Sequence
  Probe
cctggtggtctagtggttaggattcg

SEQ ID NO: 4876 - DNA, 27 bp, Artificial Sequence
  Probe
cctggtggtctagtggttaggattcgg

SEQ ID NO: 4877 - DNA, 36 bp, Artificial Sequence
  Probe
cctggtggtctagtggttaggattcggcgctctcac

SEQ ID NO: 4878 - DNA, 16 bp, Artificial Sequence
  Probe
cctgtcacgcgggaga

SEQ ID NO: 4879 - DNA, 23 bp, Artificial Sequence
  Probe
cctgtcacgcgggagaccggggt

SEQ ID NO: 4880 - DNA, 45 bp, Artificial Sequence
  Probe
cctgtcacgcgggagaccggggttcaattccccgacggggaggtg

SEQ ID NO: 4881 - DNA, 50 bp, Artificial Sequence
  Probe
cctgtcacgcgggagaccggggttcaattccccgacggggaggtgtgtag

SEQ ID NO: 4882 - DNA, 44 bp, Artificial Sequence
  Probe
cctgtcacgcgggagaccggggttcgattccccgacggggagaa

SEQ ID NO: 4883 - DNA, 45 bp, Artificial Sequence
  Probe
cctgtcacgcgggagaccggggttcgattccccgacggggagaaa

SEQ ID NO: 4884 - DNA, 49 bp, Artificial Sequence
  Probe
cctgtcacgcgggagaccggggttcgattccccgacggggagaaaagtt

SEQ ID NO: 4885 - DNA, 45 bp, Artificial Sequence
  Probe
cctgtcacgcgggagaccggggttcgattccccgacggggagagt

SEQ ID NO: 4886 - DNA, 45 bp, Artificial Sequence
  Probe
cctgtcacgcgggagaccggggttcgattccccgacggggaggca

SEQ ID NO: 4887 - DNA, 48 bp, Artificial Sequence
  Probe
cctgtcacgcgggagaccggggttcgattccccgacggggaggcacag

SEQ ID NO: 4888 - DNA, 49 bp, Artificial Sequence
  Probe
cctgtcacgcgggagaccggggttcgattccccgacggggaggcacagt

SEQ ID NO: 4889 - DNA, 50 bp, Artificial Sequence
  Probe
cctgtcacgcgggagaccggggttcgattccccgacggggaggcacagta

SEQ ID NO: 4890 - DNA, 45 bp, Artificial Sequence
  Probe
cctgtcacgcgggagaccggggttcgattccccgacggggaggcc

SEQ ID NO: 4891 - DNA, 50 bp, Artificial Sequence
  Probe
cctgtcacgcgggagaccggggttcgattccccgacggggaggccgggta

SEQ ID NO: 4892 - DNA, 19 bp, Artificial Sequence
  Probe
ccttccaagcagttgaccc

SEQ ID NO: 4893 - DNA, 23 bp, Artificial Sequence
  Probe
ccttccaagcagttgacccgggt

SEQ ID NO: 4894 - DNA, 24 bp, Artificial Sequence
  Probe
ccttccaagcagttgacccgggtt

SEQ ID NO: 4895 - DNA, 25 bp, Artificial Sequence
  Probe
ccttccaagcagttgacccgggttc

SEQ ID NO: 4896 - DNA, 16 bp, Artificial Sequence
  Probe
ccttcgatagctcagc

SEQ ID NO: 4897 - DNA, 19 bp, Artificial Sequence
  Probe
ccttcgatagctcagctgg

SEQ ID NO: 4898 - DNA, 19 bp, Artificial Sequence
  Probe
ccttcgatagctcagttgg

SEQ ID NO: 4899 - DNA, 25 bp, Artificial Sequence
  Probe
ccttcgatagctcagttggtagagc

SEQ ID NO: 4900 - DNA, 27 bp, Artificial Sequence
  Probe
ccttgtagtataaactaatacaccagt

SEQ ID NO: 4901 - DNA, 32 bp, Artificial Sequence
  Probe
ccttgtagtataaactaatacaccagtcttgt

SEQ ID NO: 4902 - DNA, 31 bp, Artificial Sequence
  Probe
ccttttaagttaaagattaagagaaccaaca

SEQ ID NO: 4903 - DNA, 46 bp, Artificial Sequence
  Probe
ccttttaagttaaagattaagagaaccaacacctctttacagtgaa

SEQ ID NO: 4904 - DNA, 49 bp, Artificial Sequence
  Probe
ccttttaagttaaagattaagagaaccaacacctctttacagtgaaatg

SEQ ID NO: 4905 - DNA, 50 bp, Artificial Sequence
  Probe
ccttttaagttaaagattaagagaaccaacacctctttacagtgaaatgc

SEQ ID NO: 4906 - DNA, 23 bp, Artificial Sequence
  Probe
ccttttttcccggcggcgggaga

SEQ ID NO: 4907 - DNA, 24 bp, Artificial Sequence
  Probe
ccttttttcccggcggcgggagaa

SEQ ID NO: 4908 - DNA, 25 bp, Artificial Sequence
  Probe
ccttttttcccggcggcgggagaag

SEQ ID NO: 4909 - DNA, 26 bp, Artificial Sequence
  Probe
ccttttttcccggcggcgggagaagt

SEQ ID NO: 4910 - DNA, 27 bp, Artificial Sequence
  Probe
ccttttttcccggcggcgggagaagta

SEQ ID NO: 4911 - DNA, 29 bp, Artificial Sequence
  Probe
ccttttttcccggcggcgggagaagtaga

SEQ ID NO: 4912 - DNA, 23 bp, Artificial Sequence
  Probe
cgaaaatgttggttatacccttc

SEQ ID NO: 4913 - DNA, 25 bp, Artificial Sequence
  Probe
cgaaaatgttggttatacccttccc

SEQ ID NO: 4914 - DNA, 27 bp, Artificial Sequence
  Probe
cgaaaatgttggttatacccttcccgt

SEQ ID NO: 4915 - DNA, 32 bp, Artificial Sequence
  Probe
cgaaaatgttggttatacccttcccgtactaa

SEQ ID NO: 4916 - DNA, 33 bp, Artificial Sequence
  Probe
cgaaaatgttggttatacccttcccgtactaat

SEQ ID NO: 4917 - DNA, 34 bp, Artificial Sequence
  Probe
cgaaaatgttggttatacccttcccgtactaatt

SEQ ID NO: 4918 - DNA, 21 bp, Artificial Sequence
  Probe
cgaaaccatcctctgctaggt

SEQ ID NO: 4919 - DNA, 21 bp, Artificial Sequence
  Probe
cgaaaccgggcggaaacacct

SEQ ID NO: 4920 - DNA, 17 bp, Artificial Sequence
  Probe
cgaaaggtccccggttc

SEQ ID NO: 4921 - DNA, 18 bp, Artificial Sequence
  Probe
cgaaaggtccccggttcg

SEQ ID NO: 4922 - DNA, 37 bp, Artificial Sequence
  Probe
cgaaaggtccccggttcgaaaccgggcggaaacacct

SEQ ID NO: 4923 - DNA, 37 bp, Artificial Sequence
  Probe
cgaaaggttggtggttcgagcccacccagggacgcct

SEQ ID NO: 4924 - DNA, 17 bp, Artificial Sequence
  Probe
cgaacccatccctgaga

SEQ ID NO: 4925 - DNA, 25 bp, Artificial Sequence
  Probe
cgaagaagcagcttcaaacctgccg

SEQ ID NO: 4926 - DNA, 26 bp, Artificial Sequence
  Probe
cgaagaagcagcttcaaacctgccgg

SEQ ID NO: 4927 - DNA, 27 bp, Artificial Sequence
  Probe
cgaagaagcagcttcaaacctgccggg

SEQ ID NO: 4928 - DNA, 28 bp, Artificial Sequence
  Probe
cgaagaagcagcttcaaacctgccgggg

SEQ ID NO: 4929 - DNA, 29 bp, Artificial Sequence
  Probe
cgaagaagcagcttcaaacctgccggggc

SEQ ID NO: 4930 - DNA, 30 bp, Artificial Sequence
  Probe
cgaagaagcagcttcaaacctgccggggct

SEQ ID NO: 4931 - DNA, 31 bp, Artificial Sequence
  Probe
cgaagaagcagcttcaaacctgccggggctt

SEQ ID NO: 4932 - DNA, 32 bp, Artificial Sequence
  Probe
cgaagaagcagcttcaaacctgccggggcttc

SEQ ID NO: 4933 - DNA, 33 bp, Artificial Sequence
  Probe
cgaagaagcagcttcaaacctgccggggcttct

SEQ ID NO: 4934 - DNA, 34 bp, Artificial Sequence
  Probe
cgaagaagcagcttcaaacctgccggggcttctc

SEQ ID NO: 4935 - DNA, 35 bp, Artificial Sequence
  Probe
cgaagaagcagcttcaaacctgccggggcttctcc

SEQ ID NO: 4936 - DNA, 36 bp, Artificial Sequence
  Probe
cgaagaagcagcttcaaacctgccggggcttctccc

SEQ ID NO: 4937 - DNA, 17 bp, Artificial Sequence
  Probe
cgaagatcacgggttcg

SEQ ID NO: 4938 - DNA, 21 bp, Artificial Sequence
  Probe
cgaatcacgtcggggtcaaac

SEQ ID NO: 4939 - DNA, 21 bp, Artificial Sequence
  Probe
cgaatcccaccgctgccacac

SEQ ID NO: 4940 - DNA, 21 bp, Artificial Sequence
  Probe
cgaatcccaccgctgccaggt

SEQ ID NO: 4941 - DNA, 21 bp, Artificial Sequence
  Probe
cgaatcccagcggtgcctccg

SEQ ID NO: 4942 - DNA, 32 bp, Artificial Sequence
  Probe
cgactcattaaattatgataatcatatttacc

SEQ ID NO: 4943 - DNA, 35 bp, Artificial Sequence
  Probe
cgactcattaaattatgataatcatatttaccaaa

SEQ ID NO: 4944 - DNA, 37 bp, Artificial Sequence
  Probe
cgactcattaaattatgataatcatatttaccaaatg

SEQ ID NO: 4945 - DNA, 21 bp, Artificial Sequence
  Probe
cgactcccggtatgggaacaa

SEQ ID NO: 4946 - DNA, 20 bp, Artificial Sequence
  Probe
cgactcccggtgtgggaacg

SEQ ID NO: 4947 - DNA, 21 bp, Artificial Sequence
  Probe
cgactcccggtgtgggaacgc

SEQ ID NO: 4948 - DNA, 31 bp, Artificial Sequence
  Probe
cgagaaagctcacaagaactgctaactcatg

SEQ ID NO: 4949 - DNA, 27 bp, Artificial Sequence
  Probe
cgagccccacgttgggcgctgtgtttt

SEQ ID NO: 4950 - DNA, 29 bp, Artificial Sequence
  Probe
cgagcctcacacggggcagtctaacgttt

SEQ ID NO: 4951 - DNA, 26 bp, Artificial Sequence
  Probe
cgaggccccgggttcaatccccggca

SEQ ID NO: 4952 - DNA, 21 bp, Artificial Sequence
  Probe
cgatccccggcatctccattg

SEQ ID NO: 4953 - DNA, 31 bp, Artificial Sequence
  Probe
cgatccgagttcaaatctcggtggaacctgc

SEQ ID NO: 4954 - DNA, 32 bp, Artificial Sequence
  Probe
cgatccgagttcaaatctcggtggaacctgca

SEQ ID NO: 4955 - DNA, 20 bp, Artificial Sequence
  Probe
cgatgcccgcatcctccact

SEQ ID NO: 4956 - DNA, 29 bp, Artificial Sequence
  Probe
cgatggatcgaaaccatcctctgctaggt

SEQ ID NO: 4957 - DNA, 19 bp, Artificial Sequence
  Probe
cgattccccgacggggaga

SEQ ID NO: 4958 - DNA, 20 bp, Artificial Sequence
  Probe
cgattccccgacggggagac

SEQ ID NO: 4959 - DNA, 19 bp, Artificial Sequence
  Probe
cgattccccgacggggagg

SEQ ID NO: 4960 - DNA, 20 bp, Artificial Sequence
  Probe
cgattccccgacggggaggc

SEQ ID NO: 4961 - DNA, 21 bp, Artificial Sequence
  Probe
cgattccccgacggggaggca

SEQ ID NO: 4962 - DNA, 20 bp, Artificial Sequence
  Probe
cgattcccggtcagggaaca

SEQ ID NO: 4963 - DNA, 21 bp, Artificial Sequence
  Probe
cgattcccggtcagggaacaa

SEQ ID NO: 4964 - DNA, 21 bp, Artificial Sequence
  Probe
cgattcccggtcatggaacca

SEQ ID NO: 4965 - DNA, 21 bp, Artificial Sequence
  Probe
cgattcctggtcagggaacca

SEQ ID NO: 4966 - DNA, 38 bp, Artificial Sequence
  Probe
cgcagaaggtcctgggttcgagccccagtggaaccacg

SEQ ID NO: 4967 - DNA, 39 bp, Artificial Sequence
  Probe
cgcagaaggtcctgggttcgagccccagtggaaccacgg

SEQ ID NO: 4968 - DNA, 39 bp, Artificial Sequence
  Probe
cgcagaaggtcctgggttcgagccccagtggaaccatag

SEQ ID NO: 4969 - DNA, 32 bp, Artificial Sequence
  Probe
cgcagcaacctcggttcgaatccgagtcacgg

SEQ ID NO: 4970 - DNA, 37 bp, Artificial Sequence
  Probe
cgcagcaacctcggttcgaatccgagtcacggcaaag

SEQ ID NO: 4971 - DNA, 37 bp, Artificial Sequence
  Probe
cgcagcaacctcggttcgaatccgagtcacggcagga

SEQ ID NO: 4972 - DNA, 37 bp, Artificial Sequence
  Probe
cgcagcaacctcggttcgaatccgagtcacggcaggt

SEQ ID NO: 4973 - DNA, 37 bp, Artificial Sequence
  Probe
cgcagcaacctcggttcgaatccgagtcacggcattg

SEQ ID NO: 4974 - DNA, 25 bp, Artificial Sequence
  Probe
cgcagcggaagcgtgctgggcccat

SEQ ID NO: 4975 - DNA, 18 bp, Artificial Sequence
  Probe
cgcataaaacttaaaact

SEQ ID NO: 4976 - DNA, 22 bp, Artificial Sequence
  Probe
cgcataaaacttaaaactttac

SEQ ID NO: 4977 - DNA, 23 bp, Artificial Sequence
  Probe
cgcataaaacttaaaactttaca

SEQ ID NO: 4978 - DNA, 34 bp, Artificial Sequence
  Probe
cgcataaaacttaaaactttacagtcagaggttc

SEQ ID NO: 4979 - DNA, 46 bp, Artificial Sequence
  Probe
cgcataaaacttaaaactttacagtcagaggttcaattcctcttct

SEQ ID NO: 4980 - DNA, 49 bp, Artificial Sequence
  Probe
cgcataaaacttaaaactttacagtcagaggttcaattcctcttcttaa

SEQ ID NO: 4981 - DNA, 50 bp, Artificial Sequence
  Probe
cgcataaaacttaaaactttacagtcagaggttcaattcctcttcttaac

SEQ ID NO: 4982 - DNA, 33 bp, Artificial Sequence
  Probe
cgcattggtggttcagtggtagaattctcgcct

SEQ ID NO: 4983 - DNA, 19 bp, Artificial Sequence
  Probe
cgcccggatagctcagtcg

SEQ ID NO: 4984 - DNA, 37 bp, Artificial Sequence
  Probe
cgcccggctagctcagtcggtagagcatgggactctt

SEQ ID NO: 4985 - DNA, 35 bp, Artificial Sequence
  Probe
cgccgcggcccgggttcgattcccggtcagggaaa

SEQ ID NO: 4986 - DNA, 35 bp, Artificial Sequence
  Probe
cgccgcggcccgggttcgattcccggtcagggaag

SEQ ID NO: 4987 - DNA, 37 bp, Artificial Sequence
  Probe
cgccgcggcccgggttcgattcccggtcagggaagcc

SEQ ID NO: 4988 - DNA, 37 bp, Artificial Sequence
  Probe
cgccgcggcccgggttcgattcccggtcagggaagtt

SEQ ID NO: 4989 - DNA, 35 bp, Artificial Sequence
  Probe
cgccgcggcccgggttcgattcccggtcagggaat

SEQ ID NO: 4990 - DNA, 37 bp, Artificial Sequence
  Probe
cgccgcggcccgggttcgattcccggtcagggaattg

SEQ ID NO: 4991 - DNA, 27 bp, Artificial Sequence
  Probe
cgccgctggtgtagtggtatcatgcaa

SEQ ID NO: 4992 - DNA, 29 bp, Artificial Sequence
  Probe
cgccgctggtgtagtggtatcatgcaaga

SEQ ID NO: 4993 - DNA, 33 bp, Artificial Sequence
  Probe
cgccgctggtgtagtggtatcatgcaagattcc

SEQ ID NO: 4994 - DNA, 21 bp, Artificial Sequence
  Probe
cgccgtgatcgtatagtggtt

SEQ ID NO: 4995 - DNA, 22 bp, Artificial Sequence
  Probe
cgccgtgatcgtatagtggtta

SEQ ID NO: 4996 - DNA, 23 bp, Artificial Sequence
  Probe
cgccgtgatcgtatagtggttag

SEQ ID NO: 4997 - DNA, 24 bp, Artificial Sequence
  Probe
cgccgtgatcgtatagtggttagt

SEQ ID NO: 4998 - DNA, 32 bp, Artificial Sequence
  Probe
cgccgtgatcgtatagtggttagtactctgcg

SEQ ID NO: 4999 - DNA, 33 bp, Artificial Sequence
  Probe
cgccgtgatcgtatagtggttagtactctgcgt

SEQ ID NO: 5000 - DNA, 34 bp, Artificial Sequence
  Probe
cgccgtgatcgtatagtggttagtactctgcgtt

SEQ ID NO: 5001 - DNA, 35 bp, Artificial Sequence
  Probe
cgccgtgatcgtatagtggttagtactctgcgttg

SEQ ID NO: 5002 - DNA, 36 bp, Artificial Sequence
  Probe
cgccgtgatcgtatagtggttagtactctgcgttgt

SEQ ID NO: 5003 - DNA, 37 bp, Artificial Sequence
  Probe
cgccgtgatcgtatagtggttagtactctgcgttgtg

SEQ ID NO: 5004 - DNA, 38 bp, Artificial Sequence
  Probe
cgccgtgatcgtatagtggttagtactctgcgttgtgg

SEQ ID NO: 5005 - DNA, 50 bp, Artificial Sequence
  Probe
cgcctgtcacgcgggagaccggggttcaattccccgacggggaggtgtgt

SEQ ID NO: 5006 - DNA, 44 bp, Artificial Sequence
  Probe
cgcctgtcacgcgggagaccggggttcgattccccgacggggag

SEQ ID NO: 5007 - DNA, 50 bp, Artificial Sequence
  Probe
cgcctgtcacgcgggagaccggggttcgattccccgacggggaggcacag

SEQ ID NO: 5008 - DNA, 50 bp, Artificial Sequence
  Probe
cgcctgtcacgcgggagaccggggttcgattccccgacggggaggcagcc

SEQ ID NO: 5009 - DNA, 50 bp, Artificial Sequence
  Probe
cgcctgtcacgcgggagaccggggttcgattccccgacggggaggccaag

SEQ ID NO: 5010 - DNA, 24 bp, Artificial Sequence
  Probe
cgccttttttcccggcggcgggag

SEQ ID NO: 5011 - DNA, 25 bp, Artificial Sequence
  Probe
cgccttttttcccggcggcgggaga

SEQ ID NO: 5012 - DNA, 26 bp, Artificial Sequence
  Probe
cgccttttttcccggcggcgggagaa

SEQ ID NO: 5013 - DNA, 27 bp, Artificial Sequence
  Probe
cgccttttttcccggcggcgggagaag

SEQ ID NO: 5014 - DNA, 28 bp, Artificial Sequence
  Probe
cgccttttttcccggcggcgggagaagt

SEQ ID NO: 5015 - DNA, 29 bp, Artificial Sequence
  Probe
cgccttttttcccggcggcgggagaagta

SEQ ID NO: 5016 - DNA, 20 bp, Artificial Sequence
  Probe
cgcgaaaggtccccggttcg

SEQ ID NO: 5017 - DNA, 39 bp, Artificial Sequence
  Probe
cgcgaaaggtccccggttcgaaaccgggcggaaacacct

SEQ ID NO: 5018 - DNA, 27 bp, Artificial Sequence
  Probe
cgcgagttcaaatctcgctggggcctc

SEQ ID NO: 5019 - DNA, 32 bp, Artificial Sequence
  Probe
cgcggcccgggttcgattcccggtcagggaaa

SEQ ID NO: 5020 - DNA, 32 bp, Artificial Sequence
  Probe
cgcggcccgggttcgattcccggtcagggaag

SEQ ID NO: 5021 - DNA, 32 bp, Artificial Sequence
  Probe
cgcggcccgggttcgattcccggtcagggaat

SEQ ID NO: 5022 - DNA, 34 bp, Artificial Sequence
  Probe
cgcggcccgggttcgattcccggtcagggaattg

SEQ ID NO: 5023 - DNA, 17 bp, Artificial Sequence
  Probe
cgcgggagaccggggtt

SEQ ID NO: 5024 - DNA, 31 bp, Artificial Sequence
  Probe
cgcgggagaccggggttcaattccccgacgg

SEQ ID NO: 5025 - DNA, 36 bp, Artificial Sequence
  Probe
cgcgggagaccggggttcaattccccgacggggagg

SEQ ID NO: 5026 - DNA, 38 bp, Artificial Sequence
  Probe
cgcgggagaccggggttcaattccccgacggggaggtg

SEQ ID NO: 5027 - DNA, 29 bp, Artificial Sequence
  Probe
cgcgggagaccggggttcgattccccgac

SEQ ID NO: 5028 - DNA, 36 bp, Artificial Sequence
  Probe
cgcgggagaccggggttcgattccccgacggggaga

SEQ ID NO: 5029 - DNA, 37 bp, Artificial Sequence
  Probe
cgcgggagaccggggttcgattccccgacggggagaa

SEQ ID NO: 5030 - DNA, 38 bp, Artificial Sequence
  Probe
cgcgggagaccggggttcgattccccgacggggagaaa

SEQ ID NO: 5031 - DNA, 37 bp, Artificial Sequence
  Probe
cgcgggagaccggggttcgattccccgacggggagac

SEQ ID NO: 5032 - DNA, 38 bp, Artificial Sequence
  Probe
cgcgggagaccggggttcgattccccgacggggagacg

SEQ ID NO: 5033 - DNA, 38 bp, Artificial Sequence
  Probe
cgcgggagaccggggttcgattccccgacggggagagt

SEQ ID NO: 5034 - DNA, 36 bp, Artificial Sequence
  Probe
cgcgggagaccggggttcgattccccgacggggagg

SEQ ID NO: 5035 - DNA, 37 bp, Artificial Sequence
  Probe
cgcgggagaccggggttcgattccccgacggggagga

SEQ ID NO: 5036 - DNA, 37 bp, Artificial Sequence
  Probe
cgcgggagaccggggttcgattccccgacggggaggc

SEQ ID NO: 5037 - DNA, 38 bp, Artificial Sequence
  Probe
cgcgggagaccggggttcgattccccgacggggaggca

SEQ ID NO: 5038 - DNA, 39 bp, Artificial Sequence
  Probe
cgcgggagaccggggttcgattccccgacggggaggcac

SEQ ID NO: 5039 - DNA, 38 bp, Artificial Sequence
  Probe
cgcgggagaccggggttcgattccccgacggggaggcc

SEQ ID NO: 5040 - DNA, 17 bp, Artificial Sequence
  Probe
cgcgggaggcccgggtt

SEQ ID NO: 5041 - DNA, 37 bp, Artificial Sequence
  Probe
cgcgggaggcccgggttcgattcccggccaatgcacg

SEQ ID NO: 5042 - DNA, 37 bp, Artificial Sequence
  Probe
cgcgggaggcccgggttcgattcccggccaatgcact

SEQ ID NO: 5043 - DNA, 38 bp, Artificial Sequence
  Probe
cgcgggaggcccgggttcgattcccggccaatgcagca

SEQ ID NO: 5044 - DNA, 37 bp, Artificial Sequence
  Probe
cgcgggaggcccgggttcgattcccggcccatgcagc

SEQ ID NO: 5045 - DNA, 29 bp, Artificial Sequence
  Probe
cgcgggttcgatccccgtacgggccacga

SEQ ID NO: 5046 - DNA, 29 bp, Artificial Sequence
  Probe
cgcgggttcgatccccgtacgggccactg

SEQ ID NO: 5047 - DNA, 25 bp, Artificial Sequence
  Probe
cgctggtgtagtggtatcatgcaag

SEQ ID NO: 5048 - DNA, 29 bp, Artificial Sequence
  Probe
cgctggttcgaatccggctcgaaggacga

SEQ ID NO: 5049 - DNA, 29 bp, Artificial Sequence
  Probe
cgctggttcgattccggctcgaaggaagt

SEQ ID NO: 5050 - DNA, 27 bp, Artificial Sequence
  Probe
cgctggttcgattccggctcgaaggac

SEQ ID NO: 5051 - DNA, 28 bp, Artificial Sequence
  Probe
cgctggttcgattccggctcgaaggact

SEQ ID NO: 5052 - DNA, 29 bp, Artificial Sequence
  Probe
cgctggttcgattccggctcgaaggactt

SEQ ID NO: 5053 - DNA, 29 bp, Artificial Sequence
  Probe
cgctggttcgattccggctcgaaggagac

SEQ ID NO: 5054 - DNA, 29 bp, Artificial Sequence
  Probe
cgctggttcgattccggctcgaaggagct

SEQ ID NO: 5055 - DNA, 40 bp, Artificial Sequence
  Probe
cggaagcgtgctgggcccataacccagaggtcgatggatc

SEQ ID NO: 5056 - DNA, 22 bp, Artificial Sequence
  Probe
cggagatgaaaacctttttcca

SEQ ID NO: 5057 - DNA, 24 bp, Artificial Sequence
  Probe
cggagatgaaaacctttttccaag

SEQ ID NO: 5058 - DNA, 25 bp, Artificial Sequence
  Probe
cggagatgaaaacctttttccaagg

SEQ ID NO: 5059 - DNA, 29 bp, Artificial Sequence
  Probe
cggagatgaaaacctttttccaaggacaa

SEQ ID NO: 5060 - DNA, 30 bp, Artificial Sequence
  Probe
cggagatgaaaacctttttccaaggacaaa

SEQ ID NO: 5061 - DNA, 31 bp, Artificial Sequence
  Probe
cggagatgaaaacctttttccaaggacaaat

SEQ ID NO: 5062 - DNA, 32 bp, Artificial Sequence
  Probe
cggagatgaaaacctttttccaaggacaaatc

SEQ ID NO: 5063 - DNA, 23 bp, Artificial Sequence
  Probe
cggatcagaagattgagggttcg

SEQ ID NO: 5064 - DNA, 23 bp, Artificial Sequence
  Probe
cggcccgggttcgactcccggtg

SEQ ID NO: 5065 - DNA, 29 bp, Artificial Sequence
  Probe
cggcccgggttcgactcccggtgtgggaa

SEQ ID NO: 5066 - DNA, 31 bp, Artificial Sequence
  Probe
cggcccgggttcgactcccggtgtgggaacg

SEQ ID NO: 5067 - DNA, 32 bp, Artificial Sequence
  Probe
cggcccgggttcgactcccggtgtgggaacgc

SEQ ID NO: 5068 - DNA, 23 bp, Artificial Sequence
  Probe
cggcccgggttcgattcccggtc

SEQ ID NO: 5069 - DNA, 29 bp, Artificial Sequence
  Probe
cggcccgggttcgattcccggtcagggaa

SEQ ID NO: 5070 - DNA, 30 bp, Artificial Sequence
  Probe
cggcccgggttcgattcccggtcagggaaa

SEQ ID NO: 5071 - DNA, 30 bp, Artificial Sequence
  Probe
cggcccgggttcgattcccggtcagggaag

SEQ ID NO: 5072 - DNA, 31 bp, Artificial Sequence
  Probe
cggcccgggttcgattcccggtcagggaagc

SEQ ID NO: 5073 - DNA, 30 bp, Artificial Sequence
  Probe
cggcccgggttcgattcccggtcagggaat

SEQ ID NO: 5074 - DNA, 32 bp, Artificial Sequence
  Probe
cggcccgggttcgattcccggtcagggaattg

SEQ ID NO: 5075 - DNA, 27 bp, Artificial Sequence
  Probe
cggctagctcagtcggtagagcatgag

SEQ ID NO: 5076 - DNA, 29 bp, Artificial Sequence
  Probe
cgggagaccggggttcaattccccgacgg

SEQ ID NO: 5077 - DNA, 36 bp, Artificial Sequence
  Probe
cgggagaccggggttcaattccccgacggggaggtg

SEQ ID NO: 5078 - DNA, 27 bp, Artificial Sequence
  Probe
cgggagaccggggttcgattccccgac

SEQ ID NO: 5079 - DNA, 34 bp, Artificial Sequence
  Probe
cgggagaccggggttcgattccccgacggggaga

SEQ ID NO: 5080 - DNA, 36 bp, Artificial Sequence
  Probe
cgggagaccggggttcgattccccgacggggagaaa

SEQ ID NO: 5081 - DNA, 35 bp, Artificial Sequence
  Probe
cgggagaccggggttcgattccccgacggggagac

SEQ ID NO: 5082 - DNA, 34 bp, Artificial Sequence
  Probe
cgggagaccggggttcgattccccgacggggagg

SEQ ID NO: 5083 - DNA, 35 bp, Artificial Sequence
  Probe
cgggagaccggggttcgattccccgacggggaggc

SEQ ID NO: 5084 - DNA, 36 bp, Artificial Sequence
  Probe
cgggagaccggggttcgattccccgacggggaggca

SEQ ID NO: 5085 - DNA, 36 bp, Artificial Sequence
  Probe
cgggagaccggggttcgattccccgacggggaggcc

SEQ ID NO: 5086 - DNA, 33 bp, Artificial Sequence
  Probe
cgggaggcccgggttcgattcccggccaatgca

SEQ ID NO: 5087 - DNA, 33 bp, Artificial Sequence
  Probe
cgggaggcccgggttcgattcccggcccatgca

SEQ ID NO: 5088 - DNA, 45 bp, Artificial Sequence
  Probe
cgggcccataccccgaaaatgttggttatacccttcccgtactaa

SEQ ID NO: 5089 - DNA, 20 bp, Artificial Sequence
  Probe
cgggctcacatcaccccata

SEQ ID NO: 5090 - DNA, 24 bp, Artificial Sequence
  Probe
cgggctcacatcaccccataaaca

SEQ ID NO: 5091 - DNA, 26 bp, Artificial Sequence
  Probe
cgggctcacatcaccccataaacaaa

SEQ ID NO: 5092 - DNA, 27 bp, Artificial Sequence
  Probe
cgggctcacatcaccccataaacaaat

SEQ ID NO: 5093 - DNA, 16 bp, Artificial Sequence
  Probe
cggggcacaataattt

SEQ ID NO: 5094 - DNA, 28 bp, Artificial Sequence
  Probe
cggggttcgattccccgacggggaggca

SEQ ID NO: 5095 - DNA, 18 bp, Artificial Sequence
  Probe
cgggtgcgagaggtcccg

SEQ ID NO: 5096 - DNA, 19 bp, Artificial Sequence
  Probe
cgggtgcgagaggtcccgg

SEQ ID NO: 5097 - DNA, 27 bp, Artificial Sequence
  Probe
cgggttcaatccccggcacctccacca

SEQ ID NO: 5098 - DNA, 27 bp, Artificial Sequence
  Probe
cgggttcaattcccggtcagggaacca

SEQ ID NO: 5099 - DNA, 27 bp, Artificial Sequence
  Probe
cgggttcgactcccggtgtgggaacgc

SEQ ID NO: 5100 - DNA, 27 bp, Artificial Sequence
  Probe
cgggttcgatccccagcatctccagtg

SEQ ID NO: 5101 - DNA, 27 bp, Artificial Sequence
  Probe
cgggttcgatccccggcatctccattg

SEQ ID NO: 5102 - DNA, 27 bp, Artificial Sequence
  Probe
cgggttcgattcccggtcagggaattg

SEQ ID NO: 5103 - DNA, 27 bp, Artificial Sequence
  Probe
cgggttcgattcccggtcatggaacca

SEQ ID NO: 5104 - DNA, 49 bp, Artificial Sequence
  Probe
cggtaatcgcataaaacttaaaactttacagtcagaggttcaattcctc

SEQ ID NO: 5105 - DNA, 20 bp, Artificial Sequence
  Probe
cggtagagcatcagactttt

SEQ ID NO: 5106 - DNA, 26 bp, Artificial Sequence
  Probe
cggtagagcatgggactcttaatccc

SEQ ID NO: 5107 - DNA, 33 bp, Artificial Sequence
  Probe
cggtagagcatgggactcttaatcccagggtcg

SEQ ID NO: 5108 - DNA, 22 bp, Artificial Sequence
  Probe
cgtagtgtagtggttatcacgt

SEQ ID NO: 5109 - DNA, 24 bp, Artificial Sequence
  Probe
cgtagtgtagtggttatcacgttc

SEQ ID NO: 5110 - DNA, 26 bp, Artificial Sequence
  Probe
cgtagtgtagtggttatcacgttcgc

SEQ ID NO: 5111 - DNA, 28 bp, Artificial Sequence
  Probe
cgtagtgtagtggttatcacgttcgcct

SEQ ID NO: 5112 - DNA, 50 bp, Artificial Sequence
  Probe
cgtagtgtagtggttatcacgttcgcctaacacgcgaaaggtccccggtt

SEQ ID NO: 5113 - DNA, 50 bp, Artificial Sequence
  Probe
cgtagtgtagtggttatcacgttcgcctcacacgcgaaaggtccccggtt

SEQ ID NO: 5114 - DNA, 24 bp, Artificial Sequence
  Probe
cgtatagtggttagtactctgcgt

SEQ ID NO: 5115 - DNA, 27 bp, Artificial Sequence
  Probe
cgtatagtggttagtactctgcgttgt

SEQ ID NO: 5116 - DNA, 27 bp, Artificial Sequence
  Probe
cgtgagttcgagcctcacacggggcag

SEQ ID NO: 5117 - DNA, 29 bp, Artificial Sequence
  Probe
cgtgagttcgatcctcacacggggcacaa

SEQ ID NO: 5118 - DNA, 26 bp, Artificial Sequence
  Probe
cgtgatcgtatagtggttagtactct

SEQ ID NO: 5119 - DNA, 27 bp, Artificial Sequence
  Probe
cgtgatcgtatagtggttagtactctg

SEQ ID NO: 5120 - DNA, 29 bp, Artificial Sequence
  Probe
cgtgatcgtatagtggttagtactctgcg

SEQ ID NO: 5121 - DNA, 37 bp, Artificial Sequence
  Probe
cgtgatcgtatagtggttagtactctgcgttgtggcc

SEQ ID NO: 5122 - DNA, 25 bp, Artificial Sequence
  Probe
cgtggttgtagtccgtgcgagaata

SEQ ID NO: 5123 - DNA, 27 bp, Artificial Sequence
  Probe
cgtggttgtagtccgtgcgagaataat

SEQ ID NO: 5124 - DNA, 28 bp, Artificial Sequence
  Probe
cgtggttgtagtccgtgcgagaataatg

SEQ ID NO: 5125 - DNA, 50 bp, Artificial Sequence
  Probe
cgttaacttccaattaactagttttgacaacattcaaaaaagagtaataa

SEQ ID NO: 5126 - DNA, 25 bp, Artificial Sequence
  Probe
cgttagtatagtggtgagtatcccc

SEQ ID NO: 5127 - DNA, 33 bp, Artificial Sequence
  Probe
cgttagtatagtggtgagtatccccgcctgtca

SEQ ID NO: 5128 - DNA, 32 bp, Artificial Sequence
  Probe
cgttggtggtatagtggtgagcatagctgcct

SEQ ID NO: 5129 - DNA, 35 bp, Artificial Sequence
  Probe
cgttggtggtatagtggtgagcatagctgccttcc

SEQ ID NO: 5130 - DNA, 35 bp, Artificial Sequence
  Probe
cgttggtggtatagtggttagcatagctgccttcc

SEQ ID NO: 5131 - DNA, 29 bp, Artificial Sequence
  Probe
ctaaacctagccccaaacccactccacct

SEQ ID NO: 5132 - DNA, 15 bp, Artificial Sequence
  Probe
ctaaagacaggggtt

SEQ ID NO: 5133 - DNA, 22 bp, Artificial Sequence
  Probe
ctaaagacaggggttaggcctc

SEQ ID NO: 5134 - DNA, 23 bp, Artificial Sequence
  Probe
ctaaagacaggggttaggcctct

SEQ ID NO: 5135 - DNA, 24 bp, Artificial Sequence
  Probe
ctaaagacaggggttaggcctctt

SEQ ID NO: 5136 - DNA, 25 bp, Artificial Sequence
  Probe
ctaaagacaggggttaggcctcttt

SEQ ID NO: 5137 - DNA, 26 bp, Artificial Sequence
  Probe
ctaaagacaggggttaggcctctttt

SEQ ID NO: 5138 - DNA, 27 bp, Artificial Sequence
  Probe
ctaaagacaggggttaggcctcttttt

SEQ ID NO: 5139 - DNA, 28 bp, Artificial Sequence
  Probe
ctaaagacaggggttaggcctcttttta

SEQ ID NO: 5140 - DNA, 29 bp, Artificial Sequence
  Probe
ctaaagacaggggttaggcctctttttac

SEQ ID NO: 5141 - DNA, 30 bp, Artificial Sequence
  Probe
ctaaagacaggggttaggcctctttttacc

SEQ ID NO: 5142 - DNA, 31 bp, Artificial Sequence
  Probe
ctaaagacaggggttaggcctctttttacca

SEQ ID NO: 5143 - DNA, 32 bp, Artificial Sequence
  Probe
ctaaagacaggggttaggcctctttttaccag

SEQ ID NO: 5144 - DNA, 33 bp, Artificial Sequence
  Probe
ctaaagacaggggttaggcctctttttaccagc

SEQ ID NO: 5145 - DNA, 34 bp, Artificial Sequence
  Probe
ctaaagacaggggttaggcctctttttaccagct

SEQ ID NO: 5146 - DNA, 35 bp, Artificial Sequence
  Probe
ctaaagacaggggttaggcctctttttaccagctc

SEQ ID NO: 5147 - DNA, 36 bp, Artificial Sequence
  Probe
ctaaagacaggggttaggcctctttttaccagctcc

SEQ ID NO: 5148 - DNA, 37 bp, Artificial Sequence
  Probe
ctaaagacaggggttaggcctctttttaccagctccg

SEQ ID NO: 5149 - DNA, 23 bp, Artificial Sequence
  Probe
ctaaataagctatcgggcccata

SEQ ID NO: 5150 - DNA, 24 bp, Artificial Sequence
  Probe
ctaaataagctatcgggcccatac

SEQ ID NO: 5151 - DNA, 32 bp, Artificial Sequence
  Probe
ctaaataagctatcgggcccataccccgaaaa

SEQ ID NO: 5152 - DNA, 33 bp, Artificial Sequence
  Probe
ctaaataagctatcgggcccataccccgaaaat

SEQ ID NO: 5153 - DNA, 22 bp, Artificial Sequence
  Probe
ctaaatcctatatatcttaatg

SEQ ID NO: 5154 - DNA, 20 bp, Artificial Sequence
  Probe
ctaacaacatggctttctca

SEQ ID NO: 5155 - DNA, 22 bp, Artificial Sequence
  Probe
ctaacaacatggctttctcaac

SEQ ID NO: 5156 - DNA, 23 bp, Artificial Sequence
  Probe
ctaacaacatggctttctcaact

SEQ ID NO: 5157 - DNA, 19 bp, Artificial Sequence
  Probe
ctaacacgcgaaaggtccc

SEQ ID NO: 5158 - DNA, 33 bp, Artificial Sequence
  Probe
ctaactcatgcccccatgtctaacaacatggct

SEQ ID NO: 5159 - DNA, 34 bp, Artificial Sequence
  Probe
ctaactcatgcccccatgtctaacaacatggctt

SEQ ID NO: 5160 - DNA, 35 bp, Artificial Sequence
  Probe
ctaactcatgcccccatgtctaacaacatggcttt

SEQ ID NO: 5161 - DNA, 36 bp, Artificial Sequence
  Probe
ctaactcatgcccccatgtctaacaacatggctttc

SEQ ID NO: 5162 - DNA, 37 bp, Artificial Sequence
  Probe
ctaactcatgcccccatgtctaacaacatggctttct

SEQ ID NO: 5163 - DNA, 38 bp, Artificial Sequence
  Probe
ctaactcatgcccccatgtctaacaacatggctttctc

SEQ ID NO: 5164 - DNA, 39 bp, Artificial Sequence
  Probe
ctaactcatgcccccatgtctaacaacatggctttctca

SEQ ID NO: 5165 - DNA, 40 bp, Artificial Sequence
  Probe
ctaactcatgcccccatgtctaacaacatggctttctcaa

SEQ ID NO: 5166 - DNA, 41 bp, Artificial Sequence
  Probe
ctaactcatgcccccatgtctaacaacatggctttctcaac

SEQ ID NO: 5167 - DNA, 42 bp, Artificial Sequence
  Probe
ctaactcatgcccccatgtctaacaacatggctttctcaact

SEQ ID NO: 5168 - DNA, 50 bp, Artificial Sequence
  Probe
ctaacttagcattaaccttttaagttaaagattaagagaaccaacacctc

SEQ ID NO: 5169 - DNA, 24 bp, Artificial Sequence
  Probe
ctaagccagggattgtgggttcga

SEQ ID NO: 5170 - DNA, 32 bp, Artificial Sequence
  Probe
ctaagtgtttgtgggtttaagtcccattggtc

SEQ ID NO: 5171 - DNA, 33 bp, Artificial Sequence
  Probe
ctaagtgtttgtgggtttaagtcccattggtct

SEQ ID NO: 5172 - DNA, 37 bp, Artificial Sequence
  Probe
ctaagtgtttgtgggtttaagtcccattggtctagta

SEQ ID NO: 5173 - DNA, 38 bp, Artificial Sequence
  Probe
ctaagtgtttgtgggtttaagtcccattggtctagtaa

SEQ ID NO: 5174 - DNA, 18 bp, Artificial Sequence
  Probe
ctaatggataaggcattg

SEQ ID NO: 5175 - DNA, 38 bp, Artificial Sequence
  Probe
ctaatggtggagttaaagactttttctctgatttgtcc

SEQ ID NO: 5176 - DNA, 39 bp, Artificial Sequence
  Probe
ctaatggtggagttaaagactttttctctgatttgtcct

SEQ ID NO: 5177 - DNA, 41 bp, Artificial Sequence
  Probe
ctaatggtggagttaaagactttttctctgatttgtccttg

SEQ ID NO: 5178 - DNA, 23 bp, Artificial Sequence
  Probe
ctagccccaaacccactccacct

SEQ ID NO: 5179 - DNA, 24 bp, Artificial Sequence
  Probe
ctagcggttaggattcctggtttt

SEQ ID NO: 5180 - DNA, 27 bp, Artificial Sequence
  Probe
ctagctcagtcggtagagcatgagact

SEQ ID NO: 5181 - DNA, 29 bp, Artificial Sequence
  Probe
ctagctcagtcggtagagcatgagactct

SEQ ID NO: 5182 - DNA, 27 bp, Artificial Sequence
  Probe
ctagctcagtcggtagagcatgggact

SEQ ID NO: 5183 - DNA, 29 bp, Artificial Sequence
  Probe
ctagctcagtcggtagagcatgggactct

SEQ ID NO: 5184 - DNA, 31 bp, Artificial Sequence
  Probe
ctagctcagtcggtagagcatgggactctta

SEQ ID NO: 5185 - DNA, 23 bp, Artificial Sequence
  Probe
ctagtggttaggattcggcgctc

SEQ ID NO: 5186 - DNA, 24 bp, Artificial Sequence
  Probe
ctagtggttaggattcggcgctct

SEQ ID NO: 5187 - DNA, 23 bp, Artificial Sequence
  Probe
ctatccattggtcttaggcccca

SEQ ID NO: 5188 - DNA, 24 bp, Artificial Sequence
  Probe
ctatccattggtcttaggccccaa

SEQ ID NO: 5189 - DNA, 25 bp, Artificial Sequence
  Probe
ctatccattggtcttaggccccaaa

SEQ ID NO: 5190 - DNA, 27 bp, Artificial Sequence
  Probe
ctatccattggtcttaggccccaaaaa

SEQ ID NO: 5191 - DNA, 50 bp, Artificial Sequence
  Probe
ctatccattggtcttaggccccaaaaattttggtgcaactccaaataaaa

SEQ ID NO: 5192 - DNA, 22 bp, Artificial Sequence
  Probe
ctatcgggcccataccccgaaa

SEQ ID NO: 5193 - DNA, 23 bp, Artificial Sequence
  Probe
ctatcgggcccataccccgaaaa

SEQ ID NO: 5194 - DNA, 24 bp, Artificial Sequence
  Probe
ctatcgggcccataccccgaaaat

SEQ ID NO: 5195 - DNA, 25 bp, Artificial Sequence
  Probe
ctatcgggcccataccccgaaaatg

SEQ ID NO: 5196 - DNA, 28 bp, Artificial Sequence
  Probe
ctatcgggcccataccccgaaaatgttg

SEQ ID NO: 5197 - DNA, 29 bp, Artificial Sequence
  Probe
ctatcgggcccataccccgaaaatgttgg

SEQ ID NO: 5198 - DNA, 32 bp, Artificial Sequence
  Probe
ctatcgggcccataccccgaaaatgttggtta

SEQ ID NO: 5199 - DNA, 43 bp, Artificial Sequence
  Probe
ctatcgggcccataccccgaaaatgttggttatacccttcccg

SEQ ID NO: 5200 - DNA, 50 bp, Artificial Sequence
  Probe
ctatcgggcccataccccgaaaatgttggttatacccttcccgtactaat

SEQ ID NO: 5201 - DNA, 49 bp, Artificial Sequence
  Probe
ctcaaagcaatacactgaaaatgtttagacgggctcacatcaccccata

SEQ ID NO: 5202 - DNA, 50 bp, Artificial Sequence
  Probe
ctcaaagcaatacactgaaaatgtttagacgggctcacatcaccccataa

SEQ ID NO: 5203 - DNA, 23 bp, Artificial Sequence
  Probe
ctcacaagaactgctaactcatg

SEQ ID NO: 5204 - DNA, 24 bp, Artificial Sequence
  Probe
ctcacaagaactgctaactcatgc

SEQ ID NO: 5205 - DNA, 25 bp, Artificial Sequence
  Probe
ctcacaagaactgctaactcatgcc

SEQ ID NO: 5206 - DNA, 26 bp, Artificial Sequence
  Probe
ctcacaagaactgctaactcatgccc

SEQ ID NO: 5207 - DNA, 29 bp, Artificial Sequence
  Probe
ctcacaagaactgctaactcatgccccca

SEQ ID NO: 5208 - DNA, 48 bp, Artificial Sequence
  Probe
ctcacaagaactgctaactcatgcccccatgtctaacaacatggcttt

SEQ ID NO: 5209 - DNA, 22 bp, Artificial Sequence
  Probe
ctcacacggggcacaataattt

SEQ ID NO: 5210 - DNA, 17 bp, Artificial Sequence
  Probe
ctcacatcaccccataa

SEQ ID NO: 5211 - DNA, 20 bp, Artificial Sequence
  Probe
ctcacatcaccccataaaca

SEQ ID NO: 5212 - DNA, 22 bp, Artificial Sequence
  Probe
ctcacatcaccccataaacaaa

SEQ ID NO: 5213 - DNA, 23 bp, Artificial Sequence
  Probe
ctcacatcaccccataaacaaat

SEQ ID NO: 5214 - DNA, 22 bp, Artificial Sequence
  Probe
ctcaccgccgcggcccgggttc

SEQ ID NO: 5215 - DNA, 20 bp, Artificial Sequence
  Probe
ctcacctggagcatgttttc

SEQ ID NO: 5216 - DNA, 21 bp, Artificial Sequence
  Probe
ctcacctggagcatgttttct

SEQ ID NO: 5217 - DNA, 22 bp, Artificial Sequence
  Probe
ctcacctggagcatgttttctt

SEQ ID NO: 5218 - DNA, 33 bp, Artificial Sequence
  Probe
ctcagggatgggttcgattctcatagtcctaga

SEQ ID NO: 5219 - DNA, 34 bp, Artificial Sequence
  Probe
ctcagggatgggttcgattctcatagtcctagaa

SEQ ID NO: 5220 - DNA, 35 bp, Artificial Sequence
  Probe
ctcagggatgggttcgattctcatagtcctagaaa

SEQ ID NO: 5221 - DNA, 17 bp, Artificial Sequence
  Probe
ctcagggtcgtgggttc

SEQ ID NO: 5222 - DNA, 32 bp, Artificial Sequence
  Probe
ctcagggtcgtgggttcgagccccacgttggg

SEQ ID NO: 5223 - DNA, 19 bp, Artificial Sequence
  Probe
ctcagtcggtagagcatca

SEQ ID NO: 5224 - DNA, 22 bp, Artificial Sequence
  Probe
ctcagtcggtagagcatcagac

SEQ ID NO: 5225 - DNA, 26 bp, Artificial Sequence
  Probe
ctcagtcggtagagcatcagactttt

SEQ ID NO: 5226 - DNA, 19 bp, Artificial Sequence
  Probe
ctcagtcggtagagcatga

SEQ ID NO: 5227 - DNA, 25 bp, Artificial Sequence
  Probe
ctcagtcggtagagcatgagactct

SEQ ID NO: 5228 - DNA, 24 bp, Artificial Sequence
  Probe
ctcagtcggtagagcatgggactc

SEQ ID NO: 5229 - DNA, 25 bp, Artificial Sequence
  Probe
ctcagtcggtagagcatgggactct

SEQ ID NO: 5230 - DNA, 26 bp, Artificial Sequence
  Probe
ctcagtcggtagagcatgggactctt

SEQ ID NO: 5231 - DNA, 34 bp, Artificial Sequence
  Probe
ctcatcagtatagtggtgagtatccccgcctgtc

SEQ ID NO: 5232 - DNA, 18 bp, Artificial Sequence
  Probe
ctcatgcccccatgtcta

SEQ ID NO: 5233 - DNA, 19 bp, Artificial Sequence
  Probe
ctcatgcccccatgtctaa

SEQ ID NO: 5234 - DNA, 28 bp, Artificial Sequence
  Probe
ctcatgcccccatgtctaacaacatggc

SEQ ID NO: 5235 - DNA, 29 bp, Artificial Sequence
  Probe
ctcatgcccccatgtctaacaacatggct

SEQ ID NO: 5236 - DNA, 30 bp, Artificial Sequence
  Probe
ctcatgcccccatgtctaacaacatggctt

SEQ ID NO: 5237 - DNA, 31 bp, Artificial Sequence
  Probe
ctcatgcccccatgtctaacaacatggcttt

SEQ ID NO: 5238 - DNA, 32 bp, Artificial Sequence
  Probe
ctcatgcccccatgtctaacaacatggctttc

SEQ ID NO: 5239 - DNA, 33 bp, Artificial Sequence
  Probe
ctcatgcccccatgtctaacaacatggctttct

SEQ ID NO: 5240 - DNA, 34 bp, Artificial Sequence
  Probe
ctcatgcccccatgtctaacaacatggctttctc

SEQ ID NO: 5241 - DNA, 35 bp, Artificial Sequence
  Probe
ctcatgcccccatgtctaacaacatggctttctca

SEQ ID NO: 5242 - DNA, 36 bp, Artificial Sequence
  Probe
ctcatgcccccatgtctaacaacatggctttctcaa

SEQ ID NO: 5243 - DNA, 37 bp, Artificial Sequence
  Probe
ctcatgcccccatgtctaacaacatggctttctcaac

SEQ ID NO: 5244 - DNA, 38 bp, Artificial Sequence
  Probe
ctcatgcccccatgtctaacaacatggctttctcaact

SEQ ID NO: 5245 - DNA, 32 bp, Artificial Sequence
  Probe
ctcattaaattatgataatcatatttaccaaa

SEQ ID NO: 5246 - DNA, 33 bp, Artificial Sequence
  Probe
ctcattaaattatgataatcatatttaccaaat

SEQ ID NO: 5247 - DNA, 34 bp, Artificial Sequence
  Probe
ctcattaaattatgataatcatatttaccaaatg

SEQ ID NO: 5248 - DNA, 50 bp, Artificial Sequence
  Probe
ctccagtcatttcgatggcgtgggttcgaatcccaccgctgccacacctc

SEQ ID NO: 5249 - DNA, 50 bp, Artificial Sequence
  Probe
ctccagtctcttcgggggcgtgggttcgaatcccaccgctgccaggtgct

SEQ ID NO: 5250 - DNA, 34 bp, Artificial Sequence
  Probe
ctcccacatggtctagcggttaggattcctggtt

SEQ ID NO: 5251 - DNA, 16 bp, Artificial Sequence
  Probe
ctcccgccttttttcc

SEQ ID NO: 5252 - DNA, 17 bp, Artificial Sequence
  Probe
ctcccgccttttttccc

SEQ ID NO: 5253 - DNA, 18 bp, Artificial Sequence
  Probe
ctcccgccttttttcccg

SEQ ID NO: 5254 - DNA, 19 bp, Artificial Sequence
  Probe
ctcccgccttttttcccgg

SEQ ID NO: 5255 - DNA, 20 bp, Artificial Sequence
  Probe
ctcccgccttttttcccggc

SEQ ID NO: 5256 - DNA, 21 bp, Artificial Sequence
  Probe
ctcccgccttttttcccggcg

SEQ ID NO: 5257 - DNA, 22 bp, Artificial Sequence
  Probe
ctcccgccttttttcccggcgg

SEQ ID NO: 5258 - DNA, 23 bp, Artificial Sequence
  Probe
ctcccgccttttttcccggcggc

SEQ ID NO: 5259 - DNA, 24 bp, Artificial Sequence
  Probe
ctcccgccttttttcccggcggcg

SEQ ID NO: 5260 - DNA, 25 bp, Artificial Sequence
  Probe
ctcccgccttttttcccggcggcgg

SEQ ID NO: 5261 - DNA, 26 bp, Artificial Sequence
  Probe
ctcccgccttttttcccggcggcggg

SEQ ID NO: 5262 - DNA, 27 bp, Artificial Sequence
  Probe
ctcccgccttttttcccggcggcggga

SEQ ID NO: 5263 - DNA, 28 bp, Artificial Sequence
  Probe
ctcccgccttttttcccggcggcgggag

SEQ ID NO: 5264 - DNA, 29 bp, Artificial Sequence
  Probe
ctcccgccttttttcccggcggcgggaga

SEQ ID NO: 5265 - DNA, 30 bp, Artificial Sequence
  Probe
ctcccgccttttttcccggcggcgggagaa

SEQ ID NO: 5266 - DNA, 17 bp, Artificial Sequence
  Probe
ctcccggtgtgggaacg

SEQ ID NO: 5267 - DNA, 34 bp, Artificial Sequence
  Probe
ctccctggtggtctagtggttaggattcggcgct

SEQ ID NO: 5268 - DNA, 50 bp, Artificial Sequence
  Probe
ctccgaggtgattttcatattgaattgcaaattcgaagaagcagcttcaa

SEQ ID NO: 5269 - DNA, 15 bp, Artificial Sequence
  Probe
ctccgtgccacctat

SEQ ID NO: 5270 - DNA, 37 bp, Artificial Sequence
  Probe
ctcctcgttagtatagtggtgagtatccccgcctgtc

SEQ ID NO: 5271 - DNA, 36 bp, Artificial Sequence
  Probe
ctcctcgttagtatagtggttagtatccccgcctgt

SEQ ID NO: 5272 - DNA, 27 bp, Artificial Sequence
  Probe
ctcgttagtatagtggtgagtatcccc

SEQ ID NO: 5273 - DNA, 37 bp, Artificial Sequence
  Probe
ctcgttagtatagtggtgagtatccccgcctgtcacg

SEQ ID NO: 5274 - DNA, 33 bp, Artificial Sequence
  Probe
ctcgttagtatagtggttagtatccccgcctgt

SEQ ID NO: 5275 - DNA, 44 bp, Artificial Sequence
  Probe
ctctgaatccagcgatccgagttcaaatctcggtggaacctgca

SEQ ID NO: 5276 - DNA, 50 bp, Artificial Sequence
  Probe
ctctggactctgaatccagcgatccgagttcaaatctcggtggaacctgc

SEQ ID NO: 5277 - DNA, 20 bp, Artificial Sequence
  Probe
ctcttaatcccagggtcgtg

SEQ ID NO: 5278 - DNA, 50 bp, Artificial Sequence
  Probe
ctcttttagtataaatagtaccgttaacttccaattaactagttttgaca

SEQ ID NO: 5279 - DNA, 24 bp, Artificial Sequence
  Probe
ctgaaaatgtttagacgggctcac

SEQ ID NO: 5280 - DNA, 42 bp, Artificial Sequence
  Probe
ctgaaaatgtttagacgggctcacatcaccccataaacaaat

SEQ ID NO: 5281 - DNA, 43 bp, Artificial Sequence
  Probe
ctgaaaatgtttagacgggctcacatcaccccataaacaaata

SEQ ID NO: 5282 - DNA, 44 bp, Artificial Sequence
  Probe
ctgaaaatgtttagacgggctcacatcaccccataaacaaatag

SEQ ID NO: 5283 - DNA, 18 bp, Artificial Sequence
  Probe
ctgaaggtcctgagttcg

SEQ ID NO: 5284 - DNA, 37 bp, Artificial Sequence
  Probe
ctgaaggtcctgagttcgaacctcagagggggcagct

SEQ ID NO: 5285 - DNA, 17 bp, Artificial Sequence
  Probe
ctgaaggtcgtgagttc

SEQ ID NO: 5286 - DNA, 34 bp, Artificial Sequence
  Probe
ctgaaggtcgtgagttcgatcctcacacggggca

SEQ ID NO: 5287 - DNA, 37 bp, Artificial Sequence
  Probe
ctgaaggtcgtgagttcgatcctcacacggggcacaa

SEQ ID NO: 5288 - DNA, 16 bp, Artificial Sequence
  Probe
ctgaatccagcgatcc

SEQ ID NO: 5289 - DNA, 17 bp, Artificial Sequence
  Probe
ctgaatccagcgatccg

SEQ ID NO: 5290 - DNA, 41 bp, Artificial Sequence
  Probe
ctgaatccagcgatccgagttcaaatctcggtggaacctgc

SEQ ID NO: 5291 - DNA, 42 bp, Artificial Sequence
  Probe
ctgaatccagcgatccgagttcaaatctcggtggaacctgca

SEQ ID NO: 5292 - DNA, 41 bp, Artificial Sequence
  Probe
ctgaatccagcgatccgagttcaaatctcggtggaacctgt

SEQ ID NO: 5293 - DNA, 41 bp, Artificial Sequence
  Probe
ctgaatccagcgatccgagttcaaatctcggtggaaccttt

SEQ ID NO: 5294 - DNA, 22 bp, Artificial Sequence
  Probe
ctgacaacagaggcttacgacc

SEQ ID NO: 5295 - DNA, 24 bp, Artificial Sequence
  Probe
ctgacaacagaggcttacgacccc

SEQ ID NO: 5296 - DNA, 26 bp, Artificial Sequence
  Probe
ctgacaacagaggcttacgacccctt

SEQ ID NO: 5297 - DNA, 29 bp, Artificial Sequence
  Probe
ctgacaacagaggcttacgaccccttatt

SEQ ID NO: 5298 - DNA, 34 bp, Artificial Sequence
  Probe
ctgacaacagaggcttacgaccccttatttaccg

SEQ ID NO: 5299 - DNA, 35 bp, Artificial Sequence
  Probe
ctgacaacagaggcttacgaccccttatttaccga

SEQ ID NO: 5300 - DNA, 36 bp, Artificial Sequence
  Probe
ctgacaacagaggcttacgaccccttatttaccgag

SEQ ID NO: 5301 - DNA, 17 bp, Artificial Sequence
  Probe
ctgagggtccagggttc

SEQ ID NO: 5302 - DNA, 18 bp, Artificial Sequence
  Probe
ctgagggtccagggttca

SEQ ID NO: 5303 - DNA, 32 bp, Artificial Sequence
  Probe
ctgagggtccagggttcaagtccctgttcggg

SEQ ID NO: 5304 - DNA, 37 bp, Artificial Sequence
  Probe
ctgagggtccagggttcaagtccctgttcgggcggca

SEQ ID NO: 5305 - DNA, 21 bp, Artificial Sequence
  Probe
ctgagtgaagcattggactgt

SEQ ID NO: 5306 - DNA, 50 bp, Artificial Sequence
  Probe
ctgataaaagagttactttgatagagtaaataataggagcttaaaccccc

SEQ ID NO: 5307 - DNA, 33 bp, Artificial Sequence
  Probe
ctgcagctagctcagtcggtagagcatgagact

SEQ ID NO: 5308 - DNA, 30 bp, Artificial Sequence
  Probe
ctgcgtgttcgaatcacgtcggggtcaaac

SEQ ID NO: 5309 - DNA, 19 bp, Artificial Sequence
  Probe
ctgctaactcatgccccca

SEQ ID NO: 5310 - DNA, 22 bp, Artificial Sequence
  Probe
ctgctaactcatgcccccatgt

SEQ ID NO: 5311 - DNA, 23 bp, Artificial Sequence
  Probe
ctgctaactcatgcccccatgtc

SEQ ID NO: 5312 - DNA, 25 bp, Artificial Sequence
  Probe
ctgctaactcatgcccccatgtcta

SEQ ID NO: 5313 - DNA, 31 bp, Artificial Sequence
  Probe
ctgctaactcatgcccccatgtctaacaaca

SEQ ID NO: 5314 - DNA, 36 bp, Artificial Sequence
  Probe
ctgctaactcatgcccccatgtctaacaacatggct

SEQ ID NO: 5315 - DNA, 37 bp, Artificial Sequence
  Probe
ctgctaactcatgcccccatgtctaacaacatggctt

SEQ ID NO: 5316 - DNA, 38 bp, Artificial Sequence
  Probe
ctgctaactcatgcccccatgtctaacaacatggcttt

SEQ ID NO: 5317 - DNA, 39 bp, Artificial Sequence
  Probe
ctgctaactcatgcccccatgtctaacaacatggctttc

SEQ ID NO: 5318 - DNA, 40 bp, Artificial Sequence
  Probe
ctgctaactcatgcccccatgtctaacaacatggctttct

SEQ ID NO: 5319 - DNA, 41 bp, Artificial Sequence
  Probe
ctgctaactcatgcccccatgtctaacaacatggctttctc

SEQ ID NO: 5320 - DNA, 42 bp, Artificial Sequence
  Probe
ctgctaactcatgcccccatgtctaacaacatggctttctca

SEQ ID NO: 5321 - DNA, 43 bp, Artificial Sequence
  Probe
ctgctaactcatgcccccatgtctaacaacatggctttctcaa

SEQ ID NO: 5322 - DNA, 44 bp, Artificial Sequence
  Probe
ctgctaactcatgcccccatgtctaacaacatggctttctcaac

SEQ ID NO: 5323 - DNA, 45 bp, Artificial Sequence
  Probe
ctgctaactcatgcccccatgtctaacaacatggctttctcaact

SEQ ID NO: 5324 - DNA, 50 bp, Artificial Sequence
  Probe
ctgctaactcatgcccccatgtctaacaacatggctttctcaacttttaa

SEQ ID NO: 5325 - DNA, 24 bp, Artificial Sequence
  Probe
ctggggattgtgggttcgagtccc

SEQ ID NO: 5326 - DNA, 27 bp, Artificial Sequence
  Probe
ctggggattgtgggttcgagtcccatc

SEQ ID NO: 5327 - DNA, 32 bp, Artificial Sequence
  Probe
ctggggattgtgggttcgagtcccatctgggt

SEQ ID NO: 5328 - DNA, 33 bp, Artificial Sequence
  Probe
ctggtggtctagtggctaggattcggcgctttc

SEQ ID NO: 5329 - DNA, 26 bp, Artificial Sequence
  Probe
ctggtggtctagtggttaggattcgg

SEQ ID NO: 5330 - DNA, 34 bp, Artificial Sequence
  Probe
ctggtggtctagtggttaggattcggcgctctca

SEQ ID NO: 5331 - DNA, 23 bp, Artificial Sequence
  Probe
ctggtgtagtggtatcatgcaag

SEQ ID NO: 5332 - DNA, 24 bp, Artificial Sequence
  Probe
ctggtgtagtggtatcatgcaaga

SEQ ID NO: 5333 - DNA, 27 bp, Artificial Sequence
  Probe
ctggtgtagtggtatcatgcaagattc

SEQ ID NO: 5334 - DNA, 23 bp, Artificial Sequence
  Probe
ctggttcaaatccgggtgccccc

SEQ ID NO: 5335 - DNA, 29 bp, Artificial Sequence
  Probe
ctgtaaagctaacttagcattaacctttt

SEQ ID NO: 5336 - DNA, 17 bp, Artificial Sequence
  Probe
ctgtcacgcgggagacc

SEQ ID NO: 5337 - DNA, 23 bp, Artificial Sequence
  Probe
ctgtcacgcgggagaccggggtt

SEQ ID NO: 5338 - DNA, 44 bp, Artificial Sequence
  Probe
ctgtcacgcgggagaccggggttcaattccccgacggggaggtg

SEQ ID NO: 5339 - DNA, 44 bp, Artificial Sequence
  Probe
ctgtcacgcgggagaccggggttcgattccccgacggggagagt

SEQ ID NO: 5340 - DNA, 44 bp, Artificial Sequence
  Probe
ctgtcacgcgggagaccggggttcgattccccgacggggaggca

SEQ ID NO: 5341 - DNA, 50 bp, Artificial Sequence
  Probe
ctgtcacgcgggagaccggggttcgattccccgacggggaggcacagtaa

SEQ ID NO: 5342 - DNA, 22 bp, Artificial Sequence
  Probe
ctgtgctccggagttacctcgt

SEQ ID NO: 5343 - DNA, 23 bp, Artificial Sequence
  Probe
ctgtgctccggagttacctcgtt

SEQ ID NO: 5344 - DNA, 24 bp, Artificial Sequence
  Probe
ctgtgctccggagttacctcgttt

SEQ ID NO: 5345 - DNA, 44 bp, Artificial Sequence
  Probe
ctgttaactaagtgtttgtgggtttaagtcccattggtctagta

SEQ ID NO: 5346 - DNA, 45 bp, Artificial Sequence
  Probe
ctgttaactaagtgtttgtgggtttaagtcccattggtctagtaa

SEQ ID NO: 5347 - DNA, 25 bp, Artificial Sequence
  Probe
cttaaaactttacagtcagaggttc

SEQ ID NO: 5348 - DNA, 37 bp, Artificial Sequence
  Probe
cttaaaactttacagtcagaggttcaattcctcttct

SEQ ID NO: 5349 - DNA, 38 bp, Artificial Sequence
  Probe
cttaaaactttacagtcagaggttcaattcctcttctt

SEQ ID NO: 5350 - DNA, 39 bp, Artificial Sequence
  Probe
cttaaaactttacagtcagaggttcaattcctcttctta

SEQ ID NO: 5351 - DNA, 40 bp, Artificial Sequence
  Probe
cttaaaactttacagtcagaggttcaattcctcttcttaa

SEQ ID NO: 5352 - DNA, 41 bp, Artificial Sequence
  Probe
cttaaaactttacagtcagaggttcaattcctcttcttaac

SEQ ID NO: 5353 - DNA, 42 bp, Artificial Sequence
  Probe
cttaaaactttacagtcagaggttcaattcctcttcttaaca

SEQ ID NO: 5354 - DNA, 44 bp, Artificial Sequence
  Probe
cttaaaactttacagtcagaggttcaattcctcttcttaacaac

SEQ ID NO: 5355 - DNA, 45 bp, Artificial Sequence
  Probe
cttaaaactttacagtcagaggttcaattcctcttcttaacaaca

SEQ ID NO: 5356 - DNA, 22 bp, Artificial Sequence
  Probe
cttaaacccccttatttctagg

SEQ ID NO: 5357 - DNA, 23 bp, Artificial Sequence
  Probe
cttaaacccccttatttctagga

SEQ ID NO: 5358 - DNA, 18 bp, Artificial Sequence
  Probe
cttaacacaaagcaccca

SEQ ID NO: 5359 - DNA, 29 bp, Artificial Sequence
  Probe
cttaacacaaagcacccaacttacactta

SEQ ID NO: 5360 - DNA, 19 bp, Artificial Sequence
  Probe
cttaacttgaccgctctga

SEQ ID NO: 5361 - DNA, 20 bp, Artificial Sequence
  Probe
cttaacttgaccgctctgag

SEQ ID NO: 5362 - DNA, 21 bp, Artificial Sequence
  Probe
cttaacttgaccgctctgagc

SEQ ID NO: 5363 - DNA, 22 bp, Artificial Sequence
  Probe
cttaacttgaccgctctgagct

SEQ ID NO: 5364 - DNA, 17 bp, Artificial Sequence
  Probe
cttacacttaggagatt

SEQ ID NO: 5365 - DNA, 20 bp, Artificial Sequence
  Probe
cttacacttaggagatttca

SEQ ID NO: 5366 - DNA, 32 bp, Artificial Sequence
  Probe
cttacacttaggagatttcaacttaacttgac

SEQ ID NO: 5367 - DNA, 34 bp, Artificial Sequence
  Probe
cttacacttaggagatttcaacttaacttgaccg

SEQ ID NO: 5368 - DNA, 36 bp, Artificial Sequence
  Probe
cttacacttaggagatttcaacttaacttgaccgct

SEQ ID NO: 5369 - DNA, 37 bp, Artificial Sequence
  Probe
cttacacttaggagatttcaacttaacttgaccgctc

SEQ ID NO: 5370 - DNA, 41 bp, Artificial Sequence
  Probe
cttacacttaggagatttcaacttaacttgaccgctctgag

SEQ ID NO: 5371 - DNA, 42 bp, Artificial Sequence
  Probe
cttacacttaggagatttcaacttaacttgaccgctctgagc

SEQ ID NO: 5372 - DNA, 43 bp, Artificial Sequence
  Probe
cttacacttaggagatttcaacttaacttgaccgctctgagct

SEQ ID NO: 5373 - DNA, 44 bp, Artificial Sequence
  Probe
cttacacttaggagatttcaacttaacttgaccgctctgagcta

SEQ ID NO: 5374 - DNA, 50 bp, Artificial Sequence
  Probe
cttacacttaggagatttcaacttaacttgaccgctctgagctaaaccta

SEQ ID NO: 5375 - DNA, 33 bp, Artificial Sequence
  Probe
cttagcattaaccttttaagttaaagattaaga

SEQ ID NO: 5376 - DNA, 36 bp, Artificial Sequence
  Probe
cttagcattaaccttttaagttaaagattaagagaa

SEQ ID NO: 5377 - DNA, 39 bp, Artificial Sequence
  Probe
cttagcattaaccttttaagttaaagattaagagaacca

SEQ ID NO: 5378 - DNA, 41 bp, Artificial Sequence
  Probe
cttagcattaaccttttaagttaaagattaagagaaccaac

SEQ ID NO: 5379 - DNA, 42 bp, Artificial Sequence
  Probe
cttagcattaaccttttaagttaaagattaagagaaccaaca

SEQ ID NO: 5380 - DNA, 50 bp, Artificial Sequence
  Probe
cttagctgttaactaagtgtttgtgggtttaagtcccattggtctagtaa

SEQ ID NO: 5381 - DNA, 50 bp, Artificial Sequence
  Probe
cttagctttgggtgctaatggtggagttaaagactttttctctgatttgt

SEQ ID NO: 5382 - DNA, 28 bp, Artificial Sequence
  Probe
cttaggagatttcaacttaacttgaccg

SEQ ID NO: 5383 - DNA, 29 bp, Artificial Sequence
  Probe
cttaggagatttcaacttaacttgaccgc

SEQ ID NO: 5384 - DNA, 30 bp, Artificial Sequence
  Probe
cttaggagatttcaacttaacttgaccgct

SEQ ID NO: 5385 - DNA, 31 bp, Artificial Sequence
  Probe
cttaggagatttcaacttaacttgaccgctc

SEQ ID NO: 5386 - DNA, 32 bp, Artificial Sequence
  Probe
cttaggagatttcaacttaacttgaccgctct

SEQ ID NO: 5387 - DNA, 33 bp, Artificial Sequence
  Probe
cttaggagatttcaacttaacttgaccgctctg

SEQ ID NO: 5388 - DNA, 34 bp, Artificial Sequence
  Probe
cttaggagatttcaacttaacttgaccgctctga

SEQ ID NO: 5389 - DNA, 35 bp, Artificial Sequence
  Probe
cttaggagatttcaacttaacttgaccgctctgag

SEQ ID NO: 5390 - DNA, 36 bp, Artificial Sequence
  Probe
cttaggagatttcaacttaacttgaccgctctgagc

SEQ ID NO: 5391 - DNA, 37 bp, Artificial Sequence
  Probe
cttaggagatttcaacttaacttgaccgctctgagct

SEQ ID NO: 5392 - DNA, 38 bp, Artificial Sequence
  Probe
cttaggagatttcaacttaacttgaccgctctgagcta

SEQ ID NO: 5393 - DNA, 24 bp, Artificial Sequence
  Probe
cttcaaagccctcagtaagttgca

SEQ ID NO: 5394 - DNA, 23 bp, Artificial Sequence
  Probe
cttccaattaactagttttgaca

SEQ ID NO: 5395 - DNA, 43 bp, Artificial Sequence
  Probe
cttccaattaactagttttgacaacattcaaaaaagagtaata

SEQ ID NO: 5396 - DNA, 40 bp, Artificial Sequence
  Probe
cttgtaaaccggagatgaaaacctttttccaaggacaaat

SEQ ID NO: 5397 - DNA, 46 bp, Artificial Sequence
  Probe
ctttacacgcagaaggtcctgggttcgagccccagtggaaccacgg

SEQ ID NO: 5398 - DNA, 18 bp, Artificial Sequence
  Probe
ctttacagtcagaggttc

SEQ ID NO: 5399 - DNA, 37 bp, Artificial Sequence
  Probe
ctttacagtcagaggttcaattcctcttcttaacaac

SEQ ID NO: 5400 - DNA, 38 bp, Artificial Sequence
  Probe
ctttacagtcagaggttcaattcctcttcttaacaaca

SEQ ID NO: 5401 - DNA, 24 bp, Artificial Sequence
  Probe
ctttgaatccagcgatccgagttc

SEQ ID NO: 5402 - DNA, 37 bp, Artificial Sequence
  Probe
ctttgatagagtaaataataggagcttaaaccccctt

SEQ ID NO: 5403 - DNA, 46 bp, Artificial Sequence
  Probe
ctttgatagagtaaataataggagcttaaacccccttatttctagg

SEQ ID NO: 5404 - DNA, 50 bp, Artificial Sequence
  Probe
ctttgatagagtaaataataggagcttaaacccccttatttctaggacta

SEQ ID NO: 5405 - DNA, 31 bp, Artificial Sequence
  Probe
ctttggggggttcgattccttccttttttgt

SEQ ID NO: 5406 - DNA, 43 bp, Artificial Sequence
  Probe
ctttgggtgctaatggtggagttaaagactttttctctgattt

SEQ ID NO: 5407 - DNA, 49 bp, Artificial Sequence
  Probe
cttttaagttaaagattaagagaaccaacacctctttacagtgaaatgc

SEQ ID NO: 5408 - DNA, 50 bp, Artificial Sequence
  Probe
cttttaagttaaagattaagagaaccaacacctctttacagtgaaatgcc

SEQ ID NO: 5409 - DNA, 23 bp, Artificial Sequence
  Probe
cttttttcccggcggcgggagaa

SEQ ID NO: 5410 - DNA, 25 bp, Artificial Sequence
  Probe
cttttttcccggcggcgggagaagt

SEQ ID NO: 5411 - DNA, 17 bp, Artificial Sequence
  Probe
gaaaaagtcatggaggc

SEQ ID NO: 5412 - DNA, 23 bp, Artificial Sequence
  Probe
gaaaaagtcatggaggccatggg

SEQ ID NO: 5413 - DNA, 24 bp, Artificial Sequence
  Probe
gaaaaagtcatggaggccatgggg

SEQ ID NO: 5414 - DNA, 25 bp, Artificial Sequence
  Probe
gaaaaagtcatggaggccatggggt

SEQ ID NO: 5415 - DNA, 29 bp, Artificial Sequence
  Probe
gaaaaagtcatggaggccatggggttggc

SEQ ID NO: 5416 - DNA, 31 bp, Artificial Sequence
  Probe
gaaaaagtcatggaggccatggggttggctt

SEQ ID NO: 5417 - DNA, 32 bp, Artificial Sequence
  Probe
gaaaaagtcatggaggccatggggttggcttg

SEQ ID NO: 5418 - DNA, 33 bp, Artificial Sequence
  Probe
gaaaaagtcatggaggccatggggttggcttga

SEQ ID NO: 5419 - DNA, 50 bp, Artificial Sequence
  Probe
gaaaaagtcatggaggccatggggttggcttgaaaccagctttggggggt

SEQ ID NO: 5420 - DNA, 23 bp, Artificial Sequence
  Probe
gaaaacctttttccaaggacaaa

SEQ ID NO: 5421 - DNA, 24 bp, Artificial Sequence
  Probe
gaaaacctttttccaaggacaaat

SEQ ID NO: 5422 - DNA, 25 bp, Artificial Sequence
  Probe
gaaaatgttggttatacccttcccg

SEQ ID NO: 5423 - DNA, 27 bp, Artificial Sequence
  Probe
gaaaatgttggttatacccttcccgta

SEQ ID NO: 5424 - DNA, 25 bp, Artificial Sequence
  Probe
gaaaatgtttagacgggctcacatc

SEQ ID NO: 5425 - DNA, 29 bp, Artificial Sequence
  Probe
gaaaatgtttagacgggctcacatcaccc

SEQ ID NO: 5426 - DNA, 39 bp, Artificial Sequence
  Probe
gaaaatgtttagacgggctcacatcaccccataaacaaa

SEQ ID NO: 5427 - DNA, 40 bp, Artificial Sequence
  Probe
gaaaatgtttagacgggctcacatcaccccataaacaaat

SEQ ID NO: 5428 - DNA, 41 bp, Artificial Sequence
  Probe
gaaaatgtttagacgggctcacatcaccccataaacaaata

SEQ ID NO: 5429 - DNA, 42 bp, Artificial Sequence
  Probe
gaaaatgtttagacgggctcacatcaccccataaacaaatag

SEQ ID NO: 5430 - DNA, 21 bp, Artificial Sequence
  Probe
gaaaccagctttggggggttc

SEQ ID NO: 5431 - DNA, 20 bp, Artificial Sequence
  Probe
gaaaccgggcggaaacacct

SEQ ID NO: 5432 - DNA, 21 bp, Artificial Sequence
  Probe
gaaagcatgctccagtggcgc

SEQ ID NO: 5433 - DNA, 22 bp, Artificial Sequence
  Probe
gaaagcatgctccagtggcgca

SEQ ID NO: 5434 - DNA, 32 bp, Artificial Sequence
  Probe
gaaagctcacaagaactgctaactcatgcccc

SEQ ID NO: 5435 - DNA, 33 bp, Artificial Sequence
  Probe
gaaagctcacaagaactgctaactcatgccccc

SEQ ID NO: 5436 - DNA, 36 bp, Artificial Sequence
  Probe
gaaaggtccccggttcgaaaccgggcggaaacacct

SEQ ID NO: 5437 - DNA, 17 bp, Artificial Sequence
  Probe
gaaaggttggtggttcg

SEQ ID NO: 5438 - DNA, 35 bp, Artificial Sequence
  Probe
gaaaggttggtggttcgagcccacccagggacgcc

SEQ ID NO: 5439 - DNA, 36 bp, Artificial Sequence
  Probe
gaaaggttggtggttcgagcccacccagggacgcct

SEQ ID NO: 5440 - DNA, 50 bp, Artificial Sequence
  Probe
gaaatacaacgatggtttttcatatcattggtcgtggttgtagtccgtgc

SEQ ID NO: 5441 - DNA, 31 bp, Artificial Sequence
  Probe
gaacagggtttgttaagatggcagagcccgg

SEQ ID NO: 5442 - DNA, 33 bp, Artificial Sequence
  Probe
gaacagggtttgttaagatggcagagcccggca

SEQ ID NO: 5443 - DNA, 32 bp, Artificial Sequence
  Probe
gaacagggtttgttaagatggcagagcccggt

SEQ ID NO: 5444 - DNA, 35 bp, Artificial Sequence
  Probe
gaacagggtttgttaagatggcagagcccggtaat

SEQ ID NO: 5445 - DNA, 36 bp, Artificial Sequence
  Probe
gaacagggtttgttaagatggcagagcccggtaatc

SEQ ID NO: 5446 - DNA, 37 bp, Artificial Sequence
  Probe
gaacagggtttgttaagatggcagagcccggtaatcg

SEQ ID NO: 5447 - DNA, 38 bp, Artificial Sequence
  Probe
gaacagggtttgttaagatggcagagcccggtaatcgc

SEQ ID NO: 5448 - DNA, 39 bp, Artificial Sequence
  Probe
gaacagggtttgttaagatggcagagcccggtaatcgca

SEQ ID NO: 5449 - DNA, 40 bp, Artificial Sequence
  Probe
gaacagggtttgttaagatggcagagcccggtaatcgcat

SEQ ID NO: 5450 - DNA, 17 bp, Artificial Sequence
  Probe
gaaccaacacctcttta

SEQ ID NO: 5451 - DNA, 18 bp, Artificial Sequence
  Probe
gaaccaacacctctttac

SEQ ID NO: 5452 - DNA, 23 bp, Artificial Sequence
  Probe
gaaccaacacctctttacagtga

SEQ ID NO: 5453 - DNA, 24 bp, Artificial Sequence
  Probe
gaaccaacacctctttacagtgaa

SEQ ID NO: 5454 - DNA, 25 bp, Artificial Sequence
  Probe
gaaccaacacctctttacagtgaaa

SEQ ID NO: 5455 - DNA, 26 bp, Artificial Sequence
  Probe
gaaccaacacctctttacagtgaaat

SEQ ID NO: 5456 - DNA, 16 bp, Artificial Sequence
  Probe
gaactgctaactcatg

SEQ ID NO: 5457 - DNA, 18 bp, Artificial Sequence
  Probe
gaactgctaactcatgcc

SEQ ID NO: 5458 - DNA, 20 bp, Artificial Sequence
  Probe
gaactgctaactcatgcccc

SEQ ID NO: 5459 - DNA, 25 bp, Artificial Sequence
  Probe
gaactgctaactcatgcccccatgt

SEQ ID NO: 5460 - DNA, 27 bp, Artificial Sequence
  Probe
gaactgctaactcatgcccccatgtct

SEQ ID NO: 5461 - DNA, 28 bp, Artificial Sequence
  Probe
gaactgctaactcatgcccccatgtcta

SEQ ID NO: 5462 - DNA, 29 bp, Artificial Sequence
  Probe
gaactgctaactcatgcccccatgtctaa

SEQ ID NO: 5463 - DNA, 39 bp, Artificial Sequence
  Probe
gaactgctaactcatgcccccatgtctaacaacatggct

SEQ ID NO: 5464 - DNA, 40 bp, Artificial Sequence
  Probe
gaactgctaactcatgcccccatgtctaacaacatggctt

SEQ ID NO: 5465 - DNA, 41 bp, Artificial Sequence
  Probe
gaactgctaactcatgcccccatgtctaacaacatggcttt

SEQ ID NO: 5466 - DNA, 42 bp, Artificial Sequence
  Probe
gaactgctaactcatgcccccatgtctaacaacatggctttc

SEQ ID NO: 5467 - DNA, 43 bp, Artificial Sequence
  Probe
gaactgctaactcatgcccccatgtctaacaacatggctttct

SEQ ID NO: 5468 - DNA, 44 bp, Artificial Sequence
  Probe
gaactgctaactcatgcccccatgtctaacaacatggctttctc

SEQ ID NO: 5469 - DNA, 45 bp, Artificial Sequence
  Probe
gaactgctaactcatgcccccatgtctaacaacatggctttctca

SEQ ID NO: 5470 - DNA, 46 bp, Artificial Sequence
  Probe
gaactgctaactcatgcccccatgtctaacaacatggctttctcaa

SEQ ID NO: 5471 - DNA, 49 bp, Artificial Sequence
  Probe
gaactgctaactcatgcccccatgtctaacaacatggctttctcaactt

SEQ ID NO: 5472 - DNA, 50 bp, Artificial Sequence
  Probe
gaactgctaactcatgcccccatgtctaacaacatggctttctcaacttt

SEQ ID NO: 5473 - DNA, 24 bp, Artificial Sequence
  Probe
gaagaagcagcttcaaacctgccg

SEQ ID NO: 5474 - DNA, 25 bp, Artificial Sequence
  Probe
gaagaagcagcttcaaacctgccgg

SEQ ID NO: 5475 - DNA, 26 bp, Artificial Sequence
  Probe
gaagaagcagcttcaaacctgccggg

SEQ ID NO: 5476 - DNA, 27 bp, Artificial Sequence
  Probe
gaagaagcagcttcaaacctgccgggg

SEQ ID NO: 5477 - DNA, 29 bp, Artificial Sequence
  Probe
gaagaagcagcttcaaacctgccggggct

SEQ ID NO: 5478 - DNA, 30 bp, Artificial Sequence
  Probe
gaagaagcagcttcaaacctgccggggctt

SEQ ID NO: 5479 - DNA, 31 bp, Artificial Sequence
  Probe
gaagaagcagcttcaaacctgccggggcttc

SEQ ID NO: 5480 - DNA, 32 bp, Artificial Sequence
  Probe
gaagaagcagcttcaaacctgccggggcttct

SEQ ID NO: 5481 - DNA, 33 bp, Artificial Sequence
  Probe
gaagaagcagcttcaaacctgccggggcttctc

SEQ ID NO: 5482 - DNA, 34 bp, Artificial Sequence
  Probe
gaagaagcagcttcaaacctgccggggcttctcc

SEQ ID NO: 5483 - DNA, 35 bp, Artificial Sequence
  Probe
gaagaagcagcttcaaacctgccggggcttctccc

SEQ ID NO: 5484 - DNA, 31 bp, Artificial Sequence
  Probe
gaagattccaggttcgactcctggctggctc

SEQ ID NO: 5485 - DNA, 32 bp, Artificial Sequence
  Probe
gaagattccaggttcgactcctggctggctcg

SEQ ID NO: 5486 - DNA, 33 bp, Artificial Sequence
  Probe
gaagattccaggttcgactcctggctggctcgg

SEQ ID NO: 5487 - DNA, 33 bp, Artificial Sequence
  Probe
gaagattccaggttcgactcctggctggctcgt

SEQ ID NO: 5488 - DNA, 35 bp, Artificial Sequence
  Probe
gaagattctaggttcgactcctggctggctcgcga

SEQ ID NO: 5489 - DNA, 32 bp, Artificial Sequence
  Probe
gaagattgagggttcgagtcccttcgtggtcg

SEQ ID NO: 5490 - DNA, 35 bp, Artificial Sequence
  Probe
gaagattgagggttcgagtcccttcgtggtcgttg

SEQ ID NO: 5491 - DNA, 30 bp, Artificial Sequence
  Probe
gaagattgcaggttcgagtcctgccgcggt

SEQ ID NO: 5492 - DNA, 35 bp, Artificial Sequence
  Probe
gaagattgcaggttcgagtcctgccgcggtcgaag

SEQ ID NO: 5493 - DNA, 26 bp, Artificial Sequence
  Probe
gaagcagcttcaaacctgccggggct

SEQ ID NO: 5494 - DNA, 27 bp, Artificial Sequence
  Probe
gaagcagcttcaaacctgccggggctt

SEQ ID NO: 5495 - DNA, 28 bp, Artificial Sequence
  Probe
gaagcagcttcaaacctgccggggcttc

SEQ ID NO: 5496 - DNA, 29 bp, Artificial Sequence
  Probe
gaagcagcttcaaacctgccggggcttct

SEQ ID NO: 5497 - DNA, 30 bp, Artificial Sequence
  Probe
gaagcagcttcaaacctgccggggcttctc

SEQ ID NO: 5498 - DNA, 31 bp, Artificial Sequence
  Probe
gaagcagcttcaaacctgccggggcttctcc

SEQ ID NO: 5499 - DNA, 32 bp, Artificial Sequence
  Probe
gaagcagcttcaaacctgccggggcttctccc

SEQ ID NO: 5500 - DNA, 36 bp, Artificial Sequence
  Probe
gaagcagcttcaaacctgccggggcttctcccgcct

SEQ ID NO: 5501 - DNA, 40 bp, Artificial Sequence
  Probe
gaagcagcttcaaacctgccggggcttctcccgccttttt

SEQ ID NO: 5502 - DNA, 43 bp, Artificial Sequence
  Probe
gaagcattggactgtaaatctaaagacaggggttaggcctctt

SEQ ID NO: 5503 - DNA, 44 bp, Artificial Sequence
  Probe
gaagcattggactgtaaatctaaagacaggggttaggcctcttt

SEQ ID NO: 5504 - DNA, 50 bp, Artificial Sequence
  Probe
gaagcattggactgtaaatctaaagacaggggttaggcctctttttacca

SEQ ID NO: 5505 - DNA, 50 bp, Artificial Sequence
  Probe
gaagccagttgattagggtgcttagctgttaactaagtgtttgtgggttt

SEQ ID NO: 5506 - DNA, 18 bp, Artificial Sequence
  Probe
gaagcgggtgctcttatt

SEQ ID NO: 5507 - DNA, 19 bp, Artificial Sequence
  Probe
gaagcgggtgctcttattt

SEQ ID NO: 5508 - DNA, 20 bp, Artificial Sequence
  Probe
gaagcgggtgctcttatttt

SEQ ID NO: 5509 - DNA, 32 bp, Artificial Sequence
  Probe
gaagcgtgctgggcccataacccagaggtcga

SEQ ID NO: 5510 - DNA, 30 bp, Artificial Sequence
  Probe
gaaggtcctgggttcgagccccagtggaac

SEQ ID NO: 5511 - DNA, 32 bp, Artificial Sequence
  Probe
gaaggtcctgggttcgagccccagtggaacca

SEQ ID NO: 5512 - DNA, 34 bp, Artificial Sequence
  Probe
gaaggtcctgggttcgagccccagtggaaccacg

SEQ ID NO: 5513 - DNA, 35 bp, Artificial Sequence
  Probe
gaaggtcctgggttcgagccccagtggaaccacgg

SEQ ID NO: 5514 - DNA, 33 bp, Artificial Sequence
  Probe
gaaggtcgtgagttcgatcctcacacggggcac

SEQ ID NO: 5515 - DNA, 35 bp, Artificial Sequence
  Probe
gaaggtcgtgagttcgatcctcacacggggcacaa

SEQ ID NO: 5516 - DNA, 35 bp, Artificial Sequence
  Probe
gaaggttgcgtgttcaaatcacgtcggggtcaaca

SEQ ID NO: 5517 - DNA, 17 bp, Artificial Sequence
  Probe
gaatccagcgatccgag

SEQ ID NO: 5518 - DNA, 18 bp, Artificial Sequence
  Probe
gaatccagcgatccgagt

SEQ ID NO: 5519 - DNA, 19 bp, Artificial Sequence
  Probe
gaatccagcgatccgagtt

SEQ ID NO: 5520 - DNA, 23 bp, Artificial Sequence
  Probe
gaatccagcgatccgagttcaaa

SEQ ID NO: 5521 - DNA, 24 bp, Artificial Sequence
  Probe
gaatccagcgatccgagttcaaat

SEQ ID NO: 5522 - DNA, 39 bp, Artificial Sequence
  Probe
gaatccagcgatccgagttcaaatctcggtggaacctgc

SEQ ID NO: 5523 - DNA, 40 bp, Artificial Sequence
  Probe
gaatccagcgatccgagttcaaatctcggtggaacctgca

SEQ ID NO: 5524 - DNA, 40 bp, Artificial Sequence
  Probe
gaatccagcgatccgagttcaaatctcggtggaacctttc

SEQ ID NO: 5525 - DNA, 39 bp, Artificial Sequence
  Probe
gaatccagcgatccgagttcaaatctcggtgggacctca

SEQ ID NO: 5526 - DNA, 40 bp, Artificial Sequence
  Probe
gaatccagcgatccgagttcaaatctcggtgggacctcac

SEQ ID NO: 5527 - DNA, 41 bp, Artificial Sequence
  Probe
gaatccagcgatccgagttcaaatctcggtgggacctcacg

SEQ ID NO: 5528 - DNA, 40 bp, Artificial Sequence
  Probe
gaatccagcgatccgagttcgagtctcggtggaacctttg

SEQ ID NO: 5529 - DNA, 20 bp, Artificial Sequence
  Probe
gaatcccagcggtgcctccg

SEQ ID NO: 5530 - DNA, 24 bp, Artificial Sequence
  Probe
gaatctgacaacagaggcttacga

SEQ ID NO: 5531 - DNA, 25 bp, Artificial Sequence
  Probe
gaatctgacaacagaggcttacgac

SEQ ID NO: 5532 - DNA, 27 bp, Artificial Sequence
  Probe
gaatctgacaacagaggcttacgaccc

SEQ ID NO: 5533 - DNA, 28 bp, Artificial Sequence
  Probe
gaatctgacaacagaggcttacgacccc

SEQ ID NO: 5534 - DNA, 29 bp, Artificial Sequence
  Probe
gaatctgacaacagaggcttacgacccct

SEQ ID NO: 5535 - DNA, 33 bp, Artificial Sequence
  Probe
gaatctgacaacagaggcttacgaccccttatt

SEQ ID NO: 5536 - DNA, 34 bp, Artificial Sequence
  Probe
gaatctgacaacagaggcttacgaccccttattt

SEQ ID NO: 5537 - DNA, 38 bp, Artificial Sequence
  Probe
gaatctgacaacagaggcttacgaccccttatttaccg

SEQ ID NO: 5538 - DNA, 39 bp, Artificial Sequence
  Probe
gaatctgacaacagaggcttacgaccccttatttaccga

SEQ ID NO: 5539 - DNA, 40 bp, Artificial Sequence
  Probe
gaatctgacaacagaggcttacgaccccttatttaccgag

SEQ ID NO: 5540 - DNA, 33 bp, Artificial Sequence
  Probe
gaatcttagctttgggtgctaatggtggagtta

SEQ ID NO: 5541 - DNA, 50 bp, Artificial Sequence
  Probe
gaatcttagctttgggtgctaatggtggagttaaagactttttctctgat

SEQ ID NO: 5542 - DNA, 17 bp, Artificial Sequence
  Probe
gaattctcgcctgccac

SEQ ID NO: 5543 - DNA, 27 bp, Artificial Sequence
  Probe
gaattctcgcctgccacgcgggaggcc

SEQ ID NO: 5544 - DNA, 45 bp, Artificial Sequence
  Probe
gaattgcaaattcgaagaagcagcttcaaacctgccggggcttct

SEQ ID NO: 5545 - DNA, 46 bp, Artificial Sequence
  Probe
gaattgcaaattcgaagaagcagcttcaaacctgccggggcttctc

SEQ ID NO: 5546 - DNA, 21 bp, Artificial Sequence
  Probe
gacaacagaggcttacgaccc

SEQ ID NO: 5547 - DNA, 22 bp, Artificial Sequence
  Probe
gacaacagaggcttacgacccc

SEQ ID NO: 5548 - DNA, 24 bp, Artificial Sequence
  Probe
gacaacagaggcttacgacccctt

SEQ ID NO: 5549 - DNA, 27 bp, Artificial Sequence
  Probe
gacaacagaggcttacgaccccttatt

SEQ ID NO: 5550 - DNA, 30 bp, Artificial Sequence
  Probe
gacaacagaggcttacgaccccttatttac

SEQ ID NO: 5551 - DNA, 32 bp, Artificial Sequence
  Probe
gacaacagaggcttacgaccccttatttaccg

SEQ ID NO: 5552 - DNA, 33 bp, Artificial Sequence
  Probe
gacaacagaggcttacgaccccttatttaccga

SEQ ID NO: 5553 - DNA, 34 bp, Artificial Sequence
  Probe
gacaacagaggcttacgaccccttatttaccgag

SEQ ID NO: 5554 - DNA, 50 bp, Artificial Sequence
  Probe
gacaccccccacagtttatgtagcttacctcctcaaagcaatacactgaa

SEQ ID NO: 5555 - DNA, 25 bp, Artificial Sequence
  Probe
gacaggggttaggcctctttttacc

SEQ ID NO: 5556 - DNA, 29 bp, Artificial Sequence
  Probe
gacaggggttaggcctctttttaccagct

SEQ ID NO: 5557 - DNA, 20 bp, Artificial Sequence
  Probe
gacatatgtccgcgtgggtt

SEQ ID NO: 5558 - DNA, 21 bp, Artificial Sequence
  Probe
gacatatgtccgcgtgggttc

SEQ ID NO: 5559 - DNA, 27 bp, Artificial Sequence
  Probe
gaccaagagccttcaaagccctcagta

SEQ ID NO: 5560 - DNA, 34 bp, Artificial Sequence
  Probe
gaccaagagccttcaaagccctcagtaagttgca

SEQ ID NO: 5561 - DNA, 45 bp, Artificial Sequence
  Probe
gaccaagagccttcaaagccctcagtaagttgcaatacttaattt

SEQ ID NO: 5562 - DNA, 19 bp, Artificial Sequence
  Probe
gacccagtggcctaatgga

SEQ ID NO: 5563 - DNA, 21 bp, Artificial Sequence
  Probe
gacccgggttcgattcccggc

SEQ ID NO: 5564 - DNA, 23 bp, Artificial Sequence
  Probe
gacccgggttcgattcccggcca

SEQ ID NO: 5565 - DNA, 26 bp, Artificial Sequence
  Probe
gacccgggttcgattcccggccaacg

SEQ ID NO: 5566 - DNA, 28 bp, Artificial Sequence
  Probe
gacccgggttcgattcccggccaacgca

SEQ ID NO: 5567 - DNA, 31 bp, Artificial Sequence
  Probe
gacccgggttcgattcccggccaacgcaagt

SEQ ID NO: 5568 - DNA, 31 bp, Artificial Sequence
  Probe
gacccgggttcgattcccggccaacgcagtg

SEQ ID NO: 5569 - DNA, 22 bp, Artificial Sequence
  Probe
gaccggggttcaattccccgac

SEQ ID NO: 5570 - DNA, 29 bp, Artificial Sequence
  Probe
gaccggggttcaattccccgacggggagg

SEQ ID NO: 5571 - DNA, 31 bp, Artificial Sequence
  Probe
gaccggggttcaattccccgacggggaggtg

SEQ ID NO: 5572 - DNA, 22 bp, Artificial Sequence
  Probe
gaccggggttcgattccccgac

SEQ ID NO: 5573 - DNA, 23 bp, Artificial Sequence
  Probe
gaccggggttcgattccccgacg

SEQ ID NO: 5574 - DNA, 24 bp, Artificial Sequence
  Probe
gaccggggttcgattccccgacgg

SEQ ID NO: 5575 - DNA, 29 bp, Artificial Sequence
  Probe
gaccggggttcgattccccgacggggaga

SEQ ID NO: 5576 - DNA, 30 bp, Artificial Sequence
  Probe
gaccggggttcgattccccgacggggagac

SEQ ID NO: 5577 - DNA, 31 bp, Artificial Sequence
  Probe
gaccggggttcgattccccgacggggagagt

SEQ ID NO: 5578 - DNA, 29 bp, Artificial Sequence
  Probe
gaccggggttcgattccccgacggggagg

SEQ ID NO: 5579 - DNA, 30 bp, Artificial Sequence
  Probe
gaccggggttcgattccccgacggggaggc

SEQ ID NO: 5580 - DNA, 31 bp, Artificial Sequence
  Probe
gaccggggttcgattccccgacggggaggca

SEQ ID NO: 5581 - DNA, 31 bp, Artificial Sequence
  Probe
gaccggggttcgattccccgacggggaggcc

SEQ ID NO: 5582 - DNA, 19 bp, Artificial Sequence
  Probe
gacctcgtggcgcaatggt

SEQ ID NO: 5583 - DNA, 33 bp, Artificial Sequence
  Probe
gacgagctagctcagtcggtagagcatgggact

SEQ ID NO: 5584 - DNA, 16 bp, Artificial Sequence
  Probe
gacgaggtggccgagt

SEQ ID NO: 5585 - DNA, 17 bp, Artificial Sequence
  Probe
gacgaggtggccgagtg

SEQ ID NO: 5586 - DNA, 18 bp, Artificial Sequence
  Probe
gacgaggtggccgagtgg

SEQ ID NO: 5587 - DNA, 19 bp, Artificial Sequence
  Probe
gacgaggtggccgagtggt

SEQ ID NO: 5588 - DNA, 23 bp, Artificial Sequence
  Probe
gacgaggtggccgagtggttaag

SEQ ID NO: 5589 - DNA, 20 bp, Artificial Sequence
  Probe
gacgggctcacatcacccca

SEQ ID NO: 5590 - DNA, 22 bp, Artificial Sequence
  Probe
gacgggctcacatcaccccata

SEQ ID NO: 5591 - DNA, 23 bp, Artificial Sequence
  Probe
gacgggctcacatcaccccataa

SEQ ID NO: 5592 - DNA, 24 bp, Artificial Sequence
  Probe
gacgggctcacatcaccccataaa

SEQ ID NO: 5593 - DNA, 25 bp, Artificial Sequence
  Probe
gacgggctcacatcaccccataaac

SEQ ID NO: 5594 - DNA, 26 bp, Artificial Sequence
  Probe
gacgggctcacatcaccccataaaca

SEQ ID NO: 5595 - DNA, 27 bp, Artificial Sequence
  Probe
gacgggctcacatcaccccataaacaa

SEQ ID NO: 5596 - DNA, 28 bp, Artificial Sequence
  Probe
gacgggctcacatcaccccataaacaaa

SEQ ID NO: 5597 - DNA, 29 bp, Artificial Sequence
  Probe
gacgggctcacatcaccccataaacaaat

SEQ ID NO: 5598 - DNA, 30 bp, Artificial Sequence
  Probe
gacgggctcacatcaccccataaacaaata

SEQ ID NO: 5599 - DNA, 15 bp, Artificial Sequence
  Probe
gactacaaaaaggat

SEQ ID NO: 5600 - DNA, 23 bp, Artificial Sequence
  Probe
gactacaaaaaggattagactga

SEQ ID NO: 5601 - DNA, 24 bp, Artificial Sequence
  Probe
gactacaaaaaggattagactgaa

SEQ ID NO: 5602 - DNA, 25 bp, Artificial Sequence
  Probe
gactacaaaaaggattagactgaac

SEQ ID NO: 5603 - DNA, 26 bp, Artificial Sequence
  Probe
gactacaaaaaggattagactgaacc

SEQ ID NO: 5604 - DNA, 27 bp, Artificial Sequence
  Probe
gactacaaaaaggattagactgaaccg

SEQ ID NO: 5605 - DNA, 29 bp, Artificial Sequence
  Probe
gactacaaaaaggattagactgaaccgaa

SEQ ID NO: 5606 - DNA, 31 bp, Artificial Sequence
  Probe
gactcattaaattatgataatcatatttacc

SEQ ID NO: 5607 - DNA, 36 bp, Artificial Sequence
  Probe
gactcattaaattatgataatcatatttaccaaatg

SEQ ID NO: 5608 - DNA, 20 bp, Artificial Sequence
  Probe
gactcccggtgtgggaacgc

SEQ ID NO: 5609 - DNA, 17 bp, Artificial Sequence
  Probe
gactctgaatccagcga

SEQ ID NO: 5610 - DNA, 44 bp, Artificial Sequence
  Probe
gactgtaaatctaaagacaggggttaggcctctttttaccagct

SEQ ID NO: 5611 - DNA, 16 bp, Artificial Sequence
  Probe
gagaaagctcacaaga

SEQ ID NO: 5612 - DNA, 17 bp, Artificial Sequence
  Probe
gagaaagctcacaagaa

SEQ ID NO: 5613 - DNA, 48 bp, Artificial Sequence
  Probe
gagaaagctcacaagaactgctaactcatgcccccatgtctaacaaca

SEQ ID NO: 5614 - DNA, 26 bp, Artificial Sequence
  Probe
gagaaccaacacctctttacagtgaa

SEQ ID NO: 5615 - DNA, 27 bp, Artificial Sequence
  Probe
gagaaccaacacctctttacagtgaaa

SEQ ID NO: 5616 - DNA, 28 bp, Artificial Sequence
  Probe
gagaaccaacacctctttacagtgaaat

SEQ ID NO: 5617 - DNA, 31 bp, Artificial Sequence
  Probe
gagaccggggttcaattccccgacggggagg

SEQ ID NO: 5618 - DNA, 33 bp, Artificial Sequence
  Probe
gagaccggggttcaattccccgacggggaggtg

SEQ ID NO: 5619 - DNA, 27 bp, Artificial Sequence
  Probe
gagaccggggttcgattccccgacggg

SEQ ID NO: 5620 - DNA, 31 bp, Artificial Sequence
  Probe
gagaccggggttcgattccccgacggggaga

SEQ ID NO: 5621 - DNA, 32 bp, Artificial Sequence
  Probe
gagaccggggttcgattccccgacggggagaa

SEQ ID NO: 5622 - DNA, 32 bp, Artificial Sequence
  Probe
gagaccggggttcgattccccgacggggagac

SEQ ID NO: 5623 - DNA, 33 bp, Artificial Sequence
  Probe
gagaccggggttcgattccccgacggggagagt

SEQ ID NO: 5624 - DNA, 31 bp, Artificial Sequence
  Probe
gagaccggggttcgattccccgacggggagg

SEQ ID NO: 5625 - DNA, 32 bp, Artificial Sequence
  Probe
gagaccggggttcgattccccgacggggaggc

SEQ ID NO: 5626 - DNA, 33 bp, Artificial Sequence
  Probe
gagaccggggttcgattccccgacggggaggca

SEQ ID NO: 5627 - DNA, 17 bp, Artificial Sequence
  Probe
gagaggtcccgggttca

SEQ ID NO: 5628 - DNA, 36 bp, Artificial Sequence
  Probe
gagaggtcccgggttcaaatcccggacgagccccct

SEQ ID NO: 5629 - DNA, 32 bp, Artificial Sequence
  Probe
gagatcctgggttcgaatcccagcggtgcctc

SEQ ID NO: 5630 - DNA, 26 bp, Artificial Sequence
  Probe
gagatgaaaacctttttccaaggaca

SEQ ID NO: 5631 - DNA, 27 bp, Artificial Sequence
  Probe
gagatgaaaacctttttccaaggacaa

SEQ ID NO: 5632 - DNA, 28 bp, Artificial Sequence
  Probe
gagatgaaaacctttttccaaggacaaa

SEQ ID NO: 5633 - DNA, 29 bp, Artificial Sequence
  Probe
gagatgaaaacctttttccaaggacaaat

SEQ ID NO: 5634 - DNA, 23 bp, Artificial Sequence
  Probe
gagatttcaacttaacttgaccg

SEQ ID NO: 5635 - DNA, 24 bp, Artificial Sequence
  Probe
gagatttcaacttaacttgaccgc

SEQ ID NO: 5636 - DNA, 25 bp, Artificial Sequence
  Probe
gagatttcaacttaacttgaccgct

SEQ ID NO: 5637 - DNA, 26 bp, Artificial Sequence
  Probe
gagatttcaacttaacttgaccgctc

SEQ ID NO: 5638 - DNA, 27 bp, Artificial Sequence
  Probe
gagatttcaacttaacttgaccgctct

SEQ ID NO: 5639 - DNA, 28 bp, Artificial Sequence
  Probe
gagatttcaacttaacttgaccgctctg

SEQ ID NO: 5640 - DNA, 29 bp, Artificial Sequence
  Probe
gagatttcaacttaacttgaccgctctga

SEQ ID NO: 5641 - DNA, 30 bp, Artificial Sequence
  Probe
gagatttcaacttaacttgaccgctctgag

SEQ ID NO: 5642 - DNA, 31 bp, Artificial Sequence
  Probe
gagatttcaacttaacttgaccgctctgagc

SEQ ID NO: 5643 - DNA, 32 bp, Artificial Sequence
  Probe
gagatttcaacttaacttgaccgctctgagct

SEQ ID NO: 5644 - DNA, 31 bp, Artificial Sequence
  Probe
gagcagcctcgttagcgcagtaggcagcgcg

SEQ ID NO: 5645 - DNA, 37 bp, Artificial Sequence
  Probe
gagcagcctcgttagcgcagtaggcagcgcgtcagtc

SEQ ID NO: 5646 - DNA, 40 bp, Artificial Sequence
  Probe
gagcagcctcgttagcgcagtaggcagcgcgtcagtctca

SEQ ID NO: 5647 - DNA, 41 bp, Artificial Sequence
  Probe
gagcagcctcgttagcgcagtaggcagcgcgtcagtctcat

SEQ ID NO: 5648 - DNA, 31 bp, Artificial Sequence
  Probe
gagcatagctgccttccaagcagttgacccg

SEQ ID NO: 5649 - DNA, 27 bp, Artificial Sequence
  Probe
gagcatgagactcttaatctcagggtc

SEQ ID NO: 5650 - DNA, 28 bp, Artificial Sequence
  Probe
gagcatgagactcttaatctcagggtcg

SEQ ID NO: 5651 - DNA, 31 bp, Artificial Sequence
  Probe
gagcatgagactcttaatctcagggtcgtgg

SEQ ID NO: 5652 - DNA, 28 bp, Artificial Sequence
  Probe
gagcatgggactcttaatcccagggtcg

SEQ ID NO: 5653 - DNA, 29 bp, Artificial Sequence
  Probe
gagcatgggactcttaatcccagggtcgt

SEQ ID NO: 5654 - DNA, 30 bp, Artificial Sequence
  Probe
gagcatgggactcttaatcccagggtcgtg

SEQ ID NO: 5655 - DNA, 31 bp, Artificial Sequence
  Probe
gagcatgggactcttaatcccagggtcgtgg

SEQ ID NO: 5656 - DNA, 23 bp, Artificial Sequence
  Probe
gagcccggtaatcgcataaaact

SEQ ID NO: 5657 - DNA, 32 bp, Artificial Sequence
  Probe
gagcccggtaatcgcataaaacttaaaacttt

SEQ ID NO: 5658 - DNA, 33 bp, Artificial Sequence
  Probe
gagcccggtaatcgcataaaacttaaaacttta

SEQ ID NO: 5659 - DNA, 35 bp, Artificial Sequence
  Probe
gagcccggtaatcgcataaaacttaaaactttaca

SEQ ID NO: 5660 - DNA, 44 bp, Artificial Sequence
  Probe
gagcccggtaatcgcataaaacttaaaactttacagtcagaggt

SEQ ID NO: 5661 - DNA, 46 bp, Artificial Sequence
  Probe
gagcccggtaatcgcataaaacttaaaactttacagtcagaggttc

SEQ ID NO: 5662 - DNA, 49 bp, Artificial Sequence
  Probe
gagcccggtaatcgcataaaacttaaaactttacagtcagaggttcaat

SEQ ID NO: 5663 - DNA, 24 bp, Artificial Sequence
  Probe
gagcttaaacccccttatttctag

SEQ ID NO: 5664 - DNA, 25 bp, Artificial Sequence
  Probe
gagcttaaacccccttatttctagg

SEQ ID NO: 5665 - DNA, 26 bp, Artificial Sequence
  Probe
gagcttaaacccccttatttctagga

SEQ ID NO: 5666 - DNA, 31 bp, Artificial Sequence
  Probe
gaggcgtgggttcgaatcccacttctgacac

SEQ ID NO: 5667 - DNA, 24 bp, Artificial Sequence
  Probe
gaggcttacgaccccttatttacc

SEQ ID NO: 5668 - DNA, 25 bp, Artificial Sequence
  Probe
gaggcttacgaccccttatttaccg

SEQ ID NO: 5669 - DNA, 26 bp, Artificial Sequence
  Probe
gaggcttacgaccccttatttaccga

SEQ ID NO: 5670 - DNA, 33 bp, Artificial Sequence
  Probe
gagggtccagggttcaagtccctgttcgggcgg

SEQ ID NO: 5671 - DNA, 33 bp, Artificial Sequence
  Probe
gagggtccagggttcaagtccctgttcgggcgt

SEQ ID NO: 5672 - DNA, 24 bp, Artificial Sequence
  Probe
gaggttccgggttcgagtcccggc

SEQ ID NO: 5673 - DNA, 31 bp, Artificial Sequence
  Probe
gaggttgtgagttcgagcctcacctggagca

SEQ ID NO: 5674 - DNA, 34 bp, Artificial Sequence
  Probe
gaggttgtgagttcgagcctcacctggagcattg

SEQ ID NO: 5675 - DNA, 23 bp, Artificial Sequence
  Probe
gagtaaataataggagcttaaac

SEQ ID NO: 5676 - DNA, 25 bp, Artificial Sequence
  Probe
gagtaaataataggagcttaaaccc

SEQ ID NO: 5677 - DNA, 27 bp, Artificial Sequence
  Probe
gagtaaataataggagcttaaaccccc

SEQ ID NO: 5678 - DNA, 28 bp, Artificial Sequence
  Probe
gagtaaataataggagcttaaaccccct

SEQ ID NO: 5679 - DNA, 32 bp, Artificial Sequence
  Probe
gagtaaataataggagcttaaacccccttatt

SEQ ID NO: 5680 - DNA, 37 bp, Artificial Sequence
  Probe
gagtaaataataggagcttaaacccccttatttctag

SEQ ID NO: 5681 - DNA, 38 bp, Artificial Sequence
  Probe
gagtaaataataggagcttaaacccccttatttctagg

SEQ ID NO: 5682 - DNA, 39 bp, Artificial Sequence
  Probe
gagtaaataataggagcttaaacccccttatttctagga

SEQ ID NO: 5683 - DNA, 40 bp, Artificial Sequence
  Probe
gagtaaataataggagcttaaacccccttatttctaggac

SEQ ID NO: 5684 - DNA, 43 bp, Artificial Sequence
  Probe
gagtaaataataggagcttaaacccccttatttctaggactat

SEQ ID NO: 5685 - DNA, 19 bp, Artificial Sequence
  Probe
gagtatccccgcctgtcac

SEQ ID NO: 5686 - DNA, 50 bp, Artificial Sequence
  Probe
gagtatccccgcctgtcacgcgggagaccggggttcgattccccgacggg

SEQ ID NO: 5687 - DNA, 19 bp, Artificial Sequence
  Probe
gagtgaagcattggactgt

SEQ ID NO: 5688 - DNA, 20 bp, Artificial Sequence
  Probe
gagtgaagcattggactgta

SEQ ID NO: 5689 - DNA, 23 bp, Artificial Sequence
  Probe
gagtggggttttgcagtccttag

SEQ ID NO: 5690 - DNA, 24 bp, Artificial Sequence
  Probe
gagtggggttttgcagtccttagc

SEQ ID NO: 5691 - DNA, 25 bp, Artificial Sequence
  Probe
gagtggggttttgcagtccttagct

SEQ ID NO: 5692 - DNA, 25 bp, Artificial Sequence
  Probe
gagtgtagcttaacacaaagcaccc

SEQ ID NO: 5693 - DNA, 26 bp, Artificial Sequence
  Probe
gagtgtagcttaacacaaagcaccca

SEQ ID NO: 5694 - DNA, 27 bp, Artificial Sequence
  Probe
gagtgtagcttaacacaaagcacccaa

SEQ ID NO: 5695 - DNA, 28 bp, Artificial Sequence
  Probe
gagtgtagcttaacacaaagcacccaac

SEQ ID NO: 5696 - DNA, 29 bp, Artificial Sequence
  Probe
gagtgtagcttaacacaaagcacccaact

SEQ ID NO: 5697 - DNA, 30 bp, Artificial Sequence
  Probe
gagtgtagcttaacacaaagcacccaactt

SEQ ID NO: 5698 - DNA, 31 bp, Artificial Sequence
  Probe
gagtgtagcttaacacaaagcacccaactta

SEQ ID NO: 5699 - DNA, 32 bp, Artificial Sequence
  Probe
gagtgtagcttaacacaaagcacccaacttac

SEQ ID NO: 5700 - DNA, 33 bp, Artificial Sequence
  Probe
gagtgtagcttaacacaaagcacccaacttaca

SEQ ID NO: 5701 - DNA, 36 bp, Artificial Sequence
  Probe
gagtgtagcttaacacaaagcacccaacttacactt

SEQ ID NO: 5702 - DNA, 37 bp, Artificial Sequence
  Probe
gagtgtagcttaacacaaagcacccaacttacactta

SEQ ID NO: 5703 - DNA, 39 bp, Artificial Sequence
  Probe
gagtgtagcttaacacaaagcacccaacttacacttagg

SEQ ID NO: 5704 - DNA, 40 bp, Artificial Sequence
  Probe
gagtgtagcttaacacaaagcacccaacttacacttagga

SEQ ID NO: 5705 - DNA, 24 bp, Artificial Sequence
  Probe
gagttaaagactttttctctgatt

SEQ ID NO: 5706 - DNA, 25 bp, Artificial Sequence
  Probe
gagttaaagactttttctctgattt

SEQ ID NO: 5707 - DNA, 50 bp, Artificial Sequence
  Probe
gagttactttgatagagtaaataataggagcttaaacccccttatttcta

SEQ ID NO: 5708 - DNA, 21 bp, Artificial Sequence
  Probe
gataatcatatttaccaaatg

SEQ ID NO: 5709 - DNA, 32 bp, Artificial Sequence
  Probe
gatagagtaaataataggagcttaaaccccct

SEQ ID NO: 5710 - DNA, 39 bp, Artificial Sequence
  Probe
gatagagtaaataataggagcttaaacccccttatttct

SEQ ID NO: 5711 - DNA, 41 bp, Artificial Sequence
  Probe
gatagagtaaataataggagcttaaacccccttatttctag

SEQ ID NO: 5712 - DNA, 42 bp, Artificial Sequence
  Probe
gatagagtaaataataggagcttaaacccccttatttctagg

SEQ ID NO: 5713 - DNA, 43 bp, Artificial Sequence
  Probe
gatagagtaaataataggagcttaaacccccttatttctagga

SEQ ID NO: 5714 - DNA, 44 bp, Artificial Sequence
  Probe
gatagagtaaataataggagcttaaacccccttatttctaggac

SEQ ID NO: 5715 - DNA, 45 bp, Artificial Sequence
  Probe
gatagagtaaataataggagcttaaacccccttatttctaggact

SEQ ID NO: 5716 - DNA, 46 bp, Artificial Sequence
  Probe
gatagagtaaataataggagcttaaacccccttatttctaggacta

SEQ ID NO: 5717 - DNA, 25 bp, Artificial Sequence
  Probe
gatatccaaccttcagctatagggt

SEQ ID NO: 5718 - DNA, 20 bp, Artificial Sequence
  Probe
gatccccggcatctccattg

SEQ ID NO: 5719 - DNA, 31 bp, Artificial Sequence
  Probe
gatccgagttcaaatctcggtggaacctgca

SEQ ID NO: 5720 - DNA, 31 bp, Artificial Sequence
  Probe
gatccgagttcaaatctcggtgggacctcac

SEQ ID NO: 5721 - DNA, 32 bp, Artificial Sequence
  Probe
gatcctgggttcgaatcccagcggtgcctccg

SEQ ID NO: 5722 - DNA, 24 bp, Artificial Sequence
  Probe
gatcgaaaccatcctctgctaggt

SEQ ID NO: 5723 - DNA, 24 bp, Artificial Sequence
  Probe
gatgaaaacctttttccaaggaca

SEQ ID NO: 5724 - DNA, 25 bp, Artificial Sequence
  Probe
gatgaaaacctttttccaaggacaa

SEQ ID NO: 5725 - DNA, 26 bp, Artificial Sequence
  Probe
gatgaaaacctttttccaaggacaaa

SEQ ID NO: 5726 - DNA, 27 bp, Artificial Sequence
  Probe
gatgaaaacctttttccaaggacaaat

SEQ ID NO: 5727 - DNA, 27 bp, Artificial Sequence
  Probe
gatgcagagtggggttttgcagtcctt

SEQ ID NO: 5728 - DNA, 28 bp, Artificial Sequence
  Probe
gatgcagagtggggttttgcagtcctta

SEQ ID NO: 5729 - DNA, 29 bp, Artificial Sequence
  Probe
gatgcagagtggggttttgcagtccttag

SEQ ID NO: 5730 - DNA, 30 bp, Artificial Sequence
  Probe
gatgcagagtggggttttgcagtccttagc

SEQ ID NO: 5731 - DNA, 31 bp, Artificial Sequence
  Probe
gatgcagagtggggttttgcagtccttagct

SEQ ID NO: 5732 - DNA, 32 bp, Artificial Sequence
  Probe
gatgcagagtggggttttgcagtccttagctg

SEQ ID NO: 5733 - DNA, 33 bp, Artificial Sequence
  Probe
gatgcagagtggggttttgcagtccttagctgt

SEQ ID NO: 5734 - DNA, 33 bp, Artificial Sequence
  Probe
gatggggtgtgataggtggcacggagaattttg

SEQ ID NO: 5735 - DNA, 27 bp, Artificial Sequence
  Probe
gatgggttcgattctcatagtcctaga

SEQ ID NO: 5736 - DNA, 31 bp, Artificial Sequence
  Probe
gattaagagaaccaacacctctttacagtga

SEQ ID NO: 5737 - DNA, 32 bp, Artificial Sequence
  Probe
gattaagagaaccaacacctctttacagtgaa

SEQ ID NO: 5738 - DNA, 33 bp, Artificial Sequence
  Probe
gattaagagaaccaacacctctttacagtgaaa

SEQ ID NO: 5739 - DNA, 34 bp, Artificial Sequence
  Probe
gattaagagaaccaacacctctttacagtgaaat

SEQ ID NO: 5740 - DNA, 20 bp, Artificial Sequence
  Probe
gattccccgacggggaggca

SEQ ID NO: 5741 - DNA, 27 bp, Artificial Sequence
  Probe
gattctaggttcgactcctggctggct

SEQ ID NO: 5742 - DNA, 31 bp, Artificial Sequence
  Probe
gattctaggttcgactcctggctggctcgcg

SEQ ID NO: 5743 - DNA, 31 bp, Artificial Sequence
  Probe
gattctaggttcgactcctggctggctcgct

SEQ ID NO: 5744 - DNA, 24 bp, Artificial Sequence
  Probe
gattgagggttcgagtcccttcgt

SEQ ID NO: 5745 - DNA, 29 bp, Artificial Sequence
  Probe
gattgagggttcgagtcccttcgtggtcg

SEQ ID NO: 5746 - DNA, 32 bp, Artificial Sequence
  Probe
gattgagggttcgagtcccttcgtggtcgttg

SEQ ID NO: 5747 - DNA, 27 bp, Artificial Sequence
  Probe
gattgcaggttcgagtcctgccgcggt

SEQ ID NO: 5748 - DNA, 32 bp, Artificial Sequence
  Probe
gattgcaggttcgagtcctgccgcggtcgaag

SEQ ID NO: 5749 - DNA, 16 bp, Artificial Sequence
  Probe
gattgtgaatctgaca

SEQ ID NO: 5750 - DNA, 28 bp, Artificial Sequence
  Probe
gattgtgaatctgacaacagaggcttac

SEQ ID NO: 5751 - DNA, 32 bp, Artificial Sequence
  Probe
gattgtgaatctgacaacagaggcttacgacc

SEQ ID NO: 5752 - DNA, 35 bp, Artificial Sequence
  Probe
gattgtgaatctgacaacagaggcttacgacccct

SEQ ID NO: 5753 - DNA, 36 bp, Artificial Sequence
  Probe
gattgtgaatctgacaacagaggcttacgacccctt

SEQ ID NO: 5754 - DNA, 41 bp, Artificial Sequence
  Probe
gattgtgaatctgacaacagaggcttacgaccccttattta

SEQ ID NO: 5755 - DNA, 44 bp, Artificial Sequence
  Probe
gattgtgaatctgacaacagaggcttacgaccccttatttaccg

SEQ ID NO: 5756 - DNA, 45 bp, Artificial Sequence
  Probe
gattgtgaatctgacaacagaggcttacgaccccttatttaccga

SEQ ID NO: 5757 - DNA, 46 bp, Artificial Sequence
  Probe
gattgtgaatctgacaacagaggcttacgaccccttatttaccgag

SEQ ID NO: 5758 - DNA, 50 bp, Artificial Sequence
  Probe
gattgtgaatctgacaacagaggcttacgaccccttatttaccgagaaag

SEQ ID NO: 5759 - DNA, 22 bp, Artificial Sequence
  Probe
gattgtgggttcgagtcccatc

SEQ ID NO: 5760 - DNA, 32 bp, Artificial Sequence
  Probe
gattgtgggttcgagtcccatctgggtcgcgt

SEQ ID NO: 5761 - DNA, 20 bp, Artificial Sequence
  Probe
gatttcaacttaacttgacc

SEQ ID NO: 5762 - DNA, 23 bp, Artificial Sequence
  Probe
gatttcaacttaacttgaccgct

SEQ ID NO: 5763 - DNA, 24 bp, Artificial Sequence
  Probe
gatttcaacttaacttgaccgctc

SEQ ID NO: 5764 - DNA, 25 bp, Artificial Sequence
  Probe
gatttcaacttaacttgaccgctct

SEQ ID NO: 5765 - DNA, 26 bp, Artificial Sequence
  Probe
gatttcaacttaacttgaccgctctg

SEQ ID NO: 5766 - DNA, 27 bp, Artificial Sequence
  Probe
gatttcaacttaacttgaccgctctga

SEQ ID NO: 5767 - DNA, 28 bp, Artificial Sequence
  Probe
gatttcaacttaacttgaccgctctgag

SEQ ID NO: 5768 - DNA, 29 bp, Artificial Sequence
  Probe
gatttcaacttaacttgaccgctctgagc

SEQ ID NO: 5769 - DNA, 30 bp, Artificial Sequence
  Probe
gatttcaacttaacttgaccgctctgagct

SEQ ID NO: 5770 - DNA, 25 bp, Artificial Sequence
  Probe
gatttcgactcattaaattatgata

SEQ ID NO: 5771 - DNA, 31 bp, Artificial Sequence
  Probe
gatttcgactcattaaattatgataatcata

SEQ ID NO: 5772 - DNA, 32 bp, Artificial Sequence
  Probe
gatttcgactcattaaattatgataatcatat

SEQ ID NO: 5773 - DNA, 40 bp, Artificial Sequence
  Probe
gatttcgactcattaaattatgataatcatatttaccaaa

SEQ ID NO: 5774 - DNA, 42 bp, Artificial Sequence
  Probe
gatttcgactcattaaattatgataatcatatttaccaaatg

SEQ ID NO: 5775 - DNA, 49 bp, Artificial Sequence
  Probe
gatttcgactcattaaattatgataatcatatttaccaaatgcccctca

SEQ ID NO: 5776 - DNA, 31 bp, Artificial Sequence
  Probe
gcaaattcgaagaagcagcttcaaacctgcc

SEQ ID NO: 5777 - DNA, 32 bp, Artificial Sequence
  Probe
gcaaattcgaagaagcagcttcaaacctgccg

SEQ ID NO: 5778 - DNA, 33 bp, Artificial Sequence
  Probe
gcaaattcgaagaagcagcttcaaacctgccgg

SEQ ID NO: 5779 - DNA, 34 bp, Artificial Sequence
  Probe
gcaaattcgaagaagcagcttcaaacctgccggg

SEQ ID NO: 5780 - DNA, 37 bp, Artificial Sequence
  Probe
gcaaattcgaagaagcagcttcaaacctgccggggct

SEQ ID NO: 5781 - DNA, 39 bp, Artificial Sequence
  Probe
gcaaattcgaagaagcagcttcaaacctgccggggcttc

SEQ ID NO: 5782 - DNA, 40 bp, Artificial Sequence
  Probe
gcaaattcgaagaagcagcttcaaacctgccggggcttct

SEQ ID NO: 5783 - DNA, 41 bp, Artificial Sequence
  Probe
gcaaattcgaagaagcagcttcaaacctgccggggcttctc

SEQ ID NO: 5784 - DNA, 32 bp, Artificial Sequence
  Probe
gcaacctcggttcgaatccgagtcacggcaaa

SEQ ID NO: 5785 - DNA, 32 bp, Artificial Sequence
  Probe
gcaacctcggttcgaatccgagtcacggcagg

SEQ ID NO: 5786 - DNA, 33 bp, Artificial Sequence
  Probe
gcaacctcggttcgaatccgagtcacggcaggt

SEQ ID NO: 5787 - DNA, 32 bp, Artificial Sequence
  Probe
gcaacctcggttcgaatccgagtcacggcatt

SEQ ID NO: 5788 - DNA, 33 bp, Artificial Sequence
  Probe
gcaacctcggttcgaatccgagtcacggcattg

SEQ ID NO: 5789 - DNA, 31 bp, Artificial Sequence
  Probe
gcaatacactgaaaatgtttagacgggctca

SEQ ID NO: 5790 - DNA, 41 bp, Artificial Sequence
  Probe
gcaatacactgaaaatgtttagacgggctcacatcacccca

SEQ ID NO: 5791 - DNA, 46 bp, Artificial Sequence
  Probe
gcaatacactgaaaatgtttagacgggctcacatcaccccataaac

SEQ ID NO: 5792 - DNA, 49 bp, Artificial Sequence
  Probe
gcaatacactgaaaatgtttagacgggctcacatcaccccataaacaaa

SEQ ID NO: 5793 - DNA, 50 bp, Artificial Sequence
  Probe
gcaatacactgaaaatgtttagacgggctcacatcaccccataaacaaat

SEQ ID NO: 5794 - DNA, 31 bp, Artificial Sequence
  Probe
gcaatggtggttcagtggtagaattctcgcc

SEQ ID NO: 5795 - DNA, 32 bp, Artificial Sequence
  Probe
gcaatggtggttcagtggtagaattctcgcct

SEQ ID NO: 5796 - DNA, 17 bp, Artificial Sequence
  Probe
gcacccaacttacactt

SEQ ID NO: 5797 - DNA, 18 bp, Artificial Sequence
  Probe
gcacccaacttacactta

SEQ ID NO: 5798 - DNA, 20 bp, Artificial Sequence
  Probe
gcacccaacttacacttagg

SEQ ID NO: 5799 - DNA, 21 bp, Artificial Sequence
  Probe
gcacccaacttacacttagga

SEQ ID NO: 5800 - DNA, 22 bp, Artificial Sequence
  Probe
gcacccaacttacacttaggag

SEQ ID NO: 5801 - DNA, 23 bp, Artificial Sequence
  Probe
gcacccaacttacacttaggaga

SEQ ID NO: 5802 - DNA, 24 bp, Artificial Sequence
  Probe
gcacccaacttacacttaggagat

SEQ ID NO: 5803 - DNA, 25 bp, Artificial Sequence
  Probe
gcacccaacttacacttaggagatt

SEQ ID NO: 5804 - DNA, 27 bp, Artificial Sequence
  Probe
gcacccaacttacacttaggagatttc

SEQ ID NO: 5805 - DNA, 28 bp, Artificial Sequence
  Probe
gcacccaacttacacttaggagatttca

SEQ ID NO: 5806 - DNA, 29 bp, Artificial Sequence
  Probe
gcacccaacttacacttaggagatttcaa

SEQ ID NO: 5807 - DNA, 30 bp, Artificial Sequence
  Probe
gcacccaacttacacttaggagatttcaac

SEQ ID NO: 5808 - DNA, 31 bp, Artificial Sequence
  Probe
gcacccaacttacacttaggagatttcaact

SEQ ID NO: 5809 - DNA, 32 bp, Artificial Sequence
  Probe
gcacccaacttacacttaggagatttcaactt

SEQ ID NO: 5810 - DNA, 33 bp, Artificial Sequence
  Probe
gcacccaacttacacttaggagatttcaactta

SEQ ID NO: 5811 - DNA, 35 bp, Artificial Sequence
  Probe
gcacccaacttacacttaggagatttcaacttaac

SEQ ID NO: 5812 - DNA, 37 bp, Artificial Sequence
  Probe
gcacccaacttacacttaggagatttcaacttaactt

SEQ ID NO: 5813 - DNA, 42 bp, Artificial Sequence
  Probe
gcacccaacttacacttaggagatttcaacttaacttgaccg

SEQ ID NO: 5814 - DNA, 43 bp, Artificial Sequence
  Probe
gcacccaacttacacttaggagatttcaacttaacttgaccgc

SEQ ID NO: 5815 - DNA, 44 bp, Artificial Sequence
  Probe
gcacccaacttacacttaggagatttcaacttaacttgaccgct

SEQ ID NO: 5816 - DNA, 45 bp, Artificial Sequence
  Probe
gcacccaacttacacttaggagatttcaacttaacttgaccgctc

SEQ ID NO: 5817 - DNA, 46 bp, Artificial Sequence
  Probe
gcacccaacttacacttaggagatttcaacttaacttgaccgctct

SEQ ID NO: 5818 - DNA, 48 bp, Artificial Sequence
  Probe
gcacccaacttacacttaggagatttcaacttaacttgaccgctctga

SEQ ID NO: 5819 - DNA, 49 bp, Artificial Sequence
  Probe
gcacccaacttacacttaggagatttcaacttaacttgaccgctctgag

SEQ ID NO: 5820 - DNA, 50 bp, Artificial Sequence
  Probe
gcacccaacttacacttaggagatttcaacttaacttgaccgctctgagc

SEQ ID NO: 5821 - DNA, 38 bp, Artificial Sequence
  Probe
gcacgaggccccgggttcaatccccggcacctccagct

SEQ ID NO: 5822 - DNA, 29 bp, Artificial Sequence
  Probe
gcacgcgtgggttcgaatcccatcctcgt

SEQ ID NO: 5823 - DNA, 23 bp, Artificial Sequence
  Probe
gcactctggactctgaatccagc

SEQ ID NO: 5824 - DNA, 31 bp, Artificial Sequence
  Probe
gcactctggactctgaatccagcgatccgag

SEQ ID NO: 5825 - DNA, 50 bp, Artificial Sequence
  Probe
gcactctggactttgaatccagcgatccgagttcaaatctcggtgggacc

SEQ ID NO: 5826 - DNA, 27 bp, Artificial Sequence
  Probe
gcactggtggttcagtggtagaattct

SEQ ID NO: 5827 - DNA, 31 bp, Artificial Sequence
  Probe
gcactggtggttcagtggtagaattctcgcc

SEQ ID NO: 5828 - DNA, 33 bp, Artificial Sequence
  Probe
gcactggtggttcagtggtagaattctcgcctc

SEQ ID NO: 5829 - DNA, 34 bp, Artificial Sequence
  Probe
gcactggtggttcagtggtagaattctcgcctcc

SEQ ID NO: 5830 - DNA, 37 bp, Artificial Sequence
  Probe
gcagaaggtcctgggttcgagccccagtggaaccacg

SEQ ID NO: 5831 - DNA, 38 bp, Artificial Sequence
  Probe
gcagaaggtcctgggttcgagccccagtggaaccacgg

SEQ ID NO: 5832 - DNA, 38 bp, Artificial Sequence
  Probe
gcagaaggtcctgggttcgagccccagtggaaccatag

SEQ ID NO: 5833 - DNA, 33 bp, Artificial Sequence
  Probe
gcagagtggcgcagcggaagcgtgctgggccca

SEQ ID NO: 5834 - DNA, 25 bp, Artificial Sequence
  Probe
gcagagtggggttttgcagtcctta

SEQ ID NO: 5835 - DNA, 26 bp, Artificial Sequence
  Probe
gcagagtggggttttgcagtccttag

SEQ ID NO: 5836 - DNA, 27 bp, Artificial Sequence
  Probe
gcagagtggggttttgcagtccttagc

SEQ ID NO: 5837 - DNA, 28 bp, Artificial Sequence
  Probe
gcagagtggggttttgcagtccttagct

SEQ ID NO: 5838 - DNA, 31 bp, Artificial Sequence
  Probe
gcagcaacctcggttcgaatccgagtcacgg

SEQ ID NO: 5839 - DNA, 36 bp, Artificial Sequence
  Probe
gcagcaacctcggttcgaatccgagtcacggcaggt

SEQ ID NO: 5840 - DNA, 36 bp, Artificial Sequence
  Probe
gcagcaacctcggttcgaatccgagtcacggcattg

SEQ ID NO: 5841 - DNA, 23 bp, Artificial Sequence
  Probe
gcagcgatggccgagtggttaag

SEQ ID NO: 5842 - DNA, 40 bp, Artificial Sequence
  Probe
gcagcggaagcgtgctgggcccataacccagaggtcgatg

SEQ ID NO: 5843 - DNA, 24 bp, Artificial Sequence
  Probe
gcagcttcaaacctgccggggctt

SEQ ID NO: 5844 - DNA, 26 bp, Artificial Sequence
  Probe
gcagcttcaaacctgccggggcttct

SEQ ID NO: 5845 - DNA, 18 bp, Artificial Sequence
  Probe
gcataaaacttaaaactt

SEQ ID NO: 5846 - DNA, 21 bp, Artificial Sequence
  Probe
gcataaaacttaaaactttac

SEQ ID NO: 5847 - DNA, 33 bp, Artificial Sequence
  Probe
gcataaaacttaaaactttacagtcagaggttc

SEQ ID NO: 5848 - DNA, 43 bp, Artificial Sequence
  Probe
gcataaaacttaaaactttacagtcagaggttcaattcctctt

SEQ ID NO: 5849 - DNA, 45 bp, Artificial Sequence
  Probe
gcataaaacttaaaactttacagtcagaggttcaattcctcttct

SEQ ID NO: 5850 - DNA, 46 bp, Artificial Sequence
  Probe
gcataaaacttaaaactttacagtcagaggttcaattcctcttctt

SEQ ID NO: 5851 - DNA, 50 bp, Artificial Sequence
  Probe
gcataaaacttaaaactttacagtcagaggttcaattcctcttcttaaca

SEQ ID NO: 5852 - DNA, 27 bp, Artificial Sequence
  Probe
gcatagctgccttccaagcagttgacc

SEQ ID NO: 5853 - DNA, 29 bp, Artificial Sequence
  Probe
gcatagctgccttccaagcagttgacccg

SEQ ID NO: 5854 - DNA, 33 bp, Artificial Sequence
  Probe
gcatagctgccttccaagcagttgacccgggtt

SEQ ID NO: 5855 - DNA, 25 bp, Artificial Sequence
  Probe
gcataggtggttcagtggtagaatt

SEQ ID NO: 5856 - DNA, 27 bp, Artificial Sequence
  Probe
gcataggtggttcagtggtagaattct

SEQ ID NO: 5857 - DNA, 31 bp, Artificial Sequence
  Probe
gcataggtggttcagtggtagaattcttgcc

SEQ ID NO: 5858 - DNA, 32 bp, Artificial Sequence
  Probe
gcataggtggttcagtggtagaattcttgcct

SEQ ID NO: 5859 - DNA, 33 bp, Artificial Sequence
  Probe
gcataggtggttcagtggtagaattcttgcctg

SEQ ID NO: 5860 - DNA, 17 bp, Artificial Sequence
  Probe
gcatgagactcttaatc

SEQ ID NO: 5861 - DNA, 38 bp, Artificial Sequence
  Probe
gcatgaggtcccgggttcgatccccagcatctccagtg

SEQ ID NO: 5862 - DNA, 17 bp, Artificial Sequence
  Probe
gcatgggactcttaatc

SEQ ID NO: 5863 - DNA, 16 bp, Artificial Sequence
  Probe
gcatgggtggttcagt

SEQ ID NO: 5864 - DNA, 20 bp, Artificial Sequence
  Probe
gcatgggtggttcagtggta

SEQ ID NO: 5865 - DNA, 22 bp, Artificial Sequence
  Probe
gcatgggtggttcagtggtaga

SEQ ID NO: 5866 - DNA, 24 bp, Artificial Sequence
  Probe
gcatgggtggttcagtggtagaat

SEQ ID NO: 5867 - DNA, 25 bp, Artificial Sequence
  Probe
gcatgggtggttcagtggtagaatt

SEQ ID NO: 5868 - DNA, 26 bp, Artificial Sequence
  Probe
gcatgggtggttcagtggtagaattc

SEQ ID NO: 5869 - DNA, 27 bp, Artificial Sequence
  Probe
gcatgggtggttcagtggtagaattct

SEQ ID NO: 5870 - DNA, 37 bp, Artificial Sequence
  Probe
gcatgggtggttcagtggtagaattctcgcctgccac

SEQ ID NO: 5871 - DNA, 39 bp, Artificial Sequence
  Probe
gcatgggtggttcagtggtagaattctcgcctgccacgc

SEQ ID NO: 5872 - DNA, 40 bp, Artificial Sequence
  Probe
gcatgggtggttcagtggtagaattctcgcctgccacgcg

SEQ ID NO: 5873 - DNA, 43 bp, Artificial Sequence
  Probe
gcatgggtggttcagtggtagaattctcgcctgccacgcggga

SEQ ID NO: 5874 - DNA, 47 bp, Artificial Sequence
  Probe
gcatgggtggttcagtggtagaattctcgcctgccacgcgggaggcc

SEQ ID NO: 5875 - DNA, 48 bp, Artificial Sequence
  Probe
gcatgggtggttcagtggtagaattctcgcctgccacgcgggaggccc

SEQ ID NO: 5876 - DNA, 49 bp, Artificial Sequence
  Probe
gcatgggtggttcagtggtagaattctcgcctgccacgcgggaggcccg

SEQ ID NO: 5877 - DNA, 17 bp, Artificial Sequence
  Probe
gcattaaccttttaagt

SEQ ID NO: 5878 - DNA, 23 bp, Artificial Sequence
  Probe
gcattaaccttttaagttaaaga

SEQ ID NO: 5879 - DNA, 33 bp, Artificial Sequence
  Probe
gcattaaccttttaagttaaagattaagagaac

SEQ ID NO: 5880 - DNA, 40 bp, Artificial Sequence
  Probe
gcattaaccttttaagttaaagattaagagaaccaacacc

SEQ ID NO: 5881 - DNA, 49 bp, Artificial Sequence
  Probe
gcattaaccttttaagttaaagattaagagaaccaacacctctttacag

SEQ ID NO: 5882 - DNA, 50 bp, Artificial Sequence
  Probe
gcattggactgtaaatctaaagacaggggttaggcctctttttaccagct

SEQ ID NO: 5883 - DNA, 27 bp, Artificial Sequence
  Probe
gcattggtggttcaatggtagaattct

SEQ ID NO: 5884 - DNA, 31 bp, Artificial Sequence
  Probe
gcattggtggttcaatggtagaattctcgcc

SEQ ID NO: 5885 - DNA, 33 bp, Artificial Sequence
  Probe
gcattggtggttcaatggtagaattctcgcctc

SEQ ID NO: 5886 - DNA, 16 bp, Artificial Sequence
  Probe
gcattggtggttcagt

SEQ ID NO: 5887 - DNA, 17 bp, Artificial Sequence
  Probe
gcattggtggttcagtg

SEQ ID NO: 5888 - DNA, 18 bp, Artificial Sequence
  Probe
gcattggtggttcagtgg

SEQ ID NO: 5889 - DNA, 19 bp, Artificial Sequence
  Probe
gcattggtggttcagtggt

SEQ ID NO: 5890 - DNA, 20 bp, Artificial Sequence
  Probe
gcattggtggttcagtggta

SEQ ID NO: 5891 - DNA, 21 bp, Artificial Sequence
  Probe
gcattggtggttcagtggtag

SEQ ID NO: 5892 - DNA, 22 bp, Artificial Sequence
  Probe
gcattggtggttcagtggtaga

SEQ ID NO: 5893 - DNA, 23 bp, Artificial Sequence
  Probe
gcattggtggttcagtggtagaa

SEQ ID NO: 5894 - DNA, 24 bp, Artificial Sequence
  Probe
gcattggtggttcagtggtagaat

SEQ ID NO: 5895 - DNA, 25 bp, Artificial Sequence
  Probe
gcattggtggttcagtggtagaatt

SEQ ID NO: 5896 - DNA, 26 bp, Artificial Sequence
  Probe
gcattggtggttcagtggtagaattc

SEQ ID NO: 5897 - DNA, 27 bp, Artificial Sequence
  Probe
gcattggtggttcagtggtagaattct

SEQ ID NO: 5898 - DNA, 28 bp, Artificial Sequence
  Probe
gcattggtggttcagtggtagaattctc

SEQ ID NO: 5899 - DNA, 29 bp, Artificial Sequence
  Probe
gcattggtggttcagtggtagaattctcg

SEQ ID NO: 5900 - DNA, 30 bp, Artificial Sequence
  Probe
gcattggtggttcagtggtagaattctcgc

SEQ ID NO: 5901 - DNA, 31 bp, Artificial Sequence
  Probe
gcattggtggttcagtggtagaattctcgcc

SEQ ID NO: 5902 - DNA, 32 bp, Artificial Sequence
  Probe
gcattggtggttcagtggtagaattctcgcct

SEQ ID NO: 5903 - DNA, 33 bp, Artificial Sequence
  Probe
gcattggtggttcagtggtagaattctcgcctc

SEQ ID NO: 5904 - DNA, 34 bp, Artificial Sequence
  Probe
gcattggtggttcagtggtagaattctcgcctcc

SEQ ID NO: 5905 - DNA, 35 bp, Artificial Sequence
  Probe
gcattggtggttcagtggtagaattctcgcctccc

SEQ ID NO: 5906 - DNA, 36 bp, Artificial Sequence
  Probe
gcattggtggttcagtggtagaattctcgcctccca

SEQ ID NO: 5907 - DNA, 39 bp, Artificial Sequence
  Probe
gcattggtggttcagtggtagaattctcgcctcccacgc

SEQ ID NO: 5908 - DNA, 33 bp, Artificial Sequence
  Probe
gcattggtggttcagtggtagaattctcgcctg

SEQ ID NO: 5909 - DNA, 34 bp, Artificial Sequence
  Probe
gcattggtggttcagtggtagaattctcgcctgc

SEQ ID NO: 5910 - DNA, 35 bp, Artificial Sequence
  Probe
gcattggtggttcagtggtagaattctcgcctgcc

SEQ ID NO: 5911 - DNA, 36 bp, Artificial Sequence
  Probe
gcattggtggttcagtggtagaattctcgcctgcca

SEQ ID NO: 5912 - DNA, 37 bp, Artificial Sequence
  Probe
gcattggtggttcagtggtagaattctcgcctgccac

SEQ ID NO: 5913 - DNA, 42 bp, Artificial Sequence
  Probe
gcattggtggttcagtggtagaattctcgcctgccacgcggg

SEQ ID NO: 5914 - DNA, 43 bp, Artificial Sequence
  Probe
gcattggtggttcagtggtagaattctcgcctgccacgcggga

SEQ ID NO: 5915 - DNA, 45 bp, Artificial Sequence
  Probe
gcattggtggttcagtggtagaattctcgcctgccacgcgggagg

SEQ ID NO: 5916 - DNA, 46 bp, Artificial Sequence
  Probe
gcattggtggttcagtggtagaattctcgcctgccacgcgggaggc

SEQ ID NO: 5917 - DNA, 47 bp, Artificial Sequence
  Probe
gcattggtggttcagtggtagaattctcgcctgccacgcgggaggcc

SEQ ID NO: 5918 - DNA, 48 bp, Artificial Sequence
  Probe
gcattggtggttcagtggtagaattctcgcctgccacgcgggaggccc

SEQ ID NO: 5919 - DNA, 37 bp, Artificial Sequence
  Probe
gcattggtggttcagtggtagaattctcgcctgccat

SEQ ID NO: 5920 - DNA, 40 bp, Artificial Sequence
  Probe
gcattggtggttcagtggtagaattctcgcctgccatgcg

SEQ ID NO: 5921 - DNA, 50 bp, Artificial Sequence
  Probe
gcattggtggttcagtggtagaattctcgcctgccatgcgggcggccggg

SEQ ID NO: 5922 - DNA, 37 bp, Artificial Sequence
  Probe
gccaaggtcgcgggttcgatccccgtacgggccacga

SEQ ID NO: 5923 - DNA, 37 bp, Artificial Sequence
  Probe
gccaaggtcgcgggttcgatccccgtacgggccactg

SEQ ID NO: 5924 - DNA, 37 bp, Artificial Sequence
  Probe
gccaaggtcgcgggttcgatccccgtacgggccactt

SEQ ID NO: 5925 - DNA, 39 bp, Artificial Sequence
  Probe
gccacgcgggaggcccgggttcgattcccggccaatgca

SEQ ID NO: 5926 - DNA, 42 bp, Artificial Sequence
  Probe
gccacgcgggaggcccgggttcgattcccggccaatgcacga

SEQ ID NO: 5927 - DNA, 43 bp, Artificial Sequence
  Probe
gccacgcgggaggcccgggttcgattcccggccaatgcacttt

SEQ ID NO: 5928 - DNA, 39 bp, Artificial Sequence
  Probe
gccacgcgggaggcccgggttcgattcccggcccatgca

SEQ ID NO: 5929 - DNA, 42 bp, Artificial Sequence
  Probe
gccacgcgggaggcccgggttcgattcccggcccatgcagca

SEQ ID NO: 5930 - DNA, 50 bp, Artificial Sequence
  Probe
gccacgcgggaggcccgggttcgattcccggcccatgcagcacgccctcc

SEQ ID NO: 5931 - DNA, 28 bp, Artificial Sequence
  Probe
gccagggattgtgggttcgagtcccatc

SEQ ID NO: 5932 - DNA, 38 bp, Artificial Sequence
  Probe
gccagggattgtgggttcgagtcccatctggggtggcc

SEQ ID NO: 5933 - DNA, 17 bp, Artificial Sequence
  Probe
gcccacccagggacgcc

SEQ ID NO: 5934 - DNA, 32 bp, Artificial Sequence
  Probe
gcccagctagctcagtcggtagagcataagac

SEQ ID NO: 5935 - DNA, 33 bp, Artificial Sequence
  Probe
gcccagctagctcagtcggtagagcataagact

SEQ ID NO: 5936 - DNA, 31 bp, Artificial Sequence
  Probe
gcccagctagctcagtcggtagagcatgaga

SEQ ID NO: 5937 - DNA, 32 bp, Artificial Sequence
  Probe
gcccagctagctcagtcggtagagcatgagac

SEQ ID NO: 5938 - DNA, 33 bp, Artificial Sequence
  Probe
gcccagctagctcagtcggtagagcatgagact

SEQ ID NO: 5939 - DNA, 34 bp, Artificial Sequence
  Probe
gcccagctagctcagtcggtagagcatgagactc

SEQ ID NO: 5940 - DNA, 36 bp, Artificial Sequence
  Probe
gcccagctagctcagtcggtagagcatgagactctt

SEQ ID NO: 5941 - DNA, 25 bp, Artificial Sequence
  Probe
gcccataacccagaggtcgatggat

SEQ ID NO: 5942 - DNA, 46 bp, Artificial Sequence
  Probe
gcccataacccagaggtcgatggatcgaaaccatcctctgctaggt

SEQ ID NO: 5943 - DNA, 21 bp, Artificial Sequence
  Probe
gcccataccccgaaaatgttg

SEQ ID NO: 5944 - DNA, 22 bp, Artificial Sequence
  Probe
gcccataccccgaaaatgttgg

SEQ ID NO: 5945 - DNA, 24 bp, Artificial Sequence
  Probe
gcccataccccgaaaatgttggtt

SEQ ID NO: 5946 - DNA, 25 bp, Artificial Sequence
  Probe
gcccataccccgaaaatgttggtta

SEQ ID NO: 5947 - DNA, 33 bp, Artificial Sequence
  Probe
gcccataccccgaaaatgttggttatacccttc

SEQ ID NO: 5948 - DNA, 43 bp, Artificial Sequence
  Probe
gcccataccccgaaaatgttggttatacccttcccgtactaat

SEQ ID NO: 5949 - DNA, 44 bp, Artificial Sequence
  Probe
gcccataccccgaaaatgttggttatacccttcccgtactaatt

SEQ ID NO: 5950 - DNA, 36 bp, Artificial Sequence
  Probe
gccccagtggcctaatggataaggcactggcctcct

SEQ ID NO: 5951 - DNA, 15 bp, Artificial Sequence
  Probe
gcccccatgtctaac

SEQ ID NO: 5952 - DNA, 16 bp, Artificial Sequence
  Probe
gcccccatgtctaaca

SEQ ID NO: 5953 - DNA, 17 bp, Artificial Sequence
  Probe
gcccccatgtctaacaa

SEQ ID NO: 5954 - DNA, 18 bp, Artificial Sequence
  Probe
gcccccatgtctaacaac

SEQ ID NO: 5955 - DNA, 19 bp, Artificial Sequence
  Probe
gcccccatgtctaacaaca

SEQ ID NO: 5956 - DNA, 20 bp, Artificial Sequence
  Probe
gcccccatgtctaacaacat

SEQ ID NO: 5957 - DNA, 21 bp, Artificial Sequence
  Probe
gcccccatgtctaacaacatg

SEQ ID NO: 5958 - DNA, 22 bp, Artificial Sequence
  Probe
gcccccatgtctaacaacatgg

SEQ ID NO: 5959 - DNA, 23 bp, Artificial Sequence
  Probe
gcccccatgtctaacaacatggc

SEQ ID NO: 5960 - DNA, 24 bp, Artificial Sequence
  Probe
gcccccatgtctaacaacatggct

SEQ ID NO: 5961 - DNA, 25 bp, Artificial Sequence
  Probe
gcccccatgtctaacaacatggctt

SEQ ID NO: 5962 - DNA, 26 bp, Artificial Sequence
  Probe
gcccccatgtctaacaacatggcttt

SEQ ID NO: 5963 - DNA, 27 bp, Artificial Sequence
  Probe
gcccccatgtctaacaacatggctttc

SEQ ID NO: 5964 - DNA, 28 bp, Artificial Sequence
  Probe
gcccccatgtctaacaacatggctttct

SEQ ID NO: 5965 - DNA, 29 bp, Artificial Sequence
  Probe
gcccccatgtctaacaacatggctttctc

SEQ ID NO: 5966 - DNA, 30 bp, Artificial Sequence
  Probe
gcccccatgtctaacaacatggctttctca

SEQ ID NO: 5967 - DNA, 31 bp, Artificial Sequence
  Probe
gcccccatgtctaacaacatggctttctcaa

SEQ ID NO: 5968 - DNA, 32 bp, Artificial Sequence
  Probe
gcccccatgtctaacaacatggctttctcaac

SEQ ID NO: 5969 - DNA, 33 bp, Artificial Sequence
  Probe
gcccccatgtctaacaacatggctttctcaact

SEQ ID NO: 5970 - DNA, 34 bp, Artificial Sequence
  Probe
gcccccatgtctaacaacatggctttctcaactt

SEQ ID NO: 5971 - DNA, 35 bp, Artificial Sequence
  Probe
gcccccatgtctaacaacatggctttctcaacttt

SEQ ID NO: 5972 - DNA, 36 bp, Artificial Sequence
  Probe
gcccccatgtctaacaacatggctttctcaactttt

SEQ ID NO: 5973 - DNA, 37 bp, Artificial Sequence
  Probe
gcccccatgtctaacaacatggctttctcaactttta

SEQ ID NO: 5974 - DNA, 38 bp, Artificial Sequence
  Probe
gcccccatgtctaacaacatggctttctcaacttttaa

SEQ ID NO: 5975 - DNA, 39 bp, Artificial Sequence
  Probe
gcccccatgtctaacaacatggctttctcaacttttaaa

SEQ ID NO: 5976 - DNA, 40 bp, Artificial Sequence
  Probe
gcccccatgtctaacaacatggctttctcaacttttaaag

SEQ ID NO: 5977 - DNA, 41 bp, Artificial Sequence
  Probe
gcccccatgtctaacaacatggctttctcaacttttaaagg

SEQ ID NO: 5978 - DNA, 21 bp, Artificial Sequence
  Probe
gccccgggttcaatccccggc

SEQ ID NO: 5979 - DNA, 31 bp, Artificial Sequence
  Probe
gccccgggttcgatccccggcatctccattg

SEQ ID NO: 5980 - DNA, 20 bp, Artificial Sequence
  Probe
gccccggtggcctaatggat

SEQ ID NO: 5981 - DNA, 28 bp, Artificial Sequence
  Probe
gcccctcatttacataaatattatacta

SEQ ID NO: 5982 - DNA, 33 bp, Artificial Sequence
  Probe
gcccgactacctcagtcggtggagcatgggact

SEQ ID NO: 5983 - DNA, 33 bp, Artificial Sequence
  Probe
gcccggagagctcagtgggtagagcatcagact

SEQ ID NO: 5984 - DNA, 16 bp, Artificial Sequence
  Probe
gcccggatagctcagt

SEQ ID NO: 5985 - DNA, 17 bp, Artificial Sequence
  Probe
gcccggatagctcagtc

SEQ ID NO: 5986 - DNA, 27 bp, Artificial Sequence
  Probe
gcccggatagctcagtcggtagagcat

SEQ ID NO: 5987 - DNA, 38 bp, Artificial Sequence
  Probe
gcccggatagctcagtcggtagagcatcagacttttaa

SEQ ID NO: 5988 - DNA, 39 bp, Artificial Sequence
  Probe
gcccggatagctcagtcggtagagcatcagacttttaat

SEQ ID NO: 5989 - DNA, 41 bp, Artificial Sequence
  Probe
gcccggatagctcagtcggtagagcatcagacttttaatct

SEQ ID NO: 5990 - DNA, 32 bp, Artificial Sequence
  Probe
gcccggatagttcagttggtagagcatcagac

SEQ ID NO: 5991 - DNA, 33 bp, Artificial Sequence
  Probe
gcccggatagttcagttggtagagcatcagact

SEQ ID NO: 5992 - DNA, 34 bp, Artificial Sequence
  Probe
gcccggatagttcagttggtagagcatcagactt

SEQ ID NO: 5993 - DNA, 19 bp, Artificial Sequence
  Probe
gcccggctagctcagtcga

SEQ ID NO: 5994 - DNA, 32 bp, Artificial Sequence
  Probe
gcccggctagctcagtcgatagagcatgagac

SEQ ID NO: 5995 - DNA, 34 bp, Artificial Sequence
  Probe
gcccggctagctcagtcgatagagcatgagactc

SEQ ID NO: 5996 - DNA, 36 bp, Artificial Sequence
  Probe
gcccggctagctcagtcgatagagcatgagactctt

SEQ ID NO: 5997 - DNA, 41 bp, Artificial Sequence
  Probe
gcccggctagctcagtcggtagagcatgagactcttaatct

SEQ ID NO: 5998 - DNA, 45 bp, Artificial Sequence
  Probe
gcccggctagctcagtcggtagagcatgagactcttaatctcagg

SEQ ID NO: 5999 - DNA, 49 bp, Artificial Sequence
  Probe
gcccggctagctcagtcggtagagcatgagactcttaatctcagggtcg

SEQ ID NO: 6000 - DNA, 38 bp, Artificial Sequence
  Probe
gcccggctagctcagtcggtagagcatgggactcttaa

SEQ ID NO: 6001 - DNA, 39 bp, Artificial Sequence
  Probe
gcccggctagctcagtcggtagagcatgggactcttaat

SEQ ID NO: 6002 - DNA, 41 bp, Artificial Sequence
  Probe
gcccggctagctcagtcggtagagcatgggactcttaatcc

SEQ ID NO: 6003 - DNA, 43 bp, Artificial Sequence
  Probe
gcccggctagctcagtcggtagagcatgggactcttaatccca

SEQ ID NO: 6004 - DNA, 46 bp, Artificial Sequence
  Probe
gcccggctagctcagtcggtagagcatgggactcttaatcccaggg

SEQ ID NO: 6005 - DNA, 48 bp, Artificial Sequence
  Probe
gcccggctagctcagtcggtagagcatgggactcttaatcccagggtc

SEQ ID NO: 6006 - DNA, 49 bp, Artificial Sequence
  Probe
gcccggctagctcagtcggtagagcatgggactcttaatcccagggtcg

SEQ ID NO: 6007 - DNA, 50 bp, Artificial Sequence
  Probe
gcccggctagctcagtcggtagagcatgggactcttaatctcagggtcgt

SEQ ID NO: 6008 - DNA, 30 bp, Artificial Sequence
  Probe
gcccgggttcgactcccggtgtgggaacgc

SEQ ID NO: 6009 - DNA, 27 bp, Artificial Sequence
  Probe
gcccggtaatcgcataaaacttaaaac

SEQ ID NO: 6010 - DNA, 29 bp, Artificial Sequence
  Probe
gcccggtaatcgcataaaacttaaaactt

SEQ ID NO: 6011 - DNA, 45 bp, Artificial Sequence
  Probe
gcccggtaatcgcataaaacttaaaactttacagtcagaggttca

SEQ ID NO: 6012 - DNA, 50 bp, Artificial Sequence
  Probe
gcccggtaatcgcataaaacttaaaactttacagtcagaggttcaattcc

SEQ ID NO: 6013 - DNA, 27 bp, Artificial Sequence
  Probe
gccctcagtaagttgcaatacttaatt

SEQ ID NO: 6014 - DNA, 31 bp, Artificial Sequence
  Probe
gccctcagtaagttgcaatacttaatttctg

SEQ ID NO: 6015 - DNA, 32 bp, Artificial Sequence
  Probe
gccctcagtaagttgcaatacttaatttctgt

SEQ ID NO: 6016 - DNA, 21 bp, Artificial Sequence
  Probe
gccgaaatagctcagttggga

SEQ ID NO: 6017 - DNA, 23 bp, Artificial Sequence
  Probe
gccgaaatagctcagttgggaga

SEQ ID NO: 6018 - DNA, 25 bp, Artificial Sequence
  Probe
gccgaaatagctcagttgggagagc

SEQ ID NO: 6019 - DNA, 18 bp, Artificial Sequence
  Probe
gccgaggttgtgagttcg

SEQ ID NO: 6020 - DNA, 23 bp, Artificial Sequence
  Probe
gccgcggcccgggttcgattccc

SEQ ID NO: 6021 - DNA, 32 bp, Artificial Sequence
  Probe
gccgcggcccgggttcgattcccggtcaggga

SEQ ID NO: 6022 - DNA, 33 bp, Artificial Sequence
  Probe
gccgcggcccgggttcgattcccggtcagggaa

SEQ ID NO: 6023 - DNA, 34 bp, Artificial Sequence
  Probe
gccgcggcccgggttcgattcccggtcagggaaa

SEQ ID NO: 6024 - DNA, 34 bp, Artificial Sequence
  Probe
gccgcggcccgggttcgattcccggtcagggaag

SEQ ID NO: 6025 - DNA, 36 bp, Artificial Sequence
  Probe
gccgcggcccgggttcgattcccggtcagggaagcc

SEQ ID NO: 6026 - DNA, 36 bp, Artificial Sequence
  Probe
gccgcggcccgggttcgattcccggtcagggaagtt

SEQ ID NO: 6027 - DNA, 34 bp, Artificial Sequence
  Probe
gccgcggcccgggttcgattcccggtcagggaat

SEQ ID NO: 6028 - DNA, 36 bp, Artificial Sequence
  Probe
gccgcggcccgggttcgattcccggtcagggaattg

SEQ ID NO: 6029 - DNA, 23 bp, Artificial Sequence
  Probe
gccgctggtgtagtggtatcatg

SEQ ID NO: 6030 - DNA, 29 bp, Artificial Sequence
  Probe
gccgctggtgtagtggtatcatgcaagat

SEQ ID NO: 6031 - DNA, 18 bp, Artificial Sequence
  Probe
gccgtgatcgtatagtgg

SEQ ID NO: 6032 - DNA, 20 bp, Artificial Sequence
  Probe
gccgtgatcgtatagtggtt

SEQ ID NO: 6033 - DNA, 23 bp, Artificial Sequence
  Probe
gccgtgatcgtatagtggttagt

SEQ ID NO: 6034 - DNA, 24 bp, Artificial Sequence
  Probe
gccgtgatcgtatagtggttagta

SEQ ID NO: 6035 - DNA, 26 bp, Artificial Sequence
  Probe
gccgtgatcgtatagtggttagtact

SEQ ID NO: 6036 - DNA, 27 bp, Artificial Sequence
  Probe
gccgtgatcgtatagtggttagtactc

SEQ ID NO: 6037 - DNA, 28 bp, Artificial Sequence
  Probe
gccgtgatcgtatagtggttagtactct

SEQ ID NO: 6038 - DNA, 29 bp, Artificial Sequence
  Probe
gccgtgatcgtatagtggttagtactctg

SEQ ID NO: 6039 - DNA, 37 bp, Artificial Sequence
  Probe
gccgtgatcgtatagtggttagtactctgcgttgtgg

SEQ ID NO: 6040 - DNA, 50 bp, Artificial Sequence
  Probe
gccgtgatcgtatagtggttagtactctgcgttgtggccgcagcaacctc

SEQ ID NO: 6041 - DNA, 16 bp, Artificial Sequence
  Probe
gcctccttagcgcagt

SEQ ID NO: 6042 - DNA, 25 bp, Artificial Sequence
  Probe
gcctccttagcgcagtaggcagcgc

SEQ ID NO: 6043 - DNA, 33 bp, Artificial Sequence
  Probe
gcctccttagcgcagtaggcagcgcgtcagtct

SEQ ID NO: 6044 - DNA, 16 bp, Artificial Sequence
  Probe
gcctcgttagcgcagt

SEQ ID NO: 6045 - DNA, 19 bp, Artificial Sequence
  Probe
gcctcgttagcgcagtagg

SEQ ID NO: 6046 - DNA, 35 bp, Artificial Sequence
  Probe
gcctcgttagcgcagtaggcagcgcgtcagtctca

SEQ ID NO: 6047 - DNA, 21 bp, Artificial Sequence
  Probe
gcctcgttagcgcagtaggta

SEQ ID NO: 6048 - DNA, 22 bp, Artificial Sequence
  Probe
gcctcgttagcgcagtaggtag

SEQ ID NO: 6049 - DNA, 23 bp, Artificial Sequence
  Probe
gcctcgttagcgcagtaggtagc

SEQ ID NO: 6050 - DNA, 24 bp, Artificial Sequence
  Probe
gcctcgttagcgcagtaggtagcg

SEQ ID NO: 6051 - DNA, 25 bp, Artificial Sequence
  Probe
gcctcgttagcgcagtaggtagcgc

SEQ ID NO: 6052 - DNA, 31 bp, Artificial Sequence
  Probe
gcctcgttagcgcagtaggtagcgcgtcagt

SEQ ID NO: 6053 - DNA, 16 bp, Artificial Sequence
  Probe
gcctggatagctcagt

SEQ ID NO: 6054 - DNA, 34 bp, Artificial Sequence
  Probe
gcctggatagctcagtcggtagagcatcagactt

SEQ ID NO: 6055 - DNA, 50 bp, Artificial Sequence
  Probe
gcctggatagctcagttggtagagcatcagacttttaatctgagggtcca

SEQ ID NO: 6056 - DNA, 25 bp, Artificial Sequence
  Probe
gcctgggtagctcagtcggtagagc

SEQ ID NO: 6057 - DNA, 29 bp, Artificial Sequence
  Probe
gcctgggtagctcagtcggtagagcatca

SEQ ID NO: 6058 - DNA, 24 bp, Artificial Sequence
  Probe
gcctgtcacgcgggagaccggggt

SEQ ID NO: 6059 - DNA, 44 bp, Artificial Sequence
  Probe
gcctgtcacgcgggagaccggggttcaattccccgacggggagg

SEQ ID NO: 6060 - DNA, 46 bp, Artificial Sequence
  Probe
gcctgtcacgcgggagaccggggttcaattccccgacggggaggtg

SEQ ID NO: 6061 - DNA, 49 bp, Artificial Sequence
  Probe
gcctgtcacgcgggagaccggggttcaattccccgacggggaggtgtgt

SEQ ID NO: 6062 - DNA, 44 bp, Artificial Sequence
  Probe
gcctgtcacgcgggagaccggggttcgattccccgacggggaga

SEQ ID NO: 6063 - DNA, 50 bp, Artificial Sequence
  Probe
gcctgtcacgcgggagaccggggttcgattccccgacggggagaaaagtt

SEQ ID NO: 6064 - DNA, 46 bp, Artificial Sequence
  Probe
gcctgtcacgcgggagaccggggttcgattccccgacggggagagt

SEQ ID NO: 6065 - DNA, 44 bp, Artificial Sequence
  Probe
gcctgtcacgcgggagaccggggttcgattccccgacggggagg

SEQ ID NO: 6066 - DNA, 46 bp, Artificial Sequence
  Probe
gcctgtcacgcgggagaccggggttcgattccccgacggggaggca

SEQ ID NO: 6067 - DNA, 49 bp, Artificial Sequence
  Probe
gcctgtcacgcgggagaccggggttcgattccccgacggggaggcacag

SEQ ID NO: 6068 - DNA, 50 bp, Artificial Sequence
  Probe
gcctgtcacgcgggagaccggggttcgattccccgacggggaggcacagt

SEQ ID NO: 6069 - DNA, 49 bp, Artificial Sequence
  Probe
gcctgtcacgcgggagaccggggttcgattccccgacggggaggcagcc

SEQ ID NO: 6070 - DNA, 46 bp, Artificial Sequence
  Probe
gcctgtcacgcgggagaccggggttcgattccccgacggggaggcc

SEQ ID NO: 6071 - DNA, 32 bp, Artificial Sequence
  Probe
gccttggtggtgcagtggtagaattctcgcct

SEQ ID NO: 6072 - DNA, 24 bp, Artificial Sequence
  Probe
gccttttttcccggcggcgggaga

SEQ ID NO: 6073 - DNA, 25 bp, Artificial Sequence
  Probe
gccttttttcccggcggcgggagaa

SEQ ID NO: 6074 - DNA, 27 bp, Artificial Sequence
  Probe
gccttttttcccggcggcgggagaagt

SEQ ID NO: 6075 - DNA, 28 bp, Artificial Sequence
  Probe
gccttttttcccggcggcgggagaagta

SEQ ID NO: 6076 - DNA, 19 bp, Artificial Sequence
  Probe
gcgaaaggtccccggttcg

SEQ ID NO: 6077 - DNA, 32 bp, Artificial Sequence
  Probe
gcgaaaggtccccggttcgaaaccgggcggaa

SEQ ID NO: 6078 - DNA, 38 bp, Artificial Sequence
  Probe
gcgaaaggtccccggttcgaaaccgggcggaaacacct

SEQ ID NO: 6079 - DNA, 32 bp, Artificial Sequence
  Probe
gcgacccgggttcgattcccgggcggcgcact

SEQ ID NO: 6080 - DNA, 33 bp, Artificial Sequence
  Probe
gcgacccgggttcgattcccgggcggcgcactt

SEQ ID NO: 6081 - DNA, 18 bp, Artificial Sequence
  Probe
gcgagaggtcccgggttc

SEQ ID NO: 6082 - DNA, 19 bp, Artificial Sequence
  Probe
gcgagaggtcccgggttca

SEQ ID NO: 6083 - DNA, 32 bp, Artificial Sequence
  Probe
gcgatccgagttcaaatctcggtggaacctgc

SEQ ID NO: 6084 - DNA, 33 bp, Artificial Sequence
  Probe
gcgatccgagttcaaatctcggtggaacctgca

SEQ ID NO: 6085 - DNA, 29 bp, Artificial Sequence
  Probe
gcgatccgagttcaaatctcggtgggacc

SEQ ID NO: 6086 - DNA, 33 bp, Artificial Sequence
  Probe
gcgatccgagttcaaatctcggtgggacctcac

SEQ ID NO: 6087 - DNA, 33 bp, Artificial Sequence
  Probe
gcgatccgagttcgagtctcggtggaacctttg

SEQ ID NO: 6088 - DNA, 19 bp, Artificial Sequence
  Probe
gcgccgctggtgtagtggt

SEQ ID NO: 6089 - DNA, 38 bp, Artificial Sequence
  Probe
gcgccgctggtgtagtggtatcatgcaagattcccatt

SEQ ID NO: 6090 - DNA, 42 bp, Artificial Sequence
  Probe
gcgccgctggtgtagtggtatcatgcaagattcccattcttg

SEQ ID NO: 6091 - DNA, 43 bp, Artificial Sequence
  Probe
gcgccgctggtgtagtggtatcatgcaagattcccattcttgc

SEQ ID NO: 6092 - DNA, 44 bp, Artificial Sequence
  Probe
gcgccgctggtgtagtggtatcatgcaagattcccattcttgcg

SEQ ID NO: 6093 - DNA, 45 bp, Artificial Sequence
  Probe
gcgccgctggtgtagtggtatcatgcaagattcccattcttgcga

SEQ ID NO: 6094 - DNA, 47 bp, Artificial Sequence
  Probe
gcgccgctggtgtagtggtatcatgcaagattcccattcttgcgacc

SEQ ID NO: 6095 - DNA, 48 bp, Artificial Sequence
  Probe
gcgccgctggtgtagtggtatcatgcaagattcccattcttgcgaccc

SEQ ID NO: 6096 - DNA, 49 bp, Artificial Sequence
  Probe
gcgccgctggtgtagtggtatcatgcaagattcccattcttgcgacccg

SEQ ID NO: 6097 - DNA, 50 bp, Artificial Sequence
  Probe
gcgctttcaccgccgcggcccgggttcgattcccggtcagggaattgttt

SEQ ID NO: 6098 - DNA, 32 bp, Artificial Sequence
  Probe
gcggcccgggttcgactcccggtgtgggaacg

SEQ ID NO: 6099 - DNA, 33 bp, Artificial Sequence
  Probe
gcggcccgggttcgactcccggtgtgggaacgc

SEQ ID NO: 6100 - DNA, 23 bp, Artificial Sequence
  Probe
gcggcccgggttcgattcccggt

SEQ ID NO: 6101 - DNA, 31 bp, Artificial Sequence
  Probe
gcggcccgggttcgattcccggtcagggaaa

SEQ ID NO: 6102 - DNA, 31 bp, Artificial Sequence
  Probe
gcggcccgggttcgattcccggtcagggaag

SEQ ID NO: 6103 - DNA, 31 bp, Artificial Sequence
  Probe
gcggcccgggttcgattcccggtcagggaat

SEQ ID NO: 6104 - DNA, 33 bp, Artificial Sequence
  Probe
gcggcccgggttcgattcccggtcagggaattg

SEQ ID NO: 6105 - DNA, 31 bp, Artificial Sequence
  Probe
gcgggagaccggggttcaattccccgacggg

SEQ ID NO: 6106 - DNA, 32 bp, Artificial Sequence
  Probe
gcgggagaccggggttcaattccccgacgggg

SEQ ID NO: 6107 - DNA, 33 bp, Artificial Sequence
  Probe
gcgggagaccggggttcaattccccgacgggga

SEQ ID NO: 6108 - DNA, 35 bp, Artificial Sequence
  Probe
gcgggagaccggggttcaattccccgacggggagg

SEQ ID NO: 6109 - DNA, 37 bp, Artificial Sequence
  Probe
gcgggagaccggggttcaattccccgacggggaggtg

SEQ ID NO: 6110 - DNA, 27 bp, Artificial Sequence
  Probe
gcgggagaccggggttcgattccccga

SEQ ID NO: 6111 - DNA, 29 bp, Artificial Sequence
  Probe
gcgggagaccggggttcgattccccgacg

SEQ ID NO: 6112 - DNA, 35 bp, Artificial Sequence
  Probe
gcgggagaccggggttcgattccccgacggggaga

SEQ ID NO: 6113 - DNA, 36 bp, Artificial Sequence
  Probe
gcgggagaccggggttcgattccccgacggggagaa

SEQ ID NO: 6114 - DNA, 37 bp, Artificial Sequence
  Probe
gcgggagaccggggttcgattccccgacggggagaaa

SEQ ID NO: 6115 - DNA, 36 bp, Artificial Sequence
  Probe
gcgggagaccggggttcgattccccgacggggagac

SEQ ID NO: 6116 - DNA, 37 bp, Artificial Sequence
  Probe
gcgggagaccggggttcgattccccgacggggagacg

SEQ ID NO: 6117 - DNA, 37 bp, Artificial Sequence
  Probe
gcgggagaccggggttcgattccccgacggggagagt

SEQ ID NO: 6118 - DNA, 35 bp, Artificial Sequence
  Probe
gcgggagaccggggttcgattccccgacggggagg

SEQ ID NO: 6119 - DNA, 36 bp, Artificial Sequence
  Probe
gcgggagaccggggttcgattccccgacggggagga

SEQ ID NO: 6120 - DNA, 36 bp, Artificial Sequence
  Probe
gcgggagaccggggttcgattccccgacggggaggc

SEQ ID NO: 6121 - DNA, 37 bp, Artificial Sequence
  Probe
gcgggagaccggggttcgattccccgacggggaggca

SEQ ID NO: 6122 - DNA, 37 bp, Artificial Sequence
  Probe
gcgggagaccggggttcgattccccgacggggaggcc

SEQ ID NO: 6123 - DNA, 17 bp, Artificial Sequence
  Probe
gcgggaggcccgggttc

SEQ ID NO: 6124 - DNA, 33 bp, Artificial Sequence
  Probe
gcgggaggcccgggttcgattcccggccaatgc

SEQ ID NO: 6125 - DNA, 34 bp, Artificial Sequence
  Probe
gcgggaggcccgggttcgattcccggccaatgca

SEQ ID NO: 6126 - DNA, 37 bp, Artificial Sequence
  Probe
gcgggaggcccgggttcgattcccggccaatgcaagt

SEQ ID NO: 6127 - DNA, 37 bp, Artificial Sequence
  Probe
gcgggaggcccgggttcgattcccggccaatgcacga

SEQ ID NO: 6128 - DNA, 37 bp, Artificial Sequence
  Probe
gcgggaggcccgggttcgattcccggccaatgcagca

SEQ ID NO: 6129 - DNA, 32 bp, Artificial Sequence
  Probe
gcgggaggcccgggttcgattcccggcccatg

SEQ ID NO: 6130 - DNA, 16 bp, Artificial Sequence
  Probe
gcgttggtggtatagt

SEQ ID NO: 6131 - DNA, 17 bp, Artificial Sequence
  Probe
gcgttggtggtatagtg

SEQ ID NO: 6132 - DNA, 18 bp, Artificial Sequence
  Probe
gcgttggtggtatagtgg

SEQ ID NO: 6133 - DNA, 19 bp, Artificial Sequence
  Probe
gcgttggtggtatagtggt

SEQ ID NO: 6134 - DNA, 20 bp, Artificial Sequence
  Probe
gcgttggtggtatagtggta

SEQ ID NO: 6135 - DNA, 23 bp, Artificial Sequence
  Probe
gcgttggtggtatagtggtaagc

SEQ ID NO: 6136 - DNA, 28 bp, Artificial Sequence
  Probe
gcgttggtggtatagtggtaagcatagc

SEQ ID NO: 6137 - DNA, 40 bp, Artificial Sequence
  Probe
gcgttggtggtatagtggtaagcatagctgccttccaagc

SEQ ID NO: 6138 - DNA, 43 bp, Artificial Sequence
  Probe
gcgttggtggtatagtggtaagcatagctgccttccaagcagt

SEQ ID NO: 6139 - DNA, 48 bp, Artificial Sequence
  Probe
gcgttggtggtatagtggtaagcatagctgccttccaagcagttgacc

SEQ ID NO: 6140 - DNA, 49 bp, Artificial Sequence
  Probe
gcgttggtggtatagtggtaagcatagctgccttccaagcagttgaccc

SEQ ID NO: 6141 - DNA, 20 bp, Artificial Sequence
  Probe
gcgttggtggtatagtggtg

SEQ ID NO: 6142 - DNA, 22 bp, Artificial Sequence
  Probe
gcgttggtggtatagtggtgag

SEQ ID NO: 6143 - DNA, 23 bp, Artificial Sequence
  Probe
gcgttggtggtatagtggtgagc

SEQ ID NO: 6144 - DNA, 24 bp, Artificial Sequence
  Probe
gcgttggtggtatagtggtgagca

SEQ ID NO: 6145 - DNA, 25 bp, Artificial Sequence
  Probe
gcgttggtggtatagtggtgagcat

SEQ ID NO: 6146 - DNA, 26 bp, Artificial Sequence
  Probe
gcgttggtggtatagtggtgagcata

SEQ ID NO: 6147 - DNA, 27 bp, Artificial Sequence
  Probe
gcgttggtggtatagtggtgagcatag

SEQ ID NO: 6148 - DNA, 28 bp, Artificial Sequence
  Probe
gcgttggtggtatagtggtgagcatagc

SEQ ID NO: 6149 - DNA, 29 bp, Artificial Sequence
  Probe
gcgttggtggtatagtggtgagcatagct

SEQ ID NO: 6150 - DNA, 30 bp, Artificial Sequence
  Probe
gcgttggtggtatagtggtgagcatagctg

SEQ ID NO: 6151 - DNA, 31 bp, Artificial Sequence
  Probe
gcgttggtggtatagtggtgagcatagctgc

SEQ ID NO: 6152 - DNA, 32 bp, Artificial Sequence
  Probe
gcgttggtggtatagtggtgagcatagctgcc

SEQ ID NO: 6153 - DNA, 33 bp, Artificial Sequence
  Probe
gcgttggtggtatagtggtgagcatagctgcct

SEQ ID NO: 6154 - DNA, 34 bp, Artificial Sequence
  Probe
gcgttggtggtatagtggtgagcatagctgcctt

SEQ ID NO: 6155 - DNA, 35 bp, Artificial Sequence
  Probe
gcgttggtggtatagtggtgagcatagctgccttc

SEQ ID NO: 6156 - DNA, 36 bp, Artificial Sequence
  Probe
gcgttggtggtatagtggtgagcatagctgccttcc

SEQ ID NO: 6157 - DNA, 37 bp, Artificial Sequence
  Probe
gcgttggtggtatagtggtgagcatagctgccttcca

SEQ ID NO: 6158 - DNA, 39 bp, Artificial Sequence
  Probe
gcgttggtggtatagtggtgagcatagctgccttccaag

SEQ ID NO: 6159 - DNA, 43 bp, Artificial Sequence
  Probe
gcgttggtggtatagtggtgagcatagctgccttccaagcagt

SEQ ID NO: 6160 - DNA, 45 bp, Artificial Sequence
  Probe
gcgttggtggtatagtggtgagcatagctgccttccaagcagttg

SEQ ID NO: 6161 - DNA, 46 bp, Artificial Sequence
  Probe
gcgttggtggtatagtggtgagcatagctgccttccaagcagttga

SEQ ID NO: 6162 - DNA, 47 bp, Artificial Sequence
  Probe
gcgttggtggtatagtggtgagcatagctgccttccaagcagttgac

SEQ ID NO: 6163 - DNA, 48 bp, Artificial Sequence
  Probe
gcgttggtggtatagtggtgagcatagctgccttccaagcagttgacc

SEQ ID NO: 6164 - DNA, 49 bp, Artificial Sequence
  Probe
gcgttggtggtatagtggtgagcatagctgccttccaagcagttgaccc

SEQ ID NO: 6165 - DNA, 23 bp, Artificial Sequence
  Probe
gcgttggtggtatagtggttagc

SEQ ID NO: 6166 - DNA, 24 bp, Artificial Sequence
  Probe
gcgttggtggtatagtggttagca

SEQ ID NO: 6167 - DNA, 25 bp, Artificial Sequence
  Probe
gcgttggtggtatagtggttagcat

SEQ ID NO: 6168 - DNA, 26 bp, Artificial Sequence
  Probe
gcgttggtggtatagtggttagcata

SEQ ID NO: 6169 - DNA, 27 bp, Artificial Sequence
  Probe
gcgttggtggtatagtggttagcatag

SEQ ID NO: 6170 - DNA, 28 bp, Artificial Sequence
  Probe
gcgttggtggtatagtggttagcatagc

SEQ ID NO: 6171 - DNA, 29 bp, Artificial Sequence
  Probe
gcgttggtggtatagtggttagcatagct

SEQ ID NO: 6172 - DNA, 30 bp, Artificial Sequence
  Probe
gcgttggtggtatagtggttagcatagctg

SEQ ID NO: 6173 - DNA, 31 bp, Artificial Sequence
  Probe
gcgttggtggtatagtggttagcatagctgc

SEQ ID NO: 6174 - DNA, 32 bp, Artificial Sequence
  Probe
gcgttggtggtatagtggttagcatagctgcc

SEQ ID NO: 6175 - DNA, 33 bp, Artificial Sequence
  Probe
gcgttggtggtatagtggttagcatagctgcct

SEQ ID NO: 6176 - DNA, 34 bp, Artificial Sequence
  Probe
gcgttggtggtatagtggttagcatagctgcctt

SEQ ID NO: 6177 - DNA, 35 bp, Artificial Sequence
  Probe
gcgttggtggtatagtggttagcatagctgccttc

SEQ ID NO: 6178 - DNA, 36 bp, Artificial Sequence
  Probe
gcgttggtggtatagtggttagcatagctgccttcc

SEQ ID NO: 6179 - DNA, 37 bp, Artificial Sequence
  Probe
gcgttggtggtatagtggttagcatagctgccttcca

SEQ ID NO: 6180 - DNA, 39 bp, Artificial Sequence
  Probe
gcgttggtggtatagtggttagcatagctgccttccaag

SEQ ID NO: 6181 - DNA, 40 bp, Artificial Sequence
  Probe
gcgttggtggtatagtggttagcatagctgccttccaagc

SEQ ID NO: 6182 - DNA, 43 bp, Artificial Sequence
  Probe
gcgttggtggtatagtggttagcatagctgccttccaagcagt

SEQ ID NO: 6183 - DNA, 47 bp, Artificial Sequence
  Probe
gcgttggtggtatagtggttagcatagctgccttccaagcagttgac

SEQ ID NO: 6184 - DNA, 48 bp, Artificial Sequence
  Probe
gcgttggtggtatagtggttagcatagctgccttccaagcagttgacc

SEQ ID NO: 6185 - DNA, 49 bp, Artificial Sequence
  Probe
gcgttggtggtatagtggttagcatagctgccttccaagcagttgaccc

SEQ ID NO: 6186 - DNA, 27 bp, Artificial Sequence
  Probe
gcgttggtggtttagtggtagaattct

SEQ ID NO: 6187 - DNA, 31 bp, Artificial Sequence
  Probe
gcgttggtggtttagtggtagaattctcgcc

SEQ ID NO: 6188 - DNA, 32 bp, Artificial Sequence
  Probe
gcgttggtggtttagtggtagaattctcgcct

SEQ ID NO: 6189 - DNA, 16 bp, Artificial Sequence
  Probe
gctaaacctagcccca

SEQ ID NO: 6190 - DNA, 17 bp, Artificial Sequence
  Probe
gctaaacctagccccaa

SEQ ID NO: 6191 - DNA, 18 bp, Artificial Sequence
  Probe
gctaaacctagccccaaa

SEQ ID NO: 6192 - DNA, 19 bp, Artificial Sequence
  Probe
gctaaacctagccccaaac

SEQ ID NO: 6193 - DNA, 20 bp, Artificial Sequence
  Probe
gctaaacctagccccaaacc

SEQ ID NO: 6194 - DNA, 21 bp, Artificial Sequence
  Probe
gctaaacctagccccaaaccc

SEQ ID NO: 6195 - DNA, 22 bp, Artificial Sequence
  Probe
gctaaacctagccccaaaccca

SEQ ID NO: 6196 - DNA, 23 bp, Artificial Sequence
  Probe
gctaaacctagccccaaacccac

SEQ ID NO: 6197 - DNA, 24 bp, Artificial Sequence
  Probe
gctaaacctagccccaaacccact

SEQ ID NO: 6198 - DNA, 25 bp, Artificial Sequence
  Probe
gctaaacctagccccaaacccactc

SEQ ID NO: 6199 - DNA, 26 bp, Artificial Sequence
  Probe
gctaaacctagccccaaacccactcc

SEQ ID NO: 6200 - DNA, 27 bp, Artificial Sequence
  Probe
gctaaacctagccccaaacccactcca

SEQ ID NO: 6201 - DNA, 28 bp, Artificial Sequence
  Probe
gctaaacctagccccaaacccactccac

SEQ ID NO: 6202 - DNA, 29 bp, Artificial Sequence
  Probe
gctaaacctagccccaaacccactccacc

SEQ ID NO: 6203 - DNA, 30 bp, Artificial Sequence
  Probe
gctaaacctagccccaaacccactccacct

SEQ ID NO: 6204 - DNA, 23 bp, Artificial Sequence
  Probe
gctaaataagctatcgggcccat

SEQ ID NO: 6205 - DNA, 24 bp, Artificial Sequence
  Probe
gctaaataagctatcgggcccata

SEQ ID NO: 6206 - DNA, 25 bp, Artificial Sequence
  Probe
gctaaataagctatcgggcccatac

SEQ ID NO: 6207 - DNA, 29 bp, Artificial Sequence
  Probe
gctaaataagctatcgggcccataccccg

SEQ ID NO: 6208 - DNA, 31 bp, Artificial Sequence
  Probe
gctaaataagctatcgggcccataccccgaa

SEQ ID NO: 6209 - DNA, 46 bp, Artificial Sequence
  Probe
gctaaataagctatcgggcccataccccgaaaatgttggttatacc

SEQ ID NO: 6210 - DNA, 49 bp, Artificial Sequence
  Probe
gctaaataagctatcgggcccataccccgaaaatgttggttataccctt

SEQ ID NO: 6211 - DNA, 50 bp, Artificial Sequence
  Probe
gctaaataagctatcgggcccataccccgaaaatgttggttatacccttc

SEQ ID NO: 6212 - DNA, 23 bp, Artificial Sequence
  Probe
gctaaatcctatatatcttaatg

SEQ ID NO: 6213 - DNA, 17 bp, Artificial Sequence
  Probe
gctaactcatgccccca

SEQ ID NO: 6214 - DNA, 23 bp, Artificial Sequence
  Probe
gctaactcatgcccccatgtcta

SEQ ID NO: 6215 - DNA, 24 bp, Artificial Sequence
  Probe
gctaactcatgcccccatgtctaa

SEQ ID NO: 6216 - DNA, 26 bp, Artificial Sequence
  Probe
gctaactcatgcccccatgtctaaca

SEQ ID NO: 6217 - DNA, 34 bp, Artificial Sequence
  Probe
gctaactcatgcccccatgtctaacaacatggct

SEQ ID NO: 6218 - DNA, 35 bp, Artificial Sequence
  Probe
gctaactcatgcccccatgtctaacaacatggctt

SEQ ID NO: 6219 - DNA, 36 bp, Artificial Sequence
  Probe
gctaactcatgcccccatgtctaacaacatggcttt

SEQ ID NO: 6220 - DNA, 37 bp, Artificial Sequence
  Probe
gctaactcatgcccccatgtctaacaacatggctttc

SEQ ID NO: 6221 - DNA, 38 bp, Artificial Sequence
  Probe
gctaactcatgcccccatgtctaacaacatggctttct

SEQ ID NO: 6222 - DNA, 39 bp, Artificial Sequence
  Probe
gctaactcatgcccccatgtctaacaacatggctttctc

SEQ ID NO: 6223 - DNA, 40 bp, Artificial Sequence
  Probe
gctaactcatgcccccatgtctaacaacatggctttctca

SEQ ID NO: 6224 - DNA, 41 bp, Artificial Sequence
  Probe
gctaactcatgcccccatgtctaacaacatggctttctcaa

SEQ ID NO: 6225 - DNA, 42 bp, Artificial Sequence
  Probe
gctaactcatgcccccatgtctaacaacatggctttctcaac

SEQ ID NO: 6226 - DNA, 43 bp, Artificial Sequence
  Probe
gctaactcatgcccccatgtctaacaacatggctttctcaact

SEQ ID NO: 6227 - DNA, 50 bp, Artificial Sequence
  Probe
gctaactcatgcccccatgtctaacaacatggctttctcaacttttaaag

SEQ ID NO: 6228 - DNA, 50 bp, Artificial Sequence
  Probe
gctaacttagcattaaccttttaagttaaagattaagagaaccaacacct

SEQ ID NO: 6229 - DNA, 23 bp, Artificial Sequence
  Probe
gctaaggaagtcctgtgctcagt

SEQ ID NO: 6230 - DNA, 24 bp, Artificial Sequence
  Probe
gctaaggaagtcctgtgctcagtt

SEQ ID NO: 6231 - DNA, 16 bp, Artificial Sequence
  Probe
gctaatggtggagtta

SEQ ID NO: 6232 - DNA, 33 bp, Artificial Sequence
  Probe
gctaatggtggagttaaagactttttctctgat

SEQ ID NO: 6233 - DNA, 34 bp, Artificial Sequence
  Probe
gctaatggtggagttaaagactttttctctgatt

SEQ ID NO: 6234 - DNA, 35 bp, Artificial Sequence
  Probe
gctaatggtggagttaaagactttttctctgattt

SEQ ID NO: 6235 - DNA, 37 bp, Artificial Sequence
  Probe
gctaatggtggagttaaagactttttctctgatttgt

SEQ ID NO: 6236 - DNA, 38 bp, Artificial Sequence
  Probe
gctaatggtggagttaaagactttttctctgatttgtc

SEQ ID NO: 6237 - DNA, 39 bp, Artificial Sequence
  Probe
gctaatggtggagttaaagactttttctctgatttgtcc

SEQ ID NO: 6238 - DNA, 40 bp, Artificial Sequence
  Probe
gctaatggtggagttaaagactttttctctgatttgtcct

SEQ ID NO: 6239 - DNA, 41 bp, Artificial Sequence
  Probe
gctaatggtggagttaaagactttttctctgatttgtcctt

SEQ ID NO: 6240 - DNA, 42 bp, Artificial Sequence
  Probe
gctaatggtggagttaaagactttttctctgatttgtccttg

SEQ ID NO: 6241 - DNA, 43 bp, Artificial Sequence
  Probe
gctaatggtggagttaaagactttttctctgatttgtccttgg

SEQ ID NO: 6242 - DNA, 22 bp, Artificial Sequence
  Probe
gctacttttaaattctgacctc

SEQ ID NO: 6243 - DNA, 23 bp, Artificial Sequence
  Probe
gctacttttaaattctgacctca

SEQ ID NO: 6244 - DNA, 24 bp, Artificial Sequence
  Probe
gctacttttaaattctgacctcaa

SEQ ID NO: 6245 - DNA, 27 bp, Artificial Sequence
  Probe
gctagctcagtcggtagagcatgagac

SEQ ID NO: 6246 - DNA, 29 bp, Artificial Sequence
  Probe
gctagctcagtcggtagagcatgagactc

SEQ ID NO: 6247 - DNA, 31 bp, Artificial Sequence
  Probe
gctagctcagtcggtagagcatgagactctt

SEQ ID NO: 6248 - DNA, 27 bp, Artificial Sequence
  Probe
gctagctcagtcggtagagcatgggac

SEQ ID NO: 6249 - DNA, 28 bp, Artificial Sequence
  Probe
gctagctcagtcggtagagcatgggact

SEQ ID NO: 6250 - DNA, 17 bp, Artificial Sequence
  Probe
gctatccattggtctta

SEQ ID NO: 6251 - DNA, 24 bp, Artificial Sequence
  Probe
gctatccattggtcttaggcccca

SEQ ID NO: 6252 - DNA, 25 bp, Artificial Sequence
  Probe
gctatccattggtcttaggccccaa

SEQ ID NO: 6253 - DNA, 18 bp, Artificial Sequence
  Probe
gctatcgggcccataccc

SEQ ID NO: 6254 - DNA, 20 bp, Artificial Sequence
  Probe
gctatcgggcccataccccg

SEQ ID NO: 6255 - DNA, 21 bp, Artificial Sequence
  Probe
gctatcgggcccataccccga

SEQ ID NO: 6256 - DNA, 22 bp, Artificial Sequence
  Probe
gctatcgggcccataccccgaa

SEQ ID NO: 6257 - DNA, 23 bp, Artificial Sequence
  Probe
gctatcgggcccataccccgaaa

SEQ ID NO: 6258 - DNA, 24 bp, Artificial Sequence
  Probe
gctatcgggcccataccccgaaaa

SEQ ID NO: 6259 - DNA, 25 bp, Artificial Sequence
  Probe
gctatcgggcccataccccgaaaat

SEQ ID NO: 6260 - DNA, 26 bp, Artificial Sequence
  Probe
gctatcgggcccataccccgaaaatg

SEQ ID NO: 6261 - DNA, 27 bp, Artificial Sequence
  Probe
gctatcgggcccataccccgaaaatgt

SEQ ID NO: 6262 - DNA, 28 bp, Artificial Sequence
  Probe
gctatcgggcccataccccgaaaatgtt

SEQ ID NO: 6263 - DNA, 29 bp, Artificial Sequence
  Probe
gctatcgggcccataccccgaaaatgttg

SEQ ID NO: 6264 - DNA, 30 bp, Artificial Sequence
  Probe
gctatcgggcccataccccgaaaatgttgg

SEQ ID NO: 6265 - DNA, 31 bp, Artificial Sequence
  Probe
gctatcgggcccataccccgaaaatgttggt

SEQ ID NO: 6266 - DNA, 33 bp, Artificial Sequence
  Probe
gctatcgggcccataccccgaaaatgttggtta

SEQ ID NO: 6267 - DNA, 46 bp, Artificial Sequence
  Probe
gctatcgggcccataccccgaaaatgttggttatacccttcccgta

SEQ ID NO: 6268 - DNA, 48 bp, Artificial Sequence
  Probe
gctatcgggcccataccccgaaaatgttggttatacccttcccgtact

SEQ ID NO: 6269 - DNA, 50 bp, Artificial Sequence
  Probe
gctatcgggcccataccccgaaaatgttggttatacccttcccgtactaa

SEQ ID NO: 6270 - DNA, 17 bp, Artificial Sequence
  Probe
gctcacaagaactgcta

SEQ ID NO: 6271 - DNA, 25 bp, Artificial Sequence
  Probe
gctcacaagaactgctaactcatgc

SEQ ID NO: 6272 - DNA, 27 bp, Artificial Sequence
  Probe
gctcacaagaactgctaactcatgccc

SEQ ID NO: 6273 - DNA, 33 bp, Artificial Sequence
  Probe
gctcacaagaactgctaactcatgcccccatgt

SEQ ID NO: 6274 - DNA, 49 bp, Artificial Sequence
  Probe
gctcacaagaactgctaactcatgcccccatgtctaacaacatggcttt

SEQ ID NO: 6275 - DNA, 17 bp, Artificial Sequence
  Probe
gctcacatcaccccata

SEQ ID NO: 6276 - DNA, 21 bp, Artificial Sequence
  Probe
gctcacatcaccccataaaca

SEQ ID NO: 6277 - DNA, 23 bp, Artificial Sequence
  Probe
gctcacatcaccccataaacaaa

SEQ ID NO: 6278 - DNA, 24 bp, Artificial Sequence
  Probe
gctcacatcaccccataaacaaat

SEQ ID NO: 6279 - DNA, 20 bp, Artificial Sequence
  Probe
gctccagtggcgcaatcggt

SEQ ID NO: 6280 - DNA, 33 bp, Artificial Sequence
  Probe
gctccagtggcgcaatcggttagcgcgcggtac

SEQ ID NO: 6281 - DNA, 29 bp, Artificial Sequence
  Probe
gctccgaggtgattttcatattgaattgc

SEQ ID NO: 6282 - DNA, 31 bp, Artificial Sequence
  Probe
gctccgaggtgattttcatattgaattgcaa

SEQ ID NO: 6283 - DNA, 32 bp, Artificial Sequence
  Probe
gctccgaggtgattttcatattgaattgcaaa

SEQ ID NO: 6284 - DNA, 34 bp, Artificial Sequence
  Probe
gctccgaggtgattttcatattgaattgcaaatt

SEQ ID NO: 6285 - DNA, 46 bp, Artificial Sequence
  Probe
gctccgaggtgattttcatattgaattgcaaattcgaagaagcagc

SEQ ID NO: 6286 - DNA, 50 bp, Artificial Sequence
  Probe
gctccgaggtgattttcatattgaattgcaaattcgaagaagcagcttca

SEQ ID NO: 6287 - DNA, 45 bp, Artificial Sequence
  Probe
gctctcaccgccgcggcccgggttcgattcccggtcagggaagtc

SEQ ID NO: 6288 - DNA, 31 bp, Artificial Sequence
  Probe
gctgcgtgttcgaatcacgtcggggtcaaac

SEQ ID NO: 6289 - DNA, 33 bp, Artificial Sequence
  Probe
gctggggattgtgggttcgagtcccatctgggt

SEQ ID NO: 6290 - DNA, 38 bp, Artificial Sequence
  Probe
gctggggattgtgggttcgagtcccatctgggtcgcgt

SEQ ID NO: 6291 - DNA, 17 bp, Artificial Sequence
  Probe
gctggtgtagtggtatc

SEQ ID NO: 6292 - DNA, 23 bp, Artificial Sequence
  Probe
gctggtgtagtggtatcatgcaa

SEQ ID NO: 6293 - DNA, 24 bp, Artificial Sequence
  Probe
gctggtgtagtggtatcatgcaag

SEQ ID NO: 6294 - DNA, 25 bp, Artificial Sequence
  Probe
gctggtgtagtggtatcatgcaaga

SEQ ID NO: 6295 - DNA, 27 bp, Artificial Sequence
  Probe
gctggtgtagtggtatcatgcaagatt

SEQ ID NO: 6296 - DNA, 28 bp, Artificial Sequence
  Probe
gctggtgtagtggtatcatgcaagattc

SEQ ID NO: 6297 - DNA, 24 bp, Artificial Sequence
  Probe
gctgtgatggccgagtggttaagg

SEQ ID NO: 6298 - DNA, 25 bp, Artificial Sequence
  Probe
gctgtgatggccgagtggttaaggc

SEQ ID NO: 6299 - DNA, 40 bp, Artificial Sequence
  Probe
gctgttaactaagtgtttgtgggtttaagtcccattggtc

SEQ ID NO: 6300 - DNA, 44 bp, Artificial Sequence
  Probe
gctgttaactaagtgtttgtgggtttaagtcccattggtctagt

SEQ ID NO: 6301 - DNA, 45 bp, Artificial Sequence
  Probe
gctgttaactaagtgtttgtgggtttaagtcccattggtctagta

SEQ ID NO: 6302 - DNA, 46 bp, Artificial Sequence
  Probe
gctgttaactaagtgtttgtgggtttaagtcccattggtctagtaa

SEQ ID NO: 6303 - DNA, 24 bp, Artificial Sequence
  Probe
gctgttacagaaattaagtattgc

SEQ ID NO: 6304 - DNA, 25 bp, Artificial Sequence
  Probe
gctgttacagaaattaagtattgca

SEQ ID NO: 6305 - DNA, 27 bp, Artificial Sequence
  Probe
gctgttacagaaattaagtattgcaac

SEQ ID NO: 6306 - DNA, 28 bp, Artificial Sequence
  Probe
gctgttacagaaattaagtattgcaact

SEQ ID NO: 6307 - DNA, 29 bp, Artificial Sequence
  Probe
gctgttacagaaattaagtattgcaactt

SEQ ID NO: 6308 - DNA, 30 bp, Artificial Sequence
  Probe
gctgttacagaaattaagtattgcaactta

SEQ ID NO: 6309 - DNA, 18 bp, Artificial Sequence
  Probe
gcttaaacccccttattt

SEQ ID NO: 6310 - DNA, 19 bp, Artificial Sequence
  Probe
gcttaaacccccttatttc

SEQ ID NO: 6311 - DNA, 21 bp, Artificial Sequence
  Probe
gcttaaacccccttatttcta

SEQ ID NO: 6312 - DNA, 22 bp, Artificial Sequence
  Probe
gcttaaacccccttatttctag

SEQ ID NO: 6313 - DNA, 23 bp, Artificial Sequence
  Probe
gcttaaacccccttatttctagg

SEQ ID NO: 6314 - DNA, 24 bp, Artificial Sequence
  Probe
gcttaaacccccttatttctagga

SEQ ID NO: 6315 - DNA, 23 bp, Artificial Sequence
  Probe
gcttacgaccccttatttaccga

SEQ ID NO: 6316 - DNA, 17 bp, Artificial Sequence
  Probe
gcttcaaacctgccggg

SEQ ID NO: 6317 - DNA, 20 bp, Artificial Sequence
  Probe
gcttcaaacctgccggggct

SEQ ID NO: 6318 - DNA, 21 bp, Artificial Sequence
  Probe
gcttcaaacctgccggggctt

SEQ ID NO: 6319 - DNA, 22 bp, Artificial Sequence
  Probe
gcttcaaacctgccggggcttc

SEQ ID NO: 6320 - DNA, 23 bp, Artificial Sequence
  Probe
gcttcaaacctgccggggcttct

SEQ ID NO: 6321 - DNA, 24 bp, Artificial Sequence
  Probe
gcttcaaacctgccggggcttctc

SEQ ID NO: 6322 - DNA, 33 bp, Artificial Sequence
  Probe
gcttctgtaatgtagtggttatcacattcgcct

SEQ ID NO: 6323 - DNA, 17 bp, Artificial Sequence
  Probe
gcttctgtagtgtagtg

SEQ ID NO: 6324 - DNA, 37 bp, Artificial Sequence
  Probe
gcttctgtagtgtagtggttatcacgttcgcctcaca

SEQ ID NO: 6325 - DNA, 15 bp, Artificial Sequence
  Probe
gctttggctgtgggg

SEQ ID NO: 6326 - DNA, 27 bp, Artificial Sequence
  Probe
gctttggggggttcgattccttccttt

SEQ ID NO: 6327 - DNA, 28 bp, Artificial Sequence
  Probe
gctttggggggttcgattccttcctttt

SEQ ID NO: 6328 - DNA, 31 bp, Artificial Sequence
  Probe
gctttggggggttcgattccttccttttttg

SEQ ID NO: 6329 - DNA, 32 bp, Artificial Sequence
  Probe
gctttggggggttcgattccttccttttttgt

SEQ ID NO: 6330 - DNA, 33 bp, Artificial Sequence
  Probe
gctttggggggttcgattccttccttttttgtc

SEQ ID NO: 6331 - DNA, 43 bp, Artificial Sequence
  Probe
gctttgggtgctaatggtggagttaaagactttttctctgatt

SEQ ID NO: 6332 - DNA, 37 bp, Artificial Sequence
  Probe
ggaagcgtgctgggcccataacccagaggtcgatgga

SEQ ID NO: 6333 - DNA, 39 bp, Artificial Sequence
  Probe
ggaagcgtgctgggcccataacccagaggtcgatggatc

SEQ ID NO: 6334 - DNA, 17 bp, Artificial Sequence
  Probe
ggactatgagaatcgaa

SEQ ID NO: 6335 - DNA, 24 bp, Artificial Sequence
  Probe
ggactatgagaatcgaacccatcc

SEQ ID NO: 6336 - DNA, 25 bp, Artificial Sequence
  Probe
ggactatgagaatcgaacccatccc

SEQ ID NO: 6337 - DNA, 30 bp, Artificial Sequence
  Probe
ggactatgagaatcgaacccatccctgaga

SEQ ID NO: 6338 - DNA, 16 bp, Artificial Sequence
  Probe
ggactctgaatccagc

SEQ ID NO: 6339 - DNA, 23 bp, Artificial Sequence
  Probe
ggactctgaatccagcgatccga

SEQ ID NO: 6340 - DNA, 24 bp, Artificial Sequence
  Probe
ggactctgaatccagcgatccgag

SEQ ID NO: 6341 - DNA, 41 bp, Artificial Sequence
  Probe
ggactgtaaatctaaagacaggggttaggcctctttttacc

SEQ ID NO: 6342 - DNA, 44 bp, Artificial Sequence
  Probe
ggactgtaaatctaaagacaggggttaggcctctttttaccagc

SEQ ID NO: 6343 - DNA, 45 bp, Artificial Sequence
  Probe
ggactgtaaatctaaagacaggggttaggcctctttttaccagct

SEQ ID NO: 6344 - DNA, 32 bp, Artificial Sequence
  Probe
ggagaccggggttcaattccccgacggggagg

SEQ ID NO: 6345 - DNA, 33 bp, Artificial Sequence
  Probe
ggagaccggggttcaattccccgacggggaggt

SEQ ID NO: 6346 - DNA, 34 bp, Artificial Sequence
  Probe
ggagaccggggttcaattccccgacggggaggtg

SEQ ID NO: 6347 - DNA, 24 bp, Artificial Sequence
  Probe
ggagaccggggttcgattccccga

SEQ ID NO: 6348 - DNA, 32 bp, Artificial Sequence
  Probe
ggagaccggggttcgattccccgacggggaga

SEQ ID NO: 6349 - DNA, 33 bp, Artificial Sequence
  Probe
ggagaccggggttcgattccccgacggggagaa

SEQ ID NO: 6350 - DNA, 34 bp, Artificial Sequence
  Probe
ggagaccggggttcgattccccgacggggagaaa

SEQ ID NO: 6351 - DNA, 33 bp, Artificial Sequence
  Probe
ggagaccggggttcgattccccgacggggagac

SEQ ID NO: 6352 - DNA, 34 bp, Artificial Sequence
  Probe
ggagaccggggttcgattccccgacggggagagt

SEQ ID NO: 6353 - DNA, 32 bp, Artificial Sequence
  Probe
ggagaccggggttcgattccccgacggggagg

SEQ ID NO: 6354 - DNA, 33 bp, Artificial Sequence
  Probe
ggagaccggggttcgattccccgacggggaggc

SEQ ID NO: 6355 - DNA, 34 bp, Artificial Sequence
  Probe
ggagaccggggttcgattccccgacggggaggca

SEQ ID NO: 6356 - DNA, 32 bp, Artificial Sequence
  Probe
ggagatcctgggttcgaatcccagcggtgcct

SEQ ID NO: 6357 - DNA, 33 bp, Artificial Sequence
  Probe
ggagatcctgggttcgaatcccagcggtgcctc

SEQ ID NO: 6358 - DNA, 23 bp, Artificial Sequence
  Probe
ggagatgaaaacctttttccaag

SEQ ID NO: 6359 - DNA, 25 bp, Artificial Sequence
  Probe
ggagatgaaaacctttttccaagga

SEQ ID NO: 6360 - DNA, 28 bp, Artificial Sequence
  Probe
ggagatgaaaacctttttccaaggacaa

SEQ ID NO: 6361 - DNA, 29 bp, Artificial Sequence
  Probe
ggagatgaaaacctttttccaaggacaaa

SEQ ID NO: 6362 - DNA, 30 bp, Artificial Sequence
  Probe
ggagatgaaaacctttttccaaggacaaat

SEQ ID NO: 6363 - DNA, 31 bp, Artificial Sequence
  Probe
ggagatgaaaacctttttccaaggacaaatc

SEQ ID NO: 6364 - DNA, 22 bp, Artificial Sequence
  Probe
ggagatttcaacttaacttgac

SEQ ID NO: 6365 - DNA, 23 bp, Artificial Sequence
  Probe
ggagatttcaacttaacttgacc

SEQ ID NO: 6366 - DNA, 24 bp, Artificial Sequence
  Probe
ggagatttcaacttaacttgaccg

SEQ ID NO: 6367 - DNA, 25 bp, Artificial Sequence
  Probe
ggagatttcaacttaacttgaccgc

SEQ ID NO: 6368 - DNA, 26 bp, Artificial Sequence
  Probe
ggagatttcaacttaacttgaccgct

SEQ ID NO: 6369 - DNA, 27 bp, Artificial Sequence
  Probe
ggagatttcaacttaacttgaccgctc

SEQ ID NO: 6370 - DNA, 28 bp, Artificial Sequence
  Probe
ggagatttcaacttaacttgaccgctct

SEQ ID NO: 6371 - DNA, 29 bp, Artificial Sequence
  Probe
ggagatttcaacttaacttgaccgctctg

SEQ ID NO: 6372 - DNA, 30 bp, Artificial Sequence
  Probe
ggagatttcaacttaacttgaccgctctga

SEQ ID NO: 6373 - DNA, 31 bp, Artificial Sequence
  Probe
ggagatttcaacttaacttgaccgctctgag

SEQ ID NO: 6374 - DNA, 32 bp, Artificial Sequence
  Probe
ggagatttcaacttaacttgaccgctctgagc

SEQ ID NO: 6375 - DNA, 33 bp, Artificial Sequence
  Probe
ggagatttcaacttaacttgaccgctctgagct

SEQ ID NO: 6376 - DNA, 25 bp, Artificial Sequence
  Probe
ggagcttaaacccccttatttctag

SEQ ID NO: 6377 - DNA, 26 bp, Artificial Sequence
  Probe
ggagcttaaacccccttatttctagg

SEQ ID NO: 6378 - DNA, 27 bp, Artificial Sequence
  Probe
ggagcttaaacccccttatttctagga

SEQ ID NO: 6379 - DNA, 23 bp, Artificial Sequence
  Probe
ggagttaaagactttttctctga

SEQ ID NO: 6380 - DNA, 25 bp, Artificial Sequence
  Probe
ggagttaaagactttttctctgatt

SEQ ID NO: 6381 - DNA, 26 bp, Artificial Sequence
  Probe
ggagttaaagactttttctctgattt

SEQ ID NO: 6382 - DNA, 24 bp, Artificial Sequence
  Probe
ggatagctcagtcggtagagcatc

SEQ ID NO: 6383 - DNA, 30 bp, Artificial Sequence
  Probe
ggatagctcagtcggtagagcatcagactt

SEQ ID NO: 6384 - DNA, 22 bp, Artificial Sequence
  Probe
ggatcagaagattgagggttcg

SEQ ID NO: 6385 - DNA, 25 bp, Artificial Sequence
  Probe
ggatcgaaaccatcctctgctaggt

SEQ ID NO: 6386 - DNA, 25 bp, Artificial Sequence
  Probe
ggatcgatgcccgcattctccatac

SEQ ID NO: 6387 - DNA, 32 bp, Artificial Sequence
  Probe
ggatggggtgtgataggtggcacggagaattt

SEQ ID NO: 6388 - DNA, 27 bp, Artificial Sequence
  Probe
ggatgggttcgattctcatagtcctag

SEQ ID NO: 6389 - DNA, 23 bp, Artificial Sequence
  Probe
ggattcggcgctctcaccgccgc

SEQ ID NO: 6390 - DNA, 27 bp, Artificial Sequence
  Probe
ggattggtggtccagtggtagaattct

SEQ ID NO: 6391 - DNA, 23 bp, Artificial Sequence
  Probe
ggattgtgggttcgagtcccacc

SEQ ID NO: 6392 - DNA, 50 bp, Artificial Sequence
  Probe
ggcacggagaattttggattctcagggatgggttcgattctcatagtcct

SEQ ID NO: 6393 - DNA, 35 bp, Artificial Sequence
  Probe
ggcatcagcctccggagctggggattgtgggttcg

SEQ ID NO: 6394 - DNA, 24 bp, Artificial Sequence
  Probe
ggcattggcctcctaagccaggga

SEQ ID NO: 6395 - DNA, 28 bp, Artificial Sequence
  Probe
ggcattggcctcctaagccagggattgt

SEQ ID NO: 6396 - DNA, 33 bp, Artificial Sequence
  Probe
ggcattggtggttcagtggtagaattctcgcct

SEQ ID NO: 6397 - DNA, 27 bp, Artificial Sequence
  Probe
ggcccataacccagaggtcgatggatc

SEQ ID NO: 6398 - DNA, 50 bp, Artificial Sequence
  Probe
ggcccataacccagaggtcgatggatcgaaaccatcctctgctaggtgcc

SEQ ID NO: 6399 - DNA, 16 bp, Artificial Sequence
  Probe
ggcccataccccgaaa

SEQ ID NO: 6400 - DNA, 17 bp, Artificial Sequence
  Probe
ggcccataccccgaaaa

SEQ ID NO: 6401 - DNA, 18 bp, Artificial Sequence
  Probe
ggcccataccccgaaaat

SEQ ID NO: 6402 - DNA, 20 bp, Artificial Sequence
  Probe
ggcccataccccgaaaatgt

SEQ ID NO: 6403 - DNA, 21 bp, Artificial Sequence
  Probe
ggcccataccccgaaaatgtt

SEQ ID NO: 6404 - DNA, 22 bp, Artificial Sequence
  Probe
ggcccataccccgaaaatgttg

SEQ ID NO: 6405 - DNA, 23 bp, Artificial Sequence
  Probe
ggcccataccccgaaaatgttgg

SEQ ID NO: 6406 - DNA, 25 bp, Artificial Sequence
  Probe
ggcccataccccgaaaatgttggtt

SEQ ID NO: 6407 - DNA, 26 bp, Artificial Sequence
  Probe
ggcccataccccgaaaatgttggtta

SEQ ID NO: 6408 - DNA, 27 bp, Artificial Sequence
  Probe
ggcccataccccgaaaatgttggttat

SEQ ID NO: 6409 - DNA, 28 bp, Artificial Sequence
  Probe
ggcccataccccgaaaatgttggttata

SEQ ID NO: 6410 - DNA, 29 bp, Artificial Sequence
  Probe
ggcccataccccgaaaatgttggttatac

SEQ ID NO: 6411 - DNA, 30 bp, Artificial Sequence
  Probe
ggcccataccccgaaaatgttggttatacc

SEQ ID NO: 6412 - DNA, 31 bp, Artificial Sequence
  Probe
ggcccataccccgaaaatgttggttataccc

SEQ ID NO: 6413 - DNA, 32 bp, Artificial Sequence
  Probe
ggcccataccccgaaaatgttggttataccct

SEQ ID NO: 6414 - DNA, 33 bp, Artificial Sequence
  Probe
ggcccataccccgaaaatgttggttataccctt

SEQ ID NO: 6415 - DNA, 34 bp, Artificial Sequence
  Probe
ggcccataccccgaaaatgttggttatacccttc

SEQ ID NO: 6416 - DNA, 35 bp, Artificial Sequence
  Probe
ggcccataccccgaaaatgttggttatacccttcc

SEQ ID NO: 6417 - DNA, 36 bp, Artificial Sequence
  Probe
ggcccataccccgaaaatgttggttatacccttccc

SEQ ID NO: 6418 - DNA, 37 bp, Artificial Sequence
  Probe
ggcccataccccgaaaatgttggttatacccttcccg

SEQ ID NO: 6419 - DNA, 39 bp, Artificial Sequence
  Probe
ggcccataccccgaaaatgttggttatacccttcccgta

SEQ ID NO: 6420 - DNA, 43 bp, Artificial Sequence
  Probe
ggcccataccccgaaaatgttggttatacccttcccgtactaa

SEQ ID NO: 6421 - DNA, 44 bp, Artificial Sequence
  Probe
ggcccataccccgaaaatgttggttatacccttcccgtactaat

SEQ ID NO: 6422 - DNA, 45 bp, Artificial Sequence
  Probe
ggcccataccccgaaaatgttggttatacccttcccgtactaatt

SEQ ID NO: 6423 - DNA, 32 bp, Artificial Sequence
  Probe
ggccccatggtgtaatggtcagcactctggac

SEQ ID NO: 6424 - DNA, 33 bp, Artificial Sequence
  Probe
ggccccatggtgtaatggtcagcactctggact

SEQ ID NO: 6425 - DNA, 35 bp, Artificial Sequence
  Probe
ggccccatggtgtaatggtcagcactctggactct

SEQ ID NO: 6426 - DNA, 37 bp, Artificial Sequence
  Probe
ggccccatggtgtaatggtcagcactctggactctga

SEQ ID NO: 6427 - DNA, 50 bp, Artificial Sequence
  Probe
ggccccatggtgtaatggttagcactctggactttgaatccagcgatccg

SEQ ID NO: 6428 - DNA, 22 bp, Artificial Sequence
  Probe
ggccccgggttcgatccccggc

SEQ ID NO: 6429 - DNA, 23 bp, Artificial Sequence
  Probe
ggccccgggttcgatccccggca

SEQ ID NO: 6430 - DNA, 32 bp, Artificial Sequence
  Probe
ggccccgggttcgatccccggcatctccattg

SEQ ID NO: 6431 - DNA, 31 bp, Artificial Sequence
  Probe
ggcccgggttcgactcccggtatgggaacaa

SEQ ID NO: 6432 - DNA, 31 bp, Artificial Sequence
  Probe
ggcccgggttcgactcccggtgtgggaacgc

SEQ ID NO: 6433 - DNA, 31 bp, Artificial Sequence
  Probe
ggcccgggttcgattcccggtcagggaattg

SEQ ID NO: 6434 - DNA, 17 bp, Artificial Sequence
  Probe
ggccctatagctcaggg

SEQ ID NO: 6435 - DNA, 19 bp, Artificial Sequence
  Probe
ggccctatagctcaggggt

SEQ ID NO: 6436 - DNA, 23 bp, Artificial Sequence
  Probe
ggccctatagctcaggggttaga

SEQ ID NO: 6437 - DNA, 25 bp, Artificial Sequence
  Probe
ggccctatagctcaggggttagagc

SEQ ID NO: 6438 - DNA, 49 bp, Artificial Sequence
  Probe
ggccctatagctcaggggttagagcactggtcttgtaaaccaggggtcg

SEQ ID NO: 6439 - DNA, 16 bp, Artificial Sequence
  Probe
ggccggttagctcagt

SEQ ID NO: 6440 - DNA, 19 bp, Artificial Sequence
  Probe
ggccggttagctcagttgg

SEQ ID NO: 6441 - DNA, 20 bp, Artificial Sequence
  Probe
ggccggttagctcagttggt

SEQ ID NO: 6442 - DNA, 21 bp, Artificial Sequence
  Probe
ggccggttagctcagttggta

SEQ ID NO: 6443 - DNA, 21 bp, Artificial Sequence
  Probe
ggccggttagctcagttggtt

SEQ ID NO: 6444 - DNA, 22 bp, Artificial Sequence
  Probe
ggccggttagctcagttggtta

SEQ ID NO: 6445 - DNA, 23 bp, Artificial Sequence
  Probe
ggccggttagctcagttggttag

SEQ ID NO: 6446 - DNA, 24 bp, Artificial Sequence
  Probe
ggccggttagctcagttggttaga

SEQ ID NO: 6447 - DNA, 26 bp, Artificial Sequence
  Probe
ggccggttagctcagttggttagagc

SEQ ID NO: 6448 - DNA, 27 bp, Artificial Sequence
  Probe
ggccggttagctcagttggttagagcg

SEQ ID NO: 6449 - DNA, 33 bp, Artificial Sequence
  Probe
ggccggttagctcagttggttagagcgtggtgc

SEQ ID NO: 6450 - DNA, 34 bp, Artificial Sequence
  Probe
ggccggttagctcagttggttagagcgtggtgct

SEQ ID NO: 6451 - DNA, 36 bp, Artificial Sequence
  Probe
ggccggttagctcagttggttagagcgtggtgctaa

SEQ ID NO: 6452 - DNA, 32 bp, Artificial Sequence
  Probe
ggcctcgtggcgcaacggtagcgcgtctgact

SEQ ID NO: 6453 - DNA, 25 bp, Artificial Sequence
  Probe
ggcgccgtggcttagttggttaaag

SEQ ID NO: 6454 - DNA, 23 bp, Artificial Sequence
  Probe
ggcgcggtggccaagtggtaagg

SEQ ID NO: 6455 - DNA, 33 bp, Artificial Sequence
  Probe
ggcggcccgggttcgactcccggtgtgggaacg

SEQ ID NO: 6456 - DNA, 18 bp, Artificial Sequence
  Probe
ggcgtgattcataccttt

SEQ ID NO: 6457 - DNA, 24 bp, Artificial Sequence
  Probe
ggctaaatcctatatatcttaatg

SEQ ID NO: 6458 - DNA, 27 bp, Artificial Sequence
  Probe
ggctagctcagtcggtagagcatgaga

SEQ ID NO: 6459 - DNA, 33 bp, Artificial Sequence
  Probe
ggctagctcagtcggtagagcatgagactctta

SEQ ID NO: 6460 - DNA, 45 bp, Artificial Sequence
  Probe
ggctagctcagtcggtagagcatgagactcttaatctcagggtcg

SEQ ID NO: 6461 - DNA, 50 bp, Artificial Sequence
  Probe
ggctagctcagtcggtagagcatgagactcttaatctcagggtcgtgggt

SEQ ID NO: 6462 - DNA, 50 bp, Artificial Sequence
  Probe
ggctagctcagtcggtagagcatgggactcttaatcccagggtcgtgggt

SEQ ID NO: 6463 - DNA, 16 bp, Artificial Sequence
  Probe
ggctcacatcacccca

SEQ ID NO: 6464 - DNA, 17 bp, Artificial Sequence
  Probe
ggctcacatcaccccat

SEQ ID NO: 6465 - DNA, 18 bp, Artificial Sequence
  Probe
ggctcacatcaccccata

SEQ ID NO: 6466 - DNA, 19 bp, Artificial Sequence
  Probe
ggctcacatcaccccataa

SEQ ID NO: 6467 - DNA, 21 bp, Artificial Sequence
  Probe
ggctcacatcaccccataaac

SEQ ID NO: 6468 - DNA, 22 bp, Artificial Sequence
  Probe
ggctcacatcaccccataaaca

SEQ ID NO: 6469 - DNA, 23 bp, Artificial Sequence
  Probe
ggctcacatcaccccataaacaa

SEQ ID NO: 6470 - DNA, 24 bp, Artificial Sequence
  Probe
ggctcacatcaccccataaacaaa

SEQ ID NO: 6471 - DNA, 25 bp, Artificial Sequence
  Probe
ggctcacatcaccccataaacaaat

SEQ ID NO: 6472 - DNA, 16 bp, Artificial Sequence
  Probe
ggctccatagctcagg

SEQ ID NO: 6473 - DNA, 17 bp, Artificial Sequence
  Probe
ggctccatagctcaggg

SEQ ID NO: 6474 - DNA, 18 bp, Artificial Sequence
  Probe
ggctccatagctcagggg

SEQ ID NO: 6475 - DNA, 19 bp, Artificial Sequence
  Probe
ggctccatagctcaggggt

SEQ ID NO: 6476 - DNA, 20 bp, Artificial Sequence
  Probe
ggctccatagctcaggggtt

SEQ ID NO: 6477 - DNA, 23 bp, Artificial Sequence
  Probe
ggctccatagctcaggggttaga

SEQ ID NO: 6478 - DNA, 25 bp, Artificial Sequence
  Probe
ggctccatagctcaggggttagagc

SEQ ID NO: 6479 - DNA, 26 bp, Artificial Sequence
  Probe
ggctccatagctcaggggttagagca

SEQ ID NO: 6480 - DNA, 28 bp, Artificial Sequence
  Probe
ggctccatagctcaggggttagagcact

SEQ ID NO: 6481 - DNA, 29 bp, Artificial Sequence
  Probe
ggctccatagctcaggggttagagcactg

SEQ ID NO: 6482 - DNA, 31 bp, Artificial Sequence
  Probe
ggctccatagctcaggggttagagcactggt

SEQ ID NO: 6483 - DNA, 32 bp, Artificial Sequence
  Probe
ggctccatagctcaggggttagagcactggtc

SEQ ID NO: 6484 - DNA, 33 bp, Artificial Sequence
  Probe
ggctccatagctcaggggttagagcactggtct

SEQ ID NO: 6485 - DNA, 34 bp, Artificial Sequence
  Probe
ggctccatagctcaggggttagagcactggtctt

SEQ ID NO: 6486 - DNA, 35 bp, Artificial Sequence
  Probe
ggctccatagctcaggggttagagcactggtcttg

SEQ ID NO: 6487 - DNA, 36 bp, Artificial Sequence
  Probe
ggctccatagctcaggggttagagcactggtcttgt

SEQ ID NO: 6488 - DNA, 37 bp, Artificial Sequence
  Probe
ggctccatagctcaggggttagagcactggtcttgta

SEQ ID NO: 6489 - DNA, 48 bp, Artificial Sequence
  Probe
ggctccatagctcaggggttagagcactggtcttgtaaaccaggggtc

SEQ ID NO: 6490 - DNA, 49 bp, Artificial Sequence
  Probe
ggctccatagctcaggggttagagcactggtcttgtaaaccaggggtcg

SEQ ID NO: 6491 - DNA, 27 bp, Artificial Sequence
  Probe
ggctccatagctcagtggttagagcac

SEQ ID NO: 6492 - DNA, 33 bp, Artificial Sequence
  Probe
ggctccgtggcgcaatggatagcgcattggact

SEQ ID NO: 6493 - DNA, 20 bp, Artificial Sequence
  Probe
ggctcgttggtctaggggta

SEQ ID NO: 6494 - DNA, 25 bp, Artificial Sequence
  Probe
ggctcgttggtctaggggtatgatt

SEQ ID NO: 6495 - DNA, 29 bp, Artificial Sequence
  Probe
ggctcgttggtctaggggtatgattctcg

SEQ ID NO: 6496 - DNA, 30 bp, Artificial Sequence
  Probe
ggctcgttggtctaggggtatgattctcgc

SEQ ID NO: 6497 - DNA, 31 bp, Artificial Sequence
  Probe
ggctcgttggtctaggggtatgattctcgct

SEQ ID NO: 6498 - DNA, 32 bp, Artificial Sequence
  Probe
ggctcgttggtctaggggtatgattctcgctt

SEQ ID NO: 6499 - DNA, 33 bp, Artificial Sequence
  Probe
ggctcgttggtctaggggtatgattctcgctta

SEQ ID NO: 6500 - DNA, 34 bp, Artificial Sequence
  Probe
ggctcgttggtctaggggtatgattctcgcttcg

SEQ ID NO: 6501 - DNA, 35 bp, Artificial Sequence
  Probe
ggctcgttggtctaggggtatgattctcgctttgg

SEQ ID NO: 6502 - DNA, 31 bp, Artificial Sequence
  Probe
ggctcgttggtctaggggtatgattctcggt

SEQ ID NO: 6503 - DNA, 33 bp, Artificial Sequence
  Probe
ggctcgttggtctaggggtatgattctcggttt

SEQ ID NO: 6504 - DNA, 32 bp, Artificial Sequence
  Probe
ggctgcgtgttcgaatcacgtcggggtcaaac

SEQ ID NO: 6505 - DNA, 32 bp, Artificial Sequence
  Probe
ggctgtatagctcagtggtagagcatttgact

SEQ ID NO: 6506 - DNA, 23 bp, Artificial Sequence
  Probe
ggcttacgaccccttatttaccg

SEQ ID NO: 6507 - DNA, 29 bp, Artificial Sequence
  Probe
gggagaccggggttcaattccccgacggg

SEQ ID NO: 6508 - DNA, 31 bp, Artificial Sequence
  Probe
gggagaccggggttcaattccccgacgggga

SEQ ID NO: 6509 - DNA, 32 bp, Artificial Sequence
  Probe
gggagaccggggttcaattccccgacggggag

SEQ ID NO: 6510 - DNA, 33 bp, Artificial Sequence
  Probe
gggagaccggggttcaattccccgacggggagg

SEQ ID NO: 6511 - DNA, 35 bp, Artificial Sequence
  Probe
gggagaccggggttcaattccccgacggggaggtg

SEQ ID NO: 6512 - DNA, 35 bp, Artificial Sequence
  Probe
gggagaccggggttcgattccccaacggggaggct

SEQ ID NO: 6513 - DNA, 25 bp, Artificial Sequence
  Probe
gggagaccggggttcgattccccga

SEQ ID NO: 6514 - DNA, 27 bp, Artificial Sequence
  Probe
gggagaccggggttcgattccccgacg

SEQ ID NO: 6515 - DNA, 28 bp, Artificial Sequence
  Probe
gggagaccggggttcgattccccgacgg

SEQ ID NO: 6516 - DNA, 33 bp, Artificial Sequence
  Probe
gggagaccggggttcgattccccgacggggaga

SEQ ID NO: 6517 - DNA, 35 bp, Artificial Sequence
  Probe
gggagaccggggttcgattccccgacggggagaaa

SEQ ID NO: 6518 - DNA, 35 bp, Artificial Sequence
  Probe
gggagaccggggttcgattccccgacggggagacg

SEQ ID NO: 6519 - DNA, 33 bp, Artificial Sequence
  Probe
gggagaccggggttcgattccccgacggggagg

SEQ ID NO: 6520 - DNA, 35 bp, Artificial Sequence
  Probe
gggagaccggggttcgattccccgacggggaggca

SEQ ID NO: 6521 - DNA, 35 bp, Artificial Sequence
  Probe
gggagaccggggttcgattccccgacggggaggcc

SEQ ID NO: 6522 - DNA, 39 bp, Artificial Sequence
  Probe
gggagcgcccggatagctcagtcggtagagcatcagact

SEQ ID NO: 6523 - DNA, 25 bp, Artificial Sequence
  Probe
gggaggcccgggttcgattcccggc

SEQ ID NO: 6524 - DNA, 27 bp, Artificial Sequence
  Probe
gggaggcccgggttcgattcccggcca

SEQ ID NO: 6525 - DNA, 31 bp, Artificial Sequence
  Probe
gggaggcccgggttcgattcccggccaatgc

SEQ ID NO: 6526 - DNA, 32 bp, Artificial Sequence
  Probe
gggaggcccgggttcgattcccggccaatgca

SEQ ID NO: 6527 - DNA, 31 bp, Artificial Sequence
  Probe
gggaggcccgggttcgattcccggcccatgc

SEQ ID NO: 6528 - DNA, 32 bp, Artificial Sequence
  Probe
gggaggcccgggttcgattcccggcccatgca

SEQ ID NO: 6529 - DNA, 30 bp, Artificial Sequence
  Probe
gggatgggttcgattctcatagtcctagaa

SEQ ID NO: 6530 - DNA, 31 bp, Artificial Sequence
  Probe
gggatgggttcgattctcatagtcctagaaa

SEQ ID NO: 6531 - DNA, 25 bp, Artificial Sequence
  Probe
gggattgtgggttcgagtcccacct

SEQ ID NO: 6532 - DNA, 27 bp, Artificial Sequence
  Probe
gggattgtgggttcgagtcccatctgg

SEQ ID NO: 6533 - DNA, 29 bp, Artificial Sequence
  Probe
gggattgtgggttcgagtcccatctgggg

SEQ ID NO: 6534 - DNA, 31 bp, Artificial Sequence
  Probe
gggattgtgggttcgagtcccatctggggtg

SEQ ID NO: 6535 - DNA, 29 bp, Artificial Sequence
  Probe
gggattgtgggttcgagtcccatctgggt

SEQ ID NO: 6536 - DNA, 31 bp, Artificial Sequence
  Probe
gggattgtgggttcgagtcccatctgggtcg

SEQ ID NO: 6537 - DNA, 34 bp, Artificial Sequence
  Probe
gggattgtgggttcgagtcccatctgggtcgcgt

SEQ ID NO: 6538 - DNA, 19 bp, Artificial Sequence
  Probe
gggccagtggcgcaatgga

SEQ ID NO: 6539 - DNA, 21 bp, Artificial Sequence
  Probe
gggcccataacccagaggtcg

SEQ ID NO: 6540 - DNA, 50 bp, Artificial Sequence
  Probe
gggcccataacccagaggtcgatggatcgaaaccatcctctgctaggtgc

SEQ ID NO: 6541 - DNA, 16 bp, Artificial Sequence
  Probe
gggcccataccccgaa

SEQ ID NO: 6542 - DNA, 17 bp, Artificial Sequence
  Probe
gggcccataccccgaaa

SEQ ID NO: 6543 - DNA, 18 bp, Artificial Sequence
  Probe
gggcccataccccgaaaa

SEQ ID NO: 6544 - DNA, 19 bp, Artificial Sequence
  Probe
gggcccataccccgaaaat

SEQ ID NO: 6545 - DNA, 22 bp, Artificial Sequence
  Probe
gggcccataccccgaaaatgtt

SEQ ID NO: 6546 - DNA, 24 bp, Artificial Sequence
  Probe
gggcccataccccgaaaatgttgg

SEQ ID NO: 6547 - DNA, 26 bp, Artificial Sequence
  Probe
gggcccataccccgaaaatgttggtt

SEQ ID NO: 6548 - DNA, 27 bp, Artificial Sequence
  Probe
gggcccataccccgaaaatgttggtta

SEQ ID NO: 6549 - DNA, 31 bp, Artificial Sequence
  Probe
gggcccataccccgaaaatgttggttatacc

SEQ ID NO: 6550 - DNA, 32 bp, Artificial Sequence
  Probe
gggcccataccccgaaaatgttggttataccc

SEQ ID NO: 6551 - DNA, 33 bp, Artificial Sequence
  Probe
gggcccataccccgaaaatgttggttataccct

SEQ ID NO: 6552 - DNA, 34 bp, Artificial Sequence
  Probe
gggcccataccccgaaaatgttggttataccctt

SEQ ID NO: 6553 - DNA, 35 bp, Artificial Sequence
  Probe
gggcccataccccgaaaatgttggttatacccttc

SEQ ID NO: 6554 - DNA, 37 bp, Artificial Sequence
  Probe
gggcccataccccgaaaatgttggttatacccttccc

SEQ ID NO: 6555 - DNA, 40 bp, Artificial Sequence
  Probe
gggcccataccccgaaaatgttggttatacccttcccgta

SEQ ID NO: 6556 - DNA, 44 bp, Artificial Sequence
  Probe
gggcccataccccgaaaatgttggttatacccttcccgtactaa

SEQ ID NO: 6557 - DNA, 45 bp, Artificial Sequence
  Probe
gggcccataccccgaaaatgttggttatacccttcccgtactaat

SEQ ID NO: 6558 - DNA, 46 bp, Artificial Sequence
  Probe
gggcccataccccgaaaatgttggttatacccttcccgtactaatt

SEQ ID NO: 6559 - DNA, 17 bp, Artificial Sequence
  Probe
gggctcacatcacccca

SEQ ID NO: 6560 - DNA, 18 bp, Artificial Sequence
  Probe
gggctcacatcaccccat

SEQ ID NO: 6561 - DNA, 19 bp, Artificial Sequence
  Probe
gggctcacatcaccccata

SEQ ID NO: 6562 - DNA, 23 bp, Artificial Sequence
  Probe
gggctcacatcaccccataaaca

SEQ ID NO: 6563 - DNA, 25 bp, Artificial Sequence
  Probe
gggctcacatcaccccataaacaaa

SEQ ID NO: 6564 - DNA, 26 bp, Artificial Sequence
  Probe
gggctcacatcaccccataaacaaat

SEQ ID NO: 6565 - DNA, 27 bp, Artificial Sequence
  Probe
gggctcacatcaccccataaacaaata

SEQ ID NO: 6566 - DNA, 21 bp, Artificial Sequence
  Probe
ggggaattagctcaaatggta

SEQ ID NO: 6567 - DNA, 24 bp, Artificial Sequence
  Probe
ggggaattagctcaaatggtagag

SEQ ID NO: 6568 - DNA, 23 bp, Artificial Sequence
  Probe
ggggaattagctcaagtggtaga

SEQ ID NO: 6569 - DNA, 32 bp, Artificial Sequence
  Probe
ggggatatagctcaggggtagagcatttgact

SEQ ID NO: 6570 - DNA, 23 bp, Artificial Sequence
  Probe
ggggatgtagctcagtggtagag

SEQ ID NO: 6571 - DNA, 33 bp, Artificial Sequence
  Probe
ggggatgtagctcagtggtagagcgcatgctta

SEQ ID NO: 6572 - DNA, 33 bp, Artificial Sequence
  Probe
ggggatgtagctcagtggtagagcgcatgcttc

SEQ ID NO: 6573 - DNA, 33 bp, Artificial Sequence
  Probe
ggggatgtagctcagtggtagagcgcgcgcttc

SEQ ID NO: 6574 - DNA, 32 bp, Artificial Sequence
  Probe
ggggattgtgggttcgagtcccatctgggtcg

SEQ ID NO: 6575 - DNA, 35 bp, Artificial Sequence
  Probe
ggggattgtgggttcgagtcccatctgggtcgcgt

SEQ ID NO: 6576 - DNA, 32 bp, Artificial Sequence
  Probe
gggggattagctcaaatggtagagcgctcgct

SEQ ID NO: 6577 - DNA, 33 bp, Artificial Sequence
  Probe
gggggattagctcaaatggtagagcgctcgctt

SEQ ID NO: 6578 - DNA, 34 bp, Artificial Sequence
  Probe
gggggattagctcaaatggtagagcgctcgctta

SEQ ID NO: 6579 - DNA, 24 bp, Artificial Sequence
  Probe
gggggcatagctcagtggtagagc

SEQ ID NO: 6580 - DNA, 31 bp, Artificial Sequence
  Probe
gggggcatagctcagtggtagagcatttgac

SEQ ID NO: 6581 - DNA, 24 bp, Artificial Sequence
  Probe
gggggtatagctcaggggtagagc

SEQ ID NO: 6582 - DNA, 32 bp, Artificial Sequence
  Probe
gggggtatagctcaggggtagagcacttgact

SEQ ID NO: 6583 - DNA, 27 bp, Artificial Sequence
  Probe
gggggtatagctcaggggtagagcatt

SEQ ID NO: 6584 - DNA, 31 bp, Artificial Sequence
  Probe
gggggtatagctcaggggtagagcatttgac

SEQ ID NO: 6585 - DNA, 33 bp, Artificial Sequence
  Probe
gggggtatagctcaggtggtagagcatttgact

SEQ ID NO: 6586 - DNA, 35 bp, Artificial Sequence
  Probe
gggggtatagctcaggtggtagagcatttgactgc

SEQ ID NO: 6587 - DNA, 16 bp, Artificial Sequence
  Probe
gggggtatagctcagt

SEQ ID NO: 6588 - DNA, 17 bp, Artificial Sequence
  Probe
gggggtatagctcagtg

SEQ ID NO: 6589 - DNA, 18 bp, Artificial Sequence
  Probe
gggggtatagctcagtgg

SEQ ID NO: 6590 - DNA, 33 bp, Artificial Sequence
  Probe
gggggtatagctcagtgggtagagcatttgact

SEQ ID NO: 6591 - DNA, 20 bp, Artificial Sequence
  Probe
gggggtatagctcagtggta

SEQ ID NO: 6592 - DNA, 22 bp, Artificial Sequence
  Probe
gggggtatagctcagtggtaga

SEQ ID NO: 6593 - DNA, 24 bp, Artificial Sequence
  Probe
gggggtatagctcagtggtagagc

SEQ ID NO: 6594 - DNA, 25 bp, Artificial Sequence
  Probe
gggggtatagctcagtggtagagca

SEQ ID NO: 6595 - DNA, 27 bp, Artificial Sequence
  Probe
gggggtatagctcagtggtagagcatt

SEQ ID NO: 6596 - DNA, 28 bp, Artificial Sequence
  Probe
gggggtatagctcagtggtagagcattt

SEQ ID NO: 6597 - DNA, 29 bp, Artificial Sequence
  Probe
gggggtatagctcagtggtagagcatttg

SEQ ID NO: 6598 - DNA, 30 bp, Artificial Sequence
  Probe
gggggtatagctcagtggtagagcatttga

SEQ ID NO: 6599 - DNA, 31 bp, Artificial Sequence
  Probe
gggggtatagctcagtggtagagcatttgac

SEQ ID NO: 6600 - DNA, 32 bp, Artificial Sequence
  Probe
gggggtatagctcagtggtagagcatttgact

SEQ ID NO: 6601 - DNA, 33 bp, Artificial Sequence
  Probe
gggggtatagctcagtggtagagcatttgactg

SEQ ID NO: 6602 - DNA, 34 bp, Artificial Sequence
  Probe
gggggtatagctcagtggtagagcatttgactgc

SEQ ID NO: 6603 - DNA, 35 bp, Artificial Sequence
  Probe
gggggtatagctcagtggtagagcatttgactgca

SEQ ID NO: 6604 - DNA, 50 bp, Artificial Sequence
  Probe
gggggtatagctcagtggtagagcatttgactgcagatcaagaggtccct

SEQ ID NO: 6605 - DNA, 33 bp, Artificial Sequence
  Probe
gggggtatagcttagcggtagagcatttgactg

SEQ ID NO: 6606 - DNA, 34 bp, Artificial Sequence
  Probe
gggggtatagcttagcggtagagcatttgactgc

SEQ ID NO: 6607 - DNA, 32 bp, Artificial Sequence
  Probe
gggggtatagttcaggggtagagcatttgact

SEQ ID NO: 6608 - DNA, 17 bp, Artificial Sequence
  Probe
gggggtgtagctcagtg

SEQ ID NO: 6609 - DNA, 18 bp, Artificial Sequence
  Probe
gggggtgtagctcagtgg

SEQ ID NO: 6610 - DNA, 20 bp, Artificial Sequence
  Probe
gggggtgtagctcagtggta

SEQ ID NO: 6611 - DNA, 31 bp, Artificial Sequence
  Probe
gggggtgtagctcagtggtagagcacatgct

SEQ ID NO: 6612 - DNA, 32 bp, Artificial Sequence
  Probe
gggggtgtagctcagtggtagagcacatgctt

SEQ ID NO: 6613 - DNA, 27 bp, Artificial Sequence
  Probe
gggggtgtagctcagtggtagagcatt

SEQ ID NO: 6614 - DNA, 33 bp, Artificial Sequence
  Probe
gggggtgtagctcagtggtagagcatttgactg

SEQ ID NO: 6615 - DNA, 31 bp, Artificial Sequence
  Probe
gggggtgtagctcagtggtagagcgcatgct

SEQ ID NO: 6616 - DNA, 33 bp, Artificial Sequence
  Probe
gggggtgtagctcagtggtagagcgcgtgctta

SEQ ID NO: 6617 - DNA, 33 bp, Artificial Sequence
  Probe
gggggtgtagctcagtggtagagcgcgtgcttc

SEQ ID NO: 6618 - DNA, 33 bp, Artificial Sequence
  Probe
ggggtatagctcaggggtagagcatttgactgc

SEQ ID NO: 6619 - DNA, 31 bp, Artificial Sequence
  Probe
ggggtatagctcagtggtagagcatttgact

SEQ ID NO: 6620 - DNA, 32 bp, Artificial Sequence
  Probe
ggggtatagctcagtggtagagcatttgactg

SEQ ID NO: 6621 - DNA, 33 bp, Artificial Sequence
  Probe
ggggtatagctcagtggtagagcatttgactgc

SEQ ID NO: 6622 - DNA, 34 bp, Artificial Sequence
  Probe
ggggtatagctcagtggtagagcatttgactgca

SEQ ID NO: 6623 - DNA, 16 bp, Artificial Sequence
  Probe
ggggtatgattctcgc

SEQ ID NO: 6624 - DNA, 17 bp, Artificial Sequence
  Probe
ggggtatgattctcgct

SEQ ID NO: 6625 - DNA, 24 bp, Artificial Sequence
  Probe
ggggtcgcgagttcaaatctcgct

SEQ ID NO: 6626 - DNA, 31 bp, Artificial Sequence
  Probe
ggggtcgcgagttcaattctcgctggggcct

SEQ ID NO: 6627 - DNA, 33 bp, Artificial Sequence
  Probe
ggggtgtagctcagtggtagagcatttgactgc

SEQ ID NO: 6628 - DNA, 24 bp, Artificial Sequence
  Probe
ggggttaggcctctttttaccagc

SEQ ID NO: 6629 - DNA, 25 bp, Artificial Sequence
  Probe
ggggttaggcctctttttaccagct

SEQ ID NO: 6630 - DNA, 26 bp, Artificial Sequence
  Probe
ggggttcgattccccgacggggagac

SEQ ID NO: 6631 - DNA, 26 bp, Artificial Sequence
  Probe
ggggttcgattccccgacggggaggc

SEQ ID NO: 6632 - DNA, 27 bp, Artificial Sequence
  Probe
ggggttcgattccccgacggggaggca

SEQ ID NO: 6633 - DNA, 17 bp, Artificial Sequence
  Probe
ggggttcgattccttcc

SEQ ID NO: 6634 - DNA, 21 bp, Artificial Sequence
  Probe
ggggttttgcagtccttagct

SEQ ID NO: 6635 - DNA, 29 bp, Artificial Sequence
  Probe
gggtagctcagtcggtagagcatcagact

SEQ ID NO: 6636 - DNA, 26 bp, Artificial Sequence
  Probe
gggtatagctcaggggtagagcattt

SEQ ID NO: 6637 - DNA, 16 bp, Artificial Sequence
  Probe
gggtatagctcagtgg

SEQ ID NO: 6638 - DNA, 25 bp, Artificial Sequence
  Probe
gggtatagctcagtggtagagcatt

SEQ ID NO: 6639 - DNA, 26 bp, Artificial Sequence
  Probe
gggtatagctcagtggtagagcattt

SEQ ID NO: 6640 - DNA, 27 bp, Artificial Sequence
  Probe
gggtatagctcagtggtagagcatttg

SEQ ID NO: 6641 - DNA, 28 bp, Artificial Sequence
  Probe
gggtatagctcagtggtagagcatttga

SEQ ID NO: 6642 - DNA, 29 bp, Artificial Sequence
  Probe
gggtatagctcagtggtagagcatttgac

SEQ ID NO: 6643 - DNA, 30 bp, Artificial Sequence
  Probe
gggtatagctcagtggtagagcatttgact

SEQ ID NO: 6644 - DNA, 31 bp, Artificial Sequence
  Probe
gggtatagctcagtggtagagcatttgactg

SEQ ID NO: 6645 - DNA, 32 bp, Artificial Sequence
  Probe
gggtatagctcagtggtagagcatttgactgc

SEQ ID NO: 6646 - DNA, 33 bp, Artificial Sequence
  Probe
gggtatagctcagtggtagagcatttgactgca

SEQ ID NO: 6647 - DNA, 32 bp, Artificial Sequence
  Probe
gggtatagcttagcggtagagcatttgactgc

SEQ ID NO: 6648 - DNA, 16 bp, Artificial Sequence
  Probe
gggtatgattctcgct

SEQ ID NO: 6649 - DNA, 33 bp, Artificial Sequence
  Probe
gggtatgattctcgcttagggtgcgagaggtcc

SEQ ID NO: 6650 - DNA, 33 bp, Artificial Sequence
  Probe
gggtatgattctcgcttcgggtgcgagaggtcc

SEQ ID NO: 6651 - DNA, 33 bp, Artificial Sequence
  Probe
gggtatgattctcgctttgggtgcgagaggtcc

SEQ ID NO: 6652 - DNA, 24 bp, Artificial Sequence
  Probe
gggtccagggttcaagtccctgtt

SEQ ID NO: 6653 - DNA, 24 bp, Artificial Sequence
  Probe
gggtcgtgggttcgagccccacgt

SEQ ID NO: 6654 - DNA, 33 bp, Artificial Sequence
  Probe
gggtcgtgggttcgagccccacgttgggcgggt

SEQ ID NO: 6655 - DNA, 39 bp, Artificial Sequence
  Probe
gggtgctaatggtggagttaaagactttttctctgattt

SEQ ID NO: 6656 - DNA, 50 bp, Artificial Sequence
  Probe
gggtgcttagctgttaactaagtgtttgtgggtttaagtcccattggtct

SEQ ID NO: 6657 - DNA, 23 bp, Artificial Sequence
  Probe
gggtggttcagtggtagaattct

SEQ ID NO: 6658 - DNA, 25 bp, Artificial Sequence
  Probe
gggtggttcagtggtagaattctcg

SEQ ID NO: 6659 - DNA, 30 bp, Artificial Sequence
  Probe
gggtggttcagtggtagaattctcgcctgc

SEQ ID NO: 6660 - DNA, 23 bp, Artificial Sequence
  Probe
gggttaggcctctttttaccagc

SEQ ID NO: 6661 - DNA, 24 bp, Artificial Sequence
  Probe
gggttaggcctctttttaccagct

SEQ ID NO: 6662 - DNA, 26 bp, Artificial Sequence
  Probe
gggttcaatccccggcacctccacca

SEQ ID NO: 6663 - DNA, 24 bp, Artificial Sequence
  Probe
gggttcaattccccgacggggagg

SEQ ID NO: 6664 - DNA, 26 bp, Artificial Sequence
  Probe
gggttcaattccccgacggggaggtg

SEQ ID NO: 6665 - DNA, 26 bp, Artificial Sequence
  Probe
gggttcaattcccggtcagggaacca

SEQ ID NO: 6666 - DNA, 26 bp, Artificial Sequence
  Probe
gggttcgactcccggtgtgggaacgc

SEQ ID NO: 6667 - DNA, 25 bp, Artificial Sequence
  Probe
gggttcgagtcccatctggggtggc

SEQ ID NO: 6668 - DNA, 26 bp, Artificial Sequence
  Probe
gggttcgagtcccatctgggtcgcgt

SEQ ID NO: 6669 - DNA, 26 bp, Artificial Sequence
  Probe
gggttcgagtcccttcgtggtcgttg

SEQ ID NO: 6670 - DNA, 21 bp, Artificial Sequence
  Probe
gggttcgatccccggcatctc

SEQ ID NO: 6671 - DNA, 24 bp, Artificial Sequence
  Probe
gggttcgatccccggcatctccaa

SEQ ID NO: 6672 - DNA, 24 bp, Artificial Sequence
  Probe
gggttcgatccccggcatctccag

SEQ ID NO: 6673 - DNA, 24 bp, Artificial Sequence
  Probe
gggttcgatccccggcatctccat

SEQ ID NO: 6674 - DNA, 24 bp, Artificial Sequence
  Probe
gggttcgattccccgacggggaga

SEQ ID NO: 6675 - DNA, 25 bp, Artificial Sequence
  Probe
gggttcgattccccgacggggagaa

SEQ ID NO: 6676 - DNA, 25 bp, Artificial Sequence
  Probe
gggttcgattccccgacggggagac

SEQ ID NO: 6677 - DNA, 24 bp, Artificial Sequence
  Probe
gggttcgattccccgacggggagg

SEQ ID NO: 6678 - DNA, 25 bp, Artificial Sequence
  Probe
gggttcgattccccgacggggaggc

SEQ ID NO: 6679 - DNA, 26 bp, Artificial Sequence
  Probe
gggttcgattccccgacggggaggca

SEQ ID NO: 6680 - DNA, 23 bp, Artificial Sequence
  Probe
gggttcgattcccgggcggcgca

SEQ ID NO: 6681 - DNA, 23 bp, Artificial Sequence
  Probe
gggttcgattctcatagtcctag

SEQ ID NO: 6682 - DNA, 24 bp, Artificial Sequence
  Probe
gggttcgattctcatagtcctaga

SEQ ID NO: 6683 - DNA, 25 bp, Artificial Sequence
  Probe
gggttcgattctcatagtcctagaa

SEQ ID NO: 6684 - DNA, 24 bp, Artificial Sequence
  Probe
ggtaaaatggctgagtgaagcatt

SEQ ID NO: 6685 - DNA, 25 bp, Artificial Sequence
  Probe
ggtaaaatggctgagtgaagcattg

SEQ ID NO: 6686 - DNA, 28 bp, Artificial Sequence
  Probe
ggtaaaatggctgagtgaagcattggac

SEQ ID NO: 6687 - DNA, 29 bp, Artificial Sequence
  Probe
ggtaaaatggctgagtgaagcattggact

SEQ ID NO: 6688 - DNA, 30 bp, Artificial Sequence
  Probe
ggtaaaatggctgagtgaagcattggactg

SEQ ID NO: 6689 - DNA, 31 bp, Artificial Sequence
  Probe
ggtaaaatggctgagtgaagcattggactgt

SEQ ID NO: 6690 - DNA, 32 bp, Artificial Sequence
  Probe
ggtaaaatggctgagtgaagcattggactgta

SEQ ID NO: 6691 - DNA, 33 bp, Artificial Sequence
  Probe
ggtaaaatggctgagtgaagcattggactgtaa

SEQ ID NO: 6692 - DNA, 34 bp, Artificial Sequence
  Probe
ggtaaaatggctgagtgaagcattggactgtaaa

SEQ ID NO: 6693 - DNA, 35 bp, Artificial Sequence
  Probe
ggtaaaatggctgagtgaagcattggactgtaaat

SEQ ID NO: 6694 - DNA, 36 bp, Artificial Sequence
  Probe
ggtaaaatggctgagtgaagcattggactgtaaatc

SEQ ID NO: 6695 - DNA, 37 bp, Artificial Sequence
  Probe
ggtaaaatggctgagtgaagcattggactgtaaatct

SEQ ID NO: 6696 - DNA, 38 bp, Artificial Sequence
  Probe
ggtaaaatggctgagtgaagcattggactgtaaatcta

SEQ ID NO: 6697 - DNA, 29 bp, Artificial Sequence
  Probe
ggtaatcgcataaaacttaaaactttaca

SEQ ID NO: 6698 - DNA, 50 bp, Artificial Sequence
  Probe
ggtaatcgcataaaacttaaaactttacagtcagaggttcaattcctctt

SEQ ID NO: 6699 - DNA, 15 bp, Artificial Sequence
  Probe
ggtacccaaatctgc

SEQ ID NO: 6700 - DNA, 17 bp, Artificial Sequence
  Probe
ggtacccaaatctgctt

SEQ ID NO: 6701 - DNA, 24 bp, Artificial Sequence
  Probe
ggtacccaaatctgcttccccatg

SEQ ID NO: 6702 - DNA, 19 bp, Artificial Sequence
  Probe
ggtagaattctcgcctgcc

SEQ ID NO: 6703 - DNA, 32 bp, Artificial Sequence
  Probe
ggtagaattctcgcctgccacgcgggaggccc

SEQ ID NO: 6704 - DNA, 32 bp, Artificial Sequence
  Probe
ggtagagcatgagactcttaatctcagggtcg

SEQ ID NO: 6705 - DNA, 34 bp, Artificial Sequence
  Probe
ggtagagcatgagactcttaatctcagggtcgtg

SEQ ID NO: 6706 - DNA, 32 bp, Artificial Sequence
  Probe
ggtagagcatgggactcttaatcccagggtcg

SEQ ID NO: 6707 - DNA, 35 bp, Artificial Sequence
  Probe
ggtagagcatgggactcttaatcccagggtcgtgg

SEQ ID NO: 6708 - DNA, 35 bp, Artificial Sequence
  Probe
ggtagcgtggccgagcggtctaaggcgctggattt

SEQ ID NO: 6709 - DNA, 36 bp, Artificial Sequence
  Probe
ggtagcgtggccgagcggtctaaggcgctggattta

SEQ ID NO: 6710 - DNA, 18 bp, Artificial Sequence
  Probe
ggtagcgtggccgagtgg

SEQ ID NO: 6711 - DNA, 25 bp, Artificial Sequence
  Probe
ggtagcgtggccgagtggtctaaga

SEQ ID NO: 6712 - DNA, 34 bp, Artificial Sequence
  Probe
ggtagcgtggccgagtggtctaagacgctggatt

SEQ ID NO: 6713 - DNA, 29 bp, Artificial Sequence
  Probe
ggtagcgtggccgagtggtctaaggcgct

SEQ ID NO: 6714 - DNA, 31 bp, Artificial Sequence
  Probe
ggtagcgtggccgagtggtctaaggcgctgg

SEQ ID NO: 6715 - DNA, 16 bp, Artificial Sequence
  Probe
ggtagtgtggccgagc

SEQ ID NO: 6716 - DNA, 24 bp, Artificial Sequence
  Probe
ggtagtgtggccgagcggtctaag

SEQ ID NO: 6717 - DNA, 31 bp, Artificial Sequence
  Probe
ggtatagctcaggggtagagcatttgactgc

SEQ ID NO: 6718 - DNA, 32 bp, Artificial Sequence
  Probe
ggtatagctcaggggtagagcatttgactgca

SEQ ID NO: 6719 - DNA, 24 bp, Artificial Sequence
  Probe
ggtatagctcagtggtagagcatt

SEQ ID NO: 6720 - DNA, 27 bp, Artificial Sequence
  Probe
ggtatagctcagtggtagagcatttga

SEQ ID NO: 6721 - DNA, 29 bp, Artificial Sequence
  Probe
ggtatagctcagtggtagagcatttgact

SEQ ID NO: 6722 - DNA, 30 bp, Artificial Sequence
  Probe
ggtatagctcagtggtagagcatttgactg

SEQ ID NO: 6723 - DNA, 31 bp, Artificial Sequence
  Probe
ggtatagctcagtggtagagcatttgactgc

SEQ ID NO: 6724 - DNA, 32 bp, Artificial Sequence
  Probe
ggtatagctcagtggtagagcatttgactgca

SEQ ID NO: 6725 - DNA, 32 bp, Artificial Sequence
  Probe
ggtatgattctcgcttagggtgcgagaggtcc

SEQ ID NO: 6726 - DNA, 33 bp, Artificial Sequence
  Probe
ggtatgattctcgcttagggtgcgagaggtccc

SEQ ID NO: 6727 - DNA, 32 bp, Artificial Sequence
  Probe
ggtatgattctcgcttcgggtgcgagaggtcc

SEQ ID NO: 6728 - DNA, 33 bp, Artificial Sequence
  Probe
ggtatgattctcgcttcgggtgcgagaggtccc

SEQ ID NO: 6729 - DNA, 32 bp, Artificial Sequence
  Probe
ggtatgattctcgctttgggtgcgagaggtcc

SEQ ID NO: 6730 - DNA, 32 bp, Artificial Sequence
  Probe
ggtatgattctcggtttgggtccgagaggtcc

SEQ ID NO: 6731 - DNA, 25 bp, Artificial Sequence
  Probe
ggtcagctaaataagctatcgggcc

SEQ ID NO: 6732 - DNA, 27 bp, Artificial Sequence
  Probe
ggtcagctaaataagctatcgggccca

SEQ ID NO: 6733 - DNA, 28 bp, Artificial Sequence
  Probe
ggtcagctaaataagctatcgggcccat

SEQ ID NO: 6734 - DNA, 29 bp, Artificial Sequence
  Probe
ggtcagctaaataagctatcgggcccata

SEQ ID NO: 6735 - DNA, 30 bp, Artificial Sequence
  Probe
ggtcagctaaataagctatcgggcccatac

SEQ ID NO: 6736 - DNA, 31 bp, Artificial Sequence
  Probe
ggtcagctaaataagctatcgggcccatacc

SEQ ID NO: 6737 - DNA, 32 bp, Artificial Sequence
  Probe
ggtcagctaaataagctatcgggcccataccc

SEQ ID NO: 6738 - DNA, 35 bp, Artificial Sequence
  Probe
ggtcagctaaataagctatcgggcccataccccga

SEQ ID NO: 6739 - DNA, 37 bp, Artificial Sequence
  Probe
ggtcagctaaataagctatcgggcccataccccgaaa

SEQ ID NO: 6740 - DNA, 39 bp, Artificial Sequence
  Probe
ggtcagctaaataagctatcgggcccataccccgaaaat

SEQ ID NO: 6741 - DNA, 40 bp, Artificial Sequence
  Probe
ggtcagctaaataagctatcgggcccataccccgaaaatg

SEQ ID NO: 6742 - DNA, 41 bp, Artificial Sequence
  Probe
ggtcagctaaataagctatcgggcccataccccgaaaatgt

SEQ ID NO: 6743 - DNA, 42 bp, Artificial Sequence
  Probe
ggtcagctaaataagctatcgggcccataccccgaaaatgtt

SEQ ID NO: 6744 - DNA, 43 bp, Artificial Sequence
  Probe
ggtcagctaaataagctatcgggcccataccccgaaaatgttg

SEQ ID NO: 6745 - DNA, 44 bp, Artificial Sequence
  Probe
ggtcagctaaataagctatcgggcccataccccgaaaatgttgg

SEQ ID NO: 6746 - DNA, 45 bp, Artificial Sequence
  Probe
ggtcagctaaataagctatcgggcccataccccgaaaatgttggt

SEQ ID NO: 6747 - DNA, 46 bp, Artificial Sequence
  Probe
ggtcagctaaataagctatcgggcccataccccgaaaatgttggtt

SEQ ID NO: 6748 - DNA, 48 bp, Artificial Sequence
  Probe
ggtcagctaaataagctatcgggcccataccccgaaaatgttggttat

SEQ ID NO: 6749 - DNA, 49 bp, Artificial Sequence
  Probe
ggtcagctaaataagctatcgggcccataccccgaaaatgttggttata

SEQ ID NO: 6750 - DNA, 27 bp, Artificial Sequence
  Probe
ggtccagggttcaagtccctgttcggg

SEQ ID NO: 6751 - DNA, 24 bp, Artificial Sequence
  Probe
ggtcccatggtgtaatggttagca

SEQ ID NO: 6752 - DNA, 32 bp, Artificial Sequence
  Probe
ggtcccgggttcaatccccggcacctccacca

SEQ ID NO: 6753 - DNA, 21 bp, Artificial Sequence
  Probe
ggtcctagcctttctattagc

SEQ ID NO: 6754 - DNA, 32 bp, Artificial Sequence
  Probe
ggtcctgggttcgagccccagtggaaccacgg

SEQ ID NO: 6755 - DNA, 32 bp, Artificial Sequence
  Probe
ggtcgatggatcgaaaccatcctctgctaggt

SEQ ID NO: 6756 - DNA, 22 bp, Artificial Sequence
  Probe
ggtcgcgggttcgatccccgta

SEQ ID NO: 6757 - DNA, 32 bp, Artificial Sequence
  Probe
ggtcgcgggttcgatccccgtacgggccacga

SEQ ID NO: 6758 - DNA, 32 bp, Artificial Sequence
  Probe
ggtcgcgggttcgatccccgtacgggccactg

SEQ ID NO: 6759 - DNA, 20 bp, Artificial Sequence
  Probe
ggtcgtggttgtagtccgtg

SEQ ID NO: 6760 - DNA, 21 bp, Artificial Sequence
  Probe
ggtcgtggttgtagtccgtgc

SEQ ID NO: 6761 - DNA, 22 bp, Artificial Sequence
  Probe
ggtcgtggttgtagtccgtgcg

SEQ ID NO: 6762 - DNA, 24 bp, Artificial Sequence
  Probe
ggtcgtggttgtagtccgtgcgag

SEQ ID NO: 6763 - DNA, 25 bp, Artificial Sequence
  Probe
ggtcgtggttgtagtccgtgcgaga

SEQ ID NO: 6764 - DNA, 29 bp, Artificial Sequence
  Probe
ggtcgtggttgtagtccgtgcgagaataa

SEQ ID NO: 6765 - DNA, 31 bp, Artificial Sequence
  Probe
ggtcgtggttgtagtccgtgcgagaataatg

SEQ ID NO: 6766 - DNA, 24 bp, Artificial Sequence
  Probe
ggtctagtggttaggattcggcgc

SEQ ID NO: 6767 - DNA, 27 bp, Artificial Sequence
  Probe
ggtctagtggttaggattcggcgctct

SEQ ID NO: 6768 - DNA, 28 bp, Artificial Sequence
  Probe
ggtctagtggttaggattcggcgctctc

SEQ ID NO: 6769 - DNA, 23 bp, Artificial Sequence
  Probe
ggtgcaactccaaataaaagtaa

SEQ ID NO: 6770 - DNA, 37 bp, Artificial Sequence
  Probe
ggtgctaatggtggagttaaagactttttctctgatt

SEQ ID NO: 6771 - DNA, 42 bp, Artificial Sequence
  Probe
ggtgctaatggtggagttaaagactttttctctgatttgtcc

SEQ ID NO: 6772 - DNA, 45 bp, Artificial Sequence
  Probe
ggtgctaatggtggagttaaagactttttctctgatttgtccttg

SEQ ID NO: 6773 - DNA, 50 bp, Artificial Sequence
  Probe
ggtgcttagctgttaactaagtgtttgtgggtttaagtcccattggtcta

SEQ ID NO: 6774 - DNA, 25 bp, Artificial Sequence
  Probe
ggtggagttaaagactttttctctg

SEQ ID NO: 6775 - DNA, 27 bp, Artificial Sequence
  Probe
ggtggagttaaagactttttctctgat

SEQ ID NO: 6776 - DNA, 28 bp, Artificial Sequence
  Probe
ggtggagttaaagactttttctctgatt

SEQ ID NO: 6777 - DNA, 29 bp, Artificial Sequence
  Probe
ggtggagttaaagactttttctctgattt

SEQ ID NO: 6778 - DNA, 31 bp, Artificial Sequence
  Probe
ggtggagttaaagactttttctctgatttgt

SEQ ID NO: 6779 - DNA, 32 bp, Artificial Sequence
  Probe
ggtggcccgggttcgactcccggtatgggaac

SEQ ID NO: 6780 - DNA, 33 bp, Artificial Sequence
  Probe
ggtggcccgggttcgactcccggtatgggaaca

SEQ ID NO: 6781 - DNA, 33 bp, Artificial Sequence
  Probe
ggtggcccgggttcgactcccggtatgggaacg

SEQ ID NO: 6782 - DNA, 28 bp, Artificial Sequence
  Probe
ggtggtctagtggttaggattcggcgct

SEQ ID NO: 6783 - DNA, 25 bp, Artificial Sequence
  Probe
ggtggttcagtggtagaattctcgc

SEQ ID NO: 6784 - DNA, 26 bp, Artificial Sequence
  Probe
ggtggttcagtggtagaattctcgcc

SEQ ID NO: 6785 - DNA, 27 bp, Artificial Sequence
  Probe
ggtggttcagtggtagaattctcgcct

SEQ ID NO: 6786 - DNA, 29 bp, Artificial Sequence
  Probe
ggtggttcagtggtagaattctcgcctgc

SEQ ID NO: 6787 - DNA, 30 bp, Artificial Sequence
  Probe
ggtggttcagtggtagaattctcgcctgcc

SEQ ID NO: 6788 - DNA, 31 bp, Artificial Sequence
  Probe
ggtgtagctcagtggtagagcatttgactgc

SEQ ID NO: 6789 - DNA, 27 bp, Artificial Sequence
  Probe
ggtgtagtggtatcatgcaagattccc

SEQ ID NO: 6790 - DNA, 50 bp, Artificial Sequence
  Probe
ggttagcactctggactctgaatccagcgatccgagttcaaatctcggtg

SEQ ID NO: 6791 - DNA, 17 bp, Artificial Sequence
  Probe
ggttaggattcggcgct

SEQ ID NO: 6792 - DNA, 19 bp, Artificial Sequence
  Probe
ggttaggattcggcgctct

SEQ ID NO: 6793 - DNA, 21 bp, Artificial Sequence
  Probe
ggttaggattcggcgctctca

SEQ ID NO: 6794 - DNA, 22 bp, Artificial Sequence
  Probe
ggttaggcctctttttaccagc

SEQ ID NO: 6795 - DNA, 23 bp, Artificial Sequence
  Probe
ggttaggcctctttttaccagct

SEQ ID NO: 6796 - DNA, 23 bp, Artificial Sequence
  Probe
ggttatacccttcccgtactaat

SEQ ID NO: 6797 - DNA, 24 bp, Artificial Sequence
  Probe
ggttatacccttcccgtactaatt

SEQ ID NO: 6798 - DNA, 25 bp, Artificial Sequence
  Probe
ggttcaaatcccggacgagccccct

SEQ ID NO: 6799 - DNA, 25 bp, Artificial Sequence
  Probe
ggttcaaatccgggtgccccctcaa

SEQ ID NO: 6800 - DNA, 23 bp, Artificial Sequence
  Probe
ggttcaattccccgacggggagg

SEQ ID NO: 6801 - DNA, 25 bp, Artificial Sequence
  Probe
ggttcaattccccgacggggaggtg

SEQ ID NO: 6802 - DNA, 25 bp, Artificial Sequence
  Probe
ggttcaattcccggtcagggaacca

SEQ ID NO: 6803 - DNA, 19 bp, Artificial Sequence
  Probe
ggttcagtggtagaattct

SEQ ID NO: 6804 - DNA, 23 bp, Artificial Sequence
  Probe
ggttcagtggtagaattctcgcc

SEQ ID NO: 6805 - DNA, 24 bp, Artificial Sequence
  Probe
ggttcagtggtagaattctcgcct

SEQ ID NO: 6806 - DNA, 25 bp, Artificial Sequence
  Probe
ggttcagtggtagaattctcgcctg

SEQ ID NO: 6807 - DNA, 26 bp, Artificial Sequence
  Probe
ggttcagtggtagaattctcgcctgc

SEQ ID NO: 6808 - DNA, 27 bp, Artificial Sequence
  Probe
ggttcagtggtagaattctcgcctgcc

SEQ ID NO: 6809 - DNA, 18 bp, Artificial Sequence
  Probe
ggttccatagtgtagcgg

SEQ ID NO: 6810 - DNA, 20 bp, Artificial Sequence
  Probe
ggttccatagtgtagcggtt

SEQ ID NO: 6811 - DNA, 37 bp, Artificial Sequence
  Probe
ggttccatagtgtagcggttatcacgtctgctttaca

SEQ ID NO: 6812 - DNA, 50 bp, Artificial Sequence
  Probe
ggttccatagtgtagcggttatcacgtctgctttacacgcagaaggtcct

SEQ ID NO: 6813 - DNA, 17 bp, Artificial Sequence
  Probe
ggttccatagtgtagtg

SEQ ID NO: 6814 - DNA, 18 bp, Artificial Sequence
  Probe
ggttccatagtgtagtgg

SEQ ID NO: 6815 - DNA, 19 bp, Artificial Sequence
  Probe
ggttccatagtgtagtggt

SEQ ID NO: 6816 - DNA, 36 bp, Artificial Sequence
  Probe
ggttccatagtgtagtggttatcacatctgctttac

SEQ ID NO: 6817 - DNA, 35 bp, Artificial Sequence
  Probe
ggttccatagtgtagtggttatcacgtctgcttta

SEQ ID NO: 6818 - DNA, 37 bp, Artificial Sequence
  Probe
ggttccatagtgtagtggttatcacgtctgctttaca

SEQ ID NO: 6819 - DNA, 39 bp, Artificial Sequence
  Probe
ggttccatagtgtagtggttatcacgtctgctttacacg

SEQ ID NO: 6820 - DNA, 19 bp, Artificial Sequence
  Probe
ggttccatggtgtaatggt

SEQ ID NO: 6821 - DNA, 34 bp, Artificial Sequence
  Probe
ggttccatggtgtaatggtgagcactctggactc

SEQ ID NO: 6822 - DNA, 23 bp, Artificial Sequence
  Probe
ggttccatggtgtaatggttagc

SEQ ID NO: 6823 - DNA, 24 bp, Artificial Sequence
  Probe
ggttccatggtgtaatggttagca

SEQ ID NO: 6824 - DNA, 27 bp, Artificial Sequence
  Probe
ggttccatggtgtaatggttagcactc

SEQ ID NO: 6825 - DNA, 29 bp, Artificial Sequence
  Probe
ggttccatggtgtaatggttagcactctg

SEQ ID NO: 6826 - DNA, 30 bp, Artificial Sequence
  Probe
ggttccatggtgtaatggttagcactctgg

SEQ ID NO: 6827 - DNA, 32 bp, Artificial Sequence
  Probe
ggttccatggtgtaatggttagcactctggac

SEQ ID NO: 6828 - DNA, 35 bp, Artificial Sequence
  Probe
ggttccatggtgtaatggttagcactctggactct

SEQ ID NO: 6829 - DNA, 22 bp, Artificial Sequence
  Probe
ggttccgggttcgagtcccggc

SEQ ID NO: 6830 - DNA, 25 bp, Artificial Sequence
  Probe
ggttcgaaaccgggcggaaacacct

SEQ ID NO: 6831 - DNA, 25 bp, Artificial Sequence
  Probe
ggttcgaatcccaccgctgccacac

SEQ ID NO: 6832 - DNA, 25 bp, Artificial Sequence
  Probe
ggttcgaatcccaccgctgccaggt

SEQ ID NO: 6833 - DNA, 25 bp, Artificial Sequence
  Probe
ggttcgaatcccacttctgacacaa

SEQ ID NO: 6834 - DNA, 25 bp, Artificial Sequence
  Probe
ggttcgaatcccagcggtgcctccg

SEQ ID NO: 6835 - DNA, 25 bp, Artificial Sequence
  Probe
ggttcgaatcctgccgactacggca

SEQ ID NO: 6836 - DNA, 25 bp, Artificial Sequence
  Probe
ggttcgaatcctgccgactacgtca

SEQ ID NO: 6837 - DNA, 23 bp, Artificial Sequence
  Probe
ggttcgactcccggtgtgggaac

SEQ ID NO: 6838 - DNA, 24 bp, Artificial Sequence
  Probe
ggttcgactcccggtgtgggaacg

SEQ ID NO: 6839 - DNA, 25 bp, Artificial Sequence
  Probe
ggttcgactcccggtgtgggaacgc

SEQ ID NO: 6840 - DNA, 24 bp, Artificial Sequence
  Probe
ggttcgagtcccatctggggtggc

SEQ ID NO: 6841 - DNA, 25 bp, Artificial Sequence
  Probe
ggttcgagtcccatctgggtcgcgt

SEQ ID NO: 6842 - DNA, 24 bp, Artificial Sequence
  Probe
ggttcgagtcccttcgtggtcgtc

SEQ ID NO: 6843 - DNA, 25 bp, Artificial Sequence
  Probe
ggttcgagtcccttcgtggtcgttg

SEQ ID NO: 6844 - DNA, 25 bp, Artificial Sequence
  Probe
ggttcgatccccagcatctccagtg

SEQ ID NO: 6845 - DNA, 19 bp, Artificial Sequence
  Probe
ggttcgatccccggcatct

SEQ ID NO: 6846 - DNA, 20 bp, Artificial Sequence
  Probe
ggttcgatccccggcatctc

SEQ ID NO: 6847 - DNA, 23 bp, Artificial Sequence
  Probe
ggttcgatccccggcatctccaa

SEQ ID NO: 6848 - DNA, 23 bp, Artificial Sequence
  Probe
ggttcgatccccggcatctccag

SEQ ID NO: 6849 - DNA, 23 bp, Artificial Sequence
  Probe
ggttcgatccccggcatctccat

SEQ ID NO: 6850 - DNA, 25 bp, Artificial Sequence
  Probe
ggttcgatccccggcatctccattg

SEQ ID NO: 6851 - DNA, 23 bp, Artificial Sequence
  Probe
ggttcgattccccgacggggaga

SEQ ID NO: 6852 - DNA, 24 bp, Artificial Sequence
  Probe
ggttcgattccccgacggggagaa

SEQ ID NO: 6853 - DNA, 24 bp, Artificial Sequence
  Probe
ggttcgattccccgacggggagac

SEQ ID NO: 6854 - DNA, 23 bp, Artificial Sequence
  Probe
ggttcgattccccgacggggagg

SEQ ID NO: 6855 - DNA, 24 bp, Artificial Sequence
  Probe
ggttcgattccccgacggggaggc

SEQ ID NO: 6856 - DNA, 25 bp, Artificial Sequence
  Probe
ggttcgattccccgacggggaggca

SEQ ID NO: 6857 - DNA, 25 bp, Artificial Sequence
  Probe
ggttcgattcccggccaatgcacga

SEQ ID NO: 6858 - DNA, 25 bp, Artificial Sequence
  Probe
ggttcgattcccggccaatgcagca

SEQ ID NO: 6859 - DNA, 25 bp, Artificial Sequence
  Probe
ggttcgattcccggtcatggaacca

SEQ ID NO: 6860 - DNA, 25 bp, Artificial Sequence
  Probe
ggttcgattcctggtcagggaacca

SEQ ID NO: 6861 - DNA, 24 bp, Artificial Sequence
  Probe
ggttcgattccttccttttttgtc

SEQ ID NO: 6862 - DNA, 23 bp, Artificial Sequence
  Probe
ggttcgattctcatagtcctaga

SEQ ID NO: 6863 - DNA, 24 bp, Artificial Sequence
  Probe
ggttcgattctcatagtcctagaa

SEQ ID NO: 6864 - DNA, 25 bp, Artificial Sequence
  Probe
ggttcgattctcatagtcctagaaa

SEQ ID NO: 6865 - DNA, 22 bp, Artificial Sequence
  Probe
ggttgtagtccgtgcgagaata

SEQ ID NO: 6866 - DNA, 23 bp, Artificial Sequence
  Probe
ggttgtagtccgtgcgagaataa

SEQ ID NO: 6867 - DNA, 25 bp, Artificial Sequence
  Probe
ggttgtagtccgtgcgagaataatg

SEQ ID NO: 6868 - DNA, 17 bp, Artificial Sequence
  Probe
ggtttttcatatcattg

SEQ ID NO: 6869 - DNA, 33 bp, Artificial Sequence
  Probe
ggtttttcatatcattggtcgtggttgtagtcc

SEQ ID NO: 6870 - DNA, 36 bp, Artificial Sequence
  Probe
ggtttttcatatcattggtcgtggttgtagtccgtg

SEQ ID NO: 6871 - DNA, 38 bp, Artificial Sequence
  Probe
ggtttttcatatcattggtcgtggttgtagtccgtgcg

SEQ ID NO: 6872 - DNA, 50 bp, Artificial Sequence
  Probe
ggtttttcatatcattggtcgtggttgtagtccgtgcgagaataatgatg

SEQ ID NO: 6873 - DNA, 23 bp, Artificial Sequence
  Probe
gtaaacaggagatcctgggttcg

SEQ ID NO: 6874 - DNA, 42 bp, Artificial Sequence
  Probe
gtaaacaggagatcctgggttcgaatcccagcggtgcctccg

SEQ ID NO: 6875 - DNA, 23 bp, Artificial Sequence
  Probe
gtaaaccaggggtcgcgagttca

SEQ ID NO: 6876 - DNA, 42 bp, Artificial Sequence
  Probe
gtaaaccaggggtcgcgagttcaattctcgctggggcctgtg

SEQ ID NO: 6877 - DNA, 32 bp, Artificial Sequence
  Probe
gtaaaccggagatgaaaacctttttccaagga

SEQ ID NO: 6878 - DNA, 35 bp, Artificial Sequence
  Probe
gtaaaccggagatgaaaacctttttccaaggacaa

SEQ ID NO: 6879 - DNA, 36 bp, Artificial Sequence
  Probe
gtaaaccggagatgaaaacctttttccaaggacaaa

SEQ ID NO: 6880 - DNA, 37 bp, Artificial Sequence
  Probe
gtaaaccggagatgaaaacctttttccaaggacaaat

SEQ ID NO: 6881 - DNA, 38 bp, Artificial Sequence
  Probe
gtaaaccggagatgaaaacctttttccaaggacaaatc

SEQ ID NO: 6882 - DNA, 39 bp, Artificial Sequence
  Probe
gtaaaccggagatgaaaacctttttccaaggacaaatca

SEQ ID NO: 6883 - DNA, 37 bp, Artificial Sequence
  Probe
gtaaataataggagcttaaacccccttatttctagga

SEQ ID NO: 6884 - DNA, 42 bp, Artificial Sequence
  Probe
gtaaatatagtttaaccaaaacatcagattgtgaatctgaca

SEQ ID NO: 6885 - DNA, 43 bp, Artificial Sequence
  Probe
gtaaatatagtttaaccaaaacatcagattgtgaatctgacaa

SEQ ID NO: 6886 - DNA, 45 bp, Artificial Sequence
  Probe
gtaaatatagtttaaccaaaacatcagattgtgaatctgacaaca

SEQ ID NO: 6887 - DNA, 50 bp, Artificial Sequence
  Probe
gtaaatatagtttaaccaaaacatcagattgtgaatctgacaacagaggc

SEQ ID NO: 6888 - DNA, 40 bp, Artificial Sequence
  Probe
gtaaatctaaagacaggggttaggcctctttttaccagct

SEQ ID NO: 6889 - DNA, 26 bp, Artificial Sequence
  Probe
gtaaggtcagctaaataagctatcgg

SEQ ID NO: 6890 - DNA, 29 bp, Artificial Sequence
  Probe
gtaaggtcagctaaataagctatcgggcc

SEQ ID NO: 6891 - DNA, 30 bp, Artificial Sequence
  Probe
gtaaggtcagctaaataagctatcgggccc

SEQ ID NO: 6892 - DNA, 31 bp, Artificial Sequence
  Probe
gtaaggtcagctaaataagctatcgggccca

SEQ ID NO: 6893 - DNA, 32 bp, Artificial Sequence
  Probe
gtaaggtcagctaaataagctatcgggcccat

SEQ ID NO: 6894 - DNA, 33 bp, Artificial Sequence
  Probe
gtaaggtcagctaaataagctatcgggcccata

SEQ ID NO: 6895 - DNA, 34 bp, Artificial Sequence
  Probe
gtaaggtcagctaaataagctatcgggcccatac

SEQ ID NO: 6896 - DNA, 35 bp, Artificial Sequence
  Probe
gtaaggtcagctaaataagctatcgggcccatacc

SEQ ID NO: 6897 - DNA, 36 bp, Artificial Sequence
  Probe
gtaaggtcagctaaataagctatcgggcccataccc

SEQ ID NO: 6898 - DNA, 37 bp, Artificial Sequence
  Probe
gtaaggtcagctaaataagctatcgggcccatacccc

SEQ ID NO: 6899 - DNA, 39 bp, Artificial Sequence
  Probe
gtaaggtcagctaaataagctatcgggcccataccccga

SEQ ID NO: 6900 - DNA, 40 bp, Artificial Sequence
  Probe
gtaaggtcagctaaataagctatcgggcccataccccgaa

SEQ ID NO: 6901 - DNA, 41 bp, Artificial Sequence
  Probe
gtaaggtcagctaaataagctatcgggcccataccccgaaa

SEQ ID NO: 6902 - DNA, 42 bp, Artificial Sequence
  Probe
gtaaggtcagctaaataagctatcgggcccataccccgaaaa

SEQ ID NO: 6903 - DNA, 43 bp, Artificial Sequence
  Probe
gtaaggtcagctaaataagctatcgggcccataccccgaaaat

SEQ ID NO: 6904 - DNA, 44 bp, Artificial Sequence
  Probe
gtaaggtcagctaaataagctatcgggcccataccccgaaaatg

SEQ ID NO: 6905 - DNA, 45 bp, Artificial Sequence
  Probe
gtaaggtcagctaaataagctatcgggcccataccccgaaaatgt

SEQ ID NO: 6906 - DNA, 46 bp, Artificial Sequence
  Probe
gtaaggtcagctaaataagctatcgggcccataccccgaaaatgtt

SEQ ID NO: 6907 - DNA, 50 bp, Artificial Sequence
  Probe
gtaaggtcagctaaataagctatcgggcccataccccgaaaatgttggtt

SEQ ID NO: 6908 - DNA, 50 bp, Artificial Sequence
  Probe
gtaatcgcataaaacttaaaactttacagtcagaggttcaattcctcttc

SEQ ID NO: 6909 - DNA, 31 bp, Artificial Sequence
  Probe
gtacatgcagagcaatgccgaggttgtgagt

SEQ ID NO: 6910 - DNA, 27 bp, Artificial Sequence
  Probe
gtaccgttaacttccaattaactagtt

SEQ ID NO: 6911 - DNA, 30 bp, Artificial Sequence
  Probe
gtaccgttaacttccaattaactagttttg

SEQ ID NO: 6912 - DNA, 31 bp, Artificial Sequence
  Probe
gtaccgttaacttccaattaactagttttga

SEQ ID NO: 6913 - DNA, 33 bp, Artificial Sequence
  Probe
gtaccgttaacttccaattaactagttttgaca

SEQ ID NO: 6914 - DNA, 38 bp, Artificial Sequence
  Probe
gtacgaggtcccgggttcaatccccggcacctccacca

SEQ ID NO: 6915 - DNA, 33 bp, Artificial Sequence
  Probe
gtagagcatgggactcttaatcccagggtcgtg

SEQ ID NO: 6916 - DNA, 27 bp, Artificial Sequence
  Probe
gtagctcagtggtagagcgcatgcttt

SEQ ID NO: 6917 - DNA, 18 bp, Artificial Sequence
  Probe
gtagtccgtgcgagaata

SEQ ID NO: 6918 - DNA, 21 bp, Artificial Sequence
  Probe
gtagtccgtgcgagaataatg

SEQ ID NO: 6919 - DNA, 19 bp, Artificial Sequence
  Probe
gtagtcgtggccgagtggt

SEQ ID NO: 6920 - DNA, 26 bp, Artificial Sequence
  Probe
gtagtcgtggccgagtggttaaggcg

SEQ ID NO: 6921 - DNA, 25 bp, Artificial Sequence
  Probe
gtagtcgtggccgagtggttaaggt

SEQ ID NO: 6922 - DNA, 30 bp, Artificial Sequence
  Probe
gtatagctcagtggtagagcatttgactgc

SEQ ID NO: 6923 - DNA, 31 bp, Artificial Sequence
  Probe
gtatagctcagtggtagagcatttgactgca

SEQ ID NO: 6924 - DNA, 27 bp, Artificial Sequence
  Probe
gtatagtggtgagtatccccgcctgtc

SEQ ID NO: 6925 - DNA, 25 bp, Artificial Sequence
  Probe
gtatagtggttagtactctgcgttg

SEQ ID NO: 6926 - DNA, 27 bp, Artificial Sequence
  Probe
gtatagtggttagtactctgcgttgtg

SEQ ID NO: 6927 - DNA, 46 bp, Artificial Sequence
  Probe
gtatcatgcaagattcccattcttgcgacccgggttcgattcccgg

SEQ ID NO: 6928 - DNA, 38 bp, Artificial Sequence
  Probe
gtatgaggtcccgggttcgatccccggcatctccaagt

SEQ ID NO: 6929 - DNA, 32 bp, Artificial Sequence
  Probe
gtatgattctcgcttagggtgcgagaggtccc

SEQ ID NO: 6930 - DNA, 33 bp, Artificial Sequence
  Probe
gtatgattctcgcttagggtgcgagaggtcccg

SEQ ID NO: 6931 - DNA, 32 bp, Artificial Sequence
  Probe
gtatgattctcgcttcgggtgcgagaggtccc

SEQ ID NO: 6932 - DNA, 33 bp, Artificial Sequence
  Probe
gtatgattctcgcttcgggtgcgagaggtcccg

SEQ ID NO: 6933 - DNA, 37 bp, Artificial Sequence
  Probe
gtatgattctcgcttcgggtgcgagaggtcccgggtt

SEQ ID NO: 6934 - DNA, 33 bp, Artificial Sequence
  Probe
gtatgattctcgctttgggtgcgagaggtcccg

SEQ ID NO: 6935 - DNA, 34 bp, Artificial Sequence
  Probe
gtatgattctcgctttgggtgcgagaggtcccgg

SEQ ID NO: 6936 - DNA, 27 bp, Artificial Sequence
  Probe
gtatgtctccatctattgatgagggtc

SEQ ID NO: 6937 - DNA, 29 bp, Artificial Sequence
  Probe
gtatgtctccatctattgatgagggtctt

SEQ ID NO: 6938 - DNA, 33 bp, Artificial Sequence
  Probe
gtcaaagttaaattataggctaaatcctatata

SEQ ID NO: 6939 - DNA, 20 bp, Artificial Sequence
  Probe
gtcacctggcaggtgcctct

SEQ ID NO: 6940 - DNA, 21 bp, Artificial Sequence
  Probe
gtcacctggcaggtgcctctt

SEQ ID NO: 6941 - DNA, 22 bp, Artificial Sequence
  Probe
gtcacctggcaggtgcctcttt

SEQ ID NO: 6942 - DNA, 23 bp, Artificial Sequence
  Probe
gtcacctggcaggtgcctctttt

SEQ ID NO: 6943 - DNA, 23 bp, Artificial Sequence
  Probe
gtcacgcgggagaccggggttca

SEQ ID NO: 6944 - DNA, 39 bp, Artificial Sequence
  Probe
gtcacgcgggagaccggggttcaattccccgacggggag

SEQ ID NO: 6945 - DNA, 42 bp, Artificial Sequence
  Probe
gtcacgcgggagaccggggttcaattccccgacggggaggtg

SEQ ID NO: 6946 - DNA, 40 bp, Artificial Sequence
  Probe
gtcacgcgggagaccggggttcgattccccgacggggaga

SEQ ID NO: 6947 - DNA, 41 bp, Artificial Sequence
  Probe
gtcacgcgggagaccggggttcgattccccgacggggagac

SEQ ID NO: 6948 - DNA, 40 bp, Artificial Sequence
  Probe
gtcacgcgggagaccggggttcgattccccgacggggagg

SEQ ID NO: 6949 - DNA, 41 bp, Artificial Sequence
  Probe
gtcacgcgggagaccggggttcgattccccgacggggaggc

SEQ ID NO: 6950 - DNA, 42 bp, Artificial Sequence
  Probe
gtcacgcgggagaccggggttcgattccccgacggggaggca

SEQ ID NO: 6951 - DNA, 49 bp, Artificial Sequence
  Probe
gtcacgcgggagaccggggttcgattccccgacggggaggcacagtaat

SEQ ID NO: 6952 - DNA, 50 bp, Artificial Sequence
  Probe
gtcacgcgggagaccggggttcgattccccgacggggaggcacagtaatt

SEQ ID NO: 6953 - DNA, 17 bp, Artificial Sequence
  Probe
gtcacggtggccgagtg

SEQ ID NO: 6954 - DNA, 22 bp, Artificial Sequence
  Probe
gtcagaggttcaattcctcttc

SEQ ID NO: 6955 - DNA, 23 bp, Artificial Sequence
  Probe
gtcagaggttcaattcctcttct

SEQ ID NO: 6956 - DNA, 24 bp, Artificial Sequence
  Probe
gtcagaggttcaattcctcttctt

SEQ ID NO: 6957 - DNA, 25 bp, Artificial Sequence
  Probe
gtcagaggttcaattcctcttctta

SEQ ID NO: 6958 - DNA, 28 bp, Artificial Sequence
  Probe
gtcagaggttcaattcctcttcttaaca

SEQ ID NO: 6959 - DNA, 31 bp, Artificial Sequence
  Probe
gtcagaggttcaattcctcttcttaacaaca

SEQ ID NO: 6960 - DNA, 25 bp, Artificial Sequence
  Probe
gtcagctaaataagctatcgggccc

SEQ ID NO: 6961 - DNA, 26 bp, Artificial Sequence
  Probe
gtcagctaaataagctatcgggccca

SEQ ID NO: 6962 - DNA, 27 bp, Artificial Sequence
  Probe
gtcagctaaataagctatcgggcccat

SEQ ID NO: 6963 - DNA, 28 bp, Artificial Sequence
  Probe
gtcagctaaataagctatcgggcccata

SEQ ID NO: 6964 - DNA, 29 bp, Artificial Sequence
  Probe
gtcagctaaataagctatcgggcccatac

SEQ ID NO: 6965 - DNA, 32 bp, Artificial Sequence
  Probe
gtcagctaaataagctatcgggcccatacccc

SEQ ID NO: 6966 - DNA, 33 bp, Artificial Sequence
  Probe
gtcagctaaataagctatcgggcccataccccg

SEQ ID NO: 6967 - DNA, 36 bp, Artificial Sequence
  Probe
gtcagctaaataagctatcgggcccataccccgaaa

SEQ ID NO: 6968 - DNA, 37 bp, Artificial Sequence
  Probe
gtcagctaaataagctatcgggcccataccccgaaaa

SEQ ID NO: 6969 - DNA, 38 bp, Artificial Sequence
  Probe
gtcagctaaataagctatcgggcccataccccgaaaat

SEQ ID NO: 6970 - DNA, 39 bp, Artificial Sequence
  Probe
gtcagctaaataagctatcgggcccataccccgaaaatg

SEQ ID NO: 6971 - DNA, 40 bp, Artificial Sequence
  Probe
gtcagctaaataagctatcgggcccataccccgaaaatgt

SEQ ID NO: 6972 - DNA, 41 bp, Artificial Sequence
  Probe
gtcagctaaataagctatcgggcccataccccgaaaatgtt

SEQ ID NO: 6973 - DNA, 43 bp, Artificial Sequence
  Probe
gtcagctaaataagctatcgggcccataccccgaaaatgttgg

SEQ ID NO: 6974 - DNA, 44 bp, Artificial Sequence
  Probe
gtcagctaaataagctatcgggcccataccccgaaaatgttggt

SEQ ID NO: 6975 - DNA, 45 bp, Artificial Sequence
  Probe
gtcagctaaataagctatcgggcccataccccgaaaatgttggtt

SEQ ID NO: 6976 - DNA, 46 bp, Artificial Sequence
  Probe
gtcagctaaataagctatcgggcccataccccgaaaatgttggtta

SEQ ID NO: 6977 - DNA, 16 bp, Artificial Sequence
  Probe
gtcaggatggccgagc

SEQ ID NO: 6978 - DNA, 17 bp, Artificial Sequence
  Probe
gtcaggatggccgagcg

SEQ ID NO: 6979 - DNA, 18 bp, Artificial Sequence
  Probe
gtcaggatggccgagcgg

SEQ ID NO: 6980 - DNA, 19 bp, Artificial Sequence
  Probe
gtcaggatggccgagcggt

SEQ ID NO: 6981 - DNA, 20 bp, Artificial Sequence
  Probe
gtcaggatggccgagcggtc

SEQ ID NO: 6982 - DNA, 21 bp, Artificial Sequence
  Probe
gtcaggatggccgagcggtct

SEQ ID NO: 6983 - DNA, 22 bp, Artificial Sequence
  Probe
gtcaggatggccgagcggtcta

SEQ ID NO: 6984 - DNA, 23 bp, Artificial Sequence
  Probe
gtcaggatggccgagcggtctaa

SEQ ID NO: 6985 - DNA, 24 bp, Artificial Sequence
  Probe
gtcaggatggccgagcggtctaag

SEQ ID NO: 6986 - DNA, 25 bp, Artificial Sequence
  Probe
gtcaggatggccgagcggtctaagg

SEQ ID NO: 6987 - DNA, 26 bp, Artificial Sequence
  Probe
gtcaggatggccgagcggtctaaggc

SEQ ID NO: 6988 - DNA, 27 bp, Artificial Sequence
  Probe
gtcaggatggccgagcggtctaaggcg

SEQ ID NO: 6989 - DNA, 31 bp, Artificial Sequence
  Probe
gtcaggatggccgagcggtctaaggcgctgc

SEQ ID NO: 6990 - DNA, 32 bp, Artificial Sequence
  Probe
gtcaggatggccgagcggtctaaggcgctgcg

SEQ ID NO: 6991 - DNA, 33 bp, Artificial Sequence
  Probe
gtcaggatggccgagcggtctaaggcgctgcgt

SEQ ID NO: 6992 - DNA, 50 bp, Artificial Sequence
  Probe
gtcaggatggccgagcggtctaaggcgctgcgttcaggtcgcagtctccc

SEQ ID NO: 6993 - DNA, 16 bp, Artificial Sequence
  Probe
gtcaggatggccgagt

SEQ ID NO: 6994 - DNA, 18 bp, Artificial Sequence
  Probe
gtcaggatggccgagtgg

SEQ ID NO: 6995 - DNA, 19 bp, Artificial Sequence
  Probe
gtcaggatggccgagtggt

SEQ ID NO: 6996 - DNA, 20 bp, Artificial Sequence
  Probe
gtcaggatggccgagtggtc

SEQ ID NO: 6997 - DNA, 21 bp, Artificial Sequence
  Probe
gtcaggatggccgagtggtct

SEQ ID NO: 6998 - DNA, 22 bp, Artificial Sequence
  Probe
gtcaggatggccgagtggtcta

SEQ ID NO: 6999 - DNA, 23 bp, Artificial Sequence
  Probe
gtcaggatggccgagtggtctaa

SEQ ID NO: 7000 - DNA, 24 bp, Artificial Sequence
  Probe
gtcaggatggccgagtggtctaag

SEQ ID NO: 7001 - DNA, 27 bp, Artificial Sequence
  Probe
gtcccatctggggtggcctgtgacttt

SEQ ID NO: 7002 - DNA, 31 bp, Artificial Sequence
  Probe
gtcccgggttcaatccccggcacctccacca

SEQ ID NO: 7003 - DNA, 27 bp, Artificial Sequence
  Probe
gtccttggaaaaaggttttcatctccg

SEQ ID NO: 7004 - DNA, 17 bp, Artificial Sequence
  Probe
gtccttgtagtataaac

SEQ ID NO: 7005 - DNA, 21 bp, Artificial Sequence
  Probe
gtccttgtagtataaactaat

SEQ ID NO: 7006 - DNA, 22 bp, Artificial Sequence
  Probe
gtccttgtagtataaactaata

SEQ ID NO: 7007 - DNA, 23 bp, Artificial Sequence
  Probe
gtccttgtagtataaactaatac

SEQ ID NO: 7008 - DNA, 24 bp, Artificial Sequence
  Probe
gtccttgtagtataaactaataca

SEQ ID NO: 7009 - DNA, 25 bp, Artificial Sequence
  Probe
gtccttgtagtataaactaatacac

SEQ ID NO: 7010 - DNA, 32 bp, Artificial Sequence
  Probe
gtccttgtagtataaactaatacaccagtctt

SEQ ID NO: 7011 - DNA, 33 bp, Artificial Sequence
  Probe
gtccttgtagtataaactaatacaccagtcttg

SEQ ID NO: 7012 - DNA, 34 bp, Artificial Sequence
  Probe
gtccttgtagtataaactaatacaccagtcttgt

SEQ ID NO: 7013 - DNA, 35 bp, Artificial Sequence
  Probe
gtccttgtagtataaactaatacaccagtcttgta

SEQ ID NO: 7014 - DNA, 39 bp, Artificial Sequence
  Probe
gtccttgtagtataaactaatacaccagtcttgtaaacc

SEQ ID NO: 7015 - DNA, 40 bp, Artificial Sequence
  Probe
gtccttgtagtataaactaatacaccagtcttgtaaaccg

SEQ ID NO: 7016 - DNA, 31 bp, Artificial Sequence
  Probe
gtcgatggatcgaaaccatcctctgctaggt

SEQ ID NO: 7017 - DNA, 31 bp, Artificial Sequence
  Probe
gtcgcgggttcgatccccgtacgggccacga

SEQ ID NO: 7018 - DNA, 17 bp, Artificial Sequence
  Probe
gtcggtagagcatgaga

SEQ ID NO: 7019 - DNA, 18 bp, Artificial Sequence
  Probe
gtcggtagagcatgagac

SEQ ID NO: 7020 - DNA, 20 bp, Artificial Sequence
  Probe
gtcggtagagcatgagactc

SEQ ID NO: 7021 - DNA, 36 bp, Artificial Sequence
  Probe
gtcggtagagcatgagactcttaatctcagggtcgt

SEQ ID NO: 7022 - DNA, 20 bp, Artificial Sequence
  Probe
gtcggtagagcatgggactc

SEQ ID NO: 7023 - DNA, 26 bp, Artificial Sequence
  Probe
gtcgtggttgtagtccgtgcgagaat

SEQ ID NO: 7024 - DNA, 30 bp, Artificial Sequence
  Probe
gtcgtggttgtagtccgtgcgagaataatg

SEQ ID NO: 7025 - DNA, 16 bp, Artificial Sequence
  Probe
gtctaacaacatggct

SEQ ID NO: 7026 - DNA, 17 bp, Artificial Sequence
  Probe
gtctaacaacatggctt

SEQ ID NO: 7027 - DNA, 24 bp, Artificial Sequence
  Probe
gtctaacaacatggctttctcaac

SEQ ID NO: 7028 - DNA, 25 bp, Artificial Sequence
  Probe
gtctaacaacatggctttctcaact

SEQ ID NO: 7029 - DNA, 27 bp, Artificial Sequence
  Probe
gtctagcggttaggattcctggttttc

SEQ ID NO: 7030 - DNA, 50 bp, Artificial Sequence
  Probe
gtctagcggttaggattcctggttttcacccaggcggcccgggttcgact

SEQ ID NO: 7031 - DNA, 24 bp, Artificial Sequence
  Probe
gtctaggggtatgattctcgctta

SEQ ID NO: 7032 - DNA, 24 bp, Artificial Sequence
  Probe
gtctaggggtatgattctcgcttc

SEQ ID NO: 7033 - DNA, 24 bp, Artificial Sequence
  Probe
gtctaggggtatgattctcgcttt

SEQ ID NO: 7034 - DNA, 23 bp, Artificial Sequence
  Probe
gtctagtggttaggattcggcgc

SEQ ID NO: 7035 - DNA, 25 bp, Artificial Sequence
  Probe
gtctagtggttaggattcggcgctc

SEQ ID NO: 7036 - DNA, 27 bp, Artificial Sequence
  Probe
gtctagtggttaggattcggcgctctc

SEQ ID NO: 7037 - DNA, 25 bp, Artificial Sequence
  Probe
gtctccatctattgatgagggtctt

SEQ ID NO: 7038 - DNA, 27 bp, Artificial Sequence
  Probe
gtctccatctattgatgagggtcttac

SEQ ID NO: 7039 - DNA, 39 bp, Artificial Sequence
  Probe
gtctgcaccaggatggccgagtggttaaggcgttggact

SEQ ID NO: 7040 - DNA, 40 bp, Artificial Sequence
  Probe
gtctgcaccaggatggccgagtggttaaggcgttggactt

SEQ ID NO: 7041 - DNA, 42 bp, Artificial Sequence
  Probe
gtcttgtaaaccggagatgaaaacctttttccaaggacaaat

SEQ ID NO: 7042 - DNA, 27 bp, Artificial Sequence
  Probe
gtgaatctgacaacagaggcttacgac

SEQ ID NO: 7043 - DNA, 29 bp, Artificial Sequence
  Probe
gtgaatctgacaacagaggcttacgaccc

SEQ ID NO: 7044 - DNA, 30 bp, Artificial Sequence
  Probe
gtgaatctgacaacagaggcttacgacccc

SEQ ID NO: 7045 - DNA, 32 bp, Artificial Sequence
  Probe
gtgaatctgacaacagaggcttacgacccctt

SEQ ID NO: 7046 - DNA, 40 bp, Artificial Sequence
  Probe
gtgaatctgacaacagaggcttacgaccccttatttaccg

SEQ ID NO: 7047 - DNA, 41 bp, Artificial Sequence
  Probe
gtgaatctgacaacagaggcttacgaccccttatttaccga

SEQ ID NO: 7048 - DNA, 42 bp, Artificial Sequence
  Probe
gtgaatctgacaacagaggcttacgaccccttatttaccgag

SEQ ID NO: 7049 - DNA, 49 bp, Artificial Sequence
  Probe
gtgagtatccccgcctgtcacgcgggagaccggggttcgattccccgac

SEQ ID NO: 7050 - DNA, 23 bp, Artificial Sequence
  Probe
gtgatcgtatagtggttagtact

SEQ ID NO: 7051 - DNA, 24 bp, Artificial Sequence
  Probe
gtgatcgtatagtggttagtactc

SEQ ID NO: 7052 - DNA, 25 bp, Artificial Sequence
  Probe
gtgatcgtatagtggttagtactct

SEQ ID NO: 7053 - DNA, 26 bp, Artificial Sequence
  Probe
gtgatcgtatagtggttagtactctg

SEQ ID NO: 7054 - DNA, 27 bp, Artificial Sequence
  Probe
gtgatcgtatagtggttagtactctgc

SEQ ID NO: 7055 - DNA, 17 bp, Artificial Sequence
  Probe
gtgcacttggacgaacc

SEQ ID NO: 7056 - DNA, 37 bp, Artificial Sequence
  Probe
gtgctaatggtggagttaaagactttttctctgattt

SEQ ID NO: 7057 - DNA, 17 bp, Artificial Sequence
  Probe
gtggagttaaagacttt

SEQ ID NO: 7058 - DNA, 25 bp, Artificial Sequence
  Probe
gtggagttaaagactttttctctga

SEQ ID NO: 7059 - DNA, 27 bp, Artificial Sequence
  Probe
gtggagttaaagactttttctctgatt

SEQ ID NO: 7060 - DNA, 28 bp, Artificial Sequence
  Probe
gtggagttaaagactttttctctgattt

SEQ ID NO: 7061 - DNA, 29 bp, Artificial Sequence
  Probe
gtggagttaaagactttttctctgatttg

SEQ ID NO: 7062 - DNA, 30 bp, Artificial Sequence
  Probe
gtggagttaaagactttttctctgatttgt

SEQ ID NO: 7063 - DNA, 32 bp, Artificial Sequence
  Probe
gtggagttaaagactttttctctgatttgtcc

SEQ ID NO: 7064 - DNA, 33 bp, Artificial Sequence
  Probe
gtggcccgggttcgactcccggtatgggaacaa

SEQ ID NO: 7065 - DNA, 23 bp, Artificial Sequence
  Probe
gtggggttttgcagtccttagct

SEQ ID NO: 7066 - DNA, 35 bp, Artificial Sequence
  Probe
gtggtaagcatagctgccttccaagcagttgaccc

SEQ ID NO: 7067 - DNA, 17 bp, Artificial Sequence
  Probe
gtggtagaattctcgcc

SEQ ID NO: 7068 - DNA, 18 bp, Artificial Sequence
  Probe
gtggtagaattctcgcct

SEQ ID NO: 7069 - DNA, 19 bp, Artificial Sequence
  Probe
gtggtagaattctcgcctg

SEQ ID NO: 7070 - DNA, 20 bp, Artificial Sequence
  Probe
gtggtagaattctcgcctgc

SEQ ID NO: 7071 - DNA, 21 bp, Artificial Sequence
  Probe
gtggtagaattctcgcctgcc

SEQ ID NO: 7072 - DNA, 18 bp, Artificial Sequence
  Probe
gtggtatcatgcaagatt

SEQ ID NO: 7073 - DNA, 19 bp, Artificial Sequence
  Probe
gtggtatcatgcaagattc

SEQ ID NO: 7074 - DNA, 28 bp, Artificial Sequence
  Probe
gtggtctagtggttaggattcggcgctc

SEQ ID NO: 7075 - DNA, 29 bp, Artificial Sequence
  Probe
gtggtctagtggttaggattcggcgctct

SEQ ID NO: 7076 - DNA, 30 bp, Artificial Sequence
  Probe
gtggtctagtggttaggattcggcgctctc

SEQ ID NO: 7077 - DNA, 31 bp, Artificial Sequence
  Probe
gtggtctagtggttaggattcggcgctctca

SEQ ID NO: 7078 - DNA, 35 bp, Artificial Sequence
  Probe
gtggtgagcatagctgccttccaagcagttgaccc

SEQ ID NO: 7079 - DNA, 17 bp, Artificial Sequence
  Probe
gtggttaggattcggcg

SEQ ID NO: 7080 - DNA, 20 bp, Artificial Sequence
  Probe
gtggttaggattcggcgctc

SEQ ID NO: 7081 - DNA, 21 bp, Artificial Sequence
  Probe
gtggttaggattcggcgctct

SEQ ID NO: 7082 - DNA, 22 bp, Artificial Sequence
  Probe
gtggttaggattcggcgctctc

SEQ ID NO: 7083 - DNA, 31 bp, Artificial Sequence
  Probe
gtggttaggattcggcgctctcaccgccgcg

SEQ ID NO: 7084 - DNA, 17 bp, Artificial Sequence
  Probe
gtggttagtactctgcg

SEQ ID NO: 7085 - DNA, 17 bp, Artificial Sequence
  Probe
gtggttatcacgttcgc

SEQ ID NO: 7086 - DNA, 19 bp, Artificial Sequence
  Probe
gtggttatcacgttcgcct

SEQ ID NO: 7087 - DNA, 22 bp, Artificial Sequence
  Probe
gtggttatcacgttcgcctcac

SEQ ID NO: 7088 - DNA, 21 bp, Artificial Sequence
  Probe
gtggttcagtggtagaattct

SEQ ID NO: 7089 - DNA, 24 bp, Artificial Sequence
  Probe
gtggttcagtggtagaattctcgc

SEQ ID NO: 7090 - DNA, 25 bp, Artificial Sequence
  Probe
gtggttcagtggtagaattctcgcc

SEQ ID NO: 7091 - DNA, 26 bp, Artificial Sequence
  Probe
gtggttcagtggtagaattctcgcct

SEQ ID NO: 7092 - DNA, 27 bp, Artificial Sequence
  Probe
gtggttcagtggtagaattctcgcctg

SEQ ID NO: 7093 - DNA, 28 bp, Artificial Sequence
  Probe
gtggttcagtggtagaattctcgcctgc

SEQ ID NO: 7094 - DNA, 29 bp, Artificial Sequence
  Probe
gtggttcagtggtagaattctcgcctgcc

SEQ ID NO: 7095 - DNA, 20 bp, Artificial Sequence
  Probe
gtggttgtagtccgtgcgag

SEQ ID NO: 7096 - DNA, 23 bp, Artificial Sequence
  Probe
gtggttgtagtccgtgcgagaat

SEQ ID NO: 7097 - DNA, 24 bp, Artificial Sequence
  Probe
gtggttgtagtccgtgcgagaata

SEQ ID NO: 7098 - DNA, 27 bp, Artificial Sequence
  Probe
gtggttgtagtccgtgcgagaataatg

SEQ ID NO: 7099 - DNA, 27 bp, Artificial Sequence
  Probe
gtgtaatggttagcactctggactctg

SEQ ID NO: 7100 - DNA, 41 bp, Artificial Sequence
  Probe
gtgtagcttaacacaaagcacccaacttacacttaggagat

SEQ ID NO: 7101 - DNA, 27 bp, Artificial Sequence
  Probe
gtgtagtggtatcatgcaagattccca

SEQ ID NO: 7102 - DNA, 24 bp, Artificial Sequence
  Probe
gtgtagtggttatcacgttcgcct

SEQ ID NO: 7103 - DNA, 45 bp, Artificial Sequence
  Probe
gtgtagtggttatcacgttcgcctcacacgcgaaaggtccccggt

SEQ ID NO: 7104 - DNA, 26 bp, Artificial Sequence
  Probe
gtgtttgtgggtttaagtcccattgg

SEQ ID NO: 7105 - DNA, 27 bp, Artificial Sequence
  Probe
gtgtttgtgggtttaagtcccattggt

SEQ ID NO: 7106 - DNA, 28 bp, Artificial Sequence
  Probe
gtgtttgtgggtttaagtcccattggtc

SEQ ID NO: 7107 - DNA, 32 bp, Artificial Sequence
  Probe
gtgtttgtgggtttaagtcccattggtctagt

SEQ ID NO: 7108 - DNA, 33 bp, Artificial Sequence
  Probe
gtgtttgtgggtttaagtcccattggtctagta

SEQ ID NO: 7109 - DNA, 22 bp, Artificial Sequence
  Probe
gttaaagactttttctctgatt

SEQ ID NO: 7110 - DNA, 23 bp, Artificial Sequence
  Probe
gttaaagactttttctctgattt

SEQ ID NO: 7111 - DNA, 23 bp, Artificial Sequence
  Probe
gttaaagattaagagaaccaaca

SEQ ID NO: 7112 - DNA, 25 bp, Artificial Sequence
  Probe
gttaaagattaagagaaccaacacc

SEQ ID NO: 7113 - DNA, 31 bp, Artificial Sequence
  Probe
gttaaagattaagagaaccaacacctcttta

SEQ ID NO: 7114 - DNA, 32 bp, Artificial Sequence
  Probe
gttaaagattaagagaaccaacacctctttac

SEQ ID NO: 7115 - DNA, 33 bp, Artificial Sequence
  Probe
gttaaagattaagagaaccaacacctctttaca

SEQ ID NO: 7116 - DNA, 36 bp, Artificial Sequence
  Probe
gttaaagattaagagaaccaacacctctttacagtg

SEQ ID NO: 7117 - DNA, 37 bp, Artificial Sequence
  Probe
gttaaagattaagagaaccaacacctctttacagtga

SEQ ID NO: 7118 - DNA, 38 bp, Artificial Sequence
  Probe
gttaaagattaagagaaccaacacctctttacagtgaa

SEQ ID NO: 7119 - DNA, 39 bp, Artificial Sequence
  Probe
gttaaagattaagagaaccaacacctctttacagtgaaa

SEQ ID NO: 7120 - DNA, 40 bp, Artificial Sequence
  Probe
gttaaagattaagagaaccaacacctctttacagtgaaat

SEQ ID NO: 7121 - DNA, 41 bp, Artificial Sequence
  Probe
gttaaagattaagagaaccaacacctctttacagtgaaatg

SEQ ID NO: 7122 - DNA, 42 bp, Artificial Sequence
  Probe
gttaaagattaagagaaccaacacctctttacagtgaaatgc

SEQ ID NO: 7123 - DNA, 45 bp, Artificial Sequence
  Probe
gttaaagattaagagaaccaacacctctttacagtgaaatgcccc

SEQ ID NO: 7124 - DNA, 46 bp, Artificial Sequence
  Probe
gttaaagattaagagaaccaacacctctttacagtgaaatgcccca

SEQ ID NO: 7125 - DNA, 50 bp, Artificial Sequence
  Probe
gttaaagattaagagaaccaacacctctttacagtgaaatgccccaacta

SEQ ID NO: 7126 - DNA, 23 bp, Artificial Sequence
  Probe
gttaactaagtgtttgtgggttt

SEQ ID NO: 7127 - DNA, 38 bp, Artificial Sequence
  Probe
gttaactaagtgtttgtgggtttaagtcccattggtct

SEQ ID NO: 7128 - DNA, 41 bp, Artificial Sequence
  Probe
gttaactaagtgtttgtgggtttaagtcccattggtctagt

SEQ ID NO: 7129 - DNA, 43 bp, Artificial Sequence
  Probe
gttaactaagtgtttgtgggtttaagtcccattggtctagtaa

SEQ ID NO: 7130 - DNA, 21 bp, Artificial Sequence
  Probe
gttaagatggcagagcccggc

SEQ ID NO: 7131 - DNA, 22 bp, Artificial Sequence
  Probe
gttaagatggcagagcccggta

SEQ ID NO: 7132 - DNA, 23 bp, Artificial Sequence
  Probe
gttaagatggcagagcccggtaa

SEQ ID NO: 7133 - DNA, 24 bp, Artificial Sequence
  Probe
gttaagatggcagagcccggtaat

SEQ ID NO: 7134 - DNA, 25 bp, Artificial Sequence
  Probe
gttaagatggcagagcccggtaatc

SEQ ID NO: 7135 - DNA, 27 bp, Artificial Sequence
  Probe
gttaagatggcagagcccggtaatcgc

SEQ ID NO: 7136 - DNA, 28 bp, Artificial Sequence
  Probe
gttaagatggcagagcccggtaatcgca

SEQ ID NO: 7137 - DNA, 29 bp, Artificial Sequence
  Probe
gttaagatggcagagcccggtaatcgcat

SEQ ID NO: 7138 - DNA, 32 bp, Artificial Sequence
  Probe
gttaagatggcagagcccggtaatcgcataaa

SEQ ID NO: 7139 - DNA, 35 bp, Artificial Sequence
  Probe
gttaagatggcagagcccggtaatcgcataaaact

SEQ ID NO: 7140 - DNA, 38 bp, Artificial Sequence
  Probe
gttaagatggcagagcccggtaatcgcataaaacttaa

SEQ ID NO: 7141 - DNA, 39 bp, Artificial Sequence
  Probe
gttaagatggcagagcccggtaatcgcataaaacttaaa

SEQ ID NO: 7142 - DNA, 41 bp, Artificial Sequence
  Probe
gttaagatggcagagcccggtaatcgcataaaacttaaaac

SEQ ID NO: 7143 - DNA, 43 bp, Artificial Sequence
  Probe
gttaagatggcagagcccggtaatcgcataaaacttaaaactt

SEQ ID NO: 7144 - DNA, 45 bp, Artificial Sequence
  Probe
gttaagatggcagagcccggtaatcgcataaaacttaaaacttta

SEQ ID NO: 7145 - DNA, 50 bp, Artificial Sequence
  Probe
gttaagatggcagagcccggtaatcgcataaaacttaaaactttacagtc

SEQ ID NO: 7146 - DNA, 22 bp, Artificial Sequence
  Probe
gttaggcctctttttaccagct

SEQ ID NO: 7147 - DNA, 20 bp, Artificial Sequence
  Probe
gttatacccttcccgtacta

SEQ ID NO: 7148 - DNA, 23 bp, Artificial Sequence
  Probe
gttatacccttcccgtactaatt

SEQ ID NO: 7149 - DNA, 15 bp, Artificial Sequence
  Probe
gttatgaaatggttt

SEQ ID NO: 7150 - DNA, 27 bp, Artificial Sequence
  Probe
gttatgaaatggtttttctaatacctt

SEQ ID NO: 7151 - DNA, 29 bp, Artificial Sequence
  Probe
gttatgaaatggtttttctaatacctttt

SEQ ID NO: 7152 - DNA, 31 bp, Artificial Sequence
  Probe
gttatgaaatggtttttctaatacctttttg

SEQ ID NO: 7153 - DNA, 24 bp, Artificial Sequence
  Probe
gttcaaatcccggacgagccccct

SEQ ID NO: 7154 - DNA, 17 bp, Artificial Sequence
  Probe
gttcaaatccgggtgcc

SEQ ID NO: 7155 - DNA, 23 bp, Artificial Sequence
  Probe
gttcaaatccgggtgccccctca

SEQ ID NO: 7156 - DNA, 24 bp, Artificial Sequence
  Probe
gttcaaatccgggtgccccctcaa

SEQ ID NO: 7157 - DNA, 23 bp, Artificial Sequence
  Probe
gttcaaatccgggtgccccctcg

SEQ ID NO: 7158 - DNA, 23 bp, Artificial Sequence
  Probe
gttcaaatccgggtgccccctct

SEQ ID NO: 7159 - DNA, 22 bp, Artificial Sequence
  Probe
gttcaattccccgacggggagg

SEQ ID NO: 7160 - DNA, 24 bp, Artificial Sequence
  Probe
gttcaattccccgacggggaggtg

SEQ ID NO: 7161 - DNA, 24 bp, Artificial Sequence
  Probe
gttcaattcccggtcagggaacca

SEQ ID NO: 7162 - DNA, 23 bp, Artificial Sequence
  Probe
gttcagtggtagaattctcgcct

SEQ ID NO: 7163 - DNA, 24 bp, Artificial Sequence
  Probe
gttcagtggtagaattctcgcctg

SEQ ID NO: 7164 - DNA, 26 bp, Artificial Sequence
  Probe
gttcagtggtagaattctcgcctgcc

SEQ ID NO: 7165 - DNA, 32 bp, Artificial Sequence
  Probe
gttccatagtgtagtggttatcacgtctgctt

SEQ ID NO: 7166 - DNA, 24 bp, Artificial Sequence
  Probe
gttcgaaaccgggcggaaacacct

SEQ ID NO: 7167 - DNA, 24 bp, Artificial Sequence
  Probe
gttcgaatcccaccgctgccacac

SEQ ID NO: 7168 - DNA, 24 bp, Artificial Sequence
  Probe
gttcgaatcccaccgctgccaggt

SEQ ID NO: 7169 - DNA, 24 bp, Artificial Sequence
  Probe
gttcgaatcccacttctgacacaa

SEQ ID NO: 7170 - DNA, 24 bp, Artificial Sequence
  Probe
gttcgaatcccagcggtgcctccg

SEQ ID NO: 7171 - DNA, 23 bp, Artificial Sequence
  Probe
gttcgactcccggtgtgggaacg

SEQ ID NO: 7172 - DNA, 24 bp, Artificial Sequence
  Probe
gttcgactcccggtgtgggaacgc

SEQ ID NO: 7173 - DNA, 23 bp, Artificial Sequence
  Probe
gttcgagtcccatctggggtggc

SEQ ID NO: 7174 - DNA, 24 bp, Artificial Sequence
  Probe
gttcgagtcccatctgggtcgcgt

SEQ ID NO: 7175 - DNA, 23 bp, Artificial Sequence
  Probe
gttcgagtcccttcgtggtcgtc

SEQ ID NO: 7176 - DNA, 24 bp, Artificial Sequence
  Probe
gttcgagtcccttcgtggtcgttg

SEQ ID NO: 7177 - DNA, 24 bp, Artificial Sequence
  Probe
gttcgatccccagcatctccagtg

SEQ ID NO: 7178 - DNA, 24 bp, Artificial Sequence
  Probe
gttcgatccccggcatctccattg

SEQ ID NO: 7179 - DNA, 24 bp, Artificial Sequence
  Probe
gttcgatccccgtacgggccacga

SEQ ID NO: 7180 - DNA, 24 bp, Artificial Sequence
  Probe
gttcgatcctcacacggggcacaa

SEQ ID NO: 7181 - DNA, 23 bp, Artificial Sequence
  Probe
gttcgattccccgacggggagaa

SEQ ID NO: 7182 - DNA, 23 bp, Artificial Sequence
  Probe
gttcgattccccgacggggagac

SEQ ID NO: 7183 - DNA, 23 bp, Artificial Sequence
  Probe
gttcgattccccgacggggaggc

SEQ ID NO: 7184 - DNA, 24 bp, Artificial Sequence
  Probe
gttcgattccccgacggggaggca

SEQ ID NO: 7185 - DNA, 24 bp, Artificial Sequence
  Probe
gttcgattcccggccaatgcacga

SEQ ID NO: 7186 - DNA, 24 bp, Artificial Sequence
  Probe
gttcgattcccggccaatgcagca

SEQ ID NO: 7187 - DNA, 21 bp, Artificial Sequence
  Probe
gttcgattcccgggcggcgca

SEQ ID NO: 7188 - DNA, 24 bp, Artificial Sequence
  Probe
gttcgattcccggtcagggaacaa

SEQ ID NO: 7189 - DNA, 23 bp, Artificial Sequence
  Probe
gttcgattccttccttttttgtc

SEQ ID NO: 7190 - DNA, 23 bp, Artificial Sequence
  Probe
gttcgattctcatagtcctagaa

SEQ ID NO: 7191 - DNA, 23 bp, Artificial Sequence
  Probe
gttcttgtagttgaaatacaacg

SEQ ID NO: 7192 - DNA, 26 bp, Artificial Sequence
  Probe
gttcttgtagttgaaatacaacgatg

SEQ ID NO: 7193 - DNA, 27 bp, Artificial Sequence
  Probe
gttcttgtagttgaaatacaacgatgg

SEQ ID NO: 7194 - DNA, 29 bp, Artificial Sequence
  Probe
gttcttgtagttgaaatacaacgatggtt

SEQ ID NO: 7195 - DNA, 30 bp, Artificial Sequence
  Probe
gttcttgtagttgaaatacaacgatggttt

SEQ ID NO: 7196 - DNA, 31 bp, Artificial Sequence
  Probe
gttcttgtagttgaaatacaacgatggtttt

SEQ ID NO: 7197 - DNA, 32 bp, Artificial Sequence
  Probe
gttcttgtagttgaaatacaacgatggttttt

SEQ ID NO: 7198 - DNA, 33 bp, Artificial Sequence
  Probe
gttcttgtagttgaaatacaacgatggtttttc

SEQ ID NO: 7199 - DNA, 34 bp, Artificial Sequence
  Probe
gttcttgtagttgaaatacaacgatggtttttca

SEQ ID NO: 7200 - DNA, 38 bp, Artificial Sequence
  Probe
gttcttgtagttgaaatacaacgatggtttttcatatc

SEQ ID NO: 7201 - DNA, 42 bp, Artificial Sequence
  Probe
gttcttgtagttgaaatacaacgatggtttttcatatcattg

SEQ ID NO: 7202 - DNA, 43 bp, Artificial Sequence
  Probe
gttcttgtagttgaaatacaacgatggtttttcatatcattgg

SEQ ID NO: 7203 - DNA, 44 bp, Artificial Sequence
  Probe
gttcttgtagttgaaatacaacgatggtttttcatatcattggt

SEQ ID NO: 7204 - DNA, 45 bp, Artificial Sequence
  Probe
gttcttgtagttgaaatacaacgatggtttttcatatcattggtc

SEQ ID NO: 7205 - DNA, 29 bp, Artificial Sequence
  Probe
gttgatgcagagtggggttttgcagtcct

SEQ ID NO: 7206 - DNA, 31 bp, Artificial Sequence
  Probe
gttgatgcagagtggggttttgcagtcctta

SEQ ID NO: 7207 - DNA, 32 bp, Artificial Sequence
  Probe
gttgatgcagagtggggttttgcagtccttag

SEQ ID NO: 7208 - DNA, 34 bp, Artificial Sequence
  Probe
gttgatgcagagtggggttttgcagtccttagct

SEQ ID NO: 7209 - DNA, 50 bp, Artificial Sequence
  Probe
gttgattagggtgcttagctgttaactaagtgtttgtgggtttaagtccc

SEQ ID NO: 7210 - DNA, 27 bp, Artificial Sequence
  Probe
gttggtggtatagtggtaagcatagct

SEQ ID NO: 7211 - DNA, 34 bp, Artificial Sequence
  Probe
gttggtggtatagtggtaagcatagctgccttcc

SEQ ID NO: 7212 - DNA, 32 bp, Artificial Sequence
  Probe
gttggtggtatagtggtgagcatagctgcctt

SEQ ID NO: 7213 - DNA, 33 bp, Artificial Sequence
  Probe
gttggtggtatagtggtgagcatagctgccttc

SEQ ID NO: 7214 - DNA, 34 bp, Artificial Sequence
  Probe
gttggtggtatagtggtgagcatagctgccttcc

SEQ ID NO: 7215 - DNA, 27 bp, Artificial Sequence
  Probe
gttggtggtatagtggttagcatagct

SEQ ID NO: 7216 - DNA, 28 bp, Artificial Sequence
  Probe
gttggtggtatagtggttagcatagctg

SEQ ID NO: 7217 - DNA, 31 bp, Artificial Sequence
  Probe
gttggtggtatagtggttagcatagctgcct

SEQ ID NO: 7218 - DNA, 33 bp, Artificial Sequence
  Probe
gttggtggtatagtggttagcatagctgccttc

SEQ ID NO: 7219 - DNA, 34 bp, Artificial Sequence
  Probe
gttggtggtatagtggttagcatagctgccttcc

SEQ ID NO: 7220 - DNA, 21 bp, Artificial Sequence
  Probe
gttgtagtccgtgcgagaata

SEQ ID NO: 7221 - DNA, 23 bp, Artificial Sequence
  Probe
gttgtagtccgtgcgagaataat

SEQ ID NO: 7222 - DNA, 24 bp, Artificial Sequence
  Probe
gttgtagtccgtgcgagaataatg

SEQ ID NO: 7223 - DNA, 33 bp, Artificial Sequence
  Probe
gtttaaccaaaacatcagattgtgaatctgaca

SEQ ID NO: 7224 - DNA, 23 bp, Artificial Sequence
  Probe
gtttaagtcccattggtctagta

SEQ ID NO: 7225 - DNA, 17 bp, Artificial Sequence
  Probe
gtttagacgggctcaca

SEQ ID NO: 7226 - DNA, 18 bp, Artificial Sequence
  Probe
gtttagacgggctcacat

SEQ ID NO: 7227 - DNA, 19 bp, Artificial Sequence
  Probe
gtttagacgggctcacatc

SEQ ID NO: 7228 - DNA, 20 bp, Artificial Sequence
  Probe
gtttagacgggctcacatca

SEQ ID NO: 7229 - DNA, 23 bp, Artificial Sequence
  Probe
gtttagacgggctcacatcaccc

SEQ ID NO: 7230 - DNA, 24 bp, Artificial Sequence
  Probe
gtttagacgggctcacatcacccc

SEQ ID NO: 7231 - DNA, 25 bp, Artificial Sequence
  Probe
gtttagacgggctcacatcacccca

SEQ ID NO: 7232 - DNA, 26 bp, Artificial Sequence
  Probe
gtttagacgggctcacatcaccccat

SEQ ID NO: 7233 - DNA, 27 bp, Artificial Sequence
  Probe
gtttagacgggctcacatcaccccata

SEQ ID NO: 7234 - DNA, 28 bp, Artificial Sequence
  Probe
gtttagacgggctcacatcaccccataa

SEQ ID NO: 7235 - DNA, 29 bp, Artificial Sequence
  Probe
gtttagacgggctcacatcaccccataaa

SEQ ID NO: 7236 - DNA, 31 bp, Artificial Sequence
  Probe
gtttagacgggctcacatcaccccataaaca

SEQ ID NO: 7237 - DNA, 32 bp, Artificial Sequence
  Probe
gtttagacgggctcacatcaccccataaacaa

SEQ ID NO: 7238 - DNA, 33 bp, Artificial Sequence
  Probe
gtttagacgggctcacatcaccccataaacaaa

SEQ ID NO: 7239 - DNA, 34 bp, Artificial Sequence
  Probe
gtttagacgggctcacatcaccccataaacaaat

SEQ ID NO: 7240 - DNA, 17 bp, Artificial Sequence
  Probe
gtttatgtagcttacct

SEQ ID NO: 7241 - DNA, 21 bp, Artificial Sequence
  Probe
gtttatgtagcttacctcctc

SEQ ID NO: 7242 - DNA, 23 bp, Artificial Sequence
  Probe
gtttatgtagcttacctcctcaa

SEQ ID NO: 7243 - DNA, 25 bp, Artificial Sequence
  Probe
gtttatgtagcttacctcctcaaag

SEQ ID NO: 7244 - DNA, 31 bp, Artificial Sequence
  Probe
gtttatgtagcttacctcctcaaagcaatac

SEQ ID NO: 7245 - DNA, 32 bp, Artificial Sequence
  Probe
gtttatgtagcttacctcctcaaagcaataca

SEQ ID NO: 7246 - DNA, 38 bp, Artificial Sequence
  Probe
gtttatgtagcttacctcctcaaagcaatacactgaaa

SEQ ID NO: 7247 - DNA, 39 bp, Artificial Sequence
  Probe
gtttatgtagcttacctcctcaaagcaatacactgaaaa

SEQ ID NO: 7248 - DNA, 41 bp, Artificial Sequence
  Probe
gtttatgtagcttacctcctcaaagcaatacactgaaaatg

SEQ ID NO: 7249 - DNA, 43 bp, Artificial Sequence
  Probe
gtttatgtagcttacctcctcaaagcaatacactgaaaatgtt

SEQ ID NO: 7250 - DNA, 44 bp, Artificial Sequence
  Probe
gtttatgtagcttacctcctcaaagcaatacactgaaaatgttt

SEQ ID NO: 7251 - DNA, 50 bp, Artificial Sequence
  Probe
gtttatgtagcttacctcctcaaagcaatacactgaaaatgtttagacgg

SEQ ID NO: 7252 - DNA, 33 bp, Artificial Sequence
  Probe
gtttccgtagtggagtggttatcacgttcgcct

SEQ ID NO: 7253 - DNA, 27 bp, Artificial Sequence
  Probe
gtttccgtagtgtagcggttatcacat

SEQ ID NO: 7254 - DNA, 37 bp, Artificial Sequence
  Probe
gtttccgtagtgtagcggttatcacattcgcctcaca

SEQ ID NO: 7255 - DNA, 50 bp, Artificial Sequence
  Probe
gtttccgtagtgtagcggttatcacattcgcctcacacgcgaaaggtccc

SEQ ID NO: 7256 - DNA, 17 bp, Artificial Sequence
  Probe
gtttccgtagtgtagtg

SEQ ID NO: 7257 - DNA, 18 bp, Artificial Sequence
  Probe
gtttccgtagtgtagtgg

SEQ ID NO: 7258 - DNA, 19 bp, Artificial Sequence
  Probe
gtttccgtagtgtagtggt

SEQ ID NO: 7259 - DNA, 34 bp, Artificial Sequence
  Probe
gtttccgtagtgtagtggtcatcacgttcgccta

SEQ ID NO: 7260 - DNA, 35 bp, Artificial Sequence
  Probe
gtttccgtagtgtagtggtcatcacgttcgcctaa

SEQ ID NO: 7261 - DNA, 36 bp, Artificial Sequence
  Probe
gtttccgtagtgtagtggtcatcacgttcgcctaac

SEQ ID NO: 7262 - DNA, 37 bp, Artificial Sequence
  Probe
gtttccgtagtgtagtggtcatcacgttcgcctaaca

SEQ ID NO: 7263 - DNA, 50 bp, Artificial Sequence
  Probe
gtttccgtagtgtagtggtcatcacgttcgcctaacacgcgaaaggtccc

SEQ ID NO: 7264 - DNA, 20 bp, Artificial Sequence
  Probe
gtttccgtagtgtagtggtt

SEQ ID NO: 7265 - DNA, 22 bp, Artificial Sequence
  Probe
gtttccgtagtgtagtggttat

SEQ ID NO: 7266 - DNA, 23 bp, Artificial Sequence
  Probe
gtttccgtagtgtagtggttatc

SEQ ID NO: 7267 - DNA, 24 bp, Artificial Sequence
  Probe
gtttccgtagtgtagtggttatca

SEQ ID NO: 7268 - DNA, 25 bp, Artificial Sequence
  Probe
gtttccgtagtgtagtggttatcac

SEQ ID NO: 7269 - DNA, 26 bp, Artificial Sequence
  Probe
gtttccgtagtgtagtggttatcacg

SEQ ID NO: 7270 - DNA, 27 bp, Artificial Sequence
  Probe
gtttccgtagtgtagtggttatcacgt

SEQ ID NO: 7271 - DNA, 28 bp, Artificial Sequence
  Probe
gtttccgtagtgtagtggttatcacgtt

SEQ ID NO: 7272 - DNA, 29 bp, Artificial Sequence
  Probe
gtttccgtagtgtagtggttatcacgttc

SEQ ID NO: 7273 - DNA, 30 bp, Artificial Sequence
  Probe
gtttccgtagtgtagtggttatcacgttcg

SEQ ID NO: 7274 - DNA, 31 bp, Artificial Sequence
  Probe
gtttccgtagtgtagtggttatcacgttcgc

SEQ ID NO: 7275 - DNA, 32 bp, Artificial Sequence
  Probe
gtttccgtagtgtagtggttatcacgttcgcc

SEQ ID NO: 7276 - DNA, 33 bp, Artificial Sequence
  Probe
gtttccgtagtgtagtggttatcacgttcgcct

SEQ ID NO: 7277 - DNA, 50 bp, Artificial Sequence
  Probe
gtttccgtagtgtagtggttatcacgttcgcctaacacgcgaaaggtccc

SEQ ID NO: 7278 - DNA, 34 bp, Artificial Sequence
  Probe
gtttccgtagtgtagtggttatcacgttcgcctc

SEQ ID NO: 7279 - DNA, 35 bp, Artificial Sequence
  Probe
gtttccgtagtgtagtggttatcacgttcgcctca

SEQ ID NO: 7280 - DNA, 36 bp, Artificial Sequence
  Probe
gtttccgtagtgtagtggttatcacgttcgcctcac

SEQ ID NO: 7281 - DNA, 37 bp, Artificial Sequence
  Probe
gtttccgtagtgtagtggttatcacgttcgcctcaca

SEQ ID NO: 7282 - DNA, 33 bp, Artificial Sequence
  Probe
gtttccgtagtgtagtggttattatgttcgcct

SEQ ID NO: 7283 - DNA, 28 bp, Artificial Sequence
  Probe
gtttccgtggtgtagtggttatcacatt

SEQ ID NO: 7284 - DNA, 32 bp, Artificial Sequence
  Probe
gtttccgtggtgtagtggttatcacattcgcc

SEQ ID NO: 7285 - DNA, 33 bp, Artificial Sequence
  Probe
gtttccgtggtgtagtggttatcacattcgcct

SEQ ID NO: 7286 - DNA, 25 bp, Artificial Sequence
  Probe
gtttggtcctagcctttctattagc

SEQ ID NO: 7287 - DNA, 15 bp, Artificial Sequence
  Probe
gtttgtgggtttaag

SEQ ID NO: 7288 - DNA, 16 bp, Artificial Sequence
  Probe
gtttgtgggtttaagt

SEQ ID NO: 7289 - DNA, 17 bp, Artificial Sequence
  Probe
gtttgtgggtttaagtc

SEQ ID NO: 7290 - DNA, 18 bp, Artificial Sequence
  Probe
gtttgtgggtttaagtcc

SEQ ID NO: 7291 - DNA, 19 bp, Artificial Sequence
  Probe
gtttgtgggtttaagtccc

SEQ ID NO: 7292 - DNA, 21 bp, Artificial Sequence
  Probe
gtttgtgggtttaagtcccat

SEQ ID NO: 7293 - DNA, 23 bp, Artificial Sequence
  Probe
gtttgtgggtttaagtcccattg

SEQ ID NO: 7294 - DNA, 24 bp, Artificial Sequence
  Probe
gtttgtgggtttaagtcccattgg

SEQ ID NO: 7295 - DNA, 25 bp, Artificial Sequence
  Probe
gtttgtgggtttaagtcccattggt

SEQ ID NO: 7296 - DNA, 26 bp, Artificial Sequence
  Probe
gtttgtgggtttaagtcccattggtc

SEQ ID NO: 7297 - DNA, 27 bp, Artificial Sequence
  Probe
gtttgtgggtttaagtcccattggtct

SEQ ID NO: 7298 - DNA, 28 bp, Artificial Sequence
  Probe
gtttgtgggtttaagtcccattggtcta

SEQ ID NO: 7299 - DNA, 29 bp, Artificial Sequence
  Probe
gtttgtgggtttaagtcccattggtctag

SEQ ID NO: 7300 - DNA, 30 bp, Artificial Sequence
  Probe
gtttgtgggtttaagtcccattggtctagt

SEQ ID NO: 7301 - DNA, 31 bp, Artificial Sequence
  Probe
gtttgtgggtttaagtcccattggtctagta

SEQ ID NO: 7302 - DNA, 32 bp, Artificial Sequence
  Probe
gtttgtgggtttaagtcccattggtctagtaa

SEQ ID NO: 7303 - DNA, 33 bp, Artificial Sequence
  Probe
gtttgtgggtttaagtcccattggtctagtaag

SEQ ID NO: 7304 - DNA, 34 bp, Artificial Sequence
  Probe
gtttgtgggtttaagtcccattggtctagtaagg

SEQ ID NO: 7305 - DNA, 35 bp, Artificial Sequence
  Probe
gtttgtgggtttaagtcccattggtctagtaaggg

SEQ ID NO: 7306 - DNA, 43 bp, Artificial Sequence
  Probe
gtttttcatatcattggtcgtggttgtagtccgtgcgagaata

SEQ ID NO: 7307 - DNA, 46 bp, Artificial Sequence
  Probe
gtttttcatatcattggtcgtggttgtagtccgtgcgagaataatg

SEQ ID NO: 7308 - DNA, 50 bp, Artificial Sequence
  Probe
taaaacttaaaactttacagtcagaggttcaattcctcttcttaacaaca

SEQ ID NO: 7309 - DNA, 33 bp, Artificial Sequence
  Probe
taaaactttacagtcagaggttcaattcctctt

SEQ ID NO: 7310 - DNA, 34 bp, Artificial Sequence
  Probe
taaaactttacagtcagaggttcaattcctcttc

SEQ ID NO: 7311 - DNA, 36 bp, Artificial Sequence
  Probe
taaaactttacagtcagaggttcaattcctcttctt

SEQ ID NO: 7312 - DNA, 38 bp, Artificial Sequence
  Probe
taaaactttacagtcagaggttcaattcctcttcttaa

SEQ ID NO: 7313 - DNA, 39 bp, Artificial Sequence
  Probe
taaaactttacagtcagaggttcaattcctcttcttaac

SEQ ID NO: 7314 - DNA, 42 bp, Artificial Sequence
  Probe
taaaactttacagtcagaggttcaattcctcttcttaacaac

SEQ ID NO: 7315 - DNA, 43 bp, Artificial Sequence
  Probe
taaaactttacagtcagaggttcaattcctcttcttaacaaca

SEQ ID NO: 7316 - DNA, 24 bp, Artificial Sequence
  Probe
taaacaaaacgaatgatttcgact

SEQ ID NO: 7317 - DNA, 37 bp, Artificial Sequence
  Probe
taaacaaaacgaatgatttcgactcattaaattatga

SEQ ID NO: 7318 - DNA, 39 bp, Artificial Sequence
  Probe
taaacaaaacgaatgatttcgactcattaaattatgata

SEQ ID NO: 7319 - DNA, 43 bp, Artificial Sequence
  Probe
taaacaaaacgaatgatttcgactcattaaattatgataatca

SEQ ID NO: 7320 - DNA, 45 bp, Artificial Sequence
  Probe
taaacaaaacgaatgatttcgactcattaaattatgataatcata

SEQ ID NO: 7321 - DNA, 50 bp, Artificial Sequence
  Probe
taaacaaaacgaatgatttcgactcattaaattatgataatcatatttac

SEQ ID NO: 7322 - DNA, 41 bp, Artificial Sequence
  Probe
taaacaggagatcctgggttcgaatcccagcggtgcctccg

SEQ ID NO: 7323 - DNA, 41 bp, Artificial Sequence
  Probe
taaaccaggggtcgcgagttcaaatctcgctggggcctcgg

SEQ ID NO: 7324 - DNA, 41 bp, Artificial Sequence
  Probe
taaaccaggggtcgcgagttcaattctcgctggggcctgtg

SEQ ID NO: 7325 - DNA, 20 bp, Artificial Sequence
  Probe
taaacccccttatttctagg

SEQ ID NO: 7326 - DNA, 21 bp, Artificial Sequence
  Probe
taaacccccttatttctagga

SEQ ID NO: 7327 - DNA, 33 bp, Artificial Sequence
  Probe
taaaccggagatgaaaacctttttccaaggaca

SEQ ID NO: 7328 - DNA, 34 bp, Artificial Sequence
  Probe
taaaccggagatgaaaacctttttccaaggacaa

SEQ ID NO: 7329 - DNA, 36 bp, Artificial Sequence
  Probe
taaaccggagatgaaaacctttttccaaggacaaat

SEQ ID NO: 7330 - DNA, 28 bp, Artificial Sequence
  Probe
taaacctagccccaaacccactccacct

SEQ ID NO: 7331 - DNA, 37 bp, Artificial Sequence
  Probe
taaagattaagagaaccaacacctctttacagtgaaa

SEQ ID NO: 7332 - DNA, 38 bp, Artificial Sequence
  Probe
taaagattaagagaaccaacacctctttacagtgaaat

SEQ ID NO: 7333 - DNA, 22 bp, Artificial Sequence
  Probe
taaataagctatcgggcccata

SEQ ID NO: 7334 - DNA, 23 bp, Artificial Sequence
  Probe
taaataagctatcgggcccatac

SEQ ID NO: 7335 - DNA, 27 bp, Artificial Sequence
  Probe
taaataagctatcgggcccataccccg

SEQ ID NO: 7336 - DNA, 31 bp, Artificial Sequence
  Probe
taaataagctatcgggcccataccccgaaaa

SEQ ID NO: 7337 - DNA, 32 bp, Artificial Sequence
  Probe
taaataagctatcgggcccataccccgaaaat

SEQ ID NO: 7338 - DNA, 33 bp, Artificial Sequence
  Probe
taaataagctatcgggcccataccccgaaaatg

SEQ ID NO: 7339 - DNA, 50 bp, Artificial Sequence
  Probe
taaataagctatcgggcccataccccgaaaatgttggttatacccttccc

SEQ ID NO: 7340 - DNA, 23 bp, Artificial Sequence
  Probe
taaatacagaccaagagccttca

SEQ ID NO: 7341 - DNA, 50 bp, Artificial Sequence
  Probe
taaatacagaccaagagccttcaaagccctcagtaagttgcaatacttaa

SEQ ID NO: 7342 - DNA, 40 bp, Artificial Sequence
  Probe
taaatagtaccgttaacttccaattaactagttttgacaa

SEQ ID NO: 7343 - DNA, 39 bp, Artificial Sequence
  Probe
taaatctaaagacaggggttaggcctctttttaccagct

SEQ ID NO: 7344 - DNA, 21 bp, Artificial Sequence
  Probe
taacaacatggctttctcaac

SEQ ID NO: 7345 - DNA, 16 bp, Artificial Sequence
  Probe
taacacaaagcaccca

SEQ ID NO: 7346 - DNA, 17 bp, Artificial Sequence
  Probe
taacacaaagcacccaa

SEQ ID NO: 7347 - DNA, 18 bp, Artificial Sequence
  Probe
taacacaaagcacccaac

SEQ ID NO: 7348 - DNA, 19 bp, Artificial Sequence
  Probe
taacacaaagcacccaact

SEQ ID NO: 7349 - DNA, 20 bp, Artificial Sequence
  Probe
taacacaaagcacccaactt

SEQ ID NO: 7350 - DNA, 23 bp, Artificial Sequence
  Probe
taacacaaagcacccaacttaca

SEQ ID NO: 7351 - DNA, 25 bp, Artificial Sequence
  Probe
taacacaaagcacccaacttacact

SEQ ID NO: 7352 - DNA, 26 bp, Artificial Sequence
  Probe
taacacaaagcacccaacttacactt

SEQ ID NO: 7353 - DNA, 27 bp, Artificial Sequence
  Probe
taacacaaagcacccaacttacactta

SEQ ID NO: 7354 - DNA, 29 bp, Artificial Sequence
  Probe
taacacaaagcacccaacttacacttagg

SEQ ID NO: 7355 - DNA, 30 bp, Artificial Sequence
  Probe
taacacaaagcacccaacttacacttagga

SEQ ID NO: 7356 - DNA, 32 bp, Artificial Sequence
  Probe
taacacaaagcacccaacttacacttaggaga

SEQ ID NO: 7357 - DNA, 37 bp, Artificial Sequence
  Probe
taacacaaagcacccaacttacacttaggagatttca

SEQ ID NO: 7358 - DNA, 39 bp, Artificial Sequence
  Probe
taacacaaagcacccaacttacacttaggagatttcaac

SEQ ID NO: 7359 - DNA, 41 bp, Artificial Sequence
  Probe
taacacaaagcacccaacttacacttaggagatttcaactt

SEQ ID NO: 7360 - DNA, 44 bp, Artificial Sequence
  Probe
taacacaaagcacccaacttacacttaggagatttcaacttaac

SEQ ID NO: 7361 - DNA, 19 bp, Artificial Sequence
  Probe
taacacgcgaaaggtcccc

SEQ ID NO: 7362 - DNA, 18 bp, Artificial Sequence
  Probe
taacagctatccattggt

SEQ ID NO: 7363 - DNA, 24 bp, Artificial Sequence
  Probe
taaccaaaacatcagattgtgaat

SEQ ID NO: 7364 - DNA, 29 bp, Artificial Sequence
  Probe
taaccaaaacatcagattgtgaatctgac

SEQ ID NO: 7365 - DNA, 30 bp, Artificial Sequence
  Probe
taaccaaaacatcagattgtgaatctgaca

SEQ ID NO: 7366 - DNA, 31 bp, Artificial Sequence
  Probe
taaccaaaacatcagattgtgaatctgacaa

SEQ ID NO: 7367 - DNA, 32 bp, Artificial Sequence
  Probe
taaccaaaacatcagattgtgaatctgacaac

SEQ ID NO: 7368 - DNA, 33 bp, Artificial Sequence
  Probe
taaccaaaacatcagattgtgaatctgacaaca

SEQ ID NO: 7369 - DNA, 37 bp, Artificial Sequence
  Probe
taaccaaaacatcagattgtgaatctgacaacagagg

SEQ ID NO: 7370 - DNA, 38 bp, Artificial Sequence
  Probe
taaccaaaacatcagattgtgaatctgacaacagaggc

SEQ ID NO: 7371 - DNA, 39 bp, Artificial Sequence
  Probe
taaccaaaacatcagattgtgaatctgacaacagaggct

SEQ ID NO: 7372 - DNA, 40 bp, Artificial Sequence
  Probe
taaccaaaacatcagattgtgaatctgacaacagaggctt

SEQ ID NO: 7373 - DNA, 45 bp, Artificial Sequence
  Probe
taaccaaaacatcagattgtgaatctgacaacagaggcttacgac

SEQ ID NO: 7374 - DNA, 48 bp, Artificial Sequence
  Probe
taaccaaaacatcagattgtgaatctgacaacagaggcttacgacccc

SEQ ID NO: 7375 - DNA, 49 bp, Artificial Sequence
  Probe
taaccaaaacatcagattgtgaatctgacaacagaggcttacgacccct

SEQ ID NO: 7376 - DNA, 41 bp, Artificial Sequence
  Probe
taacccagaggtcgatggatcgaaaccatcctctgctaggt

SEQ ID NO: 7377 - DNA, 40 bp, Artificial Sequence
  Probe
taacccagaggtcgatggatcgaaaccatcctctgctatc

SEQ ID NO: 7378 - DNA, 41 bp, Artificial Sequence
  Probe
taaccgaaaggttggtggttcgagcccacccagggacgcct

SEQ ID NO: 7379 - DNA, 50 bp, Artificial Sequence
  Probe
taaccttttaagttaaagattaagagaaccaacacctctttacagtgaaa

SEQ ID NO: 7380 - DNA, 23 bp, Artificial Sequence
  Probe
taacgccaaggtcgcgggttcga

SEQ ID NO: 7381 - DNA, 24 bp, Artificial Sequence
  Probe
taacgccaaggtcgcgggttcgat

SEQ ID NO: 7382 - DNA, 41 bp, Artificial Sequence
  Probe
taactaagtgtttgtgggtttaagtcccattggtctagtaa

SEQ ID NO: 7383 - DNA, 18 bp, Artificial Sequence
  Probe
taactcatgcccccatgt

SEQ ID NO: 7384 - DNA, 20 bp, Artificial Sequence
  Probe
taactcatgcccccatgtct

SEQ ID NO: 7385 - DNA, 21 bp, Artificial Sequence
  Probe
taactcatgcccccatgtcta

SEQ ID NO: 7386 - DNA, 23 bp, Artificial Sequence
  Probe
taactcatgcccccatgtctaac

SEQ ID NO: 7387 - DNA, 32 bp, Artificial Sequence
  Probe
taactcatgcccccatgtctaacaacatggct

SEQ ID NO: 7388 - DNA, 33 bp, Artificial Sequence
  Probe
taactcatgcccccatgtctaacaacatggctt

SEQ ID NO: 7389 - DNA, 34 bp, Artificial Sequence
  Probe
taactcatgcccccatgtctaacaacatggcttt

SEQ ID NO: 7390 - DNA, 35 bp, Artificial Sequence
  Probe
taactcatgcccccatgtctaacaacatggctttc

SEQ ID NO: 7391 - DNA, 36 bp, Artificial Sequence
  Probe
taactcatgcccccatgtctaacaacatggctttct

SEQ ID NO: 7392 - DNA, 37 bp, Artificial Sequence
  Probe
taactcatgcccccatgtctaacaacatggctttctc

SEQ ID NO: 7393 - DNA, 38 bp, Artificial Sequence
  Probe
taactcatgcccccatgtctaacaacatggctttctca

SEQ ID NO: 7394 - DNA, 39 bp, Artificial Sequence
  Probe
taactcatgcccccatgtctaacaacatggctttctcaa

SEQ ID NO: 7395 - DNA, 40 bp, Artificial Sequence
  Probe
taactcatgcccccatgtctaacaacatggctttctcaac

SEQ ID NO: 7396 - DNA, 41 bp, Artificial Sequence
  Probe
taactcatgcccccatgtctaacaacatggctttctcaact

SEQ ID NO: 7397 - DNA, 49 bp, Artificial Sequence
  Probe
taacttagcattaaccttttaagttaaagattaagagaaccaacacctc

SEQ ID NO: 7398 - DNA, 50 bp, Artificial Sequence
  Probe
taacttagcattaaccttttaagttaaagattaagagaaccaacacctct

SEQ ID NO: 7399 - DNA, 46 bp, Artificial Sequence
  Probe
taacttccaattaactagttttgacaacattcaaaaaagagtaata

SEQ ID NO: 7400 - DNA, 17 bp, Artificial Sequence
  Probe
taacttgaccgctctga

SEQ ID NO: 7401 - DNA, 19 bp, Artificial Sequence
  Probe
taacttgaccgctctgagc

SEQ ID NO: 7402 - DNA, 20 bp, Artificial Sequence
  Probe
taacttgaccgctctgagct

SEQ ID NO: 7403 - DNA, 27 bp, Artificial Sequence
  Probe
taagagaaccaacacctctttacagtg

SEQ ID NO: 7404 - DNA, 29 bp, Artificial Sequence
  Probe
taagagaaccaacacctctttacagtgaa

SEQ ID NO: 7405 - DNA, 30 bp, Artificial Sequence
  Probe
taagagaaccaacacctctttacagtgaaa

SEQ ID NO: 7406 - DNA, 31 bp, Artificial Sequence
  Probe
taagagaaccaacacctctttacagtgaaat

SEQ ID NO: 7407 - DNA, 17 bp, Artificial Sequence
  Probe
taagccagggattgtgg

SEQ ID NO: 7408 - DNA, 22 bp, Artificial Sequence
  Probe
taagccagggattgtgggttcg

SEQ ID NO: 7409 - DNA, 41 bp, Artificial Sequence
  Probe
taagccagggattgtgggttcgagtcccacctggggtgtcg

SEQ ID NO: 7410 - DNA, 40 bp, Artificial Sequence
  Probe
taagccagggattgtgggttcgagtcccatctggggtggc

SEQ ID NO: 7411 - DNA, 41 bp, Artificial Sequence
  Probe
taagccagggattgtgggttcgagtcccatctggggtggcc

SEQ ID NO: 7412 - DNA, 18 bp, Artificial Sequence
  Probe
taagctatcgggcccata

SEQ ID NO: 7413 - DNA, 19 bp, Artificial Sequence
  Probe
taagctatcgggcccatac

SEQ ID NO: 7414 - DNA, 21 bp, Artificial Sequence
  Probe
taagctatcgggcccataccc

SEQ ID NO: 7415 - DNA, 22 bp, Artificial Sequence
  Probe
taagctatcgggcccatacccc

SEQ ID NO: 7416 - DNA, 23 bp, Artificial Sequence
  Probe
taagctatcgggcccataccccg

SEQ ID NO: 7417 - DNA, 24 bp, Artificial Sequence
  Probe
taagctatcgggcccataccccga

SEQ ID NO: 7418 - DNA, 25 bp, Artificial Sequence
  Probe
taagctatcgggcccataccccgaa

SEQ ID NO: 7419 - DNA, 26 bp, Artificial Sequence
  Probe
taagctatcgggcccataccccgaaa

SEQ ID NO: 7420 - DNA, 27 bp, Artificial Sequence
  Probe
taagctatcgggcccataccccgaaaa

SEQ ID NO: 7421 - DNA, 28 bp, Artificial Sequence
  Probe
taagctatcgggcccataccccgaaaat

SEQ ID NO: 7422 - DNA, 29 bp, Artificial Sequence
  Probe
taagctatcgggcccataccccgaaaatg

SEQ ID NO: 7423 - DNA, 30 bp, Artificial Sequence
  Probe
taagctatcgggcccataccccgaaaatgt

SEQ ID NO: 7424 - DNA, 31 bp, Artificial Sequence
  Probe
taagctatcgggcccataccccgaaaatgtt

SEQ ID NO: 7425 - DNA, 32 bp, Artificial Sequence
  Probe
taagctatcgggcccataccccgaaaatgttg

SEQ ID NO: 7426 - DNA, 33 bp, Artificial Sequence
  Probe
taagctatcgggcccataccccgaaaatgttgg

SEQ ID NO: 7427 - DNA, 34 bp, Artificial Sequence
  Probe
taagctatcgggcccataccccgaaaatgttggt

SEQ ID NO: 7428 - DNA, 35 bp, Artificial Sequence
  Probe
taagctatcgggcccataccccgaaaatgttggtt

SEQ ID NO: 7429 - DNA, 36 bp, Artificial Sequence
  Probe
taagctatcgggcccataccccgaaaatgttggtta

SEQ ID NO: 7430 - DNA, 40 bp, Artificial Sequence
  Probe
taagctatcgggcccataccccgaaaatgttggttatacc

SEQ ID NO: 7431 - DNA, 41 bp, Artificial Sequence
  Probe
taagctatcgggcccataccccgaaaatgttggttataccc

SEQ ID NO: 7432 - DNA, 43 bp, Artificial Sequence
  Probe
taagctatcgggcccataccccgaaaatgttggttataccctt

SEQ ID NO: 7433 - DNA, 46 bp, Artificial Sequence
  Probe
taagctatcgggcccataccccgaaaatgttggttatacccttccc

SEQ ID NO: 7434 - DNA, 48 bp, Artificial Sequence
  Probe
taagctatcgggcccataccccgaaaatgttggttatacccttcccgt

SEQ ID NO: 7435 - DNA, 49 bp, Artificial Sequence
  Probe
taagctatcgggcccataccccgaaaatgttggttatacccttcccgta

SEQ ID NO: 7436 - DNA, 27 bp, Artificial Sequence
  Probe
taaggtcagctaaataagctatcgggc

SEQ ID NO: 7437 - DNA, 28 bp, Artificial Sequence
  Probe
taaggtcagctaaataagctatcgggcc

SEQ ID NO: 7438 - DNA, 29 bp, Artificial Sequence
  Probe
taaggtcagctaaataagctatcgggccc

SEQ ID NO: 7439 - DNA, 30 bp, Artificial Sequence
  Probe
taaggtcagctaaataagctatcgggccca

SEQ ID NO: 7440 - DNA, 31 bp, Artificial Sequence
  Probe
taaggtcagctaaataagctatcgggcccat

SEQ ID NO: 7441 - DNA, 32 bp, Artificial Sequence
  Probe
taaggtcagctaaataagctatcgggcccata

SEQ ID NO: 7442 - DNA, 33 bp, Artificial Sequence
  Probe
taaggtcagctaaataagctatcgggcccatac

SEQ ID NO: 7443 - DNA, 34 bp, Artificial Sequence
  Probe
taaggtcagctaaataagctatcgggcccatacc

SEQ ID NO: 7444 - DNA, 37 bp, Artificial Sequence
  Probe
taaggtcagctaaataagctatcgggcccataccccg

SEQ ID NO: 7445 - DNA, 39 bp, Artificial Sequence
  Probe
taaggtcagctaaataagctatcgggcccataccccgaa

SEQ ID NO: 7446 - DNA, 40 bp, Artificial Sequence
  Probe
taaggtcagctaaataagctatcgggcccataccccgaaa

SEQ ID NO: 7447 - DNA, 41 bp, Artificial Sequence
  Probe
taaggtcagctaaataagctatcgggcccataccccgaaaa

SEQ ID NO: 7448 - DNA, 42 bp, Artificial Sequence
  Probe
taaggtcagctaaataagctatcgggcccataccccgaaaat

SEQ ID NO: 7449 - DNA, 43 bp, Artificial Sequence
  Probe
taaggtcagctaaataagctatcgggcccataccccgaaaatg

SEQ ID NO: 7450 - DNA, 44 bp, Artificial Sequence
  Probe
taaggtcagctaaataagctatcgggcccataccccgaaaatgt

SEQ ID NO: 7451 - DNA, 45 bp, Artificial Sequence
  Probe
taaggtcagctaaataagctatcgggcccataccccgaaaatgtt

SEQ ID NO: 7452 - DNA, 46 bp, Artificial Sequence
  Probe
taaggtcagctaaataagctatcgggcccataccccgaaaatgttg

SEQ ID NO: 7453 - DNA, 49 bp, Artificial Sequence
  Probe
taaggtcagctaaataagctatcgggcccataccccgaaaatgttggtt

SEQ ID NO: 7454 - DNA, 50 bp, Artificial Sequence
  Probe
taaggtcagctaaataagctatcgggcccataccccgaaaatgttggtta

SEQ ID NO: 7455 - DNA, 29 bp, Artificial Sequence
  Probe
taagtgtttgtgggtttaagtcccattgg

SEQ ID NO: 7456 - DNA, 31 bp, Artificial Sequence
  Probe
taagtgtttgtgggtttaagtcccattggtc

SEQ ID NO: 7457 - DNA, 32 bp, Artificial Sequence
  Probe
taagtgtttgtgggtttaagtcccattggtct

SEQ ID NO: 7458 - DNA, 33 bp, Artificial Sequence
  Probe
taagtgtttgtgggtttaagtcccattggtcta

SEQ ID NO: 7459 - DNA, 40 bp, Artificial Sequence
  Probe
taagttaaagattaagagaaccaacacctctttacagtga

SEQ ID NO: 7460 - DNA, 43 bp, Artificial Sequence
  Probe
taagttaaagattaagagaaccaacacctctttacagtgaaat

SEQ ID NO: 7461 - DNA, 50 bp, Artificial Sequence
  Probe
taagttaaagattaagagaaccaacacctctttacagtgaaatgccccaa

SEQ ID NO: 7462 - DNA, 50 bp, Artificial Sequence
  Probe
taatacaccagtcttgtaaaccggagatgaaaacctttttccaaggacaa

SEQ ID NO: 7463 - DNA, 19 bp, Artificial Sequence
  Probe
taatcatatttaccaaatg

SEQ ID NO: 7464 - DNA, 50 bp, Artificial Sequence
  Probe
taatcgcataaaacttaaaactttacagtcagaggttcaattcctcttct

SEQ ID NO: 7465 - DNA, 41 bp, Artificial Sequence
  Probe
taatctgaaggtcgtgagttcgatcctcacacggggcacaa

SEQ ID NO: 7466 - DNA, 33 bp, Artificial Sequence
  Probe
taatggtggagttaaagactttttctctgattt

SEQ ID NO: 7467 - DNA, 29 bp, Artificial Sequence
  Probe
taattgaaaacaaaatactcaaatgggcc

SEQ ID NO: 7468 - DNA, 30 bp, Artificial Sequence
  Probe
taattgaaaacaaaatactcaaatgggcct

SEQ ID NO: 7469 - DNA, 31 bp, Artificial Sequence
  Probe
taattgaaaacaaaatactcaaatgggcctg

SEQ ID NO: 7470 - DNA, 32 bp, Artificial Sequence
  Probe
taattgaaaacaaaatactcaaatgggcctgt

SEQ ID NO: 7471 - DNA, 33 bp, Artificial Sequence
  Probe
taattgaaaacaaaatactcaaatgggcctgtc

SEQ ID NO: 7472 - DNA, 49 bp, Artificial Sequence
  Probe
tacaacgatggtttttcatatcattggtcgtggttgtagtccgtgcgag

SEQ ID NO: 7473 - DNA, 15 bp, Artificial Sequence
  Probe
tacaatctccagcat

SEQ ID NO: 7474 - DNA, 20 bp, Artificial Sequence
  Probe
tacaatctccagcattcccc

SEQ ID NO: 7475 - DNA, 23 bp, Artificial Sequence
  Probe
tacaatctccagcattccccctc

SEQ ID NO: 7476 - DNA, 25 bp, Artificial Sequence
  Probe
tacaatctccagcattccccctcaa

SEQ ID NO: 7477 - DNA, 29 bp, Artificial Sequence
  Probe
tacaatctccagcattccccctcaaacct

SEQ ID NO: 7478 - DNA, 30 bp, Artificial Sequence
  Probe
tacaatctccagcattccccctcaaaccta

SEQ ID NO: 7479 - DNA, 31 bp, Artificial Sequence
  Probe
tacaatctccagcattccccctcaaacctaa

SEQ ID NO: 7480 - DNA, 32 bp, Artificial Sequence
  Probe
tacaatctccagcattccccctcaaacctaag

SEQ ID NO: 7481 - DNA, 33 bp, Artificial Sequence
  Probe
tacaatctccagcattccccctcaaacctaaga

SEQ ID NO: 7482 - DNA, 50 bp, Artificial Sequence
  Probe
tacaccagtcttgtaaaccggagatgaaaacctttttccaaggacaaatc

SEQ ID NO: 7483 - DNA, 43 bp, Artificial Sequence
  Probe
tacacgcagaaggtcctgggttcgagccccagtggaaccacgg

SEQ ID NO: 7484 - DNA, 45 bp, Artificial Sequence
  Probe
tacactgaaaatgtttagacgggctcacatcaccccataaacaaa

SEQ ID NO: 7485 - DNA, 46 bp, Artificial Sequence
  Probe
tacactgaaaatgtttagacgggctcacatcaccccataaacaaat

SEQ ID NO: 7486 - DNA, 50 bp, Artificial Sequence
  Probe
tacactgaaaatgtttagacgggctcacatcaccccataaacaaataggt

SEQ ID NO: 7487 - DNA, 30 bp, Artificial Sequence
  Probe
tacacttaggagatttcaacttaacttgac

SEQ ID NO: 7488 - DNA, 32 bp, Artificial Sequence
  Probe
tacacttaggagatttcaacttaacttgaccg

SEQ ID NO: 7489 - DNA, 33 bp, Artificial Sequence
  Probe
tacacttaggagatttcaacttaacttgaccgc

SEQ ID NO: 7490 - DNA, 34 bp, Artificial Sequence
  Probe
tacacttaggagatttcaacttaacttgaccgct

SEQ ID NO: 7491 - DNA, 35 bp, Artificial Sequence
  Probe
tacacttaggagatttcaacttaacttgaccgctc

SEQ ID NO: 7492 - DNA, 36 bp, Artificial Sequence
  Probe
tacacttaggagatttcaacttaacttgaccgctct

SEQ ID NO: 7493 - DNA, 37 bp, Artificial Sequence
  Probe
tacacttaggagatttcaacttaacttgaccgctctg

SEQ ID NO: 7494 - DNA, 38 bp, Artificial Sequence
  Probe
tacacttaggagatttcaacttaacttgaccgctctga

SEQ ID NO: 7495 - DNA, 39 bp, Artificial Sequence
  Probe
tacacttaggagatttcaacttaacttgaccgctctgag

SEQ ID NO: 7496 - DNA, 40 bp, Artificial Sequence
  Probe
tacacttaggagatttcaacttaacttgaccgctctgagc

SEQ ID NO: 7497 - DNA, 41 bp, Artificial Sequence
  Probe
tacacttaggagatttcaacttaacttgaccgctctgagct

SEQ ID NO: 7498 - DNA, 42 bp, Artificial Sequence
  Probe
tacacttaggagatttcaacttaacttgaccgctctgagcta

SEQ ID NO: 7499 - DNA, 43 bp, Artificial Sequence
  Probe
tacacttaggagatttcaacttaacttgaccgctctgagctaa

SEQ ID NO: 7500 - DNA, 44 bp, Artificial Sequence
  Probe
tacacttaggagatttcaacttaacttgaccgctctgagctaaa

SEQ ID NO: 7501 - DNA, 18 bp, Artificial Sequence
  Probe
tacagaccaagagccttc

SEQ ID NO: 7502 - DNA, 50 bp, Artificial Sequence
  Probe
tacagaccaagagccttcaaagccctcagtaagttgcaatacttaatttc

SEQ ID NO: 7503 - DNA, 24 bp, Artificial Sequence
  Probe
tacagtcagaggttcaattcctct

SEQ ID NO: 7504 - DNA, 25 bp, Artificial Sequence
  Probe
tacagtcagaggttcaattcctctt

SEQ ID NO: 7505 - DNA, 27 bp, Artificial Sequence
  Probe
tacagtcagaggttcaattcctcttct

SEQ ID NO: 7506 - DNA, 32 bp, Artificial Sequence
  Probe
tacagtcagaggttcaattcctcttcttaaca

SEQ ID NO: 7507 - DNA, 27 bp, Artificial Sequence
  Probe
tacccacacccacccaagaacagggtt

SEQ ID NO: 7508 - DNA, 28 bp, Artificial Sequence
  Probe
tacccacacccacccaagaacagggttt

SEQ ID NO: 7509 - DNA, 29 bp, Artificial Sequence
  Probe
tacccacacccacccaagaacagggtttg

SEQ ID NO: 7510 - DNA, 30 bp, Artificial Sequence
  Probe
tacccacacccacccaagaacagggtttgt

SEQ ID NO: 7511 - DNA, 31 bp, Artificial Sequence
  Probe
tacccacacccacccaagaacagggtttgtt

SEQ ID NO: 7512 - DNA, 32 bp, Artificial Sequence
  Probe
tacccacacccacccaagaacagggtttgtta

SEQ ID NO: 7513 - DNA, 28 bp, Artificial Sequence
  Probe
taccccgaaaatgttggttatacccttc

SEQ ID NO: 7514 - DNA, 29 bp, Artificial Sequence
  Probe
taccccgaaaatgttggttatacccttcc

SEQ ID NO: 7515 - DNA, 30 bp, Artificial Sequence
  Probe
taccccgaaaatgttggttatacccttccc

SEQ ID NO: 7516 - DNA, 31 bp, Artificial Sequence
  Probe
taccccgaaaatgttggttatacccttcccg

SEQ ID NO: 7517 - DNA, 32 bp, Artificial Sequence
  Probe
taccccgaaaatgttggttatacccttcccgt

SEQ ID NO: 7518 - DNA, 33 bp, Artificial Sequence
  Probe
taccccgaaaatgttggttatacccttcccgta

SEQ ID NO: 7519 - DNA, 38 bp, Artificial Sequence
  Probe
taccccgaaaatgttggttatacccttcccgtactaat

SEQ ID NO: 7520 - DNA, 39 bp, Artificial Sequence
  Probe
taccccgaaaatgttggttatacccttcccgtactaatt

SEQ ID NO: 7521 - DNA, 17 bp, Artificial Sequence
  Probe
tacccttcccgtactaa

SEQ ID NO: 7522 - DNA, 32 bp, Artificial Sequence
  Probe
taccgttaacttccaattaactagttttgaca

SEQ ID NO: 7523 - DNA, 50 bp, Artificial Sequence
  Probe
taccgttaacttccaattaactagttttgacaacattcaaaaaagagtaa

SEQ ID NO: 7524 - DNA, 20 bp, Artificial Sequence
  Probe
tacctcctcaaagcaataca

SEQ ID NO: 7525 - DNA, 22 bp, Artificial Sequence
  Probe
tacctcctcaaagcaatacact

SEQ ID NO: 7526 - DNA, 23 bp, Artificial Sequence
  Probe
tacctcctcaaagcaatacactg

SEQ ID NO: 7527 - DNA, 24 bp, Artificial Sequence
  Probe
tacctcctcaaagcaatacactga

SEQ ID NO: 7528 - DNA, 39 bp, Artificial Sequence
  Probe
tacctcctcaaagcaatacactgaaaatgtttagacggg

SEQ ID NO: 7529 - DNA, 40 bp, Artificial Sequence
  Probe
tacctcctcaaagcaatacactgaaaatgtttagacgggc

SEQ ID NO: 7530 - DNA, 41 bp, Artificial Sequence
  Probe
tacctcctcaaagcaatacactgaaaatgtttagacgggct

SEQ ID NO: 7531 - DNA, 43 bp, Artificial Sequence
  Probe
tacctcctcaaagcaatacactgaaaatgtttagacgggctca

SEQ ID NO: 7532 - DNA, 44 bp, Artificial Sequence
  Probe
tacctcctcaaagcaatacactgaaaatgtttagacgggctcac

SEQ ID NO: 7533 - DNA, 45 bp, Artificial Sequence
  Probe
tacctcctcaaagcaatacactgaaaatgtttagacgggctcaca

SEQ ID NO: 7534 - DNA, 40 bp, Artificial Sequence
  Probe
tactttgatagagtaaataataggagcttaaaccccctta

SEQ ID NO: 7535 - DNA, 50 bp, Artificial Sequence
  Probe
tactttgatagagtaaataataggagcttaaacccccttatttctaggac

SEQ ID NO: 7536 - DNA, 22 bp, Artificial Sequence
  Probe
tagacgggctcacatcacccca

SEQ ID NO: 7537 - DNA, 23 bp, Artificial Sequence
  Probe
tagacgggctcacatcaccccat

SEQ ID NO: 7538 - DNA, 24 bp, Artificial Sequence
  Probe
tagacgggctcacatcaccccata

SEQ ID NO: 7539 - DNA, 27 bp, Artificial Sequence
  Probe
tagacgggctcacatcaccccataaac

SEQ ID NO: 7540 - DNA, 28 bp, Artificial Sequence
  Probe
tagacgggctcacatcaccccataaaca

SEQ ID NO: 7541 - DNA, 29 bp, Artificial Sequence
  Probe
tagacgggctcacatcaccccataaacaa

SEQ ID NO: 7542 - DNA, 30 bp, Artificial Sequence
  Probe
tagacgggctcacatcaccccataaacaaa

SEQ ID NO: 7543 - DNA, 31 bp, Artificial Sequence
  Probe
tagacgggctcacatcaccccataaacaaat

SEQ ID NO: 7544 - DNA, 32 bp, Artificial Sequence
  Probe
tagacgggctcacatcaccccataaacaaata

SEQ ID NO: 7545 - DNA, 32 bp, Artificial Sequence
  Probe
tagagcatgggactcttaatcccagggtcgtg

SEQ ID NO: 7546 - DNA, 22 bp, Artificial Sequence
  Probe
tagagccagactgcctgggttt

SEQ ID NO: 7547 - DNA, 23 bp, Artificial Sequence
  Probe
tagagccagactgcctgggtttg

SEQ ID NO: 7548 - DNA, 31 bp, Artificial Sequence
  Probe
tagagtaaataataggagcttaaaccccctt

SEQ ID NO: 7549 - DNA, 37 bp, Artificial Sequence
  Probe
tagagtaaataataggagcttaaacccccttatttct

SEQ ID NO: 7550 - DNA, 39 bp, Artificial Sequence
  Probe
tagagtaaataataggagcttaaacccccttatttctag

SEQ ID NO: 7551 - DNA, 40 bp, Artificial Sequence
  Probe
tagagtaaataataggagcttaaacccccttatttctagg

SEQ ID NO: 7552 - DNA, 41 bp, Artificial Sequence
  Probe
tagagtaaataataggagcttaaacccccttatttctagga

SEQ ID NO: 7553 - DNA, 25 bp, Artificial Sequence
  Probe
tagattgaagccagttgattagggt

SEQ ID NO: 7554 - DNA, 35 bp, Artificial Sequence
  Probe
tagattgaagccagttgattagggtgcttagctgt

SEQ ID NO: 7555 - DNA, 36 bp, Artificial Sequence
  Probe
tagattgaagccagttgattagggtgcttagctgtt

SEQ ID NO: 7556 - DNA, 37 bp, Artificial Sequence
  Probe
tagattgaagccagttgattagggtgcttagctgtta

SEQ ID NO: 7557 - DNA, 40 bp, Artificial Sequence
  Probe
tagattgaagccagttgattagggtgcttagctgttaact

SEQ ID NO: 7558 - DNA, 50 bp, Artificial Sequence
  Probe
tagcactctggactctgaatccagcgatccgagttcaaatctcggtggaa

SEQ ID NO: 7559 - DNA, 37 bp, Artificial Sequence
  Probe
tagcattaaccttttaagttaaagattaagagaacca

SEQ ID NO: 7560 - DNA, 39 bp, Artificial Sequence
  Probe
tagcattaaccttttaagttaaagattaagagaaccaac

SEQ ID NO: 7561 - DNA, 48 bp, Artificial Sequence
  Probe
tagcattaaccttttaagttaaagattaagagaaccaacacctcttta

SEQ ID NO: 7562 - DNA, 22 bp, Artificial Sequence
  Probe
tagccccaaacccactccacct

SEQ ID NO: 7563 - DNA, 22 bp, Artificial Sequence
  Probe
tagcgtggccgagcggtctaag

SEQ ID NO: 7564 - DNA, 29 bp, Artificial Sequence
  Probe
tagctcagtcggtagagcatcagactttt

SEQ ID NO: 7565 - DNA, 25 bp, Artificial Sequence
  Probe
tagctcagtcggtagagcatgagac

SEQ ID NO: 7566 - DNA, 27 bp, Artificial Sequence
  Probe
tagctcagtcggtagagcatgagactc

SEQ ID NO: 7567 - DNA, 29 bp, Artificial Sequence
  Probe
tagctcagtcggtagagcatgagactctt

SEQ ID NO: 7568 - DNA, 50 bp, Artificial Sequence
  Probe
tagctgttaactaagtgtttgtgggtttaagtcccattggtctagtaagg

SEQ ID NO: 7569 - DNA, 24 bp, Artificial Sequence
  Probe
taggagatttcaacttaacttgac

SEQ ID NO: 7570 - DNA, 25 bp, Artificial Sequence
  Probe
taggagatttcaacttaacttgacc

SEQ ID NO: 7571 - DNA, 26 bp, Artificial Sequence
  Probe
taggagatttcaacttaacttgaccg

SEQ ID NO: 7572 - DNA, 27 bp, Artificial Sequence
  Probe
taggagatttcaacttaacttgaccgc

SEQ ID NO: 7573 - DNA, 28 bp, Artificial Sequence
  Probe
taggagatttcaacttaacttgaccgct

SEQ ID NO: 7574 - DNA, 29 bp, Artificial Sequence
  Probe
taggagatttcaacttaacttgaccgctc

SEQ ID NO: 7575 - DNA, 31 bp, Artificial Sequence
  Probe
taggagatttcaacttaacttgaccgctctg

SEQ ID NO: 7576 - DNA, 32 bp, Artificial Sequence
  Probe
taggagatttcaacttaacttgaccgctctga

SEQ ID NO: 7577 - DNA, 33 bp, Artificial Sequence
  Probe
taggagatttcaacttaacttgaccgctctgag

SEQ ID NO: 7578 - DNA, 34 bp, Artificial Sequence
  Probe
taggagatttcaacttaacttgaccgctctgagc

SEQ ID NO: 7579 - DNA, 35 bp, Artificial Sequence
  Probe
taggagatttcaacttaacttgaccgctctgagct

SEQ ID NO: 7580 - DNA, 29 bp, Artificial Sequence
  Probe
taggagcttaaacccccttatttctagga

SEQ ID NO: 7581 - DNA, 17 bp, Artificial Sequence
  Probe
taggatggggtgtgata

SEQ ID NO: 7582 - DNA, 22 bp, Artificial Sequence
  Probe
taggatggggtgtgataggtgg

SEQ ID NO: 7583 - DNA, 25 bp, Artificial Sequence
  Probe
taggatggggtgtgataggtggcac

SEQ ID NO: 7584 - DNA, 27 bp, Artificial Sequence
  Probe
taggatggggtgtgataggtggcacgg

SEQ ID NO: 7585 - DNA, 31 bp, Artificial Sequence
  Probe
taggatggggtgtgataggtggcacggagaa

SEQ ID NO: 7586 - DNA, 34 bp, Artificial Sequence
  Probe
taggatggggtgtgataggtggcacggagaattt

SEQ ID NO: 7587 - DNA, 35 bp, Artificial Sequence
  Probe
taggatggggtgtgataggtggcacggagaatttt

SEQ ID NO: 7588 - DNA, 37 bp, Artificial Sequence
  Probe
taggatggggtgtgataggtggcacggagaattttgg

SEQ ID NO: 7589 - DNA, 17 bp, Artificial Sequence
  Probe
taggggtatgattctcg

SEQ ID NO: 7590 - DNA, 19 bp, Artificial Sequence
  Probe
tagggtgcgagaggtcccg

SEQ ID NO: 7591 - DNA, 49 bp, Artificial Sequence
  Probe
tagggtgcttagctgttaactaagtgtttgtgggtttaagtcccattgg

SEQ ID NO: 7592 - DNA, 44 bp, Artificial Sequence
  Probe
tagtaaacaggagatcctgggttcgaatcccagcggggccttac

SEQ ID NO: 7593 - DNA, 44 bp, Artificial Sequence
  Probe
tagtaaacaggagatcctgggttcgaatcccagcggtgcctccg

SEQ ID NO: 7594 - DNA, 28 bp, Artificial Sequence
  Probe
tagtaccgttaacttccaattaactagt

SEQ ID NO: 7595 - DNA, 38 bp, Artificial Sequence
  Probe
tagtaccgttaacttccaattaactagttttgacaaca

SEQ ID NO: 7596 - DNA, 40 bp, Artificial Sequence
  Probe
tagtaccgttaacttccaattaactagttttgacaacatt

SEQ ID NO: 7597 - DNA, 41 bp, Artificial Sequence
  Probe
tagtaccgttaacttccaattaactagttttgacaacattc

SEQ ID NO: 7598 - DNA, 50 bp, Artificial Sequence
  Probe
tagtaccgttaacttccaattaactagttttgacaacattcaaaaaagag

SEQ ID NO: 7599 - DNA, 17 bp, Artificial Sequence
  Probe
tagtccgtgcgagaata

SEQ ID NO: 7600 - DNA, 20 bp, Artificial Sequence
  Probe
tagtccgtgcgagaataatg

SEQ ID NO: 7601 - DNA, 19 bp, Artificial Sequence
  Probe
tagtggtgagtatccccgc

SEQ ID NO: 7602 - DNA, 24 bp, Artificial Sequence
  Probe
tagtggtgagtatccccgcctgtc

SEQ ID NO: 7603 - DNA, 25 bp, Artificial Sequence
  Probe
tagtggtgagtatccccgcctgtca

SEQ ID NO: 7604 - DNA, 27 bp, Artificial Sequence
  Probe
tagtggtgagtatccccgcctgtcacg

SEQ ID NO: 7605 - DNA, 20 bp, Artificial Sequence
  Probe
tagtggttaggattcggcgc

SEQ ID NO: 7606 - DNA, 24 bp, Artificial Sequence
  Probe
tagtggttaggattcggcgctctc

SEQ ID NO: 7607 - DNA, 19 bp, Artificial Sequence
  Probe
tagtggttagtatccccgc

SEQ ID NO: 7608 - DNA, 29 bp, Artificial Sequence
  Probe
tagtgtagtggttatcacgttcgcctcac

SEQ ID NO: 7609 - DNA, 15 bp, Artificial Sequence
  Probe
tatacccacacccac

SEQ ID NO: 7610 - DNA, 16 bp, Artificial Sequence
  Probe
tatacccacacccacc

SEQ ID NO: 7611 - DNA, 17 bp, Artificial Sequence
  Probe
tatacccacacccaccc

SEQ ID NO: 7612 - DNA, 18 bp, Artificial Sequence
  Probe
tatacccacacccaccca

SEQ ID NO: 7613 - DNA, 19 bp, Artificial Sequence
  Probe
tatacccacacccacccaa

SEQ ID NO: 7614 - DNA, 20 bp, Artificial Sequence
  Probe
tatacccacacccacccaag

SEQ ID NO: 7615 - DNA, 21 bp, Artificial Sequence
  Probe
tatacccacacccacccaaga

SEQ ID NO: 7616 - DNA, 22 bp, Artificial Sequence
  Probe
tatacccacacccacccaagaa

SEQ ID NO: 7617 - DNA, 23 bp, Artificial Sequence
  Probe
tatacccacacccacccaagaac

SEQ ID NO: 7618 - DNA, 24 bp, Artificial Sequence
  Probe
tatacccacacccacccaagaaca

SEQ ID NO: 7619 - DNA, 26 bp, Artificial Sequence
  Probe
tatacccacacccacccaagaacagg

SEQ ID NO: 7620 - DNA, 27 bp, Artificial Sequence
  Probe
tatacccacacccacccaagaacaggg

SEQ ID NO: 7621 - DNA, 28 bp, Artificial Sequence
  Probe
tatacccacacccacccaagaacagggt

SEQ ID NO: 7622 - DNA, 29 bp, Artificial Sequence
  Probe
tatacccacacccacccaagaacagggtt

SEQ ID NO: 7623 - DNA, 30 bp, Artificial Sequence
  Probe
tatacccacacccacccaagaacagggttt

SEQ ID NO: 7624 - DNA, 31 bp, Artificial Sequence
  Probe
tatacccacacccacccaagaacagggtttg

SEQ ID NO: 7625 - DNA, 32 bp, Artificial Sequence
  Probe
tatacccacacccacccaagaacagggtttgt

SEQ ID NO: 7626 - DNA, 33 bp, Artificial Sequence
  Probe
tatacccacacccacccaagaacagggtttgtt

SEQ ID NO: 7627 - DNA, 34 bp, Artificial Sequence
  Probe
tatacccacacccacccaagaacagggtttgtta

SEQ ID NO: 7628 - DNA, 35 bp, Artificial Sequence
  Probe
tatacccacacccacccaagaacagggtttgttaa

SEQ ID NO: 7629 - DNA, 36 bp, Artificial Sequence
  Probe
tatacccacacccacccaagaacagggtttgttaag

SEQ ID NO: 7630 - DNA, 37 bp, Artificial Sequence
  Probe
tatacccacacccacccaagaacagggtttgttaaga

SEQ ID NO: 7631 - DNA, 39 bp, Artificial Sequence
  Probe
tatacccacacccacccaagaacagggtttgttaagatg

SEQ ID NO: 7632 - DNA, 40 bp, Artificial Sequence
  Probe
tatacccacacccacccaagaacagggtttgttaagatgg

SEQ ID NO: 7633 - DNA, 25 bp, Artificial Sequence
  Probe
tatagtggtgagtatccccgcctgt

SEQ ID NO: 7634 - DNA, 25 bp, Artificial Sequence
  Probe
tatagtggttagtactctgcgttgt

SEQ ID NO: 7635 - DNA, 27 bp, Artificial Sequence
  Probe
tatcattggtcgtggttgtagtccgtg

SEQ ID NO: 7636 - DNA, 29 bp, Artificial Sequence
  Probe
tatcattggtcgtggttgtagtccgtgcg

SEQ ID NO: 7637 - DNA, 38 bp, Artificial Sequence
  Probe
tatcattggtcgtggttgtagtccgtgcgagaataatg

SEQ ID NO: 7638 - DNA, 24 bp, Artificial Sequence
  Probe
tatgataatcatatttaccaaatg

SEQ ID NO: 7639 - DNA, 27 bp, Artificial Sequence
  Probe
tcaaagttaaattataggctaaatcct

SEQ ID NO: 7640 - DNA, 29 bp, Artificial Sequence
  Probe
tcaaagttaaattataggctaaatcctat

SEQ ID NO: 7641 - DNA, 30 bp, Artificial Sequence
  Probe
tcaaagttaaattataggctaaatcctata

SEQ ID NO: 7642 - DNA, 31 bp, Artificial Sequence
  Probe
tcaaagttaaattataggctaaatcctatat

SEQ ID NO: 7643 - DNA, 32 bp, Artificial Sequence
  Probe
tcaaagttaaattataggctaaatcctatata

SEQ ID NO: 7644 - DNA, 22 bp, Artificial Sequence
  Probe
tcaaatcccggacgagccccct

SEQ ID NO: 7645 - DNA, 23 bp, Artificial Sequence
  Probe
tcaaatcccggacgagccccctt

SEQ ID NO: 7646 - DNA, 23 bp, Artificial Sequence
  Probe
tcaaatcccggacgagccctcat

SEQ ID NO: 7647 - DNA, 17 bp, Artificial Sequence
  Probe
tcaacttaacttgaccg

SEQ ID NO: 7648 - DNA, 24 bp, Artificial Sequence
  Probe
tcaacttaacttgaccgctctgag

SEQ ID NO: 7649 - DNA, 25 bp, Artificial Sequence
  Probe
tcaacttaacttgaccgctctgagc

SEQ ID NO: 7650 - DNA, 26 bp, Artificial Sequence
  Probe
tcaacttaacttgaccgctctgagct

SEQ ID NO: 7651 - DNA, 22 bp, Artificial Sequence
  Probe
tcaagtccctgttcgggcggca

SEQ ID NO: 7652 - DNA, 23 bp, Artificial Sequence
  Probe
tcaagtccctgttcgggcggcat

SEQ ID NO: 7653 - DNA, 22 bp, Artificial Sequence
  Probe
tcaattccccgacggggaggtg

SEQ ID NO: 7654 - DNA, 22 bp, Artificial Sequence
  Probe
tcaattcccggtcagggaacca

SEQ ID NO: 7655 - DNA, 17 bp, Artificial Sequence
  Probe
tcacaagaactgctaac

SEQ ID NO: 7656 - DNA, 22 bp, Artificial Sequence
  Probe
tcacaagaactgctaactcatg

SEQ ID NO: 7657 - DNA, 23 bp, Artificial Sequence
  Probe
tcacaagaactgctaactcatgc

SEQ ID NO: 7658 - DNA, 24 bp, Artificial Sequence
  Probe
tcacaagaactgctaactcatgcc

SEQ ID NO: 7659 - DNA, 25 bp, Artificial Sequence
  Probe
tcacaagaactgctaactcatgccc

SEQ ID NO: 7660 - DNA, 32 bp, Artificial Sequence
  Probe
tcacaagaactgctaactcatgcccccatgtc

SEQ ID NO: 7661 - DNA, 48 bp, Artificial Sequence
  Probe
tcacaagaactgctaactcatgcccccatgtctaacaacatggctttc

SEQ ID NO: 7662 - DNA, 24 bp, Artificial Sequence
  Probe
tcacacgcgaaaggtccccggttt

SEQ ID NO: 7663 - DNA, 21 bp, Artificial Sequence
  Probe
tcacacggggcacaataattt

SEQ ID NO: 7664 - DNA, 16 bp, Artificial Sequence
  Probe
tcacatcaccccataa

SEQ ID NO: 7665 - DNA, 17 bp, Artificial Sequence
  Probe
tcacatcaccccataaa

SEQ ID NO: 7666 - DNA, 18 bp, Artificial Sequence
  Probe
tcacatcaccccataaac

SEQ ID NO: 7667 - DNA, 19 bp, Artificial Sequence
  Probe
tcacatcaccccataaaca

SEQ ID NO: 7668 - DNA, 20 bp, Artificial Sequence
  Probe
tcacatcaccccataaacaa

SEQ ID NO: 7669 - DNA, 21 bp, Artificial Sequence
  Probe
tcacatcaccccataaacaaa

SEQ ID NO: 7670 - DNA, 22 bp, Artificial Sequence
  Probe
tcacatcaccccataaacaaat

SEQ ID NO: 7671 - DNA, 23 bp, Artificial Sequence
  Probe
tcacatcaccccataaacaaata

SEQ ID NO: 7672 - DNA, 39 bp, Artificial Sequence
  Probe
tcacccaggcggcccgggttcgactcccggtgtgggaac

SEQ ID NO: 7673 - DNA, 40 bp, Artificial Sequence
  Probe
tcacccaggcggcccgggttcgactcccggtgtgggaacg

SEQ ID NO: 7674 - DNA, 41 bp, Artificial Sequence
  Probe
tcacccaggcggcccgggttcgactcccggtgtgggaacgc

SEQ ID NO: 7675 - DNA, 49 bp, Artificial Sequence
  Probe
tcacccaggcggcccgggttcgactcccggtgtgggaacgccgaaattt

SEQ ID NO: 7676 - DNA, 50 bp, Artificial Sequence
  Probe
tcacccaggcggcccgggttcgactcccggtgtgggaacgccgaaatttt

SEQ ID NO: 7677 - DNA, 41 bp, Artificial Sequence
  Probe
tcacccaggtggcccgggttcgactcccggtatgggaacaa

SEQ ID NO: 7678 - DNA, 21 bp, Artificial Sequence
  Probe
tcaccgccgcggcccgggttc

SEQ ID NO: 7679 - DNA, 39 bp, Artificial Sequence
  Probe
tcaccgccgcggcccgggttcgattcccggtcagggaaa

SEQ ID NO: 7680 - DNA, 39 bp, Artificial Sequence
  Probe
tcaccgccgcggcccgggttcgattcccggtcagggaag

SEQ ID NO: 7681 - DNA, 39 bp, Artificial Sequence
  Probe
tcaccgccgcggcccgggttcgattcccggtcagggaat

SEQ ID NO: 7682 - DNA, 41 bp, Artificial Sequence
  Probe
tcaccgccgcggcccgggttcgattcccggtcagggaattg

SEQ ID NO: 7683 - DNA, 22 bp, Artificial Sequence
  Probe
tcacctggagcatgttttcttc

SEQ ID NO: 7684 - DNA, 21 bp, Artificial Sequence
  Probe
tcacgcgggagaccggggttc

SEQ ID NO: 7685 - DNA, 24 bp, Artificial Sequence
  Probe
tcacgcgggagaccggggttcaat

SEQ ID NO: 7686 - DNA, 32 bp, Artificial Sequence
  Probe
tcacgcgggagaccggggttcaattccccgac

SEQ ID NO: 7687 - DNA, 35 bp, Artificial Sequence
  Probe
tcacgcgggagaccggggttcaattccccgacggg

SEQ ID NO: 7688 - DNA, 37 bp, Artificial Sequence
  Probe
tcacgcgggagaccggggttcaattccccgacgggga

SEQ ID NO: 7689 - DNA, 39 bp, Artificial Sequence
  Probe
tcacgcgggagaccggggttcaattccccgacggggagg

SEQ ID NO: 7690 - DNA, 40 bp, Artificial Sequence
  Probe
tcacgcgggagaccggggttcaattccccgacggggaggt

SEQ ID NO: 7691 - DNA, 41 bp, Artificial Sequence
  Probe
tcacgcgggagaccggggttcaattccccgacggggaggtg

SEQ ID NO: 7692 - DNA, 42 bp, Artificial Sequence
  Probe
tcacgcgggagaccggggttcaattccccgacggggaggtgt

SEQ ID NO: 7693 - DNA, 43 bp, Artificial Sequence
  Probe
tcacgcgggagaccggggttcaattccccgacggggaggtgtg

SEQ ID NO: 7694 - DNA, 23 bp, Artificial Sequence
  Probe
tcacgcgggagaccggggttcga

SEQ ID NO: 7695 - DNA, 24 bp, Artificial Sequence
  Probe
tcacgcgggagaccggggttcgat

SEQ ID NO: 7696 - DNA, 25 bp, Artificial Sequence
  Probe
tcacgcgggagaccggggttcgatt

SEQ ID NO: 7697 - DNA, 31 bp, Artificial Sequence
  Probe
tcacgcgggagaccggggttcgattccccga

SEQ ID NO: 7698 - DNA, 37 bp, Artificial Sequence
  Probe
tcacgcgggagaccggggttcgattccccgacgggga

SEQ ID NO: 7699 - DNA, 39 bp, Artificial Sequence
  Probe
tcacgcgggagaccggggttcgattccccgacggggaga

SEQ ID NO: 7700 - DNA, 40 bp, Artificial Sequence
  Probe
tcacgcgggagaccggggttcgattccccgacggggagaa

SEQ ID NO: 7701 - DNA, 41 bp, Artificial Sequence
  Probe
tcacgcgggagaccggggttcgattccccgacggggagaaa

SEQ ID NO: 7702 - DNA, 42 bp, Artificial Sequence
  Probe
tcacgcgggagaccggggttcgattccccgacggggagaaaa

SEQ ID NO: 7703 - DNA, 43 bp, Artificial Sequence
  Probe
tcacgcgggagaccggggttcgattccccgacggggagaaaag

SEQ ID NO: 7704 - DNA, 49 bp, Artificial Sequence
  Probe
tcacgcgggagaccggggttcgattccccgacggggagaaaagttgctt

SEQ ID NO: 7705 - DNA, 50 bp, Artificial Sequence
  Probe
tcacgcgggagaccggggttcgattccccgacggggagaaaagttgcttt

SEQ ID NO: 7706 - DNA, 40 bp, Artificial Sequence
  Probe
tcacgcgggagaccggggttcgattccccgacggggagac

SEQ ID NO: 7707 - DNA, 41 bp, Artificial Sequence
  Probe
tcacgcgggagaccggggttcgattccccgacggggagacg

SEQ ID NO: 7708 - DNA, 40 bp, Artificial Sequence
  Probe
tcacgcgggagaccggggttcgattccccgacggggagag

SEQ ID NO: 7709 - DNA, 41 bp, Artificial Sequence
  Probe
tcacgcgggagaccggggttcgattccccgacggggagagt

SEQ ID NO: 7710 - DNA, 42 bp, Artificial Sequence
  Probe
tcacgcgggagaccggggttcgattccccgacggggagagta

SEQ ID NO: 7711 - DNA, 39 bp, Artificial Sequence
  Probe
tcacgcgggagaccggggttcgattccccgacggggagg

SEQ ID NO: 7712 - DNA, 40 bp, Artificial Sequence
  Probe
tcacgcgggagaccggggttcgattccccgacggggagga

SEQ ID NO: 7713 - DNA, 42 bp, Artificial Sequence
  Probe
tcacgcgggagaccggggttcgattccccgacggggaggagg

SEQ ID NO: 7714 - DNA, 43 bp, Artificial Sequence
  Probe
tcacgcgggagaccggggttcgattccccgacggggaggaggc

SEQ ID NO: 7715 - DNA, 40 bp, Artificial Sequence
  Probe
tcacgcgggagaccggggttcgattccccgacggggaggc

SEQ ID NO: 7716 - DNA, 41 bp, Artificial Sequence
  Probe
tcacgcgggagaccggggttcgattccccgacggggaggca

SEQ ID NO: 7717 - DNA, 42 bp, Artificial Sequence
  Probe
tcacgcgggagaccggggttcgattccccgacggggaggcac

SEQ ID NO: 7718 - DNA, 43 bp, Artificial Sequence
  Probe
tcacgcgggagaccggggttcgattccccgacggggaggcaca

SEQ ID NO: 7719 - DNA, 49 bp, Artificial Sequence
  Probe
tcacgcgggagaccggggttcgattccccgacggggaggcacagtaatt

SEQ ID NO: 7720 - DNA, 50 bp, Artificial Sequence
  Probe
tcacgcgggagaccggggttcgattccccgacggggaggcacagtaattg

SEQ ID NO: 7721 - DNA, 42 bp, Artificial Sequence
  Probe
tcacgcgggagaccggggttcgattccccgacggggaggcag

SEQ ID NO: 7722 - DNA, 44 bp, Artificial Sequence
  Probe
tcacgcgggagaccggggttcgattccccgacggggaggcagcc

SEQ ID NO: 7723 - DNA, 41 bp, Artificial Sequence
  Probe
tcacgcgggagaccggggttcgattccccgacggggaggcc

SEQ ID NO: 7724 - DNA, 42 bp, Artificial Sequence
  Probe
tcacgcgggagaccggggttcgattccccgacggggaggccg

SEQ ID NO: 7725 - DNA, 43 bp, Artificial Sequence
  Probe
tcacgcgggagaccggggttcgattccccgacggggaggccgg

SEQ ID NO: 7726 - DNA, 44 bp, Artificial Sequence
  Probe
tcacgcgggagaccggggttcgattccccgacggggaggccggg

SEQ ID NO: 7727 - DNA, 45 bp, Artificial Sequence
  Probe
tcacgcgggagaccggggttcgattccccgacggggaggccgggt

SEQ ID NO: 7728 - DNA, 33 bp, Artificial Sequence
  Probe
tcagaagattccaggttcgactcctggctggct

SEQ ID NO: 7729 - DNA, 38 bp, Artificial Sequence
  Probe
tcagaagattctaggttcgactcctggctggctcgcga

SEQ ID NO: 7730 - DNA, 37 bp, Artificial Sequence
  Probe
tcagaagattgcaggttcgagtcctgccgcggtcgaa

SEQ ID NO: 7731 - DNA, 50 bp, Artificial Sequence
  Probe
tcagattgtgaatctgacaacagaggcttacgaccccttatttaccgaga

SEQ ID NO: 7732 - DNA, 25 bp, Artificial Sequence
  Probe
tcagctaaataagctatcgggccca

SEQ ID NO: 7733 - DNA, 26 bp, Artificial Sequence
  Probe
tcagctaaataagctatcgggcccat

SEQ ID NO: 7734 - DNA, 27 bp, Artificial Sequence
  Probe
tcagctaaataagctatcgggcccata

SEQ ID NO: 7735 - DNA, 28 bp, Artificial Sequence
  Probe
tcagctaaataagctatcgggcccatac

SEQ ID NO: 7736 - DNA, 36 bp, Artificial Sequence
  Probe
tcagctaaataagctatcgggcccataccccgaaaa

SEQ ID NO: 7737 - DNA, 37 bp, Artificial Sequence
  Probe
tcagctaaataagctatcgggcccataccccgaaaat

SEQ ID NO: 7738 - DNA, 39 bp, Artificial Sequence
  Probe
tcagctaaataagctatcgggcccataccccgaaaatgt

SEQ ID NO: 7739 - DNA, 40 bp, Artificial Sequence
  Probe
tcagctaaataagctatcgggcccataccccgaaaatgtt

SEQ ID NO: 7740 - DNA, 41 bp, Artificial Sequence
  Probe
tcagctaaataagctatcgggcccataccccgaaaatgttg

SEQ ID NO: 7741 - DNA, 42 bp, Artificial Sequence
  Probe
tcagctaaataagctatcgggcccataccccgaaaatgttgg

SEQ ID NO: 7742 - DNA, 45 bp, Artificial Sequence
  Probe
tcagctaaataagctatcgggcccataccccgaaaatgttggtta

SEQ ID NO: 7743 - DNA, 50 bp, Artificial Sequence
  Probe
tcagctaaataagctatcgggcccataccccgaaaatgttggttataccc

SEQ ID NO: 7744 - DNA, 33 bp, Artificial Sequence
  Probe
tcagggatgggttcgattctcatagtcctagaa

SEQ ID NO: 7745 - DNA, 31 bp, Artificial Sequence
  Probe
tcagggtcgtgggttcgagccccacgttggg

SEQ ID NO: 7746 - DNA, 27 bp, Artificial Sequence
  Probe
tcagtaagttgcaatacttaatttctg

SEQ ID NO: 7747 - DNA, 37 bp, Artificial Sequence
  Probe
tcagttgatgcagagtggggttttgcagtccttagct

SEQ ID NO: 7748 - DNA, 32 bp, Artificial Sequence
  Probe
tcatatcattggtcgtggttgtagtccgtgcg

SEQ ID NO: 7749 - DNA, 39 bp, Artificial Sequence
  Probe
tcatatcattggtcgtggttgtagtccgtgcgagaataa

SEQ ID NO: 7750 - DNA, 40 bp, Artificial Sequence
  Probe
tcatatcattggtcgtggttgtagtccgtgcgagaataat

SEQ ID NO: 7751 - DNA, 41 bp, Artificial Sequence
  Probe
tcatatcattggtcgtggttgtagtccgtgcgagaataatg

SEQ ID NO: 7752 - DNA, 15 bp, Artificial Sequence
  Probe
tcatattgaattgca

SEQ ID NO: 7753 - DNA, 50 bp, Artificial Sequence
  Probe
tcatattgaattgcaaattcgaagaagcagcttcaaacctgccggggctt

SEQ ID NO: 7754 - DNA, 17 bp, Artificial Sequence
  Probe
tcatgcccccatgtcta

SEQ ID NO: 7755 - DNA, 18 bp, Artificial Sequence
  Probe
tcatgcccccatgtctaa

SEQ ID NO: 7756 - DNA, 20 bp, Artificial Sequence
  Probe
tcatgcccccatgtctaaca

SEQ ID NO: 7757 - DNA, 23 bp, Artificial Sequence
  Probe
tcatgcccccatgtctaacaaca

SEQ ID NO: 7758 - DNA, 27 bp, Artificial Sequence
  Probe
tcatgcccccatgtctaacaacatggc

SEQ ID NO: 7759 - DNA, 28 bp, Artificial Sequence
  Probe
tcatgcccccatgtctaacaacatggct

SEQ ID NO: 7760 - DNA, 29 bp, Artificial Sequence
  Probe
tcatgcccccatgtctaacaacatggctt

SEQ ID NO: 7761 - DNA, 30 bp, Artificial Sequence
  Probe
tcatgcccccatgtctaacaacatggcttt

SEQ ID NO: 7762 - DNA, 31 bp, Artificial Sequence
  Probe
tcatgcccccatgtctaacaacatggctttc

SEQ ID NO: 7763 - DNA, 32 bp, Artificial Sequence
  Probe
tcatgcccccatgtctaacaacatggctttct

SEQ ID NO: 7764 - DNA, 33 bp, Artificial Sequence
  Probe
tcatgcccccatgtctaacaacatggctttctc

SEQ ID NO: 7765 - DNA, 34 bp, Artificial Sequence
  Probe
tcatgcccccatgtctaacaacatggctttctca

SEQ ID NO: 7766 - DNA, 35 bp, Artificial Sequence
  Probe
tcatgcccccatgtctaacaacatggctttctcaa

SEQ ID NO: 7767 - DNA, 36 bp, Artificial Sequence
  Probe
tcatgcccccatgtctaacaacatggctttctcaac

SEQ ID NO: 7768 - DNA, 37 bp, Artificial Sequence
  Probe
tcatgcccccatgtctaacaacatggctttctcaact

SEQ ID NO: 7769 - DNA, 33 bp, Artificial Sequence
  Probe
tcattaaattatgataatcatatttaccaaatg

SEQ ID NO: 7770 - DNA, 33 bp, Artificial Sequence
  Probe
tcattggtcgtggttgtagtccgtgcgagaata

SEQ ID NO: 7771 - DNA, 25 bp, Artificial Sequence
  Probe
tccaatgggggttccccgcgcaggt

SEQ ID NO: 7772 - DNA, 25 bp, Artificial Sequence
  Probe
tccaatggggtctccccgcgcaggt

SEQ ID NO: 7773 - DNA, 21 bp, Artificial Sequence
  Probe
tccaatggggtttccccgcac

SEQ ID NO: 7774 - DNA, 25 bp, Artificial Sequence
  Probe
tccaatggggtttccccgcacaggt

SEQ ID NO: 7775 - DNA, 39 bp, Artificial Sequence
  Probe
tccaattaactagttttgacaacattcaaaaaagagtaa

SEQ ID NO: 7776 - DNA, 40 bp, Artificial Sequence
  Probe
tccaattaactagttttgacaacattcaaaaaagagtaat

SEQ ID NO: 7777 - DNA, 41 bp, Artificial Sequence
  Probe
tccaattaactagttttgacaacattcaaaaaagagtaata

SEQ ID NO: 7778 - DNA, 19 bp, Artificial Sequence
  Probe
tccagaggttccgggttcg

SEQ ID NO: 7779 - DNA, 32 bp, Artificial Sequence
  Probe
tccagcgatccgagttcaaatctcggtggaac

SEQ ID NO: 7780 - DNA, 33 bp, Artificial Sequence
  Probe
tccagcgatccgagttcaaatctcggtggaacc

SEQ ID NO: 7781 - DNA, 37 bp, Artificial Sequence
  Probe
tccagcgatccgagttcaaatctcggtggaacctgca

SEQ ID NO: 7782 - DNA, 35 bp, Artificial Sequence
  Probe
tccagcgatccgagttcaaatctcggtgggacctc

SEQ ID NO: 7783 - DNA, 37 bp, Artificial Sequence
  Probe
tccagcgatccgagttcaaatctcggtgggacctcac

SEQ ID NO: 7784 - DNA, 37 bp, Artificial Sequence
  Probe
tccagcgatccgagttcgagtctcggtggaacctttg

SEQ ID NO: 7785 - DNA, 27 bp, Artificial Sequence
  Probe
tccagggttcaagtccctgttcgggcg

SEQ ID NO: 7786 - DNA, 46 bp, Artificial Sequence
  Probe
tccagtcatttcgatggcgtgggttcgaatcccaccgctgccacac

SEQ ID NO: 7787 - DNA, 22 bp, Artificial Sequence
  Probe
tccattggggtttccccgcgca

SEQ ID NO: 7788 - DNA, 25 bp, Artificial Sequence
  Probe
tccattggggtttccccgcgcaggt

SEQ ID NO: 7789 - DNA, 26 bp, Artificial Sequence
  Probe
tccattggggtttccccgcgcaggtt

SEQ ID NO: 7790 - DNA, 27 bp, Artificial Sequence
  Probe
tccattggggtttccccgcgcaggttc

SEQ ID NO: 7791 - DNA, 16 bp, Artificial Sequence
  Probe
tcccacatggtctagc

SEQ ID NO: 7792 - DNA, 17 bp, Artificial Sequence
  Probe
tcccacatggtctagcg

SEQ ID NO: 7793 - DNA, 21 bp, Artificial Sequence
  Probe
tcccacatggtctagcggtta

SEQ ID NO: 7794 - DNA, 38 bp, Artificial Sequence
  Probe
tcccacatggtctagcggttaggattcctggttttcac

SEQ ID NO: 7795 - DNA, 39 bp, Artificial Sequence
  Probe
tcccacatggtctagcggttaggattcctggttttcacc

SEQ ID NO: 7796 - DNA, 41 bp, Artificial Sequence
  Probe
tcccacatggtctagcggttaggattcctggttttcaccca

SEQ ID NO: 7797 - DNA, 49 bp, Artificial Sequence
  Probe
tcccacatggtctagcggttaggattcctggttttcacccaggcggccc

SEQ ID NO: 7798 - DNA, 50 bp, Artificial Sequence
  Probe
tcccacatggtctagcggttaggattcctggttttcacccaggcggcccg

SEQ ID NO: 7799 - DNA, 16 bp, Artificial Sequence
  Probe
tcccatatggtctagc

SEQ ID NO: 7800 - DNA, 22 bp, Artificial Sequence
  Probe
tcccatatggtctagcggttag

SEQ ID NO: 7801 - DNA, 25 bp, Artificial Sequence
  Probe
tcccatatggtctagcggttaggat

SEQ ID NO: 7802 - DNA, 27 bp, Artificial Sequence
  Probe
tcccatatggtctagcggttaggattc

SEQ ID NO: 7803 - DNA, 39 bp, Artificial Sequence
  Probe
tcccatatggtctagcggttaggattcctggttttcacc

SEQ ID NO: 7804 - DNA, 40 bp, Artificial Sequence
  Probe
tcccatatggtctagcggttaggattcctggttttcaccc

SEQ ID NO: 7805 - DNA, 50 bp, Artificial Sequence
  Probe
tcccatatggtctagcggttaggattcctggttttcacccaggtggcccg

SEQ ID NO: 7806 - DNA, 43 bp, Artificial Sequence
  Probe
tcccattcttgcgacccgggttcgattcccgggcggcgcactt

SEQ ID NO: 7807 - DNA, 22 bp, Artificial Sequence
  Probe
tccccgcacaggttcgaatcct

SEQ ID NO: 7808 - DNA, 50 bp, Artificial Sequence
  Probe
tccccgcctgtcacgcgggagaccggggttcgattccccgacggggagaa

SEQ ID NO: 7809 - DNA, 50 bp, Artificial Sequence
  Probe
tccccgcctgtcacgcgggagaccggggttcgattccccgacggggaggc

SEQ ID NO: 7810 - DNA, 23 bp, Artificial Sequence
  Probe
tccccgcgcaggttcgaatcctg

SEQ ID NO: 7811 - DNA, 19 bp, Artificial Sequence
  Probe
tccccggcacctccaccag

SEQ ID NO: 7812 - DNA, 20 bp, Artificial Sequence
  Probe
tccccggcacctccaccagt

SEQ ID NO: 7813 - DNA, 21 bp, Artificial Sequence
  Probe
tccccggcacctccaccagtt

SEQ ID NO: 7814 - DNA, 15 bp, Artificial Sequence
  Probe
tcccgccttttttcc

SEQ ID NO: 7815 - DNA, 16 bp, Artificial Sequence
  Probe
tcccgccttttttccc

SEQ ID NO: 7816 - DNA, 17 bp, Artificial Sequence
  Probe
tcccgccttttttcccg

SEQ ID NO: 7817 - DNA, 18 bp, Artificial Sequence
  Probe
tcccgccttttttcccgg

SEQ ID NO: 7818 - DNA, 19 bp, Artificial Sequence
  Probe
tcccgccttttttcccggc

SEQ ID NO: 7819 - DNA, 20 bp, Artificial Sequence
  Probe
tcccgccttttttcccggcg

SEQ ID NO: 7820 - DNA, 21 bp, Artificial Sequence
  Probe
tcccgccttttttcccggcgg

SEQ ID NO: 7821 - DNA, 22 bp, Artificial Sequence
  Probe
tcccgccttttttcccggcggc

SEQ ID NO: 7822 - DNA, 23 bp, Artificial Sequence
  Probe
tcccgccttttttcccggcggcg

SEQ ID NO: 7823 - DNA, 24 bp, Artificial Sequence
  Probe
tcccgccttttttcccggcggcgg

SEQ ID NO: 7824 - DNA, 25 bp, Artificial Sequence
  Probe
tcccgccttttttcccggcggcggg

SEQ ID NO: 7825 - DNA, 26 bp, Artificial Sequence
  Probe
tcccgccttttttcccggcggcggga

SEQ ID NO: 7826 - DNA, 27 bp, Artificial Sequence
  Probe
tcccgccttttttcccggcggcgggag

SEQ ID NO: 7827 - DNA, 28 bp, Artificial Sequence
  Probe
tcccgccttttttcccggcggcgggaga

SEQ ID NO: 7828 - DNA, 29 bp, Artificial Sequence
  Probe
tcccgccttttttcccggcggcgggagaa

SEQ ID NO: 7829 - DNA, 30 bp, Artificial Sequence
  Probe
tcccgccttttttcccggcggcgggagaag

SEQ ID NO: 7830 - DNA, 31 bp, Artificial Sequence
  Probe
tcccgccttttttcccggcggcgggagaagt

SEQ ID NO: 7831 - DNA, 32 bp, Artificial Sequence
  Probe
tcccgccttttttcccggcggcgggagaagta

SEQ ID NO: 7832 - DNA, 33 bp, Artificial Sequence
  Probe
tcccgccttttttcccggcggcgggagaagtag

SEQ ID NO: 7833 - DNA, 17 bp, Artificial Sequence
  Probe
tcccggcggcgggagaa

SEQ ID NO: 7834 - DNA, 29 bp, Artificial Sequence
  Probe
tcccgggttcaatccccggcacctccacc

SEQ ID NO: 7835 - DNA, 30 bp, Artificial Sequence
  Probe
tcccgggttcaatccccggcacctccacca

SEQ ID NO: 7836 - DNA, 27 bp, Artificial Sequence
  Probe
tcccgggttcgatccccagcatctcca

SEQ ID NO: 7837 - DNA, 17 bp, Artificial Sequence
  Probe
tcccggtcagggaacca

SEQ ID NO: 7838 - DNA, 23 bp, Artificial Sequence
  Probe
tccctggtctagtggttaggatt

SEQ ID NO: 7839 - DNA, 26 bp, Artificial Sequence
  Probe
tccctggtctagtggttaggatttat

SEQ ID NO: 7840 - DNA, 28 bp, Artificial Sequence
  Probe
tccctggtctagtggttaggatttatta

SEQ ID NO: 7841 - DNA, 29 bp, Artificial Sequence
  Probe
tccctggtctagtggttaggatttattat

SEQ ID NO: 7842 - DNA, 16 bp, Artificial Sequence
  Probe
tccctggtggtctagt

SEQ ID NO: 7843 - DNA, 17 bp, Artificial Sequence
  Probe
tccctggtggtctagtg

SEQ ID NO: 7844 - DNA, 18 bp, Artificial Sequence
  Probe
tccctggtggtctagtgg

SEQ ID NO: 7845 - DNA, 19 bp, Artificial Sequence
  Probe
tccctggtggtctagtggc

SEQ ID NO: 7846 - DNA, 20 bp, Artificial Sequence
  Probe
tccctggtggtctagtggct

SEQ ID NO: 7847 - DNA, 21 bp, Artificial Sequence
  Probe
tccctggtggtctagtggcta

SEQ ID NO: 7848 - DNA, 22 bp, Artificial Sequence
  Probe
tccctggtggtctagtggctag

SEQ ID NO: 7849 - DNA, 23 bp, Artificial Sequence
  Probe
tccctggtggtctagtggctagg

SEQ ID NO: 7850 - DNA, 24 bp, Artificial Sequence
  Probe
tccctggtggtctagtggctagga

SEQ ID NO: 7851 - DNA, 25 bp, Artificial Sequence
  Probe
tccctggtggtctagtggctaggat

SEQ ID NO: 7852 - DNA, 26 bp, Artificial Sequence
  Probe
tccctggtggtctagtggctaggatt

SEQ ID NO: 7853 - DNA, 27 bp, Artificial Sequence
  Probe
tccctggtggtctagtggctaggattc

SEQ ID NO: 7854 - DNA, 28 bp, Artificial Sequence
  Probe
tccctggtggtctagtggctaggattcg

SEQ ID NO: 7855 - DNA, 29 bp, Artificial Sequence
  Probe
tccctggtggtctagtggctaggattcgg

SEQ ID NO: 7856 - DNA, 30 bp, Artificial Sequence
  Probe
tccctggtggtctagtggctaggattcggc

SEQ ID NO: 7857 - DNA, 39 bp, Artificial Sequence
  Probe
tccctggtggtctagtggctaggattcggcgctttcacc

SEQ ID NO: 7858 - DNA, 49 bp, Artificial Sequence
  Probe
tccctggtggtctagtggctaggattcggcgctttcaccgccgcggccc

SEQ ID NO: 7859 - DNA, 19 bp, Artificial Sequence
  Probe
tccctggtggtctagtggt

SEQ ID NO: 7860 - DNA, 20 bp, Artificial Sequence
  Probe
tccctggtggtctagtggtt

SEQ ID NO: 7861 - DNA, 21 bp, Artificial Sequence
  Probe
tccctggtggtctagtggtta

SEQ ID NO: 7862 - DNA, 22 bp, Artificial Sequence
  Probe
tccctggtggtctagtggttag

SEQ ID NO: 7863 - DNA, 23 bp, Artificial Sequence
  Probe
tccctggtggtctagtggttagg

SEQ ID NO: 7864 - DNA, 24 bp, Artificial Sequence
  Probe
tccctggtggtctagtggttagga

SEQ ID NO: 7865 - DNA, 25 bp, Artificial Sequence
  Probe
tccctggtggtctagtggttaggat

SEQ ID NO: 7866 - DNA, 26 bp, Artificial Sequence
  Probe
tccctggtggtctagtggttaggatt

SEQ ID NO: 7867 - DNA, 27 bp, Artificial Sequence
  Probe
tccctggtggtctagtggttaggattc

SEQ ID NO: 7868 - DNA, 28 bp, Artificial Sequence
  Probe
tccctggtggtctagtggttaggattcg

SEQ ID NO: 7869 - DNA, 29 bp, Artificial Sequence
  Probe
tccctggtggtctagtggttaggattcgg

SEQ ID NO: 7870 - DNA, 30 bp, Artificial Sequence
  Probe
tccctggtggtctagtggttaggattcggc

SEQ ID NO: 7871 - DNA, 41 bp, Artificial Sequence
  Probe
tccctggtggtctagtggttaggattcggcgctctcaccgc

SEQ ID NO: 7872 - DNA, 43 bp, Artificial Sequence
  Probe
tccctggtggtctagtggttaggattcggcgctctcaccgccg

SEQ ID NO: 7873 - DNA, 44 bp, Artificial Sequence
  Probe
tccctggtggtctagtggttaggattcggcgctctcaccgccgc

SEQ ID NO: 7874 - DNA, 45 bp, Artificial Sequence
  Probe
tccctggtggtctagtggttaggattcggcgctctcaccgccgcg

SEQ ID NO: 7875 - DNA, 46 bp, Artificial Sequence
  Probe
tccctggtggtctagtggttaggattcggcgctctcaccgccgcgg

SEQ ID NO: 7876 - DNA, 47 bp, Artificial Sequence
  Probe
tccctggtggtctagtggttaggattcggcgctctcaccgccgcggc

SEQ ID NO: 7877 - DNA, 48 bp, Artificial Sequence
  Probe
tccctggtggtctagtggttaggattcggcgctctcaccgccgcggcc

SEQ ID NO: 7878 - DNA, 30 bp, Artificial Sequence
  Probe
tccgtagtgtagcggttatcacattcgcct

SEQ ID NO: 7879 - DNA, 31 bp, Artificial Sequence
  Probe
tccgtagtgtagcggttatcacattcgcctc

SEQ ID NO: 7880 - DNA, 32 bp, Artificial Sequence
  Probe
tccgtagtgtagcggttatcacattcgcctca

SEQ ID NO: 7881 - DNA, 16 bp, Artificial Sequence
  Probe
tccgtagtgtagtggt

SEQ ID NO: 7882 - DNA, 25 bp, Artificial Sequence
  Probe
tccgtagtgtagtggtcatcacgtt

SEQ ID NO: 7883 - DNA, 27 bp, Artificial Sequence
  Probe
tccgtagtgtagtggtcatcacgttcg

SEQ ID NO: 7884 - DNA, 31 bp, Artificial Sequence
  Probe
tccgtagtgtagtggtcatcacgttcgccta

SEQ ID NO: 7885 - DNA, 32 bp, Artificial Sequence
  Probe
tccgtagtgtagtggtcatcacgttcgcctaa

SEQ ID NO: 7886 - DNA, 33 bp, Artificial Sequence
  Probe
tccgtagtgtagtggtcatcacgttcgcctaac

SEQ ID NO: 7887 - DNA, 34 bp, Artificial Sequence
  Probe
tccgtagtgtagtggtcatcacgttcgcctaaca

SEQ ID NO: 7888 - DNA, 20 bp, Artificial Sequence
  Probe
tccgtagtgtagtggttatc

SEQ ID NO: 7889 - DNA, 25 bp, Artificial Sequence
  Probe
tccgtagtgtagtggttatcacgtt

SEQ ID NO: 7890 - DNA, 27 bp, Artificial Sequence
  Probe
tccgtagtgtagtggttatcacgttcg

SEQ ID NO: 7891 - DNA, 28 bp, Artificial Sequence
  Probe
tccgtagtgtagtggttatcacgttcgc

SEQ ID NO: 7892 - DNA, 29 bp, Artificial Sequence
  Probe
tccgtagtgtagtggttatcacgttcgcc

SEQ ID NO: 7893 - DNA, 30 bp, Artificial Sequence
  Probe
tccgtagtgtagtggttatcacgttcgcct

SEQ ID NO: 7894 - DNA, 33 bp, Artificial Sequence
  Probe
tccgtagtgtagtggttatcacgttcgcctaac

SEQ ID NO: 7895 - DNA, 31 bp, Artificial Sequence
  Probe
tccgtagtgtagtggttatcacgttcgcctc

SEQ ID NO: 7896 - DNA, 32 bp, Artificial Sequence
  Probe
tccgtagtgtagtggttatcacgttcgcctca

SEQ ID NO: 7897 - DNA, 33 bp, Artificial Sequence
  Probe
tccgtagtgtagtggttatcacgttcgcctcac

SEQ ID NO: 7898 - DNA, 34 bp, Artificial Sequence
  Probe
tccgtagtgtagtggttatcacgttcgcctcaca

SEQ ID NO: 7899 - DNA, 50 bp, Artificial Sequence
  Probe
tccgtagtgtagtggttatcacgttcgcctcacacgcgaaaggtccccgg

SEQ ID NO: 7900 - DNA, 33 bp, Artificial Sequence
  Probe
tccgtggtggtctagtggctaggattcggcgct

SEQ ID NO: 7901 - DNA, 43 bp, Artificial Sequence
  Probe
tcctaagccagggattgtgggttcgagtcccacccggggtaaa

SEQ ID NO: 7902 - DNA, 44 bp, Artificial Sequence
  Probe
tcctaagccagggattgtgggttcgagtcccacccggggtaaag

SEQ ID NO: 7903 - DNA, 44 bp, Artificial Sequence
  Probe
tcctaagccagggattgtgggttcgagtcccacctggggtgtcg

SEQ ID NO: 7904 - DNA, 43 bp, Artificial Sequence
  Probe
tcctaagccagggattgtgggttcgagtcccatctggggtggc

SEQ ID NO: 7905 - DNA, 44 bp, Artificial Sequence
  Probe
tcctaagccagggattgtgggttcgagtcccatctggggtggcc

SEQ ID NO: 7906 - DNA, 20 bp, Artificial Sequence
  Probe
tcctcaaagcaatacactga

SEQ ID NO: 7907 - DNA, 37 bp, Artificial Sequence
  Probe
tcctcaaagcaatacactgaaaatgtttagacgggct

SEQ ID NO: 7908 - DNA, 39 bp, Artificial Sequence
  Probe
tcctcaaagcaatacactgaaaatgtttagacgggctca

SEQ ID NO: 7909 - DNA, 41 bp, Artificial Sequence
  Probe
tcctcaaagcaatacactgaaaatgtttagacgggctcaca

SEQ ID NO: 7910 - DNA, 49 bp, Artificial Sequence
  Probe
tcctcaaagcaatacactgaaaatgtttagacgggctcacatcacccca

SEQ ID NO: 7911 - DNA, 24 bp, Artificial Sequence
  Probe
tcctcacacggggcacaataattt

SEQ ID NO: 7912 - DNA, 32 bp, Artificial Sequence
  Probe
tcctcatcagtatagtggtgagtatccccgcc

SEQ ID NO: 7913 - DNA, 36 bp, Artificial Sequence
  Probe
tcctcatcagtatagtggtgagtatccccgcctgtc

SEQ ID NO: 7914 - DNA, 18 bp, Artificial Sequence
  Probe
tcctcgctggggcctcct

SEQ ID NO: 7915 - DNA, 17 bp, Artificial Sequence
  Probe
tcctcgttagtatagtg

SEQ ID NO: 7916 - DNA, 18 bp, Artificial Sequence
  Probe
tcctcgttagtatagtgg

SEQ ID NO: 7917 - DNA, 19 bp, Artificial Sequence
  Probe
tcctcgttagtatagtggt

SEQ ID NO: 7918 - DNA, 20 bp, Artificial Sequence
  Probe
tcctcgttagtatagtggtg

SEQ ID NO: 7919 - DNA, 21 bp, Artificial Sequence
  Probe
tcctcgttagtatagtggtga

SEQ ID NO: 7920 - DNA, 25 bp, Artificial Sequence
  Probe
tcctcgttagtatagtggtgagtat

SEQ ID NO: 7921 - DNA, 27 bp, Artificial Sequence
  Probe
tcctcgttagtatagtggtgagtatcc

SEQ ID NO: 7922 - DNA, 40 bp, Artificial Sequence
  Probe
tcctcgttagtatagtggtgagtatccccgcctgtcacgc

SEQ ID NO: 7923 - DNA, 41 bp, Artificial Sequence
  Probe
tcctcgttagtatagtggtgagtatccccgcctgtcacgcg

SEQ ID NO: 7924 - DNA, 49 bp, Artificial Sequence
  Probe
tcctcgttagtatagtggtgagtatccccgcctgtcacgcgggagaccg

SEQ ID NO: 7925 - DNA, 24 bp, Artificial Sequence
  Probe
tcctcgttagtatagtggtgagtg

SEQ ID NO: 7926 - DNA, 20 bp, Artificial Sequence
  Probe
tcctcgttagtatagtggtt

SEQ ID NO: 7927 - DNA, 23 bp, Artificial Sequence
  Probe
tcctcgttagtatagtggttagt

SEQ ID NO: 7928 - DNA, 29 bp, Artificial Sequence
  Probe
tcctcgttagtatagtggttagtatcccc

SEQ ID NO: 7929 - DNA, 39 bp, Artificial Sequence
  Probe
tcctcgttagtatagtggttagtatccccgcctgtcacg

SEQ ID NO: 7930 - DNA, 50 bp, Artificial Sequence
  Probe
tcctcgttagtatagtggttagtatccccgcctgtcacgcgggagaccgg

SEQ ID NO: 7931 - DNA, 19 bp, Artificial Sequence
  Probe
tccttaggtcgctggttcg

SEQ ID NO: 7932 - DNA, 22 bp, Artificial Sequence
  Probe
tcgaaaccatcctctgctaggt

SEQ ID NO: 7933 - DNA, 21 bp, Artificial Sequence
  Probe
tcgaaaccatcctctgctatc

SEQ ID NO: 7934 - DNA, 22 bp, Artificial Sequence
  Probe
tcgaaaccgggcggaaacacct

SEQ ID NO: 7935 - DNA, 28 bp, Artificial Sequence
  Probe
tcgaagaagcagcttcaaacctgccggg

SEQ ID NO: 7936 - DNA, 29 bp, Artificial Sequence
  Probe
tcgaagaagcagcttcaaacctgccgggg

SEQ ID NO: 7937 - DNA, 31 bp, Artificial Sequence
  Probe
tcgaagaagcagcttcaaacctgccggggct

SEQ ID NO: 7938 - DNA, 32 bp, Artificial Sequence
  Probe
tcgaagaagcagcttcaaacctgccggggctt

SEQ ID NO: 7939 - DNA, 33 bp, Artificial Sequence
  Probe
tcgaagaagcagcttcaaacctgccggggcttc

SEQ ID NO: 7940 - DNA, 34 bp, Artificial Sequence
  Probe
tcgaagaagcagcttcaaacctgccggggcttct

SEQ ID NO: 7941 - DNA, 35 bp, Artificial Sequence
  Probe
tcgaagaagcagcttcaaacctgccggggcttctc

SEQ ID NO: 7942 - DNA, 37 bp, Artificial Sequence
  Probe
tcgaagaagcagcttcaaacctgccggggcttctccc

SEQ ID NO: 7943 - DNA, 22 bp, Artificial Sequence
  Probe
tcgaatcccacttctgacacaa

SEQ ID NO: 7944 - DNA, 22 bp, Artificial Sequence
  Probe
tcgaatcccagcggtgcctccg

SEQ ID NO: 7945 - DNA, 20 bp, Artificial Sequence
  Probe
tcgaatcccatcctcgtcgc

SEQ ID NO: 7946 - DNA, 21 bp, Artificial Sequence
  Probe
tcgaatcccatcctcgtcgct

SEQ ID NO: 7947 - DNA, 22 bp, Artificial Sequence
  Probe
tcgaatcccatcctcgtcgctc

SEQ ID NO: 7948 - DNA, 20 bp, Artificial Sequence
  Probe
tcgaatccgagtcacggcaa

SEQ ID NO: 7949 - DNA, 21 bp, Artificial Sequence
  Probe
tcgaatccgagtcacggcaaa

SEQ ID NO: 7950 - DNA, 22 bp, Artificial Sequence
  Probe
tcgaatccgagtcacggcaaag

SEQ ID NO: 7951 - DNA, 20 bp, Artificial Sequence
  Probe
tcgaatccgagtcacggcag

SEQ ID NO: 7952 - DNA, 22 bp, Artificial Sequence
  Probe
tcgaatccgagtcacggcagga

SEQ ID NO: 7953 - DNA, 22 bp, Artificial Sequence
  Probe
tcgaatccgagtcacggcaggt

SEQ ID NO: 7954 - DNA, 20 bp, Artificial Sequence
  Probe
tcgaatccgagtcacggcat

SEQ ID NO: 7955 - DNA, 22 bp, Artificial Sequence
  Probe
tcgaatccgagtcacggcattg

SEQ ID NO: 7956 - DNA, 23 bp, Artificial Sequence
  Probe
tcgaatccgagtcacggcattgt

SEQ ID NO: 7957 - DNA, 24 bp, Artificial Sequence
  Probe
tcgactcattaaattatgataatc

SEQ ID NO: 7958 - DNA, 33 bp, Artificial Sequence
  Probe
tcgactcattaaattatgataatcatatttacc

SEQ ID NO: 7959 - DNA, 22 bp, Artificial Sequence
  Probe
tcgactcccggtatgggaacaa

SEQ ID NO: 7960 - DNA, 21 bp, Artificial Sequence
  Probe
tcgactcccggtgtgggaacg

SEQ ID NO: 7961 - DNA, 22 bp, Artificial Sequence
  Probe
tcgactcccggtgtgggaacgc

SEQ ID NO: 7962 - DNA, 20 bp, Artificial Sequence
  Probe
tcgagcctcacctggagcaa

SEQ ID NO: 7963 - DNA, 20 bp, Artificial Sequence
  Probe
tcgagcctcacctggagcat

SEQ ID NO: 7964 - DNA, 22 bp, Artificial Sequence
  Probe
tcgagtcccatctgggtcgcgt

SEQ ID NO: 7965 - DNA, 22 bp, Artificial Sequence
  Probe
tcgatccccggcatctccattg

SEQ ID NO: 7966 - DNA, 22 bp, Artificial Sequence
  Probe
tcgatccccgtacgggccacga

SEQ ID NO: 7967 - DNA, 23 bp, Artificial Sequence
  Probe
tcgatcctcacacggggcacaat

SEQ ID NO: 7968 - DNA, 22 bp, Artificial Sequence
  Probe
tcgatgcccgcatcctccactc

SEQ ID NO: 7969 - DNA, 20 bp, Artificial Sequence
  Probe
tcgattccccgacggggaga

SEQ ID NO: 7970 - DNA, 21 bp, Artificial Sequence
  Probe
tcgattccccgacggggagaa

SEQ ID NO: 7971 - DNA, 22 bp, Artificial Sequence
  Probe
tcgattccccgacggggagaaa

SEQ ID NO: 7972 - DNA, 21 bp, Artificial Sequence
  Probe
tcgattccccgacggggagac

SEQ ID NO: 7973 - DNA, 20 bp, Artificial Sequence
  Probe
tcgattccccgacggggagg

SEQ ID NO: 7974 - DNA, 21 bp, Artificial Sequence
  Probe
tcgattccccgacggggaggc

SEQ ID NO: 7975 - DNA, 22 bp, Artificial Sequence
  Probe
tcgattccccgacggggaggca

SEQ ID NO: 7976 - DNA, 22 bp, Artificial Sequence
  Probe
tcgattcccggccaacgcaagt

SEQ ID NO: 7977 - DNA, 22 bp, Artificial Sequence
  Probe
tcgattcccggccaacgcagtg

SEQ ID NO: 7978 - DNA, 22 bp, Artificial Sequence
  Probe
tcgattcccggccaatgcacga

SEQ ID NO: 7979 - DNA, 22 bp, Artificial Sequence
  Probe
tcgattcccggccaatgcagca

SEQ ID NO: 7980 - DNA, 22 bp, Artificial Sequence
  Probe
tcgattcccgggcggcgcactt

SEQ ID NO: 7981 - DNA, 22 bp, Artificial Sequence
  Probe
tcgattcccggtcagggaacaa

SEQ ID NO: 7982 - DNA, 22 bp, Artificial Sequence
  Probe
tcgattcccggtcatggaacca

SEQ ID NO: 7983 - DNA, 22 bp, Artificial Sequence
  Probe
tcgattcctggtcagggaacca

SEQ ID NO: 7984 - DNA, 21 bp, Artificial Sequence
  Probe
tcgattctcatagtcctagaa

SEQ ID NO: 7985 - DNA, 27 bp, Artificial Sequence
  Probe
tcgcataaaacttaaaactttacagtc

SEQ ID NO: 7986 - DNA, 29 bp, Artificial Sequence
  Probe
tcgcataaaacttaaaactttacagtcag

SEQ ID NO: 7987 - DNA, 35 bp, Artificial Sequence
  Probe
tcgcataaaacttaaaactttacagtcagaggttc

SEQ ID NO: 7988 - DNA, 46 bp, Artificial Sequence
  Probe
tcgcataaaacttaaaactttacagtcagaggttcaattcctcttc

SEQ ID NO: 7989 - DNA, 48 bp, Artificial Sequence
  Probe
tcgcataaaacttaaaactttacagtcagaggttcaattcctcttctt

SEQ ID NO: 7990 - DNA, 49 bp, Artificial Sequence
  Probe
tcgcataaaacttaaaactttacagtcagaggttcaattcctcttctta

SEQ ID NO: 7991 - DNA, 50 bp, Artificial Sequence
  Probe
tcgcataaaacttaaaactttacagtcagaggttcaattcctcttcttaa

SEQ ID NO: 7992 - DNA, 50 bp, Artificial Sequence
  Probe
tcgggcccataccccgaaaatgttggttatacccttcccgtactaattaa

SEQ ID NO: 7993 - DNA, 22 bp, Artificial Sequence
  Probe
tcgtatagtggttagtactctg

SEQ ID NO: 7994 - DNA, 23 bp, Artificial Sequence
  Probe
tcgtatagtggttagtactctgc

SEQ ID NO: 7995 - DNA, 29 bp, Artificial Sequence
  Probe
tcgtggttgtagtccgtgcgagaataatg

SEQ ID NO: 7996 - DNA, 35 bp, Artificial Sequence
  Probe
tctaaagacaggggttaggcctctttttaccagct

SEQ ID NO: 7997 - DNA, 23 bp, Artificial Sequence
  Probe
tctaacaacatggctttctcaac

SEQ ID NO: 7998 - DNA, 24 bp, Artificial Sequence
  Probe
tctaacaacatggctttctcaact

SEQ ID NO: 7999 - DNA, 19 bp, Artificial Sequence
  Probe
tctaggggtatgattctcg

SEQ ID NO: 8000 - DNA, 43 bp, Artificial Sequence
  Probe
tctcaccgccgcggcccgggttcgattcccggtcagggaagcc

SEQ ID NO: 8001 - DNA, 43 bp, Artificial Sequence
  Probe
tctcaccgccgcggcccgggttcgattcccggtcagggaagtc

SEQ ID NO: 8002 - DNA, 36 bp, Artificial Sequence
  Probe
tctcagggatgggttcgattctcatagtcctagaaa

SEQ ID NO: 8003 - DNA, 33 bp, Artificial Sequence
  Probe
tctcagggtcgtgggttcgagccccacgttggg

SEQ ID NO: 8004 - DNA, 25 bp, Artificial Sequence
  Probe
tctcccgccttttttcccggcggcg

SEQ ID NO: 8005 - DNA, 38 bp, Artificial Sequence
  Probe
tctgaaggtcgtgagttcgatcctcacacggggcacaa

SEQ ID NO: 8006 - DNA, 23 bp, Artificial Sequence
  Probe
tctgaatccagcgatccgagttc

SEQ ID NO: 8007 - DNA, 29 bp, Artificial Sequence
  Probe
tctgacaacagaggcttacgaccccttat

SEQ ID NO: 8008 - DNA, 35 bp, Artificial Sequence
  Probe
tctgacaacagaggcttacgaccccttatttaccg

SEQ ID NO: 8009 - DNA, 36 bp, Artificial Sequence
  Probe
tctgacaacagaggcttacgaccccttatttaccga

SEQ ID NO: 8010 - DNA, 37 bp, Artificial Sequence
  Probe
tctgacaacagaggcttacgaccccttatttaccgag

SEQ ID NO: 8011 - DNA, 19 bp, Artificial Sequence
  Probe
tctgagggtccagggttca

SEQ ID NO: 8012 - DNA, 22 bp, Artificial Sequence
  Probe
tctgagggtccagggttcaagt

SEQ ID NO: 8013 - DNA, 33 bp, Artificial Sequence
  Probe
tctgagggtccagggttcaagtccctgttcggg

SEQ ID NO: 8014 - DNA, 50 bp, Artificial Sequence
  Probe
tcttagctttgggtgctaatggtggagttaaagactttttctctgatttg

SEQ ID NO: 8015 - DNA, 17 bp, Artificial Sequence
  Probe
tcttcgggggcgtgggt

SEQ ID NO: 8016 - DNA, 18 bp, Artificial Sequence
  Probe
tcttcgggggcgtgggtt

SEQ ID NO: 8017 - DNA, 37 bp, Artificial Sequence
  Probe
tcttgcgacccgggttcgattcccgggcggcgcactt

SEQ ID NO: 8018 - DNA, 27 bp, Artificial Sequence
  Probe
tgaaaaagtcatggaggccatggggtt

SEQ ID NO: 8019 - DNA, 24 bp, Artificial Sequence
  Probe
tgaaaacctttttccaaggacaaa

SEQ ID NO: 8020 - DNA, 25 bp, Artificial Sequence
  Probe
tgaaaacctttttccaaggacaaat

SEQ ID NO: 8021 - DNA, 41 bp, Artificial Sequence
  Probe
tgaaaatgtttagacgggctcacatcaccccataaacaaat

SEQ ID NO: 8022 - DNA, 17 bp, Artificial Sequence
  Probe
tgaaggtcgtgagttcg

SEQ ID NO: 8023 - DNA, 33 bp, Artificial Sequence
  Probe
tgaaggtcgtgagttcgagcctcacacggggca

SEQ ID NO: 8024 - DNA, 33 bp, Artificial Sequence
  Probe
tgaaggtcgtgagttcgatcctcacacggggca

SEQ ID NO: 8025 - DNA, 36 bp, Artificial Sequence
  Probe
tgaaggtcgtgagttcgatcctcacacggggcacaa

SEQ ID NO: 8026 - DNA, 17 bp, Artificial Sequence
  Probe
tgaatccagcgatccga

SEQ ID NO: 8027 - DNA, 18 bp, Artificial Sequence
  Probe
tgaatccagcgatccgag

SEQ ID NO: 8028 - DNA, 23 bp, Artificial Sequence
  Probe
tgaatccagcgatccgagttcaa

SEQ ID NO: 8029 - DNA, 24 bp, Artificial Sequence
  Probe
tgaatccagcgatccgagttcaaa

SEQ ID NO: 8030 - DNA, 38 bp, Artificial Sequence
  Probe
tgaatccagcgatccgagttcaaatctcggtggaacct

SEQ ID NO: 8031 - DNA, 39 bp, Artificial Sequence
  Probe
tgaatccagcgatccgagttcaaatctcggtggaacctg

SEQ ID NO: 8032 - DNA, 40 bp, Artificial Sequence
  Probe
tgaatccagcgatccgagttcaaatctcggtggaacctgc

SEQ ID NO: 8033 - DNA, 41 bp, Artificial Sequence
  Probe
tgaatccagcgatccgagttcaaatctcggtggaacctgca

SEQ ID NO: 8034 - DNA, 40 bp, Artificial Sequence
  Probe
tgaatccagcgatccgagttcaaatctcggtggaacctgt

SEQ ID NO: 8035 - DNA, 39 bp, Artificial Sequence
  Probe
tgaatccagcgatccgagttcaaatctcggtggaacctt

SEQ ID NO: 8036 - DNA, 40 bp, Artificial Sequence
  Probe
tgaatccagcgatccgagttcaaatctcggtggaaccttt

SEQ ID NO: 8037 - DNA, 41 bp, Artificial Sequence
  Probe
tgaatccagcgatccgagttcaaatctcggtggaacctttc

SEQ ID NO: 8038 - DNA, 41 bp, Artificial Sequence
  Probe
tgaatccagcgatccgagttcaaatctcggtgggacctcac

SEQ ID NO: 8039 - DNA, 41 bp, Artificial Sequence
  Probe
tgaatccagcgatccgagttcgagtctcggtggaacctttg

SEQ ID NO: 8040 - DNA, 24 bp, Artificial Sequence
  Probe
tgaatctgacaacagaggcttacg

SEQ ID NO: 8041 - DNA, 26 bp, Artificial Sequence
  Probe
tgaatctgacaacagaggcttacgac

SEQ ID NO: 8042 - DNA, 39 bp, Artificial Sequence
  Probe
tgaatctgacaacagaggcttacgaccccttatttaccg

SEQ ID NO: 8043 - DNA, 40 bp, Artificial Sequence
  Probe
tgaatctgacaacagaggcttacgaccccttatttaccga

SEQ ID NO: 8044 - DNA, 41 bp, Artificial Sequence
  Probe
tgaatctgacaacagaggcttacgaccccttatttaccgag

SEQ ID NO: 8045 - DNA, 42 bp, Artificial Sequence
  Probe
tgaatctgacaacagaggcttacgaccccttatttaccgaga

SEQ ID NO: 8046 - DNA, 43 bp, Artificial Sequence
  Probe
tgaatctgacaacagaggcttacgaccccttatttaccgagaa

SEQ ID NO: 8047 - DNA, 44 bp, Artificial Sequence
  Probe
tgaatctgacaacagaggcttacgaccccttatttaccgagaaa

SEQ ID NO: 8048 - DNA, 46 bp, Artificial Sequence
  Probe
tgaatctgacaacagaggcttacgaccccttatttaccgagaaagc

SEQ ID NO: 8049 - DNA, 47 bp, Artificial Sequence
  Probe
tgaatctgacaacagaggcttacgaccccttatttaccgagaaagct

SEQ ID NO: 8050 - DNA, 49 bp, Artificial Sequence
  Probe
tgaatctgacaacagaggcttacgaccccttatttaccgagaaagctca

SEQ ID NO: 8051 - DNA, 50 bp, Artificial Sequence
  Probe
tgaatctgacaacagaggcttacgaccccttatttaccgagaaagctcac

SEQ ID NO: 8052 - DNA, 22 bp, Artificial Sequence
  Probe
tgacaacagaggcttacgaccc

SEQ ID NO: 8053 - DNA, 23 bp, Artificial Sequence
  Probe
tgacaacagaggcttacgacccc

SEQ ID NO: 8054 - DNA, 25 bp, Artificial Sequence
  Probe
tgacaacagaggcttacgacccctt

SEQ ID NO: 8055 - DNA, 28 bp, Artificial Sequence
  Probe
tgacaacagaggcttacgaccccttatt

SEQ ID NO: 8056 - DNA, 29 bp, Artificial Sequence
  Probe
tgacaacagaggcttacgaccccttattt

SEQ ID NO: 8057 - DNA, 33 bp, Artificial Sequence
  Probe
tgacaacagaggcttacgaccccttatttaccg

SEQ ID NO: 8058 - DNA, 34 bp, Artificial Sequence
  Probe
tgacaacagaggcttacgaccccttatttaccga

SEQ ID NO: 8059 - DNA, 35 bp, Artificial Sequence
  Probe
tgacaacagaggcttacgaccccttatttaccgag

SEQ ID NO: 8060 - DNA, 24 bp, Artificial Sequence
  Probe
tgacaacattcaaaaaagagtaat

SEQ ID NO: 8061 - DNA, 32 bp, Artificial Sequence
  Probe
tgacccgggttcgattcccggccaacgcaagt

SEQ ID NO: 8062 - DNA, 32 bp, Artificial Sequence
  Probe
tgacccgggttcgattcccggccaacgcagtg

SEQ ID NO: 8063 - DNA, 31 bp, Artificial Sequence
  Probe
tgagcatagctgccttccaagcagttgaccc

SEQ ID NO: 8064 - DNA, 17 bp, Artificial Sequence
  Probe
tgagggtccagggttca

SEQ ID NO: 8065 - DNA, 31 bp, Artificial Sequence
  Probe
tgagggtccagggttcaagtccctgttcggg

SEQ ID NO: 8066 - DNA, 33 bp, Artificial Sequence
  Probe
tgagggtccagggttcaagtccctgttcgggcg

SEQ ID NO: 8067 - DNA, 49 bp, Artificial Sequence
  Probe
tgataaaagagttactttgatagagtaaataataggagcttaaaccccc

SEQ ID NO: 8068 - DNA, 22 bp, Artificial Sequence
  Probe
tgataatcatatttaccaaatg

SEQ ID NO: 8069 - DNA, 35 bp, Artificial Sequence
  Probe
tgatagagtaaataataggagcttaaaccccctta

SEQ ID NO: 8070 - DNA, 43 bp, Artificial Sequence
  Probe
tgatagagtaaataataggagcttaaacccccttatttctagg

SEQ ID NO: 8071 - DNA, 44 bp, Artificial Sequence
  Probe
tgatagagtaaataataggagcttaaacccccttatttctagga

SEQ ID NO: 8072 - DNA, 26 bp, Artificial Sequence
  Probe
tgatcgtatagtggttagtactctgc

SEQ ID NO: 8073 - DNA, 31 bp, Artificial Sequence
  Probe
tgatcgtatagtggttagtactctgcgttgt

SEQ ID NO: 8074 - DNA, 32 bp, Artificial Sequence
  Probe
tgatgcagagtggggttttgcagtccttagct

SEQ ID NO: 8075 - DNA, 50 bp, Artificial Sequence
  Probe
tgatttcgactcattaaattatgataatcatatttaccaaatgcccctca

SEQ ID NO: 8076 - DNA, 20 bp, Artificial Sequence
  Probe
tgcaaattcgaagaagcagc

SEQ ID NO: 8077 - DNA, 33 bp, Artificial Sequence
  Probe
tgcaaattcgaagaagcagcttcaaacctgccg

SEQ ID NO: 8078 - DNA, 36 bp, Artificial Sequence
  Probe
tgcaaattcgaagaagcagcttcaaacctgccgggg

SEQ ID NO: 8079 - DNA, 39 bp, Artificial Sequence
  Probe
tgcaaattcgaagaagcagcttcaaacctgccggggctt

SEQ ID NO: 8080 - DNA, 40 bp, Artificial Sequence
  Probe
tgcaaattcgaagaagcagcttcaaacctgccggggcttc

SEQ ID NO: 8081 - DNA, 41 bp, Artificial Sequence
  Probe
tgcaaattcgaagaagcagcttcaaacctgccggggcttct

SEQ ID NO: 8082 - DNA, 42 bp, Artificial Sequence
  Probe
tgcaaattcgaagaagcagcttcaaacctgccggggcttctc

SEQ ID NO: 8083 - DNA, 44 bp, Artificial Sequence
  Probe
tgcaaattcgaagaagcagcttcaaacctgccggggcttctccc

SEQ ID NO: 8084 - DNA, 39 bp, Artificial Sequence
  Probe
tgcacgaggccccgggttcaatccccggcacctccagct

SEQ ID NO: 8085 - DNA, 39 bp, Artificial Sequence
  Probe
tgcacgaggtcctgggttcgatccccagtacctccaggc

SEQ ID NO: 8086 - DNA, 29 bp, Artificial Sequence
  Probe
tgcagagtggggttttgcagtccttagct

SEQ ID NO: 8087 - DNA, 37 bp, Artificial Sequence
  Probe
tgcatgaggtcccgggttcgatccccagcatctccag

SEQ ID NO: 8088 - DNA, 39 bp, Artificial Sequence
  Probe
tgcatgaggtcccgggttcgatccccagcatctccagtg

SEQ ID NO: 8089 - DNA, 33 bp, Artificial Sequence
  Probe
tgcatgggtggttcagtggtagaattctcgcct

SEQ ID NO: 8090 - DNA, 22 bp, Artificial Sequence
  Probe
tgccacgcgggaggcccgggtt

SEQ ID NO: 8091 - DNA, 43 bp, Artificial Sequence
  Probe
tgccacgcgggaggcccgggttcgattcccggcccatgcagca

SEQ ID NO: 8092 - DNA, 27 bp, Artificial Sequence
  Probe
tgccccaactaaatactaccgtatggc

SEQ ID NO: 8093 - DNA, 17 bp, Artificial Sequence
  Probe
tgcccccatgtctaaca

SEQ ID NO: 8094 - DNA, 19 bp, Artificial Sequence
  Probe
tgcccccatgtctaacaac

SEQ ID NO: 8095 - DNA, 20 bp, Artificial Sequence
  Probe
tgcccccatgtctaacaaca

SEQ ID NO: 8096 - DNA, 23 bp, Artificial Sequence
  Probe
tgcccccatgtctaacaacatgg

SEQ ID NO: 8097 - DNA, 24 bp, Artificial Sequence
  Probe
tgcccccatgtctaacaacatggc

SEQ ID NO: 8098 - DNA, 25 bp, Artificial Sequence
  Probe
tgcccccatgtctaacaacatggct

SEQ ID NO: 8099 - DNA, 26 bp, Artificial Sequence
  Probe
tgcccccatgtctaacaacatggctt

SEQ ID NO: 8100 - DNA, 27 bp, Artificial Sequence
  Probe
tgcccccatgtctaacaacatggcttt

SEQ ID NO: 8101 - DNA, 28 bp, Artificial Sequence
  Probe
tgcccccatgtctaacaacatggctttc

SEQ ID NO: 8102 - DNA, 29 bp, Artificial Sequence
  Probe
tgcccccatgtctaacaacatggctttct

SEQ ID NO: 8103 - DNA, 30 bp, Artificial Sequence
  Probe
tgcccccatgtctaacaacatggctttctc

SEQ ID NO: 8104 - DNA, 31 bp, Artificial Sequence
  Probe
tgcccccatgtctaacaacatggctttctca

SEQ ID NO: 8105 - DNA, 32 bp, Artificial Sequence
  Probe
tgcccccatgtctaacaacatggctttctcaa

SEQ ID NO: 8106 - DNA, 33 bp, Artificial Sequence
  Probe
tgcccccatgtctaacaacatggctttctcaac

SEQ ID NO: 8107 - DNA, 34 bp, Artificial Sequence
  Probe
tgcccccatgtctaacaacatggctttctcaact

SEQ ID NO: 8108 - DNA, 29 bp, Artificial Sequence
  Probe
tgcccctcatttacataaatattatacta

SEQ ID NO: 8109 - DNA, 34 bp, Artificial Sequence
  Probe
tgcccggctagctcagtcggtagagcatgagact

SEQ ID NO: 8110 - DNA, 34 bp, Artificial Sequence
  Probe
tgcccggctagctcagtcggtagagcatgggact

SEQ ID NO: 8111 - DNA, 17 bp, Artificial Sequence
  Probe
tgccgtgatcgtatagt

SEQ ID NO: 8112 - DNA, 25 bp, Artificial Sequence
  Probe
tgccgtgatcgtatagtggttagta

SEQ ID NO: 8113 - DNA, 26 bp, Artificial Sequence
  Probe
tgccgtgatcgtatagtggttagtac

SEQ ID NO: 8114 - DNA, 27 bp, Artificial Sequence
  Probe
tgccgtgatcgtatagtggttagtact

SEQ ID NO: 8115 - DNA, 31 bp, Artificial Sequence
  Probe
tgccgtgatcgtatagtggttagtactctgc

SEQ ID NO: 8116 - DNA, 32 bp, Artificial Sequence
  Probe
tgccgtgatcgtatagtggttagtactctgcg

SEQ ID NO: 8117 - DNA, 34 bp, Artificial Sequence
  Probe
tgccgtgatcgtatagtggttagtactctgcgtt

SEQ ID NO: 8118 - DNA, 38 bp, Artificial Sequence
  Probe
tgccgtgatcgtatagtggttagtactctgcgttgtgg

SEQ ID NO: 8119 - DNA, 34 bp, Artificial Sequence
  Probe
tgcgacccgggttcgattcccgggcggcgcactt

SEQ ID NO: 8120 - DNA, 20 bp, Artificial Sequence
  Probe
tgcgagaggtcccgggttca

SEQ ID NO: 8121 - DNA, 39 bp, Artificial Sequence
  Probe
tgcgagaggtcccgggttcaaatcccggacgagccccct

SEQ ID NO: 8122 - DNA, 17 bp, Artificial Sequence
  Probe
tgctaactcatgccccc

SEQ ID NO: 8123 - DNA, 21 bp, Artificial Sequence
  Probe
tgctaactcatgcccccatgt

SEQ ID NO: 8124 - DNA, 24 bp, Artificial Sequence
  Probe
tgctaactcatgcccccatgtcta

SEQ ID NO: 8125 - DNA, 25 bp, Artificial Sequence
  Probe
tgctaactcatgcccccatgtctaa

SEQ ID NO: 8126 - DNA, 35 bp, Artificial Sequence
  Probe
tgctaactcatgcccccatgtctaacaacatggct

SEQ ID NO: 8127 - DNA, 36 bp, Artificial Sequence
  Probe
tgctaactcatgcccccatgtctaacaacatggctt

SEQ ID NO: 8128 - DNA, 37 bp, Artificial Sequence
  Probe
tgctaactcatgcccccatgtctaacaacatggcttt

SEQ ID NO: 8129 - DNA, 38 bp, Artificial Sequence
  Probe
tgctaactcatgcccccatgtctaacaacatggctttc

SEQ ID NO: 8130 - DNA, 39 bp, Artificial Sequence
  Probe
tgctaactcatgcccccatgtctaacaacatggctttct

SEQ ID NO: 8131 - DNA, 40 bp, Artificial Sequence
  Probe
tgctaactcatgcccccatgtctaacaacatggctttctc

SEQ ID NO: 8132 - DNA, 41 bp, Artificial Sequence
  Probe
tgctaactcatgcccccatgtctaacaacatggctttctca

SEQ ID NO: 8133 - DNA, 43 bp, Artificial Sequence
  Probe
tgctaactcatgcccccatgtctaacaacatggctttctcaac

SEQ ID NO: 8134 - DNA, 44 bp, Artificial Sequence
  Probe
tgctaactcatgcccccatgtctaacaacatggctttctcaact

SEQ ID NO: 8135 - DNA, 50 bp, Artificial Sequence
  Probe
tgctaactcatgcccccatgtctaacaacatggctttctcaacttttaaa

SEQ ID NO: 8136 - DNA, 50 bp, Artificial Sequence
  Probe
tgctaatccattgtgctttgcacgcgtgggttcgaatcccatcctcgtcg

SEQ ID NO: 8137 - DNA, 17 bp, Artificial Sequence
  Probe
tgctaatggtggagtta

SEQ ID NO: 8138 - DNA, 35 bp, Artificial Sequence
  Probe
tgctaatggtggagttaaagactttttctctgatt

SEQ ID NO: 8139 - DNA, 36 bp, Artificial Sequence
  Probe
tgctaatggtggagttaaagactttttctctgattt

SEQ ID NO: 8140 - DNA, 38 bp, Artificial Sequence
  Probe
tgctaatggtggagttaaagactttttctctgatttgt

SEQ ID NO: 8141 - DNA, 39 bp, Artificial Sequence
  Probe
tgctaatggtggagttaaagactttttctctgatttgtc

SEQ ID NO: 8142 - DNA, 40 bp, Artificial Sequence
  Probe
tgctaatggtggagttaaagactttttctctgatttgtcc

SEQ ID NO: 8143 - DNA, 41 bp, Artificial Sequence
  Probe
tgctaatggtggagttaaagactttttctctgatttgtcct

SEQ ID NO: 8144 - DNA, 42 bp, Artificial Sequence
  Probe
tgctaatggtggagttaaagactttttctctgatttgtcctt

SEQ ID NO: 8145 - DNA, 43 bp, Artificial Sequence
  Probe
tgctaatggtggagttaaagactttttctctgatttgtccttg

SEQ ID NO: 8146 - DNA, 44 bp, Artificial Sequence
  Probe
tgctaatggtggagttaaagactttttctctgatttgtccttgg

SEQ ID NO: 8147 - DNA, 45 bp, Artificial Sequence
  Probe
tgctaatggtggagttaaagactttttctctgatttgtccttgga

SEQ ID NO: 8148 - DNA, 46 bp, Artificial Sequence
  Probe
tggactgtaaatctaaagacaggggttaggcctctttttaccagct

SEQ ID NO: 8149 - DNA, 27 bp, Artificial Sequence
  Probe
tggagttaaagactttttctctgattt

SEQ ID NO: 8150 - DNA, 26 bp, Artificial Sequence
  Probe
tggatcgaaaccatcctctgctaggt

SEQ ID NO: 8151 - DNA, 16 bp, Artificial Sequence
  Probe
tggcaggtgcctcttt

SEQ ID NO: 8152 - DNA, 17 bp, Artificial Sequence
  Probe
tggcaggtgcctctttt

SEQ ID NO: 8153 - DNA, 32 bp, Artificial Sequence
  Probe
tggcccgggttcgactcccggtatgggaacaa

SEQ ID NO: 8154 - DNA, 22 bp, Artificial Sequence
  Probe
tggctaggattcggcgctttca

SEQ ID NO: 8155 - DNA, 23 bp, Artificial Sequence
  Probe
tggctaggattcggcgctttcac

SEQ ID NO: 8156 - DNA, 50 bp, Artificial Sequence
  Probe
tgggcccataacccagaggtcgatggatcgaaaccatcctctgctaggtg

SEQ ID NO: 8157 - DNA, 31 bp, Artificial Sequence
  Probe
tggggattgtgggttcgagtcccatctgggt

SEQ ID NO: 8158 - DNA, 33 bp, Artificial Sequence
  Probe
tggggattgtgggttcgagtcccatctgggtcg

SEQ ID NO: 8159 - DNA, 36 bp, Artificial Sequence
  Probe
tggggattgtgggttcgagtcccatctgggtcgcgt

SEQ ID NO: 8160 - DNA, 29 bp, Artificial Sequence
  Probe
tgggtagctcagtcggtagagcatcagac

SEQ ID NO: 8161 - DNA, 18 bp, Artificial Sequence
  Probe
tgggtgcgagaggtcccg

SEQ ID NO: 8162 - DNA, 19 bp, Artificial Sequence
  Probe
tgggtgcgagaggtcccgg

SEQ ID NO: 8163 - DNA, 39 bp, Artificial Sequence
  Probe
tgggtgctaatggtggagttaaagactttttctctgatt

SEQ ID NO: 8164 - DNA, 40 bp, Artificial Sequence
  Probe
tgggtgctaatggtggagttaaagactttttctctgattt

SEQ ID NO: 8165 - DNA, 27 bp, Artificial Sequence
  Probe
tgggtggttcagtggtagaattctcgc

SEQ ID NO: 8166 - DNA, 24 bp, Artificial Sequence
  Probe
tgggttcgattctcatagtcctag

SEQ ID NO: 8167 - DNA, 26 bp, Artificial Sequence
  Probe
tgggttcgattctcatagtcctagaa

SEQ ID NO: 8168 - DNA, 16 bp, Artificial Sequence
  Probe
tggtagaattctcgcc

SEQ ID NO: 8169 - DNA, 17 bp, Artificial Sequence
  Probe
tggtagaattctcgcct

SEQ ID NO: 8170 - DNA, 20 bp, Artificial Sequence
  Probe
tggtagaattctcgcctgcc

SEQ ID NO: 8171 - DNA, 23 bp, Artificial Sequence
  Probe
tggtagaattctcgcctgccacg

SEQ ID NO: 8172 - DNA, 24 bp, Artificial Sequence
  Probe
tggtagaattctcgcctgccacgc

SEQ ID NO: 8173 - DNA, 29 bp, Artificial Sequence
  Probe
tggtatagtggtgagcatagctgccttcc

SEQ ID NO: 8174 - DNA, 32 bp, Artificial Sequence
  Probe
tggtatagtggtgagcatagctgccttccaag

SEQ ID NO: 8175 - DNA, 38 bp, Artificial Sequence
  Probe
tggtatatagtttaaacaaaacgaatgatttcgactca

SEQ ID NO: 8176 - DNA, 43 bp, Artificial Sequence
  Probe
tggtatatagtttaaacaaaacgaatgatttcgactcattaaa

SEQ ID NO: 8177 - DNA, 23 bp, Artificial Sequence
  Probe
tggtcgtggttgtagtccgtgcg

SEQ ID NO: 8178 - DNA, 29 bp, Artificial Sequence
  Probe
tggtcgtggttgtagtccgtgcgagaata

SEQ ID NO: 8179 - DNA, 31 bp, Artificial Sequence
  Probe
tggtcgtggttgtagtccgtgcgagaataat

SEQ ID NO: 8180 - DNA, 32 bp, Artificial Sequence
  Probe
tggtcgtggttgtagtccgtgcgagaataatg

SEQ ID NO: 8181 - DNA, 20 bp, Artificial Sequence
  Probe
tggtctaaggcgccagactc

SEQ ID NO: 8182 - DNA, 23 bp, Artificial Sequence
  Probe
tggtctagtggttaggattcggc

SEQ ID NO: 8183 - DNA, 28 bp, Artificial Sequence
  Probe
tggtctagtggttaggattcggcgctct

SEQ ID NO: 8184 - DNA, 25 bp, Artificial Sequence
  Probe
tggtgagtatccccgcctgtcacgc

SEQ ID NO: 8185 - DNA, 29 bp, Artificial Sequence
  Probe
tggtggagttaaagactttttctctgatt

SEQ ID NO: 8186 - DNA, 32 bp, Artificial Sequence
  Probe
tggtggagttaaagactttttctctgatttgt

SEQ ID NO: 8187 - DNA, 32 bp, Artificial Sequence
  Probe
tggtggtctagtggctaggattcggcgctttc

SEQ ID NO: 8188 - DNA, 27 bp, Artificial Sequence
  Probe
tggtggtctagtggttaggattcggcg

SEQ ID NO: 8189 - DNA, 29 bp, Artificial Sequence
  Probe
tggtggtctagtggttaggattcggcgct

SEQ ID NO: 8190 - DNA, 33 bp, Artificial Sequence
  Probe
tggtggtctagtggttaggattcggcgctctca

SEQ ID NO: 8191 - DNA, 25 bp, Artificial Sequence
  Probe
tggtggttcagtggtagaattctcg

SEQ ID NO: 8192 - DNA, 26 bp, Artificial Sequence
  Probe
tggtggttcagtggtagaattctcgc

SEQ ID NO: 8193 - DNA, 27 bp, Artificial Sequence
  Probe
tggtggttcagtggtagaattctcgcc

SEQ ID NO: 8194 - DNA, 28 bp, Artificial Sequence
  Probe
tggtggttcagtggtagaattctcgcct

SEQ ID NO: 8195 - DNA, 29 bp, Artificial Sequence
  Probe
tggtggttcagtggtagaattctcgcctg

SEQ ID NO: 8196 - DNA, 30 bp, Artificial Sequence
  Probe
tggtggttcagtggtagaattctcgcctgc

SEQ ID NO: 8197 - DNA, 31 bp, Artificial Sequence
  Probe
tggtggttcagtggtagaattctcgcctgcc

SEQ ID NO: 8198 - DNA, 50 bp, Artificial Sequence
  Probe
tggtggttcagtggtagaattctcgcctgccacgcgggaggcccgggttt

SEQ ID NO: 8199 - DNA, 23 bp, Artificial Sequence
  Probe
tggtgtagtggtatcatgcaaga

SEQ ID NO: 8200 - DNA, 28 bp, Artificial Sequence
  Probe
tggtgtagtggtatcatgcaagattccc

SEQ ID NO: 8201 - DNA, 24 bp, Artificial Sequence
  Probe
tggttaggattcggcgctctcacc

SEQ ID NO: 8202 - DNA, 16 bp, Artificial Sequence
  Probe
tggttagtactctgcg

SEQ ID NO: 8203 - DNA, 20 bp, Artificial Sequence
  Probe
tggttagtactctgcgttgt

SEQ ID NO: 8204 - DNA, 24 bp, Artificial Sequence
  Probe
tggttatacccttcccgtactaat

SEQ ID NO: 8205 - DNA, 25 bp, Artificial Sequence
  Probe
tggttatacccttcccgtactaatt

SEQ ID NO: 8206 - DNA, 17 bp, Artificial Sequence
  Probe
tggttatcacgttcgcc

SEQ ID NO: 8207 - DNA, 26 bp, Artificial Sequence
  Probe
tggttcaaatccgggtgccccctcaa

SEQ ID NO: 8208 - DNA, 25 bp, Artificial Sequence
  Probe
tggttcagtggtagaattctcgcct

SEQ ID NO: 8209 - DNA, 27 bp, Artificial Sequence
  Probe
tggttcagtggtagaattctcgcctgc

SEQ ID NO: 8210 - DNA, 28 bp, Artificial Sequence
  Probe
tggttcagtggtagaattctcgcctgcc

SEQ ID NO: 8211 - DNA, 41 bp, Artificial Sequence
  Probe
tggttcagtggtagaattctcgcctgccacgcgggaggccc

SEQ ID NO: 8212 - DNA, 42 bp, Artificial Sequence
  Probe
tggttcagtggtagaattctcgcctgccacgcgggaggcccg

SEQ ID NO: 8213 - DNA, 43 bp, Artificial Sequence
  Probe
tggttcagtggtagaattctcgcctgccacgcgggaggcccgg

SEQ ID NO: 8214 - DNA, 50 bp, Artificial Sequence
  Probe
tggttcagtggtagaattctcgcctgccacgcgggaggcccgggttcgat

SEQ ID NO: 8215 - DNA, 50 bp, Artificial Sequence
  Probe
tggttcagtggtagaattctcgcctgccacgcgggaggcccgggtttgat

SEQ ID NO: 8216 - DNA, 23 bp, Artificial Sequence
  Probe
tggttgtagtccgtgcgagaata

SEQ ID NO: 8217 - DNA, 24 bp, Artificial Sequence
  Probe
tggttgtagtccgtgcgagaataa

SEQ ID NO: 8218 - DNA, 26 bp, Artificial Sequence
  Probe
tggttgtagtccgtgcgagaataatg

SEQ ID NO: 8219 - DNA, 33 bp, Artificial Sequence
  Probe
tgtaaaccggagatgaaaacctttttccaagga

SEQ ID NO: 8220 - DNA, 36 bp, Artificial Sequence
  Probe
tgtaaaccggagatgaaaacctttttccaaggacaa

SEQ ID NO: 8221 - DNA, 37 bp, Artificial Sequence
  Probe
tgtaaaccggagatgaaaacctttttccaaggacaaa

SEQ ID NO: 8222 - DNA, 38 bp, Artificial Sequence
  Probe
tgtaaaccggagatgaaaacctttttccaaggacaaat

SEQ ID NO: 8223 - DNA, 40 bp, Artificial Sequence
  Probe
tgtaaaccggagatgaaaacctttttccaaggacaaatca

SEQ ID NO: 8224 - DNA, 18 bp, Artificial Sequence
  Probe
tgtaaatatagtttaacc

SEQ ID NO: 8225 - DNA, 29 bp, Artificial Sequence
  Probe
tgtaaatatagtttaaccaaaacatcaga

SEQ ID NO: 8226 - DNA, 31 bp, Artificial Sequence
  Probe
tgtaaatatagtttaaccaaaacatcagatt

SEQ ID NO: 8227 - DNA, 33 bp, Artificial Sequence
  Probe
tgtaaatatagtttaaccaaaacatcagattgt

SEQ ID NO: 8228 - DNA, 34 bp, Artificial Sequence
  Probe
tgtaaatatagtttaaccaaaacatcagattgtg

SEQ ID NO: 8229 - DNA, 38 bp, Artificial Sequence
  Probe
tgtaaatatagtttaaccaaaacatcagattgtgaatc

SEQ ID NO: 8230 - DNA, 40 bp, Artificial Sequence
  Probe
tgtaaatatagtttaaccaaaacatcagattgtgaatctg

SEQ ID NO: 8231 - DNA, 41 bp, Artificial Sequence
  Probe
tgtaaatatagtttaaccaaaacatcagattgtgaatctga

SEQ ID NO: 8232 - DNA, 42 bp, Artificial Sequence
  Probe
tgtaaatatagtttaaccaaaacatcagattgtgaatctgac

SEQ ID NO: 8233 - DNA, 43 bp, Artificial Sequence
  Probe
tgtaaatatagtttaaccaaaacatcagattgtgaatctgaca

SEQ ID NO: 8234 - DNA, 44 bp, Artificial Sequence
  Probe
tgtaaatatagtttaaccaaaacatcagattgtgaatctgacaa

SEQ ID NO: 8235 - DNA, 45 bp, Artificial Sequence
  Probe
tgtaaatatagtttaaccaaaacatcagattgtgaatctgacaac

SEQ ID NO: 8236 - DNA, 46 bp, Artificial Sequence
  Probe
tgtaaatatagtttaaccaaaacatcagattgtgaatctgacaaca

SEQ ID NO: 8237 - DNA, 49 bp, Artificial Sequence
  Probe
tgtaaatatagtttaaccaaaacatcagattgtgaatctgacaacagag

SEQ ID NO: 8238 - DNA, 50 bp, Artificial Sequence
  Probe
tgtaaatatagtttaaccaaaacatcagattgtgaatctgacaacagagg

SEQ ID NO: 8239 - DNA, 41 bp, Artificial Sequence
  Probe
tgtaaatctaaagacaggggttaggcctctttttaccagct

SEQ ID NO: 8240 - DNA, 39 bp, Artificial Sequence
  Probe
tgtacgaggtcccgggttcaatccccggcacctccacca

SEQ ID NO: 8241 - DNA, 24 bp, Artificial Sequence
  Probe
tgtagcggttatcacattcgcctc

SEQ ID NO: 8242 - DNA, 25 bp, Artificial Sequence
  Probe
tgtagcggttatcacattcgcctca

SEQ ID NO: 8243 - DNA, 39 bp, Artificial Sequence
  Probe
tgtagcttaacacaaagcacccaacttacacttaggaga

SEQ ID NO: 8244 - DNA, 19 bp, Artificial Sequence
  Probe
tgtagtccgtgcgagaata

SEQ ID NO: 8245 - DNA, 22 bp, Artificial Sequence
  Probe
tgtagtccgtgcgagaataatg

SEQ ID NO: 8246 - DNA, 21 bp, Artificial Sequence
  Probe
tgtagtggttatcacgttcgc

SEQ ID NO: 8247 - DNA, 23 bp, Artificial Sequence
  Probe
tgtagtggttatcacgttcgcct

SEQ ID NO: 8248 - DNA, 39 bp, Artificial Sequence
  Probe
tgtatgaggtcccgggttcgatccccggcatctccaagt

SEQ ID NO: 8249 - DNA, 15 bp, Artificial Sequence
  Probe
tgtatgtctccatct

SEQ ID NO: 8250 - DNA, 29 bp, Artificial Sequence
  Probe
tgtatgtctccatctattgatgagggtct

SEQ ID NO: 8251 - DNA, 31 bp, Artificial Sequence
  Probe
tgtatgtctccatctattgatgagggtctta

SEQ ID NO: 8252 - DNA, 37 bp, Artificial Sequence
  Probe
tgtatgtctccatctattgatgagggtcttactcttt

SEQ ID NO: 8253 - DNA, 21 bp, Artificial Sequence
  Probe
tgtcacgcgggagaccggggt

SEQ ID NO: 8254 - DNA, 43 bp, Artificial Sequence
  Probe
tgtcacgcgggagaccggggttcaattccccgacggggaggtg

SEQ ID NO: 8255 - DNA, 43 bp, Artificial Sequence
  Probe
tgtcacgcgggagaccggggttcgattccccgacggggagagt

SEQ ID NO: 8256 - DNA, 50 bp, Artificial Sequence
  Probe
tgtcacgcgggagaccggggttcgattccccgacggggaggaggcttaaa

SEQ ID NO: 8257 - DNA, 43 bp, Artificial Sequence
  Probe
tgtcacgcgggagaccggggttcgattccccgacggggaggca

SEQ ID NO: 8258 - DNA, 49 bp, Artificial Sequence
  Probe
tgtcacgcgggagaccggggttcgattccccgacggggaggcacagtaa

SEQ ID NO: 8259 - DNA, 50 bp, Artificial Sequence
  Probe
tgtcacgcgggagaccggggttcgattccccgacggggaggcacagtaat

SEQ ID NO: 8260 - DNA, 30 bp, Artificial Sequence
  Probe
tgtccttgtagtataaactaatacaccagt

SEQ ID NO: 8261 - DNA, 25 bp, Artificial Sequence
  Probe
tgtctaacaacatggctttctcaac

SEQ ID NO: 8262 - DNA, 27 bp, Artificial Sequence
  Probe
tgtgaatctgacaacagaggcttacga

SEQ ID NO: 8263 - DNA, 29 bp, Artificial Sequence
  Probe
tgtgaatctgacaacagaggcttacgacc

SEQ ID NO: 8264 - DNA, 31 bp, Artificial Sequence
  Probe
tgtgaatctgacaacagaggcttacgacccc

SEQ ID NO: 8265 - DNA, 32 bp, Artificial Sequence
  Probe
tgtgaatctgacaacagaggcttacgacccct

SEQ ID NO: 8266 - DNA, 33 bp, Artificial Sequence
  Probe
tgtgaatctgacaacagaggcttacgacccctt

SEQ ID NO: 8267 - DNA, 37 bp, Artificial Sequence
  Probe
tgtgaatctgacaacagaggcttacgaccccttattt

SEQ ID NO: 8268 - DNA, 38 bp, Artificial Sequence
  Probe
tgtgaatctgacaacagaggcttacgaccccttattta

SEQ ID NO: 8269 - DNA, 41 bp, Artificial Sequence
  Probe
tgtgaatctgacaacagaggcttacgaccccttatttaccg

SEQ ID NO: 8270 - DNA, 42 bp, Artificial Sequence
  Probe
tgtgaatctgacaacagaggcttacgaccccttatttaccga

SEQ ID NO: 8271 - DNA, 43 bp, Artificial Sequence
  Probe
tgtgaatctgacaacagaggcttacgaccccttatttaccgag

SEQ ID NO: 8272 - DNA, 21 bp, Artificial Sequence
  Probe
tgtgctccggagttacctcgt

SEQ ID NO: 8273 - DNA, 22 bp, Artificial Sequence
  Probe
tgtgctccggagttacctcgtt

SEQ ID NO: 8274 - DNA, 23 bp, Artificial Sequence
  Probe
tgtgctccggagttacctcgttt

SEQ ID NO: 8275 - DNA, 24 bp, Artificial Sequence
  Probe
tgtgctccggagttacctcgtttt

SEQ ID NO: 8276 - DNA, 44 bp, Artificial Sequence
  Probe
tgttaaccgaaaggttggtggttcgagcccacccagggacgcct

SEQ ID NO: 8277 - DNA, 43 bp, Artificial Sequence
  Probe
tgttaactaagtgtttgtgggtttaagtcccattggtctagta

SEQ ID NO: 8278 - DNA, 44 bp, Artificial Sequence
  Probe
tgttaactaagtgtttgtgggtttaagtcccattggtctagtaa

SEQ ID NO: 8279 - DNA, 25 bp, Artificial Sequence
  Probe
tgttcgaatcacgtcggggtcaaac

SEQ ID NO: 8280 - DNA, 17 bp, Artificial Sequence
  Probe
tgtttagacgggctcac

SEQ ID NO: 8281 - DNA, 18 bp, Artificial Sequence
  Probe
tgtttagacgggctcaca

SEQ ID NO: 8282 - DNA, 19 bp, Artificial Sequence
  Probe
tgtttagacgggctcacat

SEQ ID NO: 8283 - DNA, 20 bp, Artificial Sequence
  Probe
tgtttagacgggctcacatc

SEQ ID NO: 8284 - DNA, 21 bp, Artificial Sequence
  Probe
tgtttagacgggctcacatca

SEQ ID NO: 8285 - DNA, 26 bp, Artificial Sequence
  Probe
tgtttagacgggctcacatcacccca

SEQ ID NO: 8286 - DNA, 27 bp, Artificial Sequence
  Probe
tgtttagacgggctcacatcaccccat

SEQ ID NO: 8287 - DNA, 28 bp, Artificial Sequence
  Probe
tgtttagacgggctcacatcaccccata

SEQ ID NO: 8288 - DNA, 34 bp, Artificial Sequence
  Probe
tgtttagacgggctcacatcaccccataaacaaa

SEQ ID NO: 8289 - DNA, 35 bp, Artificial Sequence
  Probe
tgtttagacgggctcacatcaccccataaacaaat

SEQ ID NO: 8290 - DNA, 36 bp, Artificial Sequence
  Probe
tgtttagacgggctcacatcaccccataaacaaata

SEQ ID NO: 8291 - DNA, 23 bp, Artificial Sequence
  Probe
tgtttgtgggtttaagtcccatt

SEQ ID NO: 8292 - DNA, 25 bp, Artificial Sequence
  Probe
tgtttgtgggtttaagtcccattgg

SEQ ID NO: 8293 - DNA, 31 bp, Artificial Sequence
  Probe
tgtttgtgggtttaagtcccattggtctagt

SEQ ID NO: 8294 - DNA, 32 bp, Artificial Sequence
  Probe
tgtttgtgggtttaagtcccattggtctagta

SEQ ID NO: 8295 - DNA, 43 bp, Artificial Sequence
  Probe
ttaaaactttacagtcagaggttcaattcctcttcttaacaac

SEQ ID NO: 8296 - DNA, 50 bp, Artificial Sequence
  Probe
ttaaacaaaacgaatgatttcgactcattaaattatgataatcatattta

SEQ ID NO: 8297 - DNA, 21 bp, Artificial Sequence
  Probe
ttaaacccccttatttctagg

SEQ ID NO: 8298 - DNA, 39 bp, Artificial Sequence
  Probe
ttaaagattaagagaaccaacacctctttacagtgaaat

SEQ ID NO: 8299 - DNA, 17 bp, Artificial Sequence
  Probe
ttaacacaaagcaccca

SEQ ID NO: 8300 - DNA, 50 bp, Artificial Sequence
  Probe
ttaacacaaagcacccaacttacacttaggagatttcaacttaacttgac

SEQ ID NO: 8301 - DNA, 31 bp, Artificial Sequence
  Probe
ttaaccaaaacatcagattgtgaatctgaca

SEQ ID NO: 8302 - DNA, 32 bp, Artificial Sequence
  Probe
ttaaccaaaacatcagattgtgaatctgacaa

SEQ ID NO: 8303 - DNA, 33 bp, Artificial Sequence
  Probe
ttaaccaaaacatcagattgtgaatctgacaac

SEQ ID NO: 8304 - DNA, 34 bp, Artificial Sequence
  Probe
ttaaccaaaacatcagattgtgaatctgacaaca

SEQ ID NO: 8305 - DNA, 40 bp, Artificial Sequence
  Probe
ttaaccaaaacatcagattgtgaatctgacaacagaggct

SEQ ID NO: 8306 - DNA, 42 bp, Artificial Sequence
  Probe
ttaaccaaaacatcagattgtgaatctgacaacagaggctta

SEQ ID NO: 8307 - DNA, 40 bp, Artificial Sequence
  Probe
ttaaccgaaaggttggtggttcgagcccacccagggacgc

SEQ ID NO: 8308 - DNA, 41 bp, Artificial Sequence
  Probe
ttaaccgaaaggttggtggttcgagcccacccagggacgcg

SEQ ID NO: 8309 - DNA, 41 bp, Artificial Sequence
  Probe
ttaaccgaaaggttggtggttcgagcccacccagggacgct

SEQ ID NO: 8310 - DNA, 49 bp, Artificial Sequence
  Probe
ttaaccttttaagttaaagattaagagaaccaacacctctttacagtga

SEQ ID NO: 8311 - DNA, 50 bp, Artificial Sequence
  Probe
ttaaccttttaagttaaagattaagagaaccaacacctctttacagtgaa

SEQ ID NO: 8312 - DNA, 22 bp, Artificial Sequence
  Probe
ttaactaagtgtttgtgggttt

SEQ ID NO: 8313 - DNA, 23 bp, Artificial Sequence
  Probe
ttaactaagtgtttgtgggttta

SEQ ID NO: 8314 - DNA, 32 bp, Artificial Sequence
  Probe
ttaactaagtgtttgtgggtttaagtcccatt

SEQ ID NO: 8315 - DNA, 34 bp, Artificial Sequence
  Probe
ttaactaagtgtttgtgggtttaagtcccattgg

SEQ ID NO: 8316 - DNA, 39 bp, Artificial Sequence
  Probe
ttaactaagtgtttgtgggtttaagtcccattggtctag

SEQ ID NO: 8317 - DNA, 40 bp, Artificial Sequence
  Probe
ttaactaagtgtttgtgggtttaagtcccattggtctagt

SEQ ID NO: 8318 - DNA, 41 bp, Artificial Sequence
  Probe
ttaactaagtgtttgtgggtttaagtcccattggtctagta

SEQ ID NO: 8319 - DNA, 42 bp, Artificial Sequence
  Probe
ttaactaagtgtttgtgggtttaagtcccattggtctagtaa

SEQ ID NO: 8320 - DNA, 43 bp, Artificial Sequence
  Probe
ttaactaagtgtttgtgggtttaagtcccattggtctagtaag

SEQ ID NO: 8321 - DNA, 44 bp, Artificial Sequence
  Probe
ttaactaagtgtttgtgggtttaagtcccattggtctagtaagg

SEQ ID NO: 8322 - DNA, 17 bp, Artificial Sequence
  Probe
ttaactagttttgacaa

SEQ ID NO: 8323 - DNA, 18 bp, Artificial Sequence
  Probe
ttaacttgaccgctctga

SEQ ID NO: 8324 - DNA, 19 bp, Artificial Sequence
  Probe
ttaacttgaccgctctgag

SEQ ID NO: 8325 - DNA, 21 bp, Artificial Sequence
  Probe
ttaacttgaccgctctgagct

SEQ ID NO: 8326 - DNA, 32 bp, Artificial Sequence
  Probe
ttaagagaaccaacacctctttacagtgaaat

SEQ ID NO: 8327 - DNA, 43 bp, Artificial Sequence
  Probe
ttaagttaaagattaagagaaccaacacctctttacagtgaaa

SEQ ID NO: 8328 - DNA, 44 bp, Artificial Sequence
  Probe
ttaagttaaagattaagagaaccaacacctctttacagtgaaat

SEQ ID NO: 8329 - DNA, 44 bp, Artificial Sequence
  Probe
ttacacgcagaaggtcctgggttcgagccccagtggaaccacgg

SEQ ID NO: 8330 - DNA, 19 bp, Artificial Sequence
  Probe
ttacacttaggagatttca

SEQ ID NO: 8331 - DNA, 23 bp, Artificial Sequence
  Probe
ttacacttaggagatttcaactt

SEQ ID NO: 8332 - DNA, 31 bp, Artificial Sequence
  Probe
ttacacttaggagatttcaacttaacttgac

SEQ ID NO: 8333 - DNA, 33 bp, Artificial Sequence
  Probe
ttacacttaggagatttcaacttaacttgaccg

SEQ ID NO: 8334 - DNA, 35 bp, Artificial Sequence
  Probe
ttacacttaggagatttcaacttaacttgaccgct

SEQ ID NO: 8335 - DNA, 37 bp, Artificial Sequence
  Probe
ttacacttaggagatttcaacttaacttgaccgctct

SEQ ID NO: 8336 - DNA, 39 bp, Artificial Sequence
  Probe
ttacacttaggagatttcaacttaacttgaccgctctga

SEQ ID NO: 8337 - DNA, 40 bp, Artificial Sequence
  Probe
ttacacttaggagatttcaacttaacttgaccgctctgag

SEQ ID NO: 8338 - DNA, 41 bp, Artificial Sequence
  Probe
ttacacttaggagatttcaacttaacttgaccgctctgagc

SEQ ID NO: 8339 - DNA, 42 bp, Artificial Sequence
  Probe
ttacacttaggagatttcaacttaacttgaccgctctgagct

SEQ ID NO: 8340 - DNA, 43 bp, Artificial Sequence
  Probe
ttacacttaggagatttcaacttaacttgaccgctctgagcta

SEQ ID NO: 8341 - DNA, 44 bp, Artificial Sequence
  Probe
ttacacttaggagatttcaacttaacttgaccgctctgagctaa

SEQ ID NO: 8342 - DNA, 49 bp, Artificial Sequence
  Probe
ttacacttaggagatttcaacttaacttgaccgctctgagctaaaccta

SEQ ID NO: 8343 - DNA, 50 bp, Artificial Sequence
  Probe
ttacacttaggagatttcaacttaacttgaccgctctgagctaaacctag

SEQ ID NO: 8344 - DNA, 28 bp, Artificial Sequence
  Probe
ttacagtcagaggttcaattcctcttct

SEQ ID NO: 8345 - DNA, 29 bp, Artificial Sequence
  Probe
ttacagtcagaggttcaattcctcttctt

SEQ ID NO: 8346 - DNA, 32 bp, Artificial Sequence
  Probe
ttacagtcagaggttcaattcctcttcttaac

SEQ ID NO: 8347 - DNA, 37 bp, Artificial Sequence
  Probe
ttactttgatagagtaaataataggagcttaaacccc

SEQ ID NO: 8348 - DNA, 39 bp, Artificial Sequence
  Probe
ttactttgatagagtaaataataggagcttaaaccccct

SEQ ID NO: 8349 - DNA, 49 bp, Artificial Sequence
  Probe
ttactttgatagagtaaataataggagcttaaacccccttatttctagg

SEQ ID NO: 8350 - DNA, 50 bp, Artificial Sequence
  Probe
ttactttgatagagtaaataataggagcttaaacccccttatttctagga

SEQ ID NO: 8351 - DNA, 23 bp, Artificial Sequence
  Probe
ttagacgggctcacatcacccca

SEQ ID NO: 8352 - DNA, 24 bp, Artificial Sequence
  Probe
ttagacgggctcacatcaccccat

SEQ ID NO: 8353 - DNA, 25 bp, Artificial Sequence
  Probe
ttagacgggctcacatcaccccata

SEQ ID NO: 8354 - DNA, 27 bp, Artificial Sequence
  Probe
ttagacgggctcacatcaccccataaa

SEQ ID NO: 8355 - DNA, 28 bp, Artificial Sequence
  Probe
ttagacgggctcacatcaccccataaac

SEQ ID NO: 8356 - DNA, 29 bp, Artificial Sequence
  Probe
ttagacgggctcacatcaccccataaaca

SEQ ID NO: 8357 - DNA, 30 bp, Artificial Sequence
  Probe
ttagacgggctcacatcaccccataaacaa

SEQ ID NO: 8358 - DNA, 31 bp, Artificial Sequence
  Probe
ttagacgggctcacatcaccccataaacaaa

SEQ ID NO: 8359 - DNA, 32 bp, Artificial Sequence
  Probe
ttagacgggctcacatcaccccataaacaaat

SEQ ID NO: 8360 - DNA, 33 bp, Artificial Sequence
  Probe
ttagacgggctcacatcaccccataaacaaata

SEQ ID NO: 8361 - DNA, 22 bp, Artificial Sequence
  Probe
ttagagccagactgcctgggtt

SEQ ID NO: 8362 - DNA, 24 bp, Artificial Sequence
  Probe
ttagagccagactgcctgggtttg

SEQ ID NO: 8363 - DNA, 25 bp, Artificial Sequence
  Probe
ttagagccagactgcctgggtttga

SEQ ID NO: 8364 - DNA, 37 bp, Artificial Sequence
  Probe
ttagcattaaccttttaagttaaagattaagagaacc

SEQ ID NO: 8365 - DNA, 50 bp, Artificial Sequence
  Probe
ttagctgttaactaagtgtttgtgggtttaagtcccattggtctagtaag

SEQ ID NO: 8366 - DNA, 29 bp, Artificial Sequence
  Probe
ttaggagatttcaacttaacttgaccgct

SEQ ID NO: 8367 - DNA, 30 bp, Artificial Sequence
  Probe
ttaggagatttcaacttaacttgaccgctc

SEQ ID NO: 8368 - DNA, 31 bp, Artificial Sequence
  Probe
ttaggagatttcaacttaacttgaccgctct

SEQ ID NO: 8369 - DNA, 32 bp, Artificial Sequence
  Probe
ttaggagatttcaacttaacttgaccgctctg

SEQ ID NO: 8370 - DNA, 33 bp, Artificial Sequence
  Probe
ttaggagatttcaacttaacttgaccgctctga

SEQ ID NO: 8371 - DNA, 34 bp, Artificial Sequence
  Probe
ttaggagatttcaacttaacttgaccgctctgag

SEQ ID NO: 8372 - DNA, 35 bp, Artificial Sequence
  Probe
ttaggagatttcaacttaacttgaccgctctgagc

SEQ ID NO: 8373 - DNA, 36 bp, Artificial Sequence
  Probe
ttaggagatttcaacttaacttgaccgctctgagct

SEQ ID NO: 8374 - DNA, 19 bp, Artificial Sequence
  Probe
ttagggtgcgagaggtccc

SEQ ID NO: 8375 - DNA, 20 bp, Artificial Sequence
  Probe
ttagggtgcgagaggtcccg

SEQ ID NO: 8376 - DNA, 21 bp, Artificial Sequence
  Probe
ttagggtgcgagaggtcccgg

SEQ ID NO: 8377 - DNA, 50 bp, Artificial Sequence
  Probe
ttagggtgcttagctgttaactaagtgtttgtgggtttaagtcccattgg

SEQ ID NO: 8378 - DNA, 23 bp, Artificial Sequence
  Probe
ttcaaatcacgtcggggtcaaca

SEQ ID NO: 8379 - DNA, 23 bp, Artificial Sequence
  Probe
ttcaaatcccggacgagccccct

SEQ ID NO: 8380 - DNA, 23 bp, Artificial Sequence
  Probe
ttcaacttaacttgaccgctctg

SEQ ID NO: 8381 - DNA, 24 bp, Artificial Sequence
  Probe
ttcaacttaacttgaccgctctga

SEQ ID NO: 8382 - DNA, 25 bp, Artificial Sequence
  Probe
ttcaacttaacttgaccgctctgag

SEQ ID NO: 8383 - DNA, 26 bp, Artificial Sequence
  Probe
ttcaacttaacttgaccgctctgagc

SEQ ID NO: 8384 - DNA, 27 bp, Artificial Sequence
  Probe
ttcaacttaacttgaccgctctgagct

SEQ ID NO: 8385 - DNA, 23 bp, Artificial Sequence
  Probe
ttcaagtccctgttcgggcggca

SEQ ID NO: 8386 - DNA, 23 bp, Artificial Sequence
  Probe
ttcaatccccggcacctccacca

SEQ ID NO: 8387 - DNA, 23 bp, Artificial Sequence
  Probe
ttcaattccccgacggggaggtg

SEQ ID NO: 8388 - DNA, 23 bp, Artificial Sequence
  Probe
ttcaattcccggtcagggaacca

SEQ ID NO: 8389 - DNA, 29 bp, Artificial Sequence
  Probe
ttcagtggtagaattctcgcctgccacgc

SEQ ID NO: 8390 - DNA, 23 bp, Artificial Sequence
  Probe
ttcagttgatgcagagtggggtt

SEQ ID NO: 8391 - DNA, 24 bp, Artificial Sequence
  Probe
ttcagttgatgcagagtggggttt

SEQ ID NO: 8392 - DNA, 28 bp, Artificial Sequence
  Probe
ttcagttgatgcagagtggggttttgca

SEQ ID NO: 8393 - DNA, 31 bp, Artificial Sequence
  Probe
ttcagttgatgcagagtggggttttgcagtc

SEQ ID NO: 8394 - DNA, 33 bp, Artificial Sequence
  Probe
ttcagttgatgcagagtggggttttgcagtcct

SEQ ID NO: 8395 - DNA, 34 bp, Artificial Sequence
  Probe
ttcagttgatgcagagtggggttttgcagtcctt

SEQ ID NO: 8396 - DNA, 36 bp, Artificial Sequence
  Probe
ttcagttgatgcagagtggggttttgcagtccttag

SEQ ID NO: 8397 - DNA, 37 bp, Artificial Sequence
  Probe
ttcagttgatgcagagtggggttttgcagtccttagc

SEQ ID NO: 8398 - DNA, 38 bp, Artificial Sequence
  Probe
ttcagttgatgcagagtggggttttgcagtccttagct

SEQ ID NO: 8399 - DNA, 39 bp, Artificial Sequence
  Probe
ttcagttgatgcagagtggggttttgcagtccttagctg

SEQ ID NO: 8400 - DNA, 40 bp, Artificial Sequence
  Probe
ttcagttgatgcagagtggggttttgcagtccttagctgt

SEQ ID NO: 8401 - DNA, 41 bp, Artificial Sequence
  Probe
ttcatatcattggtcgtggttgtagtccgtgcgagaataat

SEQ ID NO: 8402 - DNA, 42 bp, Artificial Sequence
  Probe
ttcatatcattggtcgtggttgtagtccgtgcgagaataatg

SEQ ID NO: 8403 - DNA, 16 bp, Artificial Sequence
  Probe
ttcatattgaattgca

SEQ ID NO: 8404 - DNA, 49 bp, Artificial Sequence
  Probe
ttcatattgaattgcaaattcgaagaagcagcttcaaacctgccggggc

SEQ ID NO: 8405 - DNA, 50 bp, Artificial Sequence
  Probe
ttcatattgaattgcaaattcgaagaagcagcttcaaacctgccggggct

SEQ ID NO: 8406 - DNA, 41 bp, Artificial Sequence
  Probe
ttccaattaactagttttgacaacattcaaaaaagagtaat

SEQ ID NO: 8407 - DNA, 42 bp, Artificial Sequence
  Probe
ttccaattaactagttttgacaacattcaaaaaagagtaata

SEQ ID NO: 8408 - DNA, 31 bp, Artificial Sequence
  Probe
ttccatagtgtagtggttatcacgtctgctt

SEQ ID NO: 8409 - DNA, 23 bp, Artificial Sequence
  Probe
ttcccattcttgcgacccgggtt

SEQ ID NO: 8410 - DNA, 24 bp, Artificial Sequence
  Probe
ttcccattcttgcgacccgggttc

SEQ ID NO: 8411 - DNA, 37 bp, Artificial Sequence
  Probe
ttcccattcttgcgacccgggttcgattcccgggcgg

SEQ ID NO: 8412 - DNA, 44 bp, Artificial Sequence
  Probe
ttcccattcttgcgacccgggttcgattcccgggcggcgcactt

SEQ ID NO: 8413 - DNA, 17 bp, Artificial Sequence
  Probe
ttccccgcacaggttcg

SEQ ID NO: 8414 - DNA, 17 bp, Artificial Sequence
  Probe
ttcccggcggcgggaga

SEQ ID NO: 8415 - DNA, 18 bp, Artificial Sequence
  Probe
ttcccggcggcgggagaa

SEQ ID NO: 8416 - DNA, 17 bp, Artificial Sequence
  Probe
ttcccgggcggcgcact

SEQ ID NO: 8417 - DNA, 24 bp, Artificial Sequence
  Probe
ttccctggtggtctagtggttagg

SEQ ID NO: 8418 - DNA, 17 bp, Artificial Sequence
  Probe
ttccggctcgaaggact

SEQ ID NO: 8419 - DNA, 32 bp, Artificial Sequence
  Probe
ttccgtagtgtagcggttatcacattcgcctc

SEQ ID NO: 8420 - DNA, 33 bp, Artificial Sequence
  Probe
ttccgtagtgtagcggttatcacattcgcctca

SEQ ID NO: 8421 - DNA, 31 bp, Artificial Sequence
  Probe
ttccgtagtgtagtggtcatcacgttcgcct

SEQ ID NO: 8422 - DNA, 33 bp, Artificial Sequence
  Probe
ttccgtagtgtagtggtcatcacgttcgcctaa

SEQ ID NO: 8423 - DNA, 26 bp, Artificial Sequence
  Probe
ttccgtagtgtagtggttatcacgtt

SEQ ID NO: 8424 - DNA, 29 bp, Artificial Sequence
  Probe
ttccgtagtgtagtggttatcacgttcgc

SEQ ID NO: 8425 - DNA, 30 bp, Artificial Sequence
  Probe
ttccgtagtgtagtggttatcacgttcgcc

SEQ ID NO: 8426 - DNA, 31 bp, Artificial Sequence
  Probe
ttccgtagtgtagtggttatcacgttcgcct

SEQ ID NO: 8427 - DNA, 32 bp, Artificial Sequence
  Probe
ttccgtagtgtagtggttatcacgttcgcctc

SEQ ID NO: 8428 - DNA, 33 bp, Artificial Sequence
  Probe
ttccgtagtgtagtggttatcacgttcgcctca

SEQ ID NO: 8429 - DNA, 34 bp, Artificial Sequence
  Probe
ttccgtagtgtagtggttatcacgttcgcctcac

SEQ ID NO: 8430 - DNA, 35 bp, Artificial Sequence
  Probe
ttccgtagtgtagtggttatcacgttcgcctcaca

SEQ ID NO: 8431 - DNA, 49 bp, Artificial Sequence
  Probe
ttcctggttttcacccaggcggcccgggttcgactcccggtgtgggaac

SEQ ID NO: 8432 - DNA, 50 bp, Artificial Sequence
  Probe
ttcctggttttcacccaggcggcccgggttcgactcccggtgtgggaacg

SEQ ID NO: 8433 - DNA, 23 bp, Artificial Sequence
  Probe
ttcgaaaccgggcggaaacacct

SEQ ID NO: 8434 - DNA, 27 bp, Artificial Sequence
  Probe
ttcgaagaagcagcttcaaacctgccg

SEQ ID NO: 8435 - DNA, 32 bp, Artificial Sequence
  Probe
ttcgaagaagcagcttcaaacctgccggggct

SEQ ID NO: 8436 - DNA, 33 bp, Artificial Sequence
  Probe
ttcgaagaagcagcttcaaacctgccggggctt

SEQ ID NO: 8437 - DNA, 35 bp, Artificial Sequence
  Probe
ttcgaagaagcagcttcaaacctgccggggcttct

SEQ ID NO: 8438 - DNA, 36 bp, Artificial Sequence
  Probe
ttcgaagaagcagcttcaaacctgccggggcttctc

SEQ ID NO: 8439 - DNA, 23 bp, Artificial Sequence
  Probe
ttcgaatcacgtcggggtcaaac

SEQ ID NO: 8440 - DNA, 23 bp, Artificial Sequence
  Probe
ttcgaatcccaccgctgccacac

SEQ ID NO: 8441 - DNA, 23 bp, Artificial Sequence
  Probe
ttcgaatcccaccgctgccaggt

SEQ ID NO: 8442 - DNA, 23 bp, Artificial Sequence
  Probe
ttcgaatcccagcggtgcctccg

SEQ ID NO: 8443 - DNA, 37 bp, Artificial Sequence
  Probe
ttcgactcattaaattatgataatcatatttaccaaa

SEQ ID NO: 8444 - DNA, 39 bp, Artificial Sequence
  Probe
ttcgactcattaaattatgataatcatatttaccaaatg

SEQ ID NO: 8445 - DNA, 23 bp, Artificial Sequence
  Probe
ttcgactcccggtatgggaacaa

SEQ ID NO: 8446 - DNA, 22 bp, Artificial Sequence
  Probe
ttcgactcccggtgtgggaacg

SEQ ID NO: 8447 - DNA, 23 bp, Artificial Sequence
  Probe
ttcgactcccggtgtgggaacgc

SEQ ID NO: 8448 - DNA, 23 bp, Artificial Sequence
  Probe
ttcgagcccacccagggacgcct

SEQ ID NO: 8449 - DNA, 23 bp, Artificial Sequence
  Probe
ttcgagtcccatctgggtcgcgt

SEQ ID NO: 8450 - DNA, 23 bp, Artificial Sequence
  Probe
ttcgagtcccttcgtggtcgttg

SEQ ID NO: 8451 - DNA, 23 bp, Artificial Sequence
  Probe
ttcgatccccggcatctccattg

SEQ ID NO: 8452 - DNA, 21 bp, Artificial Sequence
  Probe
ttcgattccccgacggggaga

SEQ ID NO: 8453 - DNA, 22 bp, Artificial Sequence
  Probe
ttcgattccccgacggggagac

SEQ ID NO: 8454 - DNA, 21 bp, Artificial Sequence
  Probe
ttcgattccccgacggggagg

SEQ ID NO: 8455 - DNA, 22 bp, Artificial Sequence
  Probe
ttcgattccccgacggggaggc

SEQ ID NO: 8456 - DNA, 23 bp, Artificial Sequence
  Probe
ttcgattccccgacggggaggca

SEQ ID NO: 8457 - DNA, 23 bp, Artificial Sequence
  Probe
ttcgattcccggccaatgcacga

SEQ ID NO: 8458 - DNA, 23 bp, Artificial Sequence
  Probe
ttcgattcccggccaatgcagca

SEQ ID NO: 8459 - DNA, 22 bp, Artificial Sequence
  Probe
ttcgattcccggtcagggaaca

SEQ ID NO: 8460 - DNA, 23 bp, Artificial Sequence
  Probe
ttcgattcccggtcagggaacaa

SEQ ID NO: 8461 - DNA, 23 bp, Artificial Sequence
  Probe
ttcgattcccggtcatggaacca

SEQ ID NO: 8462 - DNA, 23 bp, Artificial Sequence
  Probe
ttcgattcctggtcagggaacca

SEQ ID NO: 8463 - DNA, 19 bp, Artificial Sequence
  Probe
ttcgggtgcgagaggtccc

SEQ ID NO: 8464 - DNA, 20 bp, Artificial Sequence
  Probe
ttcgggtgcgagaggtcccg

SEQ ID NO: 8465 - DNA, 21 bp, Artificial Sequence
  Probe
ttcgggtgcgagaggtcccgg

SEQ ID NO: 8466 - DNA, 37 bp, Artificial Sequence
  Probe
ttctcagggatgggttcgattctcatagtcctagaaa

SEQ ID NO: 8467 - DNA, 37 bp, Artificial Sequence
  Probe
ttcttgcgacccgggttcgattcccgggcggcgcact

SEQ ID NO: 8468 - DNA, 38 bp, Artificial Sequence
  Probe
ttcttgcgacccgggttcgattcccgggcggcgcactt

SEQ ID NO: 8469 - DNA, 50 bp, Artificial Sequence
  Probe
ttgaatccagcgatccgagttcaaatctcggtgggacctaccaaactttt

SEQ ID NO: 8470 - DNA, 41 bp, Artificial Sequence
  Probe
ttgaatccagcgatccgagttcaaatctcggtgggacctca

SEQ ID NO: 8471 - DNA, 25 bp, Artificial Sequence
  Probe
ttgacaacattcaaaaaagagtaat

SEQ ID NO: 8472 - DNA, 44 bp, Artificial Sequence
  Probe
ttgatagagtaaataataggagcttaaacccccttatttctagg

SEQ ID NO: 8473 - DNA, 45 bp, Artificial Sequence
  Probe
ttgatagagtaaataataggagcttaaacccccttatttctagga

SEQ ID NO: 8474 - DNA, 33 bp, Artificial Sequence
  Probe
ttgatgcagagtggggttttgcagtccttagct

SEQ ID NO: 8475 - DNA, 40 bp, Artificial Sequence
  Probe
ttgcaaattcgaagaagcagcttcaaacctgccggggctt

SEQ ID NO: 8476 - DNA, 41 bp, Artificial Sequence
  Probe
ttgcaaattcgaagaagcagcttcaaacctgccggggcttc

SEQ ID NO: 8477 - DNA, 43 bp, Artificial Sequence
  Probe
ttgcaaattcgaagaagcagcttcaaacctgccggggcttctc

SEQ ID NO: 8478 - DNA, 50 bp, Artificial Sequence
  Probe
ttggactgtaaatctaaagacaggggttaggcctctttttaccagctccg

SEQ ID NO: 8479 - DNA, 19 bp, Artificial Sequence
  Probe
ttgggtgcgagaggtcccg

SEQ ID NO: 8480 - DNA, 40 bp, Artificial Sequence
  Probe
ttgggtgctaatggtggagttaaagactttttctctgatt

SEQ ID NO: 8481 - DNA, 41 bp, Artificial Sequence
  Probe
ttgggtgctaatggtggagttaaagactttttctctgattt

SEQ ID NO: 8482 - DNA, 24 bp, Artificial Sequence
  Probe
ttggtcgtggttgtagtccgtgcg

SEQ ID NO: 8483 - DNA, 32 bp, Artificial Sequence
  Probe
ttggtcgtggttgtagtccgtgcgagaataat

SEQ ID NO: 8484 - DNA, 33 bp, Artificial Sequence
  Probe
ttggtcgtggttgtagtccgtgcgagaataatg

SEQ ID NO: 8485 - DNA, 33 bp, Artificial Sequence
  Probe
ttggtggtatagtggtaagcatagctgccttcc

SEQ ID NO: 8486 - DNA, 26 bp, Artificial Sequence
  Probe
ttggtggttcagtggtagaattctcg

SEQ ID NO: 8487 - DNA, 27 bp, Artificial Sequence
  Probe
ttggtggttcagtggtagaattctcgc

SEQ ID NO: 8488 - DNA, 28 bp, Artificial Sequence
  Probe
ttggtggttcagtggtagaattctcgcc

SEQ ID NO: 8489 - DNA, 29 bp, Artificial Sequence
  Probe
ttggtggttcagtggtagaattctcgcct

SEQ ID NO: 8490 - DNA, 31 bp, Artificial Sequence
  Probe
ttggtggttcagtggtagaattctcgcctcc

SEQ ID NO: 8491 - DNA, 30 bp, Artificial Sequence
  Probe
ttggtggttcagtggtagaattctcgcctg

SEQ ID NO: 8492 - DNA, 31 bp, Artificial Sequence
  Probe
ttggtggttcagtggtagaattctcgcctgc

SEQ ID NO: 8493 - DNA, 32 bp, Artificial Sequence
  Probe
ttggtggttcagtggtagaattctcgcctgcc

SEQ ID NO: 8494 - DNA, 50 bp, Artificial Sequence
  Probe
ttggtggttcagtggtagaattctcgcctgccacgcgggaggcccgggtt

SEQ ID NO: 8495 - DNA, 25 bp, Artificial Sequence
  Probe
ttggtggttcgagcccacccaggga

SEQ ID NO: 8496 - DNA, 44 bp, Artificial Sequence
  Probe
ttgtaaaccaggggtcgcgagttcaattctcgctggggcctgtg

SEQ ID NO: 8497 - DNA, 37 bp, Artificial Sequence
  Probe
ttgtaaaccggagatgaaaacctttttccaaggacaa

SEQ ID NO: 8498 - DNA, 38 bp, Artificial Sequence
  Probe
ttgtaaaccggagatgaaaacctttttccaaggacaaa

SEQ ID NO: 8499 - DNA, 39 bp, Artificial Sequence
  Probe
ttgtaaaccggagatgaaaacctttttccaaggacaaat

SEQ ID NO: 8500 - DNA, 40 bp, Artificial Sequence
  Probe
ttgtaaaccggagatgaaaacctttttccaaggacaaatc

SEQ ID NO: 8501 - DNA, 41 bp, Artificial Sequence
  Probe
ttgtaaaccggagatgaaaacctttttccaaggacaaatca

SEQ ID NO: 8502 - DNA, 43 bp, Artificial Sequence
  Probe
ttgtaaaccggagatgaaaacctttttccaaggacaaatcaga

SEQ ID NO: 8503 - DNA, 44 bp, Artificial Sequence
  Probe
ttgtaaatatagtttaaccaaaacatcagattgtgaatctgaca

SEQ ID NO: 8504 - DNA, 50 bp, Artificial Sequence
  Probe
ttgtaaatatagtttaaccaaaacatcagattgtgaatctgacaacagag

SEQ ID NO: 8505 - DNA, 20 bp, Artificial Sequence
  Probe
ttgtagtccgtgcgagaata

SEQ ID NO: 8506 - DNA, 23 bp, Artificial Sequence
  Probe
ttgtagtccgtgcgagaataatg

SEQ ID NO: 8507 - DNA, 17 bp, Artificial Sequence
  Probe
ttgtgaatctgacaaca

SEQ ID NO: 8508 - DNA, 25 bp, Artificial Sequence
  Probe
ttgtgaatctgacaacagaggctta

SEQ ID NO: 8509 - DNA, 32 bp, Artificial Sequence
  Probe
ttgtgaatctgacaacagaggcttacgacccc

SEQ ID NO: 8510 - DNA, 43 bp, Artificial Sequence
  Probe
ttgtgaatctgacaacagaggcttacgaccccttatttaccga

SEQ ID NO: 8511 - DNA, 44 bp, Artificial Sequence
  Probe
ttgtgaatctgacaacagaggcttacgaccccttatttaccgag

SEQ ID NO: 8512 - DNA, 50 bp, Artificial Sequence
  Probe
ttgtgaatctgacaacagaggcttacgaccccttatttaccgagaaagct

SEQ ID NO: 8513 - DNA, 32 bp, Artificial Sequence
  Probe
tttaaccaaaacatcagattgtgaatctgaca

SEQ ID NO: 8514 - DNA, 33 bp, Artificial Sequence
  Probe
tttaaccaaaacatcagattgtgaatctgacaa

SEQ ID NO: 8515 - DNA, 35 bp, Artificial Sequence
  Probe
tttaaccaaaacatcagattgtgaatctgacaaca

SEQ ID NO: 8516 - DNA, 45 bp, Artificial Sequence
  Probe
tttaagttaaagattaagagaaccaacacctctttacagtgaaat

SEQ ID NO: 8517 - DNA, 50 bp, Artificial Sequence
  Probe
tttaagttaaagattaagagaaccaacacctctttacagtgaaatgcccc

SEQ ID NO: 8518 - DNA, 16 bp, Artificial Sequence
  Probe
tttacagtcagaggtt

SEQ ID NO: 8519 - DNA, 17 bp, Artificial Sequence
  Probe
tttacagtcagaggttc

SEQ ID NO: 8520 - DNA, 27 bp, Artificial Sequence
  Probe
tttacagtcagaggttcaattcctctt

SEQ ID NO: 8521 - DNA, 33 bp, Artificial Sequence
  Probe
tttacagtcagaggttcaattcctcttcttaac

SEQ ID NO: 8522 - DNA, 17 bp, Artificial Sequence
  Probe
tttagacgggctcacat

SEQ ID NO: 8523 - DNA, 24 bp, Artificial Sequence
  Probe
tttagacgggctcacatcacccca

SEQ ID NO: 8524 - DNA, 25 bp, Artificial Sequence
  Probe
tttagacgggctcacatcaccccat

SEQ ID NO: 8525 - DNA, 31 bp, Artificial Sequence
  Probe
tttagacgggctcacatcaccccataaacaa

SEQ ID NO: 8526 - DNA, 32 bp, Artificial Sequence
  Probe
tttagacgggctcacatcaccccataaacaaa

SEQ ID NO: 8527 - DNA, 33 bp, Artificial Sequence
  Probe
tttagacgggctcacatcaccccataaacaaat

SEQ ID NO: 8528 - DNA, 27 bp, Artificial Sequence
  Probe
tttcaacttaacttgaccgctctgagc

SEQ ID NO: 8529 - DNA, 28 bp, Artificial Sequence
  Probe
tttcaacttaacttgaccgctctgagct

SEQ ID NO: 8530 - DNA, 18 bp, Artificial Sequence
  Probe
tttcccggcggcgggaga

SEQ ID NO: 8531 - DNA, 45 bp, Artificial Sequence
  Probe
tttgatagagtaaataataggagcttaaacccccttatttctagg

SEQ ID NO: 8532 - DNA, 46 bp, Artificial Sequence
  Probe
tttgatagagtaaataataggagcttaaacccccttatttctagga

SEQ ID NO: 8533 - DNA, 43 bp, Artificial Sequence
  Probe
tttggattctcagggatgggttcgattctcatagtcctagaaa

SEQ ID NO: 8534 - DNA, 20 bp, Artificial Sequence
  Probe
tttgggtccgagaggtcccg

SEQ ID NO: 8535 - DNA, 20 bp, Artificial Sequence
  Probe
tttgggtgcgagaggtcccg

SEQ ID NO: 8536 - DNA, 21 bp, Artificial Sequence
  Probe
tttgggtgcgagaggtcccgg

SEQ ID NO: 8537 - DNA, 20 bp, Artificial Sequence
  Probe
tttttcccggcggcgggaga

SEQ ID NO: 8538 - DNA, 25 bp, Artificial Sequence
  Probe
accaggatggccgagtggttaaggc

SEQ ID NO: 8539 - DNA, 30 bp, Artificial Sequence
  Probe
agcagagtggcgcagcggaagcgtgctggg

SEQ ID NO: 8540 - DNA, 18 bp, Artificial Sequence
  Probe
agtcggtagagcatcaga

SEQ ID NO: 8541 - DNA, 19 bp, Artificial Sequence
  Probe
agtcggtagagcatcagac

SEQ ID NO: 8542 - DNA, 18 bp, Artificial Sequence
  Probe
agtggttagtactctgcg

SEQ ID NO: 8543 - DNA, 20 bp, Artificial Sequence
  Probe
agtggttagtactctgcgtt

SEQ ID NO: 8544 - DNA, 21 bp, Artificial Sequence
  Probe
agtggttagtactctgcgttg

SEQ ID NO: 8545 - DNA, 22 bp, Artificial Sequence
  Probe
agtggttagtactctgcgttgt

SEQ ID NO: 8546 - DNA, 21 bp, Artificial Sequence
  Probe
agttaaagactttttctctga

SEQ ID NO: 8547 - DNA, 23 bp, Artificial Sequence
  Probe
ataacccagaggtcgatggatcg

SEQ ID NO: 8548 - DNA, 24 bp, Artificial Sequence
  Probe
atatcattggtcgtggttgtagtc

SEQ ID NO: 8549 - DNA, 25 bp, Artificial Sequence
  Probe
atatcattggtcgtggttgtagtcc

SEQ ID NO: 8550 - DNA, 30 bp, Artificial Sequence; identical to SEQ ID NO: 3694
  Probe

SEQ ID NO: 8551 - DNA, 22 bp, Artificial Sequence
  Probe
atcattggtcgtggttgtagtc

SEQ ID NO: 8552 - DNA, 30 bp, Artificial Sequence
  Probe
atcattggtcgtggttgtagtccgtgcgag

SEQ ID NO: 8553 - DNA, 27 bp, Artificial Sequence
  Probe
atggtgtaatggttagcactctggact

SEQ ID NO: 8554 - DNA, 20 bp, Artificial Sequence
  Probe
atggttagcactctggactt

SEQ ID NO: 8555 - DNA, 21 bp, Artificial Sequence
  Probe
atggttagcactctggacttt

SEQ ID NO: 8556 - DNA, 18 bp, Artificial Sequence
  Probe
attggtcgtggttgtagt

SEQ ID NO: 8557 - DNA, 19 bp, Artificial Sequence
  Probe
attggtcgtggttgtagtc

SEQ ID NO: 8558 - DNA, 20 bp, Artificial Sequence
  Probe
attggtcgtggttgtagtcc

SEQ ID NO: 8559 - DNA, 21 bp, Artificial Sequence
  Probe
attggtcgtggttgtagtccg

SEQ ID NO: 8560 - DNA, 23 bp, Artificial Sequence
  Probe
attggtcgtggttgtagtccgtg

SEQ ID NO: 8561 - DNA, 24 bp, Artificial Sequence
  Probe
attggtcgtggttgtagtccgtgc

SEQ ID NO: 8562 - DNA, 25 bp, Artificial Sequence
  Probe
attggtcgtggttgtagtccgtgcg

SEQ ID NO: 8563 - DNA, 26 bp, Artificial Sequence
  Probe
attggtcgtggttgtagtccgtgcga

SEQ ID NO: 8564 - DNA, 27 bp, Artificial Sequence
  Probe
attggtcgtggttgtagtccgtgcgag

SEQ ID NO: 8565 - DNA, 28 bp, Artificial Sequence
  Probe
attggtcgtggttgtagtccgtgcgaga

SEQ ID NO: 8566 - DNA, 20 bp, Artificial Sequence
  Probe
cactgtaaagctaacttagc

SEQ ID NO: 8567 - DNA, 21 bp, Artificial Sequence
  Probe
cactgtaaagctaacttagca

SEQ ID NO: 8568 - DNA, 20 bp, Artificial Sequence
  Probe
cagtcggtagagcatcagac

SEQ ID NO: 8569 - DNA, 28 bp, Artificial Sequence
  Probe
catggtgtaatggttagcactctggact

SEQ ID NO: 8570 - DNA, 19 bp, Artificial Sequence
  Probe
cattggtcgtggttgtagt

SEQ ID NO: 8571 - DNA, 20 bp, Artificial Sequence
  Probe
cattggtcgtggttgtagtc

SEQ ID NO: 8572 - DNA, 21 bp, Artificial Sequence
  Probe
cattggtcgtggttgtagtcc

SEQ ID NO: 8573 - DNA, 22 bp, Artificial Sequence
  Probe
cattggtcgtggttgtagtccg

SEQ ID NO: 8574 - DNA, 24 bp, Artificial Sequence
  Probe
cattggtcgtggttgtagtccgtg

SEQ ID NO: 8575 - DNA, 29 bp, Artificial Sequence
  Probe
cattggtcgtggttgtagtccgtgcgaga

SEQ ID NO: 8576 - DNA, 29 bp, Artificial Sequence
  Probe
ccatggtgtaatggttagcactctggact

SEQ ID NO: 8577 - DNA, 17 bp, Artificial Sequence
  Probe
ccccggcacctccacca

SEQ ID NO: 8578 - DNA, 30 bp, Artificial Sequence; identical to SEQ ID NO: 637
  Probe

SEQ ID NO: 8579 - DNA, 29 bp, Artificial Sequence
  Probe
ccgtgatcgtatagtggttagtactctgc

SEQ ID NO: 8580 - DNA, 30 bp, Artificial Sequence
  Probe
ccgtgatcgtatagtggttagtactctgcg

SEQ ID NO: 8581 - DNA, 23 bp, Artificial Sequence
  Probe
ccttccaagcagttgacccgggt

SEQ ID NO: 8582 - DNA, 20 bp, Artificial Sequence
  Probe
cggagctggggattgtgggt

SEQ ID NO: 8583 - DNA, 23 bp, Artificial Sequence
  Probe
cgtatagtggttagtactctgcg

SEQ ID NO: 8584 - DNA, 24 bp, Artificial Sequence
  Probe
cgtatagtggttagtactctgcgt

SEQ ID NO: 8585 - DNA, 25 bp, Artificial Sequence
  Probe
cgtatagtggttagtactctgcgtt

SEQ ID NO: 8586 - DNA, 26 bp, Artificial Sequence
  Probe
cgtatagtggttagtactctgcgttg

SEQ ID NO: 8587 - DNA, 28 bp, Artificial Sequence
  Probe
cgtgatcgtatagtggttagtactctgc

SEQ ID NO: 8588 - DNA, 30 bp, Artificial Sequence
  Probe
cgtgatcgtatagtggttagtactctgcgt

SEQ ID NO: 8589 - DNA, 19 bp, Artificial Sequence
  Probe
ctaagccagggattgtggg

SEQ ID NO: 8590 - DNA, 20 bp, Artificial Sequence
  Probe
ctaagccagggattgtgggt

SEQ ID NO: 8591 - DNA, 21 bp, Artificial Sequence
  Probe
ctaagccagggattgtgggtt

SEQ ID NO: 8592 - DNA, 21 bp, Artificial Sequence
  Probe
ctctgaatccagcgatccgag

SEQ ID NO: 8593 - DNA, 22 bp, Artificial Sequence
  Probe
ctgtcacgcgggagaccggggt

SEQ ID NO: 8594 - DNA, 22 bp, Artificial Sequence
  Probe
ctttgaatccagcgatccgagt

SEQ ID NO: 8595 - DNA, 23 bp, Artificial Sequence
  Probe
gaaaaagtcatggaggccatggg

SEQ ID NO: 8596 - DNA, 19 bp, Artificial Sequence
  Probe
gaccacgtggcctaatgga

SEQ ID NO: 8597 - DNA, 23 bp, Artificial Sequence
  Probe
gacccagtggcctaatggataag

SEQ ID NO: 8598 - DNA, 24 bp, Artificial Sequence
  Probe
gacccagtggcctaatggataagg

SEQ ID NO: 8599 - DNA, 30 bp, Artificial Sequence
  Probe
gacccagtggcctaatggataaggcatcag

SEQ ID NO: 8600 - DNA, 18 bp, Artificial Sequence
  Probe
gaccgcgtggcctaatgg

SEQ ID NO: 8601 - DNA, 19 bp, Artificial Sequence
  Probe
gaccgcgtggcctaatgga

SEQ ID NO: 8602 - DNA, 19 bp, Artificial Sequence
  Probe
gacctcgtggcgcaacggt

SEQ ID NO: 8603 - DNA, 24 bp, Artificial Sequence
  Probe
gacctcgtggcgcaacggtagcgc

SEQ ID NO: 8604 - DNA, 18 bp, Artificial Sequence
  Probe
gacctcgtggcgcaatgg

SEQ ID NO: 8605 - DNA, 24 bp, Artificial Sequence
  Probe
gacgaggtggccgagtggttaagg

SEQ ID NO: 8606 - DNA, 25 bp, Artificial Sequence
  Probe
gacgaggtggccgagtggttaaggc

SEQ ID NO: 8607 - DNA, 18 bp, Artificial Sequence
  Probe
gagaaagctcacaagaac

SEQ ID NO: 8608 - DNA, 19 bp, Artificial Sequence
  Probe
gagaaagctcacaagaact

SEQ ID NO: 8609 - DNA, 21 bp, Artificial Sequence
  Probe
gagaaagctcacaagaactgc

SEQ ID NO: 8610 - DNA, 22 bp, Artificial Sequence
  Probe
gagaaagctcacaagaactgct

SEQ ID NO: 8611 - DNA, 25 bp, Artificial Sequence
  Probe
gagaaagctcacaagaactgctaac

SEQ ID NO: 8612 - DNA, 26 bp, Artificial Sequence
  Probe
gagaaagctcacaagaactgctaact

SEQ ID NO: 8613 - DNA, 29 bp, Artificial Sequence
  Probe
gatcgtatagtggttagtactctgcgttg

SEQ ID NO: 8614 - DNA, 30 bp, Artificial Sequence
  Probe
gatcgtatagtggttagtactctgcgttgt

SEQ ID NO: 8615 - DNA, 30 bp, Artificial Sequence
  Probe
gcactggtggttcagtggtagaattctcgc

SEQ ID NO: 8616 - DNA, 21 bp, Artificial Sequence
  Probe
gcagagcccggtaatcgcata

SEQ ID NO: 8617 - DNA, 30 bp, Artificial Sequence
  Probe
gcagagtggcgcagcggaagcgtgctgggc

SEQ ID NO: 8618 - DNA, 28 bp, Artificial Sequence
  Probe
gcatgggtggttcagtggtagaattctc

SEQ ID NO: 8619 - DNA, 29 bp, Artificial Sequence
  Probe
gcatgggtggttcagtggtagaattctcg

SEQ ID NO: 8620 - DNA, 30 bp, Artificial Sequence; identical to SEQ ID NO: 1002
  Probe

SEQ ID NO: 8621 - DNA, 18 bp, Artificial Sequence
  Probe
gccccagtggcctaatgg

SEQ ID NO: 8622 - DNA, 19 bp, Artificial Sequence
  Probe
gccccagtggcctaatgga

SEQ ID NO: 8623 - DNA, 19 bp, Artificial Sequence
  Probe
gccccggtggcctaatgga

SEQ ID NO: 8624 - DNA, 19 bp, Artificial Sequence
  Probe
gcccggatagctcagtcgg

SEQ ID NO: 8625 - DNA, 20 bp, Artificial Sequence
  Probe
gcccggatagctcagtcggt

SEQ ID NO: 8626 - DNA, 22 bp, Artificial Sequence
  Probe
gcccggatagctcagtcggtag

SEQ ID NO: 8627 - DNA, 23 bp, Artificial Sequence
  Probe
gcccggatagctcagtcggtaga

SEQ ID NO: 8628 - DNA, 24 bp, Artificial Sequence
  Probe
gcccggatagctcagtcggtagag

SEQ ID NO: 8629 - DNA, 25 bp, Artificial Sequence
  Probe
gcccggatagctcagtcggtagagc

SEQ ID NO: 8630 - DNA, 26 bp, Artificial Sequence
  Probe
gcccggatagctcagtcggtagagca

SEQ ID NO: 8631 - DNA, 30 bp, Artificial Sequence; identical to SEQ ID NO: 1038
  Probe

SEQ ID NO: 8632 - DNA, 19 bp, Artificial Sequence
  Probe
gcccggctagctcagtcgg

SEQ ID NO: 8633 - DNA, 25 bp, Artificial Sequence
  Probe
gcccggctagctcagtcggtagagc

SEQ ID NO: 8634 - DNA, 30 bp, Artificial Sequence; identical to SEQ ID NO: 1062
  Probe

SEQ ID NO: 8635 - DNA, 30 bp, Artificial Sequence; identical to SEQ ID NO: 1080
  Probe

SEQ ID NO: 8636 - DNA, 30 bp, Artificial Sequence; identical to SEQ ID NO: 1105
  Probe

SEQ ID NO: 8637 - DNA, 16 bp, Artificial Sequence
  Probe
gcgccgctggtgtagt

SEQ ID NO: 8638 - DNA, 18 bp, Artificial Sequence
  Probe
gcgccgctggtgtagtgg

SEQ ID NO: 8639 - DNA, 20 bp, Artificial Sequence
  Probe
gcgccgctggtgtagtggta

SEQ ID NO: 8640 - DNA, 22 bp, Artificial Sequence
  Probe
gcgccgctggtgtagtggtatc

SEQ ID NO: 8641 - DNA, 27 bp, Artificial Sequence
  Probe
gcgccgctggtgtagtggtatcatgca

SEQ ID NO: 8642 - DNA, 29 bp, Artificial Sequence
  Probe
gcgccgctggtgtagtggtatcatgcaag

SEQ ID NO: 8643 - DNA, 25 bp, Artificial Sequence
  Probe
gctgtgatggccgagtggttaaggc

SEQ ID NO: 8644 - DNA, 20 bp, Artificial Sequence
  Probe
gcttctgtagtgtagtggtt

SEQ ID NO: 8645 - DNA, 23 bp, Artificial Sequence
  Probe
gcttctgtagtgtagtggttatc

SEQ ID NO: 8646 - DNA, 30 bp, Artificial Sequence
  Probe
gcttctgtagtgtagtggttatcacgttcg

SEQ ID NO: 8647 - DNA, 25 bp, Artificial Sequence
  Probe
ggactctgaatccagcgatccgagt

SEQ ID NO: 8648 - DNA, 30 bp, Artificial Sequence
  Probe
ggccccatggtgtaatggttagcactctgg

SEQ ID NO: 8649 - DNA, 16 bp, Artificial Sequence
  Probe
ggccgcgtggcctaat

SEQ ID NO: 8650 - DNA, 17 bp, Artificial Sequence
  Probe
ggccgcgtggcctaatg

SEQ ID NO: 8651 - DNA, 18 bp, Artificial Sequence
  Probe
ggccgcgtggcctaatgg

SEQ ID NO: 8652 - DNA, 19 bp, Artificial Sequence
  Probe
ggccgcgtggcctaatgga

SEQ ID NO: 8653 - DNA, 20 bp, Artificial Sequence
  Probe
ggccgcgtggcctaatggat

SEQ ID NO: 8654 - DNA, 24 bp, Artificial Sequence
  Probe
ggccgcgtggcctaatggataagg

SEQ ID NO: 8655 - DNA, 25 bp, Artificial Sequence
  Probe
ggccgcgtggcctaatggataaggc

SEQ ID NO: 8656 - DNA, 30 bp, Artificial Sequence
  Probe
ggccgcgtggcctaatggataaggcgtctg

SEQ ID NO: 8657 - DNA, 20 bp, Artificial Sequence
  Probe
ggccggttagctcagtcggc

SEQ ID NO: 8658 - DNA, 20 bp, Artificial Sequence
  Probe
ggcgccgtggcttagttggt

SEQ ID NO: 8659 - DNA, 22 bp, Artificial Sequence
  Probe
ggcgcggtggccaagtggtaag

SEQ ID NO: 8660 - DNA, 23 bp, Artificial Sequence
  Probe
ggcgcggtggccaagtggtaagg

SEQ ID NO: 8661 - DNA, 24 bp, Artificial Sequence
  Probe
ggcgcggtggccaagtggtaaggc

SEQ ID NO: 8662 - DNA, 24 bp, Artificial Sequence
  Probe
ggctccagtctcttcgggggcgtg

SEQ ID NO: 8663 - DNA, 18 bp, Artificial Sequence
  Probe
ggctccgtggcgcaatgg

SEQ ID NO: 8664 - DNA, 19 bp, Artificial Sequence
  Probe
ggctccgtggcgcaatgga

SEQ ID NO: 8665 - DNA, 30 bp, Artificial Sequence
  Probe
ggctcgttggtctaggggtatgattctcgg

SEQ ID NO: 8666 - DNA, 25 bp, Artificial Sequence
  Probe
ggctcgttggtctagtggtatgatt

SEQ ID NO: 8667 - DNA, 20 bp, Artificial Sequence
  Probe
ggctctgtggcttagttggc

SEQ ID NO: 8668 - DNA, 25 bp, Artificial Sequence
  Probe
ggggaattagctcaaatggtagagc

SEQ ID NO: 8669 - DNA, 18 bp, Artificial Sequence
  Probe
ggggatgtagctcagtgg

SEQ ID NO: 8670 - DNA, 19 bp, Artificial Sequence
  Probe
ggggatgtagctcagtggt

SEQ ID NO: 8671 - DNA, 20 bp, Artificial Sequence
  Probe
ggggatgtagctcagtggta

SEQ ID NO: 8672 - DNA, 21 bp, Artificial Sequence
  Probe
ggggatgtagctcagtggtag

SEQ ID NO: 8673 - DNA, 22 bp, Artificial Sequence
  Probe
ggggatgtagctcagtggtaga

SEQ ID NO: 8674 - DNA, 23 bp, Artificial Sequence
  Probe
ggggatgtagctcagtggtagag

SEQ ID NO: 8675 - DNA, 24 bp, Artificial Sequence
  Probe
ggggatgtagctcagtggtagagc

SEQ ID NO: 8676 - DNA, 20 bp, Artificial Sequence
  Probe
gggggattagctcaaatggt

SEQ ID NO: 8677 - DNA, 25 bp, Artificial Sequence
  Probe
gggggattagctcaaatggtagagc

SEQ ID NO: 8678 - DNA, 29 bp, Artificial Sequence
  Probe
gggggtatagctcaggggtagagcatttg

SEQ ID NO: 8679 - DNA, 19 bp, Artificial Sequence
  Probe
gggggtgtagctcagtggt

SEQ ID NO: 8680 - DNA, 20 bp, Artificial Sequence
  Probe
gggggtgtagctcagtggta

SEQ ID NO: 8681 - DNA, 22 bp, Artificial Sequence
  Probe
gggggtgtagctcagtggtaga

SEQ ID NO: 8682 - DNA, 24 bp, Artificial Sequence
  Probe
gggggtgtagctcagtggtagagc

SEQ ID NO: 8683 - DNA, 16 bp, Artificial Sequence
  Probe
ggtagcgtggccgagc

SEQ ID NO: 8684 - DNA, 17 bp, Artificial Sequence
  Probe
ggtagcgtggccgagcg

SEQ ID NO: 8685 - DNA, 18 bp, Artificial Sequence
  Probe
ggtagcgtggccgagcgg

SEQ ID NO: 8686 - DNA, 19 bp, Artificial Sequence
  Probe
ggtagcgtggccgagcggt

SEQ ID NO: 8687 - DNA, 20 bp, Artificial Sequence
  Probe
ggtagcgtggccgagcggtc

SEQ ID NO: 8688 - DNA, 21 bp, Artificial Sequence
  Probe
ggtagcgtggccgagcggtct

SEQ ID NO: 8689 - DNA, 22 bp, Artificial Sequence
  Probe
ggtagcgtggccgagcggtcta

SEQ ID NO: 8690 - DNA, 23 bp, Artificial Sequence
  Probe
ggtagcgtggccgagcggtctaa

SEQ ID NO: 8691 - DNA, 24 bp, Artificial Sequence
  Probe
ggtagcgtggccgagcggtctaag

SEQ ID NO: 8692 - DNA, 25 bp, Artificial Sequence
  Probe
ggtagcgtggccgagcggtctaagg

SEQ ID NO: 8693 - DNA, 26 bp, Artificial Sequence
  Probe
ggtagcgtggccgagcggtctaaggc

SEQ ID NO: 8694 - DNA, 29 bp, Artificial Sequence
  Probe
ggtagcgtggccgagcggtctaaggcgct

SEQ ID NO: 8695 - DNA, 30 bp, Artificial Sequence
  Probe
ggtagcgtggccgagcggtctaaggcgctg

SEQ ID NO: 8696 - DNA, 22 bp, Artificial Sequence
  Probe
ggtagcgtggccgagtggtcta

SEQ ID NO: 8697 - DNA, 24 bp, Artificial Sequence
  Probe
ggtagcgtggccgagtggtctaag

SEQ ID NO: 8698 - DNA, 25 bp, Artificial Sequence
  Probe
ggtagcgtggccgagtggtctaagg

SEQ ID NO: 8699 - DNA, 26 bp, Artificial Sequence
  Probe
ggtagcgtggccgagtggtctaaggc

SEQ ID NO: 8700 - DNA, 25 bp, Artificial Sequence
  Probe
ggtagtgtggccgagcggtctaagg

SEQ ID NO: 8701 - DNA, 26 bp, Artificial Sequence
  Probe
ggtagtgtggccgagcggtctaaggc

SEQ ID NO: 8702 - DNA, 30 bp, Artificial Sequence
  Probe
ggtagtgtggccgagcggtctaaggcgctg

SEQ ID NO: 8703 - DNA, 19 bp, Artificial Sequence
  Probe
ggtcccatggtgtaatggt

SEQ ID NO: 8704 - DNA, 23 bp, Artificial Sequence
  Probe
ggtcccatggtgtaatggttagc

SEQ ID NO: 8705 - DNA, 29 bp, Artificial Sequence
  Probe
ggtcccatggtgtaatggttagcactctg

SEQ ID NO: 8706 - DNA, 30 bp, Artificial Sequence
  Probe
ggtcccatggtgtaatggttagcactctgg

SEQ ID NO: 8707 - DNA, 21 bp, Artificial Sequence
  Probe
ggtcgtggttgtagtccgtgc

SEQ ID NO: 8708 - DNA, 22 bp, Artificial Sequence
  Probe
ggtcgtggttgtagtccgtgcg

SEQ ID NO: 8709 - DNA, 25 bp, Artificial Sequence
  Probe
ggtcgtggttgtagtccgtgcgaga

SEQ ID NO: 8710 - DNA, 20 bp, Artificial Sequence
  Probe
ggtggccgagtggttaaggc

SEQ ID NO: 8711 - DNA, 24 bp, Artificial Sequence
  Probe
ggtgtagtggtatcatgcaagatt

SEQ ID NO: 8712 - DNA, 24 bp, Artificial Sequence
  Probe
ggttagcactctggactctgaatc

SEQ ID NO: 8713 - DNA, 16 bp, Artificial Sequence
  Probe
ggttagtactctgcgt

SEQ ID NO: 8714 - DNA, 17 bp, Artificial Sequence
  Probe
ggttagtactctgcgtt

SEQ ID NO: 8715 - DNA, 18 bp, Artificial Sequence
  Probe
ggttagtactctgcgttg

SEQ ID NO: 8716 - DNA, 19 bp, Artificial Sequence
  Probe
ggttagtactctgcgttgt

SEQ ID NO: 8717 - DNA, 17 bp, Artificial Sequence
  Probe
ggttccatagtgtagcg

SEQ ID NO: 8718 - DNA, 19 bp, Artificial Sequence
  Probe
ggttccatagtgtagcggt

SEQ ID NO: 8719 - DNA, 20 bp, Artificial Sequence
  Probe
ggttccatagtgtagcggtt

SEQ ID NO: 8720 - DNA, 30 bp, Artificial Sequence
  Probe
ggttccatagtgtagcggttatcacgtctg

SEQ ID NO: 8721 - DNA, 23 bp, Artificial Sequence
  Probe
ggttccatagtgtagtggttatc

SEQ ID NO: 8722 - DNA, 26 bp, Artificial Sequence
  Probe
ggttccatagtgtagtggttatcacg

SEQ ID NO: 8723 - DNA, 28 bp, Artificial Sequence
  Probe
ggttccatagtgtagtggttatcacgtc

SEQ ID NO: 8724 - DNA, 30 bp, Artificial Sequence; identical to SEQ ID NO: 1451
  Probe

SEQ ID NO: 8725 - DNA, 30 bp, Artificial Sequence; identical to SEQ ID NO: 6826
  Probe

SEQ ID NO: 8726 - DNA, 23 bp, Artificial Sequence
  Probe
ggttcgactcccggtgtgggaac

SEQ ID NO: 8727 - DNA, 20 bp, Artificial Sequence
  Probe
ggttcgattccccgacgggg

SEQ ID NO: 8728 - DNA, 21 bp, Artificial Sequence
  Probe
ggttcgattccccgacgggga

SEQ ID NO: 8729 - DNA, 22 bp, Artificial Sequence
  Probe
ggttcgattccccgacggggag

SEQ ID NO: 8730 - DNA, 24 bp, Artificial Sequence
  Probe
gtaatggttagcactctggacttt

SEQ ID NO: 8731 - DNA, 18 bp, Artificial Sequence
  Probe
gtagtcgtggccgagtgg

SEQ ID NO: 8732 - DNA, 19 bp, Artificial Sequence
  Probe
gtagtcgtggccgagtggt

SEQ ID NO: 8733 - DNA, 20 bp, Artificial Sequence
  Probe
gtagtcgtggccgagtggtt

SEQ ID NO: 8734 - DNA, 22 bp, Artificial Sequence
  Probe
gtagtcgtggccgagtggttaa

SEQ ID NO: 8735 - DNA, 23 bp, Artificial Sequence
  Probe
gtagtcgtggccgagtggttaag

SEQ ID NO: 8736 - DNA, 24 bp, Artificial Sequence
  Probe
gtagtcgtggccgagtggttaagg

SEQ ID NO: 8737 - DNA, 25 bp, Artificial Sequence
  Probe
gtagtcgtggccgagtggttaaggc

SEQ ID NO: 8738 - DNA, 25 bp, Artificial Sequence
  Probe
gtcacggtggccgagtggttaaggc

SEQ ID NO: 8739 - DNA, 28 bp, Artificial Sequence
  Probe
gtccttgtagtataaactaatacaccag

SEQ ID NO: 8740 - DNA, 21 bp, Artificial Sequence
  Probe
gtcgtggttgtagtccgtgcg

SEQ ID NO: 8741 - DNA, 23 bp, Artificial Sequence
  Probe
gtcgtggttgtagtccgtgcgag

SEQ ID NO: 8742 - DNA, 24 bp, Artificial Sequence
  Probe
gtcgtggttgtagtccgtgcgaga

SEQ ID NO: 8743 - DNA, 19 bp, Artificial Sequence
  Probe
gtctctgtggcgcaatcgg

SEQ ID NO: 8744 - DNA, 20 bp, Artificial Sequence
  Probe
gtctctgtggcgcaatcggt

SEQ ID NO: 8745 - DNA, 20 bp, Artificial Sequence
  Probe
gtctctgtggcgcaatggac

SEQ ID NO: 8746 - DNA, 30 bp, Artificial Sequence; identical to SEQ ID NO: 1505
  Probe

SEQ ID NO: 8747 - DNA, 21 bp, Artificial Sequence
  Probe
gtggtgagtatccccgcctgt

SEQ ID NO: 8748 - DNA, 22 bp, Artificial Sequence
  Probe
gtggtgagtatccccgcctgtc

SEQ ID NO: 8749 - DNA, 18 bp, Artificial Sequence
  Probe
gtggttaggattcggcgc

SEQ ID NO: 8750 - DNA, 19 bp, Artificial Sequence
  Probe
gtggttaggattcggcgct

SEQ ID NO: 8751 - DNA, 18 bp, Artificial Sequence
  Probe
gtggttagtactctgcgt

SEQ ID NO: 8752 - DNA, 19 bp, Artificial Sequence
  Probe
gtggttagtactctgcgtt

SEQ ID NO: 8753 - DNA, 20 bp, Artificial Sequence
  Probe
gtggttagtactctgcgttg

SEQ ID NO: 8754 - DNA, 21 bp, Artificial Sequence
  Probe
gtggttagtactctgcgttgt

SEQ ID NO: 8755 - DNA, 22 bp, Artificial Sequence
  Probe
gtggttagtactctgcgttgtg

SEQ ID NO: 8756 - DNA, 20 bp, Artificial Sequence
  Probe
gttaaagactttttctctga

SEQ ID NO: 8757 - DNA, 21 bp, Artificial Sequence
  Probe
gttaagatggcagagcccggt

SEQ ID NO: 8758 - DNA, 22 bp, Artificial Sequence
  Probe
gttaagatggcagagcccggta

SEQ ID NO: 8759 - DNA, 23 bp, Artificial Sequence
  Probe
gttaagatggcagagcccggtaa

SEQ ID NO: 8760 - DNA, 24 bp, Artificial Sequence
  Probe
gttaagatggcagagcccggtaat

SEQ ID NO: 8761 - DNA, 25 bp, Artificial Sequence
  Probe
gttaagatggcagagcccggtaatc

SEQ ID NO: 8762 - DNA, 29 bp, Artificial Sequence
  Probe
gttaagatggcagagcccggtaatcgcat

SEQ ID NO: 8763 - DNA, 17 bp, Artificial Sequence
  Probe
gttagtactctgcgttg

SEQ ID NO: 8764 - DNA, 22 bp, Artificial Sequence
  Probe
gttcgactcccggtgtgggaac

SEQ ID NO: 8765 - DNA, 22 bp, Artificial Sequence
  Probe
gttcgattcccggtcagggaac

SEQ ID NO: 8766 - DNA, 18 bp, Artificial Sequence
  Probe
gtttatgtagcttacctc

SEQ ID NO: 8767 - DNA, 19 bp, Artificial Sequence
  Probe
gtttatgtagcttacctcc

SEQ ID NO: 8768 - DNA, 20 bp, Artificial Sequence
  Probe
gtttatgtagcttacctcct

SEQ ID NO: 8769 - DNA, 30 bp, Artificial Sequence
  Probe
gtttccgtagtgtagcggttatcacattcg

SEQ ID NO: 8770 - DNA, 20 bp, Artificial Sequence
  Probe
gtttccgtagtgtagtggtc

SEQ ID NO: 8771 - DNA, 23 bp, Artificial Sequence
  Probe
gtttccgtagtgtagtggtcatc

SEQ ID NO: 8772 - DNA, 30 bp, Artificial Sequence
  Probe
gtttccgtagtgtagtggtcatcacgttcg

SEQ ID NO: 8773 - DNA, 22 bp, Artificial Sequence
  Probe
taacccagaggtcgatggatcg

SEQ ID NO: 8774 - DNA, 23 bp, Artificial Sequence
  Probe
taacccagaggtcgatggatcga

SEQ ID NO: 8775 - DNA, 19 bp, Artificial Sequence
  Probe
taagccagggattgtgggt

SEQ ID NO: 8776 - DNA, 20 bp, Artificial Sequence
  Probe
tagaattctcgcctgccacg

SEQ ID NO: 8777 - DNA, 21 bp, Artificial Sequence
  Probe
tagaattctcgcctgccacgc

SEQ ID NO: 8778 - DNA, 19 bp, Artificial Sequence
  Probe
tagtggttaggattcggcg

SEQ ID NO: 8779 - DNA, 20 bp, Artificial Sequence
  Probe
tagtggttaggattcggcgc

SEQ ID NO: 8780 - DNA, 21 bp, Artificial Sequence
  Probe
tagtggttaggattcggcgct

SEQ ID NO: 8781 - DNA, 19 bp, Artificial Sequence
  Probe
tagtggttagtactctgcg

SEQ ID NO: 8782 - DNA, 20 bp, Artificial Sequence
  Probe
tagtggttagtactctgcgt

SEQ ID NO: 8783 - DNA, 21 bp, Artificial Sequence
  Probe
tagtggttagtactctgcgtt

SEQ ID NO: 8784 - DNA, 22 bp, Artificial Sequence
  Probe
tagtggttagtactctgcgttg

SEQ ID NO: 8785 - DNA, 23 bp, Artificial Sequence
  Probe
tagtggttagtactctgcgttgt

SEQ ID NO: 8786 - DNA, 22 bp, Artificial Sequence
  Probe
tatagtggttagtactctgcgt

SEQ ID NO: 8787 - DNA, 23 bp, Artificial Sequence
  Probe
tatagtggttagtactctgcgtt

SEQ ID NO: 8788 - DNA, 24 bp, Artificial Sequence
  Probe
tatagtggttagtactctgcgttg

SEQ ID NO: 8789 - DNA, 22 bp, Artificial Sequence
  Probe
tatcattggtcgtggttgtagt

SEQ ID NO: 8790 - DNA, 23 bp, Artificial Sequence
  Probe
tatcattggtcgtggttgtagtc

SEQ ID NO: 8791 - DNA, 24 bp, Artificial Sequence
  Probe
tatcattggtcgtggttgtagtcc

SEQ ID NO: 8792 - DNA, 29 bp, Artificial Sequence
  Probe
tatcattggtcgtggttgtagtccgtgcg

SEQ ID NO: 8793 - DNA, 22 bp, Artificial Sequence
  Probe
tcaatccccggcacctccacca

SEQ ID NO: 8794 - DNA, 20 bp, Artificial Sequence
  Probe
tcagtcggtagagcatcaga

SEQ ID NO: 8795 - DNA, 21 bp, Artificial Sequence
  Probe
tcagtcggtagagcatcagac

SEQ ID NO: 8796 - DNA, 21 bp, Artificial Sequence
  Probe
tcagtcggtagagcatgggac

SEQ ID NO: 8797 - DNA, 22 bp, Artificial Sequence
  Probe
tcagtcggtagagcatgggact

SEQ ID NO: 8798 - DNA, 21 bp, Artificial Sequence
  Probe
tcattggtcgtggttgtagtc

SEQ ID NO: 8799 - DNA, 29 bp, Artificial Sequence
  Probe
tcattggtcgtggttgtagtccgtgcgag

SEQ ID NO: 8800 - DNA, 18 bp, Artificial Sequence
  Probe
tcccacatggtctagcgg

SEQ ID NO: 8801 - DNA, 19 bp, Artificial Sequence
  Probe
tcccacatggtctagcggt

SEQ ID NO: 8802 - DNA, 20 bp, Artificial Sequence
  Probe
tcccacatggtctagcggtt

SEQ ID NO: 8803 - DNA, 22 bp, Artificial Sequence
  Probe
tcccacatggtctagcggttag

SEQ ID NO: 8804 - DNA, 23 bp, Artificial Sequence
  Probe
tcccacatggtctagcggttagg

SEQ ID NO: 8805 - DNA, 24 bp, Artificial Sequence
  Probe
tcccacatggtctagcggttagga

SEQ ID NO: 8806 - DNA, 25 bp, Artificial Sequence
  Probe
tcccacatggtctagcggttaggat

SEQ ID NO: 8807 - DNA, 26 bp, Artificial Sequence
  Probe
tcccacatggtctagcggttaggatt

SEQ ID NO: 8808 - DNA, 27 bp, Artificial Sequence
  Probe
tcccacatggtctagcggttaggattc

SEQ ID NO: 8809 - DNA, 28 bp, Artificial Sequence
  Probe
tcccacatggtctagcggttaggattcc

SEQ ID NO: 8810 - DNA, 29 bp, Artificial Sequence
  Probe
tcccacatggtctagcggttaggattcct

SEQ ID NO: 8811 - DNA, 30 bp, Artificial Sequence; identical to SEQ ID NO: 1643
  Probe

SEQ ID NO: 8812 - DNA, 22 bp, Artificial Sequence
  Probe
tcccatatggtctagcggttag

SEQ ID NO: 8813 - DNA, 23 bp, Artificial Sequence
  Probe
tcccatatggtctagcggttagg

SEQ ID NO: 8814 - DNA, 26 bp, Artificial Sequence
  Probe
tcccatatggtctagcggttaggatt

SEQ ID NO: 8815 - DNA, 30 bp, Artificial Sequence; identical to SEQ ID NO: 1659
  Probe

SEQ ID NO: 8816 - DNA, 17 bp, Artificial Sequence
  Probe
tccccggcacctccacc

SEQ ID NO: 8817 - DNA, 18 bp, Artificial Sequence
  Probe
tccccggcacctccacca

SEQ ID NO: 8818 - DNA, 20 bp, Artificial Sequence
  Probe
tccctggtctagtggttagg

SEQ ID NO: 8819 - DNA, 23 bp, Artificial Sequence
  Probe
tccctggtctagtggttaggatt

SEQ ID NO: 8820 - DNA, 23 bp, Artificial Sequence
  Probe
tcctcgttagtatagtggtgagt

SEQ ID NO: 8821 - DNA, 24 bp, Artificial Sequence
  Probe
tcgtatagtggttagtactctgcg

SEQ ID NO: 8822 - DNA, 26 bp, Artificial Sequence
  Probe
tcgtatagtggttagtactctgcgtt

SEQ ID NO: 8823 - DNA, 27 bp, Artificial Sequence
  Probe
tcgtatagtggttagtactctgcgttg

SEQ ID NO: 8824 - DNA, 29 bp, Artificial Sequence
  Probe
tgatcgtatagtggttagtactctgcgtt

SEQ ID NO: 8825 - DNA, 30 bp, Artificial Sequence
  Probe
tgatcgtatagtggttagtactctgcgttg

SEQ ID NO: 8826 - DNA, 19 bp, Artificial Sequence
  Probe
tggtcgtggttgtagtccg

SEQ ID NO: 8827 - DNA, 21 bp, Artificial Sequence
  Probe
tggtcgtggttgtagtccgtg

SEQ ID NO: 8828 - DNA, 22 bp, Artificial Sequence
  Probe
tggtcgtggttgtagtccgtgc

SEQ ID NO: 8829 - DNA, 23 bp, Artificial Sequence
  Probe
tggtcgtggttgtagtccgtgcg

SEQ ID NO: 8830 - DNA, 29 bp, Artificial Sequence
  Probe
tggtcgtggttgtagtccgtgcgagaata

SEQ ID NO: 8831 - DNA, 23 bp, Artificial Sequence
  Probe
tggtctagcggttaggattcctg

SEQ ID NO: 8832 - DNA, 24 bp, Artificial Sequence
  Probe
tggtctagcggttaggattcctgg

SEQ ID NO: 8833 - DNA, 17 bp, Artificial Sequence
  Probe
tggttagtactctgcgt

SEQ ID NO: 8834 - DNA, 18 bp, Artificial Sequence
  Probe
tggttagtactctgcgtt

SEQ ID NO: 8835 - DNA, 19 bp, Artificial Sequence
  Probe
tggttagtactctgcgttg

SEQ ID NO: 8836 - DNA, 20 bp, Artificial Sequence
  Probe
tggttagtactctgcgttgt

SEQ ID NO: 8837 - DNA, 22 bp, Artificial Sequence
  Probe
ttagcactctggactctgaatc

SEQ ID NO: 8838 - DNA, 23 bp, Artificial Sequence
  Probe
ttagcactctggactctgaatcc

SEQ ID NO: 8839 - DNA, 18 bp, Artificial Sequence
  Probe
ttcaggtcgcagtctccc

SEQ ID NO: 8840 - DNA, 22 bp, Artificial Sequence
  Probe
ttgggtccgagaggtcccgggt

SEQ ID NO: 8841 - DNA, 22 bp, Artificial Sequence
  Probe
ttgggtgcgagaggtcccgggt

SEQ ID NO: 8842 - DNA, 18 bp, Artificial Sequence
  Probe
ttggtcgtggttgtagtc

SEQ ID NO: 8843 - DNA, 19 bp, Artificial Sequence
  Probe
ttggtcgtggttgtagtcc

SEQ ID NO: 8844 - DNA, 20 bp, Artificial Sequence
  Probe
ttggtcgtggttgtagtccg

SEQ ID NO: 8845 - DNA, 21 bp, Artificial Sequence
  Probe
ttggtcgtggttgtagtccgt

SEQ ID NO: 8846 - DNA, 22 bp, Artificial Sequence
  Probe
ttggtcgtggttgtagtccgtg

SEQ ID NO: 8847 - DNA, 23 bp, Artificial Sequence
  Probe
ttggtcgtggttgtagtccgtgc

SEQ ID NO: 8848 - DNA, 24 bp, Artificial Sequence
  Probe
ttggtcgtggttgtagtccgtgcg

SEQ ID NO: 8849 - DNA, 25 bp, Artificial Sequence
  Probe
ttggtcgtggttgtagtccgtgcga

SEQ ID NO: 8850 - DNA, 26 bp, Artificial Sequence
  Probe
ttggtcgtggttgtagtccgtgcgag

SEQ ID NO: 8851 - DNA, 27 bp, Artificial Sequence
  Probe
ttggtcgtggttgtagtccgtgcgaga

SEQ ID NO: 8852 - DNA, 29 bp, Artificial Sequence
  Probe
ttggtcgtggttgtagtccgtgcgagaat

SEQ ID NO: 8853 - DNA, 20 bp, Artificial Sequence
  Probe
aaaaaggattagactgaacc

SEQ ID NO: 8854 - DNA, 21 bp, Artificial Sequence
  Probe
aaaaaggattagactgaaccg

SEQ ID NO: 8855 - DNA, 25 bp, Artificial Sequence
  Probe
aaaacatcagattgtgaatctgaca

SEQ ID NO: 8856 - DNA, 28 bp, Artificial Sequence
  Probe
aaaacatcagattgtgaatctgacaaca

SEQ ID NO: 8857 - DNA, 29 bp, Artificial Sequence
  Probe
aaaacatcagattgtgaatctgacaacag

SEQ ID NO: 8858 - DNA, 19 bp, Artificial Sequence
  Probe
aaaaggattagactgaacc

SEQ ID NO: 8859 - DNA, 20 bp, Artificial Sequence
  Probe
aaaaggattagactgaaccg

SEQ ID NO: 8860 - DNA, 28 bp, Artificial Sequence
  Probe
aaaatggctgagtgaagcattggactgt

SEQ ID NO: 8861 - DNA, 29 bp, Artificial Sequence
  Probe
aaaatggctgagtgaagcattggactgta

SEQ ID NO: 8862 - DNA, 19 bp, Artificial Sequence
  Probe
aaaatgtttagacgggctc

SEQ ID NO: 8863 - DNA, 23 bp, Artificial Sequence
  Probe
aaacatcagattgtgaatctgac

SEQ ID NO: 8864 - DNA, 24 bp, Artificial Sequence
  Probe
aaacatcagattgtgaatctgaca

SEQ ID NO: 8865 - DNA, 27 bp, Artificial Sequence
  Probe
aaacatcagattgtgaatctgacaaca

SEQ ID NO: 8866 - DNA, 29 bp, Artificial Sequence
  Probe
aaacatcagattgtgaatctgacaacaga

SEQ ID NO: 8867 - DNA, 30 bp, Artificial Sequence
  Probe
aaacatcagattgtgaatctgacaacagag

SEQ ID NO: 8868 - DNA, 16 bp, Artificial Sequence
  Probe
aaagacaccccccaca

SEQ ID NO: 8869 - DNA, 15 bp, Artificial Sequence
  Probe
aaagactttttctct

SEQ ID NO: 8870 - DNA, 17 bp, Artificial Sequence
  Probe
aaagactttttctctga

SEQ ID NO: 8871 - DNA, 29 bp, Artificial Sequence
  Probe
aaagattaagagaaccaacacctctttac

SEQ ID NO: 8872 - DNA, 18 bp, Artificial Sequence
  Probe
aaaggattagactgaacc

SEQ ID NO: 8873 - DNA, 20 bp, Artificial Sequence
  Probe
aaatctcggtggaacctgca

SEQ ID NO: 8874 - DNA, 27 bp, Artificial Sequence
  Probe
aaatggctgagtgaagcattggactgt

SEQ ID NO: 8875 - DNA, 28 bp, Artificial Sequence
  Probe
aaatggctgagtgaagcattggactgta

SEQ ID NO: 8876 - DNA, 29 bp, Artificial Sequence
  Probe
aaatggctgagtgaagcattggactgtaa

SEQ ID NO: 8877 - DNA, 18 bp, Artificial Sequence
  Probe
aaatgtttagacgggctc

SEQ ID NO: 8878 - DNA, 19 bp, Artificial Sequence
  Probe
aaatgtttagacgggctca

SEQ ID NO: 8879 - DNA, 20 bp, Artificial Sequence
  Probe
aaatgtttagacgggctcac

SEQ ID NO: 8880 - DNA, 21 bp, Artificial Sequence
  Probe
aaatgtttagacgggctcaca

SEQ ID NO: 8881 - DNA, 15 bp, Artificial Sequence
  Probe
aacagctaaggactg

SEQ ID NO: 8882 - DNA, 17 bp, Artificial Sequence
  Probe
aacagctaaggactgca

SEQ ID NO: 8883 - DNA, 18 bp, Artificial Sequence
  Probe
aacagctaaggactgcaa

SEQ ID NO: 8884 - DNA, 19 bp, Artificial Sequence
  Probe
aacagctaaggactgcaaa

SEQ ID NO: 8885 - DNA, 20 bp, Artificial Sequence
  Probe
aacagctaaggactgcaaaa

SEQ ID NO: 8886 - DNA, 21 bp, Artificial Sequence
  Probe
aacagctaaggactgcaaaac

SEQ ID NO: 8887 - DNA, 22 bp, Artificial Sequence
  Probe
aacagctaaggactgcaaaacc

SEQ ID NO: 8888 - DNA, 23 bp, Artificial Sequence
  Probe
aacagctaaggactgcaaaaccc

SEQ ID NO: 8889 - DNA, 24 bp, Artificial Sequence
  Probe
aacagctaaggactgcaaaacccc

SEQ ID NO: 8890 - DNA, 25 bp, Artificial Sequence
  Probe
aacagctaaggactgcaaaacccca

SEQ ID NO: 8891 - DNA, 26 bp, Artificial Sequence
  Probe
aacagctaaggactgcaaaaccccac

SEQ ID NO: 8892 - DNA, 27 bp, Artificial Sequence
  Probe
aacagctaaggactgcaaaaccccact

SEQ ID NO: 8893 - DNA, 28 bp, Artificial Sequence
  Probe
aacagctaaggactgcaaaaccccactc

SEQ ID NO: 8894 - DNA, 29 bp, Artificial Sequence
  Probe
aacagctaaggactgcaaaaccccactct

SEQ ID NO: 8895 - DNA, 17 bp, Artificial Sequence
  Probe
aacagctatccattggt

SEQ ID NO: 8896 - DNA, 22 bp, Artificial Sequence
  Probe
aacatcagattgtgaatctgac

SEQ ID NO: 8897 - DNA, 23 bp, Artificial Sequence
  Probe
aacatcagattgtgaatctgaca

SEQ ID NO: 8898 - DNA, 26 bp, Artificial Sequence
  Probe
aacatcagattgtgaatctgacaaca

SEQ ID NO: 8899 - DNA, 27 bp, Artificial Sequence
  Probe
aacatcagattgtgaatctgacaacag

SEQ ID NO: 8900 - DNA, 28 bp, Artificial Sequence
  Probe
aacatcagattgtgaatctgacaacaga

SEQ ID NO: 8901 - DNA, 29 bp, Artificial Sequence
  Probe
aacatcagattgtgaatctgacaacagag

SEQ ID NO: 8902 - DNA, 30 bp, Artificial Sequence
  Probe
aacatcagattgtgaatctgacaacagagg

SEQ ID NO: 8903 - DNA, 18 bp, Artificial Sequence
  Probe
aaccgggcggaaacacct

SEQ ID NO: 8904 - DNA, 15 bp, Artificial Sequence
  Probe
aactgctaactcatg

SEQ ID NO: 8905 - DNA, 15 bp, Artificial Sequence
  Probe
aacttaacttgaccg

SEQ ID NO: 8906 - DNA, 17 bp, Artificial Sequence
  Probe
aacttaacttgaccgct

SEQ ID NO: 8907 - DNA, 18 bp, Artificial Sequence
  Probe
aacttaacttgaccgctc

SEQ ID NO: 8908 - DNA, 19 bp, Artificial Sequence
  Probe
aacttaacttgaccgctct

SEQ ID NO: 8909 - DNA, 20 bp, Artificial Sequence
  Probe
aacttaacttgaccgctctg

SEQ ID NO: 8910 - DNA, 21 bp, Artificial Sequence
  Probe
aacttaacttgaccgctctga

SEQ ID NO: 8911 - DNA, 22 bp, Artificial Sequence
  Probe
aacttaacttgaccgctctgag

SEQ ID NO: 8912 - DNA, 23 bp, Artificial Sequence
  Probe
aacttaacttgaccgctctgagc

SEQ ID NO: 8913 - DNA, 25 bp, Artificial Sequence
  Probe
aacttccaattaactagttttgaca

SEQ ID NO: 8914 - DNA, 28 bp, Artificial Sequence
  Probe
aacttccaattaactagttttgacaaca

SEQ ID NO: 8915 - DNA, 15 bp, Artificial Sequence
  Probe
aacttgaccgctctg

SEQ ID NO: 8916 - DNA, 16 bp, Artificial Sequence
  Probe
aacttgaccgctctga

SEQ ID NO: 8917 - DNA, 17 bp, Artificial Sequence
  Probe
aacttgaccgctctgag

SEQ ID NO: 8918 - DNA, 18 bp, Artificial Sequence
  Probe
aacttgaccgctctgagc

SEQ ID NO: 8919 - DNA, 19 bp, Artificial Sequence
  Probe
aacttgaccgctctgagct

SEQ ID NO: 8920 - DNA, 18 bp, Artificial Sequence
  Probe
aagaactgctaactcatg

SEQ ID NO: 8921 - DNA, 19 bp, Artificial Sequence
  Probe
aagaactgctaactcatgc

SEQ ID NO: 8922 - DNA, 30 bp, Artificial Sequence; identical to SEQ ID NO: 2246
  Probe

SEQ ID NO: 8923 - DNA, 15 bp, Artificial Sequence
  Probe
aagactttttctctg

SEQ ID NO: 8924 - DNA, 16 bp, Artificial Sequence
  Probe
aagactttttctctga

SEQ ID NO: 8925 - DNA, 21 bp, Artificial Sequence
  Probe
aagattaagagaaccaacacc

SEQ ID NO: 8926 - DNA, 30 bp, Artificial Sequence
  Probe
aagattaagagaaccaacacctctttacag

SEQ ID NO: 8927 - DNA, 20 bp, Artificial Sequence
  Probe
aagattccaggttcgactcc

SEQ ID NO: 8928 - DNA, 30 bp, Artificial Sequence
  Probe
aagattccaggttcgactcctggctggctc

SEQ ID NO: 8929 - DNA, 15 bp, Artificial Sequence
  Probe
aagcattggactgta

SEQ ID NO: 8930 - DNA, 19 bp, Artificial Sequence
  Probe
aagcattggactgtaaatc

SEQ ID NO: 8931 - DNA, 20 bp, Artificial Sequence
  Probe
aagcattggactgtaaatct

SEQ ID NO: 8932 - DNA, 21 bp, Artificial Sequence
  Probe
aagcattggactgtaaatcta

SEQ ID NO: 8933 - DNA, 22 bp, Artificial Sequence
  Probe
aaggactgcaaaaccccactct

SEQ ID NO: 8934 - DNA, 19 bp, Artificial Sequence
  Probe
aaggctccagtctcttcgg

SEQ ID NO: 8935 - DNA, 20 bp, Artificial Sequence
  Probe
aaggctccagtctcttcggg

SEQ ID NO: 8936 - DNA, 25 bp, Artificial Sequence
  Probe
aagggcttagcttaattaaagtggc

SEQ ID NO: 8937 - DNA, 29 bp, Artificial Sequence
  Probe
aagggcttagcttaattaaagtggctgat

SEQ ID NO: 8938 - DNA, 17 bp, Artificial Sequence
  Probe
aaggtattagaaaaacc

SEQ ID NO: 8939 - DNA, 25 bp, Artificial Sequence
  Probe
aaggtattagaaaaaccatttcata

SEQ ID NO: 8940 - DNA, 24 bp, Artificial Sequence
  Probe
aaggtccccggttcgaaaccgggc

SEQ ID NO: 8941 - DNA, 30 bp, Artificial Sequence
  Probe
aaggtcctgggttcgagccccagtggaacc

SEQ ID NO: 8942 - DNA, 24 bp, Artificial Sequence
  Probe
aaggtcgcgggttcgatccccgta

SEQ ID NO: 8943 - DNA, 23 bp, Artificial Sequence
  Probe
aaggttccgggttcgagtcccgg

SEQ ID NO: 8944 - DNA, 24 bp, Artificial Sequence
  Probe
aaggttccgggttcgagtcccggc

SEQ ID NO: 8945 - DNA, 25 bp, Artificial Sequence
  Probe
aaggttccgggttcgagtcccggcg

SEQ ID NO: 8946 - DNA, 28 bp, Artificial Sequence
  Probe
aaggttccgggttcgagtcccggcggag

SEQ ID NO: 8947 - DNA, 21 bp, Artificial Sequence
  Probe
aataacgccaaggtcgcgggt

SEQ ID NO: 8948 - DNA, 19 bp, Artificial Sequence
  Probe
aatccagcgatccgagttc

SEQ ID NO: 8949 - DNA, 20 bp, Artificial Sequence
  Probe
aatccagcgatccgagttca

SEQ ID NO: 8950 - DNA, 21 bp, Artificial Sequence
  Probe
aatccagcgatccgagttcaa

SEQ ID NO: 8951 - DNA, 22 bp, Artificial Sequence
  Probe
aatccagcgatccgagttcaaa

SEQ ID NO: 8952 - DNA, 23 bp, Artificial Sequence
  Probe
aatccagcgatccgagttcaaat

SEQ ID NO: 8953 - DNA, 24 bp, Artificial Sequence
  Probe
aatccagcgatccgagttcaaatc

SEQ ID NO: 8954 - DNA, 19 bp, Artificial Sequence
  Probe
aatcccagcggtgcctcaa

SEQ ID NO: 8955 - DNA, 19 bp, Artificial Sequence
  Probe
aatcccagcggtgcctccg

SEQ ID NO: 8956 - DNA, 20 bp, Artificial Sequence
  Probe
aatccccggcacctccacca

SEQ ID NO: 8957 - DNA, 18 bp, Artificial Sequence
  Probe
aatcccggacgagccccc

SEQ ID NO: 8958 - DNA, 19 bp, Artificial Sequence
  Probe
aatccggctcgaaggacga

SEQ ID NO: 8959 - DNA, 17 bp, Artificial Sequence
  Probe
aatctcggtggaacctg

SEQ ID NO: 8960 - DNA, 19 bp, Artificial Sequence
  Probe
aatctcggtggaacctgca

SEQ ID NO: 8961 - DNA, 19 bp, Artificial Sequence
  Probe
aatgccgaggttgtgagtt

SEQ ID NO: 8962 - DNA, 20 bp, Artificial Sequence
  Probe
aatggataacgcgtctgact

SEQ ID NO: 8963 - DNA, 26 bp, Artificial Sequence
  Probe
aatggctgagtgaagcattggactgt

SEQ ID NO: 8964 - DNA, 27 bp, Artificial Sequence
  Probe
aatggctgagtgaagcattggactgta

SEQ ID NO: 8965 - DNA, 28 bp, Artificial Sequence
  Probe
aatggctgagtgaagcattggactgtaa

SEQ ID NO: 8966 - DNA, 18 bp, Artificial Sequence
  Probe
aatggtggagttaaagac

SEQ ID NO: 8967 - DNA, 19 bp, Artificial Sequence
  Probe
aatggtggagttaaagact

SEQ ID NO: 8968 - DNA, 29 bp, Artificial Sequence
  Probe
aatggtggagttaaagactttttctctga

SEQ ID NO: 8969 - DNA, 30 bp, Artificial Sequence
  Probe
aatggtggagttaaagactttttctctgat

SEQ ID NO: 8970 - DNA, 16 bp, Artificial Sequence
  Probe
aatggttagcactctg

SEQ ID NO: 8971 - DNA, 17 bp, Artificial Sequence
  Probe
aatggttagcactctgg

SEQ ID NO: 8972 - DNA, 18 bp, Artificial Sequence
  Probe
aatggttagcactctgga

SEQ ID NO: 8973 - DNA, 19 bp, Artificial Sequence
  Probe
aatggttagcactctggac

SEQ ID NO: 8974 - DNA, 20 bp, Artificial Sequence
  Probe
aatggttagcactctggact

SEQ ID NO: 8975 - DNA, 21 bp, Artificial Sequence
  Probe
aatggttagcactctggactc

SEQ ID NO: 8976 - DNA, 22 bp, Artificial Sequence
  Probe
aatggttagcactctggactct

SEQ ID NO: 8977 - DNA, 23 bp, Artificial Sequence
  Probe
aatggttagcactctggactctg

SEQ ID NO: 8978 - DNA, 24 bp, Artificial Sequence
  Probe
aatggttagcactctggactctga

SEQ ID NO: 8979 - DNA, 27 bp, Artificial Sequence
  Probe
aatggttagcactctggactctgaatc

SEQ ID NO: 8980 - DNA, 21 bp, Artificial Sequence
  Probe
aatggttagcactctggactt

SEQ ID NO: 8981 - DNA, 22 bp, Artificial Sequence
  Probe
aatggttagcactctggacttt

SEQ ID NO: 8982 - DNA, 18 bp, Artificial Sequence
  Probe
aattaactagttttgaca

SEQ ID NO: 8983 - DNA, 20 bp, Artificial Sequence
  Probe
aattaactagttttgacaac

SEQ ID NO: 8984 - DNA, 21 bp, Artificial Sequence
  Probe
aattaactagttttgacaaca

SEQ ID NO: 8985 - DNA, 29 bp, Artificial Sequence
  Probe
aattaactagttttgacaacattcaaaaa

SEQ ID NO: 8986 - DNA, 20 bp, Artificial Sequence
  Probe
aattcccggtcagggaacca

SEQ ID NO: 8987 - DNA, 16 bp, Artificial Sequence
  Probe
aattctcgcctgccac

SEQ ID NO: 8988 - DNA, 22 bp, Artificial Sequence
  Probe
acaaaaaggattagactgaacc

SEQ ID NO: 8989 - DNA, 23 bp, Artificial Sequence
  Probe
acaaaaaggattagactgaaccg

SEQ ID NO: 8990 - DNA, 15 bp, Artificial Sequence
  Probe
acaacagaggcttac

SEQ ID NO: 8991 - DNA, 16 bp, Artificial Sequence
  Probe
acaacagaggcttacg

SEQ ID NO: 8992 - DNA, 17 bp, Artificial Sequence
  Probe
acaacagaggcttacga

SEQ ID NO: 8993 - DNA, 18 bp, Artificial Sequence
  Probe
acaacagaggcttacgac

SEQ ID NO: 8994 - DNA, 19 bp, Artificial Sequence
  Probe
acaacagaggcttacgacc

SEQ ID NO: 8995 - DNA, 22 bp, Artificial Sequence
  Probe
acaacagaggcttacgacccct

SEQ ID NO: 8996 - DNA, 20 bp, Artificial Sequence
  Probe
acaagaactgctaactcatg

SEQ ID NO: 8997 - DNA, 22 bp, Artificial Sequence
  Probe
acaagaactgctaactcatgcc

SEQ ID NO: 8998 - DNA, 19 bp, Artificial Sequence
  Probe
acacggggcacaataattt

SEQ ID NO: 8999 - DNA, 30 bp, Artificial Sequence
  Probe
acacttaggagatttcaacttaacttgacc

SEQ ID NO: 9000 - DNA, 16 bp, Artificial Sequence
  Probe
acagctatccattggt

SEQ ID NO: 9001 - DNA, 30 bp, Artificial Sequence
  Probe
acaggagatcctgggttcgaatcccagcgg

SEQ ID NO: 9002 - DNA, 20 bp, Artificial Sequence
  Probe
acatacccatggccaacctc

SEQ ID NO: 9003 - DNA, 21 bp, Artificial Sequence
  Probe
acatacccatggccaacctcc

SEQ ID NO: 9004 - DNA, 22 bp, Artificial Sequence
  Probe
acatacccatggccaacctcct

SEQ ID NO: 9005 - DNA, 22 bp, Artificial Sequence
  Probe
acatcagattgtgaatctgaca

SEQ ID NO: 9006 - DNA, 25 bp, Artificial Sequence
  Probe
acatcagattgtgaatctgacaaca

SEQ ID NO: 9007 - DNA, 26 bp, Artificial Sequence
  Probe
acatggtctagcggttaggattcctg

SEQ ID NO: 9008 - DNA, 27 bp, Artificial Sequence
  Probe
acatggtctagcggttaggattcctgg

SEQ ID NO: 9009 - DNA, 30 bp, Artificial Sequence; identical to SEQ ID NO: 2689
  Probe

SEQ ID NO: 9010 - DNA, 25 bp, Artificial Sequence
  Probe
accagaatggccgagtggttaaggc

SEQ ID NO: 9011 - DNA, 15 bp, Artificial Sequence
  Probe
accaggatggccgag

SEQ ID NO: 9012 - DNA, 16 bp, Artificial Sequence
  Probe
accaggatggccgagt

SEQ ID NO: 9013 - DNA, 17 bp, Artificial Sequence
  Probe
accaggatggccgagtg

SEQ ID NO: 9014 - DNA, 24 bp, Artificial Sequence
  Probe
accaggatggccgagtggttaagg

SEQ ID NO: 9015 - DNA, 30 bp, Artificial Sequence
  Probe
accaggatggccgagtggttaaggcgttgg

SEQ ID NO: 9016 - DNA, 18 bp, Artificial Sequence
  Probe
acccaagaacagggtttg

SEQ ID NO: 9017 - DNA, 20 bp, Artificial Sequence
  Probe
acccaagaacagggtttgtt

SEQ ID NO: 9018 - DNA, 21 bp, Artificial Sequence
  Probe
acccaagaacagggtttgtta

SEQ ID NO: 9019 - DNA, 22 bp, Artificial Sequence
  Probe
acccaagaacagggtttgttaa

SEQ ID NO: 9020 - DNA, 23 bp, Artificial Sequence
  Probe
acccaagaacagggtttgttaag

SEQ ID NO: 9021 - DNA, 24 bp, Artificial Sequence
  Probe
acccaagaacagggtttgttaaga

SEQ ID NO: 9022 - DNA, 17 bp, Artificial Sequence
  Probe
accctgtggtctagtgg

SEQ ID NO: 9023 - DNA, 18 bp, Artificial Sequence
  Probe
accctgtggtctagtggc

SEQ ID NO: 9024 - DNA, 20 bp, Artificial Sequence
  Probe
accctgtggtctagtggcta

SEQ ID NO: 9025 - DNA, 18 bp, Artificial Sequence
  Probe
accctgtggtctagtggt

SEQ ID NO: 9026 - DNA, 19 bp, Artificial Sequence
  Probe
accctgtggtctagtggtt

SEQ ID NO: 9027 - DNA, 20 bp, Artificial Sequence
  Probe
accctgtggtctagtggtta

SEQ ID NO: 9028 - DNA, 21 bp, Artificial Sequence
  Probe
accctgtggtctagtggttag

SEQ ID NO: 9029 - DNA, 22 bp, Artificial Sequence
  Probe
accctgtggtctagtggttagg

SEQ ID NO: 9030 - DNA, 23 bp, Artificial Sequence
  Probe
accctgtggtctagtggttagga

SEQ ID NO: 9031 - DNA, 30 bp, Artificial Sequence
  Probe
accgaagatcacgggttcgaaccccgtccg

SEQ ID NO: 9032 - DNA, 30 bp, Artificial Sequence
  Probe
accgccgcggcccgggttcgattcccggtc

SEQ ID NO: 9033 - DNA, 18 bp, Artificial Sequence
  Probe
accgcgtggcctaatgga

SEQ ID NO: 9034 - DNA, 29 bp, Artificial Sequence
  Probe
accgcgtggcctaatggataaggcgtctg

SEQ ID NO: 9035 - DNA, 17 bp, Artificial Sequence
  Probe
accgggcggaaacacct

SEQ ID NO: 9036 - DNA, 15 bp, Artificial Sequence
  Probe
acctattctcaaact

SEQ ID NO: 9037 - DNA, 20 bp, Artificial Sequence
  Probe
acctcagaaggtctcacttt

SEQ ID NO: 9038 - DNA, 21 bp, Artificial Sequence
  Probe
acctcagaaggtctcactttt

SEQ ID NO: 9039 - DNA, 30 bp, Artificial Sequence
  Probe
acctcgtggcgcaacggtagcgcgtctgac

SEQ ID NO: 9040 - DNA, 30 bp, Artificial Sequence
  Probe
acctcgtggcgcaatggtagcgcgtctgac

SEQ ID NO: 9041 - DNA, 23 bp, Artificial Sequence
  Probe
acgaggtggccgagtggttaagg

SEQ ID NO: 9042 - DNA, 29 bp, Artificial Sequence
  Probe
acgaggtggccgagtggttaaggcgatgg

SEQ ID NO: 9043 - DNA, 30 bp, Artificial Sequence
  Probe
acgcagaaggtcctgggttcgagccccagt

SEQ ID NO: 9044 - DNA, 19 bp, Artificial Sequence
  Probe
actaagtgtttgtgggttt

SEQ ID NO: 9045 - DNA, 17 bp, Artificial Sequence
  Probe
actatgagaatcgaacc

SEQ ID NO: 9046 - DNA, 16 bp, Artificial Sequence
  Probe
actctgaatccagcga

SEQ ID NO: 9047 - DNA, 20 bp, Artificial Sequence
  Probe
actctgaatccagcgatccg

SEQ ID NO: 9048 - DNA, 21 bp, Artificial Sequence
  Probe
actctgaatccagcgatccga

SEQ ID NO: 9049 - DNA, 23 bp, Artificial Sequence
  Probe
actctgaatccagcgatccgagt

SEQ ID NO: 9050 - DNA, 17 bp, Artificial Sequence
  Probe
actctggactctgaatc

SEQ ID NO: 9051 - DNA, 18 bp, Artificial Sequence
  Probe
actctggactctgaatcc

SEQ ID NO: 9052 - DNA, 19 bp, Artificial Sequence
  Probe
actctggactctgaatcca

SEQ ID NO: 9053 - DNA, 21 bp, Artificial Sequence
  Probe
actctggactctgaatccagc

SEQ ID NO: 9054 - DNA, 22 bp, Artificial Sequence
  Probe
actctggactctgaatccagcg

SEQ ID NO: 9055 - DNA, 23 bp, Artificial Sequence
  Probe
actctggactctgaatccagcga

SEQ ID NO: 9056 - DNA, 17 bp, Artificial Sequence
  Probe
actctggactttgaatc

SEQ ID NO: 9057 - DNA, 19 bp, Artificial Sequence
  Probe
actcttttagtataaatag

SEQ ID NO: 9058 - DNA, 20 bp, Artificial Sequence
  Probe
actcttttagtataaatagt

SEQ ID NO: 9059 - DNA, 30 bp, Artificial Sequence; identical to SEQ ID NO: 2927
  Probe

SEQ ID NO: 9060 - DNA, 19 bp, Artificial Sequence
  Probe
actgtaaagctaacttagc

SEQ ID NO: 9061 - DNA, 30 bp, Artificial Sequence
  Probe
actgtaaagctaacttagcattaacctttt

SEQ ID NO: 9062 - DNA, 15 bp, Artificial Sequence
  Probe
acttaacttgaccgc

SEQ ID NO: 9063 - DNA, 16 bp, Artificial Sequence
  Probe
acttaacttgaccgct

SEQ ID NO: 9064 - DNA, 17 bp, Artificial Sequence
  Probe
acttaacttgaccgctc

SEQ ID NO: 9065 - DNA, 18 bp, Artificial Sequence
  Probe
acttaacttgaccgctct

SEQ ID NO: 9066 - DNA, 19 bp, Artificial Sequence
  Probe
acttaacttgaccgctctg

SEQ ID NO: 9067 - DNA, 20 bp, Artificial Sequence
  Probe
acttaacttgaccgctctga

SEQ ID NO: 9068 - DNA, 21 bp, Artificial Sequence
  Probe
acttaacttgaccgctctgag

SEQ ID NO: 9069 - DNA, 22 bp, Artificial Sequence
  Probe
acttaacttgaccgctctgagc

SEQ ID NO: 9070 - DNA, 23 bp, Artificial Sequence
  Probe
acttaacttgaccgctctgagct

SEQ ID NO: 9071 - DNA, 29 bp, Artificial Sequence
  Probe
acttaggagatttcaacttaacttgaccg

SEQ ID NO: 9072 - DNA, 30 bp, Artificial Sequence
  Probe
acttaggagatttcaacttaacttgaccgc

SEQ ID NO: 9073 - DNA, 19 bp, Artificial Sequence
  Probe
acttctgacacattcgttt

SEQ ID NO: 9074 - DNA, 15 bp, Artificial Sequence
  Probe
acttgaccgctctga

SEQ ID NO: 9075 - DNA, 16 bp, Artificial Sequence
  Probe
acttgaccgctctgag

SEQ ID NO: 9076 - DNA, 17 bp, Artificial Sequence
  Probe
acttgaccgctctgagc

SEQ ID NO: 9077 - DNA, 23 bp, Artificial Sequence
  Probe
actttgaatccagcgatccgagt

SEQ ID NO: 9078 - DNA, 19 bp, Artificial Sequence
  Probe
acttttaaaggataacagc

SEQ ID NO: 9079 - DNA, 30 bp, Artificial Sequence; identical to SEQ ID NO: 209
  Probe

SEQ ID NO: 9080 - DNA, 16 bp, Artificial Sequence
  Probe
agaaaggccgaatttt

SEQ ID NO: 9081 - DNA, 29 bp, Artificial Sequence
  Probe
agaaatatgtctgataaaagagttacttt

SEQ ID NO: 9082 - DNA, 30 bp, Artificial Sequence
  Probe
agaaatatgtctgataaaagagttactttg

SEQ ID NO: 9083 - DNA, 27 bp, Artificial Sequence
  Probe
agaaatttaggttaaatacagaccaag

SEQ ID NO: 9084 - DNA, 17 bp, Artificial Sequence
  Probe
agaactgctaactcatg

SEQ ID NO: 9085 - DNA, 19 bp, Artificial Sequence
  Probe
agaactgctaactcatgcc

SEQ ID NO: 9086 - DNA, 22 bp, Artificial Sequence
  Probe
agaactgctaactcatgccccc

SEQ ID NO: 9087 - DNA, 30 bp, Artificial Sequence
  Probe
agaatagtttaaattagaatcttagctttg

SEQ ID NO: 9088 - DNA, 29 bp, Artificial Sequence
  Probe
agacaggggttaggcctctttttaccagc

SEQ ID NO: 9089 - DNA, 30 bp, Artificial Sequence; identical to SEQ ID NO: 3114
  Probe

SEQ ID NO: 9090 - DNA, 30 bp, Artificial Sequence; identical to SEQ ID NO: 3120
  Probe

SEQ ID NO: 9091 - DNA, 15 bp, Artificial Sequence
  Probe
agactttttctctga

SEQ ID NO: 9092 - DNA, 23 bp, Artificial Sequence
  Probe
agagaaccaacacctctttacag

SEQ ID NO: 9093 - DNA, 19 bp, Artificial Sequence
  Probe
agaggtcgatggatcgaaa

SEQ ID NO: 9094 - DNA, 22 bp, Artificial Sequence
  Probe
agaggtcgatggatcgaaacca

SEQ ID NO: 9095 - DNA, 28 bp, Artificial Sequence
  Probe
agagtggcgcagcggaagcgtgctgggc

SEQ ID NO: 9096 - DNA, 29 bp, Artificial Sequence
  Probe
agagtggcgcagcggaagcgtgctgggcc

SEQ ID NO: 9097 - DNA, 19 bp, Artificial Sequence
  Probe
agatcaagaggtccccggt

SEQ ID NO: 9098 - DNA, 30 bp, Artificial Sequence
  Probe
agattaagagaaccaacacctctttacagt

SEQ ID NO: 9099 - DNA, 19 bp, Artificial Sequence
  Probe
agattccaggttcgactcc

SEQ ID NO: 9100 - DNA, 21 bp, Artificial Sequence
  Probe
agattccaggttcgactcctg

SEQ ID NO: 9101 - DNA, 29 bp, Artificial Sequence
  Probe
agattccaggttcgactcctggctggctc

SEQ ID NO: 9102 - DNA, 30 bp, Artificial Sequence
  Probe
agattccaggttcgactcctggctggctcg

SEQ ID NO: 9103 - DNA, 23 bp, Artificial Sequence
  Probe
agattcccattcttgcgacccgg

SEQ ID NO: 9104 - DNA, 19 bp, Artificial Sequence
  Probe
agattctaggttcgactcc

SEQ ID NO: 9105 - DNA, 30 bp, Artificial Sequence
  Probe
agattctaggttcgactcctggctggctcg

SEQ ID NO: 9106 - DNA, 30 bp, Artificial Sequence
  Probe
agattgagggttcgagtcccttcgtggtcg

SEQ ID NO: 9107 - DNA, 16 bp, Artificial Sequence
  Probe
agattgtgaatctgac

SEQ ID NO: 9108 - DNA, 17 bp, Artificial Sequence
  Probe
agattgtgaatctgaca

SEQ ID NO: 9109 - DNA, 18 bp, Artificial Sequence
  Probe
agattgtgaatctgacaa

SEQ ID NO: 9110 - DNA, 19 bp, Artificial Sequence
  Probe
agattgtgaatctgacaac

SEQ ID NO: 9111 - DNA, 20 bp, Artificial Sequence
  Probe
agattgtgaatctgacaaca

SEQ ID NO: 9112 - DNA, 20 bp, Artificial Sequence
  Probe
agatttcaacttaacttgac

SEQ ID NO: 9113 - DNA, 21 bp, Artificial Sequence
  Probe
agatttcaacttaacttgacc

SEQ ID NO: 9114 - DNA, 22 bp, Artificial Sequence
  Probe
agatttcaacttaacttgaccg

SEQ ID NO: 9115 - DNA, 24 bp, Artificial Sequence
  Probe
agatttcaacttaacttgaccgct

SEQ ID NO: 9116 - DNA, 25 bp, Artificial Sequence
  Probe
agatttcaacttaacttgaccgctc

SEQ ID NO: 9117 - DNA, 26 bp, Artificial Sequence
  Probe
agatttcaacttaacttgaccgctct

SEQ ID NO: 9118 - DNA, 27 bp, Artificial Sequence
  Probe
agatttcaacttaacttgaccgctctg

SEQ ID NO: 9119 - DNA, 28 bp, Artificial Sequence
  Probe
agatttcaacttaacttgaccgctctga

SEQ ID NO: 9120 - DNA, 29 bp, Artificial Sequence
  Probe
agatttcaacttaacttgaccgctctgag

SEQ ID NO: 9121 - DNA, 30 bp, Artificial Sequence; identical to SEQ ID NO: 3214
  Probe

SEQ ID NO: 9122 - DNA, 16 bp, Artificial Sequence
  Probe
agcactctggactctg

SEQ ID NO: 9123 - DNA, 17 bp, Artificial Sequence
  Probe
agcactctggactctga

SEQ ID NO: 9124 - DNA, 19 bp, Artificial Sequence
  Probe
agcactctggactctgaat

SEQ ID NO: 9125 - DNA, 20 bp, Artificial Sequence
  Probe
agcactctggactctgaatc

SEQ ID NO: 9126 - DNA, 21 bp, Artificial Sequence
  Probe
agcactctggactctgaatcc

SEQ ID NO: 9127 - DNA, 22 bp, Artificial Sequence
  Probe
agcactctggactctgaatcca

SEQ ID NO: 9128 - DNA, 23 bp, Artificial Sequence
  Probe
agcactctggactctgaatccag

SEQ ID NO: 9129 - DNA, 24 bp, Artificial Sequence
  Probe
agcactctggactctgaatccagc

SEQ ID NO: 9130 - DNA, 25 bp, Artificial Sequence
  Probe
agcactctggactctgaatccagcg

SEQ ID NO: 9131 - DNA, 30 bp, Artificial Sequence; identical to SEQ ID NO: 270
  Probe

SEQ ID NO: 9132 - DNA, 20 bp, Artificial Sequence
  Probe
agcactctggactttgaatc

SEQ ID NO: 9133 - DNA, 22 bp, Artificial Sequence
  Probe
agcagagtggcgcagcggaagc

SEQ ID NO: 9134 - DNA, 23 bp, Artificial Sequence
  Probe
agcagagtggcgcagcggaagcg

SEQ ID NO: 9135 - DNA, 24 bp, Artificial Sequence
  Probe
agcagagtggcgcagcggaagcgt

SEQ ID NO: 9136 - DNA, 27 bp, Artificial Sequence
  Probe
agcagagtggcgcagcggaagcgtgct

SEQ ID NO: 9137 - DNA, 28 bp, Artificial Sequence
  Probe
agcagagtggcgcagcggaagcgtgctg

SEQ ID NO: 9138 - DNA, 29 bp, Artificial Sequence
  Probe
agcagagtggcgcagcggaagcgtgctgg

SEQ ID NO: 9139 - DNA, 30 bp, Artificial Sequence
  Probe
agcattggtggttcagtggtagaattctcg

SEQ ID NO: 9140 - DNA, 26 bp, Artificial Sequence
  Probe
agcgcgttcggctgttaaccgaaagg

SEQ ID NO: 9141 - DNA, 24 bp, Artificial Sequence
  Probe
agctcaggggtagagcatttgact

SEQ ID NO: 9142 - DNA, 23 bp, Artificial Sequence
  Probe
agctcagtcggtagagcatcaga

SEQ ID NO: 9143 - DNA, 24 bp, Artificial Sequence
  Probe
agctcagtcggtagagcatcagac

SEQ ID NO: 9144 - DNA, 24 bp, Artificial Sequence
  Probe
agctcagtcggtagagcatgagac

SEQ ID NO: 9145 - DNA, 25 bp, Artificial Sequence
  Probe
agctcagtcggtagagcatgagact

SEQ ID NO: 9146 - DNA, 25 bp, Artificial Sequence
  Probe
agctcagtgggtagagcatttgact

SEQ ID NO: 9147 - DNA, 19 bp, Artificial Sequence
  Probe
agctcagtggtagagcatt

SEQ ID NO: 9148 - DNA, 23 bp, Artificial Sequence
  Probe
agctcagtggtagagcatttgac

SEQ ID NO: 9149 - DNA, 24 bp, Artificial Sequence
  Probe
agctcagtggtagagcatttgact

SEQ ID NO: 9150 - DNA, 25 bp, Artificial Sequence
  Probe
agctcagtggtagagcatttgactg

SEQ ID NO: 9151 - DNA, 26 bp, Artificial Sequence
  Probe
agctcagtggtagagcatttgactgc

SEQ ID NO: 9152 - DNA, 18 bp, Artificial Sequence
  Probe
agctccgaggtgattttc

SEQ ID NO: 9153 - DNA, 21 bp, Artificial Sequence
  Probe
agctccgaggtgattttcata

SEQ ID NO: 9154 - DNA, 23 bp, Artificial Sequence
  Probe
agctccgaggtgattttcatatt

SEQ ID NO: 9155 - DNA, 30 bp, Artificial Sequence; identical to SEQ ID NO: 314
  Probe

SEQ ID NO: 9156 - DNA, 25 bp, Artificial Sequence
  Probe
aggagatttcaacttaacttgaccg

SEQ ID NO: 9157 - DNA, 29 bp, Artificial Sequence
  Probe
aggagatttcaacttaacttgaccgctct

SEQ ID NO: 9158 - DNA, 30 bp, Artificial Sequence; identical to SEQ ID NO: 3410
  Probe

SEQ ID NO: 9159 - DNA, 22 bp, Artificial Sequence
  Probe
aggataacagctatccattggt

SEQ ID NO: 9160 - DNA, 19 bp, Artificial Sequence
  Probe
aggatggccgagcggtcta

SEQ ID NO: 9161 - DNA, 21 bp, Artificial Sequence
  Probe
aggatggccgagcggtctaag

SEQ ID NO: 9162 - DNA, 23 bp, Artificial Sequence
  Probe
aggatggccgagcggtctaaggc

SEQ ID NO: 9163 - DNA, 29 bp, Artificial Sequence
  Probe
aggatggccgagcggtctaaggcgctgcg

SEQ ID NO: 9164 - DNA, 21 bp, Artificial Sequence
  Probe
aggatggccgagtggtctaag

SEQ ID NO: 9165 - DNA, 23 bp, Artificial Sequence
  Probe
aggccccgggttcaatccccggc

SEQ ID NO: 9166 - DNA, 23 bp, Artificial Sequence
  Probe
aggccccgggttcgatccccggc

SEQ ID NO: 9167 - DNA, 18 bp, Artificial Sequence
  Probe
aggctccagtctcttcgg

SEQ ID NO: 9168 - DNA, 19 bp, Artificial Sequence
  Probe
aggctccagtctcttcggg

SEQ ID NO: 9169 - DNA, 22 bp, Artificial Sequence
  Probe
agggattgtgggttcgagtccc

SEQ ID NO: 9170 - DNA, 19 bp, Artificial Sequence
  Probe
aggggtagagcatttgact

SEQ ID NO: 9171 - DNA, 20 bp, Artificial Sequence
  Probe
aggggtagagcatttgactg

SEQ ID NO: 9172 - DNA, 21 bp, Artificial Sequence
  Probe
aggggtagagcatttgactgc

SEQ ID NO: 9173 - DNA, 17 bp, Artificial Sequence
  Probe
aggggtatgattctcgg

SEQ ID NO: 9174 - DNA, 25 bp, Artificial Sequence
  Probe
aggggttaggcctctttttaccagc

SEQ ID NO: 9175 - DNA, 16 bp, Artificial Sequence
  Probe
agggtaggggatgtag

SEQ ID NO: 9176 - DNA, 21 bp, Artificial Sequence
  Probe
agggtcatgggttcgtgcccc

SEQ ID NO: 9177 - DNA, 29 bp, Artificial Sequence
  Probe
agggtccagggttcaagtccctgttcggg

SEQ ID NO: 9178 - DNA, 30 bp, Artificial Sequence
  Probe
agggtccagggttcaagtccctgttcgggc

SEQ ID NO: 9179 - DNA, 21 bp, Artificial Sequence
  Probe
agggtcgtgggttcgagcccc

SEQ ID NO: 9180 - DNA, 24 bp, Artificial Sequence
  Probe
agggtcgtgggttcgagccccacg

SEQ ID NO: 9181 - DNA, 28 bp, Artificial Sequence
  Probe
agggtcgtgggttcgagccccacgttgg

SEQ ID NO: 9182 - DNA, 30 bp, Artificial Sequence
  Probe
agggtcgtgggttcgagccccacgttgggc

SEQ ID NO: 9183 - DNA, 29 bp, Artificial Sequence
  Probe
aggtcctgggttcgagccccagtggaacc

SEQ ID NO: 9184 - DNA, 19 bp, Artificial Sequence
  Probe
aggtcgcgggttcgatccc

SEQ ID NO: 9185 - DNA, 20 bp, Artificial Sequence
  Probe
aggtcgcgggttcgatcccc

SEQ ID NO: 9186 - DNA, 23 bp, Artificial Sequence
  Probe
aggtcgcgggttcgatccccgta

SEQ ID NO: 9187 - DNA, 22 bp, Artificial Sequence
  Probe
aggtcgctggttcgattccggc

SEQ ID NO: 9188 - DNA, 29 bp, Artificial Sequence
  Probe
aggtcgctggttcgattccggctcgaagg

SEQ ID NO: 9189 - DNA, 29 bp, Artificial Sequence
  Probe
aggtcgtgagttcgagcctcacacggggc

SEQ ID NO: 9190 - DNA, 23 bp, Artificial Sequence
  Probe
aggttccgggttcgagtcccggc

SEQ ID NO: 9191 - DNA, 30 bp, Artificial Sequence
  Probe
aggttccgggttcgagtcccggcggagtcg

SEQ ID NO: 9192 - DNA, 29 bp, Artificial Sequence
  Probe
aggttgcgtgttcaagtcacgtcggggtc

SEQ ID NO: 9193 - DNA, 17 bp, Artificial Sequence
  Probe
agtaaggtcagctaaat

SEQ ID NO: 9194 - DNA, 18 bp, Artificial Sequence
  Probe
agtaaggtcagctaaata

SEQ ID NO: 9195 - DNA, 20 bp, Artificial Sequence
  Probe
agtaaggtcagctaaataag

SEQ ID NO: 9196 - DNA, 21 bp, Artificial Sequence
  Probe
agtaaggtcagctaaataagc

SEQ ID NO: 9197 - DNA, 22 bp, Artificial Sequence
  Probe
agtaaggtcagctaaataagct

SEQ ID NO: 9198 - DNA, 27 bp, Artificial Sequence
  Probe
agtaaggtcagctaaataagctatcgg

SEQ ID NO: 9199 - DNA, 28 bp, Artificial Sequence
  Probe
agtaaggtcagctaaataagctatcggg

SEQ ID NO: 9200 - DNA, 30 bp, Artificial Sequence; identical to SEQ ID NO: 3514
  Probe

SEQ ID NO: 9201 - DNA, 24 bp, Artificial Sequence
  Probe
agtatagtggtgagtatccccgcc

SEQ ID NO: 9202 - DNA, 17 bp, Artificial Sequence
  Probe
agtcggtagagcatcag

SEQ ID NO: 9203 - DNA, 15 bp, Artificial Sequence
  Probe
agtcggtagagcatg

SEQ ID NO: 9204 - DNA, 16 bp, Artificial Sequence
  Probe
agtcggtagagcatga

SEQ ID NO: 9205 - DNA, 17 bp, Artificial Sequence
  Probe
agtcggtagagcatgag

SEQ ID NO: 9206 - DNA, 19 bp, Artificial Sequence
  Probe
agtcggtagagcatgagac

SEQ ID NO: 9207 - DNA, 19 bp, Artificial Sequence
  Probe
agtcggtagagcatgggac

SEQ ID NO: 9208 - DNA, 18 bp, Artificial Sequence
  Probe
agtgaagcattggactgt

SEQ ID NO: 9209 - DNA, 19 bp, Artificial Sequence
  Probe
agtgaagcattggactgta

SEQ ID NO: 9210 - DNA, 20 bp, Artificial Sequence
  Probe
agtgaagcattggactgtaa

SEQ ID NO: 9211 - DNA, 21 bp, Artificial Sequence
  Probe
agtgaagcattggactgtaaa

SEQ ID NO: 9212 - DNA, 23 bp, Artificial Sequence
  Probe
agtgaagcattggactgtaaatc

SEQ ID NO: 9213 - DNA, 24 bp, Artificial Sequence
  Probe
agtgaagcattggactgtaaatct

SEQ ID NO: 9214 - DNA, 26 bp, Artificial Sequence
  Probe
agtggcgcagcggaagcgtgctgggc

SEQ ID NO: 9215 - DNA, 15 bp, Artificial Sequence
  Probe
agtggtagaattctc

SEQ ID NO: 9216 - DNA, 16 bp, Artificial Sequence
  Probe
agtggtagaattctcg

SEQ ID NO: 9217 - DNA, 17 bp, Artificial Sequence
  Probe
agtggtagaattctcgc

SEQ ID NO: 9218 - DNA, 18 bp, Artificial Sequence
  Probe
agtggtagaattctcgcc

SEQ ID NO: 9219 - DNA, 19 bp, Artificial Sequence
  Probe
agtggtagaattctcgcct

SEQ ID NO: 9220 - DNA, 20 bp, Artificial Sequence
  Probe
agtggtagaattctcgcctg

SEQ ID NO: 9221 - DNA, 21 bp, Artificial Sequence
  Probe
agtggtagaattctcgcctgc

SEQ ID NO: 9222 - DNA, 17 bp, Artificial Sequence
  Probe
agtggtagagcatttga

SEQ ID NO: 9223 - DNA, 19 bp, Artificial Sequence
  Probe
agtggtagagcatttgact

SEQ ID NO: 9224 - DNA, 20 bp, Artificial Sequence
  Probe
agtggtagagcatttgactg

SEQ ID NO: 9225 - DNA, 21 bp, Artificial Sequence
  Probe
agtggtagagcatttgactgc

SEQ ID NO: 9226 - DNA, 23 bp, Artificial Sequence
  Probe
agtggtctagtggttaggattca

SEQ ID NO: 9227 - DNA, 24 bp, Artificial Sequence
  Probe
agtggtctagtggttaggattcag

SEQ ID NO: 9228 - DNA, 27 bp, Artificial Sequence
  Probe
agtggtctagtggttaggattcagcgc

SEQ ID NO: 9229 - DNA, 28 bp, Artificial Sequence
  Probe
agtggtctagtggttaggattcagcgct

SEQ ID NO: 9230 - DNA, 19 bp, Artificial Sequence
  Probe
agtggttaggattcggcgc

SEQ ID NO: 9231 - DNA, 20 bp, Artificial Sequence
  Probe
agtggttaggattcggcgct

SEQ ID NO: 9232 - DNA, 16 bp, Artificial Sequence
  Probe
agtggttagtactctg

SEQ ID NO: 9233 - DNA, 17 bp, Artificial Sequence
  Probe
agtggttagtactctgc

SEQ ID NO: 9234 - DNA, 19 bp, Artificial Sequence
  Probe
agtggttagtactctgcgt

SEQ ID NO: 9235 - DNA, 29 bp, Artificial Sequence
  Probe
agtgtagcttaacacaaagcacccaactt

SEQ ID NO: 9236 - DNA, 24 bp, Artificial Sequence
  Probe
agtgtagtggttatcacgttcgcc

SEQ ID NO: 9237 - DNA, 20 bp, Artificial Sequence
  Probe
agttaaagactttttctctg

SEQ ID NO: 9238 - DNA, 22 bp, Artificial Sequence
  Probe
agttaaagactttttctctgat

SEQ ID NO: 9239 - DNA, 21 bp, Artificial Sequence
  Probe
agttgacccgggttcgattcc

SEQ ID NO: 9240 - DNA, 24 bp, Artificial Sequence
  Probe
agttggtagagcggaggactgtag

SEQ ID NO: 9241 - DNA, 26 bp, Artificial Sequence
  Probe
agtttaaccaaaacatcagattgtga

SEQ ID NO: 9242 - DNA, 19 bp, Artificial Sequence
  Probe
ataacagctatccattggt

SEQ ID NO: 9243 - DNA, 15 bp, Artificial Sequence
  Probe
ataacccagaggtcg

SEQ ID NO: 9244 - DNA, 16 bp, Artificial Sequence
  Probe
ataacccagaggtcga

SEQ ID NO: 9245 - DNA, 17 bp, Artificial Sequence
  Probe
ataacccagaggtcgat

SEQ ID NO: 9246 - DNA, 18 bp, Artificial Sequence
  Probe
ataacccagaggtcgatg

SEQ ID NO: 9247 - DNA, 19 bp, Artificial Sequence
  Probe
ataacccagaggtcgatgg

SEQ ID NO: 9248 - DNA, 20 bp, Artificial Sequence
  Probe
ataacccagaggtcgatgga

SEQ ID NO: 9249 - DNA, 21 bp, Artificial Sequence
  Probe
ataacccagaggtcgatggat

SEQ ID NO: 9250 - DNA, 22 bp, Artificial Sequence
  Probe
ataacccagaggtcgatggatc

SEQ ID NO: 9251 - DNA, 24 bp, Artificial Sequence
  Probe
ataacccagaggtcgatggatcga

SEQ ID NO: 9252 - DNA, 25 bp, Artificial Sequence
  Probe
ataacccagaggtcgatggatcgaa

SEQ ID NO: 9253 - DNA, 26 bp, Artificial Sequence
  Probe
ataacccagaggtcgatggatcgaaa

SEQ ID NO: 9254 - DNA, 27 bp, Artificial Sequence
  Probe
ataacccagaggtcgatggatcgaaac

SEQ ID NO: 9255 - DNA, 28 bp, Artificial Sequence
  Probe
ataacccagaggtcgatggatcgaaacc

SEQ ID NO: 9256 - DNA, 29 bp, Artificial Sequence
  Probe
ataacccagaggtcgatggatcgaaacca

SEQ ID NO: 9257 - DNA, 20 bp, Artificial Sequence
  Probe
ataacgccaaggtcgcgggt

SEQ ID NO: 9258 - DNA, 26 bp, Artificial Sequence
  Probe
atagctcaggggtagagcatttgact

SEQ ID NO: 9259 - DNA, 27 bp, Artificial Sequence
  Probe
atagctcaggggtagagcatttgactg

SEQ ID NO: 9260 - DNA, 28 bp, Artificial Sequence
  Probe
atagctcaggggtagagcatttgactgc

SEQ ID NO: 9261 - DNA, 27 bp, Artificial Sequence
  Probe
atagctcagtgggtagagcatttgact

SEQ ID NO: 9262 - DNA, 29 bp, Artificial Sequence
  Probe
atagctcagtgggtagagcatttgactgc

SEQ ID NO: 9263 - DNA, 22 bp, Artificial Sequence
  Probe
atagctcagtggtagagcattt

SEQ ID NO: 9264 - DNA, 28 bp, Artificial Sequence
  Probe
atagctcagtggtagagcatttaactgt

SEQ ID NO: 9265 - DNA, 23 bp, Artificial Sequence
  Probe
atagctcagtggtagagcatttg

SEQ ID NO: 9266 - DNA, 24 bp, Artificial Sequence
  Probe
atagctcagtggtagagcatttga

SEQ ID NO: 9267 - DNA, 25 bp, Artificial Sequence
  Probe
atagctcagtggtagagcatttgac

SEQ ID NO: 9268 - DNA, 26 bp, Artificial Sequence
  Probe
atagctcagtggtagagcatttgact

SEQ ID NO: 9269 - DNA, 27 bp, Artificial Sequence
  Probe
atagctcagtggtagagcatttgactg

SEQ ID NO: 9270 - DNA, 28 bp, Artificial Sequence
  Probe
atagctcagtggtagagcatttgactgc

SEQ ID NO: 9271 - DNA, 29 bp, Artificial Sequence
  Probe
ataggtttggtcctagcctttctattagc

SEQ ID NO: 9272 - DNA, 18 bp, Artificial Sequence
  Probe
atagtggttagtactctg

SEQ ID NO: 9273 - DNA, 20 bp, Artificial Sequence
  Probe
atagtggttagtactctgcg

SEQ ID NO: 9274 - DNA, 21 bp, Artificial Sequence
  Probe
atagtggttagtactctgcgt

SEQ ID NO: 9275 - DNA, 22 bp, Artificial Sequence
  Probe
atagtggttagtactctgcgtt

SEQ ID NO: 9276 - DNA, 23 bp, Artificial Sequence
  Probe
atagtggttagtactctgcgttg

SEQ ID NO: 9277 - DNA, 24 bp, Artificial Sequence
  Probe
atagtggttagtactctgcgttgt

SEQ ID NO: 9278 - DNA, 29 bp, Artificial Sequence
  Probe
atatagtttaaccaaaacatcagattgtg

SEQ ID NO: 9279 - DNA, 15 bp, Artificial Sequence
  Probe
atatcattggtcgtg

SEQ ID NO: 9280 - DNA, 17 bp, Artificial Sequence
  Probe
atatcattggtcgtggt

SEQ ID NO: 9281 - DNA, 19 bp, Artificial Sequence
  Probe
atatcattggtcgtggttg

SEQ ID NO: 9282 - DNA, 20 bp, Artificial Sequence
  Probe
atatcattggtcgtggttgt

SEQ ID NO: 9283 - DNA, 21 bp, Artificial Sequence
  Probe
atatcattggtcgtggttgta

SEQ ID NO: 9284 - DNA, 22 bp, Artificial Sequence
  Probe
atatcattggtcgtggttgtag

SEQ ID NO: 9285 - DNA, 23 bp, Artificial Sequence
  Probe
atatcattggtcgtggttgtagt

SEQ ID NO: 9286 - DNA, 26 bp, Artificial Sequence
  Probe
atatcattggtcgtggttgtagtccg

SEQ ID NO: 9287 - DNA, 27 bp, Artificial Sequence
  Probe
atatcattggtcgtggttgtagtccgt

SEQ ID NO: 9288 - DNA, 28 bp, Artificial Sequence
  Probe
atatcattggtcgtggttgtagtccgtg

SEQ ID NO: 9289 - DNA, 29 bp, Artificial Sequence
  Probe
atatcattggtcgtggttgtagtccgtgc

SEQ ID NO: 9290 - DNA, 21 bp, Artificial Sequence
  Probe
atatccaaccttcagctatag

SEQ ID NO: 9291 - DNA, 22 bp, Artificial Sequence
  Probe
atatccaaccttcagctatagg

SEQ ID NO: 9292 - DNA, 23 bp, Artificial Sequence
  Probe
atatccaaccttcagctataggg

SEQ ID NO: 9293 - DNA, 26 bp, Artificial Sequence
  Probe
atatggtctagcggttaggattcctg

SEQ ID NO: 9294 - DNA, 19 bp, Artificial Sequence
  Probe
atcattggtcgtggttgta

SEQ ID NO: 9295 - DNA, 20 bp, Artificial Sequence
  Probe
atcattggtcgtggttgtag

SEQ ID NO: 9296 - DNA, 21 bp, Artificial Sequence
  Probe
atcattggtcgtggttgtagt

SEQ ID NO: 9297 - DNA, 23 bp, Artificial Sequence
  Probe
atcattggtcgtggttgtagtcc

SEQ ID NO: 9298 - DNA, 24 bp, Artificial Sequence
  Probe
atcattggtcgtggttgtagtccg

SEQ ID NO: 9299 - DNA, 25 bp, Artificial Sequence
  Probe
atcattggtcgtggttgtagtccgt

SEQ ID NO: 9300 - DNA, 26 bp, Artificial Sequence
  Probe
atcattggtcgtggttgtagtccgtg

SEQ ID NO: 9301 - DNA, 27 bp, Artificial Sequence
  Probe
atcattggtcgtggttgtagtccgtgc

SEQ ID NO: 9302 - DNA, 28 bp, Artificial Sequence
  Probe
atcattggtcgtggttgtagtccgtgcg

SEQ ID NO: 9303 - DNA, 29 bp, Artificial Sequence
  Probe
atcattggtcgtggttgtagtccgtgcga

SEQ ID NO: 9304 - DNA, 15 bp, Artificial Sequence
  Probe
atccattggtcttag

SEQ ID NO: 9305 - DNA, 17 bp, Artificial Sequence
  Probe
atcccaccgctgccaca

SEQ ID NO: 9306 - DNA, 18 bp, Artificial Sequence
  Probe
atcccaccgctgccacac

SEQ ID NO: 9307 - DNA, 17 bp, Artificial Sequence
  Probe
atcccaccgctgccagc

SEQ ID NO: 9308 - DNA, 15 bp, Artificial Sequence
  Probe
atcccactcctgaca

SEQ ID NO: 9309 - DNA, 18 bp, Artificial Sequence
  Probe
atcccagcggtgcctcaa

SEQ ID NO: 9310 - DNA, 18 bp, Artificial Sequence
  Probe
atcccagcggtgcctccg

SEQ ID NO: 9311 - DNA, 17 bp, Artificial Sequence
  Probe
atcccatcctcgtcgct

SEQ ID NO: 9312 - DNA, 17 bp, Artificial Sequence
  Probe
atcccatcctcgtcggc

SEQ ID NO: 9313 - DNA, 18 bp, Artificial Sequence
  Probe
atccccggcacctccacc

SEQ ID NO: 9314 - DNA, 19 bp, Artificial Sequence
  Probe
atccccggcacctccacca

SEQ ID NO: 9315 - DNA, 17 bp, Artificial Sequence
  Probe
atcccggacgagccccc

SEQ ID NO: 9316 - DNA, 18 bp, Artificial Sequence
  Probe
atcccggacgagccccct

SEQ ID NO: 9317 - DNA, 18 bp, Artificial Sequence
  Probe
atcccggacgagcccctc

SEQ ID NO: 9318 - DNA, 18 bp, Artificial Sequence
  Probe
atcccggacgagccctcc

SEQ ID NO: 9319 - DNA, 16 bp, Artificial Sequence
  Probe
atccggctcgaaggac

SEQ ID NO: 9320 - DNA, 17 bp, Artificial Sequence
  Probe
atccggctcgaaggacg

SEQ ID NO: 9321 - DNA, 18 bp, Artificial Sequence
  Probe
atccggctcgaaggacga

SEQ ID NO: 9322 - DNA, 19 bp, Artificial Sequence
  Probe
atccggctcgaaggacgaa

SEQ ID NO: 9323 - DNA, 20 bp, Artificial Sequence
  Probe
atccggctcgaaggacgaaa

SEQ ID NO: 9324 - DNA, 17 bp, Artificial Sequence
  Probe
atccggctcggaggacg

SEQ ID NO: 9325 - DNA, 17 bp, Artificial Sequence
  Probe
atccgggtgccccctca

SEQ ID NO: 9326 - DNA, 18 bp, Artificial Sequence
  Probe
atccgggtgccccctcaa

SEQ ID NO: 9327 - DNA, 17 bp, Artificial Sequence
  Probe
atccgggtgccccctcg

SEQ ID NO: 9328 - DNA, 17 bp, Artificial Sequence
  Probe
atccgggtgccccctct

SEQ ID NO: 9329 - DNA, 17 bp, Artificial Sequence
  Probe
atccgggtgccccctgc

SEQ ID NO: 9330 - DNA, 17 bp, Artificial Sequence
  Probe
atccgggtgcccccttc

SEQ ID NO: 9331 - DNA, 19 bp, Artificial Sequence
  Probe
atcctcgtcggccctgttt

SEQ ID NO: 9332 - DNA, 20 bp, Artificial Sequence
  Probe
atcctcgtcggccctgtttt

SEQ ID NO: 9333 - DNA, 17 bp, Artificial Sequence
  Probe
atcctgccgactacggc

SEQ ID NO: 9334 - DNA, 18 bp, Artificial Sequence
  Probe
atcctgccgactacggca

SEQ ID NO: 9335 - DNA, 17 bp, Artificial Sequence
  Probe
atcctgccgactacgtc

SEQ ID NO: 9336 - DNA, 18 bp, Artificial Sequence
  Probe
atcctgccgactacgtca

SEQ ID NO: 9337 - DNA, 19 bp, Artificial Sequence
  Probe
atcctgccgactacgtcat

SEQ ID NO: 9338 - DNA, 28 bp, Artificial Sequence
  Probe
atcggtgcatgggtggttcagtggtaga

SEQ ID NO: 9339 - DNA, 15 bp, Artificial Sequence
  Probe
atcgtatagtggtta

SEQ ID NO: 9340 - DNA, 23 bp, Artificial Sequence
  Probe
atcgtatagtggttagtactctg

SEQ ID NO: 9341 - DNA, 24 bp, Artificial Sequence
  Probe
atcgtatagtggttagtactctgc

SEQ ID NO: 9342 - DNA, 27 bp, Artificial Sequence
  Probe
atcgtatagtggttagtactctgcgtt

SEQ ID NO: 9343 - DNA, 28 bp, Artificial Sequence
  Probe
atcgtatagtggttagtactctgcgttg

SEQ ID NO: 9344 - DNA, 29 bp, Artificial Sequence
  Probe
atcgtatagtggttagtactctgcgttgt

SEQ ID NO: 9345 - DNA, 17 bp, Artificial Sequence
  Probe
atctcggtggaacctgc

SEQ ID NO: 9346 - DNA, 18 bp, Artificial Sequence
  Probe
atctcggtggaacctgca

SEQ ID NO: 9347 - DNA, 30 bp, Artificial Sequence
  Probe
atctgaaggtcgtgagttcgatcctcacac

SEQ ID NO: 9348 - DNA, 27 bp, Artificial Sequence
  Probe
atgatcgtatagtggttagtactctgc

SEQ ID NO: 9349 - DNA, 30 bp, Artificial Sequence; identical to SEQ ID NO: 3818
  Probe

SEQ ID NO: 9350 - DNA, 24 bp, Artificial Sequence
  Probe
atggataacgcgtctgactacgga

SEQ ID NO: 9351 - DNA, 20 bp, Artificial Sequence
  Probe
atggataaggcgtctgactt

SEQ ID NO: 9352 - DNA, 20 bp, Artificial Sequence
  Probe
atggataaggcgtctgattc

SEQ ID NO: 9353 - DNA, 28 bp, Artificial Sequence
  Probe
atggcacatgcagcgcaagtaggtctac

SEQ ID NO: 9354 - DNA, 25 bp, Artificial Sequence
  Probe
atggctgagtgaagcattggactgt

SEQ ID NO: 9355 - DNA, 26 bp, Artificial Sequence
  Probe
atggctgagtgaagcattggactgta

SEQ ID NO: 9356 - DNA, 27 bp, Artificial Sequence
  Probe
atggctgagtgaagcattggactgtaa

SEQ ID NO: 9357 - DNA, 25 bp, Artificial Sequence
  Probe
atgggtggttcagtggtagaattct

SEQ ID NO: 9358 - DNA, 26 bp, Artificial Sequence
  Probe
atgggtggttcagtggtagaattctc

SEQ ID NO: 9359 - DNA, 27 bp, Artificial Sequence
  Probe
atgggtggttcagtggtagaattctcg

SEQ ID NO: 9360 - DNA, 28 bp, Artificial Sequence
  Probe
atgggtggttcagtggtagaattctcgc

SEQ ID NO: 9361 - DNA, 29 bp, Artificial Sequence
  Probe
atgggtggttcagtggtagaattctcgcc

SEQ ID NO: 9362 - DNA, 30 bp, Artificial Sequence; identical to SEQ ID NO: 403
  Probe

SEQ ID NO: 9363 - DNA, 19 bp, Artificial Sequence
  Probe
atggtaagcaccctggact

SEQ ID NO: 9364 - DNA, 19 bp, Artificial Sequence
  Probe
atggtaagcactctggact

SEQ ID NO: 9365 - DNA, 19 bp, Artificial Sequence
  Probe
atggtcagcactctggact

SEQ ID NO: 9366 - DNA, 20 bp, Artificial Sequence
  Probe
atggtcagcactctggactc

SEQ ID NO: 9367 - DNA, 24 bp, Artificial Sequence
  Probe
atggtctagcggttaggattcctg

SEQ ID NO: 9368 - DNA, 25 bp, Artificial Sequence
  Probe
atggtctagcggttaggattcctgg

SEQ ID NO: 9369 - DNA, 19 bp, Artificial Sequence
  Probe
atggtgagcaccctggact

SEQ ID NO: 9370 - DNA, 19 bp, Artificial Sequence
  Probe
atggtgagcactctggact

SEQ ID NO: 9371 - DNA, 20 bp, Artificial Sequence
  Probe
atggtgagcactctggactc

SEQ ID NO: 9372 - DNA, 19 bp, Artificial Sequence
  Probe
atggtgagcactttggact

SEQ ID NO: 9373 - DNA, 28 bp, Artificial Sequence
  Probe
atggtggagttaaagactttttctctga

SEQ ID NO: 9374 - DNA, 29 bp, Artificial Sequence
  Probe
atggtggagttaaagactttttctctgat

SEQ ID NO: 9375 - DNA, 24 bp, Artificial Sequence
  Probe
atggtggttcagtggtagaattct

SEQ ID NO: 9376 - DNA, 25 bp, Artificial Sequence
  Probe
atggtggttcagtggtagaattctc

SEQ ID NO: 9377 - DNA, 26 bp, Artificial Sequence
  Probe
atggtggttcagtggtagaattctcg

SEQ ID NO: 9378 - DNA, 27 bp, Artificial Sequence
  Probe
atggtggttcagtggtagaattctcgc

SEQ ID NO: 9379 - DNA, 29 bp, Artificial Sequence
  Probe
atggtggttcagtggtagaattctcgcct

SEQ ID NO: 9380 - DNA, 24 bp, Artificial Sequence
  Probe
atggtgtaatggttagcactctgg

SEQ ID NO: 9381 - DNA, 26 bp, Artificial Sequence
  Probe
atggtgtaatggttagcactctggac

SEQ ID NO: 9382 - DNA, 28 bp, Artificial Sequence
  Probe
atggtgtaatggttagcactctggactc

SEQ ID NO: 9383 - DNA, 29 bp, Artificial Sequence
  Probe
atggtgtaatggttagcactctggactct

SEQ ID NO: 9384 - DNA, 29 bp, Artificial Sequence
  Probe
atggtgtaatggttagcactctggacttt

SEQ ID NO: 9385 - DNA, 15 bp, Artificial Sequence
  Probe
atggttagcactctg

SEQ ID NO: 9386 - DNA, 16 bp, Artificial Sequence
  Probe
atggttagcactctgg

SEQ ID NO: 9387 - DNA, 17 bp, Artificial Sequence
  Probe
atggttagcactctgga

SEQ ID NO: 9388 - DNA, 18 bp, Artificial Sequence
  Probe
atggttagcactctggac

SEQ ID NO: 9389 - DNA, 19 bp, Artificial Sequence
  Probe
atggttagcactctggact

SEQ ID NO: 9390 - DNA, 20 bp, Artificial Sequence
  Probe
atggttagcactctggactc

SEQ ID NO: 9391 - DNA, 21 bp, Artificial Sequence
  Probe
atggttagcactctggactct

SEQ ID NO: 9392 - DNA, 22 bp, Artificial Sequence
  Probe
atggttagcactctggactctg

SEQ ID NO: 9393 - DNA, 23 bp, Artificial Sequence
  Probe
atggttagcactctggactctga

SEQ ID NO: 9394 - DNA, 24 bp, Artificial Sequence
  Probe
atggttagcactctggactctgaa

SEQ ID NO: 9395 - DNA, 25 bp, Artificial Sequence
  Probe
atggttagcactctggactctgaat

SEQ ID NO: 9396 - DNA, 26 bp, Artificial Sequence
  Probe
atggttagcactctggactctgaatc

SEQ ID NO: 9397 - DNA, 27 bp, Artificial Sequence
  Probe
atggttagcactctggactctgaatcc

SEQ ID NO: 9398 - DNA, 28 bp, Artificial Sequence
  Probe
atggttagcactctggactctgaatcca

SEQ ID NO: 9399 - DNA, 30 bp, Artificial Sequence
  Probe
atggttagcactctggactctgaatccagc

SEQ ID NO: 9400 - DNA, 22 bp, Artificial Sequence
  Probe
atggttagcactctggactttg

SEQ ID NO: 9401 - DNA, 23 bp, Artificial Sequence
  Probe
atggttagcactctggactttga

SEQ ID NO: 9402 - DNA, 26 bp, Artificial Sequence
  Probe
atggttagcactctggactttgaatc

SEQ ID NO: 9403 - DNA, 19 bp, Artificial Sequence
  Probe
atggttagcactctgggct

SEQ ID NO: 9404 - DNA, 20 bp, Artificial Sequence
  Probe
atggttagcactctgggctt

SEQ ID NO: 9405 - DNA, 30 bp, Artificial Sequence
  Probe
atggtttttcatatcattggtcgtggttgt

SEQ ID NO: 9406 - DNA, 23 bp, Artificial Sequence
  Probe
atgtcgttagtctaggctgtcag

SEQ ID NO: 9407 - DNA, 24 bp, Artificial Sequence
  Probe
atgtcgttagtctaggctgtcagc

SEQ ID NO: 9408 - DNA, 25 bp, Artificial Sequence
  Probe
atgtcgttagtctaggctgtcagct

SEQ ID NO: 9409 - DNA, 30 bp, Artificial Sequence
  Probe
atgtcgttagtctaggctgtcagctcttcc

SEQ ID NO: 9410 - DNA, 18 bp, Artificial Sequence
  Probe
atgtttagacgggctcac

SEQ ID NO: 9411 - DNA, 29 bp, Artificial Sequence
  Probe
attaagagaaccaacacctctttacagtg

SEQ ID NO: 9412 - DNA, 22 bp, Artificial Sequence
  Probe
attaaggctccagtctcttcgg

SEQ ID NO: 9413 - DNA, 20 bp, Artificial Sequence
  Probe
attaatcccctggcccaacc

SEQ ID NO: 9414 - DNA, 24 bp, Artificial Sequence
  Probe
attaatcccctggcccaacccgtc

SEQ ID NO: 9415 - DNA, 30 bp, Artificial Sequence
  Probe
attcaaaggttccgggttcgagtcccggcg

SEQ ID NO: 9416 - DNA, 19 bp, Artificial Sequence
  Probe
attccaggttcgactcctg

SEQ ID NO: 9417 - DNA, 21 bp, Artificial Sequence
  Probe
attccaggttcgactcctggc

SEQ ID NO: 9418 - DNA, 19 bp, Artificial Sequence
  Probe
attcccggtcagggaacca

SEQ ID NO: 9419 - DNA, 17 bp, Artificial Sequence
  Probe
attccggctcgaaggac

SEQ ID NO: 9420 - DNA, 18 bp, Artificial Sequence
  Probe
attccggctcgaaggact

SEQ ID NO: 9421 - DNA, 30 bp, Artificial Sequence
  Probe
attccggctcgaaggacttcgtctgtaatt

SEQ ID NO: 9422 - DNA, 18 bp, Artificial Sequence
  Probe
attccggctcgaaggagc

SEQ ID NO: 9423 - DNA, 30 bp, Artificial Sequence
  Probe
attcttgcgacccgggttcgattcccgggc

SEQ ID NO: 9424 - DNA, 15 bp, Artificial Sequence
  Probe
attggtcgtggttgt

SEQ ID NO: 9425 - DNA, 16 bp, Artificial Sequence
  Probe
attggtcgtggttgta

SEQ ID NO: 9426 - DNA, 17 bp, Artificial Sequence
  Probe
attggtcgtggttgtag

SEQ ID NO: 9427 - DNA, 22 bp, Artificial Sequence
  Probe
attggtcgtggttgtagtccgt

SEQ ID NO: 9428 - DNA, 29 bp, Artificial Sequence
  Probe
attggtcgtggttgtagtccgtgcgagaa

SEQ ID NO: 9429 - DNA, 30 bp, Artificial Sequence
  Probe
attggtcgtggttgtagtccgtgcgagaat

SEQ ID NO: 9430 - DNA, 20 bp, Artificial Sequence
  Probe
attggtggttcagtggtaga

SEQ ID NO: 9431 - DNA, 21 bp, Artificial Sequence
  Probe
attggtggttcagtggtagaa

SEQ ID NO: 9432 - DNA, 25 bp, Artificial Sequence
  Probe
attggtggttcagtggtagaattct

SEQ ID NO: 9433 - DNA, 26 bp, Artificial Sequence
  Probe
attggtggttcagtggtagaattctc

SEQ ID NO: 9434 - DNA, 27 bp, Artificial Sequence
  Probe
attggtggttcagtggtagaattctcg

SEQ ID NO: 9435 - DNA, 28 bp, Artificial Sequence
  Probe
attggtggttcagtggtagaattctcgc

SEQ ID NO: 9436 - DNA, 29 bp, Artificial Sequence
  Probe
attggtggttcagtggtagaattctcgcc

SEQ ID NO: 9437 - DNA, 30 bp, Artificial Sequence; identical to SEQ ID NO: 3916
  Probe

SEQ ID NO: 9438 - DNA, 15 bp, Artificial Sequence
  Probe
attgtgaatctgaca

SEQ ID NO: 9439 - DNA, 17 bp, Artificial Sequence
  Probe
attgtgaatctgacaac

SEQ ID NO: 9440 - DNA, 18 bp, Artificial Sequence
  Probe
attgtgaatctgacaaca

SEQ ID NO: 9441 - DNA, 19 bp, Artificial Sequence
  Probe
attgtgaatctgacaacag

SEQ ID NO: 9442 - DNA, 20 bp, Artificial Sequence
  Probe
attgtgaatctgacaacaga

SEQ ID NO: 9443 - DNA, 21 bp, Artificial Sequence
  Probe
attgtgaatctgacaacagag

SEQ ID NO: 9444 - DNA, 22 bp, Artificial Sequence
  Probe
attgtgaatctgacaacagagg

SEQ ID NO: 9445 - DNA, 23 bp, Artificial Sequence
  Probe
attgtgaatctgacaacagaggc

SEQ ID NO: 9446 - DNA, 24 bp, Artificial Sequence
  Probe
attgtgaatctgacaacagaggct

SEQ ID NO: 9447 - DNA, 25 bp, Artificial Sequence
  Probe
attgtgaatctgacaacagaggctt

SEQ ID NO: 9448 - DNA, 26 bp, Artificial Sequence
  Probe
attgtgaatctgacaacagaggctta

SEQ ID NO: 9449 - DNA, 28 bp, Artificial Sequence
  Probe
attgtgaatctgacaacagaggcttacg

SEQ ID NO: 9450 - DNA, 29 bp, Artificial Sequence
  Probe
attgtgaatctgacaacagaggcttacga

SEQ ID NO: 9451 - DNA, 30 bp, Artificial Sequence
  Probe
attgtgaatctgacaacagaggcttacgac

SEQ ID NO: 9452 - DNA, 22 bp, Artificial Sequence
  Probe
atttaggctccagtctcttcgg

SEQ ID NO: 9453 - DNA, 19 bp, Artificial Sequence
  Probe
atttcaacttaacttgacc

SEQ ID NO: 9454 - DNA, 20 bp, Artificial Sequence
  Probe
atttcaacttaacttgaccg

SEQ ID NO: 9455 - DNA, 22 bp, Artificial Sequence
  Probe
atttcaacttaacttgaccgct

SEQ ID NO: 9456 - DNA, 25 bp, Artificial Sequence
  Probe
atttcaacttaacttgaccgctctg

SEQ ID NO: 9457 - DNA, 26 bp, Artificial Sequence
  Probe
atttcaacttaacttgaccgctctga

SEQ ID NO: 9458 - DNA, 27 bp, Artificial Sequence
  Probe
atttcaacttaacttgaccgctctgag

SEQ ID NO: 9459 - DNA, 28 bp, Artificial Sequence
  Probe
atttcaacttaacttgaccgctctgagc

SEQ ID NO: 9460 - DNA, 25 bp, Artificial Sequence
  Probe
atttgtggtccagtggtagaattct

SEQ ID NO: 9461 - DNA, 26 bp, Artificial Sequence
  Probe
atttgtggtccagtggtagaattctc

SEQ ID NO: 9462 - DNA, 21 bp, Artificial Sequence
  Probe
caaaaaggattagactgaacc

SEQ ID NO: 9463 - DNA, 22 bp, Artificial Sequence
  Probe
caaaaaggattagactgaaccg

SEQ ID NO: 9464 - DNA, 26 bp, Artificial Sequence
  Probe
caaaacatcagattgtgaatctgaca

SEQ ID NO: 9465 - DNA, 29 bp, Artificial Sequence
  Probe
caaaacatcagattgtgaatctgacaaca

SEQ ID NO: 9466 - DNA, 21 bp, Artificial Sequence
  Probe
caaatcccggacgagcccaca

SEQ ID NO: 9467 - DNA, 20 bp, Artificial Sequence
  Probe
caaatcccggacgagccccc

SEQ ID NO: 9468 - DNA, 21 bp, Artificial Sequence
  Probe
caaatcccggacgagccccct

SEQ ID NO: 9469 - DNA, 21 bp, Artificial Sequence
  Probe
caaatcccggacgagccctca

SEQ ID NO: 9470 - DNA, 19 bp, Artificial Sequence
  Probe
caaatctcggtggaacctg

SEQ ID NO: 9471 - DNA, 21 bp, Artificial Sequence
  Probe
caaatctcggtggaacctgca

SEQ ID NO: 9472 - DNA, 18 bp, Artificial Sequence
  Probe
caacatggctttctcaac

SEQ ID NO: 9473 - DNA, 15 bp, Artificial Sequence
  Probe
caacttaacttgacc

SEQ ID NO: 9474 - DNA, 16 bp, Artificial Sequence
  Probe
caacttaacttgaccg

SEQ ID NO: 9475 - DNA, 18 bp, Artificial Sequence
  Probe
caacttaacttgaccgct

SEQ ID NO: 9476 - DNA, 19 bp, Artificial Sequence
  Probe
caacttaacttgaccgctc

SEQ ID NO: 9477 - DNA, 20 bp, Artificial Sequence
  Probe
caacttaacttgaccgctct

SEQ ID NO: 9478 - DNA, 21 bp, Artificial Sequence
  Probe
caacttaacttgaccgctctg

SEQ ID NO: 9479 - DNA, 22 bp, Artificial Sequence
  Probe
caacttaacttgaccgctctga

SEQ ID NO: 9480 - DNA, 23 bp, Artificial Sequence
  Probe
caacttaacttgaccgctctgag

SEQ ID NO: 9481 - DNA, 24 bp, Artificial Sequence
  Probe
caacttaacttgaccgctctgagc

SEQ ID NO: 9482 - DNA, 19 bp, Artificial Sequence
  Probe
caagaactgctaactcatg

SEQ ID NO: 9483 - DNA, 21 bp, Artificial Sequence
  Probe
caagaactgctaactcatgcc

SEQ ID NO: 9484 - DNA, 21 bp, Artificial Sequence
  Probe
caagtccctgttcgggcggca

SEQ ID NO: 9485 - DNA, 21 bp, Artificial Sequence
  Probe
caatccccggcacctccacca

SEQ ID NO: 9486 - DNA, 21 bp, Artificial Sequence
  Probe
caatggataacgcgtctgact

SEQ ID NO: 9487 - DNA, 27 bp, Artificial Sequence
  Probe
caatggtggttcagtggtagaattctc

SEQ ID NO: 9488 - DNA, 28 bp, Artificial Sequence
  Probe
caatggtggttcagtggtagaattctcg

SEQ ID NO: 9489 - DNA, 29 bp, Artificial Sequence
  Probe
caatggtggttcagtggtagaattctcgc

SEQ ID NO: 9490 - DNA, 30 bp, Artificial Sequence
  Probe
caatggtggttcagtggtagaattctcgcc

SEQ ID NO: 9491 - DNA, 21 bp, Artificial Sequence
  Probe
caattcccggtcagggaacca

SEQ ID NO: 9492 - DNA, 18 bp, Artificial Sequence
  Probe
cacaagaactgctaactc

SEQ ID NO: 9493 - DNA, 21 bp, Artificial Sequence
  Probe
cacaagaactgctaactcatg

SEQ ID NO: 9494 - DNA, 22 bp, Artificial Sequence
  Probe
cacaagaactgctaactcatgc

SEQ ID NO: 9495 - DNA, 20 bp, Artificial Sequence
  Probe
cacacggggcacaataattt

SEQ ID NO: 9496 - DNA, 27 bp, Artificial Sequence
  Probe
cacatggtctagcggttaggattcctg

SEQ ID NO: 9497 - DNA, 28 bp, Artificial Sequence
  Probe
cacatggtctagcggttaggattcctgg

SEQ ID NO: 9498 - DNA, 19 bp, Artificial Sequence
  Probe
caccgccgcggcccgggtt

SEQ ID NO: 9499 - DNA, 20 bp, Artificial Sequence
  Probe
caccgccgcggcccgggttc

SEQ ID NO: 9500 - DNA, 30 bp, Artificial Sequence
  Probe
caccgccgcggcccgggttcgattcccggt

SEQ ID NO: 9501 - DNA, 21 bp, Artificial Sequence
  Probe
cacctcagaaggtctcacttt

SEQ ID NO: 9502 - DNA, 18 bp, Artificial Sequence
  Probe
cacggggcacaataattt

SEQ ID NO: 9503 - DNA, 15 bp, Artificial Sequence
  Probe
cactctggactctga

SEQ ID NO: 9504 - DNA, 16 bp, Artificial Sequence
  Probe
cactctggactctgaa

SEQ ID NO: 9505 - DNA, 17 bp, Artificial Sequence
  Probe
cactctggactctgaat

SEQ ID NO: 9506 - DNA, 18 bp, Artificial Sequence
  Probe
cactctggactctgaatc

SEQ ID NO: 9507 - DNA, 19 bp, Artificial Sequence
  Probe
cactctggactctgaatcc

SEQ ID NO: 9508 - DNA, 20 bp, Artificial Sequence
  Probe
cactctggactctgaatcca

SEQ ID NO: 9509 - DNA, 21 bp, Artificial Sequence
  Probe
cactctggactctgaatccag

SEQ ID NO: 9510 - DNA, 22 bp, Artificial Sequence
  Probe
cactctggactctgaatccagc

SEQ ID NO: 9511 - DNA, 23 bp, Artificial Sequence
  Probe
cactctggactctgaatccagcg

SEQ ID NO: 9512 - DNA, 30 bp, Artificial Sequence; identical to SEQ ID NO: 4174
  Probe

SEQ ID NO: 9513 - DNA, 21 bp, Artificial Sequence
  Probe
cactctggactctgaatccgg

SEQ ID NO: 9514 - DNA, 17 bp, Artificial Sequence
  Probe
cactctggactttgaat

SEQ ID NO: 9515 - DNA, 18 bp, Artificial Sequence
  Probe
cactctggactttgaatc

SEQ ID NO: 9516 - DNA, 19 bp, Artificial Sequence
  Probe
cactctggactttgaatcc

SEQ ID NO: 9517 - DNA, 20 bp, Artificial Sequence
  Probe
cactgaaaatgtttagacgg

SEQ ID NO: 9518 - DNA, 22 bp, Artificial Sequence
  Probe
cactgaaaatgtttagacgggc

SEQ ID NO: 9519 - DNA, 23 bp, Artificial Sequence
  Probe
cactgaaaatgtttagacgggct

SEQ ID NO: 9520 - DNA, 24 bp, Artificial Sequence
  Probe
cactgaaaatgtttagacgggctc

SEQ ID NO: 9521 - DNA, 25 bp, Artificial Sequence
  Probe
cactgaaaatgtttagacgggctca

SEQ ID NO: 9522 - DNA, 27 bp, Artificial Sequence
  Probe
cactgaaaatgtttagacgggctcaca

SEQ ID NO: 9523 - DNA, 15 bp, Artificial Sequence
  Probe
cactgtaaagctaac

SEQ ID NO: 9524 - DNA, 16 bp, Artificial Sequence
  Probe
cactgtaaagctaact

SEQ ID NO: 9525 - DNA, 17 bp, Artificial Sequence
  Probe
cactgtaaagctaactt

SEQ ID NO: 9526 - DNA, 18 bp, Artificial Sequence
  Probe
cactgtaaagctaactta

SEQ ID NO: 9527 - DNA, 19 bp, Artificial Sequence
  Probe
cactgtaaagctaacttag

SEQ ID NO: 9528 - DNA, 22 bp, Artificial Sequence
  Probe
cactgtaaagctaacttagcat

SEQ ID NO: 9529 - DNA, 23 bp, Artificial Sequence
  Probe
cactgtaaagctaacttagcatt

SEQ ID NO: 9530 - DNA, 24 bp, Artificial Sequence
  Probe
cactgtaaagctaacttagcatta

SEQ ID NO: 9531 - DNA, 25 bp, Artificial Sequence
  Probe
cactgtaaagctaacttagcattaa

SEQ ID NO: 9532 - DNA, 26 bp, Artificial Sequence
  Probe
cactgtaaagctaacttagcattaac

SEQ ID NO: 9533 - DNA, 27 bp, Artificial Sequence
  Probe
cactgtaaagctaacttagcattaacc

SEQ ID NO: 9534 - DNA, 28 bp, Artificial Sequence
  Probe
cactgtaaagctaacttagcattaacct

SEQ ID NO: 9535 - DNA, 29 bp, Artificial Sequence
  Probe
cactgtaaagctaacttagcattaacctt

SEQ ID NO: 9536 - DNA, 30 bp, Artificial Sequence; identical to SEQ ID NO: 493
  Probe

SEQ ID NO: 9537 - DNA, 30 bp, Artificial Sequence; identical to SEQ ID NO: 4195
  Probe

SEQ ID NO: 9538 - DNA, 30 bp, Artificial Sequence
  Probe
cagaagattccaggttcgactcctggctgg

SEQ ID NO: 9539 - DNA, 30 bp, Artificial Sequence
  Probe
cagaagattgagggttcgagtcccttcgtg

SEQ ID NO: 9540 - DNA, 30 bp, Artificial Sequence
  Probe
cagaagattgcaggttcgagtcctgccgcg

SEQ ID NO: 9541 - DNA, 29 bp, Artificial Sequence
  Probe
cagaaggtcctgggttcgagccccagtgg

SEQ ID NO: 9542 - DNA, 20 bp, Artificial Sequence
  Probe
cagagaatagtttaaattag

SEQ ID NO: 9543 - DNA, 21 bp, Artificial Sequence
  Probe
cagagaatagtttaaattaga

SEQ ID NO: 9544 - DNA, 22 bp, Artificial Sequence
  Probe
cagagaatagtttaaattagaa

SEQ ID NO: 9545 - DNA, 30 bp, Artificial Sequence; identical to SEQ ID NO: 519
  Probe

SEQ ID NO: 9546 - DNA, 20 bp, Artificial Sequence
  Probe
cagaggtcgatggatcgaaa

SEQ ID NO: 9547 - DNA, 23 bp, Artificial Sequence
  Probe
cagaggtcgatggatcgaaacca

SEQ ID NO: 9548 - DNA, 29 bp, Artificial Sequence
  Probe
cagagtggcgcagcggaagcgtgctgggc

SEQ ID NO: 9549 - DNA, 19 bp, Artificial Sequence
  Probe
cagagtgtagcttaacaca

SEQ ID NO: 9550 - DNA, 23 bp, Artificial Sequence
  Probe
cagagtgtagcttaacacaaagc

SEQ ID NO: 9551 - DNA, 24 bp, Artificial Sequence
  Probe
cagagtgtagcttaacacaaagca

SEQ ID NO: 9552 - DNA, 26 bp, Artificial Sequence
  Probe
cagagtgtagcttaacacaaagcacc

SEQ ID NO: 9553 - DNA, 27 bp, Artificial Sequence
  Probe
cagagtgtagcttaacacaaagcaccc

SEQ ID NO: 9554 - DNA, 28 bp, Artificial Sequence
  Probe
cagagtgtagcttaacacaaagcaccca

SEQ ID NO: 9555 - DNA, 30 bp, Artificial Sequence; identical to SEQ ID NO: 4262
  Probe

SEQ ID NO: 9556 - DNA, 17 bp, Artificial Sequence
  Probe
cagattgtgaatctgac

SEQ ID NO: 9557 - DNA, 18 bp, Artificial Sequence
  Probe
cagattgtgaatctgaca

SEQ ID NO: 9558 - DNA, 20 bp, Artificial Sequence
  Probe
cagattgtgaatctgacaac

SEQ ID NO: 9559 - DNA, 21 bp, Artificial Sequence
  Probe
cagattgtgaatctgacaaca

SEQ ID NO: 9560 - DNA, 30 bp, Artificial Sequence
  Probe
caggagatcctgggttcgaatcccagcggg

SEQ ID NO: 9561 - DNA, 30 bp, Artificial Sequence
  Probe
caggagatcctgggttcgaatcccagcggt

SEQ ID NO: 9562 - DNA, 30 bp, Artificial Sequence
  Probe
caggcggcccgggttcgactcccggtgtgg

SEQ ID NO: 9563 - DNA, 22 bp, Artificial Sequence
  Probe
cagggttcaagtccctgttcgg

SEQ ID NO: 9564 - DNA, 23 bp, Artificial Sequence
  Probe
cagggttcaagtccctgttcggg

SEQ ID NO: 9565 - DNA, 24 bp, Artificial Sequence
  Probe
cagggttcaagtccctgttcgggc

SEQ ID NO: 9566 - DNA, 25 bp, Artificial Sequence
  Probe
cagggttcaagtccctgttcgggcg

SEQ ID NO: 9567 - DNA, 28 bp, Artificial Sequence
  Probe
cagggttcaagtccctgttcgggcggca

SEQ ID NO: 9568 - DNA, 16 bp, Artificial Sequence
  Probe
caggtcgcagtctccc

SEQ ID NO: 9569 - DNA, 24 bp, Artificial Sequence
  Probe
caggttcgactcctggctggctcg

SEQ ID NO: 9570 - DNA, 16 bp, Artificial Sequence
  Probe
cagtcggtagagcatc

SEQ ID NO: 9571 - DNA, 17 bp, Artificial Sequence
  Probe
cagtcggtagagcatca

SEQ ID NO: 9572 - DNA, 18 bp, Artificial Sequence
  Probe
cagtcggtagagcatcag

SEQ ID NO: 9573 - DNA, 19 bp, Artificial Sequence
  Probe
cagtcggtagagcatcaga

SEQ ID NO: 9574 - DNA, 16 bp, Artificial Sequence
  Probe
cagtcggtagagcatg

SEQ ID NO: 9575 - DNA, 17 bp, Artificial Sequence
  Probe
cagtcggtagagcatga

SEQ ID NO: 9576 - DNA, 18 bp, Artificial Sequence
  Probe
cagtcggtagagcatgag

SEQ ID NO: 9577 - DNA, 19 bp, Artificial Sequence
  Probe
cagtcggtagagcatgaga

SEQ ID NO: 9578 - DNA, 20 bp, Artificial Sequence
  Probe
cagtcggtagagcatgagac

SEQ ID NO: 9579 - DNA, 21 bp, Artificial Sequence
  Probe
cagtcggtagagcatgagact

SEQ ID NO: 9580 - DNA, 17 bp, Artificial Sequence
  Probe
cagtcggtagagcatgg

SEQ ID NO: 9581 - DNA, 20 bp, Artificial Sequence
  Probe
cagtcggtagagcatgggac

SEQ ID NO: 9582 - DNA, 21 bp, Artificial Sequence
  Probe
cagtcggtagagcatgggact

SEQ ID NO: 9583 - DNA, 15 bp, Artificial Sequence
  Probe
cagtggtagaattct

SEQ ID NO: 9584 - DNA, 16 bp, Artificial Sequence
  Probe
cagtggtagaattctc

SEQ ID NO: 9585 - DNA, 17 bp, Artificial Sequence
  Probe
cagtggtagaattctcg

SEQ ID NO: 9586 - DNA, 18 bp, Artificial Sequence
  Probe
cagtggtagaattctcgc

SEQ ID NO: 9587 - DNA, 19 bp, Artificial Sequence
  Probe
cagtggtagaattctcgcc

SEQ ID NO: 9588 - DNA, 20 bp, Artificial Sequence
  Probe
cagtggtagaattctcgcct

SEQ ID NO: 9589 - DNA, 21 bp, Artificial Sequence
  Probe
cagtggtagaattctcgcctc

SEQ ID NO: 9590 - DNA, 22 bp, Artificial Sequence
  Probe
cagtggtagaattctcgcctcc

SEQ ID NO: 9591 - DNA, 21 bp, Artificial Sequence
  Probe
cagtggtagaattctcgcctg

SEQ ID NO: 9592 - DNA, 22 bp, Artificial Sequence
  Probe
cagtggtagaattctcgcctgc

SEQ ID NO: 9593 - DNA, 23 bp, Artificial Sequence
  Probe
cagtggtagaattctcgcctgcc

SEQ ID NO: 9594 - DNA, 22 bp, Artificial Sequence
  Probe
cagtggtagaattcttgcctgc

SEQ ID NO: 9595 - DNA, 15 bp, Artificial Sequence
  Probe
cagtggtagagcatt

SEQ ID NO: 9596 - DNA, 17 bp, Artificial Sequence
  Probe
cagtggtagagcatttg

SEQ ID NO: 9597 - DNA, 18 bp, Artificial Sequence
  Probe
cagtggtagagcatttga

SEQ ID NO: 9598 - DNA, 19 bp, Artificial Sequence
  Probe
cagtggtagagcatttgac

SEQ ID NO: 9599 - DNA, 20 bp, Artificial Sequence
  Probe
cagtggtagagcatttgact

SEQ ID NO: 9600 - DNA, 21 bp, Artificial Sequence
  Probe
cagtggtagagcatttgactg

SEQ ID NO: 9601 - DNA, 22 bp, Artificial Sequence
  Probe
cagtggtagagcatttgactgc

SEQ ID NO: 9602 - DNA, 16 bp, Artificial Sequence
  Probe
cagtggtagagcgcat

SEQ ID NO: 9603 - DNA, 22 bp, Artificial Sequence
  Probe
cagttgacccgggttcgattcc

SEQ ID NO: 9604 - DNA, 30 bp, Artificial Sequence
  Probe
cagttgacccgggttcgattcccggccaac

SEQ ID NO: 9605 - DNA, 25 bp, Artificial Sequence
  Probe
cagttggtagagcggaggactgtag

SEQ ID NO: 9606 - DNA, 17 bp, Artificial Sequence
  Probe
cataacccagaggtcga

SEQ ID NO: 9607 - DNA, 19 bp, Artificial Sequence
  Probe
cataacccagaggtcgatg

SEQ ID NO: 9608 - DNA, 20 bp, Artificial Sequence
  Probe
cataacccagaggtcgatgg

SEQ ID NO: 9609 - DNA, 21 bp, Artificial Sequence
  Probe
cataacccagaggtcgatgga

SEQ ID NO: 9610 - DNA, 22 bp, Artificial Sequence
  Probe
cataacccagaggtcgatggat

SEQ ID NO: 9611 - DNA, 23 bp, Artificial Sequence
  Probe
cataacccagaggtcgatggatc

SEQ ID NO: 9612 - DNA, 24 bp, Artificial Sequence
  Probe
cataacccagaggtcgatggatcg

SEQ ID NO: 9613 - DNA, 21 bp, Artificial Sequence
  Probe
cataatctgaaggtcctgagt

SEQ ID NO: 9614 - DNA, 21 bp, Artificial Sequence
  Probe
cataatctgaaggtcgtgagt

SEQ ID NO: 9615 - DNA, 23 bp, Artificial Sequence
  Probe
catatcattggtcgtggttgtag

SEQ ID NO: 9616 - DNA, 25 bp, Artificial Sequence
  Probe
catatcattggtcgtggttgtagtc

SEQ ID NO: 9617 - DNA, 26 bp, Artificial Sequence
  Probe
catatcattggtcgtggttgtagtcc

SEQ ID NO: 9618 - DNA, 29 bp, Artificial Sequence
  Probe
catatcattggtcgtggttgtagtccgtg

SEQ ID NO: 9619 - DNA, 30 bp, Artificial Sequence
  Probe
catatcattggtcgtggttgtagtccgtgc

SEQ ID NO: 9620 - DNA, 21 bp, Artificial Sequence
  Probe
catcagattgtgaatctgaca

SEQ ID NO: 9621 - DNA, 24 bp, Artificial Sequence
  Probe
catcagattgtgaatctgacaaca

SEQ ID NO: 9622 - DNA, 20 bp, Artificial Sequence
  Probe
catcctcgtcggccctgttt

SEQ ID NO: 9623 - DNA, 21 bp, Artificial Sequence
  Probe
catcctcgtcggccctgtttt

SEQ ID NO: 9624 - DNA, 26 bp, Artificial Sequence
  Probe
catgcccccatgtctaacaacatggc

SEQ ID NO: 9625 - DNA, 27 bp, Artificial Sequence
  Probe
catgcccccatgtctaacaacatggct

SEQ ID NO: 9626 - DNA, 30 bp, Artificial Sequence; identical to SEQ ID NO: 4433
  Probe

SEQ ID NO: 9627 - DNA, 26 bp, Artificial Sequence
  Probe
catgggtggttcagtggtagaattct

SEQ ID NO: 9628 - DNA, 28 bp, Artificial Sequence
  Probe
catgggtggttcagtggtagaattctcg

SEQ ID NO: 9629 - DNA, 29 bp, Artificial Sequence
  Probe
catgggtggttcagtggtagaattctcgc

SEQ ID NO: 9630 - DNA, 30 bp, Artificial Sequence
  Probe
catgggtggttcagtggtagaattctcgcc

SEQ ID NO: 9631 - DNA, 25 bp, Artificial Sequence
  Probe
catggtctagcggttaggattcctg

SEQ ID NO: 9632 - DNA, 26 bp, Artificial Sequence
  Probe
catggtctagcggttaggattcctgg

SEQ ID NO: 9633 - DNA, 24 bp, Artificial Sequence
  Probe
catggtgtaatggttagcactctg

SEQ ID NO: 9634 - DNA, 25 bp, Artificial Sequence
  Probe
catggtgtaatggttagcactctgg

SEQ ID NO: 9635 - DNA, 29 bp, Artificial Sequence
  Probe
catggtgtaatggttagcactctggactc

SEQ ID NO: 9636 - DNA, 30 bp, Artificial Sequence
  Probe
cattcttgcgacccgggttcgattcccggg

SEQ ID NO: 9637 - DNA, 16 bp, Artificial Sequence
  Probe
cattggtcgtggttgt

SEQ ID NO: 9638 - DNA, 17 bp, Artificial Sequence
  Probe
cattggtcgtggttgta

SEQ ID NO: 9639 - DNA, 18 bp, Artificial Sequence
  Probe
cattggtcgtggttgtag

SEQ ID NO: 9640 - DNA, 23 bp, Artificial Sequence
  Probe
cattggtcgtggttgtagtccgt

SEQ ID NO: 9641 - DNA, 25 bp, Artificial Sequence
  Probe
cattggtcgtggttgtagtccgtgc

SEQ ID NO: 9642 - DNA, 26 bp, Artificial Sequence
  Probe
cattggtcgtggttgtagtccgtgcg

SEQ ID NO: 9643 - DNA, 27 bp, Artificial Sequence
  Probe
cattggtcgtggttgtagtccgtgcga

SEQ ID NO: 9644 - DNA, 28 bp, Artificial Sequence
  Probe
cattggtcgtggttgtagtccgtgcgag

SEQ ID NO: 9645 - DNA, 21 bp, Artificial Sequence
  Probe
cattggtggttcagtggtaga

SEQ ID NO: 9646 - DNA, 26 bp, Artificial Sequence
  Probe
cattggtggttcagtggtagaattct

SEQ ID NO: 9647 - DNA, 27 bp, Artificial Sequence
  Probe
cattggtggttcagtggtagaattctc

SEQ ID NO: 9648 - DNA, 28 bp, Artificial Sequence
  Probe
cattggtggttcagtggtagaattctcg

SEQ ID NO: 9649 - DNA, 29 bp, Artificial Sequence
  Probe
cattggtggttcagtggtagaattctcgc

SEQ ID NO: 9650 - DNA, 30 bp, Artificial Sequence; identical to SEQ ID NO: 4462
  Probe

SEQ ID NO: 9651 - DNA, 21 bp, Artificial Sequence
  Probe
ccaacacctctttacagtgaa

SEQ ID NO: 9652 - DNA, 28 bp, Artificial Sequence
  Probe
ccacatggtctagcggttaggattcctg

SEQ ID NO: 9653 - DNA, 29 bp, Artificial Sequence
  Probe
ccacatggtctagcggttaggattcctgg

SEQ ID NO: 9654 - DNA, 30 bp, Artificial Sequence
  Probe
ccacatggtctagcggttaggattcctggt

SEQ ID NO: 9655 - DNA, 21 bp, Artificial Sequence
  Probe
ccagaggtcgatggatcgaaa

SEQ ID NO: 9656 - DNA, 22 bp, Artificial Sequence
  Probe
ccagaggtcgatggatcgaaac

SEQ ID NO: 9657 - DNA, 29 bp, Artificial Sequence
  Probe
ccagcgatccgagttcaaatctcggtgga

SEQ ID NO: 9658 - DNA, 24 bp, Artificial Sequence
  Probe
ccaggatggccgagtggttaaggc

SEQ ID NO: 9659 - DNA, 30 bp, Artificial Sequence
  Probe
ccaggcggcccgggttcgactcccggtgtg

SEQ ID NO: 9660 - DNA, 24 bp, Artificial Sequence
  Probe
ccagggattgtgggttcgagtccc

SEQ ID NO: 9661 - DNA, 30 bp, Artificial Sequence
  Probe
ccagggattgtgggttcgagtcccatctgg

SEQ ID NO: 9662 - DNA, 30 bp, Artificial Sequence
  Probe
ccaggggtcgcgagttcaaatctcgctggg

SEQ ID NO: 9663 - DNA, 20 bp, Artificial Sequence
  Probe
ccaggttcgactcctggctg

SEQ ID NO: 9664 - DNA, 21 bp, Artificial Sequence
  Probe
ccaggttcgactcctggctgg

SEQ ID NO: 9665 - DNA, 24 bp, Artificial Sequence
  Probe
ccaggttcgactcctggctggctc

SEQ ID NO: 9666 - DNA, 25 bp, Artificial Sequence
  Probe
ccaggttcgactcctggctggctcg

SEQ ID NO: 9667 - DNA, 21 bp, Artificial Sequence
  Probe
ccataacccagaggtcgatgg

SEQ ID NO: 9668 - DNA, 22 bp, Artificial Sequence
  Probe
ccataacccagaggtcgatgga

SEQ ID NO: 9669 - DNA, 28 bp, Artificial Sequence
  Probe
ccatatggtctagcggttaggattcctg

SEQ ID NO: 9670 - DNA, 21 bp, Artificial Sequence
  Probe
ccatcctcgtcggccctgttt

SEQ ID NO: 9671 - DNA, 22 bp, Artificial Sequence
  Probe
ccatcctcgtcggccctgtttt

SEQ ID NO: 9672 - DNA, 25 bp, Artificial Sequence
  Probe
ccatggtgtaatggttagcactctg

SEQ ID NO: 9673 - DNA, 26 bp, Artificial Sequence
  Probe
ccatggtgtaatggttagcactctgg

SEQ ID NO: 9674 - DNA, 27 bp, Artificial Sequence
  Probe
ccatggtgtaatggttagcactctgga

SEQ ID NO: 9675 - DNA, 30 bp, Artificial Sequence
  Probe
ccatggtgtaatggttagcactctggactc

SEQ ID NO: 9676 - DNA, 20 bp, Artificial Sequence
  Probe
cccaagaacagggtttgtta

SEQ ID NO: 9677 - DNA, 25 bp, Artificial Sequence
  Probe
cccacatggtctagcggttaggatt

SEQ ID NO: 9678 - DNA, 29 bp, Artificial Sequence
  Probe
cccacatggtctagcggttaggattcctg

SEQ ID NO: 9679 - DNA, 30 bp, Artificial Sequence
  Probe
cccacatggtctagcggttaggattcctgg

SEQ ID NO: 9680 - DNA, 19 bp, Artificial Sequence
  Probe
cccataacccagaggtcga

SEQ ID NO: 9681 - DNA, 22 bp, Artificial Sequence
  Probe
cccataacccagaggtcgatgg

SEQ ID NO: 9682 - DNA, 30 bp, Artificial Sequence
  Probe
cccatatggtctagcggttaggattcctgg

SEQ ID NO: 9683 - DNA, 27 bp, Artificial Sequence
  Probe
cccatggtgtaatggttagcactctgg

SEQ ID NO: 9684 - DNA, 29 bp, Artificial Sequence
  Probe
cccatggtgtaatggttagcactctggac

SEQ ID NO: 9685 - DNA, 30 bp, Artificial Sequence
  Probe
cccatggtgtaatggttagcactctggact

SEQ ID NO: 9686 - DNA, 16 bp, Artificial Sequence
  Probe
ccccggcacctccacc

SEQ ID NO: 9687 - DNA, 29 bp, Artificial Sequence
  Probe
ccccgggttcaatccccggcacctccagc

SEQ ID NO: 9688 - DNA, 29 bp, Artificial Sequence
  Probe
cccctggcggtctagtggttaggattcgg

SEQ ID NO: 9689 - DNA, 30 bp, Artificial Sequence
  Probe
cccctggcggtctagtggttaggattcggc

SEQ ID NO: 9690 - DNA, 22 bp, Artificial Sequence
  Probe
cccggatagctcagtcggtaga

SEQ ID NO: 9691 - DNA, 15 bp, Artificial Sequence
  Probe
cccggcacctccacc

SEQ ID NO: 9692 - DNA, 16 bp, Artificial Sequence
  Probe
cccggcacctccacca

SEQ ID NO: 9693 - DNA, 29 bp, Artificial Sequence
  Probe
cccgggttcaatccccggcacctccacca

SEQ ID NO: 9694 - DNA, 16 bp, Artificial Sequence
  Probe
cccggtcagggaacca

SEQ ID NO: 9695 - DNA, 27 bp, Artificial Sequence
  Probe
ccctggtggtctagtggttaggattcg

SEQ ID NO: 9696 - DNA, 28 bp, Artificial Sequence
  Probe
ccctggtggtctagtggttaggattcgg

SEQ ID NO: 9697 - DNA, 24 bp, Artificial Sequence
  Probe
ccctggttcgatcccgggtttcgg

SEQ ID NO: 9698 - DNA, 25 bp, Artificial Sequence
  Probe
ccctggttcgatcccgggtttcggc

SEQ ID NO: 9699 - DNA, 26 bp, Artificial Sequence
  Probe
ccctggttcgatcccgggtttcggca

SEQ ID NO: 9700 - DNA, 27 bp, Artificial Sequence
  Probe
ccctggttcgatcccgggtttcggcac

SEQ ID NO: 9701 - DNA, 28 bp, Artificial Sequence
  Probe
ccctggttcgatcccgggtttcggcact

SEQ ID NO: 9702 - DNA, 28 bp, Artificial Sequence
  Probe
ccctggttcgatcccgggtttcggcagc

SEQ ID NO: 9703 - DNA, 30 bp, Artificial Sequence
  Probe
ccgaaaggttggtggttcgagcccacccag

SEQ ID NO: 9704 - DNA, 30 bp, Artificial Sequence
  Probe
ccgagaggtcccgggttcaaatcccggacg

SEQ ID NO: 9705 - DNA, 29 bp, Artificial Sequence
  Probe
ccgccgcggcccgggttcgattcccggtc

SEQ ID NO: 9706 - DNA, 23 bp, Artificial Sequence
  Probe
ccgcctgtcacgcgggagaccgg

SEQ ID NO: 9707 - DNA, 22 bp, Artificial Sequence
  Probe
ccgcgcaggttcgaatcctgcc

SEQ ID NO: 9708 - DNA, 17 bp, Artificial Sequence
  Probe
ccgcgtggcctaatgga

SEQ ID NO: 9709 - DNA, 19 bp, Artificial Sequence
  Probe
ccggagctggggattgtgg

SEQ ID NO: 9710 - DNA, 21 bp, Artificial Sequence
  Probe
ccggagctggggattgtgggt

SEQ ID NO: 9711 - DNA, 21 bp, Artificial Sequence
  Probe
ccggatagctcagtcggtaga

SEQ ID NO: 9712 - DNA, 15 bp, Artificial Sequence
  Probe
ccggcacctccacca

SEQ ID NO: 9713 - DNA, 29 bp, Artificial Sequence
  Probe
ccggctcgaaggacttcgtctgtaatttt

SEQ ID NO: 9714 - DNA, 16 bp, Artificial Sequence
  Probe
ccgggcggaaacacct

SEQ ID NO: 9715 - DNA, 29 bp, Artificial Sequence
  Probe
ccggggttcgattccccgacggggaggca

SEQ ID NO: 9716 - DNA, 28 bp, Artificial Sequence
  Probe
ccgggttcaattcccggtcagggaacca

SEQ ID NO: 9717 - DNA, 19 bp, Artificial Sequence
  Probe
ccgggttcgattcccggtc

SEQ ID NO: 9718 - DNA, 21 bp, Artificial Sequence
  Probe
ccgggttcgattcccggtcag

SEQ ID NO: 9719 - DNA, 22 bp, Artificial Sequence
  Probe
ccgggttcgattcccggtcagg

SEQ ID NO: 9720 - DNA, 23 bp, Artificial Sequence
  Probe
ccgggttcgattcccggtcaggg

SEQ ID NO: 9721 - DNA, 24 bp, Artificial Sequence
  Probe
ccgggttcgattcccggtcaggga

SEQ ID NO: 9722 - DNA, 25 bp, Artificial Sequence
  Probe
ccgggttcgattcccggtcagggaa

SEQ ID NO: 9723 - DNA, 28 bp, Artificial Sequence
  Probe
ccgggttcgattcccggtcatggaacca

SEQ ID NO: 9724 - DNA, 17 bp, Artificial Sequence
  Probe
ccgtgatcgtatagtgg

SEQ ID NO: 9725 - DNA, 20 bp, Artificial Sequence
  Probe
ccgtgatcgtatagtggtta

SEQ ID NO: 9726 - DNA, 21 bp, Artificial Sequence
  Probe
ccgtgatcgtatagtggttag

SEQ ID NO: 9727 - DNA, 22 bp, Artificial Sequence
  Probe
ccgtgatcgtatagtggttagt

SEQ ID NO: 9728 - DNA, 23 bp, Artificial Sequence
  Probe
ccgtgatcgtatagtggttagta

SEQ ID NO: 9729 - DNA, 26 bp, Artificial Sequence
  Probe
ccgtgatcgtatagtggttagtactc

SEQ ID NO: 9730 - DNA, 27 bp, Artificial Sequence
  Probe
ccgtgatcgtatagtggttagtactct

SEQ ID NO: 9731 - DNA, 28 bp, Artificial Sequence
  Probe
ccgtgatcgtatagtggttagtactctg

SEQ ID NO: 9732 - DNA, 19 bp, Artificial Sequence
  Probe
cctaagccagggattgtgg

SEQ ID NO: 9733 - DNA, 21 bp, Artificial Sequence
  Probe
cctaagccagggattgtgggt

SEQ ID NO: 9734 - DNA, 22 bp, Artificial Sequence
  Probe
cctcctaagccagggattgtgg

SEQ ID NO: 9735 - DNA, 21 bp, Artificial Sequence
  Probe
cctgccacgcgggaggcccgg

SEQ ID NO: 9736 - DNA, 23 bp, Artificial Sequence
  Probe
cctgccacgcgggaggcccgggt

SEQ ID NO: 9737 - DNA, 29 bp, Artificial Sequence
  Probe
cctgggttcgaatcccagcggtgcctcaa

SEQ ID NO: 9738 - DNA, 29 bp, Artificial Sequence
  Probe
cctgggttcgaatcccagcggtgcctccg

SEQ ID NO: 9739 - DNA, 26 bp, Artificial Sequence
  Probe
cctggtggtctagtggttaggattcg

SEQ ID NO: 9740 - DNA, 27 bp, Artificial Sequence
  Probe
cctggtggtctagtggttaggattcgg

SEQ ID NO: 9741 - DNA, 30 bp, Artificial Sequence; identical to SEQ ID NO: 699
  Probe

SEQ ID NO: 9742 - DNA, 23 bp, Artificial Sequence
  Probe
cctggttcaatcccgggtttcgg

SEQ ID NO: 9743 - DNA, 23 bp, Artificial Sequence
  Probe
cctggttcgatcccgggtttcgg

SEQ ID NO: 9744 - DNA, 26 bp, Artificial Sequence
  Probe
cctggttcgatcccgggtttcggcac

SEQ ID NO: 9745 - DNA, 16 bp, Artificial Sequence
  Probe
cctgtcacgcgggaga

SEQ ID NO: 9746 - DNA, 23 bp, Artificial Sequence
  Probe
cctgtcacgcgggagaccggggt

SEQ ID NO: 9747 - DNA, 20 bp, Artificial Sequence
  Probe
ccttccaagcagttgacccg

SEQ ID NO: 9748 - DNA, 21 bp, Artificial Sequence
  Probe
ccttccaagcagttgacccgg

SEQ ID NO: 9749 - DNA, 24 bp, Artificial Sequence
  Probe
ccttccaagcagttgacccgggtt

SEQ ID NO: 9750 - DNA, 15 bp, Artificial Sequence
  Probe
ccttcgatagctcag

SEQ ID NO: 9751 - DNA, 17 bp, Artificial Sequence
  Probe
ccttcgatagctcagct

SEQ ID NO: 9752 - DNA, 18 bp, Artificial Sequence
  Probe
ccttcgatagctcagctg

SEQ ID NO: 9753 - DNA, 19 bp, Artificial Sequence
  Probe
ccttcgatagctcagctgg

SEQ ID NO: 9754 - DNA, 20 bp, Artificial Sequence
  Probe
ccttcgatagctcagctggt

SEQ ID NO: 9755 - DNA, 22 bp, Artificial Sequence
  Probe
ccttcgatagctcagctggtag

SEQ ID NO: 9756 - DNA, 23 bp, Artificial Sequence
  Probe
ccttcgatagctcagctggtaga

SEQ ID NO: 9757 - DNA, 24 bp, Artificial Sequence
  Probe
ccttcgatagctcagctggtagag

SEQ ID NO: 9758 - DNA, 25 bp, Artificial Sequence
  Probe
ccttcgatagctcagctggtagagc

SEQ ID NO: 9759 - DNA, 17 bp, Artificial Sequence
  Probe
ccttcgatagctcagtt

SEQ ID NO: 9760 - DNA, 19 bp, Artificial Sequence
  Probe
ccttcgatagctcagttgg

SEQ ID NO: 9761 - DNA, 20 bp, Artificial Sequence
  Probe
ccttcgatagctcagttggt

SEQ ID NO: 9762 - DNA, 23 bp, Artificial Sequence
  Probe
ccttcgatagctcagttggtaga

SEQ ID NO: 9763 - DNA, 24 bp, Artificial Sequence
  Probe
ccttcgatagctcagttggtagag

SEQ ID NO: 9764 - DNA, 25 bp, Artificial Sequence
  Probe
ccttcgatagctcagttggtagagc

SEQ ID NO: 9765 - DNA, 30 bp, Artificial Sequence
  Probe
ccttcgatagctcagttggtagagcggagg

SEQ ID NO: 9766 - DNA, 29 bp, Artificial Sequence
  Probe
cgaaaggtccccggttcgaaaccgggcgg

SEQ ID NO: 9767 - DNA, 30 bp, Artificial Sequence
  Probe
cgaaaggttggtggttcgagcccacccagg

SEQ ID NO: 9768 - DNA, 24 bp, Artificial Sequence
  Probe
cgaatcacgtcggggtcaaacttt

SEQ ID NO: 9769 - DNA, 21 bp, Artificial Sequence
  Probe
cgaatcccacttctgacacaa

SEQ ID NO: 9770 - DNA, 22 bp, Artificial Sequence
  Probe
cgaatcccagcggggcctgttg

SEQ ID NO: 9771 - DNA, 19 bp, Artificial Sequence
  Probe
cgaatccggctcgaaggac

SEQ ID NO: 9772 - DNA, 21 bp, Artificial Sequence
  Probe
cgaatccggctcgaaggacga

SEQ ID NO: 9773 - DNA, 29 bp, Artificial Sequence
  Probe
cgagaggtcccgggttcaaatcccggacg

SEQ ID NO: 9774 - DNA, 19 bp, Artificial Sequence
  Probe
cgagccccacgttgggcgc

SEQ ID NO: 9775 - DNA, 28 bp, Artificial Sequence
  Probe
cgaggtggccgagtggttaaggcgatgg

SEQ ID NO: 9776 - DNA, 19 bp, Artificial Sequence
  Probe
cgattccccgacggggaga

SEQ ID NO: 9777 - DNA, 19 bp, Artificial Sequence
  Probe
cgattccccgacggggagg

SEQ ID NO: 9778 - DNA, 21 bp, Artificial Sequence
  Probe
cgattccccgacggggaggca

SEQ ID NO: 9779 - DNA, 21 bp, Artificial Sequence
  Probe
cgattcccggtcagggaacaa

SEQ ID NO: 9780 - DNA, 21 bp, Artificial Sequence
  Probe
cgattcccggtcatggaacca

SEQ ID NO: 9781 - DNA, 19 bp, Artificial Sequence
  Probe
cgattccggctcgaaggac

SEQ ID NO: 9782 - DNA, 20 bp, Artificial Sequence
  Probe
cgattccggctcgaaggact

SEQ ID NO: 9783 - DNA, 20 bp, Artificial Sequence
  Probe
cgattccggctcgaaggagc

SEQ ID NO: 9784 - DNA, 21 bp, Artificial Sequence
  Probe
cgattcctggtcagggaacca

SEQ ID NO: 9785 - DNA, 30 bp, Artificial Sequence
  Probe
cgcagcaacctcggttcgaatccgagtcac

SEQ ID NO: 9786 - DNA, 23 bp, Artificial Sequence
  Probe
cgccatgatcgtatagtggttag

SEQ ID NO: 9787 - DNA, 24 bp, Artificial Sequence
  Probe
cgccatgatcgtatagtggttagt

SEQ ID NO: 9788 - DNA, 30 bp, Artificial Sequence
  Probe
cgccgcggcccgggttcgattcccggtcag

SEQ ID NO: 9789 - DNA, 28 bp, Artificial Sequence
  Probe
cgccgctggtgtagtggtatcatgcaag

SEQ ID NO: 9790 - DNA, 17 bp, Artificial Sequence
  Probe
cgccgtgatcgtatagt

SEQ ID NO: 9791 - DNA, 19 bp, Artificial Sequence
  Probe
cgccgtgatcgtatagtgg

SEQ ID NO: 9792 - DNA, 20 bp, Artificial Sequence
  Probe
cgccgtgatcgtatagtggt

SEQ ID NO: 9793 - DNA, 21 bp, Artificial Sequence
  Probe
cgccgtgatcgtatagtggtt

SEQ ID NO: 9794 - DNA, 22 bp, Artificial Sequence
  Probe
cgccgtgatcgtatagtggtta

SEQ ID NO: 9795 - DNA, 23 bp, Artificial Sequence
  Probe
cgccgtgatcgtatagtggttag

SEQ ID NO: 9796 - DNA, 24 bp, Artificial Sequence
  Probe
cgccgtgatcgtatagtggttagt

SEQ ID NO: 9797 - DNA, 25 bp, Artificial Sequence
  Probe
cgccgtgatcgtatagtggttagta

SEQ ID NO: 9798 - DNA, 30 bp, Artificial Sequence
  Probe
cgccgtgatcgtatagtggttagtactctg

SEQ ID NO: 9799 - DNA, 22 bp, Artificial Sequence
  Probe
cgcctgtcacgcgggagaccgg

SEQ ID NO: 9800 - DNA, 18 bp, Artificial Sequence
  Probe
cggagctggggattgtgg

SEQ ID NO: 9801 - DNA, 19 bp, Artificial Sequence
  Probe
cggagctggggattgtggg

SEQ ID NO: 9802 - DNA, 20 bp, Artificial Sequence
  Probe
cggatagctcagtcggtaga

SEQ ID NO: 9803 - DNA, 28 bp, Artificial Sequence
  Probe
cggctcgaaggacttcgtctgtaatttt

SEQ ID NO: 9804 - DNA, 18 bp, Artificial Sequence
  Probe
cggctgtaggaatacttt

SEQ ID NO: 9805 - DNA, 19 bp, Artificial Sequence
  Probe
cggctgtaggaatactttt

SEQ ID NO: 9806 - DNA, 30 bp, Artificial Sequence; identical to SEQ ID NO: 786
  Probe

SEQ ID NO: 9807 - DNA, 28 bp, Artificial Sequence
  Probe
cgggaggcccgggttcgattcccggcca

SEQ ID NO: 9808 - DNA, 16 bp, Artificial Sequence
  Probe
cggggcacaataattt

SEQ ID NO: 9809 - DNA, 28 bp, Artificial Sequence
  Probe
cggggttcgattccccgacggggaggca

SEQ ID NO: 9810 - DNA, 27 bp, Artificial Sequence
  Probe
cgggttcaatccccggcacctccacca

SEQ ID NO: 9811 - DNA, 27 bp, Artificial Sequence
  Probe
cgggttcaattcccggtcagggaacca

SEQ ID NO: 9812 - DNA, 27 bp, Artificial Sequence
  Probe
cgggttcgattcccggtcatggaacca

SEQ ID NO: 9813 - DNA, 16 bp, Artificial Sequence
  Probe
cggtagagcatcagac

SEQ ID NO: 9814 - DNA, 16 bp, Artificial Sequence
  Probe
cggtagagcatgagac

SEQ ID NO: 9815 - DNA, 17 bp, Artificial Sequence
  Probe
cggtctaaggcgctgcg

SEQ ID NO: 9816 - DNA, 20 bp, Artificial Sequence
  Probe
cggtctaaggcgctgcgttc

SEQ ID NO: 9817 - DNA, 17 bp, Artificial Sequence
  Probe
cggtctaaggcgctgga

SEQ ID NO: 9818 - DNA, 16 bp, Artificial Sequence
  Probe
cggttaggattcctgg

SEQ ID NO: 9819 - DNA, 20 bp, Artificial Sequence
  Probe
cggttaggattcctggtttt

SEQ ID NO: 9820 - DNA, 19 bp, Artificial Sequence
  Probe
cgtagtcgtggccgagtgg

SEQ ID NO: 9821 - DNA, 27 bp, Artificial Sequence
  Probe
cgtagtgtagtggttatcacgttcgcc

SEQ ID NO: 9822 - DNA, 15 bp, Artificial Sequence
  Probe
cgtatagtggttagt

SEQ ID NO: 9823 - DNA, 16 bp, Artificial Sequence
  Probe
cgtatagtggttagta

SEQ ID NO: 9824 - DNA, 17 bp, Artificial Sequence
  Probe
cgtatagtggttagtac

SEQ ID NO: 9825 - DNA, 18 bp, Artificial Sequence
  Probe
cgtatagtggttagtact

SEQ ID NO: 9826 - DNA, 19 bp, Artificial Sequence
  Probe
cgtatagtggttagtactc

SEQ ID NO: 9827 - DNA, 20 bp, Artificial Sequence
  Probe
cgtatagtggttagtactct

SEQ ID NO: 9828 - DNA, 21 bp, Artificial Sequence
  Probe
cgtatagtggttagtactctg

SEQ ID NO: 9829 - DNA, 22 bp, Artificial Sequence
  Probe
cgtatagtggttagtactctgc

SEQ ID NO: 9830 - DNA, 25 bp, Artificial Sequence
  Probe
cgtatagtggttagtactctgcgct

SEQ ID NO: 9831 - DNA, 26 bp, Artificial Sequence
  Probe
cgtatagtggttagtactctgcgctg

SEQ ID NO: 9832 - DNA, 27 bp, Artificial Sequence
  Probe
cgtatagtggttagtactctgcgttgt

SEQ ID NO: 9833 - DNA, 28 bp, Artificial Sequence
  Probe
cgtatagtggttagtactctgcgttgtg

SEQ ID NO: 9834 - DNA, 19 bp, Artificial Sequence
  Probe
cgtgatcgtatagtggtta

SEQ ID NO: 9835 - DNA, 20 bp, Artificial Sequence
  Probe
cgtgatcgtatagtggttag

SEQ ID NO: 9836 - DNA, 21 bp, Artificial Sequence
  Probe
cgtgatcgtatagtggttagt

SEQ ID NO: 9837 - DNA, 22 bp, Artificial Sequence
  Probe
cgtgatcgtatagtggttagta

SEQ ID NO: 9838 - DNA, 24 bp, Artificial Sequence
  Probe
cgtgatcgtatagtggttagtact

SEQ ID NO: 9839 - DNA, 25 bp, Artificial Sequence
  Probe
cgtgatcgtatagtggttagtactc

SEQ ID NO: 9840 - DNA, 26 bp, Artificial Sequence
  Probe
cgtgatcgtatagtggttagtactct

SEQ ID NO: 9841 - DNA, 27 bp, Artificial Sequence
  Probe
cgtgatcgtatagtggttagtactctg

SEQ ID NO: 9842 - DNA, 29 bp, Artificial Sequence
  Probe
cgtgatcgtatagtggttagtactctgcg

SEQ ID NO: 9843 - DNA, 22 bp, Artificial Sequence
  Probe
cgtgggttcgagccccacgttg

SEQ ID NO: 9844 - DNA, 26 bp, Artificial Sequence
  Probe
cgtgggttcgagccccacgttgggcg

SEQ ID NO: 9845 - DNA, 27 bp, Artificial Sequence
  Probe
cgtgggttcgagccccacgttgggcgc

SEQ ID NO: 9846 - DNA, 29 bp, Artificial Sequence
  Probe
cgtgggttcgagccccacgttgggcggca

SEQ ID NO: 9847 - DNA, 25 bp, Artificial Sequence
  Probe
cgtggttgtagtccgtgcgagaata

SEQ ID NO: 9848 - DNA, 18 bp, Artificial Sequence
  Probe
cgttcaggtcgcagtctc

SEQ ID NO: 9849 - DNA, 19 bp, Artificial Sequence
  Probe
cgttcaggtcgcagtctcc

SEQ ID NO: 9850 - DNA, 20 bp, Artificial Sequence
  Probe
cgttcaggtcgcagtctccc

SEQ ID NO: 9851 - DNA, 23 bp, Artificial Sequence
  Probe
cgttcgattcccggtcagggaac

SEQ ID NO: 9852 - DNA, 21 bp, Artificial Sequence
  Probe
cgttggtctaggggtatgatt

SEQ ID NO: 9853 - DNA, 28 bp, Artificial Sequence
  Probe
cgttggtctaggggtatgattctcgctt

SEQ ID NO: 9854 - DNA, 22 bp, Artificial Sequence
  Probe
ctaacaacatggctttctcaac

SEQ ID NO: 9855 - DNA, 16 bp, Artificial Sequence
  Probe
ctaagccagggattgt

SEQ ID NO: 9856 - DNA, 17 bp, Artificial Sequence
  Probe
ctaagccagggattgtg

SEQ ID NO: 9857 - DNA, 18 bp, Artificial Sequence
  Probe
ctaagccagggattgtgg

SEQ ID NO: 9858 - DNA, 22 bp, Artificial Sequence
  Probe
ctaagccagggattgtgggttc

SEQ ID NO: 9859 - DNA, 23 bp, Artificial Sequence
  Probe
ctaagccagggattgtgggttcg

SEQ ID NO: 9860 - DNA, 23 bp, Artificial Sequence
  Probe
ctaataacgccaaggtcgcgggt

SEQ ID NO: 9861 - DNA, 18 bp, Artificial Sequence
  Probe
ctaatggataaggcactg

SEQ ID NO: 9862 - DNA, 18 bp, Artificial Sequence
  Probe
ctaatggataaggcattg

SEQ ID NO: 9863 - DNA, 21 bp, Artificial Sequence
  Probe
ctacggatcagaagattccag

SEQ ID NO: 9864 - DNA, 20 bp, Artificial Sequence
  Probe
ctagcggttaggattcctgg

SEQ ID NO: 9865 - DNA, 22 bp, Artificial Sequence
  Probe
ctagcggttaggattcctggtt

SEQ ID NO: 9866 - DNA, 23 bp, Artificial Sequence
  Probe
ctagcggttaggattcctggttt

SEQ ID NO: 9867 - DNA, 24 bp, Artificial Sequence
  Probe
ctagcggttaggattcctggtttt

SEQ ID NO: 9868 - DNA, 19 bp, Artificial Sequence
  Probe
ctaggggtatgattctcgg

SEQ ID NO: 9869 - DNA, 21 bp, Artificial Sequence
  Probe
ctaggggtatgattctcggtt

SEQ ID NO: 9870 - DNA, 20 bp, Artificial Sequence
  Probe
ctaggttcgactcctggctg

SEQ ID NO: 9871 - DNA, 24 bp, Artificial Sequence
  Probe
ctaggttcgactcctggctggctc

SEQ ID NO: 9872 - DNA, 25 bp, Artificial Sequence
  Probe
ctaggttcgactcctggctggctcg

SEQ ID NO: 9873 - DNA, 20 bp, Artificial Sequence
  Probe
ctagtggttaggattcggcg

SEQ ID NO: 9874 - DNA, 21 bp, Artificial Sequence
  Probe
ctagtggttaggattcggcgc

SEQ ID NO: 9875 - DNA, 22 bp, Artificial Sequence
  Probe
ctagtggttaggattcggcgct

SEQ ID NO: 9876 - DNA, 18 bp, Artificial Sequence
  Probe
ctcacaagaactgctaac

SEQ ID NO: 9877 - DNA, 19 bp, Artificial Sequence
  Probe
ctcacaagaactgctaact

SEQ ID NO: 9878 - DNA, 20 bp, Artificial Sequence
  Probe
ctcacaagaactgctaactc

SEQ ID NO: 9879 - DNA, 21 bp, Artificial Sequence
  Probe
ctcacaagaactgctaactca

SEQ ID NO: 9880 - DNA, 22 bp, Artificial Sequence
  Probe
ctcacaagaactgctaactcat

SEQ ID NO: 9881 - DNA, 23 bp, Artificial Sequence
  Probe
ctcacaagaactgctaactcatg

SEQ ID NO: 9882 - DNA, 24 bp, Artificial Sequence
  Probe
ctcacaagaactgctaactcatgc

SEQ ID NO: 9883 - DNA, 23 bp, Artificial Sequence
  Probe
ctcacacgcgaaaggtccccggt

SEQ ID NO: 9884 - DNA, 16 bp, Artificial Sequence
  Probe
ctcaccgccgcggccc

SEQ ID NO: 9885 - DNA, 30 bp, Artificial Sequence
  Probe
ctcaccgccgcggcccgggttcgattcccg

SEQ ID NO: 9886 - DNA, 19 bp, Artificial Sequence
  Probe
ctcacctggagcatgtttt

SEQ ID NO: 9887 - DNA, 20 bp, Artificial Sequence
  Probe
ctcacctggagcatgttttc

SEQ ID NO: 9888 - DNA, 21 bp, Artificial Sequence
  Probe
ctcacctggagcatgttttct

SEQ ID NO: 9889 - DNA, 22 bp, Artificial Sequence
  Probe
ctcacctggagcatgttttctt

SEQ ID NO: 9890 - DNA, 30 bp, Artificial Sequence
  Probe
ctcagggtcgtgggttcgagccccacgttg

SEQ ID NO: 9891 - DNA, 22 bp, Artificial Sequence
  Probe
ctcagtggtagagcatttgact

SEQ ID NO: 9892 - DNA, 24 bp, Artificial Sequence
  Probe
ctcagtggtagagcatttgactgc

SEQ ID NO: 9893 - DNA, 19 bp, Artificial Sequence
  Probe
ctccagtctcttcgggggc

SEQ ID NO: 9894 - DNA, 15 bp, Artificial Sequence
  Probe
ctcccgccttttttc

SEQ ID NO: 9895 - DNA, 16 bp, Artificial Sequence
  Probe
ctcccgccttttttcc

SEQ ID NO: 9896 - DNA, 17 bp, Artificial Sequence
  Probe
ctcccgccttttttccc

SEQ ID NO: 9897 - DNA, 18 bp, Artificial Sequence
  Probe
ctcccgccttttttcccg

SEQ ID NO: 9898 - DNA, 20 bp, Artificial Sequence
  Probe
ctcccgccttttttcccggc

SEQ ID NO: 9899 - DNA, 21 bp, Artificial Sequence
  Probe
ctcccgccttttttcccggcg

SEQ ID NO: 9900 - DNA, 23 bp, Artificial Sequence
  Probe
ctcccgccttttttcccggcggc

SEQ ID NO: 9901 - DNA, 24 bp, Artificial Sequence
  Probe
ctcccgccttttttcccggcggcg

SEQ ID NO: 9902 - DNA, 25 bp, Artificial Sequence
  Probe
ctcccgccttttttcccggcggcgg

SEQ ID NO: 9903 - DNA, 26 bp, Artificial Sequence
  Probe
ctcccgccttttttcccggcggcggg

SEQ ID NO: 9904 - DNA, 29 bp, Artificial Sequence
  Probe
ctcccgccttttttcccggcggcgggaga

SEQ ID NO: 9905 - DNA, 30 bp, Artificial Sequence
  Probe
ctccctggtggtctagtggttaggattcgg

SEQ ID NO: 9906 - DNA, 28 bp, Artificial Sequence
  Probe
ctccgaggtgattttcatattgaattgc

SEQ ID NO: 9907 - DNA, 29 bp, Artificial Sequence
  Probe
ctccgaggtgattttcatattgaattgca

SEQ ID NO: 9908 - DNA, 21 bp, Artificial Sequence
  Probe
ctccggagctggggattgtgg

SEQ ID NO: 9909 - DNA, 21 bp, Artificial Sequence
  Probe
ctcctaagccagggattgtgg

SEQ ID NO: 9910 - DNA, 22 bp, Artificial Sequence
  Probe
ctcctaagccagggattgtggg

SEQ ID NO: 9911 - DNA, 23 bp, Artificial Sequence
  Probe
ctcctaagccagggattgtgggt

SEQ ID NO: 9912 - DNA, 24 bp, Artificial Sequence
  Probe
ctcgaaggacttcgtctgtaattt

SEQ ID NO: 9913 - DNA, 25 bp, Artificial Sequence
  Probe
ctcgaaggacttcgtctgtaatttt

SEQ ID NO: 9914 - DNA, 22 bp, Artificial Sequence
  Probe
ctcggttcgaatccgagtcacg

SEQ ID NO: 9915 - DNA, 23 bp, Artificial Sequence
  Probe
ctcggttcgaatccgagtcacgg

SEQ ID NO: 9916 - DNA, 16 bp, Artificial Sequence
  Probe
ctcgtcggccctgttt

SEQ ID NO: 9917 - DNA, 17 bp, Artificial Sequence
  Probe
ctcgtcggccctgtttt

SEQ ID NO: 9918 - DNA, 23 bp, Artificial Sequence
  Probe
ctcgttggtctaggggtatgatt

SEQ ID NO: 9919 - DNA, 18 bp, Artificial Sequence
  Probe
ctctcaccgccgcggccc

SEQ ID NO: 9920 - DNA, 22 bp, Artificial Sequence
  Probe
ctctcaccgccgcggcccgggt

SEQ ID NO: 9921 - DNA, 15 bp, Artificial Sequence
  Probe
ctctgaatccagcga

SEQ ID NO: 9922 - DNA, 17 bp, Artificial Sequence
  Probe
ctctgaatccagcgatc

SEQ ID NO: 9923 - DNA, 18 bp, Artificial Sequence
  Probe
ctctgaatccagcgatcc

SEQ ID NO: 9924 - DNA, 19 bp, Artificial Sequence
  Probe
ctctgaatccagcgatccg

SEQ ID NO: 9925 - DNA, 20 bp, Artificial Sequence
  Probe
ctctgaatccagcgatccga

SEQ ID NO: 9926 - DNA, 22 bp, Artificial Sequence
  Probe
ctctgaatccagcgatccgagt

SEQ ID NO: 9927 - DNA, 23 bp, Artificial Sequence
  Probe
ctctgaatccagcgatccgagtt

SEQ ID NO: 9928 - DNA, 24 bp, Artificial Sequence
  Probe
ctctgaatccagcgatccgagttc

SEQ ID NO: 9929 - DNA, 26 bp, Artificial Sequence
  Probe
ctctgaatccagcgatccgagttcaa

SEQ ID NO: 9930 - DNA, 19 bp, Artificial Sequence
  Probe
ctctgctatcggagttttt

SEQ ID NO: 9931 - DNA, 16 bp, Artificial Sequence
  Probe
ctctggactctgaatc

SEQ ID NO: 9932 - DNA, 17 bp, Artificial Sequence
  Probe
ctctggactctgaatcc

SEQ ID NO: 9933 - DNA, 18 bp, Artificial Sequence
  Probe
ctctggactctgaatcca

SEQ ID NO: 9934 - DNA, 19 bp, Artificial Sequence
  Probe
ctctggactctgaatccag

SEQ ID NO: 9935 - DNA, 20 bp, Artificial Sequence
  Probe
ctctggactctgaatccagc

SEQ ID NO: 9936 - DNA, 21 bp, Artificial Sequence
  Probe
ctctggactctgaatccagcg

SEQ ID NO: 9937 - DNA, 23 bp, Artificial Sequence
  Probe
ctctggactctgaatccagcgat

SEQ ID NO: 9938 - DNA, 28 bp, Artificial Sequence
  Probe
ctctggactctgaatccagcgatccgag

SEQ ID NO: 9939 - DNA, 29 bp, Artificial Sequence
  Probe
ctctggactctgaatccagcgatccgagt

SEQ ID NO: 9940 - DNA, 16 bp, Artificial Sequence
  Probe
ctctggactttgaatc

SEQ ID NO: 9941 - DNA, 17 bp, Artificial Sequence
  Probe
ctctggactttgaatcc

SEQ ID NO: 9942 - DNA, 20 bp, Artificial Sequence
  Probe
ctctggactttgaatccagc

SEQ ID NO: 9943 - DNA, 17 bp, Artificial Sequence
  Probe
ctctgtggcgcaatgga

SEQ ID NO: 9944 - DNA, 27 bp, Artificial Sequence
  Probe
ctctttggccttttcgagatactgttt

SEQ ID NO: 9945 - DNA, 28 bp, Artificial Sequence
  Probe
ctctttggccttttcgagatactgtttt

SEQ ID NO: 9946 - DNA, 30 bp, Artificial Sequence
  Probe
ctcttttagtataaatagtaccgttaactt

SEQ ID NO: 9947 - DNA, 23 bp, Artificial Sequence
  Probe
ctgaagatctaaaggtccctggt

SEQ ID NO: 9948 - DNA, 15 bp, Artificial Sequence
  Probe
ctgaaggtcctgagt

SEQ ID NO: 9949 - DNA, 22 bp, Artificial Sequence
  Probe
ctgaaggtcctgagttcgaacc

SEQ ID NO: 9950 - DNA, 15 bp, Artificial Sequence
  Probe
ctgaaggtcgtgagt

SEQ ID NO: 9951 - DNA, 30 bp, Artificial Sequence
  Probe
ctgaaggtcgtgagttcgatcctcacacgg

SEQ ID NO: 9952 - DNA, 19 bp, Artificial Sequence
  Probe
ctgaatccagcgatccgag

SEQ ID NO: 9953 - DNA, 20 bp, Artificial Sequence
  Probe
ctgaatccagcgatccgagt

SEQ ID NO: 9954 - DNA, 30 bp, Artificial Sequence
  Probe
ctgagggtccagggttcaagtccctgttcg

SEQ ID NO: 9955 - DNA, 30 bp, Artificial Sequence
  Probe
ctgagggtccagggttcatgtccctgttcc

SEQ ID NO: 9956 - DNA, 21 bp, Artificial Sequence
  Probe
ctgagtgaagcattggactgt

SEQ ID NO: 9957 - DNA, 22 bp, Artificial Sequence
  Probe
ctgagtgaagcattggactgta

SEQ ID NO: 9958 - DNA, 23 bp, Artificial Sequence
  Probe
ctgagtgaagcattggactgtaa

SEQ ID NO: 9959 - DNA, 19 bp, Artificial Sequence
  Probe
ctgcagatcaagaggtccc

SEQ ID NO: 9960 - DNA, 20 bp, Artificial Sequence
  Probe
ctgcagatcaagaggtcccc

SEQ ID NO: 9961 - DNA, 23 bp, Artificial Sequence
  Probe
ctgcagatcaagaggtccccggt

SEQ ID NO: 9962 - DNA, 18 bp, Artificial Sequence
  Probe
ctgccacgcgggaggccc

SEQ ID NO: 9963 - DNA, 22 bp, Artificial Sequence
  Probe
ctgccacgcgggaggcccgggt

SEQ ID NO: 9964 - DNA, 21 bp, Artificial Sequence
  Probe
ctgccttccaagcagttgacc

SEQ ID NO: 9965 - DNA, 22 bp, Artificial Sequence
  Probe
ctgccttccaagcagttgaccc

SEQ ID NO: 9966 - DNA, 23 bp, Artificial Sequence
  Probe
ctgccttccaagcagttgacccg

SEQ ID NO: 9967 - DNA, 24 bp, Artificial Sequence
  Probe
ctgccttccaagcagttgacccgg

SEQ ID NO: 9968 - DNA, 25 bp, Artificial Sequence
  Probe
ctgccttccaagcagttgacccggg

SEQ ID NO: 9969 - DNA, 26 bp, Artificial Sequence
  Probe
ctgccttccaagcagttgacccgggt

SEQ ID NO: 9970 - DNA, 22 bp, Artificial Sequence
  Probe
ctgcgtgttcgaatcacgtcgg

SEQ ID NO: 9971 - DNA, 17 bp, Artificial Sequence
  Probe
ctgctatcggagttttt

SEQ ID NO: 9972 - DNA, 19 bp, Artificial Sequence
  Probe
ctggaaagtgcacttggac

SEQ ID NO: 9973 - DNA, 20 bp, Artificial Sequence
  Probe
ctggaaagtgcacttggacg

SEQ ID NO: 9974 - DNA, 21 bp, Artificial Sequence
  Probe
ctggaaagtgcacttggacga

SEQ ID NO: 9975 - DNA, 22 bp, Artificial Sequence
  Probe
ctggaaagtgcacttggacgaa

SEQ ID NO: 9976 - DNA, 23 bp, Artificial Sequence
  Probe
ctggaaagtgcacttggacgaac

SEQ ID NO: 9977 - DNA, 24 bp, Artificial Sequence
  Probe
ctggaaagtgcacttggacgaacc

SEQ ID NO: 9978 - DNA, 15 bp, Artificial Sequence
  Probe
ctggactctgaatcc

SEQ ID NO: 9979 - DNA, 18 bp, Artificial Sequence
  Probe
ctggactctgaatccagc

SEQ ID NO: 9980 - DNA, 19 bp, Artificial Sequence
  Probe
ctggactctgaatccagcg

SEQ ID NO: 9981 - DNA, 22 bp, Artificial Sequence
  Probe
ctggactctgaatccagcgatc

SEQ ID NO: 9982 - DNA, 25 bp, Artificial Sequence
  Probe
ctggactctgaatccagcgatccga

SEQ ID NO: 9983 - DNA, 27 bp, Artificial Sequence
  Probe
ctggactctgaatccagcgatccgagt

SEQ ID NO: 9984 - DNA, 19 bp, Artificial Sequence
  Probe
ctggtctccggatggaggc

SEQ ID NO: 9985 - DNA, 25 bp, Artificial Sequence
  Probe
ctggtggtctagtggttaggattcg

SEQ ID NO: 9986 - DNA, 26 bp, Artificial Sequence
  Probe
ctggtggtctagtggttaggattcgg

SEQ ID NO: 9987 - DNA, 28 bp, Artificial Sequence
  Probe
ctggtggtctagtggttaggattcggcg

SEQ ID NO: 9988 - DNA, 29 bp, Artificial Sequence
  Probe
ctggtggtctagtggttaggattcggcgc

SEQ ID NO: 9989 - DNA, 30 bp, Artificial Sequence; identical to SEQ ID NO: 839
  Probe

SEQ ID NO: 9990 - DNA, 22 bp, Artificial Sequence
  Probe
ctggttcgatcccgggtttcgg

SEQ ID NO: 9991 - DNA, 25 bp, Artificial Sequence
  Probe
ctggttcgattccggctcgaaggac

SEQ ID NO: 9992 - DNA, 18 bp, Artificial Sequence
  Probe
ctgtaaagctaacttagc

SEQ ID NO: 9993 - DNA, 21 bp, Artificial Sequence
  Probe
ctgtaaagctaacttagcatt

SEQ ID NO: 9994 - DNA, 22 bp, Artificial Sequence
  Probe
ctgtaaagctaacttagcatta

SEQ ID NO: 9995 - DNA, 24 bp, Artificial Sequence
  Probe
ctgtaaagctaacttagcattaac

SEQ ID NO: 9996 - DNA, 25 bp, Artificial Sequence
  Probe
ctgtaaagctaacttagcattaacc

SEQ ID NO: 9997 - DNA, 29 bp, Artificial Sequence
  Probe
ctgtaaagctaacttagcattaacctttt

SEQ ID NO: 9998 - DNA, 15 bp, Artificial Sequence
  Probe
ctgtcacgcgggaga

SEQ ID NO: 9999 - DNA, 21 bp, Artificial Sequence
  Probe
ctgtcacgcgggagaccgggg

SEQ ID NO: 10000 - DNA, 24 bp, Artificial Sequence
  Probe
ctgtgatggccgagtggttaaggc

SEQ ID NO: 10001 - DNA, 15 bp, Artificial Sequence
  Probe
ctgtgctccggagtt

SEQ ID NO: 10002 - DNA, 18 bp, Artificial Sequence
  Probe
ctgtgctccggagttacc

SEQ ID NO: 10003 - DNA, 21 bp, Artificial Sequence
  Probe
ctgtgctccggagttacctcg

SEQ ID NO: 10004 - DNA, 22 bp, Artificial Sequence
  Probe
ctgtgctccggagttacctcgt

SEQ ID NO: 10005 - DNA, 23 bp, Artificial Sequence
  Probe
ctgtgctccggagttacctcgtt

SEQ ID NO: 10006 - DNA, 24 bp, Artificial Sequence
  Probe
ctgtgctccggagttacctcgttt

SEQ ID NO: 10007 - DNA, 25 bp, Artificial Sequence
  Probe
ctgtgctccggagttacctcgtttt

SEQ ID NO: 10008 - DNA, 19 bp, Artificial Sequence
  Probe
ctgttaaccgaaaggttgg

SEQ ID NO: 10009 - DNA, 22 bp, Artificial Sequence
  Probe
ctgttcgggcgtttgtagtttt

SEQ ID NO: 10010 - DNA, 15 bp, Artificial Sequence
  Probe
cttaacttgaccgct

SEQ ID NO: 10011 - DNA, 17 bp, Artificial Sequence
  Probe
cttaacttgaccgctct

SEQ ID NO: 10012 - DNA, 18 bp, Artificial Sequence
  Probe
cttaacttgaccgctctg

SEQ ID NO: 10013 - DNA, 19 bp, Artificial Sequence
  Probe
cttaacttgaccgctctga

SEQ ID NO: 10014 - DNA, 20 bp, Artificial Sequence
  Probe
cttaacttgaccgctctgag

SEQ ID NO: 10015 - DNA, 21 bp, Artificial Sequence
  Probe
cttaacttgaccgctctgagc

SEQ ID NO: 10016 - DNA, 27 bp, Artificial Sequence
  Probe
cttaggagatttcaacttaacttgacc

SEQ ID NO: 10017 - DNA, 28 bp, Artificial Sequence
  Probe
cttaggagatttcaacttaacttgaccg

SEQ ID NO: 10018 - DNA, 30 bp, Artificial Sequence; identical to SEQ ID NO: 5384
  Probe

SEQ ID NO: 10019 - DNA, 29 bp, Artificial Sequence
  Probe
cttaggtcgctggttcgattccggctcga

SEQ ID NO: 10020 - DNA, 19 bp, Artificial Sequence
  Probe
cttccaagcagttgacccg

SEQ ID NO: 10021 - DNA, 20 bp, Artificial Sequence
  Probe
cttccaagcagttgacccgg

SEQ ID NO: 10022 - DNA, 22 bp, Artificial Sequence
  Probe
cttccaagcagttgacccgggt

SEQ ID NO: 10023 - DNA, 24 bp, Artificial Sequence
  Probe
cttcgatagctcagctggtagagc

SEQ ID NO: 10024 - DNA, 24 bp, Artificial Sequence
  Probe
cttcgatagctcagttggtagagc

SEQ ID NO: 10025 - DNA, 17 bp, Artificial Sequence
  Probe
cttctgacacatacttt

SEQ ID NO: 10026 - DNA, 18 bp, Artificial Sequence
  Probe
cttctgacacatactttt

SEQ ID NO: 10027 - DNA, 18 bp, Artificial Sequence
  Probe
cttctgacacattcgttt

SEQ ID NO: 10028 - DNA, 19 bp, Artificial Sequence
  Probe
cttctgacacattcgtttt

SEQ ID NO: 10029 - DNA, 19 bp, Artificial Sequence
  Probe
cttctgtagtgtagtggtt

SEQ ID NO: 10030 - DNA, 20 bp, Artificial Sequence
  Probe
cttgtaaaccaggggtcgcg

SEQ ID NO: 10031 - DNA, 22 bp, Artificial Sequence
  Probe
cttgtaaaccaggggtcgcgag

SEQ ID NO: 10032 - DNA, 23 bp, Artificial Sequence
  Probe
cttgtaaaccaggggtcgcgagt

SEQ ID NO: 10033 - DNA, 25 bp, Artificial Sequence
  Probe
ctttcgatagctcagttggtagagc

SEQ ID NO: 10034 - DNA, 15 bp, Artificial Sequence
  Probe
ctttgaatccagcga

SEQ ID NO: 10035 - DNA, 18 bp, Artificial Sequence
  Probe
ctttgaatccagcgatcc

SEQ ID NO: 10036 - DNA, 19 bp, Artificial Sequence
  Probe
ctttgaatccagcgatccg

SEQ ID NO: 10037 - DNA, 20 bp, Artificial Sequence
  Probe
ctttgaatccagcgatccga

SEQ ID NO: 10038 - DNA, 21 bp, Artificial Sequence
  Probe
ctttgaatccagcgatccgag

SEQ ID NO: 10039 - DNA, 23 bp, Artificial Sequence
  Probe
ctttgaatccagcgatccgagtt

SEQ ID NO: 10040 - DNA, 16 bp, Artificial Sequence
  Probe
ctttgcacgcgtgggt

SEQ ID NO: 10041 - DNA, 23 bp, Artificial Sequence
  Probe
ctttggccttttcgagatactgt

SEQ ID NO: 10042 - DNA, 24 bp, Artificial Sequence
  Probe
ctttggccttttcgagatactgtt

SEQ ID NO: 10043 - DNA, 25 bp, Artificial Sequence
  Probe
ctttggccttttcgagatactgttt

SEQ ID NO: 10044 - DNA, 26 bp, Artificial Sequence
  Probe
ctttggccttttcgagatactgtttt

SEQ ID NO: 10045 - DNA, 27 bp, Artificial Sequence
  Probe
ctttggccttttcgagatactgttttt

SEQ ID NO: 10046 - DNA, 21 bp, Artificial Sequence
  Probe
ctttggtctaggggtatgatc

SEQ ID NO: 10047 - DNA, 20 bp, Artificial Sequence
  Probe
cttttaatctgagggtccag

SEQ ID NO: 10048 - DNA, 19 bp, Artificial Sequence
  Probe
cttttttcccggcggcggg

SEQ ID NO: 10049 - DNA, 18 bp, Artificial Sequence
  Probe
gaaaaagtcatggaggcc

SEQ ID NO: 10050 - DNA, 19 bp, Artificial Sequence
  Probe
gaaaaagtcatggaggcca

SEQ ID NO: 10051 - DNA, 21 bp, Artificial Sequence
  Probe
gaaaaagtcatggaggccatg

SEQ ID NO: 10052 - DNA, 24 bp, Artificial Sequence
  Probe
gaaaaagtcatggaggccatgggg

SEQ ID NO: 10053 - DNA, 26 bp, Artificial Sequence
  Probe
gaaaaagtcatggaggccatggggtt

SEQ ID NO: 10054 - DNA, 27 bp, Artificial Sequence
  Probe
gaaaaagtcatggaggccatggggttg

SEQ ID NO: 10055 - DNA, 28 bp, Artificial Sequence
  Probe
gaaaaagtcatggaggccatggggttgg

SEQ ID NO: 10056 - DNA, 29 bp, Artificial Sequence
  Probe
gaaaaagtcatggaggccatggggttggc

SEQ ID NO: 10057 - DNA, 30 bp, Artificial Sequence
  Probe
gaaaaagtcatggaggccatggggttggct

SEQ ID NO: 10058 - DNA, 20 bp, Artificial Sequence
  Probe
gaaaatgtttagacgggctc

SEQ ID NO: 10059 - DNA, 20 bp, Artificial Sequence
  Probe
gaaagctcacaagaactgct

SEQ ID NO: 10060 - DNA, 23 bp, Artificial Sequence
  Probe
gaaagctcacaagaactgctaac

SEQ ID NO: 10061 - DNA, 24 bp, Artificial Sequence
  Probe
gaaagctcacaagaactgctaact

SEQ ID NO: 10062 - DNA, 26 bp, Artificial Sequence
  Probe
gaaaggtccccggttcgaaaccgggc

SEQ ID NO: 10063 - DNA, 30 bp, Artificial Sequence
  Probe
gaaatacaacgatggtttttcatatcattg

SEQ ID NO: 10064 - DNA, 20 bp, Artificial Sequence
  Probe
gaaccaacacctctttacag

SEQ ID NO: 10065 - DNA, 24 bp, Artificial Sequence
  Probe
gaaccaacacctctttacagtgaa

SEQ ID NO: 10066 - DNA, 16 bp, Artificial Sequence
  Probe
gaactgctaactcatg

SEQ ID NO: 10067 - DNA, 30 bp, Artificial Sequence; identical to SEQ ID NO: 890
  Probe

SEQ ID NO: 10068 - DNA, 16 bp, Artificial Sequence
  Probe
gaagcattggactgta

SEQ ID NO: 10069 - DNA, 21 bp, Artificial Sequence
  Probe
gaagcattggactgtaaatct

SEQ ID NO: 10070 - DNA, 17 bp, Artificial Sequence
  Probe
gaagcgggtgctcttat

SEQ ID NO: 10071 - DNA, 18 bp, Artificial Sequence
  Probe
gaagcgggtgctcttatt

SEQ ID NO: 10072 - DNA, 19 bp, Artificial Sequence
  Probe
gaagcgggtgctcttattt

SEQ ID NO: 10073 - DNA, 20 bp, Artificial Sequence
  Probe
gaagcgggtgctcttatttt

SEQ ID NO: 10074 - DNA, 21 bp, Artificial Sequence
  Probe
gaagcgggtgctcttattttt

SEQ ID NO: 10075 - DNA, 30 bp, Artificial Sequence; identical to SEQ ID NO: 5510
  Probe

SEQ ID NO: 10076 - DNA, 25 bp, Artificial Sequence
  Probe
gaaggttgcgtgttcaagtcacgtc

SEQ ID NO: 10077 - DNA, 23 bp, Artificial Sequence
  Probe
gaagtcgcattttgtgaaccctg

SEQ ID NO: 10078 - DNA, 19 bp, Artificial Sequence
  Probe
gaatccagcgatccgagtt

SEQ ID NO: 10079 - DNA, 20 bp, Artificial Sequence
  Probe
gaatccggctcgaaggacga

SEQ ID NO: 10080 - DNA, 17 bp, Artificial Sequence
  Probe
gaattctcgcctgccac

SEQ ID NO: 10081 - DNA, 18 bp, Artificial Sequence
  Probe
gaccacgtggcctaatgg

SEQ ID NO: 10082 - DNA, 24 bp, Artificial Sequence
  Probe
gaccacgtggcctaatggataagg

SEQ ID NO: 10083 - DNA, 16 bp, Artificial Sequence
  Probe
gacccagtggcctaat

SEQ ID NO: 10084 - DNA, 17 bp, Artificial Sequence
  Probe
gacccagtggcctaatg

SEQ ID NO: 10085 - DNA, 18 bp, Artificial Sequence
  Probe
gacccagtggcctaatgg

SEQ ID NO: 10086 - DNA, 19 bp, Artificial Sequence
  Probe
gacccagtggcctaatgga

SEQ ID NO: 10087 - DNA, 20 bp, Artificial Sequence
  Probe
gacccagtggcctaatggat

SEQ ID NO: 10088 - DNA, 21 bp, Artificial Sequence
  Probe
gacccagtggcctaatggata

SEQ ID NO: 10089 - DNA, 22 bp, Artificial Sequence
  Probe
gacccagtggcctaatggataa

SEQ ID NO: 10090 - DNA, 25 bp, Artificial Sequence
  Probe
gacccagtggcctaatggataaggc

SEQ ID NO: 10091 - DNA, 26 bp, Artificial Sequence
  Probe
gacccagtggcctaatggataaggca

SEQ ID NO: 10092 - DNA, 28 bp, Artificial Sequence
  Probe
gacccagtggcctaatggataaggcatc

SEQ ID NO: 10093 - DNA, 29 bp, Artificial Sequence
  Probe
gacccagtggcctaatggataaggcatca

SEQ ID NO: 10094 - DNA, 21 bp, Artificial Sequence
  Probe
gacccgggttcgattcccggc

SEQ ID NO: 10095 - DNA, 16 bp, Artificial Sequence
  Probe
gaccgcgtggcctaat

SEQ ID NO: 10096 - DNA, 17 bp, Artificial Sequence
  Probe
gaccgcgtggcctaatg

SEQ ID NO: 10097 - DNA, 20 bp, Artificial Sequence
  Probe
gaccgcgtggcctaatggat

SEQ ID NO: 10098 - DNA, 23 bp, Artificial Sequence
  Probe
gaccgcgtggcctaatggataag

SEQ ID NO: 10099 - DNA, 24 bp, Artificial Sequence
  Probe
gaccgcgtggcctaatggataagg

SEQ ID NO: 10100 - DNA, 25 bp, Artificial Sequence
  Probe
gaccgcgtggcctaatggataaggc

SEQ ID NO: 10101 - DNA, 30 bp, Artificial Sequence
  Probe
gaccgcgtggcctaatggataaggcgtctg

SEQ ID NO: 10102 - DNA, 24 bp, Artificial Sequence
  Probe
gaccggggttcgattccccgacgg

SEQ ID NO: 10103 - DNA, 25 bp, Artificial Sequence
  Probe
gaccggggttcgattccccgacggg

SEQ ID NO: 10104 - DNA, 27 bp, Artificial Sequence
  Probe
gaccggggttcgattccccgacgggga

SEQ ID NO: 10105 - DNA, 30 bp, Artificial Sequence; identical to SEQ ID NO: 5576
  Probe

SEQ ID NO: 10106 - DNA, 30 bp, Artificial Sequence; identical to SEQ ID NO: 5579
  Probe

SEQ ID NO: 10107 - DNA, 18 bp, Artificial Sequence
  Probe
gacctcgtggcgcaacgg

SEQ ID NO: 10108 - DNA, 20 bp, Artificial Sequence
  Probe
gacctcgtggcgcaacggta

SEQ ID NO: 10109 - DNA, 22 bp, Artificial Sequence
  Probe
gacctcgtggcgcaacggtagc

SEQ ID NO: 10110 - DNA, 23 bp, Artificial Sequence
  Probe
gacctcgtggcgcaacggtagcg

SEQ ID NO: 10111 - DNA, 29 bp, Artificial Sequence
  Probe
gacctcgtggcgcaacggtagcgcgtctg

SEQ ID NO: 10112 - DNA, 19 bp, Artificial Sequence
  Probe
gacctcgtggcgcaatggt

SEQ ID NO: 10113 - DNA, 22 bp, Artificial Sequence
  Probe
gacctcgtggcgcaatggtagc

SEQ ID NO: 10114 - DNA, 24 bp, Artificial Sequence
  Probe
gacctcgtggcgcaatggtagcgc

SEQ ID NO: 10115 - DNA, 29 bp, Artificial Sequence
  Probe
gacctcgtggcgcaatggtagcgcgtctg

SEQ ID NO: 10116 - DNA, 15 bp, Artificial Sequence
  Probe
gacgaggtggccgag

SEQ ID NO: 10117 - DNA, 16 bp, Artificial Sequence
  Probe
gacgaggtggccgagt

SEQ ID NO: 10118 - DNA, 18 bp, Artificial Sequence
  Probe
gacgaggtggccgagtgg

SEQ ID NO: 10119 - DNA, 19 bp, Artificial Sequence
  Probe
gacgaggtggccgagtggt

SEQ ID NO: 10120 - DNA, 20 bp, Artificial Sequence
  Probe
gacgaggtggccgagtggtt

SEQ ID NO: 10121 - DNA, 21 bp, Artificial Sequence
  Probe
gacgaggtggccgagtggtta

SEQ ID NO: 10122 - DNA, 22 bp, Artificial Sequence
  Probe
gacgaggtggccgagtggttaa

SEQ ID NO: 10123 - DNA, 23 bp, Artificial Sequence
  Probe
gacgaggtggccgagtggttaag

SEQ ID NO: 10124 - DNA, 26 bp, Artificial Sequence
  Probe
gacgaggtggccgagtggttaaggcg

SEQ ID NO: 10125 - DNA, 27 bp, Artificial Sequence
  Probe
gacgaggtggccgagtggttaaggcga

SEQ ID NO: 10126 - DNA, 29 bp, Artificial Sequence
  Probe
gacgaggtggccgagtggttaaggcgatg

SEQ ID NO: 10127 - DNA, 30 bp, Artificial Sequence
  Probe
gacgaggtggccgagtggttaaggcgatgg

SEQ ID NO: 10128 - DNA, 18 bp, Artificial Sequence
  Probe
gactatgagaatcgaacc

SEQ ID NO: 10129 - DNA, 19 bp, Artificial Sequence
  Probe
gactatgagaatcgaaccc

SEQ ID NO: 10130 - DNA, 22 bp, Artificial Sequence
  Probe
gactctgaatccagcgatccga

SEQ ID NO: 10131 - DNA, 15 bp, Artificial Sequence
  Probe
gagaaagctcacaag

SEQ ID NO: 10132 - DNA, 16 bp, Artificial Sequence
  Probe
gagaaagctcacaaga

SEQ ID NO: 10133 - DNA, 17 bp, Artificial Sequence
  Probe
gagaaagctcacaagaa

SEQ ID NO: 10134 - DNA, 20 bp, Artificial Sequence
  Probe
gagaaagctcacaagaactg

SEQ ID NO: 10135 - DNA, 23 bp, Artificial Sequence
  Probe
gagaaagctcacaagaactgcta

SEQ ID NO: 10136 - DNA, 24 bp, Artificial Sequence
  Probe
gagaaagctcacaagaactgctaa

SEQ ID NO: 10137 - DNA, 27 bp, Artificial Sequence
  Probe
gagaaagctcacaagaactgctaactc

SEQ ID NO: 10138 - DNA, 29 bp, Artificial Sequence
  Probe
gagaaagctcacaagaactgctaactcat

SEQ ID NO: 10139 - DNA, 30 bp, Artificial Sequence; identical to SEQ ID NO: 932
  Probe

SEQ ID NO: 10140 - DNA, 22 bp, Artificial Sequence
  Probe
gagaaccaacacctctttacag

SEQ ID NO: 10141 - DNA, 24 bp, Artificial Sequence
  Probe
gagaaccaacacctctttacagtg

SEQ ID NO: 10142 - DNA, 30 bp, Artificial Sequence
  Probe
gagaatagtttaaattagaatcttagcttt

SEQ ID NO: 10143 - DNA, 26 bp, Artificial Sequence
  Probe
gagaccggggttcgattccccgacgg

SEQ ID NO: 10144 - DNA, 27 bp, Artificial Sequence
  Probe
gagaccggggttcgattccccgacggg

SEQ ID NO: 10145 - DNA, 30 bp, Artificial Sequence; identical to SEQ ID NO: 957
  Probe

SEQ ID NO: 10146 - DNA, 22 bp, Artificial Sequence
  Probe
gagatttcaacttaacttgacc

SEQ ID NO: 10147 - DNA, 23 bp, Artificial Sequence
  Probe
gagatttcaacttaacttgaccg

SEQ ID NO: 10148 - DNA, 24 bp, Artificial Sequence
  Probe
gagatttcaacttaacttgaccgc

SEQ ID NO: 10149 - DNA, 25 bp, Artificial Sequence
  Probe
gagatttcaacttaacttgaccgct

SEQ ID NO: 10150 - DNA, 26 bp, Artificial Sequence
  Probe
gagatttcaacttaacttgaccgctc

SEQ ID NO: 10151 - DNA, 27 bp, Artificial Sequence
  Probe
gagatttcaacttaacttgaccgctct

SEQ ID NO: 10152 - DNA, 28 bp, Artificial Sequence
  Probe
gagatttcaacttaacttgaccgctctg

SEQ ID NO: 10153 - DNA, 29 bp, Artificial Sequence
  Probe
gagatttcaacttaacttgaccgctctga

SEQ ID NO: 10154 - DNA, 30 bp, Artificial Sequence; identical to SEQ ID NO: 5641
  Probe

SEQ ID NO: 10155 - DNA, 15 bp, Artificial Sequence
  Probe
gagctcaattacttt

SEQ ID NO: 10156 - DNA, 16 bp, Artificial Sequence
  Probe
gagctcaattactttt

SEQ ID NO: 10157 - DNA, 24 bp, Artificial Sequence
  Probe
gaggccccgggttcaatccccggc

SEQ ID NO: 10158 - DNA, 24 bp, Artificial Sequence
  Probe
gaggccccgggttcgatccccggc

SEQ ID NO: 10159 - DNA, 30 bp, Artificial Sequence
  Probe
gagggtccagggttcaagtccctgttcggg

SEQ ID NO: 10160 - DNA, 28 bp, Artificial Sequence
  Probe
gaggtcccgggttcaaatcccggacgag

SEQ ID NO: 10161 - DNA, 30 bp, Artificial Sequence
  Probe
gaggtcccgggttcaaatcccggacgagcc

SEQ ID NO: 10162 - DNA, 19 bp, Artificial Sequence
  Probe
gaggtcgatggatcgaaac

SEQ ID NO: 10163 - DNA, 21 bp, Artificial Sequence
  Probe
gaggtcgatggatcgaaacca

SEQ ID NO: 10164 - DNA, 24 bp, Artificial Sequence
  Probe
gaggtcgatggatcgaaaccatcc

SEQ ID NO: 10165 - DNA, 15 bp, Artificial Sequence
  Probe
gagtgaagcattgga

SEQ ID NO: 10166 - DNA, 17 bp, Artificial Sequence
  Probe
gagtgaagcattggact

SEQ ID NO: 10167 - DNA, 18 bp, Artificial Sequence
  Probe
gagtgaagcattggactg

SEQ ID NO: 10168 - DNA, 19 bp, Artificial Sequence
  Probe
gagtgaagcattggactgt

SEQ ID NO: 10169 - DNA, 20 bp, Artificial Sequence
  Probe
gagtgaagcattggactgta

SEQ ID NO: 10170 - DNA, 21 bp, Artificial Sequence
  Probe
gagtgaagcattggactgtaa

SEQ ID NO: 10171 - DNA, 22 bp, Artificial Sequence
  Probe
gagtgaagcattggactgtaaa

SEQ ID NO: 10172 - DNA, 23 bp, Artificial Sequence
  Probe
gagtgaagcattggactgtaaat

SEQ ID NO: 10173 - DNA, 24 bp, Artificial Sequence
  Probe
gagtgaagcattggactgtaaatc

SEQ ID NO: 10174 - DNA, 25 bp, Artificial Sequence
  Probe
gagtgaagcattggactgtaaatct

SEQ ID NO: 10175 - DNA, 26 bp, Artificial Sequence
  Probe
gagtgaagcattggactgtaaatcta

SEQ ID NO: 10176 - DNA, 29 bp, Artificial Sequence
  Probe
gagtgaagcattggactgtaaatctaaag

SEQ ID NO: 10177 - DNA, 27 bp, Artificial Sequence
  Probe
gagtggcgcagcggaagcgtgctgggc

SEQ ID NO: 10178 - DNA, 28 bp, Artificial Sequence
  Probe
gagtggcgcagcggaagcgtgctgggcc

SEQ ID NO: 10179 - DNA, 30 bp, Artificial Sequence; identical to SEQ ID NO: 5697
  Probe

SEQ ID NO: 10180 - DNA, 22 bp, Artificial Sequence
  Probe
gagttaaagactttttctctga

SEQ ID NO: 10181 - DNA, 23 bp, Artificial Sequence
  Probe
gagttaaagactttttctctgat

SEQ ID NO: 10182 - DNA, 20 bp, Artificial Sequence
  Probe
gataacagctatccattggt

SEQ ID NO: 10183 - DNA, 23 bp, Artificial Sequence
  Probe
gatatccaaccttcagctatagg

SEQ ID NO: 10184 - DNA, 22 bp, Artificial Sequence
  Probe
gatcctgggttcgaatcccagc

SEQ ID NO: 10185 - DNA, 15 bp, Artificial Sequence
  Probe
gatcgtatagtggtt

SEQ ID NO: 10186 - DNA, 16 bp, Artificial Sequence
  Probe
gatcgtatagtggtta

SEQ ID NO: 10187 - DNA, 17 bp, Artificial Sequence
  Probe
gatcgtatagtggttag

SEQ ID NO: 10188 - DNA, 18 bp, Artificial Sequence
  Probe
gatcgtatagtggttagt

SEQ ID NO: 10189 - DNA, 19 bp, Artificial Sequence
  Probe
gatcgtatagtggttagta

SEQ ID NO: 10190 - DNA, 20 bp, Artificial Sequence
  Probe
gatcgtatagtggttagtac

SEQ ID NO: 10191 - DNA, 21 bp, Artificial Sequence
  Probe
gatcgtatagtggttagtact

SEQ ID NO: 10192 - DNA, 22 bp, Artificial Sequence
  Probe
gatcgtatagtggttagtactc

SEQ ID NO: 10193 - DNA, 23 bp, Artificial Sequence
  Probe
gatcgtatagtggttagtactct

SEQ ID NO: 10194 - DNA, 24 bp, Artificial Sequence
  Probe
gatcgtatagtggttagtactctg

SEQ ID NO: 10195 - DNA, 25 bp, Artificial Sequence
  Probe
gatcgtatagtggttagtactctgc

SEQ ID NO: 10196 - DNA, 27 bp, Artificial Sequence
  Probe
gatcgtatagtggttagtactctgcgt

SEQ ID NO: 10197 - DNA, 28 bp, Artificial Sequence
  Probe
gatcgtatagtggttagtactctgcgtt

SEQ ID NO: 10198 - DNA, 30 bp, Artificial Sequence; identical to SEQ ID NO: 5730
  Probe

SEQ ID NO: 10199 - DNA, 21 bp, Artificial Sequence
  Probe
gatggccgagcggtctaaggc

SEQ ID NO: 10200 - DNA, 29 bp, Artificial Sequence
  Probe
gatggccgagcggtctaaggcgctgcgtt

SEQ ID NO: 10201 - DNA, 30 bp, Artificial Sequence
  Probe
gatggccgagcggtctaaggcgctgcgttc

SEQ ID NO: 10202 - DNA, 30 bp, Artificial Sequence
  Probe
gatggtttttcatatcattggtcgtggttg

SEQ ID NO: 10203 - DNA, 21 bp, Artificial Sequence
  Probe
gatgtagctcagtggtagagc

SEQ ID NO: 10204 - DNA, 30 bp, Artificial Sequence
  Probe
gattaagagaaccaacacctctttacagtg

SEQ ID NO: 10205 - DNA, 20 bp, Artificial Sequence
  Probe
gattccaggttcgactcctg

SEQ ID NO: 10206 - DNA, 25 bp, Artificial Sequence
  Probe
gattccaggttcgactcctggctgg

SEQ ID NO: 10207 - DNA, 28 bp, Artificial Sequence
  Probe
gattccaggttcgactcctggctggctc

SEQ ID NO: 10208 - DNA, 29 bp, Artificial Sequence
  Probe
gattccaggttcgactcctggctggctcg

SEQ ID NO: 10209 - DNA, 30 bp, Artificial Sequence
  Probe
gattccaggttcgactcctggctggctcgg

SEQ ID NO: 10210 - DNA, 30 bp, Artificial Sequence
  Probe
gattccaggttcgactcctggctggctcgt

SEQ ID NO: 10211 - DNA, 21 bp, Artificial Sequence
  Probe
gattcccattcttgcgacccg

SEQ ID NO: 10212 - DNA, 22 bp, Artificial Sequence
  Probe
gattcccattcttgcgacccgg

SEQ ID NO: 10213 - DNA, 18 bp, Artificial Sequence
  Probe
gattccccgacggggaga

SEQ ID NO: 10214 - DNA, 18 bp, Artificial Sequence
  Probe
gattccccgacggggagg

SEQ ID NO: 10215 - DNA, 20 bp, Artificial Sequence
  Probe
gattccccgacggggaggca

SEQ ID NO: 10216 - DNA, 20 bp, Artificial Sequence
  Probe
gattcccggtcagggaacaa

SEQ ID NO: 10217 - DNA, 20 bp, Artificial Sequence
  Probe
gattcccggtcatggaacca

SEQ ID NO: 10218 - DNA, 18 bp, Artificial Sequence
  Probe
gattccggctcgaaggac

SEQ ID NO: 10219 - DNA, 19 bp, Artificial Sequence
  Probe
gattccggctcgaaggact

SEQ ID NO: 10220 - DNA, 28 bp, Artificial Sequence
  Probe
gattccggctcgaaggacttcgtctgta

SEQ ID NO: 10221 - DNA, 20 bp, Artificial Sequence
  Probe
gattcctggtcagggaacca

SEQ ID NO: 10222 - DNA, 20 bp, Artificial Sequence
  Probe
gattctaggttcgactcctg

SEQ ID NO: 10223 - DNA, 25 bp, Artificial Sequence
  Probe
gattctaggttcgactcctggctgg

SEQ ID NO: 10224 - DNA, 29 bp, Artificial Sequence
  Probe
gattctaggttcgactcctggctggctcg

SEQ ID NO: 10225 - DNA, 30 bp, Artificial Sequence
  Probe
gattctaggttcgactcctggctggctcgc

SEQ ID NO: 10226 - DNA, 22 bp, Artificial Sequence
  Probe
gattgagggttcgagtcccttc

SEQ ID NO: 10227 - DNA, 15 bp, Artificial Sequence
  Probe
gattgtgaatctgac

SEQ ID NO: 10228 - DNA, 16 bp, Artificial Sequence
  Probe
gattgtgaatctgaca

SEQ ID NO: 10229 - DNA, 17 bp, Artificial Sequence
  Probe
gattgtgaatctgacaa

SEQ ID NO: 10230 - DNA, 18 bp, Artificial Sequence
  Probe
gattgtgaatctgacaac

SEQ ID NO: 10231 - DNA, 19 bp, Artificial Sequence
  Probe
gattgtgaatctgacaaca

SEQ ID NO: 10232 - DNA, 20 bp, Artificial Sequence
  Probe
gattgtgaatctgacaacag

SEQ ID NO: 10233 - DNA, 21 bp, Artificial Sequence
  Probe
gattgtgaatctgacaacaga

SEQ ID NO: 10234 - DNA, 22 bp, Artificial Sequence
  Probe
gattgtgaatctgacaacagag

SEQ ID NO: 10235 - DNA, 24 bp, Artificial Sequence
  Probe
gattgtgaatctgacaacagaggc

SEQ ID NO: 10236 - DNA, 25 bp, Artificial Sequence
  Probe
gattgtgaatctgacaacagaggct

SEQ ID NO: 10237 - DNA, 29 bp, Artificial Sequence
  Probe
gattgtgaatctgacaacagaggcttacg

SEQ ID NO: 10238 - DNA, 22 bp, Artificial Sequence
  Probe
gattgtgggttcgagtcccatc

SEQ ID NO: 10239 - DNA, 19 bp, Artificial Sequence
  Probe
gatttcaacttaacttgac

SEQ ID NO: 10240 - DNA, 20 bp, Artificial Sequence
  Probe
gatttcaacttaacttgacc

SEQ ID NO: 10241 - DNA, 21 bp, Artificial Sequence
  Probe
gatttcaacttaacttgaccg

SEQ ID NO: 10242 - DNA, 22 bp, Artificial Sequence
  Probe
gatttcaacttaacttgaccgc

SEQ ID NO: 10243 - DNA, 23 bp, Artificial Sequence
  Probe
gatttcaacttaacttgaccgct

SEQ ID NO: 10244 - DNA, 24 bp, Artificial Sequence
  Probe
gatttcaacttaacttgaccgctc

SEQ ID NO: 10245 - DNA, 25 bp, Artificial Sequence
  Probe
gatttcaacttaacttgaccgctct

SEQ ID NO: 10246 - DNA, 26 bp, Artificial Sequence
  Probe
gatttcaacttaacttgaccgctctg

SEQ ID NO: 10247 - DNA, 27 bp, Artificial Sequence
  Probe
gatttcaacttaacttgaccgctctga

SEQ ID NO: 10248 - DNA, 28 bp, Artificial Sequence
  Probe
gatttcaacttaacttgaccgctctgag

SEQ ID NO: 10249 - DNA, 29 bp, Artificial Sequence
  Probe
gatttcaacttaacttgaccgctctgagc

SEQ ID NO: 10250 - DNA, 29 bp, Artificial Sequence
  Probe
gcaacctcggttcgaatccgagtcacggc

SEQ ID NO: 10251 - DNA, 15 bp, Artificial Sequence
  Probe
gcaactggtcgtttt

SEQ ID NO: 10252 - DNA, 19 bp, Artificial Sequence
  Probe
gcaatggatagcgcattgg

SEQ ID NO: 10253 - DNA, 21 bp, Artificial Sequence
  Probe
gcaatggtggttcagtggtag

SEQ ID NO: 10254 - DNA, 22 bp, Artificial Sequence
  Probe
gcaatggtggttcagtggtaga

SEQ ID NO: 10255 - DNA, 23 bp, Artificial Sequence
  Probe
gcaatggtggttcagtggtagaa

SEQ ID NO: 10256 - DNA, 24 bp, Artificial Sequence
  Probe
gcaatggtggttcagtggtagaat

SEQ ID NO: 10257 - DNA, 25 bp, Artificial Sequence
  Probe
gcaatggtggttcagtggtagaatt

SEQ ID NO: 10258 - DNA, 26 bp, Artificial Sequence
  Probe
gcaatggtggttcagtggtagaattc

SEQ ID NO: 10259 - DNA, 27 bp, Artificial Sequence
  Probe
gcaatggtggttcagtggtagaattct

SEQ ID NO: 10260 - DNA, 28 bp, Artificial Sequence
  Probe
gcaatggtggttcagtggtagaattctc

SEQ ID NO: 10261 - DNA, 29 bp, Artificial Sequence
  Probe
gcaatggtggttcagtggtagaattctcg

SEQ ID NO: 10262 - DNA, 30 bp, Artificial Sequence
  Probe
gcaatggtggttcagtggtagaattctcgc

SEQ ID NO: 10263 - DNA, 30 bp, Artificial Sequence; identical to SEQ ID NO: 5807
  Probe

SEQ ID NO: 10264 - DNA, 16 bp, Artificial Sequence
  Probe
gcactctggactctga

SEQ ID NO: 10265 - DNA, 19 bp, Artificial Sequence
  Probe
gcactctggactctgaatc

SEQ ID NO: 10266 - DNA, 20 bp, Artificial Sequence
  Probe
gcactctggactctgaatcc

SEQ ID NO: 10267 - DNA, 21 bp, Artificial Sequence
  Probe
gcactctggactctgaatcca

SEQ ID NO: 10268 - DNA, 23 bp, Artificial Sequence
  Probe
gcactctggactctgaatccagc

SEQ ID NO: 10269 - DNA, 29 bp, Artificial Sequence
  Probe
gcactctggactctgaatccagcgatccg

SEQ ID NO: 10270 - DNA, 19 bp, Artificial Sequence
  Probe
gcactctggactttgaatc

SEQ ID NO: 10271 - DNA, 19 bp, Artificial Sequence
  Probe
gcactggtggttcagtggt

SEQ ID NO: 10272 - DNA, 21 bp, Artificial Sequence
  Probe
gcactggtggttcagtggtag

SEQ ID NO: 10273 - DNA, 22 bp, Artificial Sequence
  Probe
gcactggtggttcagtggtaga

SEQ ID NO: 10274 - DNA, 23 bp, Artificial Sequence
  Probe
gcactggtggttcagtggtagaa

SEQ ID NO: 10275 - DNA, 24 bp, Artificial Sequence
  Probe
gcactggtggttcagtggtagaat

SEQ ID NO: 10276 - DNA, 25 bp, Artificial Sequence
  Probe
gcactggtggttcagtggtagaatt

SEQ ID NO: 10277 - DNA, 26 bp, Artificial Sequence
  Probe
gcactggtggttcagtggtagaattc

SEQ ID NO: 10278 - DNA, 27 bp, Artificial Sequence
  Probe
gcactggtggttcagtggtagaattct

SEQ ID NO: 10279 - DNA, 28 bp, Artificial Sequence
  Probe
gcactggtggttcagtggtagaattctc

SEQ ID NO: 10280 - DNA, 29 bp, Artificial Sequence
  Probe
gcactggtggttcagtggtagaattctcg

SEQ ID NO: 10281 - DNA, 30 bp, Artificial Sequence
  Probe
gcagaaggtcctgggttcgagccccagtgg

SEQ ID NO: 10282 - DNA, 18 bp, Artificial Sequence
  Probe
gcagagcccggtaatcgc

SEQ ID NO: 10283 - DNA, 19 bp, Artificial Sequence
  Probe
gcagagcccggtaatcgca

SEQ ID NO: 10284 - DNA, 20 bp, Artificial Sequence
  Probe
gcagagcccggtaatcgcat

SEQ ID NO: 10285 - DNA, 22 bp, Artificial Sequence
  Probe
gcagagcccggtaatcgcataa

SEQ ID NO: 10286 - DNA, 23 bp, Artificial Sequence
  Probe
gcagagcccggtaatcgcataaa

SEQ ID NO: 10287 - DNA, 29 bp, Artificial Sequence
  Probe
gcagagcccggtaatcgcataaaacttaa

SEQ ID NO: 10288 - DNA, 28 bp, Artificial Sequence
  Probe
gcagagtggcgcagcggaagcgtgctgg

SEQ ID NO: 10289 - DNA, 29 bp, Artificial Sequence
  Probe
gcagagtggcgcagcggaagcgtgctggg

SEQ ID NO: 10290 - DNA, 26 bp, Artificial Sequence
  Probe
gcagcaacctcggttcgaatccgagt

SEQ ID NO: 10291 - DNA, 30 bp, Artificial Sequence
  Probe
gcagcaacctcggttcgaatccgagtcacg

SEQ ID NO: 10292 - DNA, 24 bp, Artificial Sequence
  Probe
gcagcgatggccgagtggttaagg

SEQ ID NO: 10293 - DNA, 25 bp, Artificial Sequence
  Probe
gcagcgatggccgagtggttaaggc

SEQ ID NO: 10294 - DNA, 30 bp, Artificial Sequence
  Probe
gcagcgatggccgagtggttaaggcgttgg

SEQ ID NO: 10295 - DNA, 21 bp, Artificial Sequence
  Probe
gcagcggaagcgtgctgggcc

SEQ ID NO: 10296 - DNA, 23 bp, Artificial Sequence
  Probe
gcaggttcgaatcctgctcacag

SEQ ID NO: 10297 - DNA, 21 bp, Artificial Sequence
  Probe
gcagtaggtagcgcatcagtc

SEQ ID NO: 10298 - DNA, 21 bp, Artificial Sequence
  Probe
gcagtaggtagcgcgtcagtc

SEQ ID NO: 10299 - DNA, 21 bp, Artificial Sequence
  Probe
gcagtggtagaattctcgcct

SEQ ID NO: 10300 - DNA, 19 bp, Artificial Sequence
  Probe
gcataggtggttcagtggt

SEQ ID NO: 10301 - DNA, 24 bp, Artificial Sequence
  Probe
gcataggtggttcagtggtagaat

SEQ ID NO: 10302 - DNA, 25 bp, Artificial Sequence
  Probe
gcataggtggttcagtggtagaatt

SEQ ID NO: 10303 - DNA, 26 bp, Artificial Sequence
  Probe
gcataggtggttcagtggtagaattc

SEQ ID NO: 10304 - DNA, 27 bp, Artificial Sequence
  Probe
gcataggtggttcagtggtagaattct

SEQ ID NO: 10305 - DNA, 28 bp, Artificial Sequence
  Probe
gcataggtggttcagtggtagaattctt

SEQ ID NO: 10306 - DNA, 29 bp, Artificial Sequence
  Probe
gcataggtggttcagtggtagaattcttg

SEQ ID NO: 10307 - DNA, 30 bp, Artificial Sequence
  Probe
gcataggtggttcagtggtagaattcttgc

SEQ ID NO: 10308 - DNA, 20 bp, Artificial Sequence
  Probe
gcatgcacgaggccccgggt

SEQ ID NO: 10309 - DNA, 15 bp, Artificial Sequence
  Probe
gcatgggtggttcag

SEQ ID NO: 10310 - DNA, 16 bp, Artificial Sequence
  Probe
gcatgggtggttcagt

SEQ ID NO: 10311 - DNA, 17 bp, Artificial Sequence
  Probe
gcatgggtggttcagtg

SEQ ID NO: 10312 - DNA, 18 bp, Artificial Sequence
  Probe
gcatgggtggttcagtgg

SEQ ID NO: 10313 - DNA, 19 bp, Artificial Sequence
  Probe
gcatgggtggttcagtggt

SEQ ID NO: 10314 - DNA, 20 bp, Artificial Sequence
  Probe
gcatgggtggttcagtggta

SEQ ID NO: 10315 - DNA, 21 bp, Artificial Sequence
  Probe
gcatgggtggttcagtggtag

SEQ ID NO: 10316 - DNA, 22 bp, Artificial Sequence
  Probe
gcatgggtggttcagtggtaga

SEQ ID NO: 10317 - DNA, 23 bp, Artificial Sequence
  Probe
gcatgggtggttcagtggtagaa

SEQ ID NO: 10318 - DNA, 24 bp, Artificial Sequence
  Probe
gcatgggtggttcagtggtagaat

SEQ ID NO: 10319 - DNA, 25 bp, Artificial Sequence
  Probe
gcatgggtggttcagtggtagaatt

SEQ ID NO: 10320 - DNA, 26 bp, Artificial Sequence
  Probe
gcatgggtggttcagtggtagaattc

SEQ ID NO: 10321 - DNA, 27 bp, Artificial Sequence
  Probe
gcatgggtggttcagtggtagaattct

SEQ ID NO: 10322 - DNA, 20 bp, Artificial Sequence
  Probe
gcatgtgtgaggtcccgggt

SEQ ID NO: 10323 - DNA, 17 bp, Artificial Sequence
  Probe
gcattggactgtaaatc

SEQ ID NO: 10324 - DNA, 18 bp, Artificial Sequence
  Probe
gcattggactgtaaatct

SEQ ID NO: 10325 - DNA, 19 bp, Artificial Sequence
  Probe
gcattggactgtaaatcta

SEQ ID NO: 10326 - DNA, 25 bp, Artificial Sequence
  Probe
gcattggactgtaaatctaaagaca

SEQ ID NO: 10327 - DNA, 29 bp, Artificial Sequence
  Probe
gcattggtggttcaatggtagaattctcg

SEQ ID NO: 10328 - DNA, 30 bp, Artificial Sequence
  Probe
gcattggtggttcaatggtagaattctcgc

SEQ ID NO: 10329 - DNA, 15 bp, Artificial Sequence
  Probe
gcattggtggttcag

SEQ ID NO: 10330 - DNA, 16 bp, Artificial Sequence
  Probe
gcattggtggttcagt

SEQ ID NO: 10331 - DNA, 17 bp, Artificial Sequence
  Probe
gcattggtggttcagtg

SEQ ID NO: 10332 - DNA, 18 bp, Artificial Sequence
  Probe
gcattggtggttcagtgg

SEQ ID NO: 10333 - DNA, 19 bp, Artificial Sequence
  Probe
gcattggtggttcagtggt

SEQ ID NO: 10334 - DNA, 20 bp, Artificial Sequence
  Probe
gcattggtggttcagtggta

SEQ ID NO: 10335 - DNA, 21 bp, Artificial Sequence
  Probe
gcattggtggttcagtggtag

SEQ ID NO: 10336 - DNA, 22 bp, Artificial Sequence
  Probe
gcattggtggttcagtggtaga

SEQ ID NO: 10337 - DNA, 23 bp, Artificial Sequence
  Probe
gcattggtggttcagtggtagaa

SEQ ID NO: 10338 - DNA, 24 bp, Artificial Sequence
  Probe
gcattggtggttcagtggtagaat

SEQ ID NO: 10339 - DNA, 25 bp, Artificial Sequence
  Probe
gcattggtggttcagtggtagaatt

SEQ ID NO: 10340 - DNA, 26 bp, Artificial Sequence
  Probe
gcattggtggttcagtggtagaattc

SEQ ID NO: 10341 - DNA, 27 bp, Artificial Sequence
  Probe
gcattggtggttcagtggtagaattct

SEQ ID NO: 10342 - DNA, 28 bp, Artificial Sequence
  Probe
gcattggtggttcagtggtagaattctc

SEQ ID NO: 10343 - DNA, 29 bp, Artificial Sequence
  Probe
gcattggtggttcagtggtagaattctcg

SEQ ID NO: 10344 - DNA, 30 bp, Artificial Sequence; identical to SEQ ID NO: 5900
  Probe

SEQ ID NO: 10345 - DNA, 27 bp, Artificial Sequence
  Probe
gccaaggtcgcgggttcgatccccgta

SEQ ID NO: 10346 - DNA, 25 bp, Artificial Sequence
  Probe
gccagggattgtgggttcgagtccc

SEQ ID NO: 10347 - DNA, 29 bp, Artificial Sequence
  Probe
gccatgatcgtatagtggttagtactctg

SEQ ID NO: 10348 - DNA, 30 bp, Artificial Sequence
  Probe
gccatgatcgtatagtggttagtactctgc

SEQ ID NO: 10349 - DNA, 30 bp, Artificial Sequence
  Probe
gcccagctagctcagtcggtagagcatgag

SEQ ID NO: 10350 - DNA, 15 bp, Artificial Sequence
  Probe
gccccagtggcctaa

SEQ ID NO: 10351 - DNA, 16 bp, Artificial Sequence
  Probe
gccccagtggcctaat

SEQ ID NO: 10352 - DNA, 17 bp, Artificial Sequence
  Probe
gccccagtggcctaatg

SEQ ID NO: 10353 - DNA, 20 bp, Artificial Sequence
  Probe
gccccagtggcctaatggat

SEQ ID NO: 10354 - DNA, 23 bp, Artificial Sequence
  Probe
gccccagtggcctaatggataag

SEQ ID NO: 10355 - DNA, 24 bp, Artificial Sequence
  Probe
gccccagtggcctaatggataagg

SEQ ID NO: 10356 - DNA, 25 bp, Artificial Sequence
  Probe
gccccagtggcctaatggataaggc

SEQ ID NO: 10357 - DNA, 30 bp, Artificial Sequence
  Probe
gccccagtggcctaatggataaggcattgg

SEQ ID NO: 10358 - DNA, 19 bp, Artificial Sequence
  Probe
gccccagtggcctgatgga

SEQ ID NO: 10359 - DNA, 29 bp, Artificial Sequence
  Probe
gccccatggtgtaatggttagcactctgg

SEQ ID NO: 10360 - DNA, 15 bp, Artificial Sequence
  Probe
gcccccatgtctaac

SEQ ID NO: 10361 - DNA, 16 bp, Artificial Sequence
  Probe
gcccccatgtctaaca

SEQ ID NO: 10362 - DNA, 18 bp, Artificial Sequence
  Probe
gcccccatgtctaacaac

SEQ ID NO: 10363 - DNA, 23 bp, Artificial Sequence
  Probe
gcccccatgtctaacaacatggc

SEQ ID NO: 10364 - DNA, 24 bp, Artificial Sequence
  Probe
gcccccatgtctaacaacatggct

SEQ ID NO: 10365 - DNA, 25 bp, Artificial Sequence
  Probe
gcccccatgtctaacaacatggctt

SEQ ID NO: 10366 - DNA, 27 bp, Artificial Sequence
  Probe
gcccccatgtctaacaacatggctttc

SEQ ID NO: 10367 - DNA, 28 bp, Artificial Sequence
  Probe
gcccccatgtctaacaacatggctttct

SEQ ID NO: 10368 - DNA, 29 bp, Artificial Sequence
  Probe
gcccccatgtctaacaacatggctttctc

SEQ ID NO: 10369 - DNA, 18 bp, Artificial Sequence
  Probe
gccccggtggcctaatgg

SEQ ID NO: 10370 - DNA, 15 bp, Artificial Sequence
  Probe
gcccggatagctcag

SEQ ID NO: 10371 - DNA, 16 bp, Artificial Sequence
  Probe
gcccggatagctcagt

SEQ ID NO: 10372 - DNA, 17 bp, Artificial Sequence
  Probe
gcccggatagctcagtc

SEQ ID NO: 10373 - DNA, 18 bp, Artificial Sequence
  Probe
gcccggatagctcagtcg

SEQ ID NO: 10374 - DNA, 21 bp, Artificial Sequence
  Probe
gcccggatagctcagtcggta

SEQ ID NO: 10375 - DNA, 27 bp, Artificial Sequence
  Probe
gcccggatagctcagtcggtagagcat

SEQ ID NO: 10376 - DNA, 28 bp, Artificial Sequence
  Probe
gcccggatagctcagtcggtagagcatc

SEQ ID NO: 10377 - DNA, 29 bp, Artificial Sequence
  Probe
gcccggatagctcagtcggtagagcatca

SEQ ID NO: 10378 - DNA, 15 bp, Artificial Sequence
  Probe
gcccggctagctcag

SEQ ID NO: 10379 - DNA, 16 bp, Artificial Sequence
  Probe
gcccggctagctcagt

SEQ ID NO: 10380 - DNA, 18 bp, Artificial Sequence
  Probe
gcccggctagctcagtcg

SEQ ID NO: 10381 - DNA, 20 bp, Artificial Sequence
  Probe
gcccggctagctcagtcggt

SEQ ID NO: 10382 - DNA, 21 bp, Artificial Sequence
  Probe
gcccggctagctcagtcggta

SEQ ID NO: 10383 - DNA, 22 bp, Artificial Sequence
  Probe
gcccggctagctcagtcggtag

SEQ ID NO: 10384 - DNA, 23 bp, Artificial Sequence
  Probe
gcccggctagctcagtcggtaga

SEQ ID NO: 10385 - DNA, 24 bp, Artificial Sequence
  Probe
gcccggctagctcagtcggtagag

SEQ ID NO: 10386 - DNA, 26 bp, Artificial Sequence
  Probe
gcccggctagctcagtcggtagagca

SEQ ID NO: 10387 - DNA, 28 bp, Artificial Sequence
  Probe
gcccggctagctcagtcggtagagcatg

SEQ ID NO: 10388 - DNA, 29 bp, Artificial Sequence
  Probe
gcccggctagctcagtcggtagagcatga

SEQ ID NO: 10389 - DNA, 29 bp, Artificial Sequence
  Probe
gcccggctagctcagtcggtagagcatgg

SEQ ID NO: 10390 - DNA, 22 bp, Artificial Sequence
  Probe
gccgaaatagctcagttgggag

SEQ ID NO: 10391 - DNA, 23 bp, Artificial Sequence
  Probe
gccgaaatagctcagttgggaga

SEQ ID NO: 10392 - DNA, 24 bp, Artificial Sequence
  Probe
gccgaaatagctcagttgggagag

SEQ ID NO: 10393 - DNA, 25 bp, Artificial Sequence
  Probe
gccgaaatagctcagttgggagagc

SEQ ID NO: 10394 - DNA, 30 bp, Artificial Sequence
  Probe
gccgaaatagctcagttgggagagcgttag

SEQ ID NO: 10395 - DNA, 30 bp, Artificial Sequence
  Probe
gccgcggcccgggttcgattcccggtcagg

SEQ ID NO: 10396 - DNA, 18 bp, Artificial Sequence
  Probe
gccgcgtggcctaatgga

SEQ ID NO: 10397 - DNA, 19 bp, Artificial Sequence
  Probe
gccgggtactttcgtattt

SEQ ID NO: 10398 - DNA, 20 bp, Artificial Sequence
  Probe
gccgggtactttcgtatttt

SEQ ID NO: 10399 - DNA, 21 bp, Artificial Sequence
  Probe
gccgggtactttcgtattttt

SEQ ID NO: 10400 - DNA, 19 bp, Artificial Sequence
  Probe
gccggttagctcagttggt

SEQ ID NO: 10401 - DNA, 18 bp, Artificial Sequence
  Probe
gccgtgatcgtatagtgg

SEQ ID NO: 10402 - DNA, 19 bp, Artificial Sequence
  Probe
gccgtgatcgtatagtggt

SEQ ID NO: 10403 - DNA, 20 bp, Artificial Sequence
  Probe
gccgtgatcgtatagtggtt

SEQ ID NO: 10404 - DNA, 21 bp, Artificial Sequence
  Probe
gccgtgatcgtatagtggtta

SEQ ID NO: 10405 - DNA, 22 bp, Artificial Sequence
  Probe
gccgtgatcgtatagtggttag

SEQ ID NO: 10406 - DNA, 23 bp, Artificial Sequence
  Probe
gccgtgatcgtatagtggttagt

SEQ ID NO: 10407 - DNA, 24 bp, Artificial Sequence
  Probe
gccgtgatcgtatagtggttagta

SEQ ID NO: 10408 - DNA, 25 bp, Artificial Sequence
  Probe
gccgtgatcgtatagtggttagtac

SEQ ID NO: 10409 - DNA, 26 bp, Artificial Sequence
  Probe
gccgtgatcgtatagtggttagtact

SEQ ID NO: 10410 - DNA, 27 bp, Artificial Sequence
  Probe
gccgtgatcgtatagtggttagtactc

SEQ ID NO: 10411 - DNA, 28 bp, Artificial Sequence
  Probe
gccgtgatcgtatagtggttagtactct

SEQ ID NO: 10412 - DNA, 29 bp, Artificial Sequence
  Probe
gccgtgatcgtatagtggttagtactctg

SEQ ID NO: 10413 - DNA, 24 bp, Artificial Sequence
  Probe
gcctaatggataaggcatcagcct

SEQ ID NO: 10414 - DNA, 25 bp, Artificial Sequence
  Probe
gcctaatggataaggcatcagcctc

SEQ ID NO: 10415 - DNA, 23 bp, Artificial Sequence
  Probe
gcctcctaagccagggattgtgg

SEQ ID NO: 10416 - DNA, 24 bp, Artificial Sequence
  Probe
gcctcctaagccagggattgtggg

SEQ ID NO: 10417 - DNA, 25 bp, Artificial Sequence
  Probe
gcctcctaagccagggattgtgggt

SEQ ID NO: 10418 - DNA, 19 bp, Artificial Sequence
  Probe
gcctccttagcgcagtagg

SEQ ID NO: 10419 - DNA, 18 bp, Artificial Sequence
  Probe
gcctcgttagcgcagtag

SEQ ID NO: 10420 - DNA, 19 bp, Artificial Sequence
  Probe
gcctcgttagcgcagtagg

SEQ ID NO: 10421 - DNA, 24 bp, Artificial Sequence
  Probe
gcctcgttagcgcagtaggtagcg

SEQ ID NO: 10422 - DNA, 30 bp, Artificial Sequence
  Probe
gcctcgttagcgcagtaggtagcgcgtcag

SEQ ID NO: 10423 - DNA, 19 bp, Artificial Sequence
  Probe
gcctggatagctcagtcgg

SEQ ID NO: 10424 - DNA, 24 bp, Artificial Sequence
  Probe
gcctggatagctcagtcggtagag

SEQ ID NO: 10425 - DNA, 30 bp, Artificial Sequence
  Probe
gcctggatagctcagtcggtagagcatcag

SEQ ID NO: 10426 - DNA, 19 bp, Artificial Sequence
  Probe
gccttggtggtgcagtggt

SEQ ID NO: 10427 - DNA, 21 bp, Artificial Sequence
  Probe
gccttggtggtgcagtggtag

SEQ ID NO: 10428 - DNA, 22 bp, Artificial Sequence
  Probe
gccttggtggtgcagtggtaga

SEQ ID NO: 10429 - DNA, 23 bp, Artificial Sequence
  Probe
gccttggtggtgcagtggtagaa

SEQ ID NO: 10430 - DNA, 24 bp, Artificial Sequence
  Probe
gccttggtggtgcagtggtagaat

SEQ ID NO: 10431 - DNA, 25 bp, Artificial Sequence
  Probe
gccttggtggtgcagtggtagaatt

SEQ ID NO: 10432 - DNA, 27 bp, Artificial Sequence
  Probe
gccttggtggtgcagtggtagaattct

SEQ ID NO: 10433 - DNA, 28 bp, Artificial Sequence
  Probe
gccttggtggtgcagtggtagaattctc

SEQ ID NO: 10434 - DNA, 29 bp, Artificial Sequence
  Probe
gccttggtggtgcagtggtagaattctcg

SEQ ID NO: 10435 - DNA, 30 bp, Artificial Sequence
  Probe
gccttggtggtgcagtggtagaattctcgc

SEQ ID NO: 10436 - DNA, 15 bp, Artificial Sequence
  Probe
gcgaaaggtccccgg

SEQ ID NO: 10437 - DNA, 30 bp, Artificial Sequence
  Probe
gcgaaaggtccccggttcgaaaccgggcgg

SEQ ID NO: 10438 - DNA, 24 bp, Artificial Sequence
  Probe
gcgacccgggttcgattcccgggc

SEQ ID NO: 10439 - DNA, 26 bp, Artificial Sequence
  Probe
gcgacccgggttcgattcccgggcgg

SEQ ID NO: 10440 - DNA, 27 bp, Artificial Sequence
  Probe
gcgacccgggttcgattcccgggcggc

SEQ ID NO: 10441 - DNA, 28 bp, Artificial Sequence
  Probe
gcgacccgggttcgattcccgggcggcg

SEQ ID NO: 10442 - DNA, 29 bp, Artificial Sequence
  Probe
gcgacccgggttcgattcccgggcggcgc

SEQ ID NO: 10443 - DNA, 30 bp, Artificial Sequence
  Probe
gcgagaggtcccgggttcaaatcccggacg

SEQ ID NO: 10444 - DNA, 26 bp, Artificial Sequence
  Probe
gcgagttcaaatctcgctggggcctc

SEQ ID NO: 10445 - DNA, 22 bp, Artificial Sequence
  Probe
gcgcagcggaagcgtgctgggc

SEQ ID NO: 10446 - DNA, 15 bp, Artificial Sequence
  Probe
gcgccgctggtgtag

SEQ ID NO: 10447 - DNA, 17 bp, Artificial Sequence
  Probe
gcgccgctggtgtagtg

SEQ ID NO: 10448 - DNA, 19 bp, Artificial Sequence
  Probe
gcgccgctggtgtagtggt

SEQ ID NO: 10449 - DNA, 23 bp, Artificial Sequence
  Probe
gcgccgctggtgtagtggtatca

SEQ ID NO: 10450 - DNA, 24 bp, Artificial Sequence
  Probe
gcgccgctggtgtagtggtatcat

SEQ ID NO: 10451 - DNA, 25 bp, Artificial Sequence
  Probe
gcgccgctggtgtagtggtatcatg

SEQ ID NO: 10452 - DNA, 26 bp, Artificial Sequence
  Probe
gcgccgctggtgtagtggtatcatgc

SEQ ID NO: 10453 - DNA, 28 bp, Artificial Sequence
  Probe
gcgccgctggtgtagtggtatcatgcaa

SEQ ID NO: 10454 - DNA, 17 bp, Artificial Sequence
  Probe
gcggaagcgtgctgggc

SEQ ID NO: 10455 - DNA, 18 bp, Artificial Sequence
  Probe
gcggaagcgtgctgggcc

SEQ ID NO: 10456 - DNA, 29 bp, Artificial Sequence
  Probe
gcggcccgggttcgactcccggtgtggga

SEQ ID NO: 10457 - DNA, 29 bp, Artificial Sequence
  Probe
gcggcccgggttcgattcccggtcaggga

SEQ ID NO: 10458 - DNA, 30 bp, Artificial Sequence; identical to SEQ ID NO: 1169
  Probe

SEQ ID NO: 10459 - DNA, 29 bp, Artificial Sequence
  Probe
gcgggaggcccgggttcgattcccggcca

SEQ ID NO: 10460 - DNA, 20 bp, Artificial Sequence
  Probe
gcggtctaaggcgctgcgtt

SEQ ID NO: 10461 - DNA, 21 bp, Artificial Sequence
  Probe
gcggtctaaggcgctgcgttc

SEQ ID NO: 10462 - DNA, 17 bp, Artificial Sequence
  Probe
gcggttaggattcctgg

SEQ ID NO: 10463 - DNA, 18 bp, Artificial Sequence
  Probe
gcggttaggattcctggt

SEQ ID NO: 10464 - DNA, 19 bp, Artificial Sequence
  Probe
gcggttaggattcctggtt

SEQ ID NO: 10465 - DNA, 20 bp, Artificial Sequence
  Probe
gcggttaggattcctggttt

SEQ ID NO: 10466 - DNA, 21 bp, Artificial Sequence
  Probe
gcggttaggattcctggtttt

SEQ ID NO: 10467 - DNA, 22 bp, Artificial Sequence
  Probe
gcggttaggattcctggttttc

SEQ ID NO: 10468 - DNA, 21 bp, Artificial Sequence
  Probe
gcgtggcctaatggataaggc

SEQ ID NO: 10469 - DNA, 21 bp, Artificial Sequence
  Probe
gcgttcaggtcgcagtctccc

SEQ ID NO: 10470 - DNA, 24 bp, Artificial Sequence
  Probe
gcgttcgattcccggtcagggaac

SEQ ID NO: 10471 - DNA, 15 bp, Artificial Sequence
  Probe
gcgttggtggtatag

SEQ ID NO: 10472 - DNA, 16 bp, Artificial Sequence
  Probe
gcgttggtggtatagt

SEQ ID NO: 10473 - DNA, 17 bp, Artificial Sequence
  Probe
gcgttggtggtatagtg

SEQ ID NO: 10474 - DNA, 18 bp, Artificial Sequence
  Probe
gcgttggtggtatagtgg

SEQ ID NO: 10475 - DNA, 19 bp, Artificial Sequence
  Probe
gcgttggtggtatagtggt

SEQ ID NO: 10476 - DNA, 20 bp, Artificial Sequence
  Probe
gcgttggtggtatagtggta

SEQ ID NO: 10477 - DNA, 23 bp, Artificial Sequence
  Probe
gcgttggtggtatagtggtaagc

SEQ ID NO: 10478 - DNA, 24 bp, Artificial Sequence
  Probe
gcgttggtggtatagtggtaagca

SEQ ID NO: 10479 - DNA, 26 bp, Artificial Sequence
  Probe
gcgttggtggtatagtggtaagcata

SEQ ID NO: 10480 - DNA, 28 bp, Artificial Sequence
  Probe
gcgttggtggtatagtggtaagcatagc

SEQ ID NO: 10481 - DNA, 30 bp, Artificial Sequence; identical to SEQ ID NO: 1183
  Probe

SEQ ID NO: 10482 - DNA, 20 bp, Artificial Sequence
  Probe
gcgttggtggtatagtggtg

SEQ ID NO: 10483 - DNA, 21 bp, Artificial Sequence
  Probe
gcgttggtggtatagtggtga

SEQ ID NO: 10484 - DNA, 22 bp, Artificial Sequence
  Probe
gcgttggtggtatagtggtgag

SEQ ID NO: 10485 - DNA, 23 bp, Artificial Sequence
  Probe
gcgttggtggtatagtggtgagc

SEQ ID NO: 10486 - DNA, 24 bp, Artificial Sequence
  Probe
gcgttggtggtatagtggtgagca

SEQ ID NO: 10487 - DNA, 25 bp, Artificial Sequence
  Probe
gcgttggtggtatagtggtgagcat

SEQ ID NO: 10488 - DNA, 26 bp, Artificial Sequence
  Probe
gcgttggtggtatagtggtgagcata

SEQ ID NO: 10489 - DNA, 27 bp, Artificial Sequence
  Probe
gcgttggtggtatagtggtgagcatag

SEQ ID NO: 10490 - DNA, 28 bp, Artificial Sequence
  Probe
gcgttggtggtatagtggtgagcatagc

SEQ ID NO: 10491 - DNA, 29 bp, Artificial Sequence
  Probe
gcgttggtggtatagtggtgagcatagct

SEQ ID NO: 10492 - DNA, 30 bp, Artificial Sequence; identical to SEQ ID NO: 6150
  Probe

SEQ ID NO: 10493 - DNA, 28 bp, Artificial Sequence
  Probe
gcgttggtggtatagtggtgagcatagt

SEQ ID NO: 10494 - DNA, 20 bp, Artificial Sequence
  Probe
gcgttggtggtatagtggtt

SEQ ID NO: 10495 - DNA, 21 bp, Artificial Sequence
  Probe
gcgttggtggtatagtggtta

SEQ ID NO: 10496 - DNA, 22 bp, Artificial Sequence
  Probe
gcgttggtggtatagtggttag

SEQ ID NO: 10497 - DNA, 23 bp, Artificial Sequence
  Probe
gcgttggtggtatagtggttagc

SEQ ID NO: 10498 - DNA, 24 bp, Artificial Sequence
  Probe
gcgttggtggtatagtggttagca

SEQ ID NO: 10499 - DNA, 25 bp, Artificial Sequence
  Probe
gcgttggtggtatagtggttagcat

SEQ ID NO: 10500 - DNA, 26 bp, Artificial Sequence
  Probe
gcgttggtggtatagtggttagcata

SEQ ID NO: 10501 - DNA, 27 bp, Artificial Sequence
  Probe
gcgttggtggtatagtggttagcatag

SEQ ID NO: 10502 - DNA, 28 bp, Artificial Sequence
  Probe
gcgttggtggtatagtggttagcatagc

SEQ ID NO: 10503 - DNA, 29 bp, Artificial Sequence
  Probe
gcgttggtggtatagtggttagcatagct

SEQ ID NO: 10504 - DNA, 30 bp, Artificial Sequence; identical to SEQ ID NO: 6172
  Probe

SEQ ID NO: 10505 - DNA, 19 bp, Artificial Sequence
  Probe
gcgttggtggtttagtggt

SEQ ID NO: 10506 - DNA, 22 bp, Artificial Sequence
  Probe
gcgttggtggtttagtggtaga

SEQ ID NO: 10507 - DNA, 24 bp, Artificial Sequence
  Probe
gcgttggtggtttagtggtagaat

SEQ ID NO: 10508 - DNA, 25 bp, Artificial Sequence
  Probe
gcgttggtggtttagtggtagaatt

SEQ ID NO: 10509 - DNA, 27 bp, Artificial Sequence
  Probe
gcgttggtggtttagtggtagaattct

SEQ ID NO: 10510 - DNA, 28 bp, Artificial Sequence
  Probe
gcgttggtggtttagtggtagaattctc

SEQ ID NO: 10511 - DNA, 29 bp, Artificial Sequence
  Probe
gcgttggtggtttagtggtagaattctcg

SEQ ID NO: 10512 - DNA, 30 bp, Artificial Sequence
  Probe
gcgttggtggtttagtggtagaattctcgc

SEQ ID NO: 10513 - DNA, 15 bp, Artificial Sequence
  Probe
gctaaacctagcccc

SEQ ID NO: 10514 - DNA, 17 bp, Artificial Sequence
  Probe
gctaaacctagccccaa

SEQ ID NO: 10515 - DNA, 18 bp, Artificial Sequence
  Probe
gctaaacctagccccaaa

SEQ ID NO: 10516 - DNA, 19 bp, Artificial Sequence
  Probe
gctaaacctagccccaaac

SEQ ID NO: 10517 - DNA, 20 bp, Artificial Sequence
  Probe
gctaaacctagccccaaacc

SEQ ID NO: 10518 - DNA, 21 bp, Artificial Sequence
  Probe
gctaaacctagccccaaaccc

SEQ ID NO: 10519 - DNA, 22 bp, Artificial Sequence
  Probe
gctaaacctagccccaaaccca

SEQ ID NO: 10520 - DNA, 23 bp, Artificial Sequence
  Probe
gctaaacctagccccaaacccac

SEQ ID NO: 10521 - DNA, 24 bp, Artificial Sequence
  Probe
gctaaacctagccccaaacccact

SEQ ID NO: 10522 - DNA, 25 bp, Artificial Sequence
  Probe
gctaaacctagccccaaacccactc

SEQ ID NO: 10523 - DNA, 26 bp, Artificial Sequence
  Probe
gctaaacctagccccaaacccactcc

SEQ ID NO: 10524 - DNA, 27 bp, Artificial Sequence
  Probe
gctaaacctagccccaaacccactcca

SEQ ID NO: 10525 - DNA, 28 bp, Artificial Sequence
  Probe
gctaaacctagccccaaacccactccac

SEQ ID NO: 10526 - DNA, 29 bp, Artificial Sequence
  Probe
gctaaacctagccccaaacccactccacc

SEQ ID NO: 10527 - DNA, 30 bp, Artificial Sequence; identical to SEQ ID NO: 6203
  Probe

SEQ ID NO: 10528 - DNA, 21 bp, Artificial Sequence
  Probe
gctaactcatgcccccatgtc

SEQ ID NO: 10529 - DNA, 22 bp, Artificial Sequence
  Probe
gctaactcatgcccccatgtct

SEQ ID NO: 10530 - DNA, 16 bp, Artificial Sequence
  Probe
gctaatggtggagtta

SEQ ID NO: 10531 - DNA, 30 bp, Artificial Sequence
  Probe
gctaatggtggagttaaagactttttctct

SEQ ID NO: 10532 - DNA, 27 bp, Artificial Sequence
  Probe
gctagctcagtcggtagagcatgagac

SEQ ID NO: 10533 - DNA, 28 bp, Artificial Sequence
  Probe
gctagctcagtcggtagagcatgagact

SEQ ID NO: 10534 - DNA, 19 bp, Artificial Sequence
  Probe
gctcacaagaactgctaac

SEQ ID NO: 10535 - DNA, 20 bp, Artificial Sequence
  Probe
gctcacaagaactgctaact

SEQ ID NO: 10536 - DNA, 21 bp, Artificial Sequence
  Probe
gctcacaagaactgctaactc

SEQ ID NO: 10537 - DNA, 23 bp, Artificial Sequence
  Probe
gctcaggggtagagcatttgact

SEQ ID NO: 10538 - DNA, 24 bp, Artificial Sequence
  Probe
gctcaggggtagagcatttgactg

SEQ ID NO: 10539 - DNA, 21 bp, Artificial Sequence
  Probe
gctcagtcggtagagcatcag

SEQ ID NO: 10540 - DNA, 19 bp, Artificial Sequence
  Probe
gctcagtcggtagagcatg

SEQ ID NO: 10541 - DNA, 24 bp, Artificial Sequence
  Probe
gctcagtcggtagagcatgagact

SEQ ID NO: 10542 - DNA, 24 bp, Artificial Sequence
  Probe
gctcagtgggtagagcatttgact

SEQ ID NO: 10543 - DNA, 25 bp, Artificial Sequence
  Probe
gctcagtgggtagagcatttgactg

SEQ ID NO: 10544 - DNA, 20 bp, Artificial Sequence
  Probe
gctcagtggtagagcatttg

SEQ ID NO: 10545 - DNA, 22 bp, Artificial Sequence
  Probe
gctcagtggtagagcatttgac

SEQ ID NO: 10546 - DNA, 23 bp, Artificial Sequence
  Probe
gctcagtggtagagcatttgact

SEQ ID NO: 10547 - DNA, 24 bp, Artificial Sequence
  Probe
gctcagtggtagagcatttgactg

SEQ ID NO: 10548 - DNA, 25 bp, Artificial Sequence
  Probe
gctcagtggtagagcatttgactgc

SEQ ID NO: 10549 - DNA, 17 bp, Artificial Sequence
  Probe
gctccagtctcttcggg

SEQ ID NO: 10550 - DNA, 20 bp, Artificial Sequence
  Probe
gctccagtctcttcgggggc

SEQ ID NO: 10551 - DNA, 23 bp, Artificial Sequence
  Probe
gctccagtctcttcgggggcgtg

SEQ ID NO: 10552 - DNA, 18 bp, Artificial Sequence
  Probe
gctccagtggcgcaatcg

SEQ ID NO: 10553 - DNA, 19 bp, Artificial Sequence
  Probe
gctccagtggcgcaatcgg

SEQ ID NO: 10554 - DNA, 20 bp, Artificial Sequence
  Probe
gctccagtggcgcaatcggt

SEQ ID NO: 10555 - DNA, 21 bp, Artificial Sequence
  Probe
gctccagtggcgcaatcggtt

SEQ ID NO: 10556 - DNA, 23 bp, Artificial Sequence
  Probe
gctccagtggcgcaatcggttag

SEQ ID NO: 10557 - DNA, 20 bp, Artificial Sequence
  Probe
gctccgaggtgattttcata

SEQ ID NO: 10558 - DNA, 18 bp, Artificial Sequence
  Probe
gctccgtggcgcaatgga

SEQ ID NO: 10559 - DNA, 24 bp, Artificial Sequence
  Probe
gctcgttggtctaggggtatgatt

SEQ ID NO: 10560 - DNA, 18 bp, Artificial Sequence
  Probe
gctctgtggcgcaatgga

SEQ ID NO: 10561 - DNA, 19 bp, Artificial Sequence
  Probe
gctgagtgaagcattggac

SEQ ID NO: 10562 - DNA, 22 bp, Artificial Sequence
  Probe
gctgagtgaagcattggactgt

SEQ ID NO: 10563 - DNA, 23 bp, Artificial Sequence
  Probe
gctgagtgaagcattggactgta

SEQ ID NO: 10564 - DNA, 24 bp, Artificial Sequence
  Probe
gctgagtgaagcattggactgtaa

SEQ ID NO: 10565 - DNA, 24 bp, Artificial Sequence
  Probe
gctggtgtagtggtatcatgcaag

SEQ ID NO: 10566 - DNA, 27 bp, Artificial Sequence
  Probe
gctggtgtagtggtatcatgcaagatt

SEQ ID NO: 10567 - DNA, 28 bp, Artificial Sequence
  Probe
gctggtgtagtggtatcatgcaagattc

SEQ ID NO: 10568 - DNA, 17 bp, Artificial Sequence
  Probe
gctgtaggaatactttt

SEQ ID NO: 10569 - DNA, 24 bp, Artificial Sequence
  Probe
gctgtgatggccgagtggttaagg

SEQ ID NO: 10570 - DNA, 30 bp, Artificial Sequence
  Probe
gctgtgatggccgagtggttaaggcgttgg

SEQ ID NO: 10571 - DNA, 30 bp, Artificial Sequence
  Probe
gctgtgatggccgagtggttaaggtgttgg

SEQ ID NO: 10572 - DNA, 15 bp, Artificial Sequence
  Probe
gcttctgtagtgtag

SEQ ID NO: 10573 - DNA, 18 bp, Artificial Sequence
  Probe
gcttctgtagtgtagtgg

SEQ ID NO: 10574 - DNA, 19 bp, Artificial Sequence
  Probe
gcttctgtagtgtagtggt

SEQ ID NO: 10575 - DNA, 22 bp, Artificial Sequence
  Probe
gcttctgtagtgtagtggttat

SEQ ID NO: 10576 - DNA, 24 bp, Artificial Sequence
  Probe
gcttctgtagtgtagtggttatca

SEQ ID NO: 10577 - DNA, 25 bp, Artificial Sequence
  Probe
gcttctgtagtgtagtggttatcac

SEQ ID NO: 10578 - DNA, 26 bp, Artificial Sequence
  Probe
gcttctgtagtgtagtggttatcacg

SEQ ID NO: 10579 - DNA, 28 bp, Artificial Sequence
  Probe
gcttctgtagtgtagtggttatcacgtt

SEQ ID NO: 10580 - DNA, 29 bp, Artificial Sequence
  Probe
gcttctgtagtgtagtggttatcacgttc

SEQ ID NO: 10581 - DNA, 25 bp, Artificial Sequence
  Probe
gctttgcacgtatgaggccccgggt

SEQ ID NO: 10582 - DNA, 25 bp, Artificial Sequence
  Probe
gctttgcatgtatgaggccccgggt

SEQ ID NO: 10583 - DNA, 22 bp, Artificial Sequence
  Probe
ggaaagtgcacttggacgaacc

SEQ ID NO: 10584 - DNA, 15 bp, Artificial Sequence
  Probe
ggaatgtcagctttt

SEQ ID NO: 10585 - DNA, 15 bp, Artificial Sequence
  Probe
ggactatgagaatcg

SEQ ID NO: 10586 - DNA, 17 bp, Artificial Sequence
  Probe
ggactatgagaatcgaa

SEQ ID NO: 10587 - DNA, 18 bp, Artificial Sequence
  Probe
ggactatgagaatcgaac

SEQ ID NO: 10588 - DNA, 19 bp, Artificial Sequence
  Probe
ggactatgagaatcgaacc

SEQ ID NO: 10589 - DNA, 20 bp, Artificial Sequence
  Probe
ggactatgagaatcgaaccc

SEQ ID NO: 10590 - DNA, 21 bp, Artificial Sequence
  Probe
ggactatgagaatcgaaccca

SEQ ID NO: 10591 - DNA, 22 bp, Artificial Sequence
  Probe
ggactatgagaatcgaacccat

SEQ ID NO: 10592 - DNA, 23 bp, Artificial Sequence
  Probe
ggactatgagaatcgaacccatc

SEQ ID NO: 10593 - DNA, 24 bp, Artificial Sequence
  Probe
ggactatgagaatcgaacccatcc

SEQ ID NO: 10594 - DNA, 25 bp, Artificial Sequence
  Probe
ggactatgagaatcgaacccatccc

SEQ ID NO: 10595 - DNA, 26 bp, Artificial Sequence
  Probe
ggactatgagaatcgaacccatccct

SEQ ID NO: 10596 - DNA, 27 bp, Artificial Sequence
  Probe
ggactatgagaatcgaacccatccctg

SEQ ID NO: 10597 - DNA, 28 bp, Artificial Sequence
  Probe
ggactatgagaatcgaacccatccctga

SEQ ID NO: 10598 - DNA, 29 bp, Artificial Sequence
  Probe
ggactatgagaatcgaacccatccctgag

SEQ ID NO: 10599 - DNA, 16 bp, Artificial Sequence
  Probe
ggactctgaatccagc

SEQ ID NO: 10600 - DNA, 17 bp, Artificial Sequence
  Probe
ggactctgaatccagcg

SEQ ID NO: 10601 - DNA, 20 bp, Artificial Sequence
  Probe
ggactctgaatccagcgatc

SEQ ID NO: 10602 - DNA, 21 bp, Artificial Sequence
  Probe
ggactctgaatccagcgatcc

SEQ ID NO: 10603 - DNA, 22 bp, Artificial Sequence
  Probe
ggactctgaatccagcgatccg

SEQ ID NO: 10604 - DNA, 23 bp, Artificial Sequence
  Probe
ggactctgaatccagcgatccga

SEQ ID NO: 10605 - DNA, 24 bp, Artificial Sequence
  Probe
ggactctgaatccagcgatccgag

SEQ ID NO: 10606 - DNA, 29 bp, Artificial Sequence
  Probe
ggagaccggggttcgattccccgacgggg

SEQ ID NO: 10607 - DNA, 23 bp, Artificial Sequence
  Probe
ggagatgaaaacctttttccaag

SEQ ID NO: 10608 - DNA, 19 bp, Artificial Sequence
  Probe
ggagatttcaacttaactt

SEQ ID NO: 10609 - DNA, 20 bp, Artificial Sequence
  Probe
ggagatttcaacttaacttg

SEQ ID NO: 10610 - DNA, 23 bp, Artificial Sequence
  Probe
ggagatttcaacttaacttgacc

SEQ ID NO: 10611 - DNA, 24 bp, Artificial Sequence
  Probe
ggagatttcaacttaacttgaccg

SEQ ID NO: 10612 - DNA, 25 bp, Artificial Sequence
  Probe
ggagatttcaacttaacttgaccgc

SEQ ID NO: 10613 - DNA, 26 bp, Artificial Sequence
  Probe
ggagatttcaacttaacttgaccgct

SEQ ID NO: 10614 - DNA, 27 bp, Artificial Sequence
  Probe
ggagatttcaacttaacttgaccgctc

SEQ ID NO: 10615 - DNA, 28 bp, Artificial Sequence
  Probe
ggagatttcaacttaacttgaccgctct

SEQ ID NO: 10616 - DNA, 29 bp, Artificial Sequence
  Probe
ggagatttcaacttaacttgaccgctctg

SEQ ID NO: 10617 - DNA, 17 bp, Artificial Sequence
  Probe
ggagctggggattgtgg

SEQ ID NO: 10618 - DNA, 19 bp, Artificial Sequence
  Probe
ggagctggggattgtgggt

SEQ ID NO: 10619 - DNA, 23 bp, Artificial Sequence
  Probe
ggagttaaagactttttctctga

SEQ ID NO: 10620 - DNA, 24 bp, Artificial Sequence
  Probe
ggagttaaagactttttctctgat

SEQ ID NO: 10621 - DNA, 21 bp, Artificial Sequence
  Probe
ggataacagctatccattggt

SEQ ID NO: 10622 - DNA, 22 bp, Artificial Sequence
  Probe
ggataacagctatccattggtc

SEQ ID NO: 10623 - DNA, 24 bp, Artificial Sequence
  Probe
ggataacagctatccattggtctt

SEQ ID NO: 10624 - DNA, 21 bp, Artificial Sequence
  Probe
ggatagctcagtcggtagagc

SEQ ID NO: 10625 - DNA, 22 bp, Artificial Sequence
  Probe
ggattggtggtccagtggtaga

SEQ ID NO: 10626 - DNA, 27 bp, Artificial Sequence
  Probe
ggattggtggtccagtggtagaattct

SEQ ID NO: 10627 - DNA, 28 bp, Artificial Sequence
  Probe
ggattggtggtccagtggtagaattctc

SEQ ID NO: 10628 - DNA, 18 bp, Artificial Sequence
  Probe
ggcagagcatttgactgc

SEQ ID NO: 10629 - DNA, 18 bp, Artificial Sequence
  Probe
ggccagtggcgcaatgga

SEQ ID NO: 10630 - DNA, 19 bp, Artificial Sequence
  Probe
ggccccatggtgtaatggt

SEQ ID NO: 10631 - DNA, 30 bp, Artificial Sequence
  Probe
ggccccatggtgtaatggtcagcactctgg

SEQ ID NO: 10632 - DNA, 23 bp, Artificial Sequence
  Probe
ggccccatggtgtaatggttagc

SEQ ID NO: 10633 - DNA, 29 bp, Artificial Sequence
  Probe
ggccccatggtgtaatggttagcactctg

SEQ ID NO: 10634 - DNA, 19 bp, Artificial Sequence
  Probe
ggccctatagctcaggggt

SEQ ID NO: 10635 - DNA, 30 bp, Artificial Sequence; identical to SEQ ID NO: 1267
  Probe

SEQ ID NO: 10636 - DNA, 19 bp, Artificial Sequence
  Probe
ggccctgtggcttagctgg

SEQ ID NO: 10637 - DNA, 20 bp, Artificial Sequence
  Probe
ggccctgtggcttagctggt

SEQ ID NO: 10638 - DNA, 27 bp, Artificial Sequence
  Probe
ggccgagcggtctaaggcgctgcgttc

SEQ ID NO: 10639 - DNA, 15 bp, Artificial Sequence
  Probe
ggccgcgtggcctaa

SEQ ID NO: 10640 - DNA, 21 bp, Artificial Sequence
  Probe
ggccgcgtggcctaatggata

SEQ ID NO: 10641 - DNA, 22 bp, Artificial Sequence
  Probe
ggccgcgtggcctaatggataa

SEQ ID NO: 10642 - DNA, 23 bp, Artificial Sequence
  Probe
ggccgcgtggcctaatggataag

SEQ ID NO: 10643 - DNA, 26 bp, Artificial Sequence
  Probe
ggccgcgtggcctaatggataaggcg

SEQ ID NO: 10644 - DNA, 27 bp, Artificial Sequence
  Probe
ggccgcgtggcctaatggataaggcgt

SEQ ID NO: 10645 - DNA, 28 bp, Artificial Sequence
  Probe
ggccgcgtggcctaatggataaggcgtc

SEQ ID NO: 10646 - DNA, 29 bp, Artificial Sequence
  Probe
ggccgcgtggcctaatggataaggcgtct

SEQ ID NO: 10647 - DNA, 15 bp, Artificial Sequence
  Probe
ggccggttagctcag

SEQ ID NO: 10648 - DNA, 19 bp, Artificial Sequence
  Probe
ggccggttagctcagtcgg

SEQ ID NO: 10649 - DNA, 18 bp, Artificial Sequence
  Probe
ggccggttagctcagttg

SEQ ID NO: 10650 - DNA, 19 bp, Artificial Sequence
  Probe
ggccggttagctcagttgg

SEQ ID NO: 10651 - DNA, 20 bp, Artificial Sequence
  Probe
ggccggttagctcagttggt

SEQ ID NO: 10652 - DNA, 26 bp, Artificial Sequence
  Probe
ggccggttagctcagttggtaagagc

SEQ ID NO: 10653 - DNA, 24 bp, Artificial Sequence
  Probe
ggccggttagctcagttggtcaga

SEQ ID NO: 10654 - DNA, 26 bp, Artificial Sequence
  Probe
ggccggttagctcagttggtcagagc

SEQ ID NO: 10655 - DNA, 24 bp, Artificial Sequence
  Probe
ggccggttagctcagttggttaga

SEQ ID NO: 10656 - DNA, 26 bp, Artificial Sequence
  Probe
ggccggttagctcagttggttagagc

SEQ ID NO: 10657 - DNA, 30 bp, Artificial Sequence
  Probe
ggccggttagctcagttggttagagcgtgg

SEQ ID NO: 10658 - DNA, 19 bp, Artificial Sequence
  Probe
ggccgtgtggcctaatgga

SEQ ID NO: 10659 - DNA, 24 bp, Artificial Sequence
  Probe
ggcctcctaagccagggattgtgg

SEQ ID NO: 10660 - DNA, 18 bp, Artificial Sequence
  Probe
ggcctcgtggcgcaacgg

SEQ ID NO: 10661 - DNA, 19 bp, Artificial Sequence
  Probe
ggcctcgtggcgcaacggt

SEQ ID NO: 10662 - DNA, 22 bp, Artificial Sequence
  Probe
ggcctcgtggcgcaacggtagc

SEQ ID NO: 10663 - DNA, 24 bp, Artificial Sequence
  Probe
ggcctcgtggcgcaacggtagcgc

SEQ ID NO: 10664 - DNA, 29 bp, Artificial Sequence
  Probe
ggcctcgtggcgcaacggtagcgcgtctg

SEQ ID NO: 10665 - DNA, 23 bp, Artificial Sequence
  Probe
ggcgcagcggaagcgtgctgggc

SEQ ID NO: 10666 - DNA, 19 bp, Artificial Sequence
  Probe
ggcgccgtggcttagttgg

SEQ ID NO: 10667 - DNA, 26 bp, Artificial Sequence
  Probe
ggcgccgtggcttagttggttaaagc

SEQ ID NO: 10668 - DNA, 15 bp, Artificial Sequence
  Probe
ggcgcggtggccaag

SEQ ID NO: 10669 - DNA, 16 bp, Artificial Sequence
  Probe
ggcgcggtggccaagt

SEQ ID NO: 10670 - DNA, 17 bp, Artificial Sequence
  Probe
ggcgcggtggccaagtg

SEQ ID NO: 10671 - DNA, 18 bp, Artificial Sequence
  Probe
ggcgcggtggccaagtgg

SEQ ID NO: 10672 - DNA, 19 bp, Artificial Sequence
  Probe
ggcgcggtggccaagtggt

SEQ ID NO: 10673 - DNA, 20 bp, Artificial Sequence
  Probe
ggcgcggtggccaagtggta

SEQ ID NO: 10674 - DNA, 21 bp, Artificial Sequence
  Probe
ggcgcggtggccaagtggtaa

SEQ ID NO: 10675 - DNA, 25 bp, Artificial Sequence
  Probe
ggcgcggtggccaagtggtaaggcg

SEQ ID NO: 10676 - DNA, 26 bp, Artificial Sequence
  Probe
ggcgcggtggccaagtggtaaggcgt

SEQ ID NO: 10677 - DNA, 27 bp, Artificial Sequence
  Probe
ggcgcggtggccaagtggtaaggcgtc

SEQ ID NO: 10678 - DNA, 28 bp, Artificial Sequence
  Probe
ggcgcggtggccaagtggtaaggcgtcg

SEQ ID NO: 10679 - DNA, 29 bp, Artificial Sequence
  Probe
ggcgcggtggccaagtggtaaggcgtcgg

SEQ ID NO: 10680 - DNA, 30 bp, Artificial Sequence
  Probe
ggcgcggtggccaagtggtaaggcgtcggt

SEQ ID NO: 10681 - DNA, 23 bp, Artificial Sequence
  Probe
ggcggcccgggttcgactcccgg

SEQ ID NO: 10682 - DNA, 24 bp, Artificial Sequence
  Probe
ggcggcccgggttcgactcccggt

SEQ ID NO: 10683 - DNA, 28 bp, Artificial Sequence
  Probe
ggcggcccgggttcgactcccggtgtgg

SEQ ID NO: 10684 - DNA, 29 bp, Artificial Sequence
  Probe
ggcggcccgggttcgactcccggtgtggg

SEQ ID NO: 10685 - DNA, 18 bp, Artificial Sequence
  Probe
ggcgtgattcataccttt

SEQ ID NO: 10686 - DNA, 19 bp, Artificial Sequence
  Probe
ggcgtgattcatacctttt

SEQ ID NO: 10687 - DNA, 29 bp, Artificial Sequence
  Probe
ggctagctcagtcggtagagcatgagact

SEQ ID NO: 10688 - DNA, 17 bp, Artificial Sequence
  Probe
ggctccagtctcttcgg

SEQ ID NO: 10689 - DNA, 21 bp, Artificial Sequence
  Probe
ggctccagtctcttcggaggc

SEQ ID NO: 10690 - DNA, 24 bp, Artificial Sequence
  Probe
ggctccagtctcttcggaggcgtg

SEQ ID NO: 10691 - DNA, 18 bp, Artificial Sequence
  Probe
ggctccagtctcttcggg

SEQ ID NO: 10692 - DNA, 21 bp, Artificial Sequence
  Probe
ggctccagtctcttcgggggc

SEQ ID NO: 10693 - DNA, 25 bp, Artificial Sequence
  Probe
ggctccagtctcttcgggggcgtgg

SEQ ID NO: 10694 - DNA, 18 bp, Artificial Sequence
  Probe
ggctccatagctcagggg

SEQ ID NO: 10695 - DNA, 19 bp, Artificial Sequence
  Probe
ggctccatagctcaggggt

SEQ ID NO: 10696 - DNA, 30 bp, Artificial Sequence
  Probe
ggctccatagctcaggggttagagcactgg

SEQ ID NO: 10697 - DNA, 15 bp, Artificial Sequence
  Probe
ggctccgtggcgcaa

SEQ ID NO: 10698 - DNA, 16 bp, Artificial Sequence
  Probe
ggctccgtggcgcaat

SEQ ID NO: 10699 - DNA, 17 bp, Artificial Sequence
  Probe
ggctccgtggcgcaatg

SEQ ID NO: 10700 - DNA, 20 bp, Artificial Sequence
  Probe
ggctccgtggcgcaatggat

SEQ ID NO: 10701 - DNA, 23 bp, Artificial Sequence
  Probe
ggctccgtggcgcaatggatagc

SEQ ID NO: 10702 - DNA, 25 bp, Artificial Sequence
  Probe
ggctccgtggcgcaatggatagcgc

SEQ ID NO: 10703 - DNA, 26 bp, Artificial Sequence
  Probe
ggctccgtggcgcaatggatagcgca

SEQ ID NO: 10704 - DNA, 30 bp, Artificial Sequence
  Probe
ggctccgtggcgcaatggatagcgcattgg

SEQ ID NO: 10705 - DNA, 19 bp, Artificial Sequence
  Probe
ggctccgtggcttagctgg

SEQ ID NO: 10706 - DNA, 20 bp, Artificial Sequence
  Probe
ggctccgtggcttagctggt

SEQ ID NO: 10707 - DNA, 26 bp, Artificial Sequence
  Probe
ggctccgtggcttagctggttaaagc

SEQ ID NO: 10708 - DNA, 23 bp, Artificial Sequence
  Probe
ggctcgaaggacttcgtctgtaa

SEQ ID NO: 10709 - DNA, 15 bp, Artificial Sequence
  Probe
ggctcgttggtctag

SEQ ID NO: 10710 - DNA, 16 bp, Artificial Sequence
  Probe
ggctcgttggtctagg

SEQ ID NO: 10711 - DNA, 17 bp, Artificial Sequence
  Probe
ggctcgttggtctaggg

SEQ ID NO: 10712 - DNA, 18 bp, Artificial Sequence
  Probe
ggctcgttggtctagggg

SEQ ID NO: 10713 - DNA, 19 bp, Artificial Sequence
  Probe
ggctcgttggtctaggggt

SEQ ID NO: 10714 - DNA, 20 bp, Artificial Sequence
  Probe
ggctcgttggtctaggggta

SEQ ID NO: 10715 - DNA, 21 bp, Artificial Sequence
  Probe
ggctcgttggtctaggggtat

SEQ ID NO: 10716 - DNA, 22 bp, Artificial Sequence
  Probe
ggctcgttggtctaggggtatg

SEQ ID NO: 10717 - DNA, 23 bp, Artificial Sequence
  Probe
ggctcgttggtctaggggtatga

SEQ ID NO: 10718 - DNA, 24 bp, Artificial Sequence
  Probe
ggctcgttggtctaggggtatgat

SEQ ID NO: 10719 - DNA, 25 bp, Artificial Sequence
  Probe
ggctcgttggtctaggggtatgatt

SEQ ID NO: 10720 - DNA, 26 bp, Artificial Sequence
  Probe
ggctcgttggtctaggggtatgattc

SEQ ID NO: 10721 - DNA, 27 bp, Artificial Sequence
  Probe
ggctcgttggtctaggggtatgattct

SEQ ID NO: 10722 - DNA, 28 bp, Artificial Sequence
  Probe
ggctcgttggtctaggggtatgattctc

SEQ ID NO: 10723 - DNA, 29 bp, Artificial Sequence
  Probe
ggctcgttggtctaggggtatgattctcg

SEQ ID NO: 10724 - DNA, 30 bp, Artificial Sequence; identical to SEQ ID NO: 6496
  Probe

SEQ ID NO: 10725 - DNA, 30 bp, Artificial Sequence
  Probe
ggctcgttggtctagtggtatgattctcgc

SEQ ID NO: 10726 - DNA, 16 bp, Artificial Sequence
  Probe
ggctctgtggcgcaat

SEQ ID NO: 10727 - DNA, 17 bp, Artificial Sequence
  Probe
ggctctgtggcgcaatg

SEQ ID NO: 10728 - DNA, 18 bp, Artificial Sequence
  Probe
ggctctgtggcgcaatgg

SEQ ID NO: 10729 - DNA, 19 bp, Artificial Sequence
  Probe
ggctctgtggcgcaatgga

SEQ ID NO: 10730 - DNA, 20 bp, Artificial Sequence
  Probe
ggctctgtggcgcaatggat

SEQ ID NO: 10731 - DNA, 23 bp, Artificial Sequence
  Probe
ggctctgtggcgcaatggatagc

SEQ ID NO: 10732 - DNA, 25 bp, Artificial Sequence
  Probe
ggctctgtggcgcaatggatagcgc

SEQ ID NO: 10733 - DNA, 26 bp, Artificial Sequence
  Probe
ggctctgtggcgcaatggatagcgca

SEQ ID NO: 10734 - DNA, 30 bp, Artificial Sequence
  Probe
ggctctgtggcgcaatggatagcgcattgg

SEQ ID NO: 10735 - DNA, 23 bp, Artificial Sequence
  Probe
ggctgagtgaagcattggactgt

SEQ ID NO: 10736 - DNA, 24 bp, Artificial Sequence
  Probe
ggctgagtgaagcattggactgta

SEQ ID NO: 10737 - DNA, 20 bp, Artificial Sequence
  Probe
ggctggttagctcagttggt

SEQ ID NO: 10738 - DNA, 17 bp, Artificial Sequence
  Probe
ggctgtaggaatacttt

SEQ ID NO: 10739 - DNA, 18 bp, Artificial Sequence
  Probe
ggctgtaggaatactttt

SEQ ID NO: 10740 - DNA, 24 bp, Artificial Sequence
  Probe
ggctgtatagctcagtggtagagc

SEQ ID NO: 10741 - DNA, 29 bp, Artificial Sequence
  Probe
ggctgtatagctcagtggtagagcatttg

SEQ ID NO: 10742 - DNA, 30 bp, Artificial Sequence; identical to SEQ ID NO: 1315
  Probe

SEQ ID NO: 10743 - DNA, 18 bp, Artificial Sequence
  Probe
gggatgtagctcagtggt

SEQ ID NO: 10744 - DNA, 21 bp, Artificial Sequence
  Probe
gggatgtagctcagtggtaga

SEQ ID NO: 10745 - DNA, 15 bp, Artificial Sequence
  Probe
gggattgtgggttcg

SEQ ID NO: 10746 - DNA, 19 bp, Artificial Sequence
  Probe
gggattgtgggttcgagtc

SEQ ID NO: 10747 - DNA, 21 bp, Artificial Sequence
  Probe
gggattgtgggttcgagtccc

SEQ ID NO: 10748 - DNA, 24 bp, Artificial Sequence
  Probe
gggattgtgggttcgagtcccatc

SEQ ID NO: 10749 - DNA, 19 bp, Artificial Sequence
  Probe
gggcagagcatttgactgc

SEQ ID NO: 10750 - DNA, 15 bp, Artificial Sequence
  Probe
gggccagtggcgcaa

SEQ ID NO: 10751 - DNA, 16 bp, Artificial Sequence
  Probe
gggccagtggcgcaat

SEQ ID NO: 10752 - DNA, 17 bp, Artificial Sequence
  Probe
gggccagtggcgcaatg

SEQ ID NO: 10753 - DNA, 18 bp, Artificial Sequence
  Probe
gggccagtggcgcaatgg

SEQ ID NO: 10754 - DNA, 19 bp, Artificial Sequence
  Probe
gggccagtggcgcaatgga

SEQ ID NO: 10755 - DNA, 20 bp, Artificial Sequence
  Probe
gggccagtggcgcaatggat

SEQ ID NO: 10756 - DNA, 21 bp, Artificial Sequence
  Probe
gggccagtggcgcaatggata

SEQ ID NO: 10757 - DNA, 23 bp, Artificial Sequence
  Probe
gggccagtggcgcaatggataac

SEQ ID NO: 10758 - DNA, 24 bp, Artificial Sequence
  Probe
gggccagtggcgcaatggataacg

SEQ ID NO: 10759 - DNA, 25 bp, Artificial Sequence
  Probe
gggccagtggcgcaatggataacgc

SEQ ID NO: 10760 - DNA, 29 bp, Artificial Sequence
  Probe
gggccagtggcgcaatggataacgcgtct

SEQ ID NO: 10761 - DNA, 30 bp, Artificial Sequence
  Probe
gggccagtggcgcaatggataacgcgtctg

SEQ ID NO: 10762 - DNA, 29 bp, Artificial Sequence
  Probe
gggcgtatagctcaggggtagagcatttg

SEQ ID NO: 10763 - DNA, 27 bp, Artificial Sequence
  Probe
gggcttagcttaattaaagtggctgat

SEQ ID NO: 10764 - DNA, 19 bp, Artificial Sequence
  Probe
ggggaattagctcaaatgg

SEQ ID NO: 10765 - DNA, 20 bp, Artificial Sequence
  Probe
ggggaattagctcaaatggt

SEQ ID NO: 10766 - DNA, 21 bp, Artificial Sequence
  Probe
ggggaattagctcaaatggta

SEQ ID NO: 10767 - DNA, 23 bp, Artificial Sequence
  Probe
ggggaattagctcaaatggtaga

SEQ ID NO: 10768 - DNA, 24 bp, Artificial Sequence
  Probe
ggggaattagctcaaatggtagag

SEQ ID NO: 10769 - DNA, 30 bp, Artificial Sequence
  Probe
ggggaattagctcaaatggtagagcgctcg

SEQ ID NO: 10770 - DNA, 15 bp, Artificial Sequence
  Probe
ggggatgtagctcag

SEQ ID NO: 10771 - DNA, 16 bp, Artificial Sequence
  Probe
ggggatgtagctcagt

SEQ ID NO: 10772 - DNA, 17 bp, Artificial Sequence
  Probe
ggggatgtagctcagtg

SEQ ID NO: 10773 - DNA, 25 bp, Artificial Sequence
  Probe
ggggatgtagctcagtggtagagcg

SEQ ID NO: 10774 - DNA, 26 bp, Artificial Sequence
  Probe
ggggatgtagctcagtggtagagcgc

SEQ ID NO: 10775 - DNA, 27 bp, Artificial Sequence
  Probe
ggggatgtagctcagtggtagagcgca

SEQ ID NO: 10776 - DNA, 30 bp, Artificial Sequence; identical to SEQ ID NO: 1335
  Probe

SEQ ID NO: 10777 - DNA, 28 bp, Artificial Sequence
  Probe
ggggatgtagctcagtggtagagcgcgc

SEQ ID NO: 10778 - DNA, 29 bp, Artificial Sequence
  Probe
ggggatgtagctcagtggtagagcgcgcg

SEQ ID NO: 10779 - DNA, 30 bp, Artificial Sequence
  Probe
ggggatgtagctcagtggtagagcgcgcgc

SEQ ID NO: 10780 - DNA, 15 bp, Artificial Sequence
  Probe
ggggcacaataattt

SEQ ID NO: 10781 - DNA, 19 bp, Artificial Sequence
  Probe
ggggcagagcatttgactg

SEQ ID NO: 10782 - DNA, 20 bp, Artificial Sequence
  Probe
ggggcagagcatttgactgc

SEQ ID NO: 10783 - DNA, 23 bp, Artificial Sequence
  Probe
ggggcgtgggttcgaatcccacc

SEQ ID NO: 10784 - DNA, 16 bp, Artificial Sequence
  Probe
gggggattagctcaaa

SEQ ID NO: 10785 - DNA, 19 bp, Artificial Sequence
  Probe
gggggattagctcaaatgg

SEQ ID NO: 10786 - DNA, 21 bp, Artificial Sequence
  Probe
gggggattagctcaaatggta

SEQ ID NO: 10787 - DNA, 22 bp, Artificial Sequence
  Probe
gggggattagctcaaatggtag

SEQ ID NO: 10788 - DNA, 23 bp, Artificial Sequence
  Probe
gggggattagctcaaatggtaga

SEQ ID NO: 10789 - DNA, 24 bp, Artificial Sequence
  Probe
gggggattagctcaaatggtagag

SEQ ID NO: 10790 - DNA, 26 bp, Artificial Sequence
  Probe
gggggattagctcaaatggtagagcg

SEQ ID NO: 10791 - DNA, 30 bp, Artificial Sequence
  Probe
gggggattagctcaaatggtagagcgctcg

SEQ ID NO: 10792 - DNA, 19 bp, Artificial Sequence
  Probe
gggggcagagcatttgact

SEQ ID NO: 10793 - DNA, 20 bp, Artificial Sequence
  Probe
gggggcagagcatttgactg

SEQ ID NO: 10794 - DNA, 21 bp, Artificial Sequence
  Probe
gggggcagagcatttgactgc

SEQ ID NO: 10795 - DNA, 19 bp, Artificial Sequence
  Probe
gggggcatagctcagtggt

SEQ ID NO: 10796 - DNA, 29 bp, Artificial Sequence
  Probe
gggggcatagctcagtggtagagcatttg

SEQ ID NO: 10797 - DNA, 24 bp, Artificial Sequence
  Probe
gggggcgtgggttcgaatcccacc

SEQ ID NO: 10798 - DNA, 29 bp, Artificial Sequence
  Probe
gggggtatagctcacaggtagagcatttg

SEQ ID NO: 10799 - DNA, 15 bp, Artificial Sequence
  Probe
gggggtatagctcag

SEQ ID NO: 10800 - DNA, 18 bp, Artificial Sequence
  Probe
gggggtatagctcagggg

SEQ ID NO: 10801 - DNA, 22 bp, Artificial Sequence
  Probe
gggggtatagctcaggggtaga

SEQ ID NO: 10802 - DNA, 24 bp, Artificial Sequence
  Probe
gggggtatagctcaggggtagagc

SEQ ID NO: 10803 - DNA, 25 bp, Artificial Sequence
  Probe
gggggtatagctcaggggtagagca

SEQ ID NO: 10804 - DNA, 28 bp, Artificial Sequence
  Probe
gggggtatagctcaggggtagagcattt

SEQ ID NO: 10805 - DNA, 16 bp, Artificial Sequence
  Probe
gggggtatagctcagt

SEQ ID NO: 10806 - DNA, 17 bp, Artificial Sequence
  Probe
gggggtatagctcagtg

SEQ ID NO: 10807 - DNA, 18 bp, Artificial Sequence
  Probe
gggggtatagctcagtgg

SEQ ID NO: 10808 - DNA, 19 bp, Artificial Sequence
  Probe
gggggtatagctcagtggg

SEQ ID NO: 10809 - DNA, 25 bp, Artificial Sequence
  Probe
gggggtatagctcagtgggtagagc

SEQ ID NO: 10810 - DNA, 30 bp, Artificial Sequence
  Probe
gggggtatagctcagtgggtagagcatttg

SEQ ID NO: 10811 - DNA, 19 bp, Artificial Sequence
  Probe
gggggtatagctcagtggt

SEQ ID NO: 10812 - DNA, 20 bp, Artificial Sequence
  Probe
gggggtatagctcagtggta

SEQ ID NO: 10813 - DNA, 21 bp, Artificial Sequence
  Probe
gggggtatagctcagtggtag

SEQ ID NO: 10814 - DNA, 22 bp, Artificial Sequence
  Probe
gggggtatagctcagtggtaga

SEQ ID NO: 10815 - DNA, 23 bp, Artificial Sequence
  Probe
gggggtatagctcagtggtagag

SEQ ID NO: 10816 - DNA, 24 bp, Artificial Sequence
  Probe
gggggtatagctcagtggtagagc

SEQ ID NO: 10817 - DNA, 25 bp, Artificial Sequence
  Probe
gggggtatagctcagtggtagagca

SEQ ID NO: 10818 - DNA, 26 bp, Artificial Sequence
  Probe
gggggtatagctcagtggtagagcat

SEQ ID NO: 10819 - DNA, 27 bp, Artificial Sequence
  Probe
gggggtatagctcagtggtagagcatt

SEQ ID NO: 10820 - DNA, 28 bp, Artificial Sequence
  Probe
gggggtatagctcagtggtagagcattt

SEQ ID NO: 10821 - DNA, 29 bp, Artificial Sequence
  Probe
gggggtatagctcagtggtagagcatttg

SEQ ID NO: 10822 - DNA, 29 bp, Artificial Sequence
  Probe
gggggtatagcttagcggtagagcatttg

SEQ ID NO: 10823 - DNA, 29 bp, Artificial Sequence
  Probe
gggggtatagcttaggggtagagcatttg

SEQ ID NO: 10824 - DNA, 15 bp, Artificial Sequence
  Probe
gggggtgtagctcag

SEQ ID NO: 10825 - DNA, 16 bp, Artificial Sequence
  Probe
gggggtgtagctcagt

SEQ ID NO: 10826 - DNA, 17 bp, Artificial Sequence
  Probe
gggggtgtagctcagtg

SEQ ID NO: 10827 - DNA, 18 bp, Artificial Sequence
  Probe
gggggtgtagctcagtgg

SEQ ID NO: 10828 - DNA, 21 bp, Artificial Sequence
  Probe
gggggtgtagctcagtggtag

SEQ ID NO: 10829 - DNA, 23 bp, Artificial Sequence
  Probe
gggggtgtagctcagtggtagag

SEQ ID NO: 10830 - DNA, 25 bp, Artificial Sequence
  Probe
gggggtgtagctcagtggtagagca

SEQ ID NO: 10831 - DNA, 29 bp, Artificial Sequence
  Probe
gggggtgtagctcagtggtagagcatttg

SEQ ID NO: 10832 - DNA, 27 bp, Artificial Sequence
  Probe
gggggtgtagctcagtggtagagcgcg

SEQ ID NO: 10833 - DNA, 30 bp, Artificial Sequence; identical to SEQ ID NO: 1367
  Probe

SEQ ID NO: 10834 - DNA, 19 bp, Artificial Sequence
  Probe
ggggtagagcatttgactg

SEQ ID NO: 10835 - DNA, 20 bp, Artificial Sequence
  Probe
ggggtagagcatttgactgc

SEQ ID NO: 10836 - DNA, 30 bp, Artificial Sequence
  Probe
ggggtatagctcagtggtagagcatttgac

SEQ ID NO: 10837 - DNA, 16 bp, Artificial Sequence
  Probe
ggggtatgattctcgc

SEQ ID NO: 10838 - DNA, 17 bp, Artificial Sequence
  Probe
ggggtatgattctcgct

SEQ ID NO: 10839 - DNA, 18 bp, Artificial Sequence
  Probe
ggggtatgattctcgctt

SEQ ID NO: 10840 - DNA, 19 bp, Artificial Sequence
  Probe
ggggtatgattctcgctta

SEQ ID NO: 10841 - DNA, 19 bp, Artificial Sequence
  Probe
ggggtatgattctcgcttc

SEQ ID NO: 10842 - DNA, 19 bp, Artificial Sequence
  Probe
ggggtatgattctcgcttt

SEQ ID NO: 10843 - DNA, 16 bp, Artificial Sequence
  Probe
ggggtatgattctcgg

SEQ ID NO: 10844 - DNA, 17 bp, Artificial Sequence
  Probe
ggggtatgattctcggt

SEQ ID NO: 10845 - DNA, 18 bp, Artificial Sequence
  Probe
ggggtatgattctcggtt

SEQ ID NO: 10846 - DNA, 19 bp, Artificial Sequence
  Probe
ggggtatgattctcggttt

SEQ ID NO: 10847 - DNA, 18 bp, Artificial Sequence
  Probe
ggggtcagcggctatttt

SEQ ID NO: 10848 - DNA, 21 bp, Artificial Sequence
  Probe
ggggttaggcctctttttacc

SEQ ID NO: 10849 - DNA, 22 bp, Artificial Sequence
  Probe
ggggttaggcctctttttacca

SEQ ID NO: 10850 - DNA, 23 bp, Artificial Sequence
  Probe
ggggttaggcctctttttaccag

SEQ ID NO: 10851 - DNA, 24 bp, Artificial Sequence
  Probe
ggggttaggcctctttttaccagc

SEQ ID NO: 10852 - DNA, 20 bp, Artificial Sequence
  Probe
ggggttttgcagtccttagc

SEQ ID NO: 10853 - DNA, 19 bp, Artificial Sequence
  Probe
gggtagagcatttgactgc

SEQ ID NO: 10854 - DNA, 30 bp, Artificial Sequence; identical to SEQ ID NO: 6643
  Probe

SEQ ID NO: 10855 - DNA, 17 bp, Artificial Sequence
  Probe
gggtatgattctcgctt

SEQ ID NO: 10856 - DNA, 15 bp, Artificial Sequence
  Probe
gggtatgattctcgg

SEQ ID NO: 10857 - DNA, 28 bp, Artificial Sequence
  Probe
gggtccagggttcaagtccctgttcggg

SEQ ID NO: 10858 - DNA, 30 bp, Artificial Sequence
  Probe
gggtccagggttcaagtccctgttcgggcg

SEQ ID NO: 10859 - DNA, 20 bp, Artificial Sequence
  Probe
gggtcgtgggttcgagcccc

SEQ ID NO: 10860 - DNA, 23 bp, Artificial Sequence
  Probe
gggtcgtgggttcgagccccacg

SEQ ID NO: 10861 - DNA, 30 bp, Artificial Sequence
  Probe
gggtcgtgggttcgagccccacgttgggcg

SEQ ID NO: 10862 - DNA, 20 bp, Artificial Sequence
  Probe
gggtgcgagaggtcccgggt

SEQ ID NO: 10863 - DNA, 28 bp, Artificial Sequence
  Probe
gggtggttcagtggtagaattctcgcct

SEQ ID NO: 10864 - DNA, 20 bp, Artificial Sequence
  Probe
gggttcaagtccctgttcgg

SEQ ID NO: 10865 - DNA, 23 bp, Artificial Sequence
  Probe
gggttcaagtccctgttcgggcg

SEQ ID NO: 10866 - DNA, 24 bp, Artificial Sequence
  Probe
gggttcaattcccggtcagggaac

SEQ ID NO: 10867 - DNA, 26 bp, Artificial Sequence
  Probe
gggttcaattcccggtcagggaacca

SEQ ID NO: 10868 - DNA, 23 bp, Artificial Sequence
  Probe
gggttcgaatcccatcctcgtcg

SEQ ID NO: 10869 - DNA, 24 bp, Artificial Sequence
  Probe
gggttcgaatcccatcctcgtcgc

SEQ ID NO: 10870 - DNA, 24 bp, Artificial Sequence
  Probe
gggttcgactcccggtgtgggaac

SEQ ID NO: 10871 - DNA, 24 bp, Artificial Sequence
  Probe
gggttcgattccccgacggggaga

SEQ ID NO: 10872 - DNA, 25 bp, Artificial Sequence
  Probe
gggttcgattccccgacggggagac

SEQ ID NO: 10873 - DNA, 24 bp, Artificial Sequence
  Probe
gggttcgattccccgacggggagg

SEQ ID NO: 10874 - DNA, 25 bp, Artificial Sequence
  Probe
gggttcgattccccgacggggaggc

SEQ ID NO: 10875 - DNA, 26 bp, Artificial Sequence
  Probe
gggttcgattccccgacggggaggca

SEQ ID NO: 10876 - DNA, 23 bp, Artificial Sequence
  Probe
gggttcgattcccggtcagggaa

SEQ ID NO: 10877 - DNA, 24 bp, Artificial Sequence
  Probe
gggttcgattcccggtcagggaaa

SEQ ID NO: 10878 - DNA, 24 bp, Artificial Sequence
  Probe
gggttcgattcccggtcagggaag

SEQ ID NO: 10879 - DNA, 24 bp, Artificial Sequence
  Probe
gggttcgattcccggtcagggaat

SEQ ID NO: 10880 - DNA, 24 bp, Artificial Sequence
  Probe
gggttcgattcccggtcatggaac

SEQ ID NO: 10881 - DNA, 26 bp, Artificial Sequence
  Probe
gggttcgattcccggtcatggaacca

SEQ ID NO: 10882 - DNA, 15 bp, Artificial Sequence
  Probe
gggttgctgtctttt

SEQ ID NO: 10883 - DNA, 19 bp, Artificial Sequence
  Probe
gggttttgcagtccttagc

SEQ ID NO: 10884 - DNA, 15 bp, Artificial Sequence
  Probe
ggtaaaatggctgag

SEQ ID NO: 10885 - DNA, 16 bp, Artificial Sequence
  Probe
ggtaaaatggctgagt

SEQ ID NO: 10886 - DNA, 17 bp, Artificial Sequence
  Probe
ggtaaaatggctgagtg

SEQ ID NO: 10887 - DNA, 19 bp, Artificial Sequence
  Probe
ggtaaaatggctgagtgaa

SEQ ID NO: 10888 - DNA, 20 bp, Artificial Sequence
  Probe
ggtaaaatggctgagtgaag

SEQ ID NO: 10889 - DNA, 21 bp, Artificial Sequence
  Probe
ggtaaaatggctgagtgaagc

SEQ ID NO: 10890 - DNA, 22 bp, Artificial Sequence
  Probe
ggtaaaatggctgagtgaagca

SEQ ID NO: 10891 - DNA, 23 bp, Artificial Sequence
  Probe
ggtaaaatggctgagtgaagcat

SEQ ID NO: 10892 - DNA, 24 bp, Artificial Sequence
  Probe
ggtaaaatggctgagtgaagcatt

SEQ ID NO: 10893 - DNA, 25 bp, Artificial Sequence
  Probe
ggtaaaatggctgagtgaagcattg

SEQ ID NO: 10894 - DNA, 26 bp, Artificial Sequence
  Probe
ggtaaaatggctgagtgaagcattgg

SEQ ID NO: 10895 - DNA, 27 bp, Artificial Sequence
  Probe
ggtaaaatggctgagtgaagcattgga

SEQ ID NO: 10896 - DNA, 28 bp, Artificial Sequence
  Probe
ggtaaaatggctgagtgaagcattggac

SEQ ID NO: 10897 - DNA, 29 bp, Artificial Sequence
  Probe
ggtaaaatggctgagtgaagcattggact

SEQ ID NO: 10898 - DNA, 30 bp, Artificial Sequence; identical to SEQ ID NO: 6688
  Probe

SEQ ID NO: 10899 - DNA, 15 bp, Artificial Sequence
  Probe
ggtagaattctcgcc

SEQ ID NO: 10900 - DNA, 16 bp, Artificial Sequence
  Probe
ggtagaattctcgcct

SEQ ID NO: 10901 - DNA, 17 bp, Artificial Sequence
  Probe
ggtagaattctcgcctg

SEQ ID NO: 10902 - DNA, 18 bp, Artificial Sequence
  Probe
ggtagaattctcgcctgc

SEQ ID NO: 10903 - DNA, 19 bp, Artificial Sequence
  Probe
ggtagaattctcgcctgcc

SEQ ID NO: 10904 - DNA, 18 bp, Artificial Sequence
  Probe
ggtagagcatttgactgc

SEQ ID NO: 10905 - DNA, 20 bp, Artificial Sequence
  Probe
ggtagagcggaggactgtag

SEQ ID NO: 10906 - DNA, 15 bp, Artificial Sequence
  Probe
ggtagcgtggccgag

SEQ ID NO: 10907 - DNA, 27 bp, Artificial Sequence
  Probe
ggtagcgtggccgagcggtctaaggcg

SEQ ID NO: 10908 - DNA, 28 bp, Artificial Sequence
  Probe
ggtagcgtggccgagcggtctaaggcgc

SEQ ID NO: 10909 - DNA, 16 bp, Artificial Sequence
  Probe
ggtagcgtggccgagt

SEQ ID NO: 10910 - DNA, 18 bp, Artificial Sequence
  Probe
ggtagcgtggccgagtgg

SEQ ID NO: 10911 - DNA, 19 bp, Artificial Sequence
  Probe
ggtagcgtggccgagtggt

SEQ ID NO: 10912 - DNA, 20 bp, Artificial Sequence
  Probe
ggtagcgtggccgagtggtc

SEQ ID NO: 10913 - DNA, 21 bp, Artificial Sequence
  Probe
ggtagcgtggccgagtggtct

SEQ ID NO: 10914 - DNA, 23 bp, Artificial Sequence
  Probe
ggtagcgtggccgagtggtctaa

SEQ ID NO: 10915 - DNA, 27 bp, Artificial Sequence
  Probe
ggtagcgtggccgagtggtctaaggcg

SEQ ID NO: 10916 - DNA, 28 bp, Artificial Sequence
  Probe
ggtagcgtggccgagtggtctaaggcgc

SEQ ID NO: 10917 - DNA, 29 bp, Artificial Sequence
  Probe
ggtagcgtggccgagtggtctaaggcgct

SEQ ID NO: 10918 - DNA, 30 bp, Artificial Sequence
  Probe
ggtagcgtggccgagtggtctaaggcgctg

SEQ ID NO: 10919 - DNA, 19 bp, Artificial Sequence
  Probe
ggtagggtggccgagcggt

SEQ ID NO: 10920 - DNA, 29 bp, Artificial Sequence
  Probe
ggtagggtggccgagcggtctaaggcact

SEQ ID NO: 10921 - DNA, 30 bp, Artificial Sequence
  Probe
ggtagggtggccgagcggtctaaggcactg

SEQ ID NO: 10922 - DNA, 15 bp, Artificial Sequence
  Probe
ggtagtgtggccgag

SEQ ID NO: 10923 - DNA, 16 bp, Artificial Sequence
  Probe
ggtagtgtggccgagc

SEQ ID NO: 10924 - DNA, 18 bp, Artificial Sequence
  Probe
ggtagtgtggccgagcgg

SEQ ID NO: 10925 - DNA, 19 bp, Artificial Sequence
  Probe
ggtagtgtggccgagcggt

SEQ ID NO: 10926 - DNA, 20 bp, Artificial Sequence
  Probe
ggtagtgtggccgagcggtc

SEQ ID NO: 10927 - DNA, 21 bp, Artificial Sequence
  Probe
ggtagtgtggccgagcggtct

SEQ ID NO: 10928 - DNA, 22 bp, Artificial Sequence
  Probe
ggtagtgtggccgagcggtcta

SEQ ID NO: 10929 - DNA, 24 bp, Artificial Sequence
  Probe
ggtagtgtggccgagcggtctaag

SEQ ID NO: 10930 - DNA, 27 bp, Artificial Sequence
  Probe
ggtagtgtggccgagcggtctaaggcg

SEQ ID NO: 10931 - DNA, 29 bp, Artificial Sequence
  Probe
ggtagtgtggccgagcggtctaaggcgct

SEQ ID NO: 10932 - DNA, 29 bp, Artificial Sequence
  Probe
ggtatagctcagtggtagagcatttgact

SEQ ID NO: 10933 - DNA, 30 bp, Artificial Sequence; identical to SEQ ID NO: 6722
  Probe

SEQ ID NO: 10934 - DNA, 15 bp, Artificial Sequence
  Probe
ggtcccatggtgtaa

SEQ ID NO: 10935 - DNA, 16 bp, Artificial Sequence
  Probe
ggtcccatggtgtaat

SEQ ID NO: 10936 - DNA, 17 bp, Artificial Sequence
  Probe
ggtcccatggtgtaatg

SEQ ID NO: 10937 - DNA, 18 bp, Artificial Sequence
  Probe
ggtcccatggtgtaatgg

SEQ ID NO: 10938 - DNA, 20 bp, Artificial Sequence
  Probe
ggtcccatggtgtaatggtt

SEQ ID NO: 10939 - DNA, 22 bp, Artificial Sequence
  Probe
ggtcccatggtgtaatggttag

SEQ ID NO: 10940 - DNA, 24 bp, Artificial Sequence
  Probe
ggtcccatggtgtaatggttagca

SEQ ID NO: 10941 - DNA, 25 bp, Artificial Sequence
  Probe
ggtcccatggtgtaatggttagcac

SEQ ID NO: 10942 - DNA, 26 bp, Artificial Sequence
  Probe
ggtcccatggtgtaatggttagcact

SEQ ID NO: 10943 - DNA, 27 bp, Artificial Sequence
  Probe
ggtcccatggtgtaatggttagcactc

SEQ ID NO: 10944 - DNA, 28 bp, Artificial Sequence
  Probe
ggtcccatggtgtaatggttagcactct

SEQ ID NO: 10945 - DNA, 30 bp, Artificial Sequence
  Probe
ggtccccggttcgaaaccgggcggaaacac

SEQ ID NO: 10946 - DNA, 22 bp, Artificial Sequence
  Probe
ggtcccgggttcaaatcccgga

SEQ ID NO: 10947 - DNA, 22 bp, Artificial Sequence
  Probe
ggtcccgggttcgatccccggc

SEQ ID NO: 10948 - DNA, 22 bp, Artificial Sequence
  Probe
ggtcctgggttcgagccccagt

SEQ ID NO: 10949 - DNA, 26 bp, Artificial Sequence
  Probe
ggtcgatggatcgaaaccatcctctg

SEQ ID NO: 10950 - DNA, 19 bp, Artificial Sequence
  Probe
ggtcgcgggttcgatcccc

SEQ ID NO: 10951 - DNA, 21 bp, Artificial Sequence
  Probe
ggtcgcgggttcgatccccgt

SEQ ID NO: 10952 - DNA, 22 bp, Artificial Sequence
  Probe
ggtcgcgggttcgatccccgta

SEQ ID NO: 10953 - DNA, 26 bp, Artificial Sequence
  Probe
ggtcgcgggttcgatccccgtacggg

SEQ ID NO: 10954 - DNA, 20 bp, Artificial Sequence
  Probe
ggtcgctggttcgattccgg

SEQ ID NO: 10955 - DNA, 21 bp, Artificial Sequence
  Probe
ggtcgctggttcgattccggc

SEQ ID NO: 10956 - DNA, 19 bp, Artificial Sequence
  Probe
ggtcgtgggttcgagcccc

SEQ ID NO: 10957 - DNA, 15 bp, Artificial Sequence
  Probe
ggtcgtggttgtagt

SEQ ID NO: 10958 - DNA, 16 bp, Artificial Sequence
  Probe
ggtcgtggttgtagtc

SEQ ID NO: 10959 - DNA, 17 bp, Artificial Sequence
  Probe
ggtcgtggttgtagtcc

SEQ ID NO: 10960 - DNA, 18 bp, Artificial Sequence
  Probe
ggtcgtggttgtagtccg

SEQ ID NO: 10961 - DNA, 20 bp, Artificial Sequence
  Probe
ggtcgtggttgtagtccgtg

SEQ ID NO: 10962 - DNA, 23 bp, Artificial Sequence
  Probe
ggtcgtggttgtagtccgtgcga

SEQ ID NO: 10963 - DNA, 24 bp, Artificial Sequence
  Probe
ggtcgtggttgtagtccgtgcgag

SEQ ID NO: 10964 - DNA, 26 bp, Artificial Sequence
  Probe
ggtcgtggttgtagtccgtgcgagaa

SEQ ID NO: 10965 - DNA, 28 bp, Artificial Sequence
  Probe
ggtcgtggttgtagtccgtgcgagaata

SEQ ID NO: 10966 - DNA, 29 bp, Artificial Sequence
  Probe
ggtcgtggttgtagtccgtgcgagaataa

SEQ ID NO: 10967 - DNA, 19 bp, Artificial Sequence
  Probe
ggtctaaggcgctgcgttc

SEQ ID NO: 10968 - DNA, 18 bp, Artificial Sequence
  Probe
ggtctagtggttaggatt

SEQ ID NO: 10969 - DNA, 20 bp, Artificial Sequence
  Probe
ggtctagtggttaggattcg

SEQ ID NO: 10970 - DNA, 21 bp, Artificial Sequence
  Probe
ggtctagtggttaggattcgg

SEQ ID NO: 10971 - DNA, 23 bp, Artificial Sequence
  Probe
ggtctagtggttaggattcggcg

SEQ ID NO: 10972 - DNA, 24 bp, Artificial Sequence
  Probe
ggtctagtggttaggattcggcgc

SEQ ID NO: 10973 - DNA, 25 bp, Artificial Sequence
  Probe
ggtctagtggttaggattcggcgct

SEQ ID NO: 10974 - DNA, 26 bp, Artificial Sequence
  Probe
ggtctagtggttaggattcggcgctc

SEQ ID NO: 10975 - DNA, 17 bp, Artificial Sequence
  Probe
ggtctccggatggaggc

SEQ ID NO: 10976 - DNA, 17 bp, Artificial Sequence
  Probe
ggtgagcactctggact

SEQ ID NO: 10977 - DNA, 18 bp, Artificial Sequence
  Probe
ggtgagtatccccgcctg

SEQ ID NO: 10978 - DNA, 19 bp, Artificial Sequence
  Probe
ggtgagtatccccgcctgt

SEQ ID NO: 10979 - DNA, 20 bp, Artificial Sequence
  Probe
ggtgagtatccccgcctgtc

SEQ ID NO: 10980 - DNA, 24 bp, Artificial Sequence
  Probe
ggtgcagtggtagaattctcgcct

SEQ ID NO: 10981 - DNA, 26 bp, Artificial Sequence
  Probe
ggtggagttaaagactttttctctga

SEQ ID NO: 10982 - DNA, 27 bp, Artificial Sequence
  Probe
ggtggagttaaagactttttctctgat

SEQ ID NO: 10983 - DNA, 19 bp, Artificial Sequence
  Probe
ggtggccgagtggttaagg

SEQ ID NO: 10984 - DNA, 19 bp, Artificial Sequence
  Probe
ggtggtagagcatttgact

SEQ ID NO: 10985 - DNA, 20 bp, Artificial Sequence
  Probe
ggtggtagagcatttgactg

SEQ ID NO: 10986 - DNA, 21 bp, Artificial Sequence
  Probe
ggtggtagagcatttgactgc

SEQ ID NO: 10987 - DNA, 15 bp, Artificial Sequence
  Probe
ggtggtctagtggtt

SEQ ID NO: 10988 - DNA, 23 bp, Artificial Sequence
  Probe
ggtggtctagtggttaggattcg

SEQ ID NO: 10989 - DNA, 24 bp, Artificial Sequence
  Probe
ggtggtctagtggttaggattcgg

SEQ ID NO: 10990 - DNA, 25 bp, Artificial Sequence
  Probe
ggtggtctagtggttaggattcggc

SEQ ID NO: 10991 - DNA, 26 bp, Artificial Sequence
  Probe
ggtggtctagtggttaggattcggcg

SEQ ID NO: 10992 - DNA, 27 bp, Artificial Sequence
  Probe
ggtggtctagtggttaggattcggcgc

SEQ ID NO: 10993 - DNA, 28 bp, Artificial Sequence
  Probe
ggtggtctagtggttaggattcggcgct

SEQ ID NO: 10994 - DNA, 29 bp, Artificial Sequence
  Probe
ggtggtctagtggttaggattcggcgctc

SEQ ID NO: 10995 - DNA, 17 bp, Artificial Sequence
  Probe
ggtggttcagtggtaga

SEQ ID NO: 10996 - DNA, 18 bp, Artificial Sequence
  Probe
ggtggttcagtggtagaa

SEQ ID NO: 10997 - DNA, 19 bp, Artificial Sequence
  Probe
ggtggttcagtggtagaat

SEQ ID NO: 10998 - DNA, 20 bp, Artificial Sequence
  Probe
ggtggttcagtggtagaatt

SEQ ID NO: 10999 - DNA, 22 bp, Artificial Sequence
  Probe
ggtggttcagtggtagaattct

SEQ ID NO: 11000 - DNA, 23 bp, Artificial Sequence
  Probe
ggtggttcagtggtagaattctc

SEQ ID NO: 11001 - DNA, 24 bp, Artificial Sequence
  Probe
ggtggttcagtggtagaattctcg

SEQ ID NO: 11002 - DNA, 25 bp, Artificial Sequence
  Probe
ggtggttcagtggtagaattctcgc

SEQ ID NO: 11003 - DNA, 26 bp, Artificial Sequence
  Probe
ggtggttcagtggtagaattctcgcc

SEQ ID NO: 11004 - DNA, 27 bp, Artificial Sequence
  Probe
ggtggttcagtggtagaattctcgcct

SEQ ID NO: 11005 - DNA, 28 bp, Artificial Sequence
  Probe
ggtggttcagtggtagaattctcgcctg

SEQ ID NO: 11006 - DNA, 29 bp, Artificial Sequence
  Probe
ggtggttcagtggtagaattctcgcctgc

SEQ ID NO: 11007 - DNA, 30 bp, Artificial Sequence; identical to SEQ ID NO: 6787
  Probe

SEQ ID NO: 11008 - DNA, 21 bp, Artificial Sequence
  Probe
ggtgtaatggttagcactctg

SEQ ID NO: 11009 - DNA, 22 bp, Artificial Sequence
  Probe
ggtgtaatggttagcactctgg

SEQ ID NO: 11010 - DNA, 23 bp, Artificial Sequence
  Probe
ggtgtaatggttagcactctgga

SEQ ID NO: 11011 - DNA, 24 bp, Artificial Sequence
  Probe
ggtgtaatggttagcactctggac

SEQ ID NO: 11012 - DNA, 25 bp, Artificial Sequence
  Probe
ggtgtaatggttagcactctggact

SEQ ID NO: 11013 - DNA, 26 bp, Artificial Sequence
  Probe
ggtgtaatggttagcactctggactc

SEQ ID NO: 11014 - DNA, 27 bp, Artificial Sequence
  Probe
ggtgtaatggttagcactctggactct

SEQ ID NO: 11015 - DNA, 29 bp, Artificial Sequence
  Probe
ggtgtaatggttagcactctggactctga

SEQ ID NO: 11016 - DNA, 21 bp, Artificial Sequence
  Probe
ggtgtagtggtatcatgcaag

SEQ ID NO: 11017 - DNA, 25 bp, Artificial Sequence
  Probe
ggtgtagtggtatcatgcaagattc

SEQ ID NO: 11018 - DNA, 18 bp, Artificial Sequence
  Probe
ggtgttaatcttggcttt

SEQ ID NO: 11019 - DNA, 15 bp, Artificial Sequence
  Probe
ggttagcactctgga

SEQ ID NO: 11020 - DNA, 16 bp, Artificial Sequence
  Probe
ggttagcactctggac

SEQ ID NO: 11021 - DNA, 17 bp, Artificial Sequence
  Probe
ggttagcactctggact

SEQ ID NO: 11022 - DNA, 18 bp, Artificial Sequence
  Probe
ggttagcactctggactc

SEQ ID NO: 11023 - DNA, 19 bp, Artificial Sequence
  Probe
ggttagcactctggactct

SEQ ID NO: 11024 - DNA, 20 bp, Artificial Sequence
  Probe
ggttagcactctggactctg

SEQ ID NO: 11025 - DNA, 21 bp, Artificial Sequence
  Probe
ggttagcactctggactctga

SEQ ID NO: 11026 - DNA, 22 bp, Artificial Sequence
  Probe
ggttagcactctggactctgaa

SEQ ID NO: 11027 - DNA, 23 bp, Artificial Sequence
  Probe
ggttagcactctggactctgaat

SEQ ID NO: 11028 - DNA, 25 bp, Artificial Sequence
  Probe
ggttagcactctggactctgaatcc

SEQ ID NO: 11029 - DNA, 28 bp, Artificial Sequence
  Probe
ggttagcactctggactctgaatccagc

SEQ ID NO: 11030 - DNA, 18 bp, Artificial Sequence
  Probe
ggttagcactctggactt

SEQ ID NO: 11031 - DNA, 19 bp, Artificial Sequence
  Probe
ggttagcactctggacttt

SEQ ID NO: 11032 - DNA, 20 bp, Artificial Sequence
  Probe
ggttagcactctggactttg

SEQ ID NO: 11033 - DNA, 21 bp, Artificial Sequence
  Probe
ggttagcactctggactttga

SEQ ID NO: 11034 - DNA, 22 bp, Artificial Sequence
  Probe
ggttagcactctggactttgaa

SEQ ID NO: 11035 - DNA, 23 bp, Artificial Sequence
  Probe
ggttagcactctggactttgaat

SEQ ID NO: 11036 - DNA, 24 bp, Artificial Sequence
  Probe
ggttagcactctggactttgaatc

SEQ ID NO: 11037 - DNA, 17 bp, Artificial Sequence
  Probe
ggttaggattcctggtt

SEQ ID NO: 11038 - DNA, 18 bp, Artificial Sequence
  Probe
ggttaggattcctggttt

SEQ ID NO: 11039 - DNA, 19 bp, Artificial Sequence
  Probe
ggttaggattcctggtttt

SEQ ID NO: 11040 - DNA, 16 bp, Artificial Sequence
  Probe
ggttaggattcggcgc

SEQ ID NO: 11041 - DNA, 17 bp, Artificial Sequence
  Probe
ggttaggattcggcgct

SEQ ID NO: 11042 - DNA, 18 bp, Artificial Sequence
  Probe
ggttaggattcggcgctc

SEQ ID NO: 11043 - DNA, 19 bp, Artificial Sequence
  Probe
ggttaggattcggcgctct

SEQ ID NO: 11044 - DNA, 20 bp, Artificial Sequence
  Probe
ggttaggattcggcgctctc

SEQ ID NO: 11045 - DNA, 15 bp, Artificial Sequence
  Probe
ggttagtactctgcg

SEQ ID NO: 11046 - DNA, 20 bp, Artificial Sequence
  Probe
ggttagtactctgcgttgtg

SEQ ID NO: 11047 - DNA, 21 bp, Artificial Sequence
  Probe
ggttagtactctgcgttgtgg

SEQ ID NO: 11048 - DNA, 22 bp, Artificial Sequence
  Probe
ggttagtactctgcgttgtggc

SEQ ID NO: 11049 - DNA, 23 bp, Artificial Sequence
  Probe
ggttagtactctgcgttgtggcc

SEQ ID NO: 11050 - DNA, 24 bp, Artificial Sequence
  Probe
ggttagtactctgcgttgtggccg

SEQ ID NO: 11051 - DNA, 19 bp, Artificial Sequence
  Probe
ggttcaaatcccggacgag

SEQ ID NO: 11052 - DNA, 25 bp, Artificial Sequence
  Probe
ggttcaatccccggcacctccacca

SEQ ID NO: 11053 - DNA, 23 bp, Artificial Sequence
  Probe
ggttcaattcccggtcagggaac

SEQ ID NO: 11054 - DNA, 24 bp, Artificial Sequence
  Probe
ggttcaattcccggtcagggaacc

SEQ ID NO: 11055 - DNA, 25 bp, Artificial Sequence
  Probe
ggttcaattcccggtcagggaacca

SEQ ID NO: 11056 - DNA, 15 bp, Artificial Sequence
  Probe
ggttcagtggtagaa

SEQ ID NO: 11057 - DNA, 17 bp, Artificial Sequence
  Probe
ggttcagtggtagaatt

SEQ ID NO: 11058 - DNA, 19 bp, Artificial Sequence
  Probe
ggttcagtggtagaattct

SEQ ID NO: 11059 - DNA, 20 bp, Artificial Sequence
  Probe
ggttcagtggtagaattctc

SEQ ID NO: 11060 - DNA, 21 bp, Artificial Sequence
  Probe
ggttcagtggtagaattctcg

SEQ ID NO: 11061 - DNA, 22 bp, Artificial Sequence
  Probe
ggttcagtggtagaattctcgc

SEQ ID NO: 11062 - DNA, 23 bp, Artificial Sequence
  Probe
ggttcagtggtagaattctcgcc

SEQ ID NO: 11063 - DNA, 24 bp, Artificial Sequence
  Probe
ggttcagtggtagaattctcgcct

SEQ ID NO: 11064 - DNA, 25 bp, Artificial Sequence
  Probe
ggttcagtggtagaattctcgcctg

SEQ ID NO: 11065 - DNA, 26 bp, Artificial Sequence
  Probe
ggttcagtggtagaattctcgcctgc

SEQ ID NO: 11066 - DNA, 27 bp, Artificial Sequence
  Probe
ggttcagtggtagaattctcgcctgcc

SEQ ID NO: 11067 - DNA, 15 bp, Artificial Sequence
  Probe
ggttccatagtgtag

SEQ ID NO: 11068 - DNA, 16 bp, Artificial Sequence
  Probe
ggttccatagtgtagc

SEQ ID NO: 11069 - DNA, 18 bp, Artificial Sequence
  Probe
ggttccatagtgtagcgg

SEQ ID NO: 11070 - DNA, 22 bp, Artificial Sequence
  Probe
ggttccatagtgtagcggttat

SEQ ID NO: 11071 - DNA, 23 bp, Artificial Sequence
  Probe
ggttccatagtgtagcggttatc

SEQ ID NO: 11072 - DNA, 25 bp, Artificial Sequence
  Probe
ggttccatagtgtagcggttatcac

SEQ ID NO: 11073 - DNA, 26 bp, Artificial Sequence
  Probe
ggttccatagtgtagcggttatcacg

SEQ ID NO: 11074 - DNA, 28 bp, Artificial Sequence
  Probe
ggttccatagtgtagcggttatcacgtc

SEQ ID NO: 11075 - DNA, 29 bp, Artificial Sequence
  Probe
ggttccatagtgtagcggttatcacgtct

SEQ ID NO: 11076 - DNA, 16 bp, Artificial Sequence
  Probe
ggttccatagtgtagt

SEQ ID NO: 11077 - DNA, 17 bp, Artificial Sequence
  Probe
ggttccatagtgtagtg

SEQ ID NO: 11078 - DNA, 18 bp, Artificial Sequence
  Probe
ggttccatagtgtagtgg

SEQ ID NO: 11079 - DNA, 19 bp, Artificial Sequence
  Probe
ggttccatagtgtagtggt

SEQ ID NO: 11080 - DNA, 20 bp, Artificial Sequence
  Probe
ggttccatagtgtagtggtt

SEQ ID NO: 11081 - DNA, 22 bp, Artificial Sequence
  Probe
ggttccatagtgtagtggttat

SEQ ID NO: 11082 - DNA, 24 bp, Artificial Sequence
  Probe
ggttccatagtgtagtggttatca

SEQ ID NO: 11083 - DNA, 25 bp, Artificial Sequence
  Probe
ggttccatagtgtagtggttatcac

SEQ ID NO: 11084 - DNA, 26 bp, Artificial Sequence
  Probe
ggttccatagtgtagtggttatcaca

SEQ ID NO: 11085 - DNA, 30 bp, Artificial Sequence
  Probe
ggttccatagtgtagtggttatcacatctg

SEQ ID NO: 11086 - DNA, 29 bp, Artificial Sequence
  Probe
ggttccatagtgtagtggttatcacgtct

SEQ ID NO: 11087 - DNA, 15 bp, Artificial Sequence
  Probe
ggttccatggtgtaa

SEQ ID NO: 11088 - DNA, 16 bp, Artificial Sequence
  Probe
ggttccatggtgtaat

SEQ ID NO: 11089 - DNA, 17 bp, Artificial Sequence
  Probe
ggttccatggtgtaatg

SEQ ID NO: 11090 - DNA, 18 bp, Artificial Sequence
  Probe
ggttccatggtgtaatgg

SEQ ID NO: 11091 - DNA, 19 bp, Artificial Sequence
  Probe
ggttccatggtgtaatggt

SEQ ID NO: 11092 - DNA, 30 bp, Artificial Sequence
  Probe
ggttccatggtgtaatggtaagcaccctgg

SEQ ID NO: 11093 - DNA, 30 bp, Artificial Sequence
  Probe
ggttccatggtgtaatggtaagcactctgg

SEQ ID NO: 11094 - DNA, 29 bp, Artificial Sequence
  Probe
ggttccatggtgtaatggtgagcactctg

SEQ ID NO: 11095 - DNA, 30 bp, Artificial Sequence
  Probe
ggttccatggtgtaatggtgagcactctgg

SEQ ID NO: 11096 - DNA, 20 bp, Artificial Sequence
  Probe
ggttccatggtgtaatggtt

SEQ ID NO: 11097 - DNA, 21 bp, Artificial Sequence
  Probe
ggttccatggtgtaatggtta

SEQ ID NO: 11098 - DNA, 22 bp, Artificial Sequence
  Probe
ggttccatggtgtaatggttag

SEQ ID NO: 11099 - DNA, 23 bp, Artificial Sequence
  Probe
ggttccatggtgtaatggttagc

SEQ ID NO: 11100 - DNA, 24 bp, Artificial Sequence
  Probe
ggttccatggtgtaatggttagca

SEQ ID NO: 11101 - DNA, 25 bp, Artificial Sequence
  Probe
ggttccatggtgtaatggttagcac

SEQ ID NO: 11102 - DNA, 26 bp, Artificial Sequence
  Probe
ggttccatggtgtaatggttagcact

SEQ ID NO: 11103 - DNA, 27 bp, Artificial Sequence
  Probe
ggttccatggtgtaatggttagcactc

SEQ ID NO: 11104 - DNA, 28 bp, Artificial Sequence
  Probe
ggttccatggtgtaatggttagcactct

SEQ ID NO: 11105 - DNA, 29 bp, Artificial Sequence
  Probe
ggttccatggtgtaatggttagcactctg

SEQ ID NO: 11106 - DNA, 22 bp, Artificial Sequence
  Probe
ggttccgggttcgagtcccggc

SEQ ID NO: 11107 - DNA, 22 bp, Artificial Sequence
  Probe
ggttcgaatcccaccagagtcg

SEQ ID NO: 11108 - DNA, 23 bp, Artificial Sequence
  Probe
ggttcgaatcccatcctcgtcgc

SEQ ID NO: 11109 - DNA, 23 bp, Artificial Sequence
  Probe
ggttcgactcccggtatgggaac

SEQ ID NO: 11110 - DNA, 21 bp, Artificial Sequence
  Probe
ggttcgactcccggtgtggga

SEQ ID NO: 11111 - DNA, 22 bp, Artificial Sequence
  Probe
ggttcgactcccggtgtgggaa

SEQ ID NO: 11112 - DNA, 22 bp, Artificial Sequence
  Probe
ggttcgactcctggctggctcg

SEQ ID NO: 11113 - DNA, 23 bp, Artificial Sequence
  Probe
ggttcgactcctggctggctcgc

SEQ ID NO: 11114 - DNA, 20 bp, Artificial Sequence
  Probe
ggttcgagccccacgttggg

SEQ ID NO: 11115 - DNA, 23 bp, Artificial Sequence
  Probe
ggttcgagccccacgttgggcgc

SEQ ID NO: 11116 - DNA, 22 bp, Artificial Sequence
  Probe
ggttcgagtcccaccagagtcg

SEQ ID NO: 11117 - DNA, 23 bp, Artificial Sequence
  Probe
ggttcgagtcccatctgggtcgc

SEQ ID NO: 11118 - DNA, 19 bp, Artificial Sequence
  Probe
ggttcgagtcccggcggag

SEQ ID NO: 11119 - DNA, 18 bp, Artificial Sequence
  Probe
ggttcgattccccgacgg

SEQ ID NO: 11120 - DNA, 19 bp, Artificial Sequence
  Probe
ggttcgattccccgacggg

SEQ ID NO: 11121 - DNA, 23 bp, Artificial Sequence
  Probe
ggttcgattccccgacggggaga

SEQ ID NO: 11122 - DNA, 24 bp, Artificial Sequence
  Probe
ggttcgattccccgacggggagac

SEQ ID NO: 11123 - DNA, 23 bp, Artificial Sequence
  Probe
ggttcgattccccgacggggagg

SEQ ID NO: 11124 - DNA, 24 bp, Artificial Sequence
  Probe
ggttcgattccccgacggggaggc

SEQ ID NO: 11125 - DNA, 25 bp, Artificial Sequence
  Probe
ggttcgattccccgacggggaggca

SEQ ID NO: 11126 - DNA, 19 bp, Artificial Sequence
  Probe
ggttcgattcccggtcagg

SEQ ID NO: 11127 - DNA, 20 bp, Artificial Sequence
  Probe
ggttcgattcccggtcaggg

SEQ ID NO: 11128 - DNA, 21 bp, Artificial Sequence
  Probe
ggttcgattcccggtcaggga

SEQ ID NO: 11129 - DNA, 22 bp, Artificial Sequence
  Probe
ggttcgattcccggtcagggaa

SEQ ID NO: 11130 - DNA, 23 bp, Artificial Sequence
  Probe
ggttcgattcccggtcagggaaa

SEQ ID NO: 11131 - DNA, 23 bp, Artificial Sequence
  Probe
ggttcgattcccggtcagggaag

SEQ ID NO: 11132 - DNA, 24 bp, Artificial Sequence
  Probe
ggttcgattcccggtcagggaagc

SEQ ID NO: 11133 - DNA, 23 bp, Artificial Sequence
  Probe
ggttcgattcccggtcagggaat

SEQ ID NO: 11134 - DNA, 23 bp, Artificial Sequence
  Probe
ggttcgattcccggtcatggaac

SEQ ID NO: 11135 - DNA, 24 bp, Artificial Sequence
  Probe
ggttcgattcccggtcatggaacc

SEQ ID NO: 11136 - DNA, 25 bp, Artificial Sequence
  Probe
ggttcgattcccggtcatggaacca

SEQ ID NO: 11137 - DNA, 23 bp, Artificial Sequence
  Probe
ggttcgattcctggtcagggaac

SEQ ID NO: 11138 - DNA, 24 bp, Artificial Sequence
  Probe
ggttcgattcctggtcagggaacc

SEQ ID NO: 11139 - DNA, 25 bp, Artificial Sequence
  Probe
ggttcgattcctggtcagggaacca

SEQ ID NO: 11140 - DNA, 24 bp, Artificial Sequence
  Probe
ggttgcgtgttcaagtcacgtcgg

SEQ ID NO: 11141 - DNA, 15 bp, Artificial Sequence
  Probe
ggttgctgtcttttt

SEQ ID NO: 11142 - DNA, 29 bp, Artificial Sequence
  Probe
ggttggtggttcgagcccacccagggacg

SEQ ID NO: 11143 - DNA, 30 bp, Artificial Sequence
  Probe
ggttggtggttcgagcccacccagggacgc

SEQ ID NO: 11144 - DNA, 22 bp, Artificial Sequence
  Probe
ggttgtagtccgtgcgagaata

SEQ ID NO: 11145 - DNA, 18 bp, Artificial Sequence
  Probe
ggttttgcagtccttagc

SEQ ID NO: 11146 - DNA, 29 bp, Artificial Sequence
  Probe
ggtttttcatatcattggtcgtggttgta

SEQ ID NO: 11147 - DNA, 30 bp, Artificial Sequence
  Probe
ggtttttcatatcattggtcgtggttgtag

SEQ ID NO: 11148 - DNA, 30 bp, Artificial Sequence
  Probe
gtaaaatggctgagtgaagcattggactgt

SEQ ID NO: 11149 - DNA, 17 bp, Artificial Sequence
  Probe
gtaaaccaggggtcgcg

SEQ ID NO: 11150 - DNA, 18 bp, Artificial Sequence
  Probe
gtaaaccaggggtcgcga

SEQ ID NO: 11151 - DNA, 19 bp, Artificial Sequence
  Probe
gtaaaccaggggtcgcgag

SEQ ID NO: 11152 - DNA, 20 bp, Artificial Sequence
  Probe
gtaaaccaggggtcgcgagt

SEQ ID NO: 11153 - DNA, 30 bp, Artificial Sequence
  Probe
gtaaatatagtttaaccaaaacatcagatt

SEQ ID NO: 11154 - DNA, 22 bp, Artificial Sequence
  Probe
gtaatggtgagcactctggact

SEQ ID NO: 11155 - DNA, 15 bp, Artificial Sequence
  Probe
gtaatggttagcact

SEQ ID NO: 11156 - DNA, 17 bp, Artificial Sequence
  Probe
gtaatggttagcactct

SEQ ID NO: 11157 - DNA, 18 bp, Artificial Sequence
  Probe
gtaatggttagcactctg

SEQ ID NO: 11158 - DNA, 19 bp, Artificial Sequence
  Probe
gtaatggttagcactctgg

SEQ ID NO: 11159 - DNA, 20 bp, Artificial Sequence
  Probe
gtaatggttagcactctgga

SEQ ID NO: 11160 - DNA, 21 bp, Artificial Sequence
  Probe
gtaatggttagcactctggac

SEQ ID NO: 11161 - DNA, 22 bp, Artificial Sequence
  Probe
gtaatggttagcactctggact

SEQ ID NO: 11162 - DNA, 23 bp, Artificial Sequence
  Probe
gtaatggttagcactctggactc

SEQ ID NO: 11163 - DNA, 24 bp, Artificial Sequence
  Probe
gtaatggttagcactctggactct

SEQ ID NO: 11164 - DNA, 25 bp, Artificial Sequence
  Probe
gtaatggttagcactctggactctg

SEQ ID NO: 11165 - DNA, 23 bp, Artificial Sequence
  Probe
gtaatggttagcactctggactt

SEQ ID NO: 11166 - DNA, 22 bp, Artificial Sequence
  Probe
gtaatggttagcactctgggct

SEQ ID NO: 11167 - DNA, 23 bp, Artificial Sequence
  Probe
gtaatggttagcactctgggctt

SEQ ID NO: 11168 - DNA, 15 bp, Artificial Sequence
  Probe
gtagaattctcgcct

SEQ ID NO: 11169 - DNA, 16 bp, Artificial Sequence
  Probe
gtagaattctcgcctg

SEQ ID NO: 11170 - DNA, 17 bp, Artificial Sequence
  Probe
gtagaattctcgcctgc

SEQ ID NO: 11171 - DNA, 18 bp, Artificial Sequence
  Probe
gtagaattctcgcctgcc

SEQ ID NO: 11172 - DNA, 30 bp, Artificial Sequence
  Probe
gtagaattctcgcctgccacgcgggaggcc

SEQ ID NO: 11173 - DNA, 20 bp, Artificial Sequence
  Probe
gtagcgtggccgagcggtct

SEQ ID NO: 11174 - DNA, 25 bp, Artificial Sequence
  Probe
gtagcgtggccgagcggtctaaggc

SEQ ID NO: 11175 - DNA, 26 bp, Artificial Sequence
  Probe
gtagctcagtggtagagcatttgact

SEQ ID NO: 11176 - DNA, 22 bp, Artificial Sequence
  Probe
gtagtataaactaatacaccag

SEQ ID NO: 11177 - DNA, 15 bp, Artificial Sequence
  Probe
gtagtcgtggccgag

SEQ ID NO: 11178 - DNA, 16 bp, Artificial Sequence
  Probe
gtagtcgtggccgagt

SEQ ID NO: 11179 - DNA, 17 bp, Artificial Sequence
  Probe
gtagtcgtggccgagtg

SEQ ID NO: 11180 - DNA, 21 bp, Artificial Sequence
  Probe
gtagtcgtggccgagtggtta

SEQ ID NO: 11181 - DNA, 26 bp, Artificial Sequence
  Probe
gtagtcgtggccgagtggttaaggcg

SEQ ID NO: 11182 - DNA, 27 bp, Artificial Sequence
  Probe
gtagtcgtggccgagtggttaaggcga

SEQ ID NO: 11183 - DNA, 29 bp, Artificial Sequence
  Probe
gtagtcgtggccgagtggttaaggcgatg

SEQ ID NO: 11184 - DNA, 30 bp, Artificial Sequence
  Probe
gtagtcgtggccgagtggttaaggcgatgg

SEQ ID NO: 11185 - DNA, 25 bp, Artificial Sequence
  Probe
gtagtcgtggccgagtggttaaggt

SEQ ID NO: 11186 - DNA, 21 bp, Artificial Sequence
  Probe
gtagtggtatcatgcaagatt

SEQ ID NO: 11187 - DNA, 22 bp, Artificial Sequence
  Probe
gtagtggtatcatgcaagattc

SEQ ID NO: 11188 - DNA, 21 bp, Artificial Sequence
  Probe
gtagtggttatcacgttcgcc

SEQ ID NO: 11189 - DNA, 22 bp, Artificial Sequence
  Probe
gtagtggttatcacgttcgcct

SEQ ID NO: 11190 - DNA, 26 bp, Artificial Sequence
  Probe
gtagtgtagtggttatcacgttcgcc

SEQ ID NO: 11191 - DNA, 28 bp, Artificial Sequence
  Probe
gtatagctcagtggtagagcatttgact

SEQ ID NO: 11192 - DNA, 29 bp, Artificial Sequence
  Probe
gtatagctcagtggtagagcatttgactg

SEQ ID NO: 11193 - DNA, 30 bp, Artificial Sequence; identical to SEQ ID NO: 6922
  Probe

SEQ ID NO: 11194 - DNA, 23 bp, Artificial Sequence
  Probe
gtatagtggtgagtatccccgcc

SEQ ID NO: 11195 - DNA, 20 bp, Artificial Sequence
  Probe
gtatagtggttagtactctg

SEQ ID NO: 11196 - DNA, 22 bp, Artificial Sequence
  Probe
gtatagtggttagtactctgcg

SEQ ID NO: 11197 - DNA, 23 bp, Artificial Sequence
  Probe
gtatagtggttagtactctgcgt

SEQ ID NO: 11198 - DNA, 24 bp, Artificial Sequence
  Probe
gtatagtggttagtactctgcgtt

SEQ ID NO: 11199 - DNA, 25 bp, Artificial Sequence
  Probe
gtatagtggttagtactctgcgttg

SEQ ID NO: 11200 - DNA, 26 bp, Artificial Sequence
  Probe
gtatagtggttagtactctgcgttgt

SEQ ID NO: 11201 - DNA, 28 bp, Artificial Sequence
  Probe
gtatgaggccccgggttcaatccccggc

SEQ ID NO: 11202 - DNA, 28 bp, Artificial Sequence
  Probe
gtatgaggccccgggttcgatccccggc

SEQ ID NO: 11203 - DNA, 24 bp, Artificial Sequence
  Probe
gtcacggtggccgagtggttaagg

SEQ ID NO: 11204 - DNA, 30 bp, Artificial Sequence
  Probe
gtcacggtggccgagtggttaaggcgttgg

SEQ ID NO: 11205 - DNA, 15 bp, Artificial Sequence
  Probe
gtcaggatggccgag

SEQ ID NO: 11206 - DNA, 16 bp, Artificial Sequence
  Probe
gtcaggatggccgagc

SEQ ID NO: 11207 - DNA, 17 bp, Artificial Sequence
  Probe
gtcaggatggccgagcg

SEQ ID NO: 11208 - DNA, 18 bp, Artificial Sequence
  Probe
gtcaggatggccgagcgg

SEQ ID NO: 11209 - DNA, 19 bp, Artificial Sequence
  Probe
gtcaggatggccgagcggt

SEQ ID NO: 11210 - DNA, 20 bp, Artificial Sequence
  Probe
gtcaggatggccgagcggtc

SEQ ID NO: 11211 - DNA, 21 bp, Artificial Sequence
  Probe
gtcaggatggccgagcggtct

SEQ ID NO: 11212 - DNA, 22 bp, Artificial Sequence
  Probe
gtcaggatggccgagcggtcta

SEQ ID NO: 11213 - DNA, 23 bp, Artificial Sequence
  Probe
gtcaggatggccgagcggtctaa

SEQ ID NO: 11214 - DNA, 24 bp, Artificial Sequence
  Probe
gtcaggatggccgagcggtctaag

SEQ ID NO: 11215 - DNA, 25 bp, Artificial Sequence
  Probe
gtcaggatggccgagcggtctaagg

SEQ ID NO: 11216 - DNA, 26 bp, Artificial Sequence
  Probe
gtcaggatggccgagcggtctaaggc

SEQ ID NO: 11217 - DNA, 27 bp, Artificial Sequence
  Probe
gtcaggatggccgagcggtctaaggcg

SEQ ID NO: 11218 - DNA, 28 bp, Artificial Sequence
  Probe
gtcaggatggccgagcggtctaaggcgc

SEQ ID NO: 11219 - DNA, 29 bp, Artificial Sequence
  Probe
gtcaggatggccgagcggtctaaggcgct

SEQ ID NO: 11220 - DNA, 30 bp, Artificial Sequence
  Probe
gtcaggatggccgagcggtctaaggcgctg

SEQ ID NO: 11221 - DNA, 20 bp, Artificial Sequence
  Probe
gtcaggatggccgagtggtc

SEQ ID NO: 11222 - DNA, 21 bp, Artificial Sequence
  Probe
gtcaggatggccgagtggtct

SEQ ID NO: 11223 - DNA, 25 bp, Artificial Sequence
  Probe
gtcaggatggccgagtggtctaagg

SEQ ID NO: 11224 - DNA, 26 bp, Artificial Sequence
  Probe
gtcaggatggccgagtggtctaaggc

SEQ ID NO: 11225 - DNA, 27 bp, Artificial Sequence
  Probe
gtcaggatggccgagtggtctaaggcg

SEQ ID NO: 11226 - DNA, 29 bp, Artificial Sequence
  Probe
gtcaggatggccgagtggtctaaggcgcc

SEQ ID NO: 11227 - DNA, 20 bp, Artificial Sequence
  Probe
gtcccgggttcaaatcccgg

SEQ ID NO: 11228 - DNA, 21 bp, Artificial Sequence
  Probe
gtcccgggttcaaatcccgga

SEQ ID NO: 11229 - DNA, 19 bp, Artificial Sequence
  Probe
gtccctggttcgatcccgg

SEQ ID NO: 11230 - DNA, 17 bp, Artificial Sequence
  Probe
gtccttgtagtataaac

SEQ ID NO: 11231 - DNA, 18 bp, Artificial Sequence
  Probe
gtccttgtagtataaact

SEQ ID NO: 11232 - DNA, 19 bp, Artificial Sequence
  Probe
gtccttgtagtataaacta

SEQ ID NO: 11233 - DNA, 21 bp, Artificial Sequence
  Probe
gtccttgtagtataaactaat

SEQ ID NO: 11234 - DNA, 22 bp, Artificial Sequence
  Probe
gtccttgtagtataaactaata

SEQ ID NO: 11235 - DNA, 23 bp, Artificial Sequence
  Probe
gtccttgtagtataaactaatac

SEQ ID NO: 11236 - DNA, 24 bp, Artificial Sequence
  Probe
gtccttgtagtataaactaataca

SEQ ID NO: 11237 - DNA, 25 bp, Artificial Sequence
  Probe
gtccttgtagtataaactaatacac

SEQ ID NO: 11238 - DNA, 26 bp, Artificial Sequence
  Probe
gtccttgtagtataaactaatacacc

SEQ ID NO: 11239 - DNA, 27 bp, Artificial Sequence
  Probe
gtccttgtagtataaactaatacacca

SEQ ID NO: 11240 - DNA, 29 bp, Artificial Sequence
  Probe
gtccttgtagtataaactaatacaccagt

SEQ ID NO: 11241 - DNA, 30 bp, Artificial Sequence; identical to SEQ ID NO: 1487
  Probe

SEQ ID NO: 11242 - DNA, 18 bp, Artificial Sequence
  Probe
gtcgcgtgagattagttt

SEQ ID NO: 11243 - DNA, 19 bp, Artificial Sequence
  Probe
gtcgcgtgagattagtttt

SEQ ID NO: 11244 - DNA, 19 bp, Artificial Sequence
  Probe
gtcgctggttcgaatccgg

SEQ ID NO: 11245 - DNA, 19 bp, Artificial Sequence
  Probe
gtcgctggttcgattccgg

SEQ ID NO: 11246 - DNA, 17 bp, Artificial Sequence
  Probe
gtcggtagagcatcaga

SEQ ID NO: 11247 - DNA, 15 bp, Artificial Sequence
  Probe
gtcggtagagcatga

SEQ ID NO: 11248 - DNA, 18 bp, Artificial Sequence
  Probe
gtcggtagagcatgagac

SEQ ID NO: 11249 - DNA, 19 bp, Artificial Sequence
  Probe
gtcggtagagcatgagact

SEQ ID NO: 11250 - DNA, 21 bp, Artificial Sequence
  Probe
gtcgtggccgagtggttaagg

SEQ ID NO: 11251 - DNA, 15 bp, Artificial Sequence
  Probe
gtcgtggttgtagtc

SEQ ID NO: 11252 - DNA, 16 bp, Artificial Sequence
  Probe
gtcgtggttgtagtcc

SEQ ID NO: 11253 - DNA, 17 bp, Artificial Sequence
  Probe
gtcgtggttgtagtccg

SEQ ID NO: 11254 - DNA, 19 bp, Artificial Sequence
  Probe
gtcgtggttgtagtccgtg

SEQ ID NO: 11255 - DNA, 20 bp, Artificial Sequence
  Probe
gtcgtggttgtagtccgtgc

SEQ ID NO: 11256 - DNA, 22 bp, Artificial Sequence
  Probe
gtcgtggttgtagtccgtgcga

SEQ ID NO: 11257 - DNA, 25 bp, Artificial Sequence
  Probe
gtcgtggttgtagtccgtgcgagaa

SEQ ID NO: 11258 - DNA, 27 bp, Artificial Sequence
  Probe
gtcgtggttgtagtccgtgcgagaata

SEQ ID NO: 11259 - DNA, 28 bp, Artificial Sequence
  Probe
gtcgtggttgtagtccgtgcgagaataa

SEQ ID NO: 11260 - DNA, 22 bp, Artificial Sequence
  Probe
gtctagcggttaggattcctgg

SEQ ID NO: 11261 - DNA, 23 bp, Artificial Sequence
  Probe
gtctagtggttaggattcggcgc

SEQ ID NO: 11262 - DNA, 24 bp, Artificial Sequence
  Probe
gtctagtggttaggattcggcgct

SEQ ID NO: 11263 - DNA, 16 bp, Artificial Sequence
  Probe
gtctctgtggcgcaat

SEQ ID NO: 11264 - DNA, 17 bp, Artificial Sequence
  Probe
gtctctgtggcgcaatc

SEQ ID NO: 11265 - DNA, 18 bp, Artificial Sequence
  Probe
gtctctgtggcgcaatcg

SEQ ID NO: 11266 - DNA, 20 bp, Artificial Sequence
  Probe
gtctctgtggcgcaatcggc

SEQ ID NO: 11267 - DNA, 21 bp, Artificial Sequence
  Probe
gtctctgtggcgcaatcggtt

SEQ ID NO: 11268 - DNA, 30 bp, Artificial Sequence
  Probe
gtctctgtggcgcaatcggttagcgcattc

SEQ ID NO: 11269 - DNA, 30 bp, Artificial Sequence
  Probe
gtctctgtggcgcaatcggttagcgcgttc

SEQ ID NO: 11270 - DNA, 18 bp, Artificial Sequence
  Probe
gtctctgtggcgcaatgg

SEQ ID NO: 11271 - DNA, 19 bp, Artificial Sequence
  Probe
gtctctgtggcgcaatgga

SEQ ID NO: 11272 - DNA, 19 bp, Artificial Sequence
  Probe
gtctctgtggcgccatcgg

SEQ ID NO: 11273 - DNA, 20 bp, Artificial Sequence
  Probe
gtctctgtggcgccatcggt

SEQ ID NO: 11274 - DNA, 17 bp, Artificial Sequence
  Probe
gtgaagcattggactgt

SEQ ID NO: 11275 - DNA, 18 bp, Artificial Sequence
  Probe
gtgaagcattggactgta

SEQ ID NO: 11276 - DNA, 19 bp, Artificial Sequence
  Probe
gtgaagcattggactgtaa

SEQ ID NO: 11277 - DNA, 20 bp, Artificial Sequence
  Probe
gtgaagcattggactgtaaa

SEQ ID NO: 11278 - DNA, 19 bp, Artificial Sequence
  Probe
gtgagtatccccgcctgtc

SEQ ID NO: 11279 - DNA, 15 bp, Artificial Sequence
  Probe
gtgatcgtatagtgg

SEQ ID NO: 11280 - DNA, 16 bp, Artificial Sequence
  Probe
gtgatcgtatagtggt

SEQ ID NO: 11281 - DNA, 17 bp, Artificial Sequence
  Probe
gtgatcgtatagtggtt

SEQ ID NO: 11282 - DNA, 18 bp, Artificial Sequence
  Probe
gtgatcgtatagtggtta

SEQ ID NO: 11283 - DNA, 19 bp, Artificial Sequence
  Probe
gtgatcgtatagtggttag

SEQ ID NO: 11284 - DNA, 20 bp, Artificial Sequence
  Probe
gtgatcgtatagtggttagt

SEQ ID NO: 11285 - DNA, 21 bp, Artificial Sequence
  Probe
gtgatcgtatagtggttagta

SEQ ID NO: 11286 - DNA, 22 bp, Artificial Sequence
  Probe
gtgatcgtatagtggttagtac

SEQ ID NO: 11287 - DNA, 23 bp, Artificial Sequence
  Probe
gtgatcgtatagtggttagtact

SEQ ID NO: 11288 - DNA, 24 bp, Artificial Sequence
  Probe
gtgatcgtatagtggttagtactc

SEQ ID NO: 11289 - DNA, 25 bp, Artificial Sequence
  Probe
gtgatcgtatagtggttagtactct

SEQ ID NO: 11290 - DNA, 26 bp, Artificial Sequence
  Probe
gtgatcgtatagtggttagtactctg

SEQ ID NO: 11291 - DNA, 27 bp, Artificial Sequence
  Probe
gtgatcgtatagtggttagtactctgc

SEQ ID NO: 11292 - DNA, 28 bp, Artificial Sequence
  Probe
gtgatcgtatagtggttagtactctgcg

SEQ ID NO: 11293 - DNA, 29 bp, Artificial Sequence
  Probe
gtgatcgtatagtggttagtactctgcgt

SEQ ID NO: 11294 - DNA, 23 bp, Artificial Sequence
  Probe
gtgcagtggtagaattctcgcct

SEQ ID NO: 11295 - DNA, 25 bp, Artificial Sequence
  Probe
gtgcagtggtagaattctcgcctcc

SEQ ID NO: 11296 - DNA, 26 bp, Artificial Sequence
  Probe
gtggagttaaagactttttctctgat

SEQ ID NO: 11297 - DNA, 25 bp, Artificial Sequence
  Probe
gtggcgcagcggaagcgtgctgggc

SEQ ID NO: 11298 - DNA, 19 bp, Artificial Sequence
  Probe
gtgggtagagcatttgact

SEQ ID NO: 11299 - DNA, 20 bp, Artificial Sequence
  Probe
gtgggtagagcatttgactg

SEQ ID NO: 11300 - DNA, 21 bp, Artificial Sequence
  Probe
gtgggtagagcatttgactgc

SEQ ID NO: 11301 - DNA, 22 bp, Artificial Sequence
  Probe
gtgggttcgaaccccactcctg

SEQ ID NO: 11302 - DNA, 23 bp, Artificial Sequence
  Probe
gtgggttcgaaccccactcctgg

SEQ ID NO: 11303 - DNA, 23 bp, Artificial Sequence
  Probe
gtgggttcgaaccccacttctgg

SEQ ID NO: 11304 - DNA, 22 bp, Artificial Sequence
  Probe
gtgggttcgaatcccactcctg

SEQ ID NO: 11305 - DNA, 24 bp, Artificial Sequence
  Probe
gtgggttcgaatcccactcctgac

SEQ ID NO: 11306 - DNA, 25 bp, Artificial Sequence
  Probe
gtgggttcgaatcccactcctgaca

SEQ ID NO: 11307 - DNA, 22 bp, Artificial Sequence
  Probe
gtgggttcgaatcccacttctg

SEQ ID NO: 11308 - DNA, 23 bp, Artificial Sequence
  Probe
gtgggttcgaatcccacttctga

SEQ ID NO: 11309 - DNA, 24 bp, Artificial Sequence
  Probe
gtgggttcgaatcccacttctgac

SEQ ID NO: 11310 - DNA, 25 bp, Artificial Sequence
  Probe
gtgggttcgaatcccacttctgaca

SEQ ID NO: 11311 - DNA, 26 bp, Artificial Sequence
  Probe
gtgggttcgaatcccacttctgacac

SEQ ID NO: 11312 - DNA, 27 bp, Artificial Sequence
  Probe
gtgggttcgaatcccacttctgacaca

SEQ ID NO: 11313 - DNA, 28 bp, Artificial Sequence
  Probe
gtgggttcgaatcccacttctgacacaa

SEQ ID NO: 11314 - DNA, 30 bp, Artificial Sequence
  Probe
gtgggttcgaatcccacttctgacacattc

SEQ ID NO: 11315 - DNA, 26 bp, Artificial Sequence
  Probe
gtgggttcgaatcccatcctcgtcgc

SEQ ID NO: 11316 - DNA, 15 bp, Artificial Sequence
  Probe
gtggtagaattctcg

SEQ ID NO: 11317 - DNA, 16 bp, Artificial Sequence
  Probe
gtggtagaattctcgc

SEQ ID NO: 11318 - DNA, 17 bp, Artificial Sequence
  Probe
gtggtagaattctcgcc

SEQ ID NO: 11319 - DNA, 18 bp, Artificial Sequence
  Probe
gtggtagaattctcgcct

SEQ ID NO: 11320 - DNA, 19 bp, Artificial Sequence
  Probe
gtggtagaattctcgcctg

SEQ ID NO: 11321 - DNA, 20 bp, Artificial Sequence
  Probe
gtggtagaattctcgcctgc

SEQ ID NO: 11322 - DNA, 21 bp, Artificial Sequence
  Probe
gtggtagaattctcgcctgcc

SEQ ID NO: 11323 - DNA, 18 bp, Artificial Sequence
  Probe
gtggtagagcatttgact

SEQ ID NO: 11324 - DNA, 19 bp, Artificial Sequence
  Probe
gtggtagagcatttgactg

SEQ ID NO: 11325 - DNA, 20 bp, Artificial Sequence
  Probe
gtggtagagcatttgactgc

SEQ ID NO: 11326 - DNA, 18 bp, Artificial Sequence
  Probe
gtggtatcatgcaagatt

SEQ ID NO: 11327 - DNA, 19 bp, Artificial Sequence
  Probe
gtggtatcatgcaagattc

SEQ ID NO: 11328 - DNA, 22 bp, Artificial Sequence
  Probe
gtggtctagtggttaggattcg

SEQ ID NO: 11329 - DNA, 23 bp, Artificial Sequence
  Probe
gtggtctagtggttaggattcgg

SEQ ID NO: 11330 - DNA, 25 bp, Artificial Sequence
  Probe
gtggtctagtggttaggattcggcg

SEQ ID NO: 11331 - DNA, 26 bp, Artificial Sequence
  Probe
gtggtctagtggttaggattcggcgc

SEQ ID NO: 11332 - DNA, 27 bp, Artificial Sequence
  Probe
gtggtctagtggttaggattcggcgct

SEQ ID NO: 11333 - DNA, 18 bp, Artificial Sequence
  Probe
gtggtgagtatccccgcc

SEQ ID NO: 11334 - DNA, 19 bp, Artificial Sequence
  Probe
gtggtgagtatccccgcct

SEQ ID NO: 11335 - DNA, 20 bp, Artificial Sequence
  Probe
gtggtgagtatccccgcctg

SEQ ID NO: 11336 - DNA, 29 bp, Artificial Sequence
  Probe
gtggtgagtatccccgcctgtcacgcggg

SEQ ID NO: 11337 - DNA, 19 bp, Artificial Sequence
  Probe
gtggttagcactctgtgtt

SEQ ID NO: 11338 - DNA, 15 bp, Artificial Sequence
  Probe
gtggttaggattcgg

SEQ ID NO: 11339 - DNA, 17 bp, Artificial Sequence
  Probe
gtggttaggattcggcg

SEQ ID NO: 11340 - DNA, 20 bp, Artificial Sequence
  Probe
gtggttaggattcggcgctc

SEQ ID NO: 11341 - DNA, 21 bp, Artificial Sequence
  Probe
gtggttaggattcggcgctct

SEQ ID NO: 11342 - DNA, 22 bp, Artificial Sequence
  Probe
gtggttaggattcggcgctctc

SEQ ID NO: 11343 - DNA, 15 bp, Artificial Sequence
  Probe
gtggttagtactctg

SEQ ID NO: 11344 - DNA, 16 bp, Artificial Sequence
  Probe
gtggttagtactctgc

SEQ ID NO: 11345 - DNA, 17 bp, Artificial Sequence
  Probe
gtggttagtactctgcg

SEQ ID NO: 11346 - DNA, 19 bp, Artificial Sequence
  Probe
gtggttagtactctgcgct

SEQ ID NO: 11347 - DNA, 20 bp, Artificial Sequence
  Probe
gtggttagtactctgcgctg

SEQ ID NO: 11348 - DNA, 21 bp, Artificial Sequence
  Probe
gtggttagtactctgcgctgt

SEQ ID NO: 11349 - DNA, 23 bp, Artificial Sequence
  Probe
gtggttagtactctgcgttgtgg

SEQ ID NO: 11350 - DNA, 24 bp, Artificial Sequence
  Probe
gtggttagtactctgcgttgtggc

SEQ ID NO: 11351 - DNA, 25 bp, Artificial Sequence
  Probe
gtggttagtactctgcgttgtggcc

SEQ ID NO: 11352 - DNA, 21 bp, Artificial Sequence
  Probe
gtggttagtatccccgcctgt

SEQ ID NO: 11353 - DNA, 22 bp, Artificial Sequence
  Probe
gtggttagtatccccgcctgtc

SEQ ID NO: 11354 - DNA, 19 bp, Artificial Sequence
  Probe
gtggttatcacgttcgcct

SEQ ID NO: 11355 - DNA, 21 bp, Artificial Sequence
  Probe
gtggttcagtggtagaattct

SEQ ID NO: 11356 - DNA, 22 bp, Artificial Sequence
  Probe
gtggttcagtggtagaattctc

SEQ ID NO: 11357 - DNA, 23 bp, Artificial Sequence
  Probe
gtggttcagtggtagaattctcg

SEQ ID NO: 11358 - DNA, 24 bp, Artificial Sequence
  Probe
gtggttcagtggtagaattctcgc

SEQ ID NO: 11359 - DNA, 25 bp, Artificial Sequence
  Probe
gtggttcagtggtagaattctcgcc

SEQ ID NO: 11360 - DNA, 26 bp, Artificial Sequence
  Probe
gtggttcagtggtagaattctcgcct

SEQ ID NO: 11361 - DNA, 27 bp, Artificial Sequence
  Probe
gtggttcagtggtagaattctcgcctg

SEQ ID NO: 11362 - DNA, 28 bp, Artificial Sequence
  Probe
gtggttcagtggtagaattctcgcctgc

SEQ ID NO: 11363 - DNA, 17 bp, Artificial Sequence
  Probe
gtggttgtagtccgtgc

SEQ ID NO: 11364 - DNA, 18 bp, Artificial Sequence
  Probe
gtggttgtagtccgtgcg

SEQ ID NO: 11365 - DNA, 19 bp, Artificial Sequence
  Probe
gtggttgtagtccgtgcga

SEQ ID NO: 11366 - DNA, 20 bp, Artificial Sequence
  Probe
gtggttgtagtccgtgcgag

SEQ ID NO: 11367 - DNA, 21 bp, Artificial Sequence
  Probe
gtggttgtagtccgtgcgaga

SEQ ID NO: 11368 - DNA, 23 bp, Artificial Sequence
  Probe
gtggttgtagtccgtgcgagaat

SEQ ID NO: 11369 - DNA, 24 bp, Artificial Sequence
  Probe
gtggttgtagtccgtgcgagaata

SEQ ID NO: 11370 - DNA, 25 bp, Artificial Sequence
  Probe
gtggttgtagtccgtgcgagaataa

SEQ ID NO: 11371 - DNA, 24 bp, Artificial Sequence
  Probe
gtgtaatggtgagcactctggact

SEQ ID NO: 11372 - DNA, 17 bp, Artificial Sequence
  Probe
gtgtaatggttagcact

SEQ ID NO: 11373 - DNA, 18 bp, Artificial Sequence
  Probe
gtgtaatggttagcactc

SEQ ID NO: 11374 - DNA, 19 bp, Artificial Sequence
  Probe
gtgtaatggttagcactct

SEQ ID NO: 11375 - DNA, 20 bp, Artificial Sequence
  Probe
gtgtaatggttagcactctg

SEQ ID NO: 11376 - DNA, 21 bp, Artificial Sequence
  Probe
gtgtaatggttagcactctgg

SEQ ID NO: 11377 - DNA, 22 bp, Artificial Sequence
  Probe
gtgtaatggttagcactctgga

SEQ ID NO: 11378 - DNA, 23 bp, Artificial Sequence
  Probe
gtgtaatggttagcactctggac

SEQ ID NO: 11379 - DNA, 24 bp, Artificial Sequence
  Probe
gtgtaatggttagcactctggact

SEQ ID NO: 11380 - DNA, 25 bp, Artificial Sequence
  Probe
gtgtaatggttagcactctggactc

SEQ ID NO: 11381 - DNA, 26 bp, Artificial Sequence
  Probe
gtgtaatggttagcactctggactct

SEQ ID NO: 11382 - DNA, 27 bp, Artificial Sequence
  Probe
gtgtaatggttagcactctggactctg

SEQ ID NO: 11383 - DNA, 28 bp, Artificial Sequence
  Probe
gtgtaatggttagcactctggactctga

SEQ ID NO: 11384 - DNA, 25 bp, Artificial Sequence
  Probe
gtgtaatggttagcactctggactt

SEQ ID NO: 11385 - DNA, 26 bp, Artificial Sequence
  Probe
gtgtaatggttagcactctggacttt

SEQ ID NO: 11386 - DNA, 24 bp, Artificial Sequence
  Probe
gtgtaatggttagcactctgggct

SEQ ID NO: 11387 - DNA, 25 bp, Artificial Sequence
  Probe
gtgtaatggttagcactctgggctt

SEQ ID NO: 11388 - DNA, 25 bp, Artificial Sequence
  Probe
gtgtactggaaagtgcacttggacg

SEQ ID NO: 11389 - DNA, 23 bp, Artificial Sequence
  Probe
gtgtagtggttatcacgttcgcc

SEQ ID NO: 11390 - DNA, 24 bp, Artificial Sequence
  Probe
gtgtagtggttatcacgttcgcct

SEQ ID NO: 11391 - DNA, 25 bp, Artificial Sequence
  Probe
gtgtagtggttatcacgttcgcctc

SEQ ID NO: 11392 - DNA, 19 bp, Artificial Sequence
  Probe
gttaaagactttttctctg

SEQ ID NO: 11393 - DNA, 21 bp, Artificial Sequence
  Probe
gttaaagactttttctctgat

SEQ ID NO: 11394 - DNA, 19 bp, Artificial Sequence
  Probe
gttaaagattaagagaacc

SEQ ID NO: 11395 - DNA, 23 bp, Artificial Sequence
  Probe
gttaactaagtgtttgtgggttt

SEQ ID NO: 11396 - DNA, 15 bp, Artificial Sequence
  Probe
gttaagatggcagag

SEQ ID NO: 11397 - DNA, 16 bp, Artificial Sequence
  Probe
gttaagatggcagagc

SEQ ID NO: 11398 - DNA, 17 bp, Artificial Sequence
  Probe
gttaagatggcagagcc

SEQ ID NO: 11399 - DNA, 18 bp, Artificial Sequence
  Probe
gttaagatggcagagccc

SEQ ID NO: 11400 - DNA, 19 bp, Artificial Sequence
  Probe
gttaagatggcagagcccg

SEQ ID NO: 11401 - DNA, 20 bp, Artificial Sequence
  Probe
gttaagatggcagagcccgg

SEQ ID NO: 11402 - DNA, 21 bp, Artificial Sequence
  Probe
gttaagatggcagagcccggc

SEQ ID NO: 11403 - DNA, 26 bp, Artificial Sequence
  Probe
gttaagatggcagagcccggtaatcg

SEQ ID NO: 11404 - DNA, 27 bp, Artificial Sequence
  Probe
gttaagatggcagagcccggtaatcgc

SEQ ID NO: 11405 - DNA, 28 bp, Artificial Sequence
  Probe
gttaagatggcagagcccggtaatcgca

SEQ ID NO: 11406 - DNA, 16 bp, Artificial Sequence
  Probe
gttagcactctggact

SEQ ID NO: 11407 - DNA, 17 bp, Artificial Sequence
  Probe
gttagcactctggactc

SEQ ID NO: 11408 - DNA, 20 bp, Artificial Sequence
  Probe
gttagcactctggactctga

SEQ ID NO: 11409 - DNA, 21 bp, Artificial Sequence
  Probe
gttagcactctggactctgaa

SEQ ID NO: 11410 - DNA, 23 bp, Artificial Sequence
  Probe
gttagcactctggactctgaatc

SEQ ID NO: 11411 - DNA, 24 bp, Artificial Sequence
  Probe
gttagcactctggactctgaatcc

SEQ ID NO: 11412 - DNA, 27 bp, Artificial Sequence
  Probe
gttagcactctggactctgaatccagc

SEQ ID NO: 11413 - DNA, 16 bp, Artificial Sequence
  Probe
gttaggattcggcgct

SEQ ID NO: 11414 - DNA, 16 bp, Artificial Sequence
  Probe
gttagtactctgcgtt

SEQ ID NO: 11415 - DNA, 18 bp, Artificial Sequence
  Probe
gttagtactctgcgttgt

SEQ ID NO: 11416 - DNA, 19 bp, Artificial Sequence
  Probe
gttagtactctgcgttgtg

SEQ ID NO: 11417 - DNA, 21 bp, Artificial Sequence
  Probe
gttagtactctgcgttgtggc

SEQ ID NO: 11418 - DNA, 15 bp, Artificial Sequence
  Probe
gttatgaaatggttt

SEQ ID NO: 11419 - DNA, 24 bp, Artificial Sequence
  Probe
gttcaaatcccggacgagcccaca

SEQ ID NO: 11420 - DNA, 24 bp, Artificial Sequence
  Probe
gttcaaatcccggacgagccccct

SEQ ID NO: 11421 - DNA, 24 bp, Artificial Sequence
  Probe
gttcaaatcccggacgagccctca

SEQ ID NO: 11422 - DNA, 22 bp, Artificial Sequence
  Probe
gttcaaatccgggtgccccctc

SEQ ID NO: 11423 - DNA, 24 bp, Artificial Sequence
  Probe
gttcaaatccgggtgccccctcaa

SEQ ID NO: 11424 - DNA, 24 bp, Artificial Sequence
  Probe
gttcaaatctcggtggaacctgca

SEQ ID NO: 11425 - DNA, 21 bp, Artificial Sequence
  Probe
gttcaagtcacgtcggggtca

SEQ ID NO: 11426 - DNA, 19 bp, Artificial Sequence
  Probe
gttcaagtccctgttcggg

SEQ ID NO: 11427 - DNA, 21 bp, Artificial Sequence
  Probe
gttcaagtccctgttcgggcg

SEQ ID NO: 11428 - DNA, 24 bp, Artificial Sequence
  Probe
gttcaagtccctgttcgggcggca

SEQ ID NO: 11429 - DNA, 24 bp, Artificial Sequence
  Probe
gttcaatccccggcacctccacca

SEQ ID NO: 11430 - DNA, 23 bp, Artificial Sequence
  Probe
gttcaattcccggtcagggaacc

SEQ ID NO: 11431 - DNA, 24 bp, Artificial Sequence
  Probe
gttcaattcccggtcagggaacca

SEQ ID NO: 11432 - DNA, 15 bp, Artificial Sequence
  Probe
gttcaggtcgcagtc

SEQ ID NO: 11433 - DNA, 18 bp, Artificial Sequence
  Probe
gttcaggtcgcagtctcc

SEQ ID NO: 11434 - DNA, 19 bp, Artificial Sequence
  Probe
gttcaggtcgcagtctccc

SEQ ID NO: 11435 - DNA, 22 bp, Artificial Sequence
  Probe
gttcaggtcgcagtctcccctg

SEQ ID NO: 11436 - DNA, 15 bp, Artificial Sequence
  Probe
gttcagtggtagaat

SEQ ID NO: 11437 - DNA, 16 bp, Artificial Sequence
  Probe
gttcagtggtagaatt

SEQ ID NO: 11438 - DNA, 17 bp, Artificial Sequence
  Probe
gttcagtggtagaattc

SEQ ID NO: 11439 - DNA, 18 bp, Artificial Sequence
  Probe
gttcagtggtagaattct

SEQ ID NO: 11440 - DNA, 19 bp, Artificial Sequence
  Probe
gttcagtggtagaattctc

SEQ ID NO: 11441 - DNA, 20 bp, Artificial Sequence
  Probe
gttcagtggtagaattctcg

SEQ ID NO: 11442 - DNA, 21 bp, Artificial Sequence
  Probe
gttcagtggtagaattctcgc

SEQ ID NO: 11443 - DNA, 22 bp, Artificial Sequence
  Probe
gttcagtggtagaattctcgcc

SEQ ID NO: 11444 - DNA, 23 bp, Artificial Sequence
  Probe
gttcagtggtagaattctcgcct

SEQ ID NO: 11445 - DNA, 24 bp, Artificial Sequence
  Probe
gttcagtggtagaattctcgcctc

SEQ ID NO: 11446 - DNA, 25 bp, Artificial Sequence
  Probe
gttcagtggtagaattctcgcctca

SEQ ID NO: 11447 - DNA, 25 bp, Artificial Sequence
  Probe
gttcagtggtagaattctcgcctcc

SEQ ID NO: 11448 - DNA, 24 bp, Artificial Sequence
  Probe
gttcagtggtagaattctcgcctg

SEQ ID NO: 11449 - DNA, 25 bp, Artificial Sequence
  Probe
gttcagtggtagaattctcgcctgc

SEQ ID NO: 11450 - DNA, 26 bp, Artificial Sequence
  Probe
gttcagtggtagaattctcgcctgcc

SEQ ID NO: 11451 - DNA, 24 bp, Artificial Sequence
  Probe
gttcagtggtagaattctcgcctt

SEQ ID NO: 11452 - DNA, 25 bp, Artificial Sequence
  Probe
gttcagtggtagaattctcgccttt

SEQ ID NO: 11453 - DNA, 23 bp, Artificial Sequence
  Probe
gttcagtggtagaattcttgcct

SEQ ID NO: 11454 - DNA, 28 bp, Artificial Sequence
  Probe
gttccatggtgtaatggttagcactctg

SEQ ID NO: 11455 - DNA, 29 bp, Artificial Sequence
  Probe
gttccatggtgtaatggttagcactctgg

SEQ ID NO: 11456 - DNA, 21 bp, Artificial Sequence
  Probe
gttccgggttcgagtcccggc

SEQ ID NO: 11457 - DNA, 24 bp, Artificial Sequence
  Probe
gttcgaatcccagcggtgcctcaa

SEQ ID NO: 11458 - DNA, 24 bp, Artificial Sequence
  Probe
gttcgaatcccagcggtgcctccg

SEQ ID NO: 11459 - DNA, 21 bp, Artificial Sequence
  Probe
gttcgaatcccatcctcgtcg

SEQ ID NO: 11460 - DNA, 22 bp, Artificial Sequence
  Probe
gttcgaatcccatcctcgtcgc

SEQ ID NO: 11461 - DNA, 19 bp, Artificial Sequence
  Probe
gttcgaatccgagtcacgg

SEQ ID NO: 11462 - DNA, 24 bp, Artificial Sequence
  Probe
gttcgaatccggctcgaaggacga

SEQ ID NO: 11463 - DNA, 24 bp, Artificial Sequence
  Probe
gttcgaatcctgccgactacggca

SEQ ID NO: 11464 - DNA, 22 bp, Artificial Sequence
  Probe
gttcgactcccggtatgggaac

SEQ ID NO: 11465 - DNA, 24 bp, Artificial Sequence
  Probe
gttcgactcccggtatgggaacaa

SEQ ID NO: 11466 - DNA, 20 bp, Artificial Sequence
  Probe
gttcgactcccggtgtggga

SEQ ID NO: 11467 - DNA, 21 bp, Artificial Sequence
  Probe
gttcgactcccggtgtgggaa

SEQ ID NO: 11468 - DNA, 23 bp, Artificial Sequence
  Probe
gttcgactcccggtgtgggaacg

SEQ ID NO: 11469 - DNA, 20 bp, Artificial Sequence
  Probe
gttcgactcctggctggctc

SEQ ID NO: 11470 - DNA, 22 bp, Artificial Sequence
  Probe
gttcgactcctggctggctcgc

SEQ ID NO: 11471 - DNA, 24 bp, Artificial Sequence
  Probe
gttcgagcccacccagggacgcct

SEQ ID NO: 11472 - DNA, 24 bp, Artificial Sequence
  Probe
gttcgagcccacccagggacgcta

SEQ ID NO: 11473 - DNA, 19 bp, Artificial Sequence
  Probe
gttcgagccccacgttggg

SEQ ID NO: 11474 - DNA, 21 bp, Artificial Sequence
  Probe
gttcgagccccacgttgggcg

SEQ ID NO: 11475 - DNA, 22 bp, Artificial Sequence
  Probe
gttcgagccccacgttgggcgc

SEQ ID NO: 11476 - DNA, 24 bp, Artificial Sequence
  Probe
gttcgagccccacgttgggcggca

SEQ ID NO: 11477 - DNA, 19 bp, Artificial Sequence
  Probe
gttcgagtcccatctgggg

SEQ ID NO: 11478 - DNA, 21 bp, Artificial Sequence
  Probe
gttcgagtcccatctggggtg

SEQ ID NO: 11479 - DNA, 19 bp, Artificial Sequence
  Probe
gttcgatcccgggtttcgg

SEQ ID NO: 11480 - DNA, 21 bp, Artificial Sequence
  Probe
gttcgatcctcacacggggca

SEQ ID NO: 11481 - DNA, 15 bp, Artificial Sequence
  Probe
gttcgattccccgac

SEQ ID NO: 11482 - DNA, 18 bp, Artificial Sequence
  Probe
gttcgattccccgacggg

SEQ ID NO: 11483 - DNA, 19 bp, Artificial Sequence
  Probe
gttcgattccccgacgggg

SEQ ID NO: 11484 - DNA, 20 bp, Artificial Sequence
  Probe
gttcgattccccgacgggga

SEQ ID NO: 11485 - DNA, 21 bp, Artificial Sequence
  Probe
gttcgattccccgacggggag

SEQ ID NO: 11486 - DNA, 22 bp, Artificial Sequence
  Probe
gttcgattccccgacggggaga

SEQ ID NO: 11487 - DNA, 23 bp, Artificial Sequence
  Probe
gttcgattccccgacggggagac

SEQ ID NO: 11488 - DNA, 22 bp, Artificial Sequence
  Probe
gttcgattccccgacggggagg

SEQ ID NO: 11489 - DNA, 23 bp, Artificial Sequence
  Probe
gttcgattccccgacggggaggc

SEQ ID NO: 11490 - DNA, 24 bp, Artificial Sequence
  Probe
gttcgattccccgacggggaggca

SEQ ID NO: 11491 - DNA, 24 bp, Artificial Sequence
  Probe
gttcgattcccggccaatgcacga

SEQ ID NO: 11492 - DNA, 24 bp, Artificial Sequence
  Probe
gttcgattcccggccaatgcagca

SEQ ID NO: 11493 - DNA, 15 bp, Artificial Sequence
  Probe
gttcgattcccggtc

SEQ ID NO: 11494 - DNA, 18 bp, Artificial Sequence
  Probe
gttcgattcccggtcagg

SEQ ID NO: 11495 - DNA, 19 bp, Artificial Sequence
  Probe
gttcgattcccggtcaggg

SEQ ID NO: 11496 - DNA, 20 bp, Artificial Sequence
  Probe
gttcgattcccggtcaggga

SEQ ID NO: 11497 - DNA, 21 bp, Artificial Sequence
  Probe
gttcgattcccggtcagggaa

SEQ ID NO: 11498 - DNA, 23 bp, Artificial Sequence
  Probe
gttcgattcccggtcagggaaca

SEQ ID NO: 11499 - DNA, 24 bp, Artificial Sequence
  Probe
gttcgattcccggtcagggaacaa

SEQ ID NO: 11500 - DNA, 23 bp, Artificial Sequence
  Probe
gttcgattcccggtcagggaagc

SEQ ID NO: 11501 - DNA, 23 bp, Artificial Sequence
  Probe
gttcgattcccggtcatggaacc

SEQ ID NO: 11502 - DNA, 24 bp, Artificial Sequence
  Probe
gttcgattcccggtcatggaacca

SEQ ID NO: 11503 - DNA, 20 bp, Artificial Sequence
  Probe
gttcgattccggctcgaagg

SEQ ID NO: 11504 - DNA, 22 bp, Artificial Sequence
  Probe
gttcgattccggctcgaaggac

SEQ ID NO: 11505 - DNA, 23 bp, Artificial Sequence
  Probe
gttcgattcctggtcagggaacc

SEQ ID NO: 11506 - DNA, 24 bp, Artificial Sequence
  Probe
gttcgattcctggtcagggaacca

SEQ ID NO: 11507 - DNA, 18 bp, Artificial Sequence
  Probe
gttcttgtagttgaaata

SEQ ID NO: 11508 - DNA, 19 bp, Artificial Sequence
  Probe
gttcttgtagttgaaatac

SEQ ID NO: 11509 - DNA, 20 bp, Artificial Sequence
  Probe
gttcttgtagttgaaataca

SEQ ID NO: 11510 - DNA, 21 bp, Artificial Sequence
  Probe
gttcttgtagttgaaatacaa

SEQ ID NO: 11511 - DNA, 22 bp, Artificial Sequence
  Probe
gttcttgtagttgaaatacaac

SEQ ID NO: 11512 - DNA, 23 bp, Artificial Sequence
  Probe
gttcttgtagttgaaatacaacg

SEQ ID NO: 11513 - DNA, 24 bp, Artificial Sequence
  Probe
gttcttgtagttgaaatacaacga

SEQ ID NO: 11514 - DNA, 25 bp, Artificial Sequence
  Probe
gttcttgtagttgaaatacaacgat

SEQ ID NO: 11515 - DNA, 26 bp, Artificial Sequence
  Probe
gttcttgtagttgaaatacaacgatg

SEQ ID NO: 11516 - DNA, 27 bp, Artificial Sequence
  Probe
gttcttgtagttgaaatacaacgatgg

SEQ ID NO: 11517 - DNA, 28 bp, Artificial Sequence
  Probe
gttcttgtagttgaaatacaacgatggt

SEQ ID NO: 11518 - DNA, 29 bp, Artificial Sequence
  Probe
gttcttgtagttgaaatacaacgatggtt

SEQ ID NO: 11519 - DNA, 30 bp, Artificial Sequence; identical to SEQ ID NO: 7195
  Probe

SEQ ID NO: 11520 - DNA, 23 bp, Artificial Sequence
  Probe
gttggtagagcggaggactgtag

SEQ ID NO: 11521 - DNA, 20 bp, Artificial Sequence
  Probe
gttggtctaggggtatgatt

SEQ ID NO: 11522 - DNA, 25 bp, Artificial Sequence
  Probe
gttggtctaggggtatgattctcgc

SEQ ID NO: 11523 - DNA, 27 bp, Artificial Sequence
  Probe
gttggtctaggggtatgattctcgctt

SEQ ID NO: 11524 - DNA, 21 bp, Artificial Sequence
  Probe
gttggtggtatagtggtgagc

SEQ ID NO: 11525 - DNA, 21 bp, Artificial Sequence
  Probe
gttgtagtccgtgcgagaata

SEQ ID NO: 11526 - DNA, 30 bp, Artificial Sequence
  Probe
gtttaaccaaaacatcagattgtgaatctg

SEQ ID NO: 11527 - DNA, 16 bp, Artificial Sequence
  Probe
gtttagacgggctcac

SEQ ID NO: 11528 - DNA, 30 bp, Artificial Sequence
  Probe
gtttagacgggctcacatcaccccataaac

SEQ ID NO: 11529 - DNA, 23 bp, Artificial Sequence
  Probe
gtttagtggtagaattctcgcct

SEQ ID NO: 11530 - DNA, 25 bp, Artificial Sequence
  Probe
gtttagtggtagaattctcgcctcc

SEQ ID NO: 11531 - DNA, 16 bp, Artificial Sequence
  Probe
gtttatgtagcttacc

SEQ ID NO: 11532 - DNA, 17 bp, Artificial Sequence
  Probe
gtttatgtagcttacct

SEQ ID NO: 11533 - DNA, 21 bp, Artificial Sequence
  Probe
gtttatgtagcttacctcctc

SEQ ID NO: 11534 - DNA, 22 bp, Artificial Sequence
  Probe
gtttatgtagcttacctcctca

SEQ ID NO: 11535 - DNA, 23 bp, Artificial Sequence
  Probe
gtttatgtagcttacctcctcaa

SEQ ID NO: 11536 - DNA, 24 bp, Artificial Sequence
  Probe
gtttatgtagcttacctcctcaaa

SEQ ID NO: 11537 - DNA, 26 bp, Artificial Sequence
  Probe
gtttatgtagcttacctcctcaaagc

SEQ ID NO: 11538 - DNA, 27 bp, Artificial Sequence
  Probe
gtttatgtagcttacctcctcaaagca

SEQ ID NO: 11539 - DNA, 29 bp, Artificial Sequence
  Probe
gtttatgtagcttacctcctcaaagcaat

SEQ ID NO: 11540 - DNA, 20 bp, Artificial Sequence
  Probe
gtttccgtagtggagtggtt

SEQ ID NO: 11541 - DNA, 22 bp, Artificial Sequence
  Probe
gtttccgtagtggagtggttat

SEQ ID NO: 11542 - DNA, 23 bp, Artificial Sequence
  Probe
gtttccgtagtggagtggttatc

SEQ ID NO: 11543 - DNA, 30 bp, Artificial Sequence
  Probe
gtttccgtagtggagtggttatcacgttcg

SEQ ID NO: 11544 - DNA, 15 bp, Artificial Sequence
  Probe
gtttccgtagtgtag

SEQ ID NO: 11545 - DNA, 16 bp, Artificial Sequence
  Probe
gtttccgtagtgtagc

SEQ ID NO: 11546 - DNA, 17 bp, Artificial Sequence
  Probe
gtttccgtagtgtagcg

SEQ ID NO: 11547 - DNA, 18 bp, Artificial Sequence
  Probe
gtttccgtagtgtagcgg

SEQ ID NO: 11548 - DNA, 19 bp, Artificial Sequence
  Probe
gtttccgtagtgtagcggt

SEQ ID NO: 11549 - DNA, 20 bp, Artificial Sequence
  Probe
gtttccgtagtgtagcggtt

SEQ ID NO: 11550 - DNA, 22 bp, Artificial Sequence
  Probe
gtttccgtagtgtagcggttat

SEQ ID NO: 11551 - DNA, 23 bp, Artificial Sequence
  Probe
gtttccgtagtgtagcggttatc

SEQ ID NO: 11552 - DNA, 25 bp, Artificial Sequence
  Probe
gtttccgtagtgtagcggttatcac

SEQ ID NO: 11553 - DNA, 26 bp, Artificial Sequence
  Probe
gtttccgtagtgtagcggttatcaca

SEQ ID NO: 11554 - DNA, 28 bp, Artificial Sequence
  Probe
gtttccgtagtgtagcggttatcacatt

SEQ ID NO: 11555 - DNA, 29 bp, Artificial Sequence
  Probe
gtttccgtagtgtagcggttatcacattc

SEQ ID NO: 11556 - DNA, 16 bp, Artificial Sequence
  Probe
gtttccgtagtgtagt

SEQ ID NO: 11557 - DNA, 17 bp, Artificial Sequence
  Probe
gtttccgtagtgtagtg

SEQ ID NO: 11558 - DNA, 18 bp, Artificial Sequence
  Probe
gtttccgtagtgtagtgg

SEQ ID NO: 11559 - DNA, 19 bp, Artificial Sequence
  Probe
gtttccgtagtgtagtggt

SEQ ID NO: 11560 - DNA, 21 bp, Artificial Sequence
  Probe
gtttccgtagtgtagtggtca

SEQ ID NO: 11561 - DNA, 22 bp, Artificial Sequence
  Probe
gtttccgtagtgtagtggtcat

SEQ ID NO: 11562 - DNA, 24 bp, Artificial Sequence
  Probe
gtttccgtagtgtagtggtcatca

SEQ ID NO: 11563 - DNA, 25 bp, Artificial Sequence
  Probe
gtttccgtagtgtagtggtcatcac

SEQ ID NO: 11564 - DNA, 26 bp, Artificial Sequence
  Probe
gtttccgtagtgtagtggtcatcacg

SEQ ID NO: 11565 - DNA, 27 bp, Artificial Sequence
  Probe
gtttccgtagtgtagtggtcatcacgt

SEQ ID NO: 11566 - DNA, 28 bp, Artificial Sequence
  Probe
gtttccgtagtgtagtggtcatcacgtt

SEQ ID NO: 11567 - DNA, 29 bp, Artificial Sequence
  Probe
gtttccgtagtgtagtggtcatcacgttc

SEQ ID NO: 11568 - DNA, 20 bp, Artificial Sequence
  Probe
gtttccgtagtgtagtggtt

SEQ ID NO: 11569 - DNA, 21 bp, Artificial Sequence
  Probe
gtttccgtagtgtagtggtta

SEQ ID NO: 11570 - DNA, 22 bp, Artificial Sequence
  Probe
gtttccgtagtgtagtggttat

SEQ ID NO: 11571 - DNA, 23 bp, Artificial Sequence
  Probe
gtttccgtagtgtagtggttatc

SEQ ID NO: 11572 - DNA, 24 bp, Artificial Sequence
  Probe
gtttccgtagtgtagtggttatca

SEQ ID NO: 11573 - DNA, 25 bp, Artificial Sequence
  Probe
gtttccgtagtgtagtggttatcac

SEQ ID NO: 11574 - DNA, 26 bp, Artificial Sequence
  Probe
gtttccgtagtgtagtggttatcacg

SEQ ID NO: 11575 - DNA, 27 bp, Artificial Sequence
  Probe
gtttccgtagtgtagtggttatcacgt

SEQ ID NO: 11576 - DNA, 28 bp, Artificial Sequence
  Probe
gtttccgtagtgtagtggttatcacgtt

SEQ ID NO: 11577 - DNA, 29 bp, Artificial Sequence
  Probe
gtttccgtagtgtagtggttatcacgttc

SEQ ID NO: 11578 - DNA, 30 bp, Artificial Sequence; identical to SEQ ID NO: 7273
  Probe

SEQ ID NO: 11579 - DNA, 30 bp, Artificial Sequence
  Probe
gtttccgtagtgtagtggttatcacgtttg

SEQ ID NO: 11580 - DNA, 25 bp, Artificial Sequence
  Probe
gtttccgtagtgtagtggttattat

SEQ ID NO: 11581 - DNA, 20 bp, Artificial Sequence
  Probe
gtttccgtggtgtagtggtt

SEQ ID NO: 11582 - DNA, 26 bp, Artificial Sequence
  Probe
gtttccgtggtgtagtggttatcaca

SEQ ID NO: 11583 - DNA, 30 bp, Artificial Sequence
  Probe
gtttccgtggtgtagtggttatcacattcg

SEQ ID NO: 11584 - DNA, 22 bp, Artificial Sequence
  Probe
gtttgtgggtttaagtcccatt

SEQ ID NO: 11585 - DNA, 28 bp, Artificial Sequence
  Probe
gtttttcatatcattggtcgtggttgta

SEQ ID NO: 11586 - DNA, 29 bp, Artificial Sequence
  Probe
gtttttcatatcattggtcgtggttgtag

SEQ ID NO: 11587 - DNA, 30 bp, Artificial Sequence
  Probe
gtttttcatatcattggtcgtggttgtagt

SEQ ID NO: 11588 - DNA, 29 bp, Artificial Sequence
  Probe
taaaatggctgagtgaagcattggactgt

SEQ ID NO: 11589 - DNA, 18 bp, Artificial Sequence
  Probe
taaagactttttctctga

SEQ ID NO: 11590 - DNA, 19 bp, Artificial Sequence
  Probe
taaagactttttctctgat

SEQ ID NO: 11591 - DNA, 30 bp, Artificial Sequence
  Probe
taaagattaagagaaccaacacctctttac

SEQ ID NO: 11592 - DNA, 21 bp, Artificial Sequence
  Probe
taacaacatggctttctcaac

SEQ ID NO: 11593 - DNA, 18 bp, Artificial Sequence
  Probe
taacagctaaggactgca

SEQ ID NO: 11594 - DNA, 19 bp, Artificial Sequence
  Probe
taacagctaaggactgcaa

SEQ ID NO: 11595 - DNA, 20 bp, Artificial Sequence
  Probe
taacagctaaggactgcaaa

SEQ ID NO: 11596 - DNA, 21 bp, Artificial Sequence
  Probe
taacagctaaggactgcaaaa

SEQ ID NO: 11597 - DNA, 22 bp, Artificial Sequence
  Probe
taacagctaaggactgcaaaac

SEQ ID NO: 11598 - DNA, 23 bp, Artificial Sequence
  Probe
taacagctaaggactgcaaaacc

SEQ ID NO: 11599 - DNA, 24 bp, Artificial Sequence
  Probe
taacagctaaggactgcaaaaccc

SEQ ID NO: 11600 - DNA, 25 bp, Artificial Sequence
  Probe
taacagctaaggactgcaaaacccc

SEQ ID NO: 11601 - DNA, 26 bp, Artificial Sequence
  Probe
taacagctaaggactgcaaaacccca

SEQ ID NO: 11602 - DNA, 27 bp, Artificial Sequence
  Probe
taacagctaaggactgcaaaaccccac

SEQ ID NO: 11603 - DNA, 28 bp, Artificial Sequence
  Probe
taacagctaaggactgcaaaaccccact

SEQ ID NO: 11604 - DNA, 29 bp, Artificial Sequence
  Probe
taacagctaaggactgcaaaaccccactc

SEQ ID NO: 11605 - DNA, 30 bp, Artificial Sequence
  Probe
taacagctaaggactgcaaaaccccactct

SEQ ID NO: 11606 - DNA, 18 bp, Artificial Sequence
  Probe
taacagctatccattggt

SEQ ID NO: 11607 - DNA, 21 bp, Artificial Sequence
  Probe
taaccaaaacatcagattgtg

SEQ ID NO: 11608 - DNA, 29 bp, Artificial Sequence
  Probe
taaccaaaacatcagattgtgaatctgac

SEQ ID NO: 11609 - DNA, 15 bp, Artificial Sequence
  Probe
taacccagaggtcga

SEQ ID NO: 11610 - DNA, 17 bp, Artificial Sequence
  Probe
taacccagaggtcgatg

SEQ ID NO: 11611 - DNA, 18 bp, Artificial Sequence
  Probe
taacccagaggtcgatgg

SEQ ID NO: 11612 - DNA, 19 bp, Artificial Sequence
  Probe
taacccagaggtcgatgga

SEQ ID NO: 11613 - DNA, 20 bp, Artificial Sequence
  Probe
taacccagaggtcgatggat

SEQ ID NO: 11614 - DNA, 21 bp, Artificial Sequence
  Probe
taacccagaggtcgatggatc

SEQ ID NO: 11615 - DNA, 24 bp, Artificial Sequence
  Probe
taacccagaggtcgatggatcgaa

SEQ ID NO: 11616 - DNA, 25 bp, Artificial Sequence
  Probe
taacccagaggtcgatggatcgaaa

SEQ ID NO: 11617 - DNA, 26 bp, Artificial Sequence
  Probe
taacccagaggtcgatggatcgaaac

SEQ ID NO: 11618 - DNA, 27 bp, Artificial Sequence
  Probe
taacccagaggtcgatggatcgaaacc

SEQ ID NO: 11619 - DNA, 28 bp, Artificial Sequence
  Probe
taacccagaggtcgatggatcgaaacca

SEQ ID NO: 11620 - DNA, 21 bp, Artificial Sequence
  Probe
taacgccaaggtcgcgggttc

SEQ ID NO: 11621 - DNA, 22 bp, Artificial Sequence
  Probe
taacgccaaggtcgcgggttcg

SEQ ID NO: 11622 - DNA, 23 bp, Artificial Sequence
  Probe
taacgccaaggtcgcgggttcga

SEQ ID NO: 11623 - DNA, 24 bp, Artificial Sequence
  Probe
taacgccaaggtcgcgggttcgat

SEQ ID NO: 11624 - DNA, 25 bp, Artificial Sequence
  Probe
taacgccaaggtcgcgggttcgatc

SEQ ID NO: 11625 - DNA, 15 bp, Artificial Sequence
  Probe
taacttgaccgctct

SEQ ID NO: 11626 - DNA, 16 bp, Artificial Sequence
  Probe
taacttgaccgctctg

SEQ ID NO: 11627 - DNA, 17 bp, Artificial Sequence
  Probe
taacttgaccgctctga

SEQ ID NO: 11628 - DNA, 18 bp, Artificial Sequence
  Probe
taacttgaccgctctgag

SEQ ID NO: 11629 - DNA, 19 bp, Artificial Sequence
  Probe
taacttgaccgctctgagc

SEQ ID NO: 11630 - DNA, 20 bp, Artificial Sequence
  Probe
taacttgaccgctctgagct

SEQ ID NO: 11631 - DNA, 17 bp, Artificial Sequence
  Probe
taagccagggattgtgg

SEQ ID NO: 11632 - DNA, 18 bp, Artificial Sequence
  Probe
taagccagggattgtggg

SEQ ID NO: 11633 - DNA, 22 bp, Artificial Sequence
  Probe
taagccagggattgtgggttcg

SEQ ID NO: 11634 - DNA, 23 bp, Artificial Sequence
  Probe
taagccagggattgtgggttcga

SEQ ID NO: 11635 - DNA, 20 bp, Artificial Sequence
  Probe
taataacgccaaggtcgcgg

SEQ ID NO: 11636 - DNA, 22 bp, Artificial Sequence
  Probe
taataacgccaaggtcgcgggt

SEQ ID NO: 11637 - DNA, 19 bp, Artificial Sequence
  Probe
taatctgaaggtcctgagt

SEQ ID NO: 11638 - DNA, 21 bp, Artificial Sequence
  Probe
taatggataaggcatcagcct

SEQ ID NO: 11639 - DNA, 21 bp, Artificial Sequence
  Probe
taatggtgagcactctggact

SEQ ID NO: 11640 - DNA, 29 bp, Artificial Sequence
  Probe
taatggtggagttaaagactttttctctg

SEQ ID NO: 11641 - DNA, 15 bp, Artificial Sequence
  Probe
taatggttagcactc

SEQ ID NO: 11642 - DNA, 16 bp, Artificial Sequence
  Probe
taatggttagcactct

SEQ ID NO: 11643 - DNA, 17 bp, Artificial Sequence
  Probe
taatggttagcactctg

SEQ ID NO: 11644 - DNA, 18 bp, Artificial Sequence
  Probe
taatggttagcactctgg

SEQ ID NO: 11645 - DNA, 19 bp, Artificial Sequence
  Probe
taatggttagcactctgga

SEQ ID NO: 11646 - DNA, 20 bp, Artificial Sequence
  Probe
taatggttagcactctggac

SEQ ID NO: 11647 - DNA, 21 bp, Artificial Sequence
  Probe
taatggttagcactctggact

SEQ ID NO: 11648 - DNA, 22 bp, Artificial Sequence
  Probe
taatggttagcactctggactc

SEQ ID NO: 11649 - DNA, 23 bp, Artificial Sequence
  Probe
taatggttagcactctggactct

SEQ ID NO: 11650 - DNA, 24 bp, Artificial Sequence
  Probe
taatggttagcactctggactctg

SEQ ID NO: 11651 - DNA, 25 bp, Artificial Sequence
  Probe
taatggttagcactctggactctga

SEQ ID NO: 11652 - DNA, 22 bp, Artificial Sequence
  Probe
taatggttagcactctggactt

SEQ ID NO: 11653 - DNA, 23 bp, Artificial Sequence
  Probe
taatggttagcactctggacttt

SEQ ID NO: 11654 - DNA, 24 bp, Artificial Sequence
  Probe
taatggttagcactctggactttg

SEQ ID NO: 11655 - DNA, 25 bp, Artificial Sequence
  Probe
taatggttagcactctggactttga

SEQ ID NO: 11656 - DNA, 21 bp, Artificial Sequence
  Probe
taatggttagcactctgggct

SEQ ID NO: 11657 - DNA, 22 bp, Artificial Sequence
  Probe
taatggttagcactctgggctt

SEQ ID NO: 11658 - DNA, 30 bp, Artificial Sequence; identical to SEQ ID NO: 7487
  Probe

SEQ ID NO: 11659 - DNA, 26 bp, Artificial Sequence
  Probe
tactggaaagtgcacttggacgaacc

SEQ ID NO: 11660 - DNA, 16 bp, Artificial Sequence
  Probe
tagaattctcgcctgc

SEQ ID NO: 11661 - DNA, 17 bp, Artificial Sequence
  Probe
tagaattctcgcctgcc

SEQ ID NO: 11662 - DNA, 19 bp, Artificial Sequence
  Probe
tagaattctcgcctgccac

SEQ ID NO: 11663 - DNA, 18 bp, Artificial Sequence
  Probe
tagagcggaggactgtag

SEQ ID NO: 11664 - DNA, 15 bp, Artificial Sequence
  Probe
tagattgaagccagt

SEQ ID NO: 11665 - DNA, 16 bp, Artificial Sequence
  Probe
tagattgaagccagtt

SEQ ID NO: 11666 - DNA, 22 bp, Artificial Sequence
  Probe
tagattgaagccagttgattag

SEQ ID NO: 11667 - DNA, 23 bp, Artificial Sequence
  Probe
tagattgaagccagttgattagg

SEQ ID NO: 11668 - DNA, 24 bp, Artificial Sequence
  Probe
tagattgaagccagttgattaggg

SEQ ID NO: 11669 - DNA, 25 bp, Artificial Sequence
  Probe
tagattgaagccagttgattagggt

SEQ ID NO: 11670 - DNA, 26 bp, Artificial Sequence
  Probe
tagattgaagccagttgattagggtg

SEQ ID NO: 11671 - DNA, 28 bp, Artificial Sequence
  Probe
tagattgaagccagttgattagggtgct

SEQ ID NO: 11672 - DNA, 29 bp, Artificial Sequence
  Probe
tagattgaagccagttgattagggtgctt

SEQ ID NO: 11673 - DNA, 15 bp, Artificial Sequence
  Probe
tagcactctggactc

SEQ ID NO: 11674 - DNA, 17 bp, Artificial Sequence
  Probe
tagcactctggactctg

SEQ ID NO: 11675 - DNA, 18 bp, Artificial Sequence
  Probe
tagcactctggactctga

SEQ ID NO: 11676 - DNA, 19 bp, Artificial Sequence
  Probe
tagcactctggactctgaa

SEQ ID NO: 11677 - DNA, 21 bp, Artificial Sequence
  Probe
tagcactctggactctgaatc

SEQ ID NO: 11678 - DNA, 22 bp, Artificial Sequence
  Probe
tagcactctggactctgaatcc

SEQ ID NO: 11679 - DNA, 23 bp, Artificial Sequence
  Probe
tagcactctggactctgaatcca

SEQ ID NO: 11680 - DNA, 24 bp, Artificial Sequence
  Probe
tagcactctggactctgaatccag

SEQ ID NO: 11681 - DNA, 25 bp, Artificial Sequence
  Probe
tagcactctggactctgaatccagc

SEQ ID NO: 11682 - DNA, 21 bp, Artificial Sequence
  Probe
tagcactctggactttgaatc

SEQ ID NO: 11683 - DNA, 22 bp, Artificial Sequence
  Probe
tagcactctggactttgaatcc

SEQ ID NO: 11684 - DNA, 21 bp, Artificial Sequence
  Probe
tagccgtaaggcggctgtttt

SEQ ID NO: 11685 - DNA, 20 bp, Artificial Sequence
  Probe
tagcgcgttcggctgttaac

SEQ ID NO: 11686 - DNA, 21 bp, Artificial Sequence
  Probe
tagcgcgttcggctgttaacc

SEQ ID NO: 11687 - DNA, 29 bp, Artificial Sequence
  Probe
tagcgggatcgatgcccgcatcctccact

SEQ ID NO: 11688 - DNA, 19 bp, Artificial Sequence
  Probe
tagcggttaggattcctgg

SEQ ID NO: 11689 - DNA, 21 bp, Artificial Sequence
  Probe
tagcggttaggattcctggtt

SEQ ID NO: 11690 - DNA, 22 bp, Artificial Sequence
  Probe
tagcggttaggattcctggttt

SEQ ID NO: 11691 - DNA, 23 bp, Artificial Sequence
  Probe
tagcggttaggattcctggtttt

SEQ ID NO: 11692 - DNA, 29 bp, Artificial Sequence
  Probe
tagcgtggccgagcggtctaaggcgctgg

SEQ ID NO: 11693 - DNA, 25 bp, Artificial Sequence
  Probe
tagctcaggggtagagcatttgact

SEQ ID NO: 11694 - DNA, 26 bp, Artificial Sequence
  Probe
tagctcaggggtagagcatttgactg

SEQ ID NO: 11695 - DNA, 26 bp, Artificial Sequence
  Probe
tagctcagtgggtagagcatttgact

SEQ ID NO: 11696 - DNA, 25 bp, Artificial Sequence
  Probe
tagctcagtggtagagcatttgact

SEQ ID NO: 11697 - DNA, 26 bp, Artificial Sequence
  Probe
tagctcagtggtagagcatttgactg

SEQ ID NO: 11698 - DNA, 27 bp, Artificial Sequence
  Probe
tagctcagtggtagagcatttgactgc

SEQ ID NO: 11699 - DNA, 26 bp, Artificial Sequence
  Probe
taggagatttcaacttaacttgaccg

SEQ ID NO: 11700 - DNA, 30 bp, Artificial Sequence
  Probe
taggagatttcaacttaacttgaccgctct

SEQ ID NO: 11701 - DNA, 16 bp, Artificial Sequence
  Probe
taggatggggtgtgat

SEQ ID NO: 11702 - DNA, 19 bp, Artificial Sequence
  Probe
taggatggggtgtgatagg

SEQ ID NO: 11703 - DNA, 21 bp, Artificial Sequence
  Probe
taggatggggtgtgataggtg

SEQ ID NO: 11704 - DNA, 22 bp, Artificial Sequence
  Probe
taggatggggtgtgataggtgg

SEQ ID NO: 11705 - DNA, 23 bp, Artificial Sequence
  Probe
taggatggggtgtgataggtggc

SEQ ID NO: 11706 - DNA, 29 bp, Artificial Sequence
  Probe
taggatggggtgtgataggtggcacggag

SEQ ID NO: 11707 - DNA, 19 bp, Artificial Sequence
  Probe
taggctccagtctcttcgg

SEQ ID NO: 11708 - DNA, 20 bp, Artificial Sequence
  Probe
taggctccagtctcttcggg

SEQ ID NO: 11709 - DNA, 20 bp, Artificial Sequence
  Probe
taggggtatgattctcgctt

SEQ ID NO: 11710 - DNA, 21 bp, Artificial Sequence
  Probe
taggggtatgattctcgcttc

SEQ ID NO: 11711 - DNA, 18 bp, Artificial Sequence
  Probe
taggggtatgattctcgg

SEQ ID NO: 11712 - DNA, 22 bp, Artificial Sequence
  Probe
tagggtgcgagaggtcccgggt

SEQ ID NO: 11713 - DNA, 23 bp, Artificial Sequence
  Probe
taggtcgctggttcgaatccggc

SEQ ID NO: 11714 - DNA, 23 bp, Artificial Sequence
  Probe
taggtcgctggttcgattccggc

SEQ ID NO: 11715 - DNA, 30 bp, Artificial Sequence
  Probe
taggtcgctggttcgattccggctcgaagg

SEQ ID NO: 11716 - DNA, 20 bp, Artificial Sequence
  Probe
taggttcgactcctggctgg

SEQ ID NO: 11717 - DNA, 23 bp, Artificial Sequence
  Probe
tagtcgtggccgagtggttaagg

SEQ ID NO: 11718 - DNA, 24 bp, Artificial Sequence
  Probe
tagtcgtggccgagtggttaaggc

SEQ ID NO: 11719 - DNA, 20 bp, Artificial Sequence
  Probe
tagtggtagaattctcgcct

SEQ ID NO: 11720 - DNA, 20 bp, Artificial Sequence
  Probe
tagtggtatcatgcaagatt

SEQ ID NO: 11721 - DNA, 21 bp, Artificial Sequence
  Probe
tagtggtatcatgcaagattc

SEQ ID NO: 11722 - DNA, 19 bp, Artificial Sequence
  Probe
tagtggtgagtatccccgc

SEQ ID NO: 11723 - DNA, 17 bp, Artificial Sequence
  Probe
tagtggttaggattcgg

SEQ ID NO: 11724 - DNA, 18 bp, Artificial Sequence
  Probe
tagtggttaggattcggc

SEQ ID NO: 11725 - DNA, 22 bp, Artificial Sequence
  Probe
tagtggttaggattcggcgctc

SEQ ID NO: 11726 - DNA, 23 bp, Artificial Sequence
  Probe
tagtggttaggattcggcgctct

SEQ ID NO: 11727 - DNA, 24 bp, Artificial Sequence
  Probe
tagtggttaggattcggcgctctc

SEQ ID NO: 11728 - DNA, 15 bp, Artificial Sequence
  Probe
tagtggttagtactc

SEQ ID NO: 11729 - DNA, 16 bp, Artificial Sequence
  Probe
tagtggttagtactct

SEQ ID NO: 11730 - DNA, 17 bp, Artificial Sequence
  Probe
tagtggttagtactctg

SEQ ID NO: 11731 - DNA, 18 bp, Artificial Sequence
  Probe
tagtggttagtactctgc

SEQ ID NO: 11732 - DNA, 20 bp, Artificial Sequence
  Probe
tagtggttagtactctgcgc

SEQ ID NO: 11733 - DNA, 21 bp, Artificial Sequence
  Probe
tagtggttagtactctgcgct

SEQ ID NO: 11734 - DNA, 22 bp, Artificial Sequence
  Probe
tagtggttagtactctgcgctg

SEQ ID NO: 11735 - DNA, 23 bp, Artificial Sequence
  Probe
tagtggttagtactctgcgctgt

SEQ ID NO: 11736 - DNA, 24 bp, Artificial Sequence
  Probe
tagtggttagtactctgcgttgtg

SEQ ID NO: 11737 - DNA, 25 bp, Artificial Sequence
  Probe
tagtggttagtactctgcgttgtgg

SEQ ID NO: 11738 - DNA, 26 bp, Artificial Sequence
  Probe
tagtggttagtactctgcgttgtggc

SEQ ID NO: 11739 - DNA, 27 bp, Artificial Sequence
  Probe
tagtggttagtactctgcgttgtggcc

SEQ ID NO: 11740 - DNA, 21 bp, Artificial Sequence
  Probe
tagtggttatcacgttcgcct

SEQ ID NO: 11741 - DNA, 27 bp, Artificial Sequence
  Probe
tatagctcagtggtagagcatttgact

SEQ ID NO: 11742 - DNA, 28 bp, Artificial Sequence
  Probe
tatagctcagtggtagagcatttgactg

SEQ ID NO: 11743 - DNA, 29 bp, Artificial Sequence
  Probe
tatagctcagtggtagagcatttgactgc

SEQ ID NO: 11744 - DNA, 19 bp, Artificial Sequence
  Probe
tatagtggttagtactctg

SEQ ID NO: 11745 - DNA, 20 bp, Artificial Sequence
  Probe
tatagtggttagtactctgc

SEQ ID NO: 11746 - DNA, 21 bp, Artificial Sequence
  Probe
tatagtggttagtactctgcg

SEQ ID NO: 11747 - DNA, 25 bp, Artificial Sequence
  Probe
tatagtggttagtactctgcgttgt

SEQ ID NO: 11748 - DNA, 18 bp, Artificial Sequence
  Probe
tatcattggtcgtggttg

SEQ ID NO: 11749 - DNA, 19 bp, Artificial Sequence
  Probe
tatcattggtcgtggttgt

SEQ ID NO: 11750 - DNA, 20 bp, Artificial Sequence
  Probe
tatcattggtcgtggttgta

SEQ ID NO: 11751 - DNA, 21 bp, Artificial Sequence
  Probe
tatcattggtcgtggttgtag

SEQ ID NO: 11752 - DNA, 25 bp, Artificial Sequence
  Probe
tatcattggtcgtggttgtagtccg

SEQ ID NO: 11753 - DNA, 27 bp, Artificial Sequence
  Probe
tatcattggtcgtggttgtagtccgtg

SEQ ID NO: 11754 - DNA, 28 bp, Artificial Sequence
  Probe
tatcattggtcgtggttgtagtccgtgc

SEQ ID NO: 11755 - DNA, 19 bp, Artificial Sequence
  Probe
tatgataatcatatttacc

SEQ ID NO: 11756 - DNA, 22 bp, Artificial Sequence
  Probe
tatgataatcatatttaccaaa

SEQ ID NO: 11757 - DNA, 24 bp, Artificial Sequence
  Probe
tcaaaggttccgggttcgagtccc

SEQ ID NO: 11758 - DNA, 26 bp, Artificial Sequence
  Probe
tcaaaggttccgggttcgagtcccgg

SEQ ID NO: 11759 - DNA, 28 bp, Artificial Sequence
  Probe
tcaaaggttccgggttcgagtcccggcg

SEQ ID NO: 11760 - DNA, 29 bp, Artificial Sequence
  Probe
tcaaaggttccgggttcgagtcccggcgg

SEQ ID NO: 11761 - DNA, 29 bp, Artificial Sequence
  Probe
tcaaaggttgtgggttcgaatcccaccag

SEQ ID NO: 11762 - DNA, 29 bp, Artificial Sequence
  Probe
tcaaaggttgtgggttcgagtcccaccag

SEQ ID NO: 11763 - DNA, 22 bp, Artificial Sequence
  Probe
tcaaatcacgtcggggtcaaca

SEQ ID NO: 11764 - DNA, 22 bp, Artificial Sequence
  Probe
tcaaatcccggacgagcccaca

SEQ ID NO: 11765 - DNA, 21 bp, Artificial Sequence
  Probe
tcaaatcccggacgagccccc

SEQ ID NO: 11766 - DNA, 22 bp, Artificial Sequence
  Probe
tcaaatcccggacgagccccct

SEQ ID NO: 11767 - DNA, 22 bp, Artificial Sequence
  Probe
tcaaatcccggacgagccctca

SEQ ID NO: 11768 - DNA, 22 bp, Artificial Sequence
  Probe
tcaaatccgggtgccccctcaa

SEQ ID NO: 11769 - DNA, 22 bp, Artificial Sequence
  Probe
tcaaatctcggtggaacctgca

SEQ ID NO: 11770 - DNA, 20 bp, Artificial Sequence
  Probe
tcaaatctcggtgggacctc

SEQ ID NO: 11771 - DNA, 20 bp, Artificial Sequence
  Probe
tcaacttaacttgaccgctc

SEQ ID NO: 11772 - DNA, 22 bp, Artificial Sequence
  Probe
tcaacttaacttgaccgctctg

SEQ ID NO: 11773 - DNA, 23 bp, Artificial Sequence
  Probe
tcaacttaacttgaccgctctga

SEQ ID NO: 11774 - DNA, 24 bp, Artificial Sequence
  Probe
tcaacttaacttgaccgctctgag

SEQ ID NO: 11775 - DNA, 25 bp, Artificial Sequence
  Probe
tcaacttaacttgaccgctctgagc

SEQ ID NO: 11776 - DNA, 22 bp, Artificial Sequence
  Probe
tcaagtccctgttcgggcggca

SEQ ID NO: 11777 - DNA, 21 bp, Artificial Sequence
  Probe
tcaatccccggcacctccacc

SEQ ID NO: 11778 - DNA, 19 bp, Artificial Sequence
  Probe
tcaatggtagaattctcgc

SEQ ID NO: 11779 - DNA, 21 bp, Artificial Sequence
  Probe
tcaatggtagaattctcgcct

SEQ ID NO: 11780 - DNA, 30 bp, Artificial Sequence
  Probe
tcaccgccgcggcccgggttcgattcccgg

SEQ ID NO: 11781 - DNA, 30 bp, Artificial Sequence
  Probe
tcagaagattgagggttcgagtcccttcgt

SEQ ID NO: 11782 - DNA, 30 bp, Artificial Sequence
  Probe
tcagaagattgcaggttcgagtcctgccgc

SEQ ID NO: 11783 - DNA, 21 bp, Artificial Sequence
  Probe
tcagaaggctgcgtgttcgaa

SEQ ID NO: 11784 - DNA, 23 bp, Artificial Sequence
  Probe
tcagaaggctgcgtgttcgaatc

SEQ ID NO: 11785 - DNA, 30 bp, Artificial Sequence
  Probe
tcagaaggttgcgtgttcaaatcacgtcgg

SEQ ID NO: 11786 - DNA, 30 bp, Artificial Sequence
  Probe
tcagaaggttgcgtgttcaagtcacgtcgg

SEQ ID NO: 11787 - DNA, 19 bp, Artificial Sequence
  Probe
tcagattgtgaatctgaca

SEQ ID NO: 11788 - DNA, 20 bp, Artificial Sequence
  Probe
tcagggtcgtgggttcgagc

SEQ ID NO: 11789 - DNA, 17 bp, Artificial Sequence
  Probe
tcagtcggtagagcatc

SEQ ID NO: 11790 - DNA, 18 bp, Artificial Sequence
  Probe
tcagtcggtagagcatca

SEQ ID NO: 11791 - DNA, 19 bp, Artificial Sequence
  Probe
tcagtcggtagagcatcag

SEQ ID NO: 11792 - DNA, 22 bp, Artificial Sequence
  Probe
tcagtcggtagagcatcagact

SEQ ID NO: 11793 - DNA, 24 bp, Artificial Sequence
  Probe
tcagtcggtagagcatcagacttt

SEQ ID NO: 11794 - DNA, 25 bp, Artificial Sequence
  Probe
tcagtcggtagagcatcagactttt

SEQ ID NO: 11795 - DNA, 17 bp, Artificial Sequence
  Probe
tcagtcggtagagcatg

SEQ ID NO: 11796 - DNA, 18 bp, Artificial Sequence
  Probe
tcagtcggtagagcatga

SEQ ID NO: 11797 - DNA, 19 bp, Artificial Sequence
  Probe
tcagtcggtagagcatgag

SEQ ID NO: 11798 - DNA, 20 bp, Artificial Sequence
  Probe
tcagtcggtagagcatgaga

SEQ ID NO: 11799 - DNA, 21 bp, Artificial Sequence
  Probe
tcagtcggtagagcatgagac

SEQ ID NO: 11800 - DNA, 22 bp, Artificial Sequence
  Probe
tcagtcggtagagcatgagact

SEQ ID NO: 11801 - DNA, 19 bp, Artificial Sequence
  Probe
tcagtcggtagagcatggg

SEQ ID NO: 11802 - DNA, 20 bp, Artificial Sequence
  Probe
tcagtcggtagagcatggga

SEQ ID NO: 11803 - DNA, 15 bp, Artificial Sequence
  Probe
tcagtggtagaattc

SEQ ID NO: 11804 - DNA, 16 bp, Artificial Sequence
  Probe
tcagtggtagaattct

SEQ ID NO: 11805 - DNA, 17 bp, Artificial Sequence
  Probe
tcagtggtagaattctc

SEQ ID NO: 11806 - DNA, 18 bp, Artificial Sequence
  Probe
tcagtggtagaattctcg

SEQ ID NO: 11807 - DNA, 19 bp, Artificial Sequence
  Probe
tcagtggtagaattctcgc

SEQ ID NO: 11808 - DNA, 20 bp, Artificial Sequence
  Probe
tcagtggtagaattctcgcc

SEQ ID NO: 11809 - DNA, 21 bp, Artificial Sequence
  Probe
tcagtggtagaattctcgcct

SEQ ID NO: 11810 - DNA, 23 bp, Artificial Sequence
  Probe
tcagtggtagaattctcgcctcc

SEQ ID NO: 11811 - DNA, 22 bp, Artificial Sequence
  Probe
tcagtggtagaattctcgcctg

SEQ ID NO: 11812 - DNA, 23 bp, Artificial Sequence
  Probe
tcagtggtagaattctcgcctgc

SEQ ID NO: 11813 - DNA, 24 bp, Artificial Sequence
  Probe
tcagtggtagaattctcgcctgcc

SEQ ID NO: 11814 - DNA, 21 bp, Artificial Sequence
  Probe
tcagtggtagagcatttgact

SEQ ID NO: 11815 - DNA, 22 bp, Artificial Sequence
  Probe
tcagtggtagagcatttgactg

SEQ ID NO: 11816 - DNA, 23 bp, Artificial Sequence
  Probe
tcagtggtagagcatttgactgc

SEQ ID NO: 11817 - DNA, 30 bp, Artificial Sequence
  Probe
tcatatcattggtcgtggttgtagtccgtg

SEQ ID NO: 11818 - DNA, 17 bp, Artificial Sequence
  Probe
tcattggtcgtggttgt

SEQ ID NO: 11819 - DNA, 18 bp, Artificial Sequence
  Probe
tcattggtcgtggttgta

SEQ ID NO: 11820 - DNA, 19 bp, Artificial Sequence
  Probe
tcattggtcgtggttgtag

SEQ ID NO: 11821 - DNA, 20 bp, Artificial Sequence
  Probe
tcattggtcgtggttgtagt

SEQ ID NO: 11822 - DNA, 22 bp, Artificial Sequence
  Probe
tcattggtcgtggttgtagtcc

SEQ ID NO: 11823 - DNA, 23 bp, Artificial Sequence
  Probe
tcattggtcgtggttgtagtccg

SEQ ID NO: 11824 - DNA, 25 bp, Artificial Sequence
  Probe
tcattggtcgtggttgtagtccgtg

SEQ ID NO: 11825 - DNA, 26 bp, Artificial Sequence
  Probe
tcattggtcgtggttgtagtccgtgc

SEQ ID NO: 11826 - DNA, 27 bp, Artificial Sequence
  Probe
tcattggtcgtggttgtagtccgtgcg

SEQ ID NO: 11827 - DNA, 29 bp, Artificial Sequence
  Probe
tccagcgatccgagttcaaatctcggtgg

SEQ ID NO: 11828 - DNA, 29 bp, Artificial Sequence
  Probe
tccagggttcaagtccctgttcgggcggc

SEQ ID NO: 11829 - DNA, 29 bp, Artificial Sequence
  Probe
tccagggttcaagtccctgttcgggcgtc

SEQ ID NO: 11830 - DNA, 26 bp, Artificial Sequence
  Probe
tccatggtgtaatggttagcactctg

SEQ ID NO: 11831 - DNA, 30 bp, Artificial Sequence
  Probe
tccatggtgtaatggttagcactctggact

SEQ ID NO: 11832 - DNA, 21 bp, Artificial Sequence
  Probe
tccattggggtttccccgcgc

SEQ ID NO: 11833 - DNA, 25 bp, Artificial Sequence
  Probe
tccattggggtttccccgcgcaggt

SEQ ID NO: 11834 - DNA, 15 bp, Artificial Sequence
  Probe
tcccacatggtctag

SEQ ID NO: 11835 - DNA, 16 bp, Artificial Sequence
  Probe
tcccacatggtctagc

SEQ ID NO: 11836 - DNA, 17 bp, Artificial Sequence
  Probe
tcccacatggtctagcg

SEQ ID NO: 11837 - DNA, 21 bp, Artificial Sequence
  Probe
tcccacatggtctagcggtta

SEQ ID NO: 11838 - DNA, 16 bp, Artificial Sequence
  Probe
tcccatatggtctagc

SEQ ID NO: 11839 - DNA, 17 bp, Artificial Sequence
  Probe
tcccatatggtctagcg

SEQ ID NO: 11840 - DNA, 18 bp, Artificial Sequence
  Probe
tcccatatggtctagcgg

SEQ ID NO: 11841 - DNA, 19 bp, Artificial Sequence
  Probe
tcccatatggtctagcggt

SEQ ID NO: 11842 - DNA, 20 bp, Artificial Sequence
  Probe
tcccatatggtctagcggtt

SEQ ID NO: 11843 - DNA, 21 bp, Artificial Sequence
  Probe
tcccatatggtctagcggtta

SEQ ID NO: 11844 - DNA, 24 bp, Artificial Sequence
  Probe
tcccatatggtctagcggttagga

SEQ ID NO: 11845 - DNA, 25 bp, Artificial Sequence
  Probe
tcccatatggtctagcggttaggat

SEQ ID NO: 11846 - DNA, 27 bp, Artificial Sequence
  Probe
tcccatatggtctagcggttaggattc

SEQ ID NO: 11847 - DNA, 28 bp, Artificial Sequence
  Probe
tcccatatggtctagcggttaggattcc

SEQ ID NO: 11848 - DNA, 29 bp, Artificial Sequence
  Probe
tcccatatggtctagcggttaggattcct

SEQ ID NO: 11849 - DNA, 26 bp, Artificial Sequence
  Probe
tccccgcctgtcacgcgggagaccgg

SEQ ID NO: 11850 - DNA, 15 bp, Artificial Sequence
  Probe
tccccggcacctcca

SEQ ID NO: 11851 - DNA, 16 bp, Artificial Sequence
  Probe
tccccggcacctccac

SEQ ID NO: 11852 - DNA, 19 bp, Artificial Sequence
  Probe
tccccggcacctccaccag

SEQ ID NO: 11853 - DNA, 20 bp, Artificial Sequence
  Probe
tccccggcacctccaccagt

SEQ ID NO: 11854 - DNA, 21 bp, Artificial Sequence
  Probe
tccccggcacctccaccagtt

SEQ ID NO: 11855 - DNA, 29 bp, Artificial Sequence
  Probe
tccccggttcgaaaccgggcggaaacacc

SEQ ID NO: 11856 - DNA, 15 bp, Artificial Sequence
  Probe
tcccgccttttttcc

SEQ ID NO: 11857 - DNA, 16 bp, Artificial Sequence
  Probe
tcccgccttttttccc

SEQ ID NO: 11858 - DNA, 17 bp, Artificial Sequence
  Probe
tcccgccttttttcccg

SEQ ID NO: 11859 - DNA, 19 bp, Artificial Sequence
  Probe
tcccgccttttttcccggc

SEQ ID NO: 11860 - DNA, 20 bp, Artificial Sequence
  Probe
tcccgccttttttcccggcg

SEQ ID NO: 11861 - DNA, 22 bp, Artificial Sequence
  Probe
tcccgccttttttcccggcggc

SEQ ID NO: 11862 - DNA, 23 bp, Artificial Sequence
  Probe
tcccgccttttttcccggcggcg

SEQ ID NO: 11863 - DNA, 24 bp, Artificial Sequence
  Probe
tcccgccttttttcccggcggcgg

SEQ ID NO: 11864 - DNA, 25 bp, Artificial Sequence
  Probe
tcccgccttttttcccggcggcggg

SEQ ID NO: 11865 - DNA, 28 bp, Artificial Sequence
  Probe
tcccgccttttttcccggcggcgggaga

SEQ ID NO: 11866 - DNA, 29 bp, Artificial Sequence
  Probe
tcccgggttcaaatcccggacgagccccc

SEQ ID NO: 11867 - DNA, 29 bp, Artificial Sequence
  Probe
tcccgggttcaatccccggcacctccacc

SEQ ID NO: 11868 - DNA, 17 bp, Artificial Sequence
  Probe
tcccggtcagggaacca

SEQ ID NO: 11869 - DNA, 15 bp, Artificial Sequence
  Probe
tccctggtctagtgg

SEQ ID NO: 11870 - DNA, 16 bp, Artificial Sequence
  Probe
tccctggtctagtggt

SEQ ID NO: 11871 - DNA, 17 bp, Artificial Sequence
  Probe
tccctggtctagtggtt

SEQ ID NO: 11872 - DNA, 18 bp, Artificial Sequence
  Probe
tccctggtctagtggtta

SEQ ID NO: 11873 - DNA, 19 bp, Artificial Sequence
  Probe
tccctggtctagtggttag

SEQ ID NO: 11874 - DNA, 21 bp, Artificial Sequence
  Probe
tccctggtctagtggttagga

SEQ ID NO: 11875 - DNA, 22 bp, Artificial Sequence
  Probe
tccctggtctagtggttaggat

SEQ ID NO: 11876 - DNA, 24 bp, Artificial Sequence
  Probe
tccctggtctagtggttaggattt

SEQ ID NO: 11877 - DNA, 15 bp, Artificial Sequence
  Probe
tccctggtggtctag

SEQ ID NO: 11878 - DNA, 16 bp, Artificial Sequence
  Probe
tccctggtggtctagt

SEQ ID NO: 11879 - DNA, 17 bp, Artificial Sequence
  Probe
tccctggtggtctagtg

SEQ ID NO: 11880 - DNA, 18 bp, Artificial Sequence
  Probe
tccctggtggtctagtgg

SEQ ID NO: 11881 - DNA, 19 bp, Artificial Sequence
  Probe
tccctggtggtctagtggc

SEQ ID NO: 11882 - DNA, 20 bp, Artificial Sequence
  Probe
tccctggtggtctagtggct

SEQ ID NO: 11883 - DNA, 21 bp, Artificial Sequence
  Probe
tccctggtggtctagtggcta

SEQ ID NO: 11884 - DNA, 23 bp, Artificial Sequence
  Probe
tccctggtggtctagtggctagg

SEQ ID NO: 11885 - DNA, 28 bp, Artificial Sequence
  Probe
tccctggtggtctagtggctaggattcg

SEQ ID NO: 11886 - DNA, 29 bp, Artificial Sequence
  Probe
tccctggtggtctagtggctaggattcgg

SEQ ID NO: 11887 - DNA, 30 bp, Artificial Sequence; identical to SEQ ID NO: 7856
  Probe

SEQ ID NO: 11888 - DNA, 19 bp, Artificial Sequence
  Probe
tccctggtggtctagtggt

SEQ ID NO: 11889 - DNA, 20 bp, Artificial Sequence
  Probe
tccctggtggtctagtggtt

SEQ ID NO: 11890 - DNA, 21 bp, Artificial Sequence
  Probe
tccctggtggtctagtggtta

SEQ ID NO: 11891 - DNA, 22 bp, Artificial Sequence
  Probe
tccctggtggtctagtggttag

SEQ ID NO: 11892 - DNA, 23 bp, Artificial Sequence
  Probe
tccctggtggtctagtggttagg

SEQ ID NO: 11893 - DNA, 24 bp, Artificial Sequence
  Probe
tccctggtggtctagtggttagga

SEQ ID NO: 11894 - DNA, 25 bp, Artificial Sequence
  Probe
tccctggtggtctagtggttaggat

SEQ ID NO: 11895 - DNA, 26 bp, Artificial Sequence
  Probe
tccctggtggtctagtggttaggatt

SEQ ID NO: 11896 - DNA, 27 bp, Artificial Sequence
  Probe
tccctggtggtctagtggttaggattc

SEQ ID NO: 11897 - DNA, 28 bp, Artificial Sequence
  Probe
tccctggtggtctagtggttaggattcg

SEQ ID NO: 11898 - DNA, 29 bp, Artificial Sequence
  Probe
tccctggtggtctagtggttaggattcgg

SEQ ID NO: 11899 - DNA, 30 bp, Artificial Sequence; identical to SEQ ID NO: 7870
  Probe

SEQ ID NO: 11900 - DNA, 29 bp, Artificial Sequence
  Probe
tccctggttcgatcccgggtttcggcact

SEQ ID NO: 11901 - DNA, 29 bp, Artificial Sequence
  Probe
tccctggttcgatcccgggtttcggcagc

SEQ ID NO: 11902 - DNA, 19 bp, Artificial Sequence
  Probe
tccggatggaggcgtgggt

SEQ ID NO: 11903 - DNA, 15 bp, Artificial Sequence
  Probe
tccggctcgaaggac

SEQ ID NO: 11904 - DNA, 16 bp, Artificial Sequence
  Probe
tccggctcgaaggacg

SEQ ID NO: 11905 - DNA, 17 bp, Artificial Sequence
  Probe
tccggctcgaaggacga

SEQ ID NO: 11906 - DNA, 18 bp, Artificial Sequence
  Probe
tccggctcgaaggacgaa

SEQ ID NO: 11907 - DNA, 19 bp, Artificial Sequence
  Probe
tccggctcgaaggacgaaa

SEQ ID NO: 11908 - DNA, 20 bp, Artificial Sequence
  Probe
tccggctcgaaggacgaaag

SEQ ID NO: 11909 - DNA, 16 bp, Artificial Sequence
  Probe
tccggctcgaaggact

SEQ ID NO: 11910 - DNA, 16 bp, Artificial Sequence
  Probe
tccgggtgccccctca

SEQ ID NO: 11911 - DNA, 17 bp, Artificial Sequence
  Probe
tccgggtgccccctcaa

SEQ ID NO: 11912 - DNA, 16 bp, Artificial Sequence
  Probe
tccgggtgccccctcg

SEQ ID NO: 11913 - DNA, 16 bp, Artificial Sequence
  Probe
tccgggtgccccctct

SEQ ID NO: 11914 - DNA, 17 bp, Artificial Sequence
  Probe
tccgtagtgtagtggtc

SEQ ID NO: 11915 - DNA, 28 bp, Artificial Sequence
  Probe
tccgtggtggtctagtggctaggattcg

SEQ ID NO: 11916 - DNA, 29 bp, Artificial Sequence
  Probe
tccgtggtggtctagtggctaggattcgg

SEQ ID NO: 11917 - DNA, 30 bp, Artificial Sequence
  Probe
tccgtggtggtctagtggctaggattcggc

SEQ ID NO: 11918 - DNA, 20 bp, Artificial Sequence
  Probe
tcctaagccagggattgtgg

SEQ ID NO: 11919 - DNA, 21 bp, Artificial Sequence
  Probe
tcctaagccagggattgtggg

SEQ ID NO: 11920 - DNA, 22 bp, Artificial Sequence
  Probe
tcctaagccagggattgtgggt

SEQ ID NO: 11921 - DNA, 15 bp, Artificial Sequence
  Probe
tcctcgttagtatag

SEQ ID NO: 11922 - DNA, 16 bp, Artificial Sequence
  Probe
tcctcgttagtatagt

SEQ ID NO: 11923 - DNA, 17 bp, Artificial Sequence
  Probe
tcctcgttagtatagtg

SEQ ID NO: 11924 - DNA, 18 bp, Artificial Sequence
  Probe
tcctcgttagtatagtgg

SEQ ID NO: 11925 - DNA, 19 bp, Artificial Sequence
  Probe
tcctcgttagtatagtggt

SEQ ID NO: 11926 - DNA, 20 bp, Artificial Sequence
  Probe
tcctcgttagtatagtggtg

SEQ ID NO: 11927 - DNA, 22 bp, Artificial Sequence
  Probe
tcctcgttagtatagtggtgag

SEQ ID NO: 11928 - DNA, 26 bp, Artificial Sequence
  Probe
tcctcgttagtatagtggtgagtatc

SEQ ID NO: 11929 - DNA, 27 bp, Artificial Sequence
  Probe
tcctcgttagtatagtggtgagtatcc

SEQ ID NO: 11930 - DNA, 28 bp, Artificial Sequence
  Probe
tcctcgttagtatagtggtgagtatccc

SEQ ID NO: 11931 - DNA, 29 bp, Artificial Sequence
  Probe
tcctcgttagtatagtggtgagtatcccc

SEQ ID NO: 11932 - DNA, 30 bp, Artificial Sequence; identical to SEQ ID NO: 1701
  Probe

SEQ ID NO: 11933 - DNA, 30 bp, Artificial Sequence
  Probe
tcctcgttagtatagtggttagtatccccg

SEQ ID NO: 11934 - DNA, 29 bp, Artificial Sequence
  Probe
tcctgagttcgaacctcagagggggcagc

SEQ ID NO: 11935 - DNA, 29 bp, Artificial Sequence
  Probe
tcctgggttcgagccccagtggaaccacg

SEQ ID NO: 11936 - DNA, 21 bp, Artificial Sequence
  Probe
tcgaaaccatcctctgctatc

SEQ ID NO: 11937 - DNA, 15 bp, Artificial Sequence
  Probe
tcgaaaccgggcgga

SEQ ID NO: 11938 - DNA, 16 bp, Artificial Sequence
  Probe
tcgaaaccgggcggaa

SEQ ID NO: 11939 - DNA, 17 bp, Artificial Sequence
  Probe
tcgaaaccgggcggaaa

SEQ ID NO: 11940 - DNA, 19 bp, Artificial Sequence
  Probe
tcgaaaccgggcggaaaca

SEQ ID NO: 11941 - DNA, 20 bp, Artificial Sequence
  Probe
tcgaaaccgggcggaaacac

SEQ ID NO: 11942 - DNA, 21 bp, Artificial Sequence
  Probe
tcgaaaccgggcggaaacacc

SEQ ID NO: 11943 - DNA, 22 bp, Artificial Sequence
  Probe
tcgaaaccgggcggaaacacct

SEQ ID NO: 11944 - DNA, 20 bp, Artificial Sequence
  Probe
tcgaatcccaccgctgccac

SEQ ID NO: 11945 - DNA, 19 bp, Artificial Sequence
  Probe
tcgaatcccactcctgaca

SEQ ID NO: 11946 - DNA, 20 bp, Artificial Sequence
  Probe
tcgaatcccacttctgacac

SEQ ID NO: 11947 - DNA, 21 bp, Artificial Sequence
  Probe
tcgaatcccacttctgacaca

SEQ ID NO: 11948 - DNA, 22 bp, Artificial Sequence
  Probe
tcgaatcccacttctgacacaa

SEQ ID NO: 11949 - DNA, 22 bp, Artificial Sequence
  Probe
tcgaatcccagcggtgcctcaa

SEQ ID NO: 11950 - DNA, 21 bp, Artificial Sequence
  Probe
tcgaatcccagcggtgcctcc

SEQ ID NO: 11951 - DNA, 22 bp, Artificial Sequence
  Probe
tcgaatcccagcggtgcctccg

SEQ ID NO: 11952 - DNA, 19 bp, Artificial Sequence
  Probe
tcgaatcccatcctcgtcg

SEQ ID NO: 11953 - DNA, 20 bp, Artificial Sequence
  Probe
tcgaatcccatcctcgtcgc

SEQ ID NO: 11954 - DNA, 21 bp, Artificial Sequence
  Probe
tcgaatcccatcctcgtcgct

SEQ ID NO: 11955 - DNA, 21 bp, Artificial Sequence
  Probe
tcgaatcccatcctcgtcggc

SEQ ID NO: 11956 - DNA, 20 bp, Artificial Sequence
  Probe
tcgaatccggctcgaaggac

SEQ ID NO: 11957 - DNA, 21 bp, Artificial Sequence
  Probe
tcgaatccggctcgaaggacg

SEQ ID NO: 11958 - DNA, 22 bp, Artificial Sequence
  Probe
tcgaatccggctcgaaggacga

SEQ ID NO: 11959 - DNA, 22 bp, Artificial Sequence
  Probe
tcgaatcctgccgactacggca

SEQ ID NO: 11960 - DNA, 22 bp, Artificial Sequence
  Probe
tcgaatcctgccgactacgtca

SEQ ID NO: 11961 - DNA, 22 bp, Artificial Sequence
  Probe
tcgaatcctgctcacagcgtca

SEQ ID NO: 11962 - DNA, 20 bp, Artificial Sequence
  Probe
tcgactcctggctggctcgc

SEQ ID NO: 11963 - DNA, 21 bp, Artificial Sequence
  Probe
tcgagaggggctgtgctcgca

SEQ ID NO: 11964 - DNA, 24 bp, Artificial Sequence
  Probe
tcgagaggggctgtgctcgcaagg

SEQ ID NO: 11965 - DNA, 30 bp, Artificial Sequence
  Probe
tcgagaggggctgtgctcgcaaggtttctt

SEQ ID NO: 11966 - DNA, 20 bp, Artificial Sequence
  Probe
tcgagtcccatctgggtcgc

SEQ ID NO: 11967 - DNA, 29 bp, Artificial Sequence
  Probe
tcgatggatcgaaaccatcctctgctatc

SEQ ID NO: 11968 - DNA, 20 bp, Artificial Sequence
  Probe
tcgattccccgacggggaga

SEQ ID NO: 11969 - DNA, 20 bp, Artificial Sequence
  Probe
tcgattccccgacggggagg

SEQ ID NO: 11970 - DNA, 22 bp, Artificial Sequence
  Probe
tcgattccccgacggggaggca

SEQ ID NO: 11971 - DNA, 22 bp, Artificial Sequence
  Probe
tcgattcccggccaatgcacga

SEQ ID NO: 11972 - DNA, 22 bp, Artificial Sequence
  Probe
tcgattcccggccaatgcagca

SEQ ID NO: 11973 - DNA, 22 bp, Artificial Sequence
  Probe
tcgattcccggcccatgcagca

SEQ ID NO: 11974 - DNA, 19 bp, Artificial Sequence
  Probe
tcgattccggctcgaagga

SEQ ID NO: 11975 - DNA, 20 bp, Artificial Sequence
  Probe
tcgattccggctcgaaggac

SEQ ID NO: 11976 - DNA, 21 bp, Artificial Sequence
  Probe
tcgattccggctcgaaggact

SEQ ID NO: 11977 - DNA, 21 bp, Artificial Sequence
  Probe
tcgattccggctcgaaggagc

SEQ ID NO: 11978 - DNA, 19 bp, Artificial Sequence
  Probe
tcgattccttccttttttg

SEQ ID NO: 11979 - DNA, 20 bp, Artificial Sequence
  Probe
tcgattccttccttttttgt

SEQ ID NO: 11980 - DNA, 21 bp, Artificial Sequence
  Probe
tcgattccttccttttttgtc

SEQ ID NO: 11981 - DNA, 22 bp, Artificial Sequence
  Probe
tcgcctgccacgcgggaggccc

SEQ ID NO: 11982 - DNA, 29 bp, Artificial Sequence
  Probe
tcgcgggttcgatccccgtacgggccaac

SEQ ID NO: 11983 - DNA, 29 bp, Artificial Sequence
  Probe
tcgcgggttcgatccccgtacgggccaca

SEQ ID NO: 11984 - DNA, 29 bp, Artificial Sequence
  Probe
tcgcgggttcgatccccgtacgggccacg

SEQ ID NO: 11985 - DNA, 29 bp, Artificial Sequence
  Probe
tcgcgggttcgatccccgtacgggccact

SEQ ID NO: 11986 - DNA, 29 bp, Artificial Sequence
  Probe
tcgctggttcgaatccggctcgaaggacg

SEQ ID NO: 11987 - DNA, 27 bp, Artificial Sequence
  Probe
tcgctggttcgattccggctcgaagga

SEQ ID NO: 11988 - DNA, 28 bp, Artificial Sequence
  Probe
tcgctggttcgattccggctcgaaggac

SEQ ID NO: 11989 - DNA, 29 bp, Artificial Sequence
  Probe
tcgctggttcgattccggctcgaaggact

SEQ ID NO: 11990 - DNA, 29 bp, Artificial Sequence
  Probe
tcgctggttcgattccggctcgaaggagc

SEQ ID NO: 11991 - DNA, 21 bp, Artificial Sequence
  Probe
tcgggcgggagtggtggcttt

SEQ ID NO: 11992 - DNA, 22 bp, Artificial Sequence
  Probe
tcgggcgggagtggtggctttt

SEQ ID NO: 11993 - DNA, 22 bp, Artificial Sequence
  Probe
tcgggtgcgagaggtcccgggt

SEQ ID NO: 11994 - DNA, 17 bp, Artificial Sequence
  Probe
tcggtagagcatcagac

SEQ ID NO: 11995 - DNA, 17 bp, Artificial Sequence
  Probe
tcggtagagcatgagac

SEQ ID NO: 11996 - DNA, 18 bp, Artificial Sequence
  Probe
tcggtagagcatgagact

SEQ ID NO: 11997 - DNA, 17 bp, Artificial Sequence
  Probe
tcggtagagcatgggac

SEQ ID NO: 11998 - DNA, 22 bp, Artificial Sequence
  Probe
tcgtaaaccgaagatcgcgggt

SEQ ID NO: 11999 - DNA, 19 bp, Artificial Sequence
  Probe
tcgtatagtggttagtact

SEQ ID NO: 12000 - DNA, 20 bp, Artificial Sequence
  Probe
tcgtatagtggttagtactc

SEQ ID NO: 12001 - DNA, 21 bp, Artificial Sequence
  Probe
tcgtatagtggttagtactct

SEQ ID NO: 12002 - DNA, 22 bp, Artificial Sequence
  Probe
tcgtatagtggttagtactctg

SEQ ID NO: 12003 - DNA, 23 bp, Artificial Sequence
  Probe
tcgtatagtggttagtactctgc

SEQ ID NO: 12004 - DNA, 25 bp, Artificial Sequence
  Probe
tcgtatagtggttagtactctgcgt

SEQ ID NO: 12005 - DNA, 28 bp, Artificial Sequence
  Probe
tcgtatagtggttagtactctgcgttgt

SEQ ID NO: 12006 - DNA, 16 bp, Artificial Sequence
  Probe
tcgtggctactgtttt

SEQ ID NO: 12007 - DNA, 19 bp, Artificial Sequence
  Probe
tcgtggttgtagtccgtgc

SEQ ID NO: 12008 - DNA, 21 bp, Artificial Sequence
  Probe
tcgtggttgtagtccgtgcga

SEQ ID NO: 12009 - DNA, 23 bp, Artificial Sequence
  Probe
tcgtggttgtagtccgtgcgaga

SEQ ID NO: 12010 - DNA, 26 bp, Artificial Sequence
  Probe
tcgtggttgtagtccgtgcgagaata

SEQ ID NO: 12011 - DNA, 15 bp, Artificial Sequence
  Probe
tcgttggtctagggg

SEQ ID NO: 12012 - DNA, 22 bp, Artificial Sequence
  Probe
tcgttggtctaggggtatgatt

SEQ ID NO: 12013 - DNA, 27 bp, Artificial Sequence
  Probe
tcgttggtctaggggtatgattctcgc

SEQ ID NO: 12014 - DNA, 21 bp, Artificial Sequence
  Probe
tctagcggttaggattcctgg

SEQ ID NO: 12015 - DNA, 20 bp, Artificial Sequence
  Probe
tctaggggtatgattctcgg

SEQ ID NO: 12016 - DNA, 30 bp, Artificial Sequence
  Probe
tctcagggtcgtgggttcgagccccacgtt

SEQ ID NO: 12017 - DNA, 19 bp, Artificial Sequence
  Probe
tctccggatggaggcgtgg

SEQ ID NO: 12018 - DNA, 19 bp, Artificial Sequence
  Probe
tctcggtggaacctgcatt

SEQ ID NO: 12019 - DNA, 30 bp, Artificial Sequence
  Probe
tctgaaggtcgtgagttcgagcctcacacg

SEQ ID NO: 12020 - DNA, 30 bp, Artificial Sequence
  Probe
tctgaaggtcgtgagttcgatcctcacacg

SEQ ID NO: 12021 - DNA, 15 bp, Artificial Sequence
  Probe
tctgacacatacttt

SEQ ID NO: 12022 - DNA, 16 bp, Artificial Sequence
  Probe
tctgacacatactttt

SEQ ID NO: 12023 - DNA, 16 bp, Artificial Sequence
  Probe
tctgacacattcgttt

SEQ ID NO: 12024 - DNA, 17 bp, Artificial Sequence
  Probe
tctgacacattcgtttt

SEQ ID NO: 12025 - DNA, 22 bp, Artificial Sequence
  Probe
tctgacagagctcaattacttt

SEQ ID NO: 12026 - DNA, 19 bp, Artificial Sequence
  Probe
tctgacttcggatcagaag

SEQ ID NO: 12027 - DNA, 30 bp, Artificial Sequence
  Probe
tctgagggtccagggttcaagtccctgttc

SEQ ID NO: 12028 - DNA, 29 bp, Artificial Sequence
  Probe
tctgagggtccagggttcatgtccctgtt

SEQ ID NO: 12029 - DNA, 30 bp, Artificial Sequence
  Probe
tctgagggtccagggttcatgtccctgttc

SEQ ID NO: 12030 - DNA, 15 bp, Artificial Sequence
  Probe
tctggactctgaatc

SEQ ID NO: 12031 - DNA, 16 bp, Artificial Sequence
  Probe
tctggactctgaatcc

SEQ ID NO: 12032 - DNA, 17 bp, Artificial Sequence
  Probe
tctggactctgaatcca

SEQ ID NO: 12033 - DNA, 19 bp, Artificial Sequence
  Probe
tctggactctgaatccagc

SEQ ID NO: 12034 - DNA, 20 bp, Artificial Sequence
  Probe
tctggactctgaatccagcg

SEQ ID NO: 12035 - DNA, 26 bp, Artificial Sequence
  Probe
tctggactctgaatccagcgatccga

SEQ ID NO: 12036 - DNA, 27 bp, Artificial Sequence
  Probe
tctggactctgaatccagcgatccgag

SEQ ID NO: 12037 - DNA, 28 bp, Artificial Sequence
  Probe
tctggactctgaatccagcgatccgagt

SEQ ID NO: 12038 - DNA, 15 bp, Artificial Sequence
  Probe
tctggactttgaatc

SEQ ID NO: 12039 - DNA, 17 bp, Artificial Sequence
  Probe
tctgtagtgtagtggtt

SEQ ID NO: 12040 - DNA, 22 bp, Artificial Sequence
  Probe
tcttgcgacccgggttcgattc

SEQ ID NO: 12041 - DNA, 30 bp, Artificial Sequence
  Probe
tcttgcgacccgggttcgattcccgggcgg

SEQ ID NO: 12042 - DNA, 26 bp, Artificial Sequence
  Probe
tctttggccttttcgagatactgttt

SEQ ID NO: 12043 - DNA, 27 bp, Artificial Sequence
  Probe
tctttggccttttcgagatactgtttt

SEQ ID NO: 12044 - DNA, 17 bp, Artificial Sequence
  Probe
tgaagcattggactgta

SEQ ID NO: 12045 - DNA, 18 bp, Artificial Sequence
  Probe
tgaagcattggactgtaa

SEQ ID NO: 12046 - DNA, 22 bp, Artificial Sequence
  Probe
tgaagcattggactgtaaatct

SEQ ID NO: 12047 - DNA, 30 bp, Artificial Sequence; identical to SEQ ID NO: 1734
  Probe

SEQ ID NO: 12048 - DNA, 30 bp, Artificial Sequence
  Probe
tgagggtccagggttcaagtccctgttcgg

SEQ ID NO: 12049 - DNA, 18 bp, Artificial Sequence
  Probe
tgagtgaagcattggact

SEQ ID NO: 12050 - DNA, 19 bp, Artificial Sequence
  Probe
tgagtgaagcattggactg

SEQ ID NO: 12051 - DNA, 20 bp, Artificial Sequence
  Probe
tgagtgaagcattggactgt

SEQ ID NO: 12052 - DNA, 21 bp, Artificial Sequence
  Probe
tgagtgaagcattggactgta

SEQ ID NO: 12053 - DNA, 22 bp, Artificial Sequence
  Probe
tgagtgaagcattggactgtaa

SEQ ID NO: 12054 - DNA, 23 bp, Artificial Sequence
  Probe
tgagtgaagcattggactgtaaa

SEQ ID NO: 12055 - DNA, 25 bp, Artificial Sequence
  Probe
tgagtgaagcattggactgtaaatc

SEQ ID NO: 12056 - DNA, 20 bp, Artificial Sequence
  Probe
tgataacaccaaggtcgcgg

SEQ ID NO: 12057 - DNA, 15 bp, Artificial Sequence
  Probe
tgatcgtatagtggt

SEQ ID NO: 12058 - DNA, 17 bp, Artificial Sequence
  Probe
tgatcgtatagtggtta

SEQ ID NO: 12059 - DNA, 18 bp, Artificial Sequence
  Probe
tgatcgtatagtggttag

SEQ ID NO: 12060 - DNA, 19 bp, Artificial Sequence
  Probe
tgatcgtatagtggttagt

SEQ ID NO: 12061 - DNA, 20 bp, Artificial Sequence
  Probe
tgatcgtatagtggttagta

SEQ ID NO: 12062 - DNA, 22 bp, Artificial Sequence
  Probe
tgatcgtatagtggttagtact

SEQ ID NO: 12063 - DNA, 23 bp, Artificial Sequence
  Probe
tgatcgtatagtggttagtactc

SEQ ID NO: 12064 - DNA, 24 bp, Artificial Sequence
  Probe
tgatcgtatagtggttagtactct

SEQ ID NO: 12065 - DNA, 25 bp, Artificial Sequence
  Probe
tgatcgtatagtggttagtactctg

SEQ ID NO: 12066 - DNA, 26 bp, Artificial Sequence
  Probe
tgatcgtatagtggttagtactctgc

SEQ ID NO: 12067 - DNA, 27 bp, Artificial Sequence
  Probe
tgatcgtatagtggttagtactctgcg

SEQ ID NO: 12068 - DNA, 28 bp, Artificial Sequence
  Probe
tgatcgtatagtggttagtactctgcgt

SEQ ID NO: 12069 - DNA, 30 bp, Artificial Sequence
  Probe
tgcatgggtggttcagtggtagaattctcg

SEQ ID NO: 12070 - DNA, 24 bp, Artificial Sequence
  Probe
tgcccccatgtctaacaacatggc

SEQ ID NO: 12071 - DNA, 25 bp, Artificial Sequence
  Probe
tgcccccatgtctaacaacatggct

SEQ ID NO: 12072 - DNA, 30 bp, Artificial Sequence; identical to SEQ ID NO: 8103
  Probe

SEQ ID NO: 12073 - DNA, 17 bp, Artificial Sequence
  Probe
tgcccgcatcctccact

SEQ ID NO: 12074 - DNA, 15 bp, Artificial Sequence
  Probe
tgccgtgatcgtata

SEQ ID NO: 12075 - DNA, 16 bp, Artificial Sequence
  Probe
tgccgtgatcgtatag

SEQ ID NO: 12076 - DNA, 17 bp, Artificial Sequence
  Probe
tgccgtgatcgtatagt

SEQ ID NO: 12077 - DNA, 18 bp, Artificial Sequence
  Probe
tgccgtgatcgtatagtg

SEQ ID NO: 12078 - DNA, 19 bp, Artificial Sequence
  Probe
tgccgtgatcgtatagtgg

SEQ ID NO: 12079 - DNA, 20 bp, Artificial Sequence
  Probe
tgccgtgatcgtatagtggt

SEQ ID NO: 12080 - DNA, 21 bp, Artificial Sequence
  Probe
tgccgtgatcgtatagtggtt

SEQ ID NO: 12081 - DNA, 22 bp, Artificial Sequence
  Probe
tgccgtgatcgtatagtggtta

SEQ ID NO: 12082 - DNA, 23 bp, Artificial Sequence
  Probe
tgccgtgatcgtatagtggttag

SEQ ID NO: 12083 - DNA, 24 bp, Artificial Sequence
  Probe
tgccgtgatcgtatagtggttagt

SEQ ID NO: 12084 - DNA, 25 bp, Artificial Sequence
  Probe
tgccgtgatcgtatagtggttagta

SEQ ID NO: 12085 - DNA, 26 bp, Artificial Sequence
  Probe
tgccgtgatcgtatagtggttagtac

SEQ ID NO: 12086 - DNA, 27 bp, Artificial Sequence
  Probe
tgccgtgatcgtatagtggttagtact

SEQ ID NO: 12087 - DNA, 28 bp, Artificial Sequence
  Probe
tgccgtgatcgtatagtggttagtactc

SEQ ID NO: 12088 - DNA, 29 bp, Artificial Sequence
  Probe
tgccgtgatcgtatagtggttagtactct

SEQ ID NO: 12089 - DNA, 30 bp, Artificial Sequence
  Probe
tgccgtgatcgtatagtggttagtactctg

SEQ ID NO: 12090 - DNA, 22 bp, Artificial Sequence
  Probe
tgccttccaagcagttgacccg

SEQ ID NO: 12091 - DNA, 30 bp, Artificial Sequence
  Probe
tgcgagaggtcccgggttcaaatcccggac

SEQ ID NO: 12092 - DNA, 17 bp, Artificial Sequence
  Probe
tgctaatccattgtgct

SEQ ID NO: 12093 - DNA, 21 bp, Artificial Sequence
  Probe
tgctaatccattgtgctctgc

SEQ ID NO: 12094 - DNA, 21 bp, Artificial Sequence
  Probe
tgctaatccattgtgctttgc

SEQ ID NO: 12095 - DNA, 17 bp, Artificial Sequence
  Probe
tggactctgaatccagc

SEQ ID NO: 12096 - DNA, 25 bp, Artificial Sequence
  Probe
tggactctgaatccagcgatccgag

SEQ ID NO: 12097 - DNA, 26 bp, Artificial Sequence
  Probe
tggactctgaatccagcgatccgagt

SEQ ID NO: 12098 - DNA, 22 bp, Artificial Sequence
  Probe
tggaggcgtgggttcgaatccc

SEQ ID NO: 12099 - DNA, 25 bp, Artificial Sequence
  Probe
tggagttaaagactttttctctgat

SEQ ID NO: 12100 - DNA, 22 bp, Artificial Sequence
  Probe
tggataacgcgtctgactacgg

SEQ ID NO: 12101 - DNA, 23 bp, Artificial Sequence
  Probe
tggataacgcgtctgactacgga

SEQ ID NO: 12102 - DNA, 20 bp, Artificial Sequence
  Probe
tggataaggcgtctgacttc

SEQ ID NO: 12103 - DNA, 24 bp, Artificial Sequence
  Probe
tggataaggcgtctgacttcggat

SEQ ID NO: 12104 - DNA, 25 bp, Artificial Sequence
  Probe
tggataaggcgtctgacttcggatc

SEQ ID NO: 12105 - DNA, 21 bp, Artificial Sequence
  Probe
tggccgcagcaacctcggttc

SEQ ID NO: 12106 - DNA, 22 bp, Artificial Sequence
  Probe
tggccgcagcaacctcggttcg

SEQ ID NO: 12107 - DNA, 23 bp, Artificial Sequence
  Probe
tggccgcagcaacctcggttcga

SEQ ID NO: 12108 - DNA, 25 bp, Artificial Sequence
  Probe
tggcctcctaagccagggattgtgg

SEQ ID NO: 12109 - DNA, 24 bp, Artificial Sequence
  Probe
tggcgcagcggaagcgtgctgggc

SEQ ID NO: 12110 - DNA, 24 bp, Artificial Sequence
  Probe
tggctgagtgaagcattggactgt

SEQ ID NO: 12111 - DNA, 25 bp, Artificial Sequence
  Probe
tggctgagtgaagcattggactgta

SEQ ID NO: 12112 - DNA, 26 bp, Artificial Sequence
  Probe
tggctgagtgaagcattggactgtaa

SEQ ID NO: 12113 - DNA, 19 bp, Artificial Sequence
  Probe
tggggtggcctgtgacttt

SEQ ID NO: 12114 - DNA, 20 bp, Artificial Sequence
  Probe
tggggtggcctgtgactttt

SEQ ID NO: 12115 - DNA, 21 bp, Artificial Sequence
  Probe
tgggtccgagaggtcccgggt

SEQ ID NO: 12116 - DNA, 21 bp, Artificial Sequence
  Probe
tgggtcgcgtgagattagttt

SEQ ID NO: 12117 - DNA, 22 bp, Artificial Sequence
  Probe
tgggtcgcgtgagattagtttt

SEQ ID NO: 12118 - DNA, 21 bp, Artificial Sequence
  Probe
tgggtgcgagaggtcccgggt

SEQ ID NO: 12119 - DNA, 20 bp, Artificial Sequence
  Probe
tgggtggttcagtggtagaa

SEQ ID NO: 12120 - DNA, 21 bp, Artificial Sequence
  Probe
tgggtggttcagtggtagaat

SEQ ID NO: 12121 - DNA, 24 bp, Artificial Sequence
  Probe
tgggtggttcagtggtagaattct

SEQ ID NO: 12122 - DNA, 25 bp, Artificial Sequence
  Probe
tgggtggttcagtggtagaattctc

SEQ ID NO: 12123 - DNA, 26 bp, Artificial Sequence
  Probe
tgggtggttcagtggtagaattctcg

SEQ ID NO: 12124 - DNA, 27 bp, Artificial Sequence
  Probe
tgggtggttcagtggtagaattctcgc

SEQ ID NO: 12125 - DNA, 28 bp, Artificial Sequence
  Probe
tgggtggttcagtggtagaattctcgcc

SEQ ID NO: 12126 - DNA, 30 bp, Artificial Sequence; identical to SEQ ID NO: 1765
  Probe

SEQ ID NO: 12127 - DNA, 24 bp, Artificial Sequence
  Probe
tgggttcgaatcccatcctcgtcg

SEQ ID NO: 12128 - DNA, 25 bp, Artificial Sequence
  Probe
tgggttcgaatcccatcctcgtcgc

SEQ ID NO: 12129 - DNA, 21 bp, Artificial Sequence
  Probe
tgggtttaagtcccattggtc

SEQ ID NO: 12130 - DNA, 24 bp, Artificial Sequence
  Probe
tgggtttaagtcccattggtctag

SEQ ID NO: 12131 - DNA, 25 bp, Artificial Sequence
  Probe
tgggtttaagtcccattggtctagt

SEQ ID NO: 12132 - DNA, 15 bp, Artificial Sequence
  Probe
tggtagaattctcgc

SEQ ID NO: 12133 - DNA, 16 bp, Artificial Sequence
  Probe
tggtagaattctcgcc

SEQ ID NO: 12134 - DNA, 17 bp, Artificial Sequence
  Probe
tggtagaattctcgcct

SEQ ID NO: 12135 - DNA, 18 bp, Artificial Sequence
  Probe
tggtagaattctcgcctg

SEQ ID NO: 12136 - DNA, 19 bp, Artificial Sequence
  Probe
tggtagaattctcgcctgc

SEQ ID NO: 12137 - DNA, 20 bp, Artificial Sequence
  Probe
tggtagaattctcgcctgcc

SEQ ID NO: 12138 - DNA, 22 bp, Artificial Sequence
  Probe
tggtagaattctcgcctgccac

SEQ ID NO: 12139 - DNA, 23 bp, Artificial Sequence
  Probe
tggtagaattctcgcctgccacg

SEQ ID NO: 12140 - DNA, 24 bp, Artificial Sequence
  Probe
tggtagaattctcgcctgccacgc

SEQ ID NO: 12141 - DNA, 30 bp, Artificial Sequence
  Probe
tggtagaattctcgcctgccacgcgggagg

SEQ ID NO: 12142 - DNA, 15 bp, Artificial Sequence
  Probe
tggtagagcgcgtgc

SEQ ID NO: 12143 - DNA, 15 bp, Artificial Sequence
  Probe
tggtagagcgctcgc

SEQ ID NO: 12144 - DNA, 20 bp, Artificial Sequence
  Probe
tggtagagcggaggactgta

SEQ ID NO: 12145 - DNA, 21 bp, Artificial Sequence
  Probe
tggtagagcggaggactgtag

SEQ ID NO: 12146 - DNA, 15 bp, Artificial Sequence
  Probe
tggtcgtggttgtag

SEQ ID NO: 12147 - DNA, 16 bp, Artificial Sequence
  Probe
tggtcgtggttgtagt

SEQ ID NO: 12148 - DNA, 17 bp, Artificial Sequence
  Probe
tggtcgtggttgtagtc

SEQ ID NO: 12149 - DNA, 18 bp, Artificial Sequence
  Probe
tggtcgtggttgtagtcc

SEQ ID NO: 12150 - DNA, 20 bp, Artificial Sequence
  Probe
tggtcgtggttgtagtccgt

SEQ ID NO: 12151 - DNA, 24 bp, Artificial Sequence
  Probe
tggtcgtggttgtagtccgtgcga

SEQ ID NO: 12152 - DNA, 25 bp, Artificial Sequence
  Probe
tggtcgtggttgtagtccgtgcgag

SEQ ID NO: 12153 - DNA, 26 bp, Artificial Sequence
  Probe
tggtcgtggttgtagtccgtgcgaga

SEQ ID NO: 12154 - DNA, 27 bp, Artificial Sequence
  Probe
tggtcgtggttgtagtccgtgcgagaa

SEQ ID NO: 12155 - DNA, 28 bp, Artificial Sequence
  Probe
tggtcgtggttgtagtccgtgcgagaat

SEQ ID NO: 12156 - DNA, 30 bp, Artificial Sequence
  Probe
tggtcgtggttgtagtccgtgcgagaataa

SEQ ID NO: 12157 - DNA, 17 bp, Artificial Sequence
  Probe
tggtctaaggcgctgga

SEQ ID NO: 12158 - DNA, 21 bp, Artificial Sequence
  Probe
tggtctagcggttaggattcc

SEQ ID NO: 12159 - DNA, 23 bp, Artificial Sequence
  Probe
tggtctaggggtatgattctcgc

SEQ ID NO: 12160 - DNA, 24 bp, Artificial Sequence
  Probe
tggtctaggggtatgattctcgct

SEQ ID NO: 12161 - DNA, 23 bp, Artificial Sequence
  Probe
tggtctaggggtatgattctcgg

SEQ ID NO: 12162 - DNA, 24 bp, Artificial Sequence
  Probe
tggtctaggggtatgattctcggt

SEQ ID NO: 12163 - DNA, 22 bp, Artificial Sequence
  Probe
tggtctagtggttaggattcgg

SEQ ID NO: 12164 - DNA, 24 bp, Artificial Sequence
  Probe
tggtctagtggttaggattcggcg

SEQ ID NO: 12165 - DNA, 25 bp, Artificial Sequence
  Probe
tggtctagtggttaggattcggcgc

SEQ ID NO: 12166 - DNA, 26 bp, Artificial Sequence
  Probe
tggtctagtggttaggattcggcgct

SEQ ID NO: 12167 - DNA, 29 bp, Artificial Sequence
  Probe
tggtctagtggttaggattcggcgctctc

SEQ ID NO: 12168 - DNA, 16 bp, Artificial Sequence
  Probe
tggtgagtatccccgc

SEQ ID NO: 12169 - DNA, 28 bp, Artificial Sequence
  Probe
tggtggagttaaagactttttctctgat

SEQ ID NO: 12170 - DNA, 28 bp, Artificial Sequence
  Probe
tggtggtctagtggttaggattcggcgc

SEQ ID NO: 12171 - DNA, 23 bp, Artificial Sequence
  Probe
tggtggttcagtggtagaattct

SEQ ID NO: 12172 - DNA, 24 bp, Artificial Sequence
  Probe
tggtggttcagtggtagaattctc

SEQ ID NO: 12173 - DNA, 25 bp, Artificial Sequence
  Probe
tggtggttcagtggtagaattctcg

SEQ ID NO: 12174 - DNA, 26 bp, Artificial Sequence
  Probe
tggtggttcagtggtagaattctcgc

SEQ ID NO: 12175 - DNA, 27 bp, Artificial Sequence
  Probe
tggtggttcagtggtagaattctcgcc

SEQ ID NO: 12176 - DNA, 28 bp, Artificial Sequence
  Probe
tggtggttcagtggtagaattctcgcct

SEQ ID NO: 12177 - DNA, 30 bp, Artificial Sequence; identical to SEQ ID NO: 8196
  Probe

SEQ ID NO: 12178 - DNA, 26 bp, Artificial Sequence
  Probe
tggtgtaatggtgagcactctggact

SEQ ID NO: 12179 - DNA, 19 bp, Artificial Sequence
  Probe
tggtgtaatggttagcact

SEQ ID NO: 12180 - DNA, 22 bp, Artificial Sequence
  Probe
tggtgtaatggttagcactctg

SEQ ID NO: 12181 - DNA, 23 bp, Artificial Sequence
  Probe
tggtgtaatggttagcactctgg

SEQ ID NO: 12182 - DNA, 24 bp, Artificial Sequence
  Probe
tggtgtaatggttagcactctgga

SEQ ID NO: 12183 - DNA, 25 bp, Artificial Sequence
  Probe
tggtgtaatggttagcactctggac

SEQ ID NO: 12184 - DNA, 26 bp, Artificial Sequence
  Probe
tggtgtaatggttagcactctggact

SEQ ID NO: 12185 - DNA, 27 bp, Artificial Sequence
  Probe
tggtgtaatggttagcactctggactc

SEQ ID NO: 12186 - DNA, 28 bp, Artificial Sequence
  Probe
tggtgtaatggttagcactctggactct

SEQ ID NO: 12187 - DNA, 29 bp, Artificial Sequence
  Probe
tggtgtaatggttagcactctggactctg

SEQ ID NO: 12188 - DNA, 27 bp, Artificial Sequence
  Probe
tggtgtaatggttagcactctggactt

SEQ ID NO: 12189 - DNA, 29 bp, Artificial Sequence
  Probe
tggtgtaatggttagcactctggactttg

SEQ ID NO: 12190 - DNA, 15 bp, Artificial Sequence
  Probe
tggttagcactctgg

SEQ ID NO: 12191 - DNA, 16 bp, Artificial Sequence
  Probe
tggttagcactctgga

SEQ ID NO: 12192 - DNA, 17 bp, Artificial Sequence
  Probe
tggttagcactctggac

SEQ ID NO: 12193 - DNA, 18 bp, Artificial Sequence
  Probe
tggttagcactctggact

SEQ ID NO: 12194 - DNA, 19 bp, Artificial Sequence
  Probe
tggttagcactctggactc

SEQ ID NO: 12195 - DNA, 20 bp, Artificial Sequence
  Probe
tggttagcactctggactct

SEQ ID NO: 12196 - DNA, 21 bp, Artificial Sequence
  Probe
tggttagcactctggactctg

SEQ ID NO: 12197 - DNA, 22 bp, Artificial Sequence
  Probe
tggttagcactctggactctga

SEQ ID NO: 12198 - DNA, 23 bp, Artificial Sequence
  Probe
tggttagcactctggactctgaa

SEQ ID NO: 12199 - DNA, 24 bp, Artificial Sequence
  Probe
tggttagcactctggactctgaat

SEQ ID NO: 12200 - DNA, 25 bp, Artificial Sequence
  Probe
tggttagcactctggactctgaatc

SEQ ID NO: 12201 - DNA, 26 bp, Artificial Sequence
  Probe
tggttagcactctggactctgaatcc

SEQ ID NO: 12202 - DNA, 27 bp, Artificial Sequence
  Probe
tggttagcactctggactctgaatcca

SEQ ID NO: 12203 - DNA, 29 bp, Artificial Sequence
  Probe
tggttagcactctggactctgaatccagc

SEQ ID NO: 12204 - DNA, 19 bp, Artificial Sequence
  Probe
tggttagcactctggactt

SEQ ID NO: 12205 - DNA, 20 bp, Artificial Sequence
  Probe
tggttagcactctggacttt

SEQ ID NO: 12206 - DNA, 21 bp, Artificial Sequence
  Probe
tggttagcactctggactttg

SEQ ID NO: 12207 - DNA, 22 bp, Artificial Sequence
  Probe
tggttagcactctggactttga

SEQ ID NO: 12208 - DNA, 17 bp, Artificial Sequence
  Probe
tggttaggattcggcgc

SEQ ID NO: 12209 - DNA, 18 bp, Artificial Sequence
  Probe
tggttaggattcggcgct

SEQ ID NO: 12210 - DNA, 19 bp, Artificial Sequence
  Probe
tggttaggattcggcgctc

SEQ ID NO: 12211 - DNA, 21 bp, Artificial Sequence
  Probe
tggttaggattcggcgctctc

SEQ ID NO: 12212 - DNA, 22 bp, Artificial Sequence
  Probe
tggttaggattcggcgctctca

SEQ ID NO: 12213 - DNA, 23 bp, Artificial Sequence
  Probe
tggttaggattcggcgctctcac

SEQ ID NO: 12214 - DNA, 24 bp, Artificial Sequence
  Probe
tggttaggattcggcgctctcacc

SEQ ID NO: 12215 - DNA, 27 bp, Artificial Sequence
  Probe
tggttaggattcggcgctctcaccgcc

SEQ ID NO: 12216 - DNA, 15 bp, Artificial Sequence
  Probe
tggttagtactctgc

SEQ ID NO: 12217 - DNA, 16 bp, Artificial Sequence
  Probe
tggttagtactctgcg

SEQ ID NO: 12218 - DNA, 19 bp, Artificial Sequence
  Probe
tggttagtactctgcgctg

SEQ ID NO: 12219 - DNA, 21 bp, Artificial Sequence
  Probe
tggttagtactctgcgttgtg

SEQ ID NO: 12220 - DNA, 22 bp, Artificial Sequence
  Probe
tggttagtactctgcgttgtgg

SEQ ID NO: 12221 - DNA, 23 bp, Artificial Sequence
  Probe
tggttagtactctgcgttgtggc

SEQ ID NO: 12222 - DNA, 24 bp, Artificial Sequence
  Probe
tggttagtactctgcgttgtggcc

SEQ ID NO: 12223 - DNA, 25 bp, Artificial Sequence
  Probe
tggttagtactctgcgttgtggccg

SEQ ID NO: 12224 - DNA, 26 bp, Artificial Sequence
  Probe
tggttagtactctgcgttgtggccgc

SEQ ID NO: 12225 - DNA, 15 bp, Artificial Sequence
  Probe
tggttcagtggtaga

SEQ ID NO: 12226 - DNA, 16 bp, Artificial Sequence
  Probe
tggttcagtggtagaa

SEQ ID NO: 12227 - DNA, 20 bp, Artificial Sequence
  Probe
tggttcagtggtagaattct

SEQ ID NO: 12228 - DNA, 21 bp, Artificial Sequence
  Probe
tggttcagtggtagaattctc

SEQ ID NO: 12229 - DNA, 22 bp, Artificial Sequence
  Probe
tggttcagtggtagaattctcg

SEQ ID NO: 12230 - DNA, 23 bp, Artificial Sequence
  Probe
tggttcagtggtagaattctcgc

SEQ ID NO: 12231 - DNA, 24 bp, Artificial Sequence
  Probe
tggttcagtggtagaattctcgcc

SEQ ID NO: 12232 - DNA, 25 bp, Artificial Sequence
  Probe
tggttcagtggtagaattctcgcct

SEQ ID NO: 12233 - DNA, 26 bp, Artificial Sequence
  Probe
tggttcagtggtagaattctcgcctg

SEQ ID NO: 12234 - DNA, 27 bp, Artificial Sequence
  Probe
tggttcagtggtagaattctcgcctgc

SEQ ID NO: 12235 - DNA, 21 bp, Artificial Sequence
  Probe
tggttcgatcccgggtttcgg

SEQ ID NO: 12236 - DNA, 22 bp, Artificial Sequence
  Probe
tggttcgattccggctcgaagg

SEQ ID NO: 12237 - DNA, 24 bp, Artificial Sequence
  Probe
tggttcgattccggctcgaaggac

SEQ ID NO: 12238 - DNA, 23 bp, Artificial Sequence
  Probe
tggttgtagtccgtgcgagaata

SEQ ID NO: 12239 - DNA, 22 bp, Artificial Sequence
  Probe
tggtttttcatatcattggtcg

SEQ ID NO: 12240 - DNA, 28 bp, Artificial Sequence
  Probe
tggtttttcatatcattggtcgtggttg

SEQ ID NO: 12241 - DNA, 29 bp, Artificial Sequence
  Probe
tggtttttcatatcattggtcgtggttgt

SEQ ID NO: 12242 - DNA, 28 bp, Artificial Sequence
  Probe
tgtaaatatagtttaaccaaaacatcag

SEQ ID NO: 12243 - DNA, 19 bp, Artificial Sequence
  Probe
tgtaatggttagcactctg

SEQ ID NO: 12244 - DNA, 20 bp, Artificial Sequence
  Probe
tgtaatggttagcactctgg

SEQ ID NO: 12245 - DNA, 21 bp, Artificial Sequence
  Probe
tgtaatggttagcactctgga

SEQ ID NO: 12246 - DNA, 22 bp, Artificial Sequence
  Probe
tgtaatggttagcactctggac

SEQ ID NO: 12247 - DNA, 23 bp, Artificial Sequence
  Probe
tgtaatggttagcactctggact

SEQ ID NO: 12248 - DNA, 24 bp, Artificial Sequence
  Probe
tgtaatggttagcactctggactc

SEQ ID NO: 12249 - DNA, 25 bp, Artificial Sequence
  Probe
tgtaatggttagcactctggactct

SEQ ID NO: 12250 - DNA, 27 bp, Artificial Sequence
  Probe
tgtaatggttagcactctggactctga

SEQ ID NO: 12251 - DNA, 24 bp, Artificial Sequence
  Probe
tgtaatggttagcactctggactt

SEQ ID NO: 12252 - DNA, 25 bp, Artificial Sequence
  Probe
tgtaatggttagcactctggacttt

SEQ ID NO: 12253 - DNA, 19 bp, Artificial Sequence
  Probe
tgtagtccgtgcgagaata

SEQ ID NO: 12254 - DNA, 19 bp, Artificial Sequence
  Probe
tgtagtcgtggccgagtgg

SEQ ID NO: 12255 - DNA, 20 bp, Artificial Sequence
  Probe
tgtgaatctgacaacagagg

SEQ ID NO: 12256 - DNA, 23 bp, Artificial Sequence
  Probe
tgtgaatctgacaacagaggctt

SEQ ID NO: 12257 - DNA, 22 bp, Artificial Sequence
  Probe
tgtgctccggagttacctcgtt

SEQ ID NO: 12258 - DNA, 23 bp, Artificial Sequence
  Probe
tgtgctccggagttacctcgttt

SEQ ID NO: 12259 - DNA, 24 bp, Artificial Sequence
  Probe
tgtgctccggagttacctcgtttt

SEQ ID NO: 12260 - DNA, 26 bp, Artificial Sequence
  Probe
tgtgggtttaagtcccattggtctag

SEQ ID NO: 12261 - DNA, 15 bp, Artificial Sequence
  Probe
tgtttagacgggctc

SEQ ID NO: 12262 - DNA, 17 bp, Artificial Sequence
  Probe
tgtttagacgggctcac

SEQ ID NO: 12263 - DNA, 19 bp, Artificial Sequence
  Probe
tgtttagacgggctcacat

SEQ ID NO: 12264 - DNA, 19 bp, Artificial Sequence
  Probe
ttaaagactttttctctga

SEQ ID NO: 12265 - DNA, 20 bp, Artificial Sequence
  Probe
ttaaagactttttctctgat

SEQ ID NO: 12266 - DNA, 22 bp, Artificial Sequence
  Probe
ttaaccgaaaggttggtggttc

SEQ ID NO: 12267 - DNA, 23 bp, Artificial Sequence
  Probe
ttaaccgaaaggttggtggttcg

SEQ ID NO: 12268 - DNA, 24 bp, Artificial Sequence
  Probe
ttaaccgaaaggttggtggttcga

SEQ ID NO: 12269 - DNA, 15 bp, Artificial Sequence
  Probe
ttaacttgaccgctc

SEQ ID NO: 12270 - DNA, 16 bp, Artificial Sequence
  Probe
ttaacttgaccgctct

SEQ ID NO: 12271 - DNA, 17 bp, Artificial Sequence
  Probe
ttaacttgaccgctctg

SEQ ID NO: 12272 - DNA, 18 bp, Artificial Sequence
  Probe
ttaacttgaccgctctga

SEQ ID NO: 12273 - DNA, 19 bp, Artificial Sequence
  Probe
ttaacttgaccgctctgag

SEQ ID NO: 12274 - DNA, 20 bp, Artificial Sequence
  Probe
ttaacttgaccgctctgagc

SEQ ID NO: 12275 - DNA, 21 bp, Artificial Sequence
  Probe
ttaacttgaccgctctgagct

SEQ ID NO: 12276 - DNA, 30 bp, Artificial Sequence
  Probe
ttaagagaaccaacacctctttacagtgaa

SEQ ID NO: 12277 - DNA, 21 bp, Artificial Sequence
  Probe
ttaaggctccagtctcttcgg

SEQ ID NO: 12278 - DNA, 22 bp, Artificial Sequence
  Probe
ttaaggctccagtctcttcggg

SEQ ID NO: 12279 - DNA, 18 bp, Artificial Sequence
  Probe
ttaatctcagggtcgtgg

SEQ ID NO: 12280 - DNA, 29 bp, Artificial Sequence
  Probe
ttacacttaggagatttcaacttaacttg

SEQ ID NO: 12281 - DNA, 15 bp, Artificial Sequence
  Probe
ttagcactctggact

SEQ ID NO: 12282 - DNA, 16 bp, Artificial Sequence
  Probe
ttagcactctggactc

SEQ ID NO: 12283 - DNA, 17 bp, Artificial Sequence
  Probe
ttagcactctggactct

SEQ ID NO: 12284 - DNA, 18 bp, Artificial Sequence
  Probe
ttagcactctggactctg

SEQ ID NO: 12285 - DNA, 19 bp, Artificial Sequence
  Probe
ttagcactctggactctga

SEQ ID NO: 12286 - DNA, 20 bp, Artificial Sequence
  Probe
ttagcactctggactctgaa

SEQ ID NO: 12287 - DNA, 24 bp, Artificial Sequence
  Probe
ttagcactctggactctgaatcca

SEQ ID NO: 12288 - DNA, 26 bp, Artificial Sequence
  Probe
ttagcactctggactctgaatccagc

SEQ ID NO: 12289 - DNA, 27 bp, Artificial Sequence
  Probe
ttagcactctggactctgaatccagcg

SEQ ID NO: 12290 - DNA, 18 bp, Artificial Sequence
  Probe
ttagcactctggactttg

SEQ ID NO: 12291 - DNA, 19 bp, Artificial Sequence
  Probe
ttagcactctggactttga

SEQ ID NO: 12292 - DNA, 20 bp, Artificial Sequence
  Probe
ttagcactctggactttgaa

SEQ ID NO: 12293 - DNA, 21 bp, Artificial Sequence
  Probe
ttagcactctggactttgaat

SEQ ID NO: 12294 - DNA, 22 bp, Artificial Sequence
  Probe
ttagcactctggactttgaatc

SEQ ID NO: 12295 - DNA, 23 bp, Artificial Sequence
  Probe
ttagcactctggactttgaatcc

SEQ ID NO: 12296 - DNA, 26 bp, Artificial Sequence
  Probe
ttaggagatttcaacttaacttgacc

SEQ ID NO: 12297 - DNA, 27 bp, Artificial Sequence
  Probe
ttaggagatttcaacttaacttgaccg

SEQ ID NO: 12298 - DNA, 29 bp, Artificial Sequence
  Probe
ttaggagatttcaacttaacttgaccgct

SEQ ID NO: 12299 - DNA, 30 bp, Artificial Sequence; identical to SEQ ID NO: 8367
  Probe

SEQ ID NO: 12300 - DNA, 23 bp, Artificial Sequence
  Probe
ttaggatgcgagaggtcccgggt

SEQ ID NO: 12301 - DNA, 19 bp, Artificial Sequence
  Probe
ttagggtgcgagaggtccc

SEQ ID NO: 12302 - DNA, 20 bp, Artificial Sequence
  Probe
ttagggtgcgagaggtcccg

SEQ ID NO: 12303 - DNA, 21 bp, Artificial Sequence
  Probe
ttagggtgcgagaggtcccgg

SEQ ID NO: 12304 - DNA, 22 bp, Artificial Sequence
  Probe
ttagggtgcgagaggtcccggg

SEQ ID NO: 12305 - DNA, 23 bp, Artificial Sequence
  Probe
ttagggtgcgagaggtcccgggt

SEQ ID NO: 12306 - DNA, 24 bp, Artificial Sequence
  Probe
ttagggtgcgagaggtcccgggtt

SEQ ID NO: 12307 - DNA, 30 bp, Artificial Sequence
  Probe
ttaggtcgctggttcgattccggctcgaag

SEQ ID NO: 12308 - DNA, 16 bp, Artificial Sequence
  Probe
ttagtactctgcgttg

SEQ ID NO: 12309 - DNA, 17 bp, Artificial Sequence
  Probe
ttagtactctgcgttgt

SEQ ID NO: 12310 - DNA, 20 bp, Artificial Sequence
  Probe
ttagtactctgcgttgtggc

SEQ ID NO: 12311 - DNA, 21 bp, Artificial Sequence
  Probe
ttagtactctgcgttgtggcc

SEQ ID NO: 12312 - DNA, 22 bp, Artificial Sequence
  Probe
ttagtactctgcgttgtggccg

SEQ ID NO: 12313 - DNA, 23 bp, Artificial Sequence
  Probe
ttagtactctgcgttgtggccgc

SEQ ID NO: 12314 - DNA, 21 bp, Artificial Sequence
  Probe
ttagtggtagaattctcgcct

SEQ ID NO: 12315 - DNA, 29 bp, Artificial Sequence
  Probe
ttcaaaggttccgggttcgagtcccggcg

SEQ ID NO: 12316 - DNA, 30 bp, Artificial Sequence
  Probe
ttcaaaggttccgggttcgagtcccggcgg

SEQ ID NO: 12317 - DNA, 30 bp, Artificial Sequence
  Probe
ttcaaaggttgtgggttcgaatcccaccag

SEQ ID NO: 12318 - DNA, 30 bp, Artificial Sequence
  Probe
ttcaaaggttgtgggttcgagtcccaccag

SEQ ID NO: 12319 - DNA, 17 bp, Artificial Sequence
  Probe
ttcaaatcccggacgag

SEQ ID NO: 12320 - DNA, 23 bp, Artificial Sequence
  Probe
ttcaaatctcggtggaacctgca

SEQ ID NO: 12321 - DNA, 18 bp, Artificial Sequence
  Probe
ttcaacttaacttgaccg

SEQ ID NO: 12322 - DNA, 23 bp, Artificial Sequence
  Probe
ttcaacttaacttgaccgctctg

SEQ ID NO: 12323 - DNA, 24 bp, Artificial Sequence
  Probe
ttcaacttaacttgaccgctctga

SEQ ID NO: 12324 - DNA, 25 bp, Artificial Sequence
  Probe
ttcaacttaacttgaccgctctgag

SEQ ID NO: 12325 - DNA, 26 bp, Artificial Sequence
  Probe
ttcaacttaacttgaccgctctgagc

SEQ ID NO: 12326 - DNA, 23 bp, Artificial Sequence
  Probe
ttcaatccccggcacctccacca

SEQ ID NO: 12327 - DNA, 23 bp, Artificial Sequence
  Probe
ttcaattcccggtcagggaacca

SEQ ID NO: 12328 - DNA, 17 bp, Artificial Sequence
  Probe
ttcaggtcgcagtctcc

SEQ ID NO: 12329 - DNA, 17 bp, Artificial Sequence
  Probe
ttcagtggtagaattct

SEQ ID NO: 12330 - DNA, 18 bp, Artificial Sequence
  Probe
ttcagtggtagaattctc

SEQ ID NO: 12331 - DNA, 19 bp, Artificial Sequence
  Probe
ttcagtggtagaattctcg

SEQ ID NO: 12332 - DNA, 20 bp, Artificial Sequence
  Probe
ttcagtggtagaattctcgc

SEQ ID NO: 12333 - DNA, 21 bp, Artificial Sequence
  Probe
ttcagtggtagaattctcgcc

SEQ ID NO: 12334 - DNA, 22 bp, Artificial Sequence
  Probe
ttcagtggtagaattctcgcct

SEQ ID NO: 12335 - DNA, 23 bp, Artificial Sequence
  Probe
ttcagtggtagaattctcgcctg

SEQ ID NO: 12336 - DNA, 24 bp, Artificial Sequence
  Probe
ttcagtggtagaattctcgcctgc

SEQ ID NO: 12337 - DNA, 30 bp, Artificial Sequence
  Probe
ttcagttgatgcagagtggggttttgcagt

SEQ ID NO: 12338 - DNA, 30 bp, Artificial Sequence
  Probe
ttcatatcattggtcgtggttgtagtccgt

SEQ ID NO: 12339 - DNA, 27 bp, Artificial Sequence
  Probe
ttccatggtgtaatggttagcactctg

SEQ ID NO: 12340 - DNA, 30 bp, Artificial Sequence
  Probe
ttccatggtgtaatggttagcactctggac

SEQ ID NO: 12341 - DNA, 23 bp, Artificial Sequence
  Probe
ttcccatatggtctagcggttag

SEQ ID NO: 12342 - DNA, 18 bp, Artificial Sequence
  Probe
ttccccgacggggaggca

SEQ ID NO: 12343 - DNA, 18 bp, Artificial Sequence
  Probe
ttcccggtcagggaacca

SEQ ID NO: 12344 - DNA, 30 bp, Artificial Sequence
  Probe
ttccctggtggtctagtggttaggattcgg

SEQ ID NO: 12345 - DNA, 15 bp, Artificial Sequence
  Probe
ttccggctcgaagga

SEQ ID NO: 12346 - DNA, 16 bp, Artificial Sequence
  Probe
ttccggctcgaaggac

SEQ ID NO: 12347 - DNA, 17 bp, Artificial Sequence
  Probe
ttccggctcgaaggact

SEQ ID NO: 12348 - DNA, 18 bp, Artificial Sequence
  Probe
ttccggctcgaaggactt

SEQ ID NO: 12349 - DNA, 17 bp, Artificial Sequence
  Probe
ttccggctcgaaggaga

SEQ ID NO: 12350 - DNA, 17 bp, Artificial Sequence
  Probe
ttccggctcgaaggagc

SEQ ID NO: 12351 - DNA, 17 bp, Artificial Sequence
  Probe
ttccgtgggtttgtttt

SEQ ID NO: 12352 - DNA, 18 bp, Artificial Sequence
  Probe
ttccgtgggtttgttttt

SEQ ID NO: 12353 - DNA, 21 bp, Artificial Sequence
  Probe
ttcgaaaccgggcggaaacac

SEQ ID NO: 12354 - DNA, 22 bp, Artificial Sequence
  Probe
ttcgaaaccgggcggaaacacc

SEQ ID NO: 12355 - DNA, 23 bp, Artificial Sequence
  Probe
ttcgaaaccgggcggaaacacct

SEQ ID NO: 12356 - DNA, 21 bp, Artificial Sequence
  Probe
ttcgactcctggctggctcgc

SEQ ID NO: 12357 - DNA, 21 bp, Artificial Sequence
  Probe
ttcgatcccgggtttcggcac

SEQ ID NO: 12358 - DNA, 21 bp, Artificial Sequence
  Probe
ttcgattccccgacggggaga

SEQ ID NO: 12359 - DNA, 21 bp, Artificial Sequence
  Probe
ttcgattccccgacggggagg

SEQ ID NO: 12360 - DNA, 23 bp, Artificial Sequence
  Probe
ttcgattccccgacggggaggca

SEQ ID NO: 12361 - DNA, 23 bp, Artificial Sequence
  Probe
ttcgattcccggtcagggaacaa

SEQ ID NO: 12362 - DNA, 23 bp, Artificial Sequence
  Probe
ttcgattcccggtcatggaacca

SEQ ID NO: 12363 - DNA, 21 bp, Artificial Sequence
  Probe
ttcgattccggctcgaaggac

SEQ ID NO: 12364 - DNA, 23 bp, Artificial Sequence
  Probe
ttcgattcctggtcagggaacca

SEQ ID NO: 12365 - DNA, 19 bp, Artificial Sequence
  Probe
ttcgggtgcgagaggtccc

SEQ ID NO: 12366 - DNA, 20 bp, Artificial Sequence
  Probe
ttcgggtgcgagaggtcccg

SEQ ID NO: 12367 - DNA, 21 bp, Artificial Sequence
  Probe
ttcgggtgcgagaggtcccgg

SEQ ID NO: 12368 - DNA, 22 bp, Artificial Sequence
  Probe
ttcgggtgcgagaggtcccggg

SEQ ID NO: 12369 - DNA, 23 bp, Artificial Sequence
  Probe
ttcgggtgcgagaggtcccgggt

SEQ ID NO: 12370 - DNA, 24 bp, Artificial Sequence
  Probe
ttcgggtgcgagaggtcccgggtt

SEQ ID NO: 12371 - DNA, 15 bp, Artificial Sequence
  Probe
ttcgtctgtaatttt

SEQ ID NO: 12372 - DNA, 15 bp, Artificial Sequence
  Probe
ttctcgcctgccacg

SEQ ID NO: 12373 - DNA, 17 bp, Artificial Sequence
  Probe
ttctgacacattcgttt

SEQ ID NO: 12374 - DNA, 30 bp, Artificial Sequence
  Probe
ttcttgcgacccgggttcgattcccgggcg

SEQ ID NO: 12375 - DNA, 17 bp, Artificial Sequence
  Probe
ttgccatgttaacgttt

SEQ ID NO: 12376 - DNA, 18 bp, Artificial Sequence
  Probe
ttgccatgttaacgtttt

SEQ ID NO: 12377 - DNA, 22 bp, Artificial Sequence
  Probe
ttgcgtgttcaagtcacgtcgg

SEQ ID NO: 12378 - DNA, 26 bp, Artificial Sequence
  Probe
ttggcctcctaagccagggattgtgg

SEQ ID NO: 12379 - DNA, 18 bp, Artificial Sequence
  Probe
ttgggtccgagaggtccc

SEQ ID NO: 12380 - DNA, 21 bp, Artificial Sequence
  Probe
ttgggtccgagaggtcccggg

SEQ ID NO: 12381 - DNA, 23 bp, Artificial Sequence
  Probe
ttgggtgcgagaggtcccgggtt

SEQ ID NO: 12382 - DNA, 21 bp, Artificial Sequence
  Probe
ttgggtgctaatggtggagtt

SEQ ID NO: 12383 - DNA, 22 bp, Artificial Sequence
  Probe
ttgggtgctaatggtggagtta

SEQ ID NO: 12384 - DNA, 22 bp, Artificial Sequence
  Probe
ttggtagagcggaggactgtag

SEQ ID NO: 12385 - DNA, 15 bp, Artificial Sequence
  Probe
ttggtcgtggttgta

SEQ ID NO: 12386 - DNA, 16 bp, Artificial Sequence
  Probe
ttggtcgtggttgtag

SEQ ID NO: 12387 - DNA, 17 bp, Artificial Sequence
  Probe
ttggtcgtggttgtagt

SEQ ID NO: 12388 - DNA, 28 bp, Artificial Sequence
  Probe
ttggtcgtggttgtagtccgtgcgagaa

SEQ ID NO: 12389 - DNA, 24 bp, Artificial Sequence
  Probe
ttggtctaggggtatgattctcgc

SEQ ID NO: 12390 - DNA, 18 bp, Artificial Sequence
  Probe
ttggtggttcagtggtag

SEQ ID NO: 12391 - DNA, 19 bp, Artificial Sequence
  Probe
ttggtggttcagtggtaga

SEQ ID NO: 12392 - DNA, 20 bp, Artificial Sequence
  Probe
ttggtggttcagtggtagaa

SEQ ID NO: 12393 - DNA, 21 bp, Artificial Sequence
  Probe
ttggtggttcagtggtagaat

SEQ ID NO: 12394 - DNA, 22 bp, Artificial Sequence
  Probe
ttggtggttcagtggtagaatt

SEQ ID NO: 12395 - DNA, 23 bp, Artificial Sequence
  Probe
ttggtggttcagtggtagaattc

SEQ ID NO: 12396 - DNA, 24 bp, Artificial Sequence
  Probe
ttggtggttcagtggtagaattct

SEQ ID NO: 12397 - DNA, 25 bp, Artificial Sequence
  Probe
ttggtggttcagtggtagaattctc

SEQ ID NO: 12398 - DNA, 26 bp, Artificial Sequence
  Probe
ttggtggttcagtggtagaattctcg

SEQ ID NO: 12399 - DNA, 27 bp, Artificial Sequence
  Probe
ttggtggttcagtggtagaattctcgc

SEQ ID NO: 12400 - DNA, 28 bp, Artificial Sequence
  Probe
ttggtggttcagtggtagaattctcgcc

SEQ ID NO: 12401 - DNA, 29 bp, Artificial Sequence
  Probe
ttggtggttcagtggtagaattctcgcct

SEQ ID NO: 12402 - DNA, 30 bp, Artificial Sequence; identical to SEQ ID NO: 8491
  Probe

SEQ ID NO: 12403 - DNA, 29 bp, Artificial Sequence
  Probe
ttggtggttcgagcccacccagggacgcc

SEQ ID NO: 12404 - DNA, 19 bp, Artificial Sequence
  Probe
ttgtaaaccaggggtcgcg

SEQ ID NO: 12405 - DNA, 22 bp, Artificial Sequence
  Probe
ttgtaaaccaggggtcgcgagt

SEQ ID NO: 12406 - DNA, 20 bp, Artificial Sequence
  Probe
ttgtagtccgtgcgagaata

SEQ ID NO: 12407 - DNA, 15 bp, Artificial Sequence
  Probe
ttgtgaatctgacaa

SEQ ID NO: 12408 - DNA, 16 bp, Artificial Sequence
  Probe
ttgtgaatctgacaac

SEQ ID NO: 12409 - DNA, 17 bp, Artificial Sequence
  Probe
ttgtgaatctgacaaca

SEQ ID NO: 12410 - DNA, 18 bp, Artificial Sequence
  Probe
ttgtgaatctgacaacag

SEQ ID NO: 12411 - DNA, 19 bp, Artificial Sequence
  Probe
ttgtgaatctgacaacaga

SEQ ID NO: 12412 - DNA, 20 bp, Artificial Sequence
  Probe
ttgtgaatctgacaacagag

SEQ ID NO: 12413 - DNA, 21 bp, Artificial Sequence
  Probe
ttgtgaatctgacaacagagg

SEQ ID NO: 12414 - DNA, 22 bp, Artificial Sequence
  Probe
ttgtgaatctgacaacagaggc

SEQ ID NO: 12415 - DNA, 23 bp, Artificial Sequence
  Probe
ttgtgaatctgacaacagaggct

SEQ ID NO: 12416 - DNA, 24 bp, Artificial Sequence
  Probe
ttgtgaatctgacaacagaggctt

SEQ ID NO: 12417 - DNA, 25 bp, Artificial Sequence
  Probe
ttgtgaatctgacaacagaggctta

SEQ ID NO: 12418 - DNA, 27 bp, Artificial Sequence
  Probe
ttgtgaatctgacaacagaggcttacg

SEQ ID NO: 12419 - DNA, 30 bp, Artificial Sequence
  Probe
ttgtgaatctgacaacagaggcttacgacc

SEQ ID NO: 12420 - DNA, 23 bp, Artificial Sequence
  Probe
ttgtgaggacaatggcacggcaa

SEQ ID NO: 12421 - DNA, 24 bp, Artificial Sequence
  Probe
ttgtgaggacaatggcacggcaag

SEQ ID NO: 12422 - DNA, 25 bp, Artificial Sequence
  Probe
ttgtgaggacaatggcacggcaagg

SEQ ID NO: 12423 - DNA, 30 bp, Artificial Sequence
  Probe
ttgtgaggacaatggcacggcaaggggagt

SEQ ID NO: 12424 - DNA, 22 bp, Artificial Sequence
  Probe
ttgtggccgcagcaacctcggt

SEQ ID NO: 12425 - DNA, 20 bp, Artificial Sequence
  Probe
ttgtgggaacaatggcacgg

SEQ ID NO: 12426 - DNA, 21 bp, Artificial Sequence
  Probe
ttgtgggaacaatggcacggc

SEQ ID NO: 12427 - DNA, 22 bp, Artificial Sequence
  Probe
ttgtgggaacaatggcacggca

SEQ ID NO: 12428 - DNA, 23 bp, Artificial Sequence
  Probe
ttgtgggaacaatggcacggcaa

SEQ ID NO: 12429 - DNA, 24 bp, Artificial Sequence
  Probe
ttgtgggaacaatggcacggcaag

SEQ ID NO: 12430 - DNA, 25 bp, Artificial Sequence
  Probe
ttgtgggaacaatggcacggcaagg

SEQ ID NO: 12431 - DNA, 30 bp, Artificial Sequence
  Probe
ttgtgggaacaatggcacggcaaggggctc

SEQ ID NO: 12432 - DNA, 23 bp, Artificial Sequence
  Probe
ttgtggtccagtggtagaattct

SEQ ID NO: 12433 - DNA, 24 bp, Artificial Sequence
  Probe
ttgtggtccagtggtagaattctc

SEQ ID NO: 12434 - DNA, 15 bp, Artificial Sequence
  Probe
tttagacgggctcac

SEQ ID NO: 12435 - DNA, 21 bp, Artificial Sequence
  Probe
tttaggctccagtctcttcgg

SEQ ID NO: 12436 - DNA, 22 bp, Artificial Sequence
  Probe
tttaggctccagtctcttcggg

SEQ ID NO: 12437 - DNA, 18 bp, Artificial Sequence
  Probe
tttcaacttaacttgacc

SEQ ID NO: 12438 - DNA, 19 bp, Artificial Sequence
  Probe
tttcaacttaacttgaccg

SEQ ID NO: 12439 - DNA, 22 bp, Artificial Sequence
  Probe
tttcaacttaacttgaccgctc

SEQ ID NO: 12440 - DNA, 24 bp, Artificial Sequence
  Probe
tttcaacttaacttgaccgctctg

SEQ ID NO: 12441 - DNA, 25 bp, Artificial Sequence
  Probe
tttcaacttaacttgaccgctctga

SEQ ID NO: 12442 - DNA, 26 bp, Artificial Sequence
  Probe
tttcaacttaacttgaccgctctgag

SEQ ID NO: 12443 - DNA, 27 bp, Artificial Sequence
  Probe
tttcaacttaacttgaccgctctgagc

SEQ ID NO: 12444 - DNA, 19 bp, Artificial Sequence
  Probe
tttccgtagtgtagtggtc

SEQ ID NO: 12445 - DNA, 19 bp, Artificial Sequence
  Probe
tttgcatgtatgaggcccc

SEQ ID NO: 12446 - DNA, 23 bp, Artificial Sequence
  Probe
tttgcatgtatgaggccccgggt

SEQ ID NO: 12447 - DNA, 19 bp, Artificial Sequence
  Probe
tttgggtccgagaggtccc

SEQ ID NO: 12448 - DNA, 20 bp, Artificial Sequence
  Probe
tttgggtccgagaggtcccg

SEQ ID NO: 12449 - DNA, 21 bp, Artificial Sequence
  Probe
tttgggtccgagaggtcccgg

SEQ ID NO: 12450 - DNA, 23 bp, Artificial Sequence
  Probe
tttgggtccgagaggtcccgggt

SEQ ID NO: 12451 - DNA, 19 bp, Artificial Sequence
  Probe
tttgggtgcgagaggtccc

SEQ ID NO: 12452 - DNA, 20 bp, Artificial Sequence
  Probe
tttgggtgcgagaggtcccg

SEQ ID NO: 12453 - DNA, 21 bp, Artificial Sequence
  Probe
tttgggtgcgagaggtcccgg

SEQ ID NO: 12454 - DNA, 22 bp, Artificial Sequence
  Probe
tttgggtgcgagaggtcccggg

SEQ ID NO: 12455 - DNA, 23 bp, Artificial Sequence
  Probe
tttgggtgcgagaggtcccgggt

SEQ ID NO: 12456 - DNA, 24 bp, Artificial Sequence
  Probe
tttgggtgcgagaggtcccgggtt

SEQ ID NO: 12457 - DNA, 24 bp, Artificial Sequence
  Probe
tttgtggtccagtggtagaattct

SEQ ID NO: 12458 - DNA, 30 bp, Artificial Sequence
  Probe
ttttcatatcattggtcgtggttgtagtcc

SEQ ID NO: 12459 - DNA, 30 bp, Artificial Sequence
  Probe
tttttcatatcattggtcgtggttgtagtc

SEQ ID NO: 12460 - DNA, 16 bp, Artificial Sequence
  Probe
tttttcccggcggcgg

SEQ ID NO: 12461 - DNA, 17 bp, Artificial Sequence
  Probe
ttttttcccggcggcgg

SEQ ID NO: 12462 - DNA, 50 bp, Artificial Sequence; identical to SEQ ID NO: 4
  Probe

SEQ ID NO: 12463 - DNA, 50 bp, Artificial Sequence; identical to SEQ ID NO: 14
  Probe

SEQ ID NO: 12464 - DNA, 28 bp, Artificial Sequence
  Probe
aaagacaggggttaggcctctttttacc

SEQ ID NO: 12465 - DNA, 28 bp, Artificial Sequence
  Probe
aaagcaatacactgaaaatgtttagacg

SEQ ID NO: 12466 - DNA, 36 bp, Artificial Sequence; identical to SEQ ID NO: 21
  Probe

SEQ ID NO: 12467 - DNA, 44 bp, Artificial Sequence; identical to SEQ ID NO: 22
  Probe

SEQ ID NO: 12468 - DNA, 49 bp, Artificial Sequence; identical to SEQ ID NO: 24
  Probe

SEQ ID NO: 12469 - DNA, 50 bp, Artificial Sequence; identical to SEQ ID NO: 25
  Probe

SEQ ID NO: 12470 - DNA, 30 bp, Artificial Sequence
  Probe
aaaggttggtggttcgagcccacccaggga

SEQ ID NO: 12471 - DNA, 34 bp, Artificial Sequence; identical to SEQ ID NO: 33
  Probe

SEQ ID NO: 12472 - DNA, 35 bp, Artificial Sequence; identical to SEQ ID NO: 34
  Probe

SEQ ID NO: 12473 - DNA, 41 bp, Artificial Sequence; identical to SEQ ID NO: 37
  Probe

SEQ ID NO: 12474 - DNA, 33 bp, Artificial Sequence; identical to SEQ ID NO: 2047
  Probe

SEQ ID NO: 12475 - DNA, 50 bp, Artificial Sequence; identical to SEQ ID NO: 42
  Probe

SEQ ID NO: 12476 - DNA, 50 bp, Artificial Sequence; identical to SEQ ID NO: 47
  Probe

SEQ ID NO: 12477 - DNA, 17 bp, Artificial Sequence
  Probe
aaccggagatgaaaacc

SEQ ID NO: 12478 - DNA, 20 bp, Artificial Sequence
  Probe
aaccggagatgaaaaccttt

SEQ ID NO: 12479 - DNA, 27 bp, Artificial Sequence
  Probe
aaccggagatgaaaacctttttccaag

SEQ ID NO: 12480 - DNA, 29 bp, Artificial Sequence
  Probe
aaccggagatgaaaacctttttccaagga

SEQ ID NO: 12481 - DNA, 31 bp, Artificial Sequence; identical to SEQ ID NO: 53
  Probe

SEQ ID NO: 12482 - DNA, 16 bp, Artificial Sequence
  Probe
aaccgggcggaaacac

SEQ ID NO: 12483 - DNA, 17 bp, Artificial Sequence
  Probe
aaccgggcggaaacacc

SEQ ID NO: 12484 - DNA, 36 bp, Artificial Sequence; identical to SEQ ID NO: 56
  Probe

SEQ ID NO: 12485 - DNA, 29 bp, Artificial Sequence
  Probe
aactagttttgacaacattcaaaaaagag

SEQ ID NO: 12486 - DNA, 40 bp, Artificial Sequence
  Probe
aacttagcattaaccttttaagttaaagattaagagaacc

SEQ ID NO: 12487 - DNA, 41 bp, Artificial Sequence
  Probe
aacttagcattaaccttttaagttaaagattaagagaacca

SEQ ID NO: 12488 - DNA, 19 bp, Artificial Sequence
  Probe
aactttacagtcagaggtt

SEQ ID NO: 12489 - DNA, 31 bp, Artificial Sequence; identical to SEQ ID NO: 65
  Probe

SEQ ID NO: 12490 - DNA, 33 bp, Artificial Sequence; identical to SEQ ID NO: 2225
  Probe

SEQ ID NO: 12491 - DNA, 28 bp, Artificial Sequence
  Probe
aagacaggggttaggcctctttttacca

SEQ ID NO: 12492 - DNA, 27 bp, Artificial Sequence
  Probe
aagcaatacactgaaaatgtttagacg

SEQ ID NO: 12493 - DNA, 17 bp, Artificial Sequence
  Probe
aagctcacaagaactgc

SEQ ID NO: 12494 - DNA, 18 bp, Artificial Sequence
  Probe
aagctcacaagaactgct

SEQ ID NO: 12495 - DNA, 50 bp, Artificial Sequence; identical to SEQ ID NO: 84
  Probe

SEQ ID NO: 12496 - DNA, 29 bp, Artificial Sequence
  Probe
aaggttggtggttcgagcccacccaggga

SEQ ID NO: 12497 - DNA, 30 bp, Artificial Sequence; identical to SEQ ID NO: 2390
  Probe

SEQ ID NO: 12498 - DNA, 31 bp, Artificial Sequence; identical to SEQ ID NO: 86
  Probe

SEQ ID NO: 12499 - DNA, 32 bp, Artificial Sequence; identical to SEQ ID NO: 2391
  Probe

SEQ ID NO: 12500 - DNA, 33 bp, Artificial Sequence; identical to SEQ ID NO: 2392
  Probe

SEQ ID NO: 12501 - DNA, 20 bp, Artificial Sequence
  Probe
aatccagcgatccgagttca

SEQ ID NO: 12502 - DNA, 36 bp, Artificial Sequence; identical to SEQ ID NO: 93
  Probe

SEQ ID NO: 12503 - DNA, 33 bp, Artificial Sequence; identical to SEQ ID NO: 2439
  Probe

SEQ ID NO: 12504 - DNA, 35 bp, Artificial Sequence; identical to SEQ ID NO: 94
  Probe

SEQ ID NO: 12505 - DNA, 36 bp, Artificial Sequence; identical to SEQ ID NO: 95
  Probe

SEQ ID NO: 12506 - DNA, 37 bp, Artificial Sequence; identical to SEQ ID NO: 96
  Probe

SEQ ID NO: 12507 - DNA, 19 bp, Artificial Sequence
  Probe
aatccccggcacctccacc

SEQ ID NO: 12508 - DNA, 20 bp, Artificial Sequence
  Probe
aatccccggcacctccacca

SEQ ID NO: 12509 - DNA, 17 bp, Artificial Sequence
  Probe
aatccgggtgccccctc

SEQ ID NO: 12510 - DNA, 16 bp, Artificial Sequence
  Probe
aatcgcataaaactta

SEQ ID NO: 12511 - DNA, 30 bp, Artificial Sequence; identical to SEQ ID NO: 2459
  Probe

SEQ ID NO: 12512 - DNA, 30 bp, Artificial Sequence; identical to SEQ ID NO: 106
  Probe

SEQ ID NO: 12513 - DNA, 36 bp, Artificial Sequence; identical to SEQ ID NO: 111
  Probe

SEQ ID NO: 12514 - DNA, 50 bp, Artificial Sequence; identical to SEQ ID NO: 113
  Probe

SEQ ID NO: 12515 - DNA, 30 bp, Artificial Sequence
  Probe
acaagaactgctaactcatgcccccatgtc

SEQ ID NO: 12516 - DNA, 31 bp, Artificial Sequence; identical to SEQ ID NO: 2584
  Probe

SEQ ID NO: 12517 - DNA, 35 bp, Artificial Sequence
  Probe
acaagaactgctaactcatgcccccatgtctaaca

SEQ ID NO: 12518 - DNA, 38 bp, Artificial Sequence
  Probe
acaagaactgctaactcatgcccccatgtctaacaaca

SEQ ID NO: 12519 - DNA, 49 bp, Artificial Sequence; identical to SEQ ID NO: 2587
  Probe

SEQ ID NO: 12520 - DNA, 50 bp, Artificial Sequence; identical to SEQ ID NO: 124
  Probe

SEQ ID NO: 12521 - DNA, 20 bp, Artificial Sequence
  Probe
acacgcagaaggtcctgggt

SEQ ID NO: 12522 - DNA, 36 bp, Artificial Sequence
  Probe
acacgcagaaggtcctgggttcgagccccagtggaa

SEQ ID NO: 12523 - DNA, 38 bp, Artificial Sequence
  Probe
acacgcagaaggtcctgggttcgagccccagtggaacc

SEQ ID NO: 12524 - DNA, 39 bp, Artificial Sequence
  Probe
acacgcagaaggtcctgggttcgagccccagtggaacca

SEQ ID NO: 12525 - DNA, 40 bp, Artificial Sequence
  Probe
acacgcagaaggtcctgggttcgagccccagtggaaccac

SEQ ID NO: 12526 - DNA, 18 bp, Artificial Sequence
  Probe
acacgcgaaaggtccccg

SEQ ID NO: 12527 - DNA, 19 bp, Artificial Sequence
  Probe
acacgcgaaaggtccccgg

SEQ ID NO: 12528 - DNA, 20 bp, Artificial Sequence
  Probe
acacgcgaaaggtccccggt

SEQ ID NO: 12529 - DNA, 21 bp, Artificial Sequence
  Probe
acacgcgaaaggtccccggtt

SEQ ID NO: 12530 - DNA, 35 bp, Artificial Sequence
  Probe
acacgcgaaaggtccccggttcgaaaccgggcgga

SEQ ID NO: 12531 - DNA, 36 bp, Artificial Sequence
  Probe
acacgcgaaaggtccccggttcgaaaccgggcggaa

SEQ ID NO: 12532 - DNA, 18 bp, Artificial Sequence
  Probe
acagaccaagagccttca

SEQ ID NO: 12533 - DNA, 37 bp, Artificial Sequence
  Probe
acagaccaagagccttcaaagccctcagtaagttgca

SEQ ID NO: 12534 - DNA, 50 bp, Artificial Sequence; identical to SEQ ID NO: 129
  Probe

SEQ ID NO: 12535 - DNA, 18 bp, Artificial Sequence
  Probe
acatatgtccgcgtgggt

SEQ ID NO: 12536 - DNA, 50 bp, Artificial Sequence; identical to SEQ ID NO: 138
  Probe

SEQ ID NO: 12537 - DNA, 16 bp, Artificial Sequence
  Probe
accaggatggccgagt

SEQ ID NO: 12538 - DNA, 17 bp, Artificial Sequence
  Probe
accaggatggccgagtg

SEQ ID NO: 12539 - DNA, 20 bp, Artificial Sequence
  Probe
accaggatggccgagtggtt

SEQ ID NO: 12540 - DNA, 23 bp, Artificial Sequence
  Probe
accaggatggccgagtggttaag

SEQ ID NO: 12541 - DNA, 36 bp, Artificial Sequence
  Probe
accaggggtcgcgagttcaaatctcgctggggcctc

SEQ ID NO: 12542 - DNA, 32 bp, Artificial Sequence
  Probe
acccaggcggcccgggttcgactcccggtgtg

SEQ ID NO: 12543 - DNA, 33 bp, Artificial Sequence; identical to SEQ ID NO: 2763
  Probe

SEQ ID NO: 12544 - DNA, 34 bp, Artificial Sequence
  Probe
acccaggcggcccgggttcgactcccggtgtggg

SEQ ID NO: 12545 - DNA, 35 bp, Artificial Sequence; identical to SEQ ID NO: 149
  Probe

SEQ ID NO: 12546 - DNA, 36 bp, Artificial Sequence; identical to SEQ ID NO: 150
  Probe

SEQ ID NO: 12547 - DNA, 37 bp, Artificial Sequence; identical to SEQ ID NO: 151
  Probe

SEQ ID NO: 12548 - DNA, 32 bp, Artificial Sequence
  Probe
acccaggtggcccgggttcgactcccggtatg

SEQ ID NO: 12549 - DNA, 33 bp, Artificial Sequence
  Probe
acccaggtggcccgggttcgactcccggtatgg

SEQ ID NO: 12550 - DNA, 37 bp, Artificial Sequence; identical to SEQ ID NO: 152
  Probe

SEQ ID NO: 12551 - DNA, 32 bp, Artificial Sequence; identical to SEQ ID NO: 153
  Probe

SEQ ID NO: 12552 - DNA, 33 bp, Artificial Sequence; identical to SEQ ID NO: 154
  Probe

SEQ ID NO: 12553 - DNA, 34 bp, Artificial Sequence; identical to SEQ ID NO: 155
  Probe

SEQ ID NO: 12554 - DNA, 35 bp, Artificial Sequence; identical to SEQ ID NO: 156
  Probe

SEQ ID NO: 12555 - DNA, 34 bp, Artificial Sequence; identical to SEQ ID NO: 157
  Probe

SEQ ID NO: 12556 - DNA, 16 bp, Artificial Sequence
  Probe
accgaagatcacgggt

SEQ ID NO: 12557 - DNA, 33 bp, Artificial Sequence
  Probe
accgccgcggcccgggttcgattcccggtcagg

SEQ ID NO: 12558 - DNA, 35 bp, Artificial Sequence
  Probe
accgccgcggcccgggttcgattcccggtcaggga

SEQ ID NO: 12559 - DNA, 36 bp, Artificial Sequence
  Probe
accgccgcggcccgggttcgattcccggtcagggaa

SEQ ID NO: 12560 - DNA, 16 bp, Artificial Sequence
  Probe
accggagatgaaaacc

SEQ ID NO: 12561 - DNA, 17 bp, Artificial Sequence
  Probe
accggagatgaaaacct

SEQ ID NO: 12562 - DNA, 19 bp, Artificial Sequence
  Probe
accggagatgaaaaccttt

SEQ ID NO: 12563 - DNA, 22 bp, Artificial Sequence
  Probe
accggagatgaaaacctttttc

SEQ ID NO: 12564 - DNA, 23 bp, Artificial Sequence
  Probe
accggagatgaaaacctttttcc

SEQ ID NO: 12565 - DNA, 26 bp, Artificial Sequence
  Probe
accggagatgaaaacctttttccaag

SEQ ID NO: 12566 - DNA, 27 bp, Artificial Sequence
  Probe
accggagatgaaaacctttttccaagg

SEQ ID NO: 12567 - DNA, 28 bp, Artificial Sequence
  Probe
accggagatgaaaacctttttccaagga

SEQ ID NO: 12568 - DNA, 29 bp, Artificial Sequence
  Probe
accggagatgaaaacctttttccaaggac

SEQ ID NO: 12569 - DNA, 30 bp, Artificial Sequence; identical to SEQ ID NO: 165
  Probe

SEQ ID NO: 12570 - DNA, 16 bp, Artificial Sequence
  Probe
accgggcggaaacacc

SEQ ID NO: 12571 - DNA, 24 bp, Artificial Sequence
  Probe
accggggttcgattccccgacggg

SEQ ID NO: 12572 - DNA, 18 bp, Artificial Sequence
  Probe
acgcagaaggtcctgggt

SEQ ID NO: 12573 - DNA, 31 bp, Artificial Sequence
  Probe
acgcagaaggtcctgggttcgagccccagtg

SEQ ID NO: 12574 - DNA, 34 bp, Artificial Sequence
  Probe
acgcagaaggtcctgggttcgagccccagtggaa

SEQ ID NO: 12575 - DNA, 35 bp, Artificial Sequence
  Probe
acgcagaaggtcctgggttcgagccccagtggaac

SEQ ID NO: 12576 - DNA, 36 bp, Artificial Sequence; identical to SEQ ID NO: 2844
  Probe

SEQ ID NO: 12577 - DNA, 37 bp, Artificial Sequence; identical to SEQ ID NO: 166
  Probe

SEQ ID NO: 12578 - DNA, 38 bp, Artificial Sequence; identical to SEQ ID NO: 167
  Probe

SEQ ID NO: 12579 - DNA, 17 bp, Artificial Sequence
  Probe
acgccaaggtcgcgggt

SEQ ID NO: 12580 - DNA, 16 bp, Artificial Sequence
  Probe
acgcgaaaggtccccg

SEQ ID NO: 12581 - DNA, 17 bp, Artificial Sequence
  Probe
acgcgaaaggtccccgg

SEQ ID NO: 12582 - DNA, 18 bp, Artificial Sequence
  Probe
acgcgaaaggtccccggt

SEQ ID NO: 12583 - DNA, 19 bp, Artificial Sequence
  Probe
acgcgaaaggtccccggtt

SEQ ID NO: 12584 - DNA, 20 bp, Artificial Sequence
  Probe
acgcgaaaggtccccggttc

SEQ ID NO: 12585 - DNA, 34 bp, Artificial Sequence
  Probe
acgcgaaaggtccccggttcgaaaccgggcggaa

SEQ ID NO: 12586 - DNA, 17 bp, Artificial Sequence
  Probe
acgcgggagaccggggt

SEQ ID NO: 12587 - DNA, 18 bp, Artificial Sequence
  Probe
acgcgggagaccggggtt

SEQ ID NO: 12588 - DNA, 30 bp, Artificial Sequence
  Probe
acgcgggagaccggggttcaattccccgac

SEQ ID NO: 12589 - DNA, 31 bp, Artificial Sequence; identical to SEQ ID NO: 176
  Probe

SEQ ID NO: 12590 - DNA, 32 bp, Artificial Sequence; identical to SEQ ID NO: 177
  Probe

SEQ ID NO: 12591 - DNA, 33 bp, Artificial Sequence; identical to SEQ ID NO: 178
  Probe

SEQ ID NO: 12592 - DNA, 34 bp, Artificial Sequence; identical to SEQ ID NO: 179
  Probe

SEQ ID NO: 12593 - DNA, 35 bp, Artificial Sequence
  Probe
acgcgggagaccggggttcaattccccgacgggga

SEQ ID NO: 12594 - DNA, 36 bp, Artificial Sequence; identical to SEQ ID NO: 180
  Probe

SEQ ID NO: 12595 - DNA, 23 bp, Artificial Sequence
  Probe
acgcgggagaccggggttcgatt

SEQ ID NO: 12596 - DNA, 29 bp, Artificial Sequence
  Probe
acgcgggagaccggggttcgattccccga

SEQ ID NO: 12597 - DNA, 30 bp, Artificial Sequence; identical to SEQ ID NO: 182
  Probe

SEQ ID NO: 12598 - DNA, 31 bp, Artificial Sequence; identical to SEQ ID NO: 183
  Probe

SEQ ID NO: 12599 - DNA, 32 bp, Artificial Sequence; identical to SEQ ID NO: 184
  Probe

SEQ ID NO: 12600 - DNA, 33 bp, Artificial Sequence; identical to SEQ ID NO: 185
  Probe

SEQ ID NO: 12601 - DNA, 34 bp, Artificial Sequence; identical to SEQ ID NO: 186
  Probe

SEQ ID NO: 12602 - DNA, 35 bp, Artificial Sequence; identical to SEQ ID NO: 187
  Probe

SEQ ID NO: 12603 - DNA, 36 bp, Artificial Sequence; identical to SEQ ID NO: 188
  Probe

SEQ ID NO: 12604 - DNA, 17 bp, Artificial Sequence
  Probe
acgcgggaggcccgggt

SEQ ID NO: 12605 - DNA, 18 bp, Artificial Sequence
  Probe
acgcgggaggcccgggtt

SEQ ID NO: 12606 - DNA, 20 bp, Artificial Sequence
  Probe
acgcgggaggcccgggttcg

SEQ ID NO: 12607 - DNA, 36 bp, Artificial Sequence; identical to SEQ ID NO: 2880
  Probe

SEQ ID NO: 12608 - DNA, 33 bp, Artificial Sequence
  Probe
acgcgggaggcccgggttcgattcccggcccat

SEQ ID NO: 12609 - DNA, 34 bp, Artificial Sequence; identical to SEQ ID NO: 2884
  Probe

SEQ ID NO: 12610 - DNA, 19 bp, Artificial Sequence
  Probe
acgcgggaggcccgggttt

SEQ ID NO: 12611 - DNA, 29 bp, Artificial Sequence
  Probe
actaagtgtttgtgggtttaagtcccatt

SEQ ID NO: 12612 - DNA, 31 bp, Artificial Sequence
  Probe
actaagtgtttgtgggtttaagtcccattgg

SEQ ID NO: 12613 - DNA, 33 bp, Artificial Sequence; identical to SEQ ID NO: 191
  Probe

SEQ ID NO: 12614 - DNA, 34 bp, Artificial Sequence; identical to SEQ ID NO: 192
  Probe

SEQ ID NO: 12615 - DNA, 35 bp, Artificial Sequence; identical to SEQ ID NO: 193
  Probe

SEQ ID NO: 12616 - DNA, 36 bp, Artificial Sequence; identical to SEQ ID NO: 2894
  Probe

SEQ ID NO: 12617 - DNA, 28 bp, Artificial Sequence
  Probe
actagttttgacaacattcaaaaaagag

SEQ ID NO: 12618 - DNA, 16 bp, Artificial Sequence
  Probe
actcccggtgtgggaa

SEQ ID NO: 12619 - DNA, 17 bp, Artificial Sequence
  Probe
actcccggtgtgggaac

SEQ ID NO: 12620 - DNA, 28 bp, Artificial Sequence
  Probe
actcttttagtataaatagtaccgttaa

SEQ ID NO: 12621 - DNA, 32 bp, Artificial Sequence; identical to SEQ ID NO: 195
  Probe

SEQ ID NO: 12622 - DNA, 33 bp, Artificial Sequence; identical to SEQ ID NO: 196
  Probe

SEQ ID NO: 12623 - DNA, 34 bp, Artificial Sequence; identical to SEQ ID NO: 197
  Probe

SEQ ID NO: 12624 - DNA, 50 bp, Artificial Sequence; identical to SEQ ID NO: 199
  Probe

SEQ ID NO: 12625 - DNA, 39 bp, Artificial Sequence
  Probe
acttagcattaaccttttaagttaaagattaagagaacc

SEQ ID NO: 12626 - DNA, 40 bp, Artificial Sequence
  Probe
acttagcattaaccttttaagttaaagattaagagaacca

SEQ ID NO: 12627 - DNA, 39 bp, Artificial Sequence; identical to SEQ ID NO: 205
  Probe

SEQ ID NO: 12628 - DNA, 31 bp, Artificial Sequence; identical to SEQ ID NO: 210
  Probe

SEQ ID NO: 12629 - DNA, 32 bp, Artificial Sequence; identical to SEQ ID NO: 211
  Probe

SEQ ID NO: 12630 - DNA, 34 bp, Artificial Sequence; identical to SEQ ID NO: 212
  Probe

SEQ ID NO: 12631 - DNA, 50 bp, Artificial Sequence; identical to SEQ ID NO: 216
  Probe

SEQ ID NO: 12632 - DNA, 27 bp, Artificial Sequence
  Probe
agaactgctaactcatgcccccatgtc

SEQ ID NO: 12633 - DNA, 28 bp, Artificial Sequence
  Probe
agaactgctaactcatgcccccatgtct

SEQ ID NO: 12634 - DNA, 32 bp, Artificial Sequence; identical to SEQ ID NO: 3066
  Probe

SEQ ID NO: 12635 - DNA, 35 bp, Artificial Sequence
  Probe
agaactgctaactcatgcccccatgtctaacaaca

SEQ ID NO: 12636 - DNA, 44 bp, Artificial Sequence; identical to SEQ ID NO: 222
  Probe

SEQ ID NO: 12637 - DNA, 31 bp, Artificial Sequence; identical to SEQ ID NO: 225
  Probe

SEQ ID NO: 12638 - DNA, 31 bp, Artificial Sequence; identical to SEQ ID NO: 226
  Probe

SEQ ID NO: 12639 - DNA, 31 bp, Artificial Sequence; identical to SEQ ID NO: 230
  Probe

SEQ ID NO: 12640 - DNA, 30 bp, Artificial Sequence
  Probe
agaaggtcctgggttcgagccccagtggaa

SEQ ID NO: 12641 - DNA, 31 bp, Artificial Sequence
  Probe
agaaggtcctgggttcgagccccagtggaac

SEQ ID NO: 12642 - DNA, 32 bp, Artificial Sequence; identical to SEQ ID NO: 3093
  Probe

SEQ ID NO: 12643 - DNA, 33 bp, Artificial Sequence; identical to SEQ ID NO: 3094
  Probe

SEQ ID NO: 12644 - DNA, 34 bp, Artificial Sequence; identical to SEQ ID NO: 232
  Probe

SEQ ID NO: 12645 - DNA, 50 bp, Artificial Sequence; identical to SEQ ID NO: 235
  Probe

SEQ ID NO: 12646 - DNA, 19 bp, Artificial Sequence
  Probe
agaattctcgcctgccacg

SEQ ID NO: 12647 - DNA, 20 bp, Artificial Sequence
  Probe
agaattctcgcctgccacgc

SEQ ID NO: 12648 - DNA, 35 bp, Artificial Sequence; identical to SEQ ID NO: 237
  Probe

SEQ ID NO: 12649 - DNA, 22 bp, Artificial Sequence
  Probe
agaccggggttcaattccccga

SEQ ID NO: 12650 - DNA, 23 bp, Artificial Sequence
  Probe
agaccggggttcaattccccgac

SEQ ID NO: 12651 - DNA, 24 bp, Artificial Sequence
  Probe
agaccggggttcaattccccgacg

SEQ ID NO: 12652 - DNA, 29 bp, Artificial Sequence
  Probe
agaccggggttcaattccccgacggggag

SEQ ID NO: 12653 - DNA, 16 bp, Artificial Sequence
  Probe
agaccggggttcgatt

SEQ ID NO: 12654 - DNA, 22 bp, Artificial Sequence
  Probe
agaccggggttcgattccccga

SEQ ID NO: 12655 - DNA, 23 bp, Artificial Sequence
  Probe
agaccggggttcgattccccgac

SEQ ID NO: 12656 - DNA, 24 bp, Artificial Sequence
  Probe
agaccggggttcgattccccgacg

SEQ ID NO: 12657 - DNA, 25 bp, Artificial Sequence
  Probe
agaccggggttcgattccccgacgg

SEQ ID NO: 12658 - DNA, 26 bp, Artificial Sequence
  Probe
agaccggggttcgattccccgacggg

SEQ ID NO: 12659 - DNA, 28 bp, Artificial Sequence
  Probe
agaccggggttcgattccccgacgggga

SEQ ID NO: 12660 - DNA, 29 bp, Artificial Sequence
  Probe
agaccggggttcgattccccgacggggag

SEQ ID NO: 12661 - DNA, 19 bp, Artificial Sequence
  Probe
agagcccggtaatcgcata

SEQ ID NO: 12662 - DNA, 26 bp, Artificial Sequence
  Probe
agagcccggtaatcgcataaaactta

SEQ ID NO: 12663 - DNA, 28 bp, Artificial Sequence
  Probe
agagtaaataataggagcttaaaccccc

SEQ ID NO: 12664 - DNA, 31 bp, Artificial Sequence; identical to SEQ ID NO: 252
  Probe

SEQ ID NO: 12665 - DNA, 36 bp, Artificial Sequence; identical to SEQ ID NO: 255
  Probe

SEQ ID NO: 12666 - DNA, 37 bp, Artificial Sequence; identical to SEQ ID NO: 256
  Probe

SEQ ID NO: 12667 - DNA, 29 bp, Artificial Sequence
  Probe
agagtggcgcagcggaagcgtgctgggcc

SEQ ID NO: 12668 - DNA, 30 bp, Artificial Sequence
  Probe
agagtggcgcagcggaagcgtgctgggccc

SEQ ID NO: 12669 - DNA, 31 bp, Artificial Sequence; identical to SEQ ID NO: 3161
  Probe

SEQ ID NO: 12670 - DNA, 28 bp, Artificial Sequence
  Probe
agattctaggttcgactcctggctggct

SEQ ID NO: 12671 - DNA, 28 bp, Artificial Sequence
  Probe
agattgagggttcgagtcccttcgtggt

SEQ ID NO: 12672 - DNA, 35 bp, Artificial Sequence; identical to SEQ ID NO: 3196
  Probe

SEQ ID NO: 12673 - DNA, 29 bp, Artificial Sequence
  Probe
agcactctggactttgaatccagcgatcc

SEQ ID NO: 12674 - DNA, 30 bp, Artificial Sequence
  Probe
agcactctggactttgaatccagcgatccg

SEQ ID NO: 12675 - DNA, 33 bp, Artificial Sequence
  Probe
agcactctggactttgaatccagcgatccgagt

SEQ ID NO: 12676 - DNA, 29 bp, Artificial Sequence
  Probe
agcagagtggcgcagcggaagcgtgctgg

SEQ ID NO: 12677 - DNA, 31 bp, Artificial Sequence; identical to SEQ ID NO: 275
  Probe

SEQ ID NO: 12678 - DNA, 32 bp, Artificial Sequence; identical to SEQ ID NO: 276
  Probe

SEQ ID NO: 12679 - DNA, 33 bp, Artificial Sequence; identical to SEQ ID NO: 277
  Probe

SEQ ID NO: 12680 - DNA, 34 bp, Artificial Sequence; identical to SEQ ID NO: 278
  Probe

SEQ ID NO: 12681 - DNA, 35 bp, Artificial Sequence; identical to SEQ ID NO: 279
  Probe

SEQ ID NO: 12682 - DNA, 36 bp, Artificial Sequence
  Probe
agcagagtggcgcagcggaagcgtgctgggcccata

SEQ ID NO: 12683 - DNA, 17 bp, Artificial Sequence
  Probe
agcagttgacccgggtt

SEQ ID NO: 12684 - DNA, 29 bp, Artificial Sequence
  Probe
agcatagctgccttccaagcagttgaccc

SEQ ID NO: 12685 - DNA, 30 bp, Artificial Sequence; identical to SEQ ID NO: 3263
  Probe

SEQ ID NO: 12686 - DNA, 31 bp, Artificial Sequence
  Probe
agcatagctgccttccaagcagttgacccgg

SEQ ID NO: 12687 - DNA, 27 bp, Artificial Sequence
  Probe
agcattaaccttttaagttaaagatta

SEQ ID NO: 12688 - DNA, 33 bp, Artificial Sequence
  Probe
agcattaaccttttaagttaaagattaagagaa

SEQ ID NO: 12689 - DNA, 34 bp, Artificial Sequence
  Probe
agcattaaccttttaagttaaagattaagagaac

SEQ ID NO: 12690 - DNA, 35 bp, Artificial Sequence; identical to SEQ ID NO: 280
  Probe

SEQ ID NO: 12691 - DNA, 36 bp, Artificial Sequence; identical to SEQ ID NO: 281
  Probe

SEQ ID NO: 12692 - DNA, 37 bp, Artificial Sequence; identical to SEQ ID NO: 282
  Probe

SEQ ID NO: 12693 - DNA, 50 bp, Artificial Sequence; identical to SEQ ID NO: 285
  Probe

SEQ ID NO: 12694 - DNA, 17 bp, Artificial Sequence
  Probe
agccagggattgtgggt

SEQ ID NO: 12695 - DNA, 34 bp, Artificial Sequence; identical to SEQ ID NO: 287
  Probe

SEQ ID NO: 12696 - DNA, 17 bp, Artificial Sequence
  Probe
agcccggtaatcgcata

SEQ ID NO: 12697 - DNA, 24 bp, Artificial Sequence
  Probe
agcccggtaatcgcataaaactta

SEQ ID NO: 12698 - DNA, 29 bp, Artificial Sequence
  Probe
agcccggtaatcgcataaaacttaaaact

SEQ ID NO: 12699 - DNA, 18 bp, Artificial Sequence
  Probe
agccctcagtaagttgca

SEQ ID NO: 12700 - DNA, 19 bp, Artificial Sequence
  Probe
agcggaagcgtgctgggcc

SEQ ID NO: 12701 - DNA, 36 bp, Artificial Sequence
  Probe
agcggttaggattcctggttttcacccaggcggccc

SEQ ID NO: 12702 - DNA, 30 bp, Artificial Sequence; identical to SEQ ID NO: 301
  Probe

SEQ ID NO: 12703 - DNA, 50 bp, Artificial Sequence; identical to SEQ ID NO: 303
  Probe

SEQ ID NO: 12704 - DNA, 16 bp, Artificial Sequence
  Probe
agctcacaagaactgc

SEQ ID NO: 12705 - DNA, 17 bp, Artificial Sequence
  Probe
agctcacaagaactgct

SEQ ID NO: 12706 - DNA, 27 bp, Artificial Sequence
  Probe
agctcagtcggtagagcatcagacttt

SEQ ID NO: 12707 - DNA, 28 bp, Artificial Sequence
  Probe
agctcagtcggtagagcatcagactttt

SEQ ID NO: 12708 - DNA, 29 bp, Artificial Sequence
  Probe
agctcagtcggtagagcatcagactttta

SEQ ID NO: 12709 - DNA, 24 bp, Artificial Sequence
  Probe
agctcagtcggtagagcatgggac

SEQ ID NO: 12710 - DNA, 25 bp, Artificial Sequence
  Probe
agctcagtcggtagagcatgggact

SEQ ID NO: 12711 - DNA, 26 bp, Artificial Sequence
  Probe
agctcagtcggtagagcatgggactc

SEQ ID NO: 12712 - DNA, 27 bp, Artificial Sequence
  Probe
agctcagtcggtagagcatgggactct

SEQ ID NO: 12713 - DNA, 23 bp, Artificial Sequence
  Probe
agctccgaggtgattttcatatt

SEQ ID NO: 12714 - DNA, 29 bp, Artificial Sequence
  Probe
agctccgaggtgattttcatattgaattg

SEQ ID NO: 12715 - DNA, 30 bp, Artificial Sequence; identical to SEQ ID NO: 314
  Probe

SEQ ID NO: 12716 - DNA, 31 bp, Artificial Sequence; identical to SEQ ID NO: 315
  Probe

SEQ ID NO: 12717 - DNA, 34 bp, Artificial Sequence
  Probe
agctggggattgtgggttcgagtcccatctgggt

SEQ ID NO: 12718 - DNA, 41 bp, Artificial Sequence
  Probe
agctgttaactaagtgtttgtgggtttaagtcccattggtc

SEQ ID NO: 12719 - DNA, 42 bp, Artificial Sequence
  Probe
agctgttaactaagtgtttgtgggtttaagtcccattggtct

SEQ ID NO: 12720 - DNA, 17 bp, Artificial Sequence
  Probe
agctttggggggttcga

SEQ ID NO: 12721 - DNA, 21 bp, Artificial Sequence
  Probe
aggatggccgagtggtctaag

SEQ ID NO: 12722 - DNA, 29 bp, Artificial Sequence
  Probe
aggattcctggttttcacccaggcggccc

SEQ ID NO: 12723 - DNA, 29 bp, Artificial Sequence
  Probe
aggattcctggttttcacccaggtggccc

SEQ ID NO: 12724 - DNA, 29 bp, Artificial Sequence
  Probe
aggattcggcgctctcaccgccgcggccc

SEQ ID NO: 12725 - DNA, 29 bp, Artificial Sequence
  Probe
aggattcggcgctttcaccgccgcggccc

SEQ ID NO: 12726 - DNA, 23 bp, Artificial Sequence
  Probe
aggccccgggttcaatccccggc

SEQ ID NO: 12727 - DNA, 24 bp, Artificial Sequence
  Probe
aggccccgggttcaatccccggca

SEQ ID NO: 12728 - DNA, 28 bp, Artificial Sequence
  Probe
aggcggcccgggttcgactcccggtgtg

SEQ ID NO: 12729 - DNA, 29 bp, Artificial Sequence
  Probe
aggcggcccgggttcgactcccggtgtgg

SEQ ID NO: 12730 - DNA, 30 bp, Artificial Sequence; identical to SEQ ID NO: 3426
  Probe

SEQ ID NO: 12731 - DNA, 31 bp, Artificial Sequence; identical to SEQ ID NO: 325
  Probe

SEQ ID NO: 12732 - DNA, 32 bp, Artificial Sequence; identical to SEQ ID NO: 326
  Probe

SEQ ID NO: 12733 - DNA, 33 bp, Artificial Sequence; identical to SEQ ID NO: 327
  Probe

SEQ ID NO: 12734 - DNA, 23 bp, Artificial Sequence
  Probe
aggcttacgaccccttatttacc

SEQ ID NO: 12735 - DNA, 17 bp, Artificial Sequence
  Probe
aggggtatgattctcgg

SEQ ID NO: 12736 - DNA, 18 bp, Artificial Sequence
  Probe
aggggtatgattctcggt

SEQ ID NO: 12737 - DNA, 29 bp, Artificial Sequence
  Probe
agggtcgtgggttcgagccccacgttggg

SEQ ID NO: 12738 - DNA, 29 bp, Artificial Sequence
  Probe
aggtggcccgggttcgactcccggtatgg

SEQ ID NO: 12739 - DNA, 31 bp, Artificial Sequence
  Probe
aggtggcccgggttcgactcccggtatggga

SEQ ID NO: 12740 - DNA, 32 bp, Artificial Sequence; identical to SEQ ID NO: 3488
  Probe

SEQ ID NO: 12741 - DNA, 33 bp, Artificial Sequence; identical to SEQ ID NO: 3489
  Probe

SEQ ID NO: 12742 - DNA, 34 bp, Artificial Sequence; identical to SEQ ID NO: 3537
  Probe

SEQ ID NO: 12743 - DNA, 35 bp, Artificial Sequence
  Probe
agtaccgttaacttccaattaactagttttgacaa

SEQ ID NO: 12744 - DNA, 28 bp, Artificial Sequence
  Probe
agtatccccgcctgtcacgcgggagacc

SEQ ID NO: 12745 - DNA, 30 bp, Artificial Sequence
  Probe
agtatccccgcctgtcacgcgggagaccgg

SEQ ID NO: 12746 - DNA, 16 bp, Artificial Sequence
  Probe
agtcggtagagcatca

SEQ ID NO: 12747 - DNA, 17 bp, Artificial Sequence
  Probe
agtcggtagagcatcag

SEQ ID NO: 12748 - DNA, 18 bp, Artificial Sequence
  Probe
agtcggtagagcatcaga

SEQ ID NO: 12749 - DNA, 19 bp, Artificial Sequence
  Probe
agtcggtagagcatcagac

SEQ ID NO: 12750 - DNA, 21 bp, Artificial Sequence
  Probe
agtcggtagagcatcagactt

SEQ ID NO: 12751 - DNA, 22 bp, Artificial Sequence
  Probe
agtcggtagagcatcagacttt

SEQ ID NO: 12752 - DNA, 18 bp, Artificial Sequence
  Probe
agtcggtagagcatggga

SEQ ID NO: 12753 - DNA, 19 bp, Artificial Sequence
  Probe
agtcggtagagcatgggac

SEQ ID NO: 12754 - DNA, 26 bp, Artificial Sequence
  Probe
agtctcataatctgaaggtcgtgagt

SEQ ID NO: 12755 - DNA, 18 bp, Artificial Sequence
  Probe
agtggctaggattcggcg

SEQ ID NO: 12756 - DNA, 36 bp, Artificial Sequence
  Probe
agtggctaggattcggcgctttcaccgccgcggccc

SEQ ID NO: 12757 - DNA, 17 bp, Artificial Sequence
  Probe
agtggtatgattctcgc

SEQ ID NO: 12758 - DNA, 41 bp, Artificial Sequence
  Probe
agtggtgagcatagctgccttccaagcagttgacccgggtt

SEQ ID NO: 12759 - DNA, 19 bp, Artificial Sequence
  Probe
agtggtgagtatccccgcc

SEQ ID NO: 12760 - DNA, 22 bp, Artificial Sequence
  Probe
agtggtgagtatccccgcctgt

SEQ ID NO: 12761 - DNA, 23 bp, Artificial Sequence
  Probe
agtggtgagtatccccgcctgtc

SEQ ID NO: 12762 - DNA, 24 bp, Artificial Sequence
  Probe
agtggtgagtatccccgcctgtca

SEQ ID NO: 12763 - DNA, 25 bp, Artificial Sequence
  Probe
agtggtgagtatccccgcctgtcac

SEQ ID NO: 12764 - DNA, 26 bp, Artificial Sequence
  Probe
agtggtgagtatccccgcctgtcacg

SEQ ID NO: 12765 - DNA, 36 bp, Artificial Sequence
  Probe
agtggtgagtatccccgcctgtcacgcgggagaccg

SEQ ID NO: 12766 - DNA, 37 bp, Artificial Sequence
  Probe
agtggtgagtatccccgcctgtcacgcgggagaccgg

SEQ ID NO: 12767 - DNA, 40 bp, Artificial Sequence
  Probe
agtggtgagtatccccgcctgtcacgcgggagaccggggt

SEQ ID NO: 12768 - DNA, 36 bp, Artificial Sequence
  Probe
agtggttagcatagctgccttccaagcagttgaccc

SEQ ID NO: 12769 - DNA, 40 bp, Artificial Sequence
  Probe
agtggttagcatagctgccttccaagcagttgacccgggt

SEQ ID NO: 12770 - DNA, 41 bp, Artificial Sequence
  Probe
agtggttagcatagctgccttccaagcagttgacccgggtt

SEQ ID NO: 12771 - DNA, 18 bp, Artificial Sequence
  Probe
agtggttaggattcggcg

SEQ ID NO: 12772 - DNA, 19 bp, Artificial Sequence
  Probe
agtggttaggattcggcgc

SEQ ID NO: 12773 - DNA, 20 bp, Artificial Sequence
  Probe
agtggttaggattcggcgct

SEQ ID NO: 12774 - DNA, 21 bp, Artificial Sequence
  Probe
agtggttaggattcggcgctc

SEQ ID NO: 12775 - DNA, 24 bp, Artificial Sequence
  Probe
agtggttaggattcggcgctctca

SEQ ID NO: 12776 - DNA, 35 bp, Artificial Sequence
  Probe
agtggttaggattcggcgctctcaccgccgcggcc

SEQ ID NO: 12777 - DNA, 36 bp, Artificial Sequence; identical to SEQ ID NO: 361
  Probe

SEQ ID NO: 12778 - DNA, 37 bp, Artificial Sequence
  Probe
agtggttaggattcggcgctctcaccgccgcggcccg

SEQ ID NO: 12779 - DNA, 40 bp, Artificial Sequence
  Probe
agtggttaggattcggcgctctcaccgccgcggcccgggt

SEQ ID NO: 12780 - DNA, 18 bp, Artificial Sequence
  Probe
agtggttagtactctgcg

SEQ ID NO: 12781 - DNA, 19 bp, Artificial Sequence
  Probe
agtggttagtactctgcgt

SEQ ID NO: 12782 - DNA, 17 bp, Artificial Sequence
  Probe
agtggttagtatccccg

SEQ ID NO: 12783 - DNA, 18 bp, Artificial Sequence
  Probe
agtggttagtatccccgc

SEQ ID NO: 12784 - DNA, 19 bp, Artificial Sequence
  Probe
agtggttagtatccccgcc

SEQ ID NO: 12785 - DNA, 29 bp, Artificial Sequence
  Probe
agtgtttgtgggtttaagtcccattggtc

SEQ ID NO: 12786 - DNA, 30 bp, Artificial Sequence; identical to SEQ ID NO: 3599
  Probe

SEQ ID NO: 12787 - DNA, 31 bp, Artificial Sequence; identical to SEQ ID NO: 3600
  Probe

SEQ ID NO: 12788 - DNA, 30 bp, Artificial Sequence
  Probe
agttgatgcagagtggggttttgcagtcct

SEQ ID NO: 12789 - DNA, 31 bp, Artificial Sequence
  Probe
agttgatgcagagtggggttttgcagtcctt

SEQ ID NO: 12790 - DNA, 32 bp, Artificial Sequence; identical to SEQ ID NO: 3614
  Probe

SEQ ID NO: 12791 - DNA, 50 bp, Artificial Sequence; identical to SEQ ID NO: 365
  Probe

SEQ ID NO: 12792 - DNA, 23 bp, Artificial Sequence
  Probe
ataacccagaggtcgatggatcg

SEQ ID NO: 12793 - DNA, 20 bp, Artificial Sequence
  Probe
ataacgccaaggtcgcgggt

SEQ ID NO: 12794 - DNA, 37 bp, Artificial Sequence
  Probe
ataccccgaaaatgttggttatacccttcccgtacta

SEQ ID NO: 12795 - DNA, 27 bp, Artificial Sequence
  Probe
atagctcagtcggtagagcatcagact

SEQ ID NO: 12796 - DNA, 29 bp, Artificial Sequence
  Probe
atagctcagtcggtagagcatcagacttt

SEQ ID NO: 12797 - DNA, 30 bp, Artificial Sequence
  Probe
atagctcagtcggtagagcatcagactttt

SEQ ID NO: 12798 - DNA, 31 bp, Artificial Sequence
  Probe
atagctcagtcggtagagcatcagactttta

SEQ ID NO: 12799 - DNA, 33 bp, Artificial Sequence
  Probe
atatcattggtcgtggttgtagtccgtgcgaga

SEQ ID NO: 12800 - DNA, 34 bp, Artificial Sequence
  Probe
atatcattggtcgtggttgtagtccgtgcgagaa

SEQ ID NO: 12801 - DNA, 35 bp, Artificial Sequence
  Probe
atatcattggtcgtggttgtagtccgtgcgagaat

SEQ ID NO: 12802 - DNA, 36 bp, Artificial Sequence; identical to SEQ ID NO: 372
  Probe

SEQ ID NO: 12803 - DNA, 34 bp, Artificial Sequence; identical to SEQ ID NO: 374
  Probe

SEQ ID NO: 12804 - DNA, 34 bp, Artificial Sequence; identical to SEQ ID NO: 375
  Probe

SEQ ID NO: 12805 - DNA, 36 bp, Artificial Sequence
  Probe
atcagaagattctaggttcgactcctggctggctcg

SEQ ID NO: 12806 - DNA, 34 bp, Artificial Sequence
  Probe
atcagaagattgagggttcgagtcccttcgtggt

SEQ ID NO: 12807 - DNA, 34 bp, Artificial Sequence
  Probe
atcagaagattgcaggttcgagtcctgccgcggt

SEQ ID NO: 12808 - DNA, 34 bp, Artificial Sequence
  Probe
atcattggtcgtggttgtagtccgtgcgagaata

SEQ ID NO: 12809 - DNA, 16 bp, Artificial Sequence
  Probe
atccagcgatccgagt

SEQ ID NO: 12810 - DNA, 35 bp, Artificial Sequence; identical to SEQ ID NO: 379
  Probe

SEQ ID NO: 12811 - DNA, 16 bp, Artificial Sequence
  Probe
atcccaccgctgccac

SEQ ID NO: 12812 - DNA, 17 bp, Artificial Sequence
  Probe
atcccagcggtgcctcc

SEQ ID NO: 12813 - DNA, 16 bp, Artificial Sequence
  Probe
atccccggcacctcca

SEQ ID NO: 12814 - DNA, 17 bp, Artificial Sequence
  Probe
atccccggcacctccac

SEQ ID NO: 12815 - DNA, 18 bp, Artificial Sequence
  Probe
atccccggcacctccacc

SEQ ID NO: 12816 - DNA, 19 bp, Artificial Sequence
  Probe
atccccggcacctccacca

SEQ ID NO: 12817 - DNA, 16 bp, Artificial Sequence
  Probe
atccccggcatctcca

SEQ ID NO: 12818 - DNA, 16 bp, Artificial Sequence
  Probe
atccgggtgccccctc

SEQ ID NO: 12819 - DNA, 28 bp, Artificial Sequence
  Probe
atcgcataaaacttaaaactttacagtc

SEQ ID NO: 12820 - DNA, 29 bp, Artificial Sequence
  Probe
atcgcataaaacttaaaactttacagtca

SEQ ID NO: 12821 - DNA, 32 bp, Artificial Sequence; identical to SEQ ID NO: 386
  Probe

SEQ ID NO: 12822 - DNA, 33 bp, Artificial Sequence; identical to SEQ ID NO: 387
  Probe

SEQ ID NO: 12823 - DNA, 30 bp, Artificial Sequence
  Probe
atgattctcgctttgggtgcgagaggtccc

SEQ ID NO: 12824 - DNA, 29 bp, Artificial Sequence
  Probe
atgggtggttcagtggtagaattctcgcc

SEQ ID NO: 12825 - DNA, 30 bp, Artificial Sequence; identical to SEQ ID NO: 403
  Probe

SEQ ID NO: 12826 - DNA, 31 bp, Artificial Sequence; identical to SEQ ID NO: 404
  Probe

SEQ ID NO: 12827 - DNA, 32 bp, Artificial Sequence; identical to SEQ ID NO: 405
  Probe

SEQ ID NO: 12828 - DNA, 33 bp, Artificial Sequence; identical to SEQ ID NO: 406
  Probe

SEQ ID NO: 12829 - DNA, 16 bp, Artificial Sequence
  Probe
atggtagagcgctcgc

SEQ ID NO: 12830 - DNA, 28 bp, Artificial Sequence
  Probe
atggtggagttaaagactttttctctga

SEQ ID NO: 12831 - DNA, 38 bp, Artificial Sequence
  Probe
atggttagcactctggactttgaatccagcgatccgag

SEQ ID NO: 12832 - DNA, 16 bp, Artificial Sequence
  Probe
atgtttagacgggctc

SEQ ID NO: 12833 - DNA, 17 bp, Artificial Sequence
  Probe
atgtttagacgggctca

SEQ ID NO: 12834 - DNA, 18 bp, Artificial Sequence
  Probe
atgtttagacgggctcac

SEQ ID NO: 12835 - DNA, 19 bp, Artificial Sequence
  Probe
atgtttagacgggctcaca

SEQ ID NO: 12836 - DNA, 20 bp, Artificial Sequence
  Probe
atgtttagacgggctcacat

SEQ ID NO: 12837 - DNA, 27 bp, Artificial Sequence
  Probe
atgtttagacgggctcacatcacccca

SEQ ID NO: 12838 - DNA, 32 bp, Artificial Sequence
  Probe
attaactagttttgacaacattcaaaaaagag

SEQ ID NO: 12839 - DNA, 19 bp, Artificial Sequence
  Probe
attcccggtcagggaacca

SEQ ID NO: 12840 - DNA, 37 bp, Artificial Sequence; identical to SEQ ID NO: 3894
  Probe

SEQ ID NO: 12841 - DNA, 25 bp, Artificial Sequence
  Probe
attggtcgtggttgtagtccgtgcg

SEQ ID NO: 12842 - DNA, 27 bp, Artificial Sequence
  Probe
attggtcgtggttgtagtccgtgcgag

SEQ ID NO: 12843 - DNA, 28 bp, Artificial Sequence
  Probe
attggtcgtggttgtagtccgtgcgaga

SEQ ID NO: 12844 - DNA, 29 bp, Artificial Sequence
  Probe
attggtcgtggttgtagtccgtgcgagaa

SEQ ID NO: 12845 - DNA, 31 bp, Artificial Sequence; identical to SEQ ID NO: 426
  Probe

SEQ ID NO: 12846 - DNA, 32 bp, Artificial Sequence; identical to SEQ ID NO: 3924
  Probe

SEQ ID NO: 12847 - DNA, 33 bp, Artificial Sequence; identical to SEQ ID NO: 3925
  Probe

SEQ ID NO: 12848 - DNA, 45 bp, Artificial Sequence; identical to SEQ ID NO: 435
  Probe

SEQ ID NO: 12849 - DNA, 50 bp, Artificial Sequence; identical to SEQ ID NO: 437
  Probe

SEQ ID NO: 12850 - DNA, 29 bp, Artificial Sequence
  Probe
caaagcaatacactgaaaatgtttagacg

SEQ ID NO: 12851 - DNA, 33 bp, Artificial Sequence
  Probe
caaagcaatacactgaaaatgtttagacgggct

SEQ ID NO: 12852 - DNA, 35 bp, Artificial Sequence; identical to SEQ ID NO: 438
  Probe

SEQ ID NO: 12853 - DNA, 37 bp, Artificial Sequence; identical to SEQ ID NO: 439
  Probe

SEQ ID NO: 12854 - DNA, 50 bp, Artificial Sequence; identical to SEQ ID NO: 442
  Probe

SEQ ID NO: 12855 - DNA, 50 bp, Artificial Sequence; identical to SEQ ID NO: 447
  Probe

SEQ ID NO: 12856 - DNA, 31 bp, Artificial Sequence
  Probe
caaaggttccgggttcgagtcccggcggagt

SEQ ID NO: 12857 - DNA, 30 bp, Artificial Sequence
  Probe
caagaactgctaactcatgcccccatgtct

SEQ ID NO: 12858 - DNA, 34 bp, Artificial Sequence
  Probe
caagaactgctaactcatgcccccatgtctaaca

SEQ ID NO: 12859 - DNA, 37 bp, Artificial Sequence
  Probe
caagaactgctaactcatgcccccatgtctaacaaca

SEQ ID NO: 12860 - DNA, 46 bp, Artificial Sequence; identical to SEQ ID NO: 452
  Probe

SEQ ID NO: 12861 - DNA, 20 bp, Artificial Sequence
  Probe
caatccccggcacctccacc

SEQ ID NO: 12862 - DNA, 21 bp, Artificial Sequence
  Probe
caatccccggcacctccacca

SEQ ID NO: 12863 - DNA, 19 bp, Artificial Sequence
  Probe
cacgcgaaaggtccccggt

SEQ ID NO: 12864 - DNA, 16 bp, Artificial Sequence
  Probe
cacgcgggagaccggg

SEQ ID NO: 12865 - DNA, 34 bp, Artificial Sequence; identical to SEQ ID NO: 4128
  Probe

SEQ ID NO: 12866 - DNA, 33 bp, Artificial Sequence; identical to SEQ ID NO: 482
  Probe

SEQ ID NO: 12867 - DNA, 34 bp, Artificial Sequence; identical to SEQ ID NO: 483
  Probe

SEQ ID NO: 12868 - DNA, 35 bp, Artificial Sequence; identical to SEQ ID NO: 484
  Probe

SEQ ID NO: 12869 - DNA, 37 bp, Artificial Sequence; identical to SEQ ID NO: 486
  Probe

SEQ ID NO: 12870 - DNA, 27 bp, Artificial Sequence
  Probe
cactgtaaagctaacttagcattaacc

SEQ ID NO: 12871 - DNA, 28 bp, Artificial Sequence
  Probe
cactgtaaagctaacttagcattaacct

SEQ ID NO: 12872 - DNA, 30 bp, Artificial Sequence; identical to SEQ ID NO: 493
  Probe

SEQ ID NO: 12873 - DNA, 50 bp, Artificial Sequence; identical to SEQ ID NO: 502
  Probe

SEQ ID NO: 12874 - DNA, 32 bp, Artificial Sequence; identical to SEQ ID NO: 504
  Probe

SEQ ID NO: 12875 - DNA, 32 bp, Artificial Sequence; identical to SEQ ID NO: 505
  Probe

SEQ ID NO: 12876 - DNA, 32 bp, Artificial Sequence; identical to SEQ ID NO: 511
  Probe

SEQ ID NO: 12877 - DNA, 32 bp, Artificial Sequence; identical to SEQ ID NO: 4220
  Probe

SEQ ID NO: 12878 - DNA, 35 bp, Artificial Sequence
  Probe
cagaaggtcctgggttcgagccccagtggaaccac

SEQ ID NO: 12879 - DNA, 17 bp, Artificial Sequence
  Probe
cagaccaagagccttca

SEQ ID NO: 12880 - DNA, 36 bp, Artificial Sequence; identical to SEQ ID NO: 513
  Probe

SEQ ID NO: 12881 - DNA, 24 bp, Artificial Sequence
  Probe
cagagaatagtttaaattagaatc

SEQ ID NO: 12882 - DNA, 30 bp, Artificial Sequence; identical to SEQ ID NO: 519
  Probe

SEQ ID NO: 12883 - DNA, 30 bp, Artificial Sequence
  Probe
cagagtggcgcagcggaagcgtgctgggcc

SEQ ID NO: 12884 - DNA, 31 bp, Artificial Sequence; identical to SEQ ID NO: 4247
  Probe

SEQ ID NO: 12885 - DNA, 32 bp, Artificial Sequence; identical to SEQ ID NO: 527
  Probe

SEQ ID NO: 12886 - DNA, 35 bp, Artificial Sequence
  Probe
cagattgtgaatctgacaacagaggcttacgaccc

SEQ ID NO: 12887 - DNA, 29 bp, Artificial Sequence
  Probe
caggcggcccgggttcgactcccggtgtg

SEQ ID NO: 12888 - DNA, 30 bp, Artificial Sequence; identical to SEQ ID NO: 9562
  Probe

SEQ ID NO: 12889 - DNA, 31 bp, Artificial Sequence
  Probe
caggcggcccgggttcgactcccggtgtggg

SEQ ID NO: 12890 - DNA, 33 bp, Artificial Sequence; identical to SEQ ID NO: 4339
  Probe

SEQ ID NO: 12891 - DNA, 34 bp, Artificial Sequence; identical to SEQ ID NO: 533
  Probe

SEQ ID NO: 12892 - DNA, 26 bp, Artificial Sequence
  Probe
cagggatgggttcgattctcatagtc

SEQ ID NO: 12893 - DNA, 27 bp, Artificial Sequence
  Probe
cagggatgggttcgattctcatagtcc

SEQ ID NO: 12894 - DNA, 28 bp, Artificial Sequence
  Probe
cagggatgggttcgattctcatagtcct

SEQ ID NO: 12895 - DNA, 30 bp, Artificial Sequence; identical to SEQ ID NO: 534
  Probe

SEQ ID NO: 12896 - DNA, 32 bp, Artificial Sequence; identical to SEQ ID NO: 4353
  Probe

SEQ ID NO: 12897 - DNA, 34 bp, Artificial Sequence
  Probe
caggtggcccgggttcgactcccggtatgggaac

SEQ ID NO: 12898 - DNA, 16 bp, Artificial Sequence
  Probe
cagtcggtagagcatc

SEQ ID NO: 12899 - DNA, 27 bp, Artificial Sequence
  Probe
cagtctcataatctgaaggtcgtgagt

SEQ ID NO: 12900 - DNA, 50 bp, Artificial Sequence; identical to SEQ ID NO: 538
  Probe

SEQ ID NO: 12901 - DNA, 21 bp, Artificial Sequence
  Probe
cataatctgaaggtcgtgagt

SEQ ID NO: 12902 - DNA, 31 bp, Artificial Sequence; identical to SEQ ID NO: 4442
  Probe

SEQ ID NO: 12903 - DNA, 32 bp, Artificial Sequence; identical to SEQ ID NO: 4443
  Probe

SEQ ID NO: 12904 - DNA, 20 bp, Artificial Sequence
  Probe
cattggggtttccccgcgca

SEQ ID NO: 12905 - DNA, 22 bp, Artificial Sequence
  Probe
cattggggtttccccgcgcagg

SEQ ID NO: 12906 - DNA, 23 bp, Artificial Sequence
  Probe
cattggggtttccccgcgcaggt

SEQ ID NO: 12907 - DNA, 24 bp, Artificial Sequence
  Probe
cattggggtttccccgcgcaggtt

SEQ ID NO: 12908 - DNA, 32 bp, Artificial Sequence; identical to SEQ ID NO: 548
  Probe

SEQ ID NO: 12909 - DNA, 46 bp, Artificial Sequence; identical to SEQ ID NO: 558
  Probe

SEQ ID NO: 12910 - DNA, 27 bp, Artificial Sequence
  Probe
ccacatggtctagcggttaggattcct

SEQ ID NO: 12911 - DNA, 28 bp, Artificial Sequence
  Probe
ccacatggtctagcggttaggattcctg

SEQ ID NO: 12912 - DNA, 29 bp, Artificial Sequence
  Probe
ccacatggtctagcggttaggattcctgg

SEQ ID NO: 12913 - DNA, 31 bp, Artificial Sequence; identical to SEQ ID NO: 563
  Probe

SEQ ID NO: 12914 - DNA, 32 bp, Artificial Sequence; identical to SEQ ID NO: 564
  Probe

SEQ ID NO: 12915 - DNA, 33 bp, Artificial Sequence; identical to SEQ ID NO: 565
  Probe

SEQ ID NO: 12916 - DNA, 34 bp, Artificial Sequence; identical to SEQ ID NO: 566
  Probe

SEQ ID NO: 12917 - DNA, 35 bp, Artificial Sequence; identical to SEQ ID NO: 567
  Probe

SEQ ID NO: 12918 - DNA, 19 bp, Artificial Sequence
  Probe
ccacgcgggaggcccgggt

SEQ ID NO: 12919 - DNA, 20 bp, Artificial Sequence
  Probe
ccacgcgggaggcccgggtt

SEQ ID NO: 12920 - DNA, 21 bp, Artificial Sequence
  Probe
ccacgcgggaggcccgggttt

SEQ ID NO: 12921 - DNA, 17 bp, Artificial Sequence
  Probe
ccagcgatccgagttca

SEQ ID NO: 12922 - DNA, 31 bp, Artificial Sequence; identical to SEQ ID NO: 4561
  Probe

SEQ ID NO: 12923 - DNA, 34 bp, Artificial Sequence; identical to SEQ ID NO: 4562
  Probe

SEQ ID NO: 12924 - DNA, 35 bp, Artificial Sequence; identical to SEQ ID NO: 572
  Probe

SEQ ID NO: 12925 - DNA, 31 bp, Artificial Sequence; identical to SEQ ID NO: 4569
  Probe

SEQ ID NO: 12926 - DNA, 33 bp, Artificial Sequence
  Probe
ccaggtggcccgggttcgactcccggtatggga

SEQ ID NO: 12927 - DNA, 35 bp, Artificial Sequence
  Probe
ccaggtggcccgggttcgactcccggtatgggaac

SEQ ID NO: 12928 - DNA, 50 bp, Artificial Sequence; identical to SEQ ID NO: 4574
  Probe

SEQ ID NO: 12929 - DNA, 27 bp, Artificial Sequence
  Probe
ccatagtgtagtggttatcacgtctgc

SEQ ID NO: 12930 - DNA, 32 bp, Artificial Sequence; identical to SEQ ID NO: 575
  Probe

SEQ ID NO: 12931 - DNA, 33 bp, Artificial Sequence; identical to SEQ ID NO: 576
  Probe

SEQ ID NO: 12932 - DNA, 24 bp, Artificial Sequence
  Probe
ccattggggtttccccgcgcaggt

SEQ ID NO: 12933 - DNA, 28 bp, Artificial Sequence
  Probe
cccacatggtctagcggttaggattcct

SEQ ID NO: 12934 - DNA, 32 bp, Artificial Sequence; identical to SEQ ID NO: 580
  Probe

SEQ ID NO: 12935 - DNA, 33 bp, Artificial Sequence; identical to SEQ ID NO: 581
  Probe

SEQ ID NO: 12936 - DNA, 34 bp, Artificial Sequence; identical to SEQ ID NO: 582
  Probe

SEQ ID NO: 12937 - DNA, 35 bp, Artificial Sequence; identical to SEQ ID NO: 583
  Probe

SEQ ID NO: 12938 - DNA, 31 bp, Artificial Sequence
  Probe
cccaggcggcccgggttcgactcccggtgtg

SEQ ID NO: 12939 - DNA, 32 bp, Artificial Sequence; identical to SEQ ID NO: 585
  Probe

SEQ ID NO: 12940 - DNA, 33 bp, Artificial Sequence
  Probe
cccaggcggcccgggttcgactcccggtgtggg

SEQ ID NO: 12941 - DNA, 31 bp, Artificial Sequence
  Probe
cccaggtggcccgggttcgactcccggtatg

SEQ ID NO: 12942 - DNA, 32 bp, Artificial Sequence
  Probe
cccaggtggcccgggttcgactcccggtatgg

SEQ ID NO: 12943 - DNA, 19 bp, Artificial Sequence
  Probe
cccataacccagaggtcga

SEQ ID NO: 12944 - DNA, 37 bp, Artificial Sequence
  Probe
cccataccccgaaaatgttggttatacccttcccgta

SEQ ID NO: 12945 - DNA, 40 bp, Artificial Sequence
  Probe
cccataccccgaaaatgttggttatacccttcccgtacta

SEQ ID NO: 12946 - DNA, 32 bp, Artificial Sequence; identical to SEQ ID NO: 590
  Probe

SEQ ID NO: 12947 - DNA, 33 bp, Artificial Sequence; identical to SEQ ID NO: 4645
  Probe

SEQ ID NO: 12948 - DNA, 34 bp, Artificial Sequence; identical to SEQ ID NO: 591
  Probe

SEQ ID NO: 12949 - DNA, 31 bp, Artificial Sequence; identical to SEQ ID NO: 602
  Probe

SEQ ID NO: 12950 - DNA, 32 bp, Artificial Sequence; identical to SEQ ID NO: 4701
  Probe

SEQ ID NO: 12951 - DNA, 33 bp, Artificial Sequence; identical to SEQ ID NO: 603
  Probe

SEQ ID NO: 12952 - DNA, 34 bp, Artificial Sequence; identical to SEQ ID NO: 604
  Probe

SEQ ID NO: 12953 - DNA, 17 bp, Artificial Sequence
  Probe
ccccggcacctccacca

SEQ ID NO: 12954 - DNA, 30 bp, Artificial Sequence; identical to SEQ ID NO: 611
  Probe

SEQ ID NO: 12955 - DNA, 31 bp, Artificial Sequence; identical to SEQ ID NO: 612
  Probe

SEQ ID NO: 12956 - DNA, 32 bp, Artificial Sequence; identical to SEQ ID NO: 613
  Probe

SEQ ID NO: 12957 - DNA, 33 bp, Artificial Sequence; identical to SEQ ID NO: 614
  Probe

SEQ ID NO: 12958 - DNA, 30 bp, Artificial Sequence; identical to SEQ ID NO: 615
  Probe

SEQ ID NO: 12959 - DNA, 31 bp, Artificial Sequence; identical to SEQ ID NO: 616
  Probe

SEQ ID NO: 12960 - DNA, 32 bp, Artificial Sequence; identical to SEQ ID NO: 617
  Probe

SEQ ID NO: 12961 - DNA, 33 bp, Artificial Sequence; identical to SEQ ID NO: 618
  Probe

SEQ ID NO: 12962 - DNA, 34 bp, Artificial Sequence; identical to SEQ ID NO: 619
  Probe

SEQ ID NO: 12963 - DNA, 35 bp, Artificial Sequence; identical to SEQ ID NO: 620
  Probe

SEQ ID NO: 12964 - DNA, 36 bp, Artificial Sequence
  Probe
cccggatagctcagtcggtagagcatcagactttta

SEQ ID NO: 12965 - DNA, 25 bp, Artificial Sequence
  Probe
cccggctagctcagtcggtagagca

SEQ ID NO: 12966 - DNA, 27 bp, Artificial Sequence
  Probe
cccggctagctcagtcggtagagcatg

SEQ ID NO: 12967 - DNA, 28 bp, Artificial Sequence
  Probe
cccggctagctcagtcggtagagcatga

SEQ ID NO: 12968 - DNA, 29 bp, Artificial Sequence
  Probe
cccggctagctcagtcggtagagcatgag

SEQ ID NO: 12969 - DNA, 30 bp, Artificial Sequence; identical to SEQ ID NO: 4748
  Probe

SEQ ID NO: 12970 - DNA, 31 bp, Artificial Sequence; identical to SEQ ID NO: 621
  Probe

SEQ ID NO: 12971 - DNA, 32 bp, Artificial Sequence
  Probe
cccggctagctcagtcggtagagcatgagacc

SEQ ID NO: 12972 - DNA, 32 bp, Artificial Sequence; identical to SEQ ID NO: 622
  Probe

SEQ ID NO: 12973 - DNA, 33 bp, Artificial Sequence; identical to SEQ ID NO: 623
  Probe

SEQ ID NO: 12974 - DNA, 35 bp, Artificial Sequence; identical to SEQ ID NO: 625
  Probe

SEQ ID NO: 12975 - DNA, 28 bp, Artificial Sequence
  Probe
cccggctagctcagtcggtagagcatgg

SEQ ID NO: 12976 - DNA, 29 bp, Artificial Sequence
  Probe
cccggctagctcagtcggtagagcatggg

SEQ ID NO: 12977 - DNA, 30 bp, Artificial Sequence; identical to SEQ ID NO: 4750
  Probe

SEQ ID NO: 12978 - DNA, 31 bp, Artificial Sequence; identical to SEQ ID NO: 626
  Probe

SEQ ID NO: 12979 - DNA, 32 bp, Artificial Sequence; identical to SEQ ID NO: 627
  Probe

SEQ ID NO: 12980 - DNA, 33 bp, Artificial Sequence; identical to SEQ ID NO: 628
  Probe

SEQ ID NO: 12981 - DNA, 34 bp, Artificial Sequence; identical to SEQ ID NO: 629
  Probe

SEQ ID NO: 12982 - DNA, 35 bp, Artificial Sequence; identical to SEQ ID NO: 630
  Probe

SEQ ID NO: 12983 - DNA, 16 bp, Artificial Sequence
  Probe
cccggtaatcgcataa

SEQ ID NO: 12984 - DNA, 16 bp, Artificial Sequence
  Probe
ccctcagtaagttgca

SEQ ID NO: 12985 - DNA, 30 bp, Artificial Sequence
  Probe
ccctggtggtctagtggctaggattcggcg

SEQ ID NO: 12986 - DNA, 32 bp, Artificial Sequence; identical to SEQ ID NO: 634
  Probe

SEQ ID NO: 12987 - DNA, 33 bp, Artificial Sequence; identical to SEQ ID NO: 4764
  Probe

SEQ ID NO: 12988 - DNA, 34 bp, Artificial Sequence; identical to SEQ ID NO: 635
  Probe

SEQ ID NO: 12989 - DNA, 35 bp, Artificial Sequence; identical to SEQ ID NO: 636
  Probe

SEQ ID NO: 12990 - DNA, 36 bp, Artificial Sequence
  Probe
ccctggtggtctagtggctaggattcggcgctttca

SEQ ID NO: 12991 - DNA, 30 bp, Artificial Sequence; identical to SEQ ID NO: 637
  Probe

SEQ ID NO: 12992 - DNA, 31 bp, Artificial Sequence; identical to SEQ ID NO: 638
  Probe

SEQ ID NO: 12993 - DNA, 32 bp, Artificial Sequence; identical to SEQ ID NO: 639
  Probe

SEQ ID NO: 12994 - DNA, 33 bp, Artificial Sequence; identical to SEQ ID NO: 640
  Probe

SEQ ID NO: 12995 - DNA, 34 bp, Artificial Sequence; identical to SEQ ID NO: 641
  Probe

SEQ ID NO: 12996 - DNA, 35 bp, Artificial Sequence; identical to SEQ ID NO: 642
  Probe

SEQ ID NO: 12997 - DNA, 36 bp, Artificial Sequence; identical to SEQ ID NO: 643
  Probe

SEQ ID NO: 12998 - DNA, 38 bp, Artificial Sequence
  Probe
ccctggtggtctagtggttaggattcggcgctctcacc

SEQ ID NO: 12999 - DNA, 29 bp, Artificial Sequence
  Probe
ccgaaaatgttggttatacccttcccgta

SEQ ID NO: 13000 - DNA, 30 bp, Artificial Sequence; identical to SEQ ID NO: 644
  Probe

SEQ ID NO: 13001 - DNA, 31 bp, Artificial Sequence; identical to SEQ ID NO: 4782
  Probe

SEQ ID NO: 13002 - DNA, 32 bp, Artificial Sequence
  Probe
ccgaaaatgttggttatacccttcccgtacta

SEQ ID NO: 13003 - DNA, 33 bp, Artificial Sequence; identical to SEQ ID NO: 645
  Probe

SEQ ID NO: 13004 - DNA, 37 bp, Artificial Sequence; identical to SEQ ID NO: 4785
  Probe

SEQ ID NO: 13005 - DNA, 32 bp, Artificial Sequence
  Probe
ccgccgcggcccgggttcgattcccggtcagg

SEQ ID NO: 13006 - DNA, 33 bp, Artificial Sequence
  Probe
ccgccgcggcccgggttcgattcccggtcaggg

SEQ ID NO: 13007 - DNA, 34 bp, Artificial Sequence
  Probe
ccgccgcggcccgggttcgattcccggtcaggga

SEQ ID NO: 13008 - DNA, 35 bp, Artificial Sequence
  Probe
ccgccgcggcccgggttcgattcccggtcagggaa

SEQ ID NO: 13009 - DNA, 26 bp, Artificial Sequence
  Probe
ccgcctgtcacgcgggagaccggggt

SEQ ID NO: 13010 - DNA, 17 bp, Artificial Sequence
  Probe
ccgcggcccgggttcga

SEQ ID NO: 13011 - DNA, 29 bp, Artificial Sequence
  Probe
ccgcggcccgggttcgattcccggtcagg

SEQ ID NO: 13012 - DNA, 31 bp, Artificial Sequence; identical to SEQ ID NO: 4807
  Probe

SEQ ID NO: 13013 - DNA, 32 bp, Artificial Sequence; identical to SEQ ID NO: 4808
  Probe

SEQ ID NO: 13014 - DNA, 19 bp, Artificial Sequence
  Probe
ccgctggtgtagtggtatc

SEQ ID NO: 13015 - DNA, 22 bp, Artificial Sequence
  Probe
ccgctggtgtagtggtatcatg

SEQ ID NO: 13016 - DNA, 23 bp, Artificial Sequence
  Probe
ccgctggtgtagtggtatcatgc

SEQ ID NO: 13017 - DNA, 25 bp, Artificial Sequence
  Probe
ccgctggtgtagtggtatcatgcaa

SEQ ID NO: 13018 - DNA, 26 bp, Artificial Sequence
  Probe
ccgctggtgtagtggtatcatgcaag

SEQ ID NO: 13019 - DNA, 27 bp, Artificial Sequence
  Probe
ccgctggtgtagtggtatcatgcaaga

SEQ ID NO: 13020 - DNA, 28 bp, Artificial Sequence
  Probe
ccgctggtgtagtggtatcatgcaagat

SEQ ID NO: 13021 - DNA, 29 bp, Artificial Sequence
  Probe
ccgctggtgtagtggtatcatgcaagatt

SEQ ID NO: 13022 - DNA, 30 bp, Artificial Sequence; identical to SEQ ID NO: 657
  Probe

SEQ ID NO: 13023 - DNA, 31 bp, Artificial Sequence; identical to SEQ ID NO: 658
  Probe

SEQ ID NO: 13024 - DNA, 32 bp, Artificial Sequence; identical to SEQ ID NO: 659
  Probe

SEQ ID NO: 13025 - DNA, 33 bp, Artificial Sequence; identical to SEQ ID NO: 660
  Probe

SEQ ID NO: 13026 - DNA, 34 bp, Artificial Sequence
  Probe
ccgctggtgtagtggtatcatgcaagattcccat

SEQ ID NO: 13027 - DNA, 36 bp, Artificial Sequence
  Probe
ccgctggtgtagtggtatcatgcaagattcccattc

SEQ ID NO: 13028 - DNA, 16 bp, Artificial Sequence
  Probe
ccggagatgaaaacct

SEQ ID NO: 13029 - DNA, 17 bp, Artificial Sequence
  Probe
ccggagatgaaaacctt

SEQ ID NO: 13030 - DNA, 22 bp, Artificial Sequence
  Probe
ccggagatgaaaacctttttcc

SEQ ID NO: 13031 - DNA, 27 bp, Artificial Sequence
  Probe
ccggagatgaaaacctttttccaagga

SEQ ID NO: 13032 - DNA, 28 bp, Artificial Sequence
  Probe
ccggatagctcagtcggtagagcatcag

SEQ ID NO: 13033 - DNA, 29 bp, Artificial Sequence
  Probe
ccggatagctcagtcggtagagcatcaga

SEQ ID NO: 13034 - DNA, 30 bp, Artificial Sequence; identical to SEQ ID NO: 668
  Probe

SEQ ID NO: 13035 - DNA, 31 bp, Artificial Sequence; identical to SEQ ID NO: 669
  Probe

SEQ ID NO: 13036 - DNA, 32 bp, Artificial Sequence; identical to SEQ ID NO: 670
  Probe

SEQ ID NO: 13037 - DNA, 33 bp, Artificial Sequence; identical to SEQ ID NO: 671
  Probe

SEQ ID NO: 13038 - DNA, 34 bp, Artificial Sequence; identical to SEQ ID NO: 672
  Probe

SEQ ID NO: 13039 - DNA, 24 bp, Artificial Sequence
  Probe
ccggctagctcagtcggtagagca

SEQ ID NO: 13040 - DNA, 27 bp, Artificial Sequence
  Probe
ccggctagctcagtcggtagagcatga

SEQ ID NO: 13041 - DNA, 29 bp, Artificial Sequence
  Probe
ccggctagctcagtcggtagagcatgaga

SEQ ID NO: 13042 - DNA, 30 bp, Artificial Sequence; identical to SEQ ID NO: 675
  Probe

SEQ ID NO: 13043 - DNA, 31 bp, Artificial Sequence
  Probe
ccggctagctcagtcggtagagcatgagacc

SEQ ID NO: 13044 - DNA, 31 bp, Artificial Sequence; identical to SEQ ID NO: 676
  Probe

SEQ ID NO: 13045 - DNA, 32 bp, Artificial Sequence; identical to SEQ ID NO: 677
  Probe

SEQ ID NO: 13046 - DNA, 27 bp, Artificial Sequence
  Probe
ccggctagctcagtcggtagagcatgg

SEQ ID NO: 13047 - DNA, 28 bp, Artificial Sequence
  Probe
ccggctagctcagtcggtagagcatggg

SEQ ID NO: 13048 - DNA, 29 bp, Artificial Sequence
  Probe
ccggctagctcagtcggtagagcatggga

SEQ ID NO: 13049 - DNA, 30 bp, Artificial Sequence; identical to SEQ ID NO: 680
  Probe

SEQ ID NO: 13050 - DNA, 31 bp, Artificial Sequence; identical to SEQ ID NO: 681
  Probe

SEQ ID NO: 13051 - DNA, 32 bp, Artificial Sequence; identical to SEQ ID NO: 682
  Probe

SEQ ID NO: 13052 - DNA, 24 bp, Artificial Sequence
  Probe
ccgtagtgtagtggtcatcacgtt

SEQ ID NO: 13053 - DNA, 27 bp, Artificial Sequence
  Probe
ccgtagtgtagtggtcatcacgttcgc

SEQ ID NO: 13054 - DNA, 28 bp, Artificial Sequence
  Probe
ccgtagtgtagtggtcatcacgttcgcc

SEQ ID NO: 13055 - DNA, 29 bp, Artificial Sequence
  Probe
ccgtgatcgtatagtggttagtactctgc

SEQ ID NO: 13056 - DNA, 34 bp, Artificial Sequence; identical to SEQ ID NO: 689
  Probe

SEQ ID NO: 13057 - DNA, 35 bp, Artificial Sequence; identical to SEQ ID NO: 690
  Probe

SEQ ID NO: 13058 - DNA, 24 bp, Artificial Sequence
  Probe
cctcacacgcgaaaggtccccggt

SEQ ID NO: 13059 - DNA, 27 bp, Artificial Sequence
  Probe
cctcgttagtatagtggtgagtatccc

SEQ ID NO: 13060 - DNA, 28 bp, Artificial Sequence
  Probe
cctcgttagtatagtggtgagtatcccc

SEQ ID NO: 13061 - DNA, 34 bp, Artificial Sequence; identical to SEQ ID NO: 694
  Probe

SEQ ID NO: 13062 - DNA, 35 bp, Artificial Sequence; identical to SEQ ID NO: 695
  Probe

SEQ ID NO: 13063 - DNA, 23 bp, Artificial Sequence
  Probe
cctgccacgcgggaggcccgggt

SEQ ID NO: 13064 - DNA, 24 bp, Artificial Sequence
  Probe
cctgccacgcgggaggcccgggtt

SEQ ID NO: 13065 - DNA, 31 bp, Artificial Sequence; identical to SEQ ID NO: 4873
  Probe

SEQ ID NO: 13066 - DNA, 32 bp, Artificial Sequence
  Probe
cctggtggtctagtggctaggattcggcgctt

SEQ ID NO: 13067 - DNA, 33 bp, Artificial Sequence; identical to SEQ ID NO: 696
  Probe

SEQ ID NO: 13068 - DNA, 34 bp, Artificial Sequence; identical to SEQ ID NO: 697
  Probe

SEQ ID NO: 13069 - DNA, 29 bp, Artificial Sequence
  Probe
cctggtggtctagtggttaggattcggcg

SEQ ID NO: 13070 - DNA, 30 bp, Artificial Sequence; identical to SEQ ID NO: 699
  Probe

SEQ ID NO: 13071 - DNA, 31 bp, Artificial Sequence; identical to SEQ ID NO: 700
  Probe

SEQ ID NO: 13072 - DNA, 32 bp, Artificial Sequence; identical to SEQ ID NO: 701
  Probe

SEQ ID NO: 13073 - DNA, 33 bp, Artificial Sequence; identical to SEQ ID NO: 702
  Probe

SEQ ID NO: 13074 - DNA, 34 bp, Artificial Sequence; identical to SEQ ID NO: 703
  Probe

SEQ ID NO: 13075 - DNA, 35 bp, Artificial Sequence; identical to SEQ ID NO: 704
  Probe

SEQ ID NO: 13076 - DNA, 23 bp, Artificial Sequence
  Probe
cctgtcacgcgggagaccggggt

SEQ ID NO: 13077 - DNA, 24 bp, Artificial Sequence
  Probe
cctgtcacgcgggagaccggggtt

SEQ ID NO: 13078 - DNA, 38 bp, Artificial Sequence
  Probe
cctgtcacgcgggagaccggggttcaattccccgacgg

SEQ ID NO: 13079 - DNA, 39 bp, Artificial Sequence
  Probe
cctgtcacgcgggagaccggggttcaattccccgacggg

SEQ ID NO: 13080 - DNA, 35 bp, Artificial Sequence
  Probe
cctgtcacgcgggagaccggggttcgattccccga

SEQ ID NO: 13081 - DNA, 38 bp, Artificial Sequence
  Probe
cctgtcacgcgggagaccggggttcgattccccgacgg

SEQ ID NO: 13082 - DNA, 39 bp, Artificial Sequence
  Probe
cctgtcacgcgggagaccggggttcgattccccgacggg

SEQ ID NO: 13083 - DNA, 40 bp, Artificial Sequence
  Probe
cctgtcacgcgggagaccggggttcgattccccgacgggg

SEQ ID NO: 13084 - DNA, 19 bp, Artificial Sequence
  Probe
ccttccaagcagttgaccc

SEQ ID NO: 13085 - DNA, 23 bp, Artificial Sequence
  Probe
ccttccaagcagttgacccgggt

SEQ ID NO: 13086 - DNA, 24 bp, Artificial Sequence
  Probe
ccttccaagcagttgacccgggtt

SEQ ID NO: 13087 - DNA, 28 bp, Artificial Sequence
  Probe
cgaaaatgttggttatacccttcccgta

SEQ ID NO: 13088 - DNA, 29 bp, Artificial Sequence
  Probe
cgaaaatgttggttatacccttcccgtac

SEQ ID NO: 13089 - DNA, 30 bp, Artificial Sequence; identical to SEQ ID NO: 709
  Probe

SEQ ID NO: 13090 - DNA, 31 bp, Artificial Sequence; identical to SEQ ID NO: 710
  Probe

SEQ ID NO: 13091 - DNA, 31 bp, Artificial Sequence
  Probe
cgaaaggttggtggttcgagcccacccaggg

SEQ ID NO: 13092 - DNA, 32 bp, Artificial Sequence; identical to SEQ ID NO: 711
  Probe

SEQ ID NO: 13093 - DNA, 35 bp, Artificial Sequence
  Probe
cgagaggtcccgggttcaaatcccggacgagcccc

SEQ ID NO: 13094 - DNA, 33 bp, Artificial Sequence
  Probe
cgcagaaggtcctgggttcgagccccagtggaa

SEQ ID NO: 13095 - DNA, 34 bp, Artificial Sequence
  Probe
cgcagaaggtcctgggttcgagccccagtggaac

SEQ ID NO: 13096 - DNA, 35 bp, Artificial Sequence
  Probe
cgcagaaggtcctgggttcgagccccagtggaacc

SEQ ID NO: 13097 - DNA, 36 bp, Artificial Sequence
  Probe
cgcagaaggtcctgggttcgagccccagtggaacca

SEQ ID NO: 13098 - DNA, 37 bp, Artificial Sequence
  Probe
cgcagaaggtcctgggttcgagccccagtggaaccac

SEQ ID NO: 13099 - DNA, 23 bp, Artificial Sequence
  Probe
cgcagcggaagcgtgctgggccc

SEQ ID NO: 13100 - DNA, 18 bp, Artificial Sequence
  Probe
cgcataaaacttaaaact

SEQ ID NO: 13101 - DNA, 26 bp, Artificial Sequence
  Probe
cgcataaaacttaaaactttacagtc

SEQ ID NO: 13102 - DNA, 27 bp, Artificial Sequence
  Probe
cgcataaaacttaaaactttacagtca

SEQ ID NO: 13103 - DNA, 33 bp, Artificial Sequence
  Probe
cgccgcggcccgggttcgattcccggtcaggga

SEQ ID NO: 13104 - DNA, 28 bp, Artificial Sequence
  Probe
cgccgctggtgtagtggtatcatgcaag

SEQ ID NO: 13105 - DNA, 31 bp, Artificial Sequence; identical to SEQ ID NO: 722
  Probe

SEQ ID NO: 13106 - DNA, 32 bp, Artificial Sequence; identical to SEQ ID NO: 723
  Probe

SEQ ID NO: 13107 - DNA, 21 bp, Artificial Sequence
  Probe
cgcctgccacgcgggaggccc

SEQ ID NO: 13108 - DNA, 23 bp, Artificial Sequence
  Probe
cgcctgtcacgcgggagaccggg

SEQ ID NO: 13109 - DNA, 24 bp, Artificial Sequence
  Probe
cgcctgtcacgcgggagaccgggg

SEQ ID NO: 13110 - DNA, 25 bp, Artificial Sequence
  Probe
cgcctgtcacgcgggagaccggggt

SEQ ID NO: 13111 - DNA, 26 bp, Artificial Sequence
  Probe
cgcctgtcacgcgggagaccggggtt

SEQ ID NO: 13112 - DNA, 40 bp, Artificial Sequence
  Probe
cgcctgtcacgcgggagaccggggttcaattccccgacgg

SEQ ID NO: 13113 - DNA, 41 bp, Artificial Sequence
  Probe
cgcctgtcacgcgggagaccggggttcaattccccgacggg

SEQ ID NO: 13114 - DNA, 42 bp, Artificial Sequence
  Probe
cgcctgtcacgcgggagaccggggttcaattccccgacgggg

SEQ ID NO: 13115 - DNA, 31 bp, Artificial Sequence
  Probe
cgcctgtcacgcgggagaccggggttcgatt

SEQ ID NO: 13116 - DNA, 37 bp, Artificial Sequence
  Probe
cgcctgtcacgcgggagaccggggttcgattccccga

SEQ ID NO: 13117 - DNA, 39 bp, Artificial Sequence
  Probe
cgcctgtcacgcgggagaccggggttcgattccccgacg

SEQ ID NO: 13118 - DNA, 40 bp, Artificial Sequence
  Probe
cgcctgtcacgcgggagaccggggttcgattccccgacgg

SEQ ID NO: 13119 - DNA, 41 bp, Artificial Sequence; identical to SEQ ID NO: 725
  Probe

SEQ ID NO: 13120 - DNA, 42 bp, Artificial Sequence
  Probe
cgcctgtcacgcgggagaccggggttcgattccccgacgggg

SEQ ID NO: 13121 - DNA, 43 bp, Artificial Sequence
  Probe
cgcctgtcacgcgggagaccggggttcgattccccgacgggga

SEQ ID NO: 13122 - DNA, 44 bp, Artificial Sequence; identical to SEQ ID NO: 5006
  Probe

SEQ ID NO: 13123 - DNA, 17 bp, Artificial Sequence
  Probe
cgcgaaaggtccccggt

SEQ ID NO: 13124 - DNA, 18 bp, Artificial Sequence
  Probe
cgcgaaaggtccccggtt

SEQ ID NO: 13125 - DNA, 33 bp, Artificial Sequence
  Probe
cgcgaaaggtccccggttcgaaaccgggcggaa

SEQ ID NO: 13126 - DNA, 16 bp, Artificial Sequence
  Probe
cgcgggagaccggggt

SEQ ID NO: 13127 - DNA, 17 bp, Artificial Sequence
  Probe
cgcgggagaccggggtt

SEQ ID NO: 13128 - DNA, 29 bp, Artificial Sequence
  Probe
cgcgggagaccggggttcaattccccgac

SEQ ID NO: 13129 - DNA, 30 bp, Artificial Sequence
  Probe
cgcgggagaccggggttcaattccccgacg

SEQ ID NO: 13130 - DNA, 31 bp, Artificial Sequence; identical to SEQ ID NO: 5024
  Probe

SEQ ID NO: 13131 - DNA, 32 bp, Artificial Sequence; identical to SEQ ID NO: 727
  Probe

SEQ ID NO: 13132 - DNA, 33 bp, Artificial Sequence
  Probe
cgcgggagaccggggttcaattccccgacgggg

SEQ ID NO: 13133 - DNA, 34 bp, Artificial Sequence; identical to SEQ ID NO: 728
  Probe

SEQ ID NO: 13134 - DNA, 35 bp, Artificial Sequence; identical to SEQ ID NO: 729
  Probe

SEQ ID NO: 13135 - DNA, 20 bp, Artificial Sequence
  Probe
cgcgggagaccggggttcga

SEQ ID NO: 13136 - DNA, 22 bp, Artificial Sequence
  Probe
cgcgggagaccggggttcgatt

SEQ ID NO: 13137 - DNA, 32 bp, Artificial Sequence
  Probe
cgcgggagaccggggttcgattccccaacggg

SEQ ID NO: 13138 - DNA, 28 bp, Artificial Sequence
  Probe
cgcgggagaccggggttcgattccccga

SEQ ID NO: 13139 - DNA, 29 bp, Artificial Sequence
  Probe
cgcgggagaccggggttcgattccccgac

SEQ ID NO: 13140 - DNA, 30 bp, Artificial Sequence; identical to SEQ ID NO: 730
  Probe

SEQ ID NO: 13141 - DNA, 31 bp, Artificial Sequence; identical to SEQ ID NO: 731
  Probe

SEQ ID NO: 13142 - DNA, 32 bp, Artificial Sequence; identical to SEQ ID NO: 732
  Probe

SEQ ID NO: 13143 - DNA, 33 bp, Artificial Sequence; identical to SEQ ID NO: 733
  Probe

SEQ ID NO: 13144 - DNA, 34 bp, Artificial Sequence; identical to SEQ ID NO: 734
  Probe

SEQ ID NO: 13145 - DNA, 35 bp, Artificial Sequence; identical to SEQ ID NO: 735
  Probe

SEQ ID NO: 13146 - DNA, 16 bp, Artificial Sequence
  Probe
cgcgggaggcccgggt

SEQ ID NO: 13147 - DNA, 17 bp, Artificial Sequence
  Probe
cgcgggaggcccgggtt

SEQ ID NO: 13148 - DNA, 19 bp, Artificial Sequence
  Probe
cgcgggaggcccgggttcg

SEQ ID NO: 13149 - DNA, 35 bp, Artificial Sequence
  Probe
cgcgggaggcccgggttcgattcccggccaatgca

SEQ ID NO: 13150 - DNA, 35 bp, Artificial Sequence
  Probe
cgcgggaggcccgggttcgattcccggcccatgca

SEQ ID NO: 13151 - DNA, 29 bp, Artificial Sequence
  Probe
cgctggtgtagtggtatcatgcaagattc

SEQ ID NO: 13152 - DNA, 16 bp, Artificial Sequence
  Probe
cggaagcgtgctgggc

SEQ ID NO: 13153 - DNA, 17 bp, Artificial Sequence
  Probe
cggaagcgtgctgggcc

SEQ ID NO: 13154 - DNA, 18 bp, Artificial Sequence
  Probe
cggaagcgtgctgggccc

SEQ ID NO: 13155 - DNA, 23 bp, Artificial Sequence
  Probe
cggaagcgtgctgggcccataac

SEQ ID NO: 13156 - DNA, 24 bp, Artificial Sequence
  Probe
cggaagcgtgctgggcccataacc

SEQ ID NO: 13157 - DNA, 25 bp, Artificial Sequence
  Probe
cggaagcgtgctgggcccataaccc

SEQ ID NO: 13158 - DNA, 32 bp, Artificial Sequence; identical to SEQ ID NO: 745
  Probe

SEQ ID NO: 13159 - DNA, 33 bp, Artificial Sequence; identical to SEQ ID NO: 746
  Probe

SEQ ID NO: 13160 - DNA, 34 bp, Artificial Sequence; identical to SEQ ID NO: 747
  Probe

SEQ ID NO: 13161 - DNA, 35 bp, Artificial Sequence; identical to SEQ ID NO: 748
  Probe

SEQ ID NO: 13162 - DNA, 36 bp, Artificial Sequence; identical to SEQ ID NO: 749
  Probe

SEQ ID NO: 13163 - DNA, 37 bp, Artificial Sequence; identical to SEQ ID NO: 750
  Probe

SEQ ID NO: 13164 - DNA, 38 bp, Artificial Sequence; identical to SEQ ID NO: 751
  Probe

SEQ ID NO: 13165 - DNA, 39 bp, Artificial Sequence; identical to SEQ ID NO: 752
  Probe

SEQ ID NO: 13166 - DNA, 41 bp, Artificial Sequence; identical to SEQ ID NO: 753
  Probe

SEQ ID NO: 13167 - DNA, 22 bp, Artificial Sequence
  Probe
cggagatgaaaacctttttcca

SEQ ID NO: 13168 - DNA, 24 bp, Artificial Sequence
  Probe
cggagatgaaaacctttttccaag

SEQ ID NO: 13169 - DNA, 26 bp, Artificial Sequence
  Probe
cggagatgaaaacctttttccaagga

SEQ ID NO: 13170 - DNA, 27 bp, Artificial Sequence
  Probe
cggagatgaaaacctttttccaaggac

SEQ ID NO: 13171 - DNA, 28 bp, Artificial Sequence
  Probe
cggagatgaaaacctttttccaaggaca

SEQ ID NO: 13172 - DNA, 26 bp, Artificial Sequence
  Probe
cggatagctcagtcggtagagcatca

SEQ ID NO: 13173 - DNA, 27 bp, Artificial Sequence
  Probe
cggatagctcagtcggtagagcatcag

SEQ ID NO: 13174 - DNA, 28 bp, Artificial Sequence
  Probe
cggatagctcagtcggtagagcatcaga

SEQ ID NO: 13175 - DNA, 29 bp, Artificial Sequence
  Probe
cggatagctcagtcggtagagcatcagac

SEQ ID NO: 13176 - DNA, 30 bp, Artificial Sequence; identical to SEQ ID NO: 762
  Probe

SEQ ID NO: 13177 - DNA, 31 bp, Artificial Sequence; identical to SEQ ID NO: 763
  Probe

SEQ ID NO: 13178 - DNA, 32 bp, Artificial Sequence; identical to SEQ ID NO: 764
  Probe

SEQ ID NO: 13179 - DNA, 33 bp, Artificial Sequence; identical to SEQ ID NO: 765
  Probe

SEQ ID NO: 13180 - DNA, 34 bp, Artificial Sequence
  Probe
cggatagctcagtcggtagagcatcagactttta

SEQ ID NO: 13181 - DNA, 23 bp, Artificial Sequence
  Probe
cggcccgggttcgactcccggtg

SEQ ID NO: 13182 - DNA, 17 bp, Artificial Sequence
  Probe
cggctagctcagtcggt

SEQ ID NO: 13183 - DNA, 20 bp, Artificial Sequence
  Probe
cggctagctcagtcggtaga

SEQ ID NO: 13184 - DNA, 25 bp, Artificial Sequence
  Probe
cggctagctcagtcggtagagcatg

SEQ ID NO: 13185 - DNA, 26 bp, Artificial Sequence
  Probe
cggctagctcagtcggtagagcatga

SEQ ID NO: 13186 - DNA, 27 bp, Artificial Sequence
  Probe
cggctagctcagtcggtagagcatgag

SEQ ID NO: 13187 - DNA, 28 bp, Artificial Sequence
  Probe
cggctagctcagtcggtagagcatgaga

SEQ ID NO: 13188 - DNA, 29 bp, Artificial Sequence
  Probe
cggctagctcagtcggtagagcatgagac

SEQ ID NO: 13189 - DNA, 30 bp, Artificial Sequence
  Probe
cggctagctcagtcggtagagcatgagacc

SEQ ID NO: 13190 - DNA, 31 bp, Artificial Sequence
  Probe
cggctagctcagtcggtagagcatgagaccc

SEQ ID NO: 13191 - DNA, 30 bp, Artificial Sequence; identical to SEQ ID NO: 771
  Probe

SEQ ID NO: 13192 - DNA, 31 bp, Artificial Sequence; identical to SEQ ID NO: 772
  Probe

SEQ ID NO: 13193 - DNA, 32 bp, Artificial Sequence; identical to SEQ ID NO: 773
  Probe

SEQ ID NO: 13194 - DNA, 26 bp, Artificial Sequence
  Probe
cggctagctcagtcggtagagcatgg

SEQ ID NO: 13195 - DNA, 27 bp, Artificial Sequence
  Probe
cggctagctcagtcggtagagcatggg

SEQ ID NO: 13196 - DNA, 28 bp, Artificial Sequence
  Probe
cggctagctcagtcggtagagcatggga

SEQ ID NO: 13197 - DNA, 29 bp, Artificial Sequence
  Probe
cggctagctcagtcggtagagcatgggac

SEQ ID NO: 13198 - DNA, 30 bp, Artificial Sequence; identical to SEQ ID NO: 778
  Probe

SEQ ID NO: 13199 - DNA, 31 bp, Artificial Sequence; identical to SEQ ID NO: 779
  Probe

SEQ ID NO: 13200 - DNA, 32 bp, Artificial Sequence; identical to SEQ ID NO: 780
  Probe

SEQ ID NO: 13201 - DNA, 33 bp, Artificial Sequence; identical to SEQ ID NO: 781
  Probe

SEQ ID NO: 13202 - DNA, 34 bp, Artificial Sequence
  Probe
cggctagctcagtcggtagagcatgggactctta

SEQ ID NO: 13203 - DNA, 29 bp, Artificial Sequence
  Probe
cgggagaccggggttcaattccccgacgg

SEQ ID NO: 13204 - DNA, 30 bp, Artificial Sequence
  Probe
cgggagaccggggttcaattccccgacggg

SEQ ID NO: 13205 - DNA, 31 bp, Artificial Sequence
  Probe
cgggagaccggggttcaattccccgacgggg

SEQ ID NO: 13206 - DNA, 32 bp, Artificial Sequence; identical to SEQ ID NO: 783
  Probe

SEQ ID NO: 13207 - DNA, 33 bp, Artificial Sequence; identical to SEQ ID NO: 784
  Probe

SEQ ID NO: 13208 - DNA, 26 bp, Artificial Sequence
  Probe
cgggagaccggggttcgattccccga

SEQ ID NO: 13209 - DNA, 27 bp, Artificial Sequence
  Probe
cgggagaccggggttcgattccccgac

SEQ ID NO: 13210 - DNA, 28 bp, Artificial Sequence
  Probe
cgggagaccggggttcgattccccgacg

SEQ ID NO: 13211 - DNA, 29 bp, Artificial Sequence
  Probe
cgggagaccggggttcgattccccgacgg

SEQ ID NO: 13212 - DNA, 30 bp, Artificial Sequence; identical to SEQ ID NO: 786
  Probe

SEQ ID NO: 13213 - DNA, 31 bp, Artificial Sequence; identical to SEQ ID NO: 787
  Probe

SEQ ID NO: 13214 - DNA, 32 bp, Artificial Sequence; identical to SEQ ID NO: 788
  Probe

SEQ ID NO: 13215 - DNA, 33 bp, Artificial Sequence; identical to SEQ ID NO: 789
  Probe

SEQ ID NO: 13216 - DNA, 16 bp, Artificial Sequence
  Probe
cgggaggcccgggttt

SEQ ID NO: 13217 - DNA, 25 bp, Artificial Sequence
  Probe
cggtaatcgcataaaacttaaaact

SEQ ID NO: 13218 - DNA, 34 bp, Artificial Sequence; identical to SEQ ID NO: 790
  Probe

SEQ ID NO: 13219 - DNA, 16 bp, Artificial Sequence
  Probe
cggtagagcatcagac

SEQ ID NO: 13220 - DNA, 34 bp, Artificial Sequence
  Probe
cggttaggattcctggttttcacccaggcggccc

SEQ ID NO: 13221 - DNA, 34 bp, Artificial Sequence
  Probe
cggttaggattcctggttttcacccaggtggccc

SEQ ID NO: 13222 - DNA, 16 bp, Artificial Sequence
  Probe
cggttatcacgtctgc

SEQ ID NO: 13223 - DNA, 28 bp, Artificial Sequence
  Probe
cgtgatcgtatagtggttagtactctgc

SEQ ID NO: 13224 - DNA, 32 bp, Artificial Sequence; identical to SEQ ID NO: 794
  Probe

SEQ ID NO: 13225 - DNA, 33 bp, Artificial Sequence; identical to SEQ ID NO: 795
  Probe

SEQ ID NO: 13226 - DNA, 34 bp, Artificial Sequence; identical to SEQ ID NO: 796
  Probe

SEQ ID NO: 13227 - DNA, 29 bp, Artificial Sequence
  Probe
cgttagtatagtggtgagtatccccgcct

SEQ ID NO: 13228 - DNA, 31 bp, Artificial Sequence
  Probe
cgttagtatagtggtgagtatccccgcctgt

SEQ ID NO: 13229 - DNA, 32 bp, Artificial Sequence; identical to SEQ ID NO: 803
  Probe

SEQ ID NO: 13230 - DNA, 19 bp, Artificial Sequence
  Probe
cgttcaggtcgcagtctcc

SEQ ID NO: 13231 - DNA, 42 bp, Artificial Sequence
  Probe
ctaacttagcattaaccttttaagttaaagattaagagaacc

SEQ ID NO: 13232 - DNA, 20 bp, Artificial Sequence
  Probe
ctaagccagggattgtgggt

SEQ ID NO: 13233 - DNA, 32 bp, Artificial Sequence; identical to SEQ ID NO: 5170
  Probe

SEQ ID NO: 13234 - DNA, 33 bp, Artificial Sequence; identical to SEQ ID NO: 5171
  Probe

SEQ ID NO: 13235 - DNA, 34 bp, Artificial Sequence
  Probe
ctaagtgtttgtgggtttaagtcccattggtcta

SEQ ID NO: 13236 - DNA, 18 bp, Artificial Sequence
  Probe
ctaatggataaggcattg

SEQ ID NO: 13237 - DNA, 25 bp, Artificial Sequence
  Probe
ctagctcagtcggtagagcatggga

SEQ ID NO: 13238 - DNA, 26 bp, Artificial Sequence
  Probe
ctagctcagtcggtagagcatgggac

SEQ ID NO: 13239 - DNA, 27 bp, Artificial Sequence
  Probe
ctagctcagtcggtagagcatgggact

SEQ ID NO: 13240 - DNA, 28 bp, Artificial Sequence
  Probe
ctagctcagtcggtagagcatgggactc

SEQ ID NO: 13241 - DNA, 29 bp, Artificial Sequence
  Probe
ctagctcagtcggtagagcatgggactct

SEQ ID NO: 13242 - DNA, 20 bp, Artificial Sequence
  Probe
ctagtggttaggattcggcg

SEQ ID NO: 13243 - DNA, 22 bp, Artificial Sequence
  Probe
ctagtggttaggattcggcgct

SEQ ID NO: 13244 - DNA, 38 bp, Artificial Sequence
  Probe
ctagtggttaggattcggcgctctcaccgccgcggccc

SEQ ID NO: 13245 - DNA, 20 bp, Artificial Sequence
  Probe
ctcacaagaactgctaactc

SEQ ID NO: 13246 - DNA, 50 bp, Artificial Sequence; identical to SEQ ID NO: 813
  Probe

SEQ ID NO: 13247 - DNA, 23 bp, Artificial Sequence
  Probe
ctcacacgcgaaaggtccccggt

SEQ ID NO: 13248 - DNA, 30 bp, Artificial Sequence
  Probe
ctcagggatgggttcgattctcatagtcct

SEQ ID NO: 13249 - DNA, 32 bp, Artificial Sequence; identical to SEQ ID NO: 5222
  Probe

SEQ ID NO: 13250 - DNA, 23 bp, Artificial Sequence
  Probe
ctcagtcggtagagcatgggact

SEQ ID NO: 13251 - DNA, 24 bp, Artificial Sequence
  Probe
ctcagtcggtagagcatgggactc

SEQ ID NO: 13252 - DNA, 23 bp, Artificial Sequence
  Probe
ctcataatctgaaggtcgtgagt

SEQ ID NO: 13253 - DNA, 22 bp, Artificial Sequence
  Probe
ctccagtctcttcggaggcgtg

SEQ ID NO: 13254 - DNA, 22 bp, Artificial Sequence
  Probe
ctccagtctcttcgggggcgtg

SEQ ID NO: 13255 - DNA, 25 bp, Artificial Sequence
  Probe
ctccagtctcttcgggggcgtgggt

SEQ ID NO: 13256 - DNA, 16 bp, Artificial Sequence
  Probe
ctcccggtgtgggaac

SEQ ID NO: 13257 - DNA, 26 bp, Artificial Sequence
  Probe
ctcgttagtatagtggtgagtatccc

SEQ ID NO: 13258 - DNA, 30 bp, Artificial Sequence
  Probe
ctcgttagtatagtggtgagtatccccgcc

SEQ ID NO: 13259 - DNA, 31 bp, Artificial Sequence
  Probe
ctcgttagtatagtggtgagtatccccgcct

SEQ ID NO: 13260 - DNA, 32 bp, Artificial Sequence
  Probe
ctcgttagtatagtggtgagtatccccgcctg

SEQ ID NO: 13261 - DNA, 33 bp, Artificial Sequence; identical to SEQ ID NO: 819
  Probe

SEQ ID NO: 13262 - DNA, 34 bp, Artificial Sequence; identical to SEQ ID NO: 820
  Probe

SEQ ID NO: 13263 - DNA, 35 bp, Artificial Sequence; identical to SEQ ID NO: 821
  Probe

SEQ ID NO: 13264 - DNA, 33 bp, Artificial Sequence; identical to SEQ ID NO: 5274
  Probe

SEQ ID NO: 13265 - DNA, 16 bp, Artificial Sequence
  Probe
ctgaatccagcgatcc

SEQ ID NO: 13266 - DNA, 19 bp, Artificial Sequence
  Probe
ctgaatccagcgatccgag

SEQ ID NO: 13267 - DNA, 20 bp, Artificial Sequence
  Probe
ctgaatccagcgatccgagt

SEQ ID NO: 13268 - DNA, 21 bp, Artificial Sequence
  Probe
ctgaatccagcgatccgagtt

SEQ ID NO: 13269 - DNA, 22 bp, Artificial Sequence
  Probe
ctgaatccagcgatccgagttc

SEQ ID NO: 13270 - DNA, 23 bp, Artificial Sequence
  Probe
ctgaatccagcgatccgagttca

SEQ ID NO: 13271 - DNA, 32 bp, Artificial Sequence; identical to SEQ ID NO: 5303
  Probe

SEQ ID NO: 13272 - DNA, 22 bp, Artificial Sequence
  Probe
ctgccacgcgggaggcccgggt

SEQ ID NO: 13273 - DNA, 23 bp, Artificial Sequence
  Probe
ctgccacgcgggaggcccgggtt

SEQ ID NO: 13274 - DNA, 32 bp, Artificial Sequence; identical to SEQ ID NO: 5327
  Probe

SEQ ID NO: 13275 - DNA, 30 bp, Artificial Sequence
  Probe
ctggtggtctagtggctaggattcggcgct

SEQ ID NO: 13276 - DNA, 32 bp, Artificial Sequence
  Probe
ctggtggtctagtggctaggattcggcgcttt

SEQ ID NO: 13277 - DNA, 28 bp, Artificial Sequence
  Probe
ctggtggtctagtggttaggattcggcg

SEQ ID NO: 13278 - DNA, 29 bp, Artificial Sequence
  Probe
ctggtggtctagtggttaggattcggcgc

SEQ ID NO: 13279 - DNA, 30 bp, Artificial Sequence; identical to SEQ ID NO: 839
  Probe

SEQ ID NO: 13280 - DNA, 31 bp, Artificial Sequence; identical to SEQ ID NO: 840
  Probe

SEQ ID NO: 13281 - DNA, 32 bp, Artificial Sequence; identical to SEQ ID NO: 841
  Probe

SEQ ID NO: 13282 - DNA, 33 bp, Artificial Sequence; identical to SEQ ID NO: 842
  Probe

SEQ ID NO: 13283 - DNA, 34 bp, Artificial Sequence; identical to SEQ ID NO: 5330
  Probe

SEQ ID NO: 13284 - DNA, 27 bp, Artificial Sequence
  Probe
ctggtgtagtggtatcatgcaagattc

SEQ ID NO: 13285 - DNA, 19 bp, Artificial Sequence
  Probe
ctgtcacgcgggagaccgg

SEQ ID NO: 13286 - DNA, 20 bp, Artificial Sequence
  Probe
ctgtcacgcgggagaccggg

SEQ ID NO: 13287 - DNA, 21 bp, Artificial Sequence
  Probe
ctgtcacgcgggagaccgggg

SEQ ID NO: 13288 - DNA, 22 bp, Artificial Sequence
  Probe
ctgtcacgcgggagaccggggt

SEQ ID NO: 13289 - DNA, 23 bp, Artificial Sequence
  Probe
ctgtcacgcgggagaccggggtt

SEQ ID NO: 13290 - DNA, 38 bp, Artificial Sequence
  Probe
ctgtcacgcgggagaccggggttcaattccccgacggg

SEQ ID NO: 13291 - DNA, 39 bp, Artificial Sequence; identical to SEQ ID NO: 846
  Probe

SEQ ID NO: 13292 - DNA, 34 bp, Artificial Sequence
  Probe
ctgtcacgcgggagaccggggttcgattccccga

SEQ ID NO: 13293 - DNA, 37 bp, Artificial Sequence
  Probe
ctgtcacgcgggagaccggggttcgattccccgacgg

SEQ ID NO: 13294 - DNA, 38 bp, Artificial Sequence
  Probe
ctgtcacgcgggagaccggggttcgattccccgacggg

SEQ ID NO: 13295 - DNA, 39 bp, Artificial Sequence
  Probe
ctgtcacgcgggagaccggggttcgattccccgacgggg

SEQ ID NO: 13296 - DNA, 19 bp, Artificial Sequence
  Probe
ctgttaaccgaaaggttgg

SEQ ID NO: 13297 - DNA, 50 bp, Artificial Sequence; identical to SEQ ID NO: 850
  Probe

SEQ ID NO: 13298 - DNA, 18 bp, Artificial Sequence
  Probe
cttccaagcagttgaccc

SEQ ID NO: 13299 - DNA, 22 bp, Artificial Sequence
  Probe
cttccaagcagttgacccgggt

SEQ ID NO: 13300 - DNA, 23 bp, Artificial Sequence
  Probe
cttccaagcagttgacccgggtt

SEQ ID NO: 13301 - DNA, 21 bp, Artificial Sequence
  Probe
ctttgaatccagcgatccgag

SEQ ID NO: 13302 - DNA, 22 bp, Artificial Sequence
  Probe
ctttgaatccagcgatccgagt

SEQ ID NO: 13303 - DNA, 23 bp, Artificial Sequence
  Probe
ctttgaatccagcgatccgagtt

SEQ ID NO: 13304 - DNA, 18 bp, Artificial Sequence
  Probe
gaaaaagtcatggaggcc

SEQ ID NO: 13305 - DNA, 19 bp, Artificial Sequence
  Probe
gaaaaagtcatggaggcca

SEQ ID NO: 13306 - DNA, 21 bp, Artificial Sequence
  Probe
gaaaaagtcatggaggccatg

SEQ ID NO: 13307 - DNA, 27 bp, Artificial Sequence
  Probe
gaaaaagtcatggaggccatggggttg

SEQ ID NO: 13308 - DNA, 28 bp, Artificial Sequence
  Probe
gaaaaagtcatggaggccatggggttgg

SEQ ID NO: 13309 - DNA, 28 bp, Artificial Sequence
  Probe
gaaaatgttggttatacccttcccgtac

SEQ ID NO: 13310 - DNA, 30 bp, Artificial Sequence
  Probe
gaaaatgttggttatacccttcccgtacta

SEQ ID NO: 13311 - DNA, 31 bp, Artificial Sequence; identical to SEQ ID NO: 862
  Probe

SEQ ID NO: 13312 - DNA, 17 bp, Artificial Sequence
  Probe
gaaagctcacaagaact

SEQ ID NO: 13313 - DNA, 18 bp, Artificial Sequence
  Probe
gaaagctcacaagaactg

SEQ ID NO: 13314 - DNA, 20 bp, Artificial Sequence
  Probe
gaaagctcacaagaactgct

SEQ ID NO: 13315 - DNA, 24 bp, Artificial Sequence
  Probe
gaaagctcacaagaactgctaact

SEQ ID NO: 13316 - DNA, 25 bp, Artificial Sequence
  Probe
gaaagctcacaagaactgctaactc

SEQ ID NO: 13317 - DNA, 26 bp, Artificial Sequence
  Probe
gaaagctcacaagaactgctaactca

SEQ ID NO: 13318 - DNA, 31 bp, Artificial Sequence; identical to SEQ ID NO: 880
  Probe

SEQ ID NO: 13319 - DNA, 30 bp, Artificial Sequence; identical to SEQ ID NO: 882
  Probe

SEQ ID NO: 13320 - DNA, 30 bp, Artificial Sequence; identical to SEQ ID NO: 883
  Probe

SEQ ID NO: 13321 - DNA, 30 bp, Artificial Sequence; identical to SEQ ID NO: 890
  Probe

SEQ ID NO: 13322 - DNA, 30 bp, Artificial Sequence; identical to SEQ ID NO: 5491
  Probe

SEQ ID NO: 13323 - DNA, 32 bp, Artificial Sequence; identical to SEQ ID NO: 5509
  Probe

SEQ ID NO: 13324 - DNA, 29 bp, Artificial Sequence
  Probe
gaaggtcctgggttcgagccccagtggaa

SEQ ID NO: 13325 - DNA, 30 bp, Artificial Sequence; identical to SEQ ID NO: 5510
  Probe

SEQ ID NO: 13326 - DNA, 31 bp, Artificial Sequence; identical to SEQ ID NO: 891
  Probe

SEQ ID NO: 13327 - DNA, 32 bp, Artificial Sequence; identical to SEQ ID NO: 5511
  Probe

SEQ ID NO: 13328 - DNA, 17 bp, Artificial Sequence
  Probe
gaatccagcgatccgag

SEQ ID NO: 13329 - DNA, 19 bp, Artificial Sequence
  Probe
gaatccagcgatccgagtt

SEQ ID NO: 13330 - DNA, 20 bp, Artificial Sequence
  Probe
gaatccagcgatccgagttc

SEQ ID NO: 13331 - DNA, 37 bp, Artificial Sequence; identical to SEQ ID NO: 897
  Probe

SEQ ID NO: 13332 - DNA, 37 bp, Artificial Sequence
  Probe
gaatccagcgatccgagttcaaatctcggtgggacct

SEQ ID NO: 13333 - DNA, 38 bp, Artificial Sequence
  Probe
gaatccagcgatccgagttcaaatctcggtgggacctc

SEQ ID NO: 13334 - DNA, 18 bp, Artificial Sequence
  Probe
gaattctcgcctgccacg

SEQ ID NO: 13335 - DNA, 31 bp, Artificial Sequence; identical to SEQ ID NO: 903
  Probe

SEQ ID NO: 13336 - DNA, 19 bp, Artificial Sequence
  Probe
gacatatgtccgcgtgggt

SEQ ID NO: 13337 - DNA, 34 bp, Artificial Sequence; identical to SEQ ID NO: 5560
  Probe

SEQ ID NO: 13338 - DNA, 19 bp, Artificial Sequence
  Probe
gaccacgtggcctaatgga

SEQ ID NO: 13339 - DNA, 28 bp, Artificial Sequence
  Probe
gacccagtggcctaatggataaggcatc

SEQ ID NO: 13340 - DNA, 29 bp, Artificial Sequence
  Probe
gacccagtggcctaatggataaggcatca

SEQ ID NO: 13341 - DNA, 30 bp, Artificial Sequence; identical to SEQ ID NO: 8599
  Probe

SEQ ID NO: 13342 - DNA, 31 bp, Artificial Sequence; identical to SEQ ID NO: 904
  Probe

SEQ ID NO: 13343 - DNA, 32 bp, Artificial Sequence; identical to SEQ ID NO: 905
  Probe

SEQ ID NO: 13344 - DNA, 33 bp, Artificial Sequence; identical to SEQ ID NO: 906
  Probe

SEQ ID NO: 13345 - DNA, 34 bp, Artificial Sequence; identical to SEQ ID NO: 907
  Probe

SEQ ID NO: 13346 - DNA, 35 bp, Artificial Sequence; identical to SEQ ID NO: 908
  Probe

SEQ ID NO: 13347 - DNA, 36 bp, Artificial Sequence; identical to SEQ ID NO: 909
  Probe

SEQ ID NO: 13348 - DNA, 25 bp, Artificial Sequence
  Probe
gacccgggttcgattcccggccaac

SEQ ID NO: 13349 - DNA, 19 bp, Artificial Sequence
  Probe
gaccgcgtggcctaatgga

SEQ ID NO: 13350 - DNA, 21 bp, Artificial Sequence
  Probe
gaccggggttcgattccccga

SEQ ID NO: 13351 - DNA, 22 bp, Artificial Sequence
  Probe
gaccggggttcgattccccgac

SEQ ID NO: 13352 - DNA, 24 bp, Artificial Sequence
  Probe
gaccggggttcgattccccgacgg

SEQ ID NO: 13353 - DNA, 25 bp, Artificial Sequence
  Probe
gaccggggttcgattccccgacggg

SEQ ID NO: 13354 - DNA, 27 bp, Artificial Sequence
  Probe
gaccggggttcgattccccgacgggga

SEQ ID NO: 13355 - DNA, 28 bp, Artificial Sequence
  Probe
gaccggggttcgattccccgacggggag

SEQ ID NO: 13356 - DNA, 18 bp, Artificial Sequence
  Probe
gacctcgtggcgcaatgg

SEQ ID NO: 13357 - DNA, 18 bp, Artificial Sequence
  Probe
gagaaagctcacaagaac

SEQ ID NO: 13358 - DNA, 19 bp, Artificial Sequence
  Probe
gagaaagctcacaagaact

SEQ ID NO: 13359 - DNA, 20 bp, Artificial Sequence
  Probe
gagaaagctcacaagaactg

SEQ ID NO: 13360 - DNA, 21 bp, Artificial Sequence
  Probe
gagaaagctcacaagaactgc

SEQ ID NO: 13361 - DNA, 22 bp, Artificial Sequence
  Probe
gagaaagctcacaagaactgct

SEQ ID NO: 13362 - DNA, 23 bp, Artificial Sequence
  Probe
gagaaagctcacaagaactgcta

SEQ ID NO: 13363 - DNA, 24 bp, Artificial Sequence
  Probe
gagaaagctcacaagaactgctaa

SEQ ID NO: 13364 - DNA, 25 bp, Artificial Sequence
  Probe
gagaaagctcacaagaactgctaac

SEQ ID NO: 13365 - DNA, 26 bp, Artificial Sequence
  Probe
gagaaagctcacaagaactgctaact

SEQ ID NO: 13366 - DNA, 27 bp, Artificial Sequence
  Probe
gagaaagctcacaagaactgctaactc

SEQ ID NO: 13367 - DNA, 28 bp, Artificial Sequence
  Probe
gagaaagctcacaagaactgctaactca

SEQ ID NO: 13368 - DNA, 29 bp, Artificial Sequence
  Probe
gagaaagctcacaagaactgctaactcat

SEQ ID NO: 13369 - DNA, 30 bp, Artificial Sequence; identical to SEQ ID NO: 932
  Probe

SEQ ID NO: 13370 - DNA, 31 bp, Artificial Sequence; identical to SEQ ID NO: 933
  Probe

SEQ ID NO: 13371 - DNA, 32 bp, Artificial Sequence; identical to SEQ ID NO: 934
  Probe

SEQ ID NO: 13372 - DNA, 33 bp, Artificial Sequence; identical to SEQ ID NO: 935
  Probe

SEQ ID NO: 13373 - DNA, 34 bp, Artificial Sequence; identical to SEQ ID NO: 936
  Probe

SEQ ID NO: 13374 - DNA, 35 bp, Artificial Sequence; identical to SEQ ID NO: 937
  Probe

SEQ ID NO: 13375 - DNA, 36 bp, Artificial Sequence; identical to SEQ ID NO: 938
  Probe

SEQ ID NO: 13376 - DNA, 37 bp, Artificial Sequence; identical to SEQ ID NO: 939
  Probe

SEQ ID NO: 13377 - DNA, 38 bp, Artificial Sequence; identical to SEQ ID NO: 940
  Probe

SEQ ID NO: 13378 - DNA, 39 bp, Artificial Sequence; identical to SEQ ID NO: 941
  Probe

SEQ ID NO: 13379 - DNA, 40 bp, Artificial Sequence; identical to SEQ ID NO: 942
  Probe

SEQ ID NO: 13380 - DNA, 41 bp, Artificial Sequence; identical to SEQ ID NO: 943
  Probe

SEQ ID NO: 13381 - DNA, 42 bp, Artificial Sequence; identical to SEQ ID NO: 944
  Probe

SEQ ID NO: 13382 - DNA, 43 bp, Artificial Sequence; identical to SEQ ID NO: 945
  Probe

SEQ ID NO: 13383 - DNA, 44 bp, Artificial Sequence; identical to SEQ ID NO: 946
  Probe

SEQ ID NO: 13384 - DNA, 45 bp, Artificial Sequence; identical to SEQ ID NO: 947
  Probe

SEQ ID NO: 13385 - DNA, 46 bp, Artificial Sequence; identical to SEQ ID NO: 948
  Probe

SEQ ID NO: 13386 - DNA, 50 bp, Artificial Sequence; identical to SEQ ID NO: 950
  Probe

SEQ ID NO: 13387 - DNA, 24 bp, Artificial Sequence
  Probe
gagaccggggttcaattccccgac

SEQ ID NO: 13388 - DNA, 23 bp, Artificial Sequence
  Probe
gagaccggggttcgattccccga

SEQ ID NO: 13389 - DNA, 24 bp, Artificial Sequence
  Probe
gagaccggggttcgattccccgac

SEQ ID NO: 13390 - DNA, 25 bp, Artificial Sequence
  Probe
gagaccggggttcgattccccgacg

SEQ ID NO: 13391 - DNA, 26 bp, Artificial Sequence
  Probe
gagaccggggttcgattccccgacgg

SEQ ID NO: 13392 - DNA, 27 bp, Artificial Sequence
  Probe
gagaccggggttcgattccccgacggg

SEQ ID NO: 13393 - DNA, 28 bp, Artificial Sequence
  Probe
gagaccggggttcgattccccgacgggg

SEQ ID NO: 13394 - DNA, 29 bp, Artificial Sequence
  Probe
gagaccggggttcgattccccgacgggga

SEQ ID NO: 13395 - DNA, 30 bp, Artificial Sequence; identical to SEQ ID NO: 957
  Probe

SEQ ID NO: 13396 - DNA, 17 bp, Artificial Sequence
  Probe
gagaggtcccgggttca

SEQ ID NO: 13397 - DNA, 34 bp, Artificial Sequence
  Probe
gagaggtcccgggttcaaatcccggacgagcccc

SEQ ID NO: 13398 - DNA, 30 bp, Artificial Sequence
  Probe
gagcatagctgccttccaagcagttgaccc

SEQ ID NO: 13399 - DNA, 32 bp, Artificial Sequence
  Probe
gagcatagctgccttccaagcagttgacccgg

SEQ ID NO: 13400 - DNA, 16 bp, Artificial Sequence
  Probe
gagcccggtaatcgca

SEQ ID NO: 13401 - DNA, 18 bp, Artificial Sequence
  Probe
gagcccggtaatcgcata

SEQ ID NO: 13402 - DNA, 19 bp, Artificial Sequence
  Probe
gagcccggtaatcgcataa

SEQ ID NO: 13403 - DNA, 25 bp, Artificial Sequence
  Probe
gagcccggtaatcgcataaaactta

SEQ ID NO: 13404 - DNA, 30 bp, Artificial Sequence; identical to SEQ ID NO: 960
  Probe

SEQ ID NO: 13405 - DNA, 35 bp, Artificial Sequence; identical to SEQ ID NO: 5659
  Probe

SEQ ID NO: 13406 - DNA, 38 bp, Artificial Sequence; identical to SEQ ID NO: 962
  Probe

SEQ ID NO: 13407 - DNA, 39 bp, Artificial Sequence; identical to SEQ ID NO: 963
  Probe

SEQ ID NO: 13408 - DNA, 42 bp, Artificial Sequence
  Probe
gagcccggtaatcgcataaaacttaaaactttacagtcagag

SEQ ID NO: 13409 - DNA, 17 bp, Artificial Sequence
  Probe
gagcttaaaccccctta

SEQ ID NO: 13410 - DNA, 19 bp, Artificial Sequence
  Probe
gagcttaaacccccttatt

SEQ ID NO: 13411 - DNA, 20 bp, Artificial Sequence
  Probe
gagcttaaacccccttattt

SEQ ID NO: 13412 - DNA, 21 bp, Artificial Sequence
  Probe
gagcttaaacccccttatttc

SEQ ID NO: 13413 - DNA, 22 bp, Artificial Sequence
  Probe
gagcttaaacccccttatttct

SEQ ID NO: 13414 - DNA, 23 bp, Artificial Sequence
  Probe
gagcttaaacccccttatttcta

SEQ ID NO: 13415 - DNA, 16 bp, Artificial Sequence
  Probe
gaggcttacgacccct

SEQ ID NO: 13416 - DNA, 24 bp, Artificial Sequence
  Probe
gaggcttacgaccccttatttacc

SEQ ID NO: 13417 - DNA, 30 bp, Artificial Sequence; identical to SEQ ID NO: 10159
  Probe

SEQ ID NO: 13418 - DNA, 17 bp, Artificial Sequence
  Probe
gagtaaataataggagc

SEQ ID NO: 13419 - DNA, 35 bp, Artificial Sequence; identical to SEQ ID NO: 971
  Probe

SEQ ID NO: 13420 - DNA, 36 bp, Artificial Sequence; identical to SEQ ID NO: 972
  Probe

SEQ ID NO: 13421 - DNA, 29 bp, Artificial Sequence
  Probe
gagtatccccgcctgtcacgcgggagacc

SEQ ID NO: 13422 - DNA, 31 bp, Artificial Sequence
  Probe
gagtatccccgcctgtcacgcgggagaccgg

SEQ ID NO: 13423 - DNA, 17 bp, Artificial Sequence
  Probe
gattcccattcttgcga

SEQ ID NO: 13424 - DNA, 27 bp, Artificial Sequence
  Probe
gattcggcgctctcaccgccgcggccc

SEQ ID NO: 13425 - DNA, 27 bp, Artificial Sequence
  Probe
gattcggcgctttcaccgccgcggccc

SEQ ID NO: 13426 - DNA, 27 bp, Artificial Sequence
  Probe
gattgtgaatctgacaacagaggctta

SEQ ID NO: 13427 - DNA, 28 bp, Artificial Sequence
  Probe
gattgtgaatctgacaacagaggcttac

SEQ ID NO: 13428 - DNA, 32 bp, Artificial Sequence; identical to SEQ ID NO: 5751
  Probe

SEQ ID NO: 13429 - DNA, 33 bp, Artificial Sequence; identical to SEQ ID NO: 982
  Probe

SEQ ID NO: 13430 - DNA, 34 bp, Artificial Sequence; identical to SEQ ID NO: 983
  Probe

SEQ ID NO: 13431 - DNA, 29 bp, Artificial Sequence
  Probe
gcacgaggccccgggttcaatccccggca

SEQ ID NO: 13432 - DNA, 31 bp, Artificial Sequence
  Probe
gcacgaggccccgggttcaatccccggcacc

SEQ ID NO: 13433 - DNA, 35 bp, Artificial Sequence
  Probe
gcacgaggccccgggttcaatccccggcacctcca

SEQ ID NO: 13434 - DNA, 16 bp, Artificial Sequence
  Probe
gcacgaggtcctgggt

SEQ ID NO: 13435 - DNA, 28 bp, Artificial Sequence
  Probe
gcactctggactttgaatccagcgatcc

SEQ ID NO: 13436 - DNA, 29 bp, Artificial Sequence
  Probe
gcactctggactttgaatccagcgatccg

SEQ ID NO: 13437 - DNA, 32 bp, Artificial Sequence; identical to SEQ ID NO: 991
  Probe

SEQ ID NO: 13438 - DNA, 32 bp, Artificial Sequence
  Probe
gcagaaggtcctgggttcgagccccagtggaa

SEQ ID NO: 13439 - DNA, 33 bp, Artificial Sequence
  Probe
gcagaaggtcctgggttcgagccccagtggaac

SEQ ID NO: 13440 - DNA, 34 bp, Artificial Sequence
  Probe
gcagaaggtcctgggttcgagccccagtggaacc

SEQ ID NO: 13441 - DNA, 35 bp, Artificial Sequence; identical to SEQ ID NO: 992
  Probe

SEQ ID NO: 13442 - DNA, 36 bp, Artificial Sequence; identical to SEQ ID NO: 993
  Probe

SEQ ID NO: 13443 - DNA, 21 bp, Artificial Sequence
  Probe
gcagagcccggtaatcgcata

SEQ ID NO: 13444 - DNA, 17 bp, Artificial Sequence
  Probe
gcagcaacctcggttcg

SEQ ID NO: 13445 - DNA, 30 bp, Artificial Sequence; identical to SEQ ID NO: 10291
  Probe

SEQ ID NO: 13446 - DNA, 31 bp, Artificial Sequence; identical to SEQ ID NO: 5838
  Probe

SEQ ID NO: 13447 - DNA, 16 bp, Artificial Sequence
  Probe
gcagcgatggccgagt

SEQ ID NO: 13448 - DNA, 20 bp, Artificial Sequence
  Probe
gcagcgatggccgagtggtt

SEQ ID NO: 13449 - DNA, 21 bp, Artificial Sequence
  Probe
gcagcgatggccgagtggtta

SEQ ID NO: 13450 - DNA, 23 bp, Artificial Sequence
  Probe
gcagcgatggccgagtggttaag

SEQ ID NO: 13451 - DNA, 21 bp, Artificial Sequence
  Probe
gcagcggaagcgtgctgggcc

SEQ ID NO: 13452 - DNA, 25 bp, Artificial Sequence
  Probe
gcataaaacttaaaactttacagtc

SEQ ID NO: 13453 - DNA, 26 bp, Artificial Sequence
  Probe
gcataaaacttaaaactttacagtca

SEQ ID NO: 13454 - DNA, 28 bp, Artificial Sequence
  Probe
gcatagctgccttccaagcagttgaccc

SEQ ID NO: 13455 - DNA, 16 bp, Artificial Sequence
  Probe
gcatgaggtcccgggt

SEQ ID NO: 13456 - DNA, 35 bp, Artificial Sequence
  Probe
gcatgaggtcccgggttcgatccccagcatctcca

SEQ ID NO: 13457 - DNA, 28 bp, Artificial Sequence
  Probe
gcatgggtggttcagtggtagaattctc

SEQ ID NO: 13458 - DNA, 29 bp, Artificial Sequence
  Probe
gcatgggtggttcagtggtagaattctcg

SEQ ID NO: 13459 - DNA, 30 bp, Artificial Sequence; identical to SEQ ID NO: 1002
  Probe

SEQ ID NO: 13460 - DNA, 31 bp, Artificial Sequence; identical to SEQ ID NO: 1003
  Probe

SEQ ID NO: 13461 - DNA, 32 bp, Artificial Sequence; identical to SEQ ID NO: 1004
  Probe

SEQ ID NO: 13462 - DNA, 33 bp, Artificial Sequence; identical to SEQ ID NO: 1005
  Probe

SEQ ID NO: 13463 - DNA, 34 bp, Artificial Sequence; identical to SEQ ID NO: 1006
  Probe

SEQ ID NO: 13464 - DNA, 35 bp, Artificial Sequence; identical to SEQ ID NO: 1007
  Probe

SEQ ID NO: 13465 - DNA, 36 bp, Artificial Sequence; identical to SEQ ID NO: 1008
  Probe

SEQ ID NO: 13466 - DNA, 38 bp, Artificial Sequence; identical to SEQ ID NO: 1009
  Probe

SEQ ID NO: 13467 - DNA, 39 bp, Artificial Sequence; identical to SEQ ID NO: 5871
  Probe

SEQ ID NO: 13468 - DNA, 40 bp, Artificial Sequence; identical to SEQ ID NO: 5872
  Probe

SEQ ID NO: 13469 - DNA, 41 bp, Artificial Sequence
  Probe
gcatgggtggttcagtggtagaattctcgcctgccacgcgg

SEQ ID NO: 13470 - DNA, 49 bp, Artificial Sequence; identical to SEQ ID NO: 5876
  Probe

SEQ ID NO: 13471 - DNA, 50 bp, Artificial Sequence; identical to SEQ ID NO: 1010
  Probe

SEQ ID NO: 13472 - DNA, 26 bp, Artificial Sequence
  Probe
gcattaaccttttaagttaaagatta

SEQ ID NO: 13473 - DNA, 33 bp, Artificial Sequence; identical to SEQ ID NO: 5879
  Probe

SEQ ID NO: 13474 - DNA, 34 bp, Artificial Sequence; identical to SEQ ID NO: 1011
  Probe

SEQ ID NO: 13475 - DNA, 35 bp, Artificial Sequence
  Probe
gcattaaccttttaagttaaagattaagagaacca

SEQ ID NO: 13476 - DNA, 50 bp, Artificial Sequence; identical to SEQ ID NO: 1012
  Probe

SEQ ID NO: 13477 - DNA, 38 bp, Artificial Sequence
  Probe
gcattggtggttcagtggtagaattctcgcctcccacg

SEQ ID NO: 13478 - DNA, 39 bp, Artificial Sequence; identical to SEQ ID NO: 5907
  Probe

SEQ ID NO: 13479 - DNA, 40 bp, Artificial Sequence
  Probe
gcattggtggttcagtggtagaattctcgcctcccacgcg

SEQ ID NO: 13480 - DNA, 38 bp, Artificial Sequence; identical to SEQ ID NO: 1014
  Probe

SEQ ID NO: 13481 - DNA, 39 bp, Artificial Sequence; identical to SEQ ID NO: 1015
  Probe

SEQ ID NO: 13482 - DNA, 40 bp, Artificial Sequence; identical to SEQ ID NO: 1016
  Probe

SEQ ID NO: 13483 - DNA, 44 bp, Artificial Sequence; identical to SEQ ID NO: 1018
  Probe

SEQ ID NO: 13484 - DNA, 49 bp, Artificial Sequence; identical to SEQ ID NO: 1019
  Probe

SEQ ID NO: 13485 - DNA, 50 bp, Artificial Sequence; identical to SEQ ID NO: 1020
  Probe

SEQ ID NO: 13486 - DNA, 16 bp, Artificial Sequence
  Probe
gccacgcgggaggccc

SEQ ID NO: 13487 - DNA, 20 bp, Artificial Sequence
  Probe
gccacgcgggaggcccgggt

SEQ ID NO: 13488 - DNA, 21 bp, Artificial Sequence
  Probe
gccacgcgggaggcccgggtt

SEQ ID NO: 13489 - DNA, 50 bp, Artificial Sequence; identical to SEQ ID NO: 1024
  Probe

SEQ ID NO: 13490 - DNA, 41 bp, Artificial Sequence
  Probe
gcccataccccgaaaatgttggttatacccttcccgtacta

SEQ ID NO: 13491 - DNA, 19 bp, Artificial Sequence
  Probe
gccccagtggcctaatgga

SEQ ID NO: 13492 - DNA, 36 bp, Artificial Sequence; identical to SEQ ID NO: 1025
  Probe

SEQ ID NO: 13493 - DNA, 22 bp, Artificial Sequence
  Probe
gccccgggttcaatccccggca

SEQ ID NO: 13494 - DNA, 25 bp, Artificial Sequence
  Probe
gccccgggttcaatccccggcacct

SEQ ID NO: 13495 - DNA, 26 bp, Artificial Sequence
  Probe
gccccgggttcaatccccggcacctc

SEQ ID NO: 13496 - DNA, 25 bp, Artificial Sequence
  Probe
gccccgggttcgatccccggcatct

SEQ ID NO: 13497 - DNA, 18 bp, Artificial Sequence
  Probe
gcccggatagctcagtcg

SEQ ID NO: 13498 - DNA, 19 bp, Artificial Sequence
  Probe
gcccggatagctcagtcgg

SEQ ID NO: 13499 - DNA, 20 bp, Artificial Sequence
  Probe
gcccggatagctcagtcggt

SEQ ID NO: 13500 - DNA, 21 bp, Artificial Sequence
  Probe
gcccggatagctcagtcggta

SEQ ID NO: 13501 - DNA, 22 bp, Artificial Sequence
  Probe
gcccggatagctcagtcggtag

SEQ ID NO: 13502 - DNA, 23 bp, Artificial Sequence
  Probe
gcccggatagctcagtcggtaga

SEQ ID NO: 13503 - DNA, 24 bp, Artificial Sequence
  Probe
gcccggatagctcagtcggtagag

SEQ ID NO: 13504 - DNA, 25 bp, Artificial Sequence
  Probe
gcccggatagctcagtcggtagagc

SEQ ID NO: 13505 - DNA, 26 bp, Artificial Sequence
  Probe
gcccggatagctcagtcggtagagca

SEQ ID NO: 13506 - DNA, 27 bp, Artificial Sequence
  Probe
gcccggatagctcagtcggtagagcat

SEQ ID NO: 13507 - DNA, 28 bp, Artificial Sequence
  Probe
gcccggatagctcagtcggtagagcatc

SEQ ID NO: 13508 - DNA, 29 bp, Artificial Sequence
  Probe
gcccggatagctcagtcggtagagcatca

SEQ ID NO: 13509 - DNA, 30 bp, Artificial Sequence; identical to SEQ ID NO: 1038
  Probe

SEQ ID NO: 13510 - DNA, 31 bp, Artificial Sequence; identical to SEQ ID NO: 1039
  Probe

SEQ ID NO: 13511 - DNA, 32 bp, Artificial Sequence; identical to SEQ ID NO: 1040
  Probe

SEQ ID NO: 13512 - DNA, 33 bp, Artificial Sequence; identical to SEQ ID NO: 1041
  Probe

SEQ ID NO: 13513 - DNA, 34 bp, Artificial Sequence; identical to SEQ ID NO: 1042
  Probe

SEQ ID NO: 13514 - DNA, 35 bp, Artificial Sequence; identical to SEQ ID NO: 1043
  Probe

SEQ ID NO: 13515 - DNA, 36 bp, Artificial Sequence; identical to SEQ ID NO: 1044
  Probe

SEQ ID NO: 13516 - DNA, 37 bp, Artificial Sequence; identical to SEQ ID NO: 1045
  Probe

SEQ ID NO: 13517 - DNA, 40 bp, Artificial Sequence
  Probe
gcccggatagctcagtcggtagagcatcagacttttaatc

SEQ ID NO: 13518 - DNA, 50 bp, Artificial Sequence; identical to SEQ ID NO: 1046
  Probe

SEQ ID NO: 13519 - DNA, 16 bp, Artificial Sequence
  Probe
gcccggctagctcagt

SEQ ID NO: 13520 - DNA, 17 bp, Artificial Sequence
  Probe
gcccggctagctcagtc

SEQ ID NO: 13521 - DNA, 18 bp, Artificial Sequence
  Probe
gcccggctagctcagtcg

SEQ ID NO: 13522 - DNA, 31 bp, Artificial Sequence; identical to SEQ ID NO: 1050
  Probe

SEQ ID NO: 13523 - DNA, 33 bp, Artificial Sequence; identical to SEQ ID NO: 1051
  Probe

SEQ ID NO: 13524 - DNA, 22 bp, Artificial Sequence
  Probe
gcccggctagctcagtcggtag

SEQ ID NO: 13525 - DNA, 23 bp, Artificial Sequence
  Probe
gcccggctagctcagtcggtaga

SEQ ID NO: 13526 - DNA, 24 bp, Artificial Sequence
  Probe
gcccggctagctcagtcggtagag

SEQ ID NO: 13527 - DNA, 25 bp, Artificial Sequence
  Probe
gcccggctagctcagtcggtagagc

SEQ ID NO: 13528 - DNA, 26 bp, Artificial Sequence
  Probe
gcccggctagctcagtcggtagagca

SEQ ID NO: 13529 - DNA, 27 bp, Artificial Sequence
  Probe
gcccggctagctcagtcggtagagcat

SEQ ID NO: 13530 - DNA, 28 bp, Artificial Sequence
  Probe
gcccggctagctcagtcggtagagcatg

SEQ ID NO: 13531 - DNA, 29 bp, Artificial Sequence
  Probe
gcccggctagctcagtcggtagagcatga

SEQ ID NO: 13532 - DNA, 30 bp, Artificial Sequence; identical to SEQ ID NO: 1062
  Probe

SEQ ID NO: 13533 - DNA, 31 bp, Artificial Sequence; identical to SEQ ID NO: 1063
  Probe

SEQ ID NO: 13534 - DNA, 32 bp, Artificial Sequence; identical to SEQ ID NO: 1064
  Probe

SEQ ID NO: 13535 - DNA, 33 bp, Artificial Sequence; identical to SEQ ID NO: 1065
  Probe

SEQ ID NO: 13536 - DNA, 34 bp, Artificial Sequence; identical to SEQ ID NO: 1066
  Probe

SEQ ID NO: 13537 - DNA, 35 bp, Artificial Sequence; identical to SEQ ID NO: 1067
  Probe

SEQ ID NO: 13538 - DNA, 36 bp, Artificial Sequence; identical to SEQ ID NO: 1068
  Probe

SEQ ID NO: 13539 - DNA, 33 bp, Artificial Sequence; identical to SEQ ID NO: 1070
  Probe

SEQ ID NO: 13540 - DNA, 34 bp, Artificial Sequence; identical to SEQ ID NO: 1071
  Probe

SEQ ID NO: 13541 - DNA, 35 bp, Artificial Sequence; identical to SEQ ID NO: 1072
  Probe

SEQ ID NO: 13542 - DNA, 36 bp, Artificial Sequence; identical to SEQ ID NO: 1073
  Probe

SEQ ID NO: 13543 - DNA, 37 bp, Artificial Sequence; identical to SEQ ID NO: 1074
  Probe

SEQ ID NO: 13544 - DNA, 38 bp, Artificial Sequence
  Probe
gcccggctagctcagtcggtagagcatgagactcttaa

SEQ ID NO: 13545 - DNA, 39 bp, Artificial Sequence; identical to SEQ ID NO: 1075
  Probe

SEQ ID NO: 13546 - DNA, 40 bp, Artificial Sequence; identical to SEQ ID NO: 1076
  Probe

SEQ ID NO: 13547 - DNA, 41 bp, Artificial Sequence; identical to SEQ ID NO: 5997
  Probe

SEQ ID NO: 13548 - DNA, 49 bp, Artificial Sequence; identical to SEQ ID NO: 5999
  Probe

SEQ ID NO: 13549 - DNA, 50 bp, Artificial Sequence; identical to SEQ ID NO: 1078
  Probe

SEQ ID NO: 13550 - DNA, 29 bp, Artificial Sequence
  Probe
gcccggctagctcagtcggtagagcatgg

SEQ ID NO: 13551 - DNA, 30 bp, Artificial Sequence; identical to SEQ ID NO: 1080
  Probe

SEQ ID NO: 13552 - DNA, 31 bp, Artificial Sequence; identical to SEQ ID NO: 1081
  Probe

SEQ ID NO: 13553 - DNA, 32 bp, Artificial Sequence; identical to SEQ ID NO: 1082
  Probe

SEQ ID NO: 13554 - DNA, 33 bp, Artificial Sequence; identical to SEQ ID NO: 1083
  Probe

SEQ ID NO: 13555 - DNA, 34 bp, Artificial Sequence; identical to SEQ ID NO: 1084
  Probe

SEQ ID NO: 13556 - DNA, 35 bp, Artificial Sequence; identical to SEQ ID NO: 1085
  Probe

SEQ ID NO: 13557 - DNA, 36 bp, Artificial Sequence; identical to SEQ ID NO: 1086
  Probe

SEQ ID NO: 13558 - DNA, 37 bp, Artificial Sequence; identical to SEQ ID NO: 1087
  Probe

SEQ ID NO: 13559 - DNA, 38 bp, Artificial Sequence; identical to SEQ ID NO: 6000
  Probe

SEQ ID NO: 13560 - DNA, 39 bp, Artificial Sequence; identical to SEQ ID NO: 6001
  Probe

SEQ ID NO: 13561 - DNA, 40 bp, Artificial Sequence; identical to SEQ ID NO: 1088
  Probe

SEQ ID NO: 13562 - DNA, 41 bp, Artificial Sequence; identical to SEQ ID NO: 6002
  Probe

SEQ ID NO: 13563 - DNA, 42 bp, Artificial Sequence; identical to SEQ ID NO: 1089
  Probe

SEQ ID NO: 13564 - DNA, 45 bp, Artificial Sequence; identical to SEQ ID NO: 1090
  Probe

SEQ ID NO: 13565 - DNA, 49 bp, Artificial Sequence; identical to SEQ ID NO: 6006
  Probe

SEQ ID NO: 13566 - DNA, 50 bp, Artificial Sequence; identical to SEQ ID NO: 1091
  Probe

SEQ ID NO: 13567 - DNA, 16 bp, Artificial Sequence
  Probe
gcccggtaatcgcata

SEQ ID NO: 13568 - DNA, 17 bp, Artificial Sequence
  Probe
gccctcagtaagttgca

SEQ ID NO: 13569 - DNA, 31 bp, Artificial Sequence
  Probe
gccgaggttgtgagttcgagcctcacctgga

SEQ ID NO: 13570 - DNA, 29 bp, Artificial Sequence
  Probe
gccgcggcccgggttcgattcccggtcag

SEQ ID NO: 13571 - DNA, 30 bp, Artificial Sequence; identical to SEQ ID NO: 10395
  Probe

SEQ ID NO: 13572 - DNA, 31 bp, Artificial Sequence
  Probe
gccgcggcccgggttcgattcccggtcaggg

SEQ ID NO: 13573 - DNA, 32 bp, Artificial Sequence; identical to SEQ ID NO: 6021
  Probe

SEQ ID NO: 13574 - DNA, 33 bp, Artificial Sequence; identical to SEQ ID NO: 6022
  Probe

SEQ ID NO: 13575 - DNA, 20 bp, Artificial Sequence
  Probe
gccgctggtgtagtggtatc

SEQ ID NO: 13576 - DNA, 25 bp, Artificial Sequence
  Probe
gccgctggtgtagtggtatcatgca

SEQ ID NO: 13577 - DNA, 26 bp, Artificial Sequence
  Probe
gccgctggtgtagtggtatcatgcaa

SEQ ID NO: 13578 - DNA, 27 bp, Artificial Sequence
  Probe
gccgctggtgtagtggtatcatgcaag

SEQ ID NO: 13579 - DNA, 28 bp, Artificial Sequence
  Probe
gccgctggtgtagtggtatcatgcaaga

SEQ ID NO: 13580 - DNA, 30 bp, Artificial Sequence; identical to SEQ ID NO: 1100
  Probe

SEQ ID NO: 13581 - DNA, 31 bp, Artificial Sequence; identical to SEQ ID NO: 1101
  Probe

SEQ ID NO: 13582 - DNA, 32 bp, Artificial Sequence; identical to SEQ ID NO: 1102
  Probe

SEQ ID NO: 13583 - DNA, 33 bp, Artificial Sequence; identical to SEQ ID NO: 1103
  Probe

SEQ ID NO: 13584 - DNA, 34 bp, Artificial Sequence; identical to SEQ ID NO: 1104
  Probe

SEQ ID NO: 13585 - DNA, 30 bp, Artificial Sequence; identical to SEQ ID NO: 1105
  Probe

SEQ ID NO: 13586 - DNA, 31 bp, Artificial Sequence; identical to SEQ ID NO: 1106
  Probe

SEQ ID NO: 13587 - DNA, 33 bp, Artificial Sequence; identical to SEQ ID NO: 1108
  Probe

SEQ ID NO: 13588 - DNA, 34 bp, Artificial Sequence; identical to SEQ ID NO: 1109
  Probe

SEQ ID NO: 13589 - DNA, 35 bp, Artificial Sequence; identical to SEQ ID NO: 1110
  Probe

SEQ ID NO: 13590 - DNA, 36 bp, Artificial Sequence; identical to SEQ ID NO: 1111
  Probe

SEQ ID NO: 13591 - DNA, 39 bp, Artificial Sequence
  Probe
gccgtgatcgtatagtggttagtactctgcgttgtggcc

SEQ ID NO: 13592 - DNA, 25 bp, Artificial Sequence
  Probe
gcctcacacgcgaaaggtccccggt

SEQ ID NO: 13593 - DNA, 26 bp, Artificial Sequence
  Probe
gcctcacacgcgaaaggtccccggtt

SEQ ID NO: 13594 - DNA, 32 bp, Artificial Sequence; identical to SEQ ID NO: 1112
  Probe

SEQ ID NO: 13595 - DNA, 35 bp, Artificial Sequence; identical to SEQ ID NO: 1114
  Probe

SEQ ID NO: 13596 - DNA, 24 bp, Artificial Sequence
  Probe
gcctgccacgcgggaggcccgggt

SEQ ID NO: 13597 - DNA, 25 bp, Artificial Sequence
  Probe
gcctgccacgcgggaggcccgggtt

SEQ ID NO: 13598 - DNA, 31 bp, Artificial Sequence; identical to SEQ ID NO: 1115
  Probe

SEQ ID NO: 13599 - DNA, 32 bp, Artificial Sequence; identical to SEQ ID NO: 1116
  Probe

SEQ ID NO: 13600 - DNA, 33 bp, Artificial Sequence; identical to SEQ ID NO: 1117
  Probe

SEQ ID NO: 13601 - DNA, 34 bp, Artificial Sequence; identical to SEQ ID NO: 6054
  Probe

SEQ ID NO: 13602 - DNA, 35 bp, Artificial Sequence; identical to SEQ ID NO: 1118
  Probe

SEQ ID NO: 13603 - DNA, 36 bp, Artificial Sequence; identical to SEQ ID NO: 1119
  Probe

SEQ ID NO: 13604 - DNA, 31 bp, Artificial Sequence; identical to SEQ ID NO: 1120
  Probe

SEQ ID NO: 13605 - DNA, 32 bp, Artificial Sequence; identical to SEQ ID NO: 1121
  Probe

SEQ ID NO: 13606 - DNA, 33 bp, Artificial Sequence; identical to SEQ ID NO: 1122
  Probe

SEQ ID NO: 13607 - DNA, 34 bp, Artificial Sequence; identical to SEQ ID NO: 1123
  Probe

SEQ ID NO: 13608 - DNA, 31 bp, Artificial Sequence; identical to SEQ ID NO: 1126
  Probe

SEQ ID NO: 13609 - DNA, 32 bp, Artificial Sequence; identical to SEQ ID NO: 1127
  Probe

SEQ ID NO: 13610 - DNA, 33 bp, Artificial Sequence; identical to SEQ ID NO: 1128
  Probe

SEQ ID NO: 13611 - DNA, 34 bp, Artificial Sequence
  Probe
gcctgggtagctcagtcggtagagcatcagactt

SEQ ID NO: 13612 - DNA, 22 bp, Artificial Sequence
  Probe
gcctgtcacgcgggagaccggg

SEQ ID NO: 13613 - DNA, 24 bp, Artificial Sequence
  Probe
gcctgtcacgcgggagaccggggt

SEQ ID NO: 13614 - DNA, 25 bp, Artificial Sequence
  Probe
gcctgtcacgcgggagaccggggtt

SEQ ID NO: 13615 - DNA, 39 bp, Artificial Sequence
  Probe
gcctgtcacgcgggagaccggggttcaattccccgacgg

SEQ ID NO: 13616 - DNA, 40 bp, Artificial Sequence
  Probe
gcctgtcacgcgggagaccggggttcaattccccgacggg

SEQ ID NO: 13617 - DNA, 41 bp, Artificial Sequence
  Probe
gcctgtcacgcgggagaccggggttcaattccccgacgggg

SEQ ID NO: 13618 - DNA, 36 bp, Artificial Sequence
  Probe
gcctgtcacgcgggagaccggggttcgattccccga

SEQ ID NO: 13619 - DNA, 38 bp, Artificial Sequence
  Probe
gcctgtcacgcgggagaccggggttcgattccccgacg

SEQ ID NO: 13620 - DNA, 39 bp, Artificial Sequence
  Probe
gcctgtcacgcgggagaccggggttcgattccccgacgg

SEQ ID NO: 13621 - DNA, 40 bp, Artificial Sequence; identical to SEQ ID NO: 1131
  Probe

SEQ ID NO: 13622 - DNA, 41 bp, Artificial Sequence
  Probe
gcctgtcacgcgggagaccggggttcgattccccgacgggg

SEQ ID NO: 13623 - DNA, 43 bp, Artificial Sequence; identical to SEQ ID NO: 1132
  Probe

SEQ ID NO: 13624 - DNA, 16 bp, Artificial Sequence
  Probe
gcgaaaggtccccggt

SEQ ID NO: 13625 - DNA, 17 bp, Artificial Sequence
  Probe
gcgaaaggtccccggtt

SEQ ID NO: 13626 - DNA, 36 bp, Artificial Sequence
  Probe
gcgagaggtcccgggttcaaatcccggacgagcccc

SEQ ID NO: 13627 - DNA, 37 bp, Artificial Sequence
  Probe
gcgagaggtcccgggttcaaatcccggacgagccccc

SEQ ID NO: 13628 - DNA, 16 bp, Artificial Sequence
  Probe
gcgccgctggtgtagt

SEQ ID NO: 13629 - DNA, 17 bp, Artificial Sequence
  Probe
gcgccgctggtgtagtg

SEQ ID NO: 13630 - DNA, 20 bp, Artificial Sequence
  Probe
gcgccgctggtgtagtggta

SEQ ID NO: 13631 - DNA, 21 bp, Artificial Sequence
  Probe
gcgccgctggtgtagtggtat

SEQ ID NO: 13632 - DNA, 22 bp, Artificial Sequence
  Probe
gcgccgctggtgtagtggtatc

SEQ ID NO: 13633 - DNA, 23 bp, Artificial Sequence
  Probe
gcgccgctggtgtagtggtatca

SEQ ID NO: 13634 - DNA, 25 bp, Artificial Sequence
  Probe
gcgccgctggtgtagtggtatcatg

SEQ ID NO: 13635 - DNA, 26 bp, Artificial Sequence
  Probe
gcgccgctggtgtagtggtatcatgc

SEQ ID NO: 13636 - DNA, 27 bp, Artificial Sequence
  Probe
gcgccgctggtgtagtggtatcatgca

SEQ ID NO: 13637 - DNA, 28 bp, Artificial Sequence
  Probe
gcgccgctggtgtagtggtatcatgcaa

SEQ ID NO: 13638 - DNA, 29 bp, Artificial Sequence
  Probe
gcgccgctggtgtagtggtatcatgcaag

SEQ ID NO: 13639 - DNA, 30 bp, Artificial Sequence; identical to SEQ ID NO: 1149
  Probe

SEQ ID NO: 13640 - DNA, 31 bp, Artificial Sequence; identical to SEQ ID NO: 1150
  Probe

SEQ ID NO: 13641 - DNA, 32 bp, Artificial Sequence; identical to SEQ ID NO: 1151
  Probe

SEQ ID NO: 13642 - DNA, 33 bp, Artificial Sequence; identical to SEQ ID NO: 1152
  Probe

SEQ ID NO: 13643 - DNA, 34 bp, Artificial Sequence; identical to SEQ ID NO: 1153
  Probe

SEQ ID NO: 13644 - DNA, 35 bp, Artificial Sequence; identical to SEQ ID NO: 1154
  Probe

SEQ ID NO: 13645 - DNA, 36 bp, Artificial Sequence; identical to SEQ ID NO: 1155
  Probe

SEQ ID NO: 13646 - DNA, 39 bp, Artificial Sequence; identical to SEQ ID NO: 1157
  Probe

SEQ ID NO: 13647 - DNA, 40 bp, Artificial Sequence; identical to SEQ ID NO: 1158
  Probe

SEQ ID NO: 13648 - DNA, 41 bp, Artificial Sequence; identical to SEQ ID NO: 1159
  Probe

SEQ ID NO: 13649 - DNA, 44 bp, Artificial Sequence; identical to SEQ ID NO: 6092
  Probe

SEQ ID NO: 13650 - DNA, 45 bp, Artificial Sequence; identical to SEQ ID NO: 6093
  Probe

SEQ ID NO: 13651 - DNA, 46 bp, Artificial Sequence; identical to SEQ ID NO: 1160
  Probe

SEQ ID NO: 13652 - DNA, 49 bp, Artificial Sequence; identical to SEQ ID NO: 6096
  Probe

SEQ ID NO: 13653 - DNA, 50 bp, Artificial Sequence; identical to SEQ ID NO: 1161
  Probe

SEQ ID NO: 13654 - DNA, 21 bp, Artificial Sequence
  Probe
gcgctctcaccgccgcggccc

SEQ ID NO: 13655 - DNA, 17 bp, Artificial Sequence
  Probe
gcggaagcgtgctgggc

SEQ ID NO: 13656 - DNA, 18 bp, Artificial Sequence
  Probe
gcggaagcgtgctgggcc

SEQ ID NO: 13657 - DNA, 26 bp, Artificial Sequence
  Probe
gcggaagcgtgctgggcccataaccc

SEQ ID NO: 13658 - DNA, 30 bp, Artificial Sequence
  Probe
gcggcccgggttcgactcccggtgtgggaa

SEQ ID NO: 13659 - DNA, 31 bp, Artificial Sequence; identical to SEQ ID NO: 1165
  Probe

SEQ ID NO: 13660 - DNA, 27 bp, Artificial Sequence
  Probe
gcggcccgggttcgattcccggtcagg

SEQ ID NO: 13661 - DNA, 29 bp, Artificial Sequence
  Probe
gcggcccgggttcgattcccggtcaggga

SEQ ID NO: 13662 - DNA, 30 bp, Artificial Sequence
  Probe
gcggcccgggttcgattcccggtcagggaa

SEQ ID NO: 13663 - DNA, 30 bp, Artificial Sequence
  Probe
gcgggagaccggggttcaattccccgacgg

SEQ ID NO: 13664 - DNA, 31 bp, Artificial Sequence; identical to SEQ ID NO: 6105
  Probe

SEQ ID NO: 13665 - DNA, 32 bp, Artificial Sequence; identical to SEQ ID NO: 6106
  Probe

SEQ ID NO: 13666 - DNA, 33 bp, Artificial Sequence; identical to SEQ ID NO: 6107
  Probe

SEQ ID NO: 13667 - DNA, 34 bp, Artificial Sequence; identical to SEQ ID NO: 1167
  Probe

SEQ ID NO: 13668 - DNA, 27 bp, Artificial Sequence
  Probe
gcgggagaccggggttcgattccccga

SEQ ID NO: 13669 - DNA, 28 bp, Artificial Sequence
  Probe
gcgggagaccggggttcgattccccgac

SEQ ID NO: 13670 - DNA, 29 bp, Artificial Sequence
  Probe
gcgggagaccggggttcgattccccgacg

SEQ ID NO: 13671 - DNA, 30 bp, Artificial Sequence; identical to SEQ ID NO: 1169
  Probe

SEQ ID NO: 13672 - DNA, 31 bp, Artificial Sequence; identical to SEQ ID NO: 1170
  Probe

SEQ ID NO: 13673 - DNA, 32 bp, Artificial Sequence; identical to SEQ ID NO: 1171
  Probe

SEQ ID NO: 13674 - DNA, 33 bp, Artificial Sequence; identical to SEQ ID NO: 1172
  Probe

SEQ ID NO: 13675 - DNA, 34 bp, Artificial Sequence; identical to SEQ ID NO: 1173
  Probe

SEQ ID NO: 13676 - DNA, 29 bp, Artificial Sequence
  Probe
gcgtgctgggcccataacccagaggtcga

SEQ ID NO: 13677 - DNA, 27 bp, Artificial Sequence
  Probe
gcgttggtggtatagtggtaagcatag

SEQ ID NO: 13678 - DNA, 28 bp, Artificial Sequence
  Probe
gcgttggtggtatagtggtaagcatagc

SEQ ID NO: 13679 - DNA, 29 bp, Artificial Sequence
  Probe
gcgttggtggtatagtggtaagcatagct

SEQ ID NO: 13680 - DNA, 30 bp, Artificial Sequence; identical to SEQ ID NO: 1183
  Probe

SEQ ID NO: 13681 - DNA, 31 bp, Artificial Sequence; identical to SEQ ID NO: 1184
  Probe

SEQ ID NO: 13682 - DNA, 32 bp, Artificial Sequence; identical to SEQ ID NO: 1185
  Probe

SEQ ID NO: 13683 - DNA, 33 bp, Artificial Sequence; identical to SEQ ID NO: 1186
  Probe

SEQ ID NO: 13684 - DNA, 34 bp, Artificial Sequence; identical to SEQ ID NO: 1187
  Probe

SEQ ID NO: 13685 - DNA, 35 bp, Artificial Sequence; identical to SEQ ID NO: 1188
  Probe

SEQ ID NO: 13686 - DNA, 36 bp, Artificial Sequence; identical to SEQ ID NO: 1189
  Probe

SEQ ID NO: 13687 - DNA, 37 bp, Artificial Sequence; identical to SEQ ID NO: 1190
  Probe

SEQ ID NO: 13688 - DNA, 40 bp, Artificial Sequence; identical to SEQ ID NO: 6137
  Probe

SEQ ID NO: 13689 - DNA, 50 bp, Artificial Sequence; identical to SEQ ID NO: 1192
  Probe

SEQ ID NO: 13690 - DNA, 39 bp, Artificial Sequence; identical to SEQ ID NO: 6158
  Probe

SEQ ID NO: 13691 - DNA, 40 bp, Artificial Sequence; identical to SEQ ID NO: 1193
  Probe

SEQ ID NO: 13692 - DNA, 41 bp, Artificial Sequence
  Probe
gcgttggtggtatagtggtgagcatagctgccttccaagca

SEQ ID NO: 13693 - DNA, 43 bp, Artificial Sequence; identical to SEQ ID NO: 6159
  Probe

SEQ ID NO: 13694 - DNA, 44 bp, Artificial Sequence; identical to SEQ ID NO: 1194
  Probe

SEQ ID NO: 13695 - DNA, 48 bp, Artificial Sequence; identical to SEQ ID NO: 6163
  Probe

SEQ ID NO: 13696 - DNA, 49 bp, Artificial Sequence; identical to SEQ ID NO: 6164
  Probe

SEQ ID NO: 13697 - DNA, 50 bp, Artificial Sequence; identical to SEQ ID NO: 1195
  Probe

SEQ ID NO: 13698 - DNA, 39 bp, Artificial Sequence; identical to SEQ ID NO: 6180
  Probe

SEQ ID NO: 13699 - DNA, 40 bp, Artificial Sequence; identical to SEQ ID NO: 6181
  Probe

SEQ ID NO: 13700 - DNA, 41 bp, Artificial Sequence
  Probe
gcgttggtggtatagtggttagcatagctgccttccaagca

SEQ ID NO: 13701 - DNA, 44 bp, Artificial Sequence; identical to SEQ ID NO: 1196
  Probe

SEQ ID NO: 13702 - DNA, 49 bp, Artificial Sequence; identical to SEQ ID NO: 6185
  Probe

SEQ ID NO: 13703 - DNA, 50 bp, Artificial Sequence; identical to SEQ ID NO: 1197
  Probe

SEQ ID NO: 13704 - DNA, 26 bp, Artificial Sequence
  Probe
gctagctcagtcggtagagcatggga

SEQ ID NO: 13705 - DNA, 27 bp, Artificial Sequence
  Probe
gctagctcagtcggtagagcatgggac

SEQ ID NO: 13706 - DNA, 28 bp, Artificial Sequence
  Probe
gctagctcagtcggtagagcatgggact

SEQ ID NO: 13707 - DNA, 29 bp, Artificial Sequence
  Probe
gctagctcagtcggtagagcatgggactc

SEQ ID NO: 13708 - DNA, 31 bp, Artificial Sequence; identical to SEQ ID NO: 1200
  Probe

SEQ ID NO: 13709 - DNA, 46 bp, Artificial Sequence; identical to SEQ ID NO: 6267
  Probe

SEQ ID NO: 13710 - DNA, 16 bp, Artificial Sequence
  Probe
gctcacaagaactgct

SEQ ID NO: 13711 - DNA, 21 bp, Artificial Sequence
  Probe
gctcacaagaactgctaactc

SEQ ID NO: 13712 - DNA, 26 bp, Artificial Sequence
  Probe
gctcagtcggtagagcatcagacttt

SEQ ID NO: 13713 - DNA, 33 bp, Artificial Sequence; identical to SEQ ID NO: 6289
  Probe

SEQ ID NO: 13714 - DNA, 24 bp, Artificial Sequence
  Probe
gctggtgtagtggtatcatgcaag

SEQ ID NO: 13715 - DNA, 25 bp, Artificial Sequence
  Probe
gctggtgtagtggtatcatgcaaga

SEQ ID NO: 13716 - DNA, 27 bp, Artificial Sequence
  Probe
gctggtgtagtggtatcatgcaagatt

SEQ ID NO: 13717 - DNA, 28 bp, Artificial Sequence
  Probe
gctggtgtagtggtatcatgcaagattc

SEQ ID NO: 13718 - DNA, 28 bp, Artificial Sequence
  Probe
gcttctgtagtgtagtggttatcacgtt

SEQ ID NO: 13719 - DNA, 30 bp, Artificial Sequence; identical to SEQ ID NO: 8646
  Probe

SEQ ID NO: 13720 - DNA, 31 bp, Artificial Sequence; identical to SEQ ID NO: 1213
  Probe

SEQ ID NO: 13721 - DNA, 32 bp, Artificial Sequence; identical to SEQ ID NO: 1214
  Probe

SEQ ID NO: 13722 - DNA, 33 bp, Artificial Sequence; identical to SEQ ID NO: 1215
  Probe

SEQ ID NO: 13723 - DNA, 34 bp, Artificial Sequence; identical to SEQ ID NO: 1216
  Probe

SEQ ID NO: 13724 - DNA, 35 bp, Artificial Sequence; identical to SEQ ID NO: 1217
  Probe

SEQ ID NO: 13725 - DNA, 36 bp, Artificial Sequence; identical to SEQ ID NO: 1218
  Probe

SEQ ID NO: 13726 - DNA, 37 bp, Artificial Sequence; identical to SEQ ID NO: 6324
  Probe

SEQ ID NO: 13727 - DNA, 50 bp, Artificial Sequence; identical to SEQ ID NO: 1219
  Probe

SEQ ID NO: 13728 - DNA, 17 bp, Artificial Sequence
  Probe
ggaagcgtgctgggccc

SEQ ID NO: 13729 - DNA, 31 bp, Artificial Sequence; identical to SEQ ID NO: 1224
  Probe

SEQ ID NO: 13730 - DNA, 32 bp, Artificial Sequence; identical to SEQ ID NO: 1225
  Probe

SEQ ID NO: 13731 - DNA, 33 bp, Artificial Sequence; identical to SEQ ID NO: 1226
  Probe

SEQ ID NO: 13732 - DNA, 38 bp, Artificial Sequence; identical to SEQ ID NO: 1230
  Probe

SEQ ID NO: 13733 - DNA, 41 bp, Artificial Sequence; identical to SEQ ID NO: 6341
  Probe

SEQ ID NO: 13734 - DNA, 42 bp, Artificial Sequence
  Probe
ggactgtaaatctaaagacaggggttaggcctctttttacca

SEQ ID NO: 13735 - DNA, 25 bp, Artificial Sequence
  Probe
ggagaccggggttcaattccccgac

SEQ ID NO: 13736 - DNA, 27 bp, Artificial Sequence
  Probe
ggagaccggggttcaattccccgacgg

SEQ ID NO: 13737 - DNA, 28 bp, Artificial Sequence
  Probe
ggagaccggggttcaattccccgacggg

SEQ ID NO: 13738 - DNA, 29 bp, Artificial Sequence
  Probe
ggagaccggggttcaattccccgacgggg

SEQ ID NO: 13739 - DNA, 30 bp, Artificial Sequence; identical to SEQ ID NO: 1235
  Probe

SEQ ID NO: 13740 - DNA, 31 bp, Artificial Sequence; identical to SEQ ID NO: 1236
  Probe

SEQ ID NO: 13741 - DNA, 17 bp, Artificial Sequence
  Probe
ggagaccggggttcgat

SEQ ID NO: 13742 - DNA, 24 bp, Artificial Sequence
  Probe
ggagaccggggttcgattccccga

SEQ ID NO: 13743 - DNA, 25 bp, Artificial Sequence
  Probe
ggagaccggggttcgattccccgac

SEQ ID NO: 13744 - DNA, 26 bp, Artificial Sequence
  Probe
ggagaccggggttcgattccccgacg

SEQ ID NO: 13745 - DNA, 27 bp, Artificial Sequence
  Probe
ggagaccggggttcgattccccgacgg

SEQ ID NO: 13746 - DNA, 28 bp, Artificial Sequence
  Probe
ggagaccggggttcgattccccgacggg

SEQ ID NO: 13747 - DNA, 29 bp, Artificial Sequence
  Probe
ggagaccggggttcgattccccgacgggg

SEQ ID NO: 13748 - DNA, 30 bp, Artificial Sequence; identical to SEQ ID NO: 1241
  Probe

SEQ ID NO: 13749 - DNA, 31 bp, Artificial Sequence; identical to SEQ ID NO: 1242
  Probe

SEQ ID NO: 13750 - DNA, 23 bp, Artificial Sequence
  Probe
ggagatgaaaacctttttccaag

SEQ ID NO: 13751 - DNA, 25 bp, Artificial Sequence
  Probe
ggagatgaaaacctttttccaagga

SEQ ID NO: 13752 - DNA, 27 bp, Artificial Sequence
  Probe
ggagatgaaaacctttttccaaggaca

SEQ ID NO: 13753 - DNA, 16 bp, Artificial Sequence
  Probe
ggagcttaaaccccct

SEQ ID NO: 13754 - DNA, 18 bp, Artificial Sequence
  Probe
ggagcttaaaccccctta

SEQ ID NO: 13755 - DNA, 27 bp, Artificial Sequence
  Probe
ggatagctcagtcggtagagcatcaga

SEQ ID NO: 13756 - DNA, 28 bp, Artificial Sequence
  Probe
ggatagctcagtcggtagagcatcagac

SEQ ID NO: 13757 - DNA, 29 bp, Artificial Sequence
  Probe
ggatagctcagtcggtagagcatcagact

SEQ ID NO: 13758 - DNA, 30 bp, Artificial Sequence; identical to SEQ ID NO: 6383
  Probe

SEQ ID NO: 13759 - DNA, 31 bp, Artificial Sequence; identical to SEQ ID NO: 1252
  Probe

SEQ ID NO: 13760 - DNA, 32 bp, Artificial Sequence; identical to SEQ ID NO: 1253
  Probe

SEQ ID NO: 13761 - DNA, 28 bp, Artificial Sequence
  Probe
ggattcctggttttcacccaggcggccc

SEQ ID NO: 13762 - DNA, 28 bp, Artificial Sequence
  Probe
ggattcctggttttcacccaggtggccc

SEQ ID NO: 13763 - DNA, 23 bp, Artificial Sequence
  Probe
ggattcggcgctctcaccgccgc

SEQ ID NO: 13764 - DNA, 24 bp, Artificial Sequence
  Probe
ggattcggcgctctcaccgccgcg

SEQ ID NO: 13765 - DNA, 28 bp, Artificial Sequence
  Probe
ggattcggcgctctcaccgccgcggccc

SEQ ID NO: 13766 - DNA, 29 bp, Artificial Sequence
  Probe
ggattcggcgctctcaccgccgcggcccg

SEQ ID NO: 13767 - DNA, 28 bp, Artificial Sequence
  Probe
ggattcggcgctttcaccgccgcggccc

SEQ ID NO: 13768 - DNA, 29 bp, Artificial Sequence
  Probe
ggccccatggtgtaatggttagcactctg

SEQ ID NO: 13769 - DNA, 30 bp, Artificial Sequence; identical to SEQ ID NO: 8648
  Probe

SEQ ID NO: 13770 - DNA, 33 bp, Artificial Sequence; identical to SEQ ID NO: 1263
  Probe

SEQ ID NO: 13771 - DNA, 34 bp, Artificial Sequence
  Probe
ggccccatggtgtaatggttagcactctggactt

SEQ ID NO: 13772 - DNA, 36 bp, Artificial Sequence; identical to SEQ ID NO: 1264
  Probe

SEQ ID NO: 13773 - DNA, 37 bp, Artificial Sequence; identical to SEQ ID NO: 1265
  Probe

SEQ ID NO: 13774 - DNA, 50 bp, Artificial Sequence; identical to SEQ ID NO: 6427
  Probe

SEQ ID NO: 13775 - DNA, 23 bp, Artificial Sequence
  Probe
ggccccgggttcaatccccggca

SEQ ID NO: 13776 - DNA, 29 bp, Artificial Sequence
  Probe
ggccccgggttcaatccccggcacctcca

SEQ ID NO: 13777 - DNA, 23 bp, Artificial Sequence
  Probe
ggccccgggttcgatccccggca

SEQ ID NO: 13778 - DNA, 26 bp, Artificial Sequence
  Probe
ggccccgggttcgatccccggcatct

SEQ ID NO: 13779 - DNA, 28 bp, Artificial Sequence
  Probe
ggccctatagctcaggggttagagcact

SEQ ID NO: 13780 - DNA, 30 bp, Artificial Sequence; identical to SEQ ID NO: 1267
  Probe

SEQ ID NO: 13781 - DNA, 31 bp, Artificial Sequence; identical to SEQ ID NO: 1268
  Probe

SEQ ID NO: 13782 - DNA, 19 bp, Artificial Sequence
  Probe
ggccgcgtggcctaatgga

SEQ ID NO: 13783 - DNA, 27 bp, Artificial Sequence
  Probe
ggcggcccgggttcgactcccggtgtg

SEQ ID NO: 13784 - DNA, 28 bp, Artificial Sequence
  Probe
ggcggcccgggttcgactcccggtgtgg

SEQ ID NO: 13785 - DNA, 29 bp, Artificial Sequence
  Probe
ggcggcccgggttcgactcccggtgtggg

SEQ ID NO: 13786 - DNA, 30 bp, Artificial Sequence; identical to SEQ ID NO: 1278
  Probe

SEQ ID NO: 13787 - DNA, 31 bp, Artificial Sequence; identical to SEQ ID NO: 1279
  Probe

SEQ ID NO: 13788 - DNA, 32 bp, Artificial Sequence; identical to SEQ ID NO: 1280
  Probe

SEQ ID NO: 13789 - DNA, 18 bp, Artificial Sequence
  Probe
ggctagctcagtcggtag

SEQ ID NO: 13790 - DNA, 19 bp, Artificial Sequence
  Probe
ggctagctcagtcggtaga

SEQ ID NO: 13791 - DNA, 22 bp, Artificial Sequence
  Probe
ggctagctcagtcggtagagca

SEQ ID NO: 13792 - DNA, 24 bp, Artificial Sequence
  Probe
ggctagctcagtcggtagagcatg

SEQ ID NO: 13793 - DNA, 25 bp, Artificial Sequence
  Probe
ggctagctcagtcggtagagcatga

SEQ ID NO: 13794 - DNA, 27 bp, Artificial Sequence
  Probe
ggctagctcagtcggtagagcatgaga

SEQ ID NO: 13795 - DNA, 28 bp, Artificial Sequence
  Probe
ggctagctcagtcggtagagcatgagac

SEQ ID NO: 13796 - DNA, 29 bp, Artificial Sequence
  Probe
ggctagctcagtcggtagagcatgagact

SEQ ID NO: 13797 - DNA, 30 bp, Artificial Sequence; identical to SEQ ID NO: 1285
  Probe

SEQ ID NO: 13798 - DNA, 31 bp, Artificial Sequence; identical to SEQ ID NO: 1286
  Probe

SEQ ID NO: 13799 - DNA, 25 bp, Artificial Sequence
  Probe
ggctagctcagtcggtagagcatgg

SEQ ID NO: 13800 - DNA, 26 bp, Artificial Sequence
  Probe
ggctagctcagtcggtagagcatggg

SEQ ID NO: 13801 - DNA, 27 bp, Artificial Sequence
  Probe
ggctagctcagtcggtagagcatggga

SEQ ID NO: 13802 - DNA, 28 bp, Artificial Sequence
  Probe
ggctagctcagtcggtagagcatgggac

SEQ ID NO: 13803 - DNA, 29 bp, Artificial Sequence
  Probe
ggctagctcagtcggtagagcatgggact

SEQ ID NO: 13804 - DNA, 30 bp, Artificial Sequence; identical to SEQ ID NO: 1292
  Probe

SEQ ID NO: 13805 - DNA, 31 bp, Artificial Sequence; identical to SEQ ID NO: 1293
  Probe

SEQ ID NO: 13806 - DNA, 32 bp, Artificial Sequence; identical to SEQ ID NO: 1294
  Probe

SEQ ID NO: 13807 - DNA, 33 bp, Artificial Sequence; identical to SEQ ID NO: 1295
  Probe

SEQ ID NO: 13808 - DNA, 26 bp, Artificial Sequence
  Probe
ggctccatagctcagtggttagagca

SEQ ID NO: 13809 - DNA, 28 bp, Artificial Sequence
  Probe
ggctccatagctcagtggttagagcact

SEQ ID NO: 13810 - DNA, 30 bp, Artificial Sequence
  Probe
ggctccatagctcagtggttagagcactgg

SEQ ID NO: 13811 - DNA, 31 bp, Artificial Sequence; identical to SEQ ID NO: 1298
  Probe

SEQ ID NO: 13812 - DNA, 32 bp, Artificial Sequence; identical to SEQ ID NO: 1299
  Probe

SEQ ID NO: 13813 - DNA, 18 bp, Artificial Sequence
  Probe
ggctccgtggcgcaatgg

SEQ ID NO: 13814 - DNA, 19 bp, Artificial Sequence
  Probe
ggctccgtggcgcaatgga

SEQ ID NO: 13815 - DNA, 30 bp, Artificial Sequence; identical to SEQ ID NO: 10704
  Probe

SEQ ID NO: 13816 - DNA, 33 bp, Artificial Sequence; identical to SEQ ID NO: 6492
  Probe

SEQ ID NO: 13817 - DNA, 33 bp, Artificial Sequence; identical to SEQ ID NO: 1306
  Probe

SEQ ID NO: 13818 - DNA, 16 bp, Artificial Sequence
  Probe
ggcttacgacccctta

SEQ ID NO: 13819 - DNA, 26 bp, Artificial Sequence
  Probe
gggagaccggggttcaattccccgac

SEQ ID NO: 13820 - DNA, 28 bp, Artificial Sequence
  Probe
gggagaccggggttcaattccccgacgg

SEQ ID NO: 13821 - DNA, 29 bp, Artificial Sequence
  Probe
gggagaccggggttcaattccccgacggg

SEQ ID NO: 13822 - DNA, 25 bp, Artificial Sequence
  Probe
gggagaccggggttcgattccccga

SEQ ID NO: 13823 - DNA, 26 bp, Artificial Sequence
  Probe
gggagaccggggttcgattccccgac

SEQ ID NO: 13824 - DNA, 27 bp, Artificial Sequence
  Probe
gggagaccggggttcgattccccgacg

SEQ ID NO: 13825 - DNA, 28 bp, Artificial Sequence
  Probe
gggagaccggggttcgattccccgacgg

SEQ ID NO: 13826 - DNA, 29 bp, Artificial Sequence
  Probe
gggagaccggggttcgattccccgacggg

SEQ ID NO: 13827 - DNA, 30 bp, Artificial Sequence; identical to SEQ ID NO: 1315
  Probe

SEQ ID NO: 13828 - DNA, 31 bp, Artificial Sequence; identical to SEQ ID NO: 1316
  Probe

SEQ ID NO: 13829 - DNA, 32 bp, Artificial Sequence; identical to SEQ ID NO: 1317
  Probe

SEQ ID NO: 13830 - DNA, 16 bp, Artificial Sequence
  Probe
ggggatgtagctcagt

SEQ ID NO: 13831 - DNA, 17 bp, Artificial Sequence
  Probe
ggggatgtagctcagtg

SEQ ID NO: 13832 - DNA, 18 bp, Artificial Sequence
  Probe
ggggatgtagctcagtgg

SEQ ID NO: 13833 - DNA, 19 bp, Artificial Sequence
  Probe
ggggatgtagctcagtggt

SEQ ID NO: 13834 - DNA, 20 bp, Artificial Sequence
  Probe
ggggatgtagctcagtggta

SEQ ID NO: 13835 - DNA, 22 bp, Artificial Sequence
  Probe
ggggatgtagctcagtggtaga

SEQ ID NO: 13836 - DNA, 24 bp, Artificial Sequence
  Probe
ggggatgtagctcagtggtagagc

SEQ ID NO: 13837 - DNA, 30 bp, Artificial Sequence; identical to SEQ ID NO: 1335
  Probe

SEQ ID NO: 13838 - DNA, 31 bp, Artificial Sequence; identical to SEQ ID NO: 1336
  Probe

SEQ ID NO: 13839 - DNA, 32 bp, Artificial Sequence; identical to SEQ ID NO: 1337
  Probe

SEQ ID NO: 13840 - DNA, 33 bp, Artificial Sequence; identical to SEQ ID NO: 1338
  Probe

SEQ ID NO: 13841 - DNA, 19 bp, Artificial Sequence
  Probe
gggggattagctcaaatgg

SEQ ID NO: 13842 - DNA, 20 bp, Artificial Sequence
  Probe
gggggattagctcaaatggt

SEQ ID NO: 13843 - DNA, 21 bp, Artificial Sequence
  Probe
gggggattagctcaaatggta

SEQ ID NO: 13844 - DNA, 22 bp, Artificial Sequence
  Probe
gggggattagctcaaatggtag

SEQ ID NO: 13845 - DNA, 23 bp, Artificial Sequence
  Probe
gggggattagctcaaatggtaga

SEQ ID NO: 13846 - DNA, 24 bp, Artificial Sequence
  Probe
gggggattagctcaaatggtagag

SEQ ID NO: 13847 - DNA, 25 bp, Artificial Sequence
  Probe
gggggattagctcaaatggtagagc

SEQ ID NO: 13848 - DNA, 32 bp, Artificial Sequence; identical to SEQ ID NO: 1351
  Probe

SEQ ID NO: 13849 - DNA, 33 bp, Artificial Sequence; identical to SEQ ID NO: 1352
  Probe

SEQ ID NO: 13850 - DNA, 34 bp, Artificial Sequence; identical to SEQ ID NO: 1353
  Probe

SEQ ID NO: 13851 - DNA, 35 bp, Artificial Sequence; identical to SEQ ID NO: 1354
  Probe

SEQ ID NO: 13852 - DNA, 32 bp, Artificial Sequence; identical to SEQ ID NO: 1355
  Probe

SEQ ID NO: 13853 - DNA, 33 bp, Artificial Sequence; identical to SEQ ID NO: 1356
  Probe

SEQ ID NO: 13854 - DNA, 34 bp, Artificial Sequence; identical to SEQ ID NO: 1357
  Probe

SEQ ID NO: 13855 - DNA, 33 bp, Artificial Sequence; identical to SEQ ID NO: 6585
  Probe

SEQ ID NO: 13856 - DNA, 34 bp, Artificial Sequence
  Probe
gggggtatagctcaggtggtagagcatttgactg

SEQ ID NO: 13857 - DNA, 35 bp, Artificial Sequence; identical to SEQ ID NO: 6586
  Probe

SEQ ID NO: 13858 - DNA, 36 bp, Artificial Sequence
  Probe
gggggtatagctcaggtggtagagcatttgactgca

SEQ ID NO: 13859 - DNA, 26 bp, Artificial Sequence
  Probe
gggggtatagctcagtgggtagagca

SEQ ID NO: 13860 - DNA, 33 bp, Artificial Sequence; identical to SEQ ID NO: 6590
  Probe

SEQ ID NO: 13861 - DNA, 34 bp, Artificial Sequence
  Probe
gggggtatagctcagtgggtagagcatttgactg

SEQ ID NO: 13862 - DNA, 35 bp, Artificial Sequence; identical to SEQ ID NO: 1358
  Probe

SEQ ID NO: 13863 - DNA, 36 bp, Artificial Sequence
  Probe
gggggtatagctcagtgggtagagcatttgactgca

SEQ ID NO: 13864 - DNA, 36 bp, Artificial Sequence
  Probe
gggggtatagctcagtggtagagcatttgactgcag

SEQ ID NO: 13865 - DNA, 24 bp, Artificial Sequence
  Probe
gggggtatagcttagcggtagagc

SEQ ID NO: 13866 - DNA, 25 bp, Artificial Sequence
  Probe
gggggtatagcttagcggtagagca

SEQ ID NO: 13867 - DNA, 32 bp, Artificial Sequence; identical to SEQ ID NO: 1360
  Probe

SEQ ID NO: 13868 - DNA, 33 bp, Artificial Sequence; identical to SEQ ID NO: 6605
  Probe

SEQ ID NO: 13869 - DNA, 35 bp, Artificial Sequence
  Probe
gggggtatagcttagcggtagagcatttgactgca

SEQ ID NO: 13870 - DNA, 19 bp, Artificial Sequence
  Probe
gggggtgtagctcagtggt

SEQ ID NO: 13871 - DNA, 22 bp, Artificial Sequence
  Probe
gggggtgtagctcagtggtaga

SEQ ID NO: 13872 - DNA, 34 bp, Artificial Sequence; identical to SEQ ID NO: 1366
  Probe

SEQ ID NO: 13873 - DNA, 29 bp, Artificial Sequence
  Probe
gggggtgtagctcagtggtagagcgcgtg

SEQ ID NO: 13874 - DNA, 30 bp, Artificial Sequence; identical to SEQ ID NO: 1367
  Probe

SEQ ID NO: 13875 - DNA, 31 bp, Artificial Sequence; identical to SEQ ID NO: 1368
  Probe

SEQ ID NO: 13876 - DNA, 32 bp, Artificial Sequence; identical to SEQ ID NO: 1369
  Probe

SEQ ID NO: 13877 - DNA, 16 bp, Artificial Sequence
  Probe
ggggtatgattctcgg

SEQ ID NO: 13878 - DNA, 17 bp, Artificial Sequence
  Probe
ggggtatgattctcggt

SEQ ID NO: 13879 - DNA, 29 bp, Artificial Sequence
  Probe
ggggtgtagctcagtggtagagcgcgtgc

SEQ ID NO: 13880 - DNA, 34 bp, Artificial Sequence
  Probe
gggtatagctcagtgggtagagcatttgactgca

SEQ ID NO: 13881 - DNA, 34 bp, Artificial Sequence
  Probe
gggtatgattctcgcttcgggtgcgagaggtccc

SEQ ID NO: 13882 - DNA, 16 bp, Artificial Sequence
  Probe
gggtatgattctcggt

SEQ ID NO: 13883 - DNA, 16 bp, Artificial Sequence
  Probe
gggtgcgagaggtccc

SEQ ID NO: 13884 - DNA, 29 bp, Artificial Sequence
  Probe
gggtggttcagtggtagaattctcgcctg

SEQ ID NO: 13885 - DNA, 28 bp, Artificial Sequence
  Probe
gggtgtagctcagtggtagagcgcgtgc

SEQ ID NO: 13886 - DNA, 18 bp, Artificial Sequence
  Probe
gggtttccccgcgcaggt

SEQ ID NO: 13887 - DNA, 33 bp, Artificial Sequence
  Probe
ggtaagcatagctgccttccaagcagttgaccc

SEQ ID NO: 13888 - DNA, 19 bp, Artificial Sequence
  Probe
ggtaatcgcataaaactta

SEQ ID NO: 13889 - DNA, 24 bp, Artificial Sequence
  Probe
ggtaatcgcataaaacttaaaact

SEQ ID NO: 13890 - DNA, 23 bp, Artificial Sequence
  Probe
ggtagaattctcgcctgccacgc

SEQ ID NO: 13891 - DNA, 32 bp, Artificial Sequence; identical to SEQ ID NO: 6703
  Probe

SEQ ID NO: 13892 - DNA, 16 bp, Artificial Sequence
  Probe
ggtagagcatcagact

SEQ ID NO: 13893 - DNA, 37 bp, Artificial Sequence
  Probe
ggtagagcatgagactcttaatctcagggtcgtgggt

SEQ ID NO: 13894 - DNA, 17 bp, Artificial Sequence
  Probe
ggtagagcatgggactc

SEQ ID NO: 13895 - DNA, 37 bp, Artificial Sequence
  Probe
ggtagagcatgggactcttaatcccagggtcgtgggt

SEQ ID NO: 13896 - DNA, 16 bp, Artificial Sequence
  Probe
ggtagcgtggccgagc

SEQ ID NO: 13897 - DNA, 17 bp, Artificial Sequence
  Probe
ggtagcgtggccgagcg

SEQ ID NO: 13898 - DNA, 18 bp, Artificial Sequence
  Probe
ggtagcgtggccgagcgg

SEQ ID NO: 13899 - DNA, 19 bp, Artificial Sequence
  Probe
ggtagcgtggccgagcggt

SEQ ID NO: 13900 - DNA, 20 bp, Artificial Sequence
  Probe
ggtagcgtggccgagcggtc

SEQ ID NO: 13901 - DNA, 21 bp, Artificial Sequence
  Probe
ggtagcgtggccgagcggtct

SEQ ID NO: 13902 - DNA, 22 bp, Artificial Sequence
  Probe
ggtagcgtggccgagcggtcta

SEQ ID NO: 13903 - DNA, 23 bp, Artificial Sequence
  Probe
ggtagcgtggccgagcggtctaa

SEQ ID NO: 13904 - DNA, 24 bp, Artificial Sequence
  Probe
ggtagcgtggccgagcggtctaag

SEQ ID NO: 13905 - DNA, 25 bp, Artificial Sequence
  Probe
ggtagcgtggccgagcggtctaagg

SEQ ID NO: 13906 - DNA, 16 bp, Artificial Sequence
  Probe
ggtagcgtggccgagt

SEQ ID NO: 13907 - DNA, 17 bp, Artificial Sequence
  Probe
ggtagcgtggccgagtg

SEQ ID NO: 13908 - DNA, 20 bp, Artificial Sequence
  Probe
ggtagcgtggccgagtggtc

SEQ ID NO: 13909 - DNA, 22 bp, Artificial Sequence
  Probe
ggtagcgtggccgagtggtcta

SEQ ID NO: 13910 - DNA, 23 bp, Artificial Sequence
  Probe
ggtagcgtggccgagtggtctaa

SEQ ID NO: 13911 - DNA, 24 bp, Artificial Sequence
  Probe
ggtagcgtggccgagtggtctaag

SEQ ID NO: 13912 - DNA, 25 bp, Artificial Sequence
  Probe
ggtagcgtggccgagtggtctaagg

SEQ ID NO: 13913 - DNA, 35 bp, Artificial Sequence; identical to SEQ ID NO: 1405
  Probe

SEQ ID NO: 13914 - DNA, 36 bp, Artificial Sequence
  Probe
ggtagcgtggccgagtggtctaaggcgctggattta

SEQ ID NO: 13915 - DNA, 32 bp, Artificial Sequence
  Probe
ggtatcatgcaagattcccattcttgcgaccc

SEQ ID NO: 13916 - DNA, 33 bp, Artificial Sequence; identical to SEQ ID NO: 6728
  Probe

SEQ ID NO: 13917 - DNA, 33 bp, Artificial Sequence; identical to SEQ ID NO: 1407
  Probe

SEQ ID NO: 13918 - DNA, 19 bp, Artificial Sequence
  Probe
ggtcccatggtgtaatggt

SEQ ID NO: 13919 - DNA, 28 bp, Artificial Sequence
  Probe
ggtcccatggtgtaatggttagcactct

SEQ ID NO: 13920 - DNA, 29 bp, Artificial Sequence
  Probe
ggtcccatggtgtaatggttagcactctg

SEQ ID NO: 13921 - DNA, 30 bp, Artificial Sequence; identical to SEQ ID NO: 8706
  Probe

SEQ ID NO: 13922 - DNA, 50 bp, Artificial Sequence; identical to SEQ ID NO: 1417
  Probe

SEQ ID NO: 13923 - DNA, 26 bp, Artificial Sequence
  Probe
ggtcctgggttcgagccccagtggaa

SEQ ID NO: 13924 - DNA, 22 bp, Artificial Sequence
  Probe
ggtcgtggttgtagtccgtgcg

SEQ ID NO: 13925 - DNA, 25 bp, Artificial Sequence
  Probe
ggtcgtggttgtagtccgtgcgaga

SEQ ID NO: 13926 - DNA, 26 bp, Artificial Sequence
  Probe
ggtcgtggttgtagtccgtgcgagaa

SEQ ID NO: 13927 - DNA, 28 bp, Artificial Sequence
  Probe
ggtcgtggttgtagtccgtgcgagaata

SEQ ID NO: 13928 - DNA, 23 bp, Artificial Sequence
  Probe
ggtctagtggttaggattcggcg

SEQ ID NO: 13929 - DNA, 25 bp, Artificial Sequence
  Probe
ggtctagtggttaggattcggcgct

SEQ ID NO: 13930 - DNA, 26 bp, Artificial Sequence
  Probe
ggtctagtggttaggattcggcgctc

SEQ ID NO: 13931 - DNA, 33 bp, Artificial Sequence
  Probe
ggtgagcatagctgccttccaagcagttgaccc

SEQ ID NO: 13932 - DNA, 16 bp, Artificial Sequence
  Probe
ggtgagtatccccgcc

SEQ ID NO: 13933 - DNA, 20 bp, Artificial Sequence
  Probe
ggtgagtatccccgcctgtc

SEQ ID NO: 13934 - DNA, 22 bp, Artificial Sequence
  Probe
ggtgagtatccccgcctgtcac

SEQ ID NO: 13935 - DNA, 34 bp, Artificial Sequence
  Probe
ggtgagtatccccgcctgtcacgcgggagaccgg

SEQ ID NO: 13936 - DNA, 37 bp, Artificial Sequence
  Probe
ggtgagtatccccgcctgtcacgcgggagaccggggt

SEQ ID NO: 13937 - DNA, 26 bp, Artificial Sequence
  Probe
ggtggagttaaagactttttctctga

SEQ ID NO: 13938 - DNA, 31 bp, Artificial Sequence
  Probe
ggtggcccgggttcgactcccggtatgggaa

SEQ ID NO: 13939 - DNA, 32 bp, Artificial Sequence; identical to SEQ ID NO: 6779
  Probe

SEQ ID NO: 13940 - DNA, 26 bp, Artificial Sequence
  Probe
ggtggtctagtggttaggattcggcg

SEQ ID NO: 13941 - DNA, 28 bp, Artificial Sequence
  Probe
ggtggtctagtggttaggattcggcgct

SEQ ID NO: 13942 - DNA, 29 bp, Artificial Sequence
  Probe
ggtggtctagtggttaggattcggcgctc

SEQ ID NO: 13943 - DNA, 27 bp, Artificial Sequence
  Probe
ggtgtagctcagtggtagagcgcgtgc

SEQ ID NO: 13944 - DNA, 22 bp, Artificial Sequence
  Probe
ggtgtagtggtatcatgcaaga

SEQ ID NO: 13945 - DNA, 25 bp, Artificial Sequence
  Probe
ggtgtagtggtatcatgcaagattc

SEQ ID NO: 13946 - DNA, 35 bp, Artificial Sequence
  Probe
ggttagcactctggactctgaatccagcgatccga

SEQ ID NO: 13947 - DNA, 36 bp, Artificial Sequence
  Probe
ggttagcactctggactctgaatccagcgatccgag

SEQ ID NO: 13948 - DNA, 35 bp, Artificial Sequence
  Probe
ggttagcactctggactttgaatccagcgatccga

SEQ ID NO: 13949 - DNA, 36 bp, Artificial Sequence
  Probe
ggttagcactctggactttgaatccagcgatccgag

SEQ ID NO: 13950 - DNA, 33 bp, Artificial Sequence
  Probe
ggttagcatagctgccttccaagcagttgaccc

SEQ ID NO: 13951 - DNA, 16 bp, Artificial Sequence
  Probe
ggttaggattcggcgc

SEQ ID NO: 13952 - DNA, 17 bp, Artificial Sequence
  Probe
ggttaggattcggcgct

SEQ ID NO: 13953 - DNA, 16 bp, Artificial Sequence
  Probe
ggttagtactctgcgt

SEQ ID NO: 13954 - DNA, 37 bp, Artificial Sequence
  Probe
ggttatcacgttcgcctcacacgcgaaaggtccccgg

SEQ ID NO: 13955 - DNA, 25 bp, Artificial Sequence
  Probe
ggttcaatccccggcacctccacca

SEQ ID NO: 13956 - DNA, 31 bp, Artificial Sequence
  Probe
ggttcagtggtagaattctcgcctgccacgc

SEQ ID NO: 13957 - DNA, 40 bp, Artificial Sequence
  Probe
ggttcagtggtagaattctcgcctgccacgcgggaggccc

SEQ ID NO: 13958 - DNA, 16 bp, Artificial Sequence
  Probe
ggttccatagtgtagc

SEQ ID NO: 13959 - DNA, 17 bp, Artificial Sequence
  Probe
ggttccatagtgtagcg

SEQ ID NO: 13960 - DNA, 19 bp, Artificial Sequence
  Probe
ggttccatagtgtagcggt

SEQ ID NO: 13961 - DNA, 28 bp, Artificial Sequence
  Probe
ggttccatagtgtagcggttatcacgtc

SEQ ID NO: 13962 - DNA, 29 bp, Artificial Sequence
  Probe
ggttccatagtgtagcggttatcacgtct

SEQ ID NO: 13963 - DNA, 30 bp, Artificial Sequence; identical to SEQ ID NO: 8720
  Probe

SEQ ID NO: 13964 - DNA, 31 bp, Artificial Sequence; identical to SEQ ID NO: 1432
  Probe

SEQ ID NO: 13965 - DNA, 32 bp, Artificial Sequence; identical to SEQ ID NO: 1433
  Probe

SEQ ID NO: 13966 - DNA, 33 bp, Artificial Sequence; identical to SEQ ID NO: 1434
  Probe

SEQ ID NO: 13967 - DNA, 34 bp, Artificial Sequence; identical to SEQ ID NO: 1435
  Probe

SEQ ID NO: 13968 - DNA, 37 bp, Artificial Sequence; identical to SEQ ID NO: 6811
  Probe

SEQ ID NO: 13969 - DNA, 50 bp, Artificial Sequence; identical to SEQ ID NO: 6812
  Probe

SEQ ID NO: 13970 - DNA, 23 bp, Artificial Sequence
  Probe
ggttccatagtgtagtggttatc

SEQ ID NO: 13971 - DNA, 28 bp, Artificial Sequence
  Probe
ggttccatagtgtagtggttatcacatc

SEQ ID NO: 13972 - DNA, 29 bp, Artificial Sequence
  Probe
ggttccatagtgtagtggttatcacatct

SEQ ID NO: 13973 - DNA, 30 bp, Artificial Sequence; identical to SEQ ID NO: 11085
  Probe

SEQ ID NO: 13974 - DNA, 31 bp, Artificial Sequence; identical to SEQ ID NO: 1443
  Probe

SEQ ID NO: 13975 - DNA, 32 bp, Artificial Sequence; identical to SEQ ID NO: 1444
  Probe

SEQ ID NO: 13976 - DNA, 33 bp, Artificial Sequence; identical to SEQ ID NO: 1445
  Probe

SEQ ID NO: 13977 - DNA, 34 bp, Artificial Sequence; identical to SEQ ID NO: 1446
  Probe

SEQ ID NO: 13978 - DNA, 35 bp, Artificial Sequence
  Probe
ggttccatagtgtagtggttatcacatctgcttta

SEQ ID NO: 13979 - DNA, 36 bp, Artificial Sequence; identical to SEQ ID NO: 6816
  Probe

SEQ ID NO: 13980 - DNA, 37 bp, Artificial Sequence
  Probe
ggttccatagtgtagtggttatcacatctgctttaca

SEQ ID NO: 13981 - DNA, 50 bp, Artificial Sequence
  Probe
ggttccatagtgtagtggttatcacatctgctttacacgcagaaggtcct

SEQ ID NO: 13982 - DNA, 26 bp, Artificial Sequence
  Probe
ggttccatagtgtagtggttatcacg

SEQ ID NO: 13983 - DNA, 28 bp, Artificial Sequence
  Probe
ggttccatagtgtagtggttatcacgtc

SEQ ID NO: 13984 - DNA, 29 bp, Artificial Sequence
  Probe
ggttccatagtgtagtggttatcacgtct

SEQ ID NO: 13985 - DNA, 30 bp, Artificial Sequence; identical to SEQ ID NO: 1451
  Probe

SEQ ID NO: 13986 - DNA, 31 bp, Artificial Sequence; identical to SEQ ID NO: 1452
  Probe

SEQ ID NO: 13987 - DNA, 32 bp, Artificial Sequence; identical to SEQ ID NO: 1453
  Probe

SEQ ID NO: 13988 - DNA, 33 bp, Artificial Sequence; identical to SEQ ID NO: 1454
  Probe

SEQ ID NO: 13989 - DNA, 34 bp, Artificial Sequence; identical to SEQ ID NO: 1455
  Probe

SEQ ID NO: 13990 - DNA, 35 bp, Artificial Sequence; identical to SEQ ID NO: 6817
  Probe

SEQ ID NO: 13991 - DNA, 36 bp, Artificial Sequence; identical to SEQ ID NO: 1456
  Probe

SEQ ID NO: 13992 - DNA, 37 bp, Artificial Sequence; identical to SEQ ID NO: 6818
  Probe

SEQ ID NO: 13993 - DNA, 39 bp, Artificial Sequence; identical to SEQ ID NO: 6819
  Probe

SEQ ID NO: 13994 - DNA, 40 bp, Artificial Sequence
  Probe
ggttccatagtgtagtggttatcacgtctgctttacacgc

SEQ ID NO: 13995 - DNA, 50 bp, Artificial Sequence; identical to SEQ ID NO: 1457
  Probe

SEQ ID NO: 13996 - DNA, 30 bp, Artificial Sequence; identical to SEQ ID NO: 6826
  Probe

SEQ ID NO: 13997 - DNA, 33 bp, Artificial Sequence; identical to SEQ ID NO: 1458
  Probe

SEQ ID NO: 13998 - DNA, 34 bp, Artificial Sequence; identical to SEQ ID NO: 1459
  Probe

SEQ ID NO: 13999 - DNA, 36 bp, Artificial Sequence; identical to SEQ ID NO: 1460
  Probe

SEQ ID NO: 14000 - DNA, 16 bp, Artificial Sequence
  Probe
ggttcgattccccgac

SEQ ID NO: 14001 - DNA, 17 bp, Artificial Sequence
  Probe
ggttcgattccccgacg

SEQ ID NO: 14002 - DNA, 18 bp, Artificial Sequence
  Probe
ggttcgattccccgacgg

SEQ ID NO: 14003 - DNA, 19 bp, Artificial Sequence
  Probe
ggttcgattccccgacggg

SEQ ID NO: 14004 - DNA, 22 bp, Artificial Sequence
  Probe
ggttcgattccccgacggggag

SEQ ID NO: 14005 - DNA, 36 bp, Artificial Sequence
  Probe
gtaaacaggagatcctgggttcgaatcccagcggtg

SEQ ID NO: 14006 - DNA, 18 bp, Artificial Sequence
  Probe
gtaaaccaggggtcgcga

SEQ ID NO: 14007 - DNA, 20 bp, Artificial Sequence
  Probe
gtaaaccaggggtcgcgagt

SEQ ID NO: 14008 - DNA, 21 bp, Artificial Sequence
  Probe
gtaaaccaggggtcgcgagtt

SEQ ID NO: 14009 - DNA, 20 bp, Artificial Sequence
  Probe
gtaaaccgaagatcgcgggt

SEQ ID NO: 14010 - DNA, 34 bp, Artificial Sequence; identical to SEQ ID NO: 1464
  Probe

SEQ ID NO: 14011 - DNA, 33 bp, Artificial Sequence; identical to SEQ ID NO: 6913
  Probe

SEQ ID NO: 14012 - DNA, 34 bp, Artificial Sequence
  Probe
gtaccgttaacttccaattaactagttttgacaa

SEQ ID NO: 14013 - DNA, 36 bp, Artificial Sequence
  Probe
gtagaattctcgcctgccacgcgggaggcccgggtt

SEQ ID NO: 14014 - DNA, 27 bp, Artificial Sequence
  Probe
gtagctcagtggtagagcgcatgcttt

SEQ ID NO: 14015 - DNA, 16 bp, Artificial Sequence
  Probe
gtagtcgtggccgagt

SEQ ID NO: 14016 - DNA, 23 bp, Artificial Sequence
  Probe
gtagtcgtggccgagtggttaag

SEQ ID NO: 14017 - DNA, 35 bp, Artificial Sequence
  Probe
gtatgaggccccgggttcgatccccggcatctcca

SEQ ID NO: 14018 - DNA, 35 bp, Artificial Sequence
  Probe
gtatgattctcgcttcgggtgcgagaggtcccggg

SEQ ID NO: 14019 - DNA, 36 bp, Artificial Sequence
  Probe
gtatgattctcgcttcgggtgcgagaggtcccgggt

SEQ ID NO: 14020 - DNA, 32 bp, Artificial Sequence; identical to SEQ ID NO: 1472
  Probe

SEQ ID NO: 14021 - DNA, 35 bp, Artificial Sequence
  Probe
gtatgattctcgctttgggtgcgagaggtcccggg

SEQ ID NO: 14022 - DNA, 36 bp, Artificial Sequence
  Probe
gtatgattctcgctttgggtgcgagaggtcccgggt

SEQ ID NO: 14023 - DNA, 37 bp, Artificial Sequence
  Probe
gtatgattctcgctttgggtgcgagaggtcccgggtt

SEQ ID NO: 14024 - DNA, 32 bp, Artificial Sequence; identical to SEQ ID NO: 1473
  Probe

SEQ ID NO: 14025 - DNA, 20 bp, Artificial Sequence
  Probe
gtcacgcgggagaccggggt

SEQ ID NO: 14026 - DNA, 21 bp, Artificial Sequence
  Probe
gtcacgcgggagaccggggtt

SEQ ID NO: 14027 - DNA, 35 bp, Artificial Sequence
  Probe
gtcacgcgggagaccggggttcaattccccgacgg

SEQ ID NO: 14028 - DNA, 36 bp, Artificial Sequence
  Probe
gtcacgcgggagaccggggttcaattccccgacggg

SEQ ID NO: 14029 - DNA, 24 bp, Artificial Sequence
  Probe
gtcacgcgggagaccggggttcga

SEQ ID NO: 14030 - DNA, 32 bp, Artificial Sequence
  Probe
gtcacgcgggagaccggggttcgattccccga

SEQ ID NO: 14031 - DNA, 33 bp, Artificial Sequence
  Probe
gtcacgcgggagaccggggttcgattccccgac

SEQ ID NO: 14032 - DNA, 34 bp, Artificial Sequence
  Probe
gtcacgcgggagaccggggttcgattccccgacg

SEQ ID NO: 14033 - DNA, 35 bp, Artificial Sequence
  Probe
gtcacgcgggagaccggggttcgattccccgacgg

SEQ ID NO: 14034 - DNA, 36 bp, Artificial Sequence
  Probe
gtcacgcgggagaccggggttcgattccccgacggg

SEQ ID NO: 14035 - DNA, 37 bp, Artificial Sequence
  Probe
gtcacgcgggagaccggggttcgattccccgacgggg

SEQ ID NO: 14036 - DNA, 16 bp, Artificial Sequence
  Probe
gtcacggtggccgagt

SEQ ID NO: 14037 - DNA, 31 bp, Artificial Sequence; identical to SEQ ID NO: 6989
  Probe

SEQ ID NO: 14038 - DNA, 35 bp, Artificial Sequence; identical to SEQ ID NO: 1480
  Probe

SEQ ID NO: 14039 - DNA, 23 bp, Artificial Sequence
  Probe
gtcaggatggccgagtggtctaa

SEQ ID NO: 14040 - DNA, 24 bp, Artificial Sequence
  Probe
gtcaggatggccgagtggtctaag

SEQ ID NO: 14041 - DNA, 25 bp, Artificial Sequence
  Probe
gtcaggatggccgagtggtctaagg

SEQ ID NO: 14042 - DNA, 30 bp, Artificial Sequence
  Probe
gtcaggatggccgagtggtctaaggcgcca

SEQ ID NO: 14043 - DNA, 31 bp, Artificial Sequence
  Probe
gtcaggatggccgagtggtctaaggcgccag

SEQ ID NO: 14044 - DNA, 32 bp, Artificial Sequence
  Probe
gtcaggatggccgagtggtctaaggcgccaga

SEQ ID NO: 14045 - DNA, 17 bp, Artificial Sequence
  Probe
gtccttgtagtataaac

SEQ ID NO: 14046 - DNA, 18 bp, Artificial Sequence
  Probe
gtccttgtagtataaact

SEQ ID NO: 14047 - DNA, 19 bp, Artificial Sequence
  Probe
gtccttgtagtataaacta

SEQ ID NO: 14048 - DNA, 26 bp, Artificial Sequence
  Probe
gtccttgtagtataaactaatacacc

SEQ ID NO: 14049 - DNA, 27 bp, Artificial Sequence
  Probe
gtccttgtagtataaactaatacacca

SEQ ID NO: 14050 - DNA, 28 bp, Artificial Sequence
  Probe
gtccttgtagtataaactaatacaccag

SEQ ID NO: 14051 - DNA, 29 bp, Artificial Sequence
  Probe
gtccttgtagtataaactaatacaccagt

SEQ ID NO: 14052 - DNA, 30 bp, Artificial Sequence; identical to SEQ ID NO: 1487
  Probe

SEQ ID NO: 14053 - DNA, 31 bp, Artificial Sequence; identical to SEQ ID NO: 1488
  Probe

SEQ ID NO: 14054 - DNA, 50 bp, Artificial Sequence; identical to SEQ ID NO: 1489
  Probe

SEQ ID NO: 14055 - DNA, 17 bp, Artificial Sequence
  Probe
gtcggtagagcatcaga

SEQ ID NO: 14056 - DNA, 18 bp, Artificial Sequence
  Probe
gtcggtagagcatcagac

SEQ ID NO: 14057 - DNA, 40 bp, Artificial Sequence
  Probe
gtcggtagagcatgagactcttaatctcagggtcgtgggt

SEQ ID NO: 14058 - DNA, 17 bp, Artificial Sequence
  Probe
gtcggtagagcatggga

SEQ ID NO: 14059 - DNA, 18 bp, Artificial Sequence
  Probe
gtcggtagagcatgggac

SEQ ID NO: 14060 - DNA, 19 bp, Artificial Sequence
  Probe
gtcggtagagcatgggact

SEQ ID NO: 14061 - DNA, 20 bp, Artificial Sequence
  Probe
gtcggtagagcatgggactc

SEQ ID NO: 14062 - DNA, 35 bp, Artificial Sequence; identical to SEQ ID NO: 1495
  Probe

SEQ ID NO: 14063 - DNA, 40 bp, Artificial Sequence
  Probe
gtcggtagagcatgggactcttaatcccagggtcgtgggt

SEQ ID NO: 14064 - DNA, 21 bp, Artificial Sequence
  Probe
gtcgtggttgtagtccgtgcg

SEQ ID NO: 14065 - DNA, 24 bp, Artificial Sequence
  Probe
gtcgtggttgtagtccgtgcgaga

SEQ ID NO: 14066 - DNA, 27 bp, Artificial Sequence
  Probe
gtcgtggttgtagtccgtgcgagaata

SEQ ID NO: 14067 - DNA, 25 bp, Artificial Sequence
  Probe
gtctagcggttaggattcctggttt

SEQ ID NO: 14068 - DNA, 22 bp, Artificial Sequence
  Probe
gtctagtggttaggattcggcg

SEQ ID NO: 14069 - DNA, 24 bp, Artificial Sequence
  Probe
gtctagtggttaggattcggcgct

SEQ ID NO: 14070 - DNA, 25 bp, Artificial Sequence
  Probe
gtctagtggttaggattcggcgctc

SEQ ID NO: 14071 - DNA, 25 bp, Artificial Sequence
  Probe
gtctcataatctgaaggtcgtgagt

SEQ ID NO: 14072 - DNA, 32 bp, Artificial Sequence
  Probe
gtgagcatagctgccttccaagcagttgaccc

SEQ ID NO: 14073 - DNA, 33 bp, Artificial Sequence
  Probe
gtgagcatagctgccttccaagcagttgacccg

SEQ ID NO: 14074 - DNA, 34 bp, Artificial Sequence
  Probe
gtgagcatagctgccttccaagcagttgacccgg

SEQ ID NO: 14075 - DNA, 19 bp, Artificial Sequence
  Probe
gtgagtatccccgcctgtc

SEQ ID NO: 14076 - DNA, 20 bp, Artificial Sequence
  Probe
gtgagtatccccgcctgtca

SEQ ID NO: 14077 - DNA, 21 bp, Artificial Sequence
  Probe
gtgagtatccccgcctgtcac

SEQ ID NO: 14078 - DNA, 31 bp, Artificial Sequence
  Probe
gtgagtatccccgcctgtcacgcgggagacc

SEQ ID NO: 14079 - DNA, 33 bp, Artificial Sequence
  Probe
gtgagtatccccgcctgtcacgcgggagaccgg

SEQ ID NO: 14080 - DNA, 29 bp, Artificial Sequence
  Probe
gtgatcgtatagtggttagtactctgcgt

SEQ ID NO: 14081 - DNA, 30 bp, Artificial Sequence; identical to SEQ ID NO: 1505
  Probe

SEQ ID NO: 14082 - DNA, 31 bp, Artificial Sequence; identical to SEQ ID NO: 1506
  Probe

SEQ ID NO: 14083 - DNA, 32 bp, Artificial Sequence; identical to SEQ ID NO: 1507
  Probe

SEQ ID NO: 14084 - DNA, 33 bp, Artificial Sequence; identical to SEQ ID NO: 1508
  Probe

SEQ ID NO: 14085 - DNA, 29 bp, Artificial Sequence
  Probe
gtgctgggcccataacccagaggtcgatg

SEQ ID NO: 14086 - DNA, 34 bp, Artificial Sequence
  Probe
gtgctgggcccataacccagaggtcgatggatcg

SEQ ID NO: 14087 - DNA, 35 bp, Artificial Sequence
  Probe
gtggctaggattcggcgctttcaccgccgcggccc

SEQ ID NO: 14088 - DNA, 16 bp, Artificial Sequence
  Probe
gtggtagagcgcgtgc

SEQ ID NO: 14089 - DNA, 36 bp, Artificial Sequence
  Probe
gtggtatcatgcaagattcccattcttgcgacccgg

SEQ ID NO: 14090 - DNA, 25 bp, Artificial Sequence
  Probe
gtggtctagtggttaggattcggcg

SEQ ID NO: 14091 - DNA, 26 bp, Artificial Sequence
  Probe
gtggtctagtggttaggattcggcgc

SEQ ID NO: 14092 - DNA, 27 bp, Artificial Sequence
  Probe
gtggtctagtggttaggattcggcgct

SEQ ID NO: 14093 - DNA, 28 bp, Artificial Sequence
  Probe
gtggtctagtggttaggattcggcgctc

SEQ ID NO: 14094 - DNA, 29 bp, Artificial Sequence
  Probe
gtggtctagtggttaggattcggcgctct

SEQ ID NO: 14095 - DNA, 37 bp, Artificial Sequence
  Probe
gtggtgagcatagctgccttccaagcagttgacccgg

SEQ ID NO: 14096 - DNA, 22 bp, Artificial Sequence
  Probe
gtggtgagtatccccgcctgtc

SEQ ID NO: 14097 - DNA, 36 bp, Artificial Sequence
  Probe
gtggtgagtatccccgcctgtcacgcgggagaccgg

SEQ ID NO: 14098 - DNA, 39 bp, Artificial Sequence
  Probe
gtggtgagtatccccgcctgtcacgcgggagaccggggt

SEQ ID NO: 14099 - DNA, 37 bp, Artificial Sequence
  Probe
gtggttagcatagctgccttccaagcagttgacccgg

SEQ ID NO: 14100 - DNA, 39 bp, Artificial Sequence
  Probe
gtggttagcatagctgccttccaagcagttgacccgggt

SEQ ID NO: 14101 - DNA, 17 bp, Artificial Sequence
  Probe
gtggttaggattcggcg

SEQ ID NO: 14102 - DNA, 18 bp, Artificial Sequence
  Probe
gtggttaggattcggcgc

SEQ ID NO: 14103 - DNA, 19 bp, Artificial Sequence
  Probe
gtggttaggattcggcgct

SEQ ID NO: 14104 - DNA, 20 bp, Artificial Sequence
  Probe
gtggttaggattcggcgctc

SEQ ID NO: 14105 - DNA, 21 bp, Artificial Sequence
  Probe
gtggttaggattcggcgctct

SEQ ID NO: 14106 - DNA, 25 bp, Artificial Sequence
  Probe
gtggttaggattcggcgctctcacc

SEQ ID NO: 14107 - DNA, 35 bp, Artificial Sequence
  Probe
gtggttaggattcggcgctctcaccgccgcggccc

SEQ ID NO: 14108 - DNA, 39 bp, Artificial Sequence
  Probe
gtggttaggattcggcgctctcaccgccgcggcccgggt

SEQ ID NO: 14109 - DNA, 18 bp, Artificial Sequence
  Probe
gtggttagtactctgcgt

SEQ ID NO: 14110 - DNA, 19 bp, Artificial Sequence
  Probe
gtggttagtactctgcgtt

SEQ ID NO: 14111 - DNA, 20 bp, Artificial Sequence
  Probe
gtggttagtactctgcgttg

SEQ ID NO: 14112 - DNA, 21 bp, Artificial Sequence
  Probe
gtggttagtactctgcgttgt

SEQ ID NO: 14113 - DNA, 16 bp, Artificial Sequence
  Probe
gtggttagtatccccg

SEQ ID NO: 14114 - DNA, 17 bp, Artificial Sequence
  Probe
gtggttagtatccccgc

SEQ ID NO: 14115 - DNA, 40 bp, Artificial Sequence
  Probe
gtggttatcacgttcgcctcacacgcgaaaggtccccggt

SEQ ID NO: 14116 - DNA, 28 bp, Artificial Sequence
  Probe
gtgtttgtgggtttaagtcccattggtc

SEQ ID NO: 14117 - DNA, 29 bp, Artificial Sequence
  Probe
gtgtttgtgggtttaagtcccattggtct

SEQ ID NO: 14118 - DNA, 30 bp, Artificial Sequence; identical to SEQ ID NO: 1519
  Probe

SEQ ID NO: 14119 - DNA, 30 bp, Artificial Sequence; identical to SEQ ID NO: 1521
  Probe

SEQ ID NO: 14120 - DNA, 37 bp, Artificial Sequence; identical to SEQ ID NO: 1523
  Probe

SEQ ID NO: 14121 - DNA, 39 bp, Artificial Sequence; identical to SEQ ID NO: 7141
  Probe

SEQ ID NO: 14122 - DNA, 32 bp, Artificial Sequence
  Probe
gttagcatagctgccttccaagcagttgaccc

SEQ ID NO: 14123 - DNA, 24 bp, Artificial Sequence
  Probe
gttcaatccccggcacctccacca

SEQ ID NO: 14124 - DNA, 30 bp, Artificial Sequence
  Probe
gttccatagtgtagtggttatcacgtctgc

SEQ ID NO: 14125 - DNA, 16 bp, Artificial Sequence
  Probe
gttcgattccccgacg

SEQ ID NO: 14126 - DNA, 17 bp, Artificial Sequence
  Probe
gttcgattccccgacgg

SEQ ID NO: 14127 - DNA, 50 bp, Artificial Sequence; identical to SEQ ID NO: 1529
  Probe

SEQ ID NO: 14128 - DNA, 29 bp, Artificial Sequence
  Probe
gttgatgcagagtggggttttgcagtcct

SEQ ID NO: 14129 - DNA, 30 bp, Artificial Sequence
  Probe
gttgatgcagagtggggttttgcagtcctt

SEQ ID NO: 14130 - DNA, 31 bp, Artificial Sequence; identical to SEQ ID NO: 7206
  Probe

SEQ ID NO: 14131 - DNA, 19 bp, Artificial Sequence
  Probe
gtttatgtagcttacctcc

SEQ ID NO: 14132 - DNA, 20 bp, Artificial Sequence
  Probe
gtttatgtagcttacctcct

SEQ ID NO: 14133 - DNA, 30 bp, Artificial Sequence; identical to SEQ ID NO: 1536
  Probe

SEQ ID NO: 14134 - DNA, 32 bp, Artificial Sequence; identical to SEQ ID NO: 7245
  Probe

SEQ ID NO: 14135 - DNA, 33 bp, Artificial Sequence; identical to SEQ ID NO: 1537
  Probe

SEQ ID NO: 14136 - DNA, 34 bp, Artificial Sequence; identical to SEQ ID NO: 1538
  Probe

SEQ ID NO: 14137 - DNA, 35 bp, Artificial Sequence; identical to SEQ ID NO: 1539
  Probe

SEQ ID NO: 14138 - DNA, 36 bp, Artificial Sequence; identical to SEQ ID NO: 1540
  Probe

SEQ ID NO: 14139 - DNA, 37 bp, Artificial Sequence; identical to SEQ ID NO: 1541
  Probe

SEQ ID NO: 14140 - DNA, 16 bp, Artificial Sequence
  Probe
gtttccgtagtgtagc

SEQ ID NO: 14141 - DNA, 28 bp, Artificial Sequence
  Probe
gtttccgtagtgtagcggttatcacatt

SEQ ID NO: 14142 - DNA, 29 bp, Artificial Sequence
  Probe
gtttccgtagtgtagcggttatcacattc

SEQ ID NO: 14143 - DNA, 30 bp, Artificial Sequence; identical to SEQ ID NO: 8769
  Probe

SEQ ID NO: 14144 - DNA, 31 bp, Artificial Sequence; identical to SEQ ID NO: 1547
  Probe

SEQ ID NO: 14145 - DNA, 32 bp, Artificial Sequence; identical to SEQ ID NO: 1548
  Probe

SEQ ID NO: 14146 - DNA, 33 bp, Artificial Sequence; identical to SEQ ID NO: 1549
  Probe

SEQ ID NO: 14147 - DNA, 34 bp, Artificial Sequence; identical to SEQ ID NO: 1550
  Probe

SEQ ID NO: 14148 - DNA, 35 bp, Artificial Sequence; identical to SEQ ID NO: 1551
  Probe

SEQ ID NO: 14149 - DNA, 36 bp, Artificial Sequence; identical to SEQ ID NO: 1552
  Probe

SEQ ID NO: 14150 - DNA, 50 bp, Artificial Sequence; identical to SEQ ID NO: 7255
  Probe

SEQ ID NO: 14151 - DNA, 28 bp, Artificial Sequence
  Probe
gtttccgtagtgtagtggtcatcacgtt

SEQ ID NO: 14152 - DNA, 29 bp, Artificial Sequence
  Probe
gtttccgtagtgtagtggtcatcacgttc

SEQ ID NO: 14153 - DNA, 30 bp, Artificial Sequence; identical to SEQ ID NO: 8772
  Probe

SEQ ID NO: 14154 - DNA, 31 bp, Artificial Sequence; identical to SEQ ID NO: 1559
  Probe

SEQ ID NO: 14155 - DNA, 32 bp, Artificial Sequence; identical to SEQ ID NO: 1560
  Probe

SEQ ID NO: 14156 - DNA, 33 bp, Artificial Sequence; identical to SEQ ID NO: 1561
  Probe

SEQ ID NO: 14157 - DNA, 34 bp, Artificial Sequence; identical to SEQ ID NO: 7259
  Probe

SEQ ID NO: 14158 - DNA, 34 bp, Artificial Sequence; identical to SEQ ID NO: 1562
  Probe

SEQ ID NO: 14159 - DNA, 39 bp, Artificial Sequence
  Probe
gtttccgtagtgtagtggttatcacgttcgcctcacacg

SEQ ID NO: 14160 - DNA, 40 bp, Artificial Sequence
  Probe
gtttccgtagtgtagtggttatcacgttcgcctcacacgc

SEQ ID NO: 14161 - DNA, 49 bp, Artificial Sequence
  Probe
gtttccgtagtgtagtggttatcacgttcgcctcacacgcgaaaggtcc

SEQ ID NO: 14162 - DNA, 50 bp, Artificial Sequence; identical to SEQ ID NO: 1564
  Probe

SEQ ID NO: 14163 - DNA, 23 bp, Artificial Sequence
  Probe
gtttccgtagtgtagtggttatt

SEQ ID NO: 14164 - DNA, 27 bp, Artificial Sequence
  Probe
gtttgtgggtttaagtcccattggtct

SEQ ID NO: 14165 - DNA, 28 bp, Artificial Sequence
  Probe
gtttgtgggtttaagtcccattggtcta

SEQ ID NO: 14166 - DNA, 32 bp, Artificial Sequence; identical to SEQ ID NO: 7457
  Probe

SEQ ID NO: 14167 - DNA, 34 bp, Artificial Sequence
  Probe
taccccgaaaatgttggttatacccttcccgtac

SEQ ID NO: 14168 - DNA, 35 bp, Artificial Sequence; identical to SEQ ID NO: 1576
  Probe

SEQ ID NO: 14169 - DNA, 36 bp, Artificial Sequence; identical to SEQ ID NO: 1577
  Probe

SEQ ID NO: 14170 - DNA, 18 bp, Artificial Sequence
  Probe
tacctcctcaaagcaata

SEQ ID NO: 14171 - DNA, 20 bp, Artificial Sequence
  Probe
tacctcctcaaagcaataca

SEQ ID NO: 14172 - DNA, 22 bp, Artificial Sequence
  Probe
tacctcctcaaagcaatacact

SEQ ID NO: 14173 - DNA, 23 bp, Artificial Sequence
  Probe
tacctcctcaaagcaatacactg

SEQ ID NO: 14174 - DNA, 20 bp, Artificial Sequence
  Probe
tagaattctcgcctgccacg

SEQ ID NO: 14175 - DNA, 21 bp, Artificial Sequence
  Probe
tagaattctcgcctgccacgc

SEQ ID NO: 14176 - DNA, 50 bp, Artificial Sequence; identical to SEQ ID NO: 1582
  Probe

SEQ ID NO: 14177 - DNA, 34 bp, Artificial Sequence
  Probe
tagcattaaccttttaagttaaagattaagagaa

SEQ ID NO: 14178 - DNA, 35 bp, Artificial Sequence
  Probe
tagcattaaccttttaagttaaagattaagagaac

SEQ ID NO: 14179 - DNA, 36 bp, Artificial Sequence; identical to SEQ ID NO: 1584
  Probe

SEQ ID NO: 14180 - DNA, 37 bp, Artificial Sequence; identical to SEQ ID NO: 7559
  Probe

SEQ ID NO: 14181 - DNA, 27 bp, Artificial Sequence
  Probe
tagctcagtcggtagagcatcagactt

SEQ ID NO: 14182 - DNA, 28 bp, Artificial Sequence
  Probe
tagctcagtcggtagagcatcagacttt

SEQ ID NO: 14183 - DNA, 29 bp, Artificial Sequence
  Probe
tagctcagtcggtagagcatcagactttt

SEQ ID NO: 14184 - DNA, 30 bp, Artificial Sequence
  Probe
tagctcagtcggtagagcatcagactttta

SEQ ID NO: 14185 - DNA, 24 bp, Artificial Sequence
  Probe
tagctcagtcggtagagcatggga

SEQ ID NO: 14186 - DNA, 25 bp, Artificial Sequence
  Probe
tagctcagtcggtagagcatgggac

SEQ ID NO: 14187 - DNA, 26 bp, Artificial Sequence
  Probe
tagctcagtcggtagagcatgggact

SEQ ID NO: 14188 - DNA, 27 bp, Artificial Sequence
  Probe
tagctcagtcggtagagcatgggactc

SEQ ID NO: 14189 - DNA, 28 bp, Artificial Sequence
  Probe
tagctcagtcggtagagcatgggactct

SEQ ID NO: 14190 - DNA, 29 bp, Artificial Sequence
  Probe
tagctcagtcggtagagcatgggactctt

SEQ ID NO: 14191 - DNA, 21 bp, Artificial Sequence
  Probe
taggatggggtgtgataggtg

SEQ ID NO: 14192 - DNA, 23 bp, Artificial Sequence
  Probe
taggatggggtgtgataggtggc

SEQ ID NO: 14193 - DNA, 29 bp, Artificial Sequence
  Probe
taggatggggtgtgataggtggcacggag

SEQ ID NO: 14194 - DNA, 30 bp, Artificial Sequence; identical to SEQ ID NO: 1592
  Probe

SEQ ID NO: 14195 - DNA, 31 bp, Artificial Sequence; identical to SEQ ID NO: 7585
  Probe

SEQ ID NO: 14196 - DNA, 32 bp, Artificial Sequence; identical to SEQ ID NO: 1593
  Probe

SEQ ID NO: 14197 - DNA, 34 bp, Artificial Sequence; identical to SEQ ID NO: 7586
  Probe

SEQ ID NO: 14198 - DNA, 35 bp, Artificial Sequence; identical to SEQ ID NO: 7587
  Probe

SEQ ID NO: 14199 - DNA, 36 bp, Artificial Sequence; identical to SEQ ID NO: 1595
  Probe

SEQ ID NO: 14200 - DNA, 18 bp, Artificial Sequence
  Probe
taggggtatgattctcgg

SEQ ID NO: 14201 - DNA, 19 bp, Artificial Sequence
  Probe
taggggtatgattctcggt

SEQ ID NO: 14202 - DNA, 37 bp, Artificial Sequence
  Probe
tagtggctaggattcggcgctttcaccgccgcggccc

SEQ ID NO: 14203 - DNA, 19 bp, Artificial Sequence
  Probe
tagtggtatgattctcgct

SEQ ID NO: 14204 - DNA, 37 bp, Artificial Sequence
  Probe
tagtggtatgattctcgctttgggtgcgagaggtccc

SEQ ID NO: 14205 - DNA, 20 bp, Artificial Sequence
  Probe
tagtggtgagtatccccgcc

SEQ ID NO: 14206 - DNA, 23 bp, Artificial Sequence
  Probe
tagtggtgagtatccccgcctgt

SEQ ID NO: 14207 - DNA, 24 bp, Artificial Sequence
  Probe
tagtggtgagtatccccgcctgtc

SEQ ID NO: 14208 - DNA, 25 bp, Artificial Sequence
  Probe
tagtggtgagtatccccgcctgtca

SEQ ID NO: 14209 - DNA, 26 bp, Artificial Sequence
  Probe
tagtggtgagtatccccgcctgtcac

SEQ ID NO: 14210 - DNA, 27 bp, Artificial Sequence
  Probe
tagtggtgagtatccccgcctgtcacg

SEQ ID NO: 14211 - DNA, 28 bp, Artificial Sequence
  Probe
tagtggtgagtatccccgcctgtcacgc

SEQ ID NO: 14212 - DNA, 36 bp, Artificial Sequence
  Probe
tagtggtgagtatccccgcctgtcacgcgggagacc

SEQ ID NO: 14213 - DNA, 38 bp, Artificial Sequence
  Probe
tagtggtgagtatccccgcctgtcacgcgggagaccgg

SEQ ID NO: 14214 - DNA, 19 bp, Artificial Sequence
  Probe
tagtggttaggattcggcg

SEQ ID NO: 14215 - DNA, 20 bp, Artificial Sequence
  Probe
tagtggttaggattcggcgc

SEQ ID NO: 14216 - DNA, 21 bp, Artificial Sequence
  Probe
tagtggttaggattcggcgct

SEQ ID NO: 14217 - DNA, 22 bp, Artificial Sequence
  Probe
tagtggttaggattcggcgctc

SEQ ID NO: 14218 - DNA, 23 bp, Artificial Sequence
  Probe
tagtggttaggattcggcgctct

SEQ ID NO: 14219 - DNA, 25 bp, Artificial Sequence
  Probe
tagtggttaggattcggcgctctca

SEQ ID NO: 14220 - DNA, 37 bp, Artificial Sequence
  Probe
tagtggttaggattcggcgctctcaccgccgcggccc

SEQ ID NO: 14221 - DNA, 38 bp, Artificial Sequence
  Probe
tagtggttaggattcggcgctctcaccgccgcggcccg

SEQ ID NO: 14222 - DNA, 19 bp, Artificial Sequence
  Probe
tagtggttagtactctgcg

SEQ ID NO: 14223 - DNA, 16 bp, Artificial Sequence
  Probe
tagtggttagtatccc

SEQ ID NO: 14224 - DNA, 17 bp, Artificial Sequence
  Probe
tagtggttagtatcccc

SEQ ID NO: 14225 - DNA, 18 bp, Artificial Sequence
  Probe
tagtggttagtatccccg

SEQ ID NO: 14226 - DNA, 19 bp, Artificial Sequence
  Probe
tagtggttagtatccccgc

SEQ ID NO: 14227 - DNA, 26 bp, Artificial Sequence
  Probe
tagtggttagtatccccgcctgtcac

SEQ ID NO: 14228 - DNA, 24 bp, Artificial Sequence
  Probe
tagtgtagtggttatcacgtctgc

SEQ ID NO: 14229 - DNA, 22 bp, Artificial Sequence
  Probe
tcaatccccggcacctccacca

SEQ ID NO: 14230 - DNA, 50 bp, Artificial Sequence; identical to SEQ ID NO: 1610
  Probe

SEQ ID NO: 14231 - DNA, 22 bp, Artificial Sequence
  Probe
tcacacgcgaaaggtccccggt

SEQ ID NO: 14232 - DNA, 19 bp, Artificial Sequence
  Probe
tcacgcgggagaccggggt

SEQ ID NO: 14233 - DNA, 36 bp, Artificial Sequence; identical to SEQ ID NO: 1616
  Probe

SEQ ID NO: 14234 - DNA, 34 bp, Artificial Sequence; identical to SEQ ID NO: 1620
  Probe

SEQ ID NO: 14235 - DNA, 35 bp, Artificial Sequence; identical to SEQ ID NO: 1621
  Probe

SEQ ID NO: 14236 - DNA, 36 bp, Artificial Sequence; identical to SEQ ID NO: 1622
  Probe

SEQ ID NO: 14237 - DNA, 33 bp, Artificial Sequence; identical to SEQ ID NO: 1624
  Probe

SEQ ID NO: 14238 - DNA, 29 bp, Artificial Sequence
  Probe
tcagggatgggttcgattctcatagtcct

SEQ ID NO: 14239 - DNA, 38 bp, Artificial Sequence
  Probe
tcatatcattggtcgtggttgtagtccgtgcgagaata

SEQ ID NO: 14240 - DNA, 33 bp, Artificial Sequence; identical to SEQ ID NO: 7770
  Probe

SEQ ID NO: 14241 - DNA, 25 bp, Artificial Sequence
  Probe
tccaatggggtctccccgcgcaggt

SEQ ID NO: 14242 - DNA, 22 bp, Artificial Sequence
  Probe
tccaatggggtttccccgcaca

SEQ ID NO: 14243 - DNA, 23 bp, Artificial Sequence
  Probe
tccaatggggtttccccgcacag

SEQ ID NO: 14244 - DNA, 24 bp, Artificial Sequence
  Probe
tccaatggggtttccccgcacagg

SEQ ID NO: 14245 - DNA, 25 bp, Artificial Sequence
  Probe
tccaatggggtttccccgcacaggt

SEQ ID NO: 14246 - DNA, 34 bp, Artificial Sequence; identical to SEQ ID NO: 1627
  Probe

SEQ ID NO: 14247 - DNA, 34 bp, Artificial Sequence; identical to SEQ ID NO: 1628
  Probe

SEQ ID NO: 14248 - DNA, 35 bp, Artificial Sequence; identical to SEQ ID NO: 7782
  Probe

SEQ ID NO: 14249 - DNA, 28 bp, Artificial Sequence
  Probe
tccatagtgtagtggttatcacgtctgc

SEQ ID NO: 14250 - DNA, 30 bp, Artificial Sequence
  Probe
tccatagtgtagtggttatcacgtctgctt

SEQ ID NO: 14251 - DNA, 31 bp, Artificial Sequence
  Probe
tccatagtgtagtggttatcacgtctgcttt

SEQ ID NO: 14252 - DNA, 25 bp, Artificial Sequence
  Probe
tccattggggtctccccgcgcaggt

SEQ ID NO: 14253 - DNA, 20 bp, Artificial Sequence
  Probe
tccattggggtttccccgcg

SEQ ID NO: 14254 - DNA, 21 bp, Artificial Sequence
  Probe
tccattggggtttccccgcgc

SEQ ID NO: 14255 - DNA, 22 bp, Artificial Sequence
  Probe
tccattggggtttccccgcgca

SEQ ID NO: 14256 - DNA, 23 bp, Artificial Sequence
  Probe
tccattggggtttccccgcgcag

SEQ ID NO: 14257 - DNA, 24 bp, Artificial Sequence
  Probe
tccattggggtttccccgcgcagg

SEQ ID NO: 14258 - DNA, 25 bp, Artificial Sequence
  Probe
tccattggggtttccccgcgcaggt

SEQ ID NO: 14259 - DNA, 26 bp, Artificial Sequence
  Probe
tccattggggtttccccgcgcaggtt

SEQ ID NO: 14260 - DNA, 28 bp, Artificial Sequence
  Probe
tccattggggtttccccgcgcaggttcg

SEQ ID NO: 14261 - DNA, 19 bp, Artificial Sequence
  Probe
tcccacatggtctagcggt

SEQ ID NO: 14262 - DNA, 23 bp, Artificial Sequence
  Probe
tcccacatggtctagcggttagg

SEQ ID NO: 14263 - DNA, 26 bp, Artificial Sequence
  Probe
tcccacatggtctagcggttaggatt

SEQ ID NO: 14264 - DNA, 27 bp, Artificial Sequence
  Probe
tcccacatggtctagcggttaggattc

SEQ ID NO: 14265 - DNA, 28 bp, Artificial Sequence
  Probe
tcccacatggtctagcggttaggattcc

SEQ ID NO: 14266 - DNA, 29 bp, Artificial Sequence
  Probe
tcccacatggtctagcggttaggattcct

SEQ ID NO: 14267 - DNA, 30 bp, Artificial Sequence; identical to SEQ ID NO: 1643
  Probe

SEQ ID NO: 14268 - DNA, 31 bp, Artificial Sequence; identical to SEQ ID NO: 1644
  Probe

SEQ ID NO: 14269 - DNA, 32 bp, Artificial Sequence; identical to SEQ ID NO: 1645
  Probe

SEQ ID NO: 14270 - DNA, 33 bp, Artificial Sequence; identical to SEQ ID NO: 1646
  Probe

SEQ ID NO: 14271 - DNA, 34 bp, Artificial Sequence; identical to SEQ ID NO: 1647
  Probe

SEQ ID NO: 14272 - DNA, 35 bp, Artificial Sequence; identical to SEQ ID NO: 1648
  Probe

SEQ ID NO: 14273 - DNA, 36 bp, Artificial Sequence; identical to SEQ ID NO: 1649
  Probe

SEQ ID NO: 14274 - DNA, 37 bp, Artificial Sequence; identical to SEQ ID NO: 1650
  Probe

SEQ ID NO: 14275 - DNA, 39 bp, Artificial Sequence; identical to SEQ ID NO: 7795
  Probe

SEQ ID NO: 14276 - DNA, 40 bp, Artificial Sequence; identical to SEQ ID NO: 1651
  Probe

SEQ ID NO: 14277 - DNA, 41 bp, Artificial Sequence; identical to SEQ ID NO: 7796
  Probe

SEQ ID NO: 14278 - DNA, 50 bp, Artificial Sequence; identical to SEQ ID NO: 7798
  Probe

SEQ ID NO: 14279 - DNA, 17 bp, Artificial Sequence
  Probe
tcccatatggtctagcg

SEQ ID NO: 14280 - DNA, 19 bp, Artificial Sequence
  Probe
tcccatatggtctagcggt

SEQ ID NO: 14281 - DNA, 27 bp, Artificial Sequence
  Probe
tcccatatggtctagcggttaggattc

SEQ ID NO: 14282 - DNA, 28 bp, Artificial Sequence
  Probe
tcccatatggtctagcggttaggattcc

SEQ ID NO: 14283 - DNA, 29 bp, Artificial Sequence
  Probe
tcccatatggtctagcggttaggattcct

SEQ ID NO: 14284 - DNA, 30 bp, Artificial Sequence; identical to SEQ ID NO: 1659
  Probe

SEQ ID NO: 14285 - DNA, 31 bp, Artificial Sequence; identical to SEQ ID NO: 1660
  Probe

SEQ ID NO: 14286 - DNA, 32 bp, Artificial Sequence; identical to SEQ ID NO: 1661
  Probe

SEQ ID NO: 14287 - DNA, 33 bp, Artificial Sequence; identical to SEQ ID NO: 1662
  Probe

SEQ ID NO: 14288 - DNA, 34 bp, Artificial Sequence; identical to SEQ ID NO: 1663
  Probe

SEQ ID NO: 14289 - DNA, 35 bp, Artificial Sequence; identical to SEQ ID NO: 1664
  Probe

SEQ ID NO: 14290 - DNA, 36 bp, Artificial Sequence; identical to SEQ ID NO: 1665
  Probe

SEQ ID NO: 14291 - DNA, 37 bp, Artificial Sequence; identical to SEQ ID NO: 1666
  Probe

SEQ ID NO: 14292 - DNA, 39 bp, Artificial Sequence; identical to SEQ ID NO: 7803
  Probe

SEQ ID NO: 14293 - DNA, 40 bp, Artificial Sequence; identical to SEQ ID NO: 7804
  Probe

SEQ ID NO: 14294 - DNA, 41 bp, Artificial Sequence
  Probe
tcccatatggtctagcggttaggattcctggttttcaccca

SEQ ID NO: 14295 - DNA, 50 bp, Artificial Sequence; identical to SEQ ID NO: 7805
  Probe

SEQ ID NO: 14296 - DNA, 16 bp, Artificial Sequence
  Probe
tccccggcacctccac

SEQ ID NO: 14297 - DNA, 17 bp, Artificial Sequence
  Probe
tccccggcacctccacc

SEQ ID NO: 14298 - DNA, 18 bp, Artificial Sequence
  Probe
tccccggcacctccacca

SEQ ID NO: 14299 - DNA, 31 bp, Artificial Sequence; identical to SEQ ID NO: 1671
  Probe

SEQ ID NO: 14300 - DNA, 32 bp, Artificial Sequence; identical to SEQ ID NO: 1672
  Probe

SEQ ID NO: 14301 - DNA, 33 bp, Artificial Sequence; identical to SEQ ID NO: 1673
  Probe

SEQ ID NO: 14302 - DNA, 34 bp, Artificial Sequence; identical to SEQ ID NO: 1674
  Probe

SEQ ID NO: 14303 - DNA, 35 bp, Artificial Sequence; identical to SEQ ID NO: 1675
  Probe

SEQ ID NO: 14304 - DNA, 36 bp, Artificial Sequence; identical to SEQ ID NO: 1676
  Probe

SEQ ID NO: 14305 - DNA, 37 bp, Artificial Sequence; identical to SEQ ID NO: 1677
  Probe

SEQ ID NO: 14306 - DNA, 39 bp, Artificial Sequence; identical to SEQ ID NO: 7857
  Probe

SEQ ID NO: 14307 - DNA, 40 bp, Artificial Sequence
  Probe
tccctggtggtctagtggctaggattcggcgctttcaccg

SEQ ID NO: 14308 - DNA, 31 bp, Artificial Sequence; identical to SEQ ID NO: 1679
  Probe

SEQ ID NO: 14309 - DNA, 32 bp, Artificial Sequence; identical to SEQ ID NO: 1680
  Probe

SEQ ID NO: 14310 - DNA, 33 bp, Artificial Sequence; identical to SEQ ID NO: 1681
  Probe

SEQ ID NO: 14311 - DNA, 34 bp, Artificial Sequence; identical to SEQ ID NO: 1682
  Probe

SEQ ID NO: 14312 - DNA, 35 bp, Artificial Sequence; identical to SEQ ID NO: 1683
  Probe

SEQ ID NO: 14313 - DNA, 36 bp, Artificial Sequence; identical to SEQ ID NO: 1684
  Probe

SEQ ID NO: 14314 - DNA, 37 bp, Artificial Sequence; identical to SEQ ID NO: 1685
  Probe

SEQ ID NO: 14315 - DNA, 38 bp, Artificial Sequence; identical to SEQ ID NO: 1686
  Probe

SEQ ID NO: 14316 - DNA, 39 bp, Artificial Sequence; identical to SEQ ID NO: 1687
  Probe

SEQ ID NO: 14317 - DNA, 40 bp, Artificial Sequence; identical to SEQ ID NO: 1688
  Probe

SEQ ID NO: 14318 - DNA, 49 bp, Artificial Sequence; identical to SEQ ID NO: 1690
  Probe

SEQ ID NO: 14319 - DNA, 50 bp, Artificial Sequence; identical to SEQ ID NO: 1691
  Probe

SEQ ID NO: 14320 - DNA, 25 bp, Artificial Sequence
  Probe
tccgtagtgtagcggttatcacatt

SEQ ID NO: 14321 - DNA, 29 bp, Artificial Sequence
  Probe
tccgtagtgtagcggttatcacattcgcc

SEQ ID NO: 14322 - DNA, 30 bp, Artificial Sequence; identical to SEQ ID NO: 7878
  Probe

SEQ ID NO: 14323 - DNA, 31 bp, Artificial Sequence; identical to SEQ ID NO: 7879
  Probe

SEQ ID NO: 14324 - DNA, 32 bp, Artificial Sequence; identical to SEQ ID NO: 7880
  Probe

SEQ ID NO: 14325 - DNA, 25 bp, Artificial Sequence
  Probe
tccgtagtgtagtggtcatcacgtt

SEQ ID NO: 14326 - DNA, 28 bp, Artificial Sequence
  Probe
tccgtagtgtagtggtcatcacgttcgc

SEQ ID NO: 14327 - DNA, 29 bp, Artificial Sequence
  Probe
tccgtagtgtagtggtcatcacgttcgcc

SEQ ID NO: 14328 - DNA, 30 bp, Artificial Sequence
  Probe
tccgtagtgtagtggtcatcacgttcgcct

SEQ ID NO: 14329 - DNA, 31 bp, Artificial Sequence
  Probe
tccgtagtgtagtggttatcacgttcgccta

SEQ ID NO: 14330 - DNA, 50 bp, Artificial Sequence; identical to SEQ ID NO: 7899
  Probe

SEQ ID NO: 14331 - DNA, 26 bp, Artificial Sequence
  Probe
tcctcgttagtatagtggtgagtatc

SEQ ID NO: 14332 - DNA, 27 bp, Artificial Sequence
  Probe
tcctcgttagtatagtggtgagtatcc

SEQ ID NO: 14333 - DNA, 28 bp, Artificial Sequence
  Probe
tcctcgttagtatagtggtgagtatccc

SEQ ID NO: 14334 - DNA, 29 bp, Artificial Sequence
  Probe
tcctcgttagtatagtggtgagtatcccc

SEQ ID NO: 14335 - DNA, 30 bp, Artificial Sequence; identical to SEQ ID NO: 1701
  Probe

SEQ ID NO: 14336 - DNA, 31 bp, Artificial Sequence; identical to SEQ ID NO: 1702
  Probe

SEQ ID NO: 14337 - DNA, 32 bp, Artificial Sequence; identical to SEQ ID NO: 1703
  Probe

SEQ ID NO: 14338 - DNA, 33 bp, Artificial Sequence; identical to SEQ ID NO: 1704
  Probe

SEQ ID NO: 14339 - DNA, 34 bp, Artificial Sequence; identical to SEQ ID NO: 1705
  Probe

SEQ ID NO: 14340 - DNA, 35 bp, Artificial Sequence; identical to SEQ ID NO: 1706
  Probe

SEQ ID NO: 14341 - DNA, 36 bp, Artificial Sequence; identical to SEQ ID NO: 1707
  Probe

SEQ ID NO: 14342 - DNA, 37 bp, Artificial Sequence; identical to SEQ ID NO: 1708
  Probe

SEQ ID NO: 14343 - DNA, 39 bp, Artificial Sequence; identical to SEQ ID NO: 1710
  Probe

SEQ ID NO: 14344 - DNA, 40 bp, Artificial Sequence; identical to SEQ ID NO: 7922
  Probe

SEQ ID NO: 14345 - DNA, 41 bp, Artificial Sequence; identical to SEQ ID NO: 7923
  Probe

SEQ ID NO: 14346 - DNA, 50 bp, Artificial Sequence; identical to SEQ ID NO: 1711
  Probe

SEQ ID NO: 14347 - DNA, 28 bp, Artificial Sequence
  Probe
tcctcgttagtatagtggttagtatccc

SEQ ID NO: 14348 - DNA, 29 bp, Artificial Sequence
  Probe
tcctcgttagtatagtggttagtatcccc

SEQ ID NO: 14349 - DNA, 30 bp, Artificial Sequence; identical to SEQ ID NO: 11933
  Probe

SEQ ID NO: 14350 - DNA, 34 bp, Artificial Sequence; identical to SEQ ID NO: 1716
  Probe

SEQ ID NO: 14351 - DNA, 35 bp, Artificial Sequence; identical to SEQ ID NO: 1717
  Probe

SEQ ID NO: 14352 - DNA, 36 bp, Artificial Sequence; identical to SEQ ID NO: 1718
  Probe

SEQ ID NO: 14353 - DNA, 16 bp, Artificial Sequence
  Probe
tccttaggtcgctggt

SEQ ID NO: 14354 - DNA, 17 bp, Artificial Sequence
  Probe
tccttaggtcgctggtt

SEQ ID NO: 14355 - DNA, 16 bp, Artificial Sequence
  Probe
tcgagccccagtggaa

SEQ ID NO: 14356 - DNA, 22 bp, Artificial Sequence
  Probe
tcgcctgccacgcgggaggccc

SEQ ID NO: 14357 - DNA, 26 bp, Artificial Sequence
  Probe
tcgcctgccacgcgggaggcccgggt

SEQ ID NO: 14358 - DNA, 27 bp, Artificial Sequence
  Probe
tcgcctgccacgcgggaggcccgggtt

SEQ ID NO: 14359 - DNA, 18 bp, Artificial Sequence
  Probe
tcgggtgcgagaggtccc

SEQ ID NO: 14360 - DNA, 22 bp, Artificial Sequence
  Probe
tcgggtgcgagaggtcccgggt

SEQ ID NO: 14361 - DNA, 23 bp, Artificial Sequence
  Probe
tcgggtgcgagaggtcccgggtt

SEQ ID NO: 14362 - DNA, 16 bp, Artificial Sequence
  Probe
tcggtagagcatcaga

SEQ ID NO: 14363 - DNA, 17 bp, Artificial Sequence
  Probe
tcggtagagcatcagac

SEQ ID NO: 14364 - DNA, 17 bp, Artificial Sequence
  Probe
tcggtagagcatgggac

SEQ ID NO: 14365 - DNA, 22 bp, Artificial Sequence
  Probe
tcgtaaaccgaagatcacgggt

SEQ ID NO: 14366 - DNA, 22 bp, Artificial Sequence
  Probe
tcgtaaaccgaagatcgcgggt

SEQ ID NO: 14367 - DNA, 27 bp, Artificial Sequence
  Probe
tcgttagtatagtggtgagtatccccg

SEQ ID NO: 14368 - DNA, 32 bp, Artificial Sequence
  Probe
tcgttagtatagtggtgagtatccccgcctgt

SEQ ID NO: 14369 - DNA, 24 bp, Artificial Sequence
  Probe
tctcataatctgaaggtcgtgagt

SEQ ID NO: 14370 - DNA, 33 bp, Artificial Sequence; identical to SEQ ID NO: 8013
  Probe

SEQ ID NO: 14371 - DNA, 32 bp, Artificial Sequence
  Probe
tctgtagtgtagtggttatcacgttcgcctca

SEQ ID NO: 14372 - DNA, 19 bp, Artificial Sequence
  Probe
tgaatccagcgatccgagt

SEQ ID NO: 14373 - DNA, 20 bp, Artificial Sequence
  Probe
tgaatccagcgatccgagtt

SEQ ID NO: 14374 - DNA, 32 bp, Artificial Sequence; identical to SEQ ID NO: 1736
  Probe

SEQ ID NO: 14375 - DNA, 36 bp, Artificial Sequence; identical to SEQ ID NO: 1740
  Probe

SEQ ID NO: 14376 - DNA, 38 bp, Artificial Sequence; identical to SEQ ID NO: 1742
  Probe

SEQ ID NO: 14377 - DNA, 31 bp, Artificial Sequence; identical to SEQ ID NO: 8063
  Probe

SEQ ID NO: 14378 - DNA, 29 bp, Artificial Sequence
  Probe
tgaggccccgggttcgatccccggcatct

SEQ ID NO: 14379 - DNA, 31 bp, Artificial Sequence; identical to SEQ ID NO: 8065
  Probe

SEQ ID NO: 14380 - DNA, 36 bp, Artificial Sequence
  Probe
tgcacgaggccccgggttcaatccccggcacctcca

SEQ ID NO: 14381 - DNA, 17 bp, Artificial Sequence
  Probe
tgccacgcgggaggccc

SEQ ID NO: 14382 - DNA, 21 bp, Artificial Sequence
  Probe
tgccacgcgggaggcccgggt

SEQ ID NO: 14383 - DNA, 22 bp, Artificial Sequence
  Probe
tgccacgcgggaggcccgggtt

SEQ ID NO: 14384 - DNA, 16 bp, Artificial Sequence
  Probe
tgcccgcatcctccac

SEQ ID NO: 14385 - DNA, 33 bp, Artificial Sequence
  Probe
tgcgagaggtcccgggttcaaatcccggacgag

SEQ ID NO: 14386 - DNA, 37 bp, Artificial Sequence
  Probe
tgcgagaggtcccgggttcaaatcccggacgagcccc

SEQ ID NO: 14387 - DNA, 17 bp, Artificial Sequence
  Probe
tgctaatccattgtgct

SEQ ID NO: 14388 - DNA, 17 bp, Artificial Sequence
  Probe
tgctaatggtggagtta

SEQ ID NO: 14389 - DNA, 33 bp, Artificial Sequence; identical to SEQ ID NO: 1758
  Probe

SEQ ID NO: 14390 - DNA, 26 bp, Artificial Sequence
  Probe
tgggtggttcagtggtagaattctcg

SEQ ID NO: 14391 - DNA, 28 bp, Artificial Sequence
  Probe
tgggtggttcagtggtagaattctcgcc

SEQ ID NO: 14392 - DNA, 29 bp, Artificial Sequence
  Probe
tgggtggttcagtggtagaattctcgcct

SEQ ID NO: 14393 - DNA, 30 bp, Artificial Sequence; identical to SEQ ID NO: 1765
  Probe

SEQ ID NO: 14394 - DNA, 31 bp, Artificial Sequence; identical to SEQ ID NO: 1766
  Probe

SEQ ID NO: 14395 - DNA, 32 bp, Artificial Sequence; identical to SEQ ID NO: 1767
  Probe

SEQ ID NO: 14396 - DNA, 23 bp, Artificial Sequence
  Probe
tggtagaattctcgcctgccacg

SEQ ID NO: 14397 - DNA, 24 bp, Artificial Sequence
  Probe
tggtagaattctcgcctgccacgc

SEQ ID NO: 14398 - DNA, 25 bp, Artificial Sequence
  Probe
tggtagaattctcgcctgccacgcg

SEQ ID NO: 14399 - DNA, 33 bp, Artificial Sequence; identical to SEQ ID NO: 1768
  Probe

SEQ ID NO: 14400 - DNA, 29 bp, Artificial Sequence
  Probe
tggtcgtggttgtagtccgtgcgagaata

SEQ ID NO: 14401 - DNA, 17 bp, Artificial Sequence
  Probe
tggtctaaggcgccaga

SEQ ID NO: 14402 - DNA, 20 bp, Artificial Sequence
  Probe
tggtctaaggcgccagactc

SEQ ID NO: 14403 - DNA, 24 bp, Artificial Sequence
  Probe
tggtctagtggttaggattcggcg

SEQ ID NO: 14404 - DNA, 26 bp, Artificial Sequence
  Probe
tggtctagtggttaggattcggcgct

SEQ ID NO: 14405 - DNA, 27 bp, Artificial Sequence
  Probe
tggtctagtggttaggattcggcgctc

SEQ ID NO: 14406 - DNA, 30 bp, Artificial Sequence
  Probe
tggtctagtggttaggattcggcgctctca

SEQ ID NO: 14407 - DNA, 34 bp, Artificial Sequence
  Probe
tggtgagcatagctgccttccaagcagttgaccc

SEQ ID NO: 14408 - DNA, 17 bp, Artificial Sequence
  Probe
tggtgagtatccccgcc

SEQ ID NO: 14409 - DNA, 21 bp, Artificial Sequence
  Probe
tggtgagtatccccgcctgtc

SEQ ID NO: 14410 - DNA, 22 bp, Artificial Sequence
  Probe
tggtgagtatccccgcctgtca

SEQ ID NO: 14411 - DNA, 23 bp, Artificial Sequence
  Probe
tggtgagtatccccgcctgtcac

SEQ ID NO: 14412 - DNA, 24 bp, Artificial Sequence
  Probe
tggtgagtatccccgcctgtcacg

SEQ ID NO: 14413 - DNA, 25 bp, Artificial Sequence
  Probe
tggtgagtatccccgcctgtcacgc

SEQ ID NO: 14414 - DNA, 34 bp, Artificial Sequence
  Probe
tggtgagtatccccgcctgtcacgcgggagaccg

SEQ ID NO: 14415 - DNA, 35 bp, Artificial Sequence
  Probe
tggtgagtatccccgcctgtcacgcgggagaccgg

SEQ ID NO: 14416 - DNA, 38 bp, Artificial Sequence
  Probe
tggtgagtatccccgcctgtcacgcgggagaccggggt

SEQ ID NO: 14417 - DNA, 27 bp, Artificial Sequence
  Probe
tggtggtctagtggttaggattcggcg

SEQ ID NO: 14418 - DNA, 29 bp, Artificial Sequence
  Probe
tggtggtctagtggttaggattcggcgct

SEQ ID NO: 14419 - DNA, 30 bp, Artificial Sequence
  Probe
tggtggtctagtggttaggattcggcgctc

SEQ ID NO: 14420 - DNA, 31 bp, Artificial Sequence; identical to SEQ ID NO: 1774
  Probe

SEQ ID NO: 14421 - DNA, 32 bp, Artificial Sequence; identical to SEQ ID NO: 1775
  Probe

SEQ ID NO: 14422 - DNA, 33 bp, Artificial Sequence; identical to SEQ ID NO: 8190
  Probe

SEQ ID NO: 14423 - DNA, 23 bp, Artificial Sequence
  Probe
tggtgtagtggtatcatgcaaga

SEQ ID NO: 14424 - DNA, 26 bp, Artificial Sequence
  Probe
tggtgtagtggtatcatgcaagattc

SEQ ID NO: 14425 - DNA, 41 bp, Artificial Sequence
  Probe
tggtgtagtggtatcatgcaagattcccattcttgcgaccc

SEQ ID NO: 14426 - DNA, 43 bp, Artificial Sequence
  Probe
tggtgtagtggtatcatgcaagattcccattcttgcgacccgg

SEQ ID NO: 14427 - DNA, 34 bp, Artificial Sequence
  Probe
tggttagcatagctgccttccaagcagttgaccc

SEQ ID NO: 14428 - DNA, 16 bp, Artificial Sequence
  Probe
tggttaggattcggcg

SEQ ID NO: 14429 - DNA, 17 bp, Artificial Sequence
  Probe
tggttaggattcggcgc

SEQ ID NO: 14430 - DNA, 18 bp, Artificial Sequence
  Probe
tggttaggattcggcgct

SEQ ID NO: 14431 - DNA, 19 bp, Artificial Sequence
  Probe
tggttaggattcggcgctc

SEQ ID NO: 14432 - DNA, 20 bp, Artificial Sequence
  Probe
tggttaggattcggcgctct

SEQ ID NO: 14433 - DNA, 22 bp, Artificial Sequence
  Probe
tggttaggattcggcgctctca

SEQ ID NO: 14434 - DNA, 23 bp, Artificial Sequence
  Probe
tggttaggattcggcgctctcac

SEQ ID NO: 14435 - DNA, 24 bp, Artificial Sequence
  Probe
tggttaggattcggcgctctcacc

SEQ ID NO: 14436 - DNA, 27 bp, Artificial Sequence
  Probe
tggttaggattcggcgctctcaccgcc

SEQ ID NO: 14437 - DNA, 34 bp, Artificial Sequence
  Probe
tggttaggattcggcgctctcaccgccgcggccc

SEQ ID NO: 14438 - DNA, 17 bp, Artificial Sequence
  Probe
tggttagtactctgcgt

SEQ ID NO: 14439 - DNA, 18 bp, Artificial Sequence
  Probe
tggttagtactctgcgtt

SEQ ID NO: 14440 - DNA, 16 bp, Artificial Sequence
  Probe
tggttagtatccccgc

SEQ ID NO: 14441 - DNA, 21 bp, Artificial Sequence
  Probe
tggttagtatccccgcctgtc

SEQ ID NO: 14442 - DNA, 23 bp, Artificial Sequence
  Probe
tggttagtatccccgcctgtcac

SEQ ID NO: 14443 - DNA, 21 bp, Artificial Sequence
  Probe
tggttgtagtccgtgcgagaa

SEQ ID NO: 14444 - DNA, 19 bp, Artificial Sequence
  Probe
tgtcacgcgggagaccggg

SEQ ID NO: 14445 - DNA, 21 bp, Artificial Sequence
  Probe
tgtcacgcgggagaccggggt

SEQ ID NO: 14446 - DNA, 22 bp, Artificial Sequence
  Probe
tgtcacgcgggagaccggggtt

SEQ ID NO: 14447 - DNA, 36 bp, Artificial Sequence
  Probe
tgtcacgcgggagaccggggttcaattccccgacgg

SEQ ID NO: 14448 - DNA, 37 bp, Artificial Sequence
  Probe
tgtcacgcgggagaccggggttcaattccccgacggg

SEQ ID NO: 14449 - DNA, 40 bp, Artificial Sequence
  Probe
tgtcacgcgggagaccggggttcaattccccgacggggag

SEQ ID NO: 14450 - DNA, 33 bp, Artificial Sequence
  Probe
tgtcacgcgggagaccggggttcgattccccga

SEQ ID NO: 14451 - DNA, 34 bp, Artificial Sequence
  Probe
tgtcacgcgggagaccggggttcgattccccgac

SEQ ID NO: 14452 - DNA, 35 bp, Artificial Sequence
  Probe
tgtcacgcgggagaccggggttcgattccccgacg

SEQ ID NO: 14453 - DNA, 36 bp, Artificial Sequence
  Probe
tgtcacgcgggagaccggggttcgattccccgacgg

SEQ ID NO: 14454 - DNA, 37 bp, Artificial Sequence
  Probe
tgtcacgcgggagaccggggttcgattccccgacggg

SEQ ID NO: 14455 - DNA, 38 bp, Artificial Sequence
  Probe
tgtcacgcgggagaccggggttcgattccccgacgggg

SEQ ID NO: 14456 - DNA, 40 bp, Artificial Sequence; identical to SEQ ID NO: 1782
  Probe

SEQ ID NO: 14457 - DNA, 37 bp, Artificial Sequence; identical to SEQ ID NO: 8364
  Probe

SEQ ID NO: 14458 - DNA, 38 bp, Artificial Sequence
  Probe
ttagcattaaccttttaagttaaagattaagagaacca

SEQ ID NO: 14459 - DNA, 23 bp, Artificial Sequence
  Probe
ttcaatccccggcacctccacca

SEQ ID NO: 14460 - DNA, 18 bp, Artificial Sequence
  Probe
ttcaggtcgcagtctccc

SEQ ID NO: 14461 - DNA, 30 bp, Artificial Sequence; identical to SEQ ID NO: 12337
  Probe

SEQ ID NO: 14462 - DNA, 31 bp, Artificial Sequence; identical to SEQ ID NO: 8393
  Probe

SEQ ID NO: 14463 - DNA, 34 bp, Artificial Sequence; identical to SEQ ID NO: 8395
  Probe

SEQ ID NO: 14464 - DNA, 35 bp, Artificial Sequence; identical to SEQ ID NO: 1796
  Probe

SEQ ID NO: 14465 - DNA, 39 bp, Artificial Sequence
  Probe
ttcatatcattggtcgtggttgtagtccgtgcgagaata

SEQ ID NO: 14466 - DNA, 17 bp, Artificial Sequence
  Probe
ttccaagcagttgaccc

SEQ ID NO: 14467 - DNA, 29 bp, Artificial Sequence
  Probe
ttccatagtgtagtggttatcacgtctgc

SEQ ID NO: 14468 - DNA, 18 bp, Artificial Sequence
  Probe
ttcccattcttgcgaccc

SEQ ID NO: 14469 - DNA, 31 bp, Artificial Sequence
  Probe
ttccgtagtgtagcggttatcacattcgcct

SEQ ID NO: 14470 - DNA, 16 bp, Artificial Sequence
  Probe
ttcgactcccggtatg

SEQ ID NO: 14471 - DNA, 16 bp, Artificial Sequence
  Probe
ttcgactcccggtgtg

SEQ ID NO: 14472 - DNA, 17 bp, Artificial Sequence
  Probe
ttcgactcccggtgtgg

SEQ ID NO: 14473 - DNA, 16 bp, Artificial Sequence
  Probe
ttcgattcccgggcgg

SEQ ID NO: 14474 - DNA, 16 bp, Artificial Sequence
  Probe
ttctcgcctgccacgc

SEQ ID NO: 14475 - DNA, 22 bp, Artificial Sequence
  Probe
ttgggtgcgagaggtcccgggt

SEQ ID NO: 14476 - DNA, 25 bp, Artificial Sequence
  Probe
aaaacatcagattgtgaatctgaca

SEQ ID NO: 14477 - DNA, 27 bp, Artificial Sequence
  Probe
aaaacatcagattgtgaatctgacaac

SEQ ID NO: 14478 - DNA, 28 bp, Artificial Sequence
  Probe
aaaacatcagattgtgaatctgacaaca

SEQ ID NO: 14479 - DNA, 29 bp, Artificial Sequence
  Probe
aaaacatcagattgtgaatctgacaacag

SEQ ID NO: 14480 - DNA, 36 bp, Artificial Sequence
  Probe
aaaacatcagattgtgaatctgacaacagaggctta

SEQ ID NO: 14481 - DNA, 42 bp, Artificial Sequence
  Probe
aaaacatcagattgtgaatctgacaacagaggcttacgaccc

SEQ ID NO: 14482 - DNA, 23 bp, Artificial Sequence
  Probe
aaaacctttttccaaggacaaat

SEQ ID NO: 14483 - DNA, 28 bp, Artificial Sequence
  Probe
aaaacgaatgatttcgactcattaaatt

SEQ ID NO: 14484 - DNA, 29 bp, Artificial Sequence
  Probe
aaaacgaatgatttcgactcattaaatta

SEQ ID NO: 14485 - DNA, 32 bp, Artificial Sequence
  Probe
aaaacgaatgatttcgactcattaaattatga

SEQ ID NO: 14486 - DNA, 42 bp, Artificial Sequence
  Probe
aaaacgaatgatttcgactcattaaattatgataatcatatt

SEQ ID NO: 14487 - DNA, 44 bp, Artificial Sequence
  Probe
aaaacgaatgatttcgactcattaaattatgataatcatattta

SEQ ID NO: 14488 - DNA, 46 bp, Artificial Sequence; identical to SEQ ID NO: 1816
  Probe

SEQ ID NO: 14489 - DNA, 49 bp, Artificial Sequence; identical to SEQ ID NO: 1817
  Probe

SEQ ID NO: 14490 - DNA, 50 bp, Artificial Sequence; identical to SEQ ID NO: 1818
  Probe

SEQ ID NO: 14491 - DNA, 22 bp, Artificial Sequence
  Probe
aaaacttaaaactttacagtca

SEQ ID NO: 14492 - DNA, 29 bp, Artificial Sequence
  Probe
aaaacttaaaactttacagtcagaggttc

SEQ ID NO: 14493 - DNA, 30 bp, Artificial Sequence; identical to SEQ ID NO: 1821
  Probe

SEQ ID NO: 14494 - DNA, 39 bp, Artificial Sequence; identical to SEQ ID NO: 6
  Probe

SEQ ID NO: 14495 - DNA, 40 bp, Artificial Sequence; identical to SEQ ID NO: 7
  Probe

SEQ ID NO: 14496 - DNA, 41 bp, Artificial Sequence; identical to SEQ ID NO: 1823
  Probe

SEQ ID NO: 14497 - DNA, 42 bp, Artificial Sequence; identical to SEQ ID NO: 1824
  Probe

SEQ ID NO: 14498 - DNA, 43 bp, Artificial Sequence; identical to SEQ ID NO: 1825
  Probe

SEQ ID NO: 14499 - DNA, 44 bp, Artificial Sequence; identical to SEQ ID NO: 1826
  Probe

SEQ ID NO: 14500 - DNA, 45 bp, Artificial Sequence; identical to SEQ ID NO: 1827
  Probe

SEQ ID NO: 14501 - DNA, 50 bp, Artificial Sequence; identical to SEQ ID NO: 1830
  Probe

SEQ ID NO: 14502 - DNA, 22 bp, Artificial Sequence
  Probe
aaaactttacagtcagaggttc

SEQ ID NO: 14503 - DNA, 33 bp, Artificial Sequence; identical to SEQ ID NO: 9
  Probe

SEQ ID NO: 14504 - DNA, 34 bp, Artificial Sequence; identical to SEQ ID NO: 1831
  Probe

SEQ ID NO: 14505 - DNA, 36 bp, Artificial Sequence
  Probe
aaaactttacagtcagaggttcaattcctcttctta

SEQ ID NO: 14506 - DNA, 38 bp, Artificial Sequence; identical to SEQ ID NO: 1833
  Probe

SEQ ID NO: 14507 - DNA, 41 bp, Artificial Sequence; identical to SEQ ID NO: 1836
  Probe

SEQ ID NO: 14508 - DNA, 42 bp, Artificial Sequence; identical to SEQ ID NO: 1837
  Probe

SEQ ID NO: 14509 - DNA, 38 bp, Artificial Sequence
  Probe
aaaatgtttagacgggctcacatcaccccataaacaaa

SEQ ID NO: 14510 - DNA, 39 bp, Artificial Sequence; identical to SEQ ID NO: 1841
  Probe

SEQ ID NO: 14511 - DNA, 40 bp, Artificial Sequence; identical to SEQ ID NO: 1842
  Probe

SEQ ID NO: 14512 - DNA, 41 bp, Artificial Sequence
  Probe
aaaatgtttagacgggctcacatcaccccataaacaaatag

SEQ ID NO: 14513 - DNA, 24 bp, Artificial Sequence
  Probe
aaaattttggtgcaactccaaata

SEQ ID NO: 14514 - DNA, 30 bp, Artificial Sequence
  Probe
aaaattttggtgcaactccaaataaaagta

SEQ ID NO: 14515 - DNA, 30 bp, Artificial Sequence
  Probe
aaacaaaacgaatgatttcgactcattaaa

SEQ ID NO: 14516 - DNA, 31 bp, Artificial Sequence
  Probe
aaacaaaacgaatgatttcgactcattaaat

SEQ ID NO: 14517 - DNA, 50 bp, Artificial Sequence; identical to SEQ ID NO: 1846
  Probe

SEQ ID NO: 14518 - DNA, 40 bp, Artificial Sequence; identical to SEQ ID NO: 1847
  Probe

SEQ ID NO: 14519 - DNA, 24 bp, Artificial Sequence
  Probe
aaacatcagattgtgaatctgaca

SEQ ID NO: 14520 - DNA, 26 bp, Artificial Sequence
  Probe
aaacatcagattgtgaatctgacaac

SEQ ID NO: 14521 - DNA, 27 bp, Artificial Sequence
  Probe
aaacatcagattgtgaatctgacaaca

SEQ ID NO: 14522 - DNA, 28 bp, Artificial Sequence
  Probe
aaacatcagattgtgaatctgacaacag

SEQ ID NO: 14523 - DNA, 29 bp, Artificial Sequence
  Probe
aaacatcagattgtgaatctgacaacaga

SEQ ID NO: 14524 - DNA, 30 bp, Artificial Sequence; identical to SEQ ID NO: 8867
  Probe

SEQ ID NO: 14525 - DNA, 37 bp, Artificial Sequence
  Probe
aaacatcagattgtgaatctgacaacagaggcttacg

SEQ ID NO: 14526 - DNA, 38 bp, Artificial Sequence
  Probe
aaacatcagattgtgaatctgacaacagaggcttacga

SEQ ID NO: 14527 - DNA, 42 bp, Artificial Sequence
  Probe
aaacatcagattgtgaatctgacaacagaggcttacgacccc

SEQ ID NO: 14528 - DNA, 45 bp, Artificial Sequence; identical to SEQ ID NO: 13
  Probe

SEQ ID NO: 14529 - DNA, 40 bp, Artificial Sequence
  Probe
aaaccaggggtcgcgagttcaaatctcgctggggcctcgg

SEQ ID NO: 14530 - DNA, 40 bp, Artificial Sequence; identical to SEQ ID NO: 1854
  Probe

SEQ ID NO: 14531 - DNA, 16 bp, Artificial Sequence
  Probe
aaaccatttcataact

SEQ ID NO: 14532 - DNA, 20 bp, Artificial Sequence
  Probe
aaaccatttcataactttgt

SEQ ID NO: 14533 - DNA, 21 bp, Artificial Sequence
  Probe
aaaccatttcataactttgtc

SEQ ID NO: 14534 - DNA, 24 bp, Artificial Sequence
  Probe
aaaccatttcataactttgtcaaa

SEQ ID NO: 14535 - DNA, 25 bp, Artificial Sequence
  Probe
aaaccatttcataactttgtcaaag

SEQ ID NO: 14536 - DNA, 26 bp, Artificial Sequence
  Probe
aaaccatttcataactttgtcaaagt

SEQ ID NO: 14537 - DNA, 50 bp, Artificial Sequence; identical to SEQ ID NO: 1871
  Probe

SEQ ID NO: 14538 - DNA, 15 bp, Artificial Sequence
  Probe
aaacccactccacct

SEQ ID NO: 14539 - DNA, 17 bp, Artificial Sequence
  Probe
aaacccccttatttcta

SEQ ID NO: 14540 - DNA, 20 bp, Artificial Sequence
  Probe
aaacccccttatttctagga

SEQ ID NO: 14541 - DNA, 35 bp, Artificial Sequence; identical to SEQ ID NO: 1876
  Probe

SEQ ID NO: 14542 - DNA, 19 bp, Artificial Sequence
  Probe
aaaccgggcggaaacacct

SEQ ID NO: 14543 - DNA, 17 bp, Artificial Sequence
  Probe
aaacctagccccaaacc

SEQ ID NO: 14544 - DNA, 18 bp, Artificial Sequence
  Probe
aaacctagccccaaaccc

SEQ ID NO: 14545 - DNA, 19 bp, Artificial Sequence
  Probe
aaacctagccccaaaccca

SEQ ID NO: 14546 - DNA, 24 bp, Artificial Sequence
  Probe
aaacctagccccaaacccactcca

SEQ ID NO: 14547 - DNA, 26 bp, Artificial Sequence
  Probe
aaacctagccccaaacccactccacc

SEQ ID NO: 14548 - DNA, 27 bp, Artificial Sequence
  Probe
aaacctagccccaaacccactccacct

SEQ ID NO: 14549 - DNA, 19 bp, Artificial Sequence
  Probe
aaacgaatgatttcgactc

SEQ ID NO: 14550 - DNA, 20 bp, Artificial Sequence
  Probe
aaacgaatgatttcgactca

SEQ ID NO: 14551 - DNA, 33 bp, Artificial Sequence
  Probe
aaacgaatgatttcgactcattaaattatgata

SEQ ID NO: 14552 - DNA, 45 bp, Artificial Sequence; identical to SEQ ID NO: 1883
  Probe

SEQ ID NO: 14553 - DNA, 46 bp, Artificial Sequence
  Probe
aaacgaatgatttcgactcattaaattatgataatcatatttacca

SEQ ID NO: 14554 - DNA, 49 bp, Artificial Sequence; identical to SEQ ID NO: 1884
  Probe

SEQ ID NO: 14555 - DNA, 50 bp, Artificial Sequence; identical to SEQ ID NO: 1885
  Probe

SEQ ID NO: 14556 - DNA, 25 bp, Artificial Sequence
  Probe
aaactactttcttgattcaggtgtt

SEQ ID NO: 14557 - DNA, 31 bp, Artificial Sequence
  Probe
aaacttaaaactttacagtcagaggttcaat

SEQ ID NO: 14558 - DNA, 39 bp, Artificial Sequence; identical to SEQ ID NO: 16
  Probe

SEQ ID NO: 14559 - DNA, 40 bp, Artificial Sequence; identical to SEQ ID NO: 1886
  Probe

SEQ ID NO: 14560 - DNA, 41 bp, Artificial Sequence; identical to SEQ ID NO: 1887
  Probe

SEQ ID NO: 14561 - DNA, 50 bp, Artificial Sequence; identical to SEQ ID NO: 1890
  Probe

SEQ ID NO: 14562 - DNA, 32 bp, Artificial Sequence; identical to SEQ ID NO: 17
  Probe

SEQ ID NO: 14563 - DNA, 33 bp, Artificial Sequence; identical to SEQ ID NO: 1892
  Probe

SEQ ID NO: 14564 - DNA, 34 bp, Artificial Sequence; identical to SEQ ID NO: 1893
  Probe

SEQ ID NO: 14565 - DNA, 38 bp, Artificial Sequence; identical to SEQ ID NO: 1895
  Probe

SEQ ID NO: 14566 - DNA, 39 bp, Artificial Sequence; identical to SEQ ID NO: 1896
  Probe

SEQ ID NO: 14567 - DNA, 40 bp, Artificial Sequence; identical to SEQ ID NO: 1897
  Probe

SEQ ID NO: 14568 - DNA, 41 bp, Artificial Sequence; identical to SEQ ID NO: 1898
  Probe

SEQ ID NO: 14569 - DNA, 36 bp, Artificial Sequence
  Probe
aaagaacagagaatagtttaaattagaatcttagct

SEQ ID NO: 14570 - DNA, 16 bp, Artificial Sequence
  Probe
aaagacaccccccaca

SEQ ID NO: 14571 - DNA, 17 bp, Artificial Sequence
  Probe
aaagacaccccccacag

SEQ ID NO: 14572 - DNA, 19 bp, Artificial Sequence
  Probe
aaagacaccccccacagtt

SEQ ID NO: 14573 - DNA, 20 bp, Artificial Sequence
  Probe
aaagacaccccccacagttt

SEQ ID NO: 14574 - DNA, 21 bp, Artificial Sequence
  Probe
aaagacaccccccacagttta

SEQ ID NO: 14575 - DNA, 23 bp, Artificial Sequence
  Probe
aaagacaccccccacagtttatg

SEQ ID NO: 14576 - DNA, 24 bp, Artificial Sequence
  Probe
aaagacaccccccacagtttatgt

SEQ ID NO: 14577 - DNA, 25 bp, Artificial Sequence
  Probe
aaagacaccccccacagtttatgta

SEQ ID NO: 14578 - DNA, 26 bp, Artificial Sequence
  Probe
aaagacaccccccacagtttatgtag

SEQ ID NO: 14579 - DNA, 27 bp, Artificial Sequence
  Probe
aaagacaccccccacagtttatgtagc

SEQ ID NO: 14580 - DNA, 28 bp, Artificial Sequence
  Probe
aaagacaccccccacagtttatgtagct

SEQ ID NO: 14581 - DNA, 29 bp, Artificial Sequence
  Probe
aaagacaccccccacagtttatgtagctt

SEQ ID NO: 14582 - DNA, 30 bp, Artificial Sequence; identical to SEQ ID NO: 1907
  Probe

SEQ ID NO: 14583 - DNA, 31 bp, Artificial Sequence
  Probe
aaagacaccccccacagtttatgtagcttac

SEQ ID NO: 14584 - DNA, 32 bp, Artificial Sequence; identical to SEQ ID NO: 1908
  Probe

SEQ ID NO: 14585 - DNA, 33 bp, Artificial Sequence; identical to SEQ ID NO: 1909
  Probe

SEQ ID NO: 14586 - DNA, 34 bp, Artificial Sequence
  Probe
aaagacaccccccacagtttatgtagcttacctc

SEQ ID NO: 14587 - DNA, 35 bp, Artificial Sequence; identical to SEQ ID NO: 1910
  Probe

SEQ ID NO: 14588 - DNA, 36 bp, Artificial Sequence; identical to SEQ ID NO: 1911
  Probe

SEQ ID NO: 14589 - DNA, 37 bp, Artificial Sequence; identical to SEQ ID NO: 1912
  Probe

SEQ ID NO: 14590 - DNA, 38 bp, Artificial Sequence; identical to SEQ ID NO: 1913
  Probe

SEQ ID NO: 14591 - DNA, 39 bp, Artificial Sequence; identical to SEQ ID NO: 1914
  Probe

SEQ ID NO: 14592 - DNA, 40 bp, Artificial Sequence
  Probe
aaagacaccccccacagtttatgtagcttacctcctcaaa

SEQ ID NO: 14593 - DNA, 41 bp, Artificial Sequence
  Probe
aaagacaccccccacagtttatgtagcttacctcctcaaag

SEQ ID NO: 14594 - DNA, 43 bp, Artificial Sequence; identical to SEQ ID NO: 1915
  Probe

SEQ ID NO: 14595 - DNA, 44 bp, Artificial Sequence
  Probe
aaagacaccccccacagtttatgtagcttacctcctcaaagcaa

SEQ ID NO: 14596 - DNA, 50 bp, Artificial Sequence; identical to SEQ ID NO: 1918
  Probe

SEQ ID NO: 14597 - DNA, 23 bp, Artificial Sequence
  Probe
aaagacaggggttaggcctcttt

SEQ ID NO: 14598 - DNA, 24 bp, Artificial Sequence
  Probe
aaagacaggggttaggcctctttt

SEQ ID NO: 14599 - DNA, 25 bp, Artificial Sequence
  Probe
aaagacaggggttaggcctcttttt

SEQ ID NO: 14600 - DNA, 26 bp, Artificial Sequence
  Probe
aaagacaggggttaggcctcttttta

SEQ ID NO: 14601 - DNA, 29 bp, Artificial Sequence
  Probe
aaagacaggggttaggcctctttttacca

SEQ ID NO: 14602 - DNA, 30 bp, Artificial Sequence
  Probe
aaagacaggggttaggcctctttttaccag

SEQ ID NO: 14603 - DNA, 31 bp, Artificial Sequence; identical to SEQ ID NO: 1924
  Probe

SEQ ID NO: 14604 - DNA, 32 bp, Artificial Sequence; identical to SEQ ID NO: 1925
  Probe

SEQ ID NO: 14605 - DNA, 50 bp, Artificial Sequence
  Probe
aaagagttactttgatagagtaaataataggagcttaaacccccttattt

SEQ ID NO: 14606 - DNA, 30 bp, Artificial Sequence
  Probe
aaagattaagagaaccaacacctctttaca

SEQ ID NO: 14607 - DNA, 32 bp, Artificial Sequence
  Probe
aaagattaagagaaccaacacctctttacagt

SEQ ID NO: 14608 - DNA, 33 bp, Artificial Sequence; identical to SEQ ID NO: 1926
  Probe

SEQ ID NO: 14609 - DNA, 34 bp, Artificial Sequence; identical to SEQ ID NO: 1927
  Probe

SEQ ID NO: 14610 - DNA, 35 bp, Artificial Sequence; identical to SEQ ID NO: 1928
  Probe

SEQ ID NO: 14611 - DNA, 36 bp, Artificial Sequence; identical to SEQ ID NO: 1929
  Probe

SEQ ID NO: 14612 - DNA, 37 bp, Artificial Sequence; identical to SEQ ID NO: 1930
  Probe

SEQ ID NO: 14613 - DNA, 16 bp, Artificial Sequence
  Probe
aaagcaatacactgaa

SEQ ID NO: 14614 - DNA, 29 bp, Artificial Sequence
  Probe
aaagcaatacactgaaaatgtttagacgg

SEQ ID NO: 14615 - DNA, 32 bp, Artificial Sequence; identical to SEQ ID NO: 1934
  Probe

SEQ ID NO: 14616 - DNA, 34 bp, Artificial Sequence; identical to SEQ ID NO: 20
  Probe

SEQ ID NO: 14617 - DNA, 16 bp, Artificial Sequence
  Probe
aaagcacccaacttac

SEQ ID NO: 14618 - DNA, 17 bp, Artificial Sequence
  Probe
aaagcacccaacttaca

SEQ ID NO: 14619 - DNA, 20 bp, Artificial Sequence
  Probe
aaagcacccaacttacactt

SEQ ID NO: 14620 - DNA, 24 bp, Artificial Sequence
  Probe
aaagcacccaacttacacttagga

SEQ ID NO: 14621 - DNA, 26 bp, Artificial Sequence
  Probe
aaagcacccaacttacacttaggaga

SEQ ID NO: 14622 - DNA, 27 bp, Artificial Sequence
  Probe
aaagcacccaacttacacttaggagat

SEQ ID NO: 14623 - DNA, 28 bp, Artificial Sequence
  Probe
aaagcacccaacttacacttaggagatt

SEQ ID NO: 14624 - DNA, 29 bp, Artificial Sequence
  Probe
aaagcacccaacttacacttaggagattt

SEQ ID NO: 14625 - DNA, 30 bp, Artificial Sequence; identical to SEQ ID NO: 1953
  Probe

SEQ ID NO: 14626 - DNA, 31 bp, Artificial Sequence; identical to SEQ ID NO: 1954
  Probe

SEQ ID NO: 14627 - DNA, 33 bp, Artificial Sequence; identical to SEQ ID NO: 1955
  Probe

SEQ ID NO: 14628 - DNA, 36 bp, Artificial Sequence
  Probe
aaagcacccaacttacacttaggagatttcaactta

SEQ ID NO: 14629 - DNA, 50 bp, Artificial Sequence; identical to SEQ ID NO: 1962
  Probe

SEQ ID NO: 14630 - DNA, 17 bp, Artificial Sequence
  Probe
aaagctcacaagaactg

SEQ ID NO: 14631 - DNA, 23 bp, Artificial Sequence
  Probe
aaagctcacaagaactgctaact

SEQ ID NO: 14632 - DNA, 24 bp, Artificial Sequence
  Probe
aaagctcacaagaactgctaactc

SEQ ID NO: 14633 - DNA, 25 bp, Artificial Sequence
  Probe
aaagctcacaagaactgctaactca

SEQ ID NO: 14634 - DNA, 27 bp, Artificial Sequence
  Probe
aaagctcacaagaactgctaactcatg

SEQ ID NO: 14635 - DNA, 50 bp, Artificial Sequence; identical to SEQ ID NO: 32
  Probe

SEQ ID NO: 14636 - DNA, 30 bp, Artificial Sequence
  Probe
aaaggtccccggttcgaaaccgggcggaaa

SEQ ID NO: 14637 - DNA, 32 bp, Artificial Sequence
  Probe
aaaggtccccggttcgaaaccgggcggaaaca

SEQ ID NO: 14638 - DNA, 35 bp, Artificial Sequence
  Probe
aaaggtccccggttcgaaaccgggcggaaacacct

SEQ ID NO: 14639 - DNA, 35 bp, Artificial Sequence
  Probe
aaaggtccccggttcgatcccgggcggaaacaggt

SEQ ID NO: 14640 - DNA, 30 bp, Artificial Sequence
  Probe
aaaggtccctggttcgatcccgggtttcgg

SEQ ID NO: 14641 - DNA, 32 bp, Artificial Sequence
  Probe
aaaggtccctggttcgatcccgggtttcggca

SEQ ID NO: 14642 - DNA, 35 bp, Artificial Sequence
  Probe
aaaggtccctggttcgatcccgggtttcggcactt

SEQ ID NO: 14643 - DNA, 30 bp, Artificial Sequence
  Probe
aaaggttccgggttcgagtcccggcggagt

SEQ ID NO: 14644 - DNA, 32 bp, Artificial Sequence
  Probe
aaaggttggtggttcgagcccacccagggacg

SEQ ID NO: 14645 - DNA, 34 bp, Artificial Sequence
  Probe
aaaggttggtggttcgagcccacccagggacgcc

SEQ ID NO: 14646 - DNA, 35 bp, Artificial Sequence
  Probe
aaaggttggtggttcgagcccacccagggacgcct

SEQ ID NO: 14647 - DNA, 30 bp, Artificial Sequence
  Probe
aaaggttggtggttcgatcccacccaggga

SEQ ID NO: 14648 - DNA, 34 bp, Artificial Sequence
  Probe
aaagtaaggtcagctaaataagctatcgggccca

SEQ ID NO: 14649 - DNA, 36 bp, Artificial Sequence
  Probe
aaagtaaggtcagctaaataagctatcgggcccata

SEQ ID NO: 14650 - DNA, 37 bp, Artificial Sequence
  Probe
aaagtaaggtcagctaaataagctatcgggcccatac

SEQ ID NO: 14651 - DNA, 36 bp, Artificial Sequence
  Probe
aaagtggggtttccgtagtgtagtggttatcacgtt

SEQ ID NO: 14652 - DNA, 30 bp, Artificial Sequence; identical to SEQ ID NO: 1972
  Probe

SEQ ID NO: 14653 - DNA, 33 bp, Artificial Sequence
  Probe
aaagttaaattataggctaaatcctatatatct

SEQ ID NO: 14654 - DNA, 19 bp, Artificial Sequence
  Probe
aaataagctatcgggccca

SEQ ID NO: 14655 - DNA, 20 bp, Artificial Sequence
  Probe
aaataagctatcgggcccat

SEQ ID NO: 14656 - DNA, 21 bp, Artificial Sequence
  Probe
aaataagctatcgggcccata

SEQ ID NO: 14657 - DNA, 22 bp, Artificial Sequence
  Probe
aaataagctatcgggcccatac

SEQ ID NO: 14658 - DNA, 24 bp, Artificial Sequence
  Probe
aaataagctatcgggcccataccc

SEQ ID NO: 14659 - DNA, 25 bp, Artificial Sequence
  Probe
aaataagctatcgggcccatacccc

SEQ ID NO: 14660 - DNA, 26 bp, Artificial Sequence
  Probe
aaataagctatcgggcccataccccg

SEQ ID NO: 14661 - DNA, 27 bp, Artificial Sequence
  Probe
aaataagctatcgggcccataccccga

SEQ ID NO: 14662 - DNA, 29 bp, Artificial Sequence
  Probe
aaataagctatcgggcccataccccgaaa

SEQ ID NO: 14663 - DNA, 30 bp, Artificial Sequence; identical to SEQ ID NO: 1982
  Probe

SEQ ID NO: 14664 - DNA, 31 bp, Artificial Sequence; identical to SEQ ID NO: 1983
  Probe

SEQ ID NO: 14665 - DNA, 32 bp, Artificial Sequence; identical to SEQ ID NO: 1984
  Probe

SEQ ID NO: 14666 - DNA, 33 bp, Artificial Sequence; identical to SEQ ID NO: 1985
  Probe

SEQ ID NO: 14667 - DNA, 34 bp, Artificial Sequence
  Probe
aaataagctatcgggcccataccccgaaaatgtt

SEQ ID NO: 14668 - DNA, 36 bp, Artificial Sequence; identical to SEQ ID NO: 1986
  Probe

SEQ ID NO: 14669 - DNA, 37 bp, Artificial Sequence
  Probe
aaataagctatcgggcccataccccgaaaatgttggt

SEQ ID NO: 14670 - DNA, 38 bp, Artificial Sequence
  Probe
aaataagctatcgggcccataccccgaaaatgttggtt

SEQ ID NO: 14671 - DNA, 39 bp, Artificial Sequence; identical to SEQ ID NO: 1987
  Probe

SEQ ID NO: 14672 - DNA, 25 bp, Artificial Sequence
  Probe
aaataagggggtttaagctcctatt

SEQ ID NO: 14673 - DNA, 26 bp, Artificial Sequence
  Probe
aaataagggggtttaagctcctatta

SEQ ID NO: 14674 - DNA, 33 bp, Artificial Sequence; identical to SEQ ID NO: 1990
  Probe

SEQ ID NO: 14675 - DNA, 20 bp, Artificial Sequence
  Probe
aaatcccggacgagccccct

SEQ ID NO: 14676 - DNA, 20 bp, Artificial Sequence
  Probe
aaatccgggtgccccctcaa

SEQ ID NO: 14677 - DNA, 30 bp, Artificial Sequence; identical to SEQ ID NO: 1996
  Probe

SEQ ID NO: 14678 - DNA, 31 bp, Artificial Sequence; identical to SEQ ID NO: 1997
  Probe

SEQ ID NO: 14679 - DNA, 36 bp, Artificial Sequence; identical to SEQ ID NO: 2000
  Probe

SEQ ID NO: 14680 - DNA, 37 bp, Artificial Sequence; identical to SEQ ID NO: 2001
  Probe

SEQ ID NO: 14681 - DNA, 38 bp, Artificial Sequence; identical to SEQ ID NO: 2002
  Probe

SEQ ID NO: 14682 - DNA, 39 bp, Artificial Sequence; identical to SEQ ID NO: 2003
  Probe

SEQ ID NO: 14683 - DNA, 27 bp, Artificial Sequence
  Probe
aaatgttggttatacccttcccgtact

SEQ ID NO: 14684 - DNA, 37 bp, Artificial Sequence
  Probe
aaatgtttagacgggctcacatcaccccataaacaaa

SEQ ID NO: 14685 - DNA, 38 bp, Artificial Sequence
  Probe
aaatgtttagacgggctcacatcaccccataaacaaat

SEQ ID NO: 14686 - DNA, 50 bp, Artificial Sequence; identical to SEQ ID NO: 36
  Probe

SEQ ID NO: 14687 - DNA, 38 bp, Artificial Sequence; identical to SEQ ID NO: 2008
  Probe

SEQ ID NO: 14688 - DNA, 39 bp, Artificial Sequence; identical to SEQ ID NO: 2009
  Probe

SEQ ID NO: 14689 - DNA, 23 bp, Artificial Sequence
  Probe
aaattttggtgcaactccaaata

SEQ ID NO: 14690 - DNA, 49 bp, Artificial Sequence; identical to SEQ ID NO: 2012
  Probe

SEQ ID NO: 14691 - DNA, 50 bp, Artificial Sequence; identical to SEQ ID NO: 2013
  Probe

SEQ ID NO: 14692 - DNA, 20 bp, Artificial Sequence
  Probe
aacaacatggctttctcaac

SEQ ID NO: 14693 - DNA, 21 bp, Artificial Sequence
  Probe
aacaacatggctttctcaact

SEQ ID NO: 14694 - DNA, 16 bp, Artificial Sequence
  Probe
aacacaaagcacccaa

SEQ ID NO: 14695 - DNA, 17 bp, Artificial Sequence
  Probe
aacacaaagcacccaac

SEQ ID NO: 14696 - DNA, 18 bp, Artificial Sequence
  Probe
aacacaaagcacccaact

SEQ ID NO: 14697 - DNA, 20 bp, Artificial Sequence
  Probe
aacacaaagcacccaactta

SEQ ID NO: 14698 - DNA, 22 bp, Artificial Sequence
  Probe
aacacaaagcacccaacttaca

SEQ ID NO: 14699 - DNA, 24 bp, Artificial Sequence
  Probe
aacacaaagcacccaacttacact

SEQ ID NO: 14700 - DNA, 25 bp, Artificial Sequence
  Probe
aacacaaagcacccaacttacactt

SEQ ID NO: 14701 - DNA, 26 bp, Artificial Sequence
  Probe
aacacaaagcacccaacttacactta

SEQ ID NO: 14702 - DNA, 30 bp, Artificial Sequence; identical to SEQ ID NO: 2027
  Probe

SEQ ID NO: 14703 - DNA, 31 bp, Artificial Sequence; identical to SEQ ID NO: 2028
  Probe

SEQ ID NO: 14704 - DNA, 33 bp, Artificial Sequence; identical to SEQ ID NO: 2030
  Probe

SEQ ID NO: 14705 - DNA, 36 bp, Artificial Sequence; identical to SEQ ID NO: 2031
  Probe

SEQ ID NO: 14706 - DNA, 50 bp, Artificial Sequence; identical to SEQ ID NO: 39
  Probe

SEQ ID NO: 14707 - DNA, 16 bp, Artificial Sequence
  Probe
aacacctctttacagt

SEQ ID NO: 14708 - DNA, 17 bp, Artificial Sequence
  Probe
aacacctctttacagtg

SEQ ID NO: 14709 - DNA, 18 bp, Artificial Sequence
  Probe
aacacctctttacagtga

SEQ ID NO: 14710 - DNA, 19 bp, Artificial Sequence
  Probe
aacacctctttacagtgaa

SEQ ID NO: 14711 - DNA, 20 bp, Artificial Sequence
  Probe
aacacctctttacagtgaaa

SEQ ID NO: 14712 - DNA, 21 bp, Artificial Sequence
  Probe
aacacctctttacagtgaaat

SEQ ID NO: 14713 - DNA, 22 bp, Artificial Sequence
  Probe
aacacctctttacagtgaaatg

SEQ ID NO: 14714 - DNA, 21 bp, Artificial Sequence
  Probe
aacacgcgaaaggtccccggt

SEQ ID NO: 14715 - DNA, 29 bp, Artificial Sequence
  Probe
aacagaggcttacgaccccttatttaccg

SEQ ID NO: 14716 - DNA, 31 bp, Artificial Sequence; identical to SEQ ID NO: 2039
  Probe

SEQ ID NO: 14717 - DNA, 33 bp, Artificial Sequence
  Probe
aacagccggctccatagctcaggggttagagca

SEQ ID NO: 14718 - DNA, 34 bp, Artificial Sequence
  Probe
aacagccggctccatagctcaggggttagagcac

SEQ ID NO: 14719 - DNA, 35 bp, Artificial Sequence
  Probe
aacagccggctccatagctcaggggttagagcact

SEQ ID NO: 14720 - DNA, 41 bp, Artificial Sequence
  Probe
aacagccggctccatagctcaggggttagagcactggtctt

SEQ ID NO: 14721 - DNA, 42 bp, Artificial Sequence
  Probe
aacagccggctccatagctcaggggttagagcactggtcttg

SEQ ID NO: 14722 - DNA, 43 bp, Artificial Sequence
  Probe
aacagccggctccatagctcaggggttagagcactggtcttgt

SEQ ID NO: 14723 - DNA, 28 bp, Artificial Sequence
  Probe
aacagcgccgctggtgtagtggtatcat

SEQ ID NO: 14724 - DNA, 29 bp, Artificial Sequence
  Probe
aacagcgccgctggtgtagtggtatcatg

SEQ ID NO: 14725 - DNA, 31 bp, Artificial Sequence
  Probe
aacagcgccgctggtgtagtggtatcatgca

SEQ ID NO: 14726 - DNA, 33 bp, Artificial Sequence
  Probe
aacagcgccgctggtgtagtggtatcatgcaag

SEQ ID NO: 14727 - DNA, 34 bp, Artificial Sequence
  Probe
aacagcgccgctggtgtagtggtatcatgcaaga

SEQ ID NO: 14728 - DNA, 36 bp, Artificial Sequence
  Probe
aacagcgccgctggtgtagtggtatcatgcaagatt

SEQ ID NO: 14729 - DNA, 37 bp, Artificial Sequence
  Probe
aacagcgccgctggtgtagtggtatcatgcaagattc

SEQ ID NO: 14730 - DNA, 17 bp, Artificial Sequence
  Probe
aacagctaaggactgca

SEQ ID NO: 14731 - DNA, 19 bp, Artificial Sequence
  Probe
aacagctaaggactgcaaa

SEQ ID NO: 14732 - DNA, 20 bp, Artificial Sequence
  Probe
aacagctaaggactgcaaaa

SEQ ID NO: 14733 - DNA, 21 bp, Artificial Sequence
  Probe
aacagctaaggactgcaaaac

SEQ ID NO: 14734 - DNA, 22 bp, Artificial Sequence
  Probe
aacagctaaggactgcaaaacc

SEQ ID NO: 14735 - DNA, 23 bp, Artificial Sequence
  Probe
aacagctaaggactgcaaaaccc

SEQ ID NO: 14736 - DNA, 24 bp, Artificial Sequence
  Probe
aacagctaaggactgcaaaacccc

SEQ ID NO: 14737 - DNA, 25 bp, Artificial Sequence
  Probe
aacagctaaggactgcaaaacccca

SEQ ID NO: 14738 - DNA, 26 bp, Artificial Sequence
  Probe
aacagctaaggactgcaaaaccccac

SEQ ID NO: 14739 - DNA, 27 bp, Artificial Sequence
  Probe
aacagctaaggactgcaaaaccccact

SEQ ID NO: 14740 - DNA, 28 bp, Artificial Sequence
  Probe
aacagctaaggactgcaaaaccccactc

SEQ ID NO: 14741 - DNA, 29 bp, Artificial Sequence
  Probe
aacagctaaggactgcaaaaccccactct

SEQ ID NO: 14742 - DNA, 17 bp, Artificial Sequence
  Probe
aacagctatccattggt

SEQ ID NO: 14743 - DNA, 18 bp, Artificial Sequence
  Probe
aacagctatccattggtc

SEQ ID NO: 14744 - DNA, 19 bp, Artificial Sequence
  Probe
aacagctatccattggtct

SEQ ID NO: 14745 - DNA, 33 bp, Artificial Sequence
  Probe
aacaggagatcctgggttcgaatcccagcgggg

SEQ ID NO: 14746 - DNA, 36 bp, Artificial Sequence
  Probe
aacaggagatcctgggttcgaatcccagcggggcct

SEQ ID NO: 14747 - DNA, 39 bp, Artificial Sequence
  Probe
aacaggagatcctgggttcgaatcccagcggggcctgtt

SEQ ID NO: 14748 - DNA, 39 bp, Artificial Sequence; identical to SEQ ID NO: 2046
  Probe

SEQ ID NO: 14749 - DNA, 34 bp, Artificial Sequence; identical to SEQ ID NO: 2048
  Probe

SEQ ID NO: 14750 - DNA, 35 bp, Artificial Sequence
  Probe
aacaggagatcctgggttcgaatcccagcggtgcc

SEQ ID NO: 14751 - DNA, 36 bp, Artificial Sequence; identical to SEQ ID NO: 2049
  Probe

SEQ ID NO: 14752 - DNA, 37 bp, Artificial Sequence; identical to SEQ ID NO: 2050
  Probe

SEQ ID NO: 14753 - DNA, 38 bp, Artificial Sequence
  Probe
aacaggagatcctgggttcgaatcccagcggtgcctcc

SEQ ID NO: 14754 - DNA, 39 bp, Artificial Sequence; identical to SEQ ID NO: 2051
  Probe

SEQ ID NO: 14755 - DNA, 23 bp, Artificial Sequence
  Probe
aacatcagattgtgaatctgaca

SEQ ID NO: 14756 - DNA, 25 bp, Artificial Sequence
  Probe
aacatcagattgtgaatctgacaac

SEQ ID NO: 14757 - DNA, 26 bp, Artificial Sequence
  Probe
aacatcagattgtgaatctgacaaca

SEQ ID NO: 14758 - DNA, 37 bp, Artificial Sequence
  Probe
aacatcagattgtgaatctgacaacagaggcttacga

SEQ ID NO: 14759 - DNA, 41 bp, Artificial Sequence; identical to SEQ ID NO: 2056
  Probe

SEQ ID NO: 14760 - DNA, 43 bp, Artificial Sequence; identical to SEQ ID NO: 40
  Probe

SEQ ID NO: 14761 - DNA, 24 bp, Artificial Sequence
  Probe
aaccaaaacatcagattgtgaatc

SEQ ID NO: 14762 - DNA, 29 bp, Artificial Sequence
  Probe
aaccaaaacatcagattgtgaatctgaca

SEQ ID NO: 14763 - DNA, 30 bp, Artificial Sequence; identical to SEQ ID NO: 2063
  Probe

SEQ ID NO: 14764 - DNA, 31 bp, Artificial Sequence; identical to SEQ ID NO: 2064
  Probe

SEQ ID NO: 14765 - DNA, 32 bp, Artificial Sequence; identical to SEQ ID NO: 2065
  Probe

SEQ ID NO: 14766 - DNA, 33 bp, Artificial Sequence; identical to SEQ ID NO: 2066
  Probe

SEQ ID NO: 14767 - DNA, 34 bp, Artificial Sequence
  Probe
aaccaaaacatcagattgtgaatctgacaacaga

SEQ ID NO: 14768 - DNA, 35 bp, Artificial Sequence
  Probe
aaccaaaacatcagattgtgaatctgacaacagag

SEQ ID NO: 14769 - DNA, 36 bp, Artificial Sequence; identical to SEQ ID NO: 2067
  Probe

SEQ ID NO: 14770 - DNA, 37 bp, Artificial Sequence; identical to SEQ ID NO: 2068
  Probe

SEQ ID NO: 14771 - DNA, 38 bp, Artificial Sequence; identical to SEQ ID NO: 2069
  Probe

SEQ ID NO: 14772 - DNA, 39 bp, Artificial Sequence; identical to SEQ ID NO: 2070
  Probe

SEQ ID NO: 14773 - DNA, 40 bp, Artificial Sequence; identical to SEQ ID NO: 43
  Probe

SEQ ID NO: 14774 - DNA, 42 bp, Artificial Sequence
  Probe
aaccaaaacatcagattgtgaatctgacaacagaggcttacg

SEQ ID NO: 14775 - DNA, 43 bp, Artificial Sequence; identical to SEQ ID NO: 44
  Probe

SEQ ID NO: 14776 - DNA, 27 bp, Artificial Sequence
  Probe
aaccaaaccccaaagacaccccccaca

SEQ ID NO: 14777 - DNA, 22 bp, Artificial Sequence
  Probe
aaccaacacctctttacagtga

SEQ ID NO: 14778 - DNA, 23 bp, Artificial Sequence
  Probe
aaccaacacctctttacagtgaa

SEQ ID NO: 14779 - DNA, 24 bp, Artificial Sequence
  Probe
aaccaacacctctttacagtgaaa

SEQ ID NO: 14780 - DNA, 25 bp, Artificial Sequence
  Probe
aaccaacacctctttacagtgaaat

SEQ ID NO: 14781 - DNA, 19 bp, Artificial Sequence
  Probe
aaccagctttggggggttc

SEQ ID NO: 14782 - DNA, 36 bp, Artificial Sequence
  Probe
aaccagctttggggggttcgattccttccttttttg

SEQ ID NO: 14783 - DNA, 38 bp, Artificial Sequence
  Probe
aaccagctttggggggttcgattccttccttttttgtc

SEQ ID NO: 14784 - DNA, 39 bp, Artificial Sequence; identical to SEQ ID NO: 2079
  Probe

SEQ ID NO: 14785 - DNA, 39 bp, Artificial Sequence; identical to SEQ ID NO: 2080
  Probe

SEQ ID NO: 14786 - DNA, 33 bp, Artificial Sequence
  Probe
aaccaggggtcgcgagttcgatcctcgctgggg

SEQ ID NO: 14787 - DNA, 39 bp, Artificial Sequence; identical to SEQ ID NO: 2081
  Probe

SEQ ID NO: 14788 - DNA, 27 bp, Artificial Sequence
  Probe
aaccatcctctgctatcggagtttttt

SEQ ID NO: 14789 - DNA, 40 bp, Artificial Sequence; identical to SEQ ID NO: 2086
  Probe

SEQ ID NO: 14790 - DNA, 39 bp, Artificial Sequence
  Probe
aacccagaggtcgatggatcgaaaccatcctctgctatc

SEQ ID NO: 14791 - DNA, 15 bp, Artificial Sequence
  Probe
aacccatccctgaga

SEQ ID NO: 14792 - DNA, 16 bp, Artificial Sequence
  Probe
aaccccactcctggta

SEQ ID NO: 14793 - DNA, 35 bp, Artificial Sequence
  Probe
aaccgaaaggttggtggttcgagcccacccaggga

SEQ ID NO: 14794 - DNA, 40 bp, Artificial Sequence; identical to SEQ ID NO: 2088
  Probe

SEQ ID NO: 14795 - DNA, 33 bp, Artificial Sequence
  Probe
aaccgaagatcacgggttcgaaccccgtccgtg

SEQ ID NO: 14796 - DNA, 39 bp, Artificial Sequence; identical to SEQ ID NO: 2090
  Probe

SEQ ID NO: 14797 - DNA, 16 bp, Artificial Sequence
  Probe
aaccgagcgtccaagc

SEQ ID NO: 14798 - DNA, 21 bp, Artificial Sequence
  Probe
aaccgagcgtccaagctcttt

SEQ ID NO: 14799 - DNA, 22 bp, Artificial Sequence
  Probe
aaccgagcgtccaagctctttc

SEQ ID NO: 14800 - DNA, 23 bp, Artificial Sequence
  Probe
aaccgagcgtccaagctctttcc

SEQ ID NO: 14801 - DNA, 24 bp, Artificial Sequence
  Probe
aaccgagcgtccaagctctttcca

SEQ ID NO: 14802 - DNA, 25 bp, Artificial Sequence
  Probe
aaccgagcgtccaagctctttccat

SEQ ID NO: 14803 - DNA, 26 bp, Artificial Sequence
  Probe
aaccgagcgtccaagctctttccatt

SEQ ID NO: 14804 - DNA, 27 bp, Artificial Sequence
  Probe
aaccgagcgtccaagctctttccattt

SEQ ID NO: 14805 - DNA, 28 bp, Artificial Sequence
  Probe
aaccgagcgtccaagctctttccatttt

SEQ ID NO: 14806 - DNA, 29 bp, Artificial Sequence
  Probe
aaccgagcgtccaagctctttccattttt

SEQ ID NO: 14807 - DNA, 16 bp, Artificial Sequence
  Probe
aaccggagatgaaaac

SEQ ID NO: 14808 - DNA, 18 bp, Artificial Sequence
  Probe
aaccggagatgaaaacct

SEQ ID NO: 14809 - DNA, 24 bp, Artificial Sequence
  Probe
aaccggagatgaaaacctttttcc

SEQ ID NO: 14810 - DNA, 25 bp, Artificial Sequence
  Probe
aaccggagatgaaaacctttttcca

SEQ ID NO: 14811 - DNA, 30 bp, Artificial Sequence; identical to SEQ ID NO: 52
  Probe

SEQ ID NO: 14812 - DNA, 32 bp, Artificial Sequence; identical to SEQ ID NO: 2102
  Probe

SEQ ID NO: 14813 - DNA, 33 bp, Artificial Sequence; identical to SEQ ID NO: 2103
  Probe

SEQ ID NO: 14814 - DNA, 34 bp, Artificial Sequence; identical to SEQ ID NO: 2104
  Probe

SEQ ID NO: 14815 - DNA, 35 bp, Artificial Sequence; identical to SEQ ID NO: 2105
  Probe

SEQ ID NO: 14816 - DNA, 36 bp, Artificial Sequence; identical to SEQ ID NO: 2106
  Probe

SEQ ID NO: 14817 - DNA, 38 bp, Artificial Sequence
  Probe
aaccggagatgaaaacctttttccaaggacaaatcaga

SEQ ID NO: 14818 - DNA, 17 bp, Artificial Sequence
  Probe
aaccgggcggaaacaca

SEQ ID NO: 14819 - DNA, 18 bp, Artificial Sequence
  Probe
aaccgggcggaaacacac

SEQ ID NO: 14820 - DNA, 18 bp, Artificial Sequence
  Probe
aaccgggcggaaacacct

SEQ ID NO: 14821 - DNA, 19 bp, Artificial Sequence
  Probe
aaccgggcggaaacacctc

SEQ ID NO: 14822 - DNA, 20 bp, Artificial Sequence
  Probe
aaccgggcggaaacacctcc

SEQ ID NO: 14823 - DNA, 18 bp, Artificial Sequence
  Probe
aaccgggcggaaacacgt

SEQ ID NO: 14824 - DNA, 19 bp, Artificial Sequence
  Probe
aaccgggcggaaacacgtt

SEQ ID NO: 14825 - DNA, 20 bp, Artificial Sequence
  Probe
aaccgggcggaaacacgttt

SEQ ID NO: 14826 - DNA, 21 bp, Artificial Sequence
  Probe
aaccgggcggaaacacgtttt

SEQ ID NO: 14827 - DNA, 22 bp, Artificial Sequence
  Probe
aaccgggcggaaacacgttttt

SEQ ID NO: 14828 - DNA, 16 bp, Artificial Sequence
  Probe
aacctagccccaaacc

SEQ ID NO: 14829 - DNA, 17 bp, Artificial Sequence
  Probe
aacctagccccaaaccc

SEQ ID NO: 14830 - DNA, 20 bp, Artificial Sequence
  Probe
aacctagccccaaacccact

SEQ ID NO: 14831 - DNA, 25 bp, Artificial Sequence
  Probe
aacctagccccaaacccactccacc

SEQ ID NO: 14832 - DNA, 26 bp, Artificial Sequence
  Probe
aacctagccccaaacccactccacct

SEQ ID NO: 14833 - DNA, 16 bp, Artificial Sequence
  Probe
aacctcctactcctca

SEQ ID NO: 14834 - DNA, 26 bp, Artificial Sequence
  Probe
aacctgccggggcttctcccgccttt

SEQ ID NO: 14835 - DNA, 27 bp, Artificial Sequence
  Probe
aacctgccggggcttctcccgcctttt

SEQ ID NO: 14836 - DNA, 23 bp, Artificial Sequence
  Probe
aaccttcagctatagggtggaga

SEQ ID NO: 14837 - DNA, 27 bp, Artificial Sequence
  Probe
aaccttttaagttaaagattaagagaa

SEQ ID NO: 14838 - DNA, 28 bp, Artificial Sequence
  Probe
aaccttttaagttaaagattaagagaac

SEQ ID NO: 14839 - DNA, 29 bp, Artificial Sequence
  Probe
aaccttttaagttaaagattaagagaacc

SEQ ID NO: 14840 - DNA, 30 bp, Artificial Sequence
  Probe
aaccttttaagttaaagattaagagaacca

SEQ ID NO: 14841 - DNA, 50 bp, Artificial Sequence; identical to SEQ ID NO: 2121
  Probe

SEQ ID NO: 14842 - DNA, 44 bp, Artificial Sequence
  Probe
aacgaatgatttcgactcattaaattatgataatcatatttacc

SEQ ID NO: 14843 - DNA, 49 bp, Artificial Sequence; identical to SEQ ID NO: 2124
  Probe

SEQ ID NO: 14844 - DNA, 50 bp, Artificial Sequence; identical to SEQ ID NO: 2125
  Probe

SEQ ID NO: 14845 - DNA, 40 bp, Artificial Sequence
  Probe
aacgccaaggtcgcgggttcgatccccgtacgggccacga

SEQ ID NO: 14846 - DNA, 40 bp, Artificial Sequence
  Probe
aacgccaaggtcgcgggttcgatccccgtacgggccactg

SEQ ID NO: 14847 - DNA, 36 bp, Artificial Sequence
  Probe
aacgcccgtctctgtggcgcaatcggttagcgcgtt

SEQ ID NO: 14848 - DNA, 21 bp, Artificial Sequence
  Probe
aactaaatactaccgtatggc

SEQ ID NO: 14849 - DNA, 20 bp, Artificial Sequence
  Probe
aactaagtgtttgtgggttt

SEQ ID NO: 14850 - DNA, 34 bp, Artificial Sequence; identical to SEQ ID NO: 2129
  Probe

SEQ ID NO: 14851 - DNA, 35 bp, Artificial Sequence; identical to SEQ ID NO: 55
  Probe

SEQ ID NO: 14852 - DNA, 38 bp, Artificial Sequence
  Probe
aactaagtgtttgtgggtttaagtcccattggtctagt

SEQ ID NO: 14853 - DNA, 39 bp, Artificial Sequence; identical to SEQ ID NO: 2130
  Probe

SEQ ID NO: 14854 - DNA, 40 bp, Artificial Sequence; identical to SEQ ID NO: 2131
  Probe

SEQ ID NO: 14855 - DNA, 24 bp, Artificial Sequence
  Probe
aactactttcttgattcaggtgtt

SEQ ID NO: 14856 - DNA, 25 bp, Artificial Sequence
  Probe
aactactttcttgattcaggtgttt

SEQ ID NO: 14857 - DNA, 28 bp, Artificial Sequence
  Probe
aactagttttgacaacattcaaaaaaga

SEQ ID NO: 14858 - DNA, 31 bp, Artificial Sequence
  Probe
aactagttttgacaacattcaaaaaagagta

SEQ ID NO: 14859 - DNA, 32 bp, Artificial Sequence; identical to SEQ ID NO: 2132
  Probe

SEQ ID NO: 14860 - DNA, 17 bp, Artificial Sequence
  Probe
aactcatgcccccatgt

SEQ ID NO: 14861 - DNA, 18 bp, Artificial Sequence
  Probe
aactcatgcccccatgtc

SEQ ID NO: 14862 - DNA, 19 bp, Artificial Sequence
  Probe
aactcatgcccccatgtct

SEQ ID NO: 14863 - DNA, 20 bp, Artificial Sequence
  Probe
aactcatgcccccatgtcta

SEQ ID NO: 14864 - DNA, 23 bp, Artificial Sequence
  Probe
aactcatgcccccatgtctaaca

SEQ ID NO: 14865 - DNA, 26 bp, Artificial Sequence
  Probe
aactcatgcccccatgtctaacaaca

SEQ ID NO: 14866 - DNA, 31 bp, Artificial Sequence; identical to SEQ ID NO: 2140
  Probe

SEQ ID NO: 14867 - DNA, 32 bp, Artificial Sequence; identical to SEQ ID NO: 2141
  Probe

SEQ ID NO: 14868 - DNA, 33 bp, Artificial Sequence; identical to SEQ ID NO: 2142
  Probe

SEQ ID NO: 14869 - DNA, 34 bp, Artificial Sequence; identical to SEQ ID NO: 2143
  Probe

SEQ ID NO: 14870 - DNA, 35 bp, Artificial Sequence; identical to SEQ ID NO: 2144
  Probe

SEQ ID NO: 14871 - DNA, 36 bp, Artificial Sequence; identical to SEQ ID NO: 2145
  Probe

SEQ ID NO: 14872 - DNA, 37 bp, Artificial Sequence; identical to SEQ ID NO: 2146
  Probe

SEQ ID NO: 14873 - DNA, 38 bp, Artificial Sequence; identical to SEQ ID NO: 2147
  Probe

SEQ ID NO: 14874 - DNA, 39 bp, Artificial Sequence; identical to SEQ ID NO: 2148
  Probe

SEQ ID NO: 14875 - DNA, 40 bp, Artificial Sequence; identical to SEQ ID NO: 2149
  Probe

SEQ ID NO: 14876 - DNA, 41 bp, Artificial Sequence
  Probe
aactcatgcccccatgtctaacaacatggctttctcaactt

SEQ ID NO: 14877 - DNA, 43 bp, Artificial Sequence
  Probe
aactcatgcccccatgtctaacaacatggctttctcaactttt

SEQ ID NO: 14878 - DNA, 30 bp, Artificial Sequence
  Probe
aactgcccggctagctcagtcggtagagca

SEQ ID NO: 14879 - DNA, 36 bp, Artificial Sequence
  Probe
aactgcccggctagctcagtcggtagagcatgggac

SEQ ID NO: 14880 - DNA, 37 bp, Artificial Sequence; identical to SEQ ID NO: 2152
  Probe

SEQ ID NO: 14881 - DNA, 15 bp, Artificial Sequence
  Probe
aactgctaactcatg

SEQ ID NO: 14882 - DNA, 21 bp, Artificial Sequence
  Probe
aactgctaactcatgccccca

SEQ ID NO: 14883 - DNA, 23 bp, Artificial Sequence
  Probe
aactgctaactcatgcccccatg

SEQ ID NO: 14884 - DNA, 26 bp, Artificial Sequence
  Probe
aactgctaactcatgcccccatgtct

SEQ ID NO: 14885 - DNA, 30 bp, Artificial Sequence
  Probe
aactgctaactcatgcccccatgtctaaca

SEQ ID NO: 14886 - DNA, 31 bp, Artificial Sequence
  Probe
aactgctaactcatgcccccatgtctaacaa

SEQ ID NO: 14887 - DNA, 33 bp, Artificial Sequence
  Probe
aactgctaactcatgcccccatgtctaacaaca

SEQ ID NO: 14888 - DNA, 38 bp, Artificial Sequence; identical to SEQ ID NO: 2157
  Probe

SEQ ID NO: 14889 - DNA, 40 bp, Artificial Sequence; identical to SEQ ID NO: 2159
  Probe

SEQ ID NO: 14890 - DNA, 41 bp, Artificial Sequence; identical to SEQ ID NO: 2160
  Probe

SEQ ID NO: 14891 - DNA, 42 bp, Artificial Sequence; identical to SEQ ID NO: 2161
  Probe

SEQ ID NO: 14892 - DNA, 44 bp, Artificial Sequence; identical to SEQ ID NO: 2163
  Probe

SEQ ID NO: 14893 - DNA, 46 bp, Artificial Sequence; identical to SEQ ID NO: 2165
  Probe

SEQ ID NO: 14894 - DNA, 30 bp, Artificial Sequence
  Probe
aactgggtctctgtggcgcaatcggttagc

SEQ ID NO: 14895 - DNA, 31 bp, Artificial Sequence
  Probe
aactgggtctctgtggcgcaatcggttagcg

SEQ ID NO: 14896 - DNA, 34 bp, Artificial Sequence
  Probe
aactgggtctctgtggcgcaatcggttagcgcgt

SEQ ID NO: 14897 - DNA, 35 bp, Artificial Sequence
  Probe
aactgggtctctgtggcgcaatcggttagcgcgtt

SEQ ID NO: 14898 - DNA, 30 bp, Artificial Sequence
  Probe
aacttaaaactttacaatcagaggttcaac

SEQ ID NO: 14899 - DNA, 20 bp, Artificial Sequence
  Probe
aacttaaaactttacagtca

SEQ ID NO: 14900 - DNA, 26 bp, Artificial Sequence
  Probe
aacttaaaactttacagtcagaggtt

SEQ ID NO: 14901 - DNA, 27 bp, Artificial Sequence
  Probe
aacttaaaactttacagtcagaggttc

SEQ ID NO: 14902 - DNA, 28 bp, Artificial Sequence
  Probe
aacttaaaactttacagtcagaggttca

SEQ ID NO: 14903 - DNA, 29 bp, Artificial Sequence
  Probe
aacttaaaactttacagtcagaggttcaa

SEQ ID NO: 14904 - DNA, 30 bp, Artificial Sequence; identical to SEQ ID NO: 2170
  Probe

SEQ ID NO: 14905 - DNA, 31 bp, Artificial Sequence
  Probe
aacttaaaactttacagtcagaggttcaatt

SEQ ID NO: 14906 - DNA, 37 bp, Artificial Sequence; identical to SEQ ID NO: 60
  Probe

SEQ ID NO: 14907 - DNA, 38 bp, Artificial Sequence; identical to SEQ ID NO: 61
  Probe

SEQ ID NO: 14908 - DNA, 39 bp, Artificial Sequence; identical to SEQ ID NO: 62
  Probe

SEQ ID NO: 14909 - DNA, 40 bp, Artificial Sequence; identical to SEQ ID NO: 2173
  Probe

SEQ ID NO: 14910 - DNA, 41 bp, Artificial Sequence; identical to SEQ ID NO: 2174
  Probe

SEQ ID NO: 14911 - DNA, 42 bp, Artificial Sequence; identical to SEQ ID NO: 2175
  Probe

SEQ ID NO: 14912 - DNA, 43 bp, Artificial Sequence; identical to SEQ ID NO: 2176
  Probe

SEQ ID NO: 14913 - DNA, 46 bp, Artificial Sequence; identical to SEQ ID NO: 2179
  Probe

SEQ ID NO: 14914 - DNA, 16 bp, Artificial Sequence
  Probe
aacttaacttgaccgc

SEQ ID NO: 14915 - DNA, 17 bp, Artificial Sequence
  Probe
aacttaacttgaccgct

SEQ ID NO: 14916 - DNA, 18 bp, Artificial Sequence
  Probe
aacttaacttgaccgctc

SEQ ID NO: 14917 - DNA, 19 bp, Artificial Sequence
  Probe
aacttaacttgaccgctct

SEQ ID NO: 14918 - DNA, 21 bp, Artificial Sequence
  Probe
aacttaacttgaccgctctga

SEQ ID NO: 14919 - DNA, 22 bp, Artificial Sequence
  Probe
aacttaacttgaccgctctgag

SEQ ID NO: 14920 - DNA, 23 bp, Artificial Sequence
  Probe
aacttaacttgaccgctctgagc

SEQ ID NO: 14921 - DNA, 24 bp, Artificial Sequence
  Probe
aacttaacttgaccgctctgagct

SEQ ID NO: 14922 - DNA, 16 bp, Artificial Sequence
  Probe
aacttacacttaggag

SEQ ID NO: 14923 - DNA, 17 bp, Artificial Sequence
  Probe
aacttacacttaggaga

SEQ ID NO: 14924 - DNA, 19 bp, Artificial Sequence
  Probe
aacttacacttaggagatt

SEQ ID NO: 14925 - DNA, 20 bp, Artificial Sequence
  Probe
aacttacacttaggagattt

SEQ ID NO: 14926 - DNA, 21 bp, Artificial Sequence
  Probe
aacttacacttaggagatttc

SEQ ID NO: 14927 - DNA, 22 bp, Artificial Sequence
  Probe
aacttacacttaggagatttca

SEQ ID NO: 14928 - DNA, 24 bp, Artificial Sequence
  Probe
aacttacacttaggagatttcaac

SEQ ID NO: 14929 - DNA, 27 bp, Artificial Sequence
  Probe
aacttacacttaggagatttcaactta

SEQ ID NO: 14930 - DNA, 28 bp, Artificial Sequence
  Probe
aacttacacttaggagatttcaacttaa

SEQ ID NO: 14931 - DNA, 30 bp, Artificial Sequence
  Probe
aacttacacttaggagatttcaacttaact

SEQ ID NO: 14932 - DNA, 31 bp, Artificial Sequence
  Probe
aacttacacttaggagatttcaacttaactt

SEQ ID NO: 14933 - DNA, 34 bp, Artificial Sequence
  Probe
aacttacacttaggagatttcaacttaacttgac

SEQ ID NO: 14934 - DNA, 35 bp, Artificial Sequence
  Probe
aacttacacttaggagatttcaacttaacttgacc

SEQ ID NO: 14935 - DNA, 36 bp, Artificial Sequence; identical to SEQ ID NO: 2188
  Probe

SEQ ID NO: 14936 - DNA, 37 bp, Artificial Sequence; identical to SEQ ID NO: 2189
  Probe

SEQ ID NO: 14937 - DNA, 38 bp, Artificial Sequence; identical to SEQ ID NO: 2190
  Probe

SEQ ID NO: 14938 - DNA, 39 bp, Artificial Sequence; identical to SEQ ID NO: 2191
  Probe

SEQ ID NO: 14939 - DNA, 40 bp, Artificial Sequence
  Probe
aacttacacttaggagatttcaacttaacttgaccgctct

SEQ ID NO: 14940 - DNA, 42 bp, Artificial Sequence; identical to SEQ ID NO: 2192
  Probe

SEQ ID NO: 14941 - DNA, 43 bp, Artificial Sequence; identical to SEQ ID NO: 2193
  Probe

SEQ ID NO: 14942 - DNA, 44 bp, Artificial Sequence; identical to SEQ ID NO: 2194
  Probe

SEQ ID NO: 14943 - DNA, 45 bp, Artificial Sequence; identical to SEQ ID NO: 2195
  Probe

SEQ ID NO: 14944 - DNA, 50 bp, Artificial Sequence; identical to SEQ ID NO: 2197
  Probe

SEQ ID NO: 14945 - DNA, 18 bp, Artificial Sequence
  Probe
aacttagcattaaccttt

SEQ ID NO: 14946 - DNA, 29 bp, Artificial Sequence
  Probe
aacttagcattaaccttttaagttaaaga

SEQ ID NO: 14947 - DNA, 37 bp, Artificial Sequence
  Probe
aacttagcattaaccttttaagttaaagattaagaga

SEQ ID NO: 14948 - DNA, 38 bp, Artificial Sequence
  Probe
aacttagcattaaccttttaagttaaagattaagagaa

SEQ ID NO: 14949 - DNA, 50 bp, Artificial Sequence; identical to SEQ ID NO: 2201
  Probe

SEQ ID NO: 14950 - DNA, 44 bp, Artificial Sequence; identical to SEQ ID NO: 2202
  Probe

SEQ ID NO: 14951 - DNA, 45 bp, Artificial Sequence; identical to SEQ ID NO: 2203
  Probe

SEQ ID NO: 14952 - DNA, 16 bp, Artificial Sequence
  Probe
aacttgaccgctctga

SEQ ID NO: 14953 - DNA, 17 bp, Artificial Sequence
  Probe
aacttgaccgctctgag

SEQ ID NO: 14954 - DNA, 18 bp, Artificial Sequence
  Probe
aacttgaccgctctgagc

SEQ ID NO: 14955 - DNA, 20 bp, Artificial Sequence
  Probe
aactttacagtcagaggttc

SEQ ID NO: 14956 - DNA, 21 bp, Artificial Sequence
  Probe
aactttacagtcagaggttca

SEQ ID NO: 14957 - DNA, 22 bp, Artificial Sequence
  Probe
aactttacagtcagaggttcaa

SEQ ID NO: 14958 - DNA, 23 bp, Artificial Sequence
  Probe
aactttacagtcagaggttcaat

SEQ ID NO: 14959 - DNA, 24 bp, Artificial Sequence
  Probe
aactttacagtcagaggttcaatt

SEQ ID NO: 14960 - DNA, 32 bp, Artificial Sequence; identical to SEQ ID NO: 2206
  Probe

SEQ ID NO: 14961 - DNA, 33 bp, Artificial Sequence; identical to SEQ ID NO: 2207
  Probe

SEQ ID NO: 14962 - DNA, 34 bp, Artificial Sequence; identical to SEQ ID NO: 2208
  Probe

SEQ ID NO: 14963 - DNA, 35 bp, Artificial Sequence; identical to SEQ ID NO: 2209
  Probe

SEQ ID NO: 14964 - DNA, 36 bp, Artificial Sequence; identical to SEQ ID NO: 2210
  Probe

SEQ ID NO: 14965 - DNA, 37 bp, Artificial Sequence; identical to SEQ ID NO: 2211
  Probe

SEQ ID NO: 14966 - DNA, 38 bp, Artificial Sequence; identical to SEQ ID NO: 2212
  Probe

SEQ ID NO: 14967 - DNA, 39 bp, Artificial Sequence; identical to SEQ ID NO: 2213
  Probe

SEQ ID NO: 14968 - DNA, 40 bp, Artificial Sequence; identical to SEQ ID NO: 2214
  Probe

SEQ ID NO: 14969 - DNA, 38 bp, Artificial Sequence; identical to SEQ ID NO: 2217
  Probe

SEQ ID NO: 14970 - DNA, 18 bp, Artificial Sequence
  Probe
aagaactgctaactcatg

SEQ ID NO: 14971 - DNA, 24 bp, Artificial Sequence
  Probe
aagaactgctaactcatgccccca

SEQ ID NO: 14972 - DNA, 29 bp, Artificial Sequence
  Probe
aagaactgctaactcatgcccccatgtct

SEQ ID NO: 14973 - DNA, 41 bp, Artificial Sequence; identical to SEQ ID NO: 66
  Probe

SEQ ID NO: 14974 - DNA, 42 bp, Artificial Sequence; identical to SEQ ID NO: 2227
  Probe

SEQ ID NO: 14975 - DNA, 43 bp, Artificial Sequence; identical to SEQ ID NO: 67
  Probe

SEQ ID NO: 14976 - DNA, 44 bp, Artificial Sequence; identical to SEQ ID NO: 68
  Probe

SEQ ID NO: 14977 - DNA, 45 bp, Artificial Sequence; identical to SEQ ID NO: 69
  Probe

SEQ ID NO: 14978 - DNA, 49 bp, Artificial Sequence; identical to SEQ ID NO: 2229
  Probe

SEQ ID NO: 14979 - DNA, 50 bp, Artificial Sequence; identical to SEQ ID NO: 2230
  Probe

SEQ ID NO: 14980 - DNA, 28 bp, Artificial Sequence
  Probe
aagaagcagcttcaaacctgccggggct

SEQ ID NO: 14981 - DNA, 30 bp, Artificial Sequence
  Probe
aagaagcagcttcaaacctgccggggcttc

SEQ ID NO: 14982 - DNA, 31 bp, Artificial Sequence; identical to SEQ ID NO: 2232
  Probe

SEQ ID NO: 14983 - DNA, 32 bp, Artificial Sequence; identical to SEQ ID NO: 2233
  Probe

SEQ ID NO: 14984 - DNA, 23 bp, Artificial Sequence
  Probe
aagacaccccccacagtttatgt

SEQ ID NO: 14985 - DNA, 26 bp, Artificial Sequence
  Probe
aagacaccccccacagtttatgtagc

SEQ ID NO: 14986 - DNA, 27 bp, Artificial Sequence
  Probe
aagacaccccccacagtttatgtagct

SEQ ID NO: 14987 - DNA, 28 bp, Artificial Sequence
  Probe
aagacaccccccacagtttatgtagctt

SEQ ID NO: 14988 - DNA, 29 bp, Artificial Sequence
  Probe
aagacaccccccacagtttatgtagctta

SEQ ID NO: 14989 - DNA, 30 bp, Artificial Sequence
  Probe
aagacaccccccacagtttatgtagcttac

SEQ ID NO: 14990 - DNA, 31 bp, Artificial Sequence; identical to SEQ ID NO: 2236
  Probe

SEQ ID NO: 14991 - DNA, 32 bp, Artificial Sequence; identical to SEQ ID NO: 2237
  Probe

SEQ ID NO: 14992 - DNA, 33 bp, Artificial Sequence; identical to SEQ ID NO: 2238
  Probe

SEQ ID NO: 14993 - DNA, 34 bp, Artificial Sequence; identical to SEQ ID NO: 2239
  Probe

SEQ ID NO: 14994 - DNA, 35 bp, Artificial Sequence
  Probe
aagacaccccccacagtttatgtagcttacctcct

SEQ ID NO: 14995 - DNA, 36 bp, Artificial Sequence
  Probe
aagacaccccccacagtttatgtagcttacctcctc

SEQ ID NO: 14996 - DNA, 37 bp, Artificial Sequence; identical to SEQ ID NO: 2240
  Probe

SEQ ID NO: 14997 - DNA, 38 bp, Artificial Sequence
  Probe
aagacaccccccacagtttatgtagcttacctcctcaa

SEQ ID NO: 14998 - DNA, 22 bp, Artificial Sequence
  Probe
aagacaggggttaggcctcttt

SEQ ID NO: 14999 - DNA, 23 bp, Artificial Sequence
  Probe
aagacaggggttaggcctctttt

SEQ ID NO: 15000 - DNA, 24 bp, Artificial Sequence
  Probe
aagacaggggttaggcctcttttt

SEQ ID NO: 15001 - DNA, 27 bp, Artificial Sequence
  Probe
aagacaggggttaggcctctttttacc

SEQ ID NO: 15002 - DNA, 30 bp, Artificial Sequence; identical to SEQ ID NO: 2246
  Probe

SEQ ID NO: 15003 - DNA, 31 bp, Artificial Sequence; identical to SEQ ID NO: 2247
  Probe

SEQ ID NO: 15004 - DNA, 16 bp, Artificial Sequence
  Probe
aagactttttctctga

SEQ ID NO: 15005 - DNA, 26 bp, Artificial Sequence
  Probe
aagagaaccaacacctctttacagtg

SEQ ID NO: 15006 - DNA, 27 bp, Artificial Sequence
  Probe
aagagaaccaacacctctttacagtga

SEQ ID NO: 15007 - DNA, 28 bp, Artificial Sequence
  Probe
aagagaaccaacacctctttacagtgaa

SEQ ID NO: 15008 - DNA, 29 bp, Artificial Sequence
  Probe
aagagaaccaacacctctttacagtgaaa

SEQ ID NO: 15009 - DNA, 30 bp, Artificial Sequence; identical to SEQ ID NO: 2251
  Probe

SEQ ID NO: 15010 - DNA, 35 bp, Artificial Sequence
  Probe
aagagcccggatagctcagtcggtagagcatcaga

SEQ ID NO: 15011 - DNA, 36 bp, Artificial Sequence
  Probe
aagagcccggatagctcagtcggtagagcatcagac

SEQ ID NO: 15012 - DNA, 37 bp, Artificial Sequence
  Probe
aagagcccggatagctcagtcggtagagcatcagact

SEQ ID NO: 15013 - DNA, 38 bp, Artificial Sequence
  Probe
aagagcccggatagctcagtcggtagagcatcagactt

SEQ ID NO: 15014 - DNA, 39 bp, Artificial Sequence
  Probe
aagagcccggatagctcagtcggtagagcatcagacttt

SEQ ID NO: 15015 - DNA, 40 bp, Artificial Sequence
  Probe
aagagcccggatagctcagtcggtagagcatcagactttt

SEQ ID NO: 15016 - DNA, 30 bp, Artificial Sequence
  Probe
aagagccttcaaagccctcagtaagttgca

SEQ ID NO: 15017 - DNA, 16 bp, Artificial Sequence
  Probe
aagaggtccccggttc

SEQ ID NO: 15018 - DNA, 17 bp, Artificial Sequence
  Probe
aagaggtccccggttca

SEQ ID NO: 15019 - DNA, 22 bp, Artificial Sequence
  Probe
aagattaagagaaccaacacct

SEQ ID NO: 15020 - DNA, 29 bp, Artificial Sequence
  Probe
aagattaagagaaccaacacctctttaca

SEQ ID NO: 15021 - DNA, 31 bp, Artificial Sequence
  Probe
aagattaagagaaccaacacctctttacagt

SEQ ID NO: 15022 - DNA, 32 bp, Artificial Sequence; identical to SEQ ID NO: 2257
  Probe

SEQ ID NO: 15023 - DNA, 33 bp, Artificial Sequence; identical to SEQ ID NO: 2258
  Probe

SEQ ID NO: 15024 - DNA, 34 bp, Artificial Sequence; identical to SEQ ID NO: 2259
  Probe

SEQ ID NO: 15025 - DNA, 35 bp, Artificial Sequence
  Probe
aagattaagagaaccaacacctctttacagtgaaa

SEQ ID NO: 15026 - DNA, 36 bp, Artificial Sequence; identical to SEQ ID NO: 2260
  Probe

SEQ ID NO: 15027 - DNA, 38 bp, Artificial Sequence
  Probe
aagattaagagaaccaacacctctttacagtgaaatgc

SEQ ID NO: 15028 - DNA, 29 bp, Artificial Sequence
  Probe
aagattctaggttcgactcctggctggct

SEQ ID NO: 15029 - DNA, 27 bp, Artificial Sequence
  Probe
aagattgagggttcgagtcccttcgtg

SEQ ID NO: 15030 - DNA, 28 bp, Artificial Sequence
  Probe
aagattgagggttcgagtcccttcgtgg

SEQ ID NO: 15031 - DNA, 29 bp, Artificial Sequence
  Probe
aagattgagggttcgagtcccttcgtggt

SEQ ID NO: 15032 - DNA, 25 bp, Artificial Sequence
  Probe
aagcaatacactgaaaatgtttaga

SEQ ID NO: 15033 - DNA, 28 bp, Artificial Sequence
  Probe
aagcaatacactgaaaatgtttagacgg

SEQ ID NO: 15034 - DNA, 32 bp, Artificial Sequence
  Probe
aagcaatacactgaaaatgtttagacgggctc

SEQ ID NO: 15035 - DNA, 38 bp, Artificial Sequence
  Probe
aagcaatacactgaaaatgtttagacgggctcacatca

SEQ ID NO: 15036 - DNA, 43 bp, Artificial Sequence; identical to SEQ ID NO: 78
  Probe

SEQ ID NO: 15037 - DNA, 50 bp, Artificial Sequence; identical to SEQ ID NO: 2271
  Probe

SEQ ID NO: 15038 - DNA, 16 bp, Artificial Sequence
  Probe
aagcacccaacttaca

SEQ ID NO: 15039 - DNA, 17 bp, Artificial Sequence
  Probe
aagcacccaacttacac

SEQ ID NO: 15040 - DNA, 18 bp, Artificial Sequence
  Probe
aagcacccaacttacact

SEQ ID NO: 15041 - DNA, 19 bp, Artificial Sequence
  Probe
aagcacccaacttacactt

SEQ ID NO: 15042 - DNA, 20 bp, Artificial Sequence
  Probe
aagcacccaacttacactta

SEQ ID NO: 15043 - DNA, 23 bp, Artificial Sequence
  Probe
aagcacccaacttacacttagga

SEQ ID NO: 15044 - DNA, 24 bp, Artificial Sequence
  Probe
aagcacccaacttacacttaggag

SEQ ID NO: 15045 - DNA, 25 bp, Artificial Sequence
  Probe
aagcacccaacttacacttaggaga

SEQ ID NO: 15046 - DNA, 26 bp, Artificial Sequence
  Probe
aagcacccaacttacacttaggagat

SEQ ID NO: 15047 - DNA, 27 bp, Artificial Sequence
  Probe
aagcacccaacttacacttaggagatt

SEQ ID NO: 15048 - DNA, 28 bp, Artificial Sequence
  Probe
aagcacccaacttacacttaggagattt

SEQ ID NO: 15049 - DNA, 29 bp, Artificial Sequence
  Probe
aagcacccaacttacacttaggagatttc

SEQ ID NO: 15050 - DNA, 30 bp, Artificial Sequence; identical to SEQ ID NO: 2277
  Probe

SEQ ID NO: 15051 - DNA, 31 bp, Artificial Sequence
  Probe
aagcacccaacttacacttaggagatttcaa

SEQ ID NO: 15052 - DNA, 32 bp, Artificial Sequence; identical to SEQ ID NO: 2278
  Probe

SEQ ID NO: 15053 - DNA, 33 bp, Artificial Sequence; identical to SEQ ID NO: 2279
  Probe

SEQ ID NO: 15054 - DNA, 35 bp, Artificial Sequence
  Probe
aagcacccaacttacacttaggagatttcaactta

SEQ ID NO: 15055 - DNA, 36 bp, Artificial Sequence
  Probe
aagcacccaacttacacttaggagatttcaacttaa

SEQ ID NO: 15056 - DNA, 38 bp, Artificial Sequence
  Probe
aagcacccaacttacacttaggagatttcaacttaact

SEQ ID NO: 15057 - DNA, 39 bp, Artificial Sequence
  Probe
aagcacccaacttacacttaggagatttcaacttaactt

SEQ ID NO: 15058 - DNA, 42 bp, Artificial Sequence
  Probe
aagcacccaacttacacttaggagatttcaacttaacttgac

SEQ ID NO: 15059 - DNA, 44 bp, Artificial Sequence; identical to SEQ ID NO: 2280
  Probe

SEQ ID NO: 15060 - DNA, 46 bp, Artificial Sequence
  Probe
aagcacccaacttacacttaggagatttcaacttaacttgaccgct

SEQ ID NO: 15061 - DNA, 49 bp, Artificial Sequence; identical to SEQ ID NO: 2282
  Probe

SEQ ID NO: 15062 - DNA, 50 bp, Artificial Sequence; identical to SEQ ID NO: 2283
  Probe

SEQ ID NO: 15063 - DNA, 29 bp, Artificial Sequence
  Probe
aagcagcttcaaacctgccggggcttctc

SEQ ID NO: 15064 - DNA, 16 bp, Artificial Sequence
  Probe
aagcaggcttataggt

SEQ ID NO: 15065 - DNA, 40 bp, Artificial Sequence
  Probe
aagcagtcaggatggccgagcggtctaaggcgctgcgttc

SEQ ID NO: 15066 - DNA, 17 bp, Artificial Sequence
  Probe
aagcagttgacccgggt

SEQ ID NO: 15067 - DNA, 36 bp, Artificial Sequence
  Probe
aagcagttgacccgggttcgattcccggccaacgca

SEQ ID NO: 15068 - DNA, 38 bp, Artificial Sequence
  Probe
aagcagttgacccgggttcgattcccggccaacgcaag

SEQ ID NO: 15069 - DNA, 39 bp, Artificial Sequence; identical to SEQ ID NO: 2288
  Probe

SEQ ID NO: 15070 - DNA, 38 bp, Artificial Sequence
  Probe
aagcagttgacccgggttcgattcccggccaacgcagc

SEQ ID NO: 15071 - DNA, 39 bp, Artificial Sequence
  Probe
aagcagttgacccgggttcgattcccggccaacgcagcg

SEQ ID NO: 15072 - DNA, 38 bp, Artificial Sequence
  Probe
aagcagttgacccgggttcgattcccggccaacgcagt

SEQ ID NO: 15073 - DNA, 39 bp, Artificial Sequence; identical to SEQ ID NO: 2289
  Probe

SEQ ID NO: 15074 - DNA, 38 bp, Artificial Sequence
  Probe
aagcagttgacccgggttcgattcccggccaacgcatg

SEQ ID NO: 15075 - DNA, 27 bp, Artificial Sequence
  Probe
aagcattggactgtaaatctaaagaca

SEQ ID NO: 15076 - DNA, 40 bp, Artificial Sequence; identical to SEQ ID NO: 2292
  Probe

SEQ ID NO: 15077 - DNA, 40 bp, Artificial Sequence; identical to SEQ ID NO: 2293
  Probe

SEQ ID NO: 15078 - DNA, 30 bp, Artificial Sequence
  Probe
aagccagggattgtgggttcgagtcccatc

SEQ ID NO: 15079 - DNA, 34 bp, Artificial Sequence
  Probe
aagccagggattgtgggttcgagtcccatctggg

SEQ ID NO: 15080 - DNA, 35 bp, Artificial Sequence
  Probe
aagccagggattgtgggttcgagtcccatctgggg

SEQ ID NO: 15081 - DNA, 37 bp, Artificial Sequence
  Probe
aagccagggattgtgggttcgagtcccatctggggtg

SEQ ID NO: 15082 - DNA, 38 bp, Artificial Sequence
  Probe
aagccagggattgtgggttcgagtcccatctggggtgg

SEQ ID NO: 15083 - DNA, 39 bp, Artificial Sequence; identical to SEQ ID NO: 2294
  Probe

SEQ ID NO: 15084 - DNA, 40 bp, Artificial Sequence; identical to SEQ ID NO: 2295
  Probe

SEQ ID NO: 15085 - DNA, 25 bp, Artificial Sequence
  Probe
aagcgcgtcaggatggccgagcggt

SEQ ID NO: 15086 - DNA, 26 bp, Artificial Sequence
  Probe
aagcgcgtcaggatggccgagcggtc

SEQ ID NO: 15087 - DNA, 33 bp, Artificial Sequence
  Probe
aagcgcgtcaggatggccgagcggtctaaggcg

SEQ ID NO: 15088 - DNA, 17 bp, Artificial Sequence
  Probe
aagcgggtgctcttatt

SEQ ID NO: 15089 - DNA, 18 bp, Artificial Sequence
  Probe
aagcgggtgctcttattt

SEQ ID NO: 15090 - DNA, 19 bp, Artificial Sequence
  Probe
aagcgggtgctcttatttt

SEQ ID NO: 15091 - DNA, 30 bp, Artificial Sequence
  Probe
aagcgtgctgggcccataacccagaggtcg

SEQ ID NO: 15092 - DNA, 31 bp, Artificial Sequence
  Probe
aagcgtgctgggcccataacccagaggtcga

SEQ ID NO: 15093 - DNA, 34 bp, Artificial Sequence
  Probe
aagcgtgctgggcccataacccagaggtcgatgg

SEQ ID NO: 15094 - DNA, 35 bp, Artificial Sequence
  Probe
aagcgtgctgggcccataacccagaggtcgatgga

SEQ ID NO: 15095 - DNA, 16 bp, Artificial Sequence
  Probe
aagctatcgggcccat

SEQ ID NO: 15096 - DNA, 17 bp, Artificial Sequence
  Probe
aagctatcgggcccata

SEQ ID NO: 15097 - DNA, 21 bp, Artificial Sequence
  Probe
aagctatcgggcccatacccc

SEQ ID NO: 15098 - DNA, 22 bp, Artificial Sequence
  Probe
aagctatcgggcccataccccg

SEQ ID NO: 15099 - DNA, 23 bp, Artificial Sequence
  Probe
aagctatcgggcccataccccga

SEQ ID NO: 15100 - DNA, 24 bp, Artificial Sequence
  Probe
aagctatcgggcccataccccgaa

SEQ ID NO: 15101 - DNA, 25 bp, Artificial Sequence
  Probe
aagctatcgggcccataccccgaaa

SEQ ID NO: 15102 - DNA, 26 bp, Artificial Sequence
  Probe
aagctatcgggcccataccccgaaaa

SEQ ID NO: 15103 - DNA, 27 bp, Artificial Sequence
  Probe
aagctatcgggcccataccccgaaaat

SEQ ID NO: 15104 - DNA, 28 bp, Artificial Sequence
  Probe
aagctatcgggcccataccccgaaaatg

SEQ ID NO: 15105 - DNA, 29 bp, Artificial Sequence
  Probe
aagctatcgggcccataccccgaaaatgt

SEQ ID NO: 15106 - DNA, 30 bp, Artificial Sequence; identical to SEQ ID NO: 2306
  Probe

SEQ ID NO: 15107 - DNA, 31 bp, Artificial Sequence; identical to SEQ ID NO: 2307
  Probe

SEQ ID NO: 15108 - DNA, 32 bp, Artificial Sequence; identical to SEQ ID NO: 2308
  Probe

SEQ ID NO: 15109 - DNA, 33 bp, Artificial Sequence; identical to SEQ ID NO: 2309
  Probe

SEQ ID NO: 15110 - DNA, 34 bp, Artificial Sequence; identical to SEQ ID NO: 2310
  Probe

SEQ ID NO: 15111 - DNA, 35 bp, Artificial Sequence; identical to SEQ ID NO: 2311
  Probe

SEQ ID NO: 15112 - DNA, 38 bp, Artificial Sequence
  Probe
aagctatcgggcccataccccgaaaatgttggttatac

SEQ ID NO: 15113 - DNA, 39 bp, Artificial Sequence; identical to SEQ ID NO: 2312
  Probe

SEQ ID NO: 15114 - DNA, 46 bp, Artificial Sequence
  Probe
aagctatcgggcccataccccgaaaatgttggttatacccttcccg

SEQ ID NO: 15115 - DNA, 50 bp, Artificial Sequence; identical to SEQ ID NO: 80
  Probe

SEQ ID NO: 15116 - DNA, 16 bp, Artificial Sequence
  Probe
aagctcacaagaactg

SEQ ID NO: 15117 - DNA, 22 bp, Artificial Sequence
  Probe
aagctcacaagaactgctaact

SEQ ID NO: 15118 - DNA, 23 bp, Artificial Sequence
  Probe
aagctcacaagaactgctaactc

SEQ ID NO: 15119 - DNA, 24 bp, Artificial Sequence
  Probe
aagctcacaagaactgctaactca

SEQ ID NO: 15120 - DNA, 26 bp, Artificial Sequence
  Probe
aagctcacaagaactgctaactcatg

SEQ ID NO: 15121 - DNA, 30 bp, Artificial Sequence
  Probe
aaggcgtctgacttcggatcagaagattgc

SEQ ID NO: 15122 - DNA, 26 bp, Artificial Sequence
  Probe
aagggcttagcttaattaaagtggct

SEQ ID NO: 15123 - DNA, 28 bp, Artificial Sequence
  Probe
aagggcttagcttaattaaagtggctga

SEQ ID NO: 15124 - DNA, 29 bp, Artificial Sequence
  Probe
aagggcttagcttaattaaagtggctgat

SEQ ID NO: 15125 - DNA, 36 bp, Artificial Sequence
  Probe
aagggcttagcttaattaaagtggctgatttgcgtt

SEQ ID NO: 15126 - DNA, 37 bp, Artificial Sequence
  Probe
aagggcttagcttaattaaagtggctgatttgcgttc

SEQ ID NO: 15127 - DNA, 38 bp, Artificial Sequence
  Probe
aagggcttagcttaattaaagtggctgatttgcgttca

SEQ ID NO: 15128 - DNA, 20 bp, Artificial Sequence
  Probe
aaggtattagaaaaaccatt

SEQ ID NO: 15129 - DNA, 28 bp, Artificial Sequence
  Probe
aaggtattagaaaaaccatttcataact

SEQ ID NO: 15130 - DNA, 34 bp, Artificial Sequence; identical to SEQ ID NO: 2332
  Probe

SEQ ID NO: 15131 - DNA, 25 bp, Artificial Sequence
  Probe
aaggtcagctaaataagctatcggg

SEQ ID NO: 15132 - DNA, 26 bp, Artificial Sequence
  Probe
aaggtcagctaaataagctatcgggc

SEQ ID NO: 15133 - DNA, 27 bp, Artificial Sequence
  Probe
aaggtcagctaaataagctatcgggcc

SEQ ID NO: 15134 - DNA, 28 bp, Artificial Sequence
  Probe
aaggtcagctaaataagctatcgggccc

SEQ ID NO: 15135 - DNA, 29 bp, Artificial Sequence
  Probe
aaggtcagctaaataagctatcgggccca

SEQ ID NO: 15136 - DNA, 30 bp, Artificial Sequence; identical to SEQ ID NO: 2342
  Probe

SEQ ID NO: 15137 - DNA, 31 bp, Artificial Sequence; identical to SEQ ID NO: 2343
  Probe

SEQ ID NO: 15138 - DNA, 32 bp, Artificial Sequence; identical to SEQ ID NO: 2344
  Probe

SEQ ID NO: 15139 - DNA, 33 bp, Artificial Sequence; identical to SEQ ID NO: 2345
  Probe

SEQ ID NO: 15140 - DNA, 35 bp, Artificial Sequence
  Probe
aaggtcagctaaataagctatcgggcccatacccc

SEQ ID NO: 15141 - DNA, 38 bp, Artificial Sequence
  Probe
aaggtcagctaaataagctatcgggcccataccccgaa

SEQ ID NO: 15142 - DNA, 41 bp, Artificial Sequence; identical to SEQ ID NO: 2350
  Probe

SEQ ID NO: 15143 - DNA, 42 bp, Artificial Sequence; identical to SEQ ID NO: 2351
  Probe

SEQ ID NO: 15144 - DNA, 43 bp, Artificial Sequence; identical to SEQ ID NO: 2352
  Probe

SEQ ID NO: 15145 - DNA, 44 bp, Artificial Sequence; identical to SEQ ID NO: 2353
  Probe

SEQ ID NO: 15146 - DNA, 50 bp, Artificial Sequence; identical to SEQ ID NO: 2358
  Probe

SEQ ID NO: 15147 - DNA, 41 bp, Artificial Sequence
  Probe
aaggtcctgagttcgaacctcagagggggcagctgccattt

SEQ ID NO: 15148 - DNA, 29 bp, Artificial Sequence
  Probe
aaggtcctgggttcgagccccagtggaac

SEQ ID NO: 15149 - DNA, 31 bp, Artificial Sequence
  Probe
aaggtcctgggttcgagccccagtggaacca

SEQ ID NO: 15150 - DNA, 33 bp, Artificial Sequence
  Probe
aaggtcctgggttcgagccccagtggaaccacg

SEQ ID NO: 15151 - DNA, 34 bp, Artificial Sequence; identical to SEQ ID NO: 2360
  Probe

SEQ ID NO: 15152 - DNA, 34 bp, Artificial Sequence
  Probe
aaggtcctgggttcgagccccagtggaaccatag

SEQ ID NO: 15153 - DNA, 34 bp, Artificial Sequence; identical to SEQ ID NO: 2361
  Probe

SEQ ID NO: 15154 - DNA, 34 bp, Artificial Sequence; identical to SEQ ID NO: 2362
  Probe

SEQ ID NO: 15155 - DNA, 34 bp, Artificial Sequence
  Probe
aaggtcgcgggttcgatccccgtactggccacgt

SEQ ID NO: 15156 - DNA, 34 bp, Artificial Sequence
  Probe
aaggtcgtgagttcgatcctcacacggggcacaa

SEQ ID NO: 15157 - DNA, 29 bp, Artificial Sequence
  Probe
aaggttccgggttcgagtcccggcggagt

SEQ ID NO: 15158 - DNA, 34 bp, Artificial Sequence
  Probe
aaggttgcgtgttcaaatcacgtcggggtcaaca

SEQ ID NO: 15159 - DNA, 35 bp, Artificial Sequence; identical to SEQ ID NO: 2365
  Probe

SEQ ID NO: 15160 - DNA, 36 bp, Artificial Sequence; identical to SEQ ID NO: 2366
  Probe

SEQ ID NO: 15161 - DNA, 26 bp, Artificial Sequence
  Probe
aagtcggggccagtggcgcaatggat

SEQ ID NO: 15162 - DNA, 16 bp, Artificial Sequence
  Probe
aagtggttcccgtttt

SEQ ID NO: 15163 - DNA, 15 bp, Artificial Sequence
  Probe
aagtgtactggaaag

SEQ ID NO: 15164 - DNA, 24 bp, Artificial Sequence
  Probe
aagtgtactggaaagtgcacttgg

SEQ ID NO: 15165 - DNA, 25 bp, Artificial Sequence
  Probe
aagtgtactggaaagtgcacttgga

SEQ ID NO: 15166 - DNA, 26 bp, Artificial Sequence
  Probe
aagtgtactggaaagtgcacttggac

SEQ ID NO: 15167 - DNA, 27 bp, Artificial Sequence
  Probe
aagtgtactggaaagtgcacttggacg

SEQ ID NO: 15168 - DNA, 28 bp, Artificial Sequence
  Probe
aagtgtactggaaagtgcacttggacga

SEQ ID NO: 15169 - DNA, 29 bp, Artificial Sequence
  Probe
aagtgtactggaaagtgcacttggacgaa

SEQ ID NO: 15170 - DNA, 30 bp, Artificial Sequence; identical to SEQ ID NO: 2379
  Probe

SEQ ID NO: 15171 - DNA, 31 bp, Artificial Sequence; identical to SEQ ID NO: 2380
  Probe

SEQ ID NO: 15172 - DNA, 32 bp, Artificial Sequence; identical to SEQ ID NO: 2381
  Probe

SEQ ID NO: 15173 - DNA, 33 bp, Artificial Sequence; identical to SEQ ID NO: 2382
  Probe

SEQ ID NO: 15174 - DNA, 34 bp, Artificial Sequence; identical to SEQ ID NO: 2383
  Probe

SEQ ID NO: 15175 - DNA, 35 bp, Artificial Sequence; identical to SEQ ID NO: 2384
  Probe

SEQ ID NO: 15176 - DNA, 36 bp, Artificial Sequence; identical to SEQ ID NO: 2385
  Probe

SEQ ID NO: 15177 - DNA, 39 bp, Artificial Sequence; identical to SEQ ID NO: 2387
  Probe

SEQ ID NO: 15178 - DNA, 26 bp, Artificial Sequence
  Probe
aagtgtttgtgggtttaagtcccatt

SEQ ID NO: 15179 - DNA, 27 bp, Artificial Sequence
  Probe
aagtgtttgtgggtttaagtcccattg

SEQ ID NO: 15180 - DNA, 28 bp, Artificial Sequence
  Probe
aagtgtttgtgggtttaagtcccattgg

SEQ ID NO: 15181 - DNA, 29 bp, Artificial Sequence
  Probe
aagtgtttgtgggtttaagtcccattggt

SEQ ID NO: 15182 - DNA, 34 bp, Artificial Sequence; identical to SEQ ID NO: 2393
  Probe

SEQ ID NO: 15183 - DNA, 35 bp, Artificial Sequence; identical to SEQ ID NO: 2394
  Probe

SEQ ID NO: 15184 - DNA, 36 bp, Artificial Sequence
  Probe
aagtgtttgtgggtttaagtcccattggtctagtaa

SEQ ID NO: 15185 - DNA, 38 bp, Artificial Sequence; identical to SEQ ID NO: 2395
  Probe

SEQ ID NO: 15186 - DNA, 39 bp, Artificial Sequence; identical to SEQ ID NO: 2396
  Probe

SEQ ID NO: 15187 - DNA, 40 bp, Artificial Sequence; identical to SEQ ID NO: 2397
  Probe

SEQ ID NO: 15188 - DNA, 41 bp, Artificial Sequence; identical to SEQ ID NO: 2398
  Probe

SEQ ID NO: 15189 - DNA, 42 bp, Artificial Sequence; identical to SEQ ID NO: 2399
  Probe

SEQ ID NO: 15190 - DNA, 43 bp, Artificial Sequence
  Probe
aagttaaagattaagagaaccaacacctctttacagtgaaatg

SEQ ID NO: 15191 - DNA, 44 bp, Artificial Sequence; identical to SEQ ID NO: 2400
  Probe

SEQ ID NO: 15192 - DNA, 49 bp, Artificial Sequence; identical to SEQ ID NO: 2401
  Probe

SEQ ID NO: 15193 - DNA, 50 bp, Artificial Sequence; identical to SEQ ID NO: 2402
  Probe

SEQ ID NO: 15194 - DNA, 33 bp, Artificial Sequence
  Probe
aagttccctggtggtctagtggttaggattcgg

SEQ ID NO: 15195 - DNA, 36 bp, Artificial Sequence
  Probe
aagttccctggtggtctagtggttaggattcggcgc

SEQ ID NO: 15196 - DNA, 37 bp, Artificial Sequence
  Probe
aagttccctggtggtctagtggttaggattcggcgct

SEQ ID NO: 15197 - DNA, 38 bp, Artificial Sequence
  Probe
aagttccctggtggtctagtggttaggattcggcgctc

SEQ ID NO: 15198 - DNA, 40 bp, Artificial Sequence
  Probe
aagttccctggtggtctagtggttaggattcggcgctctc

SEQ ID NO: 15199 - DNA, 21 bp, Artificial Sequence
  Probe
aataacgccaaggtcgcgggt

SEQ ID NO: 15200 - DNA, 20 bp, Artificial Sequence
  Probe
aataagctatcgggcccata

SEQ ID NO: 15201 - DNA, 28 bp, Artificial Sequence
  Probe
aataagctatcgggcccataccccgaaa

SEQ ID NO: 15202 - DNA, 29 bp, Artificial Sequence
  Probe
aataagctatcgggcccataccccgaaaa

SEQ ID NO: 15203 - DNA, 30 bp, Artificial Sequence; identical to SEQ ID NO: 2407
  Probe

SEQ ID NO: 15204 - DNA, 31 bp, Artificial Sequence; identical to SEQ ID NO: 2408
  Probe

SEQ ID NO: 15205 - DNA, 33 bp, Artificial Sequence; identical to SEQ ID NO: 2412
  Probe

SEQ ID NO: 15206 - DNA, 49 bp, Artificial Sequence; identical to SEQ ID NO: 2416
  Probe

SEQ ID NO: 15207 - DNA, 50 bp, Artificial Sequence; identical to SEQ ID NO: 2417
  Probe

SEQ ID NO: 15208 - DNA, 20 bp, Artificial Sequence
  Probe
aatacagaccaagagccttc

SEQ ID NO: 15209 - DNA, 24 bp, Artificial Sequence
  Probe
aataggtttggtcctagcctttct

SEQ ID NO: 15210 - DNA, 30 bp, Artificial Sequence; identical to SEQ ID NO: 2424
  Probe

SEQ ID NO: 15211 - DNA, 37 bp, Artificial Sequence
  Probe
aatagtaccgttaacttccaattaactagttttgaca

SEQ ID NO: 15212 - DNA, 16 bp, Artificial Sequence
  Probe
aatcagagaaaaagtc

SEQ ID NO: 15213 - DNA, 24 bp, Artificial Sequence
  Probe
aatcagagaaaaagtctttaactc

SEQ ID NO: 15214 - DNA, 25 bp, Artificial Sequence
  Probe
aatcagagaaaaagtctttaactcc

SEQ ID NO: 15215 - DNA, 26 bp, Artificial Sequence
  Probe
aatcagagaaaaagtctttaactcca

SEQ ID NO: 15216 - DNA, 28 bp, Artificial Sequence
  Probe
aatcagagaaaaagtctttaactccacc

SEQ ID NO: 15217 - DNA, 29 bp, Artificial Sequence
  Probe
aatcagagaaaaagtctttaactccacca

SEQ ID NO: 15218 - DNA, 30 bp, Artificial Sequence
  Probe
aatcagagaaaaagtctttaactccaccat

SEQ ID NO: 15219 - DNA, 16 bp, Artificial Sequence
  Probe
aatccagcgatccgag

SEQ ID NO: 15220 - DNA, 18 bp, Artificial Sequence
  Probe
aatccagcgatccgagtt

SEQ ID NO: 15221 - DNA, 19 bp, Artificial Sequence
  Probe
aatccagcgatccgagttc

SEQ ID NO: 15222 - DNA, 21 bp, Artificial Sequence
  Probe
aatccagcgatccgagttcaa

SEQ ID NO: 15223 - DNA, 22 bp, Artificial Sequence
  Probe
aatccagcgatccgagttcaaa

SEQ ID NO: 15224 - DNA, 23 bp, Artificial Sequence
  Probe
aatccagcgatccgagttcaaat

SEQ ID NO: 15225 - DNA, 33 bp, Artificial Sequence
  Probe
aatccagcgatccgagttcaaatctcggtggaa

SEQ ID NO: 15226 - DNA, 34 bp, Artificial Sequence
  Probe
aatccagcgatccgagttcaaatctcggtggaac

SEQ ID NO: 15227 - DNA, 37 bp, Artificial Sequence; identical to SEQ ID NO: 2430
  Probe

SEQ ID NO: 15228 - DNA, 38 bp, Artificial Sequence; identical to SEQ ID NO: 2431
  Probe

SEQ ID NO: 15229 - DNA, 39 bp, Artificial Sequence; identical to SEQ ID NO: 2432
  Probe

SEQ ID NO: 15230 - DNA, 37 bp, Artificial Sequence; identical to SEQ ID NO: 2436
  Probe

SEQ ID NO: 15231 - DNA, 34 bp, Artificial Sequence; identical to SEQ ID NO: 2440
  Probe

SEQ ID NO: 15232 - DNA, 38 bp, Artificial Sequence; identical to SEQ ID NO: 2441
  Probe

SEQ ID NO: 15233 - DNA, 39 bp, Artificial Sequence; identical to SEQ ID NO: 2442
  Probe

SEQ ID NO: 15234 - DNA, 36 bp, Artificial Sequence
  Probe
aatccagcgatccgagttcaagtctcggtggaacct

SEQ ID NO: 15235 - DNA, 37 bp, Artificial Sequence
  Probe
aatccagcgatccgagttcaagtctcggtggaacctg

SEQ ID NO: 15236 - DNA, 39 bp, Artificial Sequence
  Probe
aatccagcgatccgagttcaagtctcggtggaacctgct

SEQ ID NO: 15237 - DNA, 36 bp, Artificial Sequence
  Probe
aatccagcgatccgagttcgagtctcggtggaacct

SEQ ID NO: 15238 - DNA, 39 bp, Artificial Sequence; identical to SEQ ID NO: 2447
  Probe

SEQ ID NO: 15239 - DNA, 17 bp, Artificial Sequence
  Probe
aatcccaccgctgccac

SEQ ID NO: 15240 - DNA, 18 bp, Artificial Sequence
  Probe
aatcccaccgctgccaca

SEQ ID NO: 15241 - DNA, 19 bp, Artificial Sequence
  Probe
aatcccaccgctgccacac

SEQ ID NO: 15242 - DNA, 19 bp, Artificial Sequence
  Probe
aatcccaccgctgccaggt

SEQ ID NO: 15243 - DNA, 16 bp, Artificial Sequence
  Probe
aatcccactcctgaca

SEQ ID NO: 15244 - DNA, 16 bp, Artificial Sequence
  Probe
aatcccacttctgaca

SEQ ID NO: 15245 - DNA, 17 bp, Artificial Sequence
  Probe
aatcccacttctgacac

SEQ ID NO: 15246 - DNA, 19 bp, Artificial Sequence
  Probe
aatcccagcggtgcctccg

SEQ ID NO: 15247 - DNA, 18 bp, Artificial Sequence
  Probe
aatcccatcctcgtcgct

SEQ ID NO: 15248 - DNA, 16 bp, Artificial Sequence
  Probe
aatcccggacgagccc

SEQ ID NO: 15249 - DNA, 17 bp, Artificial Sequence
  Probe
aatcccggacgagccca

SEQ ID NO: 15250 - DNA, 17 bp, Artificial Sequence
  Probe
aatcccggacgagcccc

SEQ ID NO: 15251 - DNA, 17 bp, Artificial Sequence
  Probe
aatcccggacgagccct

SEQ ID NO: 15252 - DNA, 18 bp, Artificial Sequence
  Probe
aatccgggtgccccctca

SEQ ID NO: 15253 - DNA, 19 bp, Artificial Sequence
  Probe
aatccgggtgccccctcaa

SEQ ID NO: 15254 - DNA, 17 bp, Artificial Sequence
  Probe
aatccgggtgccccctg

SEQ ID NO: 15255 - DNA, 17 bp, Artificial Sequence
  Probe
aatccgggtgccccctt

SEQ ID NO: 15256 - DNA, 19 bp, Artificial Sequence
  Probe
aatcctatatatcttaatg

SEQ ID NO: 15257 - DNA, 21 bp, Artificial Sequence
  Probe
aatcgcataaaacttaaaact

SEQ ID NO: 15258 - DNA, 29 bp, Artificial Sequence
  Probe
aatcgcataaaacttaaaactttacagtc

SEQ ID NO: 15259 - DNA, 32 bp, Artificial Sequence
  Probe
aatcgcataaaacttaaaactttacagtcaga

SEQ ID NO: 15260 - DNA, 37 bp, Artificial Sequence; identical to SEQ ID NO: 2460
  Probe

SEQ ID NO: 15261 - DNA, 38 bp, Artificial Sequence
  Probe
aatcgcataaaacttaaaactttacagtcagaggttca

SEQ ID NO: 15262 - DNA, 50 bp, Artificial Sequence; identical to SEQ ID NO: 101
  Probe

SEQ ID NO: 15263 - DNA, 30 bp, Artificial Sequence; identical to SEQ ID NO: 2465
  Probe

SEQ ID NO: 15264 - DNA, 33 bp, Artificial Sequence; identical to SEQ ID NO: 102
  Probe

SEQ ID NO: 15265 - DNA, 34 bp, Artificial Sequence; identical to SEQ ID NO: 103
  Probe

SEQ ID NO: 15266 - DNA, 35 bp, Artificial Sequence
  Probe
aatctaaagacaggggttaggcctctttttaccag

SEQ ID NO: 15267 - DNA, 36 bp, Artificial Sequence; identical to SEQ ID NO: 2466
  Probe

SEQ ID NO: 15268 - DNA, 37 bp, Artificial Sequence; identical to SEQ ID NO: 2467
  Probe

SEQ ID NO: 15269 - DNA, 38 bp, Artificial Sequence; identical to SEQ ID NO: 2468
  Probe

SEQ ID NO: 15270 - DNA, 40 bp, Artificial Sequence; identical to SEQ ID NO: 2472
  Probe

SEQ ID NO: 15271 - DNA, 27 bp, Artificial Sequence
  Probe
aatctgacaacagaggcttacgacccc

SEQ ID NO: 15272 - DNA, 28 bp, Artificial Sequence
  Probe
aatctgacaacagaggcttacgacccct

SEQ ID NO: 15273 - DNA, 29 bp, Artificial Sequence
  Probe
aatctgacaacagaggcttacgacccctt

SEQ ID NO: 15274 - DNA, 31 bp, Artificial Sequence; identical to SEQ ID NO: 107
  Probe

SEQ ID NO: 15275 - DNA, 32 bp, Artificial Sequence; identical to SEQ ID NO: 108
  Probe

SEQ ID NO: 15276 - DNA, 33 bp, Artificial Sequence; identical to SEQ ID NO: 2477
  Probe

SEQ ID NO: 15277 - DNA, 34 bp, Artificial Sequence; identical to SEQ ID NO: 109
  Probe

SEQ ID NO: 15278 - DNA, 37 bp, Artificial Sequence; identical to SEQ ID NO: 2478
  Probe

SEQ ID NO: 15279 - DNA, 38 bp, Artificial Sequence; identical to SEQ ID NO: 2479
  Probe

SEQ ID NO: 15280 - DNA, 39 bp, Artificial Sequence; identical to SEQ ID NO: 2480
  Probe

SEQ ID NO: 15281 - DNA, 50 bp, Artificial Sequence; identical to SEQ ID NO: 2483
  Probe

SEQ ID NO: 15282 - DNA, 16 bp, Artificial Sequence
  Probe
aatgccccaactaaat

SEQ ID NO: 15283 - DNA, 17 bp, Artificial Sequence
  Probe
aatgccccaactaaata

SEQ ID NO: 15284 - DNA, 18 bp, Artificial Sequence
  Probe
aatgccccaactaaatac

SEQ ID NO: 15285 - DNA, 19 bp, Artificial Sequence
  Probe
aatgccccaactaaatact

SEQ ID NO: 15286 - DNA, 20 bp, Artificial Sequence
  Probe
aatgccccaactaaatacta

SEQ ID NO: 15287 - DNA, 21 bp, Artificial Sequence
  Probe
aatgccccaactaaatactac

SEQ ID NO: 15288 - DNA, 22 bp, Artificial Sequence
  Probe
aatgccccaactaaatactacc

SEQ ID NO: 15289 - DNA, 23 bp, Artificial Sequence
  Probe
aatgccccaactaaatactaccg

SEQ ID NO: 15290 - DNA, 24 bp, Artificial Sequence
  Probe
aatgccccaactaaatactaccgt

SEQ ID NO: 15291 - DNA, 25 bp, Artificial Sequence
  Probe
aatgccccaactaaatactaccgta

SEQ ID NO: 15292 - DNA, 26 bp, Artificial Sequence
  Probe
aatgccccaactaaatactaccgtat

SEQ ID NO: 15293 - DNA, 27 bp, Artificial Sequence
  Probe
aatgccccaactaaatactaccgtatg

SEQ ID NO: 15294 - DNA, 28 bp, Artificial Sequence
  Probe
aatgccccaactaaatactaccgtatgg

SEQ ID NO: 15295 - DNA, 29 bp, Artificial Sequence
  Probe
aatgccccaactaaatactaccgtatggc

SEQ ID NO: 15296 - DNA, 29 bp, Artificial Sequence
  Probe
aatggtggagttaaagactttttctctga

SEQ ID NO: 15297 - DNA, 30 bp, Artificial Sequence; identical to SEQ ID NO: 8969
  Probe

SEQ ID NO: 15298 - DNA, 31 bp, Artificial Sequence; identical to SEQ ID NO: 2497
  Probe

SEQ ID NO: 15299 - DNA, 32 bp, Artificial Sequence; identical to SEQ ID NO: 2498
  Probe

SEQ ID NO: 15300 - DNA, 36 bp, Artificial Sequence; identical to SEQ ID NO: 2500
  Probe

SEQ ID NO: 15301 - DNA, 38 bp, Artificial Sequence
  Probe
aatggttagcactctggactctgaatccagcgatccga

SEQ ID NO: 15302 - DNA, 39 bp, Artificial Sequence
  Probe
aatggttagcactctggactttgaatccagcgatccgag

SEQ ID NO: 15303 - DNA, 37 bp, Artificial Sequence; identical to SEQ ID NO: 2501
  Probe

SEQ ID NO: 15304 - DNA, 38 bp, Artificial Sequence
  Probe
aatgtttagacgggctcacatcaccccataaacaaata

SEQ ID NO: 15305 - DNA, 33 bp, Artificial Sequence
  Probe
aattaactagttttgacaacattcaaaaaagag

SEQ ID NO: 15306 - DNA, 36 bp, Artificial Sequence
  Probe
aattaactagttttgacaacattcaaaaaagagtaa

SEQ ID NO: 15307 - DNA, 38 bp, Artificial Sequence; identical to SEQ ID NO: 2503
  Probe

SEQ ID NO: 15308 - DNA, 33 bp, Artificial Sequence; identical to SEQ ID NO: 2504
  Probe

SEQ ID NO: 15309 - DNA, 38 bp, Artificial Sequence
  Probe
aattagaatcttagctttgggtgctaatggtggagtta

SEQ ID NO: 15310 - DNA, 20 bp, Artificial Sequence
  Probe
aattcccggtcagggaacca

SEQ ID NO: 15311 - DNA, 37 bp, Artificial Sequence; identical to SEQ ID NO: 2507
  Probe

SEQ ID NO: 15312 - DNA, 38 bp, Artificial Sequence; identical to SEQ ID NO: 2508
  Probe

SEQ ID NO: 15313 - DNA, 39 bp, Artificial Sequence; identical to SEQ ID NO: 2509
  Probe

SEQ ID NO: 15314 - DNA, 16 bp, Artificial Sequence
  Probe
aattctcgcctgccac

SEQ ID NO: 15315 - DNA, 17 bp, Artificial Sequence
  Probe
aattctcgcctgccacg

SEQ ID NO: 15316 - DNA, 18 bp, Artificial Sequence
  Probe
aattctcgcctgccacgc

SEQ ID NO: 15317 - DNA, 31 bp, Artificial Sequence
  Probe
aattctcgcctgccacgcgggaggcccgggt

SEQ ID NO: 15318 - DNA, 39 bp, Artificial Sequence; identical to SEQ ID NO: 2515
  Probe

SEQ ID NO: 15319 - DNA, 40 bp, Artificial Sequence; identical to SEQ ID NO: 2516
  Probe

SEQ ID NO: 15320 - DNA, 45 bp, Artificial Sequence; identical to SEQ ID NO: 2521
  Probe

SEQ ID NO: 15321 - DNA, 50 bp, Artificial Sequence; identical to SEQ ID NO: 2525
  Probe

SEQ ID NO: 15322 - DNA, 28 bp, Artificial Sequence
  Probe
acaaagcacccaacttacacttaggaga

SEQ ID NO: 15323 - DNA, 30 bp, Artificial Sequence; identical to SEQ ID NO: 2537
  Probe

SEQ ID NO: 15324 - DNA, 36 bp, Artificial Sequence
  Probe
acaaagcacccaacttacacttaggagatttcaact

SEQ ID NO: 15325 - DNA, 50 bp, Artificial Sequence; identical to SEQ ID NO: 117
  Probe

SEQ ID NO: 15326 - DNA, 15 bp, Artificial Sequence
  Probe
acaacagaggcttac

SEQ ID NO: 15327 - DNA, 16 bp, Artificial Sequence
  Probe
acaacagaggcttacg

SEQ ID NO: 15328 - DNA, 17 bp, Artificial Sequence
  Probe
acaacagaggcttacga

SEQ ID NO: 15329 - DNA, 19 bp, Artificial Sequence
  Probe
acaacagaggcttacgacc

SEQ ID NO: 15330 - DNA, 20 bp, Artificial Sequence
  Probe
acaacagaggcttacgaccc

SEQ ID NO: 15331 - DNA, 21 bp, Artificial Sequence
  Probe
acaacagaggcttacgacccc

SEQ ID NO: 15332 - DNA, 22 bp, Artificial Sequence
  Probe
acaacagaggcttacgacccct

SEQ ID NO: 15333 - DNA, 23 bp, Artificial Sequence
  Probe
acaacagaggcttacgacccctt

SEQ ID NO: 15334 - DNA, 24 bp, Artificial Sequence
  Probe
acaacagaggcttacgacccctta

SEQ ID NO: 15335 - DNA, 25 bp, Artificial Sequence
  Probe
acaacagaggcttacgaccccttat

SEQ ID NO: 15336 - DNA, 26 bp, Artificial Sequence
  Probe
acaacagaggcttacgaccccttatt

SEQ ID NO: 15337 - DNA, 27 bp, Artificial Sequence
  Probe
acaacagaggcttacgaccccttattt

SEQ ID NO: 15338 - DNA, 28 bp, Artificial Sequence
  Probe
acaacagaggcttacgaccccttattta

SEQ ID NO: 15339 - DNA, 29 bp, Artificial Sequence
  Probe
acaacagaggcttacgaccccttatttac

SEQ ID NO: 15340 - DNA, 30 bp, Artificial Sequence; identical to SEQ ID NO: 2562
  Probe

SEQ ID NO: 15341 - DNA, 31 bp, Artificial Sequence; identical to SEQ ID NO: 2563
  Probe

SEQ ID NO: 15342 - DNA, 32 bp, Artificial Sequence; identical to SEQ ID NO: 2564
  Probe

SEQ ID NO: 15343 - DNA, 33 bp, Artificial Sequence; identical to SEQ ID NO: 2565
  Probe

SEQ ID NO: 15344 - DNA, 34 bp, Artificial Sequence; identical to SEQ ID NO: 2566
  Probe

SEQ ID NO: 15345 - DNA, 35 bp, Artificial Sequence; identical to SEQ ID NO: 2567
  Probe

SEQ ID NO: 15346 - DNA, 36 bp, Artificial Sequence; identical to SEQ ID NO: 2568
  Probe

SEQ ID NO: 15347 - DNA, 38 bp, Artificial Sequence; identical to SEQ ID NO: 2570
  Probe

SEQ ID NO: 15348 - DNA, 41 bp, Artificial Sequence; identical to SEQ ID NO: 2573
  Probe

SEQ ID NO: 15349 - DNA, 33 bp, Artificial Sequence
  Probe
acaacatacccatggccaacctcctactcctca

SEQ ID NO: 15350 - DNA, 19 bp, Artificial Sequence
  Probe
acaacatggctttctcaac

SEQ ID NO: 15351 - DNA, 20 bp, Artificial Sequence
  Probe
acaacattcaaaaaagagta

SEQ ID NO: 15352 - DNA, 29 bp, Artificial Sequence
  Probe
acaacgatggtttttcatatcattggtcg

SEQ ID NO: 15353 - DNA, 30 bp, Artificial Sequence
  Probe
acaacgatggtttttcatatcattggtcgt

SEQ ID NO: 15354 - DNA, 16 bp, Artificial Sequence
  Probe
acaagaactgctaact

SEQ ID NO: 15355 - DNA, 18 bp, Artificial Sequence
  Probe
acaagaactgctaactca

SEQ ID NO: 15356 - DNA, 20 bp, Artificial Sequence
  Probe
acaagaactgctaactcatg

SEQ ID NO: 15357 - DNA, 21 bp, Artificial Sequence
  Probe
acaagaactgctaactcatgc

SEQ ID NO: 15358 - DNA, 22 bp, Artificial Sequence
  Probe
acaagaactgctaactcatgcc

SEQ ID NO: 15359 - DNA, 23 bp, Artificial Sequence
  Probe
acaagaactgctaactcatgccc

SEQ ID NO: 15360 - DNA, 24 bp, Artificial Sequence
  Probe
acaagaactgctaactcatgcccc

SEQ ID NO: 15361 - DNA, 25 bp, Artificial Sequence
  Probe
acaagaactgctaactcatgccccc

SEQ ID NO: 15362 - DNA, 26 bp, Artificial Sequence
  Probe
acaagaactgctaactcatgccccca

SEQ ID NO: 15363 - DNA, 27 bp, Artificial Sequence
  Probe
acaagaactgctaactcatgcccccat

SEQ ID NO: 15364 - DNA, 28 bp, Artificial Sequence
  Probe
acaagaactgctaactcatgcccccatg

SEQ ID NO: 15365 - DNA, 29 bp, Artificial Sequence
  Probe
acaagaactgctaactcatgcccccatgt

SEQ ID NO: 15366 - DNA, 32 bp, Artificial Sequence; identical to SEQ ID NO: 2585
  Probe

SEQ ID NO: 15367 - DNA, 33 bp, Artificial Sequence
  Probe
acaagaactgctaactcatgcccccatgtctaa

SEQ ID NO: 15368 - DNA, 34 bp, Artificial Sequence
  Probe
acaagaactgctaactcatgcccccatgtctaac

SEQ ID NO: 15369 - DNA, 36 bp, Artificial Sequence
  Probe
acaagaactgctaactcatgcccccatgtctaacaa

SEQ ID NO: 15370 - DNA, 39 bp, Artificial Sequence
  Probe
acaagaactgctaactcatgcccccatgtctaacaacat

SEQ ID NO: 15371 - DNA, 43 bp, Artificial Sequence; identical to SEQ ID NO: 119
  Probe

SEQ ID NO: 15372 - DNA, 44 bp, Artificial Sequence; identical to SEQ ID NO: 120
  Probe

SEQ ID NO: 15373 - DNA, 45 bp, Artificial Sequence; identical to SEQ ID NO: 121
  Probe

SEQ ID NO: 15374 - DNA, 46 bp, Artificial Sequence; identical to SEQ ID NO: 122
  Probe

SEQ ID NO: 15375 - DNA, 50 bp, Artificial Sequence; identical to SEQ ID NO: 2588
  Probe

SEQ ID NO: 15376 - DNA, 16 bp, Artificial Sequence
  Probe
acaagtgcggtttttt

SEQ ID NO: 15377 - DNA, 27 bp, Artificial Sequence
  Probe
acaatctccagcattccccctcaaacc

SEQ ID NO: 15378 - DNA, 17 bp, Artificial Sequence
  Probe
acacaaagcacccaact

SEQ ID NO: 15379 - DNA, 23 bp, Artificial Sequence
  Probe
acacaaagcacccaacttacact

SEQ ID NO: 15380 - DNA, 24 bp, Artificial Sequence
  Probe
acacaaagcacccaacttacactt

SEQ ID NO: 15381 - DNA, 31 bp, Artificial Sequence; identical to SEQ ID NO: 2597
  Probe

SEQ ID NO: 15382 - DNA, 32 bp, Artificial Sequence
  Probe
acacaaagcacccaacttacacttaggagatt

SEQ ID NO: 15383 - DNA, 35 bp, Artificial Sequence; identical to SEQ ID NO: 2598
  Probe

SEQ ID NO: 15384 - DNA, 20 bp, Artificial Sequence
  Probe
acacactaaaaaatcccttt

SEQ ID NO: 15385 - DNA, 17 bp, Artificial Sequence
  Probe
acacccacccaagaaca

SEQ ID NO: 15386 - DNA, 19 bp, Artificial Sequence
  Probe
acacccacccaagaacagg

SEQ ID NO: 15387 - DNA, 23 bp, Artificial Sequence
  Probe
acacccacccaagaacagggttt

SEQ ID NO: 15388 - DNA, 24 bp, Artificial Sequence
  Probe
acacccacccaagaacagggtttg

SEQ ID NO: 15389 - DNA, 25 bp, Artificial Sequence
  Probe
acacccacccaagaacagggtttgt

SEQ ID NO: 15390 - DNA, 26 bp, Artificial Sequence
  Probe
acacccacccaagaacagggtttgtt

SEQ ID NO: 15391 - DNA, 27 bp, Artificial Sequence
  Probe
acacccacccaagaacagggtttgtta

SEQ ID NO: 15392 - DNA, 28 bp, Artificial Sequence
  Probe
acacccacccaagaacagggtttgttaa

SEQ ID NO: 15393 - DNA, 29 bp, Artificial Sequence
  Probe
acacccacccaagaacagggtttgttaag

SEQ ID NO: 15394 - DNA, 30 bp, Artificial Sequence
  Probe
acacccacccaagaacagggtttgttaaga

SEQ ID NO: 15395 - DNA, 46 bp, Artificial Sequence
  Probe
acaccccatcctaaagtaaggtcagctaaataagctatcgggccca

SEQ ID NO: 15396 - DNA, 24 bp, Artificial Sequence
  Probe
acaccccccacagtttatgtagct

SEQ ID NO: 15397 - DNA, 28 bp, Artificial Sequence
  Probe
acaccccccacagtttatgtagcttacc

SEQ ID NO: 15398 - DNA, 30 bp, Artificial Sequence
  Probe
acaccccccacagtttatgtagcttacctc

SEQ ID NO: 15399 - DNA, 23 bp, Artificial Sequence
  Probe
acacctcagaaggtctcactttt

SEQ ID NO: 15400 - DNA, 17 bp, Artificial Sequence
  Probe
acacctctttacagtga

SEQ ID NO: 15401 - DNA, 18 bp, Artificial Sequence
  Probe
acacctctttacagtgaa

SEQ ID NO: 15402 - DNA, 19 bp, Artificial Sequence
  Probe
acacctctttacagtgaaa

SEQ ID NO: 15403 - DNA, 20 bp, Artificial Sequence
  Probe
acacctctttacagtgaaat

SEQ ID NO: 15404 - DNA, 16 bp, Artificial Sequence
  Probe
acacgagctattgcga

SEQ ID NO: 15405 - DNA, 42 bp, Artificial Sequence
  Probe
acacgcagaaggtcctgggttcaagccccagtggaaccatgg

SEQ ID NO: 15406 - DNA, 33 bp, Artificial Sequence
  Probe
acacgcagaaggtcctgggttcgagccccagtg

SEQ ID NO: 15407 - DNA, 37 bp, Artificial Sequence
  Probe
acacgcagaaggtcctgggttcgagccccagtggaac

SEQ ID NO: 15408 - DNA, 41 bp, Artificial Sequence
  Probe
acacgcagaaggtcctgggttcgagccccagtggaaccacg

SEQ ID NO: 15409 - DNA, 42 bp, Artificial Sequence; identical to SEQ ID NO: 2613
  Probe

SEQ ID NO: 15410 - DNA, 42 bp, Artificial Sequence
  Probe
acacgcagaaggtcctgggttcgagccccagtggaaccatag

SEQ ID NO: 15411 - DNA, 50 bp, Artificial Sequence
  Probe
acacgcagaaggtcctgggttcgagccccagtggaaccatagccgtaagg

SEQ ID NO: 15412 - DNA, 16 bp, Artificial Sequence
  Probe
acacgcgaaaggtccc

SEQ ID NO: 15413 - DNA, 17 bp, Artificial Sequence
  Probe
acacgcgaaaggtcccc

SEQ ID NO: 15414 - DNA, 22 bp, Artificial Sequence
  Probe
acacgcgaaaggtccccggttc

SEQ ID NO: 15415 - DNA, 42 bp, Artificial Sequence
  Probe
acacgcgaaaggtccccggttcgaaaccgggcggaaacacct

SEQ ID NO: 15416 - DNA, 22 bp, Artificial Sequence
  Probe
acacgcgaaaggtccccggttt

SEQ ID NO: 15417 - DNA, 23 bp, Artificial Sequence
  Probe
acacgcgaaaggtccccggtttg

SEQ ID NO: 15418 - DNA, 19 bp, Artificial Sequence
  Probe
acacggggcacaataattt

SEQ ID NO: 15419 - DNA, 44 bp, Artificial Sequence; identical to SEQ ID NO: 2618
  Probe

SEQ ID NO: 15420 - DNA, 45 bp, Artificial Sequence; identical to SEQ ID NO: 2619
  Probe

SEQ ID NO: 15421 - DNA, 46 bp, Artificial Sequence; identical to SEQ ID NO: 2620
  Probe

SEQ ID NO: 15422 - DNA, 50 bp, Artificial Sequence; identical to SEQ ID NO: 2621
  Probe

SEQ ID NO: 15423 - DNA, 17 bp, Artificial Sequence
  Probe
acacttaggagatttca

SEQ ID NO: 15424 - DNA, 25 bp, Artificial Sequence
  Probe
acacttaggagatttcaacttaact

SEQ ID NO: 15425 - DNA, 29 bp, Artificial Sequence
  Probe
acacttaggagatttcaacttaacttgac

SEQ ID NO: 15426 - DNA, 30 bp, Artificial Sequence; identical to SEQ ID NO: 8999
  Probe

SEQ ID NO: 15427 - DNA, 31 bp, Artificial Sequence; identical to SEQ ID NO: 2625
  Probe

SEQ ID NO: 15428 - DNA, 32 bp, Artificial Sequence; identical to SEQ ID NO: 2626
  Probe

SEQ ID NO: 15429 - DNA, 33 bp, Artificial Sequence; identical to SEQ ID NO: 2627
  Probe

SEQ ID NO: 15430 - DNA, 34 bp, Artificial Sequence; identical to SEQ ID NO: 2628
  Probe

SEQ ID NO: 15431 - DNA, 35 bp, Artificial Sequence
  Probe
acacttaggagatttcaacttaacttgaccgctct

SEQ ID NO: 15432 - DNA, 37 bp, Artificial Sequence; identical to SEQ ID NO: 2629
  Probe

SEQ ID NO: 15433 - DNA, 38 bp, Artificial Sequence; identical to SEQ ID NO: 2630
  Probe

SEQ ID NO: 15434 - DNA, 39 bp, Artificial Sequence; identical to SEQ ID NO: 2631
  Probe

SEQ ID NO: 15435 - DNA, 40 bp, Artificial Sequence; identical to SEQ ID NO: 2632
  Probe

SEQ ID NO: 15436 - DNA, 41 bp, Artificial Sequence; identical to SEQ ID NO: 2633
  Probe

SEQ ID NO: 15437 - DNA, 42 bp, Artificial Sequence; identical to SEQ ID NO: 2634
  Probe

SEQ ID NO: 15438 - DNA, 43 bp, Artificial Sequence; identical to SEQ ID NO: 2635
  Probe

SEQ ID NO: 15439 - DNA, 17 bp, Artificial Sequence
  Probe
acagaccaagagccttc

SEQ ID NO: 15440 - DNA, 31 bp, Artificial Sequence
  Probe
acagaccaagagccttcaaagccctcagtaa

SEQ ID NO: 15441 - DNA, 35 bp, Artificial Sequence
  Probe
acagaccaagagccttcaaagccctcagtaagttg

SEQ ID NO: 15442 - DNA, 36 bp, Artificial Sequence
  Probe
acagaccaagagccttcaaagccctcagtaagttgc

SEQ ID NO: 15443 - DNA, 18 bp, Artificial Sequence
  Probe
acagaggcttacgacccc

SEQ ID NO: 15444 - DNA, 27 bp, Artificial Sequence
  Probe
acagaggcttacgaccccttatttacc

SEQ ID NO: 15445 - DNA, 28 bp, Artificial Sequence
  Probe
acagaggcttacgaccccttatttaccg

SEQ ID NO: 15446 - DNA, 30 bp, Artificial Sequence; identical to SEQ ID NO: 2640
  Probe

SEQ ID NO: 15447 - DNA, 33 bp, Artificial Sequence
  Probe
acagcgccgctggtgtagtggtatcatgcaaga

SEQ ID NO: 15448 - DNA, 35 bp, Artificial Sequence
  Probe
acagcgccgctggtgtagtggtatcatgcaagatt

SEQ ID NO: 15449 - DNA, 16 bp, Artificial Sequence
  Probe
acagctatccattggt

SEQ ID NO: 15450 - DNA, 17 bp, Artificial Sequence
  Probe
acagctatccattggtc

SEQ ID NO: 15451 - DNA, 18 bp, Artificial Sequence
  Probe
acagctatccattggtct

SEQ ID NO: 15452 - DNA, 21 bp, Artificial Sequence
  Probe
acagctatccattggtcttag

SEQ ID NO: 15453 - DNA, 27 bp, Artificial Sequence
  Probe
acagctatccattggtcttaggcccca

SEQ ID NO: 15454 - DNA, 29 bp, Artificial Sequence
  Probe
acaggagatcctgggttcgaatcccagcg

SEQ ID NO: 15455 - DNA, 31 bp, Artificial Sequence
  Probe
acaggagatcctgggttcgaatcccagcggg

SEQ ID NO: 15456 - DNA, 32 bp, Artificial Sequence
  Probe
acaggagatcctgggttcgaatcccagcgggg

SEQ ID NO: 15457 - DNA, 33 bp, Artificial Sequence
  Probe
acaggagatcctgggttcgaatcccagcggggc

SEQ ID NO: 15458 - DNA, 35 bp, Artificial Sequence
  Probe
acaggagatcctgggttcgaatcccagcggggcct

SEQ ID NO: 15459 - DNA, 36 bp, Artificial Sequence
  Probe
acaggagatcctgggttcgaatcccagcggggcctg

SEQ ID NO: 15460 - DNA, 36 bp, Artificial Sequence
  Probe
acaggagatcctgggttcgaatcccagcggggcctt

SEQ ID NO: 15461 - DNA, 38 bp, Artificial Sequence
  Probe
acaggagatcctgggttcgaatcccagcggggccttac

SEQ ID NO: 15462 - DNA, 38 bp, Artificial Sequence
  Probe
acaggagatcctgggttcgaatcccagcggggccttag

SEQ ID NO: 15463 - DNA, 32 bp, Artificial Sequence
  Probe
acaggagatcctgggttcgaatcccagcggtg

SEQ ID NO: 15464 - DNA, 33 bp, Artificial Sequence; identical to SEQ ID NO: 2645
  Probe

SEQ ID NO: 15465 - DNA, 34 bp, Artificial Sequence
  Probe
acaggagatcctgggttcgaatcccagcggtgcc

SEQ ID NO: 15466 - DNA, 35 bp, Artificial Sequence; identical to SEQ ID NO: 2646
  Probe

SEQ ID NO: 15467 - DNA, 36 bp, Artificial Sequence
  Probe
acaggagatcctgggttcgaatcccagcggtgcctc

SEQ ID NO: 15468 - DNA, 37 bp, Artificial Sequence; identical to SEQ ID NO: 2647
  Probe

SEQ ID NO: 15469 - DNA, 38 bp, Artificial Sequence; identical to SEQ ID NO: 2648
  Probe

SEQ ID NO: 15470 - DNA, 38 bp, Artificial Sequence
  Probe
acaggagatcctgggttcgactcccagcggggccttgg

SEQ ID NO: 15471 - DNA, 28 bp, Artificial Sequence
  Probe
acaggggttaggcctctttttaccagct

SEQ ID NO: 15472 - DNA, 36 bp, Artificial Sequence
  Probe
acaggtccctcctcgttagtatagtggtgagtatcc

SEQ ID NO: 15473 - DNA, 25 bp, Artificial Sequence
  Probe
acagtcagaggttcaattcctcttc

SEQ ID NO: 15474 - DNA, 26 bp, Artificial Sequence
  Probe
acagtcagaggttcaattcctcttct

SEQ ID NO: 15475 - DNA, 27 bp, Artificial Sequence
  Probe
acagtcagaggttcaattcctcttctt

SEQ ID NO: 15476 - DNA, 28 bp, Artificial Sequence
  Probe
acagtcagaggttcaattcctcttctta

SEQ ID NO: 15477 - DNA, 29 bp, Artificial Sequence
  Probe
acagtcagaggttcaattcctcttcttaa

SEQ ID NO: 15478 - DNA, 30 bp, Artificial Sequence
  Probe
acagtcagaggttcaattcctcttcttaac

SEQ ID NO: 15479 - DNA, 31 bp, Artificial Sequence; identical to SEQ ID NO: 2654
  Probe

SEQ ID NO: 15480 - DNA, 32 bp, Artificial Sequence
  Probe
acagtcagaggttcaattcctcttcttaacaa

SEQ ID NO: 15481 - DNA, 33 bp, Artificial Sequence; identical to SEQ ID NO: 2655
  Probe

SEQ ID NO: 15482 - DNA, 34 bp, Artificial Sequence; identical to SEQ ID NO: 2656
  Probe

SEQ ID NO: 15483 - DNA, 27 bp, Artificial Sequence
  Probe
acagtggctcgttggtctaggggtatg

SEQ ID NO: 15484 - DNA, 28 bp, Artificial Sequence
  Probe
acagtggctcgttggtctaggggtatga

SEQ ID NO: 15485 - DNA, 29 bp, Artificial Sequence
  Probe
acagtggctcgttggtctaggggtatgat

SEQ ID NO: 15486 - DNA, 30 bp, Artificial Sequence
  Probe
acagtggctcgttggtctaggggtatgatt

SEQ ID NO: 15487 - DNA, 31 bp, Artificial Sequence
  Probe
acagtggctcgttggtctaggggtatgattc

SEQ ID NO: 15488 - DNA, 32 bp, Artificial Sequence
  Probe
acagtggctcgttggtctaggggtatgattct

SEQ ID NO: 15489 - DNA, 36 bp, Artificial Sequence
  Probe
acagtggctcgttggtctaggggtatgattctcgct

SEQ ID NO: 15490 - DNA, 37 bp, Artificial Sequence
  Probe
acagtggctcgttggtctaggggtatgattctcgctt

SEQ ID NO: 15491 - DNA, 38 bp, Artificial Sequence
  Probe
acagtggctcgttggtctaggggtatgattctcgcttt

SEQ ID NO: 15492 - DNA, 17 bp, Artificial Sequence
  Probe
acatacccatggccaac

SEQ ID NO: 15493 - DNA, 18 bp, Artificial Sequence
  Probe
acatacccatggccaacc

SEQ ID NO: 15494 - DNA, 19 bp, Artificial Sequence
  Probe
acatacccatggccaacct

SEQ ID NO: 15495 - DNA, 20 bp, Artificial Sequence
  Probe
acatacccatggccaacctc

SEQ ID NO: 15496 - DNA, 21 bp, Artificial Sequence
  Probe
acatacccatggccaacctcc

SEQ ID NO: 15497 - DNA, 22 bp, Artificial Sequence
  Probe
acatacccatggccaacctcct

SEQ ID NO: 15498 - DNA, 23 bp, Artificial Sequence
  Probe
acatacccatggccaacctccta

SEQ ID NO: 15499 - DNA, 24 bp, Artificial Sequence
  Probe
acatacccatggccaacctcctac

SEQ ID NO: 15500 - DNA, 25 bp, Artificial Sequence
  Probe
acatacccatggccaacctcctact

SEQ ID NO: 15501 - DNA, 26 bp, Artificial Sequence
  Probe
acatacccatggccaacctcctactc

SEQ ID NO: 15502 - DNA, 27 bp, Artificial Sequence
  Probe
acatacccatggccaacctcctactcc

SEQ ID NO: 15503 - DNA, 28 bp, Artificial Sequence
  Probe
acatacccatggccaacctcctactcct

SEQ ID NO: 15504 - DNA, 29 bp, Artificial Sequence
  Probe
acatacccatggccaacctcctactcctc

SEQ ID NO: 15505 - DNA, 30 bp, Artificial Sequence; identical to SEQ ID NO: 2668
  Probe

SEQ ID NO: 15506 - DNA, 17 bp, Artificial Sequence
  Probe
acatcaccccataaaca

SEQ ID NO: 15507 - DNA, 18 bp, Artificial Sequence
  Probe
acatcaccccataaacaa

SEQ ID NO: 15508 - DNA, 19 bp, Artificial Sequence
  Probe
acatcaccccataaacaaa

SEQ ID NO: 15509 - DNA, 20 bp, Artificial Sequence
  Probe
acatcaccccataaacaaat

SEQ ID NO: 15510 - DNA, 25 bp, Artificial Sequence
  Probe
acatcagattgtgaatctgacaaca

SEQ ID NO: 15511 - DNA, 50 bp, Artificial Sequence; identical to SEQ ID NO: 2685
  Probe

SEQ ID NO: 15512 - DNA, 30 bp, Artificial Sequence; identical to SEQ ID NO: 2689
  Probe

SEQ ID NO: 15513 - DNA, 31 bp, Artificial Sequence; identical to SEQ ID NO: 2690
  Probe

SEQ ID NO: 15514 - DNA, 17 bp, Artificial Sequence
  Probe
acattcaaaaaagagta

SEQ ID NO: 15515 - DNA, 28 bp, Artificial Sequence
  Probe
accaaaacatcagattgtgaatctgaca

SEQ ID NO: 15516 - DNA, 29 bp, Artificial Sequence
  Probe
accaaaacatcagattgtgaatctgacaa

SEQ ID NO: 15517 - DNA, 30 bp, Artificial Sequence; identical to SEQ ID NO: 2694
  Probe

SEQ ID NO: 15518 - DNA, 31 bp, Artificial Sequence; identical to SEQ ID NO: 2695
  Probe

SEQ ID NO: 15519 - DNA, 32 bp, Artificial Sequence
  Probe
accaaaacatcagattgtgaatctgacaacag

SEQ ID NO: 15520 - DNA, 33 bp, Artificial Sequence
  Probe
accaaaacatcagattgtgaatctgacaacaga

SEQ ID NO: 15521 - DNA, 34 bp, Artificial Sequence
  Probe
accaaaacatcagattgtgaatctgacaacagag

SEQ ID NO: 15522 - DNA, 36 bp, Artificial Sequence
  Probe
accaaaacatcagattgtgaatctgacaacagaggc

SEQ ID NO: 15523 - DNA, 37 bp, Artificial Sequence; identical to SEQ ID NO: 2697
  Probe

SEQ ID NO: 15524 - DNA, 21 bp, Artificial Sequence
  Probe
accaacacctctttacagtga

SEQ ID NO: 15525 - DNA, 22 bp, Artificial Sequence
  Probe
accaacacctctttacagtgaa

SEQ ID NO: 15526 - DNA, 23 bp, Artificial Sequence
  Probe
accaacacctctttacagtgaaa

SEQ ID NO: 15527 - DNA, 24 bp, Artificial Sequence
  Probe
accaacacctctttacagtgaaat

SEQ ID NO: 15528 - DNA, 15 bp, Artificial Sequence
  Probe
accaaccaaacccca

SEQ ID NO: 15529 - DNA, 23 bp, Artificial Sequence
  Probe
accagaatggccgagtggttaag

SEQ ID NO: 15530 - DNA, 18 bp, Artificial Sequence
  Probe
accagctttggggggttc

SEQ ID NO: 15531 - DNA, 20 bp, Artificial Sequence
  Probe
accagctttggggggttcga

SEQ ID NO: 15532 - DNA, 31 bp, Artificial Sequence; identical to SEQ ID NO: 2713
  Probe

SEQ ID NO: 15533 - DNA, 32 bp, Artificial Sequence; identical to SEQ ID NO: 2714
  Probe

SEQ ID NO: 15534 - DNA, 34 bp, Artificial Sequence; identical to SEQ ID NO: 2716
  Probe

SEQ ID NO: 15535 - DNA, 35 bp, Artificial Sequence; identical to SEQ ID NO: 2717
  Probe

SEQ ID NO: 15536 - DNA, 36 bp, Artificial Sequence; identical to SEQ ID NO: 2718
  Probe

SEQ ID NO: 15537 - DNA, 37 bp, Artificial Sequence; identical to SEQ ID NO: 2719
  Probe

SEQ ID NO: 15538 - DNA, 38 bp, Artificial Sequence; identical to SEQ ID NO: 2720
  Probe

SEQ ID NO: 15539 - DNA, 39 bp, Artificial Sequence; identical to SEQ ID NO: 2721
  Probe

SEQ ID NO: 15540 - DNA, 18 bp, Artificial Sequence
  Probe
accaggatggccgagtgg

SEQ ID NO: 15541 - DNA, 19 bp, Artificial Sequence
  Probe
accaggatggccgagtggt

SEQ ID NO: 15542 - DNA, 21 bp, Artificial Sequence
  Probe
accaggatggccgagtggtta

SEQ ID NO: 15543 - DNA, 22 bp, Artificial Sequence
  Probe
accaggatggccgagtggttaa

SEQ ID NO: 15544 - DNA, 24 bp, Artificial Sequence
  Probe
accaggatggccgagtggttaagg

SEQ ID NO: 15545 - DNA, 25 bp, Artificial Sequence
  Probe
accaggatggccgagtggttaaggc

SEQ ID NO: 15546 - DNA, 16 bp, Artificial Sequence
  Probe
accaggggtcgcgagt

SEQ ID NO: 15547 - DNA, 38 bp, Artificial Sequence; identical to SEQ ID NO: 2727
  Probe

SEQ ID NO: 15548 - DNA, 32 bp, Artificial Sequence
  Probe
accaggggtcgcgagttcaattctcgctgggg

SEQ ID NO: 15549 - DNA, 38 bp, Artificial Sequence; identical to SEQ ID NO: 2728
  Probe

SEQ ID NO: 15550 - DNA, 36 bp, Artificial Sequence
  Probe
accaggggtcgcgagttcgatcctcgctggggcctc

SEQ ID NO: 15551 - DNA, 38 bp, Artificial Sequence
  Probe
accaggggtcgcgagttcgatcctcgctggggcctcct

SEQ ID NO: 15552 - DNA, 46 bp, Artificial Sequence; identical to SEQ ID NO: 2729
  Probe

SEQ ID NO: 15553 - DNA, 26 bp, Artificial Sequence
  Probe
accatcctctgctatagactcccttt

SEQ ID NO: 15554 - DNA, 26 bp, Artificial Sequence
  Probe
accatcctctgctatcggagtttttt

SEQ ID NO: 15555 - DNA, 21 bp, Artificial Sequence
  Probe
acccaacttacacttaggaga

SEQ ID NO: 15556 - DNA, 22 bp, Artificial Sequence
  Probe
acccaacttacacttaggagat

SEQ ID NO: 15557 - DNA, 23 bp, Artificial Sequence
  Probe
acccaacttacacttaggagatt

SEQ ID NO: 15558 - DNA, 25 bp, Artificial Sequence
  Probe
acccaacttacacttaggagatttc

SEQ ID NO: 15559 - DNA, 26 bp, Artificial Sequence
  Probe
acccaacttacacttaggagatttca

SEQ ID NO: 15560 - DNA, 27 bp, Artificial Sequence
  Probe
acccaacttacacttaggagatttcaa

SEQ ID NO: 15561 - DNA, 30 bp, Artificial Sequence; identical to SEQ ID NO: 2739
  Probe

SEQ ID NO: 15562 - DNA, 31 bp, Artificial Sequence; identical to SEQ ID NO: 2740
  Probe

SEQ ID NO: 15563 - DNA, 34 bp, Artificial Sequence
  Probe
acccaacttacacttaggagatttcaacttaact

SEQ ID NO: 15564 - DNA, 39 bp, Artificial Sequence
  Probe
acccaacttacacttaggagatttcaacttaacttgacc

SEQ ID NO: 15565 - DNA, 40 bp, Artificial Sequence; identical to SEQ ID NO: 2743
  Probe

SEQ ID NO: 15566 - DNA, 42 bp, Artificial Sequence; identical to SEQ ID NO: 2744
  Probe

SEQ ID NO: 15567 - DNA, 50 bp, Artificial Sequence; identical to SEQ ID NO: 2749
  Probe

SEQ ID NO: 15568 - DNA, 18 bp, Artificial Sequence
  Probe
acccaagaacagggtttg

SEQ ID NO: 15569 - DNA, 21 bp, Artificial Sequence
  Probe
acccaagaacagggtttgtta

SEQ ID NO: 15570 - DNA, 28 bp, Artificial Sequence
  Probe
acccacacccacccaagaacagggtttg

SEQ ID NO: 15571 - DNA, 29 bp, Artificial Sequence
  Probe
acccacacccacccaagaacagggtttgt

SEQ ID NO: 15572 - DNA, 30 bp, Artificial Sequence
  Probe
acccacacccacccaagaacagggtttgtt

SEQ ID NO: 15573 - DNA, 31 bp, Artificial Sequence; identical to SEQ ID NO: 2755
  Probe

SEQ ID NO: 15574 - DNA, 22 bp, Artificial Sequence
  Probe
acccacccaagaacagggtttg

SEQ ID NO: 15575 - DNA, 23 bp, Artificial Sequence
  Probe
acccacccaagaacagggtttgt

SEQ ID NO: 15576 - DNA, 24 bp, Artificial Sequence
  Probe
acccacccaagaacagggtttgtt

SEQ ID NO: 15577 - DNA, 25 bp, Artificial Sequence
  Probe
acccacccaagaacagggtttgtta

SEQ ID NO: 15578 - DNA, 28 bp, Artificial Sequence
  Probe
acccacccaagaacagggtttgttaaga

SEQ ID NO: 15579 - DNA, 16 bp, Artificial Sequence
  Probe
acccagaggtcgatgg

SEQ ID NO: 15580 - DNA, 17 bp, Artificial Sequence
  Probe
acccagaggtcgatgga

SEQ ID NO: 15581 - DNA, 19 bp, Artificial Sequence
  Probe
acccagaggtcgatggatc

SEQ ID NO: 15582 - DNA, 34 bp, Artificial Sequence
  Probe
acccagaggtcgatggatcgaaaccatcctctgc

SEQ ID NO: 15583 - DNA, 35 bp, Artificial Sequence
  Probe
acccagaggtcgatggatcgaaaccatcctctgct

SEQ ID NO: 15584 - DNA, 36 bp, Artificial Sequence
  Probe
acccagaggtcgatggatcgaaaccatcctctgcta

SEQ ID NO: 15585 - DNA, 37 bp, Artificial Sequence
  Probe
acccagaggtcgatggatcgaaaccatcctctgctag

SEQ ID NO: 15586 - DNA, 38 bp, Artificial Sequence
  Probe
acccagaggtcgatggatcgaaaccatcctctgctagg

SEQ ID NO: 15587 - DNA, 39 bp, Artificial Sequence
  Probe
acccagaggtcgatggatcgaaaccatcctctgctaggg

SEQ ID NO: 15588 - DNA, 39 bp, Artificial Sequence; identical to SEQ ID NO: 2760
  Probe

SEQ ID NO: 15589 - DNA, 37 bp, Artificial Sequence
  Probe
acccagaggtcgatggatcgaaaccatcctctgctat

SEQ ID NO: 15590 - DNA, 38 bp, Artificial Sequence; identical to SEQ ID NO: 2761
  Probe

SEQ ID NO: 15591 - DNA, 38 bp, Artificial Sequence
  Probe
acccagaggtcgatggatcgaaaccatcctctgctatt

SEQ ID NO: 15592 - DNA, 39 bp, Artificial Sequence
  Probe
acccagaggtcgatggatcgaaaccatcctctgctattt

SEQ ID NO: 15593 - DNA, 33 bp, Artificial Sequence; identical to SEQ ID NO: 2762
  Probe

SEQ ID NO: 15594 - DNA, 34 bp, Artificial Sequence
  Probe
acccagatagctcagtcagtagagcatcagactt

SEQ ID NO: 15595 - DNA, 38 bp, Artificial Sequence
  Probe
acccaggcggcccgggttcgactcccggtgtgggaacg

SEQ ID NO: 15596 - DNA, 39 bp, Artificial Sequence; identical to SEQ ID NO: 2764
  Probe

SEQ ID NO: 15597 - DNA, 30 bp, Artificial Sequence
  Probe
acccaggtggcccgggttcgactcccggta

SEQ ID NO: 15598 - DNA, 34 bp, Artificial Sequence
  Probe
acccaggtggcccgggttcgactcccggtatggg

SEQ ID NO: 15599 - DNA, 35 bp, Artificial Sequence
  Probe
acccaggtggcccgggttcgactcccggtatggga

SEQ ID NO: 15600 - DNA, 36 bp, Artificial Sequence; identical to SEQ ID NO: 2765
  Probe

SEQ ID NO: 15601 - DNA, 38 bp, Artificial Sequence
  Probe
acccaggtggcccgggttcgactcccggtatgggaaca

SEQ ID NO: 15602 - DNA, 39 bp, Artificial Sequence; identical to SEQ ID NO: 2766
  Probe

SEQ ID NO: 15603 - DNA, 38 bp, Artificial Sequence
  Probe
acccaggtggcccgggttcgactcccggtatgggaacg

SEQ ID NO: 15604 - DNA, 26 bp, Artificial Sequence
  Probe
acccatggccaacctcctactcctca

SEQ ID NO: 15605 - DNA, 16 bp, Artificial Sequence
  Probe
accccactcctggtag

SEQ ID NO: 15606 - DNA, 27 bp, Artificial Sequence
  Probe
accccataaacaaataggtttggtcct

SEQ ID NO: 15607 - DNA, 31 bp, Artificial Sequence
  Probe
accccataaacaaataggtttggtcctagcc

SEQ ID NO: 15608 - DNA, 44 bp, Artificial Sequence
  Probe
accccatcctaaagtaaggtcagctaaataagctatcgggccca

SEQ ID NO: 15609 - DNA, 30 bp, Artificial Sequence
  Probe
accccccacagtttatgtagcttacctcct

SEQ ID NO: 15610 - DNA, 22 bp, Artificial Sequence
  Probe
accccgaaaatgttggttatac

SEQ ID NO: 15611 - DNA, 23 bp, Artificial Sequence
  Probe
accccgaaaatgttggttatacc

SEQ ID NO: 15612 - DNA, 24 bp, Artificial Sequence
  Probe
accccgaaaatgttggttataccc

SEQ ID NO: 15613 - DNA, 25 bp, Artificial Sequence
  Probe
accccgaaaatgttggttataccct

SEQ ID NO: 15614 - DNA, 27 bp, Artificial Sequence
  Probe
accccgaaaatgttggttatacccttc

SEQ ID NO: 15615 - DNA, 28 bp, Artificial Sequence
  Probe
accccgaaaatgttggttatacccttcc

SEQ ID NO: 15616 - DNA, 29 bp, Artificial Sequence
  Probe
accccgaaaatgttggttatacccttccc

SEQ ID NO: 15617 - DNA, 30 bp, Artificial Sequence; identical to SEQ ID NO: 2769
  Probe

SEQ ID NO: 15618 - DNA, 31 bp, Artificial Sequence; identical to SEQ ID NO: 2770
  Probe

SEQ ID NO: 15619 - DNA, 36 bp, Artificial Sequence; identical to SEQ ID NO: 2771
  Probe

SEQ ID NO: 15620 - DNA, 37 bp, Artificial Sequence; identical to SEQ ID NO: 2772
  Probe

SEQ ID NO: 15621 - DNA, 38 bp, Artificial Sequence; identical to SEQ ID NO: 2773
  Probe

SEQ ID NO: 15622 - DNA, 15 bp, Artificial Sequence
  Probe
accccgacatcatta

SEQ ID NO: 15623 - DNA, 20 bp, Artificial Sequence
  Probe
accccgacatcattaccggg

SEQ ID NO: 15624 - DNA, 22 bp, Artificial Sequence
  Probe
accccgacatcattaccgggtt

SEQ ID NO: 15625 - DNA, 23 bp, Artificial Sequence
  Probe
accccgacatcattaccgggttt

SEQ ID NO: 15626 - DNA, 24 bp, Artificial Sequence
  Probe
accccgacatcattaccgggtttt

SEQ ID NO: 15627 - DNA, 25 bp, Artificial Sequence
  Probe
accccgacatcattaccgggttttc

SEQ ID NO: 15628 - DNA, 26 bp, Artificial Sequence
  Probe
accccgacatcattaccgggttttcc

SEQ ID NO: 15629 - DNA, 27 bp, Artificial Sequence
  Probe
accccgacatcattaccgggttttcct

SEQ ID NO: 15630 - DNA, 28 bp, Artificial Sequence
  Probe
accccgacatcattaccgggttttcctc

SEQ ID NO: 15631 - DNA, 29 bp, Artificial Sequence
  Probe
accccgacatcattaccgggttttcctct

SEQ ID NO: 15632 - DNA, 30 bp, Artificial Sequence; identical to SEQ ID NO: 2782
  Probe

SEQ ID NO: 15633 - DNA, 30 bp, Artificial Sequence
  Probe
acccgggttcgattcccggccaacgcaagt

SEQ ID NO: 15634 - DNA, 30 bp, Artificial Sequence
  Probe
acccgggttcgattcccggccaacgcagtg

SEQ ID NO: 15635 - DNA, 19 bp, Artificial Sequence
  Probe
accctgtggtctagtggct

SEQ ID NO: 15636 - DNA, 18 bp, Artificial Sequence
  Probe
accctgtggtctagtggt

SEQ ID NO: 15637 - DNA, 22 bp, Artificial Sequence
  Probe
accctgtggtctagtggttagg

SEQ ID NO: 15638 - DNA, 23 bp, Artificial Sequence
  Probe
accctgtggtctagtggttagga

SEQ ID NO: 15639 - DNA, 36 bp, Artificial Sequence; identical to SEQ ID NO: 158
  Probe

SEQ ID NO: 15640 - DNA, 38 bp, Artificial Sequence
  Probe
accgaaaggttggtggttcgagcccacccagggacgcc

SEQ ID NO: 15641 - DNA, 39 bp, Artificial Sequence; identical to SEQ ID NO: 2787
  Probe

SEQ ID NO: 15642 - DNA, 38 bp, Artificial Sequence
  Probe
accgaagatcacgggttcgaaccccgtccgtgcctgat

SEQ ID NO: 15643 - DNA, 38 bp, Artificial Sequence
  Probe
accgaagatcgcgggttcgaaccccgtccgtgcctgag

SEQ ID NO: 15644 - DNA, 31 bp, Artificial Sequence
  Probe
accgaagtctctgtggcgcaatcggttagcg

SEQ ID NO: 15645 - DNA, 34 bp, Artificial Sequence
  Probe
accgaagtctctgtggcgcaatcggttagcgcgt

SEQ ID NO: 15646 - DNA, 35 bp, Artificial Sequence
  Probe
accgaagtctctgtggcgcaatcggttagcgcgtt

SEQ ID NO: 15647 - DNA, 36 bp, Artificial Sequence
  Probe
accgaagtctctgtggcgcaatcggttagcgcgttc

SEQ ID NO: 15648 - DNA, 23 bp, Artificial Sequence
  Probe
accgagcgtccaagctctttcca

SEQ ID NO: 15649 - DNA, 25 bp, Artificial Sequence
  Probe
accgagcgtccaagctctttccatt

SEQ ID NO: 15650 - DNA, 26 bp, Artificial Sequence
  Probe
accgagcgtccaagctctttccattt

SEQ ID NO: 15651 - DNA, 27 bp, Artificial Sequence
  Probe
accgagcgtccaagctctttccatttt

SEQ ID NO: 15652 - DNA, 28 bp, Artificial Sequence
  Probe
accgagcgtccaagctctttccattttt

SEQ ID NO: 15653 - DNA, 37 bp, Artificial Sequence
  Probe
accgccgcagcccgggttcgattcccggtcatggaac

SEQ ID NO: 15654 - DNA, 38 bp, Artificial Sequence
  Probe
accgccgcagcccgggttcgattcccggtcatggaacc

SEQ ID NO: 15655 - DNA, 39 bp, Artificial Sequence; identical to SEQ ID NO: 2791
  Probe

SEQ ID NO: 15656 - DNA, 36 bp, Artificial Sequence
  Probe
accgccgcggcccgggttcgattcccggccagggaa

SEQ ID NO: 15657 - DNA, 39 bp, Artificial Sequence
  Probe
accgccgcggcccgggttcgattcccggccagggaattg

SEQ ID NO: 15658 - DNA, 31 bp, Artificial Sequence
  Probe
accgccgcggcccgggttcgattcccggtca

SEQ ID NO: 15659 - DNA, 34 bp, Artificial Sequence
  Probe
accgccgcggcccgggttcgattcccggtcaggg

SEQ ID NO: 15660 - DNA, 37 bp, Artificial Sequence; identical to SEQ ID NO: 2792
  Probe

SEQ ID NO: 15661 - DNA, 38 bp, Artificial Sequence
  Probe
accgccgcggcccgggttcgattcccggtcagggaaag

SEQ ID NO: 15662 - DNA, 39 bp, Artificial Sequence
  Probe
accgccgcggcccgggttcgattcccggtcagggaaaga

SEQ ID NO: 15663 - DNA, 37 bp, Artificial Sequence; identical to SEQ ID NO: 2793
  Probe

SEQ ID NO: 15664 - DNA, 38 bp, Artificial Sequence
  Probe
accgccgcggcccgggttcgattcccggtcagggaagc

SEQ ID NO: 15665 - DNA, 39 bp, Artificial Sequence; identical to SEQ ID NO: 2794
  Probe

SEQ ID NO: 15666 - DNA, 38 bp, Artificial Sequence
  Probe
accgccgcggcccgggttcgattcccggtcagggaagt

SEQ ID NO: 15667 - DNA, 39 bp, Artificial Sequence; identical to SEQ ID NO: 2795
  Probe

SEQ ID NO: 15668 - DNA, 37 bp, Artificial Sequence; identical to SEQ ID NO: 2796
  Probe

SEQ ID NO: 15669 - DNA, 38 bp, Artificial Sequence
  Probe
accgccgcggcccgggttcgattcccggtcagggaatg

SEQ ID NO: 15670 - DNA, 39 bp, Artificial Sequence
  Probe
accgccgcggcccgggttcgattcccggtcagggaatga

SEQ ID NO: 15671 - DNA, 38 bp, Artificial Sequence
  Probe
accgccgcggcccgggttcgattcccggtcagggaatt

SEQ ID NO: 15672 - DNA, 39 bp, Artificial Sequence; identical to SEQ ID NO: 2797
  Probe

SEQ ID NO: 15673 - DNA, 35 bp, Artificial Sequence
  Probe
accgcctggtttccgtagtgtagtggttatcacgt

SEQ ID NO: 15674 - DNA, 36 bp, Artificial Sequence
  Probe
accgcctggtttccgtagtgtagtggttatcacgtt

SEQ ID NO: 15675 - DNA, 38 bp, Artificial Sequence
  Probe
accgcctggtttccgtagtgtagtggttatcacgttcg

SEQ ID NO: 15676 - DNA, 30 bp, Artificial Sequence
  Probe
accgctctgagctaaacctagccccaaacc

SEQ ID NO: 15677 - DNA, 31 bp, Artificial Sequence
  Probe
accgctctgagctaaacctagccccaaaccc

SEQ ID NO: 15678 - DNA, 33 bp, Artificial Sequence
  Probe
accgctctgagctaaacctagccccaaacccac

SEQ ID NO: 15679 - DNA, 27 bp, Artificial Sequence
  Probe
accgctgccacacctcagaaggtctca

SEQ ID NO: 15680 - DNA, 29 bp, Artificial Sequence
  Probe
accgctgccacacctcagaaggtctcact

SEQ ID NO: 15681 - DNA, 32 bp, Artificial Sequence
  Probe
accgctgccacacctcagaaggtctcactttt

SEQ ID NO: 15682 - DNA, 25 bp, Artificial Sequence
  Probe
accgctgccagggttgctgtctttt

SEQ ID NO: 15683 - DNA, 26 bp, Artificial Sequence
  Probe
accgctgccagggttgctgtcttttt

SEQ ID NO: 15684 - DNA, 24 bp, Artificial Sequence
  Probe
accggagatgaaaacctttttcca

SEQ ID NO: 15685 - DNA, 25 bp, Artificial Sequence
  Probe
accggagatgaaaacctttttccaa

SEQ ID NO: 15686 - DNA, 31 bp, Artificial Sequence; identical to SEQ ID NO: 2802
  Probe

SEQ ID NO: 15687 - DNA, 32 bp, Artificial Sequence; identical to SEQ ID NO: 2803
  Probe

SEQ ID NO: 15688 - DNA, 33 bp, Artificial Sequence; identical to SEQ ID NO: 2804
  Probe

SEQ ID NO: 15689 - DNA, 34 bp, Artificial Sequence; identical to SEQ ID NO: 2805
  Probe

SEQ ID NO: 15690 - DNA, 30 bp, Artificial Sequence
  Probe
accggagcgttggtggtatagtggtaagca

SEQ ID NO: 15691 - DNA, 17 bp, Artificial Sequence
  Probe
accgggcggaaacaaag

SEQ ID NO: 15692 - DNA, 16 bp, Artificial Sequence
  Probe
accgggcggaaacaca

SEQ ID NO: 15693 - DNA, 17 bp, Artificial Sequence
  Probe
accgggcggaaacacac

SEQ ID NO: 15694 - DNA, 30 bp, Artificial Sequence
  Probe
accgggcggaaacacactaaaaaatccctt

SEQ ID NO: 15695 - DNA, 31 bp, Artificial Sequence
  Probe
accgggcggaaacacactaaaaaatcccttt

SEQ ID NO: 15696 - DNA, 17 bp, Artificial Sequence
  Probe
accgggcggaaacacct

SEQ ID NO: 15697 - DNA, 18 bp, Artificial Sequence
  Probe
accgggcggaaacacctc

SEQ ID NO: 15698 - DNA, 19 bp, Artificial Sequence
  Probe
accgggcggaaacacctcc

SEQ ID NO: 15699 - DNA, 17 bp, Artificial Sequence
  Probe
accgggcggaaacacgt

SEQ ID NO: 15700 - DNA, 17 bp, Artificial Sequence
  Probe
accgggcggaaacaggt

SEQ ID NO: 15701 - DNA, 30 bp, Artificial Sequence; identical to SEQ ID NO: 2808
  Probe

SEQ ID NO: 15702 - DNA, 21 bp, Artificial Sequence
  Probe
accggggttcgattccccgac

SEQ ID NO: 15703 - DNA, 23 bp, Artificial Sequence
  Probe
accggggttcgattccccgacgg

SEQ ID NO: 15704 - DNA, 26 bp, Artificial Sequence
  Probe
accggggttcgattccccgacgggga

SEQ ID NO: 15705 - DNA, 27 bp, Artificial Sequence
  Probe
accggggttcgattccccgacggggag

SEQ ID NO: 15706 - DNA, 28 bp, Artificial Sequence
  Probe
accggggttcgattccccgacggggaga

SEQ ID NO: 15707 - DNA, 30 bp, Artificial Sequence
  Probe
accggggttcgattccccgacggggagaaa

SEQ ID NO: 15708 - DNA, 29 bp, Artificial Sequence
  Probe
accggggttcgattccccgacggggagac

SEQ ID NO: 15709 - DNA, 30 bp, Artificial Sequence
  Probe
accggggttcgattccccgacggggagacg

SEQ ID NO: 15710 - DNA, 30 bp, Artificial Sequence
  Probe
accggggttcgattccccgacggggagagt

SEQ ID NO: 15711 - DNA, 28 bp, Artificial Sequence
  Probe
accggggttcgattccccgacggggagg

SEQ ID NO: 15712 - DNA, 29 bp, Artificial Sequence
  Probe
accggggttcgattccccgacggggaggc

SEQ ID NO: 15713 - DNA, 30 bp, Artificial Sequence; identical to SEQ ID NO: 2811
  Probe

SEQ ID NO: 15714 - DNA, 30 bp, Artificial Sequence
  Probe
accggggttcgattccccgacggggaggcc

SEQ ID NO: 15715 - DNA, 32 bp, Artificial Sequence
  Probe
accggtttccgtagtgtagcggttatcacatt

SEQ ID NO: 15716 - DNA, 44 bp, Artificial Sequence
  Probe
accgtgagcccggatagctcagtcggtagagcatcagactttta

SEQ ID NO: 15717 - DNA, 25 bp, Artificial Sequence
  Probe
accgttaacttccaattaactagtt

SEQ ID NO: 15718 - DNA, 31 bp, Artificial Sequence; identical to SEQ ID NO: 2814
  Probe

SEQ ID NO: 15719 - DNA, 50 bp, Artificial Sequence; identical to SEQ ID NO: 2815
  Probe

SEQ ID NO: 15720 - DNA, 25 bp, Artificial Sequence
  Probe
acctagccccaaacccactccacct

SEQ ID NO: 15721 - DNA, 15 bp, Artificial Sequence
  Probe
acctattctcaaact

SEQ ID NO: 15722 - DNA, 16 bp, Artificial Sequence
  Probe
acctattctcaaactt

SEQ ID NO: 15723 - DNA, 17 bp, Artificial Sequence
  Probe
acctattctcaaacttt

SEQ ID NO: 15724 - DNA, 18 bp, Artificial Sequence
  Probe
acctattctcaaacttta

SEQ ID NO: 15725 - DNA, 19 bp, Artificial Sequence
  Probe
acctattctcaaactttaa

SEQ ID NO: 15726 - DNA, 20 bp, Artificial Sequence
  Probe
acctattctcaaactttaaa

SEQ ID NO: 15727 - DNA, 21 bp, Artificial Sequence
  Probe
acctattctcaaactttaaat

SEQ ID NO: 15728 - DNA, 22 bp, Artificial Sequence
  Probe
acctattctcaaactttaaatg

SEQ ID NO: 15729 - DNA, 23 bp, Artificial Sequence
  Probe
acctattctcaaactttaaatgg

SEQ ID NO: 15730 - DNA, 24 bp, Artificial Sequence
  Probe
acctattctcaaactttaaatggg

SEQ ID NO: 15731 - DNA, 25 bp, Artificial Sequence
  Probe
acctattctcaaactttaaatgggc

SEQ ID NO: 15732 - DNA, 26 bp, Artificial Sequence
  Probe
acctattctcaaactttaaatgggca

SEQ ID NO: 15733 - DNA, 31 bp, Artificial Sequence
  Probe
acctattctcaaactttaaatgggcaagaag

SEQ ID NO: 15734 - DNA, 32 bp, Artificial Sequence; identical to SEQ ID NO: 2827
  Probe

SEQ ID NO: 15735 - DNA, 33 bp, Artificial Sequence; identical to SEQ ID NO: 2828
  Probe

SEQ ID NO: 15736 - DNA, 34 bp, Artificial Sequence
  Probe
acctattctcaaactttaaatgggcaagaagccc

SEQ ID NO: 15737 - DNA, 35 bp, Artificial Sequence
  Probe
acctattctcaaactttaaatgggcaagaagccca

SEQ ID NO: 15738 - DNA, 36 bp, Artificial Sequence; identical to SEQ ID NO: 2829
  Probe

SEQ ID NO: 15739 - DNA, 37 bp, Artificial Sequence; identical to SEQ ID NO: 2830
  Probe

SEQ ID NO: 15740 - DNA, 38 bp, Artificial Sequence
  Probe
acctattctcaaactttaaatgggcaagaagcccagct

SEQ ID NO: 15741 - DNA, 39 bp, Artificial Sequence; identical to SEQ ID NO: 2831
  Probe

SEQ ID NO: 15742 - DNA, 16 bp, Artificial Sequence
  Probe
acctcagaaggtctca

SEQ ID NO: 15743 - DNA, 17 bp, Artificial Sequence
  Probe
acctcagaaggtctcac

SEQ ID NO: 15744 - DNA, 19 bp, Artificial Sequence
  Probe
acctcagaaggtctcactt

SEQ ID NO: 15745 - DNA, 20 bp, Artificial Sequence
  Probe
acctcagaaggtctcacttt

SEQ ID NO: 15746 - DNA, 21 bp, Artificial Sequence
  Probe
acctcagaaggtctcactttt

SEQ ID NO: 15747 - DNA, 22 bp, Artificial Sequence
  Probe
acctcagaaggtctcacttttc

SEQ ID NO: 15748 - DNA, 29 bp, Artificial Sequence
  Probe
acctcagaaggtctcacttttctatccat

SEQ ID NO: 15749 - DNA, 15 bp, Artificial Sequence
  Probe
acctcctactcctca

SEQ ID NO: 15750 - DNA, 17 bp, Artificial Sequence
  Probe
acctcctcaaagcaata

SEQ ID NO: 15751 - DNA, 19 bp, Artificial Sequence
  Probe
acctcctcaaagcaataca

SEQ ID NO: 15752 - DNA, 21 bp, Artificial Sequence
  Probe
acctcctcaaagcaatacact

SEQ ID NO: 15753 - DNA, 29 bp, Artificial Sequence
  Probe
acctgtctctgtggcgcaatcggttagcg

SEQ ID NO: 15754 - DNA, 31 bp, Artificial Sequence
  Probe
acctgtctctgtggcgcaatcggttagcgcg

SEQ ID NO: 15755 - DNA, 32 bp, Artificial Sequence
  Probe
acctgtctctgtggcgcaatcggttagcgcgt

SEQ ID NO: 15756 - DNA, 33 bp, Artificial Sequence
  Probe
acctgtctctgtggcgcaatcggttagcgcgtt

SEQ ID NO: 15757 - DNA, 34 bp, Artificial Sequence
  Probe
acctgtctctgtggcgcaatcggttagcgcgttc

SEQ ID NO: 15758 - DNA, 36 bp, Artificial Sequence
  Probe
acctgtctctgtggcgcaatcggttagcgcgttcgg

SEQ ID NO: 15759 - DNA, 50 bp, Artificial Sequence
  Probe
acctgtctctgtggcgcaatcggttagcgcgttcggctgttaaccgaaag

SEQ ID NO: 15760 - DNA, 31 bp, Artificial Sequence
  Probe
acctgtctctgtggcgtagtcggttagcgcg

SEQ ID NO: 15761 - DNA, 24 bp, Artificial Sequence
  Probe
accttttaagttaaagattaagag

SEQ ID NO: 15762 - DNA, 26 bp, Artificial Sequence
  Probe
accttttaagttaaagattaagagaa

SEQ ID NO: 15763 - DNA, 27 bp, Artificial Sequence
  Probe
accttttaagttaaagattaagagaac

SEQ ID NO: 15764 - DNA, 28 bp, Artificial Sequence
  Probe
accttttaagttaaagattaagagaacc

SEQ ID NO: 15765 - DNA, 29 bp, Artificial Sequence
  Probe
accttttaagttaaagattaagagaacca

SEQ ID NO: 15766 - DNA, 30 bp, Artificial Sequence
  Probe
accttttaagttaaagattaagagaaccaa

SEQ ID NO: 15767 - DNA, 31 bp, Artificial Sequence
  Probe
accttttaagttaaagattaagagaaccaac

SEQ ID NO: 15768 - DNA, 32 bp, Artificial Sequence
  Probe
accttttaagttaaagattaagagaaccaaca

SEQ ID NO: 15769 - DNA, 46 bp, Artificial Sequence; identical to SEQ ID NO: 2839
  Probe

SEQ ID NO: 15770 - DNA, 50 bp, Artificial Sequence; identical to SEQ ID NO: 2840
  Probe

SEQ ID NO: 15771 - DNA, 50 bp, Artificial Sequence; identical to SEQ ID NO: 2841
  Probe

SEQ ID NO: 15772 - DNA, 18 bp, Artificial Sequence
  Probe
acgaccccttatttaccg

SEQ ID NO: 15773 - DNA, 36 bp, Artificial Sequence
  Probe
acgaggtcccgggttcaatccccggcacctccacca

SEQ ID NO: 15774 - DNA, 37 bp, Artificial Sequence
  Probe
acgcagaaggtcctgggttcaagccccagtggaacca

SEQ ID NO: 15775 - DNA, 38 bp, Artificial Sequence
  Probe
acgcagaaggtcctgggttcaagccccagtggaaccat

SEQ ID NO: 15776 - DNA, 40 bp, Artificial Sequence
  Probe
acgcagaaggtcctgggttcaagccccagtggaaccatgg

SEQ ID NO: 15777 - DNA, 23 bp, Artificial Sequence
  Probe
acgcagaaggtcctgggttcgag

SEQ ID NO: 15778 - DNA, 33 bp, Artificial Sequence
  Probe
acgcagaaggtcctgggttcgagccccagtgga

SEQ ID NO: 15779 - DNA, 39 bp, Artificial Sequence; identical to SEQ ID NO: 2845
  Probe

SEQ ID NO: 15780 - DNA, 40 bp, Artificial Sequence; identical to SEQ ID NO: 2846
  Probe

SEQ ID NO: 15781 - DNA, 40 bp, Artificial Sequence; identical to SEQ ID NO: 2847
  Probe

SEQ ID NO: 15782 - DNA, 40 bp, Artificial Sequence
  Probe
acgcagaaggtcctgggttcgagccccagtggaaccatga

SEQ ID NO: 15783 - DNA, 18 bp, Artificial Sequence
  Probe
acgccaaggtcgcgggtt

SEQ ID NO: 15784 - DNA, 19 bp, Artificial Sequence
  Probe
acgccaaggtcgcgggttc

SEQ ID NO: 15785 - DNA, 29 bp, Artificial Sequence
  Probe
acgccaaggtcgcgggttcgatccccgta

SEQ ID NO: 15786 - DNA, 39 bp, Artificial Sequence; identical to SEQ ID NO: 2849
  Probe

SEQ ID NO: 15787 - DNA, 39 bp, Artificial Sequence; identical to SEQ ID NO: 2850
  Probe

SEQ ID NO: 15788 - DNA, 39 bp, Artificial Sequence
  Probe
acgccaaggtcgcgggttcgatccccgtacgggccactt

SEQ ID NO: 15789 - DNA, 39 bp, Artificial Sequence; identical to SEQ ID NO: 2851
  Probe

SEQ ID NO: 15790 - DNA, 39 bp, Artificial Sequence; identical to SEQ ID NO: 2852
  Probe

SEQ ID NO: 15791 - DNA, 36 bp, Artificial Sequence
  Probe
acgcgaaaggtccccggttcgaaaccgggcggaaac

SEQ ID NO: 15792 - DNA, 37 bp, Artificial Sequence
  Probe
acgcgaaaggtccccggttcgaaaccgggcggaaaca

SEQ ID NO: 15793 - DNA, 38 bp, Artificial Sequence
  Probe
acgcgaaaggtccccggttcgaaaccgggcggaaacac

SEQ ID NO: 15794 - DNA, 39 bp, Artificial Sequence; identical to SEQ ID NO: 173
  Probe

SEQ ID NO: 15795 - DNA, 40 bp, Artificial Sequence; identical to SEQ ID NO: 2854
  Probe

SEQ ID NO: 15796 - DNA, 34 bp, Artificial Sequence
  Probe
acgcgaaaggtccccggttcgatcccgggcggaa

SEQ ID NO: 15797 - DNA, 39 bp, Artificial Sequence
  Probe
acgcgaaaggtccccggttcgatcccgggcggaaacagg

SEQ ID NO: 15798 - DNA, 40 bp, Artificial Sequence; identical to SEQ ID NO: 2855
  Probe

SEQ ID NO: 15799 - DNA, 20 bp, Artificial Sequence
  Probe
acgcgaaaggtccccggttt

SEQ ID NO: 15800 - DNA, 21 bp, Artificial Sequence
  Probe
acgcgaaaggtccccggtttg

SEQ ID NO: 15801 - DNA, 32 bp, Artificial Sequence
  Probe
acgcgaggcattggtggttcagtggtagaatt

SEQ ID NO: 15802 - DNA, 32 bp, Artificial Sequence
  Probe
acgcgggagacccgggttcaattcccggccaa

SEQ ID NO: 15803 - DNA, 33 bp, Artificial Sequence
  Probe
acgcgggagacccgggttcaattcccggccaat

SEQ ID NO: 15804 - DNA, 34 bp, Artificial Sequence
  Probe
acgcgggagacccgggttcaattcccggccaatg

SEQ ID NO: 15805 - DNA, 36 bp, Artificial Sequence
  Probe
acgcgggagacccgggttcaattcccggccaatgca

SEQ ID NO: 15806 - DNA, 37 bp, Artificial Sequence
  Probe
acgcgggagacccgggttcaattcccggccaatgcaa

SEQ ID NO: 15807 - DNA, 39 bp, Artificial Sequence
  Probe
acgcgggagacccgggttcaattcccggccaatgcaaaa

SEQ ID NO: 15808 - DNA, 16 bp, Artificial Sequence
  Probe
acgcgggagaccgggg

SEQ ID NO: 15809 - DNA, 19 bp, Artificial Sequence
  Probe
acgcgggagaccggggttc

SEQ ID NO: 15810 - DNA, 29 bp, Artificial Sequence
  Probe
acgcgggagaccggggttcaattccccga

SEQ ID NO: 15811 - DNA, 37 bp, Artificial Sequence; identical to SEQ ID NO: 2859
  Probe

SEQ ID NO: 15812 - DNA, 38 bp, Artificial Sequence; identical to SEQ ID NO: 2860
  Probe

SEQ ID NO: 15813 - DNA, 39 bp, Artificial Sequence; identical to SEQ ID NO: 2861
  Probe

SEQ ID NO: 15814 - DNA, 40 bp, Artificial Sequence; identical to SEQ ID NO: 2862
  Probe

SEQ ID NO: 15815 - DNA, 20 bp, Artificial Sequence
  Probe
acgcgggagaccggggttcg

SEQ ID NO: 15816 - DNA, 21 bp, Artificial Sequence
  Probe
acgcgggagaccggggttcga

SEQ ID NO: 15817 - DNA, 22 bp, Artificial Sequence
  Probe
acgcgggagaccggggttcgat

SEQ ID NO: 15818 - DNA, 26 bp, Artificial Sequence
  Probe
acgcgggagaccggggttcgattccc

SEQ ID NO: 15819 - DNA, 27 bp, Artificial Sequence
  Probe
acgcgggagaccggggttcgattcccc

SEQ ID NO: 15820 - DNA, 32 bp, Artificial Sequence
  Probe
acgcgggagaccggggttcgattccccaacgg

SEQ ID NO: 15821 - DNA, 33 bp, Artificial Sequence
  Probe
acgcgggagaccggggttcgattccccaacggg

SEQ ID NO: 15822 - DNA, 36 bp, Artificial Sequence
  Probe
acgcgggagaccggggttcgattccccaacggggag

SEQ ID NO: 15823 - DNA, 39 bp, Artificial Sequence; identical to SEQ ID NO: 2864
  Probe

SEQ ID NO: 15824 - DNA, 37 bp, Artificial Sequence; identical to SEQ ID NO: 2865
  Probe

SEQ ID NO: 15825 - DNA, 38 bp, Artificial Sequence; identical to SEQ ID NO: 2866
  Probe

SEQ ID NO: 15826 - DNA, 39 bp, Artificial Sequence; identical to SEQ ID NO: 2867
  Probe

SEQ ID NO: 15827 - DNA, 50 bp, Artificial Sequence
  Probe
acgcgggagaccggggttcgattccccgacggggagaaaagttgcttttt

SEQ ID NO: 15828 - DNA, 38 bp, Artificial Sequence; identical to SEQ ID NO: 2869
  Probe

SEQ ID NO: 15829 - DNA, 39 bp, Artificial Sequence; identical to SEQ ID NO: 2870
  Probe

SEQ ID NO: 15830 - DNA, 38 bp, Artificial Sequence
  Probe
acgcgggagaccggggttcgattccccgacggggagag

SEQ ID NO: 15831 - DNA, 39 bp, Artificial Sequence; identical to SEQ ID NO: 2871
  Probe

SEQ ID NO: 15832 - DNA, 37 bp, Artificial Sequence; identical to SEQ ID NO: 2872
  Probe

SEQ ID NO: 15833 - DNA, 38 bp, Artificial Sequence
  Probe
acgcgggagaccggggttcgattccccgacggggagga

SEQ ID NO: 15834 - DNA, 39 bp, Artificial Sequence
  Probe
acgcgggagaccggggttcgattccccgacggggaggag

SEQ ID NO: 15835 - DNA, 38 bp, Artificial Sequence; identical to SEQ ID NO: 2873
  Probe

SEQ ID NO: 15836 - DNA, 39 bp, Artificial Sequence; identical to SEQ ID NO: 2874
  Probe

SEQ ID NO: 15837 - DNA, 40 bp, Artificial Sequence
  Probe
acgcgggagaccggggttcgattccccgacggggaggcac

SEQ ID NO: 15838 - DNA, 47 bp, Artificial Sequence; identical to SEQ ID NO: 2875
  Probe

SEQ ID NO: 15839 - DNA, 48 bp, Artificial Sequence
  Probe
acgcgggagaccggggttcgattccccgacggggaggcacagtaattg

SEQ ID NO: 15840 - DNA, 50 bp, Artificial Sequence
  Probe
acgcgggagaccggggttcgattccccgacggggaggcacagtaattgtt

SEQ ID NO: 15841 - DNA, 39 bp, Artificial Sequence; identical to SEQ ID NO: 2877
  Probe

SEQ ID NO: 15842 - DNA, 41 bp, Artificial Sequence
  Probe
acgcgggagaccggggttcgattccccgacggggaggccgg

SEQ ID NO: 15843 - DNA, 16 bp, Artificial Sequence
  Probe
acgcgggaggcccggg

SEQ ID NO: 15844 - DNA, 19 bp, Artificial Sequence
  Probe
acgcgggaggcccgggttc

SEQ ID NO: 15845 - DNA, 23 bp, Artificial Sequence
  Probe
acgcgggaggcccgggttcgatt

SEQ ID NO: 15846 - DNA, 30 bp, Artificial Sequence
  Probe
acgcgggaggcccgggttcgattcccggcc

SEQ ID NO: 15847 - DNA, 32 bp, Artificial Sequence
  Probe
acgcgggaggcccgggttcgattcccggccaa

SEQ ID NO: 15848 - DNA, 33 bp, Artificial Sequence
  Probe
acgcgggaggcccgggttcgattcccggccaat

SEQ ID NO: 15849 - DNA, 34 bp, Artificial Sequence
  Probe
acgcgggaggcccgggttcgattcccggccaatg

SEQ ID NO: 15850 - DNA, 35 bp, Artificial Sequence
  Probe
acgcgggaggcccgggttcgattcccggccaatgc

SEQ ID NO: 15851 - DNA, 37 bp, Artificial Sequence
  Probe
acgcgggaggcccgggttcgattcccggccaatgcaa

SEQ ID NO: 15852 - DNA, 38 bp, Artificial Sequence
  Probe
acgcgggaggcccgggttcgattcccggccaatgcaac

SEQ ID NO: 15853 - DNA, 38 bp, Artificial Sequence
  Probe
acgcgggaggcccgggttcgattcccggccaatgcaag

SEQ ID NO: 15854 - DNA, 39 bp, Artificial Sequence; identical to SEQ ID NO: 2881
  Probe

SEQ ID NO: 15855 - DNA, 37 bp, Artificial Sequence
  Probe
acgcgggaggcccgggttcgattcccggccaatgcac

SEQ ID NO: 15856 - DNA, 38 bp, Artificial Sequence
  Probe
acgcgggaggcccgggttcgattcccggccaatgcacg

SEQ ID NO: 15857 - DNA, 39 bp, Artificial Sequence; identical to SEQ ID NO: 2882
  Probe

SEQ ID NO: 15858 - DNA, 38 bp, Artificial Sequence
  Probe
acgcgggaggcccgggttcgattcccggccaatgcact

SEQ ID NO: 15859 - DNA, 39 bp, Artificial Sequence
  Probe
acgcgggaggcccgggttcgattcccggccaatgcactt

SEQ ID NO: 15860 - DNA, 39 bp, Artificial Sequence; identical to SEQ ID NO: 2883
  Probe

SEQ ID NO: 15861 - DNA, 50 bp, Artificial Sequence
  Probe
acgcgggaggcccgggttcgattcccggccaatgcagcagcagaccttta

SEQ ID NO: 15862 - DNA, 32 bp, Artificial Sequence
  Probe
acgcgggaggcccgggttcgattcccggccca

SEQ ID NO: 15863 - DNA, 35 bp, Artificial Sequence
  Probe
acgcgggaggcccgggttcgattcccggcccatgc

SEQ ID NO: 15864 - DNA, 36 bp, Artificial Sequence
  Probe
acgcgggaggcccgggttcgattcccggcccatgca

SEQ ID NO: 15865 - DNA, 37 bp, Artificial Sequence
  Probe
acgcgggaggcccgggttcgattcccggcccatgcag

SEQ ID NO: 15866 - DNA, 38 bp, Artificial Sequence; identical to SEQ ID NO: 2885
  Probe

SEQ ID NO: 15867 - DNA, 39 bp, Artificial Sequence; identical to SEQ ID NO: 2886
  Probe

SEQ ID NO: 15868 - DNA, 20 bp, Artificial Sequence
  Probe
acgcgggaggcccgggtttg

SEQ ID NO: 15869 - DNA, 39 bp, Artificial Sequence
  Probe
acgctaaggtcgcgggttcgatccccgtactggccagac

SEQ ID NO: 15870 - DNA, 33 bp, Artificial Sequence
  Probe
acggcttgtcctcgttagtatagtggtgagtat

SEQ ID NO: 15871 - DNA, 36 bp, Artificial Sequence
  Probe
acggcttgtcctcgttagtatagtggtgagtatccc

SEQ ID NO: 15872 - DNA, 38 bp, Artificial Sequence
  Probe
acggcttgtcctcgttagtatagtggtgagtatccccg

SEQ ID NO: 15873 - DNA, 44 bp, Artificial Sequence
  Probe
acggcttgtcctcgttagtatagtggtgagtatccccgcctgtc

SEQ ID NO: 15874 - DNA, 30 bp, Artificial Sequence
  Probe
acgggagcccggatagctcagtcggtagag

SEQ ID NO: 15875 - DNA, 36 bp, Artificial Sequence
  Probe
acgggagcccggatagctcagtcggtagagcatcag

SEQ ID NO: 15876 - DNA, 37 bp, Artificial Sequence
  Probe
acgggagcccggatagctcagtcggtagagcatcaga

SEQ ID NO: 15877 - DNA, 38 bp, Artificial Sequence
  Probe
acgggagcccggatagctcagtcggtagagcatcagac

SEQ ID NO: 15878 - DNA, 41 bp, Artificial Sequence
  Probe
acgggagcccggatagctcagtcggtagagcatcagacttt

SEQ ID NO: 15879 - DNA, 42 bp, Artificial Sequence
  Probe
acgggagcccggatagctcagtcggtagagcatcagactttt

SEQ ID NO: 15880 - DNA, 43 bp, Artificial Sequence
  Probe
acgggagcccggatagctcagtcggtagagcatcagactttta

SEQ ID NO: 15881 - DNA, 50 bp, Artificial Sequence
  Probe
acgggagcccggatagctcagtcggtagagcatcagacttttaatctgag

SEQ ID NO: 15882 - DNA, 16 bp, Artificial Sequence
  Probe
acgggctcacatcacc

SEQ ID NO: 15883 - DNA, 19 bp, Artificial Sequence
  Probe
acgggctcacatcacccca

SEQ ID NO: 15884 - DNA, 21 bp, Artificial Sequence
  Probe
acgggctcacatcaccccata

SEQ ID NO: 15885 - DNA, 25 bp, Artificial Sequence
  Probe
acgggctcacatcaccccataaaca

SEQ ID NO: 15886 - DNA, 27 bp, Artificial Sequence
  Probe
acgggctcacatcaccccataaacaaa

SEQ ID NO: 15887 - DNA, 28 bp, Artificial Sequence
  Probe
acgggctcacatcaccccataaacaaat

SEQ ID NO: 15888 - DNA, 17 bp, Artificial Sequence
  Probe
acggggcacaataattt

SEQ ID NO: 15889 - DNA, 16 bp, Artificial Sequence
  Probe
acgggtccccggtagc

SEQ ID NO: 15890 - DNA, 17 bp, Artificial Sequence
  Probe
acgggtccccggtagct

SEQ ID NO: 15891 - DNA, 18 bp, Artificial Sequence
  Probe
acgggtccccggtagctc

SEQ ID NO: 15892 - DNA, 19 bp, Artificial Sequence
  Probe
acgggtccccggtagctcg

SEQ ID NO: 15893 - DNA, 20 bp, Artificial Sequence
  Probe
acgggtccccggtagctcgc

SEQ ID NO: 15894 - DNA, 21 bp, Artificial Sequence
  Probe
acgggtccccggtagctcgcc

SEQ ID NO: 15895 - DNA, 29 bp, Artificial Sequence
  Probe
acgggtccccggtagctcgccgtgatcgt

SEQ ID NO: 15896 - DNA, 24 bp, Artificial Sequence
  Probe
acgggtggcgccgtggcttagttg

SEQ ID NO: 15897 - DNA, 40 bp, Artificial Sequence
  Probe
acgtatgaggccccgggttcaatccccggcatctccagac

SEQ ID NO: 15898 - DNA, 31 bp, Artificial Sequence
  Probe
acgttcgcctcacacgcgaaaggtccccggt

SEQ ID NO: 15899 - DNA, 16 bp, Artificial Sequence
  Probe
actaaaaaatcccttt

SEQ ID NO: 15900 - DNA, 17 bp, Artificial Sequence
  Probe
actaaaaaatccctttt

SEQ ID NO: 15901 - DNA, 20 bp, Artificial Sequence
  Probe
actaaatactaccgtatggc

SEQ ID NO: 15902 - DNA, 19 bp, Artificial Sequence
  Probe
actaagtgtttgtgggttt

SEQ ID NO: 15903 - DNA, 32 bp, Artificial Sequence
  Probe
actaagtgtttgtgggtttaagtcccattggt

SEQ ID NO: 15904 - DNA, 37 bp, Artificial Sequence; identical to SEQ ID NO: 2895
  Probe

SEQ ID NO: 15905 - DNA, 38 bp, Artificial Sequence; identical to SEQ ID NO: 2896
  Probe

SEQ ID NO: 15906 - DNA, 39 bp, Artificial Sequence; identical to SEQ ID NO: 2897
  Probe

SEQ ID NO: 15907 - DNA, 40 bp, Artificial Sequence; identical to SEQ ID NO: 2898
  Probe

SEQ ID NO: 15908 - DNA, 41 bp, Artificial Sequence; identical to SEQ ID NO: 2899
  Probe

SEQ ID NO: 15909 - DNA, 42 bp, Artificial Sequence; identical to SEQ ID NO: 2900
  Probe

SEQ ID NO: 15910 - DNA, 18 bp, Artificial Sequence
  Probe
actactataaccacccta

SEQ ID NO: 15911 - DNA, 24 bp, Artificial Sequence
  Probe
actactttcttgattcaggtgttt

SEQ ID NO: 15912 - DNA, 27 bp, Artificial Sequence
  Probe
actagttttgacaacattcaaaaaaga

SEQ ID NO: 15913 - DNA, 30 bp, Artificial Sequence
  Probe
actagttttgacaacattcaaaaaagagta

SEQ ID NO: 15914 - DNA, 31 bp, Artificial Sequence
  Probe
actagttttgacaacattcaaaaaagagtaa

SEQ ID NO: 15915 - DNA, 15 bp, Artificial Sequence
  Probe
actataaccacccta

SEQ ID NO: 15916 - DNA, 16 bp, Artificial Sequence
  Probe
actcatgcccccatgt

SEQ ID NO: 15917 - DNA, 17 bp, Artificial Sequence
  Probe
actcatgcccccatgtc

SEQ ID NO: 15918 - DNA, 18 bp, Artificial Sequence
  Probe
actcatgcccccatgtct

SEQ ID NO: 15919 - DNA, 19 bp, Artificial Sequence
  Probe
actcatgcccccatgtcta

SEQ ID NO: 15920 - DNA, 22 bp, Artificial Sequence
  Probe
actcatgcccccatgtctaaca

SEQ ID NO: 15921 - DNA, 25 bp, Artificial Sequence
  Probe
actcatgcccccatgtctaacaaca

SEQ ID NO: 15922 - DNA, 27 bp, Artificial Sequence
  Probe
actcatgcccccatgtctaacaacatg

SEQ ID NO: 15923 - DNA, 30 bp, Artificial Sequence; identical to SEQ ID NO: 2906
  Probe

SEQ ID NO: 15924 - DNA, 31 bp, Artificial Sequence; identical to SEQ ID NO: 2907
  Probe

SEQ ID NO: 15925 - DNA, 32 bp, Artificial Sequence; identical to SEQ ID NO: 2908
  Probe

SEQ ID NO: 15926 - DNA, 33 bp, Artificial Sequence; identical to SEQ ID NO: 2909
  Probe

SEQ ID NO: 15927 - DNA, 34 bp, Artificial Sequence; identical to SEQ ID NO: 2910
  Probe

SEQ ID NO: 15928 - DNA, 35 bp, Artificial Sequence; identical to SEQ ID NO: 2911
  Probe

SEQ ID NO: 15929 - DNA, 36 bp, Artificial Sequence; identical to SEQ ID NO: 2912
  Probe

SEQ ID NO: 15930 - DNA, 37 bp, Artificial Sequence; identical to SEQ ID NO: 2913
  Probe

SEQ ID NO: 15931 - DNA, 38 bp, Artificial Sequence; identical to SEQ ID NO: 2914
  Probe

SEQ ID NO: 15932 - DNA, 39 bp, Artificial Sequence; identical to SEQ ID NO: 2915
  Probe

SEQ ID NO: 15933 - DNA, 40 bp, Artificial Sequence
  Probe
actcatgcccccatgtctaacaacatggctttctcaactt

SEQ ID NO: 15934 - DNA, 42 bp, Artificial Sequence
  Probe
actcatgcccccatgtctaacaacatggctttctcaactttt

SEQ ID NO: 15935 - DNA, 43 bp, Artificial Sequence
  Probe
actcatgcccccatgtctaacaacatggctttctcaactttta

SEQ ID NO: 15936 - DNA, 30 bp, Artificial Sequence
  Probe
actcattaaattatgataatcatatttacc

SEQ ID NO: 15937 - DNA, 34 bp, Artificial Sequence
  Probe
actcattaaattatgataatcatatttaccaaat

SEQ ID NO: 15938 - DNA, 35 bp, Artificial Sequence; identical to SEQ ID NO: 2917
  Probe

SEQ ID NO: 15939 - DNA, 19 bp, Artificial Sequence
  Probe
actcccggtatgggaacaa

SEQ ID NO: 15940 - DNA, 18 bp, Artificial Sequence
  Probe
actcccggtgtgggaacg

SEQ ID NO: 15941 - DNA, 19 bp, Artificial Sequence
  Probe
actcccggtgtgggaacgc

SEQ ID NO: 15942 - DNA, 19 bp, Artificial Sequence
  Probe
actcccggtgtgggaatga

SEQ ID NO: 15943 - DNA, 16 bp, Artificial Sequence
  Probe
actctgaatccagcga

SEQ ID NO: 15944 - DNA, 22 bp, Artificial Sequence
  Probe
actctgaatccagcgatccgag

SEQ ID NO: 15945 - DNA, 30 bp, Artificial Sequence
  Probe
actctggactttgaatccagcgatccgagt

SEQ ID NO: 15946 - DNA, 16 bp, Artificial Sequence
  Probe
actcttaatcccaggg

SEQ ID NO: 15947 - DNA, 23 bp, Artificial Sequence
  Probe
actcttttagtataaatagtacc

SEQ ID NO: 15948 - DNA, 26 bp, Artificial Sequence
  Probe
actcttttagtataaatagtaccgtt

SEQ ID NO: 15949 - DNA, 27 bp, Artificial Sequence
  Probe
actcttttagtataaatagtaccgtta

SEQ ID NO: 15950 - DNA, 30 bp, Artificial Sequence; identical to SEQ ID NO: 2927
  Probe

SEQ ID NO: 15951 - DNA, 31 bp, Artificial Sequence; identical to SEQ ID NO: 2928
  Probe

SEQ ID NO: 15952 - DNA, 42 bp, Artificial Sequence
  Probe
actcttttagtataaatagtaccgttaacttccaattaacta

SEQ ID NO: 15953 - DNA, 44 bp, Artificial Sequence; identical to SEQ ID NO: 2930
  Probe

SEQ ID NO: 15954 - DNA, 42 bp, Artificial Sequence; identical to SEQ ID NO: 2937
  Probe

SEQ ID NO: 15955 - DNA, 43 bp, Artificial Sequence; identical to SEQ ID NO: 2938
  Probe

SEQ ID NO: 15956 - DNA, 44 bp, Artificial Sequence; identical to SEQ ID NO: 2939
  Probe

SEQ ID NO: 15957 - DNA, 45 bp, Artificial Sequence; identical to SEQ ID NO: 2940
  Probe

SEQ ID NO: 15958 - DNA, 49 bp, Artificial Sequence
  Probe
actgaaaatgtttagacgggctcacatcaccccataaacaaataggttt

SEQ ID NO: 15959 - DNA, 50 bp, Artificial Sequence; identical to SEQ ID NO: 2941
  Probe

SEQ ID NO: 15960 - DNA, 20 bp, Artificial Sequence
  Probe
actgctaactcatgccccca

SEQ ID NO: 15961 - DNA, 25 bp, Artificial Sequence
  Probe
actgctaactcatgcccccatgtct

SEQ ID NO: 15962 - DNA, 29 bp, Artificial Sequence
  Probe
actgctaactcatgcccccatgtctaaca

SEQ ID NO: 15963 - DNA, 37 bp, Artificial Sequence; identical to SEQ ID NO: 2947
  Probe

SEQ ID NO: 15964 - DNA, 38 bp, Artificial Sequence; identical to SEQ ID NO: 2948
  Probe

SEQ ID NO: 15965 - DNA, 39 bp, Artificial Sequence; identical to SEQ ID NO: 2949
  Probe

SEQ ID NO: 15966 - DNA, 40 bp, Artificial Sequence; identical to SEQ ID NO: 2950
  Probe

SEQ ID NO: 15967 - DNA, 41 bp, Artificial Sequence; identical to SEQ ID NO: 2951
  Probe

SEQ ID NO: 15968 - DNA, 42 bp, Artificial Sequence; identical to SEQ ID NO: 2952
  Probe

SEQ ID NO: 15969 - DNA, 43 bp, Artificial Sequence; identical to SEQ ID NO: 2953
  Probe

SEQ ID NO: 15970 - DNA, 44 bp, Artificial Sequence; identical to SEQ ID NO: 2954
  Probe

SEQ ID NO: 15971 - DNA, 45 bp, Artificial Sequence; identical to SEQ ID NO: 2955
  Probe

SEQ ID NO: 15972 - DNA, 46 bp, Artificial Sequence; identical to SEQ ID NO: 2956
  Probe

SEQ ID NO: 15973 - DNA, 25 bp, Artificial Sequence
  Probe
actggaaagtgcacttggacgaacc

SEQ ID NO: 15974 - DNA, 43 bp, Artificial Sequence; identical to SEQ ID NO: 2960
  Probe

SEQ ID NO: 15975 - DNA, 37 bp, Artificial Sequence; identical to SEQ ID NO: 200
  Probe

SEQ ID NO: 15976 - DNA, 38 bp, Artificial Sequence; identical to SEQ ID NO: 2962
  Probe

SEQ ID NO: 15977 - DNA, 39 bp, Artificial Sequence; identical to SEQ ID NO: 2963
  Probe

SEQ ID NO: 15978 - DNA, 41 bp, Artificial Sequence; identical to SEQ ID NO: 2965
  Probe

SEQ ID NO: 15979 - DNA, 42 bp, Artificial Sequence; identical to SEQ ID NO: 2966
  Probe

SEQ ID NO: 15980 - DNA, 45 bp, Artificial Sequence; identical to SEQ ID NO: 2969
  Probe

SEQ ID NO: 15981 - DNA, 46 bp, Artificial Sequence; identical to SEQ ID NO: 2970
  Probe

SEQ ID NO: 15982 - DNA, 16 bp, Artificial Sequence
  Probe
acttaacttgaccgct

SEQ ID NO: 15983 - DNA, 17 bp, Artificial Sequence
  Probe
acttaacttgaccgctc

SEQ ID NO: 15984 - DNA, 18 bp, Artificial Sequence
  Probe
acttaacttgaccgctct

SEQ ID NO: 15985 - DNA, 20 bp, Artificial Sequence
  Probe
acttaacttgaccgctctga

SEQ ID NO: 15986 - DNA, 21 bp, Artificial Sequence
  Probe
acttaacttgaccgctctgag

SEQ ID NO: 15987 - DNA, 22 bp, Artificial Sequence
  Probe
acttaacttgaccgctctgagc

SEQ ID NO: 15988 - DNA, 23 bp, Artificial Sequence
  Probe
acttaacttgaccgctctgagct

SEQ ID NO: 15989 - DNA, 16 bp, Artificial Sequence
  Probe
acttacacttaggaga

SEQ ID NO: 15990 - DNA, 17 bp, Artificial Sequence
  Probe
acttacacttaggagat

SEQ ID NO: 15991 - DNA, 18 bp, Artificial Sequence
  Probe
acttacacttaggagatt

SEQ ID NO: 15992 - DNA, 21 bp, Artificial Sequence
  Probe
acttacacttaggagatttca

SEQ ID NO: 15993 - DNA, 24 bp, Artificial Sequence
  Probe
acttacacttaggagatttcaact

SEQ ID NO: 15994 - DNA, 25 bp, Artificial Sequence
  Probe
acttacacttaggagatttcaactt

SEQ ID NO: 15995 - DNA, 26 bp, Artificial Sequence
  Probe
acttacacttaggagatttcaactta

SEQ ID NO: 15996 - DNA, 27 bp, Artificial Sequence
  Probe
acttacacttaggagatttcaacttaa

SEQ ID NO: 15997 - DNA, 29 bp, Artificial Sequence
  Probe
acttacacttaggagatttcaacttaact

SEQ ID NO: 15998 - DNA, 31 bp, Artificial Sequence
  Probe
acttacacttaggagatttcaacttaacttg

SEQ ID NO: 15999 - DNA, 33 bp, Artificial Sequence; identical to SEQ ID NO: 2981
  Probe

SEQ ID NO: 16000 - DNA, 34 bp, Artificial Sequence
  Probe
acttacacttaggagatttcaacttaacttgacc

SEQ ID NO: 16001 - DNA, 35 bp, Artificial Sequence; identical to SEQ ID NO: 2982
  Probe

SEQ ID NO: 16002 - DNA, 36 bp, Artificial Sequence; identical to SEQ ID NO: 2983
  Probe

SEQ ID NO: 16003 - DNA, 37 bp, Artificial Sequence; identical to SEQ ID NO: 2984
  Probe

SEQ ID NO: 16004 - DNA, 38 bp, Artificial Sequence
  Probe
acttacacttaggagatttcaacttaacttgaccgctc

SEQ ID NO: 16005 - DNA, 39 bp, Artificial Sequence; identical to SEQ ID NO: 2985
  Probe

SEQ ID NO: 16006 - DNA, 41 bp, Artificial Sequence; identical to SEQ ID NO: 2987
  Probe

SEQ ID NO: 16007 - DNA, 42 bp, Artificial Sequence; identical to SEQ ID NO: 2988
  Probe

SEQ ID NO: 16008 - DNA, 43 bp, Artificial Sequence; identical to SEQ ID NO: 2989
  Probe

SEQ ID NO: 16009 - DNA, 44 bp, Artificial Sequence; identical to SEQ ID NO: 2990
  Probe

SEQ ID NO: 16010 - DNA, 50 bp, Artificial Sequence; identical to SEQ ID NO: 2992
  Probe

SEQ ID NO: 16011 - DNA, 36 bp, Artificial Sequence
  Probe
acttagcattaaccttttaagttaaagattaagaga

SEQ ID NO: 16012 - DNA, 23 bp, Artificial Sequence
  Probe
acttaggagatttcaacttaact

SEQ ID NO: 16013 - DNA, 27 bp, Artificial Sequence
  Probe
acttaggagatttcaacttaacttgac

SEQ ID NO: 16014 - DNA, 28 bp, Artificial Sequence
  Probe
acttaggagatttcaacttaacttgacc

SEQ ID NO: 16015 - DNA, 29 bp, Artificial Sequence
  Probe
acttaggagatttcaacttaacttgaccg

SEQ ID NO: 16016 - DNA, 30 bp, Artificial Sequence; identical to SEQ ID NO: 9072
  Probe

SEQ ID NO: 16017 - DNA, 31 bp, Artificial Sequence; identical to SEQ ID NO: 2999
  Probe

SEQ ID NO: 16018 - DNA, 33 bp, Artificial Sequence; identical to SEQ ID NO: 3001
  Probe

SEQ ID NO: 16019 - DNA, 36 bp, Artificial Sequence; identical to SEQ ID NO: 3003
  Probe

SEQ ID NO: 16020 - DNA, 37 bp, Artificial Sequence; identical to SEQ ID NO: 3004
  Probe

SEQ ID NO: 16021 - DNA, 38 bp, Artificial Sequence; identical to SEQ ID NO: 3005
  Probe

SEQ ID NO: 16022 - DNA, 39 bp, Artificial Sequence; identical to SEQ ID NO: 3006
  Probe

SEQ ID NO: 16023 - DNA, 43 bp, Artificial Sequence; identical to SEQ ID NO: 3009
  Probe

SEQ ID NO: 16024 - DNA, 44 bp, Artificial Sequence; identical to SEQ ID NO: 3010
  Probe

SEQ ID NO: 16025 - DNA, 26 bp, Artificial Sequence
  Probe
acttcgccttaattttaataatcaac

SEQ ID NO: 16026 - DNA, 19 bp, Artificial Sequence
  Probe
actttacagtcagaggttc

SEQ ID NO: 16027 - DNA, 30 bp, Artificial Sequence; identical to SEQ ID NO: 202
  Probe

SEQ ID NO: 16028 - DNA, 31 bp, Artificial Sequence; identical to SEQ ID NO: 3013
  Probe

SEQ ID NO: 16029 - DNA, 32 bp, Artificial Sequence; identical to SEQ ID NO: 3014
  Probe

SEQ ID NO: 16030 - DNA, 33 bp, Artificial Sequence; identical to SEQ ID NO: 3015
  Probe

SEQ ID NO: 16031 - DNA, 36 bp, Artificial Sequence
  Probe
actttacagtcagaggttcaattcctcttcttaaca

SEQ ID NO: 16032 - DNA, 38 bp, Artificial Sequence; identical to SEQ ID NO: 3018
  Probe

SEQ ID NO: 16033 - DNA, 39 bp, Artificial Sequence; identical to SEQ ID NO: 3019
  Probe

SEQ ID NO: 16034 - DNA, 16 bp, Artificial Sequence
  Probe
actttgaatccagcga

SEQ ID NO: 16035 - DNA, 21 bp, Artificial Sequence
  Probe
actttgaatccagcgatccga

SEQ ID NO: 16036 - DNA, 22 bp, Artificial Sequence
  Probe
actttgaatccagcgatccgag

SEQ ID NO: 16037 - DNA, 23 bp, Artificial Sequence
  Probe
actttgaatccagcgatccgagt

SEQ ID NO: 16038 - DNA, 24 bp, Artificial Sequence
  Probe
actttgaatccagcgatccgagtt

SEQ ID NO: 16039 - DNA, 29 bp, Artificial Sequence
  Probe
actttgatagagtaaataataggagctta

SEQ ID NO: 16040 - DNA, 33 bp, Artificial Sequence; identical to SEQ ID NO: 3022
  Probe

SEQ ID NO: 16041 - DNA, 35 bp, Artificial Sequence; identical to SEQ ID NO: 3024
  Probe

SEQ ID NO: 16042 - DNA, 36 bp, Artificial Sequence; identical to SEQ ID NO: 3025
  Probe

SEQ ID NO: 16043 - DNA, 37 bp, Artificial Sequence; identical to SEQ ID NO: 203
  Probe

SEQ ID NO: 16044 - DNA, 38 bp, Artificial Sequence; identical to SEQ ID NO: 204
  Probe

SEQ ID NO: 16045 - DNA, 40 bp, Artificial Sequence; identical to SEQ ID NO: 3026
  Probe

SEQ ID NO: 16046 - DNA, 41 bp, Artificial Sequence; identical to SEQ ID NO: 3027
  Probe

SEQ ID NO: 16047 - DNA, 42 bp, Artificial Sequence; identical to SEQ ID NO: 3028
  Probe

SEQ ID NO: 16048 - DNA, 44 bp, Artificial Sequence; identical to SEQ ID NO: 3030
  Probe

SEQ ID NO: 16049 - DNA, 45 bp, Artificial Sequence; identical to SEQ ID NO: 206
  Probe

SEQ ID NO: 16050 - DNA, 46 bp, Artificial Sequence; identical to SEQ ID NO: 3031
  Probe

SEQ ID NO: 16051 - DNA, 50 bp, Artificial Sequence; identical to SEQ ID NO: 3033
  Probe

SEQ ID NO: 16052 - DNA, 20 bp, Artificial Sequence
  Probe
acttttaaaggataacagct

SEQ ID NO: 16053 - DNA, 30 bp, Artificial Sequence; identical to SEQ ID NO: 209
  Probe

SEQ ID NO: 16054 - DNA, 33 bp, Artificial Sequence; identical to SEQ ID NO: 3035
  Probe

SEQ ID NO: 16055 - DNA, 38 bp, Artificial Sequence
  Probe
acttttaaaggataacagctatccattggtcttaggcc

SEQ ID NO: 16056 - DNA, 40 bp, Artificial Sequence
  Probe
acttttaaaggataacagctatccattggtcttaggcccc

SEQ ID NO: 16057 - DNA, 41 bp, Artificial Sequence; identical to SEQ ID NO: 3037
  Probe

SEQ ID NO: 16058 - DNA, 42 bp, Artificial Sequence
  Probe
acttttaaaggataacagctatccattggtcttaggccccaa

SEQ ID NO: 16059 - DNA, 44 bp, Artificial Sequence
  Probe
acttttaaaggataacagctatccattggtcttaggccccaaaa

SEQ ID NO: 16060 - DNA, 25 bp, Artificial Sequence
  Probe
agaaagctcacaagaactgctaact

SEQ ID NO: 16061 - DNA, 26 bp, Artificial Sequence
  Probe
agaaagctcacaagaactgctaactc

SEQ ID NO: 16062 - DNA, 27 bp, Artificial Sequence
  Probe
agaaagctcacaagaactgctaactca

SEQ ID NO: 16063 - DNA, 29 bp, Artificial Sequence
  Probe
agaaagctcacaagaactgctaactcatg

SEQ ID NO: 16064 - DNA, 35 bp, Artificial Sequence; identical to SEQ ID NO: 3042
  Probe

SEQ ID NO: 16065 - DNA, 16 bp, Artificial Sequence
  Probe
agaaaggccgaatttt

SEQ ID NO: 16066 - DNA, 17 bp, Artificial Sequence
  Probe
agaaaggccgaatttta

SEQ ID NO: 16067 - DNA, 31 bp, Artificial Sequence; identical to SEQ ID NO: 3044
  Probe

SEQ ID NO: 16068 - DNA, 34 bp, Artificial Sequence; identical to SEQ ID NO: 3047
  Probe

SEQ ID NO: 16069 - DNA, 24 bp, Artificial Sequence
  Probe
agaacagcagagtggcgcagcgga

SEQ ID NO: 16070 - DNA, 25 bp, Artificial Sequence
  Probe
agaacagcagagtggcgcagcggaa

SEQ ID NO: 16071 - DNA, 26 bp, Artificial Sequence
  Probe
agaacagcagagtggcgcagcggaag

SEQ ID NO: 16072 - DNA, 27 bp, Artificial Sequence
  Probe
agaacagcagagtggcgcagcggaagc

SEQ ID NO: 16073 - DNA, 30 bp, Artificial Sequence
  Probe
agaacagcagagtggcgcagcggaagcgtg

SEQ ID NO: 16074 - DNA, 31 bp, Artificial Sequence
  Probe
agaacagcagagtggcgcagcggaagcgtgc

SEQ ID NO: 16075 - DNA, 41 bp, Artificial Sequence
  Probe
agaacagcagagtggcgcagcggaagcgtgctgggcccata

SEQ ID NO: 16076 - DNA, 16 bp, Artificial Sequence
  Probe
agaacagggtttgtta

SEQ ID NO: 16077 - DNA, 20 bp, Artificial Sequence
  Probe
agaaccaacacctctttaca

SEQ ID NO: 16078 - DNA, 22 bp, Artificial Sequence
  Probe
agaaccaacacctctttacagt

SEQ ID NO: 16079 - DNA, 23 bp, Artificial Sequence
  Probe
agaaccaacacctctttacagtg

SEQ ID NO: 16080 - DNA, 24 bp, Artificial Sequence
  Probe
agaaccaacacctctttacagtga

SEQ ID NO: 16081 - DNA, 25 bp, Artificial Sequence
  Probe
agaaccaacacctctttacagtgaa

SEQ ID NO: 16082 - DNA, 26 bp, Artificial Sequence
  Probe
agaaccaacacctctttacagtgaaa

SEQ ID NO: 16083 - DNA, 27 bp, Artificial Sequence
  Probe
agaaccaacacctctttacagtgaaat

SEQ ID NO: 16084 - DNA, 16 bp, Artificial Sequence
  Probe
agaactgacagtacct

SEQ ID NO: 16085 - DNA, 16 bp, Artificial Sequence
  Probe
agaactgctaactcat

SEQ ID NO: 16086 - DNA, 17 bp, Artificial Sequence
  Probe
agaactgctaactcatg

SEQ ID NO: 16087 - DNA, 20 bp, Artificial Sequence
  Probe
agaactgctaactcatgccc

SEQ ID NO: 16088 - DNA, 21 bp, Artificial Sequence
  Probe
agaactgctaactcatgcccc

SEQ ID NO: 16089 - DNA, 22 bp, Artificial Sequence
  Probe
agaactgctaactcatgccccc

SEQ ID NO: 16090 - DNA, 23 bp, Artificial Sequence
  Probe
agaactgctaactcatgccccca

SEQ ID NO: 16091 - DNA, 24 bp, Artificial Sequence
  Probe
agaactgctaactcatgcccccat

SEQ ID NO: 16092 - DNA, 26 bp, Artificial Sequence
  Probe
agaactgctaactcatgcccccatgt

SEQ ID NO: 16093 - DNA, 29 bp, Artificial Sequence
  Probe
agaactgctaactcatgcccccatgtcta

SEQ ID NO: 16094 - DNA, 30 bp, Artificial Sequence
  Probe
agaactgctaactcatgcccccatgtctaa

SEQ ID NO: 16095 - DNA, 31 bp, Artificial Sequence
  Probe
agaactgctaactcatgcccccatgtctaac

SEQ ID NO: 16096 - DNA, 33 bp, Artificial Sequence
  Probe
agaactgctaactcatgcccccatgtctaacaa

SEQ ID NO: 16097 - DNA, 34 bp, Artificial Sequence
  Probe
agaactgctaactcatgcccccatgtctaacaac

SEQ ID NO: 16098 - DNA, 40 bp, Artificial Sequence; identical to SEQ ID NO: 218
  Probe

SEQ ID NO: 16099 - DNA, 41 bp, Artificial Sequence; identical to SEQ ID NO: 219
  Probe

SEQ ID NO: 16100 - DNA, 42 bp, Artificial Sequence; identical to SEQ ID NO: 220
  Probe

SEQ ID NO: 16101 - DNA, 43 bp, Artificial Sequence; identical to SEQ ID NO: 221
  Probe

SEQ ID NO: 16102 - DNA, 45 bp, Artificial Sequence; identical to SEQ ID NO: 223
  Probe

SEQ ID NO: 16103 - DNA, 46 bp, Artificial Sequence; identical to SEQ ID NO: 224
  Probe

SEQ ID NO: 16104 - DNA, 50 bp, Artificial Sequence; identical to SEQ ID NO: 3070
  Probe

SEQ ID NO: 16105 - DNA, 36 bp, Artificial Sequence; identical to SEQ ID NO: 3073
  Probe

SEQ ID NO: 16106 - DNA, 33 bp, Artificial Sequence; identical to SEQ ID NO: 3075
  Probe

SEQ ID NO: 16107 - DNA, 35 bp, Artificial Sequence
  Probe
agaagattctaggttcgactcctggctggctcgcg

SEQ ID NO: 16108 - DNA, 36 bp, Artificial Sequence; identical to SEQ ID NO: 3076
  Probe

SEQ ID NO: 16109 - DNA, 35 bp, Artificial Sequence
  Probe
agaagattctaggttcgactcctggctggctcgct

SEQ ID NO: 16110 - DNA, 36 bp, Artificial Sequence; identical to SEQ ID NO: 3077
  Probe

SEQ ID NO: 16111 - DNA, 30 bp, Artificial Sequence
  Probe
agaagattgagggttcgagtcccttcgtgg

SEQ ID NO: 16112 - DNA, 33 bp, Artificial Sequence; identical to SEQ ID NO: 231
  Probe

SEQ ID NO: 16113 - DNA, 31 bp, Artificial Sequence; identical to SEQ ID NO: 3084
  Probe

SEQ ID NO: 16114 - DNA, 29 bp, Artificial Sequence
  Probe
agaagcagcttcaaacctgccggggcttc

SEQ ID NO: 16115 - DNA, 30 bp, Artificial Sequence; identical to SEQ ID NO: 3090
  Probe

SEQ ID NO: 16116 - DNA, 31 bp, Artificial Sequence; identical to SEQ ID NO: 3091
  Probe

SEQ ID NO: 16117 - DNA, 30 bp, Artificial Sequence
  Probe
agaagccccagtggcctaatggataaggca

SEQ ID NO: 16118 - DNA, 36 bp, Artificial Sequence
  Probe
agaaggtcctgggttcaagccccagtggaaccatgg

SEQ ID NO: 16119 - DNA, 35 bp, Artificial Sequence; identical to SEQ ID NO: 3095
  Probe

SEQ ID NO: 16120 - DNA, 36 bp, Artificial Sequence; identical to SEQ ID NO: 3096
  Probe

SEQ ID NO: 16121 - DNA, 16 bp, Artificial Sequence
  Probe
agaaggtctcactttt

SEQ ID NO: 16122 - DNA, 27 bp, Artificial Sequence
  Probe
agaatcttagctttgggtgctaatggt

SEQ ID NO: 16123 - DNA, 28 bp, Artificial Sequence
  Probe
agaatcttagctttgggtgctaatggtg

SEQ ID NO: 16124 - DNA, 29 bp, Artificial Sequence
  Probe
agaatcttagctttgggtgctaatggtgg

SEQ ID NO: 16125 - DNA, 30 bp, Artificial Sequence
  Probe
agaatcttagctttgggtgctaatggtgga

SEQ ID NO: 16126 - DNA, 31 bp, Artificial Sequence; identical to SEQ ID NO: 3097
  Probe

SEQ ID NO: 16127 - DNA, 33 bp, Artificial Sequence
  Probe
agaatcttagctttgggtgctaatggtggagtt

SEQ ID NO: 16128 - DNA, 34 bp, Artificial Sequence; identical to SEQ ID NO: 3098
  Probe

SEQ ID NO: 16129 - DNA, 38 bp, Artificial Sequence
  Probe
agaatcttagctttgggtgctaatggtggagttaaaga

SEQ ID NO: 16130 - DNA, 49 bp, Artificial Sequence; identical to SEQ ID NO: 234
  Probe

SEQ ID NO: 16131 - DNA, 16 bp, Artificial Sequence
  Probe
agaattctcgcctgcc

SEQ ID NO: 16132 - DNA, 18 bp, Artificial Sequence
  Probe
agaattctcgcctgccac

SEQ ID NO: 16133 - DNA, 29 bp, Artificial Sequence
  Probe
agaattctcgcctgccacgcgggaggccc

SEQ ID NO: 16134 - DNA, 33 bp, Artificial Sequence
  Probe
agaattctcgcctgccacgcgggaggcccgggt

SEQ ID NO: 16135 - DNA, 16 bp, Artificial Sequence
  Probe
agacaacccagaacgt

SEQ ID NO: 16136 - DNA, 26 bp, Artificial Sequence
  Probe
agacaccccccacagtttatgtagct

SEQ ID NO: 16137 - DNA, 28 bp, Artificial Sequence
  Probe
agacaccccccacagtttatgtagctta

SEQ ID NO: 16138 - DNA, 30 bp, Artificial Sequence
  Probe
agacaccccccacagtttatgtagcttacc

SEQ ID NO: 16139 - DNA, 31 bp, Artificial Sequence
  Probe
agacaccccccacagtttatgtagcttacct

SEQ ID NO: 16140 - DNA, 31 bp, Artificial Sequence
  Probe
agacagccggctcgttggtctaggggtatga

SEQ ID NO: 16141 - DNA, 32 bp, Artificial Sequence
  Probe
agacagccggctcgttggtctaggggtatgat

SEQ ID NO: 16142 - DNA, 33 bp, Artificial Sequence
  Probe
agacagccggctcgttggtctaggggtatgatt

SEQ ID NO: 16143 - DNA, 38 bp, Artificial Sequence
  Probe
agacagccggctcgttggtctaggggtatgattctcgc

SEQ ID NO: 16144 - DNA, 41 bp, Artificial Sequence
  Probe
agacagccggctcgttggtctaggggtatgattctcgcttt

SEQ ID NO: 16145 - DNA, 42 bp, Artificial Sequence
  Probe
agacagccggctcgttggtctaggggtatgattctcgctttg

SEQ ID NO: 16146 - DNA, 28 bp, Artificial Sequence
  Probe
agacagcgccgctggtgtagtggtatca

SEQ ID NO: 16147 - DNA, 29 bp, Artificial Sequence
  Probe
agacagcgccgctggtgtagtggtatcat

SEQ ID NO: 16148 - DNA, 30 bp, Artificial Sequence
  Probe
agacagcgccgctggtgtagtggtatcatg

SEQ ID NO: 16149 - DNA, 36 bp, Artificial Sequence
  Probe
agacagcgccgctggtgtagtggtatcatgcaagat

SEQ ID NO: 16150 - DNA, 37 bp, Artificial Sequence
  Probe
agacagcgccgctggtgtagtggtatcatgcaagatt

SEQ ID NO: 16151 - DNA, 38 bp, Artificial Sequence
  Probe
agacagcgccgctggtgtagtggtatcatgcaagattc

SEQ ID NO: 16152 - DNA, 23 bp, Artificial Sequence
  Probe
agacaggggttaggcctcttttt

SEQ ID NO: 16153 - DNA, 26 bp, Artificial Sequence
  Probe
agacaggggttaggcctctttttacc

SEQ ID NO: 16154 - DNA, 27 bp, Artificial Sequence
  Probe
agacaggggttaggcctctttttacca

SEQ ID NO: 16155 - DNA, 29 bp, Artificial Sequence
  Probe
agacaggggttaggcctctttttaccagc

SEQ ID NO: 16156 - DNA, 30 bp, Artificial Sequence
  Probe
agacaggggttaggcctctttttaccagct

SEQ ID NO: 16157 - DNA, 16 bp, Artificial Sequence
  Probe
agaccaagagccttca

SEQ ID NO: 16158 - DNA, 28 bp, Artificial Sequence
  Probe
agaccaagagccttcaaagccctcagta

SEQ ID NO: 16159 - DNA, 31 bp, Artificial Sequence; identical to SEQ ID NO: 3106
  Probe

SEQ ID NO: 16160 - DNA, 33 bp, Artificial Sequence
  Probe
agaccaagagccttcaaagccctcagtaagttg

SEQ ID NO: 16161 - DNA, 46 bp, Artificial Sequence; identical to SEQ ID NO: 3107
  Probe

SEQ ID NO: 16162 - DNA, 49 bp, Artificial Sequence; identical to SEQ ID NO: 3109
  Probe

SEQ ID NO: 16163 - DNA, 19 bp, Artificial Sequence
  Probe
agacccgaggtagggcttt

SEQ ID NO: 16164 - DNA, 20 bp, Artificial Sequence
  Probe
agacccgaggtagggctttg

SEQ ID NO: 16165 - DNA, 29 bp, Artificial Sequence
  Probe
agacccgaggtagggctttggctgtgggg

SEQ ID NO: 16166 - DNA, 28 bp, Artificial Sequence
  Probe
agacccttttggatgttcgcaacccctt

SEQ ID NO: 16167 - DNA, 29 bp, Artificial Sequence
  Probe
agacccttttggatgttcgcaaccccttt

SEQ ID NO: 16168 - DNA, 30 bp, Artificial Sequence
  Probe
agacccttttggatgttcgcaacccctttt

SEQ ID NO: 16169 - DNA, 26 bp, Artificial Sequence
  Probe
agaccggggttcaattccccgacggg

SEQ ID NO: 16170 - DNA, 28 bp, Artificial Sequence
  Probe
agaccggggttcaattccccgacgggga

SEQ ID NO: 16171 - DNA, 30 bp, Artificial Sequence; identical to SEQ ID NO: 3111
  Probe

SEQ ID NO: 16172 - DNA, 32 bp, Artificial Sequence; identical to SEQ ID NO: 3112
  Probe

SEQ ID NO: 16173 - DNA, 27 bp, Artificial Sequence
  Probe
agaccggggttcgattccccgacgggg

SEQ ID NO: 16174 - DNA, 30 bp, Artificial Sequence; identical to SEQ ID NO: 3114
  Probe

SEQ ID NO: 16175 - DNA, 32 bp, Artificial Sequence; identical to SEQ ID NO: 3116
  Probe

SEQ ID NO: 16176 - DNA, 31 bp, Artificial Sequence; identical to SEQ ID NO: 3117
  Probe

SEQ ID NO: 16177 - DNA, 32 bp, Artificial Sequence; identical to SEQ ID NO: 3118
  Probe

SEQ ID NO: 16178 - DNA, 32 bp, Artificial Sequence; identical to SEQ ID NO: 3119
  Probe

SEQ ID NO: 16179 - DNA, 30 bp, Artificial Sequence; identical to SEQ ID NO: 3120
  Probe

SEQ ID NO: 16180 - DNA, 31 bp, Artificial Sequence; identical to SEQ ID NO: 3121
  Probe

SEQ ID NO: 16181 - DNA, 32 bp, Artificial Sequence; identical to SEQ ID NO: 3122
  Probe

SEQ ID NO: 16182 - DNA, 32 bp, Artificial Sequence; identical to SEQ ID NO: 3123
  Probe

SEQ ID NO: 16183 - DNA, 30 bp, Artificial Sequence
  Probe
agacgagggctccatagctcaggggttaga

SEQ ID NO: 16184 - DNA, 20 bp, Artificial Sequence
  Probe
agacgggctcacatcacccc

SEQ ID NO: 16185 - DNA, 21 bp, Artificial Sequence
  Probe
agacgggctcacatcacccca

SEQ ID NO: 16186 - DNA, 22 bp, Artificial Sequence
  Probe
agacgggctcacatcaccccat

SEQ ID NO: 16187 - DNA, 23 bp, Artificial Sequence
  Probe
agacgggctcacatcaccccata

SEQ ID NO: 16188 - DNA, 24 bp, Artificial Sequence
  Probe
agacgggctcacatcaccccataa

SEQ ID NO: 16189 - DNA, 25 bp, Artificial Sequence
  Probe
agacgggctcacatcaccccataaa

SEQ ID NO: 16190 - DNA, 26 bp, Artificial Sequence
  Probe
agacgggctcacatcaccccataaac

SEQ ID NO: 16191 - DNA, 27 bp, Artificial Sequence
  Probe
agacgggctcacatcaccccataaaca

SEQ ID NO: 16192 - DNA, 28 bp, Artificial Sequence
  Probe
agacgggctcacatcaccccataaacaa

SEQ ID NO: 16193 - DNA, 29 bp, Artificial Sequence
  Probe
agacgggctcacatcaccccataaacaaa

SEQ ID NO: 16194 - DNA, 30 bp, Artificial Sequence; identical to SEQ ID NO: 3135
  Probe

SEQ ID NO: 16195 - DNA, 31 bp, Artificial Sequence; identical to SEQ ID NO: 3136
  Probe

SEQ ID NO: 16196 - DNA, 29 bp, Artificial Sequence
  Probe
agactcgcggccgccttaagaagccagca

SEQ ID NO: 16197 - DNA, 30 bp, Artificial Sequence
  Probe
agactcgcggccgccttaagaagccagcag

SEQ ID NO: 16198 - DNA, 30 bp, Artificial Sequence
  Probe
agactgtgttttccttccagttcaaaaagg

SEQ ID NO: 16199 - DNA, 26 bp, Artificial Sequence
  Probe
agagaaccaacacctctttacagtga

SEQ ID NO: 16200 - DNA, 28 bp, Artificial Sequence
  Probe
agagaaccaacacctctttacagtgaaa

SEQ ID NO: 16201 - DNA, 29 bp, Artificial Sequence
  Probe
agagaaccaacacctctttacagtgaaat

SEQ ID NO: 16202 - DNA, 29 bp, Artificial Sequence
  Probe
agagcatgagactcttaatctcagggtcg

SEQ ID NO: 16203 - DNA, 30 bp, Artificial Sequence; identical to SEQ ID NO: 3140
  Probe

SEQ ID NO: 16204 - DNA, 34 bp, Artificial Sequence
  Probe
agagcatgagactcttaatctcagggtcgtgggt

SEQ ID NO: 16205 - DNA, 26 bp, Artificial Sequence
  Probe
agagcatgggactcttaatcccaggg

SEQ ID NO: 16206 - DNA, 27 bp, Artificial Sequence
  Probe
agagcatgggactcttaatcccagggt

SEQ ID NO: 16207 - DNA, 28 bp, Artificial Sequence
  Probe
agagcatgggactcttaatcccagggtc

SEQ ID NO: 16208 - DNA, 29 bp, Artificial Sequence
  Probe
agagcatgggactcttaatcccagggtcg

SEQ ID NO: 16209 - DNA, 30 bp, Artificial Sequence
  Probe
agagcatgggactcttaatcccagggtcgt

SEQ ID NO: 16210 - DNA, 31 bp, Artificial Sequence; identical to SEQ ID NO: 3142
  Probe

SEQ ID NO: 16211 - DNA, 34 bp, Artificial Sequence
  Probe
agagcatgggactcttaatcccagggtcgtgggt

SEQ ID NO: 16212 - DNA, 16 bp, Artificial Sequence
  Probe
agagcatttgactgca

SEQ ID NO: 16213 - DNA, 34 bp, Artificial Sequence
  Probe
agagcccggatagctcagtcggtagagcatcaga

SEQ ID NO: 16214 - DNA, 36 bp, Artificial Sequence
  Probe
agagcccggatagctcagtcggtagagcatcagact

SEQ ID NO: 16215 - DNA, 38 bp, Artificial Sequence
  Probe
agagcccggatagctcagtcggtagagcatcagacttt

SEQ ID NO: 16216 - DNA, 40 bp, Artificial Sequence
  Probe
agagcccggatagctcagtcggtagagcatcagactttta

SEQ ID NO: 16217 - DNA, 17 bp, Artificial Sequence
  Probe
agagcccggtaatcgca

SEQ ID NO: 16218 - DNA, 30 bp, Artificial Sequence
  Probe
agagcccggtaatcgcataaaacttaaaac

SEQ ID NO: 16219 - DNA, 31 bp, Artificial Sequence; identical to SEQ ID NO: 248
  Probe

SEQ ID NO: 16220 - DNA, 32 bp, Artificial Sequence; identical to SEQ ID NO: 3144
  Probe

SEQ ID NO: 16221 - DNA, 42 bp, Artificial Sequence
  Probe
agagcccggtaatcgcataaaacttaaaactttacagtcaga

SEQ ID NO: 16222 - DNA, 50 bp, Artificial Sequence; identical to SEQ ID NO: 3146
  Probe

SEQ ID NO: 16223 - DNA, 30 bp, Artificial Sequence
  Probe
agagccgttggttaagcgggagagacagtt

SEQ ID NO: 16224 - DNA, 31 bp, Artificial Sequence
  Probe
agagccgttggttaagcgggagagacagttg

SEQ ID NO: 16225 - DNA, 38 bp, Artificial Sequence
  Probe
agagcctggatagctcagtcggtagagcatcagacttt

SEQ ID NO: 16226 - DNA, 16 bp, Artificial Sequence
  Probe
agagctcaattacttt

SEQ ID NO: 16227 - DNA, 33 bp, Artificial Sequence
  Probe
agagctccagtggcgcaatcggttagcgcgcgg

SEQ ID NO: 16228 - DNA, 35 bp, Artificial Sequence
  Probe
agagctccagtggcgcaatcggttagcgcgcggta

SEQ ID NO: 16229 - DNA, 36 bp, Artificial Sequence
  Probe
agagctccagtggcgcaatcggttagcgcgcggtac

SEQ ID NO: 16230 - DNA, 37 bp, Artificial Sequence
  Probe
agagctccagtggcgcaatcggttagcgcgcggtact

SEQ ID NO: 16231 - DNA, 38 bp, Artificial Sequence
  Probe
agagctccagtggcgcaatcggttagcgcgcggtactt

SEQ ID NO: 16232 - DNA, 39 bp, Artificial Sequence
  Probe
agagctccagtggcgcaatcggttagcgcgcggtactta

SEQ ID NO: 16233 - DNA, 40 bp, Artificial Sequence
  Probe
agagctccagtggcgcaatcggttagcgcgcggtacttat

SEQ ID NO: 16234 - DNA, 41 bp, Artificial Sequence
  Probe
agagctccagtggcgcaatcggttagcgcgcggtacttata

SEQ ID NO: 16235 - DNA, 33 bp, Artificial Sequence
  Probe
agagggggtatagctcagtggtagagcatttga

SEQ ID NO: 16236 - DNA, 30 bp, Artificial Sequence
  Probe
agagggtctttttcaccccgctgttgctct

SEQ ID NO: 16237 - DNA, 29 bp, Artificial Sequence
  Probe
agaggtcccgggttcaaatcccggacgag

SEQ ID NO: 16238 - DNA, 30 bp, Artificial Sequence
  Probe
agaggtcccgggttcaaatcccggacgagc

SEQ ID NO: 16239 - DNA, 31 bp, Artificial Sequence
  Probe
agaggtcccgggttcaaatcccggacgagcc

SEQ ID NO: 16240 - DNA, 32 bp, Artificial Sequence
  Probe
agaggtcccgggttcaaatcccggacgagccc

SEQ ID NO: 16241 - DNA, 33 bp, Artificial Sequence
  Probe
agaggtcccgggttcaaatcccggacgagcccc

SEQ ID NO: 16242 - DNA, 34 bp, Artificial Sequence
  Probe
agaggtcccgggttcaaatcccggacgagccccc

SEQ ID NO: 16243 - DNA, 35 bp, Artificial Sequence
  Probe
agaggtcccgggttcaaatcccggacgagccccct

SEQ ID NO: 16244 - DNA, 16 bp, Artificial Sequence
  Probe
agaggtcgatggatcg

SEQ ID NO: 16245 - DNA, 30 bp, Artificial Sequence
  Probe
agaggttccatagtgtagtggttatcacgt

SEQ ID NO: 16246 - DNA, 25 bp, Artificial Sequence
  Probe
agagtaaataataggagcttaaacc

SEQ ID NO: 16247 - DNA, 26 bp, Artificial Sequence
  Probe
agagtaaataataggagcttaaaccc

SEQ ID NO: 16248 - DNA, 27 bp, Artificial Sequence
  Probe
agagtaaataataggagcttaaacccc

SEQ ID NO: 16249 - DNA, 29 bp, Artificial Sequence
  Probe
agagtaaataataggagcttaaaccccct

SEQ ID NO: 16250 - DNA, 30 bp, Artificial Sequence; identical to SEQ ID NO: 251
  Probe

SEQ ID NO: 16251 - DNA, 32 bp, Artificial Sequence; identical to SEQ ID NO: 253
  Probe

SEQ ID NO: 16252 - DNA, 33 bp, Artificial Sequence; identical to SEQ ID NO: 3156
  Probe

SEQ ID NO: 16253 - DNA, 34 bp, Artificial Sequence
  Probe
agagtaaataataggagcttaaacccccttattt

SEQ ID NO: 16254 - DNA, 35 bp, Artificial Sequence; identical to SEQ ID NO: 254
  Probe

SEQ ID NO: 16255 - DNA, 38 bp, Artificial Sequence; identical to SEQ ID NO: 3157
  Probe

SEQ ID NO: 16256 - DNA, 39 bp, Artificial Sequence; identical to SEQ ID NO: 3158
  Probe

SEQ ID NO: 16257 - DNA, 40 bp, Artificial Sequence; identical to SEQ ID NO: 3159
  Probe

SEQ ID NO: 16258 - DNA, 41 bp, Artificial Sequence; identical to SEQ ID NO: 3160
  Probe

SEQ ID NO: 16259 - DNA, 42 bp, Artificial Sequence
  Probe
agagtaaataataggagcttaaacccccttatttctaggact

SEQ ID NO: 16260 - DNA, 32 bp, Artificial Sequence; identical to SEQ ID NO: 257
  Probe

SEQ ID NO: 16261 - DNA, 23 bp, Artificial Sequence
  Probe
agagtggggttttgcagtcctta

SEQ ID NO: 16262 - DNA, 25 bp, Artificial Sequence
  Probe
agagtggggttttgcagtccttagc

SEQ ID NO: 16263 - DNA, 26 bp, Artificial Sequence
  Probe
agagtggggttttgcagtccttagct

SEQ ID NO: 16264 - DNA, 26 bp, Artificial Sequence
  Probe
agagtgtagcttaacacaaagcaccc

SEQ ID NO: 16265 - DNA, 27 bp, Artificial Sequence
  Probe
agagtgtagcttaacacaaagcaccca

SEQ ID NO: 16266 - DNA, 28 bp, Artificial Sequence
  Probe
agagtgtagcttaacacaaagcacccaa

SEQ ID NO: 16267 - DNA, 29 bp, Artificial Sequence
  Probe
agagtgtagcttaacacaaagcacccaac

SEQ ID NO: 16268 - DNA, 36 bp, Artificial Sequence
  Probe
agatagcagagtggcgcagcggaagcgtgctgggcc

SEQ ID NO: 16269 - DNA, 37 bp, Artificial Sequence
  Probe
agatagcagagtggcgcagcggaagcgtgctgggccc

SEQ ID NO: 16270 - DNA, 38 bp, Artificial Sequence
  Probe
agatagcagagtggcgcagcggaagcgtgctgggccca

SEQ ID NO: 16271 - DNA, 41 bp, Artificial Sequence
  Probe
agatagcagagtggcgcagcggaagcgtgctgggcccataa

SEQ ID NO: 16272 - DNA, 19 bp, Artificial Sequence
  Probe
agatcaagaggtccccggt

SEQ ID NO: 16273 - DNA, 33 bp, Artificial Sequence
  Probe
agatcctgggttcgaatcccagcggtgcctccg

SEQ ID NO: 16274 - DNA, 27 bp, Artificial Sequence
  Probe
agatgaaaacctttttccaaggacaaa

SEQ ID NO: 16275 - DNA, 28 bp, Artificial Sequence
  Probe
agatgaaaacctttttccaaggacaaat

SEQ ID NO: 16276 - DNA, 25 bp, Artificial Sequence
  Probe
agatgcgttggtggtatagtggtga

SEQ ID NO: 16277 - DNA, 26 bp, Artificial Sequence
  Probe
agatgcgttggtggtatagtggtgag

SEQ ID NO: 16278 - DNA, 28 bp, Artificial Sequence
  Probe
agatgcgttggtggtatagtggtgagca

SEQ ID NO: 16279 - DNA, 30 bp, Artificial Sequence
  Probe
agatgcgttggtggtatagtggtgagcata

SEQ ID NO: 16280 - DNA, 31 bp, Artificial Sequence
  Probe
agatgcgttggtggtatagtggtgagcatag

SEQ ID NO: 16281 - DNA, 32 bp, Artificial Sequence
  Probe
agatgcgttggtggtatagtggtgagcatagc

SEQ ID NO: 16282 - DNA, 34 bp, Artificial Sequence
  Probe
agatgcgttggtggtatagtggtgagcatagctg

SEQ ID NO: 16283 - DNA, 27 bp, Artificial Sequence
  Probe
agatggctcgttggtctaggggtatga

SEQ ID NO: 16284 - DNA, 29 bp, Artificial Sequence
  Probe
agatggctcgttggtctaggggtatgatt

SEQ ID NO: 16285 - DNA, 36 bp, Artificial Sequence
  Probe
agatggctcgttggtctaggggtatgattctcggtt

SEQ ID NO: 16286 - DNA, 37 bp, Artificial Sequence
  Probe
agatggctcgttggtctaggggtatgattctcggttt

SEQ ID NO: 16287 - DNA, 26 bp, Artificial Sequence
  Probe
agattaagagaaccaacacctcttta

SEQ ID NO: 16288 - DNA, 30 bp, Artificial Sequence; identical to SEQ ID NO: 9098
  Probe

SEQ ID NO: 16289 - DNA, 31 bp, Artificial Sequence; identical to SEQ ID NO: 3175
  Probe

SEQ ID NO: 16290 - DNA, 32 bp, Artificial Sequence; identical to SEQ ID NO: 3176
  Probe

SEQ ID NO: 16291 - DNA, 33 bp, Artificial Sequence; identical to SEQ ID NO: 3177
  Probe

SEQ ID NO: 16292 - DNA, 34 bp, Artificial Sequence; identical to SEQ ID NO: 3178
  Probe

SEQ ID NO: 16293 - DNA, 35 bp, Artificial Sequence; identical to SEQ ID NO: 3179
  Probe

SEQ ID NO: 16294 - DNA, 50 bp, Artificial Sequence
  Probe
agattgaagccagttgattagggtgcttagctgttaactaagtgtttgtg

SEQ ID NO: 16295 - DNA, 27 bp, Artificial Sequence
  Probe
agattgagggttcgagtcccttcgtgg

SEQ ID NO: 16296 - DNA, 33 bp, Artificial Sequence; identical to SEQ ID NO: 3191
  Probe

SEQ ID NO: 16297 - DNA, 17 bp, Artificial Sequence
  Probe
agattgtgaatctgaca

SEQ ID NO: 16298 - DNA, 20 bp, Artificial Sequence
  Probe
agattgtgaatctgacaaca

SEQ ID NO: 16299 - DNA, 21 bp, Artificial Sequence
  Probe
agattgtgaatctgacaacag

SEQ ID NO: 16300 - DNA, 36 bp, Artificial Sequence; identical to SEQ ID NO: 3197
  Probe

SEQ ID NO: 16301 - DNA, 37 bp, Artificial Sequence; identical to SEQ ID NO: 266
  Probe

SEQ ID NO: 16302 - DNA, 38 bp, Artificial Sequence; identical to SEQ ID NO: 267
  Probe

SEQ ID NO: 16303 - DNA, 39 bp, Artificial Sequence; identical to SEQ ID NO: 268
  Probe

SEQ ID NO: 16304 - DNA, 41 bp, Artificial Sequence; identical to SEQ ID NO: 3199
  Probe

SEQ ID NO: 16305 - DNA, 20 bp, Artificial Sequence
  Probe
agatttcaacttaacttgac

SEQ ID NO: 16306 - DNA, 21 bp, Artificial Sequence
  Probe
agatttcaacttaacttgacc

SEQ ID NO: 16307 - DNA, 22 bp, Artificial Sequence
  Probe
agatttcaacttaacttgaccg

SEQ ID NO: 16308 - DNA, 23 bp, Artificial Sequence
  Probe
agatttcaacttaacttgaccgc

SEQ ID NO: 16309 - DNA, 24 bp, Artificial Sequence
  Probe
agatttcaacttaacttgaccgct

SEQ ID NO: 16310 - DNA, 25 bp, Artificial Sequence
  Probe
agatttcaacttaacttgaccgctc

SEQ ID NO: 16311 - DNA, 26 bp, Artificial Sequence
  Probe
agatttcaacttaacttgaccgctct

SEQ ID NO: 16312 - DNA, 27 bp, Artificial Sequence
  Probe
agatttcaacttaacttgaccgctctg

SEQ ID NO: 16313 - DNA, 28 bp, Artificial Sequence
  Probe
agatttcaacttaacttgaccgctctga

SEQ ID NO: 16314 - DNA, 29 bp, Artificial Sequence
  Probe
agatttcaacttaacttgaccgctctgag

SEQ ID NO: 16315 - DNA, 30 bp, Artificial Sequence; identical to SEQ ID NO: 3214
  Probe

SEQ ID NO: 16316 - DNA, 31 bp, Artificial Sequence; identical to SEQ ID NO: 3215
  Probe

SEQ ID NO: 16317 - DNA, 34 bp, Artificial Sequence; identical to SEQ ID NO: 3219
  Probe

SEQ ID NO: 16318 - DNA, 34 bp, Artificial Sequence; identical to SEQ ID NO: 3221
  Probe

SEQ ID NO: 16319 - DNA, 21 bp, Artificial Sequence
  Probe
agcaaggccgagcggtctaag

SEQ ID NO: 16320 - DNA, 26 bp, Artificial Sequence
  Probe
agcaatacactgaaaatgtttagacg

SEQ ID NO: 16321 - DNA, 27 bp, Artificial Sequence
  Probe
agcaatacactgaaaatgtttagacgg

SEQ ID NO: 16322 - DNA, 34 bp, Artificial Sequence; identical to SEQ ID NO: 3225
  Probe

SEQ ID NO: 16323 - DNA, 49 bp, Artificial Sequence; identical to SEQ ID NO: 3228
  Probe

SEQ ID NO: 16324 - DNA, 50 bp, Artificial Sequence; identical to SEQ ID NO: 3229
  Probe

SEQ ID NO: 16325 - DNA, 17 bp, Artificial Sequence
  Probe
agcacccaacttacact

SEQ ID NO: 16326 - DNA, 18 bp, Artificial Sequence
  Probe
agcacccaacttacactt

SEQ ID NO: 16327 - DNA, 19 bp, Artificial Sequence
  Probe
agcacccaacttacactta

SEQ ID NO: 16328 - DNA, 22 bp, Artificial Sequence
  Probe
agcacccaacttacacttagga

SEQ ID NO: 16329 - DNA, 23 bp, Artificial Sequence
  Probe
agcacccaacttacacttaggag

SEQ ID NO: 16330 - DNA, 24 bp, Artificial Sequence
  Probe
agcacccaacttacacttaggaga

SEQ ID NO: 16331 - DNA, 25 bp, Artificial Sequence
  Probe
agcacccaacttacacttaggagat

SEQ ID NO: 16332 - DNA, 26 bp, Artificial Sequence
  Probe
agcacccaacttacacttaggagatt

SEQ ID NO: 16333 - DNA, 27 bp, Artificial Sequence
  Probe
agcacccaacttacacttaggagattt

SEQ ID NO: 16334 - DNA, 28 bp, Artificial Sequence
  Probe
agcacccaacttacacttaggagatttc

SEQ ID NO: 16335 - DNA, 29 bp, Artificial Sequence
  Probe
agcacccaacttacacttaggagatttca

SEQ ID NO: 16336 - DNA, 30 bp, Artificial Sequence
  Probe
agcacccaacttacacttaggagatttcaa

SEQ ID NO: 16337 - DNA, 31 bp, Artificial Sequence; identical to SEQ ID NO: 3241
  Probe

SEQ ID NO: 16338 - DNA, 32 bp, Artificial Sequence; identical to SEQ ID NO: 3242
  Probe

SEQ ID NO: 16339 - DNA, 33 bp, Artificial Sequence; identical to SEQ ID NO: 3243
  Probe

SEQ ID NO: 16340 - DNA, 34 bp, Artificial Sequence
  Probe
agcacccaacttacacttaggagatttcaactta

SEQ ID NO: 16341 - DNA, 35 bp, Artificial Sequence
  Probe
agcacccaacttacacttaggagatttcaacttaa

SEQ ID NO: 16342 - DNA, 36 bp, Artificial Sequence; identical to SEQ ID NO: 3244
  Probe

SEQ ID NO: 16343 - DNA, 37 bp, Artificial Sequence
  Probe
agcacccaacttacacttaggagatttcaacttaact

SEQ ID NO: 16344 - DNA, 38 bp, Artificial Sequence
  Probe
agcacccaacttacacttaggagatttcaacttaactt

SEQ ID NO: 16345 - DNA, 41 bp, Artificial Sequence
  Probe
agcacccaacttacacttaggagatttcaacttaacttgac

SEQ ID NO: 16346 - DNA, 42 bp, Artificial Sequence
  Probe
agcacccaacttacacttaggagatttcaacttaacttgacc

SEQ ID NO: 16347 - DNA, 43 bp, Artificial Sequence; identical to SEQ ID NO: 3246
  Probe

SEQ ID NO: 16348 - DNA, 45 bp, Artificial Sequence; identical to SEQ ID NO: 3248
  Probe

SEQ ID NO: 16349 - DNA, 46 bp, Artificial Sequence; identical to SEQ ID NO: 3249
  Probe

SEQ ID NO: 16350 - DNA, 50 bp, Artificial Sequence; identical to SEQ ID NO: 3251
  Probe

SEQ ID NO: 16351 - DNA, 29 bp, Artificial Sequence
  Probe
agcactctggactctgaatccagcgatcc

SEQ ID NO: 16352 - DNA, 30 bp, Artificial Sequence; identical to SEQ ID NO: 270
  Probe

SEQ ID NO: 16353 - DNA, 31 bp, Artificial Sequence; identical to SEQ ID NO: 271
  Probe

SEQ ID NO: 16354 - DNA, 32 bp, Artificial Sequence; identical to SEQ ID NO: 3254
  Probe

SEQ ID NO: 16355 - DNA, 50 bp, Artificial Sequence; identical to SEQ ID NO: 272
  Probe

SEQ ID NO: 16356 - DNA, 28 bp, Artificial Sequence
  Probe
agcactctggactttgaatccagcgatc

SEQ ID NO: 16357 - DNA, 32 bp, Artificial Sequence
  Probe
agcactctggactttgaatccagcgatccgag

SEQ ID NO: 16358 - DNA, 50 bp, Artificial Sequence; identical to SEQ ID NO: 273
  Probe

SEQ ID NO: 16359 - DNA, 40 bp, Artificial Sequence
  Probe
agcacttcccatatggtctagcggttaggattcctggttt

SEQ ID NO: 16360 - DNA, 41 bp, Artificial Sequence
  Probe
agcacttcccatatggtctagcggttaggattcctggtttt

SEQ ID NO: 16361 - DNA, 27 bp, Artificial Sequence
  Probe
agcagagtggcgcagcggaagcgtgct

SEQ ID NO: 16362 - DNA, 30 bp, Artificial Sequence; identical to SEQ ID NO: 8539
  Probe

SEQ ID NO: 16363 - DNA, 37 bp, Artificial Sequence
  Probe
agcagagtggcgcagcggaagcgtgctgggcccataa

SEQ ID NO: 16364 - DNA, 38 bp, Artificial Sequence
  Probe
agcagagtggcgcagcggaagcgtgctgggcccataac

SEQ ID NO: 16365 - DNA, 41 bp, Artificial Sequence
  Probe
agcagagtggcgcagcggaagcgtgctgggcccataaccca

SEQ ID NO: 16366 - DNA, 50 bp, Artificial Sequence; identical to SEQ ID NO: 3258
  Probe

SEQ ID NO: 16367 - DNA, 31 bp, Artificial Sequence
  Probe
agcagcctcgttagcgcagtaggcagcgcgt

SEQ ID NO: 16368 - DNA, 39 bp, Artificial Sequence
  Probe
agcagcctcgttagcgcagtaggcagcgcgtcagtctca

SEQ ID NO: 16369 - DNA, 28 bp, Artificial Sequence
  Probe
agcagcttcaaacctgccggggcttctc

SEQ ID NO: 16370 - DNA, 35 bp, Artificial Sequence
  Probe
agcaggacctcgtggcgcaacggtagcgcgtctga

SEQ ID NO: 16371 - DNA, 28 bp, Artificial Sequence
  Probe
agcaggtcccatggtgtaatggttagca

SEQ ID NO: 16372 - DNA, 39 bp, Artificial Sequence
  Probe
agcagtcaggatggccgagcggtctaaggcgctgcgttc

SEQ ID NO: 16373 - DNA, 32 bp, Artificial Sequence
  Probe
agcagttcccatatggtctagcggttaggatt

SEQ ID NO: 16374 - DNA, 38 bp, Artificial Sequence
  Probe
agcagttcccatatggtctagcggttaggattcctggt

SEQ ID NO: 16375 - DNA, 39 bp, Artificial Sequence
  Probe
agcagttcccatatggtctagcggttaggattcctggtt

SEQ ID NO: 16376 - DNA, 40 bp, Artificial Sequence
  Probe
agcagttcccatatggtctagcggttaggattcctggttt

SEQ ID NO: 16377 - DNA, 41 bp, Artificial Sequence
  Probe
agcagttcccatatggtctagcggttaggattcctggtttt

SEQ ID NO: 16378 - DNA, 16 bp, Artificial Sequence
  Probe
agcagttgacccgggt

SEQ ID NO: 16379 - DNA, 19 bp, Artificial Sequence
  Probe
agcagttgacccgggttcg

SEQ ID NO: 16380 - DNA, 32 bp, Artificial Sequence
  Probe
agcagttgacccgggttcgattcccggccaac

SEQ ID NO: 16381 - DNA, 38 bp, Artificial Sequence
  Probe
agcagttgacccgggttcgattcccggccaacgcaagt

SEQ ID NO: 16382 - DNA, 37 bp, Artificial Sequence
  Probe
agcagttgacccgggttcgattcccggccaacgcagc

SEQ ID NO: 16383 - DNA, 38 bp, Artificial Sequence
  Probe
agcagttgacccgggttcgattcccggccaacgcagcg

SEQ ID NO: 16384 - DNA, 38 bp, Artificial Sequence
  Probe
agcagttgacccgggttcgattcccggccaacgcagtg

SEQ ID NO: 16385 - DNA, 28 bp, Artificial Sequence
  Probe
agcatagctgccttccaagcagttgacc

SEQ ID NO: 16386 - DNA, 33 bp, Artificial Sequence
  Probe
agcatagctgccttccaagcagttgacccgggt

SEQ ID NO: 16387 - DNA, 34 bp, Artificial Sequence
  Probe
agcatagctgccttccaagcagttgacccgggtt

SEQ ID NO: 16388 - DNA, 27 bp, Artificial Sequence
  Probe
agcatgagactcttaatctcagggtcg

SEQ ID NO: 16389 - DNA, 21 bp, Artificial Sequence
  Probe
agcatggctgagtggtctaag

SEQ ID NO: 16390 - DNA, 25 bp, Artificial Sequence
  Probe
agcatgggactcttaatcccagggt

SEQ ID NO: 16391 - DNA, 27 bp, Artificial Sequence
  Probe
agcatgggactcttaatcccagggtcg

SEQ ID NO: 16392 - DNA, 28 bp, Artificial Sequence
  Probe
agcatgggactcttaatcccagggtcgt

SEQ ID NO: 16393 - DNA, 32 bp, Artificial Sequence
  Probe
agcatgggactcttaatcccagggtcgtgggt

SEQ ID NO: 16394 - DNA, 17 bp, Artificial Sequence
  Probe
agcattaaccttttaag

SEQ ID NO: 16395 - DNA, 18 bp, Artificial Sequence
  Probe
agcattaaccttttaagt

SEQ ID NO: 16396 - DNA, 24 bp, Artificial Sequence
  Probe
agcattaaccttttaagttaaaga

SEQ ID NO: 16397 - DNA, 26 bp, Artificial Sequence
  Probe
agcattaaccttttaagttaaagatt

SEQ ID NO: 16398 - DNA, 31 bp, Artificial Sequence
  Probe
agcattaaccttttaagttaaagattaagag

SEQ ID NO: 16399 - DNA, 32 bp, Artificial Sequence
  Probe
agcattaaccttttaagttaaagattaagaga

SEQ ID NO: 16400 - DNA, 38 bp, Artificial Sequence; identical to SEQ ID NO: 3273
  Probe

SEQ ID NO: 16401 - DNA, 39 bp, Artificial Sequence; identical to SEQ ID NO: 283
  Probe

SEQ ID NO: 16402 - DNA, 41 bp, Artificial Sequence; identical to SEQ ID NO: 3275
  Probe

SEQ ID NO: 16403 - DNA, 42 bp, Artificial Sequence; identical to SEQ ID NO: 284
  Probe

SEQ ID NO: 16404 - DNA, 48 bp, Artificial Sequence; identical to SEQ ID NO: 3279
  Probe

SEQ ID NO: 16405 - DNA, 34 bp, Artificial Sequence; identical to SEQ ID NO: 3283
  Probe

SEQ ID NO: 16406 - DNA, 36 bp, Artificial Sequence
  Probe
agcattggtggttcagtggtagaattctcgcctgcc

SEQ ID NO: 16407 - DNA, 41 bp, Artificial Sequence
  Probe
agccagcagagtggcgcagcggaagcgtgctgggcccataa

SEQ ID NO: 16408 - DNA, 20 bp, Artificial Sequence
  Probe
agccagggattgtgggttcg

SEQ ID NO: 16409 - DNA, 36 bp, Artificial Sequence
  Probe
agccagggattgtgggttcgagtcccacccggggta

SEQ ID NO: 16410 - DNA, 38 bp, Artificial Sequence
  Probe
agccagggattgtgggttcgagtcccacccggggtaaa

SEQ ID NO: 16411 - DNA, 36 bp, Artificial Sequence
  Probe
agccagggattgtgggttcgagtcccacctggggta

SEQ ID NO: 16412 - DNA, 39 bp, Artificial Sequence; identical to SEQ ID NO: 3285
  Probe

SEQ ID NO: 16413 - DNA, 29 bp, Artificial Sequence
  Probe
agccagggattgtgggttcgagtcccatc

SEQ ID NO: 16414 - DNA, 31 bp, Artificial Sequence
  Probe
agccagggattgtgggttcgagtcccatctg

SEQ ID NO: 16415 - DNA, 33 bp, Artificial Sequence
  Probe
agccagggattgtgggttcgagtcccatctggg

SEQ ID NO: 16416 - DNA, 36 bp, Artificial Sequence; identical to SEQ ID NO: 288
  Probe

SEQ ID NO: 16417 - DNA, 37 bp, Artificial Sequence
  Probe
agccagggattgtgggttcgagtcccatctggggtgg

SEQ ID NO: 16418 - DNA, 38 bp, Artificial Sequence
  Probe
agccagggattgtgggttcgagtcccatctggggtggc

SEQ ID NO: 16419 - DNA, 39 bp, Artificial Sequence; identical to SEQ ID NO: 3287
  Probe

SEQ ID NO: 16420 - DNA, 43 bp, Artificial Sequence
  Probe
agccagtaggtagcgtggccgagcggtctaaggcgctggatta

SEQ ID NO: 16421 - DNA, 20 bp, Artificial Sequence
  Probe
agccccaaacccactccacc

SEQ ID NO: 16422 - DNA, 21 bp, Artificial Sequence
  Probe
agccccaaacccactccacct

SEQ ID NO: 16423 - DNA, 16 bp, Artificial Sequence
  Probe
agccccagtggaacca

SEQ ID NO: 16424 - DNA, 17 bp, Artificial Sequence
  Probe
agccccagtggaaccac

SEQ ID NO: 16425 - DNA, 27 bp, Artificial Sequence
  Probe
agcccggatagctcagtcggtagagca

SEQ ID NO: 16426 - DNA, 32 bp, Artificial Sequence
  Probe
agcccggatagctcagtcggtagagcatcaga

SEQ ID NO: 16427 - DNA, 33 bp, Artificial Sequence
  Probe
agcccggatagctcagtcggtagagcatcagac

SEQ ID NO: 16428 - DNA, 34 bp, Artificial Sequence
  Probe
agcccggatagctcagtcggtagagcatcagact

SEQ ID NO: 16429 - DNA, 36 bp, Artificial Sequence
  Probe
agcccggatagctcagtcggtagagcatcagacttt

SEQ ID NO: 16430 - DNA, 37 bp, Artificial Sequence
  Probe
agcccggatagctcagtcggtagagcatcagactttt

SEQ ID NO: 16431 - DNA, 38 bp, Artificial Sequence
  Probe
agcccggatagctcagtcggtagagcatcagactttta

SEQ ID NO: 16432 - DNA, 18 bp, Artificial Sequence
  Probe
agcccggtaatcgcataa

SEQ ID NO: 16433 - DNA, 27 bp, Artificial Sequence
  Probe
agcccggtaatcgcataaaacttaaaa

SEQ ID NO: 16434 - DNA, 28 bp, Artificial Sequence
  Probe
agcccggtaatcgcataaaacttaaaac

SEQ ID NO: 16435 - DNA, 30 bp, Artificial Sequence
  Probe
agcccggtaatcgcataaaacttaaaactt

SEQ ID NO: 16436 - DNA, 31 bp, Artificial Sequence
  Probe
agcccggtaatcgcataaaacttaaaacttt

SEQ ID NO: 16437 - DNA, 34 bp, Artificial Sequence
  Probe
agcccggtaatcgcataaaacttaaaactttaca

SEQ ID NO: 16438 - DNA, 37 bp, Artificial Sequence; identical to SEQ ID NO: 3291
  Probe

SEQ ID NO: 16439 - DNA, 38 bp, Artificial Sequence; identical to SEQ ID NO: 292
  Probe

SEQ ID NO: 16440 - DNA, 41 bp, Artificial Sequence
  Probe
agcccggtaatcgcataaaacttaaaactttacagtcagag

SEQ ID NO: 16441 - DNA, 50 bp, Artificial Sequence; identical to SEQ ID NO: 3296
  Probe

SEQ ID NO: 16442 - DNA, 17 bp, Artificial Sequence
  Probe
agccctcagtaagttgc

SEQ ID NO: 16443 - DNA, 31 bp, Artificial Sequence
  Probe
agccctccctggtggtctagtggctaggatt

SEQ ID NO: 16444 - DNA, 41 bp, Artificial Sequence
  Probe
agccctccctggtggtctagtggctaggattcggcgctttc

SEQ ID NO: 16445 - DNA, 25 bp, Artificial Sequence
  Probe
agccggagaccgcgtggcctaatgg

SEQ ID NO: 16446 - DNA, 27 bp, Artificial Sequence
  Probe
agccggagaccgcgtggcctaatggat

SEQ ID NO: 16447 - DNA, 39 bp, Artificial Sequence
  Probe
agccggagaccgcgtggcctaatggataaggcgtctgac

SEQ ID NO: 16448 - DNA, 50 bp, Artificial Sequence
  Probe
agccggagaccgcgtggcctaatggataaggcgtctgacttcggatcaga

SEQ ID NO: 16449 - DNA, 27 bp, Artificial Sequence
  Probe
agccggctcgttggtctaggggtatga

SEQ ID NO: 16450 - DNA, 28 bp, Artificial Sequence
  Probe
agccggctcgttggtctaggggtatgat

SEQ ID NO: 16451 - DNA, 29 bp, Artificial Sequence
  Probe
agccggctcgttggtctaggggtatgatt

SEQ ID NO: 16452 - DNA, 30 bp, Artificial Sequence
  Probe
agccggctcgttggtctaggggtatgattc

SEQ ID NO: 16453 - DNA, 31 bp, Artificial Sequence
  Probe
agccggctcgttggtctaggggtatgattct

SEQ ID NO: 16454 - DNA, 33 bp, Artificial Sequence
  Probe
agccggctcgttggtctaggggtatgattctcg

SEQ ID NO: 16455 - DNA, 34 bp, Artificial Sequence
  Probe
agccggctcgttggtctaggggtatgattctcgc

SEQ ID NO: 16456 - DNA, 37 bp, Artificial Sequence
  Probe
agccggctcgttggtctaggggtatgattctcgcttt

SEQ ID NO: 16457 - DNA, 38 bp, Artificial Sequence
  Probe
agccggctcgttggtctaggggtatgattctcgctttg

SEQ ID NO: 16458 - DNA, 29 bp, Artificial Sequence
  Probe
agccgtgggggattagctcaaatggtaga

SEQ ID NO: 16459 - DNA, 15 bp, Artificial Sequence
  Probe
agcctttctattagc

SEQ ID NO: 16460 - DNA, 28 bp, Artificial Sequence
  Probe
agcgatccgagttcaaatctcggtggaa

SEQ ID NO: 16461 - DNA, 29 bp, Artificial Sequence
  Probe
agcgatccgagttcaaatctcggtggaac

SEQ ID NO: 16462 - DNA, 30 bp, Artificial Sequence
  Probe
agcgatccgagttcaaatctcggtggaacc

SEQ ID NO: 16463 - DNA, 31 bp, Artificial Sequence; identical to SEQ ID NO: 295
  Probe

SEQ ID NO: 16464 - DNA, 32 bp, Artificial Sequence; identical to SEQ ID NO: 3301
  Probe

SEQ ID NO: 16465 - DNA, 33 bp, Artificial Sequence; identical to SEQ ID NO: 3302
  Probe

SEQ ID NO: 16466 - DNA, 34 bp, Artificial Sequence; identical to SEQ ID NO: 3303
  Probe

SEQ ID NO: 16467 - DNA, 32 bp, Artificial Sequence; identical to SEQ ID NO: 3304
  Probe

SEQ ID NO: 16468 - DNA, 28 bp, Artificial Sequence
  Probe
agcgatccgagttcaaatctcggtggga

SEQ ID NO: 16469 - DNA, 29 bp, Artificial Sequence
  Probe
agcgatccgagttcaaatctcggtgggac

SEQ ID NO: 16470 - DNA, 30 bp, Artificial Sequence; identical to SEQ ID NO: 297
  Probe

SEQ ID NO: 16471 - DNA, 31 bp, Artificial Sequence; identical to SEQ ID NO: 298
  Probe

SEQ ID NO: 16472 - DNA, 32 bp, Artificial Sequence; identical to SEQ ID NO: 299
  Probe

SEQ ID NO: 16473 - DNA, 34 bp, Artificial Sequence; identical to SEQ ID NO: 3306
  Probe

SEQ ID NO: 16474 - DNA, 28 bp, Artificial Sequence
  Probe
agcgatccgagttcaagtctcggtggaa

SEQ ID NO: 16475 - DNA, 31 bp, Artificial Sequence
  Probe
agcgatccgagttcaagtctcggtggaacct

SEQ ID NO: 16476 - DNA, 34 bp, Artificial Sequence
  Probe
agcgatccgagttcgagtctcggtggaacctttg

SEQ ID NO: 16477 - DNA, 26 bp, Artificial Sequence
  Probe
agcgccgctggtgtagtggtatcatg

SEQ ID NO: 16478 - DNA, 30 bp, Artificial Sequence
  Probe
agcgccgctggtgtagtggtatcatgcaag

SEQ ID NO: 16479 - DNA, 31 bp, Artificial Sequence
  Probe
agcgccgctggtgtagtggtatcatgcaaga

SEQ ID NO: 16480 - DNA, 32 bp, Artificial Sequence
  Probe
agcgccgctggtgtagtggtatcatgcaagat

SEQ ID NO: 16481 - DNA, 33 bp, Artificial Sequence; identical to SEQ ID NO: 3310
  Probe

SEQ ID NO: 16482 - DNA, 34 bp, Artificial Sequence
  Probe
agcgccgctggtgtagtggtatcatgcaagattc

SEQ ID NO: 16483 - DNA, 36 bp, Artificial Sequence
  Probe
agcgccgctggtgtagtggtatcatgcaagattccc

SEQ ID NO: 16484 - DNA, 42 bp, Artificial Sequence
  Probe
agcgccgctggtgtagtggtatcatgcaagattcccattctt

SEQ ID NO: 16485 - DNA, 27 bp, Artificial Sequence
  Probe
agcgcgttcggctgttaaccgaaaggt

SEQ ID NO: 16486 - DNA, 50 bp, Artificial Sequence; identical to SEQ ID NO: 3312
  Probe

SEQ ID NO: 16487 - DNA, 30 bp, Artificial Sequence
  Probe
agcgctcttttccggtatttcagaagagaa

SEQ ID NO: 16488 - DNA, 20 bp, Artificial Sequence
  Probe
agcggaagcgtgctgggccc

SEQ ID NO: 16489 - DNA, 16 bp, Artificial Sequence
  Probe
agcggagccttcgata

SEQ ID NO: 16490 - DNA, 17 bp, Artificial Sequence
  Probe
agcggagccttcgatag

SEQ ID NO: 16491 - DNA, 24 bp, Artificial Sequence
  Probe
agcggagccttcgatagctcagtt

SEQ ID NO: 16492 - DNA, 36 bp, Artificial Sequence
  Probe
agcggagccttcgatagctcagttggtagagcggag

SEQ ID NO: 16493 - DNA, 38 bp, Artificial Sequence
  Probe
agcggagccttcgatagctcagttggtagagcggagga

SEQ ID NO: 16494 - DNA, 39 bp, Artificial Sequence
  Probe
agcggagccttcgatagctcagttggtagagcggaggac

SEQ ID NO: 16495 - DNA, 42 bp, Artificial Sequence
  Probe
agcggagccttcgatagctcagttggtagagcggaggactgt

SEQ ID NO: 16496 - DNA, 43 bp, Artificial Sequence
  Probe
agcggagccttcgatagctcagttggtagagcggaggactgta

SEQ ID NO: 16497 - DNA, 44 bp, Artificial Sequence; identical to SEQ ID NO: 3314
  Probe

SEQ ID NO: 16498 - DNA, 46 bp, Artificial Sequence
  Probe
agcggagccttcgatagctcagttggtagagcggaggactgtagtg

SEQ ID NO: 16499 - DNA, 49 bp, Artificial Sequence
  Probe
agcggagccttcgatagctcagttggtagagcggaggactgtagtggat

SEQ ID NO: 16500 - DNA, 50 bp, Artificial Sequence
  Probe
agcggagccttcgatagctcagttggtagagcggaggactgtagtggata

SEQ ID NO: 16501 - DNA, 18 bp, Artificial Sequence
  Probe
agcggcctctggtggcgt

SEQ ID NO: 16502 - DNA, 24 bp, Artificial Sequence
  Probe
agcggttaggattcctggttttca

SEQ ID NO: 16503 - DNA, 36 bp, Artificial Sequence
  Probe
agcggttaggattcctggttttcacccaggtggccc

SEQ ID NO: 16504 - DNA, 40 bp, Artificial Sequence
  Probe
agcggttaggattcctggttttcacccaggtggcccgggt

SEQ ID NO: 16505 - DNA, 21 bp, Artificial Sequence
  Probe
agcgtggccgagcggtctaag

SEQ ID NO: 16506 - DNA, 21 bp, Artificial Sequence
  Probe
agcgtggccgagtggtctaag

SEQ ID NO: 16507 - DNA, 33 bp, Artificial Sequence
  Probe
agcgtggccgagtggtctaaggcgctggattta

SEQ ID NO: 16508 - DNA, 31 bp, Artificial Sequence; identical to SEQ ID NO: 3315
  Probe

SEQ ID NO: 16509 - DNA, 23 bp, Artificial Sequence
  Probe
agctaaataagctatcgggccca

SEQ ID NO: 16510 - DNA, 25 bp, Artificial Sequence
  Probe
agctaaataagctatcgggcccata

SEQ ID NO: 16511 - DNA, 26 bp, Artificial Sequence
  Probe
agctaaataagctatcgggcccatac

SEQ ID NO: 16512 - DNA, 27 bp, Artificial Sequence
  Probe
agctaaataagctatcgggcccatacc

SEQ ID NO: 16513 - DNA, 28 bp, Artificial Sequence
  Probe
agctaaataagctatcgggcccataccc

SEQ ID NO: 16514 - DNA, 36 bp, Artificial Sequence
  Probe
agctaaataagctatcgggcccataccccgaaaatg

SEQ ID NO: 16515 - DNA, 29 bp, Artificial Sequence
  Probe
agctagctcagtcggtagagcatgagact

SEQ ID NO: 16516 - DNA, 27 bp, Artificial Sequence
  Probe
agctagctcagtcggtagagcatggga

SEQ ID NO: 16517 - DNA, 28 bp, Artificial Sequence
  Probe
agctagctcagtcggtagagcatgggac

SEQ ID NO: 16518 - DNA, 29 bp, Artificial Sequence
  Probe
agctagctcagtcggtagagcatgggact

SEQ ID NO: 16519 - DNA, 30 bp, Artificial Sequence
  Probe
agctagctcagtcggtagagcatgggactc

SEQ ID NO: 16520 - DNA, 16 bp, Artificial Sequence
  Probe
agctatcgggcccata

SEQ ID NO: 16521 - DNA, 21 bp, Artificial Sequence
  Probe
agctatcgggcccataccccg

SEQ ID NO: 16522 - DNA, 22 bp, Artificial Sequence
  Probe
agctatcgggcccataccccga

SEQ ID NO: 16523 - DNA, 23 bp, Artificial Sequence
  Probe
agctatcgggcccataccccgaa

SEQ ID NO: 16524 - DNA, 24 bp, Artificial Sequence
  Probe
agctatcgggcccataccccgaaa

SEQ ID NO: 16525 - DNA, 25 bp, Artificial Sequence
  Probe
agctatcgggcccataccccgaaaa

SEQ ID NO: 16526 - DNA, 26 bp, Artificial Sequence
  Probe
agctatcgggcccataccccgaaaat

SEQ ID NO: 16527 - DNA, 27 bp, Artificial Sequence
  Probe
agctatcgggcccataccccgaaaatg

SEQ ID NO: 16528 - DNA, 28 bp, Artificial Sequence
  Probe
agctatcgggcccataccccgaaaatgt

SEQ ID NO: 16529 - DNA, 29 bp, Artificial Sequence
  Probe
agctatcgggcccataccccgaaaatgtt

SEQ ID NO: 16530 - DNA, 30 bp, Artificial Sequence; identical to SEQ ID NO: 3337
  Probe

SEQ ID NO: 16531 - DNA, 31 bp, Artificial Sequence; identical to SEQ ID NO: 3338
  Probe

SEQ ID NO: 16532 - DNA, 32 bp, Artificial Sequence; identical to SEQ ID NO: 3339
  Probe

SEQ ID NO: 16533 - DNA, 33 bp, Artificial Sequence; identical to SEQ ID NO: 3340
  Probe

SEQ ID NO: 16534 - DNA, 34 bp, Artificial Sequence; identical to SEQ ID NO: 3341
  Probe

SEQ ID NO: 16535 - DNA, 40 bp, Artificial Sequence; identical to SEQ ID NO: 3342
  Probe

SEQ ID NO: 16536 - DNA, 45 bp, Artificial Sequence; identical to SEQ ID NO: 3345
  Probe

SEQ ID NO: 16537 - DNA, 21 bp, Artificial Sequence
  Probe
agctcacaagaactgctaact

SEQ ID NO: 16538 - DNA, 23 bp, Artificial Sequence
  Probe
agctcacaagaactgctaactca

SEQ ID NO: 16539 - DNA, 25 bp, Artificial Sequence
  Probe
agctcacaagaactgctaactcatg

SEQ ID NO: 16540 - DNA, 30 bp, Artificial Sequence
  Probe
agctcacaagaactgctaactcatgccccc

SEQ ID NO: 16541 - DNA, 50 bp, Artificial Sequence; identical to SEQ ID NO: 311
  Probe

SEQ ID NO: 16542 - DNA, 23 bp, Artificial Sequence
  Probe
agctcagtcggtagagcatcaga

SEQ ID NO: 16543 - DNA, 24 bp, Artificial Sequence
  Probe
agctcagtcggtagagcatcagac

SEQ ID NO: 16544 - DNA, 25 bp, Artificial Sequence
  Probe
agctcagtcggtagagcatcagact

SEQ ID NO: 16545 - DNA, 26 bp, Artificial Sequence
  Probe
agctcagtcggtagagcatcagactt

SEQ ID NO: 16546 - DNA, 23 bp, Artificial Sequence
  Probe
agctcagtcggtagagcatgaga

SEQ ID NO: 16547 - DNA, 24 bp, Artificial Sequence
  Probe
agctcagtcggtagagcatgagac

SEQ ID NO: 16548 - DNA, 25 bp, Artificial Sequence
  Probe
agctcagtcggtagagcatgagact

SEQ ID NO: 16549 - DNA, 26 bp, Artificial Sequence
  Probe
agctcagtcggtagagcatgagactc

SEQ ID NO: 16550 - DNA, 21 bp, Artificial Sequence
  Probe
agctcagtcggtagagcatgg

SEQ ID NO: 16551 - DNA, 23 bp, Artificial Sequence
  Probe
agctcagtcggtagagcatggga

SEQ ID NO: 16552 - DNA, 28 bp, Artificial Sequence
  Probe
agctcagtcggtagagcatgggactctt

SEQ ID NO: 16553 - DNA, 16 bp, Artificial Sequence
  Probe
agctccgaggtgattt

SEQ ID NO: 16554 - DNA, 17 bp, Artificial Sequence
  Probe
agctccgaggtgatttt

SEQ ID NO: 16555 - DNA, 18 bp, Artificial Sequence
  Probe
agctccgaggtgattttc

SEQ ID NO: 16556 - DNA, 21 bp, Artificial Sequence
  Probe
agctccgaggtgattttcata

SEQ ID NO: 16557 - DNA, 32 bp, Artificial Sequence; identical to SEQ ID NO: 316
  Probe

SEQ ID NO: 16558 - DNA, 33 bp, Artificial Sequence; identical to SEQ ID NO: 3363
  Probe

SEQ ID NO: 16559 - DNA, 34 bp, Artificial Sequence
  Probe
agctccgaggtgattttcatattgaattgcaaat

SEQ ID NO: 16560 - DNA, 35 bp, Artificial Sequence; identical to SEQ ID NO: 3364
  Probe

SEQ ID NO: 16561 - DNA, 36 bp, Artificial Sequence
  Probe
agctccgaggtgattttcatattgaattgcaaattc

SEQ ID NO: 16562 - DNA, 37 bp, Artificial Sequence; identical to SEQ ID NO: 3365
  Probe

SEQ ID NO: 16563 - DNA, 38 bp, Artificial Sequence; identical to SEQ ID NO: 3366
  Probe

SEQ ID NO: 16564 - DNA, 44 bp, Artificial Sequence; identical to SEQ ID NO: 3369
  Probe

SEQ ID NO: 16565 - DNA, 49 bp, Artificial Sequence; identical to SEQ ID NO: 3373
  Probe

SEQ ID NO: 16566 - DNA, 50 bp, Artificial Sequence; identical to SEQ ID NO: 3374
  Probe

SEQ ID NO: 16567 - DNA, 17 bp, Artificial Sequence
  Probe
agctggggattgtgggt

SEQ ID NO: 16568 - DNA, 29 bp, Artificial Sequence
  Probe
agctggggattgtgggttcgagtcccatc

SEQ ID NO: 16569 - DNA, 31 bp, Artificial Sequence
  Probe
agctggggattgtgggttcgagtcccatctg

SEQ ID NO: 16570 - DNA, 32 bp, Artificial Sequence
  Probe
agctggggattgtgggttcgagtcccatctgg

SEQ ID NO: 16571 - DNA, 33 bp, Artificial Sequence
  Probe
agctggggattgtgggttcgagtcccatctggg

SEQ ID NO: 16572 - DNA, 36 bp, Artificial Sequence
  Probe
agctggggattgtgggttcgagtcccatctgggtcg

SEQ ID NO: 16573 - DNA, 37 bp, Artificial Sequence
  Probe
agctggggattgtgggttcgagtcccatctgggtcgc

SEQ ID NO: 16574 - DNA, 39 bp, Artificial Sequence; identical to SEQ ID NO: 3375
  Probe

SEQ ID NO: 16575 - DNA, 39 bp, Artificial Sequence
  Probe
agctgttaactaagtgtttgtgggtttaagtcccattgg

SEQ ID NO: 16576 - DNA, 43 bp, Artificial Sequence; identical to SEQ ID NO: 3377
  Probe

SEQ ID NO: 16577 - DNA, 46 bp, Artificial Sequence
  Probe
agctgttaactaagtgtttgtgggtttaagtcccattggtctagta

SEQ ID NO: 16578 - DNA, 16 bp, Artificial Sequence
  Probe
agcttaaaccccctta

SEQ ID NO: 16579 - DNA, 22 bp, Artificial Sequence
  Probe
agcttaaacccccttatttcta

SEQ ID NO: 16580 - DNA, 23 bp, Artificial Sequence
  Probe
agcttaaacccccttatttctag

SEQ ID NO: 16581 - DNA, 24 bp, Artificial Sequence
  Probe
agcttaaacccccttatttctagg

SEQ ID NO: 16582 - DNA, 25 bp, Artificial Sequence
  Probe
agcttaaacccccttatttctagga

SEQ ID NO: 16583 - DNA, 23 bp, Artificial Sequence
  Probe
agcttacctcctcaaagcaatac

SEQ ID NO: 16584 - DNA, 27 bp, Artificial Sequence
  Probe
agcttacctcctcaaagcaatacactg

SEQ ID NO: 16585 - DNA, 23 bp, Artificial Sequence
  Probe
agcttcaaacctgccggggcttc

SEQ ID NO: 16586 - DNA, 24 bp, Artificial Sequence
  Probe
agcttcaaacctgccggggcttct

SEQ ID NO: 16587 - DNA, 25 bp, Artificial Sequence
  Probe
agcttcaaacctgccggggcttctc

SEQ ID NO: 16588 - DNA, 28 bp, Artificial Sequence
  Probe
agcttccctggtggtctagtggttagga

SEQ ID NO: 16589 - DNA, 29 bp, Artificial Sequence
  Probe
agcttccctggtggtctagtggttaggat

SEQ ID NO: 16590 - DNA, 30 bp, Artificial Sequence
  Probe
agcttccctggtggtctagtggttaggatt

SEQ ID NO: 16591 - DNA, 31 bp, Artificial Sequence
  Probe
agcttccctggtggtctagtggttaggattc

SEQ ID NO: 16592 - DNA, 32 bp, Artificial Sequence
  Probe
agcttccctggtggtctagtggttaggattcg

SEQ ID NO: 16593 - DNA, 33 bp, Artificial Sequence
  Probe
agcttccctggtggtctagtggttaggattcgg

SEQ ID NO: 16594 - DNA, 34 bp, Artificial Sequence
  Probe
agcttccctggtggtctagtggttaggattcggc

SEQ ID NO: 16595 - DNA, 35 bp, Artificial Sequence
  Probe
agcttccctggtggtctagtggttaggattcggcg

SEQ ID NO: 16596 - DNA, 36 bp, Artificial Sequence
  Probe
agcttccctggtggtctagtggttaggattcggcgc

SEQ ID NO: 16597 - DNA, 37 bp, Artificial Sequence
  Probe
agcttccctggtggtctagtggttaggattcggcgct

SEQ ID NO: 16598 - DNA, 38 bp, Artificial Sequence
  Probe
agcttccctggtggtctagtggttaggattcggcgctc

SEQ ID NO: 16599 - DNA, 39 bp, Artificial Sequence
  Probe
agcttccctggtggtctagtggttaggattcggcgctct

SEQ ID NO: 16600 - DNA, 40 bp, Artificial Sequence
  Probe
agcttccctggtggtctagtggttaggattcggcgctctc

SEQ ID NO: 16601 - DNA, 41 bp, Artificial Sequence
  Probe
agcttccctggtggtctagtggttaggattcggcgctctca

SEQ ID NO: 16602 - DNA, 16 bp, Artificial Sequence
  Probe
agctttggggggttcg

SEQ ID NO: 16603 - DNA, 27 bp, Artificial Sequence
  Probe
agctttggggggttcgattccttcctt

SEQ ID NO: 16604 - DNA, 28 bp, Artificial Sequence
  Probe
agctttggggggttcgattccttccttt

SEQ ID NO: 16605 - DNA, 29 bp, Artificial Sequence
  Probe
agctttggggggttcgattccttcctttt

SEQ ID NO: 16606 - DNA, 30 bp, Artificial Sequence
  Probe
agctttggggggttcgattccttccttttt

SEQ ID NO: 16607 - DNA, 31 bp, Artificial Sequence; identical to SEQ ID NO: 3387
  Probe

SEQ ID NO: 16608 - DNA, 32 bp, Artificial Sequence; identical to SEQ ID NO: 3388
  Probe

SEQ ID NO: 16609 - DNA, 33 bp, Artificial Sequence; identical to SEQ ID NO: 3389
  Probe

SEQ ID NO: 16610 - DNA, 34 bp, Artificial Sequence; identical to SEQ ID NO: 3390
  Probe

SEQ ID NO: 16611 - DNA, 35 bp, Artificial Sequence; identical to SEQ ID NO: 3391
  Probe

SEQ ID NO: 16612 - DNA, 36 bp, Artificial Sequence
  Probe
agctttggggggttcgattccttccttttttgtcta

SEQ ID NO: 16613 - DNA, 32 bp, Artificial Sequence
  Probe
aggacctcgtggcgcaacggtagcgcgtctga

SEQ ID NO: 16614 - DNA, 33 bp, Artificial Sequence
  Probe
aggacctcgtggcgcaacggtagcgcgtctgac

SEQ ID NO: 16615 - DNA, 34 bp, Artificial Sequence
  Probe
aggacctcgtggcgcaacggtagcgcgtctgact

SEQ ID NO: 16616 - DNA, 35 bp, Artificial Sequence
  Probe
aggacctcgtggcgcaacggtagcgcgtctgactc

SEQ ID NO: 16617 - DNA, 36 bp, Artificial Sequence
  Probe
aggacctcgtggcgcaacggtagcgcgtctgactcc

SEQ ID NO: 16618 - DNA, 30 bp, Artificial Sequence
  Probe
aggagatcctgggttcgaatcccagcgggg

SEQ ID NO: 16619 - DNA, 31 bp, Artificial Sequence
  Probe
aggagatcctgggttcgaatcccagcggggc

SEQ ID NO: 16620 - DNA, 33 bp, Artificial Sequence; identical to SEQ ID NO: 3396
  Probe

SEQ ID NO: 16621 - DNA, 36 bp, Artificial Sequence
  Probe
aggagatcctgggttcgaatcccagcggggccttac

SEQ ID NO: 16622 - DNA, 30 bp, Artificial Sequence
  Probe
aggagatcctgggttcgaatcccagcggtg

SEQ ID NO: 16623 - DNA, 31 bp, Artificial Sequence; identical to SEQ ID NO: 3397
  Probe

SEQ ID NO: 16624 - DNA, 32 bp, Artificial Sequence; identical to SEQ ID NO: 3398
  Probe

SEQ ID NO: 16625 - DNA, 33 bp, Artificial Sequence; identical to SEQ ID NO: 318
  Probe

SEQ ID NO: 16626 - DNA, 34 bp, Artificial Sequence
  Probe
aggagatcctgggttcgaatcccagcggtgcctc

SEQ ID NO: 16627 - DNA, 35 bp, Artificial Sequence; identical to SEQ ID NO: 3399
  Probe

SEQ ID NO: 16628 - DNA, 36 bp, Artificial Sequence; identical to SEQ ID NO: 3400
  Probe

SEQ ID NO: 16629 - DNA, 16 bp, Artificial Sequence
  Probe
aggagatttcaactta

SEQ ID NO: 16630 - DNA, 17 bp, Artificial Sequence
  Probe
aggagatttcaacttaa

SEQ ID NO: 16631 - DNA, 19 bp, Artificial Sequence
  Probe
aggagatttcaacttaact

SEQ ID NO: 16632 - DNA, 23 bp, Artificial Sequence
  Probe
aggagatttcaacttaacttgac

SEQ ID NO: 16633 - DNA, 24 bp, Artificial Sequence
  Probe
aggagatttcaacttaacttgacc

SEQ ID NO: 16634 - DNA, 25 bp, Artificial Sequence
  Probe
aggagatttcaacttaacttgaccg

SEQ ID NO: 16635 - DNA, 26 bp, Artificial Sequence
  Probe
aggagatttcaacttaacttgaccgc

SEQ ID NO: 16636 - DNA, 27 bp, Artificial Sequence
  Probe
aggagatttcaacttaacttgaccgct

SEQ ID NO: 16637 - DNA, 28 bp, Artificial Sequence
  Probe
aggagatttcaacttaacttgaccgctc

SEQ ID NO: 16638 - DNA, 29 bp, Artificial Sequence
  Probe
aggagatttcaacttaacttgaccgctct

SEQ ID NO: 16639 - DNA, 30 bp, Artificial Sequence; identical to SEQ ID NO: 3410
  Probe

SEQ ID NO: 16640 - DNA, 31 bp, Artificial Sequence; identical to SEQ ID NO: 3411
  Probe

SEQ ID NO: 16641 - DNA, 32 bp, Artificial Sequence; identical to SEQ ID NO: 3412
  Probe

SEQ ID NO: 16642 - DNA, 33 bp, Artificial Sequence; identical to SEQ ID NO: 3413
  Probe

SEQ ID NO: 16643 - DNA, 34 bp, Artificial Sequence; identical to SEQ ID NO: 3414
  Probe

SEQ ID NO: 16644 - DNA, 16 bp, Artificial Sequence
  Probe
aggagcttaaaccccc

SEQ ID NO: 16645 - DNA, 19 bp, Artificial Sequence
  Probe
aggagcttaaaccccctta

SEQ ID NO: 16646 - DNA, 24 bp, Artificial Sequence
  Probe
aggagcttaaacccccttatttct

SEQ ID NO: 16647 - DNA, 27 bp, Artificial Sequence
  Probe
aggagcttaaacccccttatttctagg

SEQ ID NO: 16648 - DNA, 19 bp, Artificial Sequence
  Probe
aggatggccgagcggtcta

SEQ ID NO: 16649 - DNA, 20 bp, Artificial Sequence
  Probe
aggatggccgagcggtctaa

SEQ ID NO: 16650 - DNA, 21 bp, Artificial Sequence
  Probe
aggatggccgagcggtctaag

SEQ ID NO: 16651 - DNA, 22 bp, Artificial Sequence
  Probe
aggatggccgagtggtctaagg

SEQ ID NO: 16652 - DNA, 25 bp, Artificial Sequence
  Probe
aggatggccgagtggtctaaggcgc

SEQ ID NO: 16653 - DNA, 26 bp, Artificial Sequence
  Probe
aggatggccgagtggtctaaggcgcc

SEQ ID NO: 16654 - DNA, 28 bp, Artificial Sequence
  Probe
aggatggggtgtgataggtggcacggag

SEQ ID NO: 16655 - DNA, 29 bp, Artificial Sequence
  Probe
aggatggggtgtgataggtggcacggaga

SEQ ID NO: 16656 - DNA, 33 bp, Artificial Sequence
  Probe
aggatggggtgtgataggtggcacggagaattt

SEQ ID NO: 16657 - DNA, 35 bp, Artificial Sequence
  Probe
aggatggggtgtgataggtggcacggagaattttg

SEQ ID NO: 16658 - DNA, 17 bp, Artificial Sequence
  Probe
aggattcctggttttca

SEQ ID NO: 16659 - DNA, 28 bp, Artificial Sequence
  Probe
aggattcctggttttcacccaggcggcc

SEQ ID NO: 16660 - DNA, 30 bp, Artificial Sequence
  Probe
aggattcctggttttcacccaggcggcccg

SEQ ID NO: 16661 - DNA, 30 bp, Artificial Sequence
  Probe
aggattcctggttttcacccaggtggcccg

SEQ ID NO: 16662 - DNA, 33 bp, Artificial Sequence
  Probe
aggattcctggttttcacccaggtggcccgggt

SEQ ID NO: 16663 - DNA, 17 bp, Artificial Sequence
  Probe
aggattcggcgctctca

SEQ ID NO: 16664 - DNA, 28 bp, Artificial Sequence
  Probe
aggattcggcgctctcaccgccgcggcc

SEQ ID NO: 16665 - DNA, 30 bp, Artificial Sequence
  Probe
aggattcggcgctctcaccgccgcggcccg

SEQ ID NO: 16666 - DNA, 30 bp, Artificial Sequence
  Probe
aggattcggcgctttcaccgccgcggcccg

SEQ ID NO: 16667 - DNA, 30 bp, Artificial Sequence
  Probe
aggccccgggttcaatccccggcacctcca

SEQ ID NO: 16668 - DNA, 24 bp, Artificial Sequence
  Probe
aggccccgggttcgatccccggca

SEQ ID NO: 16669 - DNA, 27 bp, Artificial Sequence
  Probe
aggccccgggttcgatccccggcatct

SEQ ID NO: 16670 - DNA, 30 bp, Artificial Sequence
  Probe
aggccccgggttcgatccccggcatctcca

SEQ ID NO: 16671 - DNA, 33 bp, Artificial Sequence
  Probe
aggccccgggttcgatccccggcatctccattg

SEQ ID NO: 16672 - DNA, 23 bp, Artificial Sequence
  Probe
aggcgccagactcaaggtaagca

SEQ ID NO: 16673 - DNA, 30 bp, Artificial Sequence
  Probe
aggcgcccggctagctcagtcggtagagca

SEQ ID NO: 16674 - DNA, 32 bp, Artificial Sequence
  Probe
aggcgcccggctagctcagtcggtagagcatg

SEQ ID NO: 16675 - DNA, 36 bp, Artificial Sequence
  Probe
aggcgcccggctagctcagtcggtagagcatgggac

SEQ ID NO: 16676 - DNA, 37 bp, Artificial Sequence
  Probe
aggcgcccggctagctcagtcggtagagcatgggact

SEQ ID NO: 16677 - DNA, 38 bp, Artificial Sequence
  Probe
aggcgcccggctagctcagtcggtagagcatgggactc

SEQ ID NO: 16678 - DNA, 40 bp, Artificial Sequence
  Probe
aggcgcccggctagctcagtcggtagagcatgggactctt

SEQ ID NO: 16679 - DNA, 41 bp, Artificial Sequence
  Probe
aggcgcccggctagctcagtcggtagagcatgggactctta

SEQ ID NO: 16680 - DNA, 34 bp, Artificial Sequence
  Probe
aggcggcccgggttcgactcccggtgtgggaacg

SEQ ID NO: 16681 - DNA, 35 bp, Artificial Sequence; identical to SEQ ID NO: 3427
  Probe

SEQ ID NO: 16682 - DNA, 44 bp, Artificial Sequence
  Probe
aggcggcccgggttcgactcccggtgtgggaacgccgaaatttt

SEQ ID NO: 16683 - DNA, 33 bp, Artificial Sequence
  Probe
aggcggcccgggttcgactcccggtgtgggaat

SEQ ID NO: 16684 - DNA, 27 bp, Artificial Sequence
  Probe
aggcggctcgttggtctaggggtatga

SEQ ID NO: 16685 - DNA, 25 bp, Artificial Sequence
  Probe
aggctaaatcctatatatcttaatg

SEQ ID NO: 16686 - DNA, 24 bp, Artificial Sequence
  Probe
aggcttacgaccccttatttaccg

SEQ ID NO: 16687 - DNA, 26 bp, Artificial Sequence
  Probe
aggcttacgaccccttatttaccgag

SEQ ID NO: 16688 - DNA, 30 bp, Artificial Sequence
  Probe
agggagcccggatagctcagtcggtagagc

SEQ ID NO: 16689 - DNA, 31 bp, Artificial Sequence
  Probe
agggagcccggatagctcagtcggtagagca

SEQ ID NO: 16690 - DNA, 36 bp, Artificial Sequence
  Probe
agggagcccggatagctcagtcggtagagcatcaga

SEQ ID NO: 16691 - DNA, 37 bp, Artificial Sequence
  Probe
agggagcccggatagctcagtcggtagagcatcagac

SEQ ID NO: 16692 - DNA, 38 bp, Artificial Sequence
  Probe
agggagcccggatagctcagtcggtagagcatcagact

SEQ ID NO: 16693 - DNA, 40 bp, Artificial Sequence
  Probe
agggagcccggatagctcagtcggtagagcatcagacttt

SEQ ID NO: 16694 - DNA, 41 bp, Artificial Sequence
  Probe
agggagcccggatagctcagtcggtagagcatcagactttt

SEQ ID NO: 16695 - DNA, 42 bp, Artificial Sequence
  Probe
agggagcccggatagctcagtcggtagagcatcagactttta

SEQ ID NO: 16696 - DNA, 16 bp, Artificial Sequence
  Probe
agggaggttatgatta

SEQ ID NO: 16697 - DNA, 21 bp, Artificial Sequence
  Probe
agggaggttatgattaacttt

SEQ ID NO: 16698 - DNA, 22 bp, Artificial Sequence
  Probe
agggaggttatgattaactttt

SEQ ID NO: 16699 - DNA, 23 bp, Artificial Sequence
  Probe
agggaggttatgattaactttta

SEQ ID NO: 16700 - DNA, 27 bp, Artificial Sequence
  Probe
agggaggttatgattaacttttagttt

SEQ ID NO: 16701 - DNA, 25 bp, Artificial Sequence
  Probe
agggatgggttcgattctcatagtc

SEQ ID NO: 16702 - DNA, 27 bp, Artificial Sequence
  Probe
agggatgggttcgattctcatagtcct

SEQ ID NO: 16703 - DNA, 32 bp, Artificial Sequence; identical to SEQ ID NO: 3433
  Probe

SEQ ID NO: 16704 - DNA, 30 bp, Artificial Sequence
  Probe
agggattgtgggttcgagtcccacctgggg

SEQ ID NO: 16705 - DNA, 25 bp, Artificial Sequence
  Probe
agggattgtgggttcgagtcccatc

SEQ ID NO: 16706 - DNA, 28 bp, Artificial Sequence
  Probe
agggattgtgggttcgagtcccatctgg

SEQ ID NO: 16707 - DNA, 30 bp, Artificial Sequence
  Probe
agggattgtgggttcgagtcccatctgggg

SEQ ID NO: 16708 - DNA, 32 bp, Artificial Sequence; identical to SEQ ID NO: 3436
  Probe

SEQ ID NO: 16709 - DNA, 33 bp, Artificial Sequence; identical to SEQ ID NO: 3437
  Probe

SEQ ID NO: 16710 - DNA, 30 bp, Artificial Sequence
  Probe
aggggcccggatagctcagtcggtagagca

SEQ ID NO: 16711 - DNA, 35 bp, Artificial Sequence
  Probe
aggggcccggatagctcagtcggtagagcatcaga

SEQ ID NO: 16712 - DNA, 36 bp, Artificial Sequence
  Probe
aggggcccggatagctcagtcggtagagcatcagac

SEQ ID NO: 16713 - DNA, 37 bp, Artificial Sequence
  Probe
aggggcccggatagctcagtcggtagagcatcagact

SEQ ID NO: 16714 - DNA, 38 bp, Artificial Sequence
  Probe
aggggcccggatagctcagtcggtagagcatcagactt

SEQ ID NO: 16715 - DNA, 39 bp, Artificial Sequence
  Probe
aggggcccggatagctcagtcggtagagcatcagacttt

SEQ ID NO: 16716 - DNA, 40 bp, Artificial Sequence
  Probe
aggggcccggatagctcagtcggtagagcatcagactttt

SEQ ID NO: 16717 - DNA, 41 bp, Artificial Sequence
  Probe
aggggcccggatagctcagtcggtagagcatcagactttta

SEQ ID NO: 16718 - DNA, 16 bp, Artificial Sequence
  Probe
aggggtatgattctcg

SEQ ID NO: 16719 - DNA, 17 bp, Artificial Sequence
  Probe
aggggtatgattctcgc

SEQ ID NO: 16720 - DNA, 18 bp, Artificial Sequence
  Probe
aggggtatgattctcgct

SEQ ID NO: 16721 - DNA, 36 bp, Artificial Sequence
  Probe
aggggtatgattctcgcttagggtgcgagaggtccc

SEQ ID NO: 16722 - DNA, 36 bp, Artificial Sequence
  Probe
aggggtatgattctcgcttcgggtgcgagaggtccc

SEQ ID NO: 16723 - DNA, 36 bp, Artificial Sequence
  Probe
aggggtatgattctcgctttgggtgcgagaggtccc

SEQ ID NO: 16724 - DNA, 31 bp, Artificial Sequence
  Probe
aggggtcgcgagttcaaatctcgctggggcc

SEQ ID NO: 16725 - DNA, 25 bp, Artificial Sequence
  Probe
aggggttaggcctctttttaccagc

SEQ ID NO: 16726 - DNA, 26 bp, Artificial Sequence
  Probe
aggggttaggcctctttttaccagct

SEQ ID NO: 16727 - DNA, 29 bp, Artificial Sequence
  Probe
agggtccagggttcaagtccctgttcggg

SEQ ID NO: 16728 - DNA, 34 bp, Artificial Sequence
  Probe
agggtccagggttcaagtccctgttcgggcggca

SEQ ID NO: 16729 - DNA, 21 bp, Artificial Sequence
  Probe
agggtgcgagaggtcccgggt

SEQ ID NO: 16730 - DNA, 22 bp, Artificial Sequence
  Probe
agggtgcgagaggtcccgggtt

SEQ ID NO: 16731 - DNA, 50 bp, Artificial Sequence; identical to SEQ ID NO: 334
  Probe

SEQ ID NO: 16732 - DNA, 17 bp, Artificial Sequence
  Probe
aggtcagctaaataagc

SEQ ID NO: 16733 - DNA, 22 bp, Artificial Sequence
  Probe
aggtcagctaaataagctatcg

SEQ ID NO: 16734 - DNA, 23 bp, Artificial Sequence
  Probe
aggtcagctaaataagctatcgg

SEQ ID NO: 16735 - DNA, 24 bp, Artificial Sequence
  Probe
aggtcagctaaataagctatcggg

SEQ ID NO: 16736 - DNA, 25 bp, Artificial Sequence
  Probe
aggtcagctaaataagctatcgggc

SEQ ID NO: 16737 - DNA, 26 bp, Artificial Sequence
  Probe
aggtcagctaaataagctatcgggcc

SEQ ID NO: 16738 - DNA, 27 bp, Artificial Sequence
  Probe
aggtcagctaaataagctatcgggccc

SEQ ID NO: 16739 - DNA, 28 bp, Artificial Sequence
  Probe
aggtcagctaaataagctatcgggccca

SEQ ID NO: 16740 - DNA, 29 bp, Artificial Sequence
  Probe
aggtcagctaaataagctatcgggcccat

SEQ ID NO: 16741 - DNA, 30 bp, Artificial Sequence; identical to SEQ ID NO: 3454
  Probe

SEQ ID NO: 16742 - DNA, 31 bp, Artificial Sequence; identical to SEQ ID NO: 3455
  Probe

SEQ ID NO: 16743 - DNA, 32 bp, Artificial Sequence; identical to SEQ ID NO: 3456
  Probe

SEQ ID NO: 16744 - DNA, 33 bp, Artificial Sequence; identical to SEQ ID NO: 3457
  Probe

SEQ ID NO: 16745 - DNA, 34 bp, Artificial Sequence; identical to SEQ ID NO: 3458
  Probe

SEQ ID NO: 16746 - DNA, 36 bp, Artificial Sequence; identical to SEQ ID NO: 3460
  Probe

SEQ ID NO: 16747 - DNA, 37 bp, Artificial Sequence; identical to SEQ ID NO: 3461
  Probe

SEQ ID NO: 16748 - DNA, 38 bp, Artificial Sequence; identical to SEQ ID NO: 3462
  Probe

SEQ ID NO: 16749 - DNA, 39 bp, Artificial Sequence; identical to SEQ ID NO: 3463
  Probe

SEQ ID NO: 16750 - DNA, 40 bp, Artificial Sequence; identical to SEQ ID NO: 3464
  Probe

SEQ ID NO: 16751 - DNA, 41 bp, Artificial Sequence; identical to SEQ ID NO: 3465
  Probe

SEQ ID NO: 16752 - DNA, 42 bp, Artificial Sequence; identical to SEQ ID NO: 3466
  Probe

SEQ ID NO: 16753 - DNA, 43 bp, Artificial Sequence; identical to SEQ ID NO: 3467
  Probe

SEQ ID NO: 16754 - DNA, 44 bp, Artificial Sequence; identical to SEQ ID NO: 3468
  Probe

SEQ ID NO: 16755 - DNA, 45 bp, Artificial Sequence; identical to SEQ ID NO: 3469
  Probe

SEQ ID NO: 16756 - DNA, 50 bp, Artificial Sequence; identical to SEQ ID NO: 3474
  Probe

SEQ ID NO: 16757 - DNA, 33 bp, Artificial Sequence
  Probe
aggtcccgggttcaaatcccggacgagccccct

SEQ ID NO: 16758 - DNA, 33 bp, Artificial Sequence
  Probe
aggtcccgggttcaatccccggcacctccacca

SEQ ID NO: 16759 - DNA, 24 bp, Artificial Sequence
  Probe
aggtcccgggttcgatccccagca

SEQ ID NO: 16760 - DNA, 33 bp, Artificial Sequence; identical to SEQ ID NO: 3476
  Probe

SEQ ID NO: 16761 - DNA, 24 bp, Artificial Sequence
  Probe
aggtcccgggttcgatccccggca

SEQ ID NO: 16762 - DNA, 33 bp, Artificial Sequence
  Probe
aggtccctcctcgttagtatagtggtgagtatc

SEQ ID NO: 16763 - DNA, 34 bp, Artificial Sequence
  Probe
aggtccctcctcgttagtatagtggtgagtatcc

SEQ ID NO: 16764 - DNA, 40 bp, Artificial Sequence
  Probe
aggtccctcctcgttagtatagtggtgagtatccccgcct

SEQ ID NO: 16765 - DNA, 42 bp, Artificial Sequence
  Probe
aggtccctcctcgttagtatagtggtgagtatccccgcctgt

SEQ ID NO: 16766 - DNA, 37 bp, Artificial Sequence
  Probe
aggtcctgagttcgaacctcagagggggcagctgcca

SEQ ID NO: 16767 - DNA, 38 bp, Artificial Sequence
  Probe
aggtcctgagttcgaacctcagagggggcagctgccat

SEQ ID NO: 16768 - DNA, 39 bp, Artificial Sequence
  Probe
aggtcctgagttcgaacctcagagggggcagctgccatt

SEQ ID NO: 16769 - DNA, 40 bp, Artificial Sequence
  Probe
aggtcctgagttcgaacctcagagggggcagctgccattt

SEQ ID NO: 16770 - DNA, 41 bp, Artificial Sequence
  Probe
aggtcctgagttcgaacctcagagggggcagctgccatttt

SEQ ID NO: 16771 - DNA, 37 bp, Artificial Sequence
  Probe
aggtcctgagttcgagcctcagagagggcagctgttt

SEQ ID NO: 16772 - DNA, 27 bp, Artificial Sequence
  Probe
aggtcctgggttcgagccccagtggaa

SEQ ID NO: 16773 - DNA, 31 bp, Artificial Sequence
  Probe
aggtcctgggttcgagccccagtggaaccac

SEQ ID NO: 16774 - DNA, 32 bp, Artificial Sequence; identical to SEQ ID NO: 3477
  Probe

SEQ ID NO: 16775 - DNA, 33 bp, Artificial Sequence; identical to SEQ ID NO: 3478
  Probe

SEQ ID NO: 16776 - DNA, 33 bp, Artificial Sequence; identical to SEQ ID NO: 3479
  Probe

SEQ ID NO: 16777 - DNA, 30 bp, Artificial Sequence
  Probe
aggtcgcgggttcgatccccgtacgggcca

SEQ ID NO: 16778 - DNA, 33 bp, Artificial Sequence; identical to SEQ ID NO: 3483
  Probe

SEQ ID NO: 16779 - DNA, 33 bp, Artificial Sequence; identical to SEQ ID NO: 3485
  Probe

SEQ ID NO: 16780 - DNA, 33 bp, Artificial Sequence
  Probe
aggtcgcgggttcgatccccgtactggccacgt

SEQ ID NO: 16781 - DNA, 26 bp, Artificial Sequence
  Probe
aggtcgctggttcgattccggctcga

SEQ ID NO: 16782 - DNA, 32 bp, Artificial Sequence
  Probe
aggtcgctggttcgattccggctcgaaggact

SEQ ID NO: 16783 - DNA, 30 bp, Artificial Sequence
  Probe
aggtcgtgagttcgagcctcacacggggca

SEQ ID NO: 16784 - DNA, 33 bp, Artificial Sequence; identical to SEQ ID NO: 3486
  Probe

SEQ ID NO: 16785 - DNA, 26 bp, Artificial Sequence
  Probe
aggtgcctcgttagcgcagtaggtag

SEQ ID NO: 16786 - DNA, 27 bp, Artificial Sequence
  Probe
aggtgcctcgttagcgcagtaggtagc

SEQ ID NO: 16787 - DNA, 28 bp, Artificial Sequence
  Probe
aggtgcctcgttagcgcagtaggtagcg

SEQ ID NO: 16788 - DNA, 29 bp, Artificial Sequence
  Probe
aggtgcctcgttagcgcagtaggtagcgc

SEQ ID NO: 16789 - DNA, 30 bp, Artificial Sequence
  Probe
aggtgcctcgttagcgcagtaggtagcgcg

SEQ ID NO: 16790 - DNA, 31 bp, Artificial Sequence
  Probe
aggtgcctcgttagcgcagtaggtagcgcgt

SEQ ID NO: 16791 - DNA, 32 bp, Artificial Sequence
  Probe
aggtgcctcgttagcgcagtaggtagcgcgtc

SEQ ID NO: 16792 - DNA, 33 bp, Artificial Sequence
  Probe
aggtgcctcgttagcgcagtaggtagcgcgtca

SEQ ID NO: 16793 - DNA, 34 bp, Artificial Sequence
  Probe
aggtgcctcgttagcgcagtaggtagcgcgtcag

SEQ ID NO: 16794 - DNA, 35 bp, Artificial Sequence
  Probe
aggtgcctcgttagcgcagtaggtagcgcgtcagt

SEQ ID NO: 16795 - DNA, 36 bp, Artificial Sequence
  Probe
aggtgcctcgttagcgcagtaggtagcgcgtcagtc

SEQ ID NO: 16796 - DNA, 37 bp, Artificial Sequence
  Probe
aggtgcctcgttagcgcagtaggtagcgcgtcagtct

SEQ ID NO: 16797 - DNA, 38 bp, Artificial Sequence
  Probe
aggtgcctcgttagcgcagtaggtagcgcgtcagtctc

SEQ ID NO: 16798 - DNA, 39 bp, Artificial Sequence
  Probe
aggtgcctcgttagcgcagtaggtagcgcgtcagtctca

SEQ ID NO: 16799 - DNA, 40 bp, Artificial Sequence
  Probe
aggtgcctcgttagcgcagtaggtagcgcgtcagtctcat

SEQ ID NO: 16800 - DNA, 41 bp, Artificial Sequence
  Probe
aggtgcctcgttagcgcagtaggtagcgcgtcagtctcata

SEQ ID NO: 16801 - DNA, 50 bp, Artificial Sequence
  Probe
aggtgcctcgttagcgcagtaggtagcgcgtcagtctcataatctgaagg

SEQ ID NO: 16802 - DNA, 26 bp, Artificial Sequence
  Probe
aggtggcccgggttcgactcccggta

SEQ ID NO: 16803 - DNA, 28 bp, Artificial Sequence
  Probe
aggtggcccgggttcgactcccggtatg

SEQ ID NO: 16804 - DNA, 30 bp, Artificial Sequence
  Probe
aggtggcccgggttcgactcccggtatggg

SEQ ID NO: 16805 - DNA, 34 bp, Artificial Sequence
  Probe
aggtggcccgggttcgactcccggtatgggaaca

SEQ ID NO: 16806 - DNA, 35 bp, Artificial Sequence; identical to SEQ ID NO: 3490
  Probe

SEQ ID NO: 16807 - DNA, 34 bp, Artificial Sequence
  Probe
aggtggcccgggttcgactcccggtatgggaacg

SEQ ID NO: 16808 - DNA, 32 bp, Artificial Sequence
  Probe
aggtggctccgtggcgcaatggatagcgcatt

SEQ ID NO: 16809 - DNA, 37 bp, Artificial Sequence
  Probe
aggtggctccgtggcgcaatggatagcgcattggact

SEQ ID NO: 16810 - DNA, 41 bp, Artificial Sequence
  Probe
aggtggctccgtggcgcaatggatagcgcattggacttcta

SEQ ID NO: 16811 - DNA, 29 bp, Artificial Sequence
  Probe
aggtggctcgttggtctaggggtatgatt

SEQ ID NO: 16812 - DNA, 28 bp, Artificial Sequence
  Probe
aggtgtcaggatggccgagtggtctaag

SEQ ID NO: 16813 - DNA, 29 bp, Artificial Sequence
  Probe
aggtgtcaggatggccgagtggtctaagg

SEQ ID NO: 16814 - DNA, 38 bp, Artificial Sequence
  Probe
aggtgtcaggatggccgagtggtctaaggcgccagact

SEQ ID NO: 16815 - DNA, 39 bp, Artificial Sequence
  Probe
aggtgtcaggatggccgagtggtctaaggcgccagactc

SEQ ID NO: 16816 - DNA, 50 bp, Artificial Sequence
  Probe
aggtgtcaggatggccgagtggtctaaggcgccagactcaagcttggctt

SEQ ID NO: 16817 - DNA, 36 bp, Artificial Sequence
  Probe
aggtgtgggtttccgtagtgtagtggtcatcacgtt

SEQ ID NO: 16818 - DNA, 26 bp, Artificial Sequence
  Probe
aggttcgaatcctgccgactacggca

SEQ ID NO: 16819 - DNA, 26 bp, Artificial Sequence
  Probe
aggttcgaatcctgccgactacgtca

SEQ ID NO: 16820 - DNA, 28 bp, Artificial Sequence
  Probe
aggttggtggttcgagcccacccaggga

SEQ ID NO: 16821 - DNA, 30 bp, Artificial Sequence
  Probe
aggttggtggttcgagcccacccagggacg

SEQ ID NO: 16822 - DNA, 33 bp, Artificial Sequence
  Probe
aggttgtgagttcgagcctcacctggagcattg

SEQ ID NO: 16823 - DNA, 27 bp, Artificial Sequence
  Probe
aggtttggtcctagcctttctattagc

SEQ ID NO: 16824 - DNA, 21 bp, Artificial Sequence
  Probe
agtaaacaggagatcctgggt

SEQ ID NO: 16825 - DNA, 36 bp, Artificial Sequence
  Probe
agtaaataataggagcttaaacccccttatttctag

SEQ ID NO: 16826 - DNA, 37 bp, Artificial Sequence; identical to SEQ ID NO: 3499
  Probe

SEQ ID NO: 16827 - DNA, 38 bp, Artificial Sequence; identical to SEQ ID NO: 3500
  Probe

SEQ ID NO: 16828 - DNA, 16 bp, Artificial Sequence
  Probe
agtaaggtcagctaaa

SEQ ID NO: 16829 - DNA, 17 bp, Artificial Sequence
  Probe
agtaaggtcagctaaat

SEQ ID NO: 16830 - DNA, 18 bp, Artificial Sequence
  Probe
agtaaggtcagctaaata

SEQ ID NO: 16831 - DNA, 19 bp, Artificial Sequence
  Probe
agtaaggtcagctaaataa

SEQ ID NO: 16832 - DNA, 20 bp, Artificial Sequence
  Probe
agtaaggtcagctaaataag

SEQ ID NO: 16833 - DNA, 21 bp, Artificial Sequence
  Probe
agtaaggtcagctaaataagc

SEQ ID NO: 16834 - DNA, 22 bp, Artificial Sequence
  Probe
agtaaggtcagctaaataagct

SEQ ID NO: 16835 - DNA, 23 bp, Artificial Sequence
  Probe
agtaaggtcagctaaataagcta

SEQ ID NO: 16836 - DNA, 24 bp, Artificial Sequence
  Probe
agtaaggtcagctaaataagctat

SEQ ID NO: 16837 - DNA, 25 bp, Artificial Sequence
  Probe
agtaaggtcagctaaataagctatc

SEQ ID NO: 16838 - DNA, 26 bp, Artificial Sequence
  Probe
agtaaggtcagctaaataagctatcg

SEQ ID NO: 16839 - DNA, 27 bp, Artificial Sequence
  Probe
agtaaggtcagctaaataagctatcgg

SEQ ID NO: 16840 - DNA, 28 bp, Artificial Sequence
  Probe
agtaaggtcagctaaataagctatcggg

SEQ ID NO: 16841 - DNA, 29 bp, Artificial Sequence
  Probe
agtaaggtcagctaaataagctatcgggc

SEQ ID NO: 16842 - DNA, 30 bp, Artificial Sequence; identical to SEQ ID NO: 3514
  Probe

SEQ ID NO: 16843 - DNA, 31 bp, Artificial Sequence; identical to SEQ ID NO: 3515
  Probe

SEQ ID NO: 16844 - DNA, 32 bp, Artificial Sequence; identical to SEQ ID NO: 3516
  Probe

SEQ ID NO: 16845 - DNA, 33 bp, Artificial Sequence; identical to SEQ ID NO: 3517
  Probe

SEQ ID NO: 16846 - DNA, 34 bp, Artificial Sequence; identical to SEQ ID NO: 3518
  Probe

SEQ ID NO: 16847 - DNA, 35 bp, Artificial Sequence; identical to SEQ ID NO: 3519
  Probe

SEQ ID NO: 16848 - DNA, 36 bp, Artificial Sequence; identical to SEQ ID NO: 3520
  Probe

SEQ ID NO: 16849 - DNA, 37 bp, Artificial Sequence; identical to SEQ ID NO: 3521
  Probe

SEQ ID NO: 16850 - DNA, 38 bp, Artificial Sequence; identical to SEQ ID NO: 3522
  Probe

SEQ ID NO: 16851 - DNA, 39 bp, Artificial Sequence; identical to SEQ ID NO: 3523
  Probe

SEQ ID NO: 16852 - DNA, 40 bp, Artificial Sequence; identical to SEQ ID NO: 3524
  Probe

SEQ ID NO: 16853 - DNA, 41 bp, Artificial Sequence; identical to SEQ ID NO: 3525
  Probe

SEQ ID NO: 16854 - DNA, 42 bp, Artificial Sequence; identical to SEQ ID NO: 3526
  Probe

SEQ ID NO: 16855 - DNA, 43 bp, Artificial Sequence; identical to SEQ ID NO: 3527
  Probe

SEQ ID NO: 16856 - DNA, 44 bp, Artificial Sequence; identical to SEQ ID NO: 3528
  Probe

SEQ ID NO: 16857 - DNA, 45 bp, Artificial Sequence; identical to SEQ ID NO: 3529
  Probe

SEQ ID NO: 16858 - DNA, 46 bp, Artificial Sequence; identical to SEQ ID NO: 3530
  Probe

SEQ ID NO: 16859 - DNA, 48 bp, Artificial Sequence; identical to SEQ ID NO: 3532
  Probe

SEQ ID NO: 16860 - DNA, 49 bp, Artificial Sequence; identical to SEQ ID NO: 3533
  Probe

SEQ ID NO: 16861 - DNA, 50 bp, Artificial Sequence; identical to SEQ ID NO: 3534
  Probe

SEQ ID NO: 16862 - DNA, 16 bp, Artificial Sequence
  Probe
agtaccgttaacttcc

SEQ ID NO: 16863 - DNA, 17 bp, Artificial Sequence
  Probe
agtaccgttaacttcca

SEQ ID NO: 16864 - DNA, 28 bp, Artificial Sequence
  Probe
agtaccgttaacttccaattaactagtt

SEQ ID NO: 16865 - DNA, 31 bp, Artificial Sequence
  Probe
agtaccgttaacttccaattaactagttttg

SEQ ID NO: 16866 - DNA, 36 bp, Artificial Sequence
  Probe
agtaccgttaacttccaattaactagttttgacaac

SEQ ID NO: 16867 - DNA, 37 bp, Artificial Sequence; identical to SEQ ID NO: 3538
  Probe

SEQ ID NO: 16868 - DNA, 50 bp, Artificial Sequence; identical to SEQ ID NO: 337
  Probe

SEQ ID NO: 16869 - DNA, 32 bp, Artificial Sequence
  Probe
agtacctgtctctgtggcgtagtcggttagcg

SEQ ID NO: 16870 - DNA, 34 bp, Artificial Sequence
  Probe
agtacctgtctctgtggcgtagtcggttagcgcg

SEQ ID NO: 16871 - DNA, 36 bp, Artificial Sequence
  Probe
agtacctgtctctgtggcgtagtcggttagcgcgtt

SEQ ID NO: 16872 - DNA, 38 bp, Artificial Sequence
  Probe
agtacctgtctctgtggcgtagtcggttagcgcgttcg

SEQ ID NO: 16873 - DNA, 33 bp, Artificial Sequence
  Probe
agtactctgcgttgtggccgcagcaacctcggt

SEQ ID NO: 16874 - DNA, 18 bp, Artificial Sequence
  Probe
agtagaactgacagtacc

SEQ ID NO: 16875 - DNA, 19 bp, Artificial Sequence
  Probe
agtagaactgacagtacct

SEQ ID NO: 16876 - DNA, 22 bp, Artificial Sequence
  Probe
agtatagtggtgagtatccccg

SEQ ID NO: 16877 - DNA, 23 bp, Artificial Sequence
  Probe
agtatagtggtgagtatccccgc

SEQ ID NO: 16878 - DNA, 28 bp, Artificial Sequence
  Probe
agtatagtggtgagtatccccgcctgtc

SEQ ID NO: 16879 - DNA, 29 bp, Artificial Sequence
  Probe
agtatccccgcctgtcacgcgggagaccg

SEQ ID NO: 16880 - DNA, 23 bp, Artificial Sequence
  Probe
agtcagaggttcaattcctcttc

SEQ ID NO: 16881 - DNA, 24 bp, Artificial Sequence
  Probe
agtcagaggttcaattcctcttct

SEQ ID NO: 16882 - DNA, 25 bp, Artificial Sequence
  Probe
agtcagaggttcaattcctcttctt

SEQ ID NO: 16883 - DNA, 26 bp, Artificial Sequence
  Probe
agtcagaggttcaattcctcttctta

SEQ ID NO: 16884 - DNA, 28 bp, Artificial Sequence
  Probe
agtcagaggttcaattcctcttcttaac

SEQ ID NO: 16885 - DNA, 29 bp, Artificial Sequence
  Probe
agtcagaggttcaattcctcttcttaaca

SEQ ID NO: 16886 - DNA, 32 bp, Artificial Sequence; identical to SEQ ID NO: 3546
  Probe

SEQ ID NO: 16887 - DNA, 16 bp, Artificial Sequence
  Probe
agtccgtgcgagaata

SEQ ID NO: 16888 - DNA, 17 bp, Artificial Sequence
  Probe
agtccgtgcgagaataa

SEQ ID NO: 16889 - DNA, 19 bp, Artificial Sequence
  Probe
agtccgtgcgagaataatg

SEQ ID NO: 16890 - DNA, 20 bp, Artificial Sequence
  Probe
agtcggtagagcatcagact

SEQ ID NO: 16891 - DNA, 23 bp, Artificial Sequence
  Probe
agtcggtagagcatcagactttt

SEQ ID NO: 16892 - DNA, 16 bp, Artificial Sequence
  Probe
agtcggtagagcatga

SEQ ID NO: 16893 - DNA, 17 bp, Artificial Sequence
  Probe
agtcggtagagcatgag

SEQ ID NO: 16894 - DNA, 18 bp, Artificial Sequence
  Probe
agtcggtagagcatgaga

SEQ ID NO: 16895 - DNA, 19 bp, Artificial Sequence
  Probe
agtcggtagagcatgagac

SEQ ID NO: 16896 - DNA, 20 bp, Artificial Sequence
  Probe
agtcggtagagcatgagact

SEQ ID NO: 16897 - DNA, 36 bp, Artificial Sequence; identical to SEQ ID NO: 346
  Probe

SEQ ID NO: 16898 - DNA, 41 bp, Artificial Sequence; identical to SEQ ID NO: 3557
  Probe

SEQ ID NO: 16899 - DNA, 17 bp, Artificial Sequence
  Probe
agtcggtagagcatggg

SEQ ID NO: 16900 - DNA, 20 bp, Artificial Sequence
  Probe
agtcggtagagcatgggact

SEQ ID NO: 16901 - DNA, 36 bp, Artificial Sequence; identical to SEQ ID NO: 354
  Probe

SEQ ID NO: 16902 - DNA, 41 bp, Artificial Sequence
  Probe
agtcggtagagcatgggactcttaatcccagggtcgtgggt

SEQ ID NO: 16903 - DNA, 26 bp, Artificial Sequence
  Probe
agtctcataatctgaaggtcctgagt

SEQ ID NO: 16904 - DNA, 28 bp, Artificial Sequence
  Probe
agtctcataatctgaaggtcctgagttc

SEQ ID NO: 16905 - DNA, 21 bp, Artificial Sequence
  Probe
agtctcataatctgaaggtcg

SEQ ID NO: 16906 - DNA, 23 bp, Artificial Sequence
  Probe
agtctcataatctgaaggtcgtg

SEQ ID NO: 16907 - DNA, 24 bp, Artificial Sequence
  Probe
agtctcataatctgaaggtcgtga

SEQ ID NO: 16908 - DNA, 28 bp, Artificial Sequence
  Probe
agtctcataatctgaaggtcgtgagttc

SEQ ID NO: 16909 - DNA, 21 bp, Artificial Sequence
  Probe
agtctcttcgggggcgtgggt

SEQ ID NO: 16910 - DNA, 22 bp, Artificial Sequence
  Probe
agtctcttcgggggcgtgggtt

SEQ ID NO: 16911 - DNA, 24 bp, Artificial Sequence
  Probe
agtctcttcgggggcgtgggttcg

SEQ ID NO: 16912 - DNA, 43 bp, Artificial Sequence
  Probe
agtctcttcgggggcgtgggttcgaatcccaccgctgccaggt

SEQ ID NO: 16913 - DNA, 43 bp, Artificial Sequence; identical to SEQ ID NO: 3569
  Probe

SEQ ID NO: 16914 - DNA, 18 bp, Artificial Sequence
  Probe
agtgcacttggacgaacc

SEQ ID NO: 16915 - DNA, 28 bp, Artificial Sequence
  Probe
agtgcccggctagctcagtcggtagagc

SEQ ID NO: 16916 - DNA, 29 bp, Artificial Sequence
  Probe
agtgcccggctagctcagtcggtagagca

SEQ ID NO: 16917 - DNA, 34 bp, Artificial Sequence
  Probe
agtgcccggctagctcagtcggtagagcatgaga

SEQ ID NO: 16918 - DNA, 36 bp, Artificial Sequence
  Probe
agtgcccggctagctcagtcggtagagcatgagact

SEQ ID NO: 16919 - DNA, 40 bp, Artificial Sequence
  Probe
agtgcccggctagctcagtcggtagagcatgagactctta

SEQ ID NO: 16920 - DNA, 30 bp, Artificial Sequence
  Probe
agtggcgcaatcggttagcgcgcggtactt

SEQ ID NO: 16921 - DNA, 31 bp, Artificial Sequence
  Probe
agtggcgcaatcggttagcgcgcggtactta

SEQ ID NO: 16922 - DNA, 32 bp, Artificial Sequence
  Probe
agtggcgcaatcggttagcgcgcggtacttat

SEQ ID NO: 16923 - DNA, 19 bp, Artificial Sequence
  Probe
agtggctaggattcggcgc

SEQ ID NO: 16924 - DNA, 24 bp, Artificial Sequence
  Probe
agtggctaggattcggcgctttca

SEQ ID NO: 16925 - DNA, 24 bp, Artificial Sequence
  Probe
agtggggttttgcagtccttagct

SEQ ID NO: 16926 - DNA, 33 bp, Artificial Sequence
  Probe
agtgggtttccgtagtgtagtggttatcacgtt

SEQ ID NO: 16927 - DNA, 36 bp, Artificial Sequence
  Probe
agtggtaagcatagctgccttccaagcagttgaccc

SEQ ID NO: 16928 - DNA, 40 bp, Artificial Sequence
  Probe
agtggtaagcatagctgccttccaagcagttgacccgggt

SEQ ID NO: 16929 - DNA, 16 bp, Artificial Sequence
  Probe
agtggtagaattctcg

SEQ ID NO: 16930 - DNA, 17 bp, Artificial Sequence
  Probe
agtggtagaattctcgc

SEQ ID NO: 16931 - DNA, 18 bp, Artificial Sequence
  Probe
agtggtagaattctcgcc

SEQ ID NO: 16932 - DNA, 19 bp, Artificial Sequence
  Probe
agtggtagaattctcgcct

SEQ ID NO: 16933 - DNA, 20 bp, Artificial Sequence
  Probe
agtggtagaattctcgcctg

SEQ ID NO: 16934 - DNA, 21 bp, Artificial Sequence
  Probe
agtggtagaattctcgcctgc

SEQ ID NO: 16935 - DNA, 22 bp, Artificial Sequence
  Probe
agtggtagaattctcgcctgcc

SEQ ID NO: 16936 - DNA, 17 bp, Artificial Sequence
  Probe
agtggtagagcgcatgc

SEQ ID NO: 16937 - DNA, 17 bp, Artificial Sequence
  Probe
agtggtatcatgcaaga

SEQ ID NO: 16938 - DNA, 36 bp, Artificial Sequence
  Probe
agtggtatgattctcgctttgggtgcgagaggtccc

SEQ ID NO: 16939 - DNA, 22 bp, Artificial Sequence
  Probe
agtggtgagcatagctgccttc

SEQ ID NO: 16940 - DNA, 23 bp, Artificial Sequence
  Probe
agtggtgagcatagctgccttcc

SEQ ID NO: 16941 - DNA, 24 bp, Artificial Sequence
  Probe
agtggtgagcatagctgccttcca

SEQ ID NO: 16942 - DNA, 36 bp, Artificial Sequence
  Probe
agtggtgagcatagctgccttccaagcagttgaccc

SEQ ID NO: 16943 - DNA, 40 bp, Artificial Sequence
  Probe
agtggtgagcatagctgccttccaagcagttgacccgggt

SEQ ID NO: 16944 - DNA, 16 bp, Artificial Sequence
  Probe
agtggtgagtatcccc

SEQ ID NO: 16945 - DNA, 17 bp, Artificial Sequence
  Probe
agtggtgagtatccccg

SEQ ID NO: 16946 - DNA, 18 bp, Artificial Sequence
  Probe
agtggtgagtatccccgc

SEQ ID NO: 16947 - DNA, 27 bp, Artificial Sequence
  Probe
agtggtgagtatccccgcctgtcacgc

SEQ ID NO: 16948 - DNA, 35 bp, Artificial Sequence
  Probe
agtggtgagtatccccgcctgtcacgcgggagacc

SEQ ID NO: 16949 - DNA, 38 bp, Artificial Sequence
  Probe
agtggttagcatagctgccttccaagcagttgacccgg

SEQ ID NO: 16950 - DNA, 50 bp, Artificial Sequence
  Probe
agtggttagcatagctgccttccaagcagttgacccgggttcgattcccg

SEQ ID NO: 16951 - DNA, 16 bp, Artificial Sequence
  Probe
agtggttaggattcgg

SEQ ID NO: 16952 - DNA, 17 bp, Artificial Sequence
  Probe
agtggttaggattcggc

SEQ ID NO: 16953 - DNA, 22 bp, Artificial Sequence
  Probe
agtggttaggattcggcgctct

SEQ ID NO: 16954 - DNA, 25 bp, Artificial Sequence
  Probe
agtggttaggattcggcgctctcac

SEQ ID NO: 16955 - DNA, 29 bp, Artificial Sequence
  Probe
agtggttaggattcggcgctctcaccgcc

SEQ ID NO: 16956 - DNA, 31 bp, Artificial Sequence
  Probe
agtggttaggattcggcgctctcaccgccgc

SEQ ID NO: 16957 - DNA, 32 bp, Artificial Sequence
  Probe
agtggttaggattcggcgctctcaccgccgcg

SEQ ID NO: 16958 - DNA, 33 bp, Artificial Sequence
  Probe
agtggttaggattcggcgctctcaccgccgcgg

SEQ ID NO: 16959 - DNA, 16 bp, Artificial Sequence
  Probe
agtggttagtactctg

SEQ ID NO: 16960 - DNA, 17 bp, Artificial Sequence
  Probe
agtggttagtactctgc

SEQ ID NO: 16961 - DNA, 20 bp, Artificial Sequence
  Probe
agtggttagtactctgcgtt

SEQ ID NO: 16962 - DNA, 16 bp, Artificial Sequence
  Probe
agtggttagtatcccc

SEQ ID NO: 16963 - DNA, 25 bp, Artificial Sequence
  Probe
agtggttagtatccccgcctgtcac

SEQ ID NO: 16964 - DNA, 36 bp, Artificial Sequence
  Probe
agtggttagtatccccgcctgtcacgcgggagaccg

SEQ ID NO: 16965 - DNA, 41 bp, Artificial Sequence
  Probe
agtggttatcacgttcgcctaacacgcgaaaggtccccggt

SEQ ID NO: 16966 - DNA, 25 bp, Artificial Sequence
  Probe
agtggttatcacgttcgcctcacac

SEQ ID NO: 16967 - DNA, 27 bp, Artificial Sequence
  Probe
agtggttatcacgttcgcctcacacgc

SEQ ID NO: 16968 - DNA, 41 bp, Artificial Sequence
  Probe
agtggttatcacgttcgcctcacacgcgaaaggtccccggt

SEQ ID NO: 16969 - DNA, 20 bp, Artificial Sequence
  Probe
agtgtagtggttatcacgtt

SEQ ID NO: 16970 - DNA, 23 bp, Artificial Sequence
  Probe
agtgtagtggttatcacgttcgc

SEQ ID NO: 16971 - DNA, 24 bp, Artificial Sequence
  Probe
agtgtagtggttatcacgttcgcc

SEQ ID NO: 16972 - DNA, 27 bp, Artificial Sequence
  Probe
agtgtagtggttatcacgttcgcctca

SEQ ID NO: 16973 - DNA, 35 bp, Artificial Sequence
  Probe
agtgtcgtctctgtggcgcaatcggttagcgcgtt

SEQ ID NO: 16974 - DNA, 20 bp, Artificial Sequence
  Probe
agtgtgtcaggatggccgag

SEQ ID NO: 16975 - DNA, 21 bp, Artificial Sequence
  Probe
agtgtgtcaggatggccgagt

SEQ ID NO: 16976 - DNA, 22 bp, Artificial Sequence
  Probe
agtgtgtcaggatggccgagtg

SEQ ID NO: 16977 - DNA, 26 bp, Artificial Sequence
  Probe
agtgtgtcaggatggccgagtggtct

SEQ ID NO: 16978 - DNA, 27 bp, Artificial Sequence
  Probe
agtgtgtcaggatggccgagtggtcta

SEQ ID NO: 16979 - DNA, 30 bp, Artificial Sequence
  Probe
agtgtgtcaggatggccgagtggtctaagg

SEQ ID NO: 16980 - DNA, 34 bp, Artificial Sequence
  Probe
agtgtgtcaggatggccgagtggtctaaggcgcc

SEQ ID NO: 16981 - DNA, 35 bp, Artificial Sequence
  Probe
agtgtgtcaggatggccgagtggtctaaggcgcca

SEQ ID NO: 16982 - DNA, 36 bp, Artificial Sequence
  Probe
agtgtgtcaggatggccgagtggtctaaggcgccag

SEQ ID NO: 16983 - DNA, 37 bp, Artificial Sequence
  Probe
agtgtgtcaggatggccgagtggtctaaggcgccaga

SEQ ID NO: 16984 - DNA, 38 bp, Artificial Sequence
  Probe
agtgtgtcaggatggccgagtggtctaaggcgccagac

SEQ ID NO: 16985 - DNA, 39 bp, Artificial Sequence
  Probe
agtgtgtcaggatggccgagtggtctaaggcgccagact

SEQ ID NO: 16986 - DNA, 40 bp, Artificial Sequence
  Probe
agtgtgtcaggatggccgagtggtctaaggcgccagactc

SEQ ID NO: 16987 - DNA, 41 bp, Artificial Sequence
  Probe
agtgtgtcaggatggccgagtggtctaaggcgccagactca

SEQ ID NO: 16988 - DNA, 42 bp, Artificial Sequence
  Probe
agtgtgtcaggatggccgagtggtctaaggcgccagactcaa

SEQ ID NO: 16989 - DNA, 44 bp, Artificial Sequence
  Probe
agtgtgtcaggatggccgagtggtctaaggcgccagactcaagc

SEQ ID NO: 16990 - DNA, 45 bp, Artificial Sequence
  Probe
agtgtgtcaggatggccgagtggtctaaggcgccagactcaagct

SEQ ID NO: 16991 - DNA, 46 bp, Artificial Sequence
  Probe
agtgtgtcaggatggccgagtggtctaaggcgccagactcaagcta

SEQ ID NO: 16992 - DNA, 25 bp, Artificial Sequence
  Probe
agtgtttgtgggtttaagtcccatt

SEQ ID NO: 16993 - DNA, 27 bp, Artificial Sequence
  Probe
agtgtttgtgggtttaagtcccattgg

SEQ ID NO: 16994 - DNA, 28 bp, Artificial Sequence
  Probe
agtgtttgtgggtttaagtcccattggt

SEQ ID NO: 16995 - DNA, 32 bp, Artificial Sequence
  Probe
agtgtttgtgggtttaagtcccattggtctag

SEQ ID NO: 16996 - DNA, 33 bp, Artificial Sequence
  Probe
agtgtttgtgggtttaagtcccattggtctagt

SEQ ID NO: 16997 - DNA, 34 bp, Artificial Sequence; identical to SEQ ID NO: 3601
  Probe

SEQ ID NO: 16998 - DNA, 24 bp, Artificial Sequence
  Probe
agttaaagactttttctctgattt

SEQ ID NO: 16999 - DNA, 20 bp, Artificial Sequence
  Probe
agttaaagattaagagaacc

SEQ ID NO: 17000 - DNA, 21 bp, Artificial Sequence
  Probe
agttaaagattaagagaacca

SEQ ID NO: 17001 - DNA, 37 bp, Artificial Sequence; identical to SEQ ID NO: 3604
  Probe

SEQ ID NO: 17002 - DNA, 38 bp, Artificial Sequence; identical to SEQ ID NO: 3605
  Probe

SEQ ID NO: 17003 - DNA, 39 bp, Artificial Sequence; identical to SEQ ID NO: 3606
  Probe

SEQ ID NO: 17004 - DNA, 40 bp, Artificial Sequence; identical to SEQ ID NO: 3607
  Probe

SEQ ID NO: 17005 - DNA, 41 bp, Artificial Sequence; identical to SEQ ID NO: 3608
  Probe

SEQ ID NO: 17006 - DNA, 42 bp, Artificial Sequence
  Probe
agttaaagattaagagaaccaacacctctttacagtgaaatg

SEQ ID NO: 17007 - DNA, 43 bp, Artificial Sequence; identical to SEQ ID NO: 3609
  Probe

SEQ ID NO: 17008 - DNA, 44 bp, Artificial Sequence
  Probe
agttaaagattaagagaaccaacacctctttacagtgaaatgcc

SEQ ID NO: 17009 - DNA, 50 bp, Artificial Sequence; identical to SEQ ID NO: 3610
  Probe

SEQ ID NO: 17010 - DNA, 28 bp, Artificial Sequence
  Probe
agttaaattataggctaaatcctatata

SEQ ID NO: 17011 - DNA, 25 bp, Artificial Sequence
  Probe
agttcgatcctcacacggggcacaa

SEQ ID NO: 17012 - DNA, 39 bp, Artificial Sequence
  Probe
agttctggctcgttggtctagtggtatgattctcgcttt

SEQ ID NO: 17013 - DNA, 28 bp, Artificial Sequence
  Probe
agttgatgcagagtggggttttgcagtc

SEQ ID NO: 17014 - DNA, 29 bp, Artificial Sequence
  Probe
agttgatgcagagtggggttttgcagtcc

SEQ ID NO: 17015 - DNA, 33 bp, Artificial Sequence; identical to SEQ ID NO: 3615
  Probe

SEQ ID NO: 17016 - DNA, 34 bp, Artificial Sequence
  Probe
agttgatgcagagtggggttttgcagtccttagc

SEQ ID NO: 17017 - DNA, 35 bp, Artificial Sequence; identical to SEQ ID NO: 3616
  Probe

SEQ ID NO: 17018 - DNA, 44 bp, Artificial Sequence; identical to SEQ ID NO: 3617
  Probe

SEQ ID NO: 17019 - DNA, 34 bp, Artificial Sequence; identical to SEQ ID NO: 3619
  Probe

SEQ ID NO: 17020 - DNA, 37 bp, Artificial Sequence; identical to SEQ ID NO: 3621
  Probe

SEQ ID NO: 17021 - DNA, 31 bp, Artificial Sequence
  Probe
agttttccttcctgtcccgtacggtttttct

SEQ ID NO: 17022 - DNA, 27 bp, Artificial Sequence
  Probe
agttttgacaacattcaaaaaagagta

SEQ ID NO: 17023 - DNA, 27 bp, Artificial Sequence
  Probe
ataaacttcgccttaattttaataatc

SEQ ID NO: 17024 - DNA, 30 bp, Artificial Sequence; identical to SEQ ID NO: 3625
  Probe

SEQ ID NO: 17025 - DNA, 19 bp, Artificial Sequence
  Probe
ataacagctatccattggt

SEQ ID NO: 17026 - DNA, 16 bp, Artificial Sequence
  Probe
ataaccatgcacacta

SEQ ID NO: 17027 - DNA, 17 bp, Artificial Sequence
  Probe
ataaccatgcacactac

SEQ ID NO: 17028 - DNA, 18 bp, Artificial Sequence
  Probe
ataaccatgcacactact

SEQ ID NO: 17029 - DNA, 19 bp, Artificial Sequence
  Probe
ataaccatgcacactacta

SEQ ID NO: 17030 - DNA, 20 bp, Artificial Sequence
  Probe
ataaccatgcacactactat

SEQ ID NO: 17031 - DNA, 21 bp, Artificial Sequence
  Probe
ataaccatgcacactactata

SEQ ID NO: 17032 - DNA, 23 bp, Artificial Sequence
  Probe
ataaccatgcacactactataac

SEQ ID NO: 17033 - DNA, 24 bp, Artificial Sequence
  Probe
ataaccatgcacactactataacc

SEQ ID NO: 17034 - DNA, 25 bp, Artificial Sequence
  Probe
ataaccatgcacactactataacca

SEQ ID NO: 17035 - DNA, 26 bp, Artificial Sequence
  Probe
ataaccatgcacactactataaccac

SEQ ID NO: 17036 - DNA, 27 bp, Artificial Sequence
  Probe
ataaccatgcacactactataaccacc

SEQ ID NO: 17037 - DNA, 28 bp, Artificial Sequence
  Probe
ataaccatgcacactactataaccaccc

SEQ ID NO: 17038 - DNA, 29 bp, Artificial Sequence
  Probe
ataaccatgcacactactataaccaccct

SEQ ID NO: 17039 - DNA, 30 bp, Artificial Sequence; identical to SEQ ID NO: 3631
  Probe

SEQ ID NO: 17040 - DNA, 16 bp, Artificial Sequence
  Probe
ataacccagaggtcga

SEQ ID NO: 17041 - DNA, 42 bp, Artificial Sequence; identical to SEQ ID NO: 3634
  Probe

SEQ ID NO: 17042 - DNA, 50 bp, Artificial Sequence
  Probe
ataacccagaggtcgatggatcgaaaccatcctctgctaggtgcctgttt

SEQ ID NO: 17043 - DNA, 41 bp, Artificial Sequence
  Probe
ataacccagaggtcgatggatcgaaaccatcctctgctatc

SEQ ID NO: 17044 - DNA, 42 bp, Artificial Sequence
  Probe
ataacgccaaggtcgcgggttcgatccccgtacgggccacag

SEQ ID NO: 17045 - DNA, 41 bp, Artificial Sequence
  Probe
ataacgccaaggtcgcgggttcgatccccgtacgggccacg

SEQ ID NO: 17046 - DNA, 42 bp, Artificial Sequence
  Probe
ataacgccaaggtcgcgggttcgatccccgtacgggccacga

SEQ ID NO: 17047 - DNA, 42 bp, Artificial Sequence
  Probe
ataacgccaaggtcgcgggttcgatccccgtacgggccactg

SEQ ID NO: 17048 - DNA, 49 bp, Artificial Sequence
  Probe
ataacgccaaggtcgcgggttcgatccccgtacgggccactggatgcca

SEQ ID NO: 17049 - DNA, 50 bp, Artificial Sequence
  Probe
ataacgccaaggtcgcgggttcgatccccgtacgggccactggatgccat

SEQ ID NO: 17050 - DNA, 41 bp, Artificial Sequence
  Probe
ataacgccaaggtcgcgggttcgatccccgtacgggccagg

SEQ ID NO: 17051 - DNA, 42 bp, Artificial Sequence
  Probe
ataacgccaaggtcgcgggttcgatccccgtacgggccagga

SEQ ID NO: 17052 - DNA, 42 bp, Artificial Sequence
  Probe
ataacgccaaggtcgcgggttcgatccccgtacgggccaggc

SEQ ID NO: 17053 - DNA, 50 bp, Artificial Sequence
  Probe
ataacgccaaggtcgcgggttcgatccccgtacgggccaggctaactttt

SEQ ID NO: 17054 - DNA, 42 bp, Artificial Sequence
  Probe
ataacgccaaggtcgcgggttcgatccccgtactggccacgt

SEQ ID NO: 17055 - DNA, 29 bp, Artificial Sequence
  Probe
ataagcattggtggttcagtggtagaatt

SEQ ID NO: 17056 - DNA, 30 bp, Artificial Sequence
  Probe
ataagcattggtggttcagtggtagaattc

SEQ ID NO: 17057 - DNA, 31 bp, Artificial Sequence
  Probe
ataagcattggtggttcagtggtagaattct

SEQ ID NO: 17058 - DNA, 33 bp, Artificial Sequence
  Probe
ataagcattggtggttcagtggtagaattctcg

SEQ ID NO: 17059 - DNA, 35 bp, Artificial Sequence
  Probe
ataagcattggtggttcagtggtagaattctcgcc

SEQ ID NO: 17060 - DNA, 36 bp, Artificial Sequence
  Probe
ataagcattggtggttcagtggtagaattctcgcct

SEQ ID NO: 17061 - DNA, 37 bp, Artificial Sequence
  Probe
ataagcattggtggttcagtggtagaattctcgcctg

SEQ ID NO: 17062 - DNA, 38 bp, Artificial Sequence
  Probe
ataagcattggtggttcagtggtagaattctcgcctgc

SEQ ID NO: 17063 - DNA, 39 bp, Artificial Sequence
  Probe
ataagcattggtggttcagtggtagaattctcgcctgcc

SEQ ID NO: 17064 - DNA, 16 bp, Artificial Sequence
  Probe
ataagctatcgggccc

SEQ ID NO: 17065 - DNA, 17 bp, Artificial Sequence
  Probe
ataagctatcgggccca

SEQ ID NO: 17066 - DNA, 18 bp, Artificial Sequence
  Probe
ataagctatcgggcccat

SEQ ID NO: 17067 - DNA, 19 bp, Artificial Sequence
  Probe
ataagctatcgggcccata

SEQ ID NO: 17068 - DNA, 24 bp, Artificial Sequence
  Probe
ataagctatcgggcccataccccg

SEQ ID NO: 17069 - DNA, 25 bp, Artificial Sequence
  Probe
ataagctatcgggcccataccccga

SEQ ID NO: 17070 - DNA, 26 bp, Artificial Sequence
  Probe
ataagctatcgggcccataccccgaa

SEQ ID NO: 17071 - DNA, 27 bp, Artificial Sequence
  Probe
ataagctatcgggcccataccccgaaa

SEQ ID NO: 17072 - DNA, 28 bp, Artificial Sequence
  Probe
ataagctatcgggcccataccccgaaaa

SEQ ID NO: 17073 - DNA, 29 bp, Artificial Sequence
  Probe
ataagctatcgggcccataccccgaaaat

SEQ ID NO: 17074 - DNA, 30 bp, Artificial Sequence; identical to SEQ ID NO: 3643
  Probe

SEQ ID NO: 17075 - DNA, 31 bp, Artificial Sequence; identical to SEQ ID NO: 3644
  Probe

SEQ ID NO: 17076 - DNA, 32 bp, Artificial Sequence; identical to SEQ ID NO: 3645
  Probe

SEQ ID NO: 17077 - DNA, 33 bp, Artificial Sequence; identical to SEQ ID NO: 3646
  Probe

SEQ ID NO: 17078 - DNA, 34 bp, Artificial Sequence; identical to SEQ ID NO: 3647
  Probe

SEQ ID NO: 17079 - DNA, 36 bp, Artificial Sequence; identical to SEQ ID NO: 3648
  Probe

SEQ ID NO: 17080 - DNA, 37 bp, Artificial Sequence; identical to SEQ ID NO: 3649
  Probe

SEQ ID NO: 17081 - DNA, 50 bp, Artificial Sequence; identical to SEQ ID NO: 3652
  Probe

SEQ ID NO: 17082 - DNA, 20 bp, Artificial Sequence
  Probe
ataatcatatttaccaaatg

SEQ ID NO: 17083 - DNA, 20 bp, Artificial Sequence
  Probe
ataatctgaaggtcgtgagt

SEQ ID NO: 17084 - DNA, 31 bp, Artificial Sequence
  Probe
atacaacgatggtttttcatatcattggtcg

SEQ ID NO: 17085 - DNA, 42 bp, Artificial Sequence
  Probe
atacaacgatggtttttcatatcattggtcgtggttgtagtc

SEQ ID NO: 17086 - DNA, 30 bp, Artificial Sequence
  Probe
atacactgaaaatgtttagacgggctcaca

SEQ ID NO: 17087 - DNA, 46 bp, Artificial Sequence; identical to SEQ ID NO: 3655
  Probe

SEQ ID NO: 17088 - DNA, 50 bp, Artificial Sequence; identical to SEQ ID NO: 3657
  Probe

SEQ ID NO: 17089 - DNA, 23 bp, Artificial Sequence
  Probe
atacccacacccacccaagaaca

SEQ ID NO: 17090 - DNA, 29 bp, Artificial Sequence
  Probe
atacccacacccacccaagaacagggttt

SEQ ID NO: 17091 - DNA, 30 bp, Artificial Sequence; identical to SEQ ID NO: 3660
  Probe

SEQ ID NO: 17092 - DNA, 31 bp, Artificial Sequence; identical to SEQ ID NO: 3661
  Probe

SEQ ID NO: 17093 - DNA, 32 bp, Artificial Sequence; identical to SEQ ID NO: 3662
  Probe

SEQ ID NO: 17094 - DNA, 33 bp, Artificial Sequence; identical to SEQ ID NO: 3663
  Probe

SEQ ID NO: 17095 - DNA, 34 bp, Artificial Sequence
  Probe
atacccacacccacccaagaacagggtttgttaa

SEQ ID NO: 17096 - DNA, 36 bp, Artificial Sequence
  Probe
atacccacacccacccaagaacagggtttgttaaga

SEQ ID NO: 17097 - DNA, 39 bp, Artificial Sequence
  Probe
atacccacacccacccaagaacagggtttgttaagatgg

SEQ ID NO: 17098 - DNA, 34 bp, Artificial Sequence; identical to SEQ ID NO: 3665
  Probe

SEQ ID NO: 17099 - DNA, 36 bp, Artificial Sequence
  Probe
ataccccgaaaatgttggttatacccttcccgtact

SEQ ID NO: 17100 - DNA, 40 bp, Artificial Sequence; identical to SEQ ID NO: 3667
  Probe

SEQ ID NO: 17101 - DNA, 17 bp, Artificial Sequence
  Probe
atacccttcccgtacta

SEQ ID NO: 17102 - DNA, 30 bp, Artificial Sequence
  Probe
atagagtaaataataggagcttaaaccccc

SEQ ID NO: 17103 - DNA, 33 bp, Artificial Sequence; identical to SEQ ID NO: 368
  Probe

SEQ ID NO: 17104 - DNA, 34 bp, Artificial Sequence; identical to SEQ ID NO: 369
  Probe

SEQ ID NO: 17105 - DNA, 37 bp, Artificial Sequence; identical to SEQ ID NO: 3668
  Probe

SEQ ID NO: 17106 - DNA, 38 bp, Artificial Sequence; identical to SEQ ID NO: 370
  Probe

SEQ ID NO: 17107 - DNA, 39 bp, Artificial Sequence; identical to SEQ ID NO: 371
  Probe

SEQ ID NO: 17108 - DNA, 40 bp, Artificial Sequence; identical to SEQ ID NO: 3669
  Probe

SEQ ID NO: 17109 - DNA, 41 bp, Artificial Sequence; identical to SEQ ID NO: 3670
  Probe

SEQ ID NO: 17110 - DNA, 42 bp, Artificial Sequence; identical to SEQ ID NO: 3671
  Probe

SEQ ID NO: 17111 - DNA, 43 bp, Artificial Sequence; identical to SEQ ID NO: 3672
  Probe

SEQ ID NO: 17112 - DNA, 25 bp, Artificial Sequence
  Probe
atagctcagtcggtagagcatcaga

SEQ ID NO: 17113 - DNA, 26 bp, Artificial Sequence
  Probe
atagctcagtcggtagagcatcagac

SEQ ID NO: 17114 - DNA, 28 bp, Artificial Sequence
  Probe
atagctcagtcggtagagcatcagactt

SEQ ID NO: 17115 - DNA, 25 bp, Artificial Sequence
  Probe
atagctcagttggtagagcggagga

SEQ ID NO: 17116 - DNA, 16 bp, Artificial Sequence
  Probe
ataggagcttaaaccc

SEQ ID NO: 17117 - DNA, 17 bp, Artificial Sequence
  Probe
ataggagcttaaacccc

SEQ ID NO: 17118 - DNA, 31 bp, Artificial Sequence
  Probe
ataggtggctcgttggtctaggggtatgatt

SEQ ID NO: 17119 - DNA, 16 bp, Artificial Sequence
  Probe
ataggtttggtcctag

SEQ ID NO: 17120 - DNA, 17 bp, Artificial Sequence
  Probe
ataggtttggtcctagc

SEQ ID NO: 17121 - DNA, 18 bp, Artificial Sequence
  Probe
ataggtttggtcctagcc

SEQ ID NO: 17122 - DNA, 19 bp, Artificial Sequence
  Probe
ataggtttggtcctagcct

SEQ ID NO: 17123 - DNA, 20 bp, Artificial Sequence
  Probe
ataggtttggtcctagcctt

SEQ ID NO: 17124 - DNA, 21 bp, Artificial Sequence
  Probe
ataggtttggtcctagccttt

SEQ ID NO: 17125 - DNA, 22 bp, Artificial Sequence
  Probe
ataggtttggtcctagcctttc

SEQ ID NO: 17126 - DNA, 23 bp, Artificial Sequence
  Probe
ataggtttggtcctagcctttct

SEQ ID NO: 17127 - DNA, 24 bp, Artificial Sequence
  Probe
ataggtttggtcctagcctttcta

SEQ ID NO: 17128 - DNA, 26 bp, Artificial Sequence
  Probe
ataggtttggtcctagcctttctatt

SEQ ID NO: 17129 - DNA, 27 bp, Artificial Sequence
  Probe
ataggtttggtcctagcctttctatta

SEQ ID NO: 17130 - DNA, 29 bp, Artificial Sequence
  Probe
ataggtttggtcctagcctttctattagc

SEQ ID NO: 17131 - DNA, 36 bp, Artificial Sequence
  Probe
atagtaccgttaacttccaattaactagttttgaca

SEQ ID NO: 17132 - DNA, 20 bp, Artificial Sequence
  Probe
atagtggtgagtatccccgc

SEQ ID NO: 17133 - DNA, 24 bp, Artificial Sequence
  Probe
atagtggtgagtatccccgcctgt

SEQ ID NO: 17134 - DNA, 39 bp, Artificial Sequence; identical to SEQ ID NO: 3689
  Probe

SEQ ID NO: 17135 - DNA, 23 bp, Artificial Sequence
  Probe
atatcattggtcgtggttgtagt

SEQ ID NO: 17136 - DNA, 24 bp, Artificial Sequence
  Probe
atatcattggtcgtggttgtagtc

SEQ ID NO: 17137 - DNA, 25 bp, Artificial Sequence
  Probe
atatcattggtcgtggttgtagtcc

SEQ ID NO: 17138 - DNA, 28 bp, Artificial Sequence
  Probe
atatcattggtcgtggttgtagtccgtg

SEQ ID NO: 17139 - DNA, 30 bp, Artificial Sequence; identical to SEQ ID NO: 3694
  Probe

SEQ ID NO: 17140 - DNA, 32 bp, Artificial Sequence
  Probe
atatcattggtcgtggttgtagtccgtgcgag

SEQ ID NO: 17141 - DNA, 37 bp, Artificial Sequence
  Probe
atatcattggtcgtggttgtagtccgtgcgagaataa

SEQ ID NO: 17142 - DNA, 38 bp, Artificial Sequence
  Probe
atatcattggtcgtggttgtagtccgtgcgagaataat

SEQ ID NO: 17143 - DNA, 39 bp, Artificial Sequence; identical to SEQ ID NO: 3695
  Probe

SEQ ID NO: 17144 - DNA, 40 bp, Artificial Sequence
  Probe
atatcattggtcgtggttgtagtccgtgcgagaataatga

SEQ ID NO: 17145 - DNA, 29 bp, Artificial Sequence
  Probe
atatccaaccttcagctatagggtggaga

SEQ ID NO: 17146 - DNA, 16 bp, Artificial Sequence
  Probe
atatgtccgcgtgggt

SEQ ID NO: 17147 - DNA, 25 bp, Artificial Sequence
  Probe
atatgtgttttccgtccttactttt

SEQ ID NO: 17148 - DNA, 50 bp, Artificial Sequence; identical to SEQ ID NO: 3698
  Probe

SEQ ID NO: 17149 - DNA, 16 bp, Artificial Sequence
  Probe
atcaagaggtccccgg

SEQ ID NO: 17150 - DNA, 17 bp, Artificial Sequence
  Probe
atcaagaggtccccggt

SEQ ID NO: 17151 - DNA, 19 bp, Artificial Sequence
  Probe
atcaagaggtccccggttc

SEQ ID NO: 17152 - DNA, 39 bp, Artificial Sequence
  Probe
atcaagaggtccccggttcaaatccgggtgccccctctg

SEQ ID NO: 17153 - DNA, 38 bp, Artificial Sequence
  Probe
atcaagaggtccctggttcaaatccgggtgccccctca

SEQ ID NO: 17154 - DNA, 39 bp, Artificial Sequence; identical to SEQ ID NO: 3700
  Probe

SEQ ID NO: 17155 - DNA, 36 bp, Artificial Sequence
  Probe
atcagaagattccaggttcgactcctggctggctcg

SEQ ID NO: 17156 - DNA, 37 bp, Artificial Sequence; identical to SEQ ID NO: 3702
  Probe

SEQ ID NO: 17157 - DNA, 39 bp, Artificial Sequence; identical to SEQ ID NO: 3703
  Probe

SEQ ID NO: 17158 - DNA, 37 bp, Artificial Sequence; identical to SEQ ID NO: 3704
  Probe

SEQ ID NO: 17159 - DNA, 38 bp, Artificial Sequence; identical to SEQ ID NO: 3705
  Probe

SEQ ID NO: 17160 - DNA, 32 bp, Artificial Sequence
  Probe
atcagaagattctaggttcgactcctggctgg

SEQ ID NO: 17161 - DNA, 37 bp, Artificial Sequence
  Probe
atcagaagattctaggttcgactcctggctggctcgc

SEQ ID NO: 17162 - DNA, 38 bp, Artificial Sequence
  Probe
atcagaagattctaggttcgactcctggctggctcgcg

SEQ ID NO: 17163 - DNA, 39 bp, Artificial Sequence; identical to SEQ ID NO: 3707
  Probe

SEQ ID NO: 17164 - DNA, 38 bp, Artificial Sequence
  Probe
atcagaagattctaggttcgactcctggctggctcgct

SEQ ID NO: 17165 - DNA, 33 bp, Artificial Sequence
  Probe
atcagaagattgagggttcgagtcccttcgtgg

SEQ ID NO: 17166 - DNA, 36 bp, Artificial Sequence
  Probe
atcagaagattgagggttcgagtcccttcgtggtcg

SEQ ID NO: 17167 - DNA, 17 bp, Artificial Sequence
  Probe
atcagaagattgcaggt

SEQ ID NO: 17168 - DNA, 39 bp, Artificial Sequence
  Probe
atcagaagattgcaggttcgagtcctgccgcggtcgaag

SEQ ID NO: 17169 - DNA, 39 bp, Artificial Sequence; identical to SEQ ID NO: 3712
  Probe

SEQ ID NO: 17170 - DNA, 39 bp, Artificial Sequence; identical to SEQ ID NO: 3713
  Probe

SEQ ID NO: 17171 - DNA, 36 bp, Artificial Sequence
  Probe
atcagaaggttgcgtgttcaagtcacgtcggggtca

SEQ ID NO: 17172 - DNA, 29 bp, Artificial Sequence
  Probe
atcagagaaaaagtctttaactccaccat

SEQ ID NO: 17173 - DNA, 21 bp, Artificial Sequence
  Probe
atcagccgacgtttgcttttt

SEQ ID NO: 17174 - DNA, 28 bp, Artificial Sequence
  Probe
atcagggcgttggtggtatagtggttag

SEQ ID NO: 17175 - DNA, 29 bp, Artificial Sequence
  Probe
atcagggcgttggtggtatagtggttagc

SEQ ID NO: 17176 - DNA, 30 bp, Artificial Sequence
  Probe
atcagggcgttggtggtatagtggttagca

SEQ ID NO: 17177 - DNA, 32 bp, Artificial Sequence
  Probe
atcagggcgttggtggtatagtggttagcata

SEQ ID NO: 17178 - DNA, 33 bp, Artificial Sequence
  Probe
atcagggcgttggtggtatagtggttagcatag

SEQ ID NO: 17179 - DNA, 36 bp, Artificial Sequence
  Probe
atcagggcgttggtggtatagtggttagcatagctg

SEQ ID NO: 17180 - DNA, 38 bp, Artificial Sequence
  Probe
atcagggcgttggtggtatagtggttagcatagctgcc

SEQ ID NO: 17181 - DNA, 31 bp, Artificial Sequence
  Probe
atcatgcaagattcccattcttgcgacccgg

SEQ ID NO: 17182 - DNA, 23 bp, Artificial Sequence
  Probe
atcattggtcgtggttgtagtcc

SEQ ID NO: 17183 - DNA, 26 bp, Artificial Sequence
  Probe
atcattggtcgtggttgtagtccgtg

SEQ ID NO: 17184 - DNA, 30 bp, Artificial Sequence; identical to SEQ ID NO: 8552
  Probe

SEQ ID NO: 17185 - DNA, 31 bp, Artificial Sequence
  Probe
atcattggtcgtggttgtagtccgtgcgaga

SEQ ID NO: 17186 - DNA, 32 bp, Artificial Sequence
  Probe
atcattggtcgtggttgtagtccgtgcgagaa

SEQ ID NO: 17187 - DNA, 33 bp, Artificial Sequence
  Probe
atcattggtcgtggttgtagtccgtgcgagaat

SEQ ID NO: 17188 - DNA, 37 bp, Artificial Sequence; identical to SEQ ID NO: 3718
  Probe

SEQ ID NO: 17189 - DNA, 27 bp, Artificial Sequence
  Probe
atccaaccttcagctatagggtggaga

SEQ ID NO: 17190 - DNA, 24 bp, Artificial Sequence
  Probe
atccaatggacatatgtccgcgtg

SEQ ID NO: 17191 - DNA, 26 bp, Artificial Sequence
  Probe
atccaatggggtctccccgcgcaggt

SEQ ID NO: 17192 - DNA, 17 bp, Artificial Sequence
  Probe
atccagcgatccgagtt

SEQ ID NO: 17193 - DNA, 33 bp, Artificial Sequence
  Probe
atccagcgatccgagttcaaatctcggtggaac

SEQ ID NO: 17194 - DNA, 34 bp, Artificial Sequence
  Probe
atccagcgatccgagttcaaatctcggtggaacc

SEQ ID NO: 17195 - DNA, 36 bp, Artificial Sequence
  Probe
atccagcgatccgagttcaaatctcggtggaacctg

SEQ ID NO: 17196 - DNA, 37 bp, Artificial Sequence; identical to SEQ ID NO: 3722
  Probe

SEQ ID NO: 17197 - DNA, 38 bp, Artificial Sequence; identical to SEQ ID NO: 3723
  Probe

SEQ ID NO: 17198 - DNA, 36 bp, Artificial Sequence
  Probe
atccagcgatccgagttcaaatctcggtggaacctt

SEQ ID NO: 17199 - DNA, 34 bp, Artificial Sequence
  Probe
atccagcgatccgagttcaaatctcggtgggacc

SEQ ID NO: 17200 - DNA, 35 bp, Artificial Sequence; identical to SEQ ID NO: 380
  Probe

SEQ ID NO: 17201 - DNA, 36 bp, Artificial Sequence
  Probe
atccagcgatccgagttcaaatctcggtgggacctc

SEQ ID NO: 17202 - DNA, 38 bp, Artificial Sequence; identical to SEQ ID NO: 3724
  Probe

SEQ ID NO: 17203 - DNA, 36 bp, Artificial Sequence
  Probe
atccagcgatccgagttcaagtctcggtggaacctg

SEQ ID NO: 17204 - DNA, 38 bp, Artificial Sequence
  Probe
atccagcgatccgagttcaagtctcggtggaacctgct

SEQ ID NO: 17205 - DNA, 36 bp, Artificial Sequence
  Probe
atccagcgatccgagttcgagtctcggtggaacctt

SEQ ID NO: 17206 - DNA, 38 bp, Artificial Sequence
  Probe
atccagcgatccgagttcgagtctcggtggaacctttg

SEQ ID NO: 17207 - DNA, 16 bp, Artificial Sequence
  Probe
atccaggtgcccccta

SEQ ID NO: 17208 - DNA, 16 bp, Artificial Sequence
  Probe
atccaggtgccccctc

SEQ ID NO: 17209 - DNA, 18 bp, Artificial Sequence
  Probe
atccaggtgccccctccc

SEQ ID NO: 17210 - DNA, 26 bp, Artificial Sequence
  Probe
atccattggggtctccccgcgcaggt

SEQ ID NO: 17211 - DNA, 23 bp, Artificial Sequence
  Probe
atccattggggtttccccgcgca

SEQ ID NO: 17212 - DNA, 26 bp, Artificial Sequence
  Probe
atccattggggtttccccgcgcaggt

SEQ ID NO: 17213 - DNA, 21 bp, Artificial Sequence
  Probe
atccattggtcttaggcccca

SEQ ID NO: 17214 - DNA, 22 bp, Artificial Sequence
  Probe
atccattggtcttaggccccaa

SEQ ID NO: 17215 - DNA, 25 bp, Artificial Sequence
  Probe
atccattggtcttaggccccaaaaa

SEQ ID NO: 17216 - DNA, 45 bp, Artificial Sequence; identical to SEQ ID NO: 3727
  Probe

SEQ ID NO: 17217 - DNA, 16 bp, Artificial Sequence
  Probe
atcccaccgctgccaa

SEQ ID NO: 17218 - DNA, 17 bp, Artificial Sequence
  Probe
atcccaccgctgccaag

SEQ ID NO: 17219 - DNA, 18 bp, Artificial Sequence
  Probe
atcccaccgctgccaagt

SEQ ID NO: 17220 - DNA, 17 bp, Artificial Sequence
  Probe
atcccaccgctgccaca

SEQ ID NO: 17221 - DNA, 18 bp, Artificial Sequence
  Probe
atcccaccgctgccacac

SEQ ID NO: 17222 - DNA, 19 bp, Artificial Sequence
  Probe
atcccaccgctgccacacc

SEQ ID NO: 17223 - DNA, 20 bp, Artificial Sequence
  Probe
atcccaccgctgccacacct

SEQ ID NO: 17224 - DNA, 21 bp, Artificial Sequence
  Probe
atcccaccgctgccacacctc

SEQ ID NO: 17225 - DNA, 16 bp, Artificial Sequence
  Probe
atcccaccgctgccag

SEQ ID NO: 17226 - DNA, 17 bp, Artificial Sequence
  Probe
atcccaccgctgccagc

SEQ ID NO: 17227 - DNA, 17 bp, Artificial Sequence
  Probe
atcccaccgctgccagg

SEQ ID NO: 17228 - DNA, 18 bp, Artificial Sequence
  Probe
atcccaccgctgccaggg

SEQ ID NO: 17229 - DNA, 30 bp, Artificial Sequence
  Probe
atcccaccgctgccagggttgctgtctttt

SEQ ID NO: 17230 - DNA, 18 bp, Artificial Sequence
  Probe
atcccaccgctgccaggt

SEQ ID NO: 17231 - DNA, 20 bp, Artificial Sequence
  Probe
atcccaccgctgccaggttt

SEQ ID NO: 17232 - DNA, 21 bp, Artificial Sequence
  Probe
atcccaccgctgccaggttta

SEQ ID NO: 17233 - DNA, 22 bp, Artificial Sequence
  Probe
atcccaccgctgccaggtttat

SEQ ID NO: 17234 - DNA, 17 bp, Artificial Sequence
  Probe
atcccaccgctgccagt

SEQ ID NO: 17235 - DNA, 18 bp, Artificial Sequence
  Probe
atcccaccgctgccagtt

SEQ ID NO: 17236 - DNA, 16 bp, Artificial Sequence
  Probe
atcccactcctgacaa

SEQ ID NO: 17237 - DNA, 18 bp, Artificial Sequence
  Probe
atcccactcctgacaagc

SEQ ID NO: 17238 - DNA, 18 bp, Artificial Sequence
  Probe
atcccactcctgacagtt

SEQ ID NO: 17239 - DNA, 16 bp, Artificial Sequence
  Probe
atcccacttctgacac

SEQ ID NO: 17240 - DNA, 17 bp, Artificial Sequence
  Probe
atcccacttctgacaca

SEQ ID NO: 17241 - DNA, 18 bp, Artificial Sequence
  Probe
atcccacttctgacacaa

SEQ ID NO: 17242 - DNA, 18 bp, Artificial Sequence
  Probe
atcccacttctgacacag

SEQ ID NO: 17243 - DNA, 24 bp, Artificial Sequence
  Probe
atcccacttctgacacatactttt

SEQ ID NO: 17244 - DNA, 16 bp, Artificial Sequence
  Probe
atcccagcggtgcctc

SEQ ID NO: 17245 - DNA, 18 bp, Artificial Sequence
  Probe
atcccagcggtgcctccg

SEQ ID NO: 17246 - DNA, 34 bp, Artificial Sequence
  Probe
atcccagggtcgtgggttcgagccccacgttggg

SEQ ID NO: 17247 - DNA, 16 bp, Artificial Sequence
  Probe
atcccatcctcgtcgc

SEQ ID NO: 17248 - DNA, 16 bp, Artificial Sequence
  Probe
atccccagtacctcca

SEQ ID NO: 17249 - DNA, 30 bp, Artificial Sequence
  Probe
atccccgcctgtcacgcgggagaccggggt

SEQ ID NO: 17250 - DNA, 31 bp, Artificial Sequence
  Probe
atccccgcctgtcacgcgggagaccggggtt

SEQ ID NO: 17251 - DNA, 17 bp, Artificial Sequence
  Probe
atccccggcatctccaa

SEQ ID NO: 17252 - DNA, 18 bp, Artificial Sequence
  Probe
atccccggcatctccaaa

SEQ ID NO: 17253 - DNA, 18 bp, Artificial Sequence
  Probe
atccccggcatctccaat

SEQ ID NO: 17254 - DNA, 17 bp, Artificial Sequence
  Probe
atccccggcatctccag

SEQ ID NO: 17255 - DNA, 18 bp, Artificial Sequence
  Probe
atccccggcatctccaga

SEQ ID NO: 17256 - DNA, 18 bp, Artificial Sequence
  Probe
atccccggcatctccagt

SEQ ID NO: 17257 - DNA, 17 bp, Artificial Sequence
  Probe
atccccggcatctccat

SEQ ID NO: 17258 - DNA, 18 bp, Artificial Sequence
  Probe
atccccggcatctccatt

SEQ ID NO: 17259 - DNA, 19 bp, Artificial Sequence
  Probe
atccccggcatctccattg

SEQ ID NO: 17260 - DNA, 26 bp, Artificial Sequence
  Probe
atcccctggcccaacccgtcatctac

SEQ ID NO: 17261 - DNA, 16 bp, Artificial Sequence
  Probe
atcccggacgagccca

SEQ ID NO: 17262 - DNA, 18 bp, Artificial Sequence
  Probe
atcccggacgagcccaca

SEQ ID NO: 17263 - DNA, 16 bp, Artificial Sequence
  Probe
atcccggacgagcccc

SEQ ID NO: 17264 - DNA, 17 bp, Artificial Sequence
  Probe
atcccggacgagccccc

SEQ ID NO: 17265 - DNA, 18 bp, Artificial Sequence
  Probe
atcccggacgagccccct

SEQ ID NO: 17266 - DNA, 19 bp, Artificial Sequence
  Probe
atcccggacgagccccctt

SEQ ID NO: 17267 - DNA, 17 bp, Artificial Sequence
  Probe
atcccggacgagcccct

SEQ ID NO: 17268 - DNA, 18 bp, Artificial Sequence
  Probe
atcccggacgagcccctc

SEQ ID NO: 17269 - DNA, 18 bp, Artificial Sequence
  Probe
atcccggacgagcccctt

SEQ ID NO: 17270 - DNA, 16 bp, Artificial Sequence
  Probe
atcccggacgagcccg

SEQ ID NO: 17271 - DNA, 18 bp, Artificial Sequence
  Probe
atcccggacgagcccggt

SEQ ID NO: 17272 - DNA, 16 bp, Artificial Sequence
  Probe
atcccggacgagccct

SEQ ID NO: 17273 - DNA, 18 bp, Artificial Sequence
  Probe
atcccggacgagccctag

SEQ ID NO: 17274 - DNA, 18 bp, Artificial Sequence
  Probe
atcccggacgagccctca

SEQ ID NO: 17275 - DNA, 18 bp, Artificial Sequence
  Probe
atcccggacgagccctcg

SEQ ID NO: 17276 - DNA, 18 bp, Artificial Sequence
  Probe
atcccggacgagccctgt

SEQ ID NO: 17277 - DNA, 19 bp, Artificial Sequence
  Probe
atcccgggcggaaacaggt

SEQ ID NO: 17278 - DNA, 16 bp, Artificial Sequence
  Probe
atcccgggtttcggca

SEQ ID NO: 17279 - DNA, 16 bp, Artificial Sequence
  Probe
atccggctcgaaggac

SEQ ID NO: 17280 - DNA, 18 bp, Artificial Sequence
  Probe
atccggctcgaaggacga

SEQ ID NO: 17281 - DNA, 18 bp, Artificial Sequence
  Probe
atccggctcggaggacgg

SEQ ID NO: 17282 - DNA, 17 bp, Artificial Sequence
  Probe
atccgggtgccccctca

SEQ ID NO: 17283 - DNA, 18 bp, Artificial Sequence
  Probe
atccgggtgccccctcaa

SEQ ID NO: 17284 - DNA, 19 bp, Artificial Sequence
  Probe
atccgggtgccccctcaat

SEQ ID NO: 17285 - DNA, 20 bp, Artificial Sequence
  Probe
atccgggtgccccctcaatg

SEQ ID NO: 17286 - DNA, 21 bp, Artificial Sequence
  Probe
atccgggtgccccctcaatgg

SEQ ID NO: 17287 - DNA, 18 bp, Artificial Sequence
  Probe
atccgggtgccccctcac

SEQ ID NO: 17288 - DNA, 19 bp, Artificial Sequence
  Probe
atccgggtgccccctcaca

SEQ ID NO: 17289 - DNA, 17 bp, Artificial Sequence
  Probe
atccgggtgccccctcg

SEQ ID NO: 17290 - DNA, 18 bp, Artificial Sequence
  Probe
atccgggtgccccctcgg

SEQ ID NO: 17291 - DNA, 17 bp, Artificial Sequence
  Probe
atccgggtgccccctct

SEQ ID NO: 17292 - DNA, 18 bp, Artificial Sequence
  Probe
atccgggtgccccctctg

SEQ ID NO: 17293 - DNA, 19 bp, Artificial Sequence
  Probe
atccgggtgccccctctgt

SEQ ID NO: 17294 - DNA, 20 bp, Artificial Sequence
  Probe
atccgggtgccccctctgtg

SEQ ID NO: 17295 - DNA, 18 bp, Artificial Sequence
  Probe
atccgggtgccccctctt

SEQ ID NO: 17296 - DNA, 19 bp, Artificial Sequence
  Probe
atccgggtgccccctcttt

SEQ ID NO: 17297 - DNA, 16 bp, Artificial Sequence
  Probe
atccgggtgccccctg

SEQ ID NO: 17298 - DNA, 16 bp, Artificial Sequence
  Probe
atccgggtgccccctt

SEQ ID NO: 17299 - DNA, 17 bp, Artificial Sequence
  Probe
atccgggtgcccccttc

SEQ ID NO: 17300 - DNA, 18 bp, Artificial Sequence
  Probe
atccgggtgcccccttcc

SEQ ID NO: 17301 - DNA, 19 bp, Artificial Sequence
  Probe
atcctcacacggggcacaa

SEQ ID NO: 17302 - DNA, 16 bp, Artificial Sequence
  Probe
atcctgctcacagcgc

SEQ ID NO: 17303 - DNA, 31 bp, Artificial Sequence
  Probe
atcctgggttcgaatcccagcggtgcctccg

SEQ ID NO: 17304 - DNA, 16 bp, Artificial Sequence
  Probe
atccttaggtcgctgg

SEQ ID NO: 17305 - DNA, 17 bp, Artificial Sequence
  Probe
atccttaggtcgctggt

SEQ ID NO: 17306 - DNA, 33 bp, Artificial Sequence
  Probe
atccttaggtcgctggttcgattccggctcgaa

SEQ ID NO: 17307 - DNA, 34 bp, Artificial Sequence
  Probe
atccttaggtcgctggttcgattccggctcgaag

SEQ ID NO: 17308 - DNA, 50 bp, Artificial Sequence
  Probe
atccttaggtcgctggttcgattccggctcgaaggaagtgcccgatgctt

SEQ ID NO: 17309 - DNA, 38 bp, Artificial Sequence
  Probe
atccttaggtcgctggttcgattccggctcgaaggact

SEQ ID NO: 17310 - DNA, 50 bp, Artificial Sequence; identical to SEQ ID NO: 3753
  Probe

SEQ ID NO: 17311 - DNA, 23 bp, Artificial Sequence
  Probe
atcgaaaccatcctctgctaggt

SEQ ID NO: 17312 - DNA, 20 bp, Artificial Sequence
  Probe
atcgcataaaacttaaaact

SEQ ID NO: 17313 - DNA, 25 bp, Artificial Sequence
  Probe
atcgcataaaacttaaaactttaca

SEQ ID NO: 17314 - DNA, 30 bp, Artificial Sequence
  Probe
atcgcataaaacttaaaactttacagtcag

SEQ ID NO: 17315 - DNA, 31 bp, Artificial Sequence
  Probe
atcgcataaaacttaaaactttacagtcaga

SEQ ID NO: 17316 - DNA, 50 bp, Artificial Sequence; identical to SEQ ID NO: 3759
  Probe

SEQ ID NO: 17317 - DNA, 27 bp, Artificial Sequence
  Probe
atcgcggctcgttggtctaggggtatg

SEQ ID NO: 17318 - DNA, 28 bp, Artificial Sequence
  Probe
atcgcggctcgttggtctaggggtatga

SEQ ID NO: 17319 - DNA, 29 bp, Artificial Sequence
  Probe
atcgcggctcgttggtctaggggtatgat

SEQ ID NO: 17320 - DNA, 30 bp, Artificial Sequence
  Probe
atcgcggctcgttggtctaggggtatgatt

SEQ ID NO: 17321 - DNA, 31 bp, Artificial Sequence
  Probe
atcgcggctcgttggtctaggggtatgattc

SEQ ID NO: 17322 - DNA, 32 bp, Artificial Sequence
  Probe
atcgcggctcgttggtctaggggtatgattct

SEQ ID NO: 17323 - DNA, 36 bp, Artificial Sequence
  Probe
atcgcggctcgttggtctaggggtatgattctcgct

SEQ ID NO: 17324 - DNA, 16 bp, Artificial Sequence
  Probe
atcgggcccatacccc

SEQ ID NO: 17325 - DNA, 50 bp, Artificial Sequence; identical to SEQ ID NO: 3760
  Probe

SEQ ID NO: 17326 - DNA, 16 bp, Artificial Sequence
  Probe
atcggtgcatgggtgg

SEQ ID NO: 17327 - DNA, 23 bp, Artificial Sequence
  Probe
atcggtgcatgggtggttcagtg

SEQ ID NO: 17328 - DNA, 24 bp, Artificial Sequence
  Probe
atcggtgcatgggtggttcagtgg

SEQ ID NO: 17329 - DNA, 25 bp, Artificial Sequence
  Probe
atcggtgcatgggtggttcagtggt

SEQ ID NO: 17330 - DNA, 26 bp, Artificial Sequence
  Probe
atcggtgcatgggtggttcagtggta

SEQ ID NO: 17331 - DNA, 27 bp, Artificial Sequence
  Probe
atcggtgcatgggtggttcagtggtag

SEQ ID NO: 17332 - DNA, 28 bp, Artificial Sequence
  Probe
atcggtgcatgggtggttcagtggtaga

SEQ ID NO: 17333 - DNA, 29 bp, Artificial Sequence
  Probe
atcggtgcatgggtggttcagtggtagaa

SEQ ID NO: 17334 - DNA, 30 bp, Artificial Sequence
  Probe
atcggtgcatgggtggttcagtggtagaat

SEQ ID NO: 17335 - DNA, 31 bp, Artificial Sequence
  Probe
atcggtgcatgggtggttcagtggtagaatt

SEQ ID NO: 17336 - DNA, 32 bp, Artificial Sequence
  Probe
atcggtgcatgggtggttcagtggtagaattc

SEQ ID NO: 17337 - DNA, 33 bp, Artificial Sequence
  Probe
atcggtgcatgggtggttcagtggtagaattct

SEQ ID NO: 17338 - DNA, 35 bp, Artificial Sequence
  Probe
atcggtgcatgggtggttcagtggtagaattctcg

SEQ ID NO: 17339 - DNA, 36 bp, Artificial Sequence
  Probe
atcggtgcatgggtggttcagtggtagaattctcgc

SEQ ID NO: 17340 - DNA, 37 bp, Artificial Sequence
  Probe
atcggtgcatgggtggttcagtggtagaattctcgcc

SEQ ID NO: 17341 - DNA, 38 bp, Artificial Sequence
  Probe
atcggtgcatgggtggttcagtggtagaattctcgcct

SEQ ID NO: 17342 - DNA, 24 bp, Artificial Sequence
  Probe
atcgtatagtggttagtactctgc

SEQ ID NO: 17343 - DNA, 27 bp, Artificial Sequence
  Probe
atcgtatagtggttagtactctgcgtt

SEQ ID NO: 17344 - DNA, 31 bp, Artificial Sequence
  Probe
atctaaagacaggggttaggcctctttttac

SEQ ID NO: 17345 - DNA, 34 bp, Artificial Sequence
  Probe
atctaaagacaggggttaggcctctttttaccag

SEQ ID NO: 17346 - DNA, 35 bp, Artificial Sequence; identical to SEQ ID NO: 3765
  Probe

SEQ ID NO: 17347 - DNA, 36 bp, Artificial Sequence; identical to SEQ ID NO: 3766
  Probe

SEQ ID NO: 17348 - DNA, 37 bp, Artificial Sequence
  Probe
atctaaagacaggggttaggcctctttttaccagctc

SEQ ID NO: 17349 - DNA, 38 bp, Artificial Sequence
  Probe
atctaaagacaggggttaggcctctttttaccagctcc

SEQ ID NO: 17350 - DNA, 17 bp, Artificial Sequence
  Probe
atctaaaggtccctggt

SEQ ID NO: 17351 - DNA, 21 bp, Artificial Sequence
  Probe
atctaaaggtccctggttcga

SEQ ID NO: 17352 - DNA, 22 bp, Artificial Sequence
  Probe
atctaaaggtccctggttcgat

SEQ ID NO: 17353 - DNA, 36 bp, Artificial Sequence; identical to SEQ ID NO: 393
  Probe

SEQ ID NO: 17354 - DNA, 39 bp, Artificial Sequence; identical to SEQ ID NO: 3774
  Probe

SEQ ID NO: 17355 - DNA, 39 bp, Artificial Sequence; identical to SEQ ID NO: 3776
  Probe

SEQ ID NO: 17356 - DNA, 34 bp, Artificial Sequence
  Probe
atctcagggtcgtgggttcgagccccacgttggg

SEQ ID NO: 17357 - DNA, 24 bp, Artificial Sequence
  Probe
atctccagcattccccctcaaacc

SEQ ID NO: 17358 - DNA, 25 bp, Artificial Sequence
  Probe
atctccagcattccccctcaaacct

SEQ ID NO: 17359 - DNA, 26 bp, Artificial Sequence
  Probe
atctccagcattccccctcaaaccta

SEQ ID NO: 17360 - DNA, 16 bp, Artificial Sequence
  Probe
atctcgctggggcctc

SEQ ID NO: 17361 - DNA, 16 bp, Artificial Sequence
  Probe
atctcggtgggaccta

SEQ ID NO: 17362 - DNA, 16 bp, Artificial Sequence
  Probe
atctcggtgggacctc

SEQ ID NO: 17363 - DNA, 17 bp, Artificial Sequence
  Probe
atctgaaggtcgtgagt

SEQ ID NO: 17364 - DNA, 33 bp, Artificial Sequence
  Probe
atctgaaggtcgtgagttcgagcctcacacggg

SEQ ID NO: 17365 - DNA, 36 bp, Artificial Sequence
  Probe
atctgaaggtcgtgagttcgatcctcacacggggca

SEQ ID NO: 17366 - DNA, 39 bp, Artificial Sequence; identical to SEQ ID NO: 3783
  Probe

SEQ ID NO: 17367 - DNA, 31 bp, Artificial Sequence; identical to SEQ ID NO: 398
  Probe

SEQ ID NO: 17368 - DNA, 35 bp, Artificial Sequence; identical to SEQ ID NO: 399
  Probe

SEQ ID NO: 17369 - DNA, 36 bp, Artificial Sequence; identical to SEQ ID NO: 3790
  Probe

SEQ ID NO: 17370 - DNA, 38 bp, Artificial Sequence; identical to SEQ ID NO: 3792
  Probe

SEQ ID NO: 17371 - DNA, 34 bp, Artificial Sequence
  Probe
atctgagggtccagggttcaagtccctgttcggg

SEQ ID NO: 17372 - DNA, 39 bp, Artificial Sequence; identical to SEQ ID NO: 3794
  Probe

SEQ ID NO: 17373 - DNA, 30 bp, Artificial Sequence
  Probe
atctgtttccgtagtgtagtggttatcacg

SEQ ID NO: 17374 - DNA, 31 bp, Artificial Sequence
  Probe
atctgtttccgtagtgtagtggttatcacgt

SEQ ID NO: 17375 - DNA, 32 bp, Artificial Sequence
  Probe
atctgtttccgtagtgtagtggttatcacgtt

SEQ ID NO: 17376 - DNA, 31 bp, Artificial Sequence; identical to SEQ ID NO: 3795
  Probe

SEQ ID NO: 17377 - DNA, 50 bp, Artificial Sequence; identical to SEQ ID NO: 3797
  Probe

SEQ ID NO: 17378 - DNA, 25 bp, Artificial Sequence
  Probe
atgaaaacctttttccaaggacaaa

SEQ ID NO: 17379 - DNA, 26 bp, Artificial Sequence
  Probe
atgaaaacctttttccaaggacaaat

SEQ ID NO: 17380 - DNA, 36 bp, Artificial Sequence
  Probe
atgaggccccgggttcaatccccggcatctccagac

SEQ ID NO: 17381 - DNA, 30 bp, Artificial Sequence
  Probe
atgaggccccgggttcgatccccggcatct

SEQ ID NO: 17382 - DNA, 36 bp, Artificial Sequence
  Probe
atgaggccccgggttcgatccccggcatctccattg

SEQ ID NO: 17383 - DNA, 23 bp, Artificial Sequence
  Probe
atgataatcatatttaccaaatg

SEQ ID NO: 17384 - DNA, 30 bp, Artificial Sequence
  Probe
atgatgtatgctttgtttctgttgagtgtg

SEQ ID NO: 17385 - DNA, 30 bp, Artificial Sequence
  Probe
atgattctcgcttagggtgcgagaggtccc

SEQ ID NO: 17386 - DNA, 31 bp, Artificial Sequence; identical to SEQ ID NO: 3801
  Probe

SEQ ID NO: 17387 - DNA, 30 bp, Artificial Sequence
  Probe
atgattctcgcttcgggtgcgagaggtccc

SEQ ID NO: 17388 - DNA, 31 bp, Artificial Sequence; identical to SEQ ID NO: 3802
  Probe

SEQ ID NO: 17389 - DNA, 34 bp, Artificial Sequence
  Probe
atgattctcgcttcgggtgcgagaggtcccgggt

SEQ ID NO: 17390 - DNA, 31 bp, Artificial Sequence; identical to SEQ ID NO: 3804
  Probe

SEQ ID NO: 17391 - DNA, 30 bp, Artificial Sequence
  Probe
atgattctcggtttgggtccgagaggtccc

SEQ ID NO: 17392 - DNA, 31 bp, Artificial Sequence
  Probe
atgattctcggtttgggtccgagaggtcccg

SEQ ID NO: 17393 - DNA, 33 bp, Artificial Sequence
  Probe
atgcaagattcccattcttgcgacccgggttcg

SEQ ID NO: 17394 - DNA, 24 bp, Artificial Sequence
  Probe
atgcacactactataaccacccta

SEQ ID NO: 17395 - DNA, 29 bp, Artificial Sequence
  Probe
atgcagagtggggttttgcagtccttagc

SEQ ID NO: 17396 - DNA, 30 bp, Artificial Sequence; identical to SEQ ID NO: 3807
  Probe

SEQ ID NO: 17397 - DNA, 16 bp, Artificial Sequence
  Probe
atgccccaactaaata

SEQ ID NO: 17398 - DNA, 18 bp, Artificial Sequence
  Probe
atgccccaactaaatact

SEQ ID NO: 17399 - DNA, 19 bp, Artificial Sequence
  Probe
atgccccaactaaatacta

SEQ ID NO: 17400 - DNA, 20 bp, Artificial Sequence
  Probe
atgccccaactaaatactac

SEQ ID NO: 17401 - DNA, 21 bp, Artificial Sequence
  Probe
atgccccaactaaatactacc

SEQ ID NO: 17402 - DNA, 22 bp, Artificial Sequence
  Probe
atgccccaactaaatactaccg

SEQ ID NO: 17403 - DNA, 23 bp, Artificial Sequence
  Probe
atgccccaactaaatactaccgt

SEQ ID NO: 17404 - DNA, 24 bp, Artificial Sequence
  Probe
atgccccaactaaatactaccgta

SEQ ID NO: 17405 - DNA, 25 bp, Artificial Sequence
  Probe
atgccccaactaaatactaccgtat

SEQ ID NO: 17406 - DNA, 26 bp, Artificial Sequence
  Probe
atgccccaactaaatactaccgtatg

SEQ ID NO: 17407 - DNA, 27 bp, Artificial Sequence
  Probe
atgccccaactaaatactaccgtatgg

SEQ ID NO: 17408 - DNA, 28 bp, Artificial Sequence
  Probe
atgccccaactaaatactaccgtatggc

SEQ ID NO: 17409 - DNA, 16 bp, Artificial Sequence
  Probe
atgcccccatgtctaa

SEQ ID NO: 17410 - DNA, 18 bp, Artificial Sequence
  Probe
atgcccccatgtctaaca

SEQ ID NO: 17411 - DNA, 21 bp, Artificial Sequence
  Probe
atgcccccatgtctaacaaca

SEQ ID NO: 17412 - DNA, 22 bp, Artificial Sequence
  Probe
atgcccccatgtctaacaacat

SEQ ID NO: 17413 - DNA, 26 bp, Artificial Sequence
  Probe
atgcccccatgtctaacaacatggct

SEQ ID NO: 17414 - DNA, 27 bp, Artificial Sequence
  Probe
atgcccccatgtctaacaacatggctt

SEQ ID NO: 17415 - DNA, 28 bp, Artificial Sequence
  Probe
atgcccccatgtctaacaacatggcttt

SEQ ID NO: 17416 - DNA, 29 bp, Artificial Sequence
  Probe
atgcccccatgtctaacaacatggctttc

SEQ ID NO: 17417 - DNA, 30 bp, Artificial Sequence; identical to SEQ ID NO: 3818
  Probe

SEQ ID NO: 17418 - DNA, 31 bp, Artificial Sequence; identical to SEQ ID NO: 3819
  Probe

SEQ ID NO: 17419 - DNA, 32 bp, Artificial Sequence; identical to SEQ ID NO: 3820
  Probe

SEQ ID NO: 17420 - DNA, 33 bp, Artificial Sequence; identical to SEQ ID NO: 3821
  Probe

SEQ ID NO: 17421 - DNA, 34 bp, Artificial Sequence; identical to SEQ ID NO: 3822
  Probe

SEQ ID NO: 17422 - DNA, 35 bp, Artificial Sequence; identical to SEQ ID NO: 3823
  Probe

SEQ ID NO: 17423 - DNA, 36 bp, Artificial Sequence
  Probe
atgcccccatgtctaacaacatggctttctcaactt

SEQ ID NO: 17424 - DNA, 16 bp, Artificial Sequence
  Probe
atgcccctcatttaca

SEQ ID NO: 17425 - DNA, 18 bp, Artificial Sequence
  Probe
atgcccctcatttacata

SEQ ID NO: 17426 - DNA, 19 bp, Artificial Sequence
  Probe
atgcccctcatttacataa

SEQ ID NO: 17427 - DNA, 21 bp, Artificial Sequence
  Probe
atgcccctcatttacataaat

SEQ ID NO: 17428 - DNA, 22 bp, Artificial Sequence
  Probe
atgcccctcatttacataaata

SEQ ID NO: 17429 - DNA, 27 bp, Artificial Sequence
  Probe
atgcccctcatttacataaatattata

SEQ ID NO: 17430 - DNA, 28 bp, Artificial Sequence
  Probe
atgcccctcatttacataaatattatac

SEQ ID NO: 17431 - DNA, 29 bp, Artificial Sequence
  Probe
atgcccctcatttacataaatattatact

SEQ ID NO: 17432 - DNA, 30 bp, Artificial Sequence; identical to SEQ ID NO: 3825
  Probe

SEQ ID NO: 17433 - DNA, 33 bp, Artificial Sequence
  Probe
atgccgaggttgtgagttcgagcctcacctgga

SEQ ID NO: 17434 - DNA, 34 bp, Artificial Sequence
  Probe
atgccgaggttgtgagttcgagcctcacctggag

SEQ ID NO: 17435 - DNA, 36 bp, Artificial Sequence
  Probe
atgccgaggttgtgagttcgagcctcacctggagca

SEQ ID NO: 17436 - DNA, 45 bp, Artificial Sequence
  Probe
atgccgaggttgtgagttcgagcctcacctggagcaagacccttt

SEQ ID NO: 17437 - DNA, 46 bp, Artificial Sequence
  Probe
atgccgaggttgtgagttcgagcctcacctggagcaagaccctttt

SEQ ID NO: 17438 - DNA, 39 bp, Artificial Sequence
  Probe
atgccgaggttgtgagttcgagcctcacctggagcattg

SEQ ID NO: 17439 - DNA, 16 bp, Artificial Sequence
  Probe
atggcacatgcagcgc

SEQ ID NO: 17440 - DNA, 17 bp, Artificial Sequence
  Probe
atggcacatgcagcgca

SEQ ID NO: 17441 - DNA, 18 bp, Artificial Sequence
  Probe
atggcacatgcagcgcaa

SEQ ID NO: 17442 - DNA, 19 bp, Artificial Sequence
  Probe
atggcacatgcagcgcaag

SEQ ID NO: 17443 - DNA, 20 bp, Artificial Sequence
  Probe
atggcacatgcagcgcaagt

SEQ ID NO: 17444 - DNA, 21 bp, Artificial Sequence
  Probe
atggcacatgcagcgcaagta

SEQ ID NO: 17445 - DNA, 22 bp, Artificial Sequence
  Probe
atggcacatgcagcgcaagtag

SEQ ID NO: 17446 - DNA, 23 bp, Artificial Sequence
  Probe
atggcacatgcagcgcaagtagg

SEQ ID NO: 17447 - DNA, 24 bp, Artificial Sequence
  Probe
atggcacatgcagcgcaagtaggt

SEQ ID NO: 17448 - DNA, 25 bp, Artificial Sequence
  Probe
atggcacatgcagcgcaagtaggtc

SEQ ID NO: 17449 - DNA, 26 bp, Artificial Sequence
  Probe
atggcacatgcagcgcaagtaggtct

SEQ ID NO: 17450 - DNA, 27 bp, Artificial Sequence
  Probe
atggcacatgcagcgcaagtaggtcta

SEQ ID NO: 17451 - DNA, 28 bp, Artificial Sequence
  Probe
atggcacatgcagcgcaagtaggtctac

SEQ ID NO: 17452 - DNA, 29 bp, Artificial Sequence
  Probe
atggcacatgcagcgcaagtaggtctaca

SEQ ID NO: 17453 - DNA, 30 bp, Artificial Sequence; identical to SEQ ID NO: 3841
  Probe

SEQ ID NO: 17454 - DNA, 19 bp, Artificial Sequence
  Probe
atggcacggcaaggggctc

SEQ ID NO: 17455 - DNA, 16 bp, Artificial Sequence
  Probe
atggccgcatatattt

SEQ ID NO: 17456 - DNA, 33 bp, Artificial Sequence
  Probe
atggcgtgggttcgaatcccaccgctgccacac

SEQ ID NO: 17457 - DNA, 25 bp, Artificial Sequence
  Probe
atgggtggttcagtggtagaattct

SEQ ID NO: 17458 - DNA, 27 bp, Artificial Sequence
  Probe
atgggtggttcagtggtagaattctcg

SEQ ID NO: 17459 - DNA, 28 bp, Artificial Sequence
  Probe
atgggtggttcagtggtagaattctcgc

SEQ ID NO: 17460 - DNA, 24 bp, Artificial Sequence
  Probe
atggtctagcggttaggattcctg

SEQ ID NO: 17461 - DNA, 30 bp, Artificial Sequence; identical to SEQ ID NO: 3846
  Probe

SEQ ID NO: 17462 - DNA, 31 bp, Artificial Sequence; identical to SEQ ID NO: 3847
  Probe

SEQ ID NO: 17463 - DNA, 35 bp, Artificial Sequence; identical to SEQ ID NO: 3849
  Probe

SEQ ID NO: 17464 - DNA, 30 bp, Artificial Sequence
  Probe
atggtggttcagtggtagaattctcgcctt

SEQ ID NO: 17465 - DNA, 16 bp, Artificial Sequence
  Probe
atggttagcactctgg

SEQ ID NO: 17466 - DNA, 17 bp, Artificial Sequence
  Probe
atggttagcactctgga

SEQ ID NO: 17467 - DNA, 19 bp, Artificial Sequence
  Probe
atggttagcactctggact

SEQ ID NO: 17468 - DNA, 20 bp, Artificial Sequence
  Probe
atggttagcactctggactc

SEQ ID NO: 17469 - DNA, 22 bp, Artificial Sequence
  Probe
atggttagcactctggactctg

SEQ ID NO: 17470 - DNA, 36 bp, Artificial Sequence
  Probe
atggttagcactctggactctgaatccagcgatccg

SEQ ID NO: 17471 - DNA, 38 bp, Artificial Sequence
  Probe
atggttagcactctggactctgaatccagcgatccgag

SEQ ID NO: 17472 - DNA, 39 bp, Artificial Sequence
  Probe
atggttagcactctggactctgaatccagcgatccgagt

SEQ ID NO: 17473 - DNA, 16 bp, Artificial Sequence
  Probe
atgtccgcgtgggttc

SEQ ID NO: 17474 - DNA, 30 bp, Artificial Sequence; identical to SEQ ID NO: 9409
  Probe

SEQ ID NO: 17475 - DNA, 22 bp, Artificial Sequence
  Probe
atgtctaacaacatggctttct

SEQ ID NO: 17476 - DNA, 24 bp, Artificial Sequence
  Probe
atgtctaacaacatggctttctca

SEQ ID NO: 17477 - DNA, 25 bp, Artificial Sequence
  Probe
atgtctaacaacatggctttctcaa

SEQ ID NO: 17478 - DNA, 26 bp, Artificial Sequence
  Probe
atgtctaacaacatggctttctcaac

SEQ ID NO: 17479 - DNA, 27 bp, Artificial Sequence
  Probe
atgtctaacaacatggctttctcaact

SEQ ID NO: 17480 - DNA, 30 bp, Artificial Sequence
  Probe
atgtctccatctattgatgagggtcttact

SEQ ID NO: 17481 - DNA, 17 bp, Artificial Sequence
  Probe
atgtggtggcttacttt

SEQ ID NO: 17482 - DNA, 18 bp, Artificial Sequence
  Probe
atgtggtggcttactttt

SEQ ID NO: 17483 - DNA, 21 bp, Artificial Sequence
  Probe
atgtttagacgggctcacatc

SEQ ID NO: 17484 - DNA, 22 bp, Artificial Sequence
  Probe
atgtttagacgggctcacatca

SEQ ID NO: 17485 - DNA, 25 bp, Artificial Sequence
  Probe
atgtttagacgggctcacatcaccc

SEQ ID NO: 17486 - DNA, 26 bp, Artificial Sequence
  Probe
atgtttagacgggctcacatcacccc

SEQ ID NO: 17487 - DNA, 28 bp, Artificial Sequence
  Probe
atgtttagacgggctcacatcaccccat

SEQ ID NO: 17488 - DNA, 29 bp, Artificial Sequence
  Probe
atgtttagacgggctcacatcaccccata

SEQ ID NO: 17489 - DNA, 30 bp, Artificial Sequence; identical to SEQ ID NO: 419
  Probe

SEQ ID NO: 17490 - DNA, 31 bp, Artificial Sequence; identical to SEQ ID NO: 3863
  Probe

SEQ ID NO: 17491 - DNA, 33 bp, Artificial Sequence; identical to SEQ ID NO: 3865
  Probe

SEQ ID NO: 17492 - DNA, 35 bp, Artificial Sequence; identical to SEQ ID NO: 3866
  Probe

SEQ ID NO: 17493 - DNA, 36 bp, Artificial Sequence; identical to SEQ ID NO: 3867
  Probe

SEQ ID NO: 17494 - DNA, 37 bp, Artificial Sequence; identical to SEQ ID NO: 3868
  Probe

SEQ ID NO: 17495 - DNA, 38 bp, Artificial Sequence; identical to SEQ ID NO: 3869
  Probe

SEQ ID NO: 17496 - DNA, 20 bp, Artificial Sequence
  Probe
attaactagttttgacaaca

SEQ ID NO: 17497 - DNA, 31 bp, Artificial Sequence
  Probe
attaactagttttgacaacattcaaaaaaga

SEQ ID NO: 17498 - DNA, 33 bp, Artificial Sequence
  Probe
attaactagttttgacaacattcaaaaaagagt

SEQ ID NO: 17499 - DNA, 34 bp, Artificial Sequence
  Probe
attaactagttttgacaacattcaaaaaagagta

SEQ ID NO: 17500 - DNA, 35 bp, Artificial Sequence
  Probe
attaactagttttgacaacattcaaaaaagagtaa

SEQ ID NO: 17501 - DNA, 36 bp, Artificial Sequence
  Probe
attaactagttttgacaacattcaaaaaagagtaat

SEQ ID NO: 17502 - DNA, 37 bp, Artificial Sequence; identical to SEQ ID NO: 3871
  Probe

SEQ ID NO: 17503 - DNA, 33 bp, Artificial Sequence; identical to SEQ ID NO: 3873
  Probe

SEQ ID NO: 17504 - DNA, 20 bp, Artificial Sequence
  Probe
attaatcccctggcccaacc

SEQ ID NO: 17505 - DNA, 21 bp, Artificial Sequence
  Probe
attaatcccctggcccaaccc

SEQ ID NO: 17506 - DNA, 22 bp, Artificial Sequence
  Probe
attaatcccctggcccaacccg

SEQ ID NO: 17507 - DNA, 23 bp, Artificial Sequence
  Probe
attaatcccctggcccaacccgt

SEQ ID NO: 17508 - DNA, 24 bp, Artificial Sequence
  Probe
attaatcccctggcccaacccgtc

SEQ ID NO: 17509 - DNA, 25 bp, Artificial Sequence
  Probe
attaatcccctggcccaacccgtca

SEQ ID NO: 17510 - DNA, 27 bp, Artificial Sequence
  Probe
attaatcccctggcccaacccgtcatc

SEQ ID NO: 17511 - DNA, 28 bp, Artificial Sequence
  Probe
attaatcccctggcccaacccgtcatct

SEQ ID NO: 17512 - DNA, 29 bp, Artificial Sequence
  Probe
attaatcccctggcccaacccgtcatcta

SEQ ID NO: 17513 - DNA, 30 bp, Artificial Sequence; identical to SEQ ID NO: 3877
  Probe

SEQ ID NO: 17514 - DNA, 50 bp, Artificial Sequence; identical to SEQ ID NO: 420
  Probe

SEQ ID NO: 17515 - DNA, 50 bp, Artificial Sequence; identical to SEQ ID NO: 421
  Probe

SEQ ID NO: 17516 - DNA, 33 bp, Artificial Sequence
  Probe
attcaaaggttccgggttcgagtcccggcggag

SEQ ID NO: 17517 - DNA, 34 bp, Artificial Sequence
  Probe
attcaaaggttccgggttcgagtcccggcggagt

SEQ ID NO: 17518 - DNA, 36 bp, Artificial Sequence
  Probe
attcaaaggttccgggttcgagtcccggcggagtcg

SEQ ID NO: 17519 - DNA, 39 bp, Artificial Sequence
  Probe
attcaaaggttccgggttcgagtcccggcggagtcgtaa

SEQ ID NO: 17520 - DNA, 34 bp, Artificial Sequence
  Probe
attcaaaggttgtgggttcgagtcccaccagagt

SEQ ID NO: 17521 - DNA, 36 bp, Artificial Sequence
  Probe
attcaaaggttgtgggttcgagtcccaccagagtcg

SEQ ID NO: 17522 - DNA, 45 bp, Artificial Sequence
  Probe
attcccattcttgcgacccgggttcgattcccgggcggcgcactt

SEQ ID NO: 17523 - DNA, 19 bp, Artificial Sequence
  Probe
attccccgacggggaggca

SEQ ID NO: 17524 - DNA, 19 bp, Artificial Sequence
  Probe
attcccggccaacgcaagt

SEQ ID NO: 17525 - DNA, 19 bp, Artificial Sequence
  Probe
attcccggccaacgcagtg

SEQ ID NO: 17526 - DNA, 19 bp, Artificial Sequence
  Probe
attcccggcccatgcagca

SEQ ID NO: 17527 - DNA, 19 bp, Artificial Sequence
  Probe
attccggctcgaaggaagt

SEQ ID NO: 17528 - DNA, 19 bp, Artificial Sequence
  Probe
attccggctcgaaggagct

SEQ ID NO: 17529 - DNA, 49 bp, Artificial Sequence; identical to SEQ ID NO: 3881
  Probe

SEQ ID NO: 17530 - DNA, 50 bp, Artificial Sequence; identical to SEQ ID NO: 3882
  Probe

SEQ ID NO: 17531 - DNA, 30 bp, Artificial Sequence
  Probe
attcctggttttcacccaggtggcccgggt

SEQ ID NO: 17532 - DNA, 31 bp, Artificial Sequence
  Probe
attcctggttttcacccaggtggcccgggtt

SEQ ID NO: 17533 - DNA, 33 bp, Artificial Sequence; identical to SEQ ID NO: 3885
  Probe

SEQ ID NO: 17534 - DNA, 36 bp, Artificial Sequence; identical to SEQ ID NO: 3887
  Probe

SEQ ID NO: 17535 - DNA, 37 bp, Artificial Sequence; identical to SEQ ID NO: 3888
  Probe

SEQ ID NO: 17536 - DNA, 38 bp, Artificial Sequence
  Probe
attcgaagaagcagcttcaaacctgccggggcttctcc

SEQ ID NO: 17537 - DNA, 30 bp, Artificial Sequence
  Probe
attcggcgctctcaccgccgcggcccgggt

SEQ ID NO: 17538 - DNA, 36 bp, Artificial Sequence
  Probe
attctcagggatgggttcgattctcatagtcctaga

SEQ ID NO: 17539 - DNA, 38 bp, Artificial Sequence; identical to SEQ ID NO: 3893
  Probe

SEQ ID NO: 17540 - DNA, 30 bp, Artificial Sequence
  Probe
attctcgcctgccacgcgggaggcccgggt

SEQ ID NO: 17541 - DNA, 33 bp, Artificial Sequence
  Probe
attcttgcgacccgggttcgattcccgggcggc

SEQ ID NO: 17542 - DNA, 34 bp, Artificial Sequence
  Probe
attcttgcgacccgggttcgattcccgggcggcg

SEQ ID NO: 17543 - DNA, 36 bp, Artificial Sequence
  Probe
attcttgcgacccgggttcgattcccgggcggcgca

SEQ ID NO: 17544 - DNA, 38 bp, Artificial Sequence; identical to SEQ ID NO: 3895
  Probe

SEQ ID NO: 17545 - DNA, 39 bp, Artificial Sequence; identical to SEQ ID NO: 3896
  Probe

SEQ ID NO: 17546 - DNA, 39 bp, Artificial Sequence; identical to SEQ ID NO: 3898
  Probe

SEQ ID NO: 17547 - DNA, 42 bp, Artificial Sequence
  Probe
attgcaaattcgaagaagcagcttcaaacctgccggggcttc

SEQ ID NO: 17548 - DNA, 43 bp, Artificial Sequence; identical to SEQ ID NO: 3905
  Probe

SEQ ID NO: 17549 - DNA, 44 bp, Artificial Sequence; identical to SEQ ID NO: 3906
  Probe

SEQ ID NO: 17550 - DNA, 19 bp, Artificial Sequence
  Probe
attggtcgtggttgtagtc

SEQ ID NO: 17551 - DNA, 20 bp, Artificial Sequence
  Probe
attggtcgtggttgtagtcc

SEQ ID NO: 17552 - DNA, 23 bp, Artificial Sequence
  Probe
attggtcgtggttgtagtccgtg

SEQ ID NO: 17553 - DNA, 26 bp, Artificial Sequence
  Probe
attggtcgtggttgtagtccgtgcga

SEQ ID NO: 17554 - DNA, 30 bp, Artificial Sequence; identical to SEQ ID NO: 9429
  Probe

SEQ ID NO: 17555 - DNA, 32 bp, Artificial Sequence
  Probe
attggtcgtggttgtagtccgtgcgagaataa

SEQ ID NO: 17556 - DNA, 33 bp, Artificial Sequence; identical to SEQ ID NO: 3910
  Probe

SEQ ID NO: 17557 - DNA, 34 bp, Artificial Sequence; identical to SEQ ID NO: 3911
  Probe

SEQ ID NO: 17558 - DNA, 23 bp, Artificial Sequence
  Probe
attggtggttcagtggtagaatt

SEQ ID NO: 17559 - DNA, 25 bp, Artificial Sequence
  Probe
attggtggttcagtggtagaattct

SEQ ID NO: 17560 - DNA, 26 bp, Artificial Sequence
  Probe
attggtggttcagtggtagaattctc

SEQ ID NO: 17561 - DNA, 27 bp, Artificial Sequence
  Probe
attggtggttcagtggtagaattctcg

SEQ ID NO: 17562 - DNA, 28 bp, Artificial Sequence
  Probe
attggtggttcagtggtagaattctcgc

SEQ ID NO: 17563 - DNA, 29 bp, Artificial Sequence
  Probe
attggtggttcagtggtagaattctcgcc

SEQ ID NO: 17564 - DNA, 30 bp, Artificial Sequence; identical to SEQ ID NO: 3916
  Probe

SEQ ID NO: 17565 - DNA, 31 bp, Artificial Sequence; identical to SEQ ID NO: 3917
  Probe

SEQ ID NO: 17566 - DNA, 32 bp, Artificial Sequence
  Probe
attggtggttcagtggtagaattctcgcctcc

SEQ ID NO: 17567 - DNA, 33 bp, Artificial Sequence; identical to SEQ ID NO: 3918
  Probe

SEQ ID NO: 17568 - DNA, 31 bp, Artificial Sequence; identical to SEQ ID NO: 3919
  Probe

SEQ ID NO: 17569 - DNA, 32 bp, Artificial Sequence; identical to SEQ ID NO: 3920
  Probe

SEQ ID NO: 17570 - DNA, 33 bp, Artificial Sequence; identical to SEQ ID NO: 3921
  Probe

SEQ ID NO: 17571 - DNA, 34 bp, Artificial Sequence; identical to SEQ ID NO: 3922
  Probe

SEQ ID NO: 17572 - DNA, 36 bp, Artificial Sequence
  Probe
attggtggttcagtggtagaattctcgcctgccacg

SEQ ID NO: 17573 - DNA, 38 bp, Artificial Sequence
  Probe
attggtggttcagtggtagaattctcgcctgccacgcg

SEQ ID NO: 17574 - DNA, 18 bp, Artificial Sequence
  Probe
attgtgaatctgacaaca

SEQ ID NO: 17575 - DNA, 31 bp, Artificial Sequence; identical to SEQ ID NO: 3923
  Probe

SEQ ID NO: 17576 - DNA, 34 bp, Artificial Sequence; identical to SEQ ID NO: 3926
  Probe

SEQ ID NO: 17577 - DNA, 43 bp, Artificial Sequence; identical to SEQ ID NO: 3930
  Probe

SEQ ID NO: 17578 - DNA, 44 bp, Artificial Sequence; identical to SEQ ID NO: 3931
  Probe

SEQ ID NO: 17579 - DNA, 45 bp, Artificial Sequence; identical to SEQ ID NO: 3932
  Probe

SEQ ID NO: 17580 - DNA, 50 bp, Artificial Sequence; identical to SEQ ID NO: 3934
  Probe

SEQ ID NO: 17581 - DNA, 20 bp, Artificial Sequence
  Probe
atttcaacttaacttgaccg

SEQ ID NO: 17582 - DNA, 22 bp, Artificial Sequence
  Probe
atttcaacttaacttgaccgct

SEQ ID NO: 17583 - DNA, 24 bp, Artificial Sequence
  Probe
atttcaacttaacttgaccgctct

SEQ ID NO: 17584 - DNA, 26 bp, Artificial Sequence
  Probe
atttcaacttaacttgaccgctctga

SEQ ID NO: 17585 - DNA, 27 bp, Artificial Sequence
  Probe
atttcaacttaacttgaccgctctgag

SEQ ID NO: 17586 - DNA, 28 bp, Artificial Sequence
  Probe
atttcaacttaacttgaccgctctgagc

SEQ ID NO: 17587 - DNA, 29 bp, Artificial Sequence
  Probe
atttcaacttaacttgaccgctctgagct

SEQ ID NO: 17588 - DNA, 36 bp, Artificial Sequence
  Probe
atttcgactcattaaattatgataatcatatttacc

SEQ ID NO: 17589 - DNA, 41 bp, Artificial Sequence
  Probe
atttcgactcattaaattatgataatcatatttaccaaatg

SEQ ID NO: 17590 - DNA, 26 bp, Artificial Sequence
  Probe
caaaaattttggtgcaactccaaata

SEQ ID NO: 17591 - DNA, 35 bp, Artificial Sequence
  Probe
caaaaattttggtgcaactccaaataaaagtaata

SEQ ID NO: 17592 - DNA, 26 bp, Artificial Sequence
  Probe
caaaacatcagattgtgaatctgaca

SEQ ID NO: 17593 - DNA, 27 bp, Artificial Sequence
  Probe
caaaacatcagattgtgaatctgacaa

SEQ ID NO: 17594 - DNA, 28 bp, Artificial Sequence
  Probe
caaaacatcagattgtgaatctgacaac

SEQ ID NO: 17595 - DNA, 29 bp, Artificial Sequence
  Probe
caaaacatcagattgtgaatctgacaaca

SEQ ID NO: 17596 - DNA, 30 bp, Artificial Sequence; identical to SEQ ID NO: 3948
  Probe

SEQ ID NO: 17597 - DNA, 31 bp, Artificial Sequence
  Probe
caaaacatcagattgtgaatctgacaacaga

SEQ ID NO: 17598 - DNA, 32 bp, Artificial Sequence; identical to SEQ ID NO: 3949
  Probe

SEQ ID NO: 17599 - DNA, 33 bp, Artificial Sequence; identical to SEQ ID NO: 3950
  Probe

SEQ ID NO: 17600 - DNA, 34 bp, Artificial Sequence; identical to SEQ ID NO: 3951
  Probe

SEQ ID NO: 17601 - DNA, 35 bp, Artificial Sequence; identical to SEQ ID NO: 3952
  Probe

SEQ ID NO: 17602 - DNA, 44 bp, Artificial Sequence; identical to SEQ ID NO: 434
  Probe

SEQ ID NO: 17603 - DNA, 46 bp, Artificial Sequence; identical to SEQ ID NO: 436
  Probe

SEQ ID NO: 17604 - DNA, 49 bp, Artificial Sequence; identical to SEQ ID NO: 3955
  Probe

SEQ ID NO: 17605 - DNA, 39 bp, Artificial Sequence
  Probe
caaaacgaatgatttcgactcattaaattatgataatca

SEQ ID NO: 17606 - DNA, 49 bp, Artificial Sequence; identical to SEQ ID NO: 3957
  Probe

SEQ ID NO: 17607 - DNA, 50 bp, Artificial Sequence; identical to SEQ ID NO: 3958
  Probe

SEQ ID NO: 17608 - DNA, 16 bp, Artificial Sequence
  Probe
caaacccactccacct

SEQ ID NO: 17609 - DNA, 22 bp, Artificial Sequence
  Probe
caaagacaccccccacagttta

SEQ ID NO: 17610 - DNA, 25 bp, Artificial Sequence
  Probe
caaagacaccccccacagtttatgt

SEQ ID NO: 17611 - DNA, 28 bp, Artificial Sequence
  Probe
caaagacaccccccacagtttatgtagc

SEQ ID NO: 17612 - DNA, 29 bp, Artificial Sequence
  Probe
caaagacaccccccacagtttatgtagct

SEQ ID NO: 17613 - DNA, 30 bp, Artificial Sequence
  Probe
caaagacaccccccacagtttatgtagctt

SEQ ID NO: 17614 - DNA, 31 bp, Artificial Sequence; identical to SEQ ID NO: 3960
  Probe

SEQ ID NO: 17615 - DNA, 32 bp, Artificial Sequence
  Probe
caaagacaccccccacagtttatgtagcttac

SEQ ID NO: 17616 - DNA, 33 bp, Artificial Sequence; identical to SEQ ID NO: 3961
  Probe

SEQ ID NO: 17617 - DNA, 34 bp, Artificial Sequence
  Probe
caaagacaccccccacagtttatgtagcttacct

SEQ ID NO: 17618 - DNA, 36 bp, Artificial Sequence; identical to SEQ ID NO: 3962
  Probe

SEQ ID NO: 17619 - DNA, 38 bp, Artificial Sequence
  Probe
caaagacaccccccacagtttatgtagcttacctcctc

SEQ ID NO: 17620 - DNA, 39 bp, Artificial Sequence
  Probe
caaagacaccccccacagtttatgtagcttacctcctca

SEQ ID NO: 17621 - DNA, 41 bp, Artificial Sequence
  Probe
caaagacaccccccacagtttatgtagcttacctcctcaaa

SEQ ID NO: 17622 - DNA, 16 bp, Artificial Sequence
  Probe
caaagcaatacactga

SEQ ID NO: 17623 - DNA, 17 bp, Artificial Sequence
  Probe
caaagcaatacactgaa

SEQ ID NO: 17624 - DNA, 30 bp, Artificial Sequence
  Probe
caaagcaatacactgaaaatgtttagacgg

SEQ ID NO: 17625 - DNA, 36 bp, Artificial Sequence
  Probe
caaagcaatacactgaaaatgtttagacgggctcac

SEQ ID NO: 17626 - DNA, 16 bp, Artificial Sequence
  Probe
caaagcacccaactta

SEQ ID NO: 17627 - DNA, 17 bp, Artificial Sequence
  Probe
caaagcacccaacttac

SEQ ID NO: 17628 - DNA, 18 bp, Artificial Sequence
  Probe
caaagcacccaacttaca

SEQ ID NO: 17629 - DNA, 20 bp, Artificial Sequence
  Probe
caaagcacccaacttacact

SEQ ID NO: 17630 - DNA, 22 bp, Artificial Sequence
  Probe
caaagcacccaacttacactta

SEQ ID NO: 17631 - DNA, 26 bp, Artificial Sequence
  Probe
caaagcacccaacttacacttaggag

SEQ ID NO: 17632 - DNA, 27 bp, Artificial Sequence
  Probe
caaagcacccaacttacacttaggaga

SEQ ID NO: 17633 - DNA, 28 bp, Artificial Sequence
  Probe
caaagcacccaacttacacttaggagat

SEQ ID NO: 17634 - DNA, 29 bp, Artificial Sequence
  Probe
caaagcacccaacttacacttaggagatt

SEQ ID NO: 17635 - DNA, 30 bp, Artificial Sequence
  Probe
caaagcacccaacttacacttaggagattt

SEQ ID NO: 17636 - DNA, 31 bp, Artificial Sequence
  Probe
caaagcacccaacttacacttaggagatttc

SEQ ID NO: 17637 - DNA, 32 bp, Artificial Sequence; identical to SEQ ID NO: 3981
  Probe

SEQ ID NO: 17638 - DNA, 33 bp, Artificial Sequence; identical to SEQ ID NO: 3982
  Probe

SEQ ID NO: 17639 - DNA, 34 bp, Artificial Sequence; identical to SEQ ID NO: 3983
  Probe

SEQ ID NO: 17640 - DNA, 35 bp, Artificial Sequence; identical to SEQ ID NO: 3984
  Probe

SEQ ID NO: 17641 - DNA, 36 bp, Artificial Sequence; identical to SEQ ID NO: 3985
  Probe

SEQ ID NO: 17642 - DNA, 37 bp, Artificial Sequence; identical to SEQ ID NO: 443
  Probe

SEQ ID NO: 17643 - DNA, 31 bp, Artificial Sequence
  Probe
caaaggttgtgggttcgagtcccaccagagt

SEQ ID NO: 17644 - DNA, 31 bp, Artificial Sequence; identical to SEQ ID NO: 3988
  Probe

SEQ ID NO: 17645 - DNA, 29 bp, Artificial Sequence
  Probe
caaatcacgtcggggtcagcggctatttt

SEQ ID NO: 17646 - DNA, 21 bp, Artificial Sequence
  Probe
caaatcccggacgagccccct

SEQ ID NO: 17647 - DNA, 21 bp, Artificial Sequence
  Probe
caaatccgggtgccccctcaa

SEQ ID NO: 17648 - DNA, 38 bp, Artificial Sequence
  Probe
caaattcgaagaagcagcttcaaacctgccggggcttc

SEQ ID NO: 17649 - DNA, 40 bp, Artificial Sequence; identical to SEQ ID NO: 3995
  Probe

SEQ ID NO: 17650 - DNA, 21 bp, Artificial Sequence
  Probe
caacacctctttacagtgaaa

SEQ ID NO: 17651 - DNA, 22 bp, Artificial Sequence
  Probe
caacacctctttacagtgaaat

SEQ ID NO: 17652 - DNA, 29 bp, Artificial Sequence
  Probe
caacagaggcttacgaccccttatttacc

SEQ ID NO: 17653 - DNA, 30 bp, Artificial Sequence; identical to SEQ ID NO: 4001
  Probe

SEQ ID NO: 17654 - DNA, 31 bp, Artificial Sequence; identical to SEQ ID NO: 4002
  Probe

SEQ ID NO: 17655 - DNA, 32 bp, Artificial Sequence; identical to SEQ ID NO: 4003
  Probe

SEQ ID NO: 17656 - DNA, 15 bp, Artificial Sequence
  Probe
caaccccatggcctc

SEQ ID NO: 17657 - DNA, 28 bp, Artificial Sequence
  Probe
caaccccatggcctccatgactttttca

SEQ ID NO: 17658 - DNA, 15 bp, Artificial Sequence
  Probe
caacccgtcatctac

SEQ ID NO: 17659 - DNA, 27 bp, Artificial Sequence
  Probe
caaccgagcgtccaagctctttccatt

SEQ ID NO: 17660 - DNA, 28 bp, Artificial Sequence
  Probe
caaccgagcgtccaagctctttccattt

SEQ ID NO: 17661 - DNA, 29 bp, Artificial Sequence
  Probe
caaccgagcgtccaagctctttccatttt

SEQ ID NO: 17662 - DNA, 30 bp, Artificial Sequence
  Probe
caaccgagcgtccaagctctttccattttt

SEQ ID NO: 17663 - DNA, 32 bp, Artificial Sequence; identical to SEQ ID NO: 4008
  Probe

SEQ ID NO: 17664 - DNA, 32 bp, Artificial Sequence; identical to SEQ ID NO: 4010
  Probe

SEQ ID NO: 17665 - DNA, 24 bp, Artificial Sequence
  Probe
caaccttcagctatagggtggaga

SEQ ID NO: 17666 - DNA, 22 bp, Artificial Sequence
  Probe
caactaaatactaccgtatggc

SEQ ID NO: 17667 - DNA, 16 bp, Artificial Sequence
  Probe
caacttaacttgaccg

SEQ ID NO: 17668 - DNA, 17 bp, Artificial Sequence
  Probe
caacttaacttgaccgc

SEQ ID NO: 17669 - DNA, 18 bp, Artificial Sequence
  Probe
caacttaacttgaccgct

SEQ ID NO: 17670 - DNA, 19 bp, Artificial Sequence
  Probe
caacttaacttgaccgctc

SEQ ID NO: 17671 - DNA, 20 bp, Artificial Sequence
  Probe
caacttaacttgaccgctct

SEQ ID NO: 17672 - DNA, 21 bp, Artificial Sequence
  Probe
caacttaacttgaccgctctg

SEQ ID NO: 17673 - DNA, 22 bp, Artificial Sequence
  Probe
caacttaacttgaccgctctga

SEQ ID NO: 17674 - DNA, 23 bp, Artificial Sequence
  Probe
caacttaacttgaccgctctgag

SEQ ID NO: 17675 - DNA, 24 bp, Artificial Sequence
  Probe
caacttaacttgaccgctctgagc

SEQ ID NO: 17676 - DNA, 25 bp, Artificial Sequence
  Probe
caacttaacttgaccgctctgagct

SEQ ID NO: 17677 - DNA, 16 bp, Artificial Sequence
  Probe
caacttacacttagga

SEQ ID NO: 17678 - DNA, 17 bp, Artificial Sequence
  Probe
caacttacacttaggag

SEQ ID NO: 17679 - DNA, 18 bp, Artificial Sequence
  Probe
caacttacacttaggaga

SEQ ID NO: 17680 - DNA, 19 bp, Artificial Sequence
  Probe
caacttacacttaggagat

SEQ ID NO: 17681 - DNA, 20 bp, Artificial Sequence
  Probe
caacttacacttaggagatt

SEQ ID NO: 17682 - DNA, 21 bp, Artificial Sequence
  Probe
caacttacacttaggagattt

SEQ ID NO: 17683 - DNA, 22 bp, Artificial Sequence
  Probe
caacttacacttaggagatttc

SEQ ID NO: 17684 - DNA, 23 bp, Artificial Sequence
  Probe
caacttacacttaggagatttca

SEQ ID NO: 17685 - DNA, 27 bp, Artificial Sequence
  Probe
caacttacacttaggagatttcaactt

SEQ ID NO: 17686 - DNA, 28 bp, Artificial Sequence
  Probe
caacttacacttaggagatttcaactta

SEQ ID NO: 17687 - DNA, 29 bp, Artificial Sequence
  Probe
caacttacacttaggagatttcaacttaa

SEQ ID NO: 17688 - DNA, 31 bp, Artificial Sequence
  Probe
caacttacacttaggagatttcaacttaact

SEQ ID NO: 17689 - DNA, 32 bp, Artificial Sequence
  Probe
caacttacacttaggagatttcaacttaactt

SEQ ID NO: 17690 - DNA, 33 bp, Artificial Sequence; identical to SEQ ID NO: 4024
  Probe

SEQ ID NO: 17691 - DNA, 35 bp, Artificial Sequence; identical to SEQ ID NO: 4025
  Probe

SEQ ID NO: 17692 - DNA, 36 bp, Artificial Sequence
  Probe
caacttacacttaggagatttcaacttaacttgacc

SEQ ID NO: 17693 - DNA, 37 bp, Artificial Sequence; identical to SEQ ID NO: 4026
  Probe

SEQ ID NO: 17694 - DNA, 38 bp, Artificial Sequence
  Probe
caacttacacttaggagatttcaacttaacttgaccgc

SEQ ID NO: 17695 - DNA, 39 bp, Artificial Sequence; identical to SEQ ID NO: 4027
  Probe

SEQ ID NO: 17696 - DNA, 41 bp, Artificial Sequence; identical to SEQ ID NO: 4028
  Probe

SEQ ID NO: 17697 - DNA, 42 bp, Artificial Sequence
  Probe
caacttacacttaggagatttcaacttaacttgaccgctctg

SEQ ID NO: 17698 - DNA, 43 bp, Artificial Sequence; identical to SEQ ID NO: 4029
  Probe

SEQ ID NO: 17699 - DNA, 44 bp, Artificial Sequence; identical to SEQ ID NO: 4030
  Probe

SEQ ID NO: 17700 - DNA, 45 bp, Artificial Sequence; identical to SEQ ID NO: 4031
  Probe

SEQ ID NO: 17701 - DNA, 46 bp, Artificial Sequence; identical to SEQ ID NO: 4032
  Probe

SEQ ID NO: 17702 - DNA, 18 bp, Artificial Sequence
  Probe
caagaacagggtttgtta

SEQ ID NO: 17703 - DNA, 16 bp, Artificial Sequence
  Probe
caagaactgctaactc

SEQ ID NO: 17704 - DNA, 17 bp, Artificial Sequence
  Probe
caagaactgctaactca

SEQ ID NO: 17705 - DNA, 19 bp, Artificial Sequence
  Probe
caagaactgctaactcatg

SEQ ID NO: 17706 - DNA, 20 bp, Artificial Sequence
  Probe
caagaactgctaactcatgc

SEQ ID NO: 17707 - DNA, 21 bp, Artificial Sequence
  Probe
caagaactgctaactcatgcc

SEQ ID NO: 17708 - DNA, 22 bp, Artificial Sequence
  Probe
caagaactgctaactcatgccc

SEQ ID NO: 17709 - DNA, 23 bp, Artificial Sequence
  Probe
caagaactgctaactcatgcccc

SEQ ID NO: 17710 - DNA, 25 bp, Artificial Sequence
  Probe
caagaactgctaactcatgccccca

SEQ ID NO: 17711 - DNA, 26 bp, Artificial Sequence
  Probe
caagaactgctaactcatgcccccat

SEQ ID NO: 17712 - DNA, 27 bp, Artificial Sequence
  Probe
caagaactgctaactcatgcccccatg

SEQ ID NO: 17713 - DNA, 28 bp, Artificial Sequence
  Probe
caagaactgctaactcatgcccccatgt

SEQ ID NO: 17714 - DNA, 29 bp, Artificial Sequence
  Probe
caagaactgctaactcatgcccccatgtc

SEQ ID NO: 17715 - DNA, 31 bp, Artificial Sequence; identical to SEQ ID NO: 4039
  Probe

SEQ ID NO: 17716 - DNA, 33 bp, Artificial Sequence
  Probe
caagaactgctaactcatgcccccatgtctaac

SEQ ID NO: 17717 - DNA, 35 bp, Artificial Sequence
  Probe
caagaactgctaactcatgcccccatgtctaacaa

SEQ ID NO: 17718 - DNA, 36 bp, Artificial Sequence
  Probe
caagaactgctaactcatgcccccatgtctaacaac

SEQ ID NO: 17719 - DNA, 42 bp, Artificial Sequence; identical to SEQ ID NO: 449
  Probe

SEQ ID NO: 17720 - DNA, 44 bp, Artificial Sequence; identical to SEQ ID NO: 450
  Probe

SEQ ID NO: 17721 - DNA, 45 bp, Artificial Sequence; identical to SEQ ID NO: 451
  Probe

SEQ ID NO: 17722 - DNA, 49 bp, Artificial Sequence; identical to SEQ ID NO: 4043
  Probe

SEQ ID NO: 17723 - DNA, 50 bp, Artificial Sequence; identical to SEQ ID NO: 4044
  Probe

SEQ ID NO: 17724 - DNA, 20 bp, Artificial Sequence
  Probe
caagcagttgacccgggttc

SEQ ID NO: 17725 - DNA, 31 bp, Artificial Sequence; identical to SEQ ID NO: 457
  Probe

SEQ ID NO: 17726 - DNA, 40 bp, Artificial Sequence
  Probe
caagcagttgacccgggttcgattcccggccaacgcaagt

SEQ ID NO: 17727 - DNA, 39 bp, Artificial Sequence
  Probe
caagcagttgacccgggttcgattcccggccaacgcagc

SEQ ID NO: 17728 - DNA, 40 bp, Artificial Sequence
  Probe
caagcagttgacccgggttcgattcccggccaacgcagtg

SEQ ID NO: 17729 - DNA, 35 bp, Artificial Sequence
  Probe
caaggtcgcgggttcgatccccgtacgggccacga

SEQ ID NO: 17730 - DNA, 35 bp, Artificial Sequence
  Probe
caaggtcgcgggttcgatccccgtacgggccactg

SEQ ID NO: 17731 - DNA, 35 bp, Artificial Sequence
  Probe
caaggtcgcgggttcgatccccgtactggccacgt

SEQ ID NO: 17732 - DNA, 21 bp, Artificial Sequence
  Probe
caagtccctgttcgggcggca

SEQ ID NO: 17733 - DNA, 32 bp, Artificial Sequence
  Probe
caatacactgaaaatgtttagacgggctcaca

SEQ ID NO: 17734 - DNA, 50 bp, Artificial Sequence; identical to SEQ ID NO: 4055
  Probe

SEQ ID NO: 17735 - DNA, 32 bp, Artificial Sequence
  Probe
caatccccggcatctccaaatcagccgacgtt

SEQ ID NO: 17736 - DNA, 33 bp, Artificial Sequence
  Probe
caatccccggcatctccaaatcagccgacgttt

SEQ ID NO: 17737 - DNA, 20 bp, Artificial Sequence
  Probe
caatgcaacgatgacgtttt

SEQ ID NO: 17738 - DNA, 23 bp, Artificial Sequence
  Probe
caatgggggttccccgcgcaggt

SEQ ID NO: 17739 - DNA, 23 bp, Artificial Sequence
  Probe
caatggggtctccccgcgcaggt

SEQ ID NO: 17740 - DNA, 23 bp, Artificial Sequence
  Probe
caatggggtttccccgcacaggt

SEQ ID NO: 17741 - DNA, 33 bp, Artificial Sequence; identical to SEQ ID NO: 4058
  Probe

SEQ ID NO: 17742 - DNA, 38 bp, Artificial Sequence; identical to SEQ ID NO: 4060
  Probe

SEQ ID NO: 17743 - DNA, 39 bp, Artificial Sequence; identical to SEQ ID NO: 4061
  Probe

SEQ ID NO: 17744 - DNA, 21 bp, Artificial Sequence
  Probe
caattcccggtcagggaacca

SEQ ID NO: 17745 - DNA, 21 bp, Artificial Sequence
  Probe
caattcctcttcttaacaaca

SEQ ID NO: 17746 - DNA, 21 bp, Artificial Sequence
  Probe
cacaagaactgctaactcatg

SEQ ID NO: 17747 - DNA, 23 bp, Artificial Sequence
  Probe
cacaagaactgctaactcatgcc

SEQ ID NO: 17748 - DNA, 49 bp, Artificial Sequence; identical to SEQ ID NO: 4093
  Probe

SEQ ID NO: 17749 - DNA, 50 bp, Artificial Sequence; identical to SEQ ID NO: 466
  Probe

SEQ ID NO: 17750 - DNA, 18 bp, Artificial Sequence
  Probe
cacacccacccaagaaca

SEQ ID NO: 17751 - DNA, 25 bp, Artificial Sequence
  Probe
cacacccacccaagaacagggtttg

SEQ ID NO: 17752 - DNA, 26 bp, Artificial Sequence
  Probe
cacacccacccaagaacagggtttgt

SEQ ID NO: 17753 - DNA, 27 bp, Artificial Sequence
  Probe
cacacccacccaagaacagggtttgtt

SEQ ID NO: 17754 - DNA, 28 bp, Artificial Sequence
  Probe
cacacccacccaagaacagggtttgtta

SEQ ID NO: 17755 - DNA, 24 bp, Artificial Sequence
  Probe
cacacctcagaaggtctcactttt

SEQ ID NO: 17756 - DNA, 20 bp, Artificial Sequence
  Probe
cacacgcgaaaggtccccgg

SEQ ID NO: 17757 - DNA, 21 bp, Artificial Sequence
  Probe
cacacgcgaaaggtccccggt

SEQ ID NO: 17758 - DNA, 22 bp, Artificial Sequence
  Probe
cacacgcgaaaggtccccggtt

SEQ ID NO: 17759 - DNA, 20 bp, Artificial Sequence
  Probe
cacacggggcacaataattt

SEQ ID NO: 17760 - DNA, 18 bp, Artificial Sequence
  Probe
cacatcaccccataaaca

SEQ ID NO: 17761 - DNA, 20 bp, Artificial Sequence
  Probe
cacatcaccccataaacaaa

SEQ ID NO: 17762 - DNA, 21 bp, Artificial Sequence
  Probe
cacatcaccccataaacaaat

SEQ ID NO: 17763 - DNA, 30 bp, Artificial Sequence; identical to SEQ ID NO: 469
  Probe

SEQ ID NO: 17764 - DNA, 31 bp, Artificial Sequence; identical to SEQ ID NO: 470
  Probe

SEQ ID NO: 17765 - DNA, 32 bp, Artificial Sequence; identical to SEQ ID NO: 471
  Probe

SEQ ID NO: 17766 - DNA, 33 bp, Artificial Sequence; identical to SEQ ID NO: 472
  Probe

SEQ ID NO: 17767 - DNA, 22 bp, Artificial Sequence
  Probe
cacccaacttacacttaggaga

SEQ ID NO: 17768 - DNA, 22 bp, Artificial Sequence
  Probe
cacctcagaaggtctcactttt

SEQ ID NO: 17769 - DNA, 38 bp, Artificial Sequence
  Probe
cacgcagaaggtcctgggttcgagccccagtggaacca

SEQ ID NO: 17770 - DNA, 41 bp, Artificial Sequence; identical to SEQ ID NO: 4122
  Probe

SEQ ID NO: 17771 - DNA, 20 bp, Artificial Sequence
  Probe
cacgcgaaaggtccccggtt

SEQ ID NO: 17772 - DNA, 18 bp, Artificial Sequence
  Probe
cacgcgggagaccggggt

SEQ ID NO: 17773 - DNA, 33 bp, Artificial Sequence; identical to SEQ ID NO: 476
  Probe

SEQ ID NO: 17774 - DNA, 35 bp, Artificial Sequence
  Probe
cacgcgggagaccggggttcaattccccgacgggg

SEQ ID NO: 17775 - DNA, 37 bp, Artificial Sequence; identical to SEQ ID NO: 478
  Probe

SEQ ID NO: 17776 - DNA, 40 bp, Artificial Sequence; identical to SEQ ID NO: 4131
  Probe

SEQ ID NO: 17777 - DNA, 30 bp, Artificial Sequence; identical to SEQ ID NO: 479
  Probe

SEQ ID NO: 17778 - DNA, 31 bp, Artificial Sequence; identical to SEQ ID NO: 480
  Probe

SEQ ID NO: 17779 - DNA, 32 bp, Artificial Sequence; identical to SEQ ID NO: 481
  Probe

SEQ ID NO: 17780 - DNA, 36 bp, Artificial Sequence; identical to SEQ ID NO: 485
  Probe

SEQ ID NO: 17781 - DNA, 38 bp, Artificial Sequence; identical to SEQ ID NO: 4137
  Probe

SEQ ID NO: 17782 - DNA, 40 bp, Artificial Sequence; identical to SEQ ID NO: 4139
  Probe

SEQ ID NO: 17783 - DNA, 50 bp, Artificial Sequence; identical to SEQ ID NO: 4143
  Probe

SEQ ID NO: 17784 - DNA, 40 bp, Artificial Sequence; identical to SEQ ID NO: 4145
  Probe

SEQ ID NO: 17785 - DNA, 40 bp, Artificial Sequence; identical to SEQ ID NO: 4147
  Probe

SEQ ID NO: 17786 - DNA, 38 bp, Artificial Sequence; identical to SEQ ID NO: 4149
  Probe

SEQ ID NO: 17787 - DNA, 39 bp, Artificial Sequence; identical to SEQ ID NO: 4154
  Probe

SEQ ID NO: 17788 - DNA, 40 bp, Artificial Sequence; identical to SEQ ID NO: 4155
  Probe

SEQ ID NO: 17789 - DNA, 41 bp, Artificial Sequence; identical to SEQ ID NO: 4156
  Probe

SEQ ID NO: 17790 - DNA, 46 bp, Artificial Sequence; identical to SEQ ID NO: 4158
  Probe

SEQ ID NO: 17791 - DNA, 48 bp, Artificial Sequence; identical to SEQ ID NO: 4160
  Probe

SEQ ID NO: 17792 - DNA, 49 bp, Artificial Sequence; identical to SEQ ID NO: 4161
  Probe

SEQ ID NO: 17793 - DNA, 50 bp, Artificial Sequence; identical to SEQ ID NO: 4162
  Probe

SEQ ID NO: 17794 - DNA, 40 bp, Artificial Sequence; identical to SEQ ID NO: 4165
  Probe

SEQ ID NO: 17795 - DNA, 26 bp, Artificial Sequence
  Probe
cactctggactctgaatccagcgatc

SEQ ID NO: 17796 - DNA, 27 bp, Artificial Sequence
  Probe
cactctggactctgaatccagcgatcc

SEQ ID NO: 17797 - DNA, 28 bp, Artificial Sequence
  Probe
cactctggactctgaatccagcgatccg

SEQ ID NO: 17798 - DNA, 30 bp, Artificial Sequence; identical to SEQ ID NO: 4174
  Probe

SEQ ID NO: 17799 - DNA, 27 bp, Artificial Sequence
  Probe
cactctggactttgaatccagcgatcc

SEQ ID NO: 17800 - DNA, 30 bp, Artificial Sequence
  Probe
cactctggactttgaatccagcgatccgag

SEQ ID NO: 17801 - DNA, 16 bp, Artificial Sequence
  Probe
cactgtaaagctaact

SEQ ID NO: 17802 - DNA, 29 bp, Artificial Sequence
  Probe
cactgtaaagctaacttagcattaacctt

SEQ ID NO: 17803 - DNA, 31 bp, Artificial Sequence; identical to SEQ ID NO: 494
  Probe

SEQ ID NO: 17804 - DNA, 32 bp, Artificial Sequence; identical to SEQ ID NO: 495
  Probe

SEQ ID NO: 17805 - DNA, 33 bp, Artificial Sequence; identical to SEQ ID NO: 4180
  Probe

SEQ ID NO: 17806 - DNA, 34 bp, Artificial Sequence; identical to SEQ ID NO: 496
  Probe

SEQ ID NO: 17807 - DNA, 35 bp, Artificial Sequence; identical to SEQ ID NO: 497
  Probe

SEQ ID NO: 17808 - DNA, 36 bp, Artificial Sequence; identical to SEQ ID NO: 498
  Probe

SEQ ID NO: 17809 - DNA, 37 bp, Artificial Sequence; identical to SEQ ID NO: 4181
  Probe

SEQ ID NO: 17810 - DNA, 38 bp, Artificial Sequence
  Probe
cactgtaaagctaacttagcattaaccttttaagttaa

SEQ ID NO: 17811 - DNA, 39 bp, Artificial Sequence; identical to SEQ ID NO: 499
  Probe

SEQ ID NO: 17812 - DNA, 41 bp, Artificial Sequence; identical to SEQ ID NO: 500
  Probe

SEQ ID NO: 17813 - DNA, 42 bp, Artificial Sequence; identical to SEQ ID NO: 4183
  Probe

SEQ ID NO: 17814 - DNA, 43 bp, Artificial Sequence; identical to SEQ ID NO: 501
  Probe

SEQ ID NO: 17815 - DNA, 44 bp, Artificial Sequence; identical to SEQ ID NO: 4184
  Probe

SEQ ID NO: 17816 - DNA, 49 bp, Artificial Sequence; identical to SEQ ID NO: 4187
  Probe

SEQ ID NO: 17817 - DNA, 30 bp, Artificial Sequence; identical to SEQ ID NO: 4195
  Probe

SEQ ID NO: 17818 - DNA, 33 bp, Artificial Sequence; identical to SEQ ID NO: 4198
  Probe

SEQ ID NO: 17819 - DNA, 34 bp, Artificial Sequence; identical to SEQ ID NO: 4199
  Probe

SEQ ID NO: 17820 - DNA, 37 bp, Artificial Sequence; identical to SEQ ID NO: 4202
  Probe

SEQ ID NO: 17821 - DNA, 38 bp, Artificial Sequence; identical to SEQ ID NO: 4203
  Probe

SEQ ID NO: 17822 - DNA, 39 bp, Artificial Sequence; identical to SEQ ID NO: 4204
  Probe

SEQ ID NO: 17823 - DNA, 40 bp, Artificial Sequence; identical to SEQ ID NO: 4205
  Probe

SEQ ID NO: 17824 - DNA, 16 bp, Artificial Sequence
  Probe
cagaagattccaggtt

SEQ ID NO: 17825 - DNA, 34 bp, Artificial Sequence
  Probe
cagaagattccaggttcgactcctggctggctcg

SEQ ID NO: 17826 - DNA, 34 bp, Artificial Sequence; identical to SEQ ID NO: 4212
  Probe

SEQ ID NO: 17827 - DNA, 36 bp, Artificial Sequence
  Probe
cagaagattctaggttcgactcctggctggctcgcg

SEQ ID NO: 17828 - DNA, 37 bp, Artificial Sequence; identical to SEQ ID NO: 4213
  Probe

SEQ ID NO: 17829 - DNA, 36 bp, Artificial Sequence
  Probe
cagaagattctaggttcgactcctggctggctcgct

SEQ ID NO: 17830 - DNA, 31 bp, Artificial Sequence; identical to SEQ ID NO: 4215
  Probe

SEQ ID NO: 17831 - DNA, 33 bp, Artificial Sequence; identical to SEQ ID NO: 4216
  Probe

SEQ ID NO: 17832 - DNA, 37 bp, Artificial Sequence; identical to SEQ ID NO: 4218
  Probe

SEQ ID NO: 17833 - DNA, 16 bp, Artificial Sequence
  Probe
cagaagattgcaggtt

SEQ ID NO: 17834 - DNA, 30 bp, Artificial Sequence; identical to SEQ ID NO: 9540
  Probe

SEQ ID NO: 17835 - DNA, 37 bp, Artificial Sequence
  Probe
cagaagattgcaggttcgagtcctgccgcggtcgaag

SEQ ID NO: 17836 - DNA, 31 bp, Artificial Sequence
  Probe
cagaaggtcctgggttcgagccccagtggaa

SEQ ID NO: 17837 - DNA, 32 bp, Artificial Sequence
  Probe
cagaaggtcctgggttcgagccccagtggaac

SEQ ID NO: 17838 - DNA, 34 bp, Artificial Sequence
  Probe
cagaaggtcctgggttcgagccccagtggaacca

SEQ ID NO: 17839 - DNA, 36 bp, Artificial Sequence; identical to SEQ ID NO: 4221
  Probe

SEQ ID NO: 17840 - DNA, 37 bp, Artificial Sequence; identical to SEQ ID NO: 4222
  Probe

SEQ ID NO: 17841 - DNA, 16 bp, Artificial Sequence
  Probe
cagaaggtctcacttt

SEQ ID NO: 17842 - DNA, 17 bp, Artificial Sequence
  Probe
cagaaggtctcactttt

SEQ ID NO: 17843 - DNA, 16 bp, Artificial Sequence
  Probe
cagaccaagagccttc

SEQ ID NO: 17844 - DNA, 29 bp, Artificial Sequence
  Probe
cagaccaagagccttcaaagccctcagta

SEQ ID NO: 17845 - DNA, 33 bp, Artificial Sequence
  Probe
cagaccaagagccttcaaagccctcagtaagtt

SEQ ID NO: 17846 - DNA, 35 bp, Artificial Sequence; identical to SEQ ID NO: 4226
  Probe

SEQ ID NO: 17847 - DNA, 49 bp, Artificial Sequence; identical to SEQ ID NO: 4227
  Probe

SEQ ID NO: 17848 - DNA, 50 bp, Artificial Sequence; identical to SEQ ID NO: 514
  Probe

SEQ ID NO: 17849 - DNA, 21 bp, Artificial Sequence
  Probe
cagagaatagtttaaattaga

SEQ ID NO: 17850 - DNA, 22 bp, Artificial Sequence
  Probe
cagagaatagtttaaattagaa

SEQ ID NO: 17851 - DNA, 23 bp, Artificial Sequence
  Probe
cagagaatagtttaaattagaat

SEQ ID NO: 17852 - DNA, 25 bp, Artificial Sequence
  Probe
cagagaatagtttaaattagaatct

SEQ ID NO: 17853 - DNA, 26 bp, Artificial Sequence
  Probe
cagagaatagtttaaattagaatctt

SEQ ID NO: 17854 - DNA, 27 bp, Artificial Sequence
  Probe
cagagaatagtttaaattagaatctta

SEQ ID NO: 17855 - DNA, 28 bp, Artificial Sequence
  Probe
cagagaatagtttaaattagaatcttag

SEQ ID NO: 17856 - DNA, 29 bp, Artificial Sequence
  Probe
cagagaatagtttaaattagaatcttagc

SEQ ID NO: 17857 - DNA, 31 bp, Artificial Sequence; identical to SEQ ID NO: 520
  Probe

SEQ ID NO: 17858 - DNA, 32 bp, Artificial Sequence; identical to SEQ ID NO: 521
  Probe

SEQ ID NO: 17859 - DNA, 33 bp, Artificial Sequence; identical to SEQ ID NO: 522
  Probe

SEQ ID NO: 17860 - DNA, 34 bp, Artificial Sequence; identical to SEQ ID NO: 523
  Probe

SEQ ID NO: 17861 - DNA, 35 bp, Artificial Sequence; identical to SEQ ID NO: 4232
  Probe

SEQ ID NO: 17862 - DNA, 36 bp, Artificial Sequence; identical to SEQ ID NO: 4233
  Probe

SEQ ID NO: 17863 - DNA, 37 bp, Artificial Sequence; identical to SEQ ID NO: 4234
  Probe

SEQ ID NO: 17864 - DNA, 38 bp, Artificial Sequence; identical to SEQ ID NO: 4235
  Probe

SEQ ID NO: 17865 - DNA, 39 bp, Artificial Sequence; identical to SEQ ID NO: 4236
  Probe

SEQ ID NO: 17866 - DNA, 40 bp, Artificial Sequence; identical to SEQ ID NO: 524
  Probe

SEQ ID NO: 17867 - DNA, 50 bp, Artificial Sequence; identical to SEQ ID NO: 526
  Probe

SEQ ID NO: 17868 - DNA, 20 bp, Artificial Sequence
  Probe
cagagcccggtaatcgcata

SEQ ID NO: 17869 - DNA, 27 bp, Artificial Sequence
  Probe
cagagcccggtaatcgcataaaactta

SEQ ID NO: 17870 - DNA, 32 bp, Artificial Sequence
  Probe
cagagcccggtaatcgcataaaacttaaaact

SEQ ID NO: 17871 - DNA, 33 bp, Artificial Sequence
  Probe
cagagcccggtaatcgcataaaacttaaaactt

SEQ ID NO: 17872 - DNA, 27 bp, Artificial Sequence
  Probe
cagaggcttacgaccccttatttaccg

SEQ ID NO: 17873 - DNA, 29 bp, Artificial Sequence
  Probe
cagaggcttacgaccccttatttaccgag

SEQ ID NO: 17874 - DNA, 29 bp, Artificial Sequence
  Probe
cagagtggcgcagcggaagcgtgctgggc

SEQ ID NO: 17875 - DNA, 33 bp, Artificial Sequence; identical to SEQ ID NO: 528
  Probe

SEQ ID NO: 17876 - DNA, 24 bp, Artificial Sequence
  Probe
cagagtggggttttgcagtcctta

SEQ ID NO: 17877 - DNA, 25 bp, Artificial Sequence
  Probe
cagagtggggttttgcagtccttag

SEQ ID NO: 17878 - DNA, 26 bp, Artificial Sequence
  Probe
cagagtggggttttgcagtccttagc

SEQ ID NO: 17879 - DNA, 27 bp, Artificial Sequence
  Probe
cagagtggggttttgcagtccttagct

SEQ ID NO: 17880 - DNA, 16 bp, Artificial Sequence
  Probe
cagagtgtagcttaac

SEQ ID NO: 17881 - DNA, 17 bp, Artificial Sequence
  Probe
cagagtgtagcttaaca

SEQ ID NO: 17882 - DNA, 19 bp, Artificial Sequence
  Probe
cagagtgtagcttaacaca

SEQ ID NO: 17883 - DNA, 20 bp, Artificial Sequence
  Probe
cagagtgtagcttaacacaa

SEQ ID NO: 17884 - DNA, 21 bp, Artificial Sequence
  Probe
cagagtgtagcttaacacaaa

SEQ ID NO: 17885 - DNA, 23 bp, Artificial Sequence
  Probe
cagagtgtagcttaacacaaagc

SEQ ID NO: 17886 - DNA, 24 bp, Artificial Sequence
  Probe
cagagtgtagcttaacacaaagca

SEQ ID NO: 17887 - DNA, 25 bp, Artificial Sequence
  Probe
cagagtgtagcttaacacaaagcac

SEQ ID NO: 17888 - DNA, 26 bp, Artificial Sequence
  Probe
cagagtgtagcttaacacaaagcacc

SEQ ID NO: 17889 - DNA, 27 bp, Artificial Sequence
  Probe
cagagtgtagcttaacacaaagcaccc

SEQ ID NO: 17890 - DNA, 28 bp, Artificial Sequence
  Probe
cagagtgtagcttaacacaaagcaccca

SEQ ID NO: 17891 - DNA, 29 bp, Artificial Sequence
  Probe
cagagtgtagcttaacacaaagcacccaa

SEQ ID NO: 17892 - DNA, 30 bp, Artificial Sequence; identical to SEQ ID NO: 4262
  Probe

SEQ ID NO: 17893 - DNA, 31 bp, Artificial Sequence; identical to SEQ ID NO: 4263
  Probe

SEQ ID NO: 17894 - DNA, 32 bp, Artificial Sequence; identical to SEQ ID NO: 4264
  Probe

SEQ ID NO: 17895 - DNA, 33 bp, Artificial Sequence; identical to SEQ ID NO: 4265
  Probe

SEQ ID NO: 17896 - DNA, 34 bp, Artificial Sequence; identical to SEQ ID NO: 4266
  Probe

SEQ ID NO: 17897 - DNA, 35 bp, Artificial Sequence; identical to SEQ ID NO: 4267
  Probe

SEQ ID NO: 17898 - DNA, 36 bp, Artificial Sequence; identical to SEQ ID NO: 4268
  Probe

SEQ ID NO: 17899 - DNA, 37 bp, Artificial Sequence; identical to SEQ ID NO: 4269
  Probe

SEQ ID NO: 17900 - DNA, 38 bp, Artificial Sequence; identical to SEQ ID NO: 4270
  Probe

SEQ ID NO: 17901 - DNA, 39 bp, Artificial Sequence; identical to SEQ ID NO: 4271
  Probe

SEQ ID NO: 17902 - DNA, 40 bp, Artificial Sequence; identical to SEQ ID NO: 4272
  Probe

SEQ ID NO: 17903 - DNA, 41 bp, Artificial Sequence; identical to SEQ ID NO: 4273
  Probe

SEQ ID NO: 17904 - DNA, 42 bp, Artificial Sequence; identical to SEQ ID NO: 4274
  Probe

SEQ ID NO: 17905 - DNA, 43 bp, Artificial Sequence; identical to SEQ ID NO: 4275
  Probe

SEQ ID NO: 17906 - DNA, 44 bp, Artificial Sequence; identical to SEQ ID NO: 4276
  Probe

SEQ ID NO: 17907 - DNA, 45 bp, Artificial Sequence; identical to SEQ ID NO: 4277
  Probe

SEQ ID NO: 17908 - DNA, 46 bp, Artificial Sequence; identical to SEQ ID NO: 4278
  Probe

SEQ ID NO: 17909 - DNA, 50 bp, Artificial Sequence; identical to SEQ ID NO: 4281
  Probe

SEQ ID NO: 17910 - DNA, 30 bp, Artificial Sequence
  Probe
cagattgtgaatctgacaacagaggcttac

SEQ ID NO: 17911 - DNA, 36 bp, Artificial Sequence
  Probe
cagattgtgaatctgacaacagaggcttacgacccc

SEQ ID NO: 17912 - DNA, 50 bp, Artificial Sequence; identical to SEQ ID NO: 4284
  Probe

SEQ ID NO: 17913 - DNA, 16 bp, Artificial Sequence
  Probe
cagcaacctcggttcg

SEQ ID NO: 17914 - DNA, 29 bp, Artificial Sequence
  Probe
cagcaacctcggttcgaatccgagtcacg

SEQ ID NO: 17915 - DNA, 30 bp, Artificial Sequence
  Probe
cagcaacctcggttcgaatccgagtcacgg

SEQ ID NO: 17916 - DNA, 32 bp, Artificial Sequence; identical to SEQ ID NO: 4285
  Probe

SEQ ID NO: 17917 - DNA, 35 bp, Artificial Sequence; identical to SEQ ID NO: 4288
  Probe

SEQ ID NO: 17918 - DNA, 35 bp, Artificial Sequence; identical to SEQ ID NO: 4290
  Probe

SEQ ID NO: 17919 - DNA, 16 bp, Artificial Sequence
  Probe
cagcagtacatgcaga

SEQ ID NO: 17920 - DNA, 18 bp, Artificial Sequence
  Probe
cagcagtacatgcagagc

SEQ ID NO: 17921 - DNA, 19 bp, Artificial Sequence
  Probe
cagcagtacatgcagagca

SEQ ID NO: 17922 - DNA, 20 bp, Artificial Sequence
  Probe
cagcagtacatgcagagcaa

SEQ ID NO: 17923 - DNA, 27 bp, Artificial Sequence
  Probe
cagcctccggagctggggattgtgggt

SEQ ID NO: 17924 - DNA, 16 bp, Artificial Sequence
  Probe
cagcgatccgagttca

SEQ ID NO: 17925 - DNA, 29 bp, Artificial Sequence
  Probe
cagcgatccgagttcaaatctcggtggaa

SEQ ID NO: 17926 - DNA, 30 bp, Artificial Sequence
  Probe
cagcgatccgagttcaaatctcggtggaac

SEQ ID NO: 17927 - DNA, 32 bp, Artificial Sequence; identical to SEQ ID NO: 530
  Probe

SEQ ID NO: 17928 - DNA, 33 bp, Artificial Sequence; identical to SEQ ID NO: 4291
  Probe

SEQ ID NO: 17929 - DNA, 35 bp, Artificial Sequence; identical to SEQ ID NO: 4293
  Probe

SEQ ID NO: 17930 - DNA, 33 bp, Artificial Sequence; identical to SEQ ID NO: 4294
  Probe

SEQ ID NO: 17931 - DNA, 29 bp, Artificial Sequence
  Probe
cagcgatccgagttcaaatctcggtggga

SEQ ID NO: 17932 - DNA, 30 bp, Artificial Sequence
  Probe
cagcgatccgagttcaaatctcggtgggac

SEQ ID NO: 17933 - DNA, 32 bp, Artificial Sequence; identical to SEQ ID NO: 531
  Probe

SEQ ID NO: 17934 - DNA, 35 bp, Artificial Sequence; identical to SEQ ID NO: 4298
  Probe

SEQ ID NO: 17935 - DNA, 23 bp, Artificial Sequence
  Probe
cagctaaataagctatcgggccc

SEQ ID NO: 17936 - DNA, 24 bp, Artificial Sequence
  Probe
cagctaaataagctatcgggccca

SEQ ID NO: 17937 - DNA, 25 bp, Artificial Sequence
  Probe
cagctaaataagctatcgggcccat

SEQ ID NO: 17938 - DNA, 26 bp, Artificial Sequence
  Probe
cagctaaataagctatcgggcccata

SEQ ID NO: 17939 - DNA, 27 bp, Artificial Sequence
  Probe
cagctaaataagctatcgggcccatac

SEQ ID NO: 17940 - DNA, 34 bp, Artificial Sequence; identical to SEQ ID NO: 4310
  Probe

SEQ ID NO: 17941 - DNA, 35 bp, Artificial Sequence; identical to SEQ ID NO: 4311
  Probe

SEQ ID NO: 17942 - DNA, 36 bp, Artificial Sequence; identical to SEQ ID NO: 4312
  Probe

SEQ ID NO: 17943 - DNA, 37 bp, Artificial Sequence; identical to SEQ ID NO: 4313
  Probe

SEQ ID NO: 17944 - DNA, 38 bp, Artificial Sequence
  Probe
cagctaaataagctatcgggcccataccccgaaaatgt

SEQ ID NO: 17945 - DNA, 39 bp, Artificial Sequence; identical to SEQ ID NO: 4314
  Probe

SEQ ID NO: 17946 - DNA, 28 bp, Artificial Sequence
  Probe
cagctagctcagtcggtagagcatgaga

SEQ ID NO: 17947 - DNA, 29 bp, Artificial Sequence
  Probe
cagctagctcagtcggtagagcatgagac

SEQ ID NO: 17948 - DNA, 30 bp, Artificial Sequence
  Probe
cagctagctcagtcggtagagcatgagact

SEQ ID NO: 17949 - DNA, 17 bp, Artificial Sequence
  Probe
cagctatagggtggaga

SEQ ID NO: 17950 - DNA, 15 bp, Artificial Sequence
  Probe
cagctatccattggt

SEQ ID NO: 17951 - DNA, 24 bp, Artificial Sequence
  Probe
cagcttcaaacctgccggggcttc

SEQ ID NO: 17952 - DNA, 26 bp, Artificial Sequence
  Probe
cagcttcaaacctgccggggcttctc

SEQ ID NO: 17953 - DNA, 17 bp, Artificial Sequence
  Probe
cagctttggggggttcg

SEQ ID NO: 17954 - DNA, 18 bp, Artificial Sequence
  Probe
cagctttggggggttcga

SEQ ID NO: 17955 - DNA, 29 bp, Artificial Sequence
  Probe
cagctttggggggttcgattccttccttt

SEQ ID NO: 17956 - DNA, 30 bp, Artificial Sequence; identical to SEQ ID NO: 4332
  Probe

SEQ ID NO: 17957 - DNA, 31 bp, Artificial Sequence
  Probe
cagctttggggggttcgattccttccttttt

SEQ ID NO: 17958 - DNA, 32 bp, Artificial Sequence; identical to SEQ ID NO: 4333
  Probe

SEQ ID NO: 17959 - DNA, 33 bp, Artificial Sequence; identical to SEQ ID NO: 4334
  Probe

SEQ ID NO: 17960 - DNA, 34 bp, Artificial Sequence; identical to SEQ ID NO: 4335
  Probe

SEQ ID NO: 17961 - DNA, 35 bp, Artificial Sequence; identical to SEQ ID NO: 4336
  Probe

SEQ ID NO: 17962 - DNA, 36 bp, Artificial Sequence; identical to SEQ ID NO: 4337
  Probe

SEQ ID NO: 17963 - DNA, 37 bp, Artificial Sequence
  Probe
cagctttggggggttcgattccttccttttttgtcta

SEQ ID NO: 17964 - DNA, 31 bp, Artificial Sequence
  Probe
caggagatcctgggttcgaatcccagcgggg

SEQ ID NO: 17965 - DNA, 34 bp, Artificial Sequence
  Probe
caggagatcctgggttcgaatcccagcggggcct

SEQ ID NO: 17966 - DNA, 31 bp, Artificial Sequence
  Probe
caggagatcctgggttcgaatcccagcggtg

SEQ ID NO: 17967 - DNA, 32 bp, Artificial Sequence
  Probe
caggagatcctgggttcgaatcccagcggtgc

SEQ ID NO: 17968 - DNA, 34 bp, Artificial Sequence
  Probe
caggagatcctgggttcgaatcccagcggtgcct

SEQ ID NO: 17969 - DNA, 35 bp, Artificial Sequence
  Probe
caggagatcctgggttcgaatcccagcggtgcctc

SEQ ID NO: 17970 - DNA, 37 bp, Artificial Sequence; identical to SEQ ID NO: 4338
  Probe

SEQ ID NO: 17971 - DNA, 37 bp, Artificial Sequence
  Probe
caggagatcctgggttcgactcccagcggggccttgg

SEQ ID NO: 17972 - DNA, 22 bp, Artificial Sequence
  Probe
caggatggccgagcggtctaag

SEQ ID NO: 17973 - DNA, 22 bp, Artificial Sequence
  Probe
caggatggccgagtggtctaag

SEQ ID NO: 17974 - DNA, 38 bp, Artificial Sequence
  Probe
caggcgcccggctagctcagtcggtagagcatgggact

SEQ ID NO: 17975 - DNA, 39 bp, Artificial Sequence
  Probe
caggcgcccggctagctcagtcggtagagcatgggactc

SEQ ID NO: 17976 - DNA, 15 bp, Artificial Sequence
  Probe
caggcgcggtggctc

SEQ ID NO: 17977 - DNA, 32 bp, Artificial Sequence
  Probe
caggcggcccgggttcgactcccggtgtggga

SEQ ID NO: 17978 - DNA, 35 bp, Artificial Sequence
  Probe
caggcggcccgggttcgactcccggtgtgggaacg

SEQ ID NO: 17979 - DNA, 36 bp, Artificial Sequence; identical to SEQ ID NO: 4340
  Probe

SEQ ID NO: 17980 - DNA, 30 bp, Artificial Sequence
  Probe
cagggatgggttcgattctcatagtcctag

SEQ ID NO: 17981 - DNA, 31 bp, Artificial Sequence; identical to SEQ ID NO: 4343
  Probe

SEQ ID NO: 17982 - DNA, 32 bp, Artificial Sequence; identical to SEQ ID NO: 4344
  Probe

SEQ ID NO: 17983 - DNA, 33 bp, Artificial Sequence; identical to SEQ ID NO: 4345
  Probe

SEQ ID NO: 17984 - DNA, 40 bp, Artificial Sequence
  Probe
cagggatgggttcgattctcatagtcctagaaataagggg

SEQ ID NO: 17985 - DNA, 36 bp, Artificial Sequence
  Probe
cagggattgtgggttcgagtcccacccggggtaaag

SEQ ID NO: 17986 - DNA, 26 bp, Artificial Sequence
  Probe
cagggattgtgggttcgagtcccatc

SEQ ID NO: 17987 - DNA, 30 bp, Artificial Sequence
  Probe
cagggattgtgggttcgagtcccatctggg

SEQ ID NO: 17988 - DNA, 31 bp, Artificial Sequence; identical to SEQ ID NO: 4347
  Probe

SEQ ID NO: 17989 - DNA, 33 bp, Artificial Sequence
  Probe
cagggattgtgggttcgagtcccatctggggtg

SEQ ID NO: 17990 - DNA, 36 bp, Artificial Sequence
  Probe
caggggtcgcgagttcaattctcgctggggcctgtg

SEQ ID NO: 17991 - DNA, 36 bp, Artificial Sequence
  Probe
caggggtcgcgagttcgatcctcgctggggcctcct

SEQ ID NO: 17992 - DNA, 26 bp, Artificial Sequence
  Probe
caggggttaggcctctttttaccagc

SEQ ID NO: 17993 - DNA, 27 bp, Artificial Sequence
  Probe
caggggttaggcctctttttaccagct

SEQ ID NO: 17994 - DNA, 16 bp, Artificial Sequence
  Probe
cagggtcgtgggttcg

SEQ ID NO: 17995 - DNA, 31 bp, Artificial Sequence; identical to SEQ ID NO: 4352
  Probe

SEQ ID NO: 17996 - DNA, 33 bp, Artificial Sequence
  Probe
cagggtcgtgggttcgagccccacgttgggcgc

SEQ ID NO: 17997 - DNA, 16 bp, Artificial Sequence
  Probe
caggtcgcagtctccc

SEQ ID NO: 17998 - DNA, 29 bp, Artificial Sequence
  Probe
caggtggcccgggttcgactcccggtatg

SEQ ID NO: 17999 - DNA, 30 bp, Artificial Sequence
  Probe
caggtggcccgggttcgactcccggtatgg

SEQ ID NO: 18000 - DNA, 31 bp, Artificial Sequence
  Probe
caggtggcccgggttcgactcccggtatggg

SEQ ID NO: 18001 - DNA, 33 bp, Artificial Sequence
  Probe
caggtggcccgggttcgactcccggtatgggaa

SEQ ID NO: 18002 - DNA, 36 bp, Artificial Sequence; identical to SEQ ID NO: 4354
  Probe

SEQ ID NO: 18003 - DNA, 16 bp, Artificial Sequence
  Probe
cagtacatgcagagca

SEQ ID NO: 18004 - DNA, 24 bp, Artificial Sequence
  Probe
cagtcagaggttcaattcctcttc

SEQ ID NO: 18005 - DNA, 25 bp, Artificial Sequence
  Probe
cagtcagaggttcaattcctcttct

SEQ ID NO: 18006 - DNA, 26 bp, Artificial Sequence
  Probe
cagtcagaggttcaattcctcttctt

SEQ ID NO: 18007 - DNA, 27 bp, Artificial Sequence
  Probe
cagtcagaggttcaattcctcttctta

SEQ ID NO: 18008 - DNA, 30 bp, Artificial Sequence; identical to SEQ ID NO: 4358
  Probe

SEQ ID NO: 18009 - DNA, 31 bp, Artificial Sequence
  Probe
cagtcagaggttcaattcctcttcttaacaa

SEQ ID NO: 18010 - DNA, 33 bp, Artificial Sequence; identical to SEQ ID NO: 4360
  Probe

SEQ ID NO: 18011 - DNA, 44 bp, Artificial Sequence; identical to SEQ ID NO: 4361
  Probe

SEQ ID NO: 18012 - DNA, 17 bp, Artificial Sequence
  Probe
cagtcggtagagcatca

SEQ ID NO: 18013 - DNA, 19 bp, Artificial Sequence
  Probe
cagtcggtagagcatcaga

SEQ ID NO: 18014 - DNA, 42 bp, Artificial Sequence
  Probe
cagtcggtagagcatgagactcttaatctcagggtcgtgggt

SEQ ID NO: 18015 - DNA, 20 bp, Artificial Sequence
  Probe
cagtcggtagagcatgggac

SEQ ID NO: 18016 - DNA, 21 bp, Artificial Sequence
  Probe
cagtcggtagagcatgggact

SEQ ID NO: 18017 - DNA, 42 bp, Artificial Sequence
  Probe
cagtcggtagagcatgggactcttaatcccagggtcgtgggt

SEQ ID NO: 18018 - DNA, 22 bp, Artificial Sequence
  Probe
cagtctcataatctgaaggtcc

SEQ ID NO: 18019 - DNA, 27 bp, Artificial Sequence
  Probe
cagtctcataatctgaaggtcctgagt

SEQ ID NO: 18020 - DNA, 22 bp, Artificial Sequence
  Probe
cagtctcataatctgaaggtcg

SEQ ID NO: 18021 - DNA, 38 bp, Artificial Sequence
  Probe
cagtctcttcgggggcgtgggttcgaatcccaccgctg

SEQ ID NO: 18022 - DNA, 39 bp, Artificial Sequence
  Probe
cagtctcttcgggggcgtgggttcgaatcccaccgctgc

SEQ ID NO: 18023 - DNA, 44 bp, Artificial Sequence
  Probe
cagtctcttcgggggcgtgggttcgaatcccaccgctgccaggt

SEQ ID NO: 18024 - DNA, 44 bp, Artificial Sequence; identical to SEQ ID NO: 4374
  Probe

SEQ ID NO: 18025 - DNA, 29 bp, Artificial Sequence
  Probe
cagtgcccggctagctcagtcggtagagc

SEQ ID NO: 18026 - DNA, 30 bp, Artificial Sequence
  Probe
cagtgcccggctagctcagtcggtagagca

SEQ ID NO: 18027 - DNA, 32 bp, Artificial Sequence
  Probe
cagtggcctaatggataaggcatcagcctccg

SEQ ID NO: 18028 - DNA, 19 bp, Artificial Sequence
  Probe
cagtggtagaattctcgcc

SEQ ID NO: 18029 - DNA, 20 bp, Artificial Sequence
  Probe
cagtggtagaattctcgcct

SEQ ID NO: 18030 - DNA, 21 bp, Artificial Sequence
  Probe
cagtggtagaattctcgcctg

SEQ ID NO: 18031 - DNA, 22 bp, Artificial Sequence
  Probe
cagtggtagaattctcgcctgc

SEQ ID NO: 18032 - DNA, 23 bp, Artificial Sequence
  Probe
cagtggtagaattctcgcctgcc

SEQ ID NO: 18033 - DNA, 36 bp, Artificial Sequence
  Probe
cagtggtagaattctcgcctgccacgcgggaggccc

SEQ ID NO: 18034 - DNA, 29 bp, Artificial Sequence
  Probe
cagttgatgcagagtggggttttgcagtc

SEQ ID NO: 18035 - DNA, 31 bp, Artificial Sequence
  Probe
cagttgatgcagagtggggttttgcagtcct

SEQ ID NO: 18036 - DNA, 32 bp, Artificial Sequence
  Probe
cagttgatgcagagtggggttttgcagtcctt

SEQ ID NO: 18037 - DNA, 33 bp, Artificial Sequence; identical to SEQ ID NO: 4379
  Probe

SEQ ID NO: 18038 - DNA, 34 bp, Artificial Sequence; identical to SEQ ID NO: 4380
  Probe

SEQ ID NO: 18039 - DNA, 35 bp, Artificial Sequence
  Probe
cagttgatgcagagtggggttttgcagtccttagc

SEQ ID NO: 18040 - DNA, 36 bp, Artificial Sequence; identical to SEQ ID NO: 4381
  Probe

SEQ ID NO: 18041 - DNA, 24 bp, Artificial Sequence
  Probe
cataaaacttaaaactttacagtc

SEQ ID NO: 18042 - DNA, 50 bp, Artificial Sequence; identical to SEQ ID NO: 4387
  Probe

SEQ ID NO: 18043 - DNA, 43 bp, Artificial Sequence; identical to SEQ ID NO: 4391
  Probe

SEQ ID NO: 18044 - DNA, 42 bp, Artificial Sequence
  Probe
cataacccagaggtcgatggatcgaaaccatcctctgctatc

SEQ ID NO: 18045 - DNA, 21 bp, Artificial Sequence
  Probe
cataatctgaaggtcctgagt

SEQ ID NO: 18046 - DNA, 33 bp, Artificial Sequence; identical to SEQ ID NO: 4394
  Probe

SEQ ID NO: 18047 - DNA, 35 bp, Artificial Sequence; identical to SEQ ID NO: 4395
  Probe

SEQ ID NO: 18048 - DNA, 37 bp, Artificial Sequence
  Probe
cataccccgaaaatgttggttatacccttcccgtact

SEQ ID NO: 18049 - DNA, 40 bp, Artificial Sequence; identical to SEQ ID NO: 4396
  Probe

SEQ ID NO: 18050 - DNA, 41 bp, Artificial Sequence; identical to SEQ ID NO: 4397
  Probe

SEQ ID NO: 18051 - DNA, 27 bp, Artificial Sequence
  Probe
catagctgccttccaagcagttgaccc

SEQ ID NO: 18052 - DNA, 30 bp, Artificial Sequence
  Probe
catagctgccttccaagcagttgacccggg

SEQ ID NO: 18053 - DNA, 31 bp, Artificial Sequence
  Probe
catagctgccttccaagcagttgacccgggt

SEQ ID NO: 18054 - DNA, 32 bp, Artificial Sequence
  Probe
catagctgccttccaagcagttgacccgggtt

SEQ ID NO: 18055 - DNA, 26 bp, Artificial Sequence
  Probe
catagtgtagtggttatcacgtctgc

SEQ ID NO: 18056 - DNA, 25 bp, Artificial Sequence
  Probe
catatcattggtcgtggttgtagtc

SEQ ID NO: 18057 - DNA, 26 bp, Artificial Sequence
  Probe
catatcattggtcgtggttgtagtcc

SEQ ID NO: 18058 - DNA, 29 bp, Artificial Sequence
  Probe
catatcattggtcgtggttgtagtccgtg

SEQ ID NO: 18059 - DNA, 33 bp, Artificial Sequence
  Probe
catatcattggtcgtggttgtagtccgtgcgag

SEQ ID NO: 18060 - DNA, 35 bp, Artificial Sequence
  Probe
catatcattggtcgtggttgtagtccgtgcgagaa

SEQ ID NO: 18061 - DNA, 36 bp, Artificial Sequence
  Probe
catatcattggtcgtggttgtagtccgtgcgagaat

SEQ ID NO: 18062 - DNA, 40 bp, Artificial Sequence
  Probe
catatcattggtcgtggttgtagtccgtgcgagaataatg

SEQ ID NO: 18063 - DNA, 31 bp, Artificial Sequence; identical to SEQ ID NO: 4402
  Probe

SEQ ID NO: 18064 - DNA, 32 bp, Artificial Sequence; identical to SEQ ID NO: 4403
  Probe

SEQ ID NO: 18065 - DNA, 33 bp, Artificial Sequence; identical to SEQ ID NO: 541
  Probe

SEQ ID NO: 18066 - DNA, 17 bp, Artificial Sequence
  Probe
catatgtccgcgtgggt

SEQ ID NO: 18067 - DNA, 19 bp, Artificial Sequence
  Probe
catatgtccgcgtgggttc

SEQ ID NO: 18068 - DNA, 50 bp, Artificial Sequence; identical to SEQ ID NO: 4406
  Probe

SEQ ID NO: 18069 - DNA, 16 bp, Artificial Sequence
  Probe
catcaccccataaaca

SEQ ID NO: 18070 - DNA, 17 bp, Artificial Sequence
  Probe
catcaccccataaacaa

SEQ ID NO: 18071 - DNA, 18 bp, Artificial Sequence
  Probe
catcaccccataaacaaa

SEQ ID NO: 18072 - DNA, 19 bp, Artificial Sequence
  Probe
catcaccccataaacaaat

SEQ ID NO: 18073 - DNA, 30 bp, Artificial Sequence
  Probe
catcaccccataaacaaataggtttggtcc

SEQ ID NO: 18074 - DNA, 31 bp, Artificial Sequence
  Probe
catcaccccataaacaaataggtttggtcct

SEQ ID NO: 18075 - DNA, 50 bp, Artificial Sequence; identical to SEQ ID NO: 4419
  Probe

SEQ ID NO: 18076 - DNA, 40 bp, Artificial Sequence; identical to SEQ ID NO: 4420
  Probe

SEQ ID NO: 18077 - DNA, 24 bp, Artificial Sequence
  Probe
catcctctgctatagactcccttt

SEQ ID NO: 18078 - DNA, 16 bp, Artificial Sequence
  Probe
catgagactcttaatc

SEQ ID NO: 18079 - DNA, 37 bp, Artificial Sequence; identical to SEQ ID NO: 4421
  Probe

SEQ ID NO: 18080 - DNA, 18 bp, Artificial Sequence
  Probe
catgcaagattcccattc

SEQ ID NO: 18081 - DNA, 29 bp, Artificial Sequence
  Probe
catgcaagattcccattcttgcgacccgg

SEQ ID NO: 18082 - DNA, 30 bp, Artificial Sequence
  Probe
catgcaagattcccattcttgcgacccggg

SEQ ID NO: 18083 - DNA, 32 bp, Artificial Sequence
  Probe
catgcaagattcccattcttgcgacccgggtt

SEQ ID NO: 18084 - DNA, 33 bp, Artificial Sequence
  Probe
catgcaagattcccattcttgcgacccgggttc

SEQ ID NO: 18085 - DNA, 34 bp, Artificial Sequence
  Probe
catgcaagattcccattcttgcgacccgggttcg

SEQ ID NO: 18086 - DNA, 16 bp, Artificial Sequence
  Probe
catgcccccatgtcta

SEQ ID NO: 18087 - DNA, 19 bp, Artificial Sequence
  Probe
catgcccccatgtctaaca

SEQ ID NO: 18088 - DNA, 21 bp, Artificial Sequence
  Probe
catgcccccatgtctaacaac

SEQ ID NO: 18089 - DNA, 22 bp, Artificial Sequence
  Probe
catgcccccatgtctaacaaca

SEQ ID NO: 18090 - DNA, 23 bp, Artificial Sequence
  Probe
catgcccccatgtctaacaacat

SEQ ID NO: 18091 - DNA, 27 bp, Artificial Sequence
  Probe
catgcccccatgtctaacaacatggct

SEQ ID NO: 18092 - DNA, 28 bp, Artificial Sequence
  Probe
catgcccccatgtctaacaacatggctt

SEQ ID NO: 18093 - DNA, 29 bp, Artificial Sequence
  Probe
catgcccccatgtctaacaacatggcttt

SEQ ID NO: 18094 - DNA, 30 bp, Artificial Sequence; identical to SEQ ID NO: 4433
  Probe

SEQ ID NO: 18095 - DNA, 31 bp, Artificial Sequence; identical to SEQ ID NO: 4434
  Probe

SEQ ID NO: 18096 - DNA, 32 bp, Artificial Sequence; identical to SEQ ID NO: 4435
  Probe

SEQ ID NO: 18097 - DNA, 33 bp, Artificial Sequence; identical to SEQ ID NO: 4436
  Probe

SEQ ID NO: 18098 - DNA, 34 bp, Artificial Sequence; identical to SEQ ID NO: 4437
  Probe

SEQ ID NO: 18099 - DNA, 35 bp, Artificial Sequence; identical to SEQ ID NO: 4438
  Probe

SEQ ID NO: 18100 - DNA, 36 bp, Artificial Sequence; identical to SEQ ID NO: 4439
  Probe

SEQ ID NO: 18101 - DNA, 37 bp, Artificial Sequence
  Probe
catgcccccatgtctaacaacatggctttctcaactt

SEQ ID NO: 18102 - DNA, 38 bp, Artificial Sequence
  Probe
catgcccccatgtctaacaacatggctttctcaacttt

SEQ ID NO: 18103 - DNA, 39 bp, Artificial Sequence
  Probe
catgcccccatgtctaacaacatggctttctcaactttt

SEQ ID NO: 18104 - DNA, 23 bp, Artificial Sequence
  Probe
catggccaacctcctactcctca

SEQ ID NO: 18105 - DNA, 31 bp, Artificial Sequence
  Probe
catggggttggcttgaaaccagctttggggg

SEQ ID NO: 18106 - DNA, 33 bp, Artificial Sequence; identical to SEQ ID NO: 4440
  Probe

SEQ ID NO: 18107 - DNA, 26 bp, Artificial Sequence
  Probe
catgggtggttcagtggtagaattct

SEQ ID NO: 18108 - DNA, 29 bp, Artificial Sequence
  Probe
catgggtggttcagtggtagaattctcgc

SEQ ID NO: 18109 - DNA, 30 bp, Artificial Sequence; identical to SEQ ID NO: 9630
  Probe

SEQ ID NO: 18110 - DNA, 33 bp, Artificial Sequence; identical to SEQ ID NO: 542
  Probe

SEQ ID NO: 18111 - DNA, 34 bp, Artificial Sequence; identical to SEQ ID NO: 4444
  Probe

SEQ ID NO: 18112 - DNA, 27 bp, Artificial Sequence
  Probe
catgtctaacaacatggctttctcaac

SEQ ID NO: 18113 - DNA, 28 bp, Artificial Sequence
  Probe
catgtctaacaacatggctttctcaact

SEQ ID NO: 18114 - DNA, 26 bp, Artificial Sequence
  Probe
catgttaacgttttcttccagctcca

SEQ ID NO: 18115 - DNA, 27 bp, Artificial Sequence
  Probe
cattaaattatgataatcatatttacc

SEQ ID NO: 18116 - DNA, 32 bp, Artificial Sequence; identical to SEQ ID NO: 4447
  Probe

SEQ ID NO: 18117 - DNA, 34 bp, Artificial Sequence
  Probe
cattcttgcgacccgggttcgattcccgggcggc

SEQ ID NO: 18118 - DNA, 38 bp, Artificial Sequence
  Probe
cattcttgcgacccgggttcgattcccgggcggcgcac

SEQ ID NO: 18119 - DNA, 39 bp, Artificial Sequence; identical to SEQ ID NO: 4450
  Probe

SEQ ID NO: 18120 - DNA, 40 bp, Artificial Sequence; identical to SEQ ID NO: 4451
  Probe

SEQ ID NO: 18121 - DNA, 40 bp, Artificial Sequence; identical to SEQ ID NO: 4455
  Probe

SEQ ID NO: 18122 - DNA, 23 bp, Artificial Sequence
  Probe
cattggggtctccccgcgcaggt

SEQ ID NO: 18123 - DNA, 24 bp, Artificial Sequence
  Probe
cattggggtctccccgcgcaggtt

SEQ ID NO: 18124 - DNA, 25 bp, Artificial Sequence
  Probe
cattggggtttccccgcgcaggttc

SEQ ID NO: 18125 - DNA, 21 bp, Artificial Sequence
  Probe
cattggtcgtggttgtagtcc

SEQ ID NO: 18126 - DNA, 24 bp, Artificial Sequence
  Probe
cattggtcgtggttgtagtccgtg

SEQ ID NO: 18127 - DNA, 26 bp, Artificial Sequence
  Probe
cattggtcgtggttgtagtccgtgcg

SEQ ID NO: 18128 - DNA, 28 bp, Artificial Sequence
  Probe
cattggtcgtggttgtagtccgtgcgag

SEQ ID NO: 18129 - DNA, 29 bp, Artificial Sequence
  Probe
cattggtcgtggttgtagtccgtgcgaga

SEQ ID NO: 18130 - DNA, 30 bp, Artificial Sequence
  Probe
cattggtcgtggttgtagtccgtgcgagaa

SEQ ID NO: 18131 - DNA, 31 bp, Artificial Sequence
  Probe
cattggtcgtggttgtagtccgtgcgagaat

SEQ ID NO: 18132 - DNA, 33 bp, Artificial Sequence; identical to SEQ ID NO: 4460
  Probe

SEQ ID NO: 18133 - DNA, 35 bp, Artificial Sequence; identical to SEQ ID NO: 4461
  Probe

SEQ ID NO: 18134 - DNA, 26 bp, Artificial Sequence
  Probe
cattggtggttcagtggtagaattct

SEQ ID NO: 18135 - DNA, 28 bp, Artificial Sequence
  Probe
cattggtggttcagtggtagaattctcg

SEQ ID NO: 18136 - DNA, 30 bp, Artificial Sequence; identical to SEQ ID NO: 4462
  Probe

SEQ ID NO: 18137 - DNA, 31 bp, Artificial Sequence; identical to SEQ ID NO: 4463
  Probe

SEQ ID NO: 18138 - DNA, 32 bp, Artificial Sequence; identical to SEQ ID NO: 4464
  Probe

SEQ ID NO: 18139 - DNA, 33 bp, Artificial Sequence; identical to SEQ ID NO: 4465
  Probe

SEQ ID NO: 18140 - DNA, 34 bp, Artificial Sequence; identical to SEQ ID NO: 4466
  Probe

SEQ ID NO: 18141 - DNA, 50 bp, Artificial Sequence
  Probe
cattggtggttcagtggtagaattctcgcctgccacgcgggaggcccggg

SEQ ID NO: 18142 - DNA, 40 bp, Artificial Sequence
  Probe
cattgtgctttgcacgcgtgggttcgaatcccatcctcgt

SEQ ID NO: 18143 - DNA, 27 bp, Artificial Sequence
  Probe
ccaaaacatcagattgtgaatctgaca

SEQ ID NO: 18144 - DNA, 28 bp, Artificial Sequence
  Probe
ccaaaacatcagattgtgaatctgacaa

SEQ ID NO: 18145 - DNA, 29 bp, Artificial Sequence
  Probe
ccaaaacatcagattgtgaatctgacaac

SEQ ID NO: 18146 - DNA, 30 bp, Artificial Sequence; identical to SEQ ID NO: 4473
  Probe

SEQ ID NO: 18147 - DNA, 31 bp, Artificial Sequence; identical to SEQ ID NO: 4474
  Probe

SEQ ID NO: 18148 - DNA, 32 bp, Artificial Sequence; identical to SEQ ID NO: 4475
  Probe

SEQ ID NO: 18149 - DNA, 33 bp, Artificial Sequence; identical to SEQ ID NO: 4476
  Probe

SEQ ID NO: 18150 - DNA, 36 bp, Artificial Sequence; identical to SEQ ID NO: 4479
  Probe

SEQ ID NO: 18151 - DNA, 38 bp, Artificial Sequence; identical to SEQ ID NO: 550
  Probe

SEQ ID NO: 18152 - DNA, 39 bp, Artificial Sequence; identical to SEQ ID NO: 551
  Probe

SEQ ID NO: 18153 - DNA, 41 bp, Artificial Sequence; identical to SEQ ID NO: 553
  Probe

SEQ ID NO: 18154 - DNA, 50 bp, Artificial Sequence; identical to SEQ ID NO: 4482
  Probe

SEQ ID NO: 18155 - DNA, 17 bp, Artificial Sequence
  Probe
ccaaacccactccacct

SEQ ID NO: 18156 - DNA, 22 bp, Artificial Sequence
  Probe
ccaaagacaccccccacagttt

SEQ ID NO: 18157 - DNA, 23 bp, Artificial Sequence
  Probe
ccaaagacaccccccacagttta

SEQ ID NO: 18158 - DNA, 29 bp, Artificial Sequence
  Probe
ccaaagacaccccccacagtttatgtagc

SEQ ID NO: 18159 - DNA, 30 bp, Artificial Sequence
  Probe
ccaaagacaccccccacagtttatgtagct

SEQ ID NO: 18160 - DNA, 31 bp, Artificial Sequence
  Probe
ccaaagacaccccccacagtttatgtagctt

SEQ ID NO: 18161 - DNA, 32 bp, Artificial Sequence
  Probe
ccaaagacaccccccacagtttatgtagctta

SEQ ID NO: 18162 - DNA, 33 bp, Artificial Sequence
  Probe
ccaaagacaccccccacagtttatgtagcttac

SEQ ID NO: 18163 - DNA, 34 bp, Artificial Sequence
  Probe
ccaaagacaccccccacagtttatgtagcttacc

SEQ ID NO: 18164 - DNA, 35 bp, Artificial Sequence
  Probe
ccaaagacaccccccacagtttatgtagcttacct

SEQ ID NO: 18165 - DNA, 36 bp, Artificial Sequence
  Probe
ccaaagacaccccccacagtttatgtagcttacctc

SEQ ID NO: 18166 - DNA, 37 bp, Artificial Sequence
  Probe
ccaaagacaccccccacagtttatgtagcttacctcc

SEQ ID NO: 18167 - DNA, 38 bp, Artificial Sequence
  Probe
ccaaagacaccccccacagtttatgtagcttacctcct

SEQ ID NO: 18168 - DNA, 40 bp, Artificial Sequence; identical to SEQ ID NO: 4484
  Probe

SEQ ID NO: 18169 - DNA, 42 bp, Artificial Sequence
  Probe
ccaaagacaccccccacagtttatgtagcttacctcctcaaa

SEQ ID NO: 18170 - DNA, 45 bp, Artificial Sequence
  Probe
ccaaagacaccccccacagtttatgtagcttacctcctcaaagca

SEQ ID NO: 18171 - DNA, 20 bp, Artificial Sequence
  Probe
ccaacacctctttacagtga

SEQ ID NO: 18172 - DNA, 21 bp, Artificial Sequence
  Probe
ccaacacctctttacagtgaa

SEQ ID NO: 18173 - DNA, 22 bp, Artificial Sequence
  Probe
ccaacacctctttacagtgaaa

SEQ ID NO: 18174 - DNA, 23 bp, Artificial Sequence
  Probe
ccaacacctctttacagtgaaat

SEQ ID NO: 18175 - DNA, 25 bp, Artificial Sequence
  Probe
ccaaccttcagctatagggtggaga

SEQ ID NO: 18176 - DNA, 23 bp, Artificial Sequence
  Probe
ccaactaaatactaccgtatggc

SEQ ID NO: 18177 - DNA, 17 bp, Artificial Sequence
  Probe
ccaacttacacttagga

SEQ ID NO: 18178 - DNA, 19 bp, Artificial Sequence
  Probe
ccaacttacacttaggaga

SEQ ID NO: 18179 - DNA, 20 bp, Artificial Sequence
  Probe
ccaacttacacttaggagat

SEQ ID NO: 18180 - DNA, 21 bp, Artificial Sequence
  Probe
ccaacttacacttaggagatt

SEQ ID NO: 18181 - DNA, 23 bp, Artificial Sequence
  Probe
ccaacttacacttaggagatttc

SEQ ID NO: 18182 - DNA, 24 bp, Artificial Sequence
  Probe
ccaacttacacttaggagatttca

SEQ ID NO: 18183 - DNA, 29 bp, Artificial Sequence
  Probe
ccaacttacacttaggagatttcaactta

SEQ ID NO: 18184 - DNA, 44 bp, Artificial Sequence; identical to SEQ ID NO: 4505
  Probe

SEQ ID NO: 18185 - DNA, 46 bp, Artificial Sequence; identical to SEQ ID NO: 4507
  Probe

SEQ ID NO: 18186 - DNA, 49 bp, Artificial Sequence; identical to SEQ ID NO: 4509
  Probe

SEQ ID NO: 18187 - DNA, 50 bp, Artificial Sequence; identical to SEQ ID NO: 4510
  Probe

SEQ ID NO: 18188 - DNA, 19 bp, Artificial Sequence
  Probe
ccaagaacagggtttgtta

SEQ ID NO: 18189 - DNA, 25 bp, Artificial Sequence
  Probe
ccaagagccttcaaagccctcagta

SEQ ID NO: 18190 - DNA, 19 bp, Artificial Sequence
  Probe
ccaagcagttgacccgggt

SEQ ID NO: 18191 - DNA, 20 bp, Artificial Sequence
  Probe
ccaagcagttgacccgggtt

SEQ ID NO: 18192 - DNA, 41 bp, Artificial Sequence
  Probe
ccaagcagttgacccgggttcgattcccggccaacgcaagt

SEQ ID NO: 18193 - DNA, 50 bp, Artificial Sequence
  Probe
ccaagcagttgacccgggttcgattcccggccaacgcaagtcgttttggg

SEQ ID NO: 18194 - DNA, 41 bp, Artificial Sequence
  Probe
ccaagcagttgacccgggttcgattcccggccaacgcagcg

SEQ ID NO: 18195 - DNA, 41 bp, Artificial Sequence
  Probe
ccaagcagttgacccgggttcgattcccggccaacgcagtg

SEQ ID NO: 18196 - DNA, 16 bp, Artificial Sequence
  Probe
ccaaggtcgcgggttc

SEQ ID NO: 18197 - DNA, 26 bp, Artificial Sequence
  Probe
ccaaggtcgcgggttcgatccccgta

SEQ ID NO: 18198 - DNA, 30 bp, Artificial Sequence
  Probe
ccaaggtcgcgggttcgatccccgtacggg

SEQ ID NO: 18199 - DNA, 31 bp, Artificial Sequence
  Probe
ccaaggtcgcgggttcgatccccgtacgggc

SEQ ID NO: 18200 - DNA, 33 bp, Artificial Sequence
  Probe
ccaaggtcgcgggttcgatccccgtacgggcca

SEQ ID NO: 18201 - DNA, 36 bp, Artificial Sequence; identical to SEQ ID NO: 4515
  Probe

SEQ ID NO: 18202 - DNA, 36 bp, Artificial Sequence; identical to SEQ ID NO: 4516
  Probe

SEQ ID NO: 18203 - DNA, 36 bp, Artificial Sequence
  Probe
ccaaggtcgcgggttcgatccccgtacgggccagga

SEQ ID NO: 18204 - DNA, 36 bp, Artificial Sequence
  Probe
ccaaggtcgcgggttcgatccccgtacgggccaggc

SEQ ID NO: 18205 - DNA, 36 bp, Artificial Sequence
  Probe
ccaaggtcgcgggttcgatccccgtactggccacgt

SEQ ID NO: 18206 - DNA, 16 bp, Artificial Sequence
  Probe
ccaatgcacgagtaca

SEQ ID NO: 18207 - DNA, 21 bp, Artificial Sequence
  Probe
ccaatgcacgagtacagtttt

SEQ ID NO: 18208 - DNA, 24 bp, Artificial Sequence
  Probe
ccaatgggggttccccgcgcaggt

SEQ ID NO: 18209 - DNA, 24 bp, Artificial Sequence
  Probe
ccaatggggtctccccgcgcaggt

SEQ ID NO: 18210 - DNA, 24 bp, Artificial Sequence
  Probe
ccaatggggtttccccgcacaggt

SEQ ID NO: 18211 - DNA, 37 bp, Artificial Sequence; identical to SEQ ID NO: 4519
  Probe

SEQ ID NO: 18212 - DNA, 38 bp, Artificial Sequence; identical to SEQ ID NO: 4520
  Probe

SEQ ID NO: 18213 - DNA, 39 bp, Artificial Sequence; identical to SEQ ID NO: 4521
  Probe

SEQ ID NO: 18214 - DNA, 40 bp, Artificial Sequence; identical to SEQ ID NO: 4522
  Probe

SEQ ID NO: 18215 - DNA, 19 bp, Artificial Sequence
  Probe
ccacacccacccaagaaca

SEQ ID NO: 18216 - DNA, 25 bp, Artificial Sequence
  Probe
ccacacccacccaagaacagggttt

SEQ ID NO: 18217 - DNA, 26 bp, Artificial Sequence
  Probe
ccacacccacccaagaacagggtttg

SEQ ID NO: 18218 - DNA, 27 bp, Artificial Sequence
  Probe
ccacacccacccaagaacagggtttgt

SEQ ID NO: 18219 - DNA, 28 bp, Artificial Sequence
  Probe
ccacacccacccaagaacagggtttgtt

SEQ ID NO: 18220 - DNA, 29 bp, Artificial Sequence
  Probe
ccacacccacccaagaacagggtttgtta

SEQ ID NO: 18221 - DNA, 30 bp, Artificial Sequence
  Probe
ccacacccacccaagaacagggtttgttaa

SEQ ID NO: 18222 - DNA, 31 bp, Artificial Sequence
  Probe
ccacacccacccaagaacagggtttgttaag

SEQ ID NO: 18223 - DNA, 25 bp, Artificial Sequence
  Probe
ccacacctcagaaggtctcactttt

SEQ ID NO: 18224 - DNA, 15 bp, Artificial Sequence
  Probe
ccacacctgtgggta

SEQ ID NO: 18225 - DNA, 24 bp, Artificial Sequence
  Probe
ccacagtttatgtagcttacctcc

SEQ ID NO: 18226 - DNA, 26 bp, Artificial Sequence
  Probe
ccacatggtctagcggttaggattcc

SEQ ID NO: 18227 - DNA, 16 bp, Artificial Sequence
  Probe
ccacccaagaacaggg

SEQ ID NO: 18228 - DNA, 20 bp, Artificial Sequence
  Probe
ccacccaagaacagggtttg

SEQ ID NO: 18229 - DNA, 23 bp, Artificial Sequence
  Probe
ccacccaagaacagggtttgtta

SEQ ID NO: 18230 - DNA, 26 bp, Artificial Sequence
  Probe
ccacccagggacgcgtggtgactttt

SEQ ID NO: 18231 - DNA, 34 bp, Artificial Sequence
  Probe
ccaccgctgccacacctcagaaggtctcactttt

SEQ ID NO: 18232 - DNA, 27 bp, Artificial Sequence
  Probe
ccaccgctgccagggttgctgtctttt

SEQ ID NO: 18233 - DNA, 21 bp, Artificial Sequence
  Probe
ccacgcgggaggcccgggttc

SEQ ID NO: 18234 - DNA, 38 bp, Artificial Sequence
  Probe
ccacgcgggaggcccgggttcgattcccggccaatgca

SEQ ID NO: 18235 - DNA, 41 bp, Artificial Sequence
  Probe
ccacgcgggaggcccgggttcgattcccggccaatgcaagt

SEQ ID NO: 18236 - DNA, 41 bp, Artificial Sequence; identical to SEQ ID NO: 4531
  Probe

SEQ ID NO: 18237 - DNA, 41 bp, Artificial Sequence; identical to SEQ ID NO: 4532
  Probe

SEQ ID NO: 18238 - DNA, 41 bp, Artificial Sequence; identical to SEQ ID NO: 4534
  Probe

SEQ ID NO: 18239 - DNA, 22 bp, Artificial Sequence
  Probe
ccacgcgggaggcccgggtttg

SEQ ID NO: 18240 - DNA, 31 bp, Artificial Sequence; identical to SEQ ID NO: 4536
  Probe

SEQ ID NO: 18241 - DNA, 50 bp, Artificial Sequence
  Probe
ccactgtaaagctaacttagcattaaccttttaagttaaagattaagaga

SEQ ID NO: 18242 - DNA, 21 bp, Artificial Sequence
  Probe
ccacttctgacacatactttt

SEQ ID NO: 18243 - DNA, 33 bp, Artificial Sequence
  Probe
ccagactcaaggtaagcaccttgcctgcgggct

SEQ ID NO: 18244 - DNA, 30 bp, Artificial Sequence
  Probe
ccagagtgtagcttaacacaaagcacccaa

SEQ ID NO: 18245 - DNA, 46 bp, Artificial Sequence; identical to SEQ ID NO: 4548
  Probe

SEQ ID NO: 18246 - DNA, 16 bp, Artificial Sequence
  Probe
ccagcgatccgagttc

SEQ ID NO: 18247 - DNA, 33 bp, Artificial Sequence; identical to SEQ ID NO: 4551
  Probe

SEQ ID NO: 18248 - DNA, 34 bp, Artificial Sequence
  Probe
ccagcgatccgagttcaaatctcggtggaacctg

SEQ ID NO: 18249 - DNA, 35 bp, Artificial Sequence
  Probe
ccagcgatccgagttcaaatctcggtggaacctgc

SEQ ID NO: 18250 - DNA, 36 bp, Artificial Sequence; identical to SEQ ID NO: 4552
  Probe

SEQ ID NO: 18251 - DNA, 34 bp, Artificial Sequence
  Probe
ccagcgatccgagttcaaatctcggtggaacctt

SEQ ID NO: 18252 - DNA, 30 bp, Artificial Sequence
  Probe
ccagcgatccgagttcaaatctcggtggga

SEQ ID NO: 18253 - DNA, 31 bp, Artificial Sequence
  Probe
ccagcgatccgagttcaaatctcggtgggac

SEQ ID NO: 18254 - DNA, 33 bp, Artificial Sequence; identical to SEQ ID NO: 571
  Probe

SEQ ID NO: 18255 - DNA, 34 bp, Artificial Sequence
  Probe
ccagcgatccgagttcaaatctcggtgggacctc

SEQ ID NO: 18256 - DNA, 36 bp, Artificial Sequence; identical to SEQ ID NO: 4554
  Probe

SEQ ID NO: 18257 - DNA, 33 bp, Artificial Sequence; identical to SEQ ID NO: 4555
  Probe

SEQ ID NO: 18258 - DNA, 36 bp, Artificial Sequence
  Probe
ccagcgatccgagttcgagtctcggtggaacctttg

SEQ ID NO: 18259 - DNA, 29 bp, Artificial Sequence
  Probe
ccagcggtgcctcaaccgagcgtccaagc

SEQ ID NO: 18260 - DNA, 39 bp, Artificial Sequence
  Probe
ccagcggtgcctcaaccgagcgtccaagctctttccatt

SEQ ID NO: 18261 - DNA, 30 bp, Artificial Sequence
  Probe
ccagctagctcagtcggtagagcatgagac

SEQ ID NO: 18262 - DNA, 31 bp, Artificial Sequence
  Probe
ccagctagctcagtcggtagagcatgagact

SEQ ID NO: 18263 - DNA, 17 bp, Artificial Sequence
  Probe
ccagctttggggggttc

SEQ ID NO: 18264 - DNA, 18 bp, Artificial Sequence
  Probe
ccagctttggggggttcg

SEQ ID NO: 18265 - DNA, 33 bp, Artificial Sequence
  Probe
ccagctttggggggttcgattccttcctttttt

SEQ ID NO: 18266 - DNA, 34 bp, Artificial Sequence
  Probe
ccagctttggggggttcgattccttccttttttg

SEQ ID NO: 18267 - DNA, 35 bp, Artificial Sequence; identical to SEQ ID NO: 4558
  Probe

SEQ ID NO: 18268 - DNA, 36 bp, Artificial Sequence; identical to SEQ ID NO: 4559
  Probe

SEQ ID NO: 18269 - DNA, 37 bp, Artificial Sequence; identical to SEQ ID NO: 4560
  Probe

SEQ ID NO: 18270 - DNA, 38 bp, Artificial Sequence
  Probe
ccagctttggggggttcgattccttccttttttgtcta

SEQ ID NO: 18271 - DNA, 30 bp, Artificial Sequence; identical to SEQ ID NO: 9659
  Probe

SEQ ID NO: 18272 - DNA, 33 bp, Artificial Sequence
  Probe
ccaggcggcccgggttcgactcccggtgtggga

SEQ ID NO: 18273 - DNA, 36 bp, Artificial Sequence
  Probe
ccaggcggcccgggttcgactcccggtgtgggaacg

SEQ ID NO: 18274 - DNA, 37 bp, Artificial Sequence; identical to SEQ ID NO: 4563
  Probe

SEQ ID NO: 18275 - DNA, 34 bp, Artificial Sequence
  Probe
ccagggattgtgggttcgagtcccatctggggtg

SEQ ID NO: 18276 - DNA, 32 bp, Artificial Sequence
  Probe
ccaggggtcgcgagttcaattctcgctggggc

SEQ ID NO: 18277 - DNA, 31 bp, Artificial Sequence
  Probe
ccaggggtcgcgagttcgatcctcgctgggg

SEQ ID NO: 18278 - DNA, 37 bp, Artificial Sequence
  Probe
ccaggggtcgcgagttcgatcctcgctggggcctcct

SEQ ID NO: 18279 - DNA, 16 bp, Artificial Sequence
  Probe
ccagggtcgtgggttc

SEQ ID NO: 18280 - DNA, 17 bp, Artificial Sequence
  Probe
ccagggtcgtgggttcg

SEQ ID NO: 18281 - DNA, 33 bp, Artificial Sequence; identical to SEQ ID NO: 4570
  Probe

SEQ ID NO: 18282 - DNA, 34 bp, Artificial Sequence
  Probe
ccagggtcgtgggttcgagccccacgttgggcgc

SEQ ID NO: 18283 - DNA, 30 bp, Artificial Sequence
  Probe
ccaggtggcccgggttcgactcccggtatg

SEQ ID NO: 18284 - DNA, 31 bp, Artificial Sequence
  Probe
ccaggtggcccgggttcgactcccggtatgg

SEQ ID NO: 18285 - DNA, 34 bp, Artificial Sequence
  Probe
ccaggtggcccgggttcgactcccggtatgggaa

SEQ ID NO: 18286 - DNA, 37 bp, Artificial Sequence; identical to SEQ ID NO: 4571
  Probe

SEQ ID NO: 18287 - DNA, 36 bp, Artificial Sequence
  Probe
ccaggtggcccgggttcgactcccggtatgggaacg

SEQ ID NO: 18288 - DNA, 45 bp, Artificial Sequence; identical to SEQ ID NO: 4572
  Probe

SEQ ID NO: 18289 - DNA, 39 bp, Artificial Sequence
  Probe
ccagtctcttcgggggcgtgggttcgaatcccaccgctg

SEQ ID NO: 18290 - DNA, 40 bp, Artificial Sequence
  Probe
ccagtctcttcgggggcgtgggttcgaatcccaccgctgc

SEQ ID NO: 18291 - DNA, 45 bp, Artificial Sequence
  Probe
ccagtctcttcgggggcgtgggttcgaatcccaccgctgccaggt

SEQ ID NO: 18292 - DNA, 50 bp, Artificial Sequence
  Probe
ccagtctcttcgggggcgtgggttcgaatcccaccgctgccaggtgcttc

SEQ ID NO: 18293 - DNA, 45 bp, Artificial Sequence; identical to SEQ ID NO: 4573
  Probe

SEQ ID NO: 18294 - DNA, 31 bp, Artificial Sequence
  Probe
ccagtggcctaatggataaggcatcagcctc

SEQ ID NO: 18295 - DNA, 33 bp, Artificial Sequence
  Probe
ccagtggcctaatggataaggcatcagcctccg

SEQ ID NO: 18296 - DNA, 44 bp, Artificial Sequence; identical to SEQ ID NO: 4575
  Probe

SEQ ID NO: 18297 - DNA, 36 bp, Artificial Sequence
  Probe
ccataccccgaaaatgttggttatacccttcccgta

SEQ ID NO: 18298 - DNA, 38 bp, Artificial Sequence
  Probe
ccataccccgaaaatgttggttatacccttcccgtact

SEQ ID NO: 18299 - DNA, 39 bp, Artificial Sequence
  Probe
ccataccccgaaaatgttggttatacccttcccgtacta

SEQ ID NO: 18300 - DNA, 41 bp, Artificial Sequence; identical to SEQ ID NO: 4577
  Probe

SEQ ID NO: 18301 - DNA, 42 bp, Artificial Sequence; identical to SEQ ID NO: 4578
  Probe

SEQ ID NO: 18302 - DNA, 24 bp, Artificial Sequence
  Probe
ccatagtgtagtggttatcacgtc

SEQ ID NO: 18303 - DNA, 28 bp, Artificial Sequence
  Probe
ccatatggtctagcggttaggattcctg

SEQ ID NO: 18304 - DNA, 29 bp, Artificial Sequence
  Probe
ccatatggtctagcggttaggattcctgg

SEQ ID NO: 18305 - DNA, 31 bp, Artificial Sequence; identical to SEQ ID NO: 4582
  Probe

SEQ ID NO: 18306 - DNA, 34 bp, Artificial Sequence; identical to SEQ ID NO: 577
  Probe

SEQ ID NO: 18307 - DNA, 23 bp, Artificial Sequence
  Probe
ccatcctctgctatcggagtttt

SEQ ID NO: 18308 - DNA, 25 bp, Artificial Sequence
  Probe
ccatcctctgctatcggagtttttt

SEQ ID NO: 18309 - DNA, 22 bp, Artificial Sequence
  Probe
ccatctattgatgagggtctta

SEQ ID NO: 18310 - DNA, 26 bp, Artificial Sequence
  Probe
ccatgcacactactataaccacccta

SEQ ID NO: 18311 - DNA, 27 bp, Artificial Sequence
  Probe
ccatgttaacgttttcttccagctcca

SEQ ID NO: 18312 - DNA, 41 bp, Artificial Sequence; identical to SEQ ID NO: 4587
  Probe

SEQ ID NO: 18313 - DNA, 24 bp, Artificial Sequence
  Probe
ccattggggtctccccgcgcaggt

SEQ ID NO: 18314 - DNA, 21 bp, Artificial Sequence
  Probe
ccattggggtttccccgcgca

SEQ ID NO: 18315 - DNA, 23 bp, Artificial Sequence
  Probe
ccattggggtttccccgcgcagg

SEQ ID NO: 18316 - DNA, 25 bp, Artificial Sequence
  Probe
ccattggggtttccccgcgcaggtt

SEQ ID NO: 18317 - DNA, 26 bp, Artificial Sequence
  Probe
ccattggggtttccccgcgcaggttc

SEQ ID NO: 18318 - DNA, 24 bp, Artificial Sequence
  Probe
ccattgtgctttgcacgcgtgggt

SEQ ID NO: 18319 - DNA, 41 bp, Artificial Sequence
  Probe
ccattgtgctttgcacgcgtgggttcgaatcccatcctcgt

SEQ ID NO: 18320 - DNA, 28 bp, Artificial Sequence
  Probe
cccaaaaattttggtgcaactccaaata

SEQ ID NO: 18321 - DNA, 37 bp, Artificial Sequence; identical to SEQ ID NO: 4594
  Probe

SEQ ID NO: 18322 - DNA, 18 bp, Artificial Sequence
  Probe
cccaaacccactccacct

SEQ ID NO: 18323 - DNA, 24 bp, Artificial Sequence
  Probe
cccaaagacaccccccacagttta

SEQ ID NO: 18324 - DNA, 30 bp, Artificial Sequence
  Probe
cccaaagacaccccccacagtttatgtagc

SEQ ID NO: 18325 - DNA, 31 bp, Artificial Sequence; identical to SEQ ID NO: 4596
  Probe

SEQ ID NO: 18326 - DNA, 32 bp, Artificial Sequence
  Probe
cccaaagacaccccccacagtttatgtagctt

SEQ ID NO: 18327 - DNA, 33 bp, Artificial Sequence
  Probe
cccaaagacaccccccacagtttatgtagctta

SEQ ID NO: 18328 - DNA, 35 bp, Artificial Sequence
  Probe
cccaaagacaccccccacagtttatgtagcttacc

SEQ ID NO: 18329 - DNA, 36 bp, Artificial Sequence
  Probe
cccaaagacaccccccacagtttatgtagcttacct

SEQ ID NO: 18330 - DNA, 37 bp, Artificial Sequence
  Probe
cccaaagacaccccccacagtttatgtagcttacctc

SEQ ID NO: 18331 - DNA, 38 bp, Artificial Sequence
  Probe
cccaaagacaccccccacagtttatgtagcttacctcc

SEQ ID NO: 18332 - DNA, 39 bp, Artificial Sequence
  Probe
cccaaagacaccccccacagtttatgtagcttacctcct

SEQ ID NO: 18333 - DNA, 41 bp, Artificial Sequence
  Probe
cccaaagacaccccccacagtttatgtagcttacctcctca

SEQ ID NO: 18334 - DNA, 24 bp, Artificial Sequence
  Probe
cccaactaaatactaccgtatggc

SEQ ID NO: 18335 - DNA, 16 bp, Artificial Sequence
  Probe
cccaacttacacttag

SEQ ID NO: 18336 - DNA, 17 bp, Artificial Sequence
  Probe
cccaacttacacttagg

SEQ ID NO: 18337 - DNA, 18 bp, Artificial Sequence
  Probe
cccaacttacacttagga

SEQ ID NO: 18338 - DNA, 19 bp, Artificial Sequence
  Probe
cccaacttacacttaggag

SEQ ID NO: 18339 - DNA, 20 bp, Artificial Sequence
  Probe
cccaacttacacttaggaga

SEQ ID NO: 18340 - DNA, 21 bp, Artificial Sequence
  Probe
cccaacttacacttaggagat

SEQ ID NO: 18341 - DNA, 22 bp, Artificial Sequence
  Probe
cccaacttacacttaggagatt

SEQ ID NO: 18342 - DNA, 23 bp, Artificial Sequence
  Probe
cccaacttacacttaggagattt

SEQ ID NO: 18343 - DNA, 24 bp, Artificial Sequence
  Probe
cccaacttacacttaggagatttc

SEQ ID NO: 18344 - DNA, 25 bp, Artificial Sequence
  Probe
cccaacttacacttaggagatttca

SEQ ID NO: 18345 - DNA, 30 bp, Artificial Sequence
  Probe
cccaacttacacttaggagatttcaactta

SEQ ID NO: 18346 - DNA, 46 bp, Artificial Sequence; identical to SEQ ID NO: 4610
  Probe

SEQ ID NO: 18347 - DNA, 49 bp, Artificial Sequence; identical to SEQ ID NO: 4612
  Probe

SEQ ID NO: 18348 - DNA, 50 bp, Artificial Sequence; identical to SEQ ID NO: 4613
  Probe

SEQ ID NO: 18349 - DNA, 17 bp, Artificial Sequence
  Probe
cccaagaacagggtttg

SEQ ID NO: 18350 - DNA, 20 bp, Artificial Sequence
  Probe
cccaagaacagggtttgtta

SEQ ID NO: 18351 - DNA, 20 bp, Artificial Sequence
  Probe
cccacacccacccaagaaca

SEQ ID NO: 18352 - DNA, 26 bp, Artificial Sequence
  Probe
cccacacccacccaagaacagggttt

SEQ ID NO: 18353 - DNA, 27 bp, Artificial Sequence
  Probe
cccacacccacccaagaacagggtttg

SEQ ID NO: 18354 - DNA, 28 bp, Artificial Sequence
  Probe
cccacacccacccaagaacagggtttgt

SEQ ID NO: 18355 - DNA, 29 bp, Artificial Sequence
  Probe
cccacacccacccaagaacagggtttgtt

SEQ ID NO: 18356 - DNA, 30 bp, Artificial Sequence; identical to SEQ ID NO: 4619
  Probe

SEQ ID NO: 18357 - DNA, 31 bp, Artificial Sequence; identical to SEQ ID NO: 4620
  Probe

SEQ ID NO: 18358 - DNA, 32 bp, Artificial Sequence
  Probe
cccacacccacccaagaacagggtttgttaag

SEQ ID NO: 18359 - DNA, 33 bp, Artificial Sequence
  Probe
cccacacccacccaagaacagggtttgttaaga

SEQ ID NO: 18360 - DNA, 22 bp, Artificial Sequence
  Probe
cccacagtttatgtagcttacc

SEQ ID NO: 18361 - DNA, 24 bp, Artificial Sequence
  Probe
cccacagtttatgtagcttacctc

SEQ ID NO: 18362 - DNA, 25 bp, Artificial Sequence
  Probe
cccacagtttatgtagcttacctcc

SEQ ID NO: 18363 - DNA, 26 bp, Artificial Sequence
  Probe
cccacagtttatgtagcttacctcct

SEQ ID NO: 18364 - DNA, 27 bp, Artificial Sequence
  Probe
cccacatggtctagcggttaggattcc

SEQ ID NO: 18365 - DNA, 29 bp, Artificial Sequence
  Probe
cccacatggtctagcggttaggattcctg

SEQ ID NO: 18366 - DNA, 30 bp, Artificial Sequence; identical to SEQ ID NO: 9679
  Probe

SEQ ID NO: 18367 - DNA, 31 bp, Artificial Sequence
  Probe
cccacatggtctagcggttaggattcctggt

SEQ ID NO: 18368 - DNA, 38 bp, Artificial Sequence
  Probe
cccacatggtctagcggttaggattcctggttttcacc

SEQ ID NO: 18369 - DNA, 20 bp, Artificial Sequence
  Probe
cccacccaagaacagggttt

SEQ ID NO: 18370 - DNA, 21 bp, Artificial Sequence
  Probe
cccacccaagaacagggtttg

SEQ ID NO: 18371 - DNA, 22 bp, Artificial Sequence
  Probe
cccacccaagaacagggtttgt

SEQ ID NO: 18372 - DNA, 23 bp, Artificial Sequence
  Probe
cccacccaagaacagggtttgtt

SEQ ID NO: 18373 - DNA, 24 bp, Artificial Sequence
  Probe
cccacccaagaacagggtttgtta

SEQ ID NO: 18374 - DNA, 26 bp, Artificial Sequence
  Probe
cccacccaagaacagggtttgttaag

SEQ ID NO: 18375 - DNA, 27 bp, Artificial Sequence
  Probe
cccacccaagaacagggtttgttaaga

SEQ ID NO: 18376 - DNA, 16 bp, Artificial Sequence
  Probe
cccacccagggacgcc

SEQ ID NO: 18377 - DNA, 17 bp, Artificial Sequence
  Probe
cccacccagggacgcct

SEQ ID NO: 18378 - DNA, 25 bp, Artificial Sequence
  Probe
cccacccagggacgcgctctccttt

SEQ ID NO: 18379 - DNA, 26 bp, Artificial Sequence
  Probe
cccacccagggacgcgtggtgacttt

SEQ ID NO: 18380 - DNA, 27 bp, Artificial Sequence
  Probe
cccacccagggacgcgtggtgactttt

SEQ ID NO: 18381 - DNA, 29 bp, Artificial Sequence
  Probe
cccacccagggacggtcagtgcttctttt

SEQ ID NO: 18382 - DNA, 35 bp, Artificial Sequence
  Probe
cccaccgctgccacacctcagaaggtctcactttt

SEQ ID NO: 18383 - DNA, 27 bp, Artificial Sequence
  Probe
cccaccgctgccagggttgctgtcttt

SEQ ID NO: 18384 - DNA, 28 bp, Artificial Sequence
  Probe
cccaccgctgccagggttgctgtctttt

SEQ ID NO: 18385 - DNA, 30 bp, Artificial Sequence
  Probe
cccactcctggtagctttaggtttttctct

SEQ ID NO: 18386 - DNA, 21 bp, Artificial Sequence
  Probe
cccacttctgacacatacttt

SEQ ID NO: 18387 - DNA, 22 bp, Artificial Sequence
  Probe
cccacttctgacacatactttt

SEQ ID NO: 18388 - DNA, 23 bp, Artificial Sequence
  Probe
cccacttctgacacattcgtttt

SEQ ID NO: 18389 - DNA, 16 bp, Artificial Sequence
  Probe
cccagaggtcgatgga

SEQ ID NO: 18390 - DNA, 19 bp, Artificial Sequence
  Probe
cccagaggtcgatggatcg

SEQ ID NO: 18391 - DNA, 25 bp, Artificial Sequence
  Probe
cccagaggtcgatggatcgaaacca

SEQ ID NO: 18392 - DNA, 38 bp, Artificial Sequence
  Probe
cccagaggtcgatggatcgaaaccatcctctgctaggt

SEQ ID NO: 18393 - DNA, 37 bp, Artificial Sequence; identical to SEQ ID NO: 4630
  Probe

SEQ ID NO: 18394 - DNA, 30 bp, Artificial Sequence
  Probe
cccagcggtgcctcaaccgagcgtccaagc

SEQ ID NO: 18395 - DNA, 16 bp, Artificial Sequence
  Probe
cccagcggtgcctccg

SEQ ID NO: 18396 - DNA, 31 bp, Artificial Sequence
  Probe
cccagcggtgcctccgtgtttcccccacgct

SEQ ID NO: 18397 - DNA, 34 bp, Artificial Sequence
  Probe
cccaggcggcccgggttcgactcccggtgtggga

SEQ ID NO: 18398 - DNA, 35 bp, Artificial Sequence
  Probe
cccaggcggcccgggttcgactcccggtgtgggaa

SEQ ID NO: 18399 - DNA, 36 bp, Artificial Sequence; identical to SEQ ID NO: 586
  Probe

SEQ ID NO: 18400 - DNA, 37 bp, Artificial Sequence; identical to SEQ ID NO: 4631
  Probe

SEQ ID NO: 18401 - DNA, 38 bp, Artificial Sequence; identical to SEQ ID NO: 4632
  Probe

SEQ ID NO: 18402 - DNA, 31 bp, Artificial Sequence
  Probe
cccagggtcgtgggttcgagccccacgttgg

SEQ ID NO: 18403 - DNA, 32 bp, Artificial Sequence
  Probe
cccagggtcgtgggttcgagccccacgttggg

SEQ ID NO: 18404 - DNA, 34 bp, Artificial Sequence
  Probe
cccagggtcgtgggttcgagccccacgttgggcg

SEQ ID NO: 18405 - DNA, 33 bp, Artificial Sequence
  Probe
cccaggtggcccgggttcgactcccggtatggg

SEQ ID NO: 18406 - DNA, 36 bp, Artificial Sequence
  Probe
cccaggtggcccgggttcgactcccggtatgggaac

SEQ ID NO: 18407 - DNA, 38 bp, Artificial Sequence
  Probe
cccaggtggcccgggttcgactcccggtatgggaacaa

SEQ ID NO: 18408 - DNA, 33 bp, Artificial Sequence; identical to SEQ ID NO: 587
  Probe

SEQ ID NO: 18409 - DNA, 45 bp, Artificial Sequence
  Probe
cccataacccagaggtcgatggatcgaaaccatcctctgctaggt

SEQ ID NO: 18410 - DNA, 33 bp, Artificial Sequence; identical to SEQ ID NO: 4641
  Probe

SEQ ID NO: 18411 - DNA, 36 bp, Artificial Sequence
  Probe
cccataccccgaaaatgttggttatacccttcccgt

SEQ ID NO: 18412 - DNA, 41 bp, Artificial Sequence; identical to SEQ ID NO: 4642
  Probe

SEQ ID NO: 18413 - DNA, 42 bp, Artificial Sequence; identical to SEQ ID NO: 4643
  Probe

SEQ ID NO: 18414 - DNA, 43 bp, Artificial Sequence; identical to SEQ ID NO: 4644
  Probe

SEQ ID NO: 18415 - DNA, 28 bp, Artificial Sequence
  Probe
cccatatggtctagcggttaggattcct

SEQ ID NO: 18416 - DNA, 30 bp, Artificial Sequence; identical to SEQ ID NO: 9682
  Probe

SEQ ID NO: 18417 - DNA, 35 bp, Artificial Sequence; identical to SEQ ID NO: 592
  Probe

SEQ ID NO: 18418 - DNA, 38 bp, Artificial Sequence
  Probe
cccatatggtctagcggttaggattcctggttttcacc

SEQ ID NO: 18419 - DNA, 41 bp, Artificial Sequence
  Probe
cccatcctaaagtaaggtcagctaaataagctatcgggccc

SEQ ID NO: 18420 - DNA, 42 bp, Artificial Sequence
  Probe
cccatcctaaagtaaggtcagctaaataagctatcgggccca

SEQ ID NO: 18421 - DNA, 22 bp, Artificial Sequence
  Probe
cccatcctcgtcggccctgttt

SEQ ID NO: 18422 - DNA, 26 bp, Artificial Sequence
  Probe
cccatctggggtggcctgtgactttt

SEQ ID NO: 18423 - DNA, 33 bp, Artificial Sequence; identical to SEQ ID NO: 4647
  Probe

SEQ ID NO: 18424 - DNA, 16 bp, Artificial Sequence
  Probe
cccatgtctaacaaca

SEQ ID NO: 18425 - DNA, 27 bp, Artificial Sequence
  Probe
cccatgtctaacaacatggctttctca

SEQ ID NO: 18426 - DNA, 29 bp, Artificial Sequence
  Probe
cccatgtctaacaacatggctttctcaac

SEQ ID NO: 18427 - DNA, 30 bp, Artificial Sequence; identical to SEQ ID NO: 4650
  Probe

SEQ ID NO: 18428 - DNA, 16 bp, Artificial Sequence
  Probe
cccattcttgcgaccc

SEQ ID NO: 18429 - DNA, 39 bp, Artificial Sequence; identical to SEQ ID NO: 600
  Probe

SEQ ID NO: 18430 - DNA, 42 bp, Artificial Sequence; identical to SEQ ID NO: 4656
  Probe

SEQ ID NO: 18431 - DNA, 22 bp, Artificial Sequence
  Probe
ccccaaaaattttggtgcaact

SEQ ID NO: 18432 - DNA, 24 bp, Artificial Sequence
  Probe
ccccaaaaattttggtgcaactcc

SEQ ID NO: 18433 - DNA, 25 bp, Artificial Sequence
  Probe
ccccaaaaattttggtgcaactcca

SEQ ID NO: 18434 - DNA, 26 bp, Artificial Sequence
  Probe
ccccaaaaattttggtgcaactccaa

SEQ ID NO: 18435 - DNA, 27 bp, Artificial Sequence
  Probe
ccccaaaaattttggtgcaactccaaa

SEQ ID NO: 18436 - DNA, 28 bp, Artificial Sequence
  Probe
ccccaaaaattttggtgcaactccaaat

SEQ ID NO: 18437 - DNA, 29 bp, Artificial Sequence
  Probe
ccccaaaaattttggtgcaactccaaata

SEQ ID NO: 18438 - DNA, 31 bp, Artificial Sequence
  Probe
ccccaaaaattttggtgcaactccaaataaa

SEQ ID NO: 18439 - DNA, 33 bp, Artificial Sequence
  Probe
ccccaaaaattttggtgcaactccaaataaaag

SEQ ID NO: 18440 - DNA, 34 bp, Artificial Sequence
  Probe
ccccaaaaattttggtgcaactccaaataaaagt

SEQ ID NO: 18441 - DNA, 35 bp, Artificial Sequence
  Probe
ccccaaaaattttggtgcaactccaaataaaagta

SEQ ID NO: 18442 - DNA, 36 bp, Artificial Sequence
  Probe
ccccaaaaattttggtgcaactccaaataaaagtaa

SEQ ID NO: 18443 - DNA, 37 bp, Artificial Sequence; identical to SEQ ID NO: 4672
  Probe

SEQ ID NO: 18444 - DNA, 38 bp, Artificial Sequence; identical to SEQ ID NO: 4673
  Probe

SEQ ID NO: 18445 - DNA, 40 bp, Artificial Sequence
  Probe
ccccaaaaattttggtgcaactccaaataaaagtaataac

SEQ ID NO: 18446 - DNA, 19 bp, Artificial Sequence
  Probe
ccccaaacccactccacct

SEQ ID NO: 18447 - DNA, 25 bp, Artificial Sequence
  Probe
ccccaactaaatactaccgtatggc

SEQ ID NO: 18448 - DNA, 23 bp, Artificial Sequence
  Probe
ccccacagtttatgtagcttacc

SEQ ID NO: 18449 - DNA, 28 bp, Artificial Sequence
  Probe
ccccacgttgggcgcgggttgtaacttt

SEQ ID NO: 18450 - DNA, 29 bp, Artificial Sequence
  Probe
ccccacgttgggcgcgggttgtaactttt

SEQ ID NO: 18451 - DNA, 33 bp, Artificial Sequence
  Probe
ccccagtggaaccacggcgtgattcataccttt

SEQ ID NO: 18452 - DNA, 17 bp, Artificial Sequence
  Probe
ccccatgtctaacaaca

SEQ ID NO: 18453 - DNA, 22 bp, Artificial Sequence
  Probe
ccccatgtctaacaacatggct

SEQ ID NO: 18454 - DNA, 23 bp, Artificial Sequence
  Probe
ccccatgtctaacaacatggctt

SEQ ID NO: 18455 - DNA, 24 bp, Artificial Sequence
  Probe
ccccatgtctaacaacatggcttt

SEQ ID NO: 18456 - DNA, 25 bp, Artificial Sequence
  Probe
ccccatgtctaacaacatggctttc

SEQ ID NO: 18457 - DNA, 28 bp, Artificial Sequence
  Probe
ccccatgtctaacaacatggctttctca

SEQ ID NO: 18458 - DNA, 30 bp, Artificial Sequence; identical to SEQ ID NO: 4683
  Probe

SEQ ID NO: 18459 - DNA, 31 bp, Artificial Sequence; identical to SEQ ID NO: 4684
  Probe

SEQ ID NO: 18460 - DNA, 24 bp, Artificial Sequence
  Probe
cccccacagtttatgtagcttacc

SEQ ID NO: 18461 - DNA, 25 bp, Artificial Sequence
  Probe
cccccacagtttatgtagcttacct

SEQ ID NO: 18462 - DNA, 22 bp, Artificial Sequence
  Probe
cccccatgtctaacaacatggc

SEQ ID NO: 18463 - DNA, 23 bp, Artificial Sequence
  Probe
cccccatgtctaacaacatggct

SEQ ID NO: 18464 - DNA, 24 bp, Artificial Sequence
  Probe
cccccatgtctaacaacatggctt

SEQ ID NO: 18465 - DNA, 25 bp, Artificial Sequence
  Probe
cccccatgtctaacaacatggcttt

SEQ ID NO: 18466 - DNA, 26 bp, Artificial Sequence
  Probe
cccccatgtctaacaacatggctttc

SEQ ID NO: 18467 - DNA, 27 bp, Artificial Sequence
  Probe
cccccatgtctaacaacatggctttct

SEQ ID NO: 18468 - DNA, 28 bp, Artificial Sequence
  Probe
cccccatgtctaacaacatggctttctc

SEQ ID NO: 18469 - DNA, 29 bp, Artificial Sequence
  Probe
cccccatgtctaacaacatggctttctca

SEQ ID NO: 18470 - DNA, 30 bp, Artificial Sequence; identical to SEQ ID NO: 4694
  Probe

SEQ ID NO: 18471 - DNA, 31 bp, Artificial Sequence; identical to SEQ ID NO: 4695
  Probe

SEQ ID NO: 18472 - DNA, 32 bp, Artificial Sequence; identical to SEQ ID NO: 4696
  Probe

SEQ ID NO: 18473 - DNA, 21 bp, Artificial Sequence
  Probe
ccccccacagtttatgtagct

SEQ ID NO: 18474 - DNA, 25 bp, Artificial Sequence
  Probe
ccccccacagtttatgtagcttacc

SEQ ID NO: 18475 - DNA, 26 bp, Artificial Sequence
  Probe
ccccccacagtttatgtagcttacct

SEQ ID NO: 18476 - DNA, 27 bp, Artificial Sequence
  Probe
ccccccacagtttatgtagcttacctc

SEQ ID NO: 18477 - DNA, 28 bp, Artificial Sequence
  Probe
ccccccacagtttatgtagcttacctcc

SEQ ID NO: 18478 - DNA, 29 bp, Artificial Sequence
  Probe
ccccccacagtttatgtagcttacctcct

SEQ ID NO: 18479 - DNA, 31 bp, Artificial Sequence
  Probe
ccccccacagtttatgtagcttacctcctca

SEQ ID NO: 18480 - DNA, 36 bp, Artificial Sequence
  Probe
ccccccacagtttatgtagcttacctcctcaaagca

SEQ ID NO: 18481 - DNA, 39 bp, Artificial Sequence
  Probe
ccccccacagtttatgtagcttacctcctcaaagcaata

SEQ ID NO: 18482 - DNA, 41 bp, Artificial Sequence
  Probe
ccccccacagtttatgtagcttacctcctcaaagcaataca

SEQ ID NO: 18483 - DNA, 28 bp, Artificial Sequence
  Probe
ccccctctgtgctccggagttacctcgt

SEQ ID NO: 18484 - DNA, 30 bp, Artificial Sequence
  Probe
ccccctctgtgctccggagttacctcgttt

SEQ ID NO: 18485 - DNA, 23 bp, Artificial Sequence
  Probe
ccccgaaaatgttggttataccc

SEQ ID NO: 18486 - DNA, 27 bp, Artificial Sequence
  Probe
ccccgaaaatgttggttatacccttcc

SEQ ID NO: 18487 - DNA, 28 bp, Artificial Sequence
  Probe
ccccgaaaatgttggttatacccttccc

SEQ ID NO: 18488 - DNA, 29 bp, Artificial Sequence
  Probe
ccccgaaaatgttggttatacccttcccg

SEQ ID NO: 18489 - DNA, 30 bp, Artificial Sequence; identical to SEQ ID NO: 4700
  Probe

SEQ ID NO: 18490 - DNA, 35 bp, Artificial Sequence; identical to SEQ ID NO: 4702
  Probe

SEQ ID NO: 18491 - DNA, 36 bp, Artificial Sequence
  Probe
ccccgaaaatgttggttatacccttcccgtactaat

SEQ ID NO: 18492 - DNA, 37 bp, Artificial Sequence; identical to SEQ ID NO: 4703
  Probe

SEQ ID NO: 18493 - DNA, 30 bp, Artificial Sequence
  Probe
ccccgcctgtcacgcgggagaccggggttc

SEQ ID NO: 18494 - DNA, 34 bp, Artificial Sequence
  Probe
ccccgcctgtcacgcgggagaccggggttcgatt

SEQ ID NO: 18495 - DNA, 29 bp, Artificial Sequence
  Probe
ccccgcgcaggttcgaatcctgccgacta

SEQ ID NO: 18496 - DNA, 29 bp, Artificial Sequence
  Probe
ccccgcgcaggttcgaatcctgctcacag

SEQ ID NO: 18497 - DNA, 16 bp, Artificial Sequence
  Probe
ccccggcacctccaaa

SEQ ID NO: 18498 - DNA, 16 bp, Artificial Sequence
  Probe
ccccggcacctccacc

SEQ ID NO: 18499 - DNA, 18 bp, Artificial Sequence
  Probe
ccccggcacctccaccag

SEQ ID NO: 18500 - DNA, 16 bp, Artificial Sequence
  Probe
ccccggcatctccaaa

SEQ ID NO: 18501 - DNA, 17 bp, Artificial Sequence
  Probe
ccccggcatctccaaat

SEQ ID NO: 18502 - DNA, 17 bp, Artificial Sequence
  Probe
ccccggcatctccagtg

SEQ ID NO: 18503 - DNA, 16 bp, Artificial Sequence
  Probe
ccccggcatctccatt

SEQ ID NO: 18504 - DNA, 17 bp, Artificial Sequence
  Probe
ccccggcatctccattg

SEQ ID NO: 18505 - DNA, 21 bp, Artificial Sequence
  Probe
ccccgggttcaatccccggca

SEQ ID NO: 18506 - DNA, 24 bp, Artificial Sequence
  Probe
ccccgggttcaatccccggcacct

SEQ ID NO: 18507 - DNA, 24 bp, Artificial Sequence
  Probe
ccccgggttcgatccccggcatct

SEQ ID NO: 18508 - DNA, 30 bp, Artificial Sequence; identical to SEQ ID NO: 4721
  Probe

SEQ ID NO: 18509 - DNA, 26 bp, Artificial Sequence
  Probe
cccctggcggtctagtggttaggatt

SEQ ID NO: 18510 - DNA, 28 bp, Artificial Sequence
  Probe
cccctggcggtctagtggttaggattcg

SEQ ID NO: 18511 - DNA, 29 bp, Artificial Sequence
  Probe
cccctggcggtctagtggttaggattcgg

SEQ ID NO: 18512 - DNA, 31 bp, Artificial Sequence
  Probe
cccctggcggtctagtggttaggattcggcg

SEQ ID NO: 18513 - DNA, 32 bp, Artificial Sequence; identical to SEQ ID NO: 4722
  Probe

SEQ ID NO: 18514 - DNA, 33 bp, Artificial Sequence; identical to SEQ ID NO: 4723
  Probe

SEQ ID NO: 18515 - DNA, 34 bp, Artificial Sequence; identical to SEQ ID NO: 4724
  Probe

SEQ ID NO: 18516 - DNA, 35 bp, Artificial Sequence; identical to SEQ ID NO: 4725
  Probe

SEQ ID NO: 18517 - DNA, 36 bp, Artificial Sequence; identical to SEQ ID NO: 4726
  Probe

SEQ ID NO: 18518 - DNA, 37 bp, Artificial Sequence; identical to SEQ ID NO: 4727
  Probe

SEQ ID NO: 18519 - DNA, 21 bp, Artificial Sequence
  Probe
cccgaaaatgttggttatacc

SEQ ID NO: 18520 - DNA, 22 bp, Artificial Sequence
  Probe
cccgaaaatgttggttataccc

SEQ ID NO: 18521 - DNA, 25 bp, Artificial Sequence
  Probe
cccgaaaatgttggttatacccttc

SEQ ID NO: 18522 - DNA, 26 bp, Artificial Sequence
  Probe
cccgaaaatgttggttatacccttcc

SEQ ID NO: 18523 - DNA, 27 bp, Artificial Sequence
  Probe
cccgaaaatgttggttatacccttccc

SEQ ID NO: 18524 - DNA, 28 bp, Artificial Sequence
  Probe
cccgaaaatgttggttatacccttcccg

SEQ ID NO: 18525 - DNA, 29 bp, Artificial Sequence
  Probe
cccgaaaatgttggttatacccttcccgt

SEQ ID NO: 18526 - DNA, 34 bp, Artificial Sequence; identical to SEQ ID NO: 4734
  Probe

SEQ ID NO: 18527 - DNA, 35 bp, Artificial Sequence; identical to SEQ ID NO: 4735
  Probe

SEQ ID NO: 18528 - DNA, 36 bp, Artificial Sequence
  Probe
cccgaaaatgttggttatacccttcccgtactaatt

SEQ ID NO: 18529 - DNA, 15 bp, Artificial Sequence
  Probe
cccgagacaacattt

SEQ ID NO: 18530 - DNA, 22 bp, Artificial Sequence
  Probe
cccgcatcctccactcagcttt

SEQ ID NO: 18531 - DNA, 31 bp, Artificial Sequence
  Probe
cccgcctgtcacgcgggagaccggggttcga

SEQ ID NO: 18532 - DNA, 33 bp, Artificial Sequence
  Probe
cccgcctgtcacgcgggagaccggggttcgatt

SEQ ID NO: 18533 - DNA, 28 bp, Artificial Sequence
  Probe
cccgccttttttcccggcggcgggagaa

SEQ ID NO: 18534 - DNA, 30 bp, Artificial Sequence; identical to SEQ ID NO: 4742
  Probe

SEQ ID NO: 18535 - DNA, 28 bp, Artificial Sequence
  Probe
cccgcgcaggttcgaatcctgccgacta

SEQ ID NO: 18536 - DNA, 25 bp, Artificial Sequence
  Probe
cccggatagctcagtcggtagagca

SEQ ID NO: 18537 - DNA, 28 bp, Artificial Sequence
  Probe
cccggatagctcagtcggtagagcatca

SEQ ID NO: 18538 - DNA, 29 bp, Artificial Sequence
  Probe
cccggatagctcagtcggtagagcatcag

SEQ ID NO: 18539 - DNA, 16 bp, Artificial Sequence
  Probe
cccggcacctccaaac

SEQ ID NO: 18540 - DNA, 16 bp, Artificial Sequence
  Probe
cccggcacctccacca

SEQ ID NO: 18541 - DNA, 17 bp, Artificial Sequence
  Probe
cccggcacctccaccag

SEQ ID NO: 18542 - DNA, 16 bp, Artificial Sequence
  Probe
cccggcatctccattg

SEQ ID NO: 18543 - DNA, 24 bp, Artificial Sequence
  Probe
cccggccaacgcagtgtcagtttt

SEQ ID NO: 18544 - DNA, 26 bp, Artificial Sequence
  Probe
cccggccaacgcagtgtcagtttttc

SEQ ID NO: 18545 - DNA, 29 bp, Artificial Sequence
  Probe
cccggccaacgcagtgtcagtttttctct

SEQ ID NO: 18546 - DNA, 23 bp, Artificial Sequence
  Probe
cccggccaacgcatgcggtacca

SEQ ID NO: 18547 - DNA, 25 bp, Artificial Sequence
  Probe
cccggccaacgcatgcggtaccact

SEQ ID NO: 18548 - DNA, 26 bp, Artificial Sequence
  Probe
cccggccaacgcatgcggtaccactt

SEQ ID NO: 18549 - DNA, 27 bp, Artificial Sequence
  Probe
cccggccaacgcatgcggtaccacttt

SEQ ID NO: 18550 - DNA, 28 bp, Artificial Sequence
  Probe
cccggccaacgcatgcggtaccactttt

SEQ ID NO: 18551 - DNA, 23 bp, Artificial Sequence
  Probe
cccggccaatgcacgagtacagt

SEQ ID NO: 18552 - DNA, 24 bp, Artificial Sequence
  Probe
cccggccaatgcacgagtacagtt

SEQ ID NO: 18553 - DNA, 25 bp, Artificial Sequence
  Probe
cccggccaatgcacgagtacagttt

SEQ ID NO: 18554 - DNA, 26 bp, Artificial Sequence
  Probe
cccggccaatgcacgagtacagtttt

SEQ ID NO: 18555 - DNA, 16 bp, Artificial Sequence
  Probe
cccggcggcgggagaa

SEQ ID NO: 18556 - DNA, 34 bp, Artificial Sequence; identical to SEQ ID NO: 624
  Probe

SEQ ID NO: 18557 - DNA, 36 bp, Artificial Sequence
  Probe
cccggctagctcagtcggtagagcatgagactctta

SEQ ID NO: 18558 - DNA, 39 bp, Artificial Sequence
  Probe
cccggctagctcagtcggtagagcatgagactcttaatc

SEQ ID NO: 18559 - DNA, 50 bp, Artificial Sequence
  Probe
cccggctagctcagtcggtagagcatgagactcttaatctcagggtcgtg

SEQ ID NO: 18560 - DNA, 36 bp, Artificial Sequence
  Probe
cccggctagctcagtcggtagagcatgggactctta

SEQ ID NO: 18561 - DNA, 17 bp, Artificial Sequence
  Probe
cccgggcggaaacaggt

SEQ ID NO: 18562 - DNA, 29 bp, Artificial Sequence
  Probe
cccgggttcaatccccggcacctccacca

SEQ ID NO: 18563 - DNA, 29 bp, Artificial Sequence
  Probe
cccgggttcaattcccggtcagggaacca

SEQ ID NO: 18564 - DNA, 26 bp, Artificial Sequence
  Probe
cccgggttcgatccccagcatctcca

SEQ ID NO: 18565 - DNA, 29 bp, Artificial Sequence
  Probe
cccgggttcgatccccagcatctccagtg

SEQ ID NO: 18566 - DNA, 29 bp, Artificial Sequence
  Probe
cccgggttcgatccccggcatctccattg

SEQ ID NO: 18567 - DNA, 29 bp, Artificial Sequence
  Probe
cccgggttcgattcccggtcagggaattg

SEQ ID NO: 18568 - DNA, 29 bp, Artificial Sequence
  Probe
cccgggttcgattcccggtcatggaacca

SEQ ID NO: 18569 - DNA, 16 bp, Artificial Sequence
  Probe
cccgggtttcggcact

SEQ ID NO: 18570 - DNA, 17 bp, Artificial Sequence
  Probe
cccgggtttcggcaggg

SEQ ID NO: 18571 - DNA, 27 bp, Artificial Sequence
  Probe
cccggtaatcgcataaaacttaaaact

SEQ ID NO: 18572 - DNA, 32 bp, Artificial Sequence
  Probe
cccggtaatcgcataaaacttaaaactttaca

SEQ ID NO: 18573 - DNA, 36 bp, Artificial Sequence; identical to SEQ ID NO: 4758
  Probe

SEQ ID NO: 18574 - DNA, 16 bp, Artificial Sequence
  Probe
cccggtcagggaacca

SEQ ID NO: 18575 - DNA, 33 bp, Artificial Sequence; identical to SEQ ID NO: 4763
  Probe

SEQ ID NO: 18576 - DNA, 21 bp, Artificial Sequence
  Probe
ccctgctaactgggctttttt

SEQ ID NO: 18577 - DNA, 32 bp, Artificial Sequence
  Probe
ccctggcggtctagtggttaggattcggcgct

SEQ ID NO: 18578 - DNA, 16 bp, Artificial Sequence
  Probe
ccctggtggtctagtg

SEQ ID NO: 18579 - DNA, 17 bp, Artificial Sequence
  Probe
ccctggtggtctagtgg

SEQ ID NO: 18580 - DNA, 25 bp, Artificial Sequence
  Probe
ccctggtggtctagtggctaggatt

SEQ ID NO: 18581 - DNA, 27 bp, Artificial Sequence
  Probe
ccctggtggtctagtggctaggattcg

SEQ ID NO: 18582 - DNA, 28 bp, Artificial Sequence
  Probe
ccctggtggtctagtggctaggattcgg

SEQ ID NO: 18583 - DNA, 31 bp, Artificial Sequence; identical to SEQ ID NO: 633
  Probe

SEQ ID NO: 18584 - DNA, 18 bp, Artificial Sequence
  Probe
ccctggtggtctagtggt

SEQ ID NO: 18585 - DNA, 24 bp, Artificial Sequence
  Probe
ccctggtggtctagtggttaggat

SEQ ID NO: 18586 - DNA, 25 bp, Artificial Sequence
  Probe
ccctggtggtctagtggttaggatt

SEQ ID NO: 18587 - DNA, 26 bp, Artificial Sequence
  Probe
ccctggtggtctagtggttaggattc

SEQ ID NO: 18588 - DNA, 27 bp, Artificial Sequence
  Probe
ccctggtggtctagtggttaggattcg

SEQ ID NO: 18589 - DNA, 28 bp, Artificial Sequence
  Probe
ccctggtggtctagtggttaggattcgg

SEQ ID NO: 18590 - DNA, 29 bp, Artificial Sequence
  Probe
ccctggtggtctagtggttaggattcggc

SEQ ID NO: 18591 - DNA, 39 bp, Artificial Sequence
  Probe
ccctggtggtctagtggttaggattcggcgctctcaccg

SEQ ID NO: 18592 - DNA, 49 bp, Artificial Sequence
  Probe
ccctggtggtctagtggttaggattcggcgctctcaccgccgcggcccg

SEQ ID NO: 18593 - DNA, 50 bp, Artificial Sequence; identical to SEQ ID NO: 4772
  Probe

SEQ ID NO: 18594 - DNA, 30 bp, Artificial Sequence
  Probe
cccttcgtggtcgttgccatgttaacgttt

SEQ ID NO: 18595 - DNA, 20 bp, Artificial Sequence
  Probe
ccgaaaatgttggttatacc

SEQ ID NO: 18596 - DNA, 21 bp, Artificial Sequence
  Probe
ccgaaaatgttggttataccc

SEQ ID NO: 18597 - DNA, 25 bp, Artificial Sequence
  Probe
ccgaaaatgttggttatacccttcc

SEQ ID NO: 18598 - DNA, 26 bp, Artificial Sequence
  Probe
ccgaaaatgttggttatacccttccc

SEQ ID NO: 18599 - DNA, 27 bp, Artificial Sequence
  Probe
ccgaaaatgttggttatacccttcccg

SEQ ID NO: 18600 - DNA, 28 bp, Artificial Sequence
  Probe
ccgaaaatgttggttatacccttcccgt

SEQ ID NO: 18601 - DNA, 33 bp, Artificial Sequence; identical to SEQ ID NO: 4783
  Probe

SEQ ID NO: 18602 - DNA, 34 bp, Artificial Sequence
  Probe
ccgaaaatgttggttatacccttcccgtactaat

SEQ ID NO: 18603 - DNA, 35 bp, Artificial Sequence
  Probe
ccgaaaatgttggttatacccttcccgtactaatt

SEQ ID NO: 18604 - DNA, 32 bp, Artificial Sequence
  Probe
ccgaaaggttggtggttcgagcccacccaggg

SEQ ID NO: 18605 - DNA, 35 bp, Artificial Sequence; identical to SEQ ID NO: 646
  Probe

SEQ ID NO: 18606 - DNA, 36 bp, Artificial Sequence
  Probe
ccgaaaggttggtggttcgagcccacccagggacgc

SEQ ID NO: 18607 - DNA, 38 bp, Artificial Sequence
  Probe
ccgaaaggttggtggttcgagcccacccagggacgcct

SEQ ID NO: 18608 - DNA, 33 bp, Artificial Sequence
  Probe
ccgaaaggttggtggttcgatcccacccaggga

SEQ ID NO: 18609 - DNA, 36 bp, Artificial Sequence
  Probe
ccgagaggtcccgggttcaaatcccggacgagcccc

SEQ ID NO: 18610 - DNA, 38 bp, Artificial Sequence
  Probe
ccgagaggtcccgggttcaaatcccggacgagcccctc

SEQ ID NO: 18611 - DNA, 25 bp, Artificial Sequence
  Probe
ccgagcgtccaagctctttccattt

SEQ ID NO: 18612 - DNA, 26 bp, Artificial Sequence
  Probe
ccgagcgtccaagctctttccatttt

SEQ ID NO: 18613 - DNA, 36 bp, Artificial Sequence; identical to SEQ ID NO: 4787
  Probe

SEQ ID NO: 18614 - DNA, 36 bp, Artificial Sequence
  Probe
ccgaggttgtgagttcgatcctcacctggagcactt

SEQ ID NO: 18615 - DNA, 16 bp, Artificial Sequence
  Probe
ccgcagcaacctcggt

SEQ ID NO: 18616 - DNA, 17 bp, Artificial Sequence
  Probe
ccgcagcaacctcggtt

SEQ ID NO: 18617 - DNA, 32 bp, Artificial Sequence; identical to SEQ ID NO: 4790
  Probe

SEQ ID NO: 18618 - DNA, 33 bp, Artificial Sequence; identical to SEQ ID NO: 4791
  Probe

SEQ ID NO: 18619 - DNA, 35 bp, Artificial Sequence
  Probe
ccgcagcaacctcggttcgaatccgagtcacggca

SEQ ID NO: 18620 - DNA, 36 bp, Artificial Sequence
  Probe
ccgcagcaacctcggttcgaatccgagtcacggcaa

SEQ ID NO: 18621 - DNA, 37 bp, Artificial Sequence; identical to SEQ ID NO: 4792
  Probe

SEQ ID NO: 18622 - DNA, 36 bp, Artificial Sequence
  Probe
ccgcagcaacctcggttcgaatccgagtcacggcag

SEQ ID NO: 18623 - DNA, 37 bp, Artificial Sequence; identical to SEQ ID NO: 4793
  Probe

SEQ ID NO: 18624 - DNA, 38 bp, Artificial Sequence; identical to SEQ ID NO: 4794
  Probe

SEQ ID NO: 18625 - DNA, 36 bp, Artificial Sequence
  Probe
ccgcagcaacctcggttcgaatccgagtcacggcat

SEQ ID NO: 18626 - DNA, 37 bp, Artificial Sequence; identical to SEQ ID NO: 4795
  Probe

SEQ ID NO: 18627 - DNA, 38 bp, Artificial Sequence; identical to SEQ ID NO: 4796
  Probe

SEQ ID NO: 18628 - DNA, 33 bp, Artificial Sequence
  Probe
ccgcagcccgggttcgattcccggtcatggaac

SEQ ID NO: 18629 - DNA, 35 bp, Artificial Sequence
  Probe
ccgcagcccgggttcgattcccggtcatggaacca

SEQ ID NO: 18630 - DNA, 38 bp, Artificial Sequence
  Probe
ccgccgcagcccgggttcgattcccggtcatggaacca

SEQ ID NO: 18631 - DNA, 38 bp, Artificial Sequence
  Probe
ccgccgcggcccgggttcgattcccggccagggaattg

SEQ ID NO: 18632 - DNA, 30 bp, Artificial Sequence
  Probe
ccgccgcggcccgggttcgattcccggtca

SEQ ID NO: 18633 - DNA, 31 bp, Artificial Sequence
  Probe
ccgccgcggcccgggttcgattcccggtcag

SEQ ID NO: 18634 - DNA, 36 bp, Artificial Sequence; identical to SEQ ID NO: 4797
  Probe

SEQ ID NO: 18635 - DNA, 37 bp, Artificial Sequence
  Probe
ccgccgcggcccgggttcgattcccggtcagggaaag

SEQ ID NO: 18636 - DNA, 38 bp, Artificial Sequence
  Probe
ccgccgcggcccgggttcgattcccggtcagggaaaga

SEQ ID NO: 18637 - DNA, 36 bp, Artificial Sequence; identical to SEQ ID NO: 4798
  Probe

SEQ ID NO: 18638 - DNA, 37 bp, Artificial Sequence; identical to SEQ ID NO: 4799
  Probe

SEQ ID NO: 18639 - DNA, 38 bp, Artificial Sequence
  Probe
ccgccgcggcccgggttcgattcccggtcagggaagcc

SEQ ID NO: 18640 - DNA, 37 bp, Artificial Sequence
  Probe
ccgccgcggcccgggttcgattcccggtcagggaagt

SEQ ID NO: 18641 - DNA, 38 bp, Artificial Sequence
  Probe
ccgccgcggcccgggttcgattcccggtcagggaagtc

SEQ ID NO: 18642 - DNA, 38 bp, Artificial Sequence
  Probe
ccgccgcggcccgggttcgattcccggtcagggaagtt

SEQ ID NO: 18643 - DNA, 36 bp, Artificial Sequence; identical to SEQ ID NO: 4800
  Probe

SEQ ID NO: 18644 - DNA, 37 bp, Artificial Sequence
  Probe
ccgccgcggcccgggttcgattcccggtcagggaatg

SEQ ID NO: 18645 - DNA, 38 bp, Artificial Sequence
  Probe
ccgccgcggcccgggttcgattcccggtcagggaatga

SEQ ID NO: 18646 - DNA, 37 bp, Artificial Sequence; identical to SEQ ID NO: 4801
  Probe

SEQ ID NO: 18647 - DNA, 38 bp, Artificial Sequence; identical to SEQ ID NO: 4802
  Probe

SEQ ID NO: 18648 - DNA, 24 bp, Artificial Sequence
  Probe
ccgcctgtcacgcgggagaccggg

SEQ ID NO: 18649 - DNA, 25 bp, Artificial Sequence
  Probe
ccgcctgtcacgcgggagaccgggg

SEQ ID NO: 18650 - DNA, 27 bp, Artificial Sequence
  Probe
ccgcctgtcacgcgggagaccggggtt

SEQ ID NO: 18651 - DNA, 28 bp, Artificial Sequence
  Probe
ccgcctgtcacgcgggagaccggggttc

SEQ ID NO: 18652 - DNA, 41 bp, Artificial Sequence
  Probe
ccgcctgtcacgcgggagaccggggttcaattccccgacgg

SEQ ID NO: 18653 - DNA, 32 bp, Artificial Sequence
  Probe
ccgcctgtcacgcgggagaccggggttcgatt

SEQ ID NO: 18654 - DNA, 33 bp, Artificial Sequence
  Probe
ccgcctgtcacgcgggagaccggggttcgattc

SEQ ID NO: 18655 - DNA, 41 bp, Artificial Sequence
  Probe
ccgcctgtcacgcgggagaccggggttcgattccccgacgg

SEQ ID NO: 18656 - DNA, 42 bp, Artificial Sequence
  Probe
ccgcctgtcacgcgggagaccggggttcgattccccgacggg

SEQ ID NO: 18657 - DNA, 50 bp, Artificial Sequence; identical to SEQ ID NO: 4804
  Probe

SEQ ID NO: 18658 - DNA, 22 bp, Artificial Sequence
  Probe
ccgcgcaggttcgaatcctgcc

SEQ ID NO: 18659 - DNA, 16 bp, Artificial Sequence
  Probe
ccgcggcccgggttcg

SEQ ID NO: 18660 - DNA, 28 bp, Artificial Sequence
  Probe
ccgcggcccgggttcgattcccggtcag

SEQ ID NO: 18661 - DNA, 30 bp, Artificial Sequence
  Probe
ccgcggcccgggttcgattcccggtcagga

SEQ ID NO: 18662 - DNA, 30 bp, Artificial Sequence
  Probe
ccgcggcccgggttcgattcccggtcaggg

SEQ ID NO: 18663 - DNA, 33 bp, Artificial Sequence; identical to SEQ ID NO: 4809
  Probe

SEQ ID NO: 18664 - DNA, 34 bp, Artificial Sequence
  Probe
ccgcggcccgggttcgattcccggtcagggaaag

SEQ ID NO: 18665 - DNA, 35 bp, Artificial Sequence
  Probe
ccgcggcccgggttcgattcccggtcagggaaaga

SEQ ID NO: 18666 - DNA, 33 bp, Artificial Sequence; identical to SEQ ID NO: 4810
  Probe

SEQ ID NO: 18667 - DNA, 34 bp, Artificial Sequence
  Probe
ccgcggcccgggttcgattcccggtcagggaagc

SEQ ID NO: 18668 - DNA, 35 bp, Artificial Sequence
  Probe
ccgcggcccgggttcgattcccggtcagggaagcc

SEQ ID NO: 18669 - DNA, 34 bp, Artificial Sequence
  Probe
ccgcggcccgggttcgattcccggtcagggaagt

SEQ ID NO: 18670 - DNA, 33 bp, Artificial Sequence; identical to SEQ ID NO: 4811
  Probe

SEQ ID NO: 18671 - DNA, 34 bp, Artificial Sequence
  Probe
ccgcggcccgggttcgattcccggtcagggaatg

SEQ ID NO: 18672 - DNA, 35 bp, Artificial Sequence
  Probe
ccgcggcccgggttcgattcccggtcagggaatga

SEQ ID NO: 18673 - DNA, 35 bp, Artificial Sequence; identical to SEQ ID NO: 4812
  Probe

SEQ ID NO: 18674 - DNA, 31 bp, Artificial Sequence
  Probe
ccgctgccacacctcagaaggtctcactttt

SEQ ID NO: 18675 - DNA, 24 bp, Artificial Sequence
  Probe
ccgctgccagggttgctgtctttt

SEQ ID NO: 18676 - DNA, 35 bp, Artificial Sequence
  Probe
ccgctggtgtagtggtatcatgcaagattcccatt

SEQ ID NO: 18677 - DNA, 37 bp, Artificial Sequence
  Probe
ccgctggtgtagtggtatcatgcaagattcccattct

SEQ ID NO: 18678 - DNA, 38 bp, Artificial Sequence
  Probe
ccgctggtgtagtggtatcatgcaagattcccattctt

SEQ ID NO: 18679 - DNA, 46 bp, Artificial Sequence
  Probe
ccgctggtgtagtggtatcatgcaagattcccattcttgcgacccg

SEQ ID NO: 18680 - DNA, 48 bp, Artificial Sequence
  Probe
ccgctggtgtagtggtatcatgcaagattcccattcttgcgacccggg

SEQ ID NO: 18681 - DNA, 49 bp, Artificial Sequence
  Probe
ccgctggtgtagtggtatcatgcaagattcccattcttgcgacccgggt

SEQ ID NO: 18682 - DNA, 50 bp, Artificial Sequence
  Probe
ccgctggtgtagtggtatcatgcaagattcccattcttgcgacccgggtt

SEQ ID NO: 18683 - DNA, 25 bp, Artificial Sequence
  Probe
ccggagatgaaaacctttttccaag

SEQ ID NO: 18684 - DNA, 28 bp, Artificial Sequence
  Probe
ccggagatgaaaacctttttccaaggac

SEQ ID NO: 18685 - DNA, 29 bp, Artificial Sequence
  Probe
ccggagatgaaaacctttttccaaggaca

SEQ ID NO: 18686 - DNA, 30 bp, Artificial Sequence; identical to SEQ ID NO: 4816
  Probe

SEQ ID NO: 18687 - DNA, 31 bp, Artificial Sequence; identical to SEQ ID NO: 4817
  Probe

SEQ ID NO: 18688 - DNA, 32 bp, Artificial Sequence; identical to SEQ ID NO: 4818
  Probe

SEQ ID NO: 18689 - DNA, 33 bp, Artificial Sequence; identical to SEQ ID NO: 4819
  Probe

SEQ ID NO: 18690 - DNA, 21 bp, Artificial Sequence
  Probe
ccggagctggggattgtgggt

SEQ ID NO: 18691 - DNA, 24 bp, Artificial Sequence
  Probe
ccggatagctcagtcggtagagca

SEQ ID NO: 18692 - DNA, 27 bp, Artificial Sequence
  Probe
ccggatagctcagtcggtagagcatca

SEQ ID NO: 18693 - DNA, 35 bp, Artificial Sequence
  Probe
ccggatagctcagtcggtagagcatcagactttta

SEQ ID NO: 18694 - DNA, 36 bp, Artificial Sequence
  Probe
ccggatagctcagtcggtagagcatcagacttttaa

SEQ ID NO: 18695 - DNA, 23 bp, Artificial Sequence
  Probe
ccggccaacgcagtgtcagtttt

SEQ ID NO: 18696 - DNA, 26 bp, Artificial Sequence
  Probe
ccggccaacgcagtgtcagtttttct

SEQ ID NO: 18697 - DNA, 28 bp, Artificial Sequence
  Probe
ccggccaacgcagtgtcagtttttctct

SEQ ID NO: 18698 - DNA, 24 bp, Artificial Sequence
  Probe
ccggccaacgcatgcggtaccact

SEQ ID NO: 18699 - DNA, 25 bp, Artificial Sequence
  Probe
ccggccaacgcatgcggtaccactt

SEQ ID NO: 18700 - DNA, 26 bp, Artificial Sequence
  Probe
ccggccaacgcatgcggtaccacttt

SEQ ID NO: 18701 - DNA, 27 bp, Artificial Sequence
  Probe
ccggccaacgcatgcggtaccactttt

SEQ ID NO: 18702 - DNA, 15 bp, Artificial Sequence
  Probe
ccggcggcgggagaa

SEQ ID NO: 18703 - DNA, 31 bp, Artificial Sequence
  Probe
ccggctagctcagtcgatagagcatgagact

SEQ ID NO: 18704 - DNA, 20 bp, Artificial Sequence
  Probe
ccggctagctcagtcggtag

SEQ ID NO: 18705 - DNA, 21 bp, Artificial Sequence
  Probe
ccggctagctcagtcggtaga

SEQ ID NO: 18706 - DNA, 22 bp, Artificial Sequence
  Probe
ccggctagctcagtcggtagag

SEQ ID NO: 18707 - DNA, 23 bp, Artificial Sequence
  Probe
ccggctagctcagtcggtagagc

SEQ ID NO: 18708 - DNA, 26 bp, Artificial Sequence
  Probe
ccggctagctcagtcggtagagcatg

SEQ ID NO: 18709 - DNA, 28 bp, Artificial Sequence
  Probe
ccggctagctcagtcggtagagcatgag

SEQ ID NO: 18710 - DNA, 32 bp, Artificial Sequence
  Probe
ccggctagctcagtcggtagagcatgagaccc

SEQ ID NO: 18711 - DNA, 33 bp, Artificial Sequence; identical to SEQ ID NO: 4825
  Probe

SEQ ID NO: 18712 - DNA, 33 bp, Artificial Sequence; identical to SEQ ID NO: 683
  Probe

SEQ ID NO: 18713 - DNA, 34 bp, Artificial Sequence; identical to SEQ ID NO: 684
  Probe

SEQ ID NO: 18714 - DNA, 38 bp, Artificial Sequence
  Probe
ccggctccatagctcaggggttagagcactggtcttgt

SEQ ID NO: 18715 - DNA, 15 bp, Artificial Sequence
  Probe
ccgggcgcggtggct

SEQ ID NO: 18716 - DNA, 16 bp, Artificial Sequence
  Probe
ccgggcggaaacacac

SEQ ID NO: 18717 - DNA, 30 bp, Artificial Sequence
  Probe
ccgggcggaaacacactaaaaaatcccttt

SEQ ID NO: 18718 - DNA, 31 bp, Artificial Sequence
  Probe
ccgggcggaaacacactaaaaaatccctttt

SEQ ID NO: 18719 - DNA, 16 bp, Artificial Sequence
  Probe
ccgggcggaaacacct

SEQ ID NO: 18720 - DNA, 16 bp, Artificial Sequence
  Probe
ccgggcggaaacaggt

SEQ ID NO: 18721 - DNA, 29 bp, Artificial Sequence
  Probe
ccggggttcgattccccgacggggaggca

SEQ ID NO: 18722 - DNA, 16 bp, Artificial Sequence
  Probe
ccgggtgccccctcaa

SEQ ID NO: 18723 - DNA, 16 bp, Artificial Sequence
  Probe
ccgggtgccccctctt

SEQ ID NO: 18724 - DNA, 21 bp, Artificial Sequence
  Probe
ccggtaatcgcataaaactta

SEQ ID NO: 18725 - DNA, 26 bp, Artificial Sequence
  Probe
ccggtaatcgcataaaacttaaaact

SEQ ID NO: 18726 - DNA, 17 bp, Artificial Sequence
  Probe
ccggttagctcagttgg

SEQ ID NO: 18727 - DNA, 18 bp, Artificial Sequence
  Probe
ccggttagctcagttggt

SEQ ID NO: 18728 - DNA, 15 bp, Artificial Sequence
  Probe
ccgtacggtttttct

SEQ ID NO: 18729 - DNA, 24 bp, Artificial Sequence
  Probe
ccgtagtgtagcggttatcacatt

SEQ ID NO: 18730 - DNA, 27 bp, Artificial Sequence
  Probe
ccgtagtgtagcggttatcacattcgc

SEQ ID NO: 18731 - DNA, 28 bp, Artificial Sequence
  Probe
ccgtagtgtagcggttatcacattcgcc

SEQ ID NO: 18732 - DNA, 29 bp, Artificial Sequence
  Probe
ccgtagtgtagcggttatcacattcgcct

SEQ ID NO: 18733 - DNA, 30 bp, Artificial Sequence
  Probe
ccgtagtgtagcggttatcacattcgcctc

SEQ ID NO: 18734 - DNA, 31 bp, Artificial Sequence
  Probe
ccgtagtgtagcggttatcacattcgcctca

SEQ ID NO: 18735 - DNA, 31 bp, Artificial Sequence; identical to SEQ ID NO: 4835
  Probe

SEQ ID NO: 18736 - DNA, 32 bp, Artificial Sequence; identical to SEQ ID NO: 4836
  Probe

SEQ ID NO: 18737 - DNA, 19 bp, Artificial Sequence
  Probe
ccgtagtgtagtggttatc

SEQ ID NO: 18738 - DNA, 23 bp, Artificial Sequence
  Probe
ccgtagtgtagtggttatcacgt

SEQ ID NO: 18739 - DNA, 24 bp, Artificial Sequence
  Probe
ccgtagtgtagtggttatcacgtt

SEQ ID NO: 18740 - DNA, 26 bp, Artificial Sequence
  Probe
ccgtagtgtagtggttatcacgttcg

SEQ ID NO: 18741 - DNA, 27 bp, Artificial Sequence
  Probe
ccgtagtgtagtggttatcacgttcgc

SEQ ID NO: 18742 - DNA, 28 bp, Artificial Sequence
  Probe
ccgtagtgtagtggttatcacgttcgcc

SEQ ID NO: 18743 - DNA, 29 bp, Artificial Sequence
  Probe
ccgtagtgtagtggttatcacgttcgcct

SEQ ID NO: 18744 - DNA, 36 bp, Artificial Sequence
  Probe
ccgtagtgtagtggttatcacgttcgcctaacacgc

SEQ ID NO: 18745 - DNA, 50 bp, Artificial Sequence; identical to SEQ ID NO: 4842
  Probe

SEQ ID NO: 18746 - DNA, 30 bp, Artificial Sequence; identical to SEQ ID NO: 4843
  Probe

SEQ ID NO: 18747 - DNA, 31 bp, Artificial Sequence; identical to SEQ ID NO: 4844
  Probe

SEQ ID NO: 18748 - DNA, 32 bp, Artificial Sequence; identical to SEQ ID NO: 4845
  Probe

SEQ ID NO: 18749 - DNA, 33 bp, Artificial Sequence; identical to SEQ ID NO: 4846
  Probe

SEQ ID NO: 18750 - DNA, 36 bp, Artificial Sequence
  Probe
ccgtagtgtagtggttatcacgttcgcctcacacgc

SEQ ID NO: 18751 - DNA, 50 bp, Artificial Sequence; identical to SEQ ID NO: 4847
  Probe

SEQ ID NO: 18752 - DNA, 24 bp, Artificial Sequence
  Probe
ccgtgatcgtatagtggttagtac

SEQ ID NO: 18753 - DNA, 25 bp, Artificial Sequence
  Probe
ccgtgatcgtatagtggttagtact

SEQ ID NO: 18754 - DNA, 26 bp, Artificial Sequence
  Probe
ccgtgatcgtatagtggttagtactc

SEQ ID NO: 18755 - DNA, 27 bp, Artificial Sequence
  Probe
ccgtgatcgtatagtggttagtactct

SEQ ID NO: 18756 - DNA, 28 bp, Artificial Sequence
  Probe
ccgtgatcgtatagtggttagtactctg

SEQ ID NO: 18757 - DNA, 30 bp, Artificial Sequence; identical to SEQ ID NO: 8580
  Probe

SEQ ID NO: 18758 - DNA, 32 bp, Artificial Sequence
  Probe
ccgtgatcgtatagtggttagtactctgcgtt

SEQ ID NO: 18759 - DNA, 33 bp, Artificial Sequence; identical to SEQ ID NO: 688
  Probe

SEQ ID NO: 18760 - DNA, 36 bp, Artificial Sequence
  Probe
ccgtgatcgtatagtggttagtactctgcgttgtgg

SEQ ID NO: 18761 - DNA, 37 bp, Artificial Sequence
  Probe
ccgtgatcgtatagtggttagtactctgcgttgtggc

SEQ ID NO: 18762 - DNA, 38 bp, Artificial Sequence
  Probe
ccgtgatcgtatagtggttagtactctgcgttgtggcc

SEQ ID NO: 18763 - DNA, 28 bp, Artificial Sequence
  Probe
ccgtggcttagttggttaaagcgcctgt

SEQ ID NO: 18764 - DNA, 24 bp, Artificial Sequence
  Probe
ccgtggtgtagtggttatcacatt

SEQ ID NO: 18765 - DNA, 27 bp, Artificial Sequence
  Probe
ccgtggtgtagtggttatcacattcgc

SEQ ID NO: 18766 - DNA, 28 bp, Artificial Sequence
  Probe
ccgtggtgtagtggttatcacattcgcc

SEQ ID NO: 18767 - DNA, 20 bp, Artificial Sequence
  Probe
ccgtgtttcccccacgcttt

SEQ ID NO: 18768 - DNA, 21 bp, Artificial Sequence
  Probe
ccgtgtttcccccacgctttt

SEQ ID NO: 18769 - DNA, 29 bp, Artificial Sequence
  Probe
ccgttaacttccaattaactagttttgac

SEQ ID NO: 18770 - DNA, 30 bp, Artificial Sequence; identical to SEQ ID NO: 4854
  Probe

SEQ ID NO: 18771 - DNA, 50 bp, Artificial Sequence; identical to SEQ ID NO: 4855
  Probe

SEQ ID NO: 18772 - DNA, 23 bp, Artificial Sequence
  Probe
cctaacacgcgaaaggtccccgg

SEQ ID NO: 18773 - DNA, 24 bp, Artificial Sequence
  Probe
cctaacacgcgaaaggtccccggt

SEQ ID NO: 18774 - DNA, 24 bp, Artificial Sequence
  Probe
cctagccccaaacccactccacct

SEQ ID NO: 18775 - DNA, 18 bp, Artificial Sequence
  Probe
cctagcctttctattagc

SEQ ID NO: 18776 - DNA, 17 bp, Artificial Sequence
  Probe
cctcaaagcaatacact

SEQ ID NO: 18777 - DNA, 20 bp, Artificial Sequence
  Probe
cctcaaagcaatacactgaa

SEQ ID NO: 18778 - DNA, 20 bp, Artificial Sequence
  Probe
cctcacacgcgaaaggtccc

SEQ ID NO: 18779 - DNA, 23 bp, Artificial Sequence
  Probe
cctcacacgcgaaaggtccccgg

SEQ ID NO: 18780 - DNA, 25 bp, Artificial Sequence
  Probe
cctcacacgcgaaaggtccccggtt

SEQ ID NO: 18781 - DNA, 23 bp, Artificial Sequence
  Probe
cctcacacggggcacaataattt

SEQ ID NO: 18782 - DNA, 23 bp, Artificial Sequence
  Probe
cctcacctggagcaagacccttt

SEQ ID NO: 18783 - DNA, 20 bp, Artificial Sequence
  Probe
cctcagaaggtctcactttt

SEQ ID NO: 18784 - DNA, 24 bp, Artificial Sequence
  Probe
cctcagagggggcagctgccattt

SEQ ID NO: 18785 - DNA, 32 bp, Artificial Sequence; identical to SEQ ID NO: 4867
  Probe

SEQ ID NO: 18786 - DNA, 25 bp, Artificial Sequence
  Probe
cctcatttacataaatattatacta

SEQ ID NO: 18787 - DNA, 16 bp, Artificial Sequence
  Probe
cctcctcaaagcaata

SEQ ID NO: 18788 - DNA, 20 bp, Artificial Sequence
  Probe
cctcctcaaagcaatacact

SEQ ID NO: 18789 - DNA, 16 bp, Artificial Sequence
  Probe
cctcgctggggcctcc

SEQ ID NO: 18790 - DNA, 26 bp, Artificial Sequence
  Probe
cctcgttagcgcagtaggtagcgcgt

SEQ ID NO: 18791 - DNA, 29 bp, Artificial Sequence
  Probe
cctcgttagtatagtggtgagtatccccg

SEQ ID NO: 18792 - DNA, 30 bp, Artificial Sequence
  Probe
cctcgttagtatagtggtgagtatccccgc

SEQ ID NO: 18793 - DNA, 31 bp, Artificial Sequence
  Probe
cctcgttagtatagtggtgagtatccccgcc

SEQ ID NO: 18794 - DNA, 32 bp, Artificial Sequence; identical to SEQ ID NO: 4870
  Probe

SEQ ID NO: 18795 - DNA, 33 bp, Artificial Sequence; identical to SEQ ID NO: 693
  Probe

SEQ ID NO: 18796 - DNA, 38 bp, Artificial Sequence
  Probe
cctcgttagtatagtggtgagtatccccgcctgtcacg

SEQ ID NO: 18797 - DNA, 31 bp, Artificial Sequence
  Probe
cctcgttagtatagtggttagtatccccgcc

SEQ ID NO: 18798 - DNA, 34 bp, Artificial Sequence
  Probe
cctcgttagtatagtggttagtatccccgcctgt

SEQ ID NO: 18799 - DNA, 28 bp, Artificial Sequence
  Probe
cctctttggccttttcgagatactgttt

SEQ ID NO: 18800 - DNA, 25 bp, Artificial Sequence
  Probe
cctgccacgcgggaggcccgggttt

SEQ ID NO: 18801 - DNA, 26 bp, Artificial Sequence
  Probe
cctgccacgcgggaggcccgggtttg

SEQ ID NO: 18802 - DNA, 20 bp, Artificial Sequence
  Probe
cctgctaactgggctttttt

SEQ ID NO: 18803 - DNA, 31 bp, Artificial Sequence
  Probe
cctggcggtctagtggttaggattcggcgct

SEQ ID NO: 18804 - DNA, 32 bp, Artificial Sequence
  Probe
cctggcggtctagtggttaggattcggcgctc

SEQ ID NO: 18805 - DNA, 25 bp, Artificial Sequence
  Probe
cctggctggctcgcgatgtctgttt

SEQ ID NO: 18806 - DNA, 26 bp, Artificial Sequence
  Probe
cctggctggctcgcgatgtctgtttt

SEQ ID NO: 18807 - DNA, 31 bp, Artificial Sequence
  Probe
cctggtggtctagtgcttaggattcggtgct

SEQ ID NO: 18808 - DNA, 27 bp, Artificial Sequence
  Probe
cctggtggtctagtggctaggattcgg

SEQ ID NO: 18809 - DNA, 30 bp, Artificial Sequence
  Probe
cctggtggtctagtggctaggattcggcgc

SEQ ID NO: 18810 - DNA, 23 bp, Artificial Sequence
  Probe
cctggtggtctagtggttaggat

SEQ ID NO: 18811 - DNA, 24 bp, Artificial Sequence
  Probe
cctggtggtctagtggttaggatt

SEQ ID NO: 18812 - DNA, 25 bp, Artificial Sequence
  Probe
cctggtggtctagtggttaggattc

SEQ ID NO: 18813 - DNA, 26 bp, Artificial Sequence
  Probe
cctggtggtctagtggttaggattcg

SEQ ID NO: 18814 - DNA, 27 bp, Artificial Sequence
  Probe
cctggtggtctagtggttaggattcgg

SEQ ID NO: 18815 - DNA, 28 bp, Artificial Sequence
  Probe
cctggtggtctagtggttaggattcggc

SEQ ID NO: 18816 - DNA, 36 bp, Artificial Sequence; identical to SEQ ID NO: 4877
  Probe

SEQ ID NO: 18817 - DNA, 16 bp, Artificial Sequence
  Probe
cctgtcacgcgggaga

SEQ ID NO: 18818 - DNA, 17 bp, Artificial Sequence
  Probe
cctgtcacgcgggagac

SEQ ID NO: 18819 - DNA, 18 bp, Artificial Sequence
  Probe
cctgtcacgcgggagacc

SEQ ID NO: 18820 - DNA, 20 bp, Artificial Sequence
  Probe
cctgtcacgcgggagaccgg

SEQ ID NO: 18821 - DNA, 21 bp, Artificial Sequence
  Probe
cctgtcacgcgggagaccggg

SEQ ID NO: 18822 - DNA, 22 bp, Artificial Sequence
  Probe
cctgtcacgcgggagaccgggg

SEQ ID NO: 18823 - DNA, 25 bp, Artificial Sequence
  Probe
cctgtcacgcgggagaccggggttc

SEQ ID NO: 18824 - DNA, 40 bp, Artificial Sequence
  Probe
cctgtcacgcgggagaccggggttcaattccccgacgggg

SEQ ID NO: 18825 - DNA, 45 bp, Artificial Sequence; identical to SEQ ID NO: 4880
  Probe

SEQ ID NO: 18826 - DNA, 50 bp, Artificial Sequence; identical to SEQ ID NO: 4881
  Probe

SEQ ID NO: 18827 - DNA, 30 bp, Artificial Sequence
  Probe
cctgtcacgcgggagaccggggttcgattc

SEQ ID NO: 18828 - DNA, 36 bp, Artificial Sequence
  Probe
cctgtcacgcgggagaccggggttcgattccccgac

SEQ ID NO: 18829 - DNA, 41 bp, Artificial Sequence
  Probe
cctgtcacgcgggagaccggggttcgattccccgacgggga

SEQ ID NO: 18830 - DNA, 43 bp, Artificial Sequence
  Probe
cctgtcacgcgggagaccggggttcgattccccgacggggaga

SEQ ID NO: 18831 - DNA, 45 bp, Artificial Sequence; identical to SEQ ID NO: 4883
  Probe

SEQ ID NO: 18832 - DNA, 50 bp, Artificial Sequence
  Probe
cctgtcacgcgggagaccggggttcgattccccgacggggagaaaagttg

SEQ ID NO: 18833 - DNA, 45 bp, Artificial Sequence; identical to SEQ ID NO: 4885
  Probe

SEQ ID NO: 18834 - DNA, 43 bp, Artificial Sequence
  Probe
cctgtcacgcgggagaccggggttcgattccccgacggggagg

SEQ ID NO: 18835 - DNA, 45 bp, Artificial Sequence; identical to SEQ ID NO: 4886
  Probe

SEQ ID NO: 18836 - DNA, 48 bp, Artificial Sequence; identical to SEQ ID NO: 4887
  Probe

SEQ ID NO: 18837 - DNA, 49 bp, Artificial Sequence; identical to SEQ ID NO: 4888
  Probe

SEQ ID NO: 18838 - DNA, 50 bp, Artificial Sequence; identical to SEQ ID NO: 4889
  Probe

SEQ ID NO: 18839 - DNA, 50 bp, Artificial Sequence
  Probe
cctgtcacgcgggagaccggggttcgattccccgacggggaggcagccgt

SEQ ID NO: 18840 - DNA, 45 bp, Artificial Sequence; identical to SEQ ID NO: 4890
  Probe

SEQ ID NO: 18841 - DNA, 50 bp, Artificial Sequence
  Probe
cctgtcacgcgggagaccggggttcgattccccgacggggaggccaagta

SEQ ID NO: 18842 - DNA, 21 bp, Artificial Sequence
  Probe
cctgtcccgtacggtttttct

SEQ ID NO: 18843 - DNA, 16 bp, Artificial Sequence
  Probe
cctgttggcttacttt

SEQ ID NO: 18844 - DNA, 31 bp, Artificial Sequence
  Probe
ccttaggtcgctggttcgattccggctcgaa

SEQ ID NO: 18845 - DNA, 32 bp, Artificial Sequence
  Probe
ccttaggtcgctggttcgattccggctcgaag

SEQ ID NO: 18846 - DNA, 16 bp, Artificial Sequence
  Probe
ccttccaagcagttga

SEQ ID NO: 18847 - DNA, 17 bp, Artificial Sequence
  Probe
ccttccaagcagttgac

SEQ ID NO: 18848 - DNA, 18 bp, Artificial Sequence
  Probe
ccttccaagcagttgacc

SEQ ID NO: 18849 - DNA, 20 bp, Artificial Sequence
  Probe
ccttccaagcagttgacccg

SEQ ID NO: 18850 - DNA, 21 bp, Artificial Sequence
  Probe
ccttccaagcagttgacccgg

SEQ ID NO: 18851 - DNA, 22 bp, Artificial Sequence
  Probe
ccttccaagcagttgacccggg

SEQ ID NO: 18852 - DNA, 25 bp, Artificial Sequence
  Probe
ccttccaagcagttgacccgggttc

SEQ ID NO: 18853 - DNA, 26 bp, Artificial Sequence
  Probe
ccttccaagcagttgacccgggttcg

SEQ ID NO: 18854 - DNA, 27 bp, Artificial Sequence
  Probe
ccttccaagcagttgacccgggttcga

SEQ ID NO: 18855 - DNA, 16 bp, Artificial Sequence
  Probe
ccttcgatagctcagc

SEQ ID NO: 18856 - DNA, 17 bp, Artificial Sequence
  Probe
ccttcgatagctcagct

SEQ ID NO: 18857 - DNA, 19 bp, Artificial Sequence
  Probe
ccttcgatagctcagctgg

SEQ ID NO: 18858 - DNA, 16 bp, Artificial Sequence
  Probe
ccttcgatagctcagt

SEQ ID NO: 18859 - DNA, 19 bp, Artificial Sequence
  Probe
ccttcgatagctcagttgg

SEQ ID NO: 18860 - DNA, 20 bp, Artificial Sequence
  Probe
ccttcgatagctcagttggt

SEQ ID NO: 18861 - DNA, 31 bp, Artificial Sequence
  Probe
ccttgcgaaactactttcttgattcaggtgt

SEQ ID NO: 18862 - DNA, 32 bp, Artificial Sequence
  Probe
ccttgcgaaactactttcttgattcaggtgtt

SEQ ID NO: 18863 - DNA, 27 bp, Artificial Sequence
  Probe
ccttttaagttaaagattaagagaacc

SEQ ID NO: 18864 - DNA, 28 bp, Artificial Sequence
  Probe
ccttttaagttaaagattaagagaacca

SEQ ID NO: 18865 - DNA, 50 bp, Artificial Sequence; identical to SEQ ID NO: 4905
  Probe

SEQ ID NO: 18866 - DNA, 15 bp, Artificial Sequence
  Probe
ccttttttccccttt

SEQ ID NO: 18867 - DNA, 24 bp, Artificial Sequence
  Probe
ccttttttcccggcggcgggagaa

SEQ ID NO: 18868 - DNA, 26 bp, Artificial Sequence
  Probe
ccttttttcccggcggcgggagaagt

SEQ ID NO: 18869 - DNA, 20 bp, Artificial Sequence
  Probe
cgaaaatgttggttataccc

SEQ ID NO: 18870 - DNA, 23 bp, Artificial Sequence
  Probe
cgaaaatgttggttatacccttc

SEQ ID NO: 18871 - DNA, 24 bp, Artificial Sequence
  Probe
cgaaaatgttggttatacccttcc

SEQ ID NO: 18872 - DNA, 25 bp, Artificial Sequence
  Probe
cgaaaatgttggttatacccttccc

SEQ ID NO: 18873 - DNA, 26 bp, Artificial Sequence
  Probe
cgaaaatgttggttatacccttcccg

SEQ ID NO: 18874 - DNA, 27 bp, Artificial Sequence
  Probe
cgaaaatgttggttatacccttcccgt

SEQ ID NO: 18875 - DNA, 32 bp, Artificial Sequence; identical to SEQ ID NO: 4915
  Probe

SEQ ID NO: 18876 - DNA, 33 bp, Artificial Sequence; identical to SEQ ID NO: 4916
  Probe

SEQ ID NO: 18877 - DNA, 34 bp, Artificial Sequence; identical to SEQ ID NO: 4917
  Probe

SEQ ID NO: 18878 - DNA, 21 bp, Artificial Sequence
  Probe
cgaaaccgggcggaaacacct

SEQ ID NO: 18879 - DNA, 27 bp, Artificial Sequence
  Probe
cgaaactactttcttgattcaggtgtt

SEQ ID NO: 18880 - DNA, 32 bp, Artificial Sequence
  Probe
cgaaaggtccccggttcgaaaccgggcggaaa

SEQ ID NO: 18881 - DNA, 37 bp, Artificial Sequence; identical to SEQ ID NO: 4922
  Probe

SEQ ID NO: 18882 - DNA, 34 bp, Artificial Sequence
  Probe
cgaaaggttggtggttcgagcccacccagggacg

SEQ ID NO: 18883 - DNA, 36 bp, Artificial Sequence
  Probe
cgaaaggttggtggttcgagcccacccagggacgcc

SEQ ID NO: 18884 - DNA, 37 bp, Artificial Sequence; identical to SEQ ID NO: 4923
  Probe

SEQ ID NO: 18885 - DNA, 29 bp, Artificial Sequence
  Probe
cgaaccccactcctggtagctttaggttt

SEQ ID NO: 18886 - DNA, 30 bp, Artificial Sequence
  Probe
cgaaccccactcctggtagctttaggtttt

SEQ ID NO: 18887 - DNA, 21 bp, Artificial Sequence
  Probe
cgaaccccgtccgtgcctgat

SEQ ID NO: 18888 - DNA, 28 bp, Artificial Sequence
  Probe
cgaacctcagagggggcagctgccattt

SEQ ID NO: 18889 - DNA, 29 bp, Artificial Sequence
  Probe
cgaacctcagagggggcagctgccatttt

SEQ ID NO: 18890 - DNA, 27 bp, Artificial Sequence
  Probe
cgaagaagcagcttcaaacctgccggg

SEQ ID NO: 18891 - DNA, 28 bp, Artificial Sequence
  Probe
cgaagaagcagcttcaaacctgccgggg

SEQ ID NO: 18892 - DNA, 29 bp, Artificial Sequence
  Probe
cgaagaagcagcttcaaacctgccggggc

SEQ ID NO: 18893 - DNA, 30 bp, Artificial Sequence; identical to SEQ ID NO: 4930
  Probe

SEQ ID NO: 18894 - DNA, 31 bp, Artificial Sequence; identical to SEQ ID NO: 4931
  Probe

SEQ ID NO: 18895 - DNA, 32 bp, Artificial Sequence; identical to SEQ ID NO: 4932
  Probe

SEQ ID NO: 18896 - DNA, 33 bp, Artificial Sequence; identical to SEQ ID NO: 4933
  Probe

SEQ ID NO: 18897 - DNA, 34 bp, Artificial Sequence; identical to SEQ ID NO: 4934
  Probe

SEQ ID NO: 18898 - DNA, 36 bp, Artificial Sequence; identical to SEQ ID NO: 4936
  Probe

SEQ ID NO: 18899 - DNA, 38 bp, Artificial Sequence
  Probe
cgaagaagcagcttcaaacctgccggggcttctcccgc

SEQ ID NO: 18900 - DNA, 20 bp, Artificial Sequence
  Probe
cgaatcacgtcggggtcaaa

SEQ ID NO: 18901 - DNA, 24 bp, Artificial Sequence
  Probe
cgaatcacgtcggggtcaaacttt

SEQ ID NO: 18902 - DNA, 21 bp, Artificial Sequence
  Probe
cgaatcccaccgctgccacac

SEQ ID NO: 18903 - DNA, 32 bp, Artificial Sequence
  Probe
cgaatcccaccgctgccagggttgctgtcttt

SEQ ID NO: 18904 - DNA, 33 bp, Artificial Sequence
  Probe
cgaatcccaccgctgccagggttgctgtctttt

SEQ ID NO: 18905 - DNA, 21 bp, Artificial Sequence
  Probe
cgaatcccaccgctgccaggt

SEQ ID NO: 18906 - DNA, 31 bp, Artificial Sequence
  Probe
cgaatcccaccgctgccaggtgcttcccttt

SEQ ID NO: 18907 - DNA, 29 bp, Artificial Sequence
  Probe
cgaatcccactcctgacagttcgtacttt

SEQ ID NO: 18908 - DNA, 21 bp, Artificial Sequence
  Probe
cgaatcccacttctgacacaa

SEQ ID NO: 18909 - DNA, 26 bp, Artificial Sequence
  Probe
cgaatcccacttctgacacatacttt

SEQ ID NO: 18910 - DNA, 27 bp, Artificial Sequence
  Probe
cgaatcccacttctgacacatactttt

SEQ ID NO: 18911 - DNA, 27 bp, Artificial Sequence
  Probe
cgaatcccacttctgacacattcgttt

SEQ ID NO: 18912 - DNA, 33 bp, Artificial Sequence
  Probe
cgaatcccacttctgacagagctcaattacttt

SEQ ID NO: 18913 - DNA, 20 bp, Artificial Sequence
  Probe
cgaatcccagcggggcctgt

SEQ ID NO: 18914 - DNA, 28 bp, Artificial Sequence
  Probe
cgaatcccagcggggcctgttgtagttt

SEQ ID NO: 18915 - DNA, 21 bp, Artificial Sequence
  Probe
cgaatcccagcggtgcctccg

SEQ ID NO: 18916 - DNA, 27 bp, Artificial Sequence
  Probe
cgaatcccatcctcgtcggccctgttt

SEQ ID NO: 18917 - DNA, 21 bp, Artificial Sequence
  Probe
cgaatcctgccgactacggca

SEQ ID NO: 18918 - DNA, 33 bp, Artificial Sequence
  Probe
cgaatcctgccgactacgggaatgtcagctttt

SEQ ID NO: 18919 - DNA, 21 bp, Artificial Sequence
  Probe
cgaatcctgccgactacgtca

SEQ ID NO: 18920 - DNA, 28 bp, Artificial Sequence
  Probe
cgaatcctgctcacagcgtcactagttt

SEQ ID NO: 18921 - DNA, 16 bp, Artificial Sequence
  Probe
cgaccccttatttacc

SEQ ID NO: 18922 - DNA, 17 bp, Artificial Sequence
  Probe
cgaccccttatttaccg

SEQ ID NO: 18923 - DNA, 32 bp, Artificial Sequence
  Probe
cgacccgggttcgattcccgggcggcgcactt

SEQ ID NO: 18924 - DNA, 26 bp, Artificial Sequence
  Probe
cgactcattaaattatgataatcata

SEQ ID NO: 18925 - DNA, 32 bp, Artificial Sequence; identical to SEQ ID NO: 4942
  Probe

SEQ ID NO: 18926 - DNA, 35 bp, Artificial Sequence; identical to SEQ ID NO: 4943
  Probe

SEQ ID NO: 18927 - DNA, 37 bp, Artificial Sequence; identical to SEQ ID NO: 4944
  Probe

SEQ ID NO: 18928 - DNA, 21 bp, Artificial Sequence
  Probe
cgactcccggtatgggaacaa

SEQ ID NO: 18929 - DNA, 27 bp, Artificial Sequence
  Probe
cgactcccggtatgggaacgcttcctt

SEQ ID NO: 18930 - DNA, 28 bp, Artificial Sequence
  Probe
cgactcccggtatgggaacgcttcctta

SEQ ID NO: 18931 - DNA, 29 bp, Artificial Sequence
  Probe
cgactcccggtatgggaacgcttccttat

SEQ ID NO: 18932 - DNA, 30 bp, Artificial Sequence
  Probe
cgactcccggtatgggaacgcttccttatt

SEQ ID NO: 18933 - DNA, 31 bp, Artificial Sequence
  Probe
cgactcccggtatgggaacgcttccttattt

SEQ ID NO: 18934 - DNA, 20 bp, Artificial Sequence
  Probe
cgactcccggtgtgggaacg

SEQ ID NO: 18935 - DNA, 21 bp, Artificial Sequence
  Probe
cgactcccggtgtgggaacgc

SEQ ID NO: 18936 - DNA, 30 bp, Artificial Sequence
  Probe
cgactcccggtgtgggaacgccgaaatttt

SEQ ID NO: 18937 - DNA, 28 bp, Artificial Sequence
  Probe
cgactcccggtgtgggaatgactggacc

SEQ ID NO: 18938 - DNA, 30 bp, Artificial Sequence
  Probe
cgactcctggctggctcgcgatgtctgttt

SEQ ID NO: 18939 - DNA, 30 bp, Artificial Sequence
  Probe
cgagaggtcccgggttcaaatcccggacga

SEQ ID NO: 18940 - DNA, 31 bp, Artificial Sequence
  Probe
cgagaggtcccgggttcaaatcccggacgag

SEQ ID NO: 18941 - DNA, 32 bp, Artificial Sequence
  Probe
cgagaggtcccgggttcaaatcccggacgagc

SEQ ID NO: 18942 - DNA, 34 bp, Artificial Sequence
  Probe
cgagaggtcccgggttcaaatcccggacgagccc

SEQ ID NO: 18943 - DNA, 36 bp, Artificial Sequence
  Probe
cgagaggtcccgggttcaaatcccggacgagccccc

SEQ ID NO: 18944 - DNA, 37 bp, Artificial Sequence
  Probe
cgagaggtcccgggttcaaatcccggacgagccccct

SEQ ID NO: 18945 - DNA, 37 bp, Artificial Sequence
  Probe
cgagaggtcccgggttcaaatcccggacgagcccggt

SEQ ID NO: 18946 - DNA, 16 bp, Artificial Sequence
  Probe
cgagcccacccaggga

SEQ ID NO: 18947 - DNA, 19 bp, Artificial Sequence
  Probe
cgagcccacccagggacgc

SEQ ID NO: 18948 - DNA, 20 bp, Artificial Sequence
  Probe
cgagcccacccagggacgcc

SEQ ID NO: 18949 - DNA, 21 bp, Artificial Sequence
  Probe
cgagcccacccagggacgcct

SEQ ID NO: 18950 - DNA, 20 bp, Artificial Sequence
  Probe
cgagcccacccagggacgcg

SEQ ID NO: 18951 - DNA, 31 bp, Artificial Sequence
  Probe
cgagcccacccagggacgcgtggtgactttt

SEQ ID NO: 18952 - DNA, 20 bp, Artificial Sequence
  Probe
cgagcccacccagggacgct

SEQ ID NO: 18953 - DNA, 20 bp, Artificial Sequence
  Probe
cgagcccacccagggacggt

SEQ ID NO: 18954 - DNA, 32 bp, Artificial Sequence
  Probe
cgagcccacccagggacggtcagtgcttcttt

SEQ ID NO: 18955 - DNA, 33 bp, Artificial Sequence
  Probe
cgagcccacccagggacggtcagtgcttctttt

SEQ ID NO: 18956 - DNA, 26 bp, Artificial Sequence
  Probe
cgagccccacgttgggcgctgtgttt

SEQ ID NO: 18957 - DNA, 27 bp, Artificial Sequence
  Probe
cgagccccacgttgggcgctgtgtttt

SEQ ID NO: 18958 - DNA, 27 bp, Artificial Sequence
  Probe
cgagccccacgttgggcgggtttgttt

SEQ ID NO: 18959 - DNA, 20 bp, Artificial Sequence
  Probe
cgagccccagtggaaccacg

SEQ ID NO: 18960 - DNA, 29 bp, Artificial Sequence
  Probe
cgagcctcacacggggcagtctaacgttt

SEQ ID NO: 18961 - DNA, 30 bp, Artificial Sequence
  Probe
cgagcctcacacggggcagtctaacgtttt

SEQ ID NO: 18962 - DNA, 20 bp, Artificial Sequence
  Probe
cgagcctcacctggagcaag

SEQ ID NO: 18963 - DNA, 27 bp, Artificial Sequence
  Probe
cgagcctcacctggagcaagacccttt

SEQ ID NO: 18964 - DNA, 28 bp, Artificial Sequence
  Probe
cgagcctcacctggagcaagaccctttt

SEQ ID NO: 18965 - DNA, 30 bp, Artificial Sequence
  Probe
cgagctagctcagtcggtagagcatgggac

SEQ ID NO: 18966 - DNA, 31 bp, Artificial Sequence
  Probe
cgagctagctcagtcggtagagcatgggact

SEQ ID NO: 18967 - DNA, 32 bp, Artificial Sequence
  Probe
cgagctagctcagtcggtagagcatgggactc

SEQ ID NO: 18968 - DNA, 28 bp, Artificial Sequence
  Probe
cgaggccccgggttcaatccccggcacc

SEQ ID NO: 18969 - DNA, 29 bp, Artificial Sequence
  Probe
cgaggccccgggttcaatccccggcacct

SEQ ID NO: 18970 - DNA, 24 bp, Artificial Sequence
  Probe
cgaggtagggctttggctgtgggg

SEQ ID NO: 18971 - DNA, 35 bp, Artificial Sequence
  Probe
cgaggttgtgagttcgagcctcacctggagcattg

SEQ ID NO: 18972 - DNA, 30 bp, Artificial Sequence
  Probe
cgagtcccatctggggtggcctgtgacttt

SEQ ID NO: 18973 - DNA, 20 bp, Artificial Sequence
  Probe
cgagtcccatctgggtcgcg

SEQ ID NO: 18974 - DNA, 20 bp, Artificial Sequence
  Probe
cgagtcccggcggagtcgta

SEQ ID NO: 18975 - DNA, 27 bp, Artificial Sequence
  Probe
cgagtcccggcggagtcgtaacgcttt

SEQ ID NO: 18976 - DNA, 28 bp, Artificial Sequence
  Probe
cgagtcccggcggagtcgtaacgctttt

SEQ ID NO: 18977 - DNA, 20 bp, Artificial Sequence
  Probe
cgagtcccttcgtggtcgtc

SEQ ID NO: 18978 - DNA, 24 bp, Artificial Sequence
  Probe
cgagtcccttcgtggtcgtcgttt

SEQ ID NO: 18979 - DNA, 20 bp, Artificial Sequence
  Probe
cgagtcctgccgcggtcgaa

SEQ ID NO: 18980 - DNA, 20 bp, Artificial Sequence
  Probe
cgatcccacccagggacgga

SEQ ID NO: 18981 - DNA, 25 bp, Artificial Sequence
  Probe
cgatccccagcatctccagtgtttt

SEQ ID NO: 18982 - DNA, 21 bp, Artificial Sequence
  Probe
cgatccccagtacctccaggc

SEQ ID NO: 18983 - DNA, 28 bp, Artificial Sequence
  Probe
cgatccccagtacctccaggccgtgttt

SEQ ID NO: 18984 - DNA, 19 bp, Artificial Sequence
  Probe
cgatccccggcatctccaa

SEQ ID NO: 18985 - DNA, 19 bp, Artificial Sequence
  Probe
cgatccccggcatctccag

SEQ ID NO: 18986 - DNA, 20 bp, Artificial Sequence
  Probe
cgatccccggcatctccagt

SEQ ID NO: 18987 - DNA, 27 bp, Artificial Sequence
  Probe
cgatccccggcatctccagtgtagttt

SEQ ID NO: 18988 - DNA, 19 bp, Artificial Sequence
  Probe
cgatccccggcatctccat

SEQ ID NO: 18989 - DNA, 20 bp, Artificial Sequence
  Probe
cgatccccggcatctccatt

SEQ ID NO: 18990 - DNA, 21 bp, Artificial Sequence
  Probe
cgatccccggcatctccattg

SEQ ID NO: 18991 - DNA, 21 bp, Artificial Sequence
  Probe
cgatcccgggcggaaacaggt

SEQ ID NO: 18992 - DNA, 21 bp, Artificial Sequence
  Probe
cgatcctcacacggggcacaa

SEQ ID NO: 18993 - DNA, 27 bp, Artificial Sequence
  Probe
cgatcctcacacggggcacaataattt

SEQ ID NO: 18994 - DNA, 20 bp, Artificial Sequence
  Probe
cgatcctcacctggagcact

SEQ ID NO: 18995 - DNA, 23 bp, Artificial Sequence
  Probe
cgatcctcacctggagcactttt

SEQ ID NO: 18996 - DNA, 20 bp, Artificial Sequence
  Probe
cgatgcccgcatcctccact

SEQ ID NO: 18997 - DNA, 21 bp, Artificial Sequence
  Probe
cgatgcccgcatcctccactc

SEQ ID NO: 18998 - DNA, 20 bp, Artificial Sequence
  Probe
cgatgcccgcatcctccagt

SEQ ID NO: 18999 - DNA, 19 bp, Artificial Sequence
  Probe
cgattccccgacggggaga

SEQ ID NO: 19000 - DNA, 20 bp, Artificial Sequence
  Probe
cgattccccgacggggagac

SEQ ID NO: 19001 - DNA, 19 bp, Artificial Sequence
  Probe
cgattccccgacggggagg

SEQ ID NO: 19002 - DNA, 20 bp, Artificial Sequence
  Probe
cgattccccgacggggaggc

SEQ ID NO: 19003 - DNA, 21 bp, Artificial Sequence
  Probe
cgattccccgacggggaggca

SEQ ID NO: 19004 - DNA, 30 bp, Artificial Sequence
  Probe
cgattccccgacggggaggcacagtaattg

SEQ ID NO: 19005 - DNA, 33 bp, Artificial Sequence
  Probe
cgattccccgacggggaggcacagtaattgttt

SEQ ID NO: 19006 - DNA, 21 bp, Artificial Sequence
  Probe
cgattccccgacggggaggcc

SEQ ID NO: 19007 - DNA, 21 bp, Artificial Sequence
  Probe
cgattcccggccaacgcaagt

SEQ ID NO: 19008 - DNA, 21 bp, Artificial Sequence
  Probe
cgattcccggccaacgcagtg

SEQ ID NO: 19009 - DNA, 23 bp, Artificial Sequence
  Probe
cgattcccggccaacgcagtgtc

SEQ ID NO: 19010 - DNA, 23 bp, Artificial Sequence
  Probe
cgattcccggccaatgcaagttt

SEQ ID NO: 19011 - DNA, 21 bp, Artificial Sequence
  Probe
cgattcccggccaatgcacga

SEQ ID NO: 19012 - DNA, 21 bp, Artificial Sequence
  Probe
cgattcccggccaatgcagca

SEQ ID NO: 19013 - DNA, 21 bp, Artificial Sequence
  Probe
cgattcccggcccatgcagca

SEQ ID NO: 19014 - DNA, 21 bp, Artificial Sequence
  Probe
cgattcccgggcggcgcactt

SEQ ID NO: 19015 - DNA, 20 bp, Artificial Sequence
  Probe
cgattcccgggcggcgcata

SEQ ID NO: 19016 - DNA, 21 bp, Artificial Sequence
  Probe
cgattcccggtcagggaacaa

SEQ ID NO: 19017 - DNA, 20 bp, Artificial Sequence
  Probe
cgattcccggtcagggaagt

SEQ ID NO: 19018 - DNA, 27 bp, Artificial Sequence
  Probe
cgattcccggtcagggaagtcttgttt

SEQ ID NO: 19019 - DNA, 21 bp, Artificial Sequence
  Probe
cgattcccggtcatggaacca

SEQ ID NO: 19020 - DNA, 21 bp, Artificial Sequence
  Probe
cgattccggctcgaaggactt

SEQ ID NO: 19021 - DNA, 33 bp, Artificial Sequence
  Probe
cgattccggctcgaaggacttcgtctgtaattt

SEQ ID NO: 19022 - DNA, 21 bp, Artificial Sequence
  Probe
cgattcctggtcagggaacca

SEQ ID NO: 19023 - DNA, 20 bp, Artificial Sequence
  Probe
cgattccttccttttttgtc

SEQ ID NO: 19024 - DNA, 20 bp, Artificial Sequence
  Probe
cgattctcatagtcctagaa

SEQ ID NO: 19025 - DNA, 21 bp, Artificial Sequence
  Probe
cgattctcatagtcctagaaa

SEQ ID NO: 19026 - DNA, 39 bp, Artificial Sequence
  Probe
cgcagaaggtcctgggttcaagccccagtggaaccatgg

SEQ ID NO: 19027 - DNA, 38 bp, Artificial Sequence; identical to SEQ ID NO: 4966
  Probe

SEQ ID NO: 19028 - DNA, 39 bp, Artificial Sequence; identical to SEQ ID NO: 4967
  Probe

SEQ ID NO: 19029 - DNA, 39 bp, Artificial Sequence; identical to SEQ ID NO: 4968
  Probe

SEQ ID NO: 19030 - DNA, 31 bp, Artificial Sequence
  Probe
cgcagcaacctcggttcgaatccgagtcacg

SEQ ID NO: 19031 - DNA, 32 bp, Artificial Sequence; identical to SEQ ID NO: 4969
  Probe

SEQ ID NO: 19032 - DNA, 36 bp, Artificial Sequence
  Probe
cgcagcaacctcggttcgaatccgagtcacggcaaa

SEQ ID NO: 19033 - DNA, 36 bp, Artificial Sequence
  Probe
cgcagcaacctcggttcgaatccgagtcacggcagg

SEQ ID NO: 19034 - DNA, 37 bp, Artificial Sequence; identical to SEQ ID NO: 4972
  Probe

SEQ ID NO: 19035 - DNA, 36 bp, Artificial Sequence
  Probe
cgcagcaacctcggttcgaatccgagtcacggcatt

SEQ ID NO: 19036 - DNA, 37 bp, Artificial Sequence; identical to SEQ ID NO: 4973
  Probe

SEQ ID NO: 19037 - DNA, 23 bp, Artificial Sequence
  Probe
cgcataaaacttaaaactttaca

SEQ ID NO: 19038 - DNA, 29 bp, Artificial Sequence
  Probe
cgcataaaacttaaaactttacagtcaga

SEQ ID NO: 19039 - DNA, 46 bp, Artificial Sequence; identical to SEQ ID NO: 4979
  Probe

SEQ ID NO: 19040 - DNA, 50 bp, Artificial Sequence; identical to SEQ ID NO: 4981
  Probe

SEQ ID NO: 19041 - DNA, 32 bp, Artificial Sequence
  Probe
cgccaaggtcgcgggttcgatccccgtacggg

SEQ ID NO: 19042 - DNA, 33 bp, Artificial Sequence
  Probe
cgccaaggtcgcgggttcgatccccgtacgggc

SEQ ID NO: 19043 - DNA, 38 bp, Artificial Sequence
  Probe
cgccaaggtcgcgggttcgatccccgtacgggccaact

SEQ ID NO: 19044 - DNA, 38 bp, Artificial Sequence
  Probe
cgccaaggtcgcgggttcgatccccgtacgggccacag

SEQ ID NO: 19045 - DNA, 38 bp, Artificial Sequence
  Probe
cgccaaggtcgcgggttcgatccccgtacgggccacga

SEQ ID NO: 19046 - DNA, 38 bp, Artificial Sequence
  Probe
cgccaaggtcgcgggttcgatccccgtacgggccactg

SEQ ID NO: 19047 - DNA, 38 bp, Artificial Sequence
  Probe
cgccaaggtcgcgggttcgatccccgtacgggccactt

SEQ ID NO: 19048 - DNA, 38 bp, Artificial Sequence
  Probe
cgccaaggtcgcgggttcgatccccgtacgggccagga

SEQ ID NO: 19049 - DNA, 38 bp, Artificial Sequence
  Probe
cgccaaggtcgcgggttcgatccccgtacgggccaggc

SEQ ID NO: 19050 - DNA, 38 bp, Artificial Sequence
  Probe
cgccaaggtcgcgggttcgatccccgtactggccacgt

SEQ ID NO: 19051 - DNA, 20 bp, Artificial Sequence
  Probe
cgccagactcaaggtaagca

SEQ ID NO: 19052 - DNA, 27 bp, Artificial Sequence
  Probe
cgcccggatagctcagtcggtagagca

SEQ ID NO: 19053 - DNA, 32 bp, Artificial Sequence
  Probe
cgcccggatagctcagtcggtagagcatcaga

SEQ ID NO: 19054 - DNA, 33 bp, Artificial Sequence; identical to SEQ ID NO: 719
  Probe

SEQ ID NO: 19055 - DNA, 34 bp, Artificial Sequence; identical to SEQ ID NO: 720
  Probe

SEQ ID NO: 19056 - DNA, 35 bp, Artificial Sequence
  Probe
cgcccggatagctcagtcggtagagcatcagactt

SEQ ID NO: 19057 - DNA, 36 bp, Artificial Sequence
  Probe
cgcccggatagctcagtcggtagagcatcagacttt

SEQ ID NO: 19058 - DNA, 37 bp, Artificial Sequence
  Probe
cgcccggatagctcagtcggtagagcatcagactttt

SEQ ID NO: 19059 - DNA, 34 bp, Artificial Sequence; identical to SEQ ID NO: 721
  Probe

SEQ ID NO: 19060 - DNA, 37 bp, Artificial Sequence
  Probe
cgccgcagcccgggttcgattcccggtcatggaacca

SEQ ID NO: 19061 - DNA, 31 bp, Artificial Sequence
  Probe
cgccgcggcccgggttcgattcccggtcagg

SEQ ID NO: 19062 - DNA, 34 bp, Artificial Sequence
  Probe
cgccgcggcccgggttcgattcccggtcagggaa

SEQ ID NO: 19063 - DNA, 35 bp, Artificial Sequence; identical to SEQ ID NO: 4985
  Probe

SEQ ID NO: 19064 - DNA, 35 bp, Artificial Sequence; identical to SEQ ID NO: 4986
  Probe

SEQ ID NO: 19065 - DNA, 37 bp, Artificial Sequence; identical to SEQ ID NO: 4987
  Probe

SEQ ID NO: 19066 - DNA, 37 bp, Artificial Sequence; identical to SEQ ID NO: 4988
  Probe

SEQ ID NO: 19067 - DNA, 35 bp, Artificial Sequence; identical to SEQ ID NO: 4989
  Probe

SEQ ID NO: 19068 - DNA, 37 bp, Artificial Sequence; identical to SEQ ID NO: 4990
  Probe

SEQ ID NO: 19069 - DNA, 25 bp, Artificial Sequence
  Probe
cgccgctggtgtagtggtatcatgc

SEQ ID NO: 19070 - DNA, 26 bp, Artificial Sequence
  Probe
cgccgctggtgtagtggtatcatgca

SEQ ID NO: 19071 - DNA, 27 bp, Artificial Sequence
  Probe
cgccgctggtgtagtggtatcatgcaa

SEQ ID NO: 19072 - DNA, 29 bp, Artificial Sequence
  Probe
cgccgctggtgtagtggtatcatgcaaga

SEQ ID NO: 19073 - DNA, 30 bp, Artificial Sequence
  Probe
cgccgctggtgtagtggtatcatgcaagat

SEQ ID NO: 19074 - DNA, 33 bp, Artificial Sequence; identical to SEQ ID NO: 4993
  Probe

SEQ ID NO: 19075 - DNA, 34 bp, Artificial Sequence; identical to SEQ ID NO: 724
  Probe

SEQ ID NO: 19076 - DNA, 50 bp, Artificial Sequence
  Probe
cgccgctggtgtagtggtatcatgcaagattcccattcttgcgacccggg

SEQ ID NO: 19077 - DNA, 31 bp, Artificial Sequence
  Probe
cgccgtgatcgtatagtggttagtactctgc

SEQ ID NO: 19078 - DNA, 32 bp, Artificial Sequence; identical to SEQ ID NO: 4998
  Probe

SEQ ID NO: 19079 - DNA, 33 bp, Artificial Sequence; identical to SEQ ID NO: 4999
  Probe

SEQ ID NO: 19080 - DNA, 34 bp, Artificial Sequence; identical to SEQ ID NO: 5000
  Probe

SEQ ID NO: 19081 - DNA, 35 bp, Artificial Sequence; identical to SEQ ID NO: 5001
  Probe

SEQ ID NO: 19082 - DNA, 36 bp, Artificial Sequence; identical to SEQ ID NO: 5002
  Probe

SEQ ID NO: 19083 - DNA, 37 bp, Artificial Sequence; identical to SEQ ID NO: 5003
  Probe

SEQ ID NO: 19084 - DNA, 38 bp, Artificial Sequence; identical to SEQ ID NO: 5004
  Probe

SEQ ID NO: 19085 - DNA, 39 bp, Artificial Sequence
  Probe
cgccgtgatcgtatagtggttagtactctgcgttgtggc

SEQ ID NO: 19086 - DNA, 40 bp, Artificial Sequence
  Probe
cgccgtgatcgtatagtggttagtactctgcgttgtggcc

SEQ ID NO: 19087 - DNA, 41 bp, Artificial Sequence
  Probe
cgccgtgatcgtatagtggttagtactctgcgttgtggccg

SEQ ID NO: 19088 - DNA, 30 bp, Artificial Sequence
  Probe
cgccgtggcttagttggttaaagcgcctgt

SEQ ID NO: 19089 - DNA, 25 bp, Artificial Sequence
  Probe
cgcctgccacgcgggaggcccgggt

SEQ ID NO: 19090 - DNA, 26 bp, Artificial Sequence
  Probe
cgcctgccacgcgggaggcccgggtt

SEQ ID NO: 19091 - DNA, 50 bp, Artificial Sequence
  Probe
cgcctgccacgcgggaggcccgggttcgattcccggcccatgcagcacgc

SEQ ID NO: 19092 - DNA, 27 bp, Artificial Sequence
  Probe
cgcctgccacgcgggaggcccgggttt

SEQ ID NO: 19093 - DNA, 16 bp, Artificial Sequence
  Probe
cgcctgtcacgcggga

SEQ ID NO: 19094 - DNA, 27 bp, Artificial Sequence
  Probe
cgcctgtcacgcgggagaccggggttc

SEQ ID NO: 19095 - DNA, 28 bp, Artificial Sequence
  Probe
cgcctgtcacgcgggagaccggggttca

SEQ ID NO: 19096 - DNA, 50 bp, Artificial Sequence; identical to SEQ ID NO: 5005
  Probe

SEQ ID NO: 19097 - DNA, 28 bp, Artificial Sequence
  Probe
cgcctgtcacgcgggagaccggggttcg

SEQ ID NO: 19098 - DNA, 29 bp, Artificial Sequence
  Probe
cgcctgtcacgcgggagaccggggttcga

SEQ ID NO: 19099 - DNA, 30 bp, Artificial Sequence
  Probe
cgcctgtcacgcgggagaccggggttcgat

SEQ ID NO: 19100 - DNA, 32 bp, Artificial Sequence
  Probe
cgcctgtcacgcgggagaccggggttcgattc

SEQ ID NO: 19101 - DNA, 38 bp, Artificial Sequence
  Probe
cgcctgtcacgcgggagaccggggttcgattccccgac

SEQ ID NO: 19102 - DNA, 45 bp, Artificial Sequence
  Probe
cgcctgtcacgcgggagaccggggttcgattccccgacggggaga

SEQ ID NO: 19103 - DNA, 46 bp, Artificial Sequence
  Probe
cgcctgtcacgcgggagaccggggttcgattccccgacggggagaa

SEQ ID NO: 19104 - DNA, 50 bp, Artificial Sequence
  Probe
cgcctgtcacgcgggagaccggggttcgattccccgacggggagaaaagt

SEQ ID NO: 19105 - DNA, 50 bp, Artificial Sequence
  Probe
cgcctgtcacgcgggagaccggggttcgattccccgacggggagagtact

SEQ ID NO: 19106 - DNA, 45 bp, Artificial Sequence
  Probe
cgcctgtcacgcgggagaccggggttcgattccccgacggggagg

SEQ ID NO: 19107 - DNA, 50 bp, Artificial Sequence
  Probe
cgcctgtcacgcgggagaccggggttcgattccccgacggggaggaggct

SEQ ID NO: 19108 - DNA, 46 bp, Artificial Sequence
  Probe
cgcctgtcacgcgggagaccggggttcgattccccgacggggaggc

SEQ ID NO: 19109 - DNA, 49 bp, Artificial Sequence
  Probe
cgcctgtcacgcgggagaccggggttcgattccccgacggggaggcaca

SEQ ID NO: 19110 - DNA, 50 bp, Artificial Sequence; identical to SEQ ID NO: 5007
  Probe

SEQ ID NO: 19111 - DNA, 50 bp, Artificial Sequence; identical to SEQ ID NO: 5008
  Probe

SEQ ID NO: 19112 - DNA, 49 bp, Artificial Sequence
  Probe
cgcctgtcacgcgggagaccggggttcgattccccgacggggaggccaa

SEQ ID NO: 19113 - DNA, 50 bp, Artificial Sequence; identical to SEQ ID NO: 5009
  Probe

SEQ ID NO: 19114 - DNA, 49 bp, Artificial Sequence
  Probe
cgcctgtcacgcgggagaccggggttcgattccccgacggggaggccgg

SEQ ID NO: 19115 - DNA, 50 bp, Artificial Sequence
  Probe
cgcctgtcacgcgggagaccggggttcgattccccgacggggaggccggg

SEQ ID NO: 19116 - DNA, 25 bp, Artificial Sequence
  Probe
cgccttttttcccggcggcgggaga

SEQ ID NO: 19117 - DNA, 26 bp, Artificial Sequence
  Probe
cgccttttttcccggcggcgggagaa

SEQ ID NO: 19118 - DNA, 28 bp, Artificial Sequence
  Probe
cgccttttttcccggcggcgggagaagt

SEQ ID NO: 19119 - DNA, 29 bp, Artificial Sequence
  Probe
cgccttttttcccggcggcgggagaagta

SEQ ID NO: 19120 - DNA, 16 bp, Artificial Sequence
  Probe
cgcgaaaggtccccgg

SEQ ID NO: 19121 - DNA, 32 bp, Artificial Sequence
  Probe
cgcgaaaggtccccggttcgaaaccgggcgga

SEQ ID NO: 19122 - DNA, 34 bp, Artificial Sequence
  Probe
cgcgaaaggtccccggttcgaaaccgggcggaaa

SEQ ID NO: 19123 - DNA, 36 bp, Artificial Sequence
  Probe
cgcgaaaggtccccggttcgaaaccgggcggaaaca

SEQ ID NO: 19124 - DNA, 39 bp, Artificial Sequence; identical to SEQ ID NO: 5017
  Probe

SEQ ID NO: 19125 - DNA, 39 bp, Artificial Sequence
  Probe
cgcgaaaggtccccggttcgaaaccgggcggaaacacgt

SEQ ID NO: 19126 - DNA, 33 bp, Artificial Sequence
  Probe
cgcgaaaggtccccggttcgatcccgggcggaa

SEQ ID NO: 19127 - DNA, 39 bp, Artificial Sequence
  Probe
cgcgaaaggtccccggttcgatcccgggcggaaacaggt

SEQ ID NO: 19128 - DNA, 38 bp, Artificial Sequence
  Probe
cgcgcattggtggttcagtggtagaattctcgcctgcc

SEQ ID NO: 19129 - DNA, 28 bp, Artificial Sequence
  Probe
cgcggcccgggttcgattcccggtcagg

SEQ ID NO: 19130 - DNA, 29 bp, Artificial Sequence
  Probe
cgcggcccgggttcgattcccggtcaggg

SEQ ID NO: 19131 - DNA, 30 bp, Artificial Sequence
  Probe
cgcggcccgggttcgattcccggtcaggga

SEQ ID NO: 19132 - DNA, 31 bp, Artificial Sequence
  Probe
cgcggcccgggttcgattcccggtcagggaa

SEQ ID NO: 19133 - DNA, 32 bp, Artificial Sequence; identical to SEQ ID NO: 5019
  Probe

SEQ ID NO: 19134 - DNA, 32 bp, Artificial Sequence; identical to SEQ ID NO: 5020
  Probe

SEQ ID NO: 19135 - DNA, 33 bp, Artificial Sequence
  Probe
cgcggcccgggttcgattcccggtcagggaagc

SEQ ID NO: 19136 - DNA, 34 bp, Artificial Sequence
  Probe
cgcggcccgggttcgattcccggtcagggaagcc

SEQ ID NO: 19137 - DNA, 34 bp, Artificial Sequence
  Probe
cgcggcccgggttcgattcccggtcagggaagtt

SEQ ID NO: 19138 - DNA, 32 bp, Artificial Sequence; identical to SEQ ID NO: 5021
  Probe

SEQ ID NO: 19139 - DNA, 34 bp, Artificial Sequence; identical to SEQ ID NO: 5022
  Probe

SEQ ID NO: 19140 - DNA, 32 bp, Artificial Sequence
  Probe
cgcgggagacccgggttcaattcccggccaat

SEQ ID NO: 19141 - DNA, 38 bp, Artificial Sequence
  Probe
cgcgggagacccgggttcaattcccggccaatgcaaaa

SEQ ID NO: 19142 - DNA, 28 bp, Artificial Sequence
  Probe
cgcgggagaccggggttcaattccccga

SEQ ID NO: 19143 - DNA, 36 bp, Artificial Sequence; identical to SEQ ID NO: 5025
  Probe

SEQ ID NO: 19144 - DNA, 37 bp, Artificial Sequence
  Probe
cgcgggagaccggggttcaattccccgacggggaggt

SEQ ID NO: 19145 - DNA, 38 bp, Artificial Sequence; identical to SEQ ID NO: 5026
  Probe

SEQ ID NO: 19146 - DNA, 21 bp, Artificial Sequence
  Probe
cgcgggagaccggggttcgat

SEQ ID NO: 19147 - DNA, 23 bp, Artificial Sequence
  Probe
cgcgggagaccggggttcgattc

SEQ ID NO: 19148 - DNA, 31 bp, Artificial Sequence
  Probe
cgcgggagaccggggttcgattccccaacgg

SEQ ID NO: 19149 - DNA, 33 bp, Artificial Sequence
  Probe
cgcgggagaccggggttcgattccccaacgggg

SEQ ID NO: 19150 - DNA, 35 bp, Artificial Sequence
  Probe
cgcgggagaccggggttcgattccccaacggggag

SEQ ID NO: 19151 - DNA, 38 bp, Artificial Sequence
  Probe
cgcgggagaccggggttcgattccccaacggggaggct

SEQ ID NO: 19152 - DNA, 36 bp, Artificial Sequence; identical to SEQ ID NO: 5028
  Probe

SEQ ID NO: 19153 - DNA, 37 bp, Artificial Sequence; identical to SEQ ID NO: 5029
  Probe

SEQ ID NO: 19154 - DNA, 38 bp, Artificial Sequence; identical to SEQ ID NO: 5030
  Probe

SEQ ID NO: 19155 - DNA, 50 bp, Artificial Sequence
  Probe
cgcgggagaccggggttcgattccccgacggggagaaaagttgctttttg

SEQ ID NO: 19156 - DNA, 37 bp, Artificial Sequence; identical to SEQ ID NO: 5031
  Probe

SEQ ID NO: 19157 - DNA, 38 bp, Artificial Sequence; identical to SEQ ID NO: 5032
  Probe

SEQ ID NO: 19158 - DNA, 37 bp, Artificial Sequence
  Probe
cgcgggagaccggggttcgattccccgacggggagag

SEQ ID NO: 19159 - DNA, 38 bp, Artificial Sequence; identical to SEQ ID NO: 5033
  Probe

SEQ ID NO: 19160 - DNA, 36 bp, Artificial Sequence; identical to SEQ ID NO: 5034
  Probe

SEQ ID NO: 19161 - DNA, 37 bp, Artificial Sequence; identical to SEQ ID NO: 5035
  Probe

SEQ ID NO: 19162 - DNA, 38 bp, Artificial Sequence
  Probe
cgcgggagaccggggttcgattccccgacggggaggag

SEQ ID NO: 19163 - DNA, 37 bp, Artificial Sequence; identical to SEQ ID NO: 5036
  Probe

SEQ ID NO: 19164 - DNA, 38 bp, Artificial Sequence; identical to SEQ ID NO: 5037
  Probe

SEQ ID NO: 19165 - DNA, 39 bp, Artificial Sequence; identical to SEQ ID NO: 5038
  Probe

SEQ ID NO: 19166 - DNA, 46 bp, Artificial Sequence
  Probe
cgcgggagaccggggttcgattccccgacggggaggcacagtaatt

SEQ ID NO: 19167 - DNA, 39 bp, Artificial Sequence
  Probe
cgcgggagaccggggttcgattccccgacggggaggcag

SEQ ID NO: 19168 - DNA, 38 bp, Artificial Sequence; identical to SEQ ID NO: 5039
  Probe

SEQ ID NO: 19169 - DNA, 41 bp, Artificial Sequence
  Probe
cgcgggagaccggggttcgattccccgacggggaggccggg

SEQ ID NO: 19170 - DNA, 32 bp, Artificial Sequence
  Probe
cgcgggaggcccgggttcgattcccggccaat

SEQ ID NO: 19171 - DNA, 33 bp, Artificial Sequence
  Probe
cgcgggaggcccgggttcgattcccggccaatg

SEQ ID NO: 19172 - DNA, 34 bp, Artificial Sequence
  Probe
cgcgggaggcccgggttcgattcccggccaatgc

SEQ ID NO: 19173 - DNA, 36 bp, Artificial Sequence
  Probe
cgcgggaggcccgggttcgattcccggccaatgcaa

SEQ ID NO: 19174 - DNA, 37 bp, Artificial Sequence
  Probe
cgcgggaggcccgggttcgattcccggccaatgcaac

SEQ ID NO: 19175 - DNA, 37 bp, Artificial Sequence
  Probe
cgcgggaggcccgggttcgattcccggccaatgcaag

SEQ ID NO: 19176 - DNA, 38 bp, Artificial Sequence
  Probe
cgcgggaggcccgggttcgattcccggccaatgcaagt

SEQ ID NO: 19177 - DNA, 36 bp, Artificial Sequence
  Probe
cgcgggaggcccgggttcgattcccggccaatgcac

SEQ ID NO: 19178 - DNA, 37 bp, Artificial Sequence; identical to SEQ ID NO: 5041
  Probe

SEQ ID NO: 19179 - DNA, 38 bp, Artificial Sequence
  Probe
cgcgggaggcccgggttcgattcccggccaatgcacga

SEQ ID NO: 19180 - DNA, 37 bp, Artificial Sequence; identical to SEQ ID NO: 5042
  Probe

SEQ ID NO: 19181 - DNA, 38 bp, Artificial Sequence
  Probe
cgcgggaggcccgggttcgattcccggccaatgcactt

SEQ ID NO: 19182 - DNA, 38 bp, Artificial Sequence; identical to SEQ ID NO: 5043
  Probe

SEQ ID NO: 19183 - DNA, 32 bp, Artificial Sequence
  Probe
cgcgggaggcccgggttcgattcccggcccat

SEQ ID NO: 19184 - DNA, 33 bp, Artificial Sequence
  Probe
cgcgggaggcccgggttcgattcccggcccatg

SEQ ID NO: 19185 - DNA, 34 bp, Artificial Sequence
  Probe
cgcgggaggcccgggttcgattcccggcccatgc

SEQ ID NO: 19186 - DNA, 36 bp, Artificial Sequence
  Probe
cgcgggaggcccgggttcgattcccggcccatgcag

SEQ ID NO: 19187 - DNA, 37 bp, Artificial Sequence; identical to SEQ ID NO: 5044
  Probe

SEQ ID NO: 19188 - DNA, 38 bp, Artificial Sequence
  Probe
cgcgggaggcccgggttcgattcccggcccatgcagca

SEQ ID NO: 19189 - DNA, 29 bp, Artificial Sequence
  Probe
cgcgggttcgatccccgtacgggccactg

SEQ ID NO: 19190 - DNA, 25 bp, Artificial Sequence
  Probe
cgcgtcagtctcataatctgaaggt

SEQ ID NO: 19191 - DNA, 24 bp, Artificial Sequence
  Probe
cgctctcaccgccgcggcccgggt

SEQ ID NO: 19192 - DNA, 42 bp, Artificial Sequence
  Probe
cgctctcaccgccgcggcccgggttcgattcccggtcaggga

SEQ ID NO: 19193 - DNA, 46 bp, Artificial Sequence
  Probe
cgctctcaccgccgcggcccgggttcgattcccggtcagggaagcc

SEQ ID NO: 19194 - DNA, 46 bp, Artificial Sequence
  Probe
cgctctcaccgccgcggcccgggttcgattcccggtcagggaagtc

SEQ ID NO: 19195 - DNA, 30 bp, Artificial Sequence
  Probe
cgctctccttttatgagctggtcgcgggaa

SEQ ID NO: 19196 - DNA, 30 bp, Artificial Sequence
  Probe
cgctgccacacctcagaaggtctcactttt

SEQ ID NO: 19197 - DNA, 23 bp, Artificial Sequence
  Probe
cgctgccagggttgctgtctttt

SEQ ID NO: 19198 - DNA, 25 bp, Artificial Sequence
  Probe
cgctggtgtagtggtatcatgcaag

SEQ ID NO: 19199 - DNA, 26 bp, Artificial Sequence
  Probe
cgctggtgtagtggtatcatgcaaga

SEQ ID NO: 19200 - DNA, 28 bp, Artificial Sequence
  Probe
cgctggtgtagtggtatcatgcaagatt

SEQ ID NO: 19201 - DNA, 30 bp, Artificial Sequence
  Probe
cgctggtgtagtggtatcatgcaagattcc

SEQ ID NO: 19202 - DNA, 31 bp, Artificial Sequence; identical to SEQ ID NO: 737
  Probe

SEQ ID NO: 19203 - DNA, 49 bp, Artificial Sequence
  Probe
cgctttcaccgccgcggcccgggttcgattcccggtcagggaattgttt

SEQ ID NO: 19204 - DNA, 25 bp, Artificial Sequence
  Probe
cggaaacacactaaaaaatcccttt

SEQ ID NO: 19205 - DNA, 20 bp, Artificial Sequence
  Probe
cggaagcgtgctgggcccat

SEQ ID NO: 19206 - DNA, 22 bp, Artificial Sequence
  Probe
cggaagcgtgctgggcccataa

SEQ ID NO: 19207 - DNA, 26 bp, Artificial Sequence
  Probe
cggaagcgtgctgggcccataaccca

SEQ ID NO: 19208 - DNA, 31 bp, Artificial Sequence
  Probe
cggaagcgtgctgggcccataacccagaggt

SEQ ID NO: 19209 - DNA, 40 bp, Artificial Sequence; identical to SEQ ID NO: 5055
  Probe

SEQ ID NO: 19210 - DNA, 50 bp, Artificial Sequence
  Probe
cggaagcgtgctgggcccataacccagaggtcgatggatcgaaaccatcc

SEQ ID NO: 19211 - DNA, 16 bp, Artificial Sequence
  Probe
cggagatgaaaacctt

SEQ ID NO: 19212 - DNA, 29 bp, Artificial Sequence
  Probe
cggagatgaaaacctttttccaaggacaa

SEQ ID NO: 19213 - DNA, 30 bp, Artificial Sequence; identical to SEQ ID NO: 5060
  Probe

SEQ ID NO: 19214 - DNA, 31 bp, Artificial Sequence; identical to SEQ ID NO: 5061
  Probe

SEQ ID NO: 19215 - DNA, 32 bp, Artificial Sequence; identical to SEQ ID NO: 5062
  Probe

SEQ ID NO: 19216 - DNA, 33 bp, Artificial Sequence
  Probe
cggagatgaaaacctttttccaaggacaaatca

SEQ ID NO: 19217 - DNA, 16 bp, Artificial Sequence
  Probe
cggagccttcgatagc

SEQ ID NO: 19218 - DNA, 23 bp, Artificial Sequence
  Probe
cggatagctcagtcggtagagca

SEQ ID NO: 19219 - DNA, 25 bp, Artificial Sequence
  Probe
cggatagctcagtcggtagagcatc

SEQ ID NO: 19220 - DNA, 20 bp, Artificial Sequence
  Probe
cggatcagaagattgagggt

SEQ ID NO: 19221 - DNA, 22 bp, Artificial Sequence
  Probe
cggcccgggttcgactcccggt

SEQ ID NO: 19222 - DNA, 24 bp, Artificial Sequence
  Probe
cggcccgggttcgactcccggtgt

SEQ ID NO: 19223 - DNA, 25 bp, Artificial Sequence
  Probe
cggcccgggttcgactcccggtgtg

SEQ ID NO: 19224 - DNA, 28 bp, Artificial Sequence
  Probe
cggcccgggttcgactcccggtgtggga

SEQ ID NO: 19225 - DNA, 29 bp, Artificial Sequence
  Probe
cggcccgggttcgactcccggtgtgggaa

SEQ ID NO: 19226 - DNA, 30 bp, Artificial Sequence; identical to SEQ ID NO: 766
  Probe

SEQ ID NO: 19227 - DNA, 32 bp, Artificial Sequence; identical to SEQ ID NO: 5067
  Probe

SEQ ID NO: 19228 - DNA, 22 bp, Artificial Sequence
  Probe
cggcccgggttcgattcccggt

SEQ ID NO: 19229 - DNA, 23 bp, Artificial Sequence
  Probe
cggcccgggttcgattcccggtc

SEQ ID NO: 19230 - DNA, 24 bp, Artificial Sequence
  Probe
cggcccgggttcgattcccggtca

SEQ ID NO: 19231 - DNA, 26 bp, Artificial Sequence
  Probe
cggcccgggttcgattcccggtcagg

SEQ ID NO: 19232 - DNA, 28 bp, Artificial Sequence
  Probe
cggcccgggttcgattcccggtcaggga

SEQ ID NO: 19233 - DNA, 29 bp, Artificial Sequence
  Probe
cggcccgggttcgattcccggtcagggaa

SEQ ID NO: 19234 - DNA, 30 bp, Artificial Sequence; identical to SEQ ID NO: 5070
  Probe

SEQ ID NO: 19235 - DNA, 30 bp, Artificial Sequence; identical to SEQ ID NO: 5071
  Probe

SEQ ID NO: 19236 - DNA, 30 bp, Artificial Sequence; identical to SEQ ID NO: 5073
  Probe

SEQ ID NO: 19237 - DNA, 32 bp, Artificial Sequence; identical to SEQ ID NO: 5074
  Probe

SEQ ID NO: 19238 - DNA, 27 bp, Artificial Sequence
  Probe
cggcgctctcaccgccgcggcccgggt

SEQ ID NO: 19239 - DNA, 28 bp, Artificial Sequence
  Probe
cggctagctcagtcgatagagcatgaga

SEQ ID NO: 19240 - DNA, 29 bp, Artificial Sequence
  Probe
cggctagctcagtcgatagagcatgagac

SEQ ID NO: 19241 - DNA, 30 bp, Artificial Sequence
  Probe
cggctagctcagtcgatagagcatgagact

SEQ ID NO: 19242 - DNA, 16 bp, Artificial Sequence
  Probe
cggctagctcagtcgg

SEQ ID NO: 19243 - DNA, 19 bp, Artificial Sequence
  Probe
cggctagctcagtcggtag

SEQ ID NO: 19244 - DNA, 22 bp, Artificial Sequence
  Probe
cggctagctcagtcggtagagc

SEQ ID NO: 19245 - DNA, 23 bp, Artificial Sequence
  Probe
cggctagctcagtcggtagagca

SEQ ID NO: 19246 - DNA, 33 bp, Artificial Sequence; identical to SEQ ID NO: 774
  Probe

SEQ ID NO: 19247 - DNA, 39 bp, Artificial Sequence
  Probe
cggctagctcagtcggtagagcatgggactcttaatccc

SEQ ID NO: 19248 - DNA, 26 bp, Artificial Sequence
  Probe
cggctgttaaccgaaaggttggtggt

SEQ ID NO: 19249 - DNA, 27 bp, Artificial Sequence
  Probe
cgggagaccggggttcaattccccgac

SEQ ID NO: 19250 - DNA, 28 bp, Artificial Sequence
  Probe
cgggagaccggggttcaattccccgacg

SEQ ID NO: 19251 - DNA, 34 bp, Artificial Sequence
  Probe
cgggagaccggggttcaattccccgacggggagg

SEQ ID NO: 19252 - DNA, 35 bp, Artificial Sequence
  Probe
cgggagaccggggttcaattccccgacggggaggt

SEQ ID NO: 19253 - DNA, 36 bp, Artificial Sequence; identical to SEQ ID NO: 5077
  Probe

SEQ ID NO: 19254 - DNA, 30 bp, Artificial Sequence
  Probe
cgggagaccggggttcgattccccaacggg

SEQ ID NO: 19255 - DNA, 36 bp, Artificial Sequence
  Probe
cgggagaccggggttcgattccccaacggggaggct

SEQ ID NO: 19256 - DNA, 34 bp, Artificial Sequence; identical to SEQ ID NO: 5079
  Probe

SEQ ID NO: 19257 - DNA, 35 bp, Artificial Sequence
  Probe
cgggagaccggggttcgattccccgacggggagaa

SEQ ID NO: 19258 - DNA, 36 bp, Artificial Sequence; identical to SEQ ID NO: 5080
  Probe

SEQ ID NO: 19259 - DNA, 35 bp, Artificial Sequence; identical to SEQ ID NO: 5081
  Probe

SEQ ID NO: 19260 - DNA, 36 bp, Artificial Sequence
  Probe
cgggagaccggggttcgattccccgacggggagacg

SEQ ID NO: 19261 - DNA, 35 bp, Artificial Sequence
  Probe
cgggagaccggggttcgattccccgacggggagag

SEQ ID NO: 19262 - DNA, 36 bp, Artificial Sequence
  Probe
cgggagaccggggttcgattccccgacggggagagt

SEQ ID NO: 19263 - DNA, 34 bp, Artificial Sequence; identical to SEQ ID NO: 5082
  Probe

SEQ ID NO: 19264 - DNA, 35 bp, Artificial Sequence
  Probe
cgggagaccggggttcgattccccgacggggagga

SEQ ID NO: 19265 - DNA, 36 bp, Artificial Sequence
  Probe
cgggagaccggggttcgattccccgacggggaggag

SEQ ID NO: 19266 - DNA, 35 bp, Artificial Sequence; identical to SEQ ID NO: 5083
  Probe

SEQ ID NO: 19267 - DNA, 36 bp, Artificial Sequence; identical to SEQ ID NO: 5084
  Probe

SEQ ID NO: 19268 - DNA, 37 bp, Artificial Sequence
  Probe
cgggagaccggggttcgattccccgacggggaggcac

SEQ ID NO: 19269 - DNA, 36 bp, Artificial Sequence; identical to SEQ ID NO: 5085
  Probe

SEQ ID NO: 19270 - DNA, 38 bp, Artificial Sequence
  Probe
cgggagaccggggttcgattccccgacggggaggccgg

SEQ ID NO: 19271 - DNA, 36 bp, Artificial Sequence
  Probe
cgggagcccggatagctcagtcggtagagcatcaga

SEQ ID NO: 19272 - DNA, 38 bp, Artificial Sequence
  Probe
cgggagcccggatagctcagtcggtagagcatcagact

SEQ ID NO: 19273 - DNA, 39 bp, Artificial Sequence
  Probe
cgggagcccggatagctcagtcggtagagcatcagactt

SEQ ID NO: 19274 - DNA, 41 bp, Artificial Sequence
  Probe
cgggagcccggatagctcagtcggtagagcatcagactttt

SEQ ID NO: 19275 - DNA, 31 bp, Artificial Sequence
  Probe
cgggagcgcccggatagctcagtcggtagag

SEQ ID NO: 19276 - DNA, 33 bp, Artificial Sequence
  Probe
cgggagcgcccggatagctcagtcggtagagca

SEQ ID NO: 19277 - DNA, 38 bp, Artificial Sequence
  Probe
cgggagcgcccggatagctcagtcggtagagcatcaga

SEQ ID NO: 19278 - DNA, 40 bp, Artificial Sequence
  Probe
cgggagcgcccggatagctcagtcggtagagcatcagact

SEQ ID NO: 19279 - DNA, 41 bp, Artificial Sequence
  Probe
cgggagcgcccggatagctcagtcggtagagcatcagactt

SEQ ID NO: 19280 - DNA, 42 bp, Artificial Sequence
  Probe
cgggagcgcccggatagctcagtcggtagagcatcagacttt

SEQ ID NO: 19281 - DNA, 43 bp, Artificial Sequence
  Probe
cgggagcgcccggatagctcagtcggtagagcatcagactttt

SEQ ID NO: 19282 - DNA, 44 bp, Artificial Sequence
  Probe
cgggagcgcccggatagctcagtcggtagagcatcagactttta

SEQ ID NO: 19283 - DNA, 32 bp, Artificial Sequence
  Probe
cgggaggcccgggttcgattcccggccaatgc

SEQ ID NO: 19284 - DNA, 33 bp, Artificial Sequence; identical to SEQ ID NO: 5086
  Probe

SEQ ID NO: 19285 - DNA, 36 bp, Artificial Sequence
  Probe
cgggaggcccgggttcgattcccggccaatgcaagt

SEQ ID NO: 19286 - DNA, 36 bp, Artificial Sequence
  Probe
cgggaggcccgggttcgattcccggccaatgcacga

SEQ ID NO: 19287 - DNA, 36 bp, Artificial Sequence
  Probe
cgggaggcccgggttcgattcccggccaatgcactt

SEQ ID NO: 19288 - DNA, 36 bp, Artificial Sequence
  Probe
cgggaggcccgggttcgattcccggccaatgcagca

SEQ ID NO: 19289 - DNA, 30 bp, Artificial Sequence
  Probe
cgggaggcccgggttcgattcccggcccat

SEQ ID NO: 19290 - DNA, 31 bp, Artificial Sequence
  Probe
cgggaggcccgggttcgattcccggcccatg

SEQ ID NO: 19291 - DNA, 33 bp, Artificial Sequence; identical to SEQ ID NO: 5087
  Probe

SEQ ID NO: 19292 - DNA, 34 bp, Artificial Sequence
  Probe
cgggaggcccgggttcgattcccggcccatgcag

SEQ ID NO: 19293 - DNA, 35 bp, Artificial Sequence
  Probe
cgggaggcccgggttcgattcccggcccatgcagc

SEQ ID NO: 19294 - DNA, 36 bp, Artificial Sequence
  Probe
cgggaggcccgggttcgattcccggcccatgcagca

SEQ ID NO: 19295 - DNA, 17 bp, Artificial Sequence
  Probe
cgggcccataccccgaa

SEQ ID NO: 19296 - DNA, 41 bp, Artificial Sequence
  Probe
cgggcccataccccgaaaatgttggttatacccttcccgta

SEQ ID NO: 19297 - DNA, 30 bp, Artificial Sequence
  Probe
cgggcgcccggctagctcagtcggtagagc

SEQ ID NO: 19298 - DNA, 31 bp, Artificial Sequence
  Probe
cgggcgcccggctagctcagtcggtagagca

SEQ ID NO: 19299 - DNA, 38 bp, Artificial Sequence
  Probe
cgggcgcccggctagctcagtcggtagagcatgagact

SEQ ID NO: 19300 - DNA, 39 bp, Artificial Sequence
  Probe
cgggcgcccggctagctcagtcggtagagcatgagactc

SEQ ID NO: 19301 - DNA, 29 bp, Artificial Sequence
  Probe
cgggcggaaacacactaaaaaatcccttt

SEQ ID NO: 19302 - DNA, 20 bp, Artificial Sequence
  Probe
cgggctcacatcaccccata

SEQ ID NO: 19303 - DNA, 24 bp, Artificial Sequence
  Probe
cgggctcacatcaccccataaaca

SEQ ID NO: 19304 - DNA, 25 bp, Artificial Sequence
  Probe
cgggctcacatcaccccataaacaa

SEQ ID NO: 19305 - DNA, 26 bp, Artificial Sequence
  Probe
cgggctcacatcaccccataaacaaa

SEQ ID NO: 19306 - DNA, 27 bp, Artificial Sequence
  Probe
cgggctcacatcaccccataaacaaat

SEQ ID NO: 19307 - DNA, 16 bp, Artificial Sequence
  Probe
cggggcacaataattt

SEQ ID NO: 19308 - DNA, 27 bp, Artificial Sequence
  Probe
cggggttcgattccccgacggggagac

SEQ ID NO: 19309 - DNA, 27 bp, Artificial Sequence
  Probe
cggggttcgattccccgacggggaggc

SEQ ID NO: 19310 - DNA, 28 bp, Artificial Sequence
  Probe
cggggttcgattccccgacggggaggca

SEQ ID NO: 19311 - DNA, 17 bp, Artificial Sequence
  Probe
cgggtccccggtagctc

SEQ ID NO: 19312 - DNA, 17 bp, Artificial Sequence
  Probe
cgggtgcgagaggtccc

SEQ ID NO: 19313 - DNA, 21 bp, Artificial Sequence
  Probe
cgggtgcgagaggtcccgggt

SEQ ID NO: 19314 - DNA, 22 bp, Artificial Sequence
  Probe
cgggtgcgagaggtcccgggtt

SEQ ID NO: 19315 - DNA, 27 bp, Artificial Sequence
  Probe
cgggttcaattcccggtcagggaacca

SEQ ID NO: 19316 - DNA, 27 bp, Artificial Sequence
  Probe
cgggttcgactcccggtatgggaacaa

SEQ ID NO: 19317 - DNA, 27 bp, Artificial Sequence
  Probe
cgggttcgactcccggtgtgggaacgc

SEQ ID NO: 19318 - DNA, 27 bp, Artificial Sequence
  Probe
cgggttcgatccccggcatctccattg

SEQ ID NO: 19319 - DNA, 27 bp, Artificial Sequence
  Probe
cgggttcgattcccggtcagggaattg

SEQ ID NO: 19320 - DNA, 27 bp, Artificial Sequence
  Probe
cgggttcgattcccggtcatggaacca

SEQ ID NO: 19321 - DNA, 20 bp, Artificial Sequence
  Probe
cggtaatcgcataaaactta

SEQ ID NO: 19322 - DNA, 26 bp, Artificial Sequence
  Probe
cggtaatcgcataaaacttaaaactt

SEQ ID NO: 19323 - DNA, 30 bp, Artificial Sequence
  Probe
cggtaatcgcataaaacttaaaactttaca

SEQ ID NO: 19324 - DNA, 33 bp, Artificial Sequence
  Probe
cggtaatcgcataaaacttaaaactttacagtc

SEQ ID NO: 19325 - DNA, 36 bp, Artificial Sequence
  Probe
cggtaatcgcataaaacttaaaactttacagtcaga

SEQ ID NO: 19326 - DNA, 39 bp, Artificial Sequence
  Probe
cggtaatcgcataaaacttaaaactttacagtcagaggt

SEQ ID NO: 19327 - DNA, 41 bp, Artificial Sequence
  Probe
cggtaatcgcataaaacttaaaactttacagtcagaggttc

SEQ ID NO: 19328 - DNA, 42 bp, Artificial Sequence
  Probe
cggtaatcgcataaaacttaaaactttacagtcagaggttca

SEQ ID NO: 19329 - DNA, 50 bp, Artificial Sequence; identical to SEQ ID NO: 791
  Probe

SEQ ID NO: 19330 - DNA, 16 bp, Artificial Sequence
  Probe
cggtagagcatgagac

SEQ ID NO: 19331 - DNA, 38 bp, Artificial Sequence
  Probe
cggtagagcatgagactcttaatctcagggtcgtgggt

SEQ ID NO: 19332 - DNA, 16 bp, Artificial Sequence
  Probe
cggtagagcatgggac

SEQ ID NO: 19333 - DNA, 26 bp, Artificial Sequence
  Probe
cggtagagcatgggactcttaatccc

SEQ ID NO: 19334 - DNA, 33 bp, Artificial Sequence; identical to SEQ ID NO: 5107
  Probe

SEQ ID NO: 19335 - DNA, 38 bp, Artificial Sequence
  Probe
cggtagagcatgggactcttaatcccagggtcgtgggt

SEQ ID NO: 19336 - DNA, 38 bp, Artificial Sequence
  Probe
cggtagagcatgggactcttaatctcagggtcgtgggt

SEQ ID NO: 19337 - DNA, 16 bp, Artificial Sequence
  Probe
cggttaggattcctgg

SEQ ID NO: 19338 - DNA, 25 bp, Artificial Sequence
  Probe
cggttaggattcctggttttcaccc

SEQ ID NO: 19339 - DNA, 26 bp, Artificial Sequence
  Probe
cggttcgaatccgagtcacggcaggt

SEQ ID NO: 19340 - DNA, 26 bp, Artificial Sequence
  Probe
cggttcgaatccgagtcacggcattg

SEQ ID NO: 19341 - DNA, 21 bp, Artificial Sequence
  Probe
cgtaaacaggagatcctgggt

SEQ ID NO: 19342 - DNA, 23 bp, Artificial Sequence
  Probe
cgtagtgtagcggttatcacatt

SEQ ID NO: 19343 - DNA, 27 bp, Artificial Sequence
  Probe
cgtagtgtagcggttatcacattcgcc

SEQ ID NO: 19344 - DNA, 23 bp, Artificial Sequence
  Probe
cgtagtgtagtggtcatcacgtt

SEQ ID NO: 19345 - DNA, 26 bp, Artificial Sequence
  Probe
cgtagtgtagtggtcatcacgttcgc

SEQ ID NO: 19346 - DNA, 27 bp, Artificial Sequence
  Probe
cgtagtgtagtggtcatcacgttcgcc

SEQ ID NO: 19347 - DNA, 23 bp, Artificial Sequence
  Probe
cgtagtgtagtggttatcacgtt

SEQ ID NO: 19348 - DNA, 25 bp, Artificial Sequence
  Probe
cgtagtgtagtggttatcacgttcg

SEQ ID NO: 19349 - DNA, 26 bp, Artificial Sequence
  Probe
cgtagtgtagtggttatcacgttcgc

SEQ ID NO: 19350 - DNA, 27 bp, Artificial Sequence
  Probe
cgtagtgtagtggttatcacgttcgcc

SEQ ID NO: 19351 - DNA, 28 bp, Artificial Sequence
  Probe
cgtagtgtagtggttatcacgttcgcct

SEQ ID NO: 19352 - DNA, 29 bp, Artificial Sequence
  Probe
cgtagtgtagtggttatcacgttcgcctc

SEQ ID NO: 19353 - DNA, 30 bp, Artificial Sequence
  Probe
cgtagtgtagtggttatcacgttcgcctca

SEQ ID NO: 19354 - DNA, 32 bp, Artificial Sequence
  Probe
cgtagtgtagtggttatcacgttcgcctcaca

SEQ ID NO: 19355 - DNA, 17 bp, Artificial Sequence
  Probe
cgtatagtggttagtac

SEQ ID NO: 19356 - DNA, 22 bp, Artificial Sequence
  Probe
cgtatagtggttagtactctgc

SEQ ID NO: 19357 - DNA, 23 bp, Artificial Sequence
  Probe
cgtatagtggttagtactctgcg

SEQ ID NO: 19358 - DNA, 25 bp, Artificial Sequence
  Probe
cgtatagtggttagtactctgcgtt

SEQ ID NO: 19359 - DNA, 27 bp, Artificial Sequence
  Probe
cgtatagtggttagtactctgcgttgt

SEQ ID NO: 19360 - DNA, 28 bp, Artificial Sequence
  Probe
cgtatagtggttagtactctgcgttgtg

SEQ ID NO: 19361 - DNA, 38 bp, Artificial Sequence
  Probe
cgtatgaggccccgggttcaatccccggcatctccaga

SEQ ID NO: 19362 - DNA, 39 bp, Artificial Sequence
  Probe
cgtatgaggccccgggttcaatccccggcatctccagac

SEQ ID NO: 19363 - DNA, 24 bp, Artificial Sequence
  Probe
cgtgatcgtatagtggttagtact

SEQ ID NO: 19364 - DNA, 27 bp, Artificial Sequence
  Probe
cgtgatcgtatagtggttagtactctg

SEQ ID NO: 19365 - DNA, 31 bp, Artificial Sequence
  Probe
cgtgatcgtatagtggttagtactctgcgtt

SEQ ID NO: 19366 - DNA, 35 bp, Artificial Sequence
  Probe
cgtgatcgtatagtggttagtactctgcgttgtgg

SEQ ID NO: 19367 - DNA, 36 bp, Artificial Sequence
  Probe
cgtgatcgtatagtggttagtactctgcgttgtggc

SEQ ID NO: 19368 - DNA, 27 bp, Artificial Sequence
  Probe
cgtgctgggcccataacccagaggtcg

SEQ ID NO: 19369 - DNA, 28 bp, Artificial Sequence
  Probe
cgtgctgggcccataacccagaggtcga

SEQ ID NO: 19370 - DNA, 23 bp, Artificial Sequence
  Probe
cgtggtgtagtggttatcacatt

SEQ ID NO: 19371 - DNA, 27 bp, Artificial Sequence
  Probe
cgtggtgtagtggttatcacattcgcc

SEQ ID NO: 19372 - DNA, 23 bp, Artificial Sequence
  Probe
cgtggttgtagtccgtgcgagaa

SEQ ID NO: 19373 - DNA, 25 bp, Artificial Sequence
  Probe
cgtggttgtagtccgtgcgagaata

SEQ ID NO: 19374 - DNA, 26 bp, Artificial Sequence
  Probe
cgtggttgtagtccgtgcgagaataa

SEQ ID NO: 19375 - DNA, 27 bp, Artificial Sequence
  Probe
cgtggttgtagtccgtgcgagaataat

SEQ ID NO: 19376 - DNA, 28 bp, Artificial Sequence
  Probe
cgtggttgtagtccgtgcgagaataatg

SEQ ID NO: 19377 - DNA, 23 bp, Artificial Sequence
  Probe
cgttagcgcagtaggtagcgcgt

SEQ ID NO: 19378 - DNA, 26 bp, Artificial Sequence
  Probe
cgttagtatagtggtgagtatccccg

SEQ ID NO: 19379 - DNA, 27 bp, Artificial Sequence
  Probe
cgttagtatagtggtgagtatccccgc

SEQ ID NO: 19380 - DNA, 28 bp, Artificial Sequence
  Probe
cgttagtatagtggtgagtatccccgcc

SEQ ID NO: 19381 - DNA, 30 bp, Artificial Sequence
  Probe
cgttagtatagtggtgagtatccccgcctg

SEQ ID NO: 19382 - DNA, 33 bp, Artificial Sequence; identical to SEQ ID NO: 5127
  Probe

SEQ ID NO: 19383 - DNA, 26 bp, Artificial Sequence
  Probe
cgttagtctaggctgtcagctcttcc

SEQ ID NO: 19384 - DNA, 17 bp, Artificial Sequence
  Probe
cgttcaggtcgcagtct

SEQ ID NO: 19385 - DNA, 20 bp, Artificial Sequence
  Probe
cgttcaggtcgcagtctccc

SEQ ID NO: 19386 - DNA, 25 bp, Artificial Sequence
  Probe
cgttggtggtatagtggtgagcata

SEQ ID NO: 19387 - DNA, 29 bp, Artificial Sequence
  Probe
cgttggtggtatagtggtgagcatagctg

SEQ ID NO: 19388 - DNA, 30 bp, Artificial Sequence
  Probe
cgttggtggtatagtggtgagcatagctgc

SEQ ID NO: 19389 - DNA, 31 bp, Artificial Sequence
  Probe
cgttggtggtatagtggtgagcatagctgcc

SEQ ID NO: 19390 - DNA, 33 bp, Artificial Sequence
  Probe
cgttggtggtatagtggtgagcatagctgcctt

SEQ ID NO: 19391 - DNA, 34 bp, Artificial Sequence
  Probe
cgttggtggtatagtggtgagcatagctgccttc

SEQ ID NO: 19392 - DNA, 35 bp, Artificial Sequence; identical to SEQ ID NO: 5129
  Probe

SEQ ID NO: 19393 - DNA, 38 bp, Artificial Sequence
  Probe
cgttggtggtatagtggtgagcatagctgccttccaag

SEQ ID NO: 19394 - DNA, 40 bp, Artificial Sequence
  Probe
cgttggtggtatagtggtgagcatagctgccttccaagca

SEQ ID NO: 19395 - DNA, 50 bp, Artificial Sequence
  Probe
cgttggtggtatagtggtgagcatagctgccttccaagcagttgacccgg

SEQ ID NO: 19396 - DNA, 28 bp, Artificial Sequence
  Probe
cgttggtggtatagtggttagcatagct

SEQ ID NO: 19397 - DNA, 29 bp, Artificial Sequence
  Probe
cgttggtggtatagtggttagcatagctg

SEQ ID NO: 19398 - DNA, 34 bp, Artificial Sequence
  Probe
cgttggtggtatagtggttagcatagctgccttc

SEQ ID NO: 19399 - DNA, 35 bp, Artificial Sequence; identical to SEQ ID NO: 5130
  Probe

SEQ ID NO: 19400 - DNA, 38 bp, Artificial Sequence
  Probe
cgttggtggtatagtggttagcatagctgccttccaag

SEQ ID NO: 19401 - DNA, 50 bp, Artificial Sequence
  Probe
cgttggtggtatagtggttagcatagctgccttccaagcagttgacccgg

SEQ ID NO: 19402 - DNA, 19 bp, Artificial Sequence
  Probe
ctaaacctagccccaaacc

SEQ ID NO: 19403 - DNA, 20 bp, Artificial Sequence
  Probe
ctaaacctagccccaaaccc

SEQ ID NO: 19404 - DNA, 29 bp, Artificial Sequence
  Probe
ctaaacctagccccaaacccactccacct

SEQ ID NO: 19405 - DNA, 15 bp, Artificial Sequence
  Probe
ctaaagacaggggtt

SEQ ID NO: 19406 - DNA, 25 bp, Artificial Sequence
  Probe
ctaaagacaggggttaggcctcttt

SEQ ID NO: 19407 - DNA, 26 bp, Artificial Sequence
  Probe
ctaaagacaggggttaggcctctttt

SEQ ID NO: 19408 - DNA, 27 bp, Artificial Sequence
  Probe
ctaaagacaggggttaggcctcttttt

SEQ ID NO: 19409 - DNA, 28 bp, Artificial Sequence
  Probe
ctaaagacaggggttaggcctcttttta

SEQ ID NO: 19410 - DNA, 29 bp, Artificial Sequence
  Probe
ctaaagacaggggttaggcctctttttac

SEQ ID NO: 19411 - DNA, 30 bp, Artificial Sequence; identical to SEQ ID NO: 5141
  Probe

SEQ ID NO: 19412 - DNA, 31 bp, Artificial Sequence; identical to SEQ ID NO: 5142
  Probe

SEQ ID NO: 19413 - DNA, 32 bp, Artificial Sequence; identical to SEQ ID NO: 5143
  Probe

SEQ ID NO: 19414 - DNA, 33 bp, Artificial Sequence; identical to SEQ ID NO: 5144
  Probe

SEQ ID NO: 19415 - DNA, 34 bp, Artificial Sequence; identical to SEQ ID NO: 5145
  Probe

SEQ ID NO: 19416 - DNA, 35 bp, Artificial Sequence; identical to SEQ ID NO: 5146
  Probe

SEQ ID NO: 19417 - DNA, 36 bp, Artificial Sequence; identical to SEQ ID NO: 5147
  Probe

SEQ ID NO: 19418 - DNA, 37 bp, Artificial Sequence; identical to SEQ ID NO: 5148
  Probe

SEQ ID NO: 19419 - DNA, 16 bp, Artificial Sequence
  Probe
ctaaaggtccctggtt

SEQ ID NO: 19420 - DNA, 37 bp, Artificial Sequence
  Probe
ctaaaggtccctggttcgatcccgggtttcggcactt

SEQ ID NO: 19421 - DNA, 20 bp, Artificial Sequence
  Probe
ctaaataagctatcgggccc

SEQ ID NO: 19422 - DNA, 21 bp, Artificial Sequence
  Probe
ctaaataagctatcgggccca

SEQ ID NO: 19423 - DNA, 22 bp, Artificial Sequence
  Probe
ctaaataagctatcgggcccat

SEQ ID NO: 19424 - DNA, 23 bp, Artificial Sequence
  Probe
ctaaataagctatcgggcccata

SEQ ID NO: 19425 - DNA, 22 bp, Artificial Sequence
  Probe
ctaaatcctatatatcttaatg

SEQ ID NO: 19426 - DNA, 22 bp, Artificial Sequence
  Probe
ctaacaacatggctttctcaac

SEQ ID NO: 19427 - DNA, 23 bp, Artificial Sequence
  Probe
ctaacaacatggctttctcaact

SEQ ID NO: 19428 - DNA, 20 bp, Artificial Sequence
  Probe
ctaacacgcgaaaggtcccc

SEQ ID NO: 19429 - DNA, 22 bp, Artificial Sequence
  Probe
ctaacacgcgaaaggtccccgg

SEQ ID NO: 19430 - DNA, 23 bp, Artificial Sequence
  Probe
ctaacacgcgaaaggtccccggt

SEQ ID NO: 19431 - DNA, 24 bp, Artificial Sequence
  Probe
ctaacacgcgaaaggtccccggtt

SEQ ID NO: 19432 - DNA, 16 bp, Artificial Sequence
  Probe
ctaactcatgccccca

SEQ ID NO: 19433 - DNA, 21 bp, Artificial Sequence
  Probe
ctaactcatgcccccatgtct

SEQ ID NO: 19434 - DNA, 25 bp, Artificial Sequence
  Probe
ctaactcatgcccccatgtctaaca

SEQ ID NO: 19435 - DNA, 33 bp, Artificial Sequence; identical to SEQ ID NO: 5158
  Probe

SEQ ID NO: 19436 - DNA, 34 bp, Artificial Sequence; identical to SEQ ID NO: 5159
  Probe

SEQ ID NO: 19437 - DNA, 36 bp, Artificial Sequence; identical to SEQ ID NO: 5161
  Probe

SEQ ID NO: 19438 - DNA, 37 bp, Artificial Sequence; identical to SEQ ID NO: 5162
  Probe

SEQ ID NO: 19439 - DNA, 38 bp, Artificial Sequence; identical to SEQ ID NO: 5163
  Probe

SEQ ID NO: 19440 - DNA, 39 bp, Artificial Sequence; identical to SEQ ID NO: 5164
  Probe

SEQ ID NO: 19441 - DNA, 40 bp, Artificial Sequence; identical to SEQ ID NO: 5165
  Probe

SEQ ID NO: 19442 - DNA, 41 bp, Artificial Sequence; identical to SEQ ID NO: 5166
  Probe

SEQ ID NO: 19443 - DNA, 42 bp, Artificial Sequence; identical to SEQ ID NO: 5167
  Probe

SEQ ID NO: 19444 - DNA, 21 bp, Artificial Sequence
  Probe
ctaagccagggattgtgggtt

SEQ ID NO: 19445 - DNA, 35 bp, Artificial Sequence
  Probe
ctaagtgtttgtgggtttaagtcccattggtctag

SEQ ID NO: 19446 - DNA, 36 bp, Artificial Sequence
  Probe
ctaagtgtttgtgggtttaagtcccattggtctagt

SEQ ID NO: 19447 - DNA, 37 bp, Artificial Sequence; identical to SEQ ID NO: 5172
  Probe

SEQ ID NO: 19448 - DNA, 38 bp, Artificial Sequence; identical to SEQ ID NO: 5173
  Probe

SEQ ID NO: 19449 - DNA, 39 bp, Artificial Sequence
  Probe
ctaagtgtttgtgggtttaagtcccattggtctagtaag

SEQ ID NO: 19450 - DNA, 19 bp, Artificial Sequence
  Probe
ctaataacgccaaggtcgc

SEQ ID NO: 19451 - DNA, 23 bp, Artificial Sequence
  Probe
ctaataacgccaaggtcgcgggt

SEQ ID NO: 19452 - DNA, 24 bp, Artificial Sequence
  Probe
ctaataacgccaaggtcgcgggtt

SEQ ID NO: 19453 - DNA, 18 bp, Artificial Sequence
  Probe
ctaatggataaggcactg

SEQ ID NO: 19454 - DNA, 34 bp, Artificial Sequence
  Probe
ctaatggtggagttaaagactttttctctgattt

SEQ ID NO: 19455 - DNA, 38 bp, Artificial Sequence; identical to SEQ ID NO: 5175
  Probe

SEQ ID NO: 19456 - DNA, 39 bp, Artificial Sequence; identical to SEQ ID NO: 5176
  Probe

SEQ ID NO: 19457 - DNA, 41 bp, Artificial Sequence; identical to SEQ ID NO: 5177
  Probe

SEQ ID NO: 19458 - DNA, 26 bp, Artificial Sequence
  Probe
ctacggatcagaagattctaggttcg

SEQ ID NO: 19459 - DNA, 19 bp, Artificial Sequence
  Probe
ctacttcctcagcaggaga

SEQ ID NO: 19460 - DNA, 20 bp, Artificial Sequence
  Probe
ctacttcctcagcaggagac

SEQ ID NO: 19461 - DNA, 23 bp, Artificial Sequence
  Probe
ctagccccaaacccactccacct

SEQ ID NO: 19462 - DNA, 17 bp, Artificial Sequence
  Probe
ctagcctttctattagc

SEQ ID NO: 19463 - DNA, 24 bp, Artificial Sequence
  Probe
ctagcggttaggattcctggtttt

SEQ ID NO: 19464 - DNA, 25 bp, Artificial Sequence
  Probe
ctagctcagtcggtagagcatgaga

SEQ ID NO: 19465 - DNA, 26 bp, Artificial Sequence
  Probe
ctagctcagtcggtagagcatgagac

SEQ ID NO: 19466 - DNA, 27 bp, Artificial Sequence
  Probe
ctagctcagtcggtagagcatgagact

SEQ ID NO: 19467 - DNA, 30 bp, Artificial Sequence
  Probe
ctagctcagtcggtagagcatgagactctt

SEQ ID NO: 19468 - DNA, 23 bp, Artificial Sequence
  Probe
ctagctcagtcggtagagcatgg

SEQ ID NO: 19469 - DNA, 30 bp, Artificial Sequence; identical to SEQ ID NO: 807
  Probe

SEQ ID NO: 19470 - DNA, 16 bp, Artificial Sequence
  Probe
ctaggggtatgattct

SEQ ID NO: 19471 - DNA, 19 bp, Artificial Sequence
  Probe
ctaggggtatgattctcgc

SEQ ID NO: 19472 - DNA, 20 bp, Artificial Sequence
  Probe
ctaggggtatgattctcgct

SEQ ID NO: 19473 - DNA, 23 bp, Artificial Sequence
  Probe
ctaggggtatgattctcgcttag

SEQ ID NO: 19474 - DNA, 23 bp, Artificial Sequence
  Probe
ctaggggtatgattctcgcttcg

SEQ ID NO: 19475 - DNA, 23 bp, Artificial Sequence
  Probe
ctaggggtatgattctcgctttg

SEQ ID NO: 19476 - DNA, 24 bp, Artificial Sequence
  Probe
ctaggggtatgattctcgctttgg

SEQ ID NO: 19477 - DNA, 38 bp, Artificial Sequence
  Probe
ctagtggctaggattcggcgctttcaccgccgcggccc

SEQ ID NO: 19478 - DNA, 21 bp, Artificial Sequence
  Probe
ctagtggttaggattcggcgc

SEQ ID NO: 19479 - DNA, 23 bp, Artificial Sequence
  Probe
ctagtggttaggattcggcgctc

SEQ ID NO: 19480 - DNA, 24 bp, Artificial Sequence
  Probe
ctagtggttaggattcggcgctct

SEQ ID NO: 19481 - DNA, 29 bp, Artificial Sequence
  Probe
ctagttttgacaacattcaaaaaagagta

SEQ ID NO: 19482 - DNA, 30 bp, Artificial Sequence
  Probe
ctagttttgacaacattcaaaaaagagtaa

SEQ ID NO: 19483 - DNA, 15 bp, Artificial Sequence
  Probe
ctatagcaccccctc

SEQ ID NO: 19484 - DNA, 23 bp, Artificial Sequence
  Probe
ctatagcaccccctctaccccct

SEQ ID NO: 19485 - DNA, 23 bp, Artificial Sequence
  Probe
ctatccattggtcttaggcccca

SEQ ID NO: 19486 - DNA, 50 bp, Artificial Sequence; identical to SEQ ID NO: 5191
  Probe

SEQ ID NO: 19487 - DNA, 23 bp, Artificial Sequence
  Probe
ctatcgggcccataccccgaaaa

SEQ ID NO: 19488 - DNA, 24 bp, Artificial Sequence
  Probe
ctatcgggcccataccccgaaaat

SEQ ID NO: 19489 - DNA, 15 bp, Artificial Sequence
  Probe
ctatctcccctttta

SEQ ID NO: 19490 - DNA, 19 bp, Artificial Sequence
  Probe
ctatctccccttttatact

SEQ ID NO: 19491 - DNA, 20 bp, Artificial Sequence
  Probe
ctatctccccttttatacta

SEQ ID NO: 19492 - DNA, 16 bp, Artificial Sequence
  Probe
ctcaaagcaatacact

SEQ ID NO: 19493 - DNA, 19 bp, Artificial Sequence
  Probe
ctcaaagcaatacactgaa

SEQ ID NO: 19494 - DNA, 31 bp, Artificial Sequence
  Probe
ctcaaagcaatacactgaaaatgtttagacg

SEQ ID NO: 19495 - DNA, 46 bp, Artificial Sequence; identical to SEQ ID NO: 809
  Probe

SEQ ID NO: 19496 - DNA, 21 bp, Artificial Sequence
  Probe
ctcacaagaactgctaactca

SEQ ID NO: 19497 - DNA, 23 bp, Artificial Sequence
  Probe
ctcacaagaactgctaactcatg

SEQ ID NO: 19498 - DNA, 20 bp, Artificial Sequence
  Probe
ctcacacgcgaaaggtcccc

SEQ ID NO: 19499 - DNA, 22 bp, Artificial Sequence
  Probe
ctcacacgcgaaaggtccccgg

SEQ ID NO: 19500 - DNA, 24 bp, Artificial Sequence
  Probe
ctcacacgcgaaaggtccccggtt

SEQ ID NO: 19501 - DNA, 22 bp, Artificial Sequence
  Probe
ctcacacggggcacaataattt

SEQ ID NO: 19502 - DNA, 20 bp, Artificial Sequence
  Probe
ctcacatcaccccataaaca

SEQ ID NO: 19503 - DNA, 21 bp, Artificial Sequence
  Probe
ctcacatcaccccataaacaa

SEQ ID NO: 19504 - DNA, 22 bp, Artificial Sequence
  Probe
ctcacatcaccccataaacaaa

SEQ ID NO: 19505 - DNA, 23 bp, Artificial Sequence
  Probe
ctcacatcaccccataaacaaat

SEQ ID NO: 19506 - DNA, 42 bp, Artificial Sequence
  Probe
ctcaccgccgcggcccgggttcgattcccggtcagggaaaga

SEQ ID NO: 19507 - DNA, 42 bp, Artificial Sequence
  Probe
ctcaccgccgcggcccgggttcgattcccggtcagggaagcc

SEQ ID NO: 19508 - DNA, 42 bp, Artificial Sequence
  Probe
ctcaccgccgcggcccgggttcgattcccggtcagggaagtc

SEQ ID NO: 19509 - DNA, 42 bp, Artificial Sequence
  Probe
ctcaccgccgcggcccgggttcgattcccggtcagggaatga

SEQ ID NO: 19510 - DNA, 19 bp, Artificial Sequence
  Probe
ctcagaaggtctcactttt

SEQ ID NO: 19511 - DNA, 23 bp, Artificial Sequence
  Probe
ctcagagggggcagctgccattt

SEQ ID NO: 19512 - DNA, 17 bp, Artificial Sequence
  Probe
ctcagggatgggttcga

SEQ ID NO: 19513 - DNA, 29 bp, Artificial Sequence
  Probe
ctcagggatgggttcgattctcatagtcc

SEQ ID NO: 19514 - DNA, 32 bp, Artificial Sequence; identical to SEQ ID NO: 816
  Probe

SEQ ID NO: 19515 - DNA, 33 bp, Artificial Sequence; identical to SEQ ID NO: 5218
  Probe

SEQ ID NO: 19516 - DNA, 35 bp, Artificial Sequence; identical to SEQ ID NO: 5220
  Probe

SEQ ID NO: 19517 - DNA, 37 bp, Artificial Sequence
  Probe
ctcagggtcgtgggttcgagccccacgttgggcggca

SEQ ID NO: 19518 - DNA, 26 bp, Artificial Sequence
  Probe
ctcagtaagttgcaatacttaatttc

SEQ ID NO: 19519 - DNA, 27 bp, Artificial Sequence
  Probe
ctcagtaagttgcaatacttaatttct

SEQ ID NO: 19520 - DNA, 28 bp, Artificial Sequence
  Probe
ctcagtaagttgcaatacttaatttctg

SEQ ID NO: 19521 - DNA, 31 bp, Artificial Sequence
  Probe
ctcagtaagttgcaatacttaatttctgtaa

SEQ ID NO: 19522 - DNA, 16 bp, Artificial Sequence
  Probe
ctcagtcggtagagca

SEQ ID NO: 19523 - DNA, 21 bp, Artificial Sequence
  Probe
ctcagtcggtagagcatggga

SEQ ID NO: 19524 - DNA, 25 bp, Artificial Sequence
  Probe
ctcagtcggtagagcatgggactct

SEQ ID NO: 19525 - DNA, 26 bp, Artificial Sequence
  Probe
ctcagtcggtagagcatgggactctt

SEQ ID NO: 19526 - DNA, 31 bp, Artificial Sequence
  Probe
ctcagtggtctagtggttaggattcagcgct

SEQ ID NO: 19527 - DNA, 23 bp, Artificial Sequence
  Probe
ctcataatctgaaggtcctgagt

SEQ ID NO: 19528 - DNA, 33 bp, Artificial Sequence
  Probe
ctcatcagtatagtggtgagtatccccgcctgt

SEQ ID NO: 19529 - DNA, 16 bp, Artificial Sequence
  Probe
ctcatgcccccatgtc

SEQ ID NO: 19530 - DNA, 17 bp, Artificial Sequence
  Probe
ctcatgcccccatgtct

SEQ ID NO: 19531 - DNA, 29 bp, Artificial Sequence
  Probe
ctcatgcccccatgtctaacaacatggct

SEQ ID NO: 19532 - DNA, 30 bp, Artificial Sequence; identical to SEQ ID NO: 5236
  Probe

SEQ ID NO: 19533 - DNA, 31 bp, Artificial Sequence; identical to SEQ ID NO: 5237
  Probe

SEQ ID NO: 19534 - DNA, 32 bp, Artificial Sequence; identical to SEQ ID NO: 5238
  Probe

SEQ ID NO: 19535 - DNA, 33 bp, Artificial Sequence; identical to SEQ ID NO: 5239
  Probe

SEQ ID NO: 19536 - DNA, 34 bp, Artificial Sequence; identical to SEQ ID NO: 5240
  Probe

SEQ ID NO: 19537 - DNA, 35 bp, Artificial Sequence; identical to SEQ ID NO: 5241
  Probe

SEQ ID NO: 19538 - DNA, 36 bp, Artificial Sequence; identical to SEQ ID NO: 5242
  Probe

SEQ ID NO: 19539 - DNA, 37 bp, Artificial Sequence; identical to SEQ ID NO: 5243
  Probe

SEQ ID NO: 19540 - DNA, 38 bp, Artificial Sequence; identical to SEQ ID NO: 5244
  Probe

SEQ ID NO: 19541 - DNA, 39 bp, Artificial Sequence
  Probe
ctcatgcccccatgtctaacaacatggctttctcaactt

SEQ ID NO: 19542 - DNA, 34 bp, Artificial Sequence; identical to SEQ ID NO: 5247
  Probe

SEQ ID NO: 19543 - DNA, 24 bp, Artificial Sequence
  Probe
ctcatttacataaatattatacta

SEQ ID NO: 19544 - DNA, 25 bp, Artificial Sequence
  Probe
ctccagtcatttcgatggcgtgggt

SEQ ID NO: 19545 - DNA, 50 bp, Artificial Sequence; identical to SEQ ID NO: 5248
  Probe

SEQ ID NO: 19546 - DNA, 41 bp, Artificial Sequence
  Probe
ctccagtctcttcgggggcgtgggttcgaatcccaccgctg

SEQ ID NO: 19547 - DNA, 42 bp, Artificial Sequence
  Probe
ctccagtctcttcgggggcgtgggttcgaatcccaccgctgc

SEQ ID NO: 19548 - DNA, 50 bp, Artificial Sequence; identical to SEQ ID NO: 5249
  Probe

SEQ ID NO: 19549 - DNA, 17 bp, Artificial Sequence
  Probe
ctccatagctcaggggt

SEQ ID NO: 19550 - DNA, 27 bp, Artificial Sequence
  Probe
ctccatagctcaggggttagagcactg

SEQ ID NO: 19551 - DNA, 28 bp, Artificial Sequence
  Probe
ctccatagctcaggggttagagcactgg

SEQ ID NO: 19552 - DNA, 29 bp, Artificial Sequence
  Probe
ctccatagctcaggggttagagcactggt

SEQ ID NO: 19553 - DNA, 30 bp, Artificial Sequence
  Probe
ctccatagctcaggggttagagcactggtc

SEQ ID NO: 19554 - DNA, 29 bp, Artificial Sequence
  Probe
ctccatagctcagtggttagagcactggt

SEQ ID NO: 19555 - DNA, 16 bp, Artificial Sequence
  Probe
ctcccgccttttttcc

SEQ ID NO: 19556 - DNA, 17 bp, Artificial Sequence
  Probe
ctcccgccttttttccc

SEQ ID NO: 19557 - DNA, 18 bp, Artificial Sequence
  Probe
ctcccgccttttttcccg

SEQ ID NO: 19558 - DNA, 19 bp, Artificial Sequence
  Probe
ctcccgccttttttcccgg

SEQ ID NO: 19559 - DNA, 20 bp, Artificial Sequence
  Probe
ctcccgccttttttcccggc

SEQ ID NO: 19560 - DNA, 21 bp, Artificial Sequence
  Probe
ctcccgccttttttcccggcg

SEQ ID NO: 19561 - DNA, 22 bp, Artificial Sequence
  Probe
ctcccgccttttttcccggcgg

SEQ ID NO: 19562 - DNA, 23 bp, Artificial Sequence
  Probe
ctcccgccttttttcccggcggc

SEQ ID NO: 19563 - DNA, 24 bp, Artificial Sequence
  Probe
ctcccgccttttttcccggcggcg

SEQ ID NO: 19564 - DNA, 25 bp, Artificial Sequence
  Probe
ctcccgccttttttcccggcggcgg

SEQ ID NO: 19565 - DNA, 26 bp, Artificial Sequence
  Probe
ctcccgccttttttcccggcggcggg

SEQ ID NO: 19566 - DNA, 27 bp, Artificial Sequence
  Probe
ctcccgccttttttcccggcggcggga

SEQ ID NO: 19567 - DNA, 28 bp, Artificial Sequence
  Probe
ctcccgccttttttcccggcggcgggag

SEQ ID NO: 19568 - DNA, 29 bp, Artificial Sequence
  Probe
ctcccgccttttttcccggcggcgggaga

SEQ ID NO: 19569 - DNA, 30 bp, Artificial Sequence; identical to SEQ ID NO: 5265
  Probe

SEQ ID NO: 19570 - DNA, 18 bp, Artificial Sequence
  Probe
ctcccggtatgggaacaa

SEQ ID NO: 19571 - DNA, 17 bp, Artificial Sequence
  Probe
ctcccggtgtgggaacg

SEQ ID NO: 19572 - DNA, 18 bp, Artificial Sequence
  Probe
ctcccggtgtgggaacgc

SEQ ID NO: 19573 - DNA, 28 bp, Artificial Sequence
  Probe
ctcccggtgtgggaacgccgaaatttta

SEQ ID NO: 19574 - DNA, 18 bp, Artificial Sequence
  Probe
ctcccggtgtgggaatga

SEQ ID NO: 19575 - DNA, 28 bp, Artificial Sequence
  Probe
ctccgaggtgattttcatattgaattgc

SEQ ID NO: 19576 - DNA, 15 bp, Artificial Sequence
  Probe
ctccgtgccacctat

SEQ ID NO: 19577 - DNA, 21 bp, Artificial Sequence
  Probe
ctcctcaaagcaatacactga

SEQ ID NO: 19578 - DNA, 27 bp, Artificial Sequence
  Probe
ctcgcctgccacgcgggaggcccgggt

SEQ ID NO: 19579 - DNA, 28 bp, Artificial Sequence
  Probe
ctcggctttccctgctaactgggctttt

SEQ ID NO: 19580 - DNA, 29 bp, Artificial Sequence
  Probe
ctcggctttccctgctaactgggcttttt

SEQ ID NO: 19581 - DNA, 30 bp, Artificial Sequence
  Probe
ctcggctttccctgctaactgggctttttt

SEQ ID NO: 19582 - DNA, 27 bp, Artificial Sequence
  Probe
ctcgttagtatagtggtgagtatcccc

SEQ ID NO: 19583 - DNA, 28 bp, Artificial Sequence
  Probe
ctcgttagtatagtggtgagtatccccg

SEQ ID NO: 19584 - DNA, 29 bp, Artificial Sequence
  Probe
ctcgttagtatagtggtgagtatccccgc

SEQ ID NO: 19585 - DNA, 36 bp, Artificial Sequence
  Probe
ctcgttagtatagtggtgagtatccccgcctgtcac

SEQ ID NO: 19586 - DNA, 37 bp, Artificial Sequence; identical to SEQ ID NO: 5273
  Probe

SEQ ID NO: 19587 - DNA, 38 bp, Artificial Sequence
  Probe
ctcgttagtatagtggtgagtatccccgcctgtcacgc

SEQ ID NO: 19588 - DNA, 34 bp, Artificial Sequence; identical to SEQ ID NO: 822
  Probe

SEQ ID NO: 19589 - DNA, 18 bp, Artificial Sequence
  Probe
ctctcaccgccgcggccc

SEQ ID NO: 19590 - DNA, 22 bp, Artificial Sequence
  Probe
ctctcaccgccgcggcccgggt

SEQ ID NO: 19591 - DNA, 44 bp, Artificial Sequence
  Probe
ctctcaccgccgcggcccgggttcgattcccggtcagggaagcc

SEQ ID NO: 19592 - DNA, 44 bp, Artificial Sequence
  Probe
ctctcaccgccgcggcccgggttcgattcccggtcagggaagtc

SEQ ID NO: 19593 - DNA, 19 bp, Artificial Sequence
  Probe
ctctgaatccagcgatccg

SEQ ID NO: 19594 - DNA, 20 bp, Artificial Sequence
  Probe
ctctgaatccagcgatccga

SEQ ID NO: 19595 - DNA, 21 bp, Artificial Sequence
  Probe
ctctgaatccagcgatccgag

SEQ ID NO: 19596 - DNA, 22 bp, Artificial Sequence
  Probe
ctctgaatccagcgatccgagt

SEQ ID NO: 19597 - DNA, 38 bp, Artificial Sequence
  Probe
ctctgaatccagcgatccgagttcaaatctcggtggaa

SEQ ID NO: 19598 - DNA, 15 bp, Artificial Sequence
  Probe
ctctgcctgccaact

SEQ ID NO: 19599 - DNA, 50 bp, Artificial Sequence; identical to SEQ ID NO: 5278
  Probe

SEQ ID NO: 19600 - DNA, 41 bp, Artificial Sequence
  Probe
ctgaaaatgtttagacgggctcacatcaccccataaacaaa

SEQ ID NO: 19601 - DNA, 42 bp, Artificial Sequence; identical to SEQ ID NO: 5280
  Probe

SEQ ID NO: 19602 - DNA, 43 bp, Artificial Sequence; identical to SEQ ID NO: 5281
  Probe

SEQ ID NO: 19603 - DNA, 44 bp, Artificial Sequence; identical to SEQ ID NO: 5282
  Probe

SEQ ID NO: 19604 - DNA, 16 bp, Artificial Sequence
  Probe
ctgaaggtcctgagtt

SEQ ID NO: 19605 - DNA, 37 bp, Artificial Sequence; identical to SEQ ID NO: 5284
  Probe

SEQ ID NO: 19606 - DNA, 37 bp, Artificial Sequence
  Probe
ctgaaggtcctgagttcgagcctcagagagggcagct

SEQ ID NO: 19607 - DNA, 16 bp, Artificial Sequence
  Probe
ctgaaggtcgtgagtt

SEQ ID NO: 19608 - DNA, 31 bp, Artificial Sequence
  Probe
ctgaaggtcgtgagttcgagcctcacacggg

SEQ ID NO: 19609 - DNA, 31 bp, Artificial Sequence
  Probe
ctgaaggtcgtgagttcgatcctcacacggg

SEQ ID NO: 19610 - DNA, 36 bp, Artificial Sequence
  Probe
ctgaaggtcgtgagttcgatcctcacacggggcaca

SEQ ID NO: 19611 - DNA, 37 bp, Artificial Sequence; identical to SEQ ID NO: 5287
  Probe

SEQ ID NO: 19612 - DNA, 39 bp, Artificial Sequence; identical to SEQ ID NO: 833
  Probe

SEQ ID NO: 19613 - DNA, 42 bp, Artificial Sequence; identical to SEQ ID NO: 5291
  Probe

SEQ ID NO: 19614 - DNA, 33 bp, Artificial Sequence; identical to SEQ ID NO: 836
  Probe

SEQ ID NO: 19615 - DNA, 34 bp, Artificial Sequence; identical to SEQ ID NO: 5298
  Probe

SEQ ID NO: 19616 - DNA, 35 bp, Artificial Sequence; identical to SEQ ID NO: 5299
  Probe

SEQ ID NO: 19617 - DNA, 36 bp, Artificial Sequence; identical to SEQ ID NO: 5300
  Probe

SEQ ID NO: 19618 - DNA, 31 bp, Artificial Sequence
  Probe
ctgagggtccagggttcaagtccctgttcgg

SEQ ID NO: 19619 - DNA, 34 bp, Artificial Sequence
  Probe
ctgagggtccagggttcaagtccctgttcgggcg

SEQ ID NO: 19620 - DNA, 37 bp, Artificial Sequence; identical to SEQ ID NO: 5304
  Probe

SEQ ID NO: 19621 - DNA, 31 bp, Artificial Sequence
  Probe
ctgcagctagctcagtcggtagagcatgaga

SEQ ID NO: 19622 - DNA, 32 bp, Artificial Sequence
  Probe
ctgcagctagctcagtcggtagagcatgagac

SEQ ID NO: 19623 - DNA, 33 bp, Artificial Sequence; identical to SEQ ID NO: 5307
  Probe

SEQ ID NO: 19624 - DNA, 25 bp, Artificial Sequence
  Probe
ctgccacacctcagaaggtctcact

SEQ ID NO: 19625 - DNA, 24 bp, Artificial Sequence
  Probe
ctgccacgcgggaggcccgggttt

SEQ ID NO: 19626 - DNA, 30 bp, Artificial Sequence; identical to SEQ ID NO: 5308
  Probe

SEQ ID NO: 19627 - DNA, 19 bp, Artificial Sequence
  Probe
ctgctaactcatgccccca

SEQ ID NO: 19628 - DNA, 28 bp, Artificial Sequence
  Probe
ctgctaactcatgcccccatgtctaaca

SEQ ID NO: 19629 - DNA, 36 bp, Artificial Sequence; identical to SEQ ID NO: 5314
  Probe

SEQ ID NO: 19630 - DNA, 37 bp, Artificial Sequence; identical to SEQ ID NO: 5315
  Probe

SEQ ID NO: 19631 - DNA, 38 bp, Artificial Sequence; identical to SEQ ID NO: 5316
  Probe

SEQ ID NO: 19632 - DNA, 39 bp, Artificial Sequence; identical to SEQ ID NO: 5317
  Probe

SEQ ID NO: 19633 - DNA, 40 bp, Artificial Sequence; identical to SEQ ID NO: 5318
  Probe

SEQ ID NO: 19634 - DNA, 41 bp, Artificial Sequence; identical to SEQ ID NO: 5319
  Probe

SEQ ID NO: 19635 - DNA, 42 bp, Artificial Sequence; identical to SEQ ID NO: 5320
  Probe

SEQ ID NO: 19636 - DNA, 43 bp, Artificial Sequence; identical to SEQ ID NO: 5321
  Probe

SEQ ID NO: 19637 - DNA, 44 bp, Artificial Sequence; identical to SEQ ID NO: 5322
  Probe

SEQ ID NO: 19638 - DNA, 45 bp, Artificial Sequence; identical to SEQ ID NO: 5323
  Probe

SEQ ID NO: 19639 - DNA, 16 bp, Artificial Sequence
  Probe
ctgctatcggagtttt

SEQ ID NO: 19640 - DNA, 17 bp, Artificial Sequence
  Probe
ctgctatcggagttttt

SEQ ID NO: 19641 - DNA, 24 bp, Artificial Sequence
  Probe
ctggaaagtgcacttggacgaacc

SEQ ID NO: 19642 - DNA, 30 bp, Artificial Sequence
  Probe
ctggcggtctagtggttaggattcggcgct

SEQ ID NO: 19643 - DNA, 24 bp, Artificial Sequence
  Probe
ctggctggctcgcgatgtctgttt

SEQ ID NO: 19644 - DNA, 25 bp, Artificial Sequence
  Probe
ctggctggctcgcgatgtctgtttt

SEQ ID NO: 19645 - DNA, 27 bp, Artificial Sequence
  Probe
ctggggattgtgggttcgagtcccatc

SEQ ID NO: 19646 - DNA, 30 bp, Artificial Sequence
  Probe
ctggggattgtgggttcgagtcccatctgg

SEQ ID NO: 19647 - DNA, 31 bp, Artificial Sequence
  Probe
ctggggattgtgggttcgagtcccatctggg

SEQ ID NO: 19648 - DNA, 37 bp, Artificial Sequence
  Probe
ctggggattgtgggttcgagtcccatctgggtcgcgt

SEQ ID NO: 19649 - DNA, 31 bp, Artificial Sequence
  Probe
ctgggtagctcagtcggtagagcatcagact

SEQ ID NO: 19650 - DNA, 41 bp, Artificial Sequence
  Probe
ctggtctccaatggaggcgtgggttcgaatcccacttctga

SEQ ID NO: 19651 - DNA, 23 bp, Artificial Sequence
  Probe
ctggtctccggatggaggcgtgg

SEQ ID NO: 19652 - DNA, 31 bp, Artificial Sequence
  Probe
ctggtggtctagtggctaggattcggcgctt

SEQ ID NO: 19653 - DNA, 33 bp, Artificial Sequence; identical to SEQ ID NO: 5328
  Probe

SEQ ID NO: 19654 - DNA, 23 bp, Artificial Sequence
  Probe
ctggtggtctagtggttaggatt

SEQ ID NO: 19655 - DNA, 25 bp, Artificial Sequence
  Probe
ctggtggtctagtggttaggattcg

SEQ ID NO: 19656 - DNA, 26 bp, Artificial Sequence
  Probe
ctggtggtctagtggttaggattcgg

SEQ ID NO: 19657 - DNA, 27 bp, Artificial Sequence
  Probe
ctggtggtctagtggttaggattcggc

SEQ ID NO: 19658 - DNA, 36 bp, Artificial Sequence
  Probe
ctggtggtctagtggttaggattcggcgctctcacc

SEQ ID NO: 19659 - DNA, 23 bp, Artificial Sequence
  Probe
ctggtgtagtggtatcatgcaag

SEQ ID NO: 19660 - DNA, 24 bp, Artificial Sequence
  Probe
ctggtgtagtggtatcatgcaaga

SEQ ID NO: 19661 - DNA, 26 bp, Artificial Sequence
  Probe
ctggtgtagtggtatcatgcaagatt

SEQ ID NO: 19662 - DNA, 28 bp, Artificial Sequence
  Probe
ctggtgtagtggtatcatgcaagattcc

SEQ ID NO: 19663 - DNA, 29 bp, Artificial Sequence
  Probe
ctggtgtagtggtatcatgcaagattccc

SEQ ID NO: 19664 - DNA, 25 bp, Artificial Sequence
  Probe
ctgtaaagctaacttagcattaacc

SEQ ID NO: 19665 - DNA, 50 bp, Artificial Sequence; identical to SEQ ID NO: 844
  Probe

SEQ ID NO: 19666 - DNA, 16 bp, Artificial Sequence
  Probe
ctgtcacgcgggagac

SEQ ID NO: 19667 - DNA, 17 bp, Artificial Sequence
  Probe
ctgtcacgcgggagacc

SEQ ID NO: 19668 - DNA, 24 bp, Artificial Sequence
  Probe
ctgtcacgcgggagaccggggttc

SEQ ID NO: 19669 - DNA, 25 bp, Artificial Sequence
  Probe
ctgtcacgcgggagaccggggttca

SEQ ID NO: 19670 - DNA, 26 bp, Artificial Sequence
  Probe
ctgtcacgcgggagaccggggttcaa

SEQ ID NO: 19671 - DNA, 37 bp, Artificial Sequence
  Probe
ctgtcacgcgggagaccggggttcaattccccgacgg

SEQ ID NO: 19672 - DNA, 44 bp, Artificial Sequence; identical to SEQ ID NO: 5338
  Probe

SEQ ID NO: 19673 - DNA, 25 bp, Artificial Sequence
  Probe
ctgtcacgcgggagaccggggttcg

SEQ ID NO: 19674 - DNA, 26 bp, Artificial Sequence
  Probe
ctgtcacgcgggagaccggggttcga

SEQ ID NO: 19675 - DNA, 35 bp, Artificial Sequence
  Probe
ctgtcacgcgggagaccggggttcgattccccgac

SEQ ID NO: 19676 - DNA, 36 bp, Artificial Sequence
  Probe
ctgtcacgcgggagaccggggttcgattccccgacg

SEQ ID NO: 19677 - DNA, 42 bp, Artificial Sequence
  Probe
ctgtcacgcgggagaccggggttcgattccccgacggggaga

SEQ ID NO: 19678 - DNA, 44 bp, Artificial Sequence
  Probe
ctgtcacgcgggagaccggggttcgattccccgacggggagaaa

SEQ ID NO: 19679 - DNA, 44 bp, Artificial Sequence
  Probe
ctgtcacgcgggagaccggggttcgattccccgacggggagacg

SEQ ID NO: 19680 - DNA, 44 bp, Artificial Sequence; identical to SEQ ID NO: 5339
  Probe

SEQ ID NO: 19681 - DNA, 42 bp, Artificial Sequence
  Probe
ctgtcacgcgggagaccggggttcgattccccgacggggagg

SEQ ID NO: 19682 - DNA, 44 bp, Artificial Sequence; identical to SEQ ID NO: 5340
  Probe

SEQ ID NO: 19683 - DNA, 50 bp, Artificial Sequence; identical to SEQ ID NO: 5341
  Probe

SEQ ID NO: 19684 - DNA, 44 bp, Artificial Sequence
  Probe
ctgtcacgcgggagaccggggttcgattccccgacggggaggcc

SEQ ID NO: 19685 - DNA, 21 bp, Artificial Sequence
  Probe
ctgtgctccggagttacctcg

SEQ ID NO: 19686 - DNA, 22 bp, Artificial Sequence
  Probe
ctgtgctccggagttacctcgt

SEQ ID NO: 19687 - DNA, 23 bp, Artificial Sequence
  Probe
ctgtgctccggagttacctcgtt

SEQ ID NO: 19688 - DNA, 24 bp, Artificial Sequence
  Probe
ctgtgctccggagttacctcgttt

SEQ ID NO: 19689 - DNA, 25 bp, Artificial Sequence
  Probe
ctgtgctccggagttacctcgtttt

SEQ ID NO: 19690 - DNA, 26 bp, Artificial Sequence
  Probe
ctgtgctccggagttacctcgttttg

SEQ ID NO: 19691 - DNA, 39 bp, Artificial Sequence
  Probe
ctgttaactaagtgtttgtgggtttaagtcccattggtc

SEQ ID NO: 19692 - DNA, 40 bp, Artificial Sequence
  Probe
ctgttaactaagtgtttgtgggtttaagtcccattggtct

SEQ ID NO: 19693 - DNA, 41 bp, Artificial Sequence
  Probe
ctgttaactaagtgtttgtgggtttaagtcccattggtcta

SEQ ID NO: 19694 - DNA, 43 bp, Artificial Sequence
  Probe
ctgttaactaagtgtttgtgggtttaagtcccattggtctagt

SEQ ID NO: 19695 - DNA, 45 bp, Artificial Sequence; identical to SEQ ID NO: 5346
  Probe

SEQ ID NO: 19696 - DNA, 38 bp, Artificial Sequence; identical to SEQ ID NO: 5349
  Probe

SEQ ID NO: 19697 - DNA, 40 bp, Artificial Sequence; identical to SEQ ID NO: 5351
  Probe

SEQ ID NO: 19698 - DNA, 41 bp, Artificial Sequence; identical to SEQ ID NO: 5352
  Probe

SEQ ID NO: 19699 - DNA, 42 bp, Artificial Sequence; identical to SEQ ID NO: 5353
  Probe

SEQ ID NO: 19700 - DNA, 45 bp, Artificial Sequence; identical to SEQ ID NO: 5355
  Probe

SEQ ID NO: 19701 - DNA, 22 bp, Artificial Sequence
  Probe
cttaaacccccttatttctagg

SEQ ID NO: 19702 - DNA, 23 bp, Artificial Sequence
  Probe
cttaaacccccttatttctagga

SEQ ID NO: 19703 - DNA, 16 bp, Artificial Sequence
  Probe
cttaacacaaagcacc

SEQ ID NO: 19704 - DNA, 17 bp, Artificial Sequence
  Probe
cttaacacaaagcaccc

SEQ ID NO: 19705 - DNA, 18 bp, Artificial Sequence
  Probe
cttaacacaaagcaccca

SEQ ID NO: 19706 - DNA, 19 bp, Artificial Sequence
  Probe
cttaacacaaagcacccaa

SEQ ID NO: 19707 - DNA, 25 bp, Artificial Sequence
  Probe
cttaacacaaagcacccaacttaca

SEQ ID NO: 19708 - DNA, 17 bp, Artificial Sequence
  Probe
cttaacttgaccgctct

SEQ ID NO: 19709 - DNA, 20 bp, Artificial Sequence
  Probe
cttaacttgaccgctctgag

SEQ ID NO: 19710 - DNA, 21 bp, Artificial Sequence
  Probe
cttaacttgaccgctctgagc

SEQ ID NO: 19711 - DNA, 22 bp, Artificial Sequence
  Probe
cttaacttgaccgctctgagct

SEQ ID NO: 19712 - DNA, 16 bp, Artificial Sequence
  Probe
cttacacttaggagat

SEQ ID NO: 19713 - DNA, 25 bp, Artificial Sequence
  Probe
cttacacttaggagatttcaactta

SEQ ID NO: 19714 - DNA, 34 bp, Artificial Sequence; identical to SEQ ID NO: 5367
  Probe

SEQ ID NO: 19715 - DNA, 36 bp, Artificial Sequence; identical to SEQ ID NO: 5368
  Probe

SEQ ID NO: 19716 - DNA, 38 bp, Artificial Sequence
  Probe
cttacacttaggagatttcaacttaacttgaccgctct

SEQ ID NO: 19717 - DNA, 41 bp, Artificial Sequence; identical to SEQ ID NO: 5370
  Probe

SEQ ID NO: 19718 - DNA, 42 bp, Artificial Sequence; identical to SEQ ID NO: 5371
  Probe

SEQ ID NO: 19719 - DNA, 43 bp, Artificial Sequence; identical to SEQ ID NO: 5372
  Probe

SEQ ID NO: 19720 - DNA, 17 bp, Artificial Sequence
  Probe
cttacctcctcaaagca

SEQ ID NO: 19721 - DNA, 20 bp, Artificial Sequence
  Probe
cttacctcctcaaagcaata

SEQ ID NO: 19722 - DNA, 24 bp, Artificial Sequence
  Probe
cttacctcctcaaagcaatacact

SEQ ID NO: 19723 - DNA, 30 bp, Artificial Sequence
  Probe
cttagcattaaccttttaagttaaagatta

SEQ ID NO: 19724 - DNA, 36 bp, Artificial Sequence; identical to SEQ ID NO: 5376
  Probe

SEQ ID NO: 19725 - DNA, 38 bp, Artificial Sequence
  Probe
cttagcattaaccttttaagttaaagattaagagaacc

SEQ ID NO: 19726 - DNA, 50 bp, Artificial Sequence; identical to SEQ ID NO: 5381
  Probe

SEQ ID NO: 19727 - DNA, 24 bp, Artificial Sequence
  Probe
cttaggagatttcaacttaacttg

SEQ ID NO: 19728 - DNA, 26 bp, Artificial Sequence
  Probe
cttaggagatttcaacttaacttgac

SEQ ID NO: 19729 - DNA, 28 bp, Artificial Sequence
  Probe
cttaggagatttcaacttaacttgaccg

SEQ ID NO: 19730 - DNA, 29 bp, Artificial Sequence
  Probe
cttaggagatttcaacttaacttgaccgc

SEQ ID NO: 19731 - DNA, 30 bp, Artificial Sequence; identical to SEQ ID NO: 5384
  Probe

SEQ ID NO: 19732 - DNA, 31 bp, Artificial Sequence; identical to SEQ ID NO: 5385
  Probe

SEQ ID NO: 19733 - DNA, 32 bp, Artificial Sequence; identical to SEQ ID NO: 5386
  Probe

SEQ ID NO: 19734 - DNA, 34 bp, Artificial Sequence; identical to SEQ ID NO: 5388
  Probe

SEQ ID NO: 19735 - DNA, 35 bp, Artificial Sequence; identical to SEQ ID NO: 5389
  Probe

SEQ ID NO: 19736 - DNA, 36 bp, Artificial Sequence; identical to SEQ ID NO: 5390
  Probe

SEQ ID NO: 19737 - DNA, 37 bp, Artificial Sequence; identical to SEQ ID NO: 5391
  Probe

SEQ ID NO: 19738 - DNA, 38 bp, Artificial Sequence; identical to SEQ ID NO: 5392
  Probe

SEQ ID NO: 19739 - DNA, 31 bp, Artificial Sequence
  Probe
cttaggtcgctggttcgattccggctcgaag

SEQ ID NO: 19740 - DNA, 33 bp, Artificial Sequence
  Probe
cttaggtcgctggttcgattccggctcgaagga

SEQ ID NO: 19741 - DNA, 23 bp, Artificial Sequence
  Probe
cttagttggttaaagcgcctgtc

SEQ ID NO: 19742 - DNA, 24 bp, Artificial Sequence
  Probe
cttagttggttaaagcgcctgtct

SEQ ID NO: 19743 - DNA, 15 bp, Artificial Sequence
  Probe
cttcactatggctct

SEQ ID NO: 19744 - DNA, 16 bp, Artificial Sequence
  Probe
cttccaagcagttgac

SEQ ID NO: 19745 - DNA, 17 bp, Artificial Sequence
  Probe
cttccaagcagttgacc

SEQ ID NO: 19746 - DNA, 21 bp, Artificial Sequence
  Probe
cttccaagcagttgacccggg

SEQ ID NO: 19747 - DNA, 24 bp, Artificial Sequence
  Probe
cttccaagcagttgacccgggttc

SEQ ID NO: 19748 - DNA, 44 bp, Artificial Sequence
  Probe
cttccaagcagttgacccgggttcgattcccggccaacgcagtg

SEQ ID NO: 19749 - DNA, 41 bp, Artificial Sequence
  Probe
cttccaattaactagttttgacaacattcaaaaaagagtaa

SEQ ID NO: 19750 - DNA, 42 bp, Artificial Sequence
  Probe
cttccaattaactagttttgacaacattcaaaaaagagtaat

SEQ ID NO: 19751 - DNA, 43 bp, Artificial Sequence; identical to SEQ ID NO: 5395
  Probe

SEQ ID NO: 19752 - DNA, 31 bp, Artificial Sequence
  Probe
cttgcgaaactactttcttgattcaggtgtt

SEQ ID NO: 19753 - DNA, 30 bp, Artificial Sequence
  Probe
cttgcgacccgggttcgattcccgggcggc

SEQ ID NO: 19754 - DNA, 31 bp, Artificial Sequence
  Probe
cttgcgacccgggttcgattcccgggcggcg

SEQ ID NO: 19755 - DNA, 33 bp, Artificial Sequence
  Probe
cttgcgacccgggttcgattcccgggcggcgca

SEQ ID NO: 19756 - DNA, 36 bp, Artificial Sequence
  Probe
cttgcgacccgggttcgattcccgggcggcgcactt

SEQ ID NO: 19757 - DNA, 40 bp, Artificial Sequence; identical to SEQ ID NO: 5396
  Probe

SEQ ID NO: 19758 - DNA, 15 bp, Artificial Sequence
  Probe
ctttaactccaccat

SEQ ID NO: 19759 - DNA, 46 bp, Artificial Sequence; identical to SEQ ID NO: 5397
  Probe

SEQ ID NO: 19760 - DNA, 18 bp, Artificial Sequence
  Probe
ctttacagtcagaggttc

SEQ ID NO: 19761 - DNA, 30 bp, Artificial Sequence
  Probe
ctttacagtcagaggttcaattcctcttct

SEQ ID NO: 19762 - DNA, 35 bp, Artificial Sequence
  Probe
ctttacagtcagaggttcaattcctcttcttaaca

SEQ ID NO: 19763 - DNA, 36 bp, Artificial Sequence
  Probe
ctttacagtcagaggttcaattcctcttcttaacaa

SEQ ID NO: 19764 - DNA, 37 bp, Artificial Sequence; identical to SEQ ID NO: 5399
  Probe

SEQ ID NO: 19765 - DNA, 38 bp, Artificial Sequence; identical to SEQ ID NO: 5400
  Probe

SEQ ID NO: 19766 - DNA, 18 bp, Artificial Sequence
  Probe
ctttgaatccagcgatcc

SEQ ID NO: 19767 - DNA, 20 bp, Artificial Sequence
  Probe
ctttgaatccagcgatccga

SEQ ID NO: 19768 - DNA, 24 bp, Artificial Sequence
  Probe
ctttgaatccagcgatccgagttc

SEQ ID NO: 19769 - DNA, 46 bp, Artificial Sequence; identical to SEQ ID NO: 5403
  Probe

SEQ ID NO: 19770 - DNA, 50 bp, Artificial Sequence; identical to SEQ ID NO: 5404
  Probe

SEQ ID NO: 19771 - DNA, 16 bp, Artificial Sequence
  Probe
ctttgcacgcgtgggt

SEQ ID NO: 19772 - DNA, 31 bp, Artificial Sequence; identical to SEQ ID NO: 5405
  Probe

SEQ ID NO: 19773 - DNA, 32 bp, Artificial Sequence
  Probe
ctttggggggttcgattccttccttttttgtc

SEQ ID NO: 19774 - DNA, 28 bp, Artificial Sequence
  Probe
ctttgggtgctaatggtggagttaaaga

SEQ ID NO: 19775 - DNA, 26 bp, Artificial Sequence
  Probe
cttttaagttaaagattaagagaacc

SEQ ID NO: 19776 - DNA, 27 bp, Artificial Sequence
  Probe
cttttaagttaaagattaagagaacca

SEQ ID NO: 19777 - DNA, 49 bp, Artificial Sequence; identical to SEQ ID NO: 5407
  Probe

SEQ ID NO: 19778 - DNA, 50 bp, Artificial Sequence; identical to SEQ ID NO: 5408
  Probe

SEQ ID NO: 19779 - DNA, 30 bp, Artificial Sequence
  Probe
cttttagtataaatagtaccgttaacttcc

SEQ ID NO: 19780 - DNA, 23 bp, Artificial Sequence
  Probe
cttttttcccggcggcgggagaa

SEQ ID NO: 19781 - DNA, 25 bp, Artificial Sequence
  Probe
cttttttcccggcggcgggagaagt

SEQ ID NO: 19782 - DNA, 16 bp, Artificial Sequence
  Probe
gaaaaagtcatggagg

SEQ ID NO: 19783 - DNA, 17 bp, Artificial Sequence
  Probe
gaaaaagtcatggaggc

SEQ ID NO: 19784 - DNA, 20 bp, Artificial Sequence
  Probe
gaaaaagtcatggaggccat

SEQ ID NO: 19785 - DNA, 23 bp, Artificial Sequence
  Probe
gaaaaagtcatggaggccatggg

SEQ ID NO: 19786 - DNA, 24 bp, Artificial Sequence
  Probe
gaaaaagtcatggaggccatgggg

SEQ ID NO: 19787 - DNA, 25 bp, Artificial Sequence
  Probe
gaaaaagtcatggaggccatggggt

SEQ ID NO: 19788 - DNA, 26 bp, Artificial Sequence
  Probe
gaaaaagtcatggaggccatggggtt

SEQ ID NO: 19789 - DNA, 29 bp, Artificial Sequence
  Probe
gaaaaagtcatggaggccatggggttggc

SEQ ID NO: 19790 - DNA, 30 bp, Artificial Sequence; identical to SEQ ID NO: 10057
  Probe

SEQ ID NO: 19791 - DNA, 31 bp, Artificial Sequence; identical to SEQ ID NO: 5416
  Probe

SEQ ID NO: 19792 - DNA, 32 bp, Artificial Sequence; identical to SEQ ID NO: 5417
  Probe

SEQ ID NO: 19793 - DNA, 33 bp, Artificial Sequence; identical to SEQ ID NO: 5418
  Probe

SEQ ID NO: 19794 - DNA, 50 bp, Artificial Sequence; identical to SEQ ID NO: 5419
  Probe

SEQ ID NO: 19795 - DNA, 24 bp, Artificial Sequence
  Probe
gaaaacctttttccaaggacaaat

SEQ ID NO: 19796 - DNA, 24 bp, Artificial Sequence
  Probe
gaaaatgttggttatacccttccc

SEQ ID NO: 19797 - DNA, 25 bp, Artificial Sequence
  Probe
gaaaatgttggttatacccttcccg

SEQ ID NO: 19798 - DNA, 26 bp, Artificial Sequence
  Probe
gaaaatgttggttatacccttcccgt

SEQ ID NO: 19799 - DNA, 27 bp, Artificial Sequence
  Probe
gaaaatgttggttatacccttcccgta

SEQ ID NO: 19800 - DNA, 29 bp, Artificial Sequence
  Probe
gaaaatgttggttatacccttcccgtact

SEQ ID NO: 19801 - DNA, 31 bp, Artificial Sequence
  Probe
gaaaatgttggttatacccttcccgtactaa

SEQ ID NO: 19802 - DNA, 20 bp, Artificial Sequence
  Probe
gaaaatgtttagacgggctc

SEQ ID NO: 19803 - DNA, 21 bp, Artificial Sequence
  Probe
gaaaatgtttagacgggctca

SEQ ID NO: 19804 - DNA, 23 bp, Artificial Sequence
  Probe
gaaaatgtttagacgggctcaca

SEQ ID NO: 19805 - DNA, 26 bp, Artificial Sequence
  Probe
gaaaatgtttagacgggctcacatca

SEQ ID NO: 19806 - DNA, 29 bp, Artificial Sequence
  Probe
gaaaatgtttagacgggctcacatcaccc

SEQ ID NO: 19807 - DNA, 30 bp, Artificial Sequence; identical to SEQ ID NO: 861
  Probe

SEQ ID NO: 19808 - DNA, 32 bp, Artificial Sequence; identical to SEQ ID NO: 863
  Probe

SEQ ID NO: 19809 - DNA, 33 bp, Artificial Sequence; identical to SEQ ID NO: 864
  Probe

SEQ ID NO: 19810 - DNA, 38 bp, Artificial Sequence
  Probe
gaaaatgtttagacgggctcacatcaccccataaacaa

SEQ ID NO: 19811 - DNA, 39 bp, Artificial Sequence; identical to SEQ ID NO: 5426
  Probe

SEQ ID NO: 19812 - DNA, 40 bp, Artificial Sequence; identical to SEQ ID NO: 5427
  Probe

SEQ ID NO: 19813 - DNA, 41 bp, Artificial Sequence; identical to SEQ ID NO: 5428
  Probe

SEQ ID NO: 19814 - DNA, 42 bp, Artificial Sequence; identical to SEQ ID NO: 5429
  Probe

SEQ ID NO: 19815 - DNA, 43 bp, Artificial Sequence
  Probe
gaaaatgtttagacgggctcacatcaccccataaacaaatagg

SEQ ID NO: 19816 - DNA, 38 bp, Artificial Sequence
  Probe
gaaaccagctttggggggttcgattccttccttttttg

SEQ ID NO: 19817 - DNA, 39 bp, Artificial Sequence
  Probe
gaaaccagctttggggggttcgattccttccttttttgt

SEQ ID NO: 19818 - DNA, 40 bp, Artificial Sequence
  Probe
gaaaccagctttggggggttcgattccttccttttttgtc

SEQ ID NO: 19819 - DNA, 20 bp, Artificial Sequence
  Probe
gaaaccgggcggaaacacct

SEQ ID NO: 19820 - DNA, 26 bp, Artificial Sequence
  Probe
gaaactactttcttgattcaggtgtt

SEQ ID NO: 19821 - DNA, 21 bp, Artificial Sequence
  Probe
gaaagctcacaagaactgcta

SEQ ID NO: 19822 - DNA, 23 bp, Artificial Sequence
  Probe
gaaagctcacaagaactgctaac

SEQ ID NO: 19823 - DNA, 28 bp, Artificial Sequence
  Probe
gaaagctcacaagaactgctaactcatg

SEQ ID NO: 19824 - DNA, 16 bp, Artificial Sequence
  Probe
gaaaggtccccggttc

SEQ ID NO: 19825 - DNA, 30 bp, Artificial Sequence
  Probe
gaaaggtccccggttcgaaaccgggcggaa

SEQ ID NO: 19826 - DNA, 31 bp, Artificial Sequence
  Probe
gaaaggtccccggttcgaaaccgggcggaaa

SEQ ID NO: 19827 - DNA, 33 bp, Artificial Sequence
  Probe
gaaaggtccccggttcgaaaccgggcggaaaca

SEQ ID NO: 19828 - DNA, 36 bp, Artificial Sequence; identical to SEQ ID NO: 5436
  Probe

SEQ ID NO: 19829 - DNA, 36 bp, Artificial Sequence
  Probe
gaaaggtccccggttcgatcccgggcggaaacaggt

SEQ ID NO: 19830 - DNA, 30 bp, Artificial Sequence
  Probe
gaaaggttggtggttcgagcccacccaggg

SEQ ID NO: 19831 - DNA, 32 bp, Artificial Sequence; identical to SEQ ID NO: 881
  Probe

SEQ ID NO: 19832 - DNA, 33 bp, Artificial Sequence
  Probe
gaaaggttggtggttcgagcccacccagggacg

SEQ ID NO: 19833 - DNA, 34 bp, Artificial Sequence
  Probe
gaaaggttggtggttcgagcccacccagggacgc

SEQ ID NO: 19834 - DNA, 35 bp, Artificial Sequence; identical to SEQ ID NO: 5438
  Probe

SEQ ID NO: 19835 - DNA, 36 bp, Artificial Sequence; identical to SEQ ID NO: 5439
  Probe

SEQ ID NO: 19836 - DNA, 31 bp, Artificial Sequence
  Probe
gaaaggttggtggttcgatcccacccaggga

SEQ ID NO: 19837 - DNA, 15 bp, Artificial Sequence
  Probe
gaaagtacgattact

SEQ ID NO: 19838 - DNA, 34 bp, Artificial Sequence
  Probe
gaaatacaacgatggtttttcatatcattggtcg

SEQ ID NO: 19839 - DNA, 36 bp, Artificial Sequence
  Probe
gaaatacaacgatggtttttcatatcattggtcgtg

SEQ ID NO: 19840 - DNA, 38 bp, Artificial Sequence
  Probe
gaaatacaacgatggtttttcatatcattggtcgtggt

SEQ ID NO: 19841 - DNA, 45 bp, Artificial Sequence
  Probe
gaaatacaacgatggtttttcatatcattggtcgtggttgtagtc

SEQ ID NO: 19842 - DNA, 29 bp, Artificial Sequence
  Probe
gaaatccaatggggtctccccgcgcaggt

SEQ ID NO: 19843 - DNA, 29 bp, Artificial Sequence
  Probe
gaaatccattggggtttccccgcgcaggt

SEQ ID NO: 19844 - DNA, 36 bp, Artificial Sequence; identical to SEQ ID NO: 5445
  Probe

SEQ ID NO: 19845 - DNA, 38 bp, Artificial Sequence; identical to SEQ ID NO: 5447
  Probe

SEQ ID NO: 19846 - DNA, 39 bp, Artificial Sequence; identical to SEQ ID NO: 5448
  Probe

SEQ ID NO: 19847 - DNA, 19 bp, Artificial Sequence
  Probe
gaaccaacacctctttaca

SEQ ID NO: 19848 - DNA, 21 bp, Artificial Sequence
  Probe
gaaccaacacctctttacagt

SEQ ID NO: 19849 - DNA, 22 bp, Artificial Sequence
  Probe
gaaccaacacctctttacagtg

SEQ ID NO: 19850 - DNA, 23 bp, Artificial Sequence
  Probe
gaaccaacacctctttacagtga

SEQ ID NO: 19851 - DNA, 24 bp, Artificial Sequence
  Probe
gaaccaacacctctttacagtgaa

SEQ ID NO: 19852 - DNA, 25 bp, Artificial Sequence
  Probe
gaaccaacacctctttacagtgaaa

SEQ ID NO: 19853 - DNA, 26 bp, Artificial Sequence
  Probe
gaaccaacacctctttacagtgaaat

SEQ ID NO: 19854 - DNA, 16 bp, Artificial Sequence
  Probe
gaacccatccctgaga

SEQ ID NO: 19855 - DNA, 27 bp, Artificial Sequence
  Probe
gaacctcagagggggcagctgccattt

SEQ ID NO: 19856 - DNA, 16 bp, Artificial Sequence
  Probe
gaactgctaactcatg

SEQ ID NO: 19857 - DNA, 22 bp, Artificial Sequence
  Probe
gaactgctaactcatgccccca

SEQ ID NO: 19858 - DNA, 26 bp, Artificial Sequence
  Probe
gaactgctaactcatgcccccatgtc

SEQ ID NO: 19859 - DNA, 27 bp, Artificial Sequence
  Probe
gaactgctaactcatgcccccatgtct

SEQ ID NO: 19860 - DNA, 28 bp, Artificial Sequence
  Probe
gaactgctaactcatgcccccatgtcta

SEQ ID NO: 19861 - DNA, 30 bp, Artificial Sequence
  Probe
gaactgctaactcatgcccccatgtctaac

SEQ ID NO: 19862 - DNA, 31 bp, Artificial Sequence
  Probe
gaactgctaactcatgcccccatgtctaaca

SEQ ID NO: 19863 - DNA, 34 bp, Artificial Sequence
  Probe
gaactgctaactcatgcccccatgtctaacaaca

SEQ ID NO: 19864 - DNA, 39 bp, Artificial Sequence; identical to SEQ ID NO: 5463
  Probe

SEQ ID NO: 19865 - DNA, 40 bp, Artificial Sequence; identical to SEQ ID NO: 5464
  Probe

SEQ ID NO: 19866 - DNA, 41 bp, Artificial Sequence; identical to SEQ ID NO: 5465
  Probe

SEQ ID NO: 19867 - DNA, 42 bp, Artificial Sequence; identical to SEQ ID NO: 5466
  Probe

SEQ ID NO: 19868 - DNA, 43 bp, Artificial Sequence; identical to SEQ ID NO: 5467
  Probe

SEQ ID NO: 19869 - DNA, 44 bp, Artificial Sequence; identical to SEQ ID NO: 5468
  Probe

SEQ ID NO: 19870 - DNA, 45 bp, Artificial Sequence; identical to SEQ ID NO: 5469
  Probe

SEQ ID NO: 19871 - DNA, 46 bp, Artificial Sequence; identical to SEQ ID NO: 5470
  Probe

SEQ ID NO: 19872 - DNA, 50 bp, Artificial Sequence; identical to SEQ ID NO: 5472
  Probe

SEQ ID NO: 19873 - DNA, 26 bp, Artificial Sequence
  Probe
gaagaagcagcttcaaacctgccggg

SEQ ID NO: 19874 - DNA, 27 bp, Artificial Sequence
  Probe
gaagaagcagcttcaaacctgccgggg

SEQ ID NO: 19875 - DNA, 28 bp, Artificial Sequence
  Probe
gaagaagcagcttcaaacctgccggggc

SEQ ID NO: 19876 - DNA, 29 bp, Artificial Sequence
  Probe
gaagaagcagcttcaaacctgccggggct

SEQ ID NO: 19877 - DNA, 30 bp, Artificial Sequence; identical to SEQ ID NO: 5478
  Probe

SEQ ID NO: 19878 - DNA, 31 bp, Artificial Sequence; identical to SEQ ID NO: 5479
  Probe

SEQ ID NO: 19879 - DNA, 32 bp, Artificial Sequence; identical to SEQ ID NO: 5480
  Probe

SEQ ID NO: 19880 - DNA, 33 bp, Artificial Sequence; identical to SEQ ID NO: 5481
  Probe

SEQ ID NO: 19881 - DNA, 34 bp, Artificial Sequence; identical to SEQ ID NO: 5482
  Probe

SEQ ID NO: 19882 - DNA, 35 bp, Artificial Sequence; identical to SEQ ID NO: 5483
  Probe

SEQ ID NO: 19883 - DNA, 42 bp, Artificial Sequence
  Probe
gaagaagcagcttcaaacctgccggggcttctcccgcctttt

SEQ ID NO: 19884 - DNA, 26 bp, Artificial Sequence
  Probe
gaagagcccggatagctcagtcggta

SEQ ID NO: 19885 - DNA, 28 bp, Artificial Sequence
  Probe
gaagagcccggatagctcagtcggtaga

SEQ ID NO: 19886 - DNA, 30 bp, Artificial Sequence
  Probe
gaagagcccggatagctcagtcggtagagc

SEQ ID NO: 19887 - DNA, 31 bp, Artificial Sequence
  Probe
gaagagcccggatagctcagtcggtagagca

SEQ ID NO: 19888 - DNA, 32 bp, Artificial Sequence
  Probe
gaagagcccggatagctcagtcggtagagcat

SEQ ID NO: 19889 - DNA, 34 bp, Artificial Sequence
  Probe
gaagagcccggatagctcagtcggtagagcatca

SEQ ID NO: 19890 - DNA, 36 bp, Artificial Sequence
  Probe
gaagagcccggatagctcagtcggtagagcatcaga

SEQ ID NO: 19891 - DNA, 37 bp, Artificial Sequence
  Probe
gaagagcccggatagctcagtcggtagagcatcagac

SEQ ID NO: 19892 - DNA, 38 bp, Artificial Sequence
  Probe
gaagagcccggatagctcagtcggtagagcatcagact

SEQ ID NO: 19893 - DNA, 39 bp, Artificial Sequence
  Probe
gaagagcccggatagctcagtcggtagagcatcagactt

SEQ ID NO: 19894 - DNA, 40 bp, Artificial Sequence
  Probe
gaagagcccggatagctcagtcggtagagcatcagacttt

SEQ ID NO: 19895 - DNA, 41 bp, Artificial Sequence
  Probe
gaagagcccggatagctcagtcggtagagcatcagactttt

SEQ ID NO: 19896 - DNA, 42 bp, Artificial Sequence
  Probe
gaagagcccggatagctcagtcggtagagcatcagactttta

SEQ ID NO: 19897 - DNA, 44 bp, Artificial Sequence
  Probe
gaagagcccggatagctcagtcggtagagcatcagacttttaat

SEQ ID NO: 19898 - DNA, 16 bp, Artificial Sequence
  Probe
gaagatcacgggttcg

SEQ ID NO: 19899 - DNA, 29 bp, Artificial Sequence
  Probe
gaagatcacgggttcgaaccccgtccgtg

SEQ ID NO: 19900 - DNA, 34 bp, Artificial Sequence
  Probe
gaagattccaggttcgactcctggctggctcgtt

SEQ ID NO: 19901 - DNA, 31 bp, Artificial Sequence; identical to SEQ ID NO: 884
  Probe

SEQ ID NO: 19902 - DNA, 32 bp, Artificial Sequence; identical to SEQ ID NO: 885
  Probe

SEQ ID NO: 19903 - DNA, 33 bp, Artificial Sequence; identical to SEQ ID NO: 886
  Probe

SEQ ID NO: 19904 - DNA, 34 bp, Artificial Sequence
  Probe
gaagattctaggttcgactcctggctggctcgcg

SEQ ID NO: 19905 - DNA, 35 bp, Artificial Sequence; identical to SEQ ID NO: 5488
  Probe

SEQ ID NO: 19906 - DNA, 34 bp, Artificial Sequence
  Probe
gaagattctaggttcgactcctggctggctcgct

SEQ ID NO: 19907 - DNA, 30 bp, Artificial Sequence
  Probe
gaagattgagggttcgaatcccttcgtggt

SEQ ID NO: 19908 - DNA, 28 bp, Artificial Sequence
  Probe
gaagattgagggttcgagtcccttcgtg

SEQ ID NO: 19909 - DNA, 31 bp, Artificial Sequence
  Probe
gaagattgagggttcgagtcccttcgtggtc

SEQ ID NO: 19910 - DNA, 32 bp, Artificial Sequence; identical to SEQ ID NO: 5489
  Probe

SEQ ID NO: 19911 - DNA, 34 bp, Artificial Sequence
  Probe
gaagattgagggttcgagtcccttcgtggtcgtc

SEQ ID NO: 19912 - DNA, 35 bp, Artificial Sequence; identical to SEQ ID NO: 5490
  Probe

SEQ ID NO: 19913 - DNA, 16 bp, Artificial Sequence
  Probe
gaagcagcttcaaacc

SEQ ID NO: 19914 - DNA, 27 bp, Artificial Sequence
  Probe
gaagcagcttcaaacctgccggggctt

SEQ ID NO: 19915 - DNA, 28 bp, Artificial Sequence
  Probe
gaagcagcttcaaacctgccggggcttc

SEQ ID NO: 19916 - DNA, 29 bp, Artificial Sequence
  Probe
gaagcagcttcaaacctgccggggcttct

SEQ ID NO: 19917 - DNA, 30 bp, Artificial Sequence; identical to SEQ ID NO: 5497
  Probe

SEQ ID NO: 19918 - DNA, 31 bp, Artificial Sequence; identical to SEQ ID NO: 5498
  Probe

SEQ ID NO: 19919 - DNA, 36 bp, Artificial Sequence
  Probe
gaagcccggctagctcagtcggtagagcatgggact

SEQ ID NO: 19920 - DNA, 16 bp, Artificial Sequence
  Probe
gaagcgggtgctctta

SEQ ID NO: 19921 - DNA, 17 bp, Artificial Sequence
  Probe
gaagcgggtgctcttat

SEQ ID NO: 19922 - DNA, 18 bp, Artificial Sequence
  Probe
gaagcgggtgctcttatt

SEQ ID NO: 19923 - DNA, 19 bp, Artificial Sequence
  Probe
gaagcgggtgctcttattt

SEQ ID NO: 19924 - DNA, 20 bp, Artificial Sequence
  Probe
gaagcgggtgctcttatttt

SEQ ID NO: 19925 - DNA, 21 bp, Artificial Sequence
  Probe
gaagcgggtgctcttattttt

SEQ ID NO: 19926 - DNA, 22 bp, Artificial Sequence
  Probe
gaagcgggtgctcttatttttt

SEQ ID NO: 19927 - DNA, 23 bp, Artificial Sequence
  Probe
gaagcgggtgctcttattttttc

SEQ ID NO: 19928 - DNA, 25 bp, Artificial Sequence
  Probe
gaagcgggtgctcttattttttcta

SEQ ID NO: 19929 - DNA, 16 bp, Artificial Sequence
  Probe
gaagcgtgctgggccc

SEQ ID NO: 19930 - DNA, 36 bp, Artificial Sequence
  Probe
gaagcgtgctgggcccataacccagaggtcgatgga

SEQ ID NO: 19931 - DNA, 37 bp, Artificial Sequence
  Probe
gaagcgtgctgggcccataacccagaggtcgatggat

SEQ ID NO: 19932 - DNA, 30 bp, Artificial Sequence
  Probe
gaaggtcctgagttcgaacctcagaggggg

SEQ ID NO: 19933 - DNA, 32 bp, Artificial Sequence
  Probe
gaaggtcctgagttcgaacctcagagggggca

SEQ ID NO: 19934 - DNA, 33 bp, Artificial Sequence
  Probe
gaaggtcctgagttcgaacctcagagggggcaa

SEQ ID NO: 19935 - DNA, 33 bp, Artificial Sequence
  Probe
gaaggtcctgagttcgaacctcagagggggcag

SEQ ID NO: 19936 - DNA, 34 bp, Artificial Sequence
  Probe
gaaggtcctgagttcgaacctcagagggggcagc

SEQ ID NO: 19937 - DNA, 35 bp, Artificial Sequence
  Probe
gaaggtcctgagttcgaacctcagagggggcagct

SEQ ID NO: 19938 - DNA, 35 bp, Artificial Sequence
  Probe
gaaggtcctgagttcgagcctcagagagggcagct

SEQ ID NO: 19939 - DNA, 30 bp, Artificial Sequence
  Probe
gaaggtcctgggttcaagccccagtggaac

SEQ ID NO: 19940 - DNA, 35 bp, Artificial Sequence
  Probe
gaaggtcctgggttcaagccccagtggaaccatgg

SEQ ID NO: 19941 - DNA, 33 bp, Artificial Sequence; identical to SEQ ID NO: 892
  Probe

SEQ ID NO: 19942 - DNA, 34 bp, Artificial Sequence; identical to SEQ ID NO: 5512
  Probe

SEQ ID NO: 19943 - DNA, 35 bp, Artificial Sequence; identical to SEQ ID NO: 5513
  Probe

SEQ ID NO: 19944 - DNA, 35 bp, Artificial Sequence
  Probe
gaaggtcctgggttcgagccccagtggaaccatag

SEQ ID NO: 19945 - DNA, 30 bp, Artificial Sequence
  Probe
gaaggtcgtgagttcgagcctcacacgggg

SEQ ID NO: 19946 - DNA, 32 bp, Artificial Sequence
  Probe
gaaggtcgtgagttcgagcctcacacggggca

SEQ ID NO: 19947 - DNA, 30 bp, Artificial Sequence
  Probe
gaaggtcgtgagttcgatcctcacacgggg

SEQ ID NO: 19948 - DNA, 33 bp, Artificial Sequence; identical to SEQ ID NO: 5514
  Probe

SEQ ID NO: 19949 - DNA, 35 bp, Artificial Sequence; identical to SEQ ID NO: 5515
  Probe

SEQ ID NO: 19950 - DNA, 41 bp, Artificial Sequence
  Probe
gaaggtcgtgagttcgatcctcacacggggcacaataattt

SEQ ID NO: 19951 - DNA, 35 bp, Artificial Sequence
  Probe
gaaggttgcgtgttcaaatcacgtcggggtcaaac

SEQ ID NO: 19952 - DNA, 35 bp, Artificial Sequence; identical to SEQ ID NO: 5516
  Probe

SEQ ID NO: 19953 - DNA, 32 bp, Artificial Sequence
  Probe
gaaggttgcgtgttcaagtcacgtcggggtca

SEQ ID NO: 19954 - DNA, 16 bp, Artificial Sequence
  Probe
gaatccagcgatccga

SEQ ID NO: 19955 - DNA, 18 bp, Artificial Sequence
  Probe
gaatccagcgatccgagt

SEQ ID NO: 19956 - DNA, 21 bp, Artificial Sequence
  Probe
gaatccagcgatccgagttca

SEQ ID NO: 19957 - DNA, 34 bp, Artificial Sequence
  Probe
gaatccagcgatccgagttcaaatctcggtggaa

SEQ ID NO: 19958 - DNA, 36 bp, Artificial Sequence
  Probe
gaatccagcgatccgagttcaaatctcggtggaacc

SEQ ID NO: 19959 - DNA, 38 bp, Artificial Sequence
  Probe
gaatccagcgatccgagttcaaatctcggtggaacctg

SEQ ID NO: 19960 - DNA, 39 bp, Artificial Sequence; identical to SEQ ID NO: 5522
  Probe

SEQ ID NO: 19961 - DNA, 40 bp, Artificial Sequence; identical to SEQ ID NO: 5523
  Probe

SEQ ID NO: 19962 - DNA, 38 bp, Artificial Sequence
  Probe
gaatccagcgatccgagttcaaatctcggtggaacctt

SEQ ID NO: 19963 - DNA, 34 bp, Artificial Sequence
  Probe
gaatccagcgatccgagttcaaatctcggtggga

SEQ ID NO: 19964 - DNA, 40 bp, Artificial Sequence; identical to SEQ ID NO: 5526
  Probe

SEQ ID NO: 19965 - DNA, 37 bp, Artificial Sequence
  Probe
gaatccagcgatccgagttcaagtctcggtggaacct

SEQ ID NO: 19966 - DNA, 38 bp, Artificial Sequence
  Probe
gaatccagcgatccgagttcaagtctcggtggaacctg

SEQ ID NO: 19967 - DNA, 39 bp, Artificial Sequence
  Probe
gaatccagcgatccgagttcaagtctcggtggaacctgc

SEQ ID NO: 19968 - DNA, 40 bp, Artificial Sequence
  Probe
gaatccagcgatccgagttcaagtctcggtggaacctgct

SEQ ID NO: 19969 - DNA, 37 bp, Artificial Sequence
  Probe
gaatccagcgatccgagttcgagtctcggtggaacct

SEQ ID NO: 19970 - DNA, 38 bp, Artificial Sequence
  Probe
gaatccagcgatccgagttcgagtctcggtggaacctt

SEQ ID NO: 19971 - DNA, 40 bp, Artificial Sequence; identical to SEQ ID NO: 5528
  Probe

SEQ ID NO: 19972 - DNA, 20 bp, Artificial Sequence
  Probe
gaatcccaccgctgccacac

SEQ ID NO: 19973 - DNA, 20 bp, Artificial Sequence
  Probe
gaatcccaccgctgccaggt

SEQ ID NO: 19974 - DNA, 20 bp, Artificial Sequence
  Probe
gaatcccagcggtgcctccg

SEQ ID NO: 19975 - DNA, 28 bp, Artificial Sequence
  Probe
gaatctgacaacagaggcttacgacccc

SEQ ID NO: 19976 - DNA, 31 bp, Artificial Sequence; identical to SEQ ID NO: 899
  Probe

SEQ ID NO: 19977 - DNA, 37 bp, Artificial Sequence; identical to SEQ ID NO: 901
  Probe

SEQ ID NO: 19978 - DNA, 38 bp, Artificial Sequence; identical to SEQ ID NO: 5537
  Probe

SEQ ID NO: 19979 - DNA, 39 bp, Artificial Sequence; identical to SEQ ID NO: 5538
  Probe

SEQ ID NO: 19980 - DNA, 40 bp, Artificial Sequence; identical to SEQ ID NO: 5539
  Probe

SEQ ID NO: 19981 - DNA, 28 bp, Artificial Sequence
  Probe
gaatcttagctttgggtgctaatggtgg

SEQ ID NO: 19982 - DNA, 29 bp, Artificial Sequence
  Probe
gaatcttagctttgggtgctaatggtgga

SEQ ID NO: 19983 - DNA, 30 bp, Artificial Sequence
  Probe
gaatcttagctttgggtgctaatggtggag

SEQ ID NO: 19984 - DNA, 32 bp, Artificial Sequence
  Probe
gaatcttagctttgggtgctaatggtggagtt

SEQ ID NO: 19985 - DNA, 33 bp, Artificial Sequence; identical to SEQ ID NO: 5540
  Probe

SEQ ID NO: 19986 - DNA, 34 bp, Artificial Sequence
  Probe
gaatcttagctttgggtgctaatggtggagttaa

SEQ ID NO: 19987 - DNA, 36 bp, Artificial Sequence
  Probe
gaatcttagctttgggtgctaatggtggagttaaag

SEQ ID NO: 19988 - DNA, 37 bp, Artificial Sequence
  Probe
gaatcttagctttgggtgctaatggtggagttaaaga

SEQ ID NO: 19989 - DNA, 50 bp, Artificial Sequence; identical to SEQ ID NO: 5541
  Probe

SEQ ID NO: 19990 - DNA, 16 bp, Artificial Sequence
  Probe
gaattctcgcctgcca

SEQ ID NO: 19991 - DNA, 17 bp, Artificial Sequence
  Probe
gaattctcgcctgccac

SEQ ID NO: 19992 - DNA, 19 bp, Artificial Sequence
  Probe
gaattctcgcctgccacgc

SEQ ID NO: 19993 - DNA, 28 bp, Artificial Sequence
  Probe
gaattctcgcctgccacgcgggaggccc

SEQ ID NO: 19994 - DNA, 32 bp, Artificial Sequence
  Probe
gaattctcgcctgccacgcgggaggcccgggt

SEQ ID NO: 19995 - DNA, 46 bp, Artificial Sequence; identical to SEQ ID NO: 5545
  Probe

SEQ ID NO: 19996 - DNA, 21 bp, Artificial Sequence
  Probe
gacaacagaggcttacgaccc

SEQ ID NO: 19997 - DNA, 22 bp, Artificial Sequence
  Probe
gacaacagaggcttacgacccc

SEQ ID NO: 19998 - DNA, 23 bp, Artificial Sequence
  Probe
gacaacagaggcttacgacccct

SEQ ID NO: 19999 - DNA, 25 bp, Artificial Sequence
  Probe
gacaacagaggcttacgacccctta

SEQ ID NO: 20000 - DNA, 27 bp, Artificial Sequence
  Probe
gacaacagaggcttacgaccccttatt

SEQ ID NO: 20001 - DNA, 30 bp, Artificial Sequence; identical to SEQ ID NO: 5550
  Probe

SEQ ID NO: 20002 - DNA, 32 bp, Artificial Sequence; identical to SEQ ID NO: 5551
  Probe

SEQ ID NO: 20003 - DNA, 33 bp, Artificial Sequence; identical to SEQ ID NO: 5552
  Probe

SEQ ID NO: 20004 - DNA, 34 bp, Artificial Sequence; identical to SEQ ID NO: 5553
  Probe

SEQ ID NO: 20005 - DNA, 21 bp, Artificial Sequence
  Probe
gacaacattcaaaaaagagta

SEQ ID NO: 20006 - DNA, 22 bp, Artificial Sequence
  Probe
gacaacattcaaaaaagagtaa

SEQ ID NO: 20007 - DNA, 24 bp, Artificial Sequence
  Probe
gacaacattcaaaaaagagtaata

SEQ ID NO: 20008 - DNA, 16 bp, Artificial Sequence
  Probe
gacacacgtacacgtc

SEQ ID NO: 20009 - DNA, 25 bp, Artificial Sequence
  Probe
gacaccccccacagtttatgtagct

SEQ ID NO: 20010 - DNA, 29 bp, Artificial Sequence
  Probe
gacaccccccacagtttatgtagcttacc

SEQ ID NO: 20011 - DNA, 30 bp, Artificial Sequence
  Probe
gacaccccccacagtttatgtagcttacct

SEQ ID NO: 20012 - DNA, 31 bp, Artificial Sequence
  Probe
gacaccccccacagtttatgtagcttacctc

SEQ ID NO: 20013 - DNA, 32 bp, Artificial Sequence
  Probe
gacaccccccacagtttatgtagcttacctcc

SEQ ID NO: 20014 - DNA, 38 bp, Artificial Sequence
  Probe
gacaccgaagtctctgtggcgcaatcggttagcgcgtt

SEQ ID NO: 20015 - DNA, 28 bp, Artificial Sequence
  Probe
gacagcgccgctggtgtagtggtatcat

SEQ ID NO: 20016 - DNA, 29 bp, Artificial Sequence
  Probe
gacagcgccgctggtgtagtggtatcatg

SEQ ID NO: 20017 - DNA, 30 bp, Artificial Sequence
  Probe
gacagcgccgctggtgtagtggtatcatgc

SEQ ID NO: 20018 - DNA, 31 bp, Artificial Sequence
  Probe
gacagcgccgctggtgtagtggtatcatgca

SEQ ID NO: 20019 - DNA, 33 bp, Artificial Sequence
  Probe
gacagcgccgctggtgtagtggtatcatgcaag

SEQ ID NO: 20020 - DNA, 34 bp, Artificial Sequence
  Probe
gacagcgccgctggtgtagtggtatcatgcaaga

SEQ ID NO: 20021 - DNA, 35 bp, Artificial Sequence
  Probe
gacagcgccgctggtgtagtggtatcatgcaagat

SEQ ID NO: 20022 - DNA, 36 bp, Artificial Sequence
  Probe
gacagcgccgctggtgtagtggtatcatgcaagatt

SEQ ID NO: 20023 - DNA, 37 bp, Artificial Sequence
  Probe
gacagcgccgctggtgtagtggtatcatgcaagattc

SEQ ID NO: 20024 - DNA, 39 bp, Artificial Sequence
  Probe
gacagcgccgctggtgtagtggtatcatgcaagattccc

SEQ ID NO: 20025 - DNA, 40 bp, Artificial Sequence
  Probe
gacagcgccgctggtgtagtggtatcatgcaagattccca

SEQ ID NO: 20026 - DNA, 41 bp, Artificial Sequence
  Probe
gacagcgccgctggtgtagtggtatcatgcaagattcccat

SEQ ID NO: 20027 - DNA, 43 bp, Artificial Sequence
  Probe
gacagcgccgctggtgtagtggtatcatgcaagattcccattc

SEQ ID NO: 20028 - DNA, 44 bp, Artificial Sequence
  Probe
gacagcgccgctggtgtagtggtatcatgcaagattcccattct

SEQ ID NO: 20029 - DNA, 25 bp, Artificial Sequence
  Probe
gacaggggttaggcctctttttacc

SEQ ID NO: 20030 - DNA, 26 bp, Artificial Sequence
  Probe
gacaggggttaggcctctttttacca

SEQ ID NO: 20031 - DNA, 28 bp, Artificial Sequence
  Probe
gacaggggttaggcctctttttaccagc

SEQ ID NO: 20032 - DNA, 29 bp, Artificial Sequence
  Probe
gacaggggttaggcctctttttaccagct

SEQ ID NO: 20033 - DNA, 25 bp, Artificial Sequence
  Probe
gacaggtggccggttagctcagttg

SEQ ID NO: 20034 - DNA, 36 bp, Artificial Sequence
  Probe
gacaggtggccggttagctcagttggttagagcgtg

SEQ ID NO: 20035 - DNA, 39 bp, Artificial Sequence
  Probe
gacaggtggccggttagctcagttggttagagcgtggtg

SEQ ID NO: 20036 - DNA, 46 bp, Artificial Sequence
  Probe
gacaggtggccggttagctcagttggttagagcgtggtgctaataa

SEQ ID NO: 20037 - DNA, 25 bp, Artificial Sequence
  Probe
gacagtagcattggtggttcagtgg

SEQ ID NO: 20038 - DNA, 27 bp, Artificial Sequence
  Probe
gacagtagcattggtggttcagtggta

SEQ ID NO: 20039 - DNA, 28 bp, Artificial Sequence
  Probe
gacagtagcattggtggttcagtggtag

SEQ ID NO: 20040 - DNA, 29 bp, Artificial Sequence
  Probe
gacagtagcattggtggttcagtggtaga

SEQ ID NO: 20041 - DNA, 30 bp, Artificial Sequence
  Probe
gacagtagcattggtggttcagtggtagaa

SEQ ID NO: 20042 - DNA, 31 bp, Artificial Sequence
  Probe
gacagtagcattggtggttcagtggtagaat

SEQ ID NO: 20043 - DNA, 32 bp, Artificial Sequence
  Probe
gacagtagcattggtggttcagtggtagaatt

SEQ ID NO: 20044 - DNA, 33 bp, Artificial Sequence
  Probe
gacagtagcattggtggttcagtggtagaattc

SEQ ID NO: 20045 - DNA, 34 bp, Artificial Sequence
  Probe
gacagtagcattggtggttcagtggtagaattct

SEQ ID NO: 20046 - DNA, 36 bp, Artificial Sequence
  Probe
gacagtagcattggtggttcagtggtagaattctcg

SEQ ID NO: 20047 - DNA, 37 bp, Artificial Sequence
  Probe
gacagtagcattggtggttcagtggtagaattctcgc

SEQ ID NO: 20048 - DNA, 38 bp, Artificial Sequence
  Probe
gacagtagcattggtggttcagtggtagaattctcgcc

SEQ ID NO: 20049 - DNA, 39 bp, Artificial Sequence
  Probe
gacagtagcattggtggttcagtggtagaattctcgcct

SEQ ID NO: 20050 - DNA, 40 bp, Artificial Sequence
  Probe
gacagtagcattggtggttcagtggtagaattctcgcctg

SEQ ID NO: 20051 - DNA, 41 bp, Artificial Sequence
  Probe
gacagtagcattggtggttcagtggtagaattctcgcctgc

SEQ ID NO: 20052 - DNA, 42 bp, Artificial Sequence
  Probe
gacagtagcattggtggttcagtggtagaattctcgcctgcc

SEQ ID NO: 20053 - DNA, 27 bp, Artificial Sequence
  Probe
gaccaagagccttcaaagccctcagta

SEQ ID NO: 20054 - DNA, 30 bp, Artificial Sequence
  Probe
gaccaagagccttcaaagccctcagtaagt

SEQ ID NO: 20055 - DNA, 31 bp, Artificial Sequence
  Probe
gaccaagagccttcaaagccctcagtaagtt

SEQ ID NO: 20056 - DNA, 19 bp, Artificial Sequence
  Probe
gacccagtggcctaatgga

SEQ ID NO: 20057 - DNA, 20 bp, Artificial Sequence
  Probe
gacccagtggcctaatggat

SEQ ID NO: 20058 - DNA, 24 bp, Artificial Sequence
  Probe
gacccgggttcgattcccggccaa

SEQ ID NO: 20059 - DNA, 26 bp, Artificial Sequence
  Probe
gacccgggttcgattcccggccaacg

SEQ ID NO: 20060 - DNA, 28 bp, Artificial Sequence
  Probe
gacccgggttcgattcccggccaacgca

SEQ ID NO: 20061 - DNA, 31 bp, Artificial Sequence; identical to SEQ ID NO: 5567
  Probe

SEQ ID NO: 20062 - DNA, 31 bp, Artificial Sequence; identical to SEQ ID NO: 5568
  Probe

SEQ ID NO: 20063 - DNA, 31 bp, Artificial Sequence
  Probe
gacccgggttcgattcccgggcggcgcactt

SEQ ID NO: 20064 - DNA, 27 bp, Artificial Sequence
  Probe
gacccttttggatgttcgcaacccctt

SEQ ID NO: 20065 - DNA, 28 bp, Artificial Sequence
  Probe
gacccttttggatgttcgcaaccccttt

SEQ ID NO: 20066 - DNA, 29 bp, Artificial Sequence
  Probe
gacccttttggatgttcgcaacccctttt

SEQ ID NO: 20067 - DNA, 31 bp, Artificial Sequence
  Probe
gaccgctctgagctaaacctagccccaaacc

SEQ ID NO: 20068 - DNA, 21 bp, Artificial Sequence
  Probe
gaccggggttcaattccccga

SEQ ID NO: 20069 - DNA, 22 bp, Artificial Sequence
  Probe
gaccggggttcaattccccgac

SEQ ID NO: 20070 - DNA, 25 bp, Artificial Sequence
  Probe
gaccggggttcaattccccgacggg

SEQ ID NO: 20071 - DNA, 29 bp, Artificial Sequence
  Probe
gaccggggttcaattccccgacggggagg

SEQ ID NO: 20072 - DNA, 31 bp, Artificial Sequence; identical to SEQ ID NO: 5571
  Probe

SEQ ID NO: 20073 - DNA, 23 bp, Artificial Sequence
  Probe
gaccggggttcgattccccgacg

SEQ ID NO: 20074 - DNA, 26 bp, Artificial Sequence
  Probe
gaccggggttcgattccccgacgggg

SEQ ID NO: 20075 - DNA, 29 bp, Artificial Sequence
  Probe
gaccggggttcgattccccgacggggaga

SEQ ID NO: 20076 - DNA, 31 bp, Artificial Sequence
  Probe
gaccggggttcgattccccgacggggagaaa

SEQ ID NO: 20077 - DNA, 30 bp, Artificial Sequence; identical to SEQ ID NO: 5576
  Probe

SEQ ID NO: 20078 - DNA, 31 bp, Artificial Sequence
  Probe
gaccggggttcgattccccgacggggagacg

SEQ ID NO: 20079 - DNA, 31 bp, Artificial Sequence; identical to SEQ ID NO: 5577
  Probe

SEQ ID NO: 20080 - DNA, 29 bp, Artificial Sequence
  Probe
gaccggggttcgattccccgacggggagg

SEQ ID NO: 20081 - DNA, 30 bp, Artificial Sequence; identical to SEQ ID NO: 5579
  Probe

SEQ ID NO: 20082 - DNA, 31 bp, Artificial Sequence; identical to SEQ ID NO: 5580
  Probe

SEQ ID NO: 20083 - DNA, 31 bp, Artificial Sequence; identical to SEQ ID NO: 5581
  Probe

SEQ ID NO: 20084 - DNA, 16 bp, Artificial Sequence
  Probe
gacctcacgagacttt

SEQ ID NO: 20085 - DNA, 33 bp, Artificial Sequence
  Probe
gacctcgtggcgcaatggtagcgcgtctgactc

SEQ ID NO: 20086 - DNA, 34 bp, Artificial Sequence
  Probe
gacctcgtggcgcaatggtagcgcgtctgactcc

SEQ ID NO: 20087 - DNA, 32 bp, Artificial Sequence
  Probe
gacgagctagctcagtcggtagagcatgggac

SEQ ID NO: 20088 - DNA, 33 bp, Artificial Sequence; identical to SEQ ID NO: 5583
  Probe

SEQ ID NO: 20089 - DNA, 16 bp, Artificial Sequence
  Probe
gacgaggtggccgagt

SEQ ID NO: 20090 - DNA, 17 bp, Artificial Sequence
  Probe
gacgaggtggccgagtg

SEQ ID NO: 20091 - DNA, 20 bp, Artificial Sequence
  Probe
gacgaggtggccgagtggtt

SEQ ID NO: 20092 - DNA, 21 bp, Artificial Sequence
  Probe
gacgaggtggccgagtggtta

SEQ ID NO: 20093 - DNA, 22 bp, Artificial Sequence
  Probe
gacgaggtggccgagtggttaa

SEQ ID NO: 20094 - DNA, 23 bp, Artificial Sequence
  Probe
gacgaggtggccgagtggttaag

SEQ ID NO: 20095 - DNA, 25 bp, Artificial Sequence
  Probe
gacgaggtggccgagtggttaaggc

SEQ ID NO: 20096 - DNA, 26 bp, Artificial Sequence
  Probe
gacgaggtggccgagtggttaaggcg

SEQ ID NO: 20097 - DNA, 26 bp, Artificial Sequence
  Probe
gacggctcgttggtctaggggtatga

SEQ ID NO: 20098 - DNA, 28 bp, Artificial Sequence
  Probe
gacggctcgttggtctaggggtatgatt

SEQ ID NO: 20099 - DNA, 24 bp, Artificial Sequence
  Probe
gacgggccgcgtggcctaatggat

SEQ ID NO: 20100 - DNA, 17 bp, Artificial Sequence
  Probe
gacgggctcacatcacc

SEQ ID NO: 20101 - DNA, 18 bp, Artificial Sequence
  Probe
gacgggctcacatcaccc

SEQ ID NO: 20102 - DNA, 19 bp, Artificial Sequence
  Probe
gacgggctcacatcacccc

SEQ ID NO: 20103 - DNA, 20 bp, Artificial Sequence
  Probe
gacgggctcacatcacccca

SEQ ID NO: 20104 - DNA, 21 bp, Artificial Sequence
  Probe
gacgggctcacatcaccccat

SEQ ID NO: 20105 - DNA, 22 bp, Artificial Sequence
  Probe
gacgggctcacatcaccccata

SEQ ID NO: 20106 - DNA, 23 bp, Artificial Sequence
  Probe
gacgggctcacatcaccccataa

SEQ ID NO: 20107 - DNA, 24 bp, Artificial Sequence
  Probe
gacgggctcacatcaccccataaa

SEQ ID NO: 20108 - DNA, 25 bp, Artificial Sequence
  Probe
gacgggctcacatcaccccataaac

SEQ ID NO: 20109 - DNA, 26 bp, Artificial Sequence
  Probe
gacgggctcacatcaccccataaaca

SEQ ID NO: 20110 - DNA, 27 bp, Artificial Sequence
  Probe
gacgggctcacatcaccccataaacaa

SEQ ID NO: 20111 - DNA, 28 bp, Artificial Sequence
  Probe
gacgggctcacatcaccccataaacaaa

SEQ ID NO: 20112 - DNA, 29 bp, Artificial Sequence
  Probe
gacgggctcacatcaccccataaacaaat

SEQ ID NO: 20113 - DNA, 15 bp, Artificial Sequence
  Probe
gactacaaaaaggat

SEQ ID NO: 20114 - DNA, 22 bp, Artificial Sequence
  Probe
gactacaaaaaggattagactg

SEQ ID NO: 20115 - DNA, 23 bp, Artificial Sequence
  Probe
gactacaaaaaggattagactga

SEQ ID NO: 20116 - DNA, 24 bp, Artificial Sequence
  Probe
gactacaaaaaggattagactgaa

SEQ ID NO: 20117 - DNA, 25 bp, Artificial Sequence
  Probe
gactacaaaaaggattagactgaac

SEQ ID NO: 20118 - DNA, 26 bp, Artificial Sequence
  Probe
gactacaaaaaggattagactgaacc

SEQ ID NO: 20119 - DNA, 27 bp, Artificial Sequence
  Probe
gactacaaaaaggattagactgaaccg

SEQ ID NO: 20120 - DNA, 25 bp, Artificial Sequence
  Probe
gactacggatcagaagattctaggt

SEQ ID NO: 20121 - DNA, 16 bp, Artificial Sequence
  Probe
gactatgagaatcgaa

SEQ ID NO: 20122 - DNA, 18 bp, Artificial Sequence
  Probe
gactatgagaatcgaacc

SEQ ID NO: 20123 - DNA, 19 bp, Artificial Sequence
  Probe
gactatgagaatcgaaccc

SEQ ID NO: 20124 - DNA, 20 bp, Artificial Sequence
  Probe
gactatgagaatcgaaccca

SEQ ID NO: 20125 - DNA, 23 bp, Artificial Sequence
  Probe
gactatgagaatcgaacccatcc

SEQ ID NO: 20126 - DNA, 24 bp, Artificial Sequence
  Probe
gactatgagaatcgaacccatccc

SEQ ID NO: 20127 - DNA, 29 bp, Artificial Sequence
  Probe
gactatgagaatcgaacccatccctgaga

SEQ ID NO: 20128 - DNA, 31 bp, Artificial Sequence; identical to SEQ ID NO: 5606
  Probe

SEQ ID NO: 20129 - DNA, 32 bp, Artificial Sequence
  Probe
gactcattaaattatgataatcatatttacca

SEQ ID NO: 20130 - DNA, 34 bp, Artificial Sequence
  Probe
gactcattaaattatgataatcatatttaccaaa

SEQ ID NO: 20131 - DNA, 36 bp, Artificial Sequence; identical to SEQ ID NO: 5607
  Probe

SEQ ID NO: 20132 - DNA, 20 bp, Artificial Sequence
  Probe
gactcccggtatgggaacaa

SEQ ID NO: 20133 - DNA, 20 bp, Artificial Sequence
  Probe
gactcccggtgtgggaacgc

SEQ ID NO: 20134 - DNA, 28 bp, Artificial Sequence
  Probe
gactcgcggccgccttaagaagccagca

SEQ ID NO: 20135 - DNA, 31 bp, Artificial Sequence
  Probe
gactcggtctctgtggcgcaatcggttagcg

SEQ ID NO: 20136 - DNA, 34 bp, Artificial Sequence
  Probe
gactcggtctctgtggcgcaatcggttagcgcgt

SEQ ID NO: 20137 - DNA, 35 bp, Artificial Sequence
  Probe
gactcggtctctgtggcgcaatcggttagcgcgtt

SEQ ID NO: 20138 - DNA, 36 bp, Artificial Sequence
  Probe
gactcggtctctgtggcgcaatcggttagcgcgttc

SEQ ID NO: 20139 - DNA, 40 bp, Artificial Sequence
  Probe
gactctgaatccagcgatccgagttcaaatctcggtggaa

SEQ ID NO: 20140 - DNA, 46 bp, Artificial Sequence
  Probe
gactctgaatccagcgatccgagttcaaatctcggtggaacctgca

SEQ ID NO: 20141 - DNA, 46 bp, Artificial Sequence
  Probe
gactttgaatccagcgatccgagttcaaatctcggtgggacctcac

SEQ ID NO: 20142 - DNA, 16 bp, Artificial Sequence
  Probe
gagaaagctcacaaga

SEQ ID NO: 20143 - DNA, 17 bp, Artificial Sequence
  Probe
gagaaagctcacaagaa

SEQ ID NO: 20144 - DNA, 49 bp, Artificial Sequence; identical to SEQ ID NO: 949
  Probe

SEQ ID NO: 20145 - DNA, 21 bp, Artificial Sequence
  Probe
gagaaccaacacctctttaca

SEQ ID NO: 20146 - DNA, 24 bp, Artificial Sequence
  Probe
gagaaccaacacctctttacagtg

SEQ ID NO: 20147 - DNA, 25 bp, Artificial Sequence
  Probe
gagaaccaacacctctttacagtga

SEQ ID NO: 20148 - DNA, 26 bp, Artificial Sequence
  Probe
gagaaccaacacctctttacagtgaa

SEQ ID NO: 20149 - DNA, 27 bp, Artificial Sequence
  Probe
gagaaccaacacctctttacagtgaaa

SEQ ID NO: 20150 - DNA, 28 bp, Artificial Sequence
  Probe
gagaaccaacacctctttacagtgaaat

SEQ ID NO: 20151 - DNA, 31 bp, Artificial Sequence; identical to SEQ ID NO: 951
  Probe

SEQ ID NO: 20152 - DNA, 24 bp, Artificial Sequence
  Probe
gagacagcagagtggcgcagcgga

SEQ ID NO: 20153 - DNA, 26 bp, Artificial Sequence
  Probe
gagacagcagagtggcgcagcggaag

SEQ ID NO: 20154 - DNA, 42 bp, Artificial Sequence
  Probe
gagacagcagagtggcgcagcggaagcgtgctgggcccataa

SEQ ID NO: 20155 - DNA, 20 bp, Artificial Sequence
  Probe
gagacccgaggtagggcttt

SEQ ID NO: 20156 - DNA, 30 bp, Artificial Sequence
  Probe
gagacccgaggtagggctttggctgtgggg

SEQ ID NO: 20157 - DNA, 23 bp, Artificial Sequence
  Probe
gagaccggggttcaattccccga

SEQ ID NO: 20158 - DNA, 25 bp, Artificial Sequence
  Probe
gagaccggggttcaattccccgacg

SEQ ID NO: 20159 - DNA, 27 bp, Artificial Sequence
  Probe
gagaccggggttcaattccccgacggg

SEQ ID NO: 20160 - DNA, 30 bp, Artificial Sequence
  Probe
gagaccggggttcaattccccgacggggag

SEQ ID NO: 20161 - DNA, 31 bp, Artificial Sequence; identical to SEQ ID NO: 5617
  Probe

SEQ ID NO: 20162 - DNA, 33 bp, Artificial Sequence; identical to SEQ ID NO: 5618
  Probe

SEQ ID NO: 20163 - DNA, 31 bp, Artificial Sequence; identical to SEQ ID NO: 5620
  Probe

SEQ ID NO: 20164 - DNA, 33 bp, Artificial Sequence
  Probe
gagaccggggttcgattccccgacggggagaaa

SEQ ID NO: 20165 - DNA, 32 bp, Artificial Sequence; identical to SEQ ID NO: 5622
  Probe

SEQ ID NO: 20166 - DNA, 33 bp, Artificial Sequence
  Probe
gagaccggggttcgattccccgacggggagacg

SEQ ID NO: 20167 - DNA, 33 bp, Artificial Sequence; identical to SEQ ID NO: 5623
  Probe

SEQ ID NO: 20168 - DNA, 31 bp, Artificial Sequence; identical to SEQ ID NO: 5624
  Probe

SEQ ID NO: 20169 - DNA, 32 bp, Artificial Sequence
  Probe
gagaccggggttcgattccccgacggggagga

SEQ ID NO: 20170 - DNA, 32 bp, Artificial Sequence; identical to SEQ ID NO: 5625
  Probe

SEQ ID NO: 20171 - DNA, 33 bp, Artificial Sequence; identical to SEQ ID NO: 5626
  Probe

SEQ ID NO: 20172 - DNA, 33 bp, Artificial Sequence
  Probe
gagaccggggttcgattccccgacggggaggcc

SEQ ID NO: 20173 - DNA, 30 bp, Artificial Sequence
  Probe
gagactcgcggccgccttaagaagccagca

SEQ ID NO: 20174 - DNA, 16 bp, Artificial Sequence
  Probe
gagagcgctcggtttt

SEQ ID NO: 20175 - DNA, 17 bp, Artificial Sequence
  Probe
gagagcgctcggttttt

SEQ ID NO: 20176 - DNA, 29 bp, Artificial Sequence
  Probe
gagagcggctcgttggtctaggggtatga

SEQ ID NO: 20177 - DNA, 30 bp, Artificial Sequence
  Probe
gagagcggctcgttggtctaggggtatgat

SEQ ID NO: 20178 - DNA, 31 bp, Artificial Sequence
  Probe
gagagcggctcgttggtctaggggtatgatt

SEQ ID NO: 20179 - DNA, 33 bp, Artificial Sequence
  Probe
gagagcggctcgttggtctaggggtatgattct

SEQ ID NO: 20180 - DNA, 35 bp, Artificial Sequence
  Probe
gagagcggctcgttggtctaggggtatgattctcg

SEQ ID NO: 20181 - DNA, 36 bp, Artificial Sequence
  Probe
gagagcggctcgttggtctaggggtatgattctcgc

SEQ ID NO: 20182 - DNA, 25 bp, Artificial Sequence
  Probe
gagaggcactggtggttcagtggta

SEQ ID NO: 20183 - DNA, 26 bp, Artificial Sequence
  Probe
gagaggcactggtggttcagtggtag

SEQ ID NO: 20184 - DNA, 30 bp, Artificial Sequence
  Probe
gagaggcactggtggttcagtggtagaatt

SEQ ID NO: 20185 - DNA, 32 bp, Artificial Sequence
  Probe
gagaggcactggtggttcagtggtagaattct

SEQ ID NO: 20186 - DNA, 16 bp, Artificial Sequence
  Probe
gagaggtcccgggttc

SEQ ID NO: 20187 - DNA, 30 bp, Artificial Sequence
  Probe
gagaggtcccgggttcaaatcccggacgag

SEQ ID NO: 20188 - DNA, 31 bp, Artificial Sequence
  Probe
gagaggtcccgggttcaaatcccggacgagc

SEQ ID NO: 20189 - DNA, 32 bp, Artificial Sequence
  Probe
gagaggtcccgggttcaaatcccggacgagcc

SEQ ID NO: 20190 - DNA, 33 bp, Artificial Sequence
  Probe
gagaggtcccgggttcaaatcccggacgagccc

SEQ ID NO: 20191 - DNA, 36 bp, Artificial Sequence; identical to SEQ ID NO: 5628
  Probe

SEQ ID NO: 20192 - DNA, 30 bp, Artificial Sequence
  Probe
gagatcctgggttcgaatcccagcggtgcc

SEQ ID NO: 20193 - DNA, 34 bp, Artificial Sequence
  Probe
gagatcctgggttcgaatcccagcggtgcctccg

SEQ ID NO: 20194 - DNA, 20 bp, Artificial Sequence
  Probe
gagatgaaaacctttttcca

SEQ ID NO: 20195 - DNA, 24 bp, Artificial Sequence
  Probe
gagatgaaaacctttttccaagga

SEQ ID NO: 20196 - DNA, 25 bp, Artificial Sequence
  Probe
gagatgaaaacctttttccaaggac

SEQ ID NO: 20197 - DNA, 26 bp, Artificial Sequence
  Probe
gagatgaaaacctttttccaaggaca

SEQ ID NO: 20198 - DNA, 27 bp, Artificial Sequence
  Probe
gagatgaaaacctttttccaaggacaa

SEQ ID NO: 20199 - DNA, 28 bp, Artificial Sequence
  Probe
gagatgaaaacctttttccaaggacaaa

SEQ ID NO: 20200 - DNA, 29 bp, Artificial Sequence
  Probe
gagatgaaaacctttttccaaggacaaat

SEQ ID NO: 20201 - DNA, 30 bp, Artificial Sequence
  Probe
gagatgaaaacctttttccaaggacaaatc

SEQ ID NO: 20202 - DNA, 18 bp, Artificial Sequence
  Probe
gagatgttacctagcgtt

SEQ ID NO: 20203 - DNA, 19 bp, Artificial Sequence
  Probe
gagatgttacctagcgttt

SEQ ID NO: 20204 - DNA, 20 bp, Artificial Sequence
  Probe
gagatgttacctagcgtttt

SEQ ID NO: 20205 - DNA, 21 bp, Artificial Sequence
  Probe
gagatttcaacttaacttgac

SEQ ID NO: 20206 - DNA, 22 bp, Artificial Sequence
  Probe
gagatttcaacttaacttgacc

SEQ ID NO: 20207 - DNA, 23 bp, Artificial Sequence
  Probe
gagatttcaacttaacttgaccg

SEQ ID NO: 20208 - DNA, 24 bp, Artificial Sequence
  Probe
gagatttcaacttaacttgaccgc

SEQ ID NO: 20209 - DNA, 25 bp, Artificial Sequence
  Probe
gagatttcaacttaacttgaccgct

SEQ ID NO: 20210 - DNA, 26 bp, Artificial Sequence
  Probe
gagatttcaacttaacttgaccgctc

SEQ ID NO: 20211 - DNA, 27 bp, Artificial Sequence
  Probe
gagatttcaacttaacttgaccgctct

SEQ ID NO: 20212 - DNA, 28 bp, Artificial Sequence
  Probe
gagatttcaacttaacttgaccgctctg

SEQ ID NO: 20213 - DNA, 29 bp, Artificial Sequence
  Probe
gagatttcaacttaacttgaccgctctga

SEQ ID NO: 20214 - DNA, 30 bp, Artificial Sequence; identical to SEQ ID NO: 5641
  Probe

SEQ ID NO: 20215 - DNA, 31 bp, Artificial Sequence; identical to SEQ ID NO: 5642
  Probe

SEQ ID NO: 20216 - DNA, 32 bp, Artificial Sequence; identical to SEQ ID NO: 5643
  Probe

SEQ ID NO: 20217 - DNA, 22 bp, Artificial Sequence
  Probe
gagcacaatgtagcataagcgc

SEQ ID NO: 20218 - DNA, 25 bp, Artificial Sequence
  Probe
gagcagcctcgttagcgcagtaggc

SEQ ID NO: 20219 - DNA, 29 bp, Artificial Sequence
  Probe
gagcagcctcgttagcgcagtaggcagcg

SEQ ID NO: 20220 - DNA, 30 bp, Artificial Sequence
  Probe
gagcagcctcgttagcgcagtaggcagcgc

SEQ ID NO: 20221 - DNA, 31 bp, Artificial Sequence; identical to SEQ ID NO: 5644
  Probe

SEQ ID NO: 20222 - DNA, 32 bp, Artificial Sequence
  Probe
gagcagcctcgttagcgcagtaggcagcgcgt

SEQ ID NO: 20223 - DNA, 33 bp, Artificial Sequence
  Probe
gagcagcctcgttagcgcagtaggcagcgcgtc

SEQ ID NO: 20224 - DNA, 34 bp, Artificial Sequence
  Probe
gagcagcctcgttagcgcagtaggcagcgcgtca

SEQ ID NO: 20225 - DNA, 35 bp, Artificial Sequence
  Probe
gagcagcctcgttagcgcagtaggcagcgcgtcag

SEQ ID NO: 20226 - DNA, 36 bp, Artificial Sequence
  Probe
gagcagcctcgttagcgcagtaggcagcgcgtcagt

SEQ ID NO: 20227 - DNA, 37 bp, Artificial Sequence; identical to SEQ ID NO: 5645
  Probe

SEQ ID NO: 20228 - DNA, 38 bp, Artificial Sequence
  Probe
gagcagcctcgttagcgcagtaggcagcgcgtcagtct

SEQ ID NO: 20229 - DNA, 40 bp, Artificial Sequence; identical to SEQ ID NO: 5646
  Probe

SEQ ID NO: 20230 - DNA, 41 bp, Artificial Sequence; identical to SEQ ID NO: 5647
  Probe

SEQ ID NO: 20231 - DNA, 42 bp, Artificial Sequence
  Probe
gagcagcctcgttagcgcagtaggcagcgcgtcagtctcata

SEQ ID NO: 20232 - DNA, 50 bp, Artificial Sequence
  Probe
gagcagcctcgttagcgcagtaggcagcgcgtcagtctcataatctgaag

SEQ ID NO: 20233 - DNA, 34 bp, Artificial Sequence
  Probe
gagcatagctgccttccaagcagttgacccgggt

SEQ ID NO: 20234 - DNA, 16 bp, Artificial Sequence
  Probe
gagcatcagactttta

SEQ ID NO: 20235 - DNA, 28 bp, Artificial Sequence
  Probe
gagcatgagactcttaatctcagggtcg

SEQ ID NO: 20236 - DNA, 33 bp, Artificial Sequence
  Probe
gagcatgagactcttaatctcagggtcgtgggt

SEQ ID NO: 20237 - DNA, 28 bp, Artificial Sequence
  Probe
gagcatgggactcttaatcccagggtcg

SEQ ID NO: 20238 - DNA, 29 bp, Artificial Sequence
  Probe
gagcatgggactcttaatcccagggtcgt

SEQ ID NO: 20239 - DNA, 33 bp, Artificial Sequence
  Probe
gagcatgggactcttaatcccagggtcgtgggt

SEQ ID NO: 20240 - DNA, 28 bp, Artificial Sequence
  Probe
gagcccacccagggacgcgctctccttt

SEQ ID NO: 20241 - DNA, 33 bp, Artificial Sequence
  Probe
gagcccggatagctcagtcggtagagcatcaga

SEQ ID NO: 20242 - DNA, 34 bp, Artificial Sequence
  Probe
gagcccggatagctcagtcggtagagcatcagac

SEQ ID NO: 20243 - DNA, 35 bp, Artificial Sequence
  Probe
gagcccggatagctcagtcggtagagcatcagact

SEQ ID NO: 20244 - DNA, 36 bp, Artificial Sequence
  Probe
gagcccggatagctcagtcggtagagcatcagactt

SEQ ID NO: 20245 - DNA, 37 bp, Artificial Sequence
  Probe
gagcccggatagctcagtcggtagagcatcagacttt

SEQ ID NO: 20246 - DNA, 38 bp, Artificial Sequence
  Probe
gagcccggatagctcagtcggtagagcatcagactttt

SEQ ID NO: 20247 - DNA, 39 bp, Artificial Sequence
  Probe
gagcccggatagctcagtcggtagagcatcagactttta

SEQ ID NO: 20248 - DNA, 41 bp, Artificial Sequence
  Probe
gagcccggatagctcagtcggtagagcatcagacttttaat

SEQ ID NO: 20249 - DNA, 20 bp, Artificial Sequence
  Probe
gagcccggtaatcgcataaa

SEQ ID NO: 20250 - DNA, 23 bp, Artificial Sequence
  Probe
gagcccggtaatcgcataaaact

SEQ ID NO: 20251 - DNA, 24 bp, Artificial Sequence
  Probe
gagcccggtaatcgcataaaactt

SEQ ID NO: 20252 - DNA, 26 bp, Artificial Sequence
  Probe
gagcccggtaatcgcataaaacttaa

SEQ ID NO: 20253 - DNA, 27 bp, Artificial Sequence
  Probe
gagcccggtaatcgcataaaacttaaa

SEQ ID NO: 20254 - DNA, 28 bp, Artificial Sequence
  Probe
gagcccggtaatcgcataaaacttaaaa

SEQ ID NO: 20255 - DNA, 29 bp, Artificial Sequence
  Probe
gagcccggtaatcgcataaaacttaaaac

SEQ ID NO: 20256 - DNA, 31 bp, Artificial Sequence; identical to SEQ ID NO: 961
  Probe

SEQ ID NO: 20257 - DNA, 32 bp, Artificial Sequence; identical to SEQ ID NO: 5657
  Probe

SEQ ID NO: 20258 - DNA, 41 bp, Artificial Sequence
  Probe
gagcccggtaatcgcataaaacttaaaactttacagtcaga

SEQ ID NO: 20259 - DNA, 43 bp, Artificial Sequence
  Probe
gagcccggtaatcgcataaaacttaaaactttacagtcagagg

SEQ ID NO: 20260 - DNA, 44 bp, Artificial Sequence; identical to SEQ ID NO: 5660
  Probe

SEQ ID NO: 20261 - DNA, 46 bp, Artificial Sequence; identical to SEQ ID NO: 5661
  Probe

SEQ ID NO: 20262 - DNA, 49 bp, Artificial Sequence; identical to SEQ ID NO: 5662
  Probe

SEQ ID NO: 20263 - DNA, 50 bp, Artificial Sequence; identical to SEQ ID NO: 965
  Probe

SEQ ID NO: 20264 - DNA, 28 bp, Artificial Sequence
  Probe
gagcctcacacggggcagtctaacgttt

SEQ ID NO: 20265 - DNA, 25 bp, Artificial Sequence
  Probe
gagcctcacctggagcaagaccctt

SEQ ID NO: 20266 - DNA, 26 bp, Artificial Sequence
  Probe
gagcctcacctggagcaagacccttt

SEQ ID NO: 20267 - DNA, 27 bp, Artificial Sequence
  Probe
gagcctcacctggagcaagaccctttt

SEQ ID NO: 20268 - DNA, 39 bp, Artificial Sequence
  Probe
gagcctggatagctcagtcggtagagcatcagactttta

SEQ ID NO: 20269 - DNA, 29 bp, Artificial Sequence
  Probe
gagcgacggctcgttggtctaggggtatg

SEQ ID NO: 20270 - DNA, 30 bp, Artificial Sequence
  Probe
gagcgacggctcgttggtctaggggtatga

SEQ ID NO: 20271 - DNA, 31 bp, Artificial Sequence
  Probe
gagcgacggctcgttggtctaggggtatgat

SEQ ID NO: 20272 - DNA, 32 bp, Artificial Sequence
  Probe
gagcgacggctcgttggtctaggggtatgatt

SEQ ID NO: 20273 - DNA, 33 bp, Artificial Sequence
  Probe
gagcgacggctcgttggtctaggggtatgattc

SEQ ID NO: 20274 - DNA, 36 bp, Artificial Sequence
  Probe
gagcgacggctcgttggtctaggggtatgattctcg

SEQ ID NO: 20275 - DNA, 39 bp, Artificial Sequence
  Probe
gagcgcccggatagctcagtcggtagagcatcagacttt

SEQ ID NO: 20276 - DNA, 41 bp, Artificial Sequence
  Probe
gagcgcccggatagctcagtcggtagagcatcagactttta

SEQ ID NO: 20277 - DNA, 28 bp, Artificial Sequence
  Probe
gagctagctcagtcggtagagcatggga

SEQ ID NO: 20278 - DNA, 29 bp, Artificial Sequence
  Probe
gagctagctcagtcggtagagcatgggac

SEQ ID NO: 20279 - DNA, 30 bp, Artificial Sequence
  Probe
gagctagctcagtcggtagagcatgggact

SEQ ID NO: 20280 - DNA, 31 bp, Artificial Sequence
  Probe
gagctagctcagtcggtagagcatgggactc

SEQ ID NO: 20281 - DNA, 16 bp, Artificial Sequence
  Probe
gagctcaattactttt

SEQ ID NO: 20282 - DNA, 16 bp, Artificial Sequence
  Probe
gagctggtcgcgggaa

SEQ ID NO: 20283 - DNA, 16 bp, Artificial Sequence
  Probe
gagcttaaaccccctt

SEQ ID NO: 20284 - DNA, 24 bp, Artificial Sequence
  Probe
gagcttaaacccccttatttctag

SEQ ID NO: 20285 - DNA, 25 bp, Artificial Sequence
  Probe
gagcttaaacccccttatttctagg

SEQ ID NO: 20286 - DNA, 26 bp, Artificial Sequence
  Probe
gagcttaaacccccttatttctagga

SEQ ID NO: 20287 - DNA, 22 bp, Artificial Sequence
  Probe
gaggagaccttgctcagcagat

SEQ ID NO: 20288 - DNA, 23 bp, Artificial Sequence
  Probe
gaggagaccttgctcagcagatg

SEQ ID NO: 20289 - DNA, 30 bp, Artificial Sequence
  Probe
gaggcattggtggttcagtggtagaattct

SEQ ID NO: 20290 - DNA, 32 bp, Artificial Sequence
  Probe
gaggcattggtggttcagtggtagaattctcg

SEQ ID NO: 20291 - DNA, 25 bp, Artificial Sequence
  Probe
gaggccccgggttcaatccccggca

SEQ ID NO: 20292 - DNA, 38 bp, Artificial Sequence
  Probe
gaggccccgggttcaatccccggcatctccagactttt

SEQ ID NO: 20293 - DNA, 25 bp, Artificial Sequence
  Probe
gaggccccgggttcgatccccggca

SEQ ID NO: 20294 - DNA, 28 bp, Artificial Sequence
  Probe
gaggccccgggttcgatccccggcatct

SEQ ID NO: 20295 - DNA, 34 bp, Artificial Sequence
  Probe
gaggccccgggttcgatccccggcatctccattg

SEQ ID NO: 20296 - DNA, 27 bp, Artificial Sequence
  Probe
gaggcgtgggttcgaatcccacttctg

SEQ ID NO: 20297 - DNA, 28 bp, Artificial Sequence
  Probe
gaggcgtgggttcgaatcccacttctga

SEQ ID NO: 20298 - DNA, 30 bp, Artificial Sequence
  Probe
gaggcgtgggttcgaatcccacttctgaca

SEQ ID NO: 20299 - DNA, 31 bp, Artificial Sequence; identical to SEQ ID NO: 5666
  Probe

SEQ ID NO: 20300 - DNA, 32 bp, Artificial Sequence
  Probe
gaggcgtgggttcgaatcccacttctgacaca

SEQ ID NO: 20301 - DNA, 17 bp, Artificial Sequence
  Probe
gaggcttacgacccctt

SEQ ID NO: 20302 - DNA, 18 bp, Artificial Sequence
  Probe
gaggcttacgacccctta

SEQ ID NO: 20303 - DNA, 21 bp, Artificial Sequence
  Probe
gaggcttacgaccccttattt

SEQ ID NO: 20304 - DNA, 22 bp, Artificial Sequence
  Probe
gaggcttacgaccccttattta

SEQ ID NO: 20305 - DNA, 23 bp, Artificial Sequence
  Probe
gaggcttacgaccccttatttac

SEQ ID NO: 20306 - DNA, 25 bp, Artificial Sequence
  Probe
gaggcttacgaccccttatttaccg

SEQ ID NO: 20307 - DNA, 26 bp, Artificial Sequence
  Probe
gaggcttacgaccccttatttaccga

SEQ ID NO: 20308 - DNA, 27 bp, Artificial Sequence
  Probe
gaggcttacgaccccttatttaccgag

SEQ ID NO: 20309 - DNA, 32 bp, Artificial Sequence
  Probe
gagggtccagggttcaagtccctgttcgggcg

SEQ ID NO: 20310 - DNA, 35 bp, Artificial Sequence
  Probe
gagggtccagggttcaagtccctgttcgggcggca

SEQ ID NO: 20311 - DNA, 42 bp, Artificial Sequence
  Probe
gagggtccagggttcaagtccctgttcgggcggcatgtcttt

SEQ ID NO: 20312 - DNA, 40 bp, Artificial Sequence
  Probe
gagggtccagggttcaagtccctgttcgggcggtatcttt

SEQ ID NO: 20313 - DNA, 41 bp, Artificial Sequence
  Probe
gagggtccagggttcaagtccctgttcgggcggtatctttt

SEQ ID NO: 20314 - DNA, 28 bp, Artificial Sequence
  Probe
gagggttctcaccttctctctccgattt

SEQ ID NO: 20315 - DNA, 29 bp, Artificial Sequence
  Probe
gagggttctcaccttctctctccgatttt

SEQ ID NO: 20316 - DNA, 26 bp, Artificial Sequence
  Probe
gaggtagcgggatcgatgcccgcatc

SEQ ID NO: 20317 - DNA, 23 bp, Artificial Sequence
  Probe
gaggtagggctttggctgtgggg

SEQ ID NO: 20318 - DNA, 34 bp, Artificial Sequence
  Probe
gaggtcccgggttcaaatcccggacgagccccct

SEQ ID NO: 20319 - DNA, 25 bp, Artificial Sequence
  Probe
gaggtcccgggttcgatccccagca

SEQ ID NO: 20320 - DNA, 29 bp, Artificial Sequence
  Probe
gaggtcgatggatcgaaaccatcctctgc

SEQ ID NO: 20321 - DNA, 30 bp, Artificial Sequence
  Probe
gaggtcgatggatcgaaaccatcctctgct

SEQ ID NO: 20322 - DNA, 31 bp, Artificial Sequence
  Probe
gaggtcgatggatcgaaaccatcctctgcta

SEQ ID NO: 20323 - DNA, 31 bp, Artificial Sequence; identical to SEQ ID NO: 5673
  Probe

SEQ ID NO: 20324 - DNA, 34 bp, Artificial Sequence; identical to SEQ ID NO: 5674
  Probe

SEQ ID NO: 20325 - DNA, 20 bp, Artificial Sequence
  Probe
gagtaaataataggagctta

SEQ ID NO: 20326 - DNA, 21 bp, Artificial Sequence
  Probe
gagtaaataataggagcttaa

SEQ ID NO: 20327 - DNA, 26 bp, Artificial Sequence
  Probe
gagtaaataataggagcttaaacccc

SEQ ID NO: 20328 - DNA, 27 bp, Artificial Sequence
  Probe
gagtaaataataggagcttaaaccccc

SEQ ID NO: 20329 - DNA, 28 bp, Artificial Sequence
  Probe
gagtaaataataggagcttaaaccccct

SEQ ID NO: 20330 - DNA, 29 bp, Artificial Sequence
  Probe
gagtaaataataggagcttaaaccccctt

SEQ ID NO: 20331 - DNA, 30 bp, Artificial Sequence; identical to SEQ ID NO: 969
  Probe

SEQ ID NO: 20332 - DNA, 33 bp, Artificial Sequence
  Probe
gagtaaataataggagcttaaacccccttattt

SEQ ID NO: 20333 - DNA, 34 bp, Artificial Sequence
  Probe
gagtaaataataggagcttaaacccccttatttc

SEQ ID NO: 20334 - DNA, 37 bp, Artificial Sequence; identical to SEQ ID NO: 5680
  Probe

SEQ ID NO: 20335 - DNA, 38 bp, Artificial Sequence; identical to SEQ ID NO: 5681
  Probe

SEQ ID NO: 20336 - DNA, 39 bp, Artificial Sequence; identical to SEQ ID NO: 5682
  Probe

SEQ ID NO: 20337 - DNA, 40 bp, Artificial Sequence; identical to SEQ ID NO: 5683
  Probe

SEQ ID NO: 20338 - DNA, 16 bp, Artificial Sequence
  Probe
gagtatccccgcctgt

SEQ ID NO: 20339 - DNA, 30 bp, Artificial Sequence
  Probe
gagtatccccgcctgtcacgcgggagaccg

SEQ ID NO: 20340 - DNA, 50 bp, Artificial Sequence; identical to SEQ ID NO: 5686
  Probe

SEQ ID NO: 20341 - DNA, 16 bp, Artificial Sequence
  Probe
gagtgaagcattggac

SEQ ID NO: 20342 - DNA, 17 bp, Artificial Sequence
  Probe
gagtgaagcattggact

SEQ ID NO: 20343 - DNA, 19 bp, Artificial Sequence
  Probe
gagtgaagcattggactgt

SEQ ID NO: 20344 - DNA, 20 bp, Artificial Sequence
  Probe
gagtgaagcattggactgta

SEQ ID NO: 20345 - DNA, 21 bp, Artificial Sequence
  Probe
gagtgaagcattggactgtaa

SEQ ID NO: 20346 - DNA, 28 bp, Artificial Sequence
  Probe
gagtggcgcagcggaagcgtgctgggcc

SEQ ID NO: 20347 - DNA, 29 bp, Artificial Sequence
  Probe
gagtggcgcagcggaagcgtgctgggccc

SEQ ID NO: 20348 - DNA, 30 bp, Artificial Sequence
  Probe
gagtggcgcagcggaagcgtgctgggccca

SEQ ID NO: 20349 - DNA, 31 bp, Artificial Sequence
  Probe
gagtggcgcagcggaagcgtgctgggcccat

SEQ ID NO: 20350 - DNA, 23 bp, Artificial Sequence
  Probe
gagtggggttttgcagtccttag

SEQ ID NO: 20351 - DNA, 24 bp, Artificial Sequence
  Probe
gagtggggttttgcagtccttagc

SEQ ID NO: 20352 - DNA, 25 bp, Artificial Sequence
  Probe
gagtggggttttgcagtccttagct

SEQ ID NO: 20353 - DNA, 24 bp, Artificial Sequence
  Probe
gagtgtagcttaacacaaagcacc

SEQ ID NO: 20354 - DNA, 25 bp, Artificial Sequence
  Probe
gagtgtagcttaacacaaagcaccc

SEQ ID NO: 20355 - DNA, 26 bp, Artificial Sequence
  Probe
gagtgtagcttaacacaaagcaccca

SEQ ID NO: 20356 - DNA, 27 bp, Artificial Sequence
  Probe
gagtgtagcttaacacaaagcacccaa

SEQ ID NO: 20357 - DNA, 28 bp, Artificial Sequence
  Probe
gagtgtagcttaacacaaagcacccaac

SEQ ID NO: 20358 - DNA, 29 bp, Artificial Sequence
  Probe
gagtgtagcttaacacaaagcacccaact

SEQ ID NO: 20359 - DNA, 30 bp, Artificial Sequence; identical to SEQ ID NO: 5697
  Probe

SEQ ID NO: 20360 - DNA, 31 bp, Artificial Sequence; identical to SEQ ID NO: 5698
  Probe

SEQ ID NO: 20361 - DNA, 16 bp, Artificial Sequence
  Probe
gagtgtcaggatggcc

SEQ ID NO: 20362 - DNA, 19 bp, Artificial Sequence
  Probe
gagtgtcaggatggccgag

SEQ ID NO: 20363 - DNA, 20 bp, Artificial Sequence
  Probe
gagtgtcaggatggccgagt

SEQ ID NO: 20364 - DNA, 24 bp, Artificial Sequence
  Probe
gagtgtcaggatggccgagtggtc

SEQ ID NO: 20365 - DNA, 25 bp, Artificial Sequence
  Probe
gagtgtcaggatggccgagtggtct

SEQ ID NO: 20366 - DNA, 33 bp, Artificial Sequence
  Probe
gagtgtcaggatggccgagtggtctaaggcgcc

SEQ ID NO: 20367 - DNA, 34 bp, Artificial Sequence
  Probe
gagtgtcaggatggccgagtggtctaaggcgcca

SEQ ID NO: 20368 - DNA, 36 bp, Artificial Sequence
  Probe
gagtgtcaggatggccgagtggtctaaggcgccaga

SEQ ID NO: 20369 - DNA, 38 bp, Artificial Sequence
  Probe
gagtgtcaggatggccgagtggtctaaggcgccagact

SEQ ID NO: 20370 - DNA, 39 bp, Artificial Sequence
  Probe
gagtgtcaggatggccgagtggtctaaggcgccagactc

SEQ ID NO: 20371 - DNA, 50 bp, Artificial Sequence
  Probe
gagtgtcaggatggccgagtggtctaaggcgccagactcaaggtaagcac

SEQ ID NO: 20372 - DNA, 24 bp, Artificial Sequence
  Probe
gagttaaagactttttctctgatt

SEQ ID NO: 20373 - DNA, 25 bp, Artificial Sequence
  Probe
gagttaaagactttttctctgattt

SEQ ID NO: 20374 - DNA, 23 bp, Artificial Sequence
  Probe
gagttagcggggagtgatatatt

SEQ ID NO: 20375 - DNA, 24 bp, Artificial Sequence
  Probe
gagttagcggggagtgatatatta

SEQ ID NO: 20376 - DNA, 26 bp, Artificial Sequence
  Probe
gagttagcggggagtgatatattatt

SEQ ID NO: 20377 - DNA, 27 bp, Artificial Sequence
  Probe
gagttagcggggagtgatatattattg

SEQ ID NO: 20378 - DNA, 50 bp, Artificial Sequence; identical to SEQ ID NO: 973
  Probe

SEQ ID NO: 20379 - DNA, 20 bp, Artificial Sequence
  Probe
gataacagctatccattggt

SEQ ID NO: 20380 - DNA, 21 bp, Artificial Sequence
  Probe
gataacagctatccattggtc

SEQ ID NO: 20381 - DNA, 22 bp, Artificial Sequence
  Probe
gataacagctatccattggtct

SEQ ID NO: 20382 - DNA, 31 bp, Artificial Sequence
  Probe
gataacagctatccattggtcttaggcccca

SEQ ID NO: 20383 - DNA, 16 bp, Artificial Sequence
  Probe
gataatcatatttacc

SEQ ID NO: 20384 - DNA, 21 bp, Artificial Sequence
  Probe
gataatcatatttaccaaatg

SEQ ID NO: 20385 - DNA, 15 bp, Artificial Sequence
  Probe
gatagactaagcaaa

SEQ ID NO: 20386 - DNA, 21 bp, Artificial Sequence
  Probe
gatagagtaaataataggagc

SEQ ID NO: 20387 - DNA, 28 bp, Artificial Sequence
  Probe
gatagagtaaataataggagcttaaacc

SEQ ID NO: 20388 - DNA, 34 bp, Artificial Sequence; identical to SEQ ID NO: 975
  Probe

SEQ ID NO: 20389 - DNA, 38 bp, Artificial Sequence
  Probe
gatagagtaaataataggagcttaaacccccttatttc

SEQ ID NO: 20390 - DNA, 39 bp, Artificial Sequence; identical to SEQ ID NO: 5710
  Probe

SEQ ID NO: 20391 - DNA, 40 bp, Artificial Sequence; identical to SEQ ID NO: 976
  Probe

SEQ ID NO: 20392 - DNA, 41 bp, Artificial Sequence; identical to SEQ ID NO: 5711
  Probe

SEQ ID NO: 20393 - DNA, 42 bp, Artificial Sequence; identical to SEQ ID NO: 5712
  Probe

SEQ ID NO: 20394 - DNA, 43 bp, Artificial Sequence; identical to SEQ ID NO: 5713
  Probe

SEQ ID NO: 20395 - DNA, 28 bp, Artificial Sequence
  Probe
gatagctcagtcggtagagcatcagact

SEQ ID NO: 20396 - DNA, 30 bp, Artificial Sequence
  Probe
gatagctcagtcggtagagcatcagacttt

SEQ ID NO: 20397 - DNA, 31 bp, Artificial Sequence
  Probe
gatagctcagtcggtagagcatcagactttt

SEQ ID NO: 20398 - DNA, 32 bp, Artificial Sequence
  Probe
gatagctcagtcggtagagcatcagactttta

SEQ ID NO: 20399 - DNA, 26 bp, Artificial Sequence
  Probe
gatagctcagttggtagagcggagga

SEQ ID NO: 20400 - DNA, 27 bp, Artificial Sequence
  Probe
gatagctcagttggtagagcggaggac

SEQ ID NO: 20401 - DNA, 30 bp, Artificial Sequence
  Probe
gatatccaaccttcagctatagggtggaga

SEQ ID NO: 20402 - DNA, 23 bp, Artificial Sequence
  Probe
gatccccagcatctccagtgttt

SEQ ID NO: 20403 - DNA, 24 bp, Artificial Sequence
  Probe
gatccccagcatctccagtgtttt

SEQ ID NO: 20404 - DNA, 20 bp, Artificial Sequence
  Probe
gatccccggcatctccattg

SEQ ID NO: 20405 - DNA, 25 bp, Artificial Sequence
  Probe
gatccgagttcaaatctcggtggaa

SEQ ID NO: 20406 - DNA, 32 bp, Artificial Sequence; identical to SEQ ID NO: 5721
  Probe

SEQ ID NO: 20407 - DNA, 24 bp, Artificial Sequence
  Probe
gatcgaaaccatcctctgctaggt

SEQ ID NO: 20408 - DNA, 26 bp, Artificial Sequence
  Probe
gatcgggaggtagcgtggccgagtgg

SEQ ID NO: 20409 - DNA, 26 bp, Artificial Sequence
  Probe
gatgaaaacctttttccaaggacaaa

SEQ ID NO: 20410 - DNA, 27 bp, Artificial Sequence
  Probe
gatgaaaacctttttccaaggacaaat

SEQ ID NO: 20411 - DNA, 21 bp, Artificial Sequence
  Probe
gatgcagagtggggttttgca

SEQ ID NO: 20412 - DNA, 23 bp, Artificial Sequence
  Probe
gatgcagagtggggttttgcagt

SEQ ID NO: 20413 - DNA, 24 bp, Artificial Sequence
  Probe
gatgcagagtggggttttgcagtc

SEQ ID NO: 20414 - DNA, 26 bp, Artificial Sequence
  Probe
gatgcagagtggggttttgcagtcct

SEQ ID NO: 20415 - DNA, 27 bp, Artificial Sequence
  Probe
gatgcagagtggggttttgcagtcctt

SEQ ID NO: 20416 - DNA, 28 bp, Artificial Sequence
  Probe
gatgcagagtggggttttgcagtcctta

SEQ ID NO: 20417 - DNA, 29 bp, Artificial Sequence
  Probe
gatgcagagtggggttttgcagtccttag

SEQ ID NO: 20418 - DNA, 30 bp, Artificial Sequence; identical to SEQ ID NO: 5730
  Probe

SEQ ID NO: 20419 - DNA, 31 bp, Artificial Sequence; identical to SEQ ID NO: 5731
  Probe

SEQ ID NO: 20420 - DNA, 17 bp, Artificial Sequence
  Probe
gatggccgagcggtcta

SEQ ID NO: 20421 - DNA, 19 bp, Artificial Sequence
  Probe
gatggccgagcggtctaag

SEQ ID NO: 20422 - DNA, 34 bp, Artificial Sequence
  Probe
gatggcgtgggttcgaatcccaccgctgccacac

SEQ ID NO: 20423 - DNA, 26 bp, Artificial Sequence
  Probe
gatggggtgtgataggtggcacggag

SEQ ID NO: 20424 - DNA, 33 bp, Artificial Sequence; identical to SEQ ID NO: 5734
  Probe

SEQ ID NO: 20425 - DNA, 17 bp, Artificial Sequence
  Probe
gattaagagaaccaaca

SEQ ID NO: 20426 - DNA, 19 bp, Artificial Sequence
  Probe
gattaagagaaccaacacc

SEQ ID NO: 20427 - DNA, 29 bp, Artificial Sequence
  Probe
gattaagagaaccaacacctctttacagt

SEQ ID NO: 20428 - DNA, 30 bp, Artificial Sequence; identical to SEQ ID NO: 10204
  Probe

SEQ ID NO: 20429 - DNA, 31 bp, Artificial Sequence; identical to SEQ ID NO: 5736
  Probe

SEQ ID NO: 20430 - DNA, 32 bp, Artificial Sequence; identical to SEQ ID NO: 5737
  Probe

SEQ ID NO: 20431 - DNA, 33 bp, Artificial Sequence; identical to SEQ ID NO: 5738
  Probe

SEQ ID NO: 20432 - DNA, 34 bp, Artificial Sequence; identical to SEQ ID NO: 5739
  Probe

SEQ ID NO: 20433 - DNA, 50 bp, Artificial Sequence; identical to SEQ ID NO: 977
  Probe

SEQ ID NO: 20434 - DNA, 46 bp, Artificial Sequence
  Probe
gattcccattcttgcgacccgggttcgattcccgggcggcgcactt

SEQ ID NO: 20435 - DNA, 31 bp, Artificial Sequence
  Probe
gattccccgacggggagagtactagcagttt

SEQ ID NO: 20436 - DNA, 20 bp, Artificial Sequence
  Probe
gattccccgacggggaggca

SEQ ID NO: 20437 - DNA, 20 bp, Artificial Sequence
  Probe
gattcccggccaacgcaagt

SEQ ID NO: 20438 - DNA, 20 bp, Artificial Sequence
  Probe
gattcccggccaacgcagtg

SEQ ID NO: 20439 - DNA, 20 bp, Artificial Sequence
  Probe
gattcccggcccatgcagca

SEQ ID NO: 20440 - DNA, 20 bp, Artificial Sequence
  Probe
gattcccggtcagggaacaa

SEQ ID NO: 20441 - DNA, 19 bp, Artificial Sequence
  Probe
gattctcatagtcctagaa

SEQ ID NO: 20442 - DNA, 28 bp, Artificial Sequence
  Probe
gattctcgcttcgggtgcgagaggtccc

SEQ ID NO: 20443 - DNA, 29 bp, Artificial Sequence
  Probe
gattgaaacttttcgaaagtacgattact

SEQ ID NO: 20444 - DNA, 27 bp, Artificial Sequence
  Probe
gattgagggttcgagtcccttcgtggt

SEQ ID NO: 20445 - DNA, 23 bp, Artificial Sequence
  Probe
gattgcaggttcgagtcctgccg

SEQ ID NO: 20446 - DNA, 16 bp, Artificial Sequence
  Probe
gattgtgaatctgaca

SEQ ID NO: 20447 - DNA, 17 bp, Artificial Sequence
  Probe
gattgtgaatctgacaa

SEQ ID NO: 20448 - DNA, 19 bp, Artificial Sequence
  Probe
gattgtgaatctgacaaca

SEQ ID NO: 20449 - DNA, 20 bp, Artificial Sequence
  Probe
gattgtgaatctgacaacag

SEQ ID NO: 20450 - DNA, 21 bp, Artificial Sequence
  Probe
gattgtgaatctgacaacaga

SEQ ID NO: 20451 - DNA, 22 bp, Artificial Sequence
  Probe
gattgtgaatctgacaacagag

SEQ ID NO: 20452 - DNA, 24 bp, Artificial Sequence
  Probe
gattgtgaatctgacaacagaggc

SEQ ID NO: 20453 - DNA, 25 bp, Artificial Sequence
  Probe
gattgtgaatctgacaacagaggct

SEQ ID NO: 20454 - DNA, 29 bp, Artificial Sequence
  Probe
gattgtgaatctgacaacagaggcttacg

SEQ ID NO: 20455 - DNA, 30 bp, Artificial Sequence
  Probe
gattgtgaatctgacaacagaggcttacga

SEQ ID NO: 20456 - DNA, 35 bp, Artificial Sequence; identical to SEQ ID NO: 5752
  Probe

SEQ ID NO: 20457 - DNA, 36 bp, Artificial Sequence; identical to SEQ ID NO: 5753
  Probe

SEQ ID NO: 20458 - DNA, 38 bp, Artificial Sequence; identical to SEQ ID NO: 985
  Probe

SEQ ID NO: 20459 - DNA, 39 bp, Artificial Sequence; identical to SEQ ID NO: 986
  Probe

SEQ ID NO: 20460 - DNA, 40 bp, Artificial Sequence
  Probe
gattgtgaatctgacaacagaggcttacgaccccttattt

SEQ ID NO: 20461 - DNA, 43 bp, Artificial Sequence; identical to SEQ ID NO: 988
  Probe

SEQ ID NO: 20462 - DNA, 44 bp, Artificial Sequence; identical to SEQ ID NO: 5755
  Probe

SEQ ID NO: 20463 - DNA, 45 bp, Artificial Sequence; identical to SEQ ID NO: 5756
  Probe

SEQ ID NO: 20464 - DNA, 46 bp, Artificial Sequence; identical to SEQ ID NO: 5757
  Probe

SEQ ID NO: 20465 - DNA, 20 bp, Artificial Sequence
  Probe
gatttcaacttaacttgacc

SEQ ID NO: 20466 - DNA, 21 bp, Artificial Sequence
  Probe
gatttcaacttaacttgaccg

SEQ ID NO: 20467 - DNA, 22 bp, Artificial Sequence
  Probe
gatttcaacttaacttgaccgc

SEQ ID NO: 20468 - DNA, 23 bp, Artificial Sequence
  Probe
gatttcaacttaacttgaccgct

SEQ ID NO: 20469 - DNA, 24 bp, Artificial Sequence
  Probe
gatttcaacttaacttgaccgctc

SEQ ID NO: 20470 - DNA, 25 bp, Artificial Sequence
  Probe
gatttcaacttaacttgaccgctct

SEQ ID NO: 20471 - DNA, 26 bp, Artificial Sequence
  Probe
gatttcaacttaacttgaccgctctg

SEQ ID NO: 20472 - DNA, 27 bp, Artificial Sequence
  Probe
gatttcaacttaacttgaccgctctga

SEQ ID NO: 20473 - DNA, 28 bp, Artificial Sequence
  Probe
gatttcaacttaacttgaccgctctgag

SEQ ID NO: 20474 - DNA, 29 bp, Artificial Sequence
  Probe
gatttcaacttaacttgaccgctctgagc

SEQ ID NO: 20475 - DNA, 30 bp, Artificial Sequence; identical to SEQ ID NO: 5769
  Probe

SEQ ID NO: 20476 - DNA, 29 bp, Artificial Sequence
  Probe
gatttcgactcattaaattatgataatca

SEQ ID NO: 20477 - DNA, 31 bp, Artificial Sequence; identical to SEQ ID NO: 5771
  Probe

SEQ ID NO: 20478 - DNA, 32 bp, Artificial Sequence; identical to SEQ ID NO: 5772
  Probe

SEQ ID NO: 20479 - DNA, 38 bp, Artificial Sequence
  Probe
gatttcgactcattaaattatgataatcatatttacca

SEQ ID NO: 20480 - DNA, 41 bp, Artificial Sequence
  Probe
gatttcgactcattaaattatgataatcatatttaccaaat

SEQ ID NO: 20481 - DNA, 42 bp, Artificial Sequence; identical to SEQ ID NO: 5774
  Probe

SEQ ID NO: 20482 - DNA, 15 bp, Artificial Sequence
  Probe
gcaaaaccccactct

SEQ ID NO: 20483 - DNA, 39 bp, Artificial Sequence; identical to SEQ ID NO: 5781
  Probe

SEQ ID NO: 20484 - DNA, 40 bp, Artificial Sequence; identical to SEQ ID NO: 5782
  Probe

SEQ ID NO: 20485 - DNA, 41 bp, Artificial Sequence; identical to SEQ ID NO: 5783
  Probe

SEQ ID NO: 20486 - DNA, 33 bp, Artificial Sequence; identical to SEQ ID NO: 5786
  Probe

SEQ ID NO: 20487 - DNA, 33 bp, Artificial Sequence; identical to SEQ ID NO: 5788
  Probe

SEQ ID NO: 20488 - DNA, 16 bp, Artificial Sequence
  Probe
gcaactggtcgtttta

SEQ ID NO: 20489 - DNA, 42 bp, Artificial Sequence
  Probe
gcaagcagtcaggatggccgagcggtctaaggcgctgcgttc

SEQ ID NO: 20490 - DNA, 31 bp, Artificial Sequence; identical to SEQ ID NO: 5789
  Probe

SEQ ID NO: 20491 - DNA, 33 bp, Artificial Sequence; identical to SEQ ID NO: 989
  Probe

SEQ ID NO: 20492 - DNA, 41 bp, Artificial Sequence; identical to SEQ ID NO: 5790
  Probe

SEQ ID NO: 20493 - DNA, 50 bp, Artificial Sequence; identical to SEQ ID NO: 5793
  Probe

SEQ ID NO: 20494 - DNA, 19 bp, Artificial Sequence
  Probe
gcaatggatagcgcattgg

SEQ ID NO: 20495 - DNA, 20 bp, Artificial Sequence
  Probe
gcaatggatagcgcattgga

SEQ ID NO: 20496 - DNA, 27 bp, Artificial Sequence
  Probe
gcaatggtggttcagtggtagaattct

SEQ ID NO: 20497 - DNA, 31 bp, Artificial Sequence; identical to SEQ ID NO: 5794
  Probe

SEQ ID NO: 20498 - DNA, 32 bp, Artificial Sequence; identical to SEQ ID NO: 5795
  Probe

SEQ ID NO: 20499 - DNA, 33 bp, Artificial Sequence
  Probe
gcaatggtggttcagtggtagaattctcgcctt

SEQ ID NO: 20500 - DNA, 34 bp, Artificial Sequence
  Probe
gcaatggtggttcagtggtagaattctcgccttt

SEQ ID NO: 20501 - DNA, 16 bp, Artificial Sequence
  Probe
gcacagtaattgtttt

SEQ ID NO: 20502 - DNA, 17 bp, Artificial Sequence
  Probe
gcacagtaattgttttt

SEQ ID NO: 20503 - DNA, 16 bp, Artificial Sequence
  Probe
gcacccaacttacact

SEQ ID NO: 20504 - DNA, 17 bp, Artificial Sequence
  Probe
gcacccaacttacactt

SEQ ID NO: 20505 - DNA, 18 bp, Artificial Sequence
  Probe
gcacccaacttacactta

SEQ ID NO: 20506 - DNA, 20 bp, Artificial Sequence
  Probe
gcacccaacttacacttagg

SEQ ID NO: 20507 - DNA, 21 bp, Artificial Sequence
  Probe
gcacccaacttacacttagga

SEQ ID NO: 20508 - DNA, 22 bp, Artificial Sequence
  Probe
gcacccaacttacacttaggag

SEQ ID NO: 20509 - DNA, 23 bp, Artificial Sequence
  Probe
gcacccaacttacacttaggaga

SEQ ID NO: 20510 - DNA, 24 bp, Artificial Sequence
  Probe
gcacccaacttacacttaggagat

SEQ ID NO: 20511 - DNA, 25 bp, Artificial Sequence
  Probe
gcacccaacttacacttaggagatt

SEQ ID NO: 20512 - DNA, 26 bp, Artificial Sequence
  Probe
gcacccaacttacacttaggagattt

SEQ ID NO: 20513 - DNA, 27 bp, Artificial Sequence
  Probe
gcacccaacttacacttaggagatttc

SEQ ID NO: 20514 - DNA, 28 bp, Artificial Sequence
  Probe
gcacccaacttacacttaggagatttca

SEQ ID NO: 20515 - DNA, 29 bp, Artificial Sequence
  Probe
gcacccaacttacacttaggagatttcaa

SEQ ID NO: 20516 - DNA, 31 bp, Artificial Sequence; identical to SEQ ID NO: 5808
  Probe

SEQ ID NO: 20517 - DNA, 32 bp, Artificial Sequence; identical to SEQ ID NO: 5809
  Probe

SEQ ID NO: 20518 - DNA, 33 bp, Artificial Sequence; identical to SEQ ID NO: 5810
  Probe

SEQ ID NO: 20519 - DNA, 36 bp, Artificial Sequence
  Probe
gcacccaacttacacttaggagatttcaacttaact

SEQ ID NO: 20520 - DNA, 40 bp, Artificial Sequence
  Probe
gcacccaacttacacttaggagatttcaacttaacttgac

SEQ ID NO: 20521 - DNA, 42 bp, Artificial Sequence; identical to SEQ ID NO: 5813
  Probe

SEQ ID NO: 20522 - DNA, 44 bp, Artificial Sequence; identical to SEQ ID NO: 5815
  Probe

SEQ ID NO: 20523 - DNA, 50 bp, Artificial Sequence; identical to SEQ ID NO: 5820
  Probe

SEQ ID NO: 20524 - DNA, 16 bp, Artificial Sequence
  Probe
gcacgaggccccgggt

SEQ ID NO: 20525 - DNA, 18 bp, Artificial Sequence
  Probe
gcacgaggccccgggttc

SEQ ID NO: 20526 - DNA, 32 bp, Artificial Sequence
  Probe
gcacgaggccccgggttcaatccccggcacct

SEQ ID NO: 20527 - DNA, 33 bp, Artificial Sequence
  Probe
gcacgaggccccgggttcaatccccggcacctc

SEQ ID NO: 20528 - DNA, 34 bp, Artificial Sequence
  Probe
gcacgaggccccgggttcaatccccggcacctcc

SEQ ID NO: 20529 - DNA, 36 bp, Artificial Sequence
  Probe
gcacgaggccccgggttcaatccccggcacctccag

SEQ ID NO: 20530 - DNA, 37 bp, Artificial Sequence
  Probe
gcacgaggccccgggttcaatccccggcacctccagc

SEQ ID NO: 20531 - DNA, 38 bp, Artificial Sequence; identical to SEQ ID NO: 5821
  Probe

SEQ ID NO: 20532 - DNA, 36 bp, Artificial Sequence
  Probe
gcacgaggccccgggttcaatccccggcacctccat

SEQ ID NO: 20533 - DNA, 37 bp, Artificial Sequence
  Probe
gcacgaggccccgggttcaatccccggcacctccatt

SEQ ID NO: 20534 - DNA, 38 bp, Artificial Sequence
  Probe
gcacgaggccccgggttcaatccccggcacctccattc

SEQ ID NO: 20535 - DNA, 42 bp, Artificial Sequence
  Probe
gcacgaggccccgggttcaatccccggcacctccattccttt

SEQ ID NO: 20536 - DNA, 38 bp, Artificial Sequence
  Probe
gcacgaggccctgggttcaatccccagcacctccatgt

SEQ ID NO: 20537 - DNA, 38 bp, Artificial Sequence
  Probe
gcacgaggtcctgggttcaatccccaatacctccaggt

SEQ ID NO: 20538 - DNA, 37 bp, Artificial Sequence
  Probe
gcacgaggtcctgggttcgatccccagtacctccagg

SEQ ID NO: 20539 - DNA, 38 bp, Artificial Sequence
  Probe
gcacgaggtcctgggttcgatccccagtacctccaggc

SEQ ID NO: 20540 - DNA, 16 bp, Artificial Sequence
  Probe
gcacgccctcccattt

SEQ ID NO: 20541 - DNA, 17 bp, Artificial Sequence
  Probe
gcacgccctcccatttt

SEQ ID NO: 20542 - DNA, 40 bp, Artificial Sequence
  Probe
gcacgcggttccatagtgtagcggttatcacgtctgcttt

SEQ ID NO: 20543 - DNA, 28 bp, Artificial Sequence
  Probe
gcacgcgtgggttcgaatcccatcctcg

SEQ ID NO: 20544 - DNA, 29 bp, Artificial Sequence
  Probe
gcacgcgtgggttcgaatcccatcctcgt

SEQ ID NO: 20545 - DNA, 16 bp, Artificial Sequence
  Probe
gcacggcaaggggctc

SEQ ID NO: 20546 - DNA, 42 bp, Artificial Sequence
  Probe
gcacgtatgaggccccgggttcaatccccggcatctccagac

SEQ ID NO: 20547 - DNA, 27 bp, Artificial Sequence
  Probe
gcactctggactctgaatccagcgatc

SEQ ID NO: 20548 - DNA, 28 bp, Artificial Sequence
  Probe
gcactctggactctgaatccagcgatcc

SEQ ID NO: 20549 - DNA, 29 bp, Artificial Sequence
  Probe
gcactctggactctgaatccagcgatccg

SEQ ID NO: 20550 - DNA, 30 bp, Artificial Sequence; identical to SEQ ID NO: 990
  Probe

SEQ ID NO: 20551 - DNA, 31 bp, Artificial Sequence; identical to SEQ ID NO: 5824
  Probe

SEQ ID NO: 20552 - DNA, 32 bp, Artificial Sequence
  Probe
gcactctggactctgaatccagcgatccgagt

SEQ ID NO: 20553 - DNA, 27 bp, Artificial Sequence
  Probe
gcactctggactttgaatccagcgatc

SEQ ID NO: 20554 - DNA, 30 bp, Artificial Sequence
  Probe
gcactctggactttgaatccagcgatccga

SEQ ID NO: 20555 - DNA, 31 bp, Artificial Sequence
  Probe
gcactctggactttgaatccagcgatccgag

SEQ ID NO: 20556 - DNA, 32 bp, Artificial Sequence
  Probe
gcactctggactttgaatccagcgatccgagt

SEQ ID NO: 20557 - DNA, 33 bp, Artificial Sequence
  Probe
gcactctggactttgaatccagcgatccgagtt

SEQ ID NO: 20558 - DNA, 27 bp, Artificial Sequence
  Probe
gcactggtggttcagtggtagaattct

SEQ ID NO: 20559 - DNA, 29 bp, Artificial Sequence
  Probe
gcactggtggttcagtggtagaattctcg

SEQ ID NO: 20560 - DNA, 30 bp, Artificial Sequence; identical to SEQ ID NO: 8615
  Probe

SEQ ID NO: 20561 - DNA, 31 bp, Artificial Sequence; identical to SEQ ID NO: 5827
  Probe

SEQ ID NO: 20562 - DNA, 33 bp, Artificial Sequence; identical to SEQ ID NO: 5828
  Probe

SEQ ID NO: 20563 - DNA, 34 bp, Artificial Sequence
  Probe
gcactggtggttcagtggtagaattctcgcctca

SEQ ID NO: 20564 - DNA, 34 bp, Artificial Sequence; identical to SEQ ID NO: 5829
  Probe

SEQ ID NO: 20565 - DNA, 35 bp, Artificial Sequence
  Probe
gcactggtggttcagtggtagaattctcgcctccc

SEQ ID NO: 20566 - DNA, 16 bp, Artificial Sequence
  Probe
gcagaaggtcctgggt

SEQ ID NO: 20567 - DNA, 33 bp, Artificial Sequence
  Probe
gcagaaggtcctgggttcaagccccagtggaac

SEQ ID NO: 20568 - DNA, 38 bp, Artificial Sequence
  Probe
gcagaaggtcctgggttcaagccccagtggaaccatgg

SEQ ID NO: 20569 - DNA, 31 bp, Artificial Sequence
  Probe
gcagaaggtcctgggttcgagccccagtgga

SEQ ID NO: 20570 - DNA, 37 bp, Artificial Sequence; identical to SEQ ID NO: 5830
  Probe

SEQ ID NO: 20571 - DNA, 38 bp, Artificial Sequence; identical to SEQ ID NO: 5831
  Probe

SEQ ID NO: 20572 - DNA, 38 bp, Artificial Sequence; identical to SEQ ID NO: 5832
  Probe

SEQ ID NO: 20573 - DNA, 28 bp, Artificial Sequence
  Probe
gcagagcccggtaatcgcataaaactta

SEQ ID NO: 20574 - DNA, 33 bp, Artificial Sequence
  Probe
gcagagcccggtaatcgcataaaacttaaaact

SEQ ID NO: 20575 - DNA, 30 bp, Artificial Sequence; identical to SEQ ID NO: 8617
  Probe

SEQ ID NO: 20576 - DNA, 31 bp, Artificial Sequence
  Probe
gcagagtggcgcagcggaagcgtgctgggcc

SEQ ID NO: 20577 - DNA, 32 bp, Artificial Sequence
  Probe
gcagagtggcgcagcggaagcgtgctgggccc

SEQ ID NO: 20578 - DNA, 33 bp, Artificial Sequence; identical to SEQ ID NO: 5833
  Probe

SEQ ID NO: 20579 - DNA, 25 bp, Artificial Sequence
  Probe
gcagagtggggttttgcagtcctta

SEQ ID NO: 20580 - DNA, 27 bp, Artificial Sequence
  Probe
gcagagtggggttttgcagtccttagc

SEQ ID NO: 20581 - DNA, 28 bp, Artificial Sequence
  Probe
gcagagtggggttttgcagtccttagct

SEQ ID NO: 20582 - DNA, 32 bp, Artificial Sequence
  Probe
gcagcaacctcggttcgaatccgagtcacggc

SEQ ID NO: 20583 - DNA, 33 bp, Artificial Sequence
  Probe
gcagcaacctcggttcgaatccgagtcacggca

SEQ ID NO: 20584 - DNA, 34 bp, Artificial Sequence
  Probe
gcagcaacctcggttcgaatccgagtcacggcaa

SEQ ID NO: 20585 - DNA, 36 bp, Artificial Sequence
  Probe
gcagcaacctcggttcgaatccgagtcacggcaaag

SEQ ID NO: 20586 - DNA, 34 bp, Artificial Sequence
  Probe
gcagcaacctcggttcgaatccgagtcacggcag

SEQ ID NO: 20587 - DNA, 36 bp, Artificial Sequence
  Probe
gcagcaacctcggttcgaatccgagtcacggcagga

SEQ ID NO: 20588 - DNA, 36 bp, Artificial Sequence; identical to SEQ ID NO: 5839
  Probe

SEQ ID NO: 20589 - DNA, 34 bp, Artificial Sequence
  Probe
gcagcaacctcggttcgaatccgagtcacggcat

SEQ ID NO: 20590 - DNA, 36 bp, Artificial Sequence; identical to SEQ ID NO: 5840
  Probe

SEQ ID NO: 20591 - DNA, 33 bp, Artificial Sequence
  Probe
gcagcccgggttcgattcccggtcatggaacca

SEQ ID NO: 20592 - DNA, 17 bp, Artificial Sequence
  Probe
gcagcgatggccgagtg

SEQ ID NO: 20593 - DNA, 25 bp, Artificial Sequence
  Probe
gcagcgatggccgagtggttaaggc

SEQ ID NO: 20594 - DNA, 22 bp, Artificial Sequence
  Probe
gcagcggaagcgtgctgggccc

SEQ ID NO: 20595 - DNA, 24 bp, Artificial Sequence
  Probe
gcagcggaagcgtgctgggcccat

SEQ ID NO: 20596 - DNA, 16 bp, Artificial Sequence
  Probe
gcagcggagccttcga

SEQ ID NO: 20597 - DNA, 17 bp, Artificial Sequence
  Probe
gcagcggagccttcgat

SEQ ID NO: 20598 - DNA, 30 bp, Artificial Sequence
  Probe
gcagcggagccttcgatagctcagttggta

SEQ ID NO: 20599 - DNA, 38 bp, Artificial Sequence
  Probe
gcagcggagccttcgatagctcagttggtagagcggag

SEQ ID NO: 20600 - DNA, 41 bp, Artificial Sequence
  Probe
gcagcggagccttcgatagctcagttggtagagcggaggac

SEQ ID NO: 20601 - DNA, 44 bp, Artificial Sequence
  Probe
gcagcggagccttcgatagctcagttggtagagcggaggactgt

SEQ ID NO: 20602 - DNA, 45 bp, Artificial Sequence
  Probe
gcagcggagccttcgatagctcagttggtagagcggaggactgta

SEQ ID NO: 20603 - DNA, 46 bp, Artificial Sequence
  Probe
gcagcggagccttcgatagctcagttggtagagcggaggactgtag

SEQ ID NO: 20604 - DNA, 50 bp, Artificial Sequence
  Probe
gcagcggagccttcgatagctcagttggtagagcggaggactgtagtgga

SEQ ID NO: 20605 - DNA, 22 bp, Artificial Sequence
  Probe
gcagctgggtagcgtggccgag

SEQ ID NO: 20606 - DNA, 23 bp, Artificial Sequence
  Probe
gcagctgggtagcgtggccgagc

SEQ ID NO: 20607 - DNA, 24 bp, Artificial Sequence
  Probe
gcagctgggtagcgtggccgagcg

SEQ ID NO: 20608 - DNA, 25 bp, Artificial Sequence
  Probe
gcagctgggtagcgtggccgagcgg

SEQ ID NO: 20609 - DNA, 26 bp, Artificial Sequence
  Probe
gcagctgggtagcgtggccgagcggt

SEQ ID NO: 20610 - DNA, 28 bp, Artificial Sequence
  Probe
gcagctgggtagcgtggccgagcggtct

SEQ ID NO: 20611 - DNA, 29 bp, Artificial Sequence
  Probe
gcagctgggtagcgtggccgagcggtcta

SEQ ID NO: 20612 - DNA, 33 bp, Artificial Sequence
  Probe
gcagcttcaaacctgccggggcttctcccgcct

SEQ ID NO: 20613 - DNA, 41 bp, Artificial Sequence
  Probe
gcagtctcccctggaggcgtgggttcgaatcccactcctga

SEQ ID NO: 20614 - DNA, 32 bp, Artificial Sequence
  Probe
gcagttgacccgggttcgattcccggccaacg

SEQ ID NO: 20615 - DNA, 17 bp, Artificial Sequence
  Probe
gcataaaacttaaaact

SEQ ID NO: 20616 - DNA, 28 bp, Artificial Sequence
  Probe
gcataaaacttaaaactttacagtcaga

SEQ ID NO: 20617 - DNA, 33 bp, Artificial Sequence; identical to SEQ ID NO: 5847
  Probe

SEQ ID NO: 20618 - DNA, 44 bp, Artificial Sequence; identical to SEQ ID NO: 999
  Probe

SEQ ID NO: 20619 - DNA, 50 bp, Artificial Sequence; identical to SEQ ID NO: 5851
  Probe

SEQ ID NO: 20620 - DNA, 27 bp, Artificial Sequence
  Probe
gcatagctgccttccaagcagttgacc

SEQ ID NO: 20621 - DNA, 29 bp, Artificial Sequence
  Probe
gcatagctgccttccaagcagttgacccg

SEQ ID NO: 20622 - DNA, 30 bp, Artificial Sequence
  Probe
gcatagctgccttccaagcagttgacccgg

SEQ ID NO: 20623 - DNA, 32 bp, Artificial Sequence
  Probe
gcatagctgccttccaagcagttgacccgggt

SEQ ID NO: 20624 - DNA, 33 bp, Artificial Sequence; identical to SEQ ID NO: 5854
  Probe

SEQ ID NO: 20625 - DNA, 27 bp, Artificial Sequence
  Probe
gcataggtggttcagtggtagaattct

SEQ ID NO: 20626 - DNA, 31 bp, Artificial Sequence; identical to SEQ ID NO: 5857
  Probe

SEQ ID NO: 20627 - DNA, 32 bp, Artificial Sequence; identical to SEQ ID NO: 5858
  Probe

SEQ ID NO: 20628 - DNA, 33 bp, Artificial Sequence; identical to SEQ ID NO: 5859
  Probe

SEQ ID NO: 20629 - DNA, 34 bp, Artificial Sequence
  Probe
gcataggtggttcagtggtagaattcttgcctgc

SEQ ID NO: 20630 - DNA, 35 bp, Artificial Sequence
  Probe
gcataggtggttcagtggtagaattcttgcctgcc

SEQ ID NO: 20631 - DNA, 33 bp, Artificial Sequence
  Probe
gcatctgtttccgtagtgtagtggttatcacgt

SEQ ID NO: 20632 - DNA, 34 bp, Artificial Sequence
  Probe
gcatctgtttccgtagtgtagtggttatcacgtt

SEQ ID NO: 20633 - DNA, 29 bp, Artificial Sequence
  Probe
gcatgaggtcccgggttcgatccccagca

SEQ ID NO: 20634 - DNA, 31 bp, Artificial Sequence
  Probe
gcatgaggtcccgggttcgatccccagcatc

SEQ ID NO: 20635 - DNA, 32 bp, Artificial Sequence
  Probe
gcatgaggtcccgggttcgatccccagcatct

SEQ ID NO: 20636 - DNA, 33 bp, Artificial Sequence
  Probe
gcatgaggtcccgggttcgatccccagcatctc

SEQ ID NO: 20637 - DNA, 36 bp, Artificial Sequence
  Probe
gcatgaggtcccgggttcgatccccagcatctccag

SEQ ID NO: 20638 - DNA, 37 bp, Artificial Sequence
  Probe
gcatgaggtcccgggttcgatccccagcatctccagt

SEQ ID NO: 20639 - DNA, 38 bp, Artificial Sequence; identical to SEQ ID NO: 5861
  Probe

SEQ ID NO: 20640 - DNA, 25 bp, Artificial Sequence
  Probe
gcatgggtgattcagtggtagaatt

SEQ ID NO: 20641 - DNA, 27 bp, Artificial Sequence
  Probe
gcatgggtgattcagtggtagaatttt

SEQ ID NO: 20642 - DNA, 19 bp, Artificial Sequence
  Probe
gcatgggtggttcagtggt

SEQ ID NO: 20643 - DNA, 20 bp, Artificial Sequence
  Probe
gcatgggtggttcagtggta

SEQ ID NO: 20644 - DNA, 21 bp, Artificial Sequence
  Probe
gcatgggtggttcagtggtag

SEQ ID NO: 20645 - DNA, 22 bp, Artificial Sequence
  Probe
gcatgggtggttcagtggtaga

SEQ ID NO: 20646 - DNA, 23 bp, Artificial Sequence
  Probe
gcatgggtggttcagtggtagaa

SEQ ID NO: 20647 - DNA, 24 bp, Artificial Sequence
  Probe
gcatgggtggttcagtggtagaat

SEQ ID NO: 20648 - DNA, 25 bp, Artificial Sequence
  Probe
gcatgggtggttcagtggtagaatt

SEQ ID NO: 20649 - DNA, 26 bp, Artificial Sequence
  Probe
gcatgggtggttcagtggtagaattc

SEQ ID NO: 20650 - DNA, 27 bp, Artificial Sequence
  Probe
gcatgggtggttcagtggtagaattct

SEQ ID NO: 20651 - DNA, 37 bp, Artificial Sequence; identical to SEQ ID NO: 5870
  Probe

SEQ ID NO: 20652 - DNA, 42 bp, Artificial Sequence
  Probe
gcatgggtggttcagtggtagaattctcgcctgccacgcggg

SEQ ID NO: 20653 - DNA, 43 bp, Artificial Sequence; identical to SEQ ID NO: 5873
  Probe

SEQ ID NO: 20654 - DNA, 46 bp, Artificial Sequence
  Probe
gcatgggtggttcagtggtagaattctcgcctgccacgcgggaggc

SEQ ID NO: 20655 - DNA, 16 bp, Artificial Sequence
  Probe
gcatgtctttgctttt

SEQ ID NO: 20656 - DNA, 23 bp, Artificial Sequence
  Probe
gcattaaccttttaagttaaaga

SEQ ID NO: 20657 - DNA, 25 bp, Artificial Sequence
  Probe
gcattaaccttttaagttaaagatt

SEQ ID NO: 20658 - DNA, 30 bp, Artificial Sequence
  Probe
gcattaaccttttaagttaaagattaagag

SEQ ID NO: 20659 - DNA, 31 bp, Artificial Sequence
  Probe
gcattaaccttttaagttaaagattaagaga

SEQ ID NO: 20660 - DNA, 32 bp, Artificial Sequence
  Probe
gcattaaccttttaagttaaagattaagagaa

SEQ ID NO: 20661 - DNA, 36 bp, Artificial Sequence
  Probe
gcattaaccttttaagttaaagattaagagaaccaa

SEQ ID NO: 20662 - DNA, 38 bp, Artificial Sequence
  Probe
gcattaaccttttaagttaaagattaagagaaccaaca

SEQ ID NO: 20663 - DNA, 40 bp, Artificial Sequence; identical to SEQ ID NO: 5880
  Probe

SEQ ID NO: 20664 - DNA, 50 bp, Artificial Sequence; identical to SEQ ID NO: 5882
  Probe

SEQ ID NO: 20665 - DNA, 27 bp, Artificial Sequence
  Probe
gcattggtggttcaatggtagaattct

SEQ ID NO: 20666 - DNA, 29 bp, Artificial Sequence
  Probe
gcattggtggttcaatggtagaattctcg

SEQ ID NO: 20667 - DNA, 31 bp, Artificial Sequence; identical to SEQ ID NO: 5884
  Probe

SEQ ID NO: 20668 - DNA, 32 bp, Artificial Sequence; identical to SEQ ID NO: 1013
  Probe

SEQ ID NO: 20669 - DNA, 33 bp, Artificial Sequence; identical to SEQ ID NO: 5885
  Probe

SEQ ID NO: 20670 - DNA, 34 bp, Artificial Sequence
  Probe
gcattggtggttcaatggtagaattctcgcctcc

SEQ ID NO: 20671 - DNA, 35 bp, Artificial Sequence
  Probe
gcattggtggttcaatggtagaattctcgcctccc

SEQ ID NO: 20672 - DNA, 16 bp, Artificial Sequence
  Probe
gcattggtggttcagt

SEQ ID NO: 20673 - DNA, 17 bp, Artificial Sequence
  Probe
gcattggtggttcagtg

SEQ ID NO: 20674 - DNA, 18 bp, Artificial Sequence
  Probe
gcattggtggttcagtgg

SEQ ID NO: 20675 - DNA, 19 bp, Artificial Sequence
  Probe
gcattggtggttcagtggt

SEQ ID NO: 20676 - DNA, 20 bp, Artificial Sequence
  Probe
gcattggtggttcagtggta

SEQ ID NO: 20677 - DNA, 21 bp, Artificial Sequence
  Probe
gcattggtggttcagtggtag

SEQ ID NO: 20678 - DNA, 22 bp, Artificial Sequence
  Probe
gcattggtggttcagtggtaga

SEQ ID NO: 20679 - DNA, 23 bp, Artificial Sequence
  Probe
gcattggtggttcagtggtagaa

SEQ ID NO: 20680 - DNA, 24 bp, Artificial Sequence
  Probe
gcattggtggttcagtggtagaat

SEQ ID NO: 20681 - DNA, 25 bp, Artificial Sequence
  Probe
gcattggtggttcagtggtagaatt

SEQ ID NO: 20682 - DNA, 26 bp, Artificial Sequence
  Probe
gcattggtggttcagtggtagaattc

SEQ ID NO: 20683 - DNA, 27 bp, Artificial Sequence
  Probe
gcattggtggttcagtggtagaattct

SEQ ID NO: 20684 - DNA, 28 bp, Artificial Sequence
  Probe
gcattggtggttcagtggtagaattctc

SEQ ID NO: 20685 - DNA, 29 bp, Artificial Sequence
  Probe
gcattggtggttcagtggtagaattctcg

SEQ ID NO: 20686 - DNA, 30 bp, Artificial Sequence; identical to SEQ ID NO: 5900
  Probe

SEQ ID NO: 20687 - DNA, 31 bp, Artificial Sequence; identical to SEQ ID NO: 5901
  Probe

SEQ ID NO: 20688 - DNA, 32 bp, Artificial Sequence; identical to SEQ ID NO: 5902
  Probe

SEQ ID NO: 20689 - DNA, 33 bp, Artificial Sequence; identical to SEQ ID NO: 5903
  Probe

SEQ ID NO: 20690 - DNA, 34 bp, Artificial Sequence; identical to SEQ ID NO: 5904
  Probe

SEQ ID NO: 20691 - DNA, 35 bp, Artificial Sequence; identical to SEQ ID NO: 5905
  Probe

SEQ ID NO: 20692 - DNA, 36 bp, Artificial Sequence; identical to SEQ ID NO: 5906
  Probe

SEQ ID NO: 20693 - DNA, 33 bp, Artificial Sequence; identical to SEQ ID NO: 5908
  Probe

SEQ ID NO: 20694 - DNA, 34 bp, Artificial Sequence; identical to SEQ ID NO: 5909
  Probe

SEQ ID NO: 20695 - DNA, 35 bp, Artificial Sequence; identical to SEQ ID NO: 5910
  Probe

SEQ ID NO: 20696 - DNA, 36 bp, Artificial Sequence; identical to SEQ ID NO: 5911
  Probe

SEQ ID NO: 20697 - DNA, 37 bp, Artificial Sequence; identical to SEQ ID NO: 5912
  Probe

SEQ ID NO: 20698 - DNA, 41 bp, Artificial Sequence; identical to SEQ ID NO: 1017
  Probe

SEQ ID NO: 20699 - DNA, 42 bp, Artificial Sequence; identical to SEQ ID NO: 5913
  Probe

SEQ ID NO: 20700 - DNA, 43 bp, Artificial Sequence; identical to SEQ ID NO: 5914
  Probe

SEQ ID NO: 20701 - DNA, 45 bp, Artificial Sequence; identical to SEQ ID NO: 5915
  Probe

SEQ ID NO: 20702 - DNA, 46 bp, Artificial Sequence; identical to SEQ ID NO: 5916
  Probe

SEQ ID NO: 20703 - DNA, 48 bp, Artificial Sequence; identical to SEQ ID NO: 5918
  Probe

SEQ ID NO: 20704 - DNA, 37 bp, Artificial Sequence; identical to SEQ ID NO: 5919
  Probe

SEQ ID NO: 20705 - DNA, 38 bp, Artificial Sequence
  Probe
gcattggtggttcagtggtagaattctcgcctgccatg

SEQ ID NO: 20706 - DNA, 39 bp, Artificial Sequence
  Probe
gcattggtggttcagtggtagaattctcgcctgccatgc

SEQ ID NO: 20707 - DNA, 46 bp, Artificial Sequence
  Probe
gcattggtggttcagtggtagaattctcgcctgccatgcgggcggc

SEQ ID NO: 20708 - DNA, 50 bp, Artificial Sequence; identical to SEQ ID NO: 5921
  Probe

SEQ ID NO: 20709 - DNA, 16 bp, Artificial Sequence
  Probe
gccaaggtcgcgggtt

SEQ ID NO: 20710 - DNA, 17 bp, Artificial Sequence
  Probe
gccaaggtcgcgggttc

SEQ ID NO: 20711 - DNA, 27 bp, Artificial Sequence
  Probe
gccaaggtcgcgggttcgatccccgta

SEQ ID NO: 20712 - DNA, 32 bp, Artificial Sequence
  Probe
gccaaggtcgcgggttcgatccccgtacgggc

SEQ ID NO: 20713 - DNA, 37 bp, Artificial Sequence; identical to SEQ ID NO: 5922
  Probe

SEQ ID NO: 20714 - DNA, 37 bp, Artificial Sequence; identical to SEQ ID NO: 5923
  Probe

SEQ ID NO: 20715 - DNA, 37 bp, Artificial Sequence
  Probe
gccaaggtcgcgggttcgatccccgtacgggccagga

SEQ ID NO: 20716 - DNA, 37 bp, Artificial Sequence
  Probe
gccaaggtcgcgggttcgatccccgtacgggccaggc

SEQ ID NO: 20717 - DNA, 22 bp, Artificial Sequence
  Probe
gccaatgcacgagtacagtttt

SEQ ID NO: 20718 - DNA, 25 bp, Artificial Sequence
  Probe
gccacacctcagaaggtctcacttt

SEQ ID NO: 20719 - DNA, 26 bp, Artificial Sequence
  Probe
gccacacctcagaaggtctcactttt

SEQ ID NO: 20720 - DNA, 39 bp, Artificial Sequence; identical to SEQ ID NO: 5925
  Probe

SEQ ID NO: 20721 - DNA, 42 bp, Artificial Sequence; identical to SEQ ID NO: 5926
  Probe

SEQ ID NO: 20722 - DNA, 42 bp, Artificial Sequence
  Probe
gccacgcgggaggcccgggttcgattcccggccaatgcagca

SEQ ID NO: 20723 - DNA, 42 bp, Artificial Sequence; identical to SEQ ID NO: 5929
  Probe

SEQ ID NO: 20724 - DNA, 22 bp, Artificial Sequence
  Probe
gccacgcgggaggcccgggttt

SEQ ID NO: 20725 - DNA, 23 bp, Artificial Sequence
  Probe
gccacgcgggaggcccgggtttg

SEQ ID NO: 20726 - DNA, 36 bp, Artificial Sequence
  Probe
gccagagggggtatagctcagtggtagagcatttga

SEQ ID NO: 20727 - DNA, 38 bp, Artificial Sequence
  Probe
gccagagggggtatagctcagtggtagagcatttgact

SEQ ID NO: 20728 - DNA, 16 bp, Artificial Sequence
  Probe
gccagggattgtgggt

SEQ ID NO: 20729 - DNA, 17 bp, Artificial Sequence
  Probe
gccagggattgtgggtt

SEQ ID NO: 20730 - DNA, 38 bp, Artificial Sequence
  Probe
gccagggattgtgggttcgagtcccacccggggtaaag

SEQ ID NO: 20731 - DNA, 38 bp, Artificial Sequence
  Probe
gccagggattgtgggttcgagtcccacctggggtgtcg

SEQ ID NO: 20732 - DNA, 28 bp, Artificial Sequence
  Probe
gccagggattgtgggttcgagtcccatc

SEQ ID NO: 20733 - DNA, 31 bp, Artificial Sequence
  Probe
gccagggattgtgggttcgagtcccatctgg

SEQ ID NO: 20734 - DNA, 33 bp, Artificial Sequence
  Probe
gccagggattgtgggttcgagtcccatctgggg

SEQ ID NO: 20735 - DNA, 35 bp, Artificial Sequence
  Probe
gccagggattgtgggttcgagtcccatctggggtg

SEQ ID NO: 20736 - DNA, 37 bp, Artificial Sequence
  Probe
gccagggattgtgggttcgagtcccatctggggtggc

SEQ ID NO: 20737 - DNA, 38 bp, Artificial Sequence; identical to SEQ ID NO: 5932
  Probe

SEQ ID NO: 20738 - DNA, 38 bp, Artificial Sequence
  Probe
gccatcggtgcatgggtggttcagtggtagaattctcg

SEQ ID NO: 20739 - DNA, 16 bp, Artificial Sequence
  Probe
gcccacccagggacgc

SEQ ID NO: 20740 - DNA, 17 bp, Artificial Sequence
  Probe
gcccacccagggacgcc

SEQ ID NO: 20741 - DNA, 18 bp, Artificial Sequence
  Probe
gcccacccagggacgcct

SEQ ID NO: 20742 - DNA, 27 bp, Artificial Sequence
  Probe
gcccacccagggacgcgtggtgacttt

SEQ ID NO: 20743 - DNA, 28 bp, Artificial Sequence
  Probe
gcccacccagggacgcgtggtgactttt

SEQ ID NO: 20744 - DNA, 26 bp, Artificial Sequence
  Probe
gcccagctagctcagtcggtagagca

SEQ ID NO: 20745 - DNA, 31 bp, Artificial Sequence
  Probe
gcccagctagctcagtcggtagagcataaga

SEQ ID NO: 20746 - DNA, 32 bp, Artificial Sequence; identical to SEQ ID NO: 5934
  Probe

SEQ ID NO: 20747 - DNA, 33 bp, Artificial Sequence; identical to SEQ ID NO: 5935
  Probe

SEQ ID NO: 20748 - DNA, 34 bp, Artificial Sequence
  Probe
gcccagctagctcagtcggtagagcataagactc

SEQ ID NO: 20749 - DNA, 28 bp, Artificial Sequence
  Probe
gcccagctagctcagtcggtagagcatg

SEQ ID NO: 20750 - DNA, 29 bp, Artificial Sequence
  Probe
gcccagctagctcagtcggtagagcatga

SEQ ID NO: 20751 - DNA, 30 bp, Artificial Sequence; identical to SEQ ID NO: 10349
  Probe

SEQ ID NO: 20752 - DNA, 31 bp, Artificial Sequence; identical to SEQ ID NO: 5936
  Probe

SEQ ID NO: 20753 - DNA, 32 bp, Artificial Sequence; identical to SEQ ID NO: 5937
  Probe

SEQ ID NO: 20754 - DNA, 33 bp, Artificial Sequence; identical to SEQ ID NO: 5938
  Probe

SEQ ID NO: 20755 - DNA, 34 bp, Artificial Sequence; identical to SEQ ID NO: 5939
  Probe

SEQ ID NO: 20756 - DNA, 36 bp, Artificial Sequence; identical to SEQ ID NO: 5940
  Probe

SEQ ID NO: 20757 - DNA, 23 bp, Artificial Sequence
  Probe
gcccagtagaactgacagtacct

SEQ ID NO: 20758 - DNA, 46 bp, Artificial Sequence; identical to SEQ ID NO: 5942
  Probe

SEQ ID NO: 20759 - DNA, 43 bp, Artificial Sequence; identical to SEQ ID NO: 5948
  Probe

SEQ ID NO: 20760 - DNA, 44 bp, Artificial Sequence; identical to SEQ ID NO: 5949
  Probe

SEQ ID NO: 20761 - DNA, 20 bp, Artificial Sequence
  Probe
gccccaaacccactccacct

SEQ ID NO: 20762 - DNA, 26 bp, Artificial Sequence
  Probe
gccccaactaaatactaccgtatggc

SEQ ID NO: 20763 - DNA, 30 bp, Artificial Sequence
  Probe
gccccacgttgggcgcgggttgtaactttt

SEQ ID NO: 20764 - DNA, 16 bp, Artificial Sequence
  Probe
gccccagtggaaccac

SEQ ID NO: 20765 - DNA, 20 bp, Artificial Sequence
  Probe
gccccagtggcctaatggat

SEQ ID NO: 20766 - DNA, 29 bp, Artificial Sequence
  Probe
gccccagtggcctaatggataaggcattg

SEQ ID NO: 20767 - DNA, 30 bp, Artificial Sequence; identical to SEQ ID NO: 10357
  Probe

SEQ ID NO: 20768 - DNA, 31 bp, Artificial Sequence
  Probe
gccccagtggcctaatggataaggcattggc

SEQ ID NO: 20769 - DNA, 33 bp, Artificial Sequence
  Probe
gccccagtggcctaatggataaggcattggcct

SEQ ID NO: 20770 - DNA, 34 bp, Artificial Sequence
  Probe
gccccagtggcctaatggataaggcattggcctc

SEQ ID NO: 20771 - DNA, 35 bp, Artificial Sequence
  Probe
gccccagtggcctaatggataaggcattggcctcc

SEQ ID NO: 20772 - DNA, 41 bp, Artificial Sequence
  Probe
gccccagtggcctaatggataaggcattggcctcctaagcc

SEQ ID NO: 20773 - DNA, 15 bp, Artificial Sequence
  Probe
gcccccatgtctaac

SEQ ID NO: 20774 - DNA, 16 bp, Artificial Sequence
  Probe
gcccccatgtctaaca

SEQ ID NO: 20775 - DNA, 17 bp, Artificial Sequence
  Probe
gcccccatgtctaacaa

SEQ ID NO: 20776 - DNA, 18 bp, Artificial Sequence
  Probe
gcccccatgtctaacaac

SEQ ID NO: 20777 - DNA, 19 bp, Artificial Sequence
  Probe
gcccccatgtctaacaaca

SEQ ID NO: 20778 - DNA, 20 bp, Artificial Sequence
  Probe
gcccccatgtctaacaacat

SEQ ID NO: 20779 - DNA, 21 bp, Artificial Sequence
  Probe
gcccccatgtctaacaacatg

SEQ ID NO: 20780 - DNA, 22 bp, Artificial Sequence
  Probe
gcccccatgtctaacaacatgg

SEQ ID NO: 20781 - DNA, 23 bp, Artificial Sequence
  Probe
gcccccatgtctaacaacatggc

SEQ ID NO: 20782 - DNA, 24 bp, Artificial Sequence
  Probe
gcccccatgtctaacaacatggct

SEQ ID NO: 20783 - DNA, 25 bp, Artificial Sequence
  Probe
gcccccatgtctaacaacatggctt

SEQ ID NO: 20784 - DNA, 26 bp, Artificial Sequence
  Probe
gcccccatgtctaacaacatggcttt

SEQ ID NO: 20785 - DNA, 27 bp, Artificial Sequence
  Probe
gcccccatgtctaacaacatggctttc

SEQ ID NO: 20786 - DNA, 28 bp, Artificial Sequence
  Probe
gcccccatgtctaacaacatggctttct

SEQ ID NO: 20787 - DNA, 29 bp, Artificial Sequence
  Probe
gcccccatgtctaacaacatggctttctc

SEQ ID NO: 20788 - DNA, 30 bp, Artificial Sequence; identical to SEQ ID NO: 5966
  Probe

SEQ ID NO: 20789 - DNA, 31 bp, Artificial Sequence; identical to SEQ ID NO: 5967
  Probe

SEQ ID NO: 20790 - DNA, 32 bp, Artificial Sequence; identical to SEQ ID NO: 5968
  Probe

SEQ ID NO: 20791 - DNA, 33 bp, Artificial Sequence; identical to SEQ ID NO: 5969
  Probe

SEQ ID NO: 20792 - DNA, 34 bp, Artificial Sequence; identical to SEQ ID NO: 5970
  Probe

SEQ ID NO: 20793 - DNA, 35 bp, Artificial Sequence; identical to SEQ ID NO: 5971
  Probe

SEQ ID NO: 20794 - DNA, 36 bp, Artificial Sequence; identical to SEQ ID NO: 5972
  Probe

SEQ ID NO: 20795 - DNA, 37 bp, Artificial Sequence; identical to SEQ ID NO: 5973
  Probe

SEQ ID NO: 20796 - DNA, 38 bp, Artificial Sequence; identical to SEQ ID NO: 5974
  Probe

SEQ ID NO: 20797 - DNA, 39 bp, Artificial Sequence; identical to SEQ ID NO: 5975
  Probe

SEQ ID NO: 20798 - DNA, 40 bp, Artificial Sequence; identical to SEQ ID NO: 5976
  Probe

SEQ ID NO: 20799 - DNA, 24 bp, Artificial Sequence
  Probe
gccccgggttcaatccccggcacc

SEQ ID NO: 20800 - DNA, 30 bp, Artificial Sequence
  Probe
gccccgggttcaatccccggcacctccagc

SEQ ID NO: 20801 - DNA, 31 bp, Artificial Sequence
  Probe
gccccgggttcaatccccggcatctccagac

SEQ ID NO: 20802 - DNA, 22 bp, Artificial Sequence
  Probe
gccccgggttcgatccccggca

SEQ ID NO: 20803 - DNA, 26 bp, Artificial Sequence
  Probe
gccccgggttcgatccccggcatctc

SEQ ID NO: 20804 - DNA, 30 bp, Artificial Sequence
  Probe
gccccgggttcgatccccggcatctccatt

SEQ ID NO: 20805 - DNA, 31 bp, Artificial Sequence; identical to SEQ ID NO: 5979
  Probe

SEQ ID NO: 20806 - DNA, 28 bp, Artificial Sequence
  Probe
gcccctcatttacataaatattatacta

SEQ ID NO: 20807 - DNA, 31 bp, Artificial Sequence
  Probe
gcccgactacctcagtcggtggagcatggga

SEQ ID NO: 20808 - DNA, 33 bp, Artificial Sequence; identical to SEQ ID NO: 5982
  Probe

SEQ ID NO: 20809 - DNA, 16 bp, Artificial Sequence
  Probe
gcccgcatcctccact

SEQ ID NO: 20810 - DNA, 17 bp, Artificial Sequence
  Probe
gcccgcatcctccactc

SEQ ID NO: 20811 - DNA, 33 bp, Artificial Sequence; identical to SEQ ID NO: 5983
  Probe

SEQ ID NO: 20812 - DNA, 34 bp, Artificial Sequence
  Probe
gcccggagagctcagtgggtagagcatcagactt

SEQ ID NO: 20813 - DNA, 16 bp, Artificial Sequence
  Probe
gcccggatagctcagt

SEQ ID NO: 20814 - DNA, 17 bp, Artificial Sequence
  Probe
gcccggatagctcagtc

SEQ ID NO: 20815 - DNA, 38 bp, Artificial Sequence; identical to SEQ ID NO: 5987
  Probe

SEQ ID NO: 20816 - DNA, 39 bp, Artificial Sequence; identical to SEQ ID NO: 5988
  Probe

SEQ ID NO: 20817 - DNA, 41 bp, Artificial Sequence; identical to SEQ ID NO: 5989
  Probe

SEQ ID NO: 20818 - DNA, 31 bp, Artificial Sequence
  Probe
gcccggatagttcagttggtagagcatcaga

SEQ ID NO: 20819 - DNA, 32 bp, Artificial Sequence; identical to SEQ ID NO: 5990
  Probe

SEQ ID NO: 20820 - DNA, 33 bp, Artificial Sequence; identical to SEQ ID NO: 5991
  Probe

SEQ ID NO: 20821 - DNA, 34 bp, Artificial Sequence; identical to SEQ ID NO: 5992
  Probe

SEQ ID NO: 20822 - DNA, 28 bp, Artificial Sequence
  Probe
gcccggctagctcagtcgatagagcatg

SEQ ID NO: 20823 - DNA, 29 bp, Artificial Sequence
  Probe
gcccggctagctcagtcgatagagcatga

SEQ ID NO: 20824 - DNA, 30 bp, Artificial Sequence
  Probe
gcccggctagctcagtcgatagagcatgag

SEQ ID NO: 20825 - DNA, 32 bp, Artificial Sequence; identical to SEQ ID NO: 5994
  Probe

SEQ ID NO: 20826 - DNA, 34 bp, Artificial Sequence; identical to SEQ ID NO: 5995
  Probe

SEQ ID NO: 20827 - DNA, 36 bp, Artificial Sequence; identical to SEQ ID NO: 5996
  Probe

SEQ ID NO: 20828 - DNA, 19 bp, Artificial Sequence
  Probe
gcccggctagctcagtcgg

SEQ ID NO: 20829 - DNA, 20 bp, Artificial Sequence
  Probe
gcccggctagctcagtcggt

SEQ ID NO: 20830 - DNA, 21 bp, Artificial Sequence
  Probe
gcccggctagctcagtcggta

SEQ ID NO: 20831 - DNA, 37 bp, Artificial Sequence; identical to SEQ ID NO: 1069
  Probe

SEQ ID NO: 20832 - DNA, 38 bp, Artificial Sequence
  Probe
gcccggctagctcagtcggtagagcatgagacccttaa

SEQ ID NO: 20833 - DNA, 42 bp, Artificial Sequence; identical to SEQ ID NO: 1077
  Probe

SEQ ID NO: 20834 - DNA, 43 bp, Artificial Sequence
  Probe
gcccggctagctcagtcggtagagcatgagactcttaatctca

SEQ ID NO: 20835 - DNA, 43 bp, Artificial Sequence; identical to SEQ ID NO: 6003
  Probe

SEQ ID NO: 20836 - DNA, 46 bp, Artificial Sequence; identical to SEQ ID NO: 6004
  Probe

SEQ ID NO: 20837 - DNA, 48 bp, Artificial Sequence; identical to SEQ ID NO: 6005
  Probe

SEQ ID NO: 20838 - DNA, 50 bp, Artificial Sequence; identical to SEQ ID NO: 6007
  Probe

SEQ ID NO: 20839 - DNA, 30 bp, Artificial Sequence
  Probe
gcccgggttcgactcccggtatgggaacaa

SEQ ID NO: 20840 - DNA, 41 bp, Artificial Sequence
  Probe
gcccgggttcgactcccggtatgggaacaaaagtggctttt

SEQ ID NO: 20841 - DNA, 30 bp, Artificial Sequence
  Probe
gcccgggttcgattcccggtcagggaattg

SEQ ID NO: 20842 - DNA, 30 bp, Artificial Sequence
  Probe
gcccgggttcgattcccggtcatggaacca

SEQ ID NO: 20843 - DNA, 17 bp, Artificial Sequence
  Probe
gcccggtaatcgcataa

SEQ ID NO: 20844 - DNA, 23 bp, Artificial Sequence
  Probe
gcccggtaatcgcataaaactta

SEQ ID NO: 20845 - DNA, 28 bp, Artificial Sequence
  Probe
gcccggtaatcgcataaaacttaaaact

SEQ ID NO: 20846 - DNA, 33 bp, Artificial Sequence
  Probe
gcccggtaatcgcataaaacttaaaactttaca

SEQ ID NO: 20847 - DNA, 36 bp, Artificial Sequence
  Probe
gcccggtaatcgcataaaacttaaaactttacagtc

SEQ ID NO: 20848 - DNA, 37 bp, Artificial Sequence; identical to SEQ ID NO: 1093
  Probe

SEQ ID NO: 20849 - DNA, 34 bp, Artificial Sequence
  Probe
gcccgtctctgtggcgcaatcggttagcgcgttc

SEQ ID NO: 20850 - DNA, 16 bp, Artificial Sequence
  Probe
gccctcagtaagttgc

SEQ ID NO: 20851 - DNA, 31 bp, Artificial Sequence; identical to SEQ ID NO: 6014
  Probe

SEQ ID NO: 20852 - DNA, 25 bp, Artificial Sequence
  Probe
gccctgggttcaatccccagcacct

SEQ ID NO: 20853 - DNA, 31 bp, Artificial Sequence
  Probe
gccctgggttcaatccccagcacctccatgt

SEQ ID NO: 20854 - DNA, 22 bp, Artificial Sequence
  Probe
gccgaaatagctcagttgggag

SEQ ID NO: 20855 - DNA, 23 bp, Artificial Sequence
  Probe
gccgaaatagctcagttgggaga

SEQ ID NO: 20856 - DNA, 25 bp, Artificial Sequence
  Probe
gccgaaatagctcagttgggagagc

SEQ ID NO: 20857 - DNA, 31 bp, Artificial Sequence
  Probe
gccgaggttgtgagttcgatcctcacctgga

SEQ ID NO: 20858 - DNA, 36 bp, Artificial Sequence
  Probe
gccgcagcccgggttcgattcccggtcatggaacca

SEQ ID NO: 20859 - DNA, 30 bp, Artificial Sequence
  Probe
gccgcgcattggtggttcagtggtagaatt

SEQ ID NO: 20860 - DNA, 33 bp, Artificial Sequence
  Probe
gccgcggcccgggttcgattcccggccagggaa

SEQ ID NO: 20861 - DNA, 36 bp, Artificial Sequence
  Probe
gccgcggcccgggttcgattcccggccagggaattg

SEQ ID NO: 20862 - DNA, 28 bp, Artificial Sequence
  Probe
gccgcggcccgggttcgattcccggtca

SEQ ID NO: 20863 - DNA, 31 bp, Artificial Sequence
  Probe
gccgcggcccgggttcgattcccggtcagga

SEQ ID NO: 20864 - DNA, 33 bp, Artificial Sequence
  Probe
gccgcggcccgggttcgattcccggtcaggaaa

SEQ ID NO: 20865 - DNA, 34 bp, Artificial Sequence; identical to SEQ ID NO: 6023
  Probe

SEQ ID NO: 20866 - DNA, 35 bp, Artificial Sequence
  Probe
gccgcggcccgggttcgattcccggtcagggaaag

SEQ ID NO: 20867 - DNA, 36 bp, Artificial Sequence
  Probe
gccgcggcccgggttcgattcccggtcagggaaaga

SEQ ID NO: 20868 - DNA, 34 bp, Artificial Sequence; identical to SEQ ID NO: 6024
  Probe

SEQ ID NO: 20869 - DNA, 35 bp, Artificial Sequence
  Probe
gccgcggcccgggttcgattcccggtcagggaagc

SEQ ID NO: 20870 - DNA, 36 bp, Artificial Sequence; identical to SEQ ID NO: 6025
  Probe

SEQ ID NO: 20871 - DNA, 35 bp, Artificial Sequence
  Probe
gccgcggcccgggttcgattcccggtcagggaagt

SEQ ID NO: 20872 - DNA, 36 bp, Artificial Sequence
  Probe
gccgcggcccgggttcgattcccggtcagggaagtc

SEQ ID NO: 20873 - DNA, 36 bp, Artificial Sequence; identical to SEQ ID NO: 6026
  Probe

SEQ ID NO: 20874 - DNA, 34 bp, Artificial Sequence; identical to SEQ ID NO: 6027
  Probe

SEQ ID NO: 20875 - DNA, 35 bp, Artificial Sequence
  Probe
gccgcggcccgggttcgattcccggtcagggaatg

SEQ ID NO: 20876 - DNA, 36 bp, Artificial Sequence
  Probe
gccgcggcccgggttcgattcccggtcagggaatga

SEQ ID NO: 20877 - DNA, 35 bp, Artificial Sequence
  Probe
gccgcggcccgggttcgattcccggtcagggaatt

SEQ ID NO: 20878 - DNA, 36 bp, Artificial Sequence; identical to SEQ ID NO: 6028
  Probe

SEQ ID NO: 20879 - DNA, 37 bp, Artificial Sequence
  Probe
gccgcggcccgggttcgattcccggtcagggaattgt

SEQ ID NO: 20880 - DNA, 23 bp, Artificial Sequence
  Probe
gccgctggtgtagtggtatcatg

SEQ ID NO: 20881 - DNA, 24 bp, Artificial Sequence
  Probe
gccgctggtgtagtggtatcatgc

SEQ ID NO: 20882 - DNA, 29 bp, Artificial Sequence
  Probe
gccgctggtgtagtggtatcatgcaagat

SEQ ID NO: 20883 - DNA, 38 bp, Artificial Sequence
  Probe
gccgctggtgtagtggtatcatgcaagattcccattct

SEQ ID NO: 20884 - DNA, 18 bp, Artificial Sequence
  Probe
gccgggtactttcgtatt

SEQ ID NO: 20885 - DNA, 20 bp, Artificial Sequence
  Probe
gccgggtactttcgtatttt

SEQ ID NO: 20886 - DNA, 21 bp, Artificial Sequence
  Probe
gccgggtactttcgtattttt

SEQ ID NO: 20887 - DNA, 22 bp, Artificial Sequence
  Probe
gccgggtactttcgtattttta

SEQ ID NO: 20888 - DNA, 30 bp, Artificial Sequence
  Probe
gccgggtactttcgtatttttaaatacaga

SEQ ID NO: 20889 - DNA, 16 bp, Artificial Sequence
  Probe
gccggtagtcgactcg

SEQ ID NO: 20890 - DNA, 33 bp, Artificial Sequence
  Probe
gccgtcgtcctcgttagtatagtggtgagtatc

SEQ ID NO: 20891 - DNA, 38 bp, Artificial Sequence
  Probe
gccgtctcccacatggtctagcggttaggattcctggt

SEQ ID NO: 20892 - DNA, 39 bp, Artificial Sequence
  Probe
gccgtctcccacatggtctagcggttaggattcctggtt

SEQ ID NO: 20893 - DNA, 40 bp, Artificial Sequence
  Probe
gccgtctcccacatggtctagcggttaggattcctggttt

SEQ ID NO: 20894 - DNA, 41 bp, Artificial Sequence
  Probe
gccgtctcccacatggtctagcggttaggattcctggtttt

SEQ ID NO: 20895 - DNA, 17 bp, Artificial Sequence
  Probe
gccgtgatcgtatagtg

SEQ ID NO: 20896 - DNA, 18 bp, Artificial Sequence
  Probe
gccgtgatcgtatagtgg

SEQ ID NO: 20897 - DNA, 19 bp, Artificial Sequence
  Probe
gccgtgatcgtatagtggt

SEQ ID NO: 20898 - DNA, 20 bp, Artificial Sequence
  Probe
gccgtgatcgtatagtggtt

SEQ ID NO: 20899 - DNA, 21 bp, Artificial Sequence
  Probe
gccgtgatcgtatagtggtta

SEQ ID NO: 20900 - DNA, 22 bp, Artificial Sequence
  Probe
gccgtgatcgtatagtggttag

SEQ ID NO: 20901 - DNA, 23 bp, Artificial Sequence
  Probe
gccgtgatcgtatagtggttagt

SEQ ID NO: 20902 - DNA, 24 bp, Artificial Sequence
  Probe
gccgtgatcgtatagtggttagta

SEQ ID NO: 20903 - DNA, 25 bp, Artificial Sequence
  Probe
gccgtgatcgtatagtggttagtac

SEQ ID NO: 20904 - DNA, 26 bp, Artificial Sequence
  Probe
gccgtgatcgtatagtggttagtact

SEQ ID NO: 20905 - DNA, 27 bp, Artificial Sequence
  Probe
gccgtgatcgtatagtggttagtactc

SEQ ID NO: 20906 - DNA, 28 bp, Artificial Sequence
  Probe
gccgtgatcgtatagtggttagtactct

SEQ ID NO: 20907 - DNA, 29 bp, Artificial Sequence
  Probe
gccgtgatcgtatagtggttagtactctg

SEQ ID NO: 20908 - DNA, 32 bp, Artificial Sequence; identical to SEQ ID NO: 1107
  Probe

SEQ ID NO: 20909 - DNA, 37 bp, Artificial Sequence; identical to SEQ ID NO: 6039
  Probe

SEQ ID NO: 20910 - DNA, 38 bp, Artificial Sequence
  Probe
gccgtgatcgtatagtggttagtactctgcgttgtggc

SEQ ID NO: 20911 - DNA, 40 bp, Artificial Sequence
  Probe
gccgtgatcgtatagtggttagtactctgcgttgtggccg

SEQ ID NO: 20912 - DNA, 41 bp, Artificial Sequence
  Probe
gccgtgatcgtatagtggttagtactctgcgttgtggccgc

SEQ ID NO: 20913 - DNA, 42 bp, Artificial Sequence
  Probe
gccgtgatcgtatagtggttagtactctgcgttgtggccgca

SEQ ID NO: 20914 - DNA, 50 bp, Artificial Sequence; identical to SEQ ID NO: 6040
  Probe

SEQ ID NO: 20915 - DNA, 26 bp, Artificial Sequence
  Probe
gcctaacacgcgaaaggtccccggtt

SEQ ID NO: 20916 - DNA, 36 bp, Artificial Sequence
  Probe
gcctaccggtttccgtagtgtagcggttatcacatt

SEQ ID NO: 20917 - DNA, 16 bp, Artificial Sequence
  Probe
gcctccttagcgcagt

SEQ ID NO: 20918 - DNA, 16 bp, Artificial Sequence
  Probe
gcctcgttagcgcagt

SEQ ID NO: 20919 - DNA, 19 bp, Artificial Sequence
  Probe
gcctcgttagcgcagtagg

SEQ ID NO: 20920 - DNA, 20 bp, Artificial Sequence
  Probe
gcctcgttagcgcagtaggc

SEQ ID NO: 20921 - DNA, 20 bp, Artificial Sequence
  Probe
gcctcgttagcgcagtaggt

SEQ ID NO: 20922 - DNA, 21 bp, Artificial Sequence
  Probe
gcctcgttagcgcagtaggta

SEQ ID NO: 20923 - DNA, 23 bp, Artificial Sequence
  Probe
gcctcgttagcgcagtaggtagc

SEQ ID NO: 20924 - DNA, 25 bp, Artificial Sequence
  Probe
gcctcgttagcgcagtaggtagcgc

SEQ ID NO: 20925 - DNA, 31 bp, Artificial Sequence; identical to SEQ ID NO: 6052
  Probe

SEQ ID NO: 20926 - DNA, 33 bp, Artificial Sequence; identical to SEQ ID NO: 1113
  Probe

SEQ ID NO: 20927 - DNA, 36 bp, Artificial Sequence
  Probe
gcctcgttagcgcagtaggtagcgcgtcagtctcat

SEQ ID NO: 20928 - DNA, 29 bp, Artificial Sequence
  Probe
gcctgatatccaaccttcagctatagggt

SEQ ID NO: 20929 - DNA, 20 bp, Artificial Sequence
  Probe
gcctgccacgcgggaggccc

SEQ ID NO: 20930 - DNA, 46 bp, Artificial Sequence
  Probe
gcctgccacgcgggaggcccgggttcgattcccggccaatgcaagt

SEQ ID NO: 20931 - DNA, 46 bp, Artificial Sequence
  Probe
gcctgccacgcgggaggcccgggttcgattcccggccaatgcacga

SEQ ID NO: 20932 - DNA, 46 bp, Artificial Sequence
  Probe
gcctgccacgcgggaggcccgggttcgattcccggccaatgcactt

SEQ ID NO: 20933 - DNA, 46 bp, Artificial Sequence
  Probe
gcctgccacgcgggaggcccgggttcgattcccggccaatgcagca

SEQ ID NO: 20934 - DNA, 40 bp, Artificial Sequence
  Probe
gcctgccacgcgggaggcccgggttcgattcccggcccat

SEQ ID NO: 20935 - DNA, 46 bp, Artificial Sequence
  Probe
gcctgccacgcgggaggcccgggttcgattcccggcccatgcagca

SEQ ID NO: 20936 - DNA, 50 bp, Artificial Sequence
  Probe
gcctgccacgcgggaggcccgggttcgattcccggcccatgcagcacgaa

SEQ ID NO: 20937 - DNA, 49 bp, Artificial Sequence
  Probe
gcctgccacgcgggaggcccgggttcgattcccggcccatgcagcacgc

SEQ ID NO: 20938 - DNA, 50 bp, Artificial Sequence
  Probe
gcctgccacgcgggaggcccgggttcgattcccggcccatgcagcacgcc

SEQ ID NO: 20939 - DNA, 26 bp, Artificial Sequence
  Probe
gcctgccacgcgggaggcccgggttt

SEQ ID NO: 20940 - DNA, 26 bp, Artificial Sequence
  Probe
gcctggatagctcagtcggtagagca

SEQ ID NO: 20941 - DNA, 29 bp, Artificial Sequence
  Probe
gcctggatagctcagtcggtagagcatca

SEQ ID NO: 20942 - DNA, 30 bp, Artificial Sequence; identical to SEQ ID NO: 10425
  Probe

SEQ ID NO: 20943 - DNA, 26 bp, Artificial Sequence
  Probe
gcctggatagctcagttggtagagca

SEQ ID NO: 20944 - DNA, 35 bp, Artificial Sequence; identical to SEQ ID NO: 1124
  Probe

SEQ ID NO: 20945 - DNA, 36 bp, Artificial Sequence; identical to SEQ ID NO: 1125
  Probe

SEQ ID NO: 20946 - DNA, 26 bp, Artificial Sequence
  Probe
gcctgggtagctcagtcggtagagca

SEQ ID NO: 20947 - DNA, 29 bp, Artificial Sequence
  Probe
gcctgggtagctcagtcggtagagcatca

SEQ ID NO: 20948 - DNA, 35 bp, Artificial Sequence; identical to SEQ ID NO: 1129
  Probe

SEQ ID NO: 20949 - DNA, 36 bp, Artificial Sequence; identical to SEQ ID NO: 1130
  Probe

SEQ ID NO: 20950 - DNA, 17 bp, Artificial Sequence
  Probe
gcctgtcacgcgggaga

SEQ ID NO: 20951 - DNA, 23 bp, Artificial Sequence
  Probe
gcctgtcacgcgggagaccgggg

SEQ ID NO: 20952 - DNA, 26 bp, Artificial Sequence
  Probe
gcctgtcacgcgggagaccggggttc

SEQ ID NO: 20953 - DNA, 28 bp, Artificial Sequence
  Probe
gcctgtcacgcgggagaccggggttcaa

SEQ ID NO: 20954 - DNA, 36 bp, Artificial Sequence
  Probe
gcctgtcacgcgggagaccggggttcaattccccga

SEQ ID NO: 20955 - DNA, 38 bp, Artificial Sequence
  Probe
gcctgtcacgcgggagaccggggttcaattccccgacg

SEQ ID NO: 20956 - DNA, 42 bp, Artificial Sequence
  Probe
gcctgtcacgcgggagaccggggttcaattccccgacgggga

SEQ ID NO: 20957 - DNA, 46 bp, Artificial Sequence; identical to SEQ ID NO: 6060
  Probe

SEQ ID NO: 20958 - DNA, 49 bp, Artificial Sequence; identical to SEQ ID NO: 6061
  Probe

SEQ ID NO: 20959 - DNA, 50 bp, Artificial Sequence
  Probe
gcctgtcacgcgggagaccggggttcaattccccgacggggaggtgtgta

SEQ ID NO: 20960 - DNA, 27 bp, Artificial Sequence
  Probe
gcctgtcacgcgggagaccggggttcg

SEQ ID NO: 20961 - DNA, 29 bp, Artificial Sequence
  Probe
gcctgtcacgcgggagaccggggttcgat

SEQ ID NO: 20962 - DNA, 30 bp, Artificial Sequence
  Probe
gcctgtcacgcgggagaccggggttcgatt

SEQ ID NO: 20963 - DNA, 31 bp, Artificial Sequence
  Probe
gcctgtcacgcgggagaccggggttcgattc

SEQ ID NO: 20964 - DNA, 46 bp, Artificial Sequence
  Probe
gcctgtcacgcgggagaccggggttcgattccccaacggggaggct

SEQ ID NO: 20965 - DNA, 37 bp, Artificial Sequence
  Probe
gcctgtcacgcgggagaccggggttcgattccccgac

SEQ ID NO: 20966 - DNA, 42 bp, Artificial Sequence
  Probe
gcctgtcacgcgggagaccggggttcgattccccgacgggga

SEQ ID NO: 20967 - DNA, 44 bp, Artificial Sequence; identical to SEQ ID NO: 6062
  Probe

SEQ ID NO: 20968 - DNA, 46 bp, Artificial Sequence
  Probe
gcctgtcacgcgggagaccggggttcgattccccgacggggagaaa

SEQ ID NO: 20969 - DNA, 50 bp, Artificial Sequence; identical to SEQ ID NO: 6063
  Probe

SEQ ID NO: 20970 - DNA, 46 bp, Artificial Sequence; identical to SEQ ID NO: 6064
  Probe

SEQ ID NO: 20971 - DNA, 44 bp, Artificial Sequence; identical to SEQ ID NO: 6065
  Probe

SEQ ID NO: 20972 - DNA, 46 bp, Artificial Sequence
  Probe
gcctgtcacgcgggagaccggggttcgattccccgacggggaggag

SEQ ID NO: 20973 - DNA, 50 bp, Artificial Sequence
  Probe
gcctgtcacgcgggagaccggggttcgattccccgacggggaggaggctt

SEQ ID NO: 20974 - DNA, 46 bp, Artificial Sequence; identical to SEQ ID NO: 6066
  Probe

SEQ ID NO: 20975 - DNA, 49 bp, Artificial Sequence; identical to SEQ ID NO: 6067
  Probe

SEQ ID NO: 20976 - DNA, 50 bp, Artificial Sequence; identical to SEQ ID NO: 6068
  Probe

SEQ ID NO: 20977 - DNA, 49 bp, Artificial Sequence; identical to SEQ ID NO: 6069
  Probe

SEQ ID NO: 20978 - DNA, 50 bp, Artificial Sequence
  Probe
gcctgtcacgcgggagaccggggttcgattccccgacggggaggcagccg

SEQ ID NO: 20979 - DNA, 46 bp, Artificial Sequence; identical to SEQ ID NO: 6070
  Probe

SEQ ID NO: 20980 - DNA, 50 bp, Artificial Sequence
  Probe
gcctgtcacgcgggagaccggggttcgattccccgacggggaggccaagt

SEQ ID NO: 20981 - DNA, 50 bp, Artificial Sequence
  Probe
gcctgtcacgcgggagaccggggttcgattccccgacggggaggccgggt

SEQ ID NO: 20982 - DNA, 21 bp, Artificial Sequence
  Probe
gcctgtgacttttgtcctttt

SEQ ID NO: 20983 - DNA, 22 bp, Artificial Sequence
  Probe
gcctgtgacttttgtccttttt

SEQ ID NO: 20984 - DNA, 21 bp, Artificial Sequence
  Probe
gccttaattttaataatcaac

SEQ ID NO: 20985 - DNA, 46 bp, Artificial Sequence
  Probe
gccttccaagcagttgacccgggttcgattcccggccaacgcaagt

SEQ ID NO: 20986 - DNA, 46 bp, Artificial Sequence
  Probe
gccttccaagcagttgacccgggttcgattcccggccaacgcagtg

SEQ ID NO: 20987 - DNA, 30 bp, Artificial Sequence
  Probe
gccttccttcgttggctctgcctgccaact

SEQ ID NO: 20988 - DNA, 33 bp, Artificial Sequence
  Probe
gccttgcgaaactactttcttgattcaggtgtt

SEQ ID NO: 20989 - DNA, 32 bp, Artificial Sequence; identical to SEQ ID NO: 6071
  Probe

SEQ ID NO: 20990 - DNA, 25 bp, Artificial Sequence
  Probe
gccttttttcccggcggcgggagaa

SEQ ID NO: 20991 - DNA, 27 bp, Artificial Sequence
  Probe
gccttttttcccggcggcgggagaagt

SEQ ID NO: 20992 - DNA, 28 bp, Artificial Sequence
  Probe
gcgaaactactttcttgattcaggtgtt

SEQ ID NO: 20993 - DNA, 29 bp, Artificial Sequence
  Probe
gcgaaactactttcttgattcaggtgttt

SEQ ID NO: 20994 - DNA, 31 bp, Artificial Sequence
  Probe
gcgaaaggtccccggttcgaaaccgggcgga

SEQ ID NO: 20995 - DNA, 32 bp, Artificial Sequence; identical to SEQ ID NO: 6077
  Probe

SEQ ID NO: 20996 - DNA, 33 bp, Artificial Sequence
  Probe
gcgaaaggtccccggttcgaaaccgggcggaaa

SEQ ID NO: 20997 - DNA, 38 bp, Artificial Sequence; identical to SEQ ID NO: 6078
  Probe

SEQ ID NO: 20998 - DNA, 38 bp, Artificial Sequence
  Probe
gcgaaaggtccccggttcgatcccgggcggaaacaggt

SEQ ID NO: 20999 - DNA, 33 bp, Artificial Sequence; identical to SEQ ID NO: 6080
  Probe

SEQ ID NO: 21000 - DNA, 16 bp, Artificial Sequence
  Probe
gcgagaggtcccgggt

SEQ ID NO: 21001 - DNA, 17 bp, Artificial Sequence
  Probe
gcgagaggtcccgggtt

SEQ ID NO: 21002 - DNA, 31 bp, Artificial Sequence
  Probe
gcgagaggtcccgggttcaaatcccggacga

SEQ ID NO: 21003 - DNA, 32 bp, Artificial Sequence
  Probe
gcgagaggtcccgggttcaaatcccggacgag

SEQ ID NO: 21004 - DNA, 33 bp, Artificial Sequence
  Probe
gcgagaggtcccgggttcaaatcccggacgagc

SEQ ID NO: 21005 - DNA, 34 bp, Artificial Sequence
  Probe
gcgagaggtcccgggttcaaatcccggacgagcc

SEQ ID NO: 21006 - DNA, 35 bp, Artificial Sequence
  Probe
gcgagaggtcccgggttcaaatcccggacgagccc

SEQ ID NO: 21007 - DNA, 38 bp, Artificial Sequence
  Probe
gcgagaggtcccgggttcaaatcccggacgagccccct

SEQ ID NO: 21008 - DNA, 25 bp, Artificial Sequence
  Probe
gcgaggcattggtggttcagtggta

SEQ ID NO: 21009 - DNA, 27 bp, Artificial Sequence
  Probe
gcgaggcattggtggttcagtggtaga

SEQ ID NO: 21010 - DNA, 28 bp, Artificial Sequence
  Probe
gcgaggcattggtggttcagtggtagaa

SEQ ID NO: 21011 - DNA, 30 bp, Artificial Sequence
  Probe
gcgaggcattggtggttcagtggtagaatt

SEQ ID NO: 21012 - DNA, 31 bp, Artificial Sequence
  Probe
gcgaggcattggtggttcagtggtagaattc

SEQ ID NO: 21013 - DNA, 32 bp, Artificial Sequence
  Probe
gcgaggcattggtggttcagtggtagaattct

SEQ ID NO: 21014 - DNA, 34 bp, Artificial Sequence
  Probe
gcgaggcattggtggttcagtggtagaattctcg

SEQ ID NO: 21015 - DNA, 27 bp, Artificial Sequence
  Probe
gcgatccgagttcaaatctcggtggaa

SEQ ID NO: 21016 - DNA, 31 bp, Artificial Sequence
  Probe
gcgatccgagttcaaatctcggtggaacctg

SEQ ID NO: 21017 - DNA, 33 bp, Artificial Sequence; identical to SEQ ID NO: 6084
  Probe

SEQ ID NO: 21018 - DNA, 31 bp, Artificial Sequence
  Probe
gcgatccgagttcaaatctcggtggaacctt

SEQ ID NO: 21019 - DNA, 33 bp, Artificial Sequence; identical to SEQ ID NO: 6086
  Probe

SEQ ID NO: 21020 - DNA, 27 bp, Artificial Sequence
  Probe
gcgatccgagttcaagtctcggtggaa

SEQ ID NO: 21021 - DNA, 24 bp, Artificial Sequence
  Probe
gcgcagcggaagcgtgctgggccc

SEQ ID NO: 21022 - DNA, 25 bp, Artificial Sequence
  Probe
gcgcagcggaagcgtgctgggccca

SEQ ID NO: 21023 - DNA, 36 bp, Artificial Sequence
  Probe
gcgcagggccagtggcgcaatggataacgcgtctga

SEQ ID NO: 21024 - DNA, 39 bp, Artificial Sequence
  Probe
gcgcagggccagtggcgcaatggataacgcgtctgacta

SEQ ID NO: 21025 - DNA, 33 bp, Artificial Sequence
  Probe
gcgcattggtggttcagtggtagaattctcgcc

SEQ ID NO: 21026 - DNA, 36 bp, Artificial Sequence
  Probe
gcgccagactcaaggtaagcaccttgcctgcgggct

SEQ ID NO: 21027 - DNA, 28 bp, Artificial Sequence
  Probe
gcgcccggatagctcagtcggtagagca

SEQ ID NO: 21028 - DNA, 33 bp, Artificial Sequence
  Probe
gcgcccggatagctcagtcggtagagcatcaga

SEQ ID NO: 21029 - DNA, 38 bp, Artificial Sequence
  Probe
gcgcccggatagctcagtcggtagagcatcagactttt

SEQ ID NO: 21030 - DNA, 18 bp, Artificial Sequence
  Probe
gcgccgctggtgtagtgg

SEQ ID NO: 21031 - DNA, 19 bp, Artificial Sequence
  Probe
gcgccgctggtgtagtggt

SEQ ID NO: 21032 - DNA, 24 bp, Artificial Sequence
  Probe
gcgccgctggtgtagtggtatcat

SEQ ID NO: 21033 - DNA, 37 bp, Artificial Sequence; identical to SEQ ID NO: 1156
  Probe

SEQ ID NO: 21034 - DNA, 38 bp, Artificial Sequence; identical to SEQ ID NO: 6089
  Probe

SEQ ID NO: 21035 - DNA, 42 bp, Artificial Sequence; identical to SEQ ID NO: 6090
  Probe

SEQ ID NO: 21036 - DNA, 43 bp, Artificial Sequence; identical to SEQ ID NO: 6091
  Probe

SEQ ID NO: 21037 - DNA, 47 bp, Artificial Sequence; identical to SEQ ID NO: 6094
  Probe

SEQ ID NO: 21038 - DNA, 48 bp, Artificial Sequence; identical to SEQ ID NO: 6095
  Probe

SEQ ID NO: 21039 - DNA, 33 bp, Artificial Sequence
  Probe
gcgcgggggtatagctcagtggtagagcatttg

SEQ ID NO: 21040 - DNA, 25 bp, Artificial Sequence
  Probe
gcgctctcaccgccgcggcccgggt

SEQ ID NO: 21041 - DNA, 27 bp, Artificial Sequence
  Probe
gcgctctcaccgccgcggcccgggttc

SEQ ID NO: 21042 - DNA, 41 bp, Artificial Sequence
  Probe
gcgctctcaccgccgcggcccgggttcgattcccggtcagg

SEQ ID NO: 21043 - DNA, 42 bp, Artificial Sequence
  Probe
gcgctctcaccgccgcggcccgggttcgattcccggtcagga

SEQ ID NO: 21044 - DNA, 42 bp, Artificial Sequence
  Probe
gcgctctcaccgccgcggcccgggttcgattcccggtcaggg

SEQ ID NO: 21045 - DNA, 50 bp, Artificial Sequence
  Probe
gcgctctcaccgccgcggcccgggttcgattcccggtcagggaaagagta

SEQ ID NO: 21046 - DNA, 50 bp, Artificial Sequence; identical to SEQ ID NO: 6097
  Probe

SEQ ID NO: 21047 - DNA, 19 bp, Artificial Sequence
  Probe
gcggaagcgtgctgggccc

SEQ ID NO: 21048 - DNA, 35 bp, Artificial Sequence; identical to SEQ ID NO: 1163
  Probe

SEQ ID NO: 21049 - DNA, 38 bp, Artificial Sequence
  Probe
gcggaagcgtgctgggcccataacccagaggtcgatgg

SEQ ID NO: 21050 - DNA, 39 bp, Artificial Sequence
  Probe
gcggaagcgtgctgggcccataacccagaggtcgatgga

SEQ ID NO: 21051 - DNA, 40 bp, Artificial Sequence
  Probe
gcggaagcgtgctgggcccataacccagaggtcgatggat

SEQ ID NO: 21052 - DNA, 26 bp, Artificial Sequence
  Probe
gcggcccgggttcgactcccggtgtg

SEQ ID NO: 21053 - DNA, 27 bp, Artificial Sequence
  Probe
gcggcccgggttcgactcccggtgtgg

SEQ ID NO: 21054 - DNA, 28 bp, Artificial Sequence
  Probe
gcggcccgggttcgactcccggtgtggg

SEQ ID NO: 21055 - DNA, 29 bp, Artificial Sequence
  Probe
gcggcccgggttcgactcccggtgtggga

SEQ ID NO: 21056 - DNA, 33 bp, Artificial Sequence; identical to SEQ ID NO: 6099
  Probe

SEQ ID NO: 21057 - DNA, 25 bp, Artificial Sequence
  Probe
gcggcccgggttcgattcccggtca

SEQ ID NO: 21058 - DNA, 26 bp, Artificial Sequence
  Probe
gcggcccgggttcgattcccggtcag

SEQ ID NO: 21059 - DNA, 28 bp, Artificial Sequence
  Probe
gcggcccgggttcgattcccggtcaggg

SEQ ID NO: 21060 - DNA, 31 bp, Artificial Sequence; identical to SEQ ID NO: 6101
  Probe

SEQ ID NO: 21061 - DNA, 31 bp, Artificial Sequence; identical to SEQ ID NO: 6102
  Probe

SEQ ID NO: 21062 - DNA, 32 bp, Artificial Sequence
  Probe
gcggcccgggttcgattcccggtcagggaagc

SEQ ID NO: 21063 - DNA, 33 bp, Artificial Sequence
  Probe
gcggcccgggttcgattcccggtcagggaagcc

SEQ ID NO: 21064 - DNA, 31 bp, Artificial Sequence; identical to SEQ ID NO: 6103
  Probe

SEQ ID NO: 21065 - DNA, 33 bp, Artificial Sequence; identical to SEQ ID NO: 6104
  Probe

SEQ ID NO: 21066 - DNA, 19 bp, Artificial Sequence
  Probe
gcggcttagcctgtggctc

SEQ ID NO: 21067 - DNA, 31 bp, Artificial Sequence
  Probe
gcgggagacccgggttcaattcccggccaat

SEQ ID NO: 21068 - DNA, 16 bp, Artificial Sequence
  Probe
gcgggagaccggggtt

SEQ ID NO: 21069 - DNA, 17 bp, Artificial Sequence
  Probe
gcgggagaccggggttc

SEQ ID NO: 21070 - DNA, 28 bp, Artificial Sequence
  Probe
gcgggagaccggggttcaattccccgac

SEQ ID NO: 21071 - DNA, 29 bp, Artificial Sequence
  Probe
gcgggagaccggggttcaattccccgacg

SEQ ID NO: 21072 - DNA, 35 bp, Artificial Sequence; identical to SEQ ID NO: 6108
  Probe

SEQ ID NO: 21073 - DNA, 36 bp, Artificial Sequence
  Probe
gcgggagaccggggttcaattccccgacggggaggt

SEQ ID NO: 21074 - DNA, 37 bp, Artificial Sequence; identical to SEQ ID NO: 6109
  Probe

SEQ ID NO: 21075 - DNA, 19 bp, Artificial Sequence
  Probe
gcgggagaccggggttcga

SEQ ID NO: 21076 - DNA, 20 bp, Artificial Sequence
  Probe
gcgggagaccggggttcgat

SEQ ID NO: 21077 - DNA, 21 bp, Artificial Sequence
  Probe
gcgggagaccggggttcgatt

SEQ ID NO: 21078 - DNA, 31 bp, Artificial Sequence
  Probe
gcgggagaccggggttcgattccccaacggg

SEQ ID NO: 21079 - DNA, 33 bp, Artificial Sequence
  Probe
gcgggagaccggggttcgattccccaacgggga

SEQ ID NO: 21080 - DNA, 37 bp, Artificial Sequence
  Probe
gcgggagaccggggttcgattccccaacggggaggct

SEQ ID NO: 21081 - DNA, 35 bp, Artificial Sequence; identical to SEQ ID NO: 6112
  Probe

SEQ ID NO: 21082 - DNA, 36 bp, Artificial Sequence; identical to SEQ ID NO: 6113
  Probe

SEQ ID NO: 21083 - DNA, 37 bp, Artificial Sequence; identical to SEQ ID NO: 6114
  Probe

SEQ ID NO: 21084 - DNA, 36 bp, Artificial Sequence; identical to SEQ ID NO: 6115
  Probe

SEQ ID NO: 21085 - DNA, 37 bp, Artificial Sequence; identical to SEQ ID NO: 6116
  Probe

SEQ ID NO: 21086 - DNA, 36 bp, Artificial Sequence
  Probe
gcgggagaccggggttcgattccccgacggggagag

SEQ ID NO: 21087 - DNA, 37 bp, Artificial Sequence; identical to SEQ ID NO: 6117
  Probe

SEQ ID NO: 21088 - DNA, 35 bp, Artificial Sequence; identical to SEQ ID NO: 6118
  Probe

SEQ ID NO: 21089 - DNA, 36 bp, Artificial Sequence; identical to SEQ ID NO: 6119
  Probe

SEQ ID NO: 21090 - DNA, 37 bp, Artificial Sequence
  Probe
gcgggagaccggggttcgattccccgacggggaggag

SEQ ID NO: 21091 - DNA, 36 bp, Artificial Sequence; identical to SEQ ID NO: 6120
  Probe

SEQ ID NO: 21092 - DNA, 37 bp, Artificial Sequence; identical to SEQ ID NO: 6121
  Probe

SEQ ID NO: 21093 - DNA, 38 bp, Artificial Sequence
  Probe
gcgggagaccggggttcgattccccgacggggaggcac

SEQ ID NO: 21094 - DNA, 46 bp, Artificial Sequence
  Probe
gcgggagaccggggttcgattccccgacggggaggcacagtaattg

SEQ ID NO: 21095 - DNA, 37 bp, Artificial Sequence; identical to SEQ ID NO: 6122
  Probe

SEQ ID NO: 21096 - DNA, 16 bp, Artificial Sequence
  Probe
gcgggaggcccgggtt

SEQ ID NO: 21097 - DNA, 31 bp, Artificial Sequence
  Probe
gcgggaggcccgggttcgattcccggccaat

SEQ ID NO: 21098 - DNA, 32 bp, Artificial Sequence
  Probe
gcgggaggcccgggttcgattcccggccaatg

SEQ ID NO: 21099 - DNA, 33 bp, Artificial Sequence; identical to SEQ ID NO: 6124
  Probe

SEQ ID NO: 21100 - DNA, 34 bp, Artificial Sequence; identical to SEQ ID NO: 6125
  Probe

SEQ ID NO: 21101 - DNA, 37 bp, Artificial Sequence; identical to SEQ ID NO: 6126
  Probe

SEQ ID NO: 21102 - DNA, 36 bp, Artificial Sequence
  Probe
gcgggaggcccgggttcgattcccggccaatgcacg

SEQ ID NO: 21103 - DNA, 37 bp, Artificial Sequence; identical to SEQ ID NO: 6127
  Probe

SEQ ID NO: 21104 - DNA, 36 bp, Artificial Sequence
  Probe
gcgggaggcccgggttcgattcccggccaatgcact

SEQ ID NO: 21105 - DNA, 37 bp, Artificial Sequence; identical to SEQ ID NO: 6128
  Probe

SEQ ID NO: 21106 - DNA, 31 bp, Artificial Sequence
  Probe
gcgggaggcccgggttcgattcccggcccat

SEQ ID NO: 21107 - DNA, 32 bp, Artificial Sequence; identical to SEQ ID NO: 6129
  Probe

SEQ ID NO: 21108 - DNA, 33 bp, Artificial Sequence
  Probe
gcgggaggcccgggttcgattcccggcccatgc

SEQ ID NO: 21109 - DNA, 34 bp, Artificial Sequence
  Probe
gcgggaggcccgggttcgattcccggcccatgca

SEQ ID NO: 21110 - DNA, 37 bp, Artificial Sequence
  Probe
gcgggaggcccgggttcgattcccggcccatgcagca

SEQ ID NO: 21111 - DNA, 17 bp, Artificial Sequence
  Probe
gcgggaggcccgggttt

SEQ ID NO: 21112 - DNA, 36 bp, Artificial Sequence
  Probe
gcggttccatagtgtagcggttatcacgtctgcttt

SEQ ID NO: 21113 - DNA, 26 bp, Artificial Sequence
  Probe
gcgtcagtctcataatctgaaggtcg

SEQ ID NO: 21114 - DNA, 28 bp, Artificial Sequence
  Probe
gcgtgctgggcccataacccagaggtcg

SEQ ID NO: 21115 - DNA, 31 bp, Artificial Sequence; identical to SEQ ID NO: 1178
  Probe

SEQ ID NO: 21116 - DNA, 36 bp, Artificial Sequence
  Probe
gcgtgctgggcccataacccagaggtcgatggatcg

SEQ ID NO: 21117 - DNA, 20 bp, Artificial Sequence
  Probe
gcgtggccgagtggtctaag

SEQ ID NO: 21118 - DNA, 21 bp, Artificial Sequence
  Probe
gcgttcaggtcgcagtctccc

SEQ ID NO: 21119 - DNA, 17 bp, Artificial Sequence
  Probe
gcgttggtggtatagtg

SEQ ID NO: 21120 - DNA, 19 bp, Artificial Sequence
  Probe
gcgttggtggtatagtggt

SEQ ID NO: 21121 - DNA, 24 bp, Artificial Sequence
  Probe
gcgttggtggtatagtggtaagca

SEQ ID NO: 21122 - DNA, 26 bp, Artificial Sequence
  Probe
gcgttggtggtatagtggtaagcata

SEQ ID NO: 21123 - DNA, 39 bp, Artificial Sequence
  Probe
gcgttggtggtatagtggtaagcatagctgccttccaag

SEQ ID NO: 21124 - DNA, 41 bp, Artificial Sequence
  Probe
gcgttggtggtatagtggtaagcatagctgccttccaagca

SEQ ID NO: 21125 - DNA, 48 bp, Artificial Sequence; identical to SEQ ID NO: 6139
  Probe

SEQ ID NO: 21126 - DNA, 49 bp, Artificial Sequence; identical to SEQ ID NO: 6140
  Probe

SEQ ID NO: 21127 - DNA, 20 bp, Artificial Sequence
  Probe
gcgttggtggtatagtggtg

SEQ ID NO: 21128 - DNA, 22 bp, Artificial Sequence
  Probe
gcgttggtggtatagtggtgag

SEQ ID NO: 21129 - DNA, 23 bp, Artificial Sequence
  Probe
gcgttggtggtatagtggtgagc

SEQ ID NO: 21130 - DNA, 24 bp, Artificial Sequence
  Probe
gcgttggtggtatagtggtgagca

SEQ ID NO: 21131 - DNA, 25 bp, Artificial Sequence
  Probe
gcgttggtggtatagtggtgagcat

SEQ ID NO: 21132 - DNA, 26 bp, Artificial Sequence
  Probe
gcgttggtggtatagtggtgagcata

SEQ ID NO: 21133 - DNA, 27 bp, Artificial Sequence
  Probe
gcgttggtggtatagtggtgagcatag

SEQ ID NO: 21134 - DNA, 28 bp, Artificial Sequence
  Probe
gcgttggtggtatagtggtgagcatagc

SEQ ID NO: 21135 - DNA, 29 bp, Artificial Sequence
  Probe
gcgttggtggtatagtggtgagcatagct

SEQ ID NO: 21136 - DNA, 30 bp, Artificial Sequence; identical to SEQ ID NO: 6150
  Probe

SEQ ID NO: 21137 - DNA, 31 bp, Artificial Sequence; identical to SEQ ID NO: 6151
  Probe

SEQ ID NO: 21138 - DNA, 32 bp, Artificial Sequence; identical to SEQ ID NO: 6152
  Probe

SEQ ID NO: 21139 - DNA, 33 bp, Artificial Sequence; identical to SEQ ID NO: 6153
  Probe

SEQ ID NO: 21140 - DNA, 34 bp, Artificial Sequence; identical to SEQ ID NO: 6154
  Probe

SEQ ID NO: 21141 - DNA, 35 bp, Artificial Sequence; identical to SEQ ID NO: 6155
  Probe

SEQ ID NO: 21142 - DNA, 36 bp, Artificial Sequence; identical to SEQ ID NO: 6156
  Probe

SEQ ID NO: 21143 - DNA, 37 bp, Artificial Sequence; identical to SEQ ID NO: 6157
  Probe

SEQ ID NO: 21144 - DNA, 38 bp, Artificial Sequence
  Probe
gcgttggtggtatagtggtgagcatagctgccttccaa

SEQ ID NO: 21145 - DNA, 42 bp, Artificial Sequence
  Probe
gcgttggtggtatagtggtgagcatagctgccttccaagcag

SEQ ID NO: 21146 - DNA, 46 bp, Artificial Sequence; identical to SEQ ID NO: 6161
  Probe

SEQ ID NO: 21147 - DNA, 28 bp, Artificial Sequence
  Probe
gcgttggtggtatagtggtgagcatagt

SEQ ID NO: 21148 - DNA, 29 bp, Artificial Sequence
  Probe
gcgttggtggtatagtggtgagcatagtt

SEQ ID NO: 21149 - DNA, 32 bp, Artificial Sequence
  Probe
gcgttggtggtatagtggtgagcatagttgcc

SEQ ID NO: 21150 - DNA, 34 bp, Artificial Sequence
  Probe
gcgttggtggtatagtggtgagcatagttgcctt

SEQ ID NO: 21151 - DNA, 35 bp, Artificial Sequence
  Probe
gcgttggtggtatagtggtgagcatagttgccttc

SEQ ID NO: 21152 - DNA, 36 bp, Artificial Sequence
  Probe
gcgttggtggtatagtggtgagcatagttgccttcc

SEQ ID NO: 21153 - DNA, 20 bp, Artificial Sequence
  Probe
gcgttggtggtatagtggtt

SEQ ID NO: 21154 - DNA, 22 bp, Artificial Sequence
  Probe
gcgttggtggtatagtggttag

SEQ ID NO: 21155 - DNA, 23 bp, Artificial Sequence
  Probe
gcgttggtggtatagtggttagc

SEQ ID NO: 21156 - DNA, 24 bp, Artificial Sequence
  Probe
gcgttggtggtatagtggttagca

SEQ ID NO: 21157 - DNA, 26 bp, Artificial Sequence
  Probe
gcgttggtggtatagtggttagcata

SEQ ID NO: 21158 - DNA, 27 bp, Artificial Sequence
  Probe
gcgttggtggtatagtggttagcatag

SEQ ID NO: 21159 - DNA, 28 bp, Artificial Sequence
  Probe
gcgttggtggtatagtggttagcatagc

SEQ ID NO: 21160 - DNA, 29 bp, Artificial Sequence
  Probe
gcgttggtggtatagtggttagcatagct

SEQ ID NO: 21161 - DNA, 30 bp, Artificial Sequence; identical to SEQ ID NO: 6172
  Probe

SEQ ID NO: 21162 - DNA, 31 bp, Artificial Sequence; identical to SEQ ID NO: 6173
  Probe

SEQ ID NO: 21163 - DNA, 32 bp, Artificial Sequence; identical to SEQ ID NO: 6174
  Probe

SEQ ID NO: 21164 - DNA, 33 bp, Artificial Sequence; identical to SEQ ID NO: 6175
  Probe

SEQ ID NO: 21165 - DNA, 34 bp, Artificial Sequence; identical to SEQ ID NO: 6176
  Probe

SEQ ID NO: 21166 - DNA, 35 bp, Artificial Sequence; identical to SEQ ID NO: 6177
  Probe

SEQ ID NO: 21167 - DNA, 36 bp, Artificial Sequence; identical to SEQ ID NO: 6178
  Probe

SEQ ID NO: 21168 - DNA, 37 bp, Artificial Sequence; identical to SEQ ID NO: 6179
  Probe

SEQ ID NO: 21169 - DNA, 38 bp, Artificial Sequence
  Probe
gcgttggtggtatagtggttagcatagctgccttccaa

SEQ ID NO: 21170 - DNA, 42 bp, Artificial Sequence
  Probe
gcgttggtggtatagtggttagcatagctgccttccaagcag

SEQ ID NO: 21171 - DNA, 43 bp, Artificial Sequence; identical to SEQ ID NO: 6182
  Probe

SEQ ID NO: 21172 - DNA, 48 bp, Artificial Sequence; identical to SEQ ID NO: 6184
  Probe

SEQ ID NO: 21173 - DNA, 27 bp, Artificial Sequence
  Probe
gcgttggtggtttagtggtagaattct

SEQ ID NO: 21174 - DNA, 29 bp, Artificial Sequence
  Probe
gcgttggtggtttagtggtagaattctcg

SEQ ID NO: 21175 - DNA, 30 bp, Artificial Sequence; identical to SEQ ID NO: 10512
  Probe

SEQ ID NO: 21176 - DNA, 31 bp, Artificial Sequence; identical to SEQ ID NO: 6187
  Probe

SEQ ID NO: 21177 - DNA, 32 bp, Artificial Sequence; identical to SEQ ID NO: 6188
  Probe

SEQ ID NO: 21178 - DNA, 33 bp, Artificial Sequence
  Probe
gcgttggtggtttagtggtagaattctcgcctc

SEQ ID NO: 21179 - DNA, 16 bp, Artificial Sequence
  Probe
gctaaacctagcccca

SEQ ID NO: 21180 - DNA, 17 bp, Artificial Sequence
  Probe
gctaaacctagccccaa

SEQ ID NO: 21181 - DNA, 18 bp, Artificial Sequence
  Probe
gctaaacctagccccaaa

SEQ ID NO: 21182 - DNA, 19 bp, Artificial Sequence
  Probe
gctaaacctagccccaaac

SEQ ID NO: 21183 - DNA, 20 bp, Artificial Sequence
  Probe
gctaaacctagccccaaacc

SEQ ID NO: 21184 - DNA, 21 bp, Artificial Sequence
  Probe
gctaaacctagccccaaaccc

SEQ ID NO: 21185 - DNA, 22 bp, Artificial Sequence
  Probe
gctaaacctagccccaaaccca

SEQ ID NO: 21186 - DNA, 23 bp, Artificial Sequence
  Probe
gctaaacctagccccaaacccac

SEQ ID NO: 21187 - DNA, 24 bp, Artificial Sequence
  Probe
gctaaacctagccccaaacccact

SEQ ID NO: 21188 - DNA, 25 bp, Artificial Sequence
  Probe
gctaaacctagccccaaacccactc

SEQ ID NO: 21189 - DNA, 26 bp, Artificial Sequence
  Probe
gctaaacctagccccaaacccactcc

SEQ ID NO: 21190 - DNA, 27 bp, Artificial Sequence
  Probe
gctaaacctagccccaaacccactcca

SEQ ID NO: 21191 - DNA, 28 bp, Artificial Sequence
  Probe
gctaaacctagccccaaacccactccac

SEQ ID NO: 21192 - DNA, 29 bp, Artificial Sequence
  Probe
gctaaacctagccccaaacccactccacc

SEQ ID NO: 21193 - DNA, 30 bp, Artificial Sequence; identical to SEQ ID NO: 6203
  Probe

SEQ ID NO: 21194 - DNA, 22 bp, Artificial Sequence
  Probe
gctaaataagctatcgggccca

SEQ ID NO: 21195 - DNA, 23 bp, Artificial Sequence
  Probe
gctaaataagctatcgggcccat

SEQ ID NO: 21196 - DNA, 24 bp, Artificial Sequence
  Probe
gctaaataagctatcgggcccata

SEQ ID NO: 21197 - DNA, 25 bp, Artificial Sequence
  Probe
gctaaataagctatcgggcccatac

SEQ ID NO: 21198 - DNA, 36 bp, Artificial Sequence
  Probe
gctaaataagctatcgggcccataccccgaaaatgt

SEQ ID NO: 21199 - DNA, 23 bp, Artificial Sequence
  Probe
gctaaatcctatatatcttaatg

SEQ ID NO: 21200 - DNA, 16 bp, Artificial Sequence
  Probe
gctaactcatgccccc

SEQ ID NO: 21201 - DNA, 17 bp, Artificial Sequence
  Probe
gctaactcatgccccca

SEQ ID NO: 21202 - DNA, 20 bp, Artificial Sequence
  Probe
gctaactcatgcccccatgt

SEQ ID NO: 21203 - DNA, 21 bp, Artificial Sequence
  Probe
gctaactcatgcccccatgtc

SEQ ID NO: 21204 - DNA, 22 bp, Artificial Sequence
  Probe
gctaactcatgcccccatgtct

SEQ ID NO: 21205 - DNA, 23 bp, Artificial Sequence
  Probe
gctaactcatgcccccatgtcta

SEQ ID NO: 21206 - DNA, 26 bp, Artificial Sequence
  Probe
gctaactcatgcccccatgtctaaca

SEQ ID NO: 21207 - DNA, 29 bp, Artificial Sequence
  Probe
gctaactcatgcccccatgtctaacaaca

SEQ ID NO: 21208 - DNA, 34 bp, Artificial Sequence; identical to SEQ ID NO: 6217
  Probe

SEQ ID NO: 21209 - DNA, 35 bp, Artificial Sequence; identical to SEQ ID NO: 6218
  Probe

SEQ ID NO: 21210 - DNA, 36 bp, Artificial Sequence; identical to SEQ ID NO: 6219
  Probe

SEQ ID NO: 21211 - DNA, 37 bp, Artificial Sequence; identical to SEQ ID NO: 6220
  Probe

SEQ ID NO: 21212 - DNA, 38 bp, Artificial Sequence; identical to SEQ ID NO: 6221
  Probe

SEQ ID NO: 21213 - DNA, 39 bp, Artificial Sequence; identical to SEQ ID NO: 6222
  Probe

SEQ ID NO: 21214 - DNA, 40 bp, Artificial Sequence; identical to SEQ ID NO: 6223
  Probe

SEQ ID NO: 21215 - DNA, 41 bp, Artificial Sequence; identical to SEQ ID NO: 6224
  Probe

SEQ ID NO: 21216 - DNA, 42 bp, Artificial Sequence; identical to SEQ ID NO: 6225
  Probe

SEQ ID NO: 21217 - DNA, 43 bp, Artificial Sequence; identical to SEQ ID NO: 6226
  Probe

SEQ ID NO: 21218 - DNA, 50 bp, Artificial Sequence; identical to SEQ ID NO: 6227
  Probe

SEQ ID NO: 21219 - DNA, 25 bp, Artificial Sequence
  Probe
gctaaggaagtcctgtgctcagttt

SEQ ID NO: 21220 - DNA, 26 bp, Artificial Sequence
  Probe
gctaaggaagtcctgtgctcagtttt

SEQ ID NO: 21221 - DNA, 27 bp, Artificial Sequence
  Probe
gctaaggaagtcctgtgctcagttttg

SEQ ID NO: 21222 - DNA, 24 bp, Artificial Sequence
  Probe
gctaataacgccaaggtcgcgggt

SEQ ID NO: 21223 - DNA, 25 bp, Artificial Sequence
  Probe
gctaataacgccaaggtcgcgggtt

SEQ ID NO: 21224 - DNA, 16 bp, Artificial Sequence
  Probe
gctaatggtggagtta

SEQ ID NO: 21225 - DNA, 17 bp, Artificial Sequence
  Probe
gctaatggtggagttaa

SEQ ID NO: 21226 - DNA, 20 bp, Artificial Sequence
  Probe
gctaatggtggagttaaaga

SEQ ID NO: 21227 - DNA, 32 bp, Artificial Sequence; identical to SEQ ID NO: 1198
  Probe

SEQ ID NO: 21228 - DNA, 34 bp, Artificial Sequence; identical to SEQ ID NO: 6233
  Probe

SEQ ID NO: 21229 - DNA, 35 bp, Artificial Sequence; identical to SEQ ID NO: 6234
  Probe

SEQ ID NO: 21230 - DNA, 37 bp, Artificial Sequence; identical to SEQ ID NO: 6235
  Probe

SEQ ID NO: 21231 - DNA, 38 bp, Artificial Sequence; identical to SEQ ID NO: 6236
  Probe

SEQ ID NO: 21232 - DNA, 39 bp, Artificial Sequence; identical to SEQ ID NO: 6237
  Probe

SEQ ID NO: 21233 - DNA, 40 bp, Artificial Sequence; identical to SEQ ID NO: 6238
  Probe

SEQ ID NO: 21234 - DNA, 41 bp, Artificial Sequence; identical to SEQ ID NO: 6239
  Probe

SEQ ID NO: 21235 - DNA, 42 bp, Artificial Sequence; identical to SEQ ID NO: 6240
  Probe

SEQ ID NO: 21236 - DNA, 23 bp, Artificial Sequence
  Probe
gctacttttaaattctgacctca

SEQ ID NO: 21237 - DNA, 21 bp, Artificial Sequence
  Probe
gctagctcagtcggtagagca

SEQ ID NO: 21238 - DNA, 24 bp, Artificial Sequence
  Probe
gctagctcagtcggtagagcatga

SEQ ID NO: 21239 - DNA, 26 bp, Artificial Sequence
  Probe
gctagctcagtcggtagagcatgaga

SEQ ID NO: 21240 - DNA, 27 bp, Artificial Sequence
  Probe
gctagctcagtcggtagagcatgagac

SEQ ID NO: 21241 - DNA, 28 bp, Artificial Sequence
  Probe
gctagctcagtcggtagagcatgagact

SEQ ID NO: 21242 - DNA, 29 bp, Artificial Sequence
  Probe
gctagctcagtcggtagagcatgagactc

SEQ ID NO: 21243 - DNA, 30 bp, Artificial Sequence
  Probe
gctagctcagtcggtagagcatgagactct

SEQ ID NO: 21244 - DNA, 24 bp, Artificial Sequence
  Probe
gctagctcagtcggtagagcatgg

SEQ ID NO: 21245 - DNA, 25 bp, Artificial Sequence
  Probe
gctagctcagtcggtagagcatggg

SEQ ID NO: 21246 - DNA, 30 bp, Artificial Sequence
  Probe
gctagctcagtcggtagagcatgggactct

SEQ ID NO: 21247 - DNA, 44 bp, Artificial Sequence
  Probe
gctagctcagtcggtagagcatgggactcttaatcccagggtcg

SEQ ID NO: 21248 - DNA, 29 bp, Artificial Sequence
  Probe
gctataagcattggtggttcagtggtaga

SEQ ID NO: 21249 - DNA, 34 bp, Artificial Sequence
  Probe
gctataagcattggtggttcagtggtagaattct

SEQ ID NO: 21250 - DNA, 24 bp, Artificial Sequence
  Probe
gctatccattggtcttaggcccca

SEQ ID NO: 21251 - DNA, 20 bp, Artificial Sequence
  Probe
gctatcgggcccataccccg

SEQ ID NO: 21252 - DNA, 21 bp, Artificial Sequence
  Probe
gctatcgggcccataccccga

SEQ ID NO: 21253 - DNA, 22 bp, Artificial Sequence
  Probe
gctatcgggcccataccccgaa

SEQ ID NO: 21254 - DNA, 23 bp, Artificial Sequence
  Probe
gctatcgggcccataccccgaaa

SEQ ID NO: 21255 - DNA, 24 bp, Artificial Sequence
  Probe
gctatcgggcccataccccgaaaa

SEQ ID NO: 21256 - DNA, 25 bp, Artificial Sequence
  Probe
gctatcgggcccataccccgaaaat

SEQ ID NO: 21257 - DNA, 26 bp, Artificial Sequence
  Probe
gctatcgggcccataccccgaaaatg

SEQ ID NO: 21258 - DNA, 27 bp, Artificial Sequence
  Probe
gctatcgggcccataccccgaaaatgt

SEQ ID NO: 21259 - DNA, 28 bp, Artificial Sequence
  Probe
gctatcgggcccataccccgaaaatgtt

SEQ ID NO: 21260 - DNA, 29 bp, Artificial Sequence
  Probe
gctatcgggcccataccccgaaaatgttg

SEQ ID NO: 21261 - DNA, 30 bp, Artificial Sequence; identical to SEQ ID NO: 6264
  Probe

SEQ ID NO: 21262 - DNA, 31 bp, Artificial Sequence; identical to SEQ ID NO: 6265
  Probe

SEQ ID NO: 21263 - DNA, 32 bp, Artificial Sequence
  Probe
gctatcgggcccataccccgaaaatgttggtt

SEQ ID NO: 21264 - DNA, 39 bp, Artificial Sequence
  Probe
gctatcgggcccataccccgaaaatgttggttataccct

SEQ ID NO: 21265 - DNA, 42 bp, Artificial Sequence
  Probe
gctatcgggcccataccccgaaaatgttggttatacccttcc

SEQ ID NO: 21266 - DNA, 50 bp, Artificial Sequence; identical to SEQ ID NO: 6269
  Probe

SEQ ID NO: 21267 - DNA, 20 bp, Artificial Sequence
  Probe
gctcacaagaactgctaact

SEQ ID NO: 21268 - DNA, 23 bp, Artificial Sequence
  Probe
gctcacaagaactgctaactcat

SEQ ID NO: 21269 - DNA, 24 bp, Artificial Sequence
  Probe
gctcacaagaactgctaactcatg

SEQ ID NO: 21270 - DNA, 50 bp, Artificial Sequence; identical to SEQ ID NO: 1205
  Probe

SEQ ID NO: 21271 - DNA, 16 bp, Artificial Sequence
  Probe
gctcacatcaccccat

SEQ ID NO: 21272 - DNA, 17 bp, Artificial Sequence
  Probe
gctcacatcaccccata

SEQ ID NO: 21273 - DNA, 18 bp, Artificial Sequence
  Probe
gctcacatcaccccataa

SEQ ID NO: 21274 - DNA, 21 bp, Artificial Sequence
  Probe
gctcacatcaccccataaaca

SEQ ID NO: 21275 - DNA, 22 bp, Artificial Sequence
  Probe
gctcacatcaccccataaacaa

SEQ ID NO: 21276 - DNA, 23 bp, Artificial Sequence
  Probe
gctcacatcaccccataaacaaa

SEQ ID NO: 21277 - DNA, 24 bp, Artificial Sequence
  Probe
gctcacatcaccccataaacaaat

SEQ ID NO: 21278 - DNA, 24 bp, Artificial Sequence
  Probe
gctcagtcggtagagcatcagact

SEQ ID NO: 21279 - DNA, 25 bp, Artificial Sequence
  Probe
gctcagtcggtagagcatcagactt

SEQ ID NO: 21280 - DNA, 27 bp, Artificial Sequence
  Probe
gctcagtcggtagagcatcagactttt

SEQ ID NO: 21281 - DNA, 28 bp, Artificial Sequence
  Probe
gctcagtcggtagagcatcagactttta

SEQ ID NO: 21282 - DNA, 24 bp, Artificial Sequence
  Probe
gctcagtcggtagagcatgagact

SEQ ID NO: 21283 - DNA, 25 bp, Artificial Sequence
  Probe
gctcagtcggtagagcatgagactc

SEQ ID NO: 21284 - DNA, 24 bp, Artificial Sequence
  Probe
gctcagtcggtagagcatgggact

SEQ ID NO: 21285 - DNA, 25 bp, Artificial Sequence
  Probe
gctcagtcggtagagcatgggactc

SEQ ID NO: 21286 - DNA, 36 bp, Artificial Sequence
  Probe
gctccagtggcgcaatcggttagcgcgcggtactta

SEQ ID NO: 21287 - DNA, 38 bp, Artificial Sequence
  Probe
gctccagtggcgcaatcggttagcgcgcggtacttata

SEQ ID NO: 21288 - DNA, 29 bp, Artificial Sequence
  Probe
gctccgaggtgattttcatattgaattgc

SEQ ID NO: 21289 - DNA, 30 bp, Artificial Sequence; identical to SEQ ID NO: 1206
  Probe

SEQ ID NO: 21290 - DNA, 31 bp, Artificial Sequence; identical to SEQ ID NO: 6282
  Probe

SEQ ID NO: 21291 - DNA, 32 bp, Artificial Sequence; identical to SEQ ID NO: 6283
  Probe

SEQ ID NO: 21292 - DNA, 33 bp, Artificial Sequence
  Probe
gctccgaggtgattttcatattgaattgcaaat

SEQ ID NO: 21293 - DNA, 34 bp, Artificial Sequence; identical to SEQ ID NO: 6284
  Probe

SEQ ID NO: 21294 - DNA, 44 bp, Artificial Sequence
  Probe
gctccgaggtgattttcatattgaattgcaaattcgaagaagca

SEQ ID NO: 21295 - DNA, 50 bp, Artificial Sequence; identical to SEQ ID NO: 6286
  Probe

SEQ ID NO: 21296 - DNA, 26 bp, Artificial Sequence
  Probe
gctcgaaggacttcgtctgtaatttt

SEQ ID NO: 21297 - DNA, 30 bp, Artificial Sequence
  Probe
gctcgttggtctaggggtatgattctcgct

SEQ ID NO: 21298 - DNA, 23 bp, Artificial Sequence
  Probe
gctctcaccgccgcggcccgggt

SEQ ID NO: 21299 - DNA, 29 bp, Artificial Sequence
  Probe
gctctccttttatgagctggtcgcgggaa

SEQ ID NO: 21300 - DNA, 24 bp, Artificial Sequence
  Probe
gctgataacaccaaggtcgcgggc

SEQ ID NO: 21301 - DNA, 18 bp, Artificial Sequence
  Probe
gctgcatagcaagccttt

SEQ ID NO: 21302 - DNA, 29 bp, Artificial Sequence
  Probe
gctgccacacctcagaaggtctcactttt

SEQ ID NO: 21303 - DNA, 21 bp, Artificial Sequence
  Probe
gctgccagggttgctgtcttt

SEQ ID NO: 21304 - DNA, 22 bp, Artificial Sequence
  Probe
gctgccagggttgctgtctttt

SEQ ID NO: 21305 - DNA, 31 bp, Artificial Sequence
  Probe
gctggggattgtgggttcgagtcccatctgg

SEQ ID NO: 21306 - DNA, 35 bp, Artificial Sequence
  Probe
gctggggattgtgggttcgagtcccatctgggtcg

SEQ ID NO: 21307 - DNA, 36 bp, Artificial Sequence
  Probe
gctggggattgtgggttcgagtcccatctgggtcgc

SEQ ID NO: 21308 - DNA, 38 bp, Artificial Sequence; identical to SEQ ID NO: 6290
  Probe

SEQ ID NO: 21309 - DNA, 20 bp, Artificial Sequence
  Probe
gctggtgtagtggtatcatg

SEQ ID NO: 21310 - DNA, 26 bp, Artificial Sequence
  Probe
gctggtgtagtggtatcatgcaagat

SEQ ID NO: 21311 - DNA, 29 bp, Artificial Sequence
  Probe
gctggtgtagtggtatcatgcaagattcc

SEQ ID NO: 21312 - DNA, 30 bp, Artificial Sequence; identical to SEQ ID NO: 1207
  Probe

SEQ ID NO: 21313 - DNA, 41 bp, Artificial Sequence
  Probe
gctgttaaccgaaaggttggtggttcgagcccacccaggga

SEQ ID NO: 21314 - DNA, 40 bp, Artificial Sequence; identical to SEQ ID NO: 6299
  Probe

SEQ ID NO: 21315 - DNA, 41 bp, Artificial Sequence
  Probe
gctgttaactaagtgtttgtgggtttaagtcccattggtct

SEQ ID NO: 21316 - DNA, 42 bp, Artificial Sequence
  Probe
gctgttaactaagtgtttgtgggtttaagtcccattggtcta

SEQ ID NO: 21317 - DNA, 46 bp, Artificial Sequence; identical to SEQ ID NO: 6302
  Probe

SEQ ID NO: 21318 - DNA, 24 bp, Artificial Sequence
  Probe
gctgttacagaaattaagtattgc

SEQ ID NO: 21319 - DNA, 27 bp, Artificial Sequence
  Probe
gctgttacagaaattaagtattgcaac

SEQ ID NO: 21320 - DNA, 29 bp, Artificial Sequence
  Probe
gctgttacagaaattaagtattgcaactt

SEQ ID NO: 21321 - DNA, 30 bp, Artificial Sequence; identical to SEQ ID NO: 6308
  Probe

SEQ ID NO: 21322 - DNA, 23 bp, Artificial Sequence
  Probe
gcttaaacccccttatttctagg

SEQ ID NO: 21323 - DNA, 24 bp, Artificial Sequence
  Probe
gcttaaacccccttatttctagga

SEQ ID NO: 21324 - DNA, 17 bp, Artificial Sequence
  Probe
gcttacgaccccttatt

SEQ ID NO: 21325 - DNA, 21 bp, Artificial Sequence
  Probe
gcttacgaccccttatttacc

SEQ ID NO: 21326 - DNA, 22 bp, Artificial Sequence
  Probe
gcttacgaccccttatttaccg

SEQ ID NO: 21327 - DNA, 23 bp, Artificial Sequence
  Probe
gcttagttggttaaagcgcctgt

SEQ ID NO: 21328 - DNA, 24 bp, Artificial Sequence
  Probe
gcttcaaacctgccggggcttctc

SEQ ID NO: 21329 - DNA, 15 bp, Artificial Sequence
  Probe
gcttcgctgcgtgag

SEQ ID NO: 21330 - DNA, 28 bp, Artificial Sequence
  Probe
gcttctgtaatgtagtggttatcacatt

SEQ ID NO: 21331 - DNA, 33 bp, Artificial Sequence; identical to SEQ ID NO: 6322
  Probe

SEQ ID NO: 21332 - DNA, 34 bp, Artificial Sequence
  Probe
gcttctgtaatgtagtggttatcacattcgcctc

SEQ ID NO: 21333 - DNA, 39 bp, Artificial Sequence
  Probe
gcttctgtagtgtagtggttatcacgttcgcctcacacg

SEQ ID NO: 21334 - DNA, 46 bp, Artificial Sequence
  Probe
gctttacacgcagaaggtcctgggttcgagccccagtggaaccacg

SEQ ID NO: 21335 - DNA, 50 bp, Artificial Sequence
  Probe
gctttacacgcagaaggtcctgggttcgagccccagtggaaccacggcgt

SEQ ID NO: 21336 - DNA, 26 bp, Artificial Sequence
  Probe
gctttaggtttttctcttaaatcatt

SEQ ID NO: 21337 - DNA, 25 bp, Artificial Sequence
  Probe
gctttgcacgtatgaggccccgggt

SEQ ID NO: 21338 - DNA, 26 bp, Artificial Sequence
  Probe
gctttgcacgtatgaggccccgggtt

SEQ ID NO: 21339 - DNA, 27 bp, Artificial Sequence
  Probe
gctttgcacgtatgaggccccgggttc

SEQ ID NO: 21340 - DNA, 26 bp, Artificial Sequence
  Probe
gctttggggggttcgattccttcctt

SEQ ID NO: 21341 - DNA, 27 bp, Artificial Sequence
  Probe
gctttggggggttcgattccttccttt

SEQ ID NO: 21342 - DNA, 28 bp, Artificial Sequence
  Probe
gctttggggggttcgattccttcctttt

SEQ ID NO: 21343 - DNA, 30 bp, Artificial Sequence
  Probe
gctttggggggttcgattccttcctttttt

SEQ ID NO: 21344 - DNA, 31 bp, Artificial Sequence; identical to SEQ ID NO: 6328
  Probe

SEQ ID NO: 21345 - DNA, 32 bp, Artificial Sequence; identical to SEQ ID NO: 6329
  Probe

SEQ ID NO: 21346 - DNA, 33 bp, Artificial Sequence; identical to SEQ ID NO: 6330
  Probe

SEQ ID NO: 21347 - DNA, 34 bp, Artificial Sequence
  Probe
gctttggggggttcgattccttccttttttgtct

SEQ ID NO: 21348 - DNA, 22 bp, Artificial Sequence
  Probe
ggaaagtgcacttggacgaacc

SEQ ID NO: 21349 - DNA, 40 bp, Artificial Sequence
  Probe
ggaaagtgcacttggacgaaccagagtgtagcttaacaca

SEQ ID NO: 21350 - DNA, 41 bp, Artificial Sequence
  Probe
ggaaagtgcacttggacgaaccagagtgtagcttaacacaa

SEQ ID NO: 21351 - DNA, 29 bp, Artificial Sequence
  Probe
ggaacagataataagccgtgcccagccgt

SEQ ID NO: 21352 - DNA, 16 bp, Artificial Sequence
  Probe
ggaagcgtgctgggcc

SEQ ID NO: 21353 - DNA, 24 bp, Artificial Sequence
  Probe
ggaagcgtgctgggcccataaccc

SEQ ID NO: 21354 - DNA, 30 bp, Artificial Sequence
  Probe
ggaagcgtgctgggcccataacccagaggt

SEQ ID NO: 21355 - DNA, 34 bp, Artificial Sequence; identical to SEQ ID NO: 1227
  Probe

SEQ ID NO: 21356 - DNA, 35 bp, Artificial Sequence; identical to SEQ ID NO: 1228
  Probe

SEQ ID NO: 21357 - DNA, 36 bp, Artificial Sequence; identical to SEQ ID NO: 1229
  Probe

SEQ ID NO: 21358 - DNA, 37 bp, Artificial Sequence; identical to SEQ ID NO: 6332
  Probe

SEQ ID NO: 21359 - DNA, 39 bp, Artificial Sequence; identical to SEQ ID NO: 6333
  Probe

SEQ ID NO: 21360 - DNA, 16 bp, Artificial Sequence
  Probe
ggaatgtcagcttttt

SEQ ID NO: 21361 - DNA, 30 bp, Artificial Sequence
  Probe
ggaatgtcagctttttgccgtcaacactta

SEQ ID NO: 21362 - DNA, 16 bp, Artificial Sequence
  Probe
ggacctcacgagactt

SEQ ID NO: 21363 - DNA, 16 bp, Artificial Sequence
  Probe
ggactatgagaatcga

SEQ ID NO: 21364 - DNA, 17 bp, Artificial Sequence
  Probe
ggactatgagaatcgaa

SEQ ID NO: 21365 - DNA, 18 bp, Artificial Sequence
  Probe
ggactatgagaatcgaac

SEQ ID NO: 21366 - DNA, 19 bp, Artificial Sequence
  Probe
ggactatgagaatcgaacc

SEQ ID NO: 21367 - DNA, 20 bp, Artificial Sequence
  Probe
ggactatgagaatcgaaccc

SEQ ID NO: 21368 - DNA, 21 bp, Artificial Sequence
  Probe
ggactatgagaatcgaaccca

SEQ ID NO: 21369 - DNA, 22 bp, Artificial Sequence
  Probe
ggactatgagaatcgaacccat

SEQ ID NO: 21370 - DNA, 23 bp, Artificial Sequence
  Probe
ggactatgagaatcgaacccatc

SEQ ID NO: 21371 - DNA, 24 bp, Artificial Sequence
  Probe
ggactatgagaatcgaacccatcc

SEQ ID NO: 21372 - DNA, 25 bp, Artificial Sequence
  Probe
ggactatgagaatcgaacccatccc

SEQ ID NO: 21373 - DNA, 26 bp, Artificial Sequence
  Probe
ggactatgagaatcgaacccatccct

SEQ ID NO: 21374 - DNA, 27 bp, Artificial Sequence
  Probe
ggactatgagaatcgaacccatccctg

SEQ ID NO: 21375 - DNA, 28 bp, Artificial Sequence
  Probe
ggactatgagaatcgaacccatccctga

SEQ ID NO: 21376 - DNA, 29 bp, Artificial Sequence
  Probe
ggactatgagaatcgaacccatccctgag

SEQ ID NO: 21377 - DNA, 30 bp, Artificial Sequence; identical to SEQ ID NO: 6337
  Probe

SEQ ID NO: 21378 - DNA, 23 bp, Artificial Sequence
  Probe
ggactctgaatccagcgatccga

SEQ ID NO: 21379 - DNA, 24 bp, Artificial Sequence
  Probe
ggactctgaatccagcgatccgag

SEQ ID NO: 21380 - DNA, 45 bp, Artificial Sequence; identical to SEQ ID NO: 6343
  Probe

SEQ ID NO: 21381 - DNA, 24 bp, Artificial Sequence
  Probe
ggagaccggggttcaattccccga

SEQ ID NO: 21382 - DNA, 26 bp, Artificial Sequence
  Probe
ggagaccggggttcaattccccgacg

SEQ ID NO: 21383 - DNA, 32 bp, Artificial Sequence; identical to SEQ ID NO: 6344
  Probe

SEQ ID NO: 21384 - DNA, 33 bp, Artificial Sequence; identical to SEQ ID NO: 6345
  Probe

SEQ ID NO: 21385 - DNA, 34 bp, Artificial Sequence; identical to SEQ ID NO: 6346
  Probe

SEQ ID NO: 21386 - DNA, 16 bp, Artificial Sequence
  Probe
ggagaccggggttcga

SEQ ID NO: 21387 - DNA, 34 bp, Artificial Sequence
  Probe
ggagaccggggttcgattccccaacggggaggct

SEQ ID NO: 21388 - DNA, 32 bp, Artificial Sequence; identical to SEQ ID NO: 6348
  Probe

SEQ ID NO: 21389 - DNA, 33 bp, Artificial Sequence; identical to SEQ ID NO: 6349
  Probe

SEQ ID NO: 21390 - DNA, 34 bp, Artificial Sequence; identical to SEQ ID NO: 6350
  Probe

SEQ ID NO: 21391 - DNA, 33 bp, Artificial Sequence; identical to SEQ ID NO: 6351
  Probe

SEQ ID NO: 21392 - DNA, 34 bp, Artificial Sequence
  Probe
ggagaccggggttcgattccccgacggggagacg

SEQ ID NO: 21393 - DNA, 33 bp, Artificial Sequence
  Probe
ggagaccggggttcgattccccgacggggagag

SEQ ID NO: 21394 - DNA, 34 bp, Artificial Sequence; identical to SEQ ID NO: 6352
  Probe

SEQ ID NO: 21395 - DNA, 32 bp, Artificial Sequence; identical to SEQ ID NO: 6353
  Probe

SEQ ID NO: 21396 - DNA, 33 bp, Artificial Sequence
  Probe
ggagaccggggttcgattccccgacggggagga

SEQ ID NO: 21397 - DNA, 34 bp, Artificial Sequence
  Probe
ggagaccggggttcgattccccgacggggaggag

SEQ ID NO: 21398 - DNA, 33 bp, Artificial Sequence; identical to SEQ ID NO: 6354
  Probe

SEQ ID NO: 21399 - DNA, 34 bp, Artificial Sequence; identical to SEQ ID NO: 6355
  Probe

SEQ ID NO: 21400 - DNA, 35 bp, Artificial Sequence
  Probe
ggagaccggggttcgattccccgacggggaggcac

SEQ ID NO: 21401 - DNA, 34 bp, Artificial Sequence
  Probe
ggagaccggggttcgattccccgacggggaggcc

SEQ ID NO: 21402 - DNA, 30 bp, Artificial Sequence
  Probe
ggagatcctgggttcgaatcccagcggggc

SEQ ID NO: 21403 - DNA, 31 bp, Artificial Sequence
  Probe
ggagatcctgggttcgaatcccagcggggcc

SEQ ID NO: 21404 - DNA, 32 bp, Artificial Sequence
  Probe
ggagatcctgggttcgaatcccagcggggcct

SEQ ID NO: 21405 - DNA, 33 bp, Artificial Sequence
  Probe
ggagatcctgggttcgaatcccagcggggcctg

SEQ ID NO: 21406 - DNA, 33 bp, Artificial Sequence
  Probe
ggagatcctgggttcgaatcccagcggggcctt

SEQ ID NO: 21407 - DNA, 29 bp, Artificial Sequence
  Probe
ggagatcctgggttcgaatcccagcggtg

SEQ ID NO: 21408 - DNA, 30 bp, Artificial Sequence
  Probe
ggagatcctgggttcgaatcccagcggtgc

SEQ ID NO: 21409 - DNA, 31 bp, Artificial Sequence
  Probe
ggagatcctgggttcgaatcccagcggtgcc

SEQ ID NO: 21410 - DNA, 32 bp, Artificial Sequence; identical to SEQ ID NO: 6356
  Probe

SEQ ID NO: 21411 - DNA, 33 bp, Artificial Sequence; identical to SEQ ID NO: 6357
  Probe

SEQ ID NO: 21412 - DNA, 35 bp, Artificial Sequence
  Probe
ggagatcctgggttcgaatcccagcggtgcctccg

SEQ ID NO: 21413 - DNA, 16 bp, Artificial Sequence
  Probe
ggagatgaaaaccttt

SEQ ID NO: 21414 - DNA, 26 bp, Artificial Sequence
  Probe
ggagatgaaaacctttttccaaggac

SEQ ID NO: 21415 - DNA, 28 bp, Artificial Sequence
  Probe
ggagatgaaaacctttttccaaggacaa

SEQ ID NO: 21416 - DNA, 29 bp, Artificial Sequence
  Probe
ggagatgaaaacctttttccaaggacaaa

SEQ ID NO: 21417 - DNA, 30 bp, Artificial Sequence; identical to SEQ ID NO: 6362
  Probe

SEQ ID NO: 21418 - DNA, 31 bp, Artificial Sequence; identical to SEQ ID NO: 6363
  Probe

SEQ ID NO: 21419 - DNA, 32 bp, Artificial Sequence
  Probe
ggagatgaaaacctttttccaaggacaaatca

SEQ ID NO: 21420 - DNA, 16 bp, Artificial Sequence
  Probe
ggagatttcaacttaa

SEQ ID NO: 21421 - DNA, 22 bp, Artificial Sequence
  Probe
ggagatttcaacttaacttgac

SEQ ID NO: 21422 - DNA, 23 bp, Artificial Sequence
  Probe
ggagatttcaacttaacttgacc

SEQ ID NO: 21423 - DNA, 24 bp, Artificial Sequence
  Probe
ggagatttcaacttaacttgaccg

SEQ ID NO: 21424 - DNA, 25 bp, Artificial Sequence
  Probe
ggagatttcaacttaacttgaccgc

SEQ ID NO: 21425 - DNA, 26 bp, Artificial Sequence
  Probe
ggagatttcaacttaacttgaccgct

SEQ ID NO: 21426 - DNA, 27 bp, Artificial Sequence
  Probe
ggagatttcaacttaacttgaccgctc

SEQ ID NO: 21427 - DNA, 28 bp, Artificial Sequence
  Probe
ggagatttcaacttaacttgaccgctct

SEQ ID NO: 21428 - DNA, 29 bp, Artificial Sequence
  Probe
ggagatttcaacttaacttgaccgctctg

SEQ ID NO: 21429 - DNA, 30 bp, Artificial Sequence; identical to SEQ ID NO: 6372
  Probe

SEQ ID NO: 21430 - DNA, 31 bp, Artificial Sequence; identical to SEQ ID NO: 6373
  Probe

SEQ ID NO: 21431 - DNA, 32 bp, Artificial Sequence; identical to SEQ ID NO: 6374
  Probe

SEQ ID NO: 21432 - DNA, 33 bp, Artificial Sequence; identical to SEQ ID NO: 6375
  Probe

SEQ ID NO: 21433 - DNA, 39 bp, Artificial Sequence
  Probe
ggagcccggatagctcagtcggtagagcatcagactttt

SEQ ID NO: 21434 - DNA, 40 bp, Artificial Sequence
  Probe
ggagcccggatagctcagtcggtagagcatcagactttta

SEQ ID NO: 21435 - DNA, 31 bp, Artificial Sequence
  Probe
ggagcgcccggatagctcagtcggtagagca

SEQ ID NO: 21436 - DNA, 36 bp, Artificial Sequence
  Probe
ggagcgcccggatagctcagtcggtagagcatcaga

SEQ ID NO: 21437 - DNA, 38 bp, Artificial Sequence
  Probe
ggagcgcccggatagctcagtcggtagagcatcagact

SEQ ID NO: 21438 - DNA, 39 bp, Artificial Sequence
  Probe
ggagcgcccggatagctcagtcggtagagcatcagactt

SEQ ID NO: 21439 - DNA, 40 bp, Artificial Sequence
  Probe
ggagcgcccggatagctcagtcggtagagcatcagacttt

SEQ ID NO: 21440 - DNA, 41 bp, Artificial Sequence
  Probe
ggagcgcccggatagctcagtcggtagagcatcagactttt

SEQ ID NO: 21441 - DNA, 42 bp, Artificial Sequence
  Probe
ggagcgcccggatagctcagtcggtagagcatcagactttta

SEQ ID NO: 21442 - DNA, 30 bp, Artificial Sequence
  Probe
ggagcgttggtggtatagtggtaagcatag

SEQ ID NO: 21443 - DNA, 33 bp, Artificial Sequence
  Probe
ggagcgttggtggtatagtggtaagcatagctg

SEQ ID NO: 21444 - DNA, 38 bp, Artificial Sequence
  Probe
ggagcgttggtggtatagtggtaagcatagctgccttc

SEQ ID NO: 21445 - DNA, 23 bp, Artificial Sequence
  Probe
ggagcgttttgtggatttgtttt

SEQ ID NO: 21446 - DNA, 35 bp, Artificial Sequence
  Probe
ggagctccagtggcgcaatcggttagcgcgcggta

SEQ ID NO: 21447 - DNA, 38 bp, Artificial Sequence
  Probe
ggagctccagtggcgcaatcggttagcgcgcggtactt

SEQ ID NO: 21448 - DNA, 39 bp, Artificial Sequence
  Probe
ggagctccagtggcgcaatcggttagcgcgcggtactta

SEQ ID NO: 21449 - DNA, 40 bp, Artificial Sequence
  Probe
ggagctccagtggcgcaatcggttagcgcgcggtacttat

SEQ ID NO: 21450 - DNA, 41 bp, Artificial Sequence
  Probe
ggagctccagtggcgcaatcggttagcgcgcggtacttata

SEQ ID NO: 21451 - DNA, 44 bp, Artificial Sequence
  Probe
ggagctccagtggcgcaatcggttagcgcgcggtacttatatga

SEQ ID NO: 21452 - DNA, 17 bp, Artificial Sequence
  Probe
ggagcttaaaccccctt

SEQ ID NO: 21453 - DNA, 22 bp, Artificial Sequence
  Probe
ggagcttaaacccccttatttc

SEQ ID NO: 21454 - DNA, 23 bp, Artificial Sequence
  Probe
ggagcttaaacccccttatttct

SEQ ID NO: 21455 - DNA, 24 bp, Artificial Sequence
  Probe
ggagcttaaacccccttatttcta

SEQ ID NO: 21456 - DNA, 25 bp, Artificial Sequence
  Probe
ggagcttaaacccccttatttctag

SEQ ID NO: 21457 - DNA, 26 bp, Artificial Sequence
  Probe
ggagcttaaacccccttatttctagg

SEQ ID NO: 21458 - DNA, 27 bp, Artificial Sequence
  Probe
ggagcttaaacccccttatttctagga

SEQ ID NO: 21459 - DNA, 31 bp, Artificial Sequence
  Probe
ggaggcccgggttcgattcccggccaatgca

SEQ ID NO: 21460 - DNA, 34 bp, Artificial Sequence
  Probe
ggaggcccgggttcgattcccggccaatgcacga

SEQ ID NO: 21461 - DNA, 34 bp, Artificial Sequence
  Probe
ggaggcccgggttcgattcccggccaatgcagca

SEQ ID NO: 21462 - DNA, 31 bp, Artificial Sequence
  Probe
ggaggcccgggttcgattcccggcccatgca

SEQ ID NO: 21463 - DNA, 28 bp, Artificial Sequence
  Probe
ggaggcgtgggttcgaatcccactcctg

SEQ ID NO: 21464 - DNA, 28 bp, Artificial Sequence
  Probe
ggaggcgtgggttcgaatcccacttctg

SEQ ID NO: 21465 - DNA, 29 bp, Artificial Sequence
  Probe
ggaggcgtgggttcgaatcccacttctga

SEQ ID NO: 21466 - DNA, 31 bp, Artificial Sequence
  Probe
ggaggcgtgggttcgaatcccacttctgaca

SEQ ID NO: 21467 - DNA, 32 bp, Artificial Sequence
  Probe
ggaggcgtgggttcgaatcccacttctgacac

SEQ ID NO: 21468 - DNA, 25 bp, Artificial Sequence
  Probe
ggagttaaagactttttctctgatt

SEQ ID NO: 21469 - DNA, 26 bp, Artificial Sequence
  Probe
ggagttaaagactttttctctgattt

SEQ ID NO: 21470 - DNA, 38 bp, Artificial Sequence
  Probe
ggataaggcattggcctcctaagccagggattgtgggt

SEQ ID NO: 21471 - DNA, 24 bp, Artificial Sequence
  Probe
ggatagctcagtcggtagagcatc

SEQ ID NO: 21472 - DNA, 33 bp, Artificial Sequence
  Probe
ggatagctcagtcggtagagcatcagactttta

SEQ ID NO: 21473 - DNA, 25 bp, Artificial Sequence
  Probe
ggatcgatgcccgcatcctccactc

SEQ ID NO: 21474 - DNA, 25 bp, Artificial Sequence
  Probe
ggatcgatgcccgcattctccatac

SEQ ID NO: 21475 - DNA, 20 bp, Artificial Sequence
  Probe
ggatggccgagcggtctaag

SEQ ID NO: 21476 - DNA, 25 bp, Artificial Sequence
  Probe
ggatggccgagtggtctaaggcgcc

SEQ ID NO: 21477 - DNA, 27 bp, Artificial Sequence
  Probe
ggatggggtgtgataggtggcacggag

SEQ ID NO: 21478 - DNA, 28 bp, Artificial Sequence
  Probe
ggatggggtgtgataggtggcacggaga

SEQ ID NO: 21479 - DNA, 30 bp, Artificial Sequence
  Probe
ggatggggtgtgataggtggcacggagaat

SEQ ID NO: 21480 - DNA, 34 bp, Artificial Sequence; identical to SEQ ID NO: 1254
  Probe

SEQ ID NO: 21481 - DNA, 30 bp, Artificial Sequence
  Probe
ggatgggttcgattctcatagtcctagaaa

SEQ ID NO: 21482 - DNA, 30 bp, Artificial Sequence
  Probe
ggatgttttactgagaacagttcagcgagg

SEQ ID NO: 21483 - DNA, 16 bp, Artificial Sequence
  Probe
ggattcctggttttca

SEQ ID NO: 21484 - DNA, 19 bp, Artificial Sequence
  Probe
ggattcctggttttcaccc

SEQ ID NO: 21485 - DNA, 23 bp, Artificial Sequence
  Probe
ggattcctggttttcacccaggc

SEQ ID NO: 21486 - DNA, 24 bp, Artificial Sequence
  Probe
ggattcctggttttcacccaggcg

SEQ ID NO: 21487 - DNA, 27 bp, Artificial Sequence
  Probe
ggattcctggttttcacccaggcggcc

SEQ ID NO: 21488 - DNA, 29 bp, Artificial Sequence
  Probe
ggattcctggttttcacccaggtggcccg

SEQ ID NO: 21489 - DNA, 16 bp, Artificial Sequence
  Probe
ggattcggcgctctca

SEQ ID NO: 21490 - DNA, 25 bp, Artificial Sequence
  Probe
ggattcggcgctctcaccgccgcgg

SEQ ID NO: 21491 - DNA, 27 bp, Artificial Sequence
  Probe
ggattcggcgctctcaccgccgcggcc

SEQ ID NO: 21492 - DNA, 30 bp, Artificial Sequence
  Probe
ggattcggcgctctcaccgccgcggcccgg

SEQ ID NO: 21493 - DNA, 32 bp, Artificial Sequence
  Probe
ggattcggcgctctcaccgccgcggcccgggt

SEQ ID NO: 21494 - DNA, 23 bp, Artificial Sequence
  Probe
ggattcggcgctttcaccgccgc

SEQ ID NO: 21495 - DNA, 24 bp, Artificial Sequence
  Probe
ggattcggcgctttcaccgccgcg

SEQ ID NO: 21496 - DNA, 27 bp, Artificial Sequence
  Probe
ggattcggcgctttcaccgccgcggcc

SEQ ID NO: 21497 - DNA, 29 bp, Artificial Sequence
  Probe
ggattcggcgctttcaccgccgcggcccg

SEQ ID NO: 21498 - DNA, 27 bp, Artificial Sequence
  Probe
ggattggtggtccagtggtagaattct

SEQ ID NO: 21499 - DNA, 23 bp, Artificial Sequence
  Probe
ggattgtgggttcgagtcccatc

SEQ ID NO: 21500 - DNA, 50 bp, Artificial Sequence; identical to SEQ ID NO: 6392
  Probe

SEQ ID NO: 21501 - DNA, 28 bp, Artificial Sequence
  Probe
ggcagaacagcagagtggcgcagcggaa

SEQ ID NO: 21502 - DNA, 31 bp, Artificial Sequence
  Probe
ggcagagggggtatagctcagtggtagagca

SEQ ID NO: 21503 - DNA, 33 bp, Artificial Sequence
  Probe
ggcagagggggtatagctcagtggtagagcatt

SEQ ID NO: 21504 - DNA, 35 bp, Artificial Sequence
  Probe
ggcagagggggtatagctcagtggtagagcatttg

SEQ ID NO: 21505 - DNA, 36 bp, Artificial Sequence
  Probe
ggcagagggggtatagctcagtggtagagcatttga

SEQ ID NO: 21506 - DNA, 37 bp, Artificial Sequence
  Probe
ggcagagggggtatagctcagtggtagagcatttgac

SEQ ID NO: 21507 - DNA, 32 bp, Artificial Sequence
  Probe
ggcagagtggtgcagcggaagcgtgctgggcc

SEQ ID NO: 21508 - DNA, 33 bp, Artificial Sequence
  Probe
ggcagagtggtgcagcggaagcgtgctgggccc

SEQ ID NO: 21509 - DNA, 33 bp, Artificial Sequence; identical to SEQ ID NO: 6396
  Probe

SEQ ID NO: 21510 - DNA, 34 bp, Artificial Sequence
  Probe
ggcattggtggttcagtggtagaattctcgcctg

SEQ ID NO: 21511 - DNA, 36 bp, Artificial Sequence
  Probe
ggcattggtggttcagtggtagaattctcgcctgcc

SEQ ID NO: 21512 - DNA, 38 bp, Artificial Sequence
  Probe
ggccatggggttggcttgaaaccagctttggggggttc

SEQ ID NO: 21513 - DNA, 50 bp, Artificial Sequence; identical to SEQ ID NO: 6398
  Probe

SEQ ID NO: 21514 - DNA, 16 bp, Artificial Sequence
  Probe
ggcccataccccgaaa

SEQ ID NO: 21515 - DNA, 17 bp, Artificial Sequence
  Probe
ggcccataccccgaaaa

SEQ ID NO: 21516 - DNA, 18 bp, Artificial Sequence
  Probe
ggcccataccccgaaaat

SEQ ID NO: 21517 - DNA, 19 bp, Artificial Sequence
  Probe
ggcccataccccgaaaatg

SEQ ID NO: 21518 - DNA, 20 bp, Artificial Sequence
  Probe
ggcccataccccgaaaatgt

SEQ ID NO: 21519 - DNA, 21 bp, Artificial Sequence
  Probe
ggcccataccccgaaaatgtt

SEQ ID NO: 21520 - DNA, 22 bp, Artificial Sequence
  Probe
ggcccataccccgaaaatgttg

SEQ ID NO: 21521 - DNA, 24 bp, Artificial Sequence
  Probe
ggcccataccccgaaaatgttggt

SEQ ID NO: 21522 - DNA, 25 bp, Artificial Sequence
  Probe
ggcccataccccgaaaatgttggtt

SEQ ID NO: 21523 - DNA, 26 bp, Artificial Sequence
  Probe
ggcccataccccgaaaatgttggtta

SEQ ID NO: 21524 - DNA, 28 bp, Artificial Sequence
  Probe
ggcccataccccgaaaatgttggttata

SEQ ID NO: 21525 - DNA, 29 bp, Artificial Sequence
  Probe
ggcccataccccgaaaatgttggttatac

SEQ ID NO: 21526 - DNA, 30 bp, Artificial Sequence; identical to SEQ ID NO: 6411
  Probe

SEQ ID NO: 21527 - DNA, 31 bp, Artificial Sequence; identical to SEQ ID NO: 6412
  Probe

SEQ ID NO: 21528 - DNA, 32 bp, Artificial Sequence; identical to SEQ ID NO: 6413
  Probe

SEQ ID NO: 21529 - DNA, 33 bp, Artificial Sequence; identical to SEQ ID NO: 6414
  Probe

SEQ ID NO: 21530 - DNA, 34 bp, Artificial Sequence; identical to SEQ ID NO: 6415
  Probe

SEQ ID NO: 21531 - DNA, 35 bp, Artificial Sequence; identical to SEQ ID NO: 6416
  Probe

SEQ ID NO: 21532 - DNA, 36 bp, Artificial Sequence; identical to SEQ ID NO: 6417
  Probe

SEQ ID NO: 21533 - DNA, 38 bp, Artificial Sequence
  Probe
ggcccataccccgaaaatgttggttatacccttcccgt

SEQ ID NO: 21534 - DNA, 39 bp, Artificial Sequence; identical to SEQ ID NO: 6419
  Probe

SEQ ID NO: 21535 - DNA, 40 bp, Artificial Sequence
  Probe
ggcccataccccgaaaatgttggttatacccttcccgtac

SEQ ID NO: 21536 - DNA, 41 bp, Artificial Sequence
  Probe
ggcccataccccgaaaatgttggttatacccttcccgtact

SEQ ID NO: 21537 - DNA, 42 bp, Artificial Sequence
  Probe
ggcccataccccgaaaatgttggttatacccttcccgtacta

SEQ ID NO: 21538 - DNA, 44 bp, Artificial Sequence; identical to SEQ ID NO: 6421
  Probe

SEQ ID NO: 21539 - DNA, 45 bp, Artificial Sequence; identical to SEQ ID NO: 6422
  Probe

SEQ ID NO: 21540 - DNA, 31 bp, Artificial Sequence
  Probe
ggccccatggtgtaatggttagcactctgga

SEQ ID NO: 21541 - DNA, 32 bp, Artificial Sequence; identical to SEQ ID NO: 1262
  Probe

SEQ ID NO: 21542 - DNA, 35 bp, Artificial Sequence
  Probe
ggccccatggtgtaatggttagcactctggacttt

SEQ ID NO: 21543 - DNA, 38 bp, Artificial Sequence
  Probe
ggccccatggtgtaatggttagcactctggactttgaa

SEQ ID NO: 21544 - DNA, 26 bp, Artificial Sequence
  Probe
ggccccgggttcaatccccggcacct

SEQ ID NO: 21545 - DNA, 30 bp, Artificial Sequence
  Probe
ggccccgggttcaatccccggcacctccag

SEQ ID NO: 21546 - DNA, 22 bp, Artificial Sequence
  Probe
ggccccgggttcgatccccggc

SEQ ID NO: 21547 - DNA, 27 bp, Artificial Sequence
  Probe
ggccccgggttcgatccccggcatctc

SEQ ID NO: 21548 - DNA, 31 bp, Artificial Sequence
  Probe
ggccccgggttcgatccccggcatctccatt

SEQ ID NO: 21549 - DNA, 32 bp, Artificial Sequence; identical to SEQ ID NO: 6430
  Probe

SEQ ID NO: 21550 - DNA, 33 bp, Artificial Sequence
  Probe
ggcccggatagctcagtcggtagagcatcagac

SEQ ID NO: 21551 - DNA, 34 bp, Artificial Sequence
  Probe
ggcccggatagctcagtcggtagagcatcagact

SEQ ID NO: 21552 - DNA, 36 bp, Artificial Sequence
  Probe
ggcccggatagctcagtcggtagagcatcagacttt

SEQ ID NO: 21553 - DNA, 37 bp, Artificial Sequence
  Probe
ggcccggatagctcagtcggtagagcatcagactttt

SEQ ID NO: 21554 - DNA, 38 bp, Artificial Sequence
  Probe
ggcccggatagctcagtcggtagagcatcagactttta

SEQ ID NO: 21555 - DNA, 29 bp, Artificial Sequence
  Probe
ggcccgggttcgactcccggtatgggaac

SEQ ID NO: 21556 - DNA, 31 bp, Artificial Sequence; identical to SEQ ID NO: 6431
  Probe

SEQ ID NO: 21557 - DNA, 42 bp, Artificial Sequence
  Probe
ggcccgggttcgactcccggtatgggaacaaaagtggctttt

SEQ ID NO: 21558 - DNA, 22 bp, Artificial Sequence
  Probe
ggcccgggttcgactcccggtg

SEQ ID NO: 21559 - DNA, 23 bp, Artificial Sequence
  Probe
ggcccgggttcgactcccggtgt

SEQ ID NO: 21560 - DNA, 25 bp, Artificial Sequence
  Probe
ggcccgggttcgactcccggtgtgg

SEQ ID NO: 21561 - DNA, 31 bp, Artificial Sequence; identical to SEQ ID NO: 6432
  Probe

SEQ ID NO: 21562 - DNA, 23 bp, Artificial Sequence
  Probe
ggcccgggttcgattcccggtca

SEQ ID NO: 21563 - DNA, 31 bp, Artificial Sequence; identical to SEQ ID NO: 6433
  Probe

SEQ ID NO: 21564 - DNA, 16 bp, Artificial Sequence
  Probe
ggccctatagctcagg

SEQ ID NO: 21565 - DNA, 17 bp, Artificial Sequence
  Probe
ggccctatagctcaggg

SEQ ID NO: 21566 - DNA, 18 bp, Artificial Sequence
  Probe
ggccctatagctcagggg

SEQ ID NO: 21567 - DNA, 19 bp, Artificial Sequence
  Probe
ggccctatagctcaggggt

SEQ ID NO: 21568 - DNA, 26 bp, Artificial Sequence
  Probe
ggccctatagctcaggggttagagca

SEQ ID NO: 21569 - DNA, 29 bp, Artificial Sequence
  Probe
ggccctatagctcaggggttagagcactg

SEQ ID NO: 21570 - DNA, 32 bp, Artificial Sequence; identical to SEQ ID NO: 1269
  Probe

SEQ ID NO: 21571 - DNA, 33 bp, Artificial Sequence; identical to SEQ ID NO: 1270
  Probe

SEQ ID NO: 21572 - DNA, 34 bp, Artificial Sequence
  Probe
ggccctatagctcaggggttagagcactggtctt

SEQ ID NO: 21573 - DNA, 36 bp, Artificial Sequence; identical to SEQ ID NO: 1271
  Probe

SEQ ID NO: 21574 - DNA, 41 bp, Artificial Sequence
  Probe
ggccgcccggctagctcagtcggtagagcatgagactctta

SEQ ID NO: 21575 - DNA, 20 bp, Artificial Sequence
  Probe
ggccgcgtggcctaatggat

SEQ ID NO: 21576 - DNA, 16 bp, Artificial Sequence
  Probe
ggccggttagctcagt

SEQ ID NO: 21577 - DNA, 19 bp, Artificial Sequence
  Probe
ggccggttagctcagttgg

SEQ ID NO: 21578 - DNA, 20 bp, Artificial Sequence
  Probe
ggccggttagctcagttggt

SEQ ID NO: 21579 - DNA, 24 bp, Artificial Sequence
  Probe
ggccggttagctcagttggttaga

SEQ ID NO: 21580 - DNA, 26 bp, Artificial Sequence
  Probe
ggccggttagctcagttggttagagc

SEQ ID NO: 21581 - DNA, 32 bp, Artificial Sequence
  Probe
ggccggttagctcagttggttagagcgtggtg

SEQ ID NO: 21582 - DNA, 33 bp, Artificial Sequence; identical to SEQ ID NO: 6449
  Probe

SEQ ID NO: 21583 - DNA, 34 bp, Artificial Sequence; identical to SEQ ID NO: 6450
  Probe

SEQ ID NO: 21584 - DNA, 35 bp, Artificial Sequence
  Probe
ggccggttagctcagttggttagagcgtggtgcta

SEQ ID NO: 21585 - DNA, 28 bp, Artificial Sequence
  Probe
ggcgcaatcggttagcgcgcggtactta

SEQ ID NO: 21586 - DNA, 29 bp, Artificial Sequence
  Probe
ggcgcaatcggttagcgcgcggtacttat

SEQ ID NO: 21587 - DNA, 30 bp, Artificial Sequence
  Probe
ggcgcaatcggttagcgcgcggtacttata

SEQ ID NO: 21588 - DNA, 26 bp, Artificial Sequence
  Probe
ggcgctctcaccgccgcggcccgggt

SEQ ID NO: 21589 - DNA, 27 bp, Artificial Sequence
  Probe
ggcgctctcaccgccgcggcccgggtt

SEQ ID NO: 21590 - DNA, 33 bp, Artificial Sequence; identical to SEQ ID NO: 6455
  Probe

SEQ ID NO: 21591 - DNA, 34 bp, Artificial Sequence
  Probe
ggcggcccgggttcgactcccggtgtgggaacgc

SEQ ID NO: 21592 - DNA, 18 bp, Artificial Sequence
  Probe
ggcgtgattcataccttt

SEQ ID NO: 21593 - DNA, 19 bp, Artificial Sequence
  Probe
ggcgtgattcatacctttt

SEQ ID NO: 21594 - DNA, 20 bp, Artificial Sequence
  Probe
ggcgtgattcataccttttt

SEQ ID NO: 21595 - DNA, 31 bp, Artificial Sequence
  Probe
ggcgtgggttcgaatcccaccgctgccacac

SEQ ID NO: 21596 - DNA, 31 bp, Artificial Sequence
  Probe
ggcgtgggttcgaatcccaccgctgccaggt

SEQ ID NO: 21597 - DNA, 24 bp, Artificial Sequence
  Probe
ggctaaatcctatatatcttaatg

SEQ ID NO: 21598 - DNA, 17 bp, Artificial Sequence
  Probe
ggctagctcagtcggta

SEQ ID NO: 21599 - DNA, 21 bp, Artificial Sequence
  Probe
ggctagctcagtcggtagagc

SEQ ID NO: 21600 - DNA, 26 bp, Artificial Sequence
  Probe
ggctagctcagtcggtagagcatgag

SEQ ID NO: 21601 - DNA, 29 bp, Artificial Sequence
  Probe
ggctagctcagtcggtagagcatgagacc

SEQ ID NO: 21602 - DNA, 30 bp, Artificial Sequence
  Probe
ggctagctcagtcggtagagcatgagaccc

SEQ ID NO: 21603 - DNA, 31 bp, Artificial Sequence
  Probe
ggctagctcagtcggtagagcatgagaccct

SEQ ID NO: 21604 - DNA, 32 bp, Artificial Sequence; identical to SEQ ID NO: 1287
  Probe

SEQ ID NO: 21605 - DNA, 33 bp, Artificial Sequence; identical to SEQ ID NO: 6459
  Probe

SEQ ID NO: 21606 - DNA, 50 bp, Artificial Sequence; identical to SEQ ID NO: 6461
  Probe

SEQ ID NO: 21607 - DNA, 34 bp, Artificial Sequence
  Probe
ggctagctcagtcggtagagcatgggactcttaa

SEQ ID NO: 21608 - DNA, 50 bp, Artificial Sequence; identical to SEQ ID NO: 6462
  Probe

SEQ ID NO: 21609 - DNA, 33 bp, Artificial Sequence
  Probe
ggctaggattcggcgctttcaccgccgcggccc

SEQ ID NO: 21610 - DNA, 16 bp, Artificial Sequence
  Probe
ggctcacatcacccca

SEQ ID NO: 21611 - DNA, 17 bp, Artificial Sequence
  Probe
ggctcacatcaccccat

SEQ ID NO: 21612 - DNA, 18 bp, Artificial Sequence
  Probe
ggctcacatcaccccata

SEQ ID NO: 21613 - DNA, 19 bp, Artificial Sequence
  Probe
ggctcacatcaccccataa

SEQ ID NO: 21614 - DNA, 20 bp, Artificial Sequence
  Probe
ggctcacatcaccccataaa

SEQ ID NO: 21615 - DNA, 21 bp, Artificial Sequence
  Probe
ggctcacatcaccccataaac

SEQ ID NO: 21616 - DNA, 22 bp, Artificial Sequence
  Probe
ggctcacatcaccccataaaca

SEQ ID NO: 21617 - DNA, 23 bp, Artificial Sequence
  Probe
ggctcacatcaccccataaacaa

SEQ ID NO: 21618 - DNA, 24 bp, Artificial Sequence
  Probe
ggctcacatcaccccataaacaaa

SEQ ID NO: 21619 - DNA, 25 bp, Artificial Sequence
  Probe
ggctcacatcaccccataaacaaat

SEQ ID NO: 21620 - DNA, 26 bp, Artificial Sequence
  Probe
ggctcacatcaccccataaacaaata

SEQ ID NO: 21621 - DNA, 16 bp, Artificial Sequence
  Probe
ggctccatagctcagg

SEQ ID NO: 21622 - DNA, 17 bp, Artificial Sequence
  Probe
ggctccatagctcaggg

SEQ ID NO: 21623 - DNA, 18 bp, Artificial Sequence
  Probe
ggctccatagctcagggg

SEQ ID NO: 21624 - DNA, 19 bp, Artificial Sequence
  Probe
ggctccatagctcaggggt

SEQ ID NO: 21625 - DNA, 20 bp, Artificial Sequence
  Probe
ggctccatagctcaggggtt

SEQ ID NO: 21626 - DNA, 23 bp, Artificial Sequence
  Probe
ggctccatagctcaggggttaga

SEQ ID NO: 21627 - DNA, 25 bp, Artificial Sequence
  Probe
ggctccatagctcaggggttagagc

SEQ ID NO: 21628 - DNA, 26 bp, Artificial Sequence
  Probe
ggctccatagctcaggggttagagca

SEQ ID NO: 21629 - DNA, 28 bp, Artificial Sequence
  Probe
ggctccatagctcaggggttagagcact

SEQ ID NO: 21630 - DNA, 29 bp, Artificial Sequence
  Probe
ggctccatagctcaggggttagagcactg

SEQ ID NO: 21631 - DNA, 30 bp, Artificial Sequence; identical to SEQ ID NO: 10696
  Probe

SEQ ID NO: 21632 - DNA, 31 bp, Artificial Sequence; identical to SEQ ID NO: 6482
  Probe

SEQ ID NO: 21633 - DNA, 32 bp, Artificial Sequence; identical to SEQ ID NO: 6483
  Probe

SEQ ID NO: 21634 - DNA, 33 bp, Artificial Sequence; identical to SEQ ID NO: 6484
  Probe

SEQ ID NO: 21635 - DNA, 34 bp, Artificial Sequence; identical to SEQ ID NO: 6485
  Probe

SEQ ID NO: 21636 - DNA, 35 bp, Artificial Sequence; identical to SEQ ID NO: 6486
  Probe

SEQ ID NO: 21637 - DNA, 36 bp, Artificial Sequence; identical to SEQ ID NO: 6487
  Probe

SEQ ID NO: 21638 - DNA, 37 bp, Artificial Sequence; identical to SEQ ID NO: 6488
  Probe

SEQ ID NO: 21639 - DNA, 29 bp, Artificial Sequence
  Probe
ggctccatagctcagtggttagagcactg

SEQ ID NO: 21640 - DNA, 33 bp, Artificial Sequence; identical to SEQ ID NO: 1300
  Probe

SEQ ID NO: 21641 - DNA, 36 bp, Artificial Sequence; identical to SEQ ID NO: 1301
  Probe

SEQ ID NO: 21642 - DNA, 20 bp, Artificial Sequence
  Probe
ggctccgtggcgcaatggat

SEQ ID NO: 21643 - DNA, 29 bp, Artificial Sequence
  Probe
ggctccgtggcgcaatggatagcgcattg

SEQ ID NO: 21644 - DNA, 31 bp, Artificial Sequence
  Probe
ggctccgtggcgcaatggatagcgcattgga

SEQ ID NO: 21645 - DNA, 32 bp, Artificial Sequence; identical to SEQ ID NO: 1304
  Probe

SEQ ID NO: 21646 - DNA, 35 bp, Artificial Sequence
  Probe
ggctccgtggcgcaatggatagcgcattggacttc

SEQ ID NO: 21647 - DNA, 25 bp, Artificial Sequence
  Probe
ggctcgaaggacttcgtctgtaatt

SEQ ID NO: 21648 - DNA, 24 bp, Artificial Sequence
  Probe
ggctcgttggtctaggggtatgat

SEQ ID NO: 21649 - DNA, 25 bp, Artificial Sequence
  Probe
ggctcgttggtctaggggtatgatt

SEQ ID NO: 21650 - DNA, 26 bp, Artificial Sequence
  Probe
ggctcgttggtctaggggtatgattc

SEQ ID NO: 21651 - DNA, 27 bp, Artificial Sequence
  Probe
ggctcgttggtctaggggtatgattct

SEQ ID NO: 21652 - DNA, 28 bp, Artificial Sequence
  Probe
ggctcgttggtctaggggtatgattctc

SEQ ID NO: 21653 - DNA, 29 bp, Artificial Sequence
  Probe
ggctcgttggtctaggggtatgattctcg

SEQ ID NO: 21654 - DNA, 30 bp, Artificial Sequence; identical to SEQ ID NO: 6496
  Probe

SEQ ID NO: 21655 - DNA, 31 bp, Artificial Sequence; identical to SEQ ID NO: 6497
  Probe

SEQ ID NO: 21656 - DNA, 32 bp, Artificial Sequence; identical to SEQ ID NO: 6498
  Probe

SEQ ID NO: 21657 - DNA, 33 bp, Artificial Sequence; identical to SEQ ID NO: 6499
  Probe

SEQ ID NO: 21658 - DNA, 34 bp, Artificial Sequence; identical to SEQ ID NO: 6500
  Probe

SEQ ID NO: 21659 - DNA, 33 bp, Artificial Sequence; identical to SEQ ID NO: 1307
  Probe

SEQ ID NO: 21660 - DNA, 31 bp, Artificial Sequence; identical to SEQ ID NO: 6502
  Probe

SEQ ID NO: 21661 - DNA, 33 bp, Artificial Sequence; identical to SEQ ID NO: 6503
  Probe

SEQ ID NO: 21662 - DNA, 34 bp, Artificial Sequence
  Probe
ggctcgttggtctaggggtatgattctcggtttg

SEQ ID NO: 21663 - DNA, 30 bp, Artificial Sequence; identical to SEQ ID NO: 10734
  Probe

SEQ ID NO: 21664 - DNA, 32 bp, Artificial Sequence; identical to SEQ ID NO: 6504
  Probe

SEQ ID NO: 21665 - DNA, 22 bp, Artificial Sequence
  Probe
ggctggctcgcgatgtctgttt

SEQ ID NO: 21666 - DNA, 23 bp, Artificial Sequence
  Probe
ggctggctcgcgatgtctgtttt

SEQ ID NO: 21667 - DNA, 32 bp, Artificial Sequence
  Probe
ggctgggggatgtagctcagtggtagagcgcg

SEQ ID NO: 21668 - DNA, 34 bp, Artificial Sequence
  Probe
ggctgggggatgtagctcagtggtagagcgcgcg

SEQ ID NO: 21669 - DNA, 32 bp, Artificial Sequence; identical to SEQ ID NO: 6505
  Probe

SEQ ID NO: 21670 - DNA, 38 bp, Artificial Sequence
  Probe
ggctgtggctccgtggcttagctggttaaagcgcctgt

SEQ ID NO: 21671 - DNA, 25 bp, Artificial Sequence
  Probe
ggctgttaaccgaaaggttggtggt

SEQ ID NO: 21672 - DNA, 42 bp, Artificial Sequence
  Probe
ggctgttaaccgaaaggttggtggttcgagcccacccaggga

SEQ ID NO: 21673 - DNA, 22 bp, Artificial Sequence
  Probe
ggcttacgaccccttatttacc

SEQ ID NO: 21674 - DNA, 23 bp, Artificial Sequence
  Probe
ggcttacgaccccttatttaccg

SEQ ID NO: 21675 - DNA, 24 bp, Artificial Sequence
  Probe
ggcttagttggttaaagcgcctgt

SEQ ID NO: 21676 - DNA, 31 bp, Artificial Sequence
  Probe
ggcttgtcctcgttagtatagtggtgagtat

SEQ ID NO: 21677 - DNA, 33 bp, Artificial Sequence
  Probe
ggcttgtcctcgttagtatagtggtgagtatcc

SEQ ID NO: 21678 - DNA, 34 bp, Artificial Sequence
  Probe
ggcttgtcctcgttagtatagtggtgagtatccc

SEQ ID NO: 21679 - DNA, 36 bp, Artificial Sequence
  Probe
ggcttgtcctcgttagtatagtggtgagtatccccg

SEQ ID NO: 21680 - DNA, 38 bp, Artificial Sequence
  Probe
ggcttgtcctcgttagtatagtggtgagtatccccgcc

SEQ ID NO: 21681 - DNA, 40 bp, Artificial Sequence
  Probe
ggcttgtcctcgttagtatagtggtgagtatccccgcctg

SEQ ID NO: 21682 - DNA, 41 bp, Artificial Sequence
  Probe
ggcttgtcctcgttagtatagtggtgagtatccccgcctgt

SEQ ID NO: 21683 - DNA, 42 bp, Artificial Sequence
  Probe
ggcttgtcctcgttagtatagtggtgagtatccccgcctgtc

SEQ ID NO: 21684 - DNA, 17 bp, Artificial Sequence
  Probe
gggacctcacgagactt

SEQ ID NO: 21685 - DNA, 31 bp, Artificial Sequence
  Probe
gggacgaggtggccgagtggttaaggcgatg

SEQ ID NO: 21686 - DNA, 39 bp, Artificial Sequence
  Probe
gggacgaggtggccgagtggttaaggcgatggactgcta

SEQ ID NO: 21687 - DNA, 25 bp, Artificial Sequence
  Probe
gggagaccggggttcaattccccga

SEQ ID NO: 21688 - DNA, 27 bp, Artificial Sequence
  Probe
gggagaccggggttcaattccccgacg

SEQ ID NO: 21689 - DNA, 30 bp, Artificial Sequence; identical to SEQ ID NO: 1312
  Probe

SEQ ID NO: 21690 - DNA, 31 bp, Artificial Sequence; identical to SEQ ID NO: 6508
  Probe

SEQ ID NO: 21691 - DNA, 32 bp, Artificial Sequence; identical to SEQ ID NO: 6509
  Probe

SEQ ID NO: 21692 - DNA, 33 bp, Artificial Sequence; identical to SEQ ID NO: 6510
  Probe

SEQ ID NO: 21693 - DNA, 34 bp, Artificial Sequence
  Probe
gggagaccggggttcaattccccgacggggaggt

SEQ ID NO: 21694 - DNA, 35 bp, Artificial Sequence; identical to SEQ ID NO: 6511
  Probe

SEQ ID NO: 21695 - DNA, 31 bp, Artificial Sequence
  Probe
gggagaccggggttcgattccccaacgggga

SEQ ID NO: 21696 - DNA, 32 bp, Artificial Sequence
  Probe
gggagaccggggttcgattccccaacggggag

SEQ ID NO: 21697 - DNA, 33 bp, Artificial Sequence
  Probe
gggagaccggggttcgattccccaacggggagg

SEQ ID NO: 21698 - DNA, 35 bp, Artificial Sequence; identical to SEQ ID NO: 6512
  Probe

SEQ ID NO: 21699 - DNA, 33 bp, Artificial Sequence; identical to SEQ ID NO: 6516
  Probe

SEQ ID NO: 21700 - DNA, 34 bp, Artificial Sequence
  Probe
gggagaccggggttcgattccccgacggggagaa

SEQ ID NO: 21701 - DNA, 35 bp, Artificial Sequence; identical to SEQ ID NO: 6517
  Probe

SEQ ID NO: 21702 - DNA, 49 bp, Artificial Sequence
  Probe
gggagaccggggttcgattccccgacggggagaaaagttgctttttgca

SEQ ID NO: 21703 - DNA, 50 bp, Artificial Sequence
  Probe
gggagaccggggttcgattccccgacggggagaaaagttgctttttgcat

SEQ ID NO: 21704 - DNA, 34 bp, Artificial Sequence
  Probe
gggagaccggggttcgattccccgacggggagac

SEQ ID NO: 21705 - DNA, 35 bp, Artificial Sequence; identical to SEQ ID NO: 6518
  Probe

SEQ ID NO: 21706 - DNA, 34 bp, Artificial Sequence
  Probe
gggagaccggggttcgattccccgacggggagag

SEQ ID NO: 21707 - DNA, 35 bp, Artificial Sequence
  Probe
gggagaccggggttcgattccccgacggggagagt

SEQ ID NO: 21708 - DNA, 33 bp, Artificial Sequence; identical to SEQ ID NO: 6519
  Probe

SEQ ID NO: 21709 - DNA, 34 bp, Artificial Sequence
  Probe
gggagaccggggttcgattccccgacggggagga

SEQ ID NO: 21710 - DNA, 35 bp, Artificial Sequence
  Probe
gggagaccggggttcgattccccgacggggaggag

SEQ ID NO: 21711 - DNA, 34 bp, Artificial Sequence
  Probe
gggagaccggggttcgattccccgacggggaggc

SEQ ID NO: 21712 - DNA, 35 bp, Artificial Sequence; identical to SEQ ID NO: 6520
  Probe

SEQ ID NO: 21713 - DNA, 36 bp, Artificial Sequence
  Probe
gggagaccggggttcgattccccgacggggaggcac

SEQ ID NO: 21714 - DNA, 35 bp, Artificial Sequence; identical to SEQ ID NO: 6521
  Probe

SEQ ID NO: 21715 - DNA, 25 bp, Artificial Sequence
  Probe
gggagcccggatagctcagtcggta

SEQ ID NO: 21716 - DNA, 27 bp, Artificial Sequence
  Probe
gggagcccggatagctcagtcggtaga

SEQ ID NO: 21717 - DNA, 29 bp, Artificial Sequence
  Probe
gggagcccggatagctcagtcggtagagc

SEQ ID NO: 21718 - DNA, 30 bp, Artificial Sequence
  Probe
gggagcccggatagctcagtcggtagagca

SEQ ID NO: 21719 - DNA, 33 bp, Artificial Sequence
  Probe
gggagcccggatagctcagtcggtagagcatca

SEQ ID NO: 21720 - DNA, 34 bp, Artificial Sequence
  Probe
gggagcccggatagctcagtcggtagagcatcag

SEQ ID NO: 21721 - DNA, 35 bp, Artificial Sequence
  Probe
gggagcccggatagctcagtcggtagagcatcaga

SEQ ID NO: 21722 - DNA, 36 bp, Artificial Sequence
  Probe
gggagcccggatagctcagtcggtagagcatcagac

SEQ ID NO: 21723 - DNA, 37 bp, Artificial Sequence
  Probe
gggagcccggatagctcagtcggtagagcatcagact

SEQ ID NO: 21724 - DNA, 38 bp, Artificial Sequence
  Probe
gggagcccggatagctcagtcggtagagcatcagactt

SEQ ID NO: 21725 - DNA, 39 bp, Artificial Sequence
  Probe
gggagcccggatagctcagtcggtagagcatcagacttt

SEQ ID NO: 21726 - DNA, 40 bp, Artificial Sequence
  Probe
gggagcccggatagctcagtcggtagagcatcagactttt

SEQ ID NO: 21727 - DNA, 41 bp, Artificial Sequence
  Probe
gggagcccggatagctcagtcggtagagcatcagactttta

SEQ ID NO: 21728 - DNA, 42 bp, Artificial Sequence
  Probe
gggagcccggatagctcagtcggtagagcatcagacttttaa

SEQ ID NO: 21729 - DNA, 22 bp, Artificial Sequence
  Probe
gggagcgcccggatagctcagt

SEQ ID NO: 21730 - DNA, 27 bp, Artificial Sequence
  Probe
gggagcgcccggatagctcagtcggta

SEQ ID NO: 21731 - DNA, 28 bp, Artificial Sequence
  Probe
gggagcgcccggatagctcagtcggtag

SEQ ID NO: 21732 - DNA, 29 bp, Artificial Sequence
  Probe
gggagcgcccggatagctcagtcggtaga

SEQ ID NO: 21733 - DNA, 30 bp, Artificial Sequence
  Probe
gggagcgcccggatagctcagtcggtagag

SEQ ID NO: 21734 - DNA, 31 bp, Artificial Sequence
  Probe
gggagcgcccggatagctcagtcggtagagc

SEQ ID NO: 21735 - DNA, 32 bp, Artificial Sequence
  Probe
gggagcgcccggatagctcagtcggtagagca

SEQ ID NO: 21736 - DNA, 33 bp, Artificial Sequence
  Probe
gggagcgcccggatagctcagtcggtagagcat

SEQ ID NO: 21737 - DNA, 35 bp, Artificial Sequence
  Probe
gggagcgcccggatagctcagtcggtagagcatca

SEQ ID NO: 21738 - DNA, 36 bp, Artificial Sequence
  Probe
gggagcgcccggatagctcagtcggtagagcatcag

SEQ ID NO: 21739 - DNA, 37 bp, Artificial Sequence
  Probe
gggagcgcccggatagctcagtcggtagagcatcaga

SEQ ID NO: 21740 - DNA, 38 bp, Artificial Sequence
  Probe
gggagcgcccggatagctcagtcggtagagcatcagac

SEQ ID NO: 21741 - DNA, 39 bp, Artificial Sequence; identical to SEQ ID NO: 6522
  Probe

SEQ ID NO: 21742 - DNA, 40 bp, Artificial Sequence
  Probe
gggagcgcccggatagctcagtcggtagagcatcagactt

SEQ ID NO: 21743 - DNA, 41 bp, Artificial Sequence
  Probe
gggagcgcccggatagctcagtcggtagagcatcagacttt

SEQ ID NO: 21744 - DNA, 42 bp, Artificial Sequence
  Probe
gggagcgcccggatagctcagtcggtagagcatcagactttt

SEQ ID NO: 21745 - DNA, 43 bp, Artificial Sequence
  Probe
gggagcgcccggatagctcagtcggtagagcatcagactttta

SEQ ID NO: 21746 - DNA, 44 bp, Artificial Sequence
  Probe
gggagcgcccggatagctcagtcggtagagcatcagacttttaa

SEQ ID NO: 21747 - DNA, 45 bp, Artificial Sequence
  Probe
gggagcgcccggatagctcagtcggtagagcatcagacttttaat

SEQ ID NO: 21748 - DNA, 50 bp, Artificial Sequence
  Probe
gggagcgcccggatagctcagtcggtagagcatcagacttttaatctgag

SEQ ID NO: 21749 - DNA, 24 bp, Artificial Sequence
  Probe
gggagcgttttgtggatttgtttt

SEQ ID NO: 21750 - DNA, 25 bp, Artificial Sequence
  Probe
gggaggcccgggttcgattcccggc

SEQ ID NO: 21751 - DNA, 26 bp, Artificial Sequence
  Probe
gggaggcccgggttcgattcccggcc

SEQ ID NO: 21752 - DNA, 29 bp, Artificial Sequence
  Probe
gggaggcccgggttcgattcccggccaat

SEQ ID NO: 21753 - DNA, 30 bp, Artificial Sequence
  Probe
gggaggcccgggttcgattcccggccaatg

SEQ ID NO: 21754 - DNA, 31 bp, Artificial Sequence; identical to SEQ ID NO: 6525
  Probe

SEQ ID NO: 21755 - DNA, 32 bp, Artificial Sequence; identical to SEQ ID NO: 6526
  Probe

SEQ ID NO: 21756 - DNA, 35 bp, Artificial Sequence
  Probe
gggaggcccgggttcgattcccggccaatgcaagt

SEQ ID NO: 21757 - DNA, 33 bp, Artificial Sequence
  Probe
gggaggcccgggttcgattcccggccaatgcac

SEQ ID NO: 21758 - DNA, 35 bp, Artificial Sequence
  Probe
gggaggcccgggttcgattcccggccaatgcacga

SEQ ID NO: 21759 - DNA, 35 bp, Artificial Sequence
  Probe
gggaggcccgggttcgattcccggccaatgcagca

SEQ ID NO: 21760 - DNA, 29 bp, Artificial Sequence
  Probe
gggaggcccgggttcgattcccggcccat

SEQ ID NO: 21761 - DNA, 30 bp, Artificial Sequence
  Probe
gggaggcccgggttcgattcccggcccatg

SEQ ID NO: 21762 - DNA, 31 bp, Artificial Sequence; identical to SEQ ID NO: 6527
  Probe

SEQ ID NO: 21763 - DNA, 32 bp, Artificial Sequence; identical to SEQ ID NO: 6528
  Probe

SEQ ID NO: 21764 - DNA, 33 bp, Artificial Sequence
  Probe
gggaggcccgggttcgattcccggcccatgcag

SEQ ID NO: 21765 - DNA, 34 bp, Artificial Sequence
  Probe
gggaggcccgggttcgattcccggcccatgcagc

SEQ ID NO: 21766 - DNA, 35 bp, Artificial Sequence
  Probe
gggaggcccgggttcgattcccggcccatgcagca

SEQ ID NO: 21767 - DNA, 21 bp, Artificial Sequence
  Probe
gggaggtagcgtggccgagtg

SEQ ID NO: 21768 - DNA, 23 bp, Artificial Sequence
  Probe
gggaggtagcgtggccgagtggt

SEQ ID NO: 21769 - DNA, 24 bp, Artificial Sequence
  Probe
gggaggtagcgtggccgagtggtc

SEQ ID NO: 21770 - DNA, 25 bp, Artificial Sequence
  Probe
gggaggtagcgtggccgagtggtct

SEQ ID NO: 21771 - DNA, 26 bp, Artificial Sequence
  Probe
gggaggtagcgtggccgagtggtcta

SEQ ID NO: 21772 - DNA, 27 bp, Artificial Sequence
  Probe
gggaggtagcgtggccgagtggtctaa

SEQ ID NO: 21773 - DNA, 33 bp, Artificial Sequence
  Probe
gggaggtagcgtggccgagtggtctaaggcgct

SEQ ID NO: 21774 - DNA, 37 bp, Artificial Sequence
  Probe
gggaggtagcgtggccgagtggtctaaggcgctggat

SEQ ID NO: 21775 - DNA, 38 bp, Artificial Sequence
  Probe
gggaggtagcgtggccgagtggtctaaggcgctggatt

SEQ ID NO: 21776 - DNA, 39 bp, Artificial Sequence
  Probe
gggaggtagcgtggccgagtggtctaaggcgctggattt

SEQ ID NO: 21777 - DNA, 40 bp, Artificial Sequence
  Probe
gggaggtagcgtggccgagtggtctaaggcgctggattta

SEQ ID NO: 21778 - DNA, 41 bp, Artificial Sequence
  Probe
gggaggtagcgtggccgagtggtctaaggcgctggatttag

SEQ ID NO: 21779 - DNA, 42 bp, Artificial Sequence
  Probe
gggaggtagcgtggccgagtggtctaaggcgctggatttagg

SEQ ID NO: 21780 - DNA, 43 bp, Artificial Sequence
  Probe
gggaggtagcgtggccgagtggtctaaggcgctggatttaggc

SEQ ID NO: 21781 - DNA, 44 bp, Artificial Sequence
  Probe
gggaggtagcgtggccgagtggtctaaggcgctggatttaggct

SEQ ID NO: 21782 - DNA, 50 bp, Artificial Sequence
  Probe
gggaggtagcgtggccgagtggtctaaggcgctggatttaggctccagtc

SEQ ID NO: 21783 - DNA, 25 bp, Artificial Sequence
  Probe
gggatgggttcgattctcatagtcc

SEQ ID NO: 21784 - DNA, 26 bp, Artificial Sequence
  Probe
gggatgggttcgattctcatagtcct

SEQ ID NO: 21785 - DNA, 30 bp, Artificial Sequence; identical to SEQ ID NO: 6529
  Probe

SEQ ID NO: 21786 - DNA, 31 bp, Artificial Sequence; identical to SEQ ID NO: 6530
  Probe

SEQ ID NO: 21787 - DNA, 29 bp, Artificial Sequence
  Probe
gggattagctcaaatggtagagcgctcgc

SEQ ID NO: 21788 - DNA, 24 bp, Artificial Sequence
  Probe
gggattgtgggttcgagtcccatc

SEQ ID NO: 21789 - DNA, 25 bp, Artificial Sequence
  Probe
gggattgtgggttcgagtcccatct

SEQ ID NO: 21790 - DNA, 26 bp, Artificial Sequence
  Probe
gggattgtgggttcgagtcccatctg

SEQ ID NO: 21791 - DNA, 27 bp, Artificial Sequence
  Probe
gggattgtgggttcgagtcccatctgg

SEQ ID NO: 21792 - DNA, 32 bp, Artificial Sequence; identical to SEQ ID NO: 1323
  Probe

SEQ ID NO: 21793 - DNA, 19 bp, Artificial Sequence
  Probe
gggccagtggcgcaatgga

SEQ ID NO: 21794 - DNA, 20 bp, Artificial Sequence
  Probe
gggccagtggcgcaatggat

SEQ ID NO: 21795 - DNA, 26 bp, Artificial Sequence
  Probe
gggcccataacccagaggtcgatgga

SEQ ID NO: 21796 - DNA, 28 bp, Artificial Sequence
  Probe
gggcccataacccagaggtcgatggatc

SEQ ID NO: 21797 - DNA, 29 bp, Artificial Sequence
  Probe
gggcccataacccagaggtcgatggatcg

SEQ ID NO: 21798 - DNA, 50 bp, Artificial Sequence; identical to SEQ ID NO: 6540
  Probe

SEQ ID NO: 21799 - DNA, 16 bp, Artificial Sequence
  Probe
gggcccataccccgaa

SEQ ID NO: 21800 - DNA, 17 bp, Artificial Sequence
  Probe
gggcccataccccgaaa

SEQ ID NO: 21801 - DNA, 21 bp, Artificial Sequence
  Probe
gggcccataccccgaaaatgt

SEQ ID NO: 21802 - DNA, 22 bp, Artificial Sequence
  Probe
gggcccataccccgaaaatgtt

SEQ ID NO: 21803 - DNA, 25 bp, Artificial Sequence
  Probe
gggcccataccccgaaaatgttggt

SEQ ID NO: 21804 - DNA, 26 bp, Artificial Sequence
  Probe
gggcccataccccgaaaatgttggtt

SEQ ID NO: 21805 - DNA, 27 bp, Artificial Sequence
  Probe
gggcccataccccgaaaatgttggtta

SEQ ID NO: 21806 - DNA, 31 bp, Artificial Sequence; identical to SEQ ID NO: 6549
  Probe

SEQ ID NO: 21807 - DNA, 32 bp, Artificial Sequence; identical to SEQ ID NO: 6550
  Probe

SEQ ID NO: 21808 - DNA, 33 bp, Artificial Sequence; identical to SEQ ID NO: 6551
  Probe

SEQ ID NO: 21809 - DNA, 34 bp, Artificial Sequence; identical to SEQ ID NO: 6552
  Probe

SEQ ID NO: 21810 - DNA, 36 bp, Artificial Sequence
  Probe
gggcccataccccgaaaatgttggttatacccttcc

SEQ ID NO: 21811 - DNA, 37 bp, Artificial Sequence; identical to SEQ ID NO: 6554
  Probe

SEQ ID NO: 21812 - DNA, 38 bp, Artificial Sequence
  Probe
gggcccataccccgaaaatgttggttatacccttcccg

SEQ ID NO: 21813 - DNA, 39 bp, Artificial Sequence
  Probe
gggcccataccccgaaaatgttggttatacccttcccgt

SEQ ID NO: 21814 - DNA, 40 bp, Artificial Sequence; identical to SEQ ID NO: 6555
  Probe

SEQ ID NO: 21815 - DNA, 41 bp, Artificial Sequence
  Probe
gggcccataccccgaaaatgttggttatacccttcccgtac

SEQ ID NO: 21816 - DNA, 46 bp, Artificial Sequence; identical to SEQ ID NO: 6558
  Probe

SEQ ID NO: 21817 - DNA, 33 bp, Artificial Sequence
  Probe
gggcccggatagctcagtcggtagagcatcaga

SEQ ID NO: 21818 - DNA, 37 bp, Artificial Sequence
  Probe
gggcccggatagctcagtcggtagagcatcagacttt

SEQ ID NO: 21819 - DNA, 38 bp, Artificial Sequence
  Probe
gggcccggatagctcagtcggtagagcatcagactttt

SEQ ID NO: 21820 - DNA, 29 bp, Artificial Sequence
  Probe
gggcgcccggctagctcagtcggtagagc

SEQ ID NO: 21821 - DNA, 30 bp, Artificial Sequence
  Probe
gggcgcccggctagctcagtcggtagagca

SEQ ID NO: 21822 - DNA, 33 bp, Artificial Sequence
  Probe
gggcggtcctcgttagtatagtggtgagtatcc

SEQ ID NO: 21823 - DNA, 17 bp, Artificial Sequence
  Probe
gggctcacatcacccca

SEQ ID NO: 21824 - DNA, 19 bp, Artificial Sequence
  Probe
gggctcacatcaccccata

SEQ ID NO: 21825 - DNA, 20 bp, Artificial Sequence
  Probe
gggctcacatcaccccataa

SEQ ID NO: 21826 - DNA, 23 bp, Artificial Sequence
  Probe
gggctcacatcaccccataaaca

SEQ ID NO: 21827 - DNA, 25 bp, Artificial Sequence
  Probe
gggctcacatcaccccataaacaaa

SEQ ID NO: 21828 - DNA, 26 bp, Artificial Sequence
  Probe
gggctcacatcaccccataaacaaat

SEQ ID NO: 21829 - DNA, 16 bp, Artificial Sequence
  Probe
ggggaattagctcaaa

SEQ ID NO: 21830 - DNA, 23 bp, Artificial Sequence
  Probe
ggggaattagctcaaatggtaga

SEQ ID NO: 21831 - DNA, 25 bp, Artificial Sequence
  Probe
ggggaattagctcaaatggtagagc

SEQ ID NO: 21832 - DNA, 25 bp, Artificial Sequence
  Probe
ggggacgcgttggtggtgtagtggt

SEQ ID NO: 21833 - DNA, 26 bp, Artificial Sequence
  Probe
ggggacgcgttggtggtgtagtggtg

SEQ ID NO: 21834 - DNA, 27 bp, Artificial Sequence
  Probe
ggggacgcgttggtggtgtagtggtga

SEQ ID NO: 21835 - DNA, 28 bp, Artificial Sequence
  Probe
ggggacgcgttggtggtgtagtggtgag

SEQ ID NO: 21836 - DNA, 29 bp, Artificial Sequence
  Probe
ggggacgcgttggtggtgtagtggtgagc

SEQ ID NO: 21837 - DNA, 30 bp, Artificial Sequence
  Probe
ggggacgcgttggtggtgtagtggtgagca

SEQ ID NO: 21838 - DNA, 33 bp, Artificial Sequence
  Probe
ggggacgcgttggtggtgtagtggtgagcacag

SEQ ID NO: 21839 - DNA, 36 bp, Artificial Sequence
  Probe
ggggacgcgttggtggtgtagtggtgagcacagctg

SEQ ID NO: 21840 - DNA, 38 bp, Artificial Sequence
  Probe
ggggacgcgttggtggtgtagtggtgagcacagctgcc

SEQ ID NO: 21841 - DNA, 41 bp, Artificial Sequence
  Probe
ggggacgcgttggtggtgtagtggtgagcacagctgccttt

SEQ ID NO: 21842 - DNA, 42 bp, Artificial Sequence
  Probe
ggggacgcgttggtggtgtagtggtgagcacagctgcctttc

SEQ ID NO: 21843 - DNA, 50 bp, Artificial Sequence
  Probe
ggggacgcgttggtggtgtagtggtgagcacagctgcctttcaagcagtt

SEQ ID NO: 21844 - DNA, 28 bp, Artificial Sequence
  Probe
ggggagaggcactggtggttcagtggta

SEQ ID NO: 21845 - DNA, 29 bp, Artificial Sequence
  Probe
ggggagaggcactggtggttcagtggtag

SEQ ID NO: 21846 - DNA, 30 bp, Artificial Sequence
  Probe
ggggagaggcactggtggttcagtggtaga

SEQ ID NO: 21847 - DNA, 31 bp, Artificial Sequence
  Probe
ggggagaggcactggtggttcagtggtagaa

SEQ ID NO: 21848 - DNA, 33 bp, Artificial Sequence
  Probe
ggggagaggcactggtggttcagtggtagaatt

SEQ ID NO: 21849 - DNA, 50 bp, Artificial Sequence
  Probe
ggggagaggcactggtggttcagtggtagaattctcgcctcacacgcggg

SEQ ID NO: 21850 - DNA, 21 bp, Artificial Sequence
  Probe
ggggatgtagctcagtggtag

SEQ ID NO: 21851 - DNA, 23 bp, Artificial Sequence
  Probe
ggggatgtagctcagtggtagag

SEQ ID NO: 21852 - DNA, 27 bp, Artificial Sequence
  Probe
ggggatgtagctcagtggtagagcgca

SEQ ID NO: 21853 - DNA, 29 bp, Artificial Sequence
  Probe
ggggatgtagctcagtggtagagcgcatg

SEQ ID NO: 21854 - DNA, 33 bp, Artificial Sequence; identical to SEQ ID NO: 6572
  Probe

SEQ ID NO: 21855 - DNA, 34 bp, Artificial Sequence
  Probe
ggggatgtagctcagtggtagagcgcatgctttg

SEQ ID NO: 21856 - DNA, 35 bp, Artificial Sequence; identical to SEQ ID NO: 1339
  Probe

SEQ ID NO: 21857 - DNA, 36 bp, Artificial Sequence
  Probe
ggggatgtagctcagtggtagagcgcatgctttgca

SEQ ID NO: 21858 - DNA, 39 bp, Artificial Sequence
  Probe
ggggatgtagctcagtggtagagcgcatgctttgcacgt

SEQ ID NO: 21859 - DNA, 29 bp, Artificial Sequence
  Probe
ggggatgtagctcagtggtagagcgcgcg

SEQ ID NO: 21860 - DNA, 30 bp, Artificial Sequence; identical to SEQ ID NO: 10779
  Probe

SEQ ID NO: 21861 - DNA, 32 bp, Artificial Sequence; identical to SEQ ID NO: 1340
  Probe

SEQ ID NO: 21862 - DNA, 33 bp, Artificial Sequence; identical to SEQ ID NO: 6573
  Probe

SEQ ID NO: 21863 - DNA, 25 bp, Artificial Sequence
  Probe
ggggattgtgggttcgagtcccatc

SEQ ID NO: 21864 - DNA, 28 bp, Artificial Sequence
  Probe
ggggattgtgggttcgagtcccatctgg

SEQ ID NO: 21865 - DNA, 30 bp, Artificial Sequence
  Probe
ggggattgtgggttcgagtcccatctgggt

SEQ ID NO: 21866 - DNA, 34 bp, Artificial Sequence
  Probe
ggggcccggatagctcagtcggtagagcatcaga

SEQ ID NO: 21867 - DNA, 36 bp, Artificial Sequence
  Probe
ggggcccggatagctcagtcggtagagcatcagact

SEQ ID NO: 21868 - DNA, 37 bp, Artificial Sequence
  Probe
ggggcccggatagctcagtcggtagagcatcagactt

SEQ ID NO: 21869 - DNA, 38 bp, Artificial Sequence
  Probe
ggggcccggatagctcagtcggtagagcatcagacttt

SEQ ID NO: 21870 - DNA, 39 bp, Artificial Sequence
  Probe
ggggcccggatagctcagtcggtagagcatcagactttt

SEQ ID NO: 21871 - DNA, 23 bp, Artificial Sequence
  Probe
ggggcgtgggttcgaatcccacc

SEQ ID NO: 21872 - DNA, 33 bp, Artificial Sequence
  Probe
ggggcgtgggttcgaatcccaccgctgccaggt

SEQ ID NO: 21873 - DNA, 16 bp, Artificial Sequence
  Probe
gggggattagctcaaa

SEQ ID NO: 21874 - DNA, 26 bp, Artificial Sequence
  Probe
gggggattagctcaaatggtagagcg

SEQ ID NO: 21875 - DNA, 30 bp, Artificial Sequence; identical to SEQ ID NO: 10791
  Probe

SEQ ID NO: 21876 - DNA, 31 bp, Artificial Sequence
  Probe
gggggattagctcaaatggtagagcgctcgc

SEQ ID NO: 21877 - DNA, 33 bp, Artificial Sequence; identical to SEQ ID NO: 6577
  Probe

SEQ ID NO: 21878 - DNA, 24 bp, Artificial Sequence
  Probe
gggggcgtgggttcgaatcccacc

SEQ ID NO: 21879 - DNA, 25 bp, Artificial Sequence
  Probe
gggggcgtgggttcgaatcccaccg

SEQ ID NO: 21880 - DNA, 25 bp, Artificial Sequence
  Probe
gggggtatagctcaggggtagagca

SEQ ID NO: 21881 - DNA, 33 bp, Artificial Sequence
  Probe
gggggtatagctcaggggtagagcacttgactg

SEQ ID NO: 21882 - DNA, 30 bp, Artificial Sequence
  Probe
gggggtatagctcaggggtagagcatttga

SEQ ID NO: 21883 - DNA, 25 bp, Artificial Sequence
  Probe
gggggtatagctcaggtggtagagc

SEQ ID NO: 21884 - DNA, 26 bp, Artificial Sequence
  Probe
gggggtatagctcaggtggtagagca

SEQ ID NO: 21885 - DNA, 28 bp, Artificial Sequence
  Probe
gggggtatagctcaggtggtagagcatt

SEQ ID NO: 21886 - DNA, 31 bp, Artificial Sequence
  Probe
gggggtatagctcaggtggtagagcatttga

SEQ ID NO: 21887 - DNA, 16 bp, Artificial Sequence
  Probe
gggggtatagctcagt

SEQ ID NO: 21888 - DNA, 17 bp, Artificial Sequence
  Probe
gggggtatagctcagtg

SEQ ID NO: 21889 - DNA, 18 bp, Artificial Sequence
  Probe
gggggtatagctcagtgg

SEQ ID NO: 21890 - DNA, 19 bp, Artificial Sequence
  Probe
gggggtatagctcagtggg

SEQ ID NO: 21891 - DNA, 23 bp, Artificial Sequence
  Probe
gggggtatagctcagtgggtaga

SEQ ID NO: 21892 - DNA, 25 bp, Artificial Sequence
  Probe
gggggtatagctcagtgggtagagc

SEQ ID NO: 21893 - DNA, 29 bp, Artificial Sequence
  Probe
gggggtatagctcagtgggtagagcattt

SEQ ID NO: 21894 - DNA, 30 bp, Artificial Sequence; identical to SEQ ID NO: 10810
  Probe

SEQ ID NO: 21895 - DNA, 31 bp, Artificial Sequence
  Probe
gggggtatagctcagtgggtagagcatttga

SEQ ID NO: 21896 - DNA, 32 bp, Artificial Sequence
  Probe
gggggtatagctcagtgggtagagcatttgac

SEQ ID NO: 21897 - DNA, 19 bp, Artificial Sequence
  Probe
gggggtatagctcagtggt

SEQ ID NO: 21898 - DNA, 20 bp, Artificial Sequence
  Probe
gggggtatagctcagtggta

SEQ ID NO: 21899 - DNA, 22 bp, Artificial Sequence
  Probe
gggggtatagctcagtggtaga

SEQ ID NO: 21900 - DNA, 23 bp, Artificial Sequence
  Probe
gggggtatagctcagtggtagag

SEQ ID NO: 21901 - DNA, 24 bp, Artificial Sequence
  Probe
gggggtatagctcagtggtagagc

SEQ ID NO: 21902 - DNA, 25 bp, Artificial Sequence
  Probe
gggggtatagctcagtggtagagca

SEQ ID NO: 21903 - DNA, 26 bp, Artificial Sequence
  Probe
gggggtatagctcagtggtagagcat

SEQ ID NO: 21904 - DNA, 27 bp, Artificial Sequence
  Probe
gggggtatagctcagtggtagagcatt

SEQ ID NO: 21905 - DNA, 28 bp, Artificial Sequence
  Probe
gggggtatagctcagtggtagagcattt

SEQ ID NO: 21906 - DNA, 29 bp, Artificial Sequence
  Probe
gggggtatagctcagtggtagagcatttg

SEQ ID NO: 21907 - DNA, 30 bp, Artificial Sequence; identical to SEQ ID NO: 6598
  Probe

SEQ ID NO: 21908 - DNA, 31 bp, Artificial Sequence; identical to SEQ ID NO: 6599
  Probe

SEQ ID NO: 21909 - DNA, 32 bp, Artificial Sequence; identical to SEQ ID NO: 6600
  Probe

SEQ ID NO: 21910 - DNA, 33 bp, Artificial Sequence; identical to SEQ ID NO: 6601
  Probe

SEQ ID NO: 21911 - DNA, 34 bp, Artificial Sequence; identical to SEQ ID NO: 6602
  Probe

SEQ ID NO: 21912 - DNA, 35 bp, Artificial Sequence; identical to SEQ ID NO: 6603
  Probe

SEQ ID NO: 21913 - DNA, 25 bp, Artificial Sequence
  Probe
gggggtatagctcagtggtagagcg

SEQ ID NO: 21914 - DNA, 16 bp, Artificial Sequence
  Probe
gggggtgtagctcagt

SEQ ID NO: 21915 - DNA, 18 bp, Artificial Sequence
  Probe
gggggtgtagctcagtgg

SEQ ID NO: 21916 - DNA, 20 bp, Artificial Sequence
  Probe
gggggtgtagctcagtggta

SEQ ID NO: 21917 - DNA, 23 bp, Artificial Sequence
  Probe
gggggtgtagctcagtggtagag

SEQ ID NO: 21918 - DNA, 24 bp, Artificial Sequence
  Probe
gggggtgtagctcagtggtagagc

SEQ ID NO: 21919 - DNA, 30 bp, Artificial Sequence
  Probe
gggggtgtagctcagtggtagagcacatgc

SEQ ID NO: 21920 - DNA, 31 bp, Artificial Sequence; identical to SEQ ID NO: 6611
  Probe

SEQ ID NO: 21921 - DNA, 32 bp, Artificial Sequence; identical to SEQ ID NO: 6612
  Probe

SEQ ID NO: 21922 - DNA, 33 bp, Artificial Sequence
  Probe
gggggtgtagctcagtggtagagcacatgcttt

SEQ ID NO: 21923 - DNA, 32 bp, Artificial Sequence; identical to SEQ ID NO: 1365
  Probe

SEQ ID NO: 21924 - DNA, 33 bp, Artificial Sequence; identical to SEQ ID NO: 6614
  Probe

SEQ ID NO: 21925 - DNA, 27 bp, Artificial Sequence
  Probe
gggggtgtagctcagtggtagagcgcg

SEQ ID NO: 21926 - DNA, 33 bp, Artificial Sequence; identical to SEQ ID NO: 6616
  Probe

SEQ ID NO: 21927 - DNA, 34 bp, Artificial Sequence
  Probe
gggggtgtagctcagtggtagagcgcgtgcttag

SEQ ID NO: 21928 - DNA, 35 bp, Artificial Sequence
  Probe
gggggtgtagctcagtggtagagcgcgtgcttagc

SEQ ID NO: 21929 - DNA, 33 bp, Artificial Sequence; identical to SEQ ID NO: 6617
  Probe

SEQ ID NO: 21930 - DNA, 34 bp, Artificial Sequence
  Probe
gggggtgtagctcagtggtagagcgcgtgcttcg

SEQ ID NO: 21931 - DNA, 31 bp, Artificial Sequence; identical to SEQ ID NO: 6619
  Probe

SEQ ID NO: 21932 - DNA, 32 bp, Artificial Sequence; identical to SEQ ID NO: 6620
  Probe

SEQ ID NO: 21933 - DNA, 33 bp, Artificial Sequence; identical to SEQ ID NO: 6621
  Probe

SEQ ID NO: 21934 - DNA, 34 bp, Artificial Sequence; identical to SEQ ID NO: 6622
  Probe

SEQ ID NO: 21935 - DNA, 16 bp, Artificial Sequence
  Probe
ggggtatgattctcgc

SEQ ID NO: 21936 - DNA, 17 bp, Artificial Sequence
  Probe
ggggtatgattctcgct

SEQ ID NO: 21937 - DNA, 21 bp, Artificial Sequence
  Probe
ggggttaggcctctttttacc

SEQ ID NO: 21938 - DNA, 24 bp, Artificial Sequence
  Probe
ggggttaggcctctttttaccagc

SEQ ID NO: 21939 - DNA, 25 bp, Artificial Sequence
  Probe
ggggttaggcctctttttaccagct

SEQ ID NO: 21940 - DNA, 28 bp, Artificial Sequence
  Probe
ggggttcctcgcagcttcgctgcgtgag

SEQ ID NO: 21941 - DNA, 27 bp, Artificial Sequence
  Probe
ggggttcgattccccgacggggaggca

SEQ ID NO: 21942 - DNA, 21 bp, Artificial Sequence
  Probe
ggggttttgcagtccttagct

SEQ ID NO: 21943 - DNA, 30 bp, Artificial Sequence
  Probe
gggtacgcgttggtggtatagtggtgagca

SEQ ID NO: 21944 - DNA, 31 bp, Artificial Sequence
  Probe
gggtacgcgttggtggtatagtggtgagcat

SEQ ID NO: 21945 - DNA, 33 bp, Artificial Sequence
  Probe
gggtacgcgttggtggtatagtggtgagcatag

SEQ ID NO: 21946 - DNA, 36 bp, Artificial Sequence
  Probe
gggtacgcgttggtggtatagtggtgagcatagctg

SEQ ID NO: 21947 - DNA, 38 bp, Artificial Sequence
  Probe
gggtacgcgttggtggtatagtggtgagcatagctgcc

SEQ ID NO: 21948 - DNA, 42 bp, Artificial Sequence
  Probe
gggtacgcgttggtggtatagtggtgagcatagctgccttcc

SEQ ID NO: 21949 - DNA, 50 bp, Artificial Sequence
  Probe
gggtacgcgttggtggtatagtggtgagcatagctgccttccaagcagtt

SEQ ID NO: 21950 - DNA, 33 bp, Artificial Sequence; identical to SEQ ID NO: 1373
  Probe

SEQ ID NO: 21951 - DNA, 28 bp, Artificial Sequence
  Probe
gggtatagctcagtggtagagcatttga

SEQ ID NO: 21952 - DNA, 30 bp, Artificial Sequence; identical to SEQ ID NO: 6643
  Probe

SEQ ID NO: 21953 - DNA, 31 bp, Artificial Sequence; identical to SEQ ID NO: 6644
  Probe

SEQ ID NO: 21954 - DNA, 32 bp, Artificial Sequence; identical to SEQ ID NO: 6645
  Probe

SEQ ID NO: 21955 - DNA, 33 bp, Artificial Sequence; identical to SEQ ID NO: 6646
  Probe

SEQ ID NO: 21956 - DNA, 16 bp, Artificial Sequence
  Probe
gggtatgattctcgct

SEQ ID NO: 21957 - DNA, 33 bp, Artificial Sequence; identical to SEQ ID NO: 6649
  Probe

SEQ ID NO: 21958 - DNA, 34 bp, Artificial Sequence
  Probe
gggtatgattctcgcttagggtgcgagaggtccc

SEQ ID NO: 21959 - DNA, 38 bp, Artificial Sequence
  Probe
gggtatgattctcgcttagggtgcgagaggtcccgggt

SEQ ID NO: 21960 - DNA, 39 bp, Artificial Sequence
  Probe
gggtatgattctcgcttagggtgcgagaggtcccgggtt

SEQ ID NO: 21961 - DNA, 33 bp, Artificial Sequence; identical to SEQ ID NO: 6650
  Probe

SEQ ID NO: 21962 - DNA, 38 bp, Artificial Sequence
  Probe
gggtatgattctcgcttcgggtgcgagaggtcccgggt

SEQ ID NO: 21963 - DNA, 33 bp, Artificial Sequence; identical to SEQ ID NO: 6651
  Probe

SEQ ID NO: 21964 - DNA, 34 bp, Artificial Sequence
  Probe
gggtatgattctcgctttgggtgcgagaggtccc

SEQ ID NO: 21965 - DNA, 36 bp, Artificial Sequence
  Probe
gggtatgattctcgctttgggtgcgagaggtcccgg

SEQ ID NO: 21966 - DNA, 37 bp, Artificial Sequence
  Probe
gggtatgattctcgctttgggtgcgagaggtcccggg

SEQ ID NO: 21967 - DNA, 38 bp, Artificial Sequence
  Probe
gggtatgattctcgctttgggtgcgagaggtcccgggt

SEQ ID NO: 21968 - DNA, 39 bp, Artificial Sequence
  Probe
gggtatgattctcgctttgggtgcgagaggtcccgggtt

SEQ ID NO: 21969 - DNA, 34 bp, Artificial Sequence
  Probe
gggtatgattctcggtttgggtccgagaggtccc

SEQ ID NO: 21970 - DNA, 38 bp, Artificial Sequence
  Probe
gggtatgattctcggtttgggtccgagaggtcccgggt

SEQ ID NO: 21971 - DNA, 24 bp, Artificial Sequence
  Probe
gggtccagggttcaagtccctgtt

SEQ ID NO: 21972 - DNA, 28 bp, Artificial Sequence
  Probe
gggtccagggttcaagtccctgttcggg

SEQ ID NO: 21973 - DNA, 33 bp, Artificial Sequence
  Probe
gggtccagggttcaagtccctgttcgggcggca

SEQ ID NO: 21974 - DNA, 33 bp, Artificial Sequence
  Probe
gggtccagggttcaagtccctgttcgggcgtct

SEQ ID NO: 21975 - DNA, 16 bp, Artificial Sequence
  Probe
gggtccccggtagctc

SEQ ID NO: 21976 - DNA, 17 bp, Artificial Sequence
  Probe
gggtccccggtagctcg

SEQ ID NO: 21977 - DNA, 25 bp, Artificial Sequence
  Probe
gggtccccggtagctcgccgtgatc

SEQ ID NO: 21978 - DNA, 26 bp, Artificial Sequence
  Probe
gggtccccggtagctcgccgtgatcg

SEQ ID NO: 21979 - DNA, 27 bp, Artificial Sequence
  Probe
gggtccccggtagctcgccgtgatcgt

SEQ ID NO: 21980 - DNA, 28 bp, Artificial Sequence
  Probe
gggtccccggtagctcgccgtgatcgta

SEQ ID NO: 21981 - DNA, 29 bp, Artificial Sequence
  Probe
gggtccccggtagctcgccgtgatcgtat

SEQ ID NO: 21982 - DNA, 30 bp, Artificial Sequence
  Probe
gggtccccggtagctcgccgtgatcgtata

SEQ ID NO: 21983 - DNA, 31 bp, Artificial Sequence
  Probe
gggtccccggtagctcgccgtgatcgtatag

SEQ ID NO: 21984 - DNA, 34 bp, Artificial Sequence
  Probe
gggtccccggtagctcgccgtgatcgtatagtgg

SEQ ID NO: 21985 - DNA, 42 bp, Artificial Sequence
  Probe
gggtccccggtagctcgccgtgatcgtatagtggttagtact

SEQ ID NO: 21986 - DNA, 39 bp, Artificial Sequence
  Probe
gggtcgcgagttcaattctcgctggggcctgtgtgtttt

SEQ ID NO: 21987 - DNA, 33 bp, Artificial Sequence
  Probe
gggtcgcgagttcgatcctcgctggggcctcct

SEQ ID NO: 21988 - DNA, 28 bp, Artificial Sequence
  Probe
gggtcgtgggttcgagccccacgttggg

SEQ ID NO: 21989 - DNA, 39 bp, Artificial Sequence; identical to SEQ ID NO: 6655
  Probe

SEQ ID NO: 21990 - DNA, 50 bp, Artificial Sequence; identical to SEQ ID NO: 6656
  Probe

SEQ ID NO: 21991 - DNA, 22 bp, Artificial Sequence
  Probe
gggtggcgccgtggcttagttg

SEQ ID NO: 21992 - DNA, 36 bp, Artificial Sequence
  Probe
gggtggcgccgtggcttagttggttaaagcgcctgt

SEQ ID NO: 21993 - DNA, 38 bp, Artificial Sequence
  Probe
gggtggcgccgtggcttagttggttaaagcgcctgtct

SEQ ID NO: 21994 - DNA, 39 bp, Artificial Sequence
  Probe
gggtggcgccgtggcttagttggttaaagcgcctgtcta

SEQ ID NO: 21995 - DNA, 40 bp, Artificial Sequence
  Probe
gggtggcgccgtggcttagttggttaaagcgcctgtctag

SEQ ID NO: 21996 - DNA, 41 bp, Artificial Sequence
  Probe
gggtggcgccgtggcttagttggttaaagcgcctgtctagt

SEQ ID NO: 21997 - DNA, 42 bp, Artificial Sequence
  Probe
gggtggcgccgtggcttagttggttaaagcgcctgtctagta

SEQ ID NO: 21998 - DNA, 41 bp, Artificial Sequence
  Probe
gggtggctctgtggcgcaatggatagcgcattggacttcta

SEQ ID NO: 21999 - DNA, 28 bp, Artificial Sequence
  Probe
gggtggttcagtggtagaattctcgcct

SEQ ID NO: 22000 - DNA, 30 bp, Artificial Sequence; identical to SEQ ID NO: 6659
  Probe

SEQ ID NO: 22001 - DNA, 31 bp, Artificial Sequence; identical to SEQ ID NO: 1376
  Probe

SEQ ID NO: 22002 - DNA, 23 bp, Artificial Sequence
  Probe
gggttaggcctctttttaccagc

SEQ ID NO: 22003 - DNA, 24 bp, Artificial Sequence
  Probe
gggttaggcctctttttaccagct

SEQ ID NO: 22004 - DNA, 26 bp, Artificial Sequence
  Probe
gggttcaatccccggcacctccacca

SEQ ID NO: 22005 - DNA, 24 bp, Artificial Sequence
  Probe
gggttcaattccccgacggggagg

SEQ ID NO: 22006 - DNA, 26 bp, Artificial Sequence
  Probe
gggttcaattccccgacggggaggtg

SEQ ID NO: 22007 - DNA, 26 bp, Artificial Sequence
  Probe
gggttcaattcccggtcagggaacca

SEQ ID NO: 22008 - DNA, 26 bp, Artificial Sequence
  Probe
gggttcgactcccggtatgggaacaa

SEQ ID NO: 22009 - DNA, 26 bp, Artificial Sequence
  Probe
gggttcgactcccggtgtgggaacgc

SEQ ID NO: 22010 - DNA, 26 bp, Artificial Sequence
  Probe
gggttcgatccccggcatctccattg

SEQ ID NO: 22011 - DNA, 22 bp, Artificial Sequence
  Probe
gggttcgattccccgacgggga

SEQ ID NO: 22012 - DNA, 23 bp, Artificial Sequence
  Probe
gggttcgattccccgacggggag

SEQ ID NO: 22013 - DNA, 24 bp, Artificial Sequence
  Probe
gggttcgattccccgacggggaga

SEQ ID NO: 22014 - DNA, 25 bp, Artificial Sequence
  Probe
gggttcgattccccgacggggagaa

SEQ ID NO: 22015 - DNA, 25 bp, Artificial Sequence
  Probe
gggttcgattccccgacggggagac

SEQ ID NO: 22016 - DNA, 24 bp, Artificial Sequence
  Probe
gggttcgattccccgacggggagg

SEQ ID NO: 22017 - DNA, 25 bp, Artificial Sequence
  Probe
gggttcgattccccgacggggaggc

SEQ ID NO: 22018 - DNA, 26 bp, Artificial Sequence
  Probe
gggttcgattccccgacggggaggca

SEQ ID NO: 22019 - DNA, 23 bp, Artificial Sequence
  Probe
gggttcgattcccggccaacgca

SEQ ID NO: 22020 - DNA, 26 bp, Artificial Sequence
  Probe
gggttcgattcccggccaacgcaagt

SEQ ID NO: 22021 - DNA, 26 bp, Artificial Sequence
  Probe
gggttcgattcccggccaacgcagtg

SEQ ID NO: 22022 - DNA, 26 bp, Artificial Sequence
  Probe
gggttcgattcccggccaatgcacga

SEQ ID NO: 22023 - DNA, 26 bp, Artificial Sequence
  Probe
gggttcgattcccggccaatgcagca

SEQ ID NO: 22024 - DNA, 23 bp, Artificial Sequence
  Probe
gggttcgattcccgggcggcgca

SEQ ID NO: 22025 - DNA, 26 bp, Artificial Sequence
  Probe
gggttcgattcccggtcagggaattg

SEQ ID NO: 22026 - DNA, 26 bp, Artificial Sequence
  Probe
gggttcgattcccggtcatggaacca

SEQ ID NO: 22027 - DNA, 21 bp, Artificial Sequence
  Probe
gggttcgattctcatagtcct

SEQ ID NO: 22028 - DNA, 24 bp, Artificial Sequence
  Probe
gggttcgattctcatagtcctaga

SEQ ID NO: 22029 - DNA, 25 bp, Artificial Sequence
  Probe
gggttcgattctcatagtcctagaa

SEQ ID NO: 22030 - DNA, 26 bp, Artificial Sequence
  Probe
gggttcgattctcatagtcctagaaa

SEQ ID NO: 22031 - DNA, 18 bp, Artificial Sequence
  Probe
gggtttccccgcacaggt

SEQ ID NO: 22032 - DNA, 19 bp, Artificial Sequence
  Probe
gggtttccccgcgcaggtt

SEQ ID NO: 22033 - DNA, 30 bp, Artificial Sequence
  Probe
gggtttccgtagtgtagtggttatcacgtt

SEQ ID NO: 22034 - DNA, 16 bp, Artificial Sequence
  Probe
gggtttctttaagttt

SEQ ID NO: 22035 - DNA, 17 bp, Artificial Sequence
  Probe
gggtttctttaagtttt

SEQ ID NO: 22036 - DNA, 24 bp, Artificial Sequence
  Probe
ggtaaaatggctgagtgaagcatt

SEQ ID NO: 22037 - DNA, 25 bp, Artificial Sequence
  Probe
ggtaaaatggctgagtgaagcattg

SEQ ID NO: 22038 - DNA, 26 bp, Artificial Sequence
  Probe
ggtaaaatggctgagtgaagcattgg

SEQ ID NO: 22039 - DNA, 27 bp, Artificial Sequence
  Probe
ggtaaaatggctgagtgaagcattgga

SEQ ID NO: 22040 - DNA, 28 bp, Artificial Sequence
  Probe
ggtaaaatggctgagtgaagcattggac

SEQ ID NO: 22041 - DNA, 29 bp, Artificial Sequence
  Probe
ggtaaaatggctgagtgaagcattggact

SEQ ID NO: 22042 - DNA, 30 bp, Artificial Sequence; identical to SEQ ID NO: 6688
  Probe

SEQ ID NO: 22043 - DNA, 31 bp, Artificial Sequence; identical to SEQ ID NO: 6689
  Probe

SEQ ID NO: 22044 - DNA, 32 bp, Artificial Sequence; identical to SEQ ID NO: 6690
  Probe

SEQ ID NO: 22045 - DNA, 33 bp, Artificial Sequence; identical to SEQ ID NO: 6691
  Probe

SEQ ID NO: 22046 - DNA, 34 bp, Artificial Sequence; identical to SEQ ID NO: 6692
  Probe

SEQ ID NO: 22047 - DNA, 35 bp, Artificial Sequence; identical to SEQ ID NO: 6693
  Probe

SEQ ID NO: 22048 - DNA, 36 bp, Artificial Sequence; identical to SEQ ID NO: 6694
  Probe

SEQ ID NO: 22049 - DNA, 37 bp, Artificial Sequence; identical to SEQ ID NO: 6695
  Probe

SEQ ID NO: 22050 - DNA, 38 bp, Artificial Sequence; identical to SEQ ID NO: 6696
  Probe

SEQ ID NO: 22051 - DNA, 39 bp, Artificial Sequence
  Probe
ggtaaaatggctgagtgaagcattggactgtaaatctaa

SEQ ID NO: 22052 - DNA, 40 bp, Artificial Sequence
  Probe
ggtaaaatggctgagtgaagcattggactgtaaatctaaa

SEQ ID NO: 22053 - DNA, 38 bp, Artificial Sequence
  Probe
ggtaagcatagctgccttccaagcagttgacccgggtt

SEQ ID NO: 22054 - DNA, 29 bp, Artificial Sequence
  Probe
ggtaatcgcataaaacttaaaactttaca

SEQ ID NO: 22055 - DNA, 32 bp, Artificial Sequence
  Probe
ggtaatcgcataaaacttaaaactttacagtc

SEQ ID NO: 22056 - DNA, 33 bp, Artificial Sequence; identical to SEQ ID NO: 1381
  Probe

SEQ ID NO: 22057 - DNA, 50 bp, Artificial Sequence; identical to SEQ ID NO: 6698
  Probe

SEQ ID NO: 22058 - DNA, 15 bp, Artificial Sequence
  Probe
ggtacccaaatctgc

SEQ ID NO: 22059 - DNA, 16 bp, Artificial Sequence
  Probe
ggtagaattctcgcct

SEQ ID NO: 22060 - DNA, 17 bp, Artificial Sequence
  Probe
ggtagaattctcgcctg

SEQ ID NO: 22061 - DNA, 18 bp, Artificial Sequence
  Probe
ggtagaattctcgcctgc

SEQ ID NO: 22062 - DNA, 19 bp, Artificial Sequence
  Probe
ggtagaattctcgcctgcc

SEQ ID NO: 22063 - DNA, 20 bp, Artificial Sequence
  Probe
ggtagaattctcgcctgcca

SEQ ID NO: 22064 - DNA, 22 bp, Artificial Sequence
  Probe
ggtagaattctcgcctgccacg

SEQ ID NO: 22065 - DNA, 33 bp, Artificial Sequence
  Probe
ggtagaattctcgcctgccacgcgggaggcccg

SEQ ID NO: 22066 - DNA, 37 bp, Artificial Sequence
  Probe
ggtagaattctcgcctgccacgcgggaggcccgggtt

SEQ ID NO: 22067 - DNA, 16 bp, Artificial Sequence
  Probe
ggtagagcatgagact

SEQ ID NO: 22068 - DNA, 32 bp, Artificial Sequence; identical to SEQ ID NO: 6704
  Probe

SEQ ID NO: 22069 - DNA, 16 bp, Artificial Sequence
  Probe
ggtagagcatgggact

SEQ ID NO: 22070 - DNA, 25 bp, Artificial Sequence
  Probe
ggtagagcatgggactcttaatccc

SEQ ID NO: 22071 - DNA, 29 bp, Artificial Sequence
  Probe
ggtagagcatgggactcttaatcccaggg

SEQ ID NO: 22072 - DNA, 32 bp, Artificial Sequence; identical to SEQ ID NO: 6706
  Probe

SEQ ID NO: 22073 - DNA, 34 bp, Artificial Sequence
  Probe
ggtagagcatgggactcttaatcccagggtcgtg

SEQ ID NO: 22074 - DNA, 37 bp, Artificial Sequence
  Probe
ggtagagcatgggactcttaatctcagggtcgtgggt

SEQ ID NO: 22075 - DNA, 26 bp, Artificial Sequence
  Probe
ggtagcgtggccgagcggtctaaggc

SEQ ID NO: 22076 - DNA, 27 bp, Artificial Sequence
  Probe
ggtagcgtggccgagcggtctaaggcg

SEQ ID NO: 22077 - DNA, 34 bp, Artificial Sequence
  Probe
ggtagcgtggccgagcggtctaaggcgctggatt

SEQ ID NO: 22078 - DNA, 35 bp, Artificial Sequence
  Probe
ggtagcgtggccgagcggtctaaggcgctggatta

SEQ ID NO: 22079 - DNA, 36 bp, Artificial Sequence
  Probe
ggtagcgtggccgagcggtctaaggcgctggattaa

SEQ ID NO: 22080 - DNA, 35 bp, Artificial Sequence; identical to SEQ ID NO: 6708
  Probe

SEQ ID NO: 22081 - DNA, 36 bp, Artificial Sequence; identical to SEQ ID NO: 6709
  Probe

SEQ ID NO: 22082 - DNA, 19 bp, Artificial Sequence
  Probe
ggtagcgtggccgagtggt

SEQ ID NO: 22083 - DNA, 21 bp, Artificial Sequence
  Probe
ggtagcgtggccgagtggtct

SEQ ID NO: 22084 - DNA, 25 bp, Artificial Sequence
  Probe
ggtagcgtggccgagtggtctaaga

SEQ ID NO: 22085 - DNA, 26 bp, Artificial Sequence
  Probe
ggtagcgtggccgagtggtctaaggc

SEQ ID NO: 22086 - DNA, 27 bp, Artificial Sequence
  Probe
ggtagcgtggccgagtggtctaaggcg

SEQ ID NO: 22087 - DNA, 28 bp, Artificial Sequence
  Probe
ggtagcgtggccgagtggtctaaggcgc

SEQ ID NO: 22088 - DNA, 30 bp, Artificial Sequence; identical to SEQ ID NO: 10918
  Probe

SEQ ID NO: 22089 - DNA, 31 bp, Artificial Sequence; identical to SEQ ID NO: 6714
  Probe

SEQ ID NO: 22090 - DNA, 34 bp, Artificial Sequence; identical to SEQ ID NO: 1404
  Probe

SEQ ID NO: 22091 - DNA, 50 bp, Artificial Sequence
  Probe
ggtagcgtggccgagtggtctaaggcgctggatttaggctccagtcattt

SEQ ID NO: 22092 - DNA, 16 bp, Artificial Sequence
  Probe
ggtagtgtggccgagc

SEQ ID NO: 22093 - DNA, 24 bp, Artificial Sequence
  Probe
ggtagtgtggccgagcggtctaag

SEQ ID NO: 22094 - DNA, 31 bp, Artificial Sequence; identical to SEQ ID NO: 6723
  Probe

SEQ ID NO: 22095 - DNA, 32 bp, Artificial Sequence; identical to SEQ ID NO: 6724
  Probe

SEQ ID NO: 22096 - DNA, 16 bp, Artificial Sequence
  Probe
ggtatagtggtgagca

SEQ ID NO: 22097 - DNA, 22 bp, Artificial Sequence
  Probe
ggtatagtggtgagcatagctg

SEQ ID NO: 22098 - DNA, 24 bp, Artificial Sequence
  Probe
ggtatagtggtgagcatagctgcc

SEQ ID NO: 22099 - DNA, 27 bp, Artificial Sequence
  Probe
ggtatagtggtgagcatagctgccttc

SEQ ID NO: 22100 - DNA, 22 bp, Artificial Sequence
  Probe
ggtatagtggttagcatagctg

SEQ ID NO: 22101 - DNA, 27 bp, Artificial Sequence
  Probe
ggtatagtggttagcatagctgccttc

SEQ ID NO: 22102 - DNA, 41 bp, Artificial Sequence
  Probe
ggtatagtggttagcatagctgccttccaagcagttgaccc

SEQ ID NO: 22103 - DNA, 17 bp, Artificial Sequence
  Probe
ggtatcatgcaagattc

SEQ ID NO: 22104 - DNA, 33 bp, Artificial Sequence
  Probe
ggtatcatgcaagattcccattcttgcgacccg

SEQ ID NO: 22105 - DNA, 34 bp, Artificial Sequence
  Probe
ggtatcatgcaagattcccattcttgcgacccgg

SEQ ID NO: 22106 - DNA, 36 bp, Artificial Sequence
  Probe
ggtatcatgcaagattcccattcttgcgacccgggt

SEQ ID NO: 22107 - DNA, 32 bp, Artificial Sequence; identical to SEQ ID NO: 6725
  Probe

SEQ ID NO: 22108 - DNA, 33 bp, Artificial Sequence; identical to SEQ ID NO: 6726
  Probe

SEQ ID NO: 22109 - DNA, 37 bp, Artificial Sequence
  Probe
ggtatgattctcgcttagggtgcgagaggtcccgggt

SEQ ID NO: 22110 - DNA, 38 bp, Artificial Sequence
  Probe
ggtatgattctcgcttagggtgcgagaggtcccgggtt

SEQ ID NO: 22111 - DNA, 32 bp, Artificial Sequence; identical to SEQ ID NO: 6727
  Probe

SEQ ID NO: 22112 - DNA, 37 bp, Artificial Sequence
  Probe
ggtatgattctcgcttcgggtgcgagaggtcccgggt

SEQ ID NO: 22113 - DNA, 38 bp, Artificial Sequence
  Probe
ggtatgattctcgcttcgggtgcgagaggtcccgggtt

SEQ ID NO: 22114 - DNA, 32 bp, Artificial Sequence; identical to SEQ ID NO: 6729
  Probe

SEQ ID NO: 22115 - DNA, 34 bp, Artificial Sequence
  Probe
ggtatgattctcgctttgggtgcgagaggtcccg

SEQ ID NO: 22116 - DNA, 36 bp, Artificial Sequence
  Probe
ggtatgattctcgctttgggtgcgagaggtcccggg

SEQ ID NO: 22117 - DNA, 37 bp, Artificial Sequence
  Probe
ggtatgattctcgctttgggtgcgagaggtcccgggt

SEQ ID NO: 22118 - DNA, 38 bp, Artificial Sequence
  Probe
ggtatgattctcgctttgggtgcgagaggtcccgggtt

SEQ ID NO: 22119 - DNA, 33 bp, Artificial Sequence; identical to SEQ ID NO: 1408
  Probe

SEQ ID NO: 22120 - DNA, 23 bp, Artificial Sequence
  Probe
ggtcagctaaataagctatcggg

SEQ ID NO: 22121 - DNA, 25 bp, Artificial Sequence
  Probe
ggtcagctaaataagctatcgggcc

SEQ ID NO: 22122 - DNA, 26 bp, Artificial Sequence
  Probe
ggtcagctaaataagctatcgggccc

SEQ ID NO: 22123 - DNA, 27 bp, Artificial Sequence
  Probe
ggtcagctaaataagctatcgggccca

SEQ ID NO: 22124 - DNA, 28 bp, Artificial Sequence
  Probe
ggtcagctaaataagctatcgggcccat

SEQ ID NO: 22125 - DNA, 29 bp, Artificial Sequence
  Probe
ggtcagctaaataagctatcgggcccata

SEQ ID NO: 22126 - DNA, 30 bp, Artificial Sequence; identical to SEQ ID NO: 6735
  Probe

SEQ ID NO: 22127 - DNA, 31 bp, Artificial Sequence; identical to SEQ ID NO: 6736
  Probe

SEQ ID NO: 22128 - DNA, 37 bp, Artificial Sequence; identical to SEQ ID NO: 6739
  Probe

SEQ ID NO: 22129 - DNA, 38 bp, Artificial Sequence
  Probe
ggtcagctaaataagctatcgggcccataccccgaaaa

SEQ ID NO: 22130 - DNA, 40 bp, Artificial Sequence; identical to SEQ ID NO: 6741
  Probe

SEQ ID NO: 22131 - DNA, 41 bp, Artificial Sequence; identical to SEQ ID NO: 6742
  Probe

SEQ ID NO: 22132 - DNA, 42 bp, Artificial Sequence; identical to SEQ ID NO: 6743
  Probe

SEQ ID NO: 22133 - DNA, 43 bp, Artificial Sequence; identical to SEQ ID NO: 6744
  Probe

SEQ ID NO: 22134 - DNA, 44 bp, Artificial Sequence; identical to SEQ ID NO: 6745
  Probe

SEQ ID NO: 22135 - DNA, 45 bp, Artificial Sequence; identical to SEQ ID NO: 6746
  Probe

SEQ ID NO: 22136 - DNA, 50 bp, Artificial Sequence; identical to SEQ ID NO: 1410
  Probe

SEQ ID NO: 22137 - DNA, 36 bp, Artificial Sequence
  Probe
ggtcatcacgttcgcctaacacgcgaaaggtccccg

SEQ ID NO: 22138 - DNA, 38 bp, Artificial Sequence
  Probe
ggtcatcacgttcgcctaacacgcgaaaggtccccggt

SEQ ID NO: 22139 - DNA, 23 bp, Artificial Sequence
  Probe
ggtcatgggtggttgcgttttgg

SEQ ID NO: 22140 - DNA, 27 bp, Artificial Sequence
  Probe
ggtccagggttcaagtccctgttcggg

SEQ ID NO: 22141 - DNA, 32 bp, Artificial Sequence
  Probe
ggtccagggttcaagtccctgttcgggcggca

SEQ ID NO: 22142 - DNA, 17 bp, Artificial Sequence
  Probe
ggtcccatggtgtaatg

SEQ ID NO: 22143 - DNA, 20 bp, Artificial Sequence
  Probe
ggtcccatggtgtaatggtt

SEQ ID NO: 22144 - DNA, 26 bp, Artificial Sequence
  Probe
ggtcccatggtgtaatggttagcact

SEQ ID NO: 22145 - DNA, 31 bp, Artificial Sequence
  Probe
ggtcccatggtgtaatggttagcactctgga

SEQ ID NO: 22146 - DNA, 33 bp, Artificial Sequence; identical to SEQ ID NO: 1415
  Probe

SEQ ID NO: 22147 - DNA, 26 bp, Artificial Sequence
  Probe
ggtcccgggttcaaatcccggacgag

SEQ ID NO: 22148 - DNA, 32 bp, Artificial Sequence
  Probe
ggtcccgggttcaaatcccggacgagccccct

SEQ ID NO: 22149 - DNA, 32 bp, Artificial Sequence; identical to SEQ ID NO: 6752
  Probe

SEQ ID NO: 22150 - DNA, 23 bp, Artificial Sequence
  Probe
ggtcccgggttcgatccccagca

SEQ ID NO: 22151 - DNA, 25 bp, Artificial Sequence
  Probe
ggtcccgggttcgatccccagcatc

SEQ ID NO: 22152 - DNA, 26 bp, Artificial Sequence
  Probe
ggtcccgggttcgatccccagcatct

SEQ ID NO: 22153 - DNA, 32 bp, Artificial Sequence
  Probe
ggtcccgggttcgatccccagcatctccagtg

SEQ ID NO: 22154 - DNA, 36 bp, Artificial Sequence
  Probe
ggtcccgggttcgatccccagcatctccagtgtttt

SEQ ID NO: 22155 - DNA, 23 bp, Artificial Sequence
  Probe
ggtcccgggttcgatccccggca

SEQ ID NO: 22156 - DNA, 32 bp, Artificial Sequence
  Probe
ggtccctcctcgttagtatagtggtgagtatc

SEQ ID NO: 22157 - DNA, 33 bp, Artificial Sequence
  Probe
ggtccctcctcgttagtatagtggtgagtatcc

SEQ ID NO: 22158 - DNA, 36 bp, Artificial Sequence
  Probe
ggtccctcctcgttagtatagtggtgagtatccccg

SEQ ID NO: 22159 - DNA, 38 bp, Artificial Sequence
  Probe
ggtccctcctcgttagtatagtggtgagtatccccgcc

SEQ ID NO: 22160 - DNA, 21 bp, Artificial Sequence
  Probe
ggtcctagcctttctattagc

SEQ ID NO: 22161 - DNA, 27 bp, Artificial Sequence
  Probe
ggtcctgggttcgagccccagtggaac

SEQ ID NO: 22162 - DNA, 31 bp, Artificial Sequence
  Probe
ggtcctgggttcgagccccagtggaaccacg

SEQ ID NO: 22163 - DNA, 32 bp, Artificial Sequence; identical to SEQ ID NO: 6754
  Probe

SEQ ID NO: 22164 - DNA, 32 bp, Artificial Sequence; identical to SEQ ID NO: 6755
  Probe

SEQ ID NO: 22165 - DNA, 38 bp, Artificial Sequence
  Probe
ggtcgcgagttcaattctcgctggggcctgtgtgtttt

SEQ ID NO: 22166 - DNA, 39 bp, Artificial Sequence
  Probe
ggtcgcgagttcaattctcgctggggcctgtgtgttttt

SEQ ID NO: 22167 - DNA, 32 bp, Artificial Sequence; identical to SEQ ID NO: 6757
  Probe

SEQ ID NO: 22168 - DNA, 32 bp, Artificial Sequence; identical to SEQ ID NO: 6758
  Probe

SEQ ID NO: 22169 - DNA, 31 bp, Artificial Sequence
  Probe
ggtcgctggttcgaatccggctcgaaggacg

SEQ ID NO: 22170 - DNA, 31 bp, Artificial Sequence
  Probe
ggtcgctggttcgattccggctcgaaggact

SEQ ID NO: 22171 - DNA, 32 bp, Artificial Sequence
  Probe
ggtcgtgagttcgatcctcacacggggcacaa

SEQ ID NO: 22172 - DNA, 27 bp, Artificial Sequence
  Probe
ggtcgtgggttcgagccccacgttggg

SEQ ID NO: 22173 - DNA, 17 bp, Artificial Sequence
  Probe
ggtcgtggttgtagtcc

SEQ ID NO: 22174 - DNA, 20 bp, Artificial Sequence
  Probe
ggtcgtggttgtagtccgtg

SEQ ID NO: 22175 - DNA, 21 bp, Artificial Sequence
  Probe
ggtcgtggttgtagtccgtgc

SEQ ID NO: 22176 - DNA, 24 bp, Artificial Sequence
  Probe
ggtcgtggttgtagtccgtgcgag

SEQ ID NO: 22177 - DNA, 27 bp, Artificial Sequence
  Probe
ggtcgtggttgtagtccgtgcgagaat

SEQ ID NO: 22178 - DNA, 29 bp, Artificial Sequence
  Probe
ggtcgtggttgtagtccgtgcgagaataa

SEQ ID NO: 22179 - DNA, 31 bp, Artificial Sequence; identical to SEQ ID NO: 6765
  Probe

SEQ ID NO: 22180 - DNA, 16 bp, Artificial Sequence
  Probe
ggtctaaggcgccaga

SEQ ID NO: 22181 - DNA, 20 bp, Artificial Sequence
  Probe
ggtctagtggttaggattcg

SEQ ID NO: 22182 - DNA, 21 bp, Artificial Sequence
  Probe
ggtctagtggttaggattcgg

SEQ ID NO: 22183 - DNA, 22 bp, Artificial Sequence
  Probe
ggtctagtggttaggattcggc

SEQ ID NO: 22184 - DNA, 24 bp, Artificial Sequence
  Probe
ggtctagtggttaggattcggcgc

SEQ ID NO: 22185 - DNA, 27 bp, Artificial Sequence
  Probe
ggtctagtggttaggattcggcgctct

SEQ ID NO: 22186 - DNA, 29 bp, Artificial Sequence
  Probe
ggtctagtggttaggattcggcgctctca

SEQ ID NO: 22187 - DNA, 30 bp, Artificial Sequence
  Probe
ggtctagtggttaggattcggcgctctcac

SEQ ID NO: 22188 - DNA, 41 bp, Artificial Sequence
  Probe
ggtctagtggttaggattcggcgctctcaccgccgcggccc

SEQ ID NO: 22189 - DNA, 26 bp, Artificial Sequence
  Probe
ggtctcgtaaaccgaagatcacgggt

SEQ ID NO: 22190 - DNA, 34 bp, Artificial Sequence
  Probe
ggtgagcatagctgccttccaagcagttgacccg

SEQ ID NO: 22191 - DNA, 35 bp, Artificial Sequence
  Probe
ggtgagcatagctgccttccaagcagttgacccgg

SEQ ID NO: 22192 - DNA, 37 bp, Artificial Sequence
  Probe
ggtgagcatagctgccttccaagcagttgacccgggt

SEQ ID NO: 22193 - DNA, 38 bp, Artificial Sequence
  Probe
ggtgagcatagctgccttccaagcagttgacccgggtt

SEQ ID NO: 22194 - DNA, 30 bp, Artificial Sequence
  Probe
ggtgagcccggctagctcagtcggtagagc

SEQ ID NO: 22195 - DNA, 31 bp, Artificial Sequence
  Probe
ggtgagcccggctagctcagtcggtagagca

SEQ ID NO: 22196 - DNA, 19 bp, Artificial Sequence
  Probe
ggtgagtatccccgcctgt

SEQ ID NO: 22197 - DNA, 21 bp, Artificial Sequence
  Probe
ggtgagtatccccgcctgtca

SEQ ID NO: 22198 - DNA, 32 bp, Artificial Sequence
  Probe
ggtgagtatccccgcctgtcacgcgggagacc

SEQ ID NO: 22199 - DNA, 33 bp, Artificial Sequence
  Probe
ggtgagtatccccgcctgtcacgcgggagaccg

SEQ ID NO: 22200 - DNA, 23 bp, Artificial Sequence
  Probe
ggtgcaactccaaataaaagtaa

SEQ ID NO: 22201 - DNA, 30 bp, Artificial Sequence
  Probe
ggtgcatgggtggttcagtggtagaattct

SEQ ID NO: 22202 - DNA, 32 bp, Artificial Sequence
  Probe
ggtgcatgggtggttcagtggtagaattctcg

SEQ ID NO: 22203 - DNA, 36 bp, Artificial Sequence
  Probe
ggtgcatgggtggttcagtggtagaattctcgcctg

SEQ ID NO: 22204 - DNA, 27 bp, Artificial Sequence
  Probe
ggtgctaataacgccaaggtcgcgggt

SEQ ID NO: 22205 - DNA, 28 bp, Artificial Sequence
  Probe
ggtgctaataacgccaaggtcgcgggtt

SEQ ID NO: 22206 - DNA, 27 bp, Artificial Sequence
  Probe
ggtgctgataacaccaaggtcgcgggc

SEQ ID NO: 22207 - DNA, 50 bp, Artificial Sequence; identical to SEQ ID NO: 6773
  Probe

SEQ ID NO: 22208 - DNA, 16 bp, Artificial Sequence
  Probe
ggtggagttaaagact

SEQ ID NO: 22209 - DNA, 28 bp, Artificial Sequence
  Probe
ggtggagttaaagactttttctctgatt

SEQ ID NO: 22210 - DNA, 29 bp, Artificial Sequence
  Probe
ggtggagttaaagactttttctctgattt

SEQ ID NO: 22211 - DNA, 31 bp, Artificial Sequence; identical to SEQ ID NO: 6778
  Probe

SEQ ID NO: 22212 - DNA, 27 bp, Artificial Sequence
  Probe
ggtggcccgggttcgactcccggtatg

SEQ ID NO: 22213 - DNA, 28 bp, Artificial Sequence
  Probe
ggtggcccgggttcgactcccggtatgg

SEQ ID NO: 22214 - DNA, 29 bp, Artificial Sequence
  Probe
ggtggcccgggttcgactcccggtatggg

SEQ ID NO: 22215 - DNA, 30 bp, Artificial Sequence
  Probe
ggtggcccgggttcgactcccggtatggga

SEQ ID NO: 22216 - DNA, 33 bp, Artificial Sequence; identical to SEQ ID NO: 6780
  Probe

SEQ ID NO: 22217 - DNA, 34 bp, Artificial Sequence
  Probe
ggtggcccgggttcgactcccggtatgggaacaa

SEQ ID NO: 22218 - DNA, 33 bp, Artificial Sequence; identical to SEQ ID NO: 6781
  Probe

SEQ ID NO: 22219 - DNA, 25 bp, Artificial Sequence
  Probe
ggtggtatagtggtgagcatagctg

SEQ ID NO: 22220 - DNA, 25 bp, Artificial Sequence
  Probe
ggtggtatagtggttagcatagctg

SEQ ID NO: 22221 - DNA, 23 bp, Artificial Sequence
  Probe
ggtggtctagtggttaggattcg

SEQ ID NO: 22222 - DNA, 24 bp, Artificial Sequence
  Probe
ggtggtctagtggttaggattcgg

SEQ ID NO: 22223 - DNA, 27 bp, Artificial Sequence
  Probe
ggtggtctagtggttaggattcggcgc

SEQ ID NO: 22224 - DNA, 30 bp, Artificial Sequence
  Probe
ggtggtctagtggttaggattcggcgctct

SEQ ID NO: 22225 - DNA, 31 bp, Artificial Sequence
  Probe
ggtggtctagtggttaggattcggcgctctc

SEQ ID NO: 22226 - DNA, 32 bp, Artificial Sequence
  Probe
ggtggtctagtggttaggattcggcgctctca

SEQ ID NO: 22227 - DNA, 16 bp, Artificial Sequence
  Probe
ggtggttcagtggtag

SEQ ID NO: 22228 - DNA, 17 bp, Artificial Sequence
  Probe
ggtggttcagtggtaga

SEQ ID NO: 22229 - DNA, 18 bp, Artificial Sequence
  Probe
ggtggttcagtggtagaa

SEQ ID NO: 22230 - DNA, 19 bp, Artificial Sequence
  Probe
ggtggttcagtggtagaat

SEQ ID NO: 22231 - DNA, 24 bp, Artificial Sequence
  Probe
ggtggttcagtggtagaattctcg

SEQ ID NO: 22232 - DNA, 25 bp, Artificial Sequence
  Probe
ggtggttcagtggtagaattctcgc

SEQ ID NO: 22233 - DNA, 26 bp, Artificial Sequence
  Probe
ggtggttcagtggtagaattctcgcc

SEQ ID NO: 22234 - DNA, 27 bp, Artificial Sequence
  Probe
ggtggttcagtggtagaattctcgcct

SEQ ID NO: 22235 - DNA, 29 bp, Artificial Sequence
  Probe
ggtggttcagtggtagaattctcgcctcc

SEQ ID NO: 22236 - DNA, 28 bp, Artificial Sequence
  Probe
ggtggttcagtggtagaattctcgcctg

SEQ ID NO: 22237 - DNA, 29 bp, Artificial Sequence
  Probe
ggtggttcagtggtagaattctcgcctgc

SEQ ID NO: 22238 - DNA, 30 bp, Artificial Sequence; identical to SEQ ID NO: 6787
  Probe

SEQ ID NO: 22239 - DNA, 30 bp, Artificial Sequence
  Probe
ggtggttctaacttgctggggtggcggttt

SEQ ID NO: 22240 - DNA, 31 bp, Artificial Sequence
  Probe
ggtgtagctcagtggtagagcgcgtgcttag

SEQ ID NO: 22241 - DNA, 31 bp, Artificial Sequence
  Probe
ggtgtagctcagtggtagagcgcgtgcttcg

SEQ ID NO: 22242 - DNA, 19 bp, Artificial Sequence
  Probe
ggtgtagtggtatcatgca

SEQ ID NO: 22243 - DNA, 21 bp, Artificial Sequence
  Probe
ggtgtagtggtatcatgcaag

SEQ ID NO: 22244 - DNA, 24 bp, Artificial Sequence
  Probe
ggtgtagtggtatcatgcaagatt

SEQ ID NO: 22245 - DNA, 42 bp, Artificial Sequence
  Probe
ggtgtagtggtatcatgcaagattcccattcttgcgacccgg

SEQ ID NO: 22246 - DNA, 27 bp, Artificial Sequence
  Probe
ggtgtcaggatggccgagtggtctaag

SEQ ID NO: 22247 - DNA, 17 bp, Artificial Sequence
  Probe
ggttagcactctggact

SEQ ID NO: 22248 - DNA, 19 bp, Artificial Sequence
  Probe
ggttagcactctggactct

SEQ ID NO: 22249 - DNA, 33 bp, Artificial Sequence
  Probe
ggttagcactctggactctgaatccagcgatcc

SEQ ID NO: 22250 - DNA, 34 bp, Artificial Sequence
  Probe
ggttagcactctggactctgaatccagcgatccg

SEQ ID NO: 22251 - DNA, 38 bp, Artificial Sequence
  Probe
ggttagcactctggactctgaatccagcgatccgagtt

SEQ ID NO: 22252 - DNA, 33 bp, Artificial Sequence
  Probe
ggttagcactctggactttgaatccagcgatcc

SEQ ID NO: 22253 - DNA, 37 bp, Artificial Sequence
  Probe
ggttagcactctggactttgaatccagcgatccgagt

SEQ ID NO: 22254 - DNA, 38 bp, Artificial Sequence
  Probe
ggttagcactctggactttgaatccagcgatccgagtt

SEQ ID NO: 22255 - DNA, 39 bp, Artificial Sequence
  Probe
ggttagcactctggactttgaatccagcgatccgagttc

SEQ ID NO: 22256 - DNA, 37 bp, Artificial Sequence
  Probe
ggttagcatagctgccttccaagcagttgacccgggt

SEQ ID NO: 22257 - DNA, 21 bp, Artificial Sequence
  Probe
ggttaggattcggcgctctca

SEQ ID NO: 22258 - DNA, 33 bp, Artificial Sequence
  Probe
ggttaggattcggcgctctcaccgccgcggccc

SEQ ID NO: 22259 - DNA, 37 bp, Artificial Sequence
  Probe
ggttaggattcggcgctctcaccgccgcggcccgggt

SEQ ID NO: 22260 - DNA, 22 bp, Artificial Sequence
  Probe
ggttaggcctctttttaccagc

SEQ ID NO: 22261 - DNA, 23 bp, Artificial Sequence
  Probe
ggttaggcctctttttaccagct

SEQ ID NO: 22262 - DNA, 18 bp, Artificial Sequence
  Probe
ggttatacccttcccgta

SEQ ID NO: 22263 - DNA, 19 bp, Artificial Sequence
  Probe
ggttatacccttcccgtac

SEQ ID NO: 22264 - DNA, 20 bp, Artificial Sequence
  Probe
ggttatacccttcccgtact

SEQ ID NO: 22265 - DNA, 21 bp, Artificial Sequence
  Probe
ggttatacccttcccgtacta

SEQ ID NO: 22266 - DNA, 24 bp, Artificial Sequence
  Probe
ggttatacccttcccgtactaatt

SEQ ID NO: 22267 - DNA, 36 bp, Artificial Sequence
  Probe
ggttatcacattcgcctcacacgcgaaaggtccccg

SEQ ID NO: 22268 - DNA, 38 bp, Artificial Sequence
  Probe
ggttatcacattcgcctcacacgcgaaaggtccccggt

SEQ ID NO: 22269 - DNA, 38 bp, Artificial Sequence
  Probe
ggttatcacgtctgctttacacgcagaaggtcctgggt

SEQ ID NO: 22270 - DNA, 36 bp, Artificial Sequence
  Probe
ggttatcacgttcgcctaacacgcgaaaggtccccg

SEQ ID NO: 22271 - DNA, 37 bp, Artificial Sequence
  Probe
ggttatcacgttcgcctaacacgcgaaaggtccccgg

SEQ ID NO: 22272 - DNA, 38 bp, Artificial Sequence
  Probe
ggttatcacgttcgcctaacacgcgaaaggtccccggt

SEQ ID NO: 22273 - DNA, 33 bp, Artificial Sequence
  Probe
ggttatcacgttcgcctcacacgcgaaaggtcc

SEQ ID NO: 22274 - DNA, 34 bp, Artificial Sequence
  Probe
ggttatcacgttcgcctcacacgcgaaaggtccc

SEQ ID NO: 22275 - DNA, 36 bp, Artificial Sequence
  Probe
ggttatcacgttcgcctcacacgcgaaaggtccccg

SEQ ID NO: 22276 - DNA, 38 bp, Artificial Sequence
  Probe
ggttatcacgttcgcctcacacgcgaaaggtccccggt

SEQ ID NO: 22277 - DNA, 39 bp, Artificial Sequence
  Probe
ggttatcacgttcgcctcacacgcgaaaggtccccggtt

SEQ ID NO: 22278 - DNA, 24 bp, Artificial Sequence
  Probe
ggttcaaatcccggacgagccccc

SEQ ID NO: 22279 - DNA, 25 bp, Artificial Sequence
  Probe
ggttcaaatcccggacgagccccct

SEQ ID NO: 22280 - DNA, 25 bp, Artificial Sequence
  Probe
ggttcaaatccgggtgccccctcaa

SEQ ID NO: 22281 - DNA, 25 bp, Artificial Sequence
  Probe
ggttcaagtccctgttcgggcggca

SEQ ID NO: 22282 - DNA, 23 bp, Artificial Sequence
  Probe
ggttcaattccccgacggggagg

SEQ ID NO: 22283 - DNA, 24 bp, Artificial Sequence
  Probe
ggttcaattccccgacggggaggt

SEQ ID NO: 22284 - DNA, 25 bp, Artificial Sequence
  Probe
ggttcaattccccgacggggaggtg

SEQ ID NO: 22285 - DNA, 25 bp, Artificial Sequence
  Probe
ggttcaattcccggtcagggaacca

SEQ ID NO: 22286 - DNA, 25 bp, Artificial Sequence
  Probe
ggttcaattcctcttcttaacaaca

SEQ ID NO: 22287 - DNA, 16 bp, Artificial Sequence
  Probe
ggttcagtggtagaat

SEQ ID NO: 22288 - DNA, 19 bp, Artificial Sequence
  Probe
ggttcagtggtagaattct

SEQ ID NO: 22289 - DNA, 22 bp, Artificial Sequence
  Probe
ggttcagtggtagaattctcgc

SEQ ID NO: 22290 - DNA, 23 bp, Artificial Sequence
  Probe
ggttcagtggtagaattctcgcc

SEQ ID NO: 22291 - DNA, 24 bp, Artificial Sequence
  Probe
ggttcagtggtagaattctcgcct

SEQ ID NO: 22292 - DNA, 26 bp, Artificial Sequence
  Probe
ggttcagtggtagaattctcgcctcc

SEQ ID NO: 22293 - DNA, 25 bp, Artificial Sequence
  Probe
ggttcagtggtagaattctcgcctg

SEQ ID NO: 22294 - DNA, 26 bp, Artificial Sequence
  Probe
ggttcagtggtagaattctcgcctgc

SEQ ID NO: 22295 - DNA, 27 bp, Artificial Sequence
  Probe
ggttcagtggtagaattctcgcctgcc

SEQ ID NO: 22296 - DNA, 32 bp, Artificial Sequence
  Probe
ggttcagtggtagaattctcgcctgccacgcg

SEQ ID NO: 22297 - DNA, 18 bp, Artificial Sequence
  Probe
ggttccatagtgtagcgg

SEQ ID NO: 22298 - DNA, 23 bp, Artificial Sequence
  Probe
ggttccatagtgtagcggttatc

SEQ ID NO: 22299 - DNA, 24 bp, Artificial Sequence
  Probe
ggttccatagtgtagcggttatca

SEQ ID NO: 22300 - DNA, 35 bp, Artificial Sequence
  Probe
ggttccatagtgtagcggttatcacgtctgcttta

SEQ ID NO: 22301 - DNA, 36 bp, Artificial Sequence; identical to SEQ ID NO: 1436
  Probe

SEQ ID NO: 22302 - DNA, 39 bp, Artificial Sequence
  Probe
ggttccatagtgtagcggttatcacgtctgctttacacg

SEQ ID NO: 22303 - DNA, 40 bp, Artificial Sequence
  Probe
ggttccatagtgtagcggttatcacgtctgctttacacgc

SEQ ID NO: 22304 - DNA, 41 bp, Artificial Sequence
  Probe
ggttccatagtgtagcggttatcacgtctgctttacacgca

SEQ ID NO: 22305 - DNA, 17 bp, Artificial Sequence
  Probe
ggttccatagtgtagtg

SEQ ID NO: 22306 - DNA, 19 bp, Artificial Sequence
  Probe
ggttccatagtgtagtggt

SEQ ID NO: 22307 - DNA, 22 bp, Artificial Sequence
  Probe
ggttccatagtgtagtggttat

SEQ ID NO: 22308 - DNA, 24 bp, Artificial Sequence
  Probe
ggttccatagtgtagtggttatca

SEQ ID NO: 22309 - DNA, 25 bp, Artificial Sequence
  Probe
ggttccatagtgtagtggttatcac

SEQ ID NO: 22310 - DNA, 26 bp, Artificial Sequence
  Probe
ggttccatagtgtagtggttatcaca

SEQ ID NO: 22311 - DNA, 27 bp, Artificial Sequence
  Probe
ggttccatagtgtagtggttatcacat

SEQ ID NO: 22312 - DNA, 27 bp, Artificial Sequence
  Probe
ggttccatagtgtagtggttatcacgt

SEQ ID NO: 22313 - DNA, 38 bp, Artificial Sequence
  Probe
ggttccatagtgtagtggttatcacgtctgctttacac

SEQ ID NO: 22314 - DNA, 41 bp, Artificial Sequence
  Probe
ggttccatagtgtagtggttatcacgtctgctttacacgca

SEQ ID NO: 22315 - DNA, 49 bp, Artificial Sequence
  Probe
ggttccatagtgtagtggttatcacgtctgctttacacgcagaaggtcc

SEQ ID NO: 22316 - DNA, 29 bp, Artificial Sequence
  Probe
ggttccatggtgtaatggtgagcactctg

SEQ ID NO: 22317 - DNA, 26 bp, Artificial Sequence
  Probe
ggttccatggtgtaatggttagcact

SEQ ID NO: 22318 - DNA, 27 bp, Artificial Sequence
  Probe
ggttccatggtgtaatggttagcactc

SEQ ID NO: 22319 - DNA, 28 bp, Artificial Sequence
  Probe
ggttccatggtgtaatggttagcactct

SEQ ID NO: 22320 - DNA, 29 bp, Artificial Sequence
  Probe
ggttccatggtgtaatggttagcactctg

SEQ ID NO: 22321 - DNA, 31 bp, Artificial Sequence
  Probe
ggttccatggtgtaatggttagcactctgga

SEQ ID NO: 22322 - DNA, 37 bp, Artificial Sequence; identical to SEQ ID NO: 1461
  Probe

SEQ ID NO: 22323 - DNA, 26 bp, Artificial Sequence
  Probe
ggttcctcgcagcttcgctgcgtgag

SEQ ID NO: 22324 - DNA, 25 bp, Artificial Sequence
  Probe
ggttcgaaaccgggcggaaacacct

SEQ ID NO: 22325 - DNA, 25 bp, Artificial Sequence
  Probe
ggttcgaatcccaccgctgccacac

SEQ ID NO: 22326 - DNA, 25 bp, Artificial Sequence
  Probe
ggttcgaatcccaccgctgccaggt

SEQ ID NO: 22327 - DNA, 25 bp, Artificial Sequence
  Probe
ggttcgaatcccacttctgacacaa

SEQ ID NO: 22328 - DNA, 25 bp, Artificial Sequence
  Probe
ggttcgaatcccagcggtgcctccg

SEQ ID NO: 22329 - DNA, 25 bp, Artificial Sequence
  Probe
ggttcgactcccggtatgggaacaa

SEQ ID NO: 22330 - DNA, 23 bp, Artificial Sequence
  Probe
ggttcgactcccggtgtgggaac

SEQ ID NO: 22331 - DNA, 25 bp, Artificial Sequence
  Probe
ggttcgactcccggtgtgggaacgc

SEQ ID NO: 22332 - DNA, 25 bp, Artificial Sequence
  Probe
ggttcgagccccacgttgggcggca

SEQ ID NO: 22333 - DNA, 25 bp, Artificial Sequence
  Probe
ggttcgagtcccttcgtggtcgttg

SEQ ID NO: 22334 - DNA, 25 bp, Artificial Sequence
  Probe
ggttcgatccccagcatctccagtg

SEQ ID NO: 22335 - DNA, 25 bp, Artificial Sequence
  Probe
ggttcgatccccagtacctccaggc

SEQ ID NO: 22336 - DNA, 16 bp, Artificial Sequence
  Probe
ggttcgatccccggca

SEQ ID NO: 22337 - DNA, 25 bp, Artificial Sequence
  Probe
ggttcgatccccggcatctccattg

SEQ ID NO: 22338 - DNA, 25 bp, Artificial Sequence
  Probe
ggttcgatcccgggcggaaacaggt

SEQ ID NO: 22339 - DNA, 25 bp, Artificial Sequence
  Probe
ggttcgattccccaacggggaggct

SEQ ID NO: 22340 - DNA, 20 bp, Artificial Sequence
  Probe
ggttcgattccccgacgggg

SEQ ID NO: 22341 - DNA, 23 bp, Artificial Sequence
  Probe
ggttcgattccccgacggggaga

SEQ ID NO: 22342 - DNA, 24 bp, Artificial Sequence
  Probe
ggttcgattccccgacggggagaa

SEQ ID NO: 22343 - DNA, 25 bp, Artificial Sequence
  Probe
ggttcgattccccgacggggagaaa

SEQ ID NO: 22344 - DNA, 24 bp, Artificial Sequence
  Probe
ggttcgattccccgacggggagac

SEQ ID NO: 22345 - DNA, 25 bp, Artificial Sequence
  Probe
ggttcgattccccgacggggagacg

SEQ ID NO: 22346 - DNA, 25 bp, Artificial Sequence
  Probe
ggttcgattccccgacggggagagt

SEQ ID NO: 22347 - DNA, 23 bp, Artificial Sequence
  Probe
ggttcgattccccgacggggagg

SEQ ID NO: 22348 - DNA, 24 bp, Artificial Sequence
  Probe
ggttcgattccccgacggggagga

SEQ ID NO: 22349 - DNA, 24 bp, Artificial Sequence
  Probe
ggttcgattccccgacggggaggc

SEQ ID NO: 22350 - DNA, 25 bp, Artificial Sequence
  Probe
ggttcgattccccgacggggaggca

SEQ ID NO: 22351 - DNA, 26 bp, Artificial Sequence
  Probe
ggttcgattccccgacggggaggcac

SEQ ID NO: 22352 - DNA, 25 bp, Artificial Sequence
  Probe
ggttcgattccccgacggggaggcc

SEQ ID NO: 22353 - DNA, 16 bp, Artificial Sequence
  Probe
ggttcgattcccggcc

SEQ ID NO: 22354 - DNA, 25 bp, Artificial Sequence
  Probe
ggttcgattcccggccaatgcacga

SEQ ID NO: 22355 - DNA, 25 bp, Artificial Sequence
  Probe
ggttcgattcccggccaatgcagca

SEQ ID NO: 22356 - DNA, 25 bp, Artificial Sequence
  Probe
ggttcgattcccggtcatggaacca

SEQ ID NO: 22357 - DNA, 25 bp, Artificial Sequence
  Probe
ggttcgattcctggtcagggaacca

SEQ ID NO: 22358 - DNA, 24 bp, Artificial Sequence
  Probe
ggttcgattccttccttttttgtc

SEQ ID NO: 22359 - DNA, 20 bp, Artificial Sequence
  Probe
ggttcgattctcatagtcct

SEQ ID NO: 22360 - DNA, 23 bp, Artificial Sequence
  Probe
ggttcgattctcatagtcctaga

SEQ ID NO: 22361 - DNA, 24 bp, Artificial Sequence
  Probe
ggttcgattctcatagtcctagaa

SEQ ID NO: 22362 - DNA, 25 bp, Artificial Sequence
  Probe
ggttcgattctcatagtcctagaaa

SEQ ID NO: 22363 - DNA, 20 bp, Artificial Sequence
  Probe
ggttgtagtccgtgcgagaa

SEQ ID NO: 22364 - DNA, 21 bp, Artificial Sequence
  Probe
ggttgtagtccgtgcgagaat

SEQ ID NO: 22365 - DNA, 22 bp, Artificial Sequence
  Probe
ggttgtagtccgtgcgagaata

SEQ ID NO: 22366 - DNA, 23 bp, Artificial Sequence
  Probe
ggttgtagtccgtgcgagaataa

SEQ ID NO: 22367 - DNA, 25 bp, Artificial Sequence
  Probe
ggttgtagtccgtgcgagaataatg

SEQ ID NO: 22368 - DNA, 19 bp, Artificial Sequence
  Probe
ggtttaagtcccattggtc

SEQ ID NO: 22369 - DNA, 24 bp, Artificial Sequence
  Probe
ggtttaagtcccattggtctagta

SEQ ID NO: 22370 - DNA, 29 bp, Artificial Sequence
  Probe
ggtttccgtagtgtagtggttatcacgtt

SEQ ID NO: 22371 - DNA, 34 bp, Artificial Sequence
  Probe
ggtttccgtagtgtagtggttatcacgttcgcct

SEQ ID NO: 22372 - DNA, 36 bp, Artificial Sequence
  Probe
ggtttccgtagtgtagtggttatcacgttcgcctca

SEQ ID NO: 22373 - DNA, 26 bp, Artificial Sequence
  Probe
ggtttggtcctagcctttctattagc

SEQ ID NO: 22374 - DNA, 32 bp, Artificial Sequence
  Probe
ggtttttcatatcattggtcgtggttgtagtc

SEQ ID NO: 22375 - DNA, 33 bp, Artificial Sequence; identical to SEQ ID NO: 6869
  Probe

SEQ ID NO: 22376 - DNA, 36 bp, Artificial Sequence; identical to SEQ ID NO: 6870
  Probe

SEQ ID NO: 22377 - DNA, 38 bp, Artificial Sequence; identical to SEQ ID NO: 6871
  Probe

SEQ ID NO: 22378 - DNA, 20 bp, Artificial Sequence
  Probe
gtaaacaggagatcctgggt

SEQ ID NO: 22379 - DNA, 33 bp, Artificial Sequence
  Probe
gtaaacaggagatcctgggttcgaatcccagcg

SEQ ID NO: 22380 - DNA, 36 bp, Artificial Sequence
  Probe
gtaaacaggagatcctgggttcgaatcccagcgggg

SEQ ID NO: 22381 - DNA, 37 bp, Artificial Sequence
  Probe
gtaaacaggagatcctgggttcgaatcccagcggggc

SEQ ID NO: 22382 - DNA, 40 bp, Artificial Sequence
  Probe
gtaaacaggagatcctgggttcgaatcccagcggggcctg

SEQ ID NO: 22383 - DNA, 40 bp, Artificial Sequence
  Probe
gtaaacaggagatcctgggttcgaatcccagcggggcctt

SEQ ID NO: 22384 - DNA, 42 bp, Artificial Sequence
  Probe
gtaaacaggagatcctgggttcgaatcccagcggggccttac

SEQ ID NO: 22385 - DNA, 37 bp, Artificial Sequence
  Probe
gtaaacaggagatcctgggttcgaatcccagcggtgc

SEQ ID NO: 22386 - DNA, 38 bp, Artificial Sequence
  Probe
gtaaacaggagatcctgggttcgaatcccagcggtgcc

SEQ ID NO: 22387 - DNA, 40 bp, Artificial Sequence
  Probe
gtaaacaggagatcctgggttcgaatcccagcggtgcctc

SEQ ID NO: 22388 - DNA, 42 bp, Artificial Sequence; identical to SEQ ID NO: 6874
  Probe

SEQ ID NO: 22389 - DNA, 16 bp, Artificial Sequence
  Probe
gtaaaccaggggtcgc

SEQ ID NO: 22390 - DNA, 17 bp, Artificial Sequence
  Probe
gtaaaccaggggtcgcg

SEQ ID NO: 22391 - DNA, 42 bp, Artificial Sequence
  Probe
gtaaaccaggggtcgcgagttcaaatctcgctggggcctcgg

SEQ ID NO: 22392 - DNA, 42 bp, Artificial Sequence; identical to SEQ ID NO: 6876
  Probe

SEQ ID NO: 22393 - DNA, 42 bp, Artificial Sequence
  Probe
gtaaaccaggggtcgcgagttcgatcctcgctggggcctcct

SEQ ID NO: 22394 - DNA, 20 bp, Artificial Sequence
  Probe
gtaaaccgaagatcacgggt

SEQ ID NO: 22395 - DNA, 42 bp, Artificial Sequence
  Probe
gtaaaccgaagatcacgggttcgaaccccgtccgtgcctgat

SEQ ID NO: 22396 - DNA, 42 bp, Artificial Sequence
  Probe
gtaaaccgaagatcgcgggttcgaaccccgtccgtgcctgag

SEQ ID NO: 22397 - DNA, 32 bp, Artificial Sequence; identical to SEQ ID NO: 6877
  Probe

SEQ ID NO: 22398 - DNA, 36 bp, Artificial Sequence; identical to SEQ ID NO: 6879
  Probe

SEQ ID NO: 22399 - DNA, 37 bp, Artificial Sequence; identical to SEQ ID NO: 6880
  Probe

SEQ ID NO: 22400 - DNA, 38 bp, Artificial Sequence; identical to SEQ ID NO: 6881
  Probe

SEQ ID NO: 22401 - DNA, 36 bp, Artificial Sequence
  Probe
gtaaataataggagcttaaacccccttatttctagg

SEQ ID NO: 22402 - DNA, 37 bp, Artificial Sequence; identical to SEQ ID NO: 6883
  Probe

SEQ ID NO: 22403 - DNA, 42 bp, Artificial Sequence; identical to SEQ ID NO: 6884
  Probe

SEQ ID NO: 22404 - DNA, 40 bp, Artificial Sequence; identical to SEQ ID NO: 6888
  Probe

SEQ ID NO: 22405 - DNA, 22 bp, Artificial Sequence
  Probe
gtaagcaccttgcctgcgggct

SEQ ID NO: 22406 - DNA, 23 bp, Artificial Sequence
  Probe
gtaagcaccttgcctgcgggctt

SEQ ID NO: 22407 - DNA, 32 bp, Artificial Sequence
  Probe
gtaagcatagctgccttccaagcagttgaccc

SEQ ID NO: 22408 - DNA, 30 bp, Artificial Sequence; identical to SEQ ID NO: 6891
  Probe

SEQ ID NO: 22409 - DNA, 31 bp, Artificial Sequence; identical to SEQ ID NO: 6892
  Probe

SEQ ID NO: 22410 - DNA, 32 bp, Artificial Sequence; identical to SEQ ID NO: 6893
  Probe

SEQ ID NO: 22411 - DNA, 33 bp, Artificial Sequence; identical to SEQ ID NO: 6894
  Probe

SEQ ID NO: 22412 - DNA, 34 bp, Artificial Sequence; identical to SEQ ID NO: 6895
  Probe

SEQ ID NO: 22413 - DNA, 35 bp, Artificial Sequence; identical to SEQ ID NO: 6896
  Probe

SEQ ID NO: 22414 - DNA, 36 bp, Artificial Sequence; identical to SEQ ID NO: 6897
  Probe

SEQ ID NO: 22415 - DNA, 37 bp, Artificial Sequence; identical to SEQ ID NO: 6898
  Probe

SEQ ID NO: 22416 - DNA, 39 bp, Artificial Sequence; identical to SEQ ID NO: 6899
  Probe

SEQ ID NO: 22417 - DNA, 41 bp, Artificial Sequence; identical to SEQ ID NO: 6901
  Probe

SEQ ID NO: 22418 - DNA, 43 bp, Artificial Sequence; identical to SEQ ID NO: 6903
  Probe

SEQ ID NO: 22419 - DNA, 44 bp, Artificial Sequence; identical to SEQ ID NO: 6904
  Probe

SEQ ID NO: 22420 - DNA, 45 bp, Artificial Sequence; identical to SEQ ID NO: 6905
  Probe

SEQ ID NO: 22421 - DNA, 46 bp, Artificial Sequence; identical to SEQ ID NO: 6906
  Probe

SEQ ID NO: 22422 - DNA, 50 bp, Artificial Sequence; identical to SEQ ID NO: 6907
  Probe

SEQ ID NO: 22423 - DNA, 23 bp, Artificial Sequence
  Probe
gtaatcgcataaaacttaaaact

SEQ ID NO: 22424 - DNA, 32 bp, Artificial Sequence
  Probe
gtaatcgcataaaacttaaaactttacagtca

SEQ ID NO: 22425 - DNA, 16 bp, Artificial Sequence
  Probe
gtaccgttaacttcca

SEQ ID NO: 22426 - DNA, 27 bp, Artificial Sequence
  Probe
gtaccgttaacttccaattaactagtt

SEQ ID NO: 22427 - DNA, 31 bp, Artificial Sequence; identical to SEQ ID NO: 6912
  Probe

SEQ ID NO: 22428 - DNA, 32 bp, Artificial Sequence
  Probe
gtaccgttaacttccaattaactagttttgac

SEQ ID NO: 22429 - DNA, 36 bp, Artificial Sequence
  Probe
gtaccgttaacttccaattaactagttttgacaaca

SEQ ID NO: 22430 - DNA, 50 bp, Artificial Sequence; identical to SEQ ID NO: 1465
  Probe

SEQ ID NO: 22431 - DNA, 23 bp, Artificial Sequence
  Probe
gtaccttgatgtcgcctcaattt

SEQ ID NO: 22432 - DNA, 25 bp, Artificial Sequence
  Probe
gtaccttgatgtcgcctcaatttct

SEQ ID NO: 22433 - DNA, 30 bp, Artificial Sequence
  Probe
gtaccttgatgtcgcctcaatttctcaacg

SEQ ID NO: 22434 - DNA, 38 bp, Artificial Sequence
  Probe
gtacgaggccccgggttcgacccccggctcctccagtt

SEQ ID NO: 22435 - DNA, 38 bp, Artificial Sequence; identical to SEQ ID NO: 6914
  Probe

SEQ ID NO: 22436 - DNA, 34 bp, Artificial Sequence
  Probe
gtacgcgaggcattggtggttcagtggtagaatt

SEQ ID NO: 22437 - DNA, 36 bp, Artificial Sequence
  Probe
gtacgcgaggcattggtggttcagtggtagaattct

SEQ ID NO: 22438 - DNA, 38 bp, Artificial Sequence
  Probe
gtacgcgaggcattggtggttcagtggtagaattctcg

SEQ ID NO: 22439 - DNA, 36 bp, Artificial Sequence
  Probe
gtagaattctcgcctcccacgcgggagacccgggtt

SEQ ID NO: 22440 - DNA, 31 bp, Artificial Sequence
  Probe
gtagaattctcgcctgccacgcgggaggccc

SEQ ID NO: 22441 - DNA, 35 bp, Artificial Sequence
  Probe
gtagaattctcgcctgccacgcgggaggcccgggt

SEQ ID NO: 22442 - DNA, 50 bp, Artificial Sequence
  Probe
gtagaattctcgcctgccacgcgggaggcccgggttcgattcccggccca

SEQ ID NO: 22443 - DNA, 36 bp, Artificial Sequence
  Probe
gtagagcatgagactcttaatctcagggtcgtgggt

SEQ ID NO: 22444 - DNA, 16 bp, Artificial Sequence
  Probe
gtagagcatgggactc

SEQ ID NO: 22445 - DNA, 33 bp, Artificial Sequence; identical to SEQ ID NO: 6915
  Probe

SEQ ID NO: 22446 - DNA, 36 bp, Artificial Sequence
  Probe
gtagagcatgggactcttaatcccagggtcgtgggt

SEQ ID NO: 22447 - DNA, 29 bp, Artificial Sequence
  Probe
gtagaggttccatagtgtagtggttatca

SEQ ID NO: 22448 - DNA, 31 bp, Artificial Sequence
  Probe
gtagaggttccatagtgtagtggttatcacg

SEQ ID NO: 22449 - DNA, 32 bp, Artificial Sequence
  Probe
gtagaggttccatagtgtagtggttatcacgt

SEQ ID NO: 22450 - DNA, 33 bp, Artificial Sequence
  Probe
gtagaggttccatagtgtagtggttatcacgtc

SEQ ID NO: 22451 - DNA, 35 bp, Artificial Sequence
  Probe
gtagaggttccatagtgtagtggttatcacgtctg

SEQ ID NO: 22452 - DNA, 36 bp, Artificial Sequence
  Probe
gtagaggttccatagtgtagtggttatcacgtctgc

SEQ ID NO: 22453 - DNA, 37 bp, Artificial Sequence
  Probe
gtagaggttccatagtgtagtggttatcacgtctgct

SEQ ID NO: 22454 - DNA, 39 bp, Artificial Sequence
  Probe
gtagaggttccatagtgtagtggttatcacgtctgcttt

SEQ ID NO: 22455 - DNA, 27 bp, Artificial Sequence
  Probe
gtagctcagtggtagagcgcatgctta

SEQ ID NO: 22456 - DNA, 27 bp, Artificial Sequence
  Probe
gtagctcagtggtagagcgcatgcttc

SEQ ID NO: 22457 - DNA, 16 bp, Artificial Sequence
  Probe
gtagtccgtgcgagaa

SEQ ID NO: 22458 - DNA, 18 bp, Artificial Sequence
  Probe
gtagtccgtgcgagaata

SEQ ID NO: 22459 - DNA, 19 bp, Artificial Sequence
  Probe
gtagtccgtgcgagaataa

SEQ ID NO: 22460 - DNA, 21 bp, Artificial Sequence
  Probe
gtagtccgtgcgagaataatg

SEQ ID NO: 22461 - DNA, 17 bp, Artificial Sequence
  Probe
gtagtcgtggccgagtg

SEQ ID NO: 22462 - DNA, 20 bp, Artificial Sequence
  Probe
gtagtcgtggccgagtggtt

SEQ ID NO: 22463 - DNA, 38 bp, Artificial Sequence
  Probe
gtagtcgtggccgagtggttaaggtgatggactagaaa

SEQ ID NO: 22464 - DNA, 42 bp, Artificial Sequence
  Probe
gtagtggttatcacgttcgcctcacacgcgaaaggtccccgg

SEQ ID NO: 22465 - DNA, 43 bp, Artificial Sequence
  Probe
gtagtggttatcacgttcgcctcacacgcgaaaggtccccggt

SEQ ID NO: 22466 - DNA, 26 bp, Artificial Sequence
  Probe
gtagtgtagcggttatcacattcgcc

SEQ ID NO: 22467 - DNA, 22 bp, Artificial Sequence
  Probe
gtagtgtagtggtcatcacgtt

SEQ ID NO: 22468 - DNA, 25 bp, Artificial Sequence
  Probe
gtagtgtagtggtcatcacgttcgc

SEQ ID NO: 22469 - DNA, 26 bp, Artificial Sequence
  Probe
gtagtgtagtggtcatcacgttcgcc

SEQ ID NO: 22470 - DNA, 22 bp, Artificial Sequence
  Probe
gtagtgtagtggttatcacgtt

SEQ ID NO: 22471 - DNA, 25 bp, Artificial Sequence
  Probe
gtagtgtagtggttatcacgttcgc

SEQ ID NO: 22472 - DNA, 26 bp, Artificial Sequence
  Probe
gtagtgtagtggttatcacgttcgcc

SEQ ID NO: 22473 - DNA, 27 bp, Artificial Sequence
  Probe
gtagtgtagtggttatcacgttcgcct

SEQ ID NO: 22474 - DNA, 28 bp, Artificial Sequence
  Probe
gtagtgtagtggttatcacgttcgcctc

SEQ ID NO: 22475 - DNA, 29 bp, Artificial Sequence
  Probe
gtagtgtagtggttatcacgttcgcctca

SEQ ID NO: 22476 - DNA, 26 bp, Artificial Sequence
  Probe
gtatagagcagagtggcgcagcggaa

SEQ ID NO: 22477 - DNA, 31 bp, Artificial Sequence; identical to SEQ ID NO: 6923
  Probe

SEQ ID NO: 22478 - DNA, 26 bp, Artificial Sequence
  Probe
gtatagtggtgagcatagctgccttc

SEQ ID NO: 22479 - DNA, 21 bp, Artificial Sequence
  Probe
gtatagtggtgagtatccccg

SEQ ID NO: 22480 - DNA, 22 bp, Artificial Sequence
  Probe
gtatagtggtgagtatccccgc

SEQ ID NO: 22481 - DNA, 23 bp, Artificial Sequence
  Probe
gtatagtggtgagtatccccgcc

SEQ ID NO: 22482 - DNA, 24 bp, Artificial Sequence
  Probe
gtatagtggtgagtatccccgcct

SEQ ID NO: 22483 - DNA, 26 bp, Artificial Sequence
  Probe
gtatagtggtgagtatccccgcctgt

SEQ ID NO: 22484 - DNA, 27 bp, Artificial Sequence
  Probe
gtatagtggtgagtatccccgcctgtc

SEQ ID NO: 22485 - DNA, 31 bp, Artificial Sequence
  Probe
gtatcatgcaagattcccattcttgcgaccc

SEQ ID NO: 22486 - DNA, 33 bp, Artificial Sequence
  Probe
gtatcatgcaagattcccattcttgcgacccgg

SEQ ID NO: 22487 - DNA, 36 bp, Artificial Sequence
  Probe
gtatcatgcaagattcccattcttgcgacccgggtt

SEQ ID NO: 22488 - DNA, 28 bp, Artificial Sequence
  Probe
gtatccccgcctgtcacgcgggagaccg

SEQ ID NO: 22489 - DNA, 29 bp, Artificial Sequence
  Probe
gtatccccgcctgtcacgcgggagaccgg

SEQ ID NO: 22490 - DNA, 33 bp, Artificial Sequence
  Probe
gtatccccgcctgtcacgcgggagaccggggtt

SEQ ID NO: 22491 - DNA, 34 bp, Artificial Sequence
  Probe
gtatccccgcctgtcacgcgggagaccggggttc

SEQ ID NO: 22492 - DNA, 38 bp, Artificial Sequence
  Probe
gtatgaggccccgggttcaatccccggcatctccagac

SEQ ID NO: 22493 - DNA, 29 bp, Artificial Sequence
  Probe
gtatgaggccccgggttcgatccccggca

SEQ ID NO: 22494 - DNA, 32 bp, Artificial Sequence
  Probe
gtatgaggccccgggttcgatccccggcatct

SEQ ID NO: 22495 - DNA, 33 bp, Artificial Sequence
  Probe
gtatgaggccccgggttcgatccccggcatctc

SEQ ID NO: 22496 - DNA, 36 bp, Artificial Sequence
  Probe
gtatgaggccccgggttcgatccccggcatctccaa

SEQ ID NO: 22497 - DNA, 36 bp, Artificial Sequence
  Probe
gtatgaggccccgggttcgatccccggcatctccag

SEQ ID NO: 22498 - DNA, 38 bp, Artificial Sequence
  Probe
gtatgaggccccgggttcgatccccggcatctccagtg

SEQ ID NO: 22499 - DNA, 36 bp, Artificial Sequence
  Probe
gtatgaggccccgggttcgatccccggcatctccat

SEQ ID NO: 22500 - DNA, 37 bp, Artificial Sequence
  Probe
gtatgaggccccgggttcgatccccggcatctccatt

SEQ ID NO: 22501 - DNA, 38 bp, Artificial Sequence
  Probe
gtatgaggccccgggttcgatccccggcatctccattg

SEQ ID NO: 22502 - DNA, 38 bp, Artificial Sequence
  Probe
gtatgaggcctcgggttcgatccccgacacctccaagc

SEQ ID NO: 22503 - DNA, 16 bp, Artificial Sequence
  Probe
gtatgaggtcccgggt

SEQ ID NO: 22504 - DNA, 38 bp, Artificial Sequence
  Probe
gtatgaggtcccgggttcgatccccggcacctccaaac

SEQ ID NO: 22505 - DNA, 32 bp, Artificial Sequence
  Probe
gtatgaggtcccgggttcgatccccggcatct

SEQ ID NO: 22506 - DNA, 33 bp, Artificial Sequence
  Probe
gtatgaggtcccgggttcgatccccggcatctc

SEQ ID NO: 22507 - DNA, 35 bp, Artificial Sequence
  Probe
gtatgaggtcccgggttcgatccccggcatctcca

SEQ ID NO: 22508 - DNA, 36 bp, Artificial Sequence
  Probe
gtatgaggtcccgggttcgatccccggcatctccaa

SEQ ID NO: 22509 - DNA, 37 bp, Artificial Sequence
  Probe
gtatgaggtcccgggttcgatccccggcatctccaag

SEQ ID NO: 22510 - DNA, 38 bp, Artificial Sequence; identical to SEQ ID NO: 6928
  Probe

SEQ ID NO: 22511 - DNA, 37 bp, Artificial Sequence
  Probe
gtatgaggtcccgggttcgatccccggcatctccaat

SEQ ID NO: 22512 - DNA, 38 bp, Artificial Sequence
  Probe
gtatgaggtcccgggttcgatccccggcatctccaata

SEQ ID NO: 22513 - DNA, 31 bp, Artificial Sequence
  Probe
gtatgattctcgcttagggtgcgagaggtcc

SEQ ID NO: 22514 - DNA, 32 bp, Artificial Sequence; identical to SEQ ID NO: 6929
  Probe

SEQ ID NO: 22515 - DNA, 33 bp, Artificial Sequence; identical to SEQ ID NO: 6930
  Probe

SEQ ID NO: 22516 - DNA, 34 bp, Artificial Sequence
  Probe
gtatgattctcgcttagggtgcgagaggtcccgg

SEQ ID NO: 22517 - DNA, 35 bp, Artificial Sequence
  Probe
gtatgattctcgcttagggtgcgagaggtcccggg

SEQ ID NO: 22518 - DNA, 36 bp, Artificial Sequence
  Probe
gtatgattctcgcttagggtgcgagaggtcccgggt

SEQ ID NO: 22519 - DNA, 37 bp, Artificial Sequence
  Probe
gtatgattctcgcttagggtgcgagaggtcccgggtt

SEQ ID NO: 22520 - DNA, 31 bp, Artificial Sequence
  Probe
gtatgattctcgcttcgggtgcgagaggtcc

SEQ ID NO: 22521 - DNA, 32 bp, Artificial Sequence; identical to SEQ ID NO: 6931
  Probe

SEQ ID NO: 22522 - DNA, 33 bp, Artificial Sequence; identical to SEQ ID NO: 6932
  Probe

SEQ ID NO: 22523 - DNA, 34 bp, Artificial Sequence
  Probe
gtatgattctcgcttcgggtgcgagaggtcccgg

SEQ ID NO: 22524 - DNA, 37 bp, Artificial Sequence; identical to SEQ ID NO: 6933
  Probe

SEQ ID NO: 22525 - DNA, 31 bp, Artificial Sequence
  Probe
gtatgattctcgctttgggtgcgagaggtcc

SEQ ID NO: 22526 - DNA, 33 bp, Artificial Sequence; identical to SEQ ID NO: 6934
  Probe

SEQ ID NO: 22527 - DNA, 34 bp, Artificial Sequence; identical to SEQ ID NO: 6935
  Probe

SEQ ID NO: 22528 - DNA, 35 bp, Artificial Sequence
  Probe
gtatgattctcggtttgggtccgagaggtcccggg

SEQ ID NO: 22529 - DNA, 36 bp, Artificial Sequence
  Probe
gtatgattctcggtttgggtccgagaggtcccgggt

SEQ ID NO: 22530 - DNA, 33 bp, Artificial Sequence; identical to SEQ ID NO: 6938
  Probe

SEQ ID NO: 22531 - DNA, 36 bp, Artificial Sequence
  Probe
gtcaaagttaaattataggctaaatcctatatatct

SEQ ID NO: 22532 - DNA, 38 bp, Artificial Sequence
  Probe
gtcaaagttaaattataggctaaatcctatatatctta

SEQ ID NO: 22533 - DNA, 40 bp, Artificial Sequence
  Probe
gtcaaagttaaattataggctaaatcctatatatcttaat

SEQ ID NO: 22534 - DNA, 41 bp, Artificial Sequence
  Probe
gtcaaagttaaattataggctaaatcctatatatcttaatg

SEQ ID NO: 22535 - DNA, 43 bp, Artificial Sequence
  Probe
gtcaaagttaaattataggctaaatcctatatatcttaatggc

SEQ ID NO: 22536 - DNA, 22 bp, Artificial Sequence
  Probe
gtcacctggcaggtgcctcttt

SEQ ID NO: 22537 - DNA, 23 bp, Artificial Sequence
  Probe
gtcacctggcaggtgcctctttt

SEQ ID NO: 22538 - DNA, 18 bp, Artificial Sequence
  Probe
gtcacgcgggagaccggg

SEQ ID NO: 22539 - DNA, 19 bp, Artificial Sequence
  Probe
gtcacgcgggagaccgggg

SEQ ID NO: 22540 - DNA, 22 bp, Artificial Sequence
  Probe
gtcacgcgggagaccggggttc

SEQ ID NO: 22541 - DNA, 23 bp, Artificial Sequence
  Probe
gtcacgcgggagaccggggttca

SEQ ID NO: 22542 - DNA, 24 bp, Artificial Sequence
  Probe
gtcacgcgggagaccggggttcaa

SEQ ID NO: 22543 - DNA, 33 bp, Artificial Sequence
  Probe
gtcacgcgggagaccggggttcaattccccgac

SEQ ID NO: 22544 - DNA, 34 bp, Artificial Sequence
  Probe
gtcacgcgggagaccggggttcaattccccgacg

SEQ ID NO: 22545 - DNA, 42 bp, Artificial Sequence; identical to SEQ ID NO: 6945
  Probe

SEQ ID NO: 22546 - DNA, 23 bp, Artificial Sequence
  Probe
gtcacgcgggagaccggggttcg

SEQ ID NO: 22547 - DNA, 25 bp, Artificial Sequence
  Probe
gtcacgcgggagaccggggttcgat

SEQ ID NO: 22548 - DNA, 26 bp, Artificial Sequence
  Probe
gtcacgcgggagaccggggttcgatt

SEQ ID NO: 22549 - DNA, 38 bp, Artificial Sequence
  Probe
gtcacgcgggagaccggggttcgattccccgacgggga

SEQ ID NO: 22550 - DNA, 39 bp, Artificial Sequence; identical to SEQ ID NO: 1474
  Probe

SEQ ID NO: 22551 - DNA, 40 bp, Artificial Sequence; identical to SEQ ID NO: 6946
  Probe

SEQ ID NO: 22552 - DNA, 42 bp, Artificial Sequence
  Probe
gtcacgcgggagaccggggttcgattccccgacggggagacg

SEQ ID NO: 22553 - DNA, 42 bp, Artificial Sequence
  Probe
gtcacgcgggagaccggggttcgattccccgacggggagagt

SEQ ID NO: 22554 - DNA, 40 bp, Artificial Sequence; identical to SEQ ID NO: 6948
  Probe

SEQ ID NO: 22555 - DNA, 42 bp, Artificial Sequence; identical to SEQ ID NO: 6950
  Probe

SEQ ID NO: 22556 - DNA, 50 bp, Artificial Sequence; identical to SEQ ID NO: 6952
  Probe

SEQ ID NO: 22557 - DNA, 42 bp, Artificial Sequence
  Probe
gtcacgcgggagaccggggttcgattccccgacggggaggcc

SEQ ID NO: 22558 - DNA, 22 bp, Artificial Sequence
  Probe
gtcagaggttcaattcctcttc

SEQ ID NO: 22559 - DNA, 23 bp, Artificial Sequence
  Probe
gtcagaggttcaattcctcttct

SEQ ID NO: 22560 - DNA, 24 bp, Artificial Sequence
  Probe
gtcagaggttcaattcctcttctt

SEQ ID NO: 22561 - DNA, 25 bp, Artificial Sequence
  Probe
gtcagaggttcaattcctcttctta

SEQ ID NO: 22562 - DNA, 26 bp, Artificial Sequence
  Probe
gtcagaggttcaattcctcttcttaa

SEQ ID NO: 22563 - DNA, 28 bp, Artificial Sequence
  Probe
gtcagaggttcaattcctcttcttaaca

SEQ ID NO: 22564 - DNA, 30 bp, Artificial Sequence
  Probe
gtcagaggttcaattcctcttcttaacaac

SEQ ID NO: 22565 - DNA, 31 bp, Artificial Sequence; identical to SEQ ID NO: 6959
  Probe

SEQ ID NO: 22566 - DNA, 24 bp, Artificial Sequence
  Probe
gtcagctaaataagctatcgggcc

SEQ ID NO: 22567 - DNA, 25 bp, Artificial Sequence
  Probe
gtcagctaaataagctatcgggccc

SEQ ID NO: 22568 - DNA, 26 bp, Artificial Sequence
  Probe
gtcagctaaataagctatcgggccca

SEQ ID NO: 22569 - DNA, 27 bp, Artificial Sequence
  Probe
gtcagctaaataagctatcgggcccat

SEQ ID NO: 22570 - DNA, 28 bp, Artificial Sequence
  Probe
gtcagctaaataagctatcgggcccata

SEQ ID NO: 22571 - DNA, 29 bp, Artificial Sequence
  Probe
gtcagctaaataagctatcgggcccatac

SEQ ID NO: 22572 - DNA, 30 bp, Artificial Sequence
  Probe
gtcagctaaataagctatcgggcccatacc

SEQ ID NO: 22573 - DNA, 36 bp, Artificial Sequence; identical to SEQ ID NO: 6967
  Probe

SEQ ID NO: 22574 - DNA, 37 bp, Artificial Sequence; identical to SEQ ID NO: 6968
  Probe

SEQ ID NO: 22575 - DNA, 38 bp, Artificial Sequence; identical to SEQ ID NO: 6969
  Probe

SEQ ID NO: 22576 - DNA, 39 bp, Artificial Sequence; identical to SEQ ID NO: 6970
  Probe

SEQ ID NO: 22577 - DNA, 40 bp, Artificial Sequence; identical to SEQ ID NO: 6971
  Probe

SEQ ID NO: 22578 - DNA, 41 bp, Artificial Sequence; identical to SEQ ID NO: 6972
  Probe

SEQ ID NO: 22579 - DNA, 29 bp, Artificial Sequence
  Probe
gtcagctgtttttcctaaccggagagtaa

SEQ ID NO: 22580 - DNA, 16 bp, Artificial Sequence
  Probe
gtcaggatggccgagc

SEQ ID NO: 22581 - DNA, 17 bp, Artificial Sequence
  Probe
gtcaggatggccgagcg

SEQ ID NO: 22582 - DNA, 19 bp, Artificial Sequence
  Probe
gtcaggatggccgagcggt

SEQ ID NO: 22583 - DNA, 20 bp, Artificial Sequence
  Probe
gtcaggatggccgagcggtc

SEQ ID NO: 22584 - DNA, 21 bp, Artificial Sequence
  Probe
gtcaggatggccgagcggtct

SEQ ID NO: 22585 - DNA, 22 bp, Artificial Sequence
  Probe
gtcaggatggccgagcggtcta

SEQ ID NO: 22586 - DNA, 23 bp, Artificial Sequence
  Probe
gtcaggatggccgagcggtctaa

SEQ ID NO: 22587 - DNA, 24 bp, Artificial Sequence
  Probe
gtcaggatggccgagcggtctaag

SEQ ID NO: 22588 - DNA, 25 bp, Artificial Sequence
  Probe
gtcaggatggccgagcggtctaagg

SEQ ID NO: 22589 - DNA, 26 bp, Artificial Sequence
  Probe
gtcaggatggccgagcggtctaaggc

SEQ ID NO: 22590 - DNA, 27 bp, Artificial Sequence
  Probe
gtcaggatggccgagcggtctaaggcg

SEQ ID NO: 22591 - DNA, 34 bp, Artificial Sequence; identical to SEQ ID NO: 1479
  Probe

SEQ ID NO: 22592 - DNA, 36 bp, Artificial Sequence
  Probe
gtcaggatggccgagcggtctaaggcgctgcgttca

SEQ ID NO: 22593 - DNA, 16 bp, Artificial Sequence
  Probe
gtcaggatggccgagt

SEQ ID NO: 22594 - DNA, 17 bp, Artificial Sequence
  Probe
gtcaggatggccgagtg

SEQ ID NO: 22595 - DNA, 19 bp, Artificial Sequence
  Probe
gtcaggatggccgagtggt

SEQ ID NO: 22596 - DNA, 20 bp, Artificial Sequence
  Probe
gtcaggatggccgagtggtc

SEQ ID NO: 22597 - DNA, 21 bp, Artificial Sequence
  Probe
gtcaggatggccgagtggtct

SEQ ID NO: 22598 - DNA, 22 bp, Artificial Sequence
  Probe
gtcaggatggccgagtggtcta

SEQ ID NO: 22599 - DNA, 26 bp, Artificial Sequence
  Probe
gtcaggatggccgagtggtctaaggc

SEQ ID NO: 22600 - DNA, 27 bp, Artificial Sequence
  Probe
gtcaggatggccgagtggtctaaggcg

SEQ ID NO: 22601 - DNA, 29 bp, Artificial Sequence
  Probe
gtcaggatggccgagtggtctaaggcgcc

SEQ ID NO: 22602 - DNA, 34 bp, Artificial Sequence
  Probe
gtcaggatggccgagtggtctaaggcgccagact

SEQ ID NO: 22603 - DNA, 35 bp, Artificial Sequence
  Probe
gtcaggatggccgagtggtctaaggcgccagactc

SEQ ID NO: 22604 - DNA, 36 bp, Artificial Sequence
  Probe
gtcaggatggccgagtggtctaaggcgccagactca

SEQ ID NO: 22605 - DNA, 30 bp, Artificial Sequence
  Probe
gtcagtgcttcttttcccgagacaacattt

SEQ ID NO: 22606 - DNA, 36 bp, Artificial Sequence
  Probe
gtcatcacgttcgcctaacacgcgaaaggtccccgg

SEQ ID NO: 22607 - DNA, 40 bp, Artificial Sequence
  Probe
gtcatctcccacatggtctagcggttaggattcctggttt

SEQ ID NO: 22608 - DNA, 21 bp, Artificial Sequence
  Probe
gtcatgggtggttgcgttttg

SEQ ID NO: 22609 - DNA, 22 bp, Artificial Sequence
  Probe
gtcatgggtggttgcgttttgg

SEQ ID NO: 22610 - DNA, 31 bp, Artificial Sequence
  Probe
gtccagggttcaagtccctgttcgggcggca

SEQ ID NO: 22611 - DNA, 39 bp, Artificial Sequence
  Probe
gtccagggttcaagtccctgttcgggcgtttgtagtttt

SEQ ID NO: 22612 - DNA, 16 bp, Artificial Sequence
  Probe
gtcccaccagagtcgc

SEQ ID NO: 22613 - DNA, 17 bp, Artificial Sequence
  Probe
gtcccaccagagtcgct

SEQ ID NO: 22614 - DNA, 23 bp, Artificial Sequence
  Probe
gtcccatctggggtggcctgtga

SEQ ID NO: 22615 - DNA, 31 bp, Artificial Sequence
  Probe
gtccccggttcaaatccgggtgccccctcac

SEQ ID NO: 22616 - DNA, 31 bp, Artificial Sequence
  Probe
gtccccggttcaaatccgggtgccccctctg

SEQ ID NO: 22617 - DNA, 31 bp, Artificial Sequence
  Probe
gtcccgggttcaaatcccggacgagccccct

SEQ ID NO: 22618 - DNA, 30 bp, Artificial Sequence
  Probe
gtcccgggttcaatccccggcacctccacc

SEQ ID NO: 22619 - DNA, 31 bp, Artificial Sequence; identical to SEQ ID NO: 7002
  Probe

SEQ ID NO: 22620 - DNA, 31 bp, Artificial Sequence
  Probe
gtcccgggttcgatccccagcatctccagtg

SEQ ID NO: 22621 - DNA, 33 bp, Artificial Sequence
  Probe
gtcccgggttcgatccccagcatctccagtgtt

SEQ ID NO: 22622 - DNA, 34 bp, Artificial Sequence
  Probe
gtcccgggttcgatccccagcatctccagtgttt

SEQ ID NO: 22623 - DNA, 35 bp, Artificial Sequence
  Probe
gtcccgggttcgatccccagcatctccagtgtttt

SEQ ID NO: 22624 - DNA, 36 bp, Artificial Sequence
  Probe
gtcccgggttcgatccccagcatctccagtgttttt

SEQ ID NO: 22625 - DNA, 29 bp, Artificial Sequence
  Probe
gtccctcctcgttagtatagtggtgagta

SEQ ID NO: 22626 - DNA, 30 bp, Artificial Sequence
  Probe
gtccctcctcgttagtatagtggtgagtat

SEQ ID NO: 22627 - DNA, 31 bp, Artificial Sequence
  Probe
gtccctcctcgttagtatagtggtgagtatc

SEQ ID NO: 22628 - DNA, 32 bp, Artificial Sequence
  Probe
gtccctcctcgttagtatagtggtgagtatcc

SEQ ID NO: 22629 - DNA, 33 bp, Artificial Sequence
  Probe
gtccctcctcgttagtatagtggtgagtatccc

SEQ ID NO: 22630 - DNA, 35 bp, Artificial Sequence
  Probe
gtccctcctcgttagtatagtggtgagtatccccg

SEQ ID NO: 22631 - DNA, 36 bp, Artificial Sequence
  Probe
gtccctcctcgttagtatagtggtgagtatccccgc

SEQ ID NO: 22632 - DNA, 37 bp, Artificial Sequence
  Probe
gtccctcctcgttagtatagtggtgagtatccccgcc

SEQ ID NO: 22633 - DNA, 38 bp, Artificial Sequence
  Probe
gtccctcctcgttagtatagtggtgagtatccccgcct

SEQ ID NO: 22634 - DNA, 39 bp, Artificial Sequence
  Probe
gtccctcctcgttagtatagtggtgagtatccccgcctg

SEQ ID NO: 22635 - DNA, 40 bp, Artificial Sequence
  Probe
gtccctcctcgttagtatagtggtgagtatccccgcctgt

SEQ ID NO: 22636 - DNA, 41 bp, Artificial Sequence
  Probe
gtccctcctcgttagtatagtggtgagtatccccgcctgtc

SEQ ID NO: 22637 - DNA, 31 bp, Artificial Sequence
  Probe
gtccctggttcaaatccgggtgccccctcaa

SEQ ID NO: 22638 - DNA, 18 bp, Artificial Sequence
  Probe
gtccctgtccaggcgcta

SEQ ID NO: 22639 - DNA, 16 bp, Artificial Sequence
  Probe
gtccctgttcgggcgt

SEQ ID NO: 22640 - DNA, 28 bp, Artificial Sequence
  Probe
gtccgcgtgggttcgaaccccactcctg

SEQ ID NO: 22641 - DNA, 20 bp, Artificial Sequence
  Probe
gtcctagcctttctattagc

SEQ ID NO: 22642 - DNA, 28 bp, Artificial Sequence
  Probe
gtcctggctcgttggtctaggggtatga

SEQ ID NO: 22643 - DNA, 30 bp, Artificial Sequence
  Probe
gtcctggctcgttggtctaggggtatgatt

SEQ ID NO: 22644 - DNA, 32 bp, Artificial Sequence
  Probe
gtcctggctcgttggtctaggggtatgattct

SEQ ID NO: 22645 - DNA, 34 bp, Artificial Sequence
  Probe
gtcctggctcgttggtctaggggtatgattctcg

SEQ ID NO: 22646 - DNA, 36 bp, Artificial Sequence
  Probe
gtcctggctcgttggtctaggggtatgattctcgct

SEQ ID NO: 22647 - DNA, 38 bp, Artificial Sequence
  Probe
gtcctggctcgttggtctaggggtatgattctcgcttt

SEQ ID NO: 22648 - DNA, 31 bp, Artificial Sequence
  Probe
gtcctgggttcgatccccagtacctccaggc

SEQ ID NO: 22649 - DNA, 27 bp, Artificial Sequence
  Probe
gtccttggaaaaaggttttcatctccg

SEQ ID NO: 22650 - DNA, 22 bp, Artificial Sequence
  Probe
gtccttgtagtataaactaata

SEQ ID NO: 22651 - DNA, 24 bp, Artificial Sequence
  Probe
gtccttgtagtataaactaataca

SEQ ID NO: 22652 - DNA, 32 bp, Artificial Sequence; identical to SEQ ID NO: 7010
  Probe

SEQ ID NO: 22653 - DNA, 33 bp, Artificial Sequence; identical to SEQ ID NO: 7011
  Probe

SEQ ID NO: 22654 - DNA, 34 bp, Artificial Sequence; identical to SEQ ID NO: 7012
  Probe

SEQ ID NO: 22655 - DNA, 35 bp, Artificial Sequence; identical to SEQ ID NO: 7013
  Probe

SEQ ID NO: 22656 - DNA, 39 bp, Artificial Sequence; identical to SEQ ID NO: 7014
  Probe

SEQ ID NO: 22657 - DNA, 31 bp, Artificial Sequence; identical to SEQ ID NO: 7016
  Probe

SEQ ID NO: 22658 - DNA, 37 bp, Artificial Sequence
  Probe
gtcgcgagttcaattctcgctggggcctgtgtgtttt

SEQ ID NO: 22659 - DNA, 38 bp, Artificial Sequence
  Probe
gtcgcgagttcaattctcgctggggcctgtgtgttttt

SEQ ID NO: 22660 - DNA, 31 bp, Artificial Sequence
  Probe
gtcgcgagttcgatcctcgctggggcctcct

SEQ ID NO: 22661 - DNA, 31 bp, Artificial Sequence; identical to SEQ ID NO: 7017
  Probe

SEQ ID NO: 22662 - DNA, 31 bp, Artificial Sequence
  Probe
gtcgcgggttcgatccccgtacgggccactg

SEQ ID NO: 22663 - DNA, 26 bp, Artificial Sequence
  Probe
gtcggctcgttggtctaggggtatga

SEQ ID NO: 22664 - DNA, 28 bp, Artificial Sequence
  Probe
gtcggctcgttggtctaggggtatgatt

SEQ ID NO: 22665 - DNA, 30 bp, Artificial Sequence
  Probe
gtcggctcgttggtctaggggtatgattct

SEQ ID NO: 22666 - DNA, 32 bp, Artificial Sequence
  Probe
gtcggctcgttggtctaggggtatgattctcg

SEQ ID NO: 22667 - DNA, 33 bp, Artificial Sequence
  Probe
gtcggctcgttggtctaggggtatgattctcgc

SEQ ID NO: 22668 - DNA, 34 bp, Artificial Sequence
  Probe
gtcggctcgttggtctaggggtatgattctcgct

SEQ ID NO: 22669 - DNA, 16 bp, Artificial Sequence
  Probe
gtcggtagagcatcag

SEQ ID NO: 22670 - DNA, 19 bp, Artificial Sequence
  Probe
gtcggtagagcatcagact

SEQ ID NO: 22671 - DNA, 20 bp, Artificial Sequence
  Probe
gtcggtagagcatcagactt

SEQ ID NO: 22672 - DNA, 16 bp, Artificial Sequence
  Probe
gtcggtagagcatgag

SEQ ID NO: 22673 - DNA, 17 bp, Artificial Sequence
  Probe
gtcggtagagcatgaga

SEQ ID NO: 22674 - DNA, 18 bp, Artificial Sequence
  Probe
gtcggtagagcatgagac

SEQ ID NO: 22675 - DNA, 35 bp, Artificial Sequence; identical to SEQ ID NO: 1492
  Probe

SEQ ID NO: 22676 - DNA, 36 bp, Artificial Sequence; identical to SEQ ID NO: 7021
  Probe

SEQ ID NO: 22677 - DNA, 16 bp, Artificial Sequence
  Probe
gtcggtagagcatggg

SEQ ID NO: 22678 - DNA, 36 bp, Artificial Sequence
  Probe
gtcggtagagcatgggactcttaatcccagggtcgt

SEQ ID NO: 22679 - DNA, 30 bp, Artificial Sequence
  Probe
gtcgtcctcgttagtatagtggtgagtatc

SEQ ID NO: 22680 - DNA, 20 bp, Artificial Sequence
  Probe
gtcgtggcgtcccggtagct

SEQ ID NO: 22681 - DNA, 16 bp, Artificial Sequence
  Probe
gtcgtggttgtagtcc

SEQ ID NO: 22682 - DNA, 19 bp, Artificial Sequence
  Probe
gtcgtggttgtagtccgtg

SEQ ID NO: 22683 - DNA, 23 bp, Artificial Sequence
  Probe
gtcgtggttgtagtccgtgcgag

SEQ ID NO: 22684 - DNA, 25 bp, Artificial Sequence
  Probe
gtcgtggttgtagtccgtgcgagaa

SEQ ID NO: 22685 - DNA, 26 bp, Artificial Sequence
  Probe
gtcgtggttgtagtccgtgcgagaat

SEQ ID NO: 22686 - DNA, 28 bp, Artificial Sequence
  Probe
gtcgtggttgtagtccgtgcgagaataa

SEQ ID NO: 22687 - DNA, 30 bp, Artificial Sequence; identical to SEQ ID NO: 7024
  Probe

SEQ ID NO: 22688 - DNA, 31 bp, Artificial Sequence
  Probe
gtcgtggttgtagtccgtgcgagaataatga

SEQ ID NO: 22689 - DNA, 22 bp, Artificial Sequence
  Probe
gtctaacaacatggctttctca

SEQ ID NO: 22690 - DNA, 24 bp, Artificial Sequence
  Probe
gtctaacaacatggctttctcaac

SEQ ID NO: 22691 - DNA, 25 bp, Artificial Sequence
  Probe
gtctaacaacatggctttctcaact

SEQ ID NO: 22692 - DNA, 26 bp, Artificial Sequence
  Probe
gtctagcggttaggattcctggtttt

SEQ ID NO: 22693 - DNA, 16 bp, Artificial Sequence
  Probe
gtctaggggtatgatt

SEQ ID NO: 22694 - DNA, 21 bp, Artificial Sequence
  Probe
gtctaggggtatgattctcgc

SEQ ID NO: 22695 - DNA, 27 bp, Artificial Sequence
  Probe
gtctagtggttaggattcggcgctctc

SEQ ID NO: 22696 - DNA, 44 bp, Artificial Sequence
  Probe
gtctagtggttaggattcggcgctctcaccgccgcggcccgggt

SEQ ID NO: 22697 - DNA, 25 bp, Artificial Sequence
  Probe
gtctcataatctgaaggtcctgagt

SEQ ID NO: 22698 - DNA, 21 bp, Artificial Sequence
  Probe
gtctgcaccaggatggccgag

SEQ ID NO: 22699 - DNA, 40 bp, Artificial Sequence; identical to SEQ ID NO: 7040
  Probe

SEQ ID NO: 22700 - DNA, 42 bp, Artificial Sequence; identical to SEQ ID NO: 7041
  Probe

SEQ ID NO: 22701 - DNA, 42 bp, Artificial Sequence
  Probe
gtgaatccttcgatagctcagttggtagagcggaggactgta

SEQ ID NO: 22702 - DNA, 25 bp, Artificial Sequence
  Probe
gtgaatctgacaacagaggcttacg

SEQ ID NO: 22703 - DNA, 28 bp, Artificial Sequence
  Probe
gtgaatctgacaacagaggcttacgacc

SEQ ID NO: 22704 - DNA, 29 bp, Artificial Sequence
  Probe
gtgaatctgacaacagaggcttacgaccc

SEQ ID NO: 22705 - DNA, 30 bp, Artificial Sequence; identical to SEQ ID NO: 7044
  Probe

SEQ ID NO: 22706 - DNA, 32 bp, Artificial Sequence; identical to SEQ ID NO: 7045
  Probe

SEQ ID NO: 22707 - DNA, 33 bp, Artificial Sequence; identical to SEQ ID NO: 1501
  Probe

SEQ ID NO: 22708 - DNA, 36 bp, Artificial Sequence
  Probe
gtgaatctgacaacagaggcttacgaccccttattt

SEQ ID NO: 22709 - DNA, 39 bp, Artificial Sequence; identical to SEQ ID NO: 1502
  Probe

SEQ ID NO: 22710 - DNA, 40 bp, Artificial Sequence; identical to SEQ ID NO: 7046
  Probe

SEQ ID NO: 22711 - DNA, 41 bp, Artificial Sequence; identical to SEQ ID NO: 7047
  Probe

SEQ ID NO: 22712 - DNA, 42 bp, Artificial Sequence; identical to SEQ ID NO: 7048
  Probe

SEQ ID NO: 22713 - DNA, 36 bp, Artificial Sequence
  Probe
gtgacctcgtggcgcaatggtagcgcgtctgactcc

SEQ ID NO: 22714 - DNA, 49 bp, Artificial Sequence
  Probe
gtgacctcgtggcgcaatggtagcgcgtctgactccagatcagaaggtt

SEQ ID NO: 22715 - DNA, 50 bp, Artificial Sequence
  Probe
gtgacctcgtggcgcaatggtagcgcgtctgactccagatcagaaggttg

SEQ ID NO: 22716 - DNA, 31 bp, Artificial Sequence
  Probe
gtgagcatagctgccttccaagcagttgacc

SEQ ID NO: 22717 - DNA, 36 bp, Artificial Sequence
  Probe
gtgagcatagctgccttccaagcagttgacccgggt

SEQ ID NO: 22718 - DNA, 37 bp, Artificial Sequence
  Probe
gtgagcatagctgccttccaagcagttgacccgggtt

SEQ ID NO: 22719 - DNA, 38 bp, Artificial Sequence
  Probe
gtgagcatagctgccttccaagcagttgacccgggttc

SEQ ID NO: 22720 - DNA, 28 bp, Artificial Sequence
  Probe
gtgagcccggatagctcagtcggtagag

SEQ ID NO: 22721 - DNA, 30 bp, Artificial Sequence
  Probe
gtgagcccggatagctcagtcggtagagca

SEQ ID NO: 22722 - DNA, 33 bp, Artificial Sequence
  Probe
gtgagcccggatagctcagtcggtagagcatca

SEQ ID NO: 22723 - DNA, 35 bp, Artificial Sequence
  Probe
gtgagcccggatagctcagtcggtagagcatcaga

SEQ ID NO: 22724 - DNA, 36 bp, Artificial Sequence
  Probe
gtgagcccggatagctcagtcggtagagcatcagac

SEQ ID NO: 22725 - DNA, 37 bp, Artificial Sequence
  Probe
gtgagcccggatagctcagtcggtagagcatcagact

SEQ ID NO: 22726 - DNA, 38 bp, Artificial Sequence
  Probe
gtgagcccggatagctcagtcggtagagcatcagactt

SEQ ID NO: 22727 - DNA, 39 bp, Artificial Sequence
  Probe
gtgagcccggatagctcagtcggtagagcatcagacttt

SEQ ID NO: 22728 - DNA, 40 bp, Artificial Sequence
  Probe
gtgagcccggatagctcagtcggtagagcatcagactttt

SEQ ID NO: 22729 - DNA, 41 bp, Artificial Sequence
  Probe
gtgagcccggatagctcagtcggtagagcatcagactttta

SEQ ID NO: 22730 - DNA, 42 bp, Artificial Sequence
  Probe
gtgagcccggatagctcagtcggtagagcatcagacttttaa

SEQ ID NO: 22731 - DNA, 43 bp, Artificial Sequence
  Probe
gtgagcccggatagctcagtcggtagagcatcagacttttaat

SEQ ID NO: 22732 - DNA, 29 bp, Artificial Sequence
  Probe
gtgagcccggctagctcagtcggtagagc

SEQ ID NO: 22733 - DNA, 30 bp, Artificial Sequence
  Probe
gtgagcccggctagctcagtcggtagagca

SEQ ID NO: 22734 - DNA, 34 bp, Artificial Sequence
  Probe
gtgaggccctatagctcaggggttagagcactgg

SEQ ID NO: 22735 - DNA, 36 bp, Artificial Sequence
  Probe
gtgaggccctatagctcaggggttagagcactggtc

SEQ ID NO: 22736 - DNA, 37 bp, Artificial Sequence
  Probe
gtgaggccctatagctcaggggttagagcactggtct

SEQ ID NO: 22737 - DNA, 18 bp, Artificial Sequence
  Probe
gtgagtatccccgcctgt

SEQ ID NO: 22738 - DNA, 22 bp, Artificial Sequence
  Probe
gtgagtatccccgcctgtcacg

SEQ ID NO: 22739 - DNA, 23 bp, Artificial Sequence
  Probe
gtgagtatccccgcctgtcacgc

SEQ ID NO: 22740 - DNA, 32 bp, Artificial Sequence
  Probe
gtgagtatccccgcctgtcacgcgggagaccg

SEQ ID NO: 22741 - DNA, 36 bp, Artificial Sequence
  Probe
gtgagtatccccgcctgtcacgcgggagaccggggt

SEQ ID NO: 22742 - DNA, 20 bp, Artificial Sequence
  Probe
gtgatcgtatagtggttagt

SEQ ID NO: 22743 - DNA, 24 bp, Artificial Sequence
  Probe
gtgatcgtatagtggttagtactc

SEQ ID NO: 22744 - DNA, 25 bp, Artificial Sequence
  Probe
gtgatcgtatagtggttagtactct

SEQ ID NO: 22745 - DNA, 26 bp, Artificial Sequence
  Probe
gtgatcgtatagtggttagtactctg

SEQ ID NO: 22746 - DNA, 27 bp, Artificial Sequence
  Probe
gtgatcgtatagtggttagtactctgc

SEQ ID NO: 22747 - DNA, 28 bp, Artificial Sequence
  Probe
gtgatcgtatagtggttagtactctgcg

SEQ ID NO: 22748 - DNA, 34 bp, Artificial Sequence
  Probe
gtgatcgtatagtggttagtactctgcgttgtgg

SEQ ID NO: 22749 - DNA, 35 bp, Artificial Sequence
  Probe
gtgatcgtatagtggttagtactctgcgttgtggc

SEQ ID NO: 22750 - DNA, 36 bp, Artificial Sequence
  Probe
gtgatcgtatagtggttagtactctgcgttgtggcc

SEQ ID NO: 22751 - DNA, 39 bp, Artificial Sequence
  Probe
gtgatcgtatagtggttagtactctgcgttgtggccgca

SEQ ID NO: 22752 - DNA, 17 bp, Artificial Sequence
  Probe
gtgcaactccaaataaa

SEQ ID NO: 22753 - DNA, 21 bp, Artificial Sequence
  Probe
gtgcaactccaaataaaagta

SEQ ID NO: 22754 - DNA, 22 bp, Artificial Sequence
  Probe
gtgcaactccaaataaaagtaa

SEQ ID NO: 22755 - DNA, 17 bp, Artificial Sequence
  Probe
gtgcacttggacgaacc

SEQ ID NO: 22756 - DNA, 25 bp, Artificial Sequence
  Probe
gtgcaggtagcgtggccgagcggtc

SEQ ID NO: 22757 - DNA, 39 bp, Artificial Sequence
  Probe
gtgcaggtagcgtggccgagcggtctaaggcgctggatt

SEQ ID NO: 22758 - DNA, 40 bp, Artificial Sequence
  Probe
gtgcaggtagcgtggccgagcggtctaaggcgctggattt

SEQ ID NO: 22759 - DNA, 41 bp, Artificial Sequence
  Probe
gtgcaggtagcgtggccgagcggtctaaggcgctggattta

SEQ ID NO: 22760 - DNA, 31 bp, Artificial Sequence
  Probe
gtgcctcaaccgagcgtccaagctctttcca

SEQ ID NO: 22761 - DNA, 33 bp, Artificial Sequence
  Probe
gtgcctcaaccgagcgtccaagctctttccatt

SEQ ID NO: 22762 - DNA, 31 bp, Artificial Sequence
  Probe
gtgcctgatatccaaccttcagctatagggt

SEQ ID NO: 22763 - DNA, 31 bp, Artificial Sequence
  Probe
gtgcggttcctcgttagtatagtggtgagta

SEQ ID NO: 22764 - DNA, 32 bp, Artificial Sequence
  Probe
gtgcggttcctcgttagtatagtggtgagtat

SEQ ID NO: 22765 - DNA, 33 bp, Artificial Sequence
  Probe
gtgcggttcctcgttagtatagtggtgagtatc

SEQ ID NO: 22766 - DNA, 34 bp, Artificial Sequence
  Probe
gtgcggttcctcgttagtatagtggtgagtatcc

SEQ ID NO: 22767 - DNA, 35 bp, Artificial Sequence
  Probe
gtgcggttcctcgttagtatagtggtgagtatccc

SEQ ID NO: 22768 - DNA, 36 bp, Artificial Sequence
  Probe
gtgcggttcctcgttagtatagtggtgagtatcccc

SEQ ID NO: 22769 - DNA, 37 bp, Artificial Sequence
  Probe
gtgcggttcctcgttagtatagtggtgagtatccccg

SEQ ID NO: 22770 - DNA, 38 bp, Artificial Sequence
  Probe
gtgcggttcctcgttagtatagtggtgagtatccccgc

SEQ ID NO: 22771 - DNA, 39 bp, Artificial Sequence
  Probe
gtgcggttcctcgttagtatagtggtgagtatccccgcc

SEQ ID NO: 22772 - DNA, 40 bp, Artificial Sequence
  Probe
gtgcggttcctcgttagtatagtggtgagtatccccgcct

SEQ ID NO: 22773 - DNA, 41 bp, Artificial Sequence
  Probe
gtgcggttcctcgttagtatagtggtgagtatccccgcctg

SEQ ID NO: 22774 - DNA, 42 bp, Artificial Sequence
  Probe
gtgcggttcctcgttagtatagtggtgagtatccccgcctgt

SEQ ID NO: 22775 - DNA, 43 bp, Artificial Sequence
  Probe
gtgcggttcctcgttagtatagtggtgagtatccccgcctgtc

SEQ ID NO: 22776 - DNA, 26 bp, Artificial Sequence
  Probe
gtgctaataacgccaaggtcgcgggt

SEQ ID NO: 22777 - DNA, 27 bp, Artificial Sequence
  Probe
gtgctaataacgccaaggtcgcgggtt

SEQ ID NO: 22778 - DNA, 22 bp, Artificial Sequence
  Probe
gtgctccggagttacctcgttt

SEQ ID NO: 22779 - DNA, 23 bp, Artificial Sequence
  Probe
gtgctccggagttacctcgtttt

SEQ ID NO: 22780 - DNA, 26 bp, Artificial Sequence
  Probe
gtgctgataacaccaaggtcgcgggc

SEQ ID NO: 22781 - DNA, 30 bp, Artificial Sequence
  Probe
gtgctgggcccataacccagaggtcgatgg

SEQ ID NO: 22782 - DNA, 33 bp, Artificial Sequence
  Probe
gtgctgggcccataacccagaggtcgatggatc

SEQ ID NO: 22783 - DNA, 39 bp, Artificial Sequence
  Probe
gtgcttccttcgatagctcagctggtagagcggaggact

SEQ ID NO: 22784 - DNA, 50 bp, Artificial Sequence
  Probe
gtgcttccttcgatagctcagctggtagagcggaggactgtagtacttaa

SEQ ID NO: 22785 - DNA, 27 bp, Artificial Sequence
  Probe
gtggagttaaagactttttctctgatt

SEQ ID NO: 22786 - DNA, 28 bp, Artificial Sequence
  Probe
gtggagttaaagactttttctctgattt

SEQ ID NO: 22787 - DNA, 29 bp, Artificial Sequence
  Probe
gtggagttaaagactttttctctgatttg

SEQ ID NO: 22788 - DNA, 30 bp, Artificial Sequence
  Probe
gtggcccgggttcgactcccggtatgggaa

SEQ ID NO: 22789 - DNA, 31 bp, Artificial Sequence
  Probe
gtggcccgggttcgactcccggtatgggaac

SEQ ID NO: 22790 - DNA, 33 bp, Artificial Sequence; identical to SEQ ID NO: 7064
  Probe

SEQ ID NO: 22791 - DNA, 31 bp, Artificial Sequence
  Probe
gtggcgcaatcggttagcgcgcggtacttat

SEQ ID NO: 22792 - DNA, 16 bp, Artificial Sequence
  Probe
gtggcgtcccggtagc

SEQ ID NO: 22793 - DNA, 17 bp, Artificial Sequence
  Probe
gtggcgtcccggtagct

SEQ ID NO: 22794 - DNA, 18 bp, Artificial Sequence
  Probe
gtggcgtcccggtagctc

SEQ ID NO: 22795 - DNA, 19 bp, Artificial Sequence
  Probe
gtggcgtcccggtagctcg

SEQ ID NO: 22796 - DNA, 17 bp, Artificial Sequence
  Probe
gtggctaggattcggcg

SEQ ID NO: 22797 - DNA, 21 bp, Artificial Sequence
  Probe
gtggctaggattcggcgcttt

SEQ ID NO: 22798 - DNA, 39 bp, Artificial Sequence
  Probe
gtggctaggattcggcgctttcaccgccgcggcccgggt

SEQ ID NO: 22799 - DNA, 28 bp, Artificial Sequence
  Probe
gtgggaacaatggcacggcaaggggctc

SEQ ID NO: 22800 - DNA, 30 bp, Artificial Sequence
  Probe
gtggggttcctcgcagcttcgctgcgtgag

SEQ ID NO: 22801 - DNA, 23 bp, Artificial Sequence
  Probe
gtggggttttgcagtccttagct

SEQ ID NO: 22802 - DNA, 16 bp, Artificial Sequence
  Probe
gtgggtggcttttttt

SEQ ID NO: 22803 - DNA, 36 bp, Artificial Sequence
  Probe
gtggtaagcatagctgccttccaagcagttgacccg

SEQ ID NO: 22804 - DNA, 39 bp, Artificial Sequence
  Probe
gtggtaagcatagctgccttccaagcagttgacccgggt

SEQ ID NO: 22805 - DNA, 16 bp, Artificial Sequence
  Probe
gtggtagaattctcgc

SEQ ID NO: 22806 - DNA, 17 bp, Artificial Sequence
  Probe
gtggtagaattctcgcc

SEQ ID NO: 22807 - DNA, 18 bp, Artificial Sequence
  Probe
gtggtagaattctcgcct

SEQ ID NO: 22808 - DNA, 19 bp, Artificial Sequence
  Probe
gtggtagaattctcgcctg

SEQ ID NO: 22809 - DNA, 20 bp, Artificial Sequence
  Probe
gtggtagaattctcgcctgc

SEQ ID NO: 22810 - DNA, 21 bp, Artificial Sequence
  Probe
gtggtagaattctcgcctgcc

SEQ ID NO: 22811 - DNA, 38 bp, Artificial Sequence
  Probe
gtggtagaattctcgcctgccacgcgggaggcccgggt

SEQ ID NO: 22812 - DNA, 24 bp, Artificial Sequence
  Probe
gtggtatagtggtgagcatagctg

SEQ ID NO: 22813 - DNA, 28 bp, Artificial Sequence
  Probe
gtggtatagtggtgagcatagctgcctt

SEQ ID NO: 22814 - DNA, 29 bp, Artificial Sequence
  Probe
gtggtatagtggtgagcatagctgccttc

SEQ ID NO: 22815 - DNA, 23 bp, Artificial Sequence
  Probe
gtggtatagtggttagcatagct

SEQ ID NO: 22816 - DNA, 16 bp, Artificial Sequence
  Probe
gtggtatcatgcaaga

SEQ ID NO: 22817 - DNA, 19 bp, Artificial Sequence
  Probe
gtggtatcatgcaagattc

SEQ ID NO: 22818 - DNA, 20 bp, Artificial Sequence
  Probe
gtggtatcatgcaagattcc

SEQ ID NO: 22819 - DNA, 37 bp, Artificial Sequence
  Probe
gtggtatcatgcaagattcccattcttgcgacccggg

SEQ ID NO: 22820 - DNA, 38 bp, Artificial Sequence
  Probe
gtggtatcatgcaagattcccattcttgcgacccgggt

SEQ ID NO: 22821 - DNA, 39 bp, Artificial Sequence
  Probe
gtggtatcatgcaagattcccattcttgcgacccgggtt

SEQ ID NO: 22822 - DNA, 40 bp, Artificial Sequence
  Probe
gtggtcatcacgttcgcctaacacgcgaaaggtccccggt

SEQ ID NO: 22823 - DNA, 24 bp, Artificial Sequence
  Probe
gtggtcgttgccatgttaacgttt

SEQ ID NO: 22824 - DNA, 25 bp, Artificial Sequence
  Probe
gtggtcgttgccatgttaacgtttt

SEQ ID NO: 22825 - DNA, 19 bp, Artificial Sequence
  Probe
gtggtctagtggttaggat

SEQ ID NO: 22826 - DNA, 20 bp, Artificial Sequence
  Probe
gtggtctagtggttaggatt

SEQ ID NO: 22827 - DNA, 22 bp, Artificial Sequence
  Probe
gtggtctagtggttaggattcg

SEQ ID NO: 22828 - DNA, 23 bp, Artificial Sequence
  Probe
gtggtctagtggttaggattcgg

SEQ ID NO: 22829 - DNA, 30 bp, Artificial Sequence; identical to SEQ ID NO: 7076
  Probe

SEQ ID NO: 22830 - DNA, 31 bp, Artificial Sequence; identical to SEQ ID NO: 7077
  Probe

SEQ ID NO: 22831 - DNA, 36 bp, Artificial Sequence
  Probe
gtggtgacccagtggcctaatggataaggcatcagc

SEQ ID NO: 22832 - DNA, 21 bp, Artificial Sequence
  Probe
gtggtgagcatagctgccttc

SEQ ID NO: 22833 - DNA, 38 bp, Artificial Sequence
  Probe
gtggtgagcatagctgccttccaagcagttgacccggg

SEQ ID NO: 22834 - DNA, 39 bp, Artificial Sequence
  Probe
gtggtgagcatagctgccttccaagcagttgacccgggt

SEQ ID NO: 22835 - DNA, 40 bp, Artificial Sequence
  Probe
gtggtgagcatagctgccttccaagcagttgacccgggtt

SEQ ID NO: 22836 - DNA, 16 bp, Artificial Sequence
  Probe
gtggtgagtatccccg

SEQ ID NO: 22837 - DNA, 17 bp, Artificial Sequence
  Probe
gtggtgagtatccccgc

SEQ ID NO: 22838 - DNA, 18 bp, Artificial Sequence
  Probe
gtggtgagtatccccgcc

SEQ ID NO: 22839 - DNA, 21 bp, Artificial Sequence
  Probe
gtggtgagtatccccgcctgt

SEQ ID NO: 22840 - DNA, 23 bp, Artificial Sequence
  Probe
gtggtgagtatccccgcctgtca

SEQ ID NO: 22841 - DNA, 24 bp, Artificial Sequence
  Probe
gtggtgagtatccccgcctgtcac

SEQ ID NO: 22842 - DNA, 25 bp, Artificial Sequence
  Probe
gtggtgagtatccccgcctgtcacg

SEQ ID NO: 22843 - DNA, 35 bp, Artificial Sequence
  Probe
gtggtgagtatccccgcctgtcacgcgggagaccg

SEQ ID NO: 22844 - DNA, 35 bp, Artificial Sequence
  Probe
gtggttagcatagctgccttccaagcagttgaccc

SEQ ID NO: 22845 - DNA, 36 bp, Artificial Sequence
  Probe
gtggttagcatagctgccttccaagcagttgacccg

SEQ ID NO: 22846 - DNA, 38 bp, Artificial Sequence
  Probe
gtggttagcatagctgccttccaagcagttgacccggg

SEQ ID NO: 22847 - DNA, 40 bp, Artificial Sequence
  Probe
gtggttagcatagctgccttccaagcagttgacccgggtt

SEQ ID NO: 22848 - DNA, 41 bp, Artificial Sequence
  Probe
gtggttagcatagctgccttccaagcagttgacccgggttc

SEQ ID NO: 22849 - DNA, 16 bp, Artificial Sequence
  Probe
gtggttaggattcggc

SEQ ID NO: 22850 - DNA, 22 bp, Artificial Sequence
  Probe
gtggttaggattcggcgctctc

SEQ ID NO: 22851 - DNA, 23 bp, Artificial Sequence
  Probe
gtggttaggattcggcgctctca

SEQ ID NO: 22852 - DNA, 24 bp, Artificial Sequence
  Probe
gtggttaggattcggcgctctcac

SEQ ID NO: 22853 - DNA, 28 bp, Artificial Sequence
  Probe
gtggttaggattcggcgctctcaccgcc

SEQ ID NO: 22854 - DNA, 30 bp, Artificial Sequence
  Probe
gtggttaggattcggcgctctcaccgccgc

SEQ ID NO: 22855 - DNA, 31 bp, Artificial Sequence; identical to SEQ ID NO: 7083
  Probe

SEQ ID NO: 22856 - DNA, 36 bp, Artificial Sequence
  Probe
gtggttaggattcggcgctctcaccgccgcggcccg

SEQ ID NO: 22857 - DNA, 16 bp, Artificial Sequence
  Probe
gtggttagtactctgc

SEQ ID NO: 22858 - DNA, 17 bp, Artificial Sequence
  Probe
gtggttagtactctgcg

SEQ ID NO: 22859 - DNA, 22 bp, Artificial Sequence
  Probe
gtggttagtactctgcgttgtg

SEQ ID NO: 22860 - DNA, 21 bp, Artificial Sequence
  Probe
gtggttagtatccccgcctgt

SEQ ID NO: 22861 - DNA, 24 bp, Artificial Sequence
  Probe
gtggttagtatccccgcctgtcac

SEQ ID NO: 22862 - DNA, 17 bp, Artificial Sequence
  Probe
gtggttatcacgtctgc

SEQ ID NO: 22863 - DNA, 40 bp, Artificial Sequence
  Probe
gtggttatcacgtctgctttacacgcagaaggtcctgggt

SEQ ID NO: 22864 - DNA, 18 bp, Artificial Sequence
  Probe
gtggttatcacgttcgcc

SEQ ID NO: 22865 - DNA, 40 bp, Artificial Sequence
  Probe
gtggttatcacgttcgcctaacacgcgaaaggtccccggt

SEQ ID NO: 22866 - DNA, 21 bp, Artificial Sequence
  Probe
gtggttatcacgttcgcctca

SEQ ID NO: 22867 - DNA, 23 bp, Artificial Sequence
  Probe
gtggttatcacgttcgcctcaca

SEQ ID NO: 22868 - DNA, 23 bp, Artificial Sequence
  Probe
gtggttcagtggtagaattctcg

SEQ ID NO: 22869 - DNA, 25 bp, Artificial Sequence
  Probe
gtggttcagtggtagaattctcgcc

SEQ ID NO: 22870 - DNA, 26 bp, Artificial Sequence
  Probe
gtggttcagtggtagaattctcgcct

SEQ ID NO: 22871 - DNA, 27 bp, Artificial Sequence
  Probe
gtggttcagtggtagaattctcgcctg

SEQ ID NO: 22872 - DNA, 28 bp, Artificial Sequence
  Probe
gtggttcagtggtagaattctcgcctgc

SEQ ID NO: 22873 - DNA, 29 bp, Artificial Sequence
  Probe
gtggttcagtggtagaattctcgcctgcc

SEQ ID NO: 22874 - DNA, 29 bp, Artificial Sequence
  Probe
gtggttctaacttgctggggtggcggttt

SEQ ID NO: 22875 - DNA, 16 bp, Artificial Sequence
  Probe
gtggttgtagtccgtg

SEQ ID NO: 22876 - DNA, 18 bp, Artificial Sequence
  Probe
gtggttgtagtccgtgcg

SEQ ID NO: 22877 - DNA, 20 bp, Artificial Sequence
  Probe
gtggttgtagtccgtgcgag

SEQ ID NO: 22878 - DNA, 21 bp, Artificial Sequence
  Probe
gtggttgtagtccgtgcgaga

SEQ ID NO: 22879 - DNA, 22 bp, Artificial Sequence
  Probe
gtggttgtagtccgtgcgagaa

SEQ ID NO: 22880 - DNA, 23 bp, Artificial Sequence
  Probe
gtggttgtagtccgtgcgagaat

SEQ ID NO: 22881 - DNA, 24 bp, Artificial Sequence
  Probe
gtggttgtagtccgtgcgagaata

SEQ ID NO: 22882 - DNA, 25 bp, Artificial Sequence
  Probe
gtggttgtagtccgtgcgagaataa

SEQ ID NO: 22883 - DNA, 26 bp, Artificial Sequence
  Probe
gtggttgtagtccgtgcgagaataat

SEQ ID NO: 22884 - DNA, 27 bp, Artificial Sequence
  Probe
gtggttgtagtccgtgcgagaataatg

SEQ ID NO: 22885 - DNA, 18 bp, Artificial Sequence
  Probe
gtgtaagcagggtcgttt

SEQ ID NO: 22886 - DNA, 19 bp, Artificial Sequence
  Probe
gtgtaagcagggtcgtttt

SEQ ID NO: 22887 - DNA, 27 bp, Artificial Sequence
  Probe
gtgtaagcagggtcgttttacaacttt

SEQ ID NO: 22888 - DNA, 26 bp, Artificial Sequence
  Probe
gtgtagctcagtggtagagcgcgtgc

SEQ ID NO: 22889 - DNA, 21 bp, Artificial Sequence
  Probe
gtgtagtggtatcatgcaaga

SEQ ID NO: 22890 - DNA, 24 bp, Artificial Sequence
  Probe
gtgtagtggtatcatgcaagattc

SEQ ID NO: 22891 - DNA, 41 bp, Artificial Sequence
  Probe
gtgtagtggtatcatgcaagattcccattcttgcgacccgg

SEQ ID NO: 22892 - DNA, 19 bp, Artificial Sequence
  Probe
gtgtagtggttatcacgtt

SEQ ID NO: 22893 - DNA, 26 bp, Artificial Sequence
  Probe
gtgtagtggttatcacgttcgcctca

SEQ ID NO: 22894 - DNA, 17 bp, Artificial Sequence
  Probe
gtgtcaggatggccgag

SEQ ID NO: 22895 - DNA, 25 bp, Artificial Sequence
  Probe
gtgtcagtttttctcttcagctttt

SEQ ID NO: 22896 - DNA, 26 bp, Artificial Sequence
  Probe
gtgtcagtttttctcttcagcttttt

SEQ ID NO: 22897 - DNA, 16 bp, Artificial Sequence
  Probe
gtgtccctagtagctc

SEQ ID NO: 22898 - DNA, 17 bp, Artificial Sequence
  Probe
gtgtccctagtagctcg

SEQ ID NO: 22899 - DNA, 28 bp, Artificial Sequence
  Probe
gtgtccctggtggtctagtggctaggat

SEQ ID NO: 22900 - DNA, 29 bp, Artificial Sequence
  Probe
gtgtccctggtggtctagtggctaggatt

SEQ ID NO: 22901 - DNA, 38 bp, Artificial Sequence
  Probe
gtgtccctggtggtctagtggctaggattcggcgcttt

SEQ ID NO: 22902 - DNA, 30 bp, Artificial Sequence
  Probe
gtgtcggctcgttggtctaggggtatgatt

SEQ ID NO: 22903 - DNA, 32 bp, Artificial Sequence
  Probe
gtgtcggctcgttggtctaggggtatgattct

SEQ ID NO: 22904 - DNA, 34 bp, Artificial Sequence
  Probe
gtgtcggctcgttggtctaggggtatgattctcg

SEQ ID NO: 22905 - DNA, 20 bp, Artificial Sequence
  Probe
gtgtgaatccttcgatagct

SEQ ID NO: 22906 - DNA, 44 bp, Artificial Sequence
  Probe
gtgtgaatccttcgatagctcagttggtagagcggaggactgta

SEQ ID NO: 22907 - DNA, 16 bp, Artificial Sequence
  Probe
gtgtgaggtcccgggt

SEQ ID NO: 22908 - DNA, 33 bp, Artificial Sequence
  Probe
gtgtggggttccatagtgtagtggttatcacgt

SEQ ID NO: 22909 - DNA, 18 bp, Artificial Sequence
  Probe
gtgtgtagctgcactttt

SEQ ID NO: 22910 - DNA, 19 bp, Artificial Sequence
  Probe
gtgtgtagctgcacttttt

SEQ ID NO: 22911 - DNA, 16 bp, Artificial Sequence
  Probe
gtgtgtcaggatggcc

SEQ ID NO: 22912 - DNA, 28 bp, Artificial Sequence
  Probe
gtgtgtcaggatggccgagtggtctaag

SEQ ID NO: 22913 - DNA, 39 bp, Artificial Sequence
  Probe
gtgtgtcaggatggccgagtggtctaaggcgccagactc

SEQ ID NO: 22914 - DNA, 32 bp, Artificial Sequence
  Probe
gtgttgatggtatagtggtgagcatagctgcc

SEQ ID NO: 22915 - DNA, 35 bp, Artificial Sequence
  Probe
gtgttgatggtatagtggtgagcatagctgccttc

SEQ ID NO: 22916 - DNA, 36 bp, Artificial Sequence
  Probe
gtgttgatggtatagtggtgagcatagctgccttcc

SEQ ID NO: 22917 - DNA, 26 bp, Artificial Sequence
  Probe
gtgtttgtgggtttaagtcccattgg

SEQ ID NO: 22918 - DNA, 27 bp, Artificial Sequence
  Probe
gtgtttgtgggtttaagtcccattggt

SEQ ID NO: 22919 - DNA, 31 bp, Artificial Sequence
  Probe
gtgtttgtgggtttaagtcccattggtctag

SEQ ID NO: 22920 - DNA, 32 bp, Artificial Sequence; identical to SEQ ID NO: 7107
  Probe

SEQ ID NO: 22921 - DNA, 33 bp, Artificial Sequence; identical to SEQ ID NO: 7108
  Probe

SEQ ID NO: 22922 - DNA, 19 bp, Artificial Sequence
  Probe
gttaaagattaagagaacc

SEQ ID NO: 22923 - DNA, 20 bp, Artificial Sequence
  Probe
gttaaagattaagagaacca

SEQ ID NO: 22924 - DNA, 33 bp, Artificial Sequence; identical to SEQ ID NO: 7115
  Probe

SEQ ID NO: 22925 - DNA, 35 bp, Artificial Sequence
  Probe
gttaaagattaagagaaccaacacctctttacagt

SEQ ID NO: 22926 - DNA, 36 bp, Artificial Sequence; identical to SEQ ID NO: 7116
  Probe

SEQ ID NO: 22927 - DNA, 37 bp, Artificial Sequence; identical to SEQ ID NO: 7117
  Probe

SEQ ID NO: 22928 - DNA, 38 bp, Artificial Sequence; identical to SEQ ID NO: 7118
  Probe

SEQ ID NO: 22929 - DNA, 39 bp, Artificial Sequence; identical to SEQ ID NO: 7119
  Probe

SEQ ID NO: 22930 - DNA, 40 bp, Artificial Sequence; identical to SEQ ID NO: 7120
  Probe

SEQ ID NO: 22931 - DNA, 41 bp, Artificial Sequence; identical to SEQ ID NO: 7121
  Probe

SEQ ID NO: 22932 - DNA, 42 bp, Artificial Sequence; identical to SEQ ID NO: 7122
  Probe

SEQ ID NO: 22933 - DNA, 46 bp, Artificial Sequence; identical to SEQ ID NO: 7124
  Probe

SEQ ID NO: 22934 - DNA, 50 bp, Artificial Sequence; identical to SEQ ID NO: 7125
  Probe

SEQ ID NO: 22935 - DNA, 38 bp, Artificial Sequence
  Probe
gttaaccgaaaggttggtggttcgagcccacccaggga

SEQ ID NO: 22936 - DNA, 43 bp, Artificial Sequence
  Probe
gttaaccgaaaggttggtggttcgagcccacccagggacgcct

SEQ ID NO: 22937 - DNA, 33 bp, Artificial Sequence
  Probe
gttaactaagtgtttgtgggtttaagtcccatt

SEQ ID NO: 22938 - DNA, 37 bp, Artificial Sequence
  Probe
gttaactaagtgtttgtgggtttaagtcccattggtc

SEQ ID NO: 22939 - DNA, 38 bp, Artificial Sequence; identical to SEQ ID NO: 7127
  Probe

SEQ ID NO: 22940 - DNA, 41 bp, Artificial Sequence; identical to SEQ ID NO: 7128
  Probe

SEQ ID NO: 22941 - DNA, 42 bp, Artificial Sequence
  Probe
gttaactaagtgtttgtgggtttaagtcccattggtctagta

SEQ ID NO: 22942 - DNA, 43 bp, Artificial Sequence; identical to SEQ ID NO: 7129
  Probe

SEQ ID NO: 22943 - DNA, 21 bp, Artificial Sequence
  Probe
gttaagatggcagagcccggc

SEQ ID NO: 22944 - DNA, 21 bp, Artificial Sequence
  Probe
gttaagatggcagagcccggt

SEQ ID NO: 22945 - DNA, 22 bp, Artificial Sequence
  Probe
gttaagatggcagagcccggta

SEQ ID NO: 22946 - DNA, 23 bp, Artificial Sequence
  Probe
gttaagatggcagagcccggtaa

SEQ ID NO: 22947 - DNA, 25 bp, Artificial Sequence
  Probe
gttaagatggcagagcccggtaatc

SEQ ID NO: 22948 - DNA, 26 bp, Artificial Sequence
  Probe
gttaagatggcagagcccggtaatcg

SEQ ID NO: 22949 - DNA, 27 bp, Artificial Sequence
  Probe
gttaagatggcagagcccggtaatcgc

SEQ ID NO: 22950 - DNA, 28 bp, Artificial Sequence
  Probe
gttaagatggcagagcccggtaatcgca

SEQ ID NO: 22951 - DNA, 29 bp, Artificial Sequence
  Probe
gttaagatggcagagcccggtaatcgcat

SEQ ID NO: 22952 - DNA, 31 bp, Artificial Sequence
  Probe
gttaagatggcagagcccggtaatcgcataa

SEQ ID NO: 22953 - DNA, 32 bp, Artificial Sequence; identical to SEQ ID NO: 7138
  Probe

SEQ ID NO: 22954 - DNA, 33 bp, Artificial Sequence
  Probe
gttaagatggcagagcccggtaatcgcataaaa

SEQ ID NO: 22955 - DNA, 34 bp, Artificial Sequence; identical to SEQ ID NO: 1522
  Probe

SEQ ID NO: 22956 - DNA, 35 bp, Artificial Sequence; identical to SEQ ID NO: 7139
  Probe

SEQ ID NO: 22957 - DNA, 36 bp, Artificial Sequence
  Probe
gttaagatggcagagcccggtaatcgcataaaactt

SEQ ID NO: 22958 - DNA, 38 bp, Artificial Sequence; identical to SEQ ID NO: 7140
  Probe

SEQ ID NO: 22959 - DNA, 40 bp, Artificial Sequence
  Probe
gttaagatggcagagcccggtaatcgcataaaacttaaaa

SEQ ID NO: 22960 - DNA, 42 bp, Artificial Sequence; identical to SEQ ID NO: 1524
  Probe

SEQ ID NO: 22961 - DNA, 43 bp, Artificial Sequence; identical to SEQ ID NO: 7143
  Probe

SEQ ID NO: 22962 - DNA, 44 bp, Artificial Sequence
  Probe
gttaagatggcagagcccggtaatcgcataaaacttaaaacttt

SEQ ID NO: 22963 - DNA, 50 bp, Artificial Sequence; identical to SEQ ID NO: 7145
  Probe

SEQ ID NO: 22964 - DNA, 34 bp, Artificial Sequence
  Probe
gttagcatagctgccttccaagcagttgacccgg

SEQ ID NO: 22965 - DNA, 16 bp, Artificial Sequence
  Probe
gttaggattcggcgct

SEQ ID NO: 22966 - DNA, 32 bp, Artificial Sequence
  Probe
gttaggattcggcgctctcaccgccgcggccc

SEQ ID NO: 22967 - DNA, 25 bp, Artificial Sequence
  Probe
gttagtatagtggtgagtatccccg

SEQ ID NO: 22968 - DNA, 26 bp, Artificial Sequence
  Probe
gttagtatagtggtgagtatccccgc

SEQ ID NO: 22969 - DNA, 30 bp, Artificial Sequence
  Probe
gttagtatagtggtgagtatccccgcctgt

SEQ ID NO: 22970 - DNA, 17 bp, Artificial Sequence
  Probe
gttatacccttcccgta

SEQ ID NO: 22971 - DNA, 23 bp, Artificial Sequence
  Probe
gttatacccttcccgtactaatt

SEQ ID NO: 22972 - DNA, 15 bp, Artificial Sequence
  Probe
gttatgaaatggttt

SEQ ID NO: 22973 - DNA, 31 bp, Artificial Sequence; identical to SEQ ID NO: 7152
  Probe

SEQ ID NO: 22974 - DNA, 24 bp, Artificial Sequence
  Probe
gttcaaatcccggacgagccccct

SEQ ID NO: 22975 - DNA, 24 bp, Artificial Sequence
  Probe
gttcaagtccctgttcgggcggca

SEQ ID NO: 22976 - DNA, 24 bp, Artificial Sequence
  Probe
gttcaattccccgacggggaggtg

SEQ ID NO: 22977 - DNA, 24 bp, Artificial Sequence
  Probe
gttcaattcccggtcagggaacca

SEQ ID NO: 22978 - DNA, 24 bp, Artificial Sequence
  Probe
gttcaattcctcttcttaacaaca

SEQ ID NO: 22979 - DNA, 24 bp, Artificial Sequence
  Probe
gttcagtggtagaattctcgcctg

SEQ ID NO: 22980 - DNA, 30 bp, Artificial Sequence
  Probe
gttccatagtgtagtggttatcacatctgc

SEQ ID NO: 22981 - DNA, 32 bp, Artificial Sequence; identical to SEQ ID NO: 7165
  Probe

SEQ ID NO: 22982 - DNA, 33 bp, Artificial Sequence
  Probe
gttccatagtgtagtggttatcacgtctgcttt

SEQ ID NO: 22983 - DNA, 24 bp, Artificial Sequence
  Probe
gttcgaaaccgggcggaaacacct

SEQ ID NO: 22984 - DNA, 24 bp, Artificial Sequence
  Probe
gttcgaatcccagcggtgcctccg

SEQ ID NO: 22985 - DNA, 24 bp, Artificial Sequence
  Probe
gttcgactcccggtatgggaacaa

SEQ ID NO: 22986 - DNA, 24 bp, Artificial Sequence
  Probe
gttcgactcccggtgtgggaacgc

SEQ ID NO: 22987 - DNA, 24 bp, Artificial Sequence
  Probe
gttcgagcccacccagggacgcct

SEQ ID NO: 22988 - DNA, 24 bp, Artificial Sequence
  Probe
gttcgagtcccatctgggtcgcgt

SEQ ID NO: 22989 - DNA, 24 bp, Artificial Sequence
  Probe
gttcgagtcccttcgtggtcgttg

SEQ ID NO: 22990 - DNA, 24 bp, Artificial Sequence
  Probe
gttcgatccccagtacctccaggc

SEQ ID NO: 22991 - DNA, 24 bp, Artificial Sequence
  Probe
gttcgatccccggcatctccattg

SEQ ID NO: 22992 - DNA, 22 bp, Artificial Sequence
  Probe
gttcgattccccgacggggaga

SEQ ID NO: 22993 - DNA, 23 bp, Artificial Sequence
  Probe
gttcgattccccgacggggagaa

SEQ ID NO: 22994 - DNA, 24 bp, Artificial Sequence
  Probe
gttcgattccccgacggggagaaa

SEQ ID NO: 22995 - DNA, 23 bp, Artificial Sequence
  Probe
gttcgattccccgacggggagac

SEQ ID NO: 22996 - DNA, 24 bp, Artificial Sequence
  Probe
gttcgattccccgacggggagacg

SEQ ID NO: 22997 - DNA, 24 bp, Artificial Sequence
  Probe
gttcgattccccgacggggagagt

SEQ ID NO: 22998 - DNA, 22 bp, Artificial Sequence
  Probe
gttcgattccccgacggggagg

SEQ ID NO: 22999 - DNA, 23 bp, Artificial Sequence
  Probe
gttcgattccccgacggggaggc

SEQ ID NO: 23000 - DNA, 24 bp, Artificial Sequence
  Probe
gttcgattccccgacggggaggca

SEQ ID NO: 23001 - DNA, 24 bp, Artificial Sequence
  Probe
gttcgattccccgacggggaggcc

SEQ ID NO: 23002 - DNA, 24 bp, Artificial Sequence
  Probe
gttcgattcccggccaacgcaagt

SEQ ID NO: 23003 - DNA, 24 bp, Artificial Sequence
  Probe
gttcgattcccggccaacgcagtg

SEQ ID NO: 23004 - DNA, 24 bp, Artificial Sequence
  Probe
gttcgattcccggccaatgcacga

SEQ ID NO: 23005 - DNA, 24 bp, Artificial Sequence
  Probe
gttcgattcccggccaatgcagca

SEQ ID NO: 23006 - DNA, 24 bp, Artificial Sequence
  Probe
gttcgattcccggtcagggaacaa

SEQ ID NO: 23007 - DNA, 24 bp, Artificial Sequence
  Probe
gttcgattcccggtcatggaacca

SEQ ID NO: 23008 - DNA, 24 bp, Artificial Sequence
  Probe
gttcgattcctggtcagggaacca

SEQ ID NO: 23009 - DNA, 23 bp, Artificial Sequence
  Probe
gttcgattctcatagtcctagaa

SEQ ID NO: 23010 - DNA, 23 bp, Artificial Sequence
  Probe
gttcttgtagttgaaatacaacg

SEQ ID NO: 23011 - DNA, 27 bp, Artificial Sequence
  Probe
gttcttgtagttgaaatacaacgatgg

SEQ ID NO: 23012 - DNA, 28 bp, Artificial Sequence
  Probe
gttcttgtagttgaaatacaacgatggt

SEQ ID NO: 23013 - DNA, 29 bp, Artificial Sequence
  Probe
gttcttgtagttgaaatacaacgatggtt

SEQ ID NO: 23014 - DNA, 30 bp, Artificial Sequence; identical to SEQ ID NO: 7195
  Probe

SEQ ID NO: 23015 - DNA, 31 bp, Artificial Sequence; identical to SEQ ID NO: 7196
  Probe

SEQ ID NO: 23016 - DNA, 32 bp, Artificial Sequence; identical to SEQ ID NO: 7197
  Probe

SEQ ID NO: 23017 - DNA, 36 bp, Artificial Sequence
  Probe
gttcttgtagttgaaatacaacgatggtttttcata

SEQ ID NO: 23018 - DNA, 50 bp, Artificial Sequence
  Probe
gttgaaatacaacgatggtttttcatatcattggtcgtggttgtagtccg

SEQ ID NO: 23019 - DNA, 27 bp, Artificial Sequence
  Probe
gttgatgcagagtggggttttgcagtc

SEQ ID NO: 23020 - DNA, 32 bp, Artificial Sequence; identical to SEQ ID NO: 7207
  Probe

SEQ ID NO: 23021 - DNA, 33 bp, Artificial Sequence
  Probe
gttgatgcagagtggggttttgcagtccttagc

SEQ ID NO: 23022 - DNA, 34 bp, Artificial Sequence; identical to SEQ ID NO: 7208
  Probe

SEQ ID NO: 23023 - DNA, 50 bp, Artificial Sequence; identical to SEQ ID NO: 7209
  Probe

SEQ ID NO: 23024 - DNA, 18 bp, Artificial Sequence
  Probe
gttgccatgttaacgttt

SEQ ID NO: 23025 - DNA, 27 bp, Artificial Sequence
  Probe
gttggtggtatagtggtaagcatagct

SEQ ID NO: 23026 - DNA, 30 bp, Artificial Sequence
  Probe
gttggtggtatagtggtaagcatagctgcc

SEQ ID NO: 23027 - DNA, 33 bp, Artificial Sequence
  Probe
gttggtggtatagtggtaagcatagctgccttc

SEQ ID NO: 23028 - DNA, 34 bp, Artificial Sequence; identical to SEQ ID NO: 7211
  Probe

SEQ ID NO: 23029 - DNA, 25 bp, Artificial Sequence
  Probe
gttggtggtatagtggtgagcatag

SEQ ID NO: 23030 - DNA, 26 bp, Artificial Sequence
  Probe
gttggtggtatagtggtgagcatagc

SEQ ID NO: 23031 - DNA, 28 bp, Artificial Sequence
  Probe
gttggtggtatagtggtgagcatagctg

SEQ ID NO: 23032 - DNA, 29 bp, Artificial Sequence
  Probe
gttggtggtatagtggtgagcatagctgc

SEQ ID NO: 23033 - DNA, 30 bp, Artificial Sequence
  Probe
gttggtggtatagtggtgagcatagctgcc

SEQ ID NO: 23034 - DNA, 31 bp, Artificial Sequence
  Probe
gttggtggtatagtggtgagcatagctgcct

SEQ ID NO: 23035 - DNA, 32 bp, Artificial Sequence; identical to SEQ ID NO: 7212
  Probe

SEQ ID NO: 23036 - DNA, 33 bp, Artificial Sequence; identical to SEQ ID NO: 7213
  Probe

SEQ ID NO: 23037 - DNA, 34 bp, Artificial Sequence; identical to SEQ ID NO: 7214
  Probe

SEQ ID NO: 23038 - DNA, 26 bp, Artificial Sequence
  Probe
gttggtggtatagtggttagcatagc

SEQ ID NO: 23039 - DNA, 27 bp, Artificial Sequence
  Probe
gttggtggtatagtggttagcatagct

SEQ ID NO: 23040 - DNA, 28 bp, Artificial Sequence
  Probe
gttggtggtatagtggttagcatagctg

SEQ ID NO: 23041 - DNA, 29 bp, Artificial Sequence
  Probe
gttggtggtatagtggttagcatagctgc

SEQ ID NO: 23042 - DNA, 30 bp, Artificial Sequence
  Probe
gttggtggtatagtggttagcatagctgcc

SEQ ID NO: 23043 - DNA, 31 bp, Artificial Sequence; identical to SEQ ID NO: 7217
  Probe

SEQ ID NO: 23044 - DNA, 32 bp, Artificial Sequence
  Probe
gttggtggtatagtggttagcatagctgcctt

SEQ ID NO: 23045 - DNA, 33 bp, Artificial Sequence; identical to SEQ ID NO: 7218
  Probe

SEQ ID NO: 23046 - DNA, 34 bp, Artificial Sequence; identical to SEQ ID NO: 7219
  Probe

SEQ ID NO: 23047 - DNA, 26 bp, Artificial Sequence
  Probe
gttggtggttcgagcccacccaggga

SEQ ID NO: 23048 - DNA, 31 bp, Artificial Sequence
  Probe
gttggtggttcgagcccacccagggacgcct

SEQ ID NO: 23049 - DNA, 21 bp, Artificial Sequence
  Probe
gttgtagtccgtgcgagaata

SEQ ID NO: 23050 - DNA, 22 bp, Artificial Sequence
  Probe
gttgtagtccgtgcgagaataa

SEQ ID NO: 23051 - DNA, 23 bp, Artificial Sequence
  Probe
gttgtagtccgtgcgagaataat

SEQ ID NO: 23052 - DNA, 24 bp, Artificial Sequence
  Probe
gttgtagtccgtgcgagaataatg

SEQ ID NO: 23053 - DNA, 33 bp, Artificial Sequence; identical to SEQ ID NO: 7223
  Probe

SEQ ID NO: 23054 - DNA, 36 bp, Artificial Sequence
  Probe
gtttaaccaaaacatcagattgtgaatctgacaaca

SEQ ID NO: 23055 - DNA, 16 bp, Artificial Sequence
  Probe
gtttagacgggctcac

SEQ ID NO: 23056 - DNA, 17 bp, Artificial Sequence
  Probe
gtttagacgggctcaca

SEQ ID NO: 23057 - DNA, 18 bp, Artificial Sequence
  Probe
gtttagacgggctcacat

SEQ ID NO: 23058 - DNA, 20 bp, Artificial Sequence
  Probe
gtttagacgggctcacatca

SEQ ID NO: 23059 - DNA, 25 bp, Artificial Sequence
  Probe
gtttagacgggctcacatcacccca

SEQ ID NO: 23060 - DNA, 26 bp, Artificial Sequence
  Probe
gtttagacgggctcacatcaccccat

SEQ ID NO: 23061 - DNA, 27 bp, Artificial Sequence
  Probe
gtttagacgggctcacatcaccccata

SEQ ID NO: 23062 - DNA, 28 bp, Artificial Sequence
  Probe
gtttagacgggctcacatcaccccataa

SEQ ID NO: 23063 - DNA, 29 bp, Artificial Sequence
  Probe
gtttagacgggctcacatcaccccataaa

SEQ ID NO: 23064 - DNA, 31 bp, Artificial Sequence; identical to SEQ ID NO: 7236
  Probe

SEQ ID NO: 23065 - DNA, 33 bp, Artificial Sequence; identical to SEQ ID NO: 7238
  Probe

SEQ ID NO: 23066 - DNA, 34 bp, Artificial Sequence; identical to SEQ ID NO: 7239
  Probe

SEQ ID NO: 23067 - DNA, 17 bp, Artificial Sequence
  Probe
gtttatgtagcttacct

SEQ ID NO: 23068 - DNA, 21 bp, Artificial Sequence
  Probe
gtttatgtagcttacctcctc

SEQ ID NO: 23069 - DNA, 22 bp, Artificial Sequence
  Probe
gtttatgtagcttacctcctca

SEQ ID NO: 23070 - DNA, 27 bp, Artificial Sequence
  Probe
gtttatgtagcttacctcctcaaagca

SEQ ID NO: 23071 - DNA, 31 bp, Artificial Sequence; identical to SEQ ID NO: 7244
  Probe

SEQ ID NO: 23072 - DNA, 38 bp, Artificial Sequence; identical to SEQ ID NO: 7246
  Probe

SEQ ID NO: 23073 - DNA, 39 bp, Artificial Sequence; identical to SEQ ID NO: 7247
  Probe

SEQ ID NO: 23074 - DNA, 40 bp, Artificial Sequence
  Probe
gtttatgtagcttacctcctcaaagcaatacactgaaaat

SEQ ID NO: 23075 - DNA, 42 bp, Artificial Sequence
  Probe
gtttatgtagcttacctcctcaaagcaatacactgaaaatgt

SEQ ID NO: 23076 - DNA, 43 bp, Artificial Sequence; identical to SEQ ID NO: 7249
  Probe

SEQ ID NO: 23077 - DNA, 44 bp, Artificial Sequence; identical to SEQ ID NO: 7250
  Probe

SEQ ID NO: 23078 - DNA, 50 bp, Artificial Sequence; identical to SEQ ID NO: 7251
  Probe

SEQ ID NO: 23079 - DNA, 38 bp, Artificial Sequence
  Probe
gtttccccgcacaggttcgaatcctgttcgtgacgggt

SEQ ID NO: 23080 - DNA, 28 bp, Artificial Sequence
  Probe
gtttccgtagtggagtggttatcacgtt

SEQ ID NO: 23081 - DNA, 31 bp, Artificial Sequence
  Probe
gtttccgtagtggagtggttatcacgttcgc

SEQ ID NO: 23082 - DNA, 32 bp, Artificial Sequence
  Probe
gtttccgtagtggagtggttatcacgttcgcc

SEQ ID NO: 23083 - DNA, 33 bp, Artificial Sequence; identical to SEQ ID NO: 7252
  Probe

SEQ ID NO: 23084 - DNA, 34 bp, Artificial Sequence
  Probe
gtttccgtagtggagtggttatcacgttcgcctc

SEQ ID NO: 23085 - DNA, 35 bp, Artificial Sequence
  Probe
gtttccgtagtggagtggttatcacgttcgcctca

SEQ ID NO: 23086 - DNA, 50 bp, Artificial Sequence
  Probe
gtttccgtagtggagtggttatcacgttcgcctcacacgcgaaaggtccc

SEQ ID NO: 23087 - DNA, 17 bp, Artificial Sequence
  Probe
gtttccgtagtgtagcg

SEQ ID NO: 23088 - DNA, 22 bp, Artificial Sequence
  Probe
gtttccgtagtgtagcggttat

SEQ ID NO: 23089 - DNA, 23 bp, Artificial Sequence
  Probe
gtttccgtagtgtagcggttatc

SEQ ID NO: 23090 - DNA, 27 bp, Artificial Sequence
  Probe
gtttccgtagtgtagcggttatcacat

SEQ ID NO: 23091 - DNA, 37 bp, Artificial Sequence; identical to SEQ ID NO: 7254
  Probe

SEQ ID NO: 23092 - DNA, 38 bp, Artificial Sequence
  Probe
gtttccgtagtgtagcggttatcacattcgcctcacac

SEQ ID NO: 23093 - DNA, 40 bp, Artificial Sequence
  Probe
gtttccgtagtgtagcggttatcacattcgcctcacacgc

SEQ ID NO: 23094 - DNA, 42 bp, Artificial Sequence
  Probe
gtttccgtagtgtagcggttatcacattcgcctcacacgcga

SEQ ID NO: 23095 - DNA, 16 bp, Artificial Sequence
  Probe
gtttccgtagtgtagt

SEQ ID NO: 23096 - DNA, 17 bp, Artificial Sequence
  Probe
gtttccgtagtgtagtg

SEQ ID NO: 23097 - DNA, 18 bp, Artificial Sequence
  Probe
gtttccgtagtgtagtgg

SEQ ID NO: 23098 - DNA, 19 bp, Artificial Sequence
  Probe
gtttccgtagtgtagtggt

SEQ ID NO: 23099 - DNA, 20 bp, Artificial Sequence
  Probe
gtttccgtagtgtagtggtc

SEQ ID NO: 23100 - DNA, 22 bp, Artificial Sequence
  Probe
gtttccgtagtgtagtggtcat

SEQ ID NO: 23101 - DNA, 23 bp, Artificial Sequence
  Probe
gtttccgtagtgtagtggtcatc

SEQ ID NO: 23102 - DNA, 24 bp, Artificial Sequence
  Probe
gtttccgtagtgtagtggtcatca

SEQ ID NO: 23103 - DNA, 27 bp, Artificial Sequence
  Probe
gtttccgtagtgtagtggtcatcacgt

SEQ ID NO: 23104 - DNA, 35 bp, Artificial Sequence; identical to SEQ ID NO: 7260
  Probe

SEQ ID NO: 23105 - DNA, 36 bp, Artificial Sequence; identical to SEQ ID NO: 7261
  Probe

SEQ ID NO: 23106 - DNA, 37 bp, Artificial Sequence; identical to SEQ ID NO: 7262
  Probe

SEQ ID NO: 23107 - DNA, 38 bp, Artificial Sequence
  Probe
gtttccgtagtgtagtggtcatcacgttcgcctaacac

SEQ ID NO: 23108 - DNA, 39 bp, Artificial Sequence
  Probe
gtttccgtagtgtagtggtcatcacgttcgcctaacacg

SEQ ID NO: 23109 - DNA, 50 bp, Artificial Sequence; identical to SEQ ID NO: 7263
  Probe

SEQ ID NO: 23110 - DNA, 20 bp, Artificial Sequence
  Probe
gtttccgtagtgtagtggtt

SEQ ID NO: 23111 - DNA, 22 bp, Artificial Sequence
  Probe
gtttccgtagtgtagtggttat

SEQ ID NO: 23112 - DNA, 23 bp, Artificial Sequence
  Probe
gtttccgtagtgtagtggttatc

SEQ ID NO: 23113 - DNA, 24 bp, Artificial Sequence
  Probe
gtttccgtagtgtagtggttatca

SEQ ID NO: 23114 - DNA, 25 bp, Artificial Sequence
  Probe
gtttccgtagtgtagtggttatcac

SEQ ID NO: 23115 - DNA, 26 bp, Artificial Sequence
  Probe
gtttccgtagtgtagtggttatcacg

SEQ ID NO: 23116 - DNA, 27 bp, Artificial Sequence
  Probe
gtttccgtagtgtagtggttatcacgt

SEQ ID NO: 23117 - DNA, 28 bp, Artificial Sequence
  Probe
gtttccgtagtgtagtggttatcacgtt

SEQ ID NO: 23118 - DNA, 29 bp, Artificial Sequence
  Probe
gtttccgtagtgtagtggttatcacgttc

SEQ ID NO: 23119 - DNA, 30 bp, Artificial Sequence; identical to SEQ ID NO: 7273
  Probe

SEQ ID NO: 23120 - DNA, 31 bp, Artificial Sequence; identical to SEQ ID NO: 7274
  Probe

SEQ ID NO: 23121 - DNA, 32 bp, Artificial Sequence; identical to SEQ ID NO: 7275
  Probe

SEQ ID NO: 23122 - DNA, 33 bp, Artificial Sequence; identical to SEQ ID NO: 7276
  Probe

SEQ ID NO: 23123 - DNA, 35 bp, Artificial Sequence
  Probe
gtttccgtagtgtagtggttatcacgttcgcctaa

SEQ ID NO: 23124 - DNA, 36 bp, Artificial Sequence
  Probe
gtttccgtagtgtagtggttatcacgttcgcctaac

SEQ ID NO: 23125 - DNA, 40 bp, Artificial Sequence
  Probe
gtttccgtagtgtagtggttatcacgttcgcctaacacgc

SEQ ID NO: 23126 - DNA, 41 bp, Artificial Sequence
  Probe
gtttccgtagtgtagtggttatcacgttcgcctaacacgcg

SEQ ID NO: 23127 - DNA, 49 bp, Artificial Sequence
  Probe
gtttccgtagtgtagtggttatcacgttcgcctaacacgcgaaaggtcc

SEQ ID NO: 23128 - DNA, 50 bp, Artificial Sequence; identical to SEQ ID NO: 7277
  Probe

SEQ ID NO: 23129 - DNA, 34 bp, Artificial Sequence; identical to SEQ ID NO: 7278
  Probe

SEQ ID NO: 23130 - DNA, 35 bp, Artificial Sequence; identical to SEQ ID NO: 7279
  Probe

SEQ ID NO: 23131 - DNA, 36 bp, Artificial Sequence; identical to SEQ ID NO: 7280
  Probe

SEQ ID NO: 23132 - DNA, 37 bp, Artificial Sequence; identical to SEQ ID NO: 7281
  Probe

SEQ ID NO: 23133 - DNA, 38 bp, Artificial Sequence; identical to SEQ ID NO: 1563
  Probe

SEQ ID NO: 23134 - DNA, 41 bp, Artificial Sequence
  Probe
gtttccgtagtgtagtggttatcacgttcgcctcacacgcg

SEQ ID NO: 23135 - DNA, 42 bp, Artificial Sequence
  Probe
gtttccgtagtgtagtggttatcacgttcgcctcacacgcga

SEQ ID NO: 23136 - DNA, 46 bp, Artificial Sequence
  Probe
gtttccgtagtgtagtggttatcacgttcgcctcacacgcgaaagg

SEQ ID NO: 23137 - DNA, 31 bp, Artificial Sequence
  Probe
gtttccgtagtgtagtggttatcacgtttgc

SEQ ID NO: 23138 - DNA, 32 bp, Artificial Sequence
  Probe
gtttccgtagtgtagtggttatcacgtttgcc

SEQ ID NO: 23139 - DNA, 33 bp, Artificial Sequence
  Probe
gtttccgtagtgtagtggttatcacgtttgcct

SEQ ID NO: 23140 - DNA, 34 bp, Artificial Sequence
  Probe
gtttccgtagtgtagtggttatcacgtttgccta

SEQ ID NO: 23141 - DNA, 35 bp, Artificial Sequence
  Probe
gtttccgtagtgtagtggttatcacgtttgcctaa

SEQ ID NO: 23142 - DNA, 28 bp, Artificial Sequence
  Probe
gtttccgtagtgtagtggttattatgtt

SEQ ID NO: 23143 - DNA, 31 bp, Artificial Sequence
  Probe
gtttccgtagtgtagtggttattatgttcgc

SEQ ID NO: 23144 - DNA, 32 bp, Artificial Sequence
  Probe
gtttccgtagtgtagtggttattatgttcgcc

SEQ ID NO: 23145 - DNA, 33 bp, Artificial Sequence; identical to SEQ ID NO: 7282
  Probe

SEQ ID NO: 23146 - DNA, 34 bp, Artificial Sequence
  Probe
gtttccgtagtgtagtggttattatgttcgcctc

SEQ ID NO: 23147 - DNA, 28 bp, Artificial Sequence
  Probe
gtttccgtggtgtagtggttatcacatt

SEQ ID NO: 23148 - DNA, 29 bp, Artificial Sequence
  Probe
gtttccgtggtgtagtggttatcacattc

SEQ ID NO: 23149 - DNA, 30 bp, Artificial Sequence; identical to SEQ ID NO: 11583
  Probe

SEQ ID NO: 23150 - DNA, 31 bp, Artificial Sequence
  Probe
gtttccgtggtgtagtggttatcacattcgc

SEQ ID NO: 23151 - DNA, 32 bp, Artificial Sequence; identical to SEQ ID NO: 7284
  Probe

SEQ ID NO: 23152 - DNA, 33 bp, Artificial Sequence; identical to SEQ ID NO: 7285
  Probe

SEQ ID NO: 23153 - DNA, 34 bp, Artificial Sequence
  Probe
gtttccgtggtgtagtggttatcacattcgcctt

SEQ ID NO: 23154 - DNA, 15 bp, Artificial Sequence
  Probe
gtttgtgggtttaag

SEQ ID NO: 23155 - DNA, 16 bp, Artificial Sequence
  Probe
gtttgtgggtttaagt

SEQ ID NO: 23156 - DNA, 17 bp, Artificial Sequence
  Probe
gtttgtgggtttaagtc

SEQ ID NO: 23157 - DNA, 18 bp, Artificial Sequence
  Probe
gtttgtgggtttaagtcc

SEQ ID NO: 23158 - DNA, 19 bp, Artificial Sequence
  Probe
gtttgtgggtttaagtccc

SEQ ID NO: 23159 - DNA, 21 bp, Artificial Sequence
  Probe
gtttgtgggtttaagtcccat

SEQ ID NO: 23160 - DNA, 22 bp, Artificial Sequence
  Probe
gtttgtgggtttaagtcccatt

SEQ ID NO: 23161 - DNA, 23 bp, Artificial Sequence
  Probe
gtttgtgggtttaagtcccattg

SEQ ID NO: 23162 - DNA, 24 bp, Artificial Sequence
  Probe
gtttgtgggtttaagtcccattgg

SEQ ID NO: 23163 - DNA, 25 bp, Artificial Sequence
  Probe
gtttgtgggtttaagtcccattggt

SEQ ID NO: 23164 - DNA, 26 bp, Artificial Sequence
  Probe
gtttgtgggtttaagtcccattggtc

SEQ ID NO: 23165 - DNA, 29 bp, Artificial Sequence
  Probe
gtttgtgggtttaagtcccattggtctag

SEQ ID NO: 23166 - DNA, 30 bp, Artificial Sequence; identical to SEQ ID NO: 7300
  Probe

SEQ ID NO: 23167 - DNA, 31 bp, Artificial Sequence; identical to SEQ ID NO: 7301
  Probe

SEQ ID NO: 23168 - DNA, 32 bp, Artificial Sequence; identical to SEQ ID NO: 7302
  Probe

SEQ ID NO: 23169 - DNA, 33 bp, Artificial Sequence; identical to SEQ ID NO: 7303
  Probe

SEQ ID NO: 23170 - DNA, 34 bp, Artificial Sequence; identical to SEQ ID NO: 7304
  Probe

SEQ ID NO: 23171 - DNA, 35 bp, Artificial Sequence; identical to SEQ ID NO: 7305
  Probe

SEQ ID NO: 23172 - DNA, 36 bp, Artificial Sequence
  Probe
gtttgtgggtttaagtcccattggtctagtaagggc

SEQ ID NO: 23173 - DNA, 31 bp, Artificial Sequence
  Probe
gtttttcatatcattggtcgtggttgtagtc

SEQ ID NO: 23174 - DNA, 46 bp, Artificial Sequence; identical to SEQ ID NO: 7307
  Probe

SEQ ID NO: 23175 - DNA, 38 bp, Artificial Sequence; identical to SEQ ID NO: 7312
  Probe

SEQ ID NO: 23176 - DNA, 39 bp, Artificial Sequence; identical to SEQ ID NO: 7313
  Probe

SEQ ID NO: 23177 - DNA, 40 bp, Artificial Sequence
  Probe
taaaactttacagtcagaggttcaattcctcttcttaaca

SEQ ID NO: 23178 - DNA, 42 bp, Artificial Sequence; identical to SEQ ID NO: 7314
  Probe

SEQ ID NO: 23179 - DNA, 43 bp, Artificial Sequence; identical to SEQ ID NO: 7315
  Probe

SEQ ID NO: 23180 - DNA, 25 bp, Artificial Sequence
  Probe
taaacaaaacgaatgatttcgactc

SEQ ID NO: 23181 - DNA, 31 bp, Artificial Sequence
  Probe
taaacaaaacgaatgatttcgactcattaaa

SEQ ID NO: 23182 - DNA, 32 bp, Artificial Sequence
  Probe
taaacaaaacgaatgatttcgactcattaaat

SEQ ID NO: 23183 - DNA, 33 bp, Artificial Sequence
  Probe
taaacaaaacgaatgatttcgactcattaaatt

SEQ ID NO: 23184 - DNA, 34 bp, Artificial Sequence
  Probe
taaacaaaacgaatgatttcgactcattaaatta

SEQ ID NO: 23185 - DNA, 36 bp, Artificial Sequence
  Probe
taaacaaaacgaatgatttcgactcattaaattatg

SEQ ID NO: 23186 - DNA, 37 bp, Artificial Sequence; identical to SEQ ID NO: 7317
  Probe

SEQ ID NO: 23187 - DNA, 39 bp, Artificial Sequence; identical to SEQ ID NO: 7318
  Probe

SEQ ID NO: 23188 - DNA, 50 bp, Artificial Sequence; identical to SEQ ID NO: 7321
  Probe

SEQ ID NO: 23189 - DNA, 41 bp, Artificial Sequence; identical to SEQ ID NO: 7322
  Probe

SEQ ID NO: 23190 - DNA, 41 bp, Artificial Sequence; identical to SEQ ID NO: 7323
  Probe

SEQ ID NO: 23191 - DNA, 20 bp, Artificial Sequence
  Probe
taaacccccttatttctagg

SEQ ID NO: 23192 - DNA, 21 bp, Artificial Sequence
  Probe
taaacccccttatttctagga

SEQ ID NO: 23193 - DNA, 36 bp, Artificial Sequence; identical to SEQ ID NO: 7329
  Probe

SEQ ID NO: 23194 - DNA, 28 bp, Artificial Sequence
  Probe
taaacctagccccaaacccactccacct

SEQ ID NO: 23195 - DNA, 29 bp, Artificial Sequence
  Probe
taaacttcgccttaattttaataatcaac

SEQ ID NO: 23196 - DNA, 29 bp, Artificial Sequence
  Probe
taaagacaggggttaggcctctttttacc

SEQ ID NO: 23197 - DNA, 32 bp, Artificial Sequence
  Probe
taaagacaggggttaggcctctttttaccagc

SEQ ID NO: 23198 - DNA, 33 bp, Artificial Sequence
  Probe
taaagacaggggttaggcctctttttaccagct

SEQ ID NO: 23199 - DNA, 33 bp, Artificial Sequence
  Probe
taaagattaagagaaccaacacctctttacagt

SEQ ID NO: 23200 - DNA, 34 bp, Artificial Sequence
  Probe
taaagattaagagaaccaacacctctttacagtg

SEQ ID NO: 23201 - DNA, 35 bp, Artificial Sequence
  Probe
taaagattaagagaaccaacacctctttacagtga

SEQ ID NO: 23202 - DNA, 36 bp, Artificial Sequence
  Probe
taaagattaagagaaccaacacctctttacagtgaa

SEQ ID NO: 23203 - DNA, 37 bp, Artificial Sequence; identical to SEQ ID NO: 7331
  Probe

SEQ ID NO: 23204 - DNA, 38 bp, Artificial Sequence; identical to SEQ ID NO: 7332
  Probe

SEQ ID NO: 23205 - DNA, 36 bp, Artificial Sequence
  Probe
taaaggtccctggttcgatcccgggtttcggcactt

SEQ ID NO: 23206 - DNA, 35 bp, Artificial Sequence
  Probe
taaagtaaggtcagctaaataagctatcgggccca

SEQ ID NO: 23207 - DNA, 38 bp, Artificial Sequence
  Probe
taaagtaaggtcagctaaataagctatcgggcccatac

SEQ ID NO: 23208 - DNA, 31 bp, Artificial Sequence; identical to SEQ ID NO: 7336
  Probe

SEQ ID NO: 23209 - DNA, 42 bp, Artificial Sequence
  Probe
taaatacagaccaagagccttcaaagccctcagtaagttgca

SEQ ID NO: 23210 - DNA, 39 bp, Artificial Sequence; identical to SEQ ID NO: 7343
  Probe

SEQ ID NO: 23211 - DNA, 21 bp, Artificial Sequence
  Probe
taacaacatggctttctcaac

SEQ ID NO: 23212 - DNA, 22 bp, Artificial Sequence
  Probe
taacaacatggctttctcaact

SEQ ID NO: 23213 - DNA, 16 bp, Artificial Sequence
  Probe
taacacaaagcaccca

SEQ ID NO: 23214 - DNA, 17 bp, Artificial Sequence
  Probe
taacacaaagcacccaa

SEQ ID NO: 23215 - DNA, 18 bp, Artificial Sequence
  Probe
taacacaaagcacccaac

SEQ ID NO: 23216 - DNA, 19 bp, Artificial Sequence
  Probe
taacacaaagcacccaact

SEQ ID NO: 23217 - DNA, 20 bp, Artificial Sequence
  Probe
taacacaaagcacccaactt

SEQ ID NO: 23218 - DNA, 21 bp, Artificial Sequence
  Probe
taacacaaagcacccaactta

SEQ ID NO: 23219 - DNA, 23 bp, Artificial Sequence
  Probe
taacacaaagcacccaacttaca

SEQ ID NO: 23220 - DNA, 25 bp, Artificial Sequence
  Probe
taacacaaagcacccaacttacact

SEQ ID NO: 23221 - DNA, 26 bp, Artificial Sequence
  Probe
taacacaaagcacccaacttacactt

SEQ ID NO: 23222 - DNA, 27 bp, Artificial Sequence
  Probe
taacacaaagcacccaacttacactta

SEQ ID NO: 23223 - DNA, 30 bp, Artificial Sequence; identical to SEQ ID NO: 7355
  Probe

SEQ ID NO: 23224 - DNA, 31 bp, Artificial Sequence
  Probe
taacacaaagcacccaacttacacttaggag

SEQ ID NO: 23225 - DNA, 32 bp, Artificial Sequence; identical to SEQ ID NO: 7356
  Probe

SEQ ID NO: 23226 - DNA, 33 bp, Artificial Sequence
  Probe
taacacaaagcacccaacttacacttaggagat

SEQ ID NO: 23227 - DNA, 37 bp, Artificial Sequence; identical to SEQ ID NO: 7357
  Probe

SEQ ID NO: 23228 - DNA, 42 bp, Artificial Sequence
  Probe
taacacaaagcacccaacttacacttaggagatttcaactta

SEQ ID NO: 23229 - DNA, 50 bp, Artificial Sequence; identical to SEQ ID NO: 1568
  Probe

SEQ ID NO: 23230 - DNA, 18 bp, Artificial Sequence
  Probe
taacacgcgaaaggtccc

SEQ ID NO: 23231 - DNA, 19 bp, Artificial Sequence
  Probe
taacacgcgaaaggtcccc

SEQ ID NO: 23232 - DNA, 21 bp, Artificial Sequence
  Probe
taacacgcgaaaggtccccgg

SEQ ID NO: 23233 - DNA, 22 bp, Artificial Sequence
  Probe
taacacgcgaaaggtccccggt

SEQ ID NO: 23234 - DNA, 23 bp, Artificial Sequence
  Probe
taacacgcgaaaggtccccggtt

SEQ ID NO: 23235 - DNA, 23 bp, Artificial Sequence
  Probe
taacagctaaggactgcaaaacc

SEQ ID NO: 23236 - DNA, 24 bp, Artificial Sequence
  Probe
taacagctaaggactgcaaaaccc

SEQ ID NO: 23237 - DNA, 25 bp, Artificial Sequence
  Probe
taacagctaaggactgcaaaacccc

SEQ ID NO: 23238 - DNA, 26 bp, Artificial Sequence
  Probe
taacagctaaggactgcaaaacccca

SEQ ID NO: 23239 - DNA, 27 bp, Artificial Sequence
  Probe
taacagctaaggactgcaaaaccccac

SEQ ID NO: 23240 - DNA, 28 bp, Artificial Sequence
  Probe
taacagctaaggactgcaaaaccccact

SEQ ID NO: 23241 - DNA, 29 bp, Artificial Sequence
  Probe
taacagctaaggactgcaaaaccccactc

SEQ ID NO: 23242 - DNA, 30 bp, Artificial Sequence; identical to SEQ ID NO: 11605
  Probe

SEQ ID NO: 23243 - DNA, 18 bp, Artificial Sequence
  Probe
taacagctatccattggt

SEQ ID NO: 23244 - DNA, 27 bp, Artificial Sequence
  Probe
taaccaaaacatcagattgtgaatctg

SEQ ID NO: 23245 - DNA, 30 bp, Artificial Sequence; identical to SEQ ID NO: 7365
  Probe

SEQ ID NO: 23246 - DNA, 31 bp, Artificial Sequence; identical to SEQ ID NO: 7366
  Probe

SEQ ID NO: 23247 - DNA, 32 bp, Artificial Sequence; identical to SEQ ID NO: 7367
  Probe

SEQ ID NO: 23248 - DNA, 33 bp, Artificial Sequence; identical to SEQ ID NO: 7368
  Probe

SEQ ID NO: 23249 - DNA, 34 bp, Artificial Sequence
  Probe
taaccaaaacatcagattgtgaatctgacaacag

SEQ ID NO: 23250 - DNA, 35 bp, Artificial Sequence
  Probe
taaccaaaacatcagattgtgaatctgacaacaga

SEQ ID NO: 23251 - DNA, 36 bp, Artificial Sequence
  Probe
taaccaaaacatcagattgtgaatctgacaacagag

SEQ ID NO: 23252 - DNA, 38 bp, Artificial Sequence; identical to SEQ ID NO: 7370
  Probe

SEQ ID NO: 23253 - DNA, 39 bp, Artificial Sequence; identical to SEQ ID NO: 7371
  Probe

SEQ ID NO: 23254 - DNA, 41 bp, Artificial Sequence
  Probe
taaccaaaacatcagattgtgaatctgacaacagaggctta

SEQ ID NO: 23255 - DNA, 50 bp, Artificial Sequence; identical to SEQ ID NO: 1569
  Probe

SEQ ID NO: 23256 - DNA, 41 bp, Artificial Sequence; identical to SEQ ID NO: 7376
  Probe

SEQ ID NO: 23257 - DNA, 41 bp, Artificial Sequence; identical to SEQ ID NO: 7378
  Probe

SEQ ID NO: 23258 - DNA, 30 bp, Artificial Sequence
  Probe
taaccttttaagttaaagattaagagaacc

SEQ ID NO: 23259 - DNA, 50 bp, Artificial Sequence; identical to SEQ ID NO: 7379
  Probe

SEQ ID NO: 23260 - DNA, 41 bp, Artificial Sequence
  Probe
taacgccaaggtcgcgggttcgatccccgtacgggccactg

SEQ ID NO: 23261 - DNA, 36 bp, Artificial Sequence
  Probe
taactaagtgtttgtgggtttaagtcccattggtct

SEQ ID NO: 23262 - DNA, 41 bp, Artificial Sequence; identical to SEQ ID NO: 7382
  Probe

SEQ ID NO: 23263 - DNA, 30 bp, Artificial Sequence
  Probe
taactagttttgacaacattcaaaaaagag

SEQ ID NO: 23264 - DNA, 32 bp, Artificial Sequence
  Probe
taactagttttgacaacattcaaaaaagagta

SEQ ID NO: 23265 - DNA, 33 bp, Artificial Sequence
  Probe
taactagttttgacaacattcaaaaaagagtaa

SEQ ID NO: 23266 - DNA, 24 bp, Artificial Sequence
  Probe
taactcatgcccccatgtctaaca

SEQ ID NO: 23267 - DNA, 32 bp, Artificial Sequence; identical to SEQ ID NO: 7387
  Probe

SEQ ID NO: 23268 - DNA, 33 bp, Artificial Sequence; identical to SEQ ID NO: 7388
  Probe

SEQ ID NO: 23269 - DNA, 34 bp, Artificial Sequence; identical to SEQ ID NO: 7389
  Probe

SEQ ID NO: 23270 - DNA, 35 bp, Artificial Sequence; identical to SEQ ID NO: 7390
  Probe

SEQ ID NO: 23271 - DNA, 36 bp, Artificial Sequence; identical to SEQ ID NO: 7391
  Probe

SEQ ID NO: 23272 - DNA, 37 bp, Artificial Sequence; identical to SEQ ID NO: 7392
  Probe

SEQ ID NO: 23273 - DNA, 38 bp, Artificial Sequence; identical to SEQ ID NO: 7393
  Probe

SEQ ID NO: 23274 - DNA, 39 bp, Artificial Sequence; identical to SEQ ID NO: 7394
  Probe

SEQ ID NO: 23275 - DNA, 40 bp, Artificial Sequence; identical to SEQ ID NO: 7395
  Probe

SEQ ID NO: 23276 - DNA, 41 bp, Artificial Sequence; identical to SEQ ID NO: 7396
  Probe

SEQ ID NO: 23277 - DNA, 42 bp, Artificial Sequence
  Probe
taactcatgcccccatgtctaacaacatggctttctcaactt

SEQ ID NO: 23278 - DNA, 46 bp, Artificial Sequence; identical to SEQ ID NO: 7399
  Probe

SEQ ID NO: 23279 - DNA, 19 bp, Artificial Sequence
  Probe
taacttgaccgctctgagc

SEQ ID NO: 23280 - DNA, 20 bp, Artificial Sequence
  Probe
taacttgaccgctctgagct

SEQ ID NO: 23281 - DNA, 15 bp, Artificial Sequence
  Probe
taagaaactgcgcga

SEQ ID NO: 23282 - DNA, 30 bp, Artificial Sequence; identical to SEQ ID NO: 7405
  Probe

SEQ ID NO: 23283 - DNA, 31 bp, Artificial Sequence; identical to SEQ ID NO: 7406
  Probe

SEQ ID NO: 23284 - DNA, 41 bp, Artificial Sequence
  Probe
taagccagggattgtgggttcgagtcccacccggggtaaag

SEQ ID NO: 23285 - DNA, 41 bp, Artificial Sequence; identical to SEQ ID NO: 7409
  Probe

SEQ ID NO: 23286 - DNA, 40 bp, Artificial Sequence; identical to SEQ ID NO: 7410
  Probe

SEQ ID NO: 23287 - DNA, 41 bp, Artificial Sequence; identical to SEQ ID NO: 7411
  Probe

SEQ ID NO: 23288 - DNA, 16 bp, Artificial Sequence
  Probe
taagctatcgggccca

SEQ ID NO: 23289 - DNA, 17 bp, Artificial Sequence
  Probe
taagctatcgggcccat

SEQ ID NO: 23290 - DNA, 18 bp, Artificial Sequence
  Probe
taagctatcgggcccata

SEQ ID NO: 23291 - DNA, 19 bp, Artificial Sequence
  Probe
taagctatcgggcccatac

SEQ ID NO: 23292 - DNA, 20 bp, Artificial Sequence
  Probe
taagctatcgggcccatacc

SEQ ID NO: 23293 - DNA, 22 bp, Artificial Sequence
  Probe
taagctatcgggcccatacccc

SEQ ID NO: 23294 - DNA, 23 bp, Artificial Sequence
  Probe
taagctatcgggcccataccccg

SEQ ID NO: 23295 - DNA, 24 bp, Artificial Sequence
  Probe
taagctatcgggcccataccccga

SEQ ID NO: 23296 - DNA, 25 bp, Artificial Sequence
  Probe
taagctatcgggcccataccccgaa

SEQ ID NO: 23297 - DNA, 26 bp, Artificial Sequence
  Probe
taagctatcgggcccataccccgaaa

SEQ ID NO: 23298 - DNA, 27 bp, Artificial Sequence
  Probe
taagctatcgggcccataccccgaaaa

SEQ ID NO: 23299 - DNA, 28 bp, Artificial Sequence
  Probe
taagctatcgggcccataccccgaaaat

SEQ ID NO: 23300 - DNA, 29 bp, Artificial Sequence
  Probe
taagctatcgggcccataccccgaaaatg

SEQ ID NO: 23301 - DNA, 30 bp, Artificial Sequence; identical to SEQ ID NO: 7423
  Probe

SEQ ID NO: 23302 - DNA, 31 bp, Artificial Sequence; identical to SEQ ID NO: 7424
  Probe

SEQ ID NO: 23303 - DNA, 32 bp, Artificial Sequence; identical to SEQ ID NO: 7425
  Probe

SEQ ID NO: 23304 - DNA, 33 bp, Artificial Sequence; identical to SEQ ID NO: 7426
  Probe

SEQ ID NO: 23305 - DNA, 34 bp, Artificial Sequence; identical to SEQ ID NO: 7427
  Probe

SEQ ID NO: 23306 - DNA, 35 bp, Artificial Sequence; identical to SEQ ID NO: 7428
  Probe

SEQ ID NO: 23307 - DNA, 36 bp, Artificial Sequence; identical to SEQ ID NO: 7429
  Probe

SEQ ID NO: 23308 - DNA, 39 bp, Artificial Sequence
  Probe
taagctatcgggcccataccccgaaaatgttggttatac

SEQ ID NO: 23309 - DNA, 40 bp, Artificial Sequence; identical to SEQ ID NO: 7430
  Probe

SEQ ID NO: 23310 - DNA, 50 bp, Artificial Sequence; identical to SEQ ID NO: 1573
  Probe

SEQ ID NO: 23311 - DNA, 26 bp, Artificial Sequence
  Probe
taaggtcagctaaataagctatcggg

SEQ ID NO: 23312 - DNA, 27 bp, Artificial Sequence
  Probe
taaggtcagctaaataagctatcgggc

SEQ ID NO: 23313 - DNA, 28 bp, Artificial Sequence
  Probe
taaggtcagctaaataagctatcgggcc

SEQ ID NO: 23314 - DNA, 29 bp, Artificial Sequence
  Probe
taaggtcagctaaataagctatcgggccc

SEQ ID NO: 23315 - DNA, 30 bp, Artificial Sequence; identical to SEQ ID NO: 7439
  Probe

SEQ ID NO: 23316 - DNA, 31 bp, Artificial Sequence; identical to SEQ ID NO: 7440
  Probe

SEQ ID NO: 23317 - DNA, 32 bp, Artificial Sequence; identical to SEQ ID NO: 7441
  Probe

SEQ ID NO: 23318 - DNA, 33 bp, Artificial Sequence; identical to SEQ ID NO: 7442
  Probe

SEQ ID NO: 23319 - DNA, 34 bp, Artificial Sequence; identical to SEQ ID NO: 7443
  Probe

SEQ ID NO: 23320 - DNA, 36 bp, Artificial Sequence
  Probe
taaggtcagctaaataagctatcgggcccatacccc

SEQ ID NO: 23321 - DNA, 44 bp, Artificial Sequence; identical to SEQ ID NO: 7450
  Probe

SEQ ID NO: 23322 - DNA, 50 bp, Artificial Sequence; identical to SEQ ID NO: 7454
  Probe

SEQ ID NO: 23323 - DNA, 29 bp, Artificial Sequence
  Probe
taagtgtttgtgggtttaagtcccattgg

SEQ ID NO: 23324 - DNA, 30 bp, Artificial Sequence
  Probe
taagtgtttgtgggtttaagtcccattggt

SEQ ID NO: 23325 - DNA, 31 bp, Artificial Sequence; identical to SEQ ID NO: 7456
  Probe

SEQ ID NO: 23326 - DNA, 33 bp, Artificial Sequence; identical to SEQ ID NO: 7458
  Probe

SEQ ID NO: 23327 - DNA, 35 bp, Artificial Sequence
  Probe
taagtgtttgtgggtttaagtcccattggtctagt

SEQ ID NO: 23328 - DNA, 36 bp, Artificial Sequence
  Probe
taagtgtttgtgggtttaagtcccattggtctagta

SEQ ID NO: 23329 - DNA, 43 bp, Artificial Sequence; identical to SEQ ID NO: 7460
  Probe

SEQ ID NO: 23330 - DNA, 22 bp, Artificial Sequence
  Probe
taataacgccaaggtcgcgggt

SEQ ID NO: 23331 - DNA, 23 bp, Artificial Sequence
  Probe
taataacgccaaggtcgcgggtt

SEQ ID NO: 23332 - DNA, 19 bp, Artificial Sequence
  Probe
taatcatatttaccaaatg

SEQ ID NO: 23333 - DNA, 41 bp, Artificial Sequence; identical to SEQ ID NO: 7465
  Probe

SEQ ID NO: 23334 - DNA, 30 bp, Artificial Sequence
  Probe
taatggtggagttaaagactttttctctga

SEQ ID NO: 23335 - DNA, 33 bp, Artificial Sequence; identical to SEQ ID NO: 7466
  Probe

SEQ ID NO: 23336 - DNA, 15 bp, Artificial Sequence
  Probe
taattgaaaacaaaa

SEQ ID NO: 23337 - DNA, 29 bp, Artificial Sequence
  Probe
taattgaaaacaaaatactcaaatgggcc

SEQ ID NO: 23338 - DNA, 30 bp, Artificial Sequence; identical to SEQ ID NO: 7468
  Probe

SEQ ID NO: 23339 - DNA, 31 bp, Artificial Sequence; identical to SEQ ID NO: 7469
  Probe

SEQ ID NO: 23340 - DNA, 32 bp, Artificial Sequence; identical to SEQ ID NO: 7470
  Probe

SEQ ID NO: 23341 - DNA, 33 bp, Artificial Sequence; identical to SEQ ID NO: 7471
  Probe

SEQ ID NO: 23342 - DNA, 21 bp, Artificial Sequence
  Probe
tacaatctccagcattccccc

SEQ ID NO: 23343 - DNA, 22 bp, Artificial Sequence
  Probe
tacaatctccagcattccccct

SEQ ID NO: 23344 - DNA, 23 bp, Artificial Sequence
  Probe
tacaatctccagcattccccctc

SEQ ID NO: 23345 - DNA, 24 bp, Artificial Sequence
  Probe
tacaatctccagcattccccctca

SEQ ID NO: 23346 - DNA, 25 bp, Artificial Sequence
  Probe
tacaatctccagcattccccctcaa

SEQ ID NO: 23347 - DNA, 26 bp, Artificial Sequence
  Probe
tacaatctccagcattccccctcaaa

SEQ ID NO: 23348 - DNA, 28 bp, Artificial Sequence
  Probe
tacaatctccagcattccccctcaaacc

SEQ ID NO: 23349 - DNA, 29 bp, Artificial Sequence
  Probe
tacaatctccagcattccccctcaaacct

SEQ ID NO: 23350 - DNA, 30 bp, Artificial Sequence; identical to SEQ ID NO: 7478
  Probe

SEQ ID NO: 23351 - DNA, 31 bp, Artificial Sequence; identical to SEQ ID NO: 7479
  Probe

SEQ ID NO: 23352 - DNA, 32 bp, Artificial Sequence; identical to SEQ ID NO: 7480
  Probe

SEQ ID NO: 23353 - DNA, 37 bp, Artificial Sequence
  Probe
tacacgcagaaggtcctgggttcgagccccagtggaa

SEQ ID NO: 23354 - DNA, 43 bp, Artificial Sequence; identical to SEQ ID NO: 7483
  Probe

SEQ ID NO: 23355 - DNA, 23 bp, Artificial Sequence
  Probe
tacacttaggagatttcaactta

SEQ ID NO: 23356 - DNA, 26 bp, Artificial Sequence
  Probe
tacacttaggagatttcaacttaact

SEQ ID NO: 23357 - DNA, 27 bp, Artificial Sequence
  Probe
tacacttaggagatttcaacttaactt

SEQ ID NO: 23358 - DNA, 28 bp, Artificial Sequence
  Probe
tacacttaggagatttcaacttaacttg

SEQ ID NO: 23359 - DNA, 30 bp, Artificial Sequence; identical to SEQ ID NO: 7487
  Probe

SEQ ID NO: 23360 - DNA, 31 bp, Artificial Sequence
  Probe
tacacttaggagatttcaacttaacttgacc

SEQ ID NO: 23361 - DNA, 32 bp, Artificial Sequence; identical to SEQ ID NO: 7488
  Probe

SEQ ID NO: 23362 - DNA, 33 bp, Artificial Sequence; identical to SEQ ID NO: 7489
  Probe

SEQ ID NO: 23363 - DNA, 34 bp, Artificial Sequence; identical to SEQ ID NO: 7490
  Probe

SEQ ID NO: 23364 - DNA, 36 bp, Artificial Sequence; identical to SEQ ID NO: 7492
  Probe

SEQ ID NO: 23365 - DNA, 38 bp, Artificial Sequence; identical to SEQ ID NO: 7494
  Probe

SEQ ID NO: 23366 - DNA, 39 bp, Artificial Sequence; identical to SEQ ID NO: 7495
  Probe

SEQ ID NO: 23367 - DNA, 40 bp, Artificial Sequence; identical to SEQ ID NO: 7496
  Probe

SEQ ID NO: 23368 - DNA, 41 bp, Artificial Sequence; identical to SEQ ID NO: 7497
  Probe

SEQ ID NO: 23369 - DNA, 42 bp, Artificial Sequence; identical to SEQ ID NO: 7498
  Probe

SEQ ID NO: 23370 - DNA, 26 bp, Artificial Sequence
  Probe
tacagtcagaggttcaattcctcttc

SEQ ID NO: 23371 - DNA, 27 bp, Artificial Sequence
  Probe
tacagtcagaggttcaattcctcttct

SEQ ID NO: 23372 - DNA, 28 bp, Artificial Sequence
  Probe
tacagtcagaggttcaattcctcttctt

SEQ ID NO: 23373 - DNA, 29 bp, Artificial Sequence
  Probe
tacagtcagaggttcaattcctcttctta

SEQ ID NO: 23374 - DNA, 32 bp, Artificial Sequence; identical to SEQ ID NO: 7506
  Probe

SEQ ID NO: 23375 - DNA, 31 bp, Artificial Sequence
  Probe
tacagtggctcgttggtctaggggtatgatt

SEQ ID NO: 23376 - DNA, 16 bp, Artificial Sequence
  Probe
tacccacacccaccca

SEQ ID NO: 23377 - DNA, 22 bp, Artificial Sequence
  Probe
tacccacacccacccaagaaca

SEQ ID NO: 23378 - DNA, 27 bp, Artificial Sequence
  Probe
tacccacacccacccaagaacagggtt

SEQ ID NO: 23379 - DNA, 28 bp, Artificial Sequence
  Probe
tacccacacccacccaagaacagggttt

SEQ ID NO: 23380 - DNA, 29 bp, Artificial Sequence
  Probe
tacccacacccacccaagaacagggtttg

SEQ ID NO: 23381 - DNA, 30 bp, Artificial Sequence; identical to SEQ ID NO: 7510
  Probe

SEQ ID NO: 23382 - DNA, 31 bp, Artificial Sequence; identical to SEQ ID NO: 7511
  Probe

SEQ ID NO: 23383 - DNA, 32 bp, Artificial Sequence; identical to SEQ ID NO: 7512
  Probe

SEQ ID NO: 23384 - DNA, 33 bp, Artificial Sequence
  Probe
tacccacacccacccaagaacagggtttgttaa

SEQ ID NO: 23385 - DNA, 27 bp, Artificial Sequence
  Probe
tacccatggccaacctcctactcctca

SEQ ID NO: 23386 - DNA, 29 bp, Artificial Sequence
  Probe
taccccgaaaatgttggttatacccttcc

SEQ ID NO: 23387 - DNA, 30 bp, Artificial Sequence; identical to SEQ ID NO: 7515
  Probe

SEQ ID NO: 23388 - DNA, 31 bp, Artificial Sequence; identical to SEQ ID NO: 7516
  Probe

SEQ ID NO: 23389 - DNA, 32 bp, Artificial Sequence; identical to SEQ ID NO: 7517
  Probe

SEQ ID NO: 23390 - DNA, 33 bp, Artificial Sequence; identical to SEQ ID NO: 7518
  Probe

SEQ ID NO: 23391 - DNA, 38 bp, Artificial Sequence; identical to SEQ ID NO: 7519
  Probe

SEQ ID NO: 23392 - DNA, 39 bp, Artificial Sequence; identical to SEQ ID NO: 7520
  Probe

SEQ ID NO: 23393 - DNA, 32 bp, Artificial Sequence; identical to SEQ ID NO: 7522
  Probe

SEQ ID NO: 23394 - DNA, 33 bp, Artificial Sequence
  Probe
taccgttaacttccaattaactagttttgacaa

SEQ ID NO: 23395 - DNA, 50 bp, Artificial Sequence; identical to SEQ ID NO: 7523
  Probe

SEQ ID NO: 23396 - DNA, 16 bp, Artificial Sequence
  Probe
tacctcctcaaagcaa

SEQ ID NO: 23397 - DNA, 19 bp, Artificial Sequence
  Probe
tacctcctcaaagcaatac

SEQ ID NO: 23398 - DNA, 24 bp, Artificial Sequence
  Probe
tacctcctcaaagcaatacactga

SEQ ID NO: 23399 - DNA, 25 bp, Artificial Sequence
  Probe
tacctcctcaaagcaatacactgaa

SEQ ID NO: 23400 - DNA, 50 bp, Artificial Sequence; identical to SEQ ID NO: 1579
  Probe

SEQ ID NO: 23401 - DNA, 33 bp, Artificial Sequence
  Probe
tactcagtggtctagtggttaggattcagcgct

SEQ ID NO: 23402 - DNA, 23 bp, Artificial Sequence
  Probe
tactctgcgttgtggccgcagca

SEQ ID NO: 23403 - DNA, 26 bp, Artificial Sequence
  Probe
tactggaaagtgcacttggacgaacc

SEQ ID NO: 23404 - DNA, 50 bp, Artificial Sequence; identical to SEQ ID NO: 7535
  Probe

SEQ ID NO: 23405 - DNA, 50 bp, Artificial Sequence; identical to SEQ ID NO: 1580
  Probe

SEQ ID NO: 23406 - DNA, 19 bp, Artificial Sequence
  Probe
tagaattctcgcctgccac

SEQ ID NO: 23407 - DNA, 30 bp, Artificial Sequence
  Probe
tagaattctcgcctgccacgcgggaggccc

SEQ ID NO: 23408 - DNA, 17 bp, Artificial Sequence
  Probe
tagacgggctcacatca

SEQ ID NO: 23409 - DNA, 22 bp, Artificial Sequence
  Probe
tagacgggctcacatcacccca

SEQ ID NO: 23410 - DNA, 23 bp, Artificial Sequence
  Probe
tagacgggctcacatcaccccat

SEQ ID NO: 23411 - DNA, 24 bp, Artificial Sequence
  Probe
tagacgggctcacatcaccccata

SEQ ID NO: 23412 - DNA, 25 bp, Artificial Sequence
  Probe
tagacgggctcacatcaccccataa

SEQ ID NO: 23413 - DNA, 26 bp, Artificial Sequence
  Probe
tagacgggctcacatcaccccataaa

SEQ ID NO: 23414 - DNA, 28 bp, Artificial Sequence
  Probe
tagacgggctcacatcaccccataaaca

SEQ ID NO: 23415 - DNA, 29 bp, Artificial Sequence
  Probe
tagacgggctcacatcaccccataaacaa

SEQ ID NO: 23416 - DNA, 30 bp, Artificial Sequence; identical to SEQ ID NO: 7542
  Probe

SEQ ID NO: 23417 - DNA, 31 bp, Artificial Sequence; identical to SEQ ID NO: 7543
  Probe

SEQ ID NO: 23418 - DNA, 32 bp, Artificial Sequence; identical to SEQ ID NO: 7544
  Probe

SEQ ID NO: 23419 - DNA, 30 bp, Artificial Sequence
  Probe
tagagcatgagactcttaatctcagggtcg

SEQ ID NO: 23420 - DNA, 35 bp, Artificial Sequence
  Probe
tagagcatgagactcttaatctcagggtcgtgggt

SEQ ID NO: 23421 - DNA, 27 bp, Artificial Sequence
  Probe
tagagcatgggactcttaatcccaggg

SEQ ID NO: 23422 - DNA, 28 bp, Artificial Sequence
  Probe
tagagcatgggactcttaatcccagggt

SEQ ID NO: 23423 - DNA, 29 bp, Artificial Sequence
  Probe
tagagcatgggactcttaatcccagggtc

SEQ ID NO: 23424 - DNA, 30 bp, Artificial Sequence
  Probe
tagagcatgggactcttaatcccagggtcg

SEQ ID NO: 23425 - DNA, 32 bp, Artificial Sequence; identical to SEQ ID NO: 7545
  Probe

SEQ ID NO: 23426 - DNA, 35 bp, Artificial Sequence
  Probe
tagagcatgggactcttaatcccagggtcgtgggt

SEQ ID NO: 23427 - DNA, 36 bp, Artificial Sequence
  Probe
tagagtaaataataggagcttaaacccccttatttc

SEQ ID NO: 23428 - DNA, 38 bp, Artificial Sequence
  Probe
tagagtaaataataggagcttaaacccccttatttcta

SEQ ID NO: 23429 - DNA, 39 bp, Artificial Sequence; identical to SEQ ID NO: 7550
  Probe

SEQ ID NO: 23430 - DNA, 40 bp, Artificial Sequence; identical to SEQ ID NO: 7551
  Probe

SEQ ID NO: 23431 - DNA, 41 bp, Artificial Sequence; identical to SEQ ID NO: 7552
  Probe

SEQ ID NO: 23432 - DNA, 42 bp, Artificial Sequence
  Probe
tagagtaaataataggagcttaaacccccttatttctaggac

SEQ ID NO: 23433 - DNA, 25 bp, Artificial Sequence
  Probe
tagattgaagccagttgattagggt

SEQ ID NO: 23434 - DNA, 31 bp, Artificial Sequence
  Probe
tagattgaagccagttgattagggtgcttag

SEQ ID NO: 23435 - DNA, 32 bp, Artificial Sequence
  Probe
tagattgaagccagttgattagggtgcttagc

SEQ ID NO: 23436 - DNA, 33 bp, Artificial Sequence
  Probe
tagattgaagccagttgattagggtgcttagct

SEQ ID NO: 23437 - DNA, 36 bp, Artificial Sequence; identical to SEQ ID NO: 7555
  Probe

SEQ ID NO: 23438 - DNA, 37 bp, Artificial Sequence; identical to SEQ ID NO: 7556
  Probe

SEQ ID NO: 23439 - DNA, 38 bp, Artificial Sequence
  Probe
tagattgaagccagttgattagggtgcttagctgttaa

SEQ ID NO: 23440 - DNA, 39 bp, Artificial Sequence
  Probe
tagattgaagccagttgattagggtgcttagctgttaac

SEQ ID NO: 23441 - DNA, 40 bp, Artificial Sequence; identical to SEQ ID NO: 7557
  Probe

SEQ ID NO: 23442 - DNA, 41 bp, Artificial Sequence
  Probe
tagattgaagccagttgattagggtgcttagctgttaacta

SEQ ID NO: 23443 - DNA, 49 bp, Artificial Sequence
  Probe
tagattgaagccagttgattagggtgcttagctgttaactaagtgtttg

SEQ ID NO: 23444 - DNA, 33 bp, Artificial Sequence
  Probe
tagcactctggactctgaatccagcgatccgag

SEQ ID NO: 23445 - DNA, 30 bp, Artificial Sequence
  Probe
tagcactctggactttgaatccagcgatcc

SEQ ID NO: 23446 - DNA, 30 bp, Artificial Sequence
  Probe
tagcatagctgccttccaagcagttgaccc

SEQ ID NO: 23447 - DNA, 31 bp, Artificial Sequence
  Probe
tagcatagctgccttccaagcagttgacccg

SEQ ID NO: 23448 - DNA, 32 bp, Artificial Sequence
  Probe
tagcatagctgccttccaagcagttgacccgg

SEQ ID NO: 23449 - DNA, 25 bp, Artificial Sequence
  Probe
tagcattaaccttttaagttaaaga

SEQ ID NO: 23450 - DNA, 28 bp, Artificial Sequence
  Probe
tagcattaaccttttaagttaaagatta

SEQ ID NO: 23451 - DNA, 33 bp, Artificial Sequence
  Probe
tagcattaaccttttaagttaaagattaagaga

SEQ ID NO: 23452 - DNA, 42 bp, Artificial Sequence
  Probe
tagcattaaccttttaagttaaagattaagagaaccaacacc

SEQ ID NO: 23453 - DNA, 49 bp, Artificial Sequence; identical to SEQ ID NO: 1585
  Probe

SEQ ID NO: 23454 - DNA, 50 bp, Artificial Sequence; identical to SEQ ID NO: 1586
  Probe

SEQ ID NO: 23455 - DNA, 22 bp, Artificial Sequence
  Probe
tagccccaaacccactccacct

SEQ ID NO: 23456 - DNA, 16 bp, Artificial Sequence
  Probe
tagcctttctattagc

SEQ ID NO: 23457 - DNA, 37 bp, Artificial Sequence
  Probe
tagcggttaggattcctggttttcacccaggcggccc

SEQ ID NO: 23458 - DNA, 38 bp, Artificial Sequence
  Probe
tagcggttaggattcctggttttcacccaggcggcccg

SEQ ID NO: 23459 - DNA, 22 bp, Artificial Sequence
  Probe
tagcgtggccgagcggtctaag

SEQ ID NO: 23460 - DNA, 22 bp, Artificial Sequence
  Probe
tagcgtggccgagtggtctaag

SEQ ID NO: 23461 - DNA, 25 bp, Artificial Sequence
  Probe
tagctcagtcggtagagcatcagac

SEQ ID NO: 23462 - DNA, 26 bp, Artificial Sequence
  Probe
tagctcagtcggtagagcatcagact

SEQ ID NO: 23463 - DNA, 24 bp, Artificial Sequence
  Probe
tagctcagtcggtagagcatgaga

SEQ ID NO: 23464 - DNA, 25 bp, Artificial Sequence
  Probe
tagctcagtcggtagagcatgagac

SEQ ID NO: 23465 - DNA, 26 bp, Artificial Sequence
  Probe
tagctcagtcggtagagcatgagacc

SEQ ID NO: 23466 - DNA, 26 bp, Artificial Sequence
  Probe
tagctcagtcggtagagcatgagact

SEQ ID NO: 23467 - DNA, 27 bp, Artificial Sequence
  Probe
tagctcagtcggtagagcatgagactc

SEQ ID NO: 23468 - DNA, 28 bp, Artificial Sequence
  Probe
tagctcagtcggtagagcatgagactct

SEQ ID NO: 23469 - DNA, 29 bp, Artificial Sequence
  Probe
tagctcagtcggtagagcatgagactctt

SEQ ID NO: 23470 - DNA, 22 bp, Artificial Sequence
  Probe
tagctcagtcggtagagcatgg

SEQ ID NO: 23471 - DNA, 30 bp, Artificial Sequence
  Probe
tagctcagtcggtagagcatgggactctta

SEQ ID NO: 23472 - DNA, 42 bp, Artificial Sequence
  Probe
tagctgttaactaagtgtttgtgggtttaagtcccattggtc

SEQ ID NO: 23473 - DNA, 20 bp, Artificial Sequence
  Probe
taggagatttcaacttaact

SEQ ID NO: 23474 - DNA, 24 bp, Artificial Sequence
  Probe
taggagatttcaacttaacttgac

SEQ ID NO: 23475 - DNA, 25 bp, Artificial Sequence
  Probe
taggagatttcaacttaacttgacc

SEQ ID NO: 23476 - DNA, 26 bp, Artificial Sequence
  Probe
taggagatttcaacttaacttgaccg

SEQ ID NO: 23477 - DNA, 27 bp, Artificial Sequence
  Probe
taggagatttcaacttaacttgaccgc

SEQ ID NO: 23478 - DNA, 28 bp, Artificial Sequence
  Probe
taggagatttcaacttaacttgaccgct

SEQ ID NO: 23479 - DNA, 29 bp, Artificial Sequence
  Probe
taggagatttcaacttaacttgaccgctc

SEQ ID NO: 23480 - DNA, 30 bp, Artificial Sequence; identical to SEQ ID NO: 11700
  Probe

SEQ ID NO: 23481 - DNA, 33 bp, Artificial Sequence; identical to SEQ ID NO: 7577
  Probe

SEQ ID NO: 23482 - DNA, 34 bp, Artificial Sequence; identical to SEQ ID NO: 7578
  Probe

SEQ ID NO: 23483 - DNA, 35 bp, Artificial Sequence; identical to SEQ ID NO: 7579
  Probe

SEQ ID NO: 23484 - DNA, 16 bp, Artificial Sequence
  Probe
taggagcttaaacccc

SEQ ID NO: 23485 - DNA, 28 bp, Artificial Sequence
  Probe
taggagcttaaacccccttatttctagg

SEQ ID NO: 23486 - DNA, 17 bp, Artificial Sequence
  Probe
taggatggggtgtgata

SEQ ID NO: 23487 - DNA, 22 bp, Artificial Sequence
  Probe
taggatggggtgtgataggtgg

SEQ ID NO: 23488 - DNA, 24 bp, Artificial Sequence
  Probe
taggatggggtgtgataggtggca

SEQ ID NO: 23489 - DNA, 26 bp, Artificial Sequence
  Probe
taggatggggtgtgataggtggcacg

SEQ ID NO: 23490 - DNA, 27 bp, Artificial Sequence
  Probe
taggatggggtgtgataggtggcacgg

SEQ ID NO: 23491 - DNA, 28 bp, Artificial Sequence
  Probe
taggatggggtgtgataggtggcacgga

SEQ ID NO: 23492 - DNA, 33 bp, Artificial Sequence; identical to SEQ ID NO: 1594
  Probe

SEQ ID NO: 23493 - DNA, 37 bp, Artificial Sequence; identical to SEQ ID NO: 7588
  Probe

SEQ ID NO: 23494 - DNA, 38 bp, Artificial Sequence
  Probe
taggatggggtgtgataggtggcacggagaattttgga

SEQ ID NO: 23495 - DNA, 49 bp, Artificial Sequence
  Probe
taggatggggtgtgataggtggcacggagaattttggattctcagggat

SEQ ID NO: 23496 - DNA, 50 bp, Artificial Sequence
  Probe
taggatggggtgtgataggtggcacggagaattttggattctcagggatg

SEQ ID NO: 23497 - DNA, 30 bp, Artificial Sequence
  Probe
taggattcggcgctctcaccgccgcggccc

SEQ ID NO: 23498 - DNA, 26 bp, Artificial Sequence
  Probe
taggctaaatcctatatatcttaatg

SEQ ID NO: 23499 - DNA, 19 bp, Artificial Sequence
  Probe
tagggctttggctgtgggg

SEQ ID NO: 23500 - DNA, 17 bp, Artificial Sequence
  Probe
taggggtatgattctcg

SEQ ID NO: 23501 - DNA, 18 bp, Artificial Sequence
  Probe
taggggtatgattctcgc

SEQ ID NO: 23502 - DNA, 19 bp, Artificial Sequence
  Probe
taggggtatgattctcgct

SEQ ID NO: 23503 - DNA, 37 bp, Artificial Sequence
  Probe
taggggtatgattctcgctttgggtgcgagaggtccc

SEQ ID NO: 23504 - DNA, 18 bp, Artificial Sequence
  Probe
tagggtgcgagaggtccc

SEQ ID NO: 23505 - DNA, 22 bp, Artificial Sequence
  Probe
tagggtgcgagaggtcccgggt

SEQ ID NO: 23506 - DNA, 23 bp, Artificial Sequence
  Probe
tagggtgcgagaggtcccgggtt

SEQ ID NO: 23507 - DNA, 50 bp, Artificial Sequence; identical to SEQ ID NO: 1596
  Probe

SEQ ID NO: 23508 - DNA, 27 bp, Artificial Sequence
  Probe
taggtcgctggttcgattccggctcga

SEQ ID NO: 23509 - DNA, 21 bp, Artificial Sequence
  Probe
tagtaaacaggagatcctggg

SEQ ID NO: 23510 - DNA, 22 bp, Artificial Sequence
  Probe
tagtaaacaggagatcctgggt

SEQ ID NO: 23511 - DNA, 38 bp, Artificial Sequence
  Probe
tagtaaacaggagatcctgggttcgaatcccagcggtg

SEQ ID NO: 23512 - DNA, 35 bp, Artificial Sequence; identical to SEQ ID NO: 1597
  Probe

SEQ ID NO: 23513 - DNA, 36 bp, Artificial Sequence
  Probe
tagtaccgttaacttccaattaactagttttgacaa

SEQ ID NO: 23514 - DNA, 50 bp, Artificial Sequence; identical to SEQ ID NO: 7598
  Probe

SEQ ID NO: 23515 - DNA, 23 bp, Artificial Sequence
  Probe
tagtatagtggtgagtatccccg

SEQ ID NO: 23516 - DNA, 30 bp, Artificial Sequence
  Probe
tagtatagtggtgagtatccccgcctgtca

SEQ ID NO: 23517 - DNA, 17 bp, Artificial Sequence
  Probe
tagtccgtgcgagaata

SEQ ID NO: 23518 - DNA, 18 bp, Artificial Sequence
  Probe
tagtccgtgcgagaataa

SEQ ID NO: 23519 - DNA, 20 bp, Artificial Sequence
  Probe
tagtccgtgcgagaataatg

SEQ ID NO: 23520 - DNA, 25 bp, Artificial Sequence
  Probe
tagtggctaggattcggcgctttca

SEQ ID NO: 23521 - DNA, 37 bp, Artificial Sequence
  Probe
tagtggtaagcatagctgccttccaagcagttgaccc

SEQ ID NO: 23522 - DNA, 42 bp, Artificial Sequence
  Probe
tagtggtaagcatagctgccttccaagcagttgacccgggtt

SEQ ID NO: 23523 - DNA, 21 bp, Artificial Sequence
  Probe
tagtggtatcatgcaagattc

SEQ ID NO: 23524 - DNA, 22 bp, Artificial Sequence
  Probe
tagtggtatcatgcaagattcc

SEQ ID NO: 23525 - DNA, 18 bp, Artificial Sequence
  Probe
tagtggtatgattctcgc

SEQ ID NO: 23526 - DNA, 23 bp, Artificial Sequence
  Probe
tagtggtgagcatagctgccttc

SEQ ID NO: 23527 - DNA, 37 bp, Artificial Sequence
  Probe
tagtggtgagcatagctgccttccaagcagttgaccc

SEQ ID NO: 23528 - DNA, 42 bp, Artificial Sequence
  Probe
tagtggtgagcatagctgccttccaagcagttgacccgggtt

SEQ ID NO: 23529 - DNA, 16 bp, Artificial Sequence
  Probe
tagtggtgagtatccc

SEQ ID NO: 23530 - DNA, 17 bp, Artificial Sequence
  Probe
tagtggtgagtatcccc

SEQ ID NO: 23531 - DNA, 18 bp, Artificial Sequence
  Probe
tagtggtgagtatccccg

SEQ ID NO: 23532 - DNA, 19 bp, Artificial Sequence
  Probe
tagtggtgagtatccccgc

SEQ ID NO: 23533 - DNA, 33 bp, Artificial Sequence
  Probe
tagtggtgagtatccccgcctgtcacgcgggag

SEQ ID NO: 23534 - DNA, 37 bp, Artificial Sequence
  Probe
tagtggtgagtatccccgcctgtcacgcgggagaccg

SEQ ID NO: 23535 - DNA, 39 bp, Artificial Sequence
  Probe
tagtggtgagtatccccgcctgtcacgcgggagaccggg

SEQ ID NO: 23536 - DNA, 41 bp, Artificial Sequence
  Probe
tagtggtgagtatccccgcctgtcacgcgggagaccggggt

SEQ ID NO: 23537 - DNA, 50 bp, Artificial Sequence
  Probe
tagtggtgagtatccccgcctgtcacgcgggagaccggggttcgattccc

SEQ ID NO: 23538 - DNA, 37 bp, Artificial Sequence
  Probe
tagtggttagcatagctgccttccaagcagttgaccc

SEQ ID NO: 23539 - DNA, 38 bp, Artificial Sequence
  Probe
tagtggttagcatagctgccttccaagcagttgacccg

SEQ ID NO: 23540 - DNA, 41 bp, Artificial Sequence
  Probe
tagtggttagcatagctgccttccaagcagttgacccgggt

SEQ ID NO: 23541 - DNA, 16 bp, Artificial Sequence
  Probe
tagtggttaggattcg

SEQ ID NO: 23542 - DNA, 17 bp, Artificial Sequence
  Probe
tagtggttaggattcgg

SEQ ID NO: 23543 - DNA, 18 bp, Artificial Sequence
  Probe
tagtggttaggattcggc

SEQ ID NO: 23544 - DNA, 24 bp, Artificial Sequence
  Probe
tagtggttaggattcggcgctctc

SEQ ID NO: 23545 - DNA, 26 bp, Artificial Sequence
  Probe
tagtggttaggattcggcgctctcac

SEQ ID NO: 23546 - DNA, 27 bp, Artificial Sequence
  Probe
tagtggttaggattcggcgctctcacc

SEQ ID NO: 23547 - DNA, 30 bp, Artificial Sequence
  Probe
tagtggttaggattcggcgctctcaccgcc

SEQ ID NO: 23548 - DNA, 32 bp, Artificial Sequence
  Probe
tagtggttaggattcggcgctctcaccgccgc

SEQ ID NO: 23549 - DNA, 33 bp, Artificial Sequence
  Probe
tagtggttaggattcggcgctctcaccgccgcg

SEQ ID NO: 23550 - DNA, 36 bp, Artificial Sequence
  Probe
tagtggttaggattcggcgctctcaccgccgcggcc

SEQ ID NO: 23551 - DNA, 17 bp, Artificial Sequence
  Probe
tagtggttagtactctg

SEQ ID NO: 23552 - DNA, 18 bp, Artificial Sequence
  Probe
tagtggttagtactctgc

SEQ ID NO: 23553 - DNA, 20 bp, Artificial Sequence
  Probe
tagtggttagtactctgcgt

SEQ ID NO: 23554 - DNA, 21 bp, Artificial Sequence
  Probe
tagtggttagtactctgcgtt

SEQ ID NO: 23555 - DNA, 23 bp, Artificial Sequence
  Probe
tagtggttagtactctgcgttgt

SEQ ID NO: 23556 - DNA, 33 bp, Artificial Sequence
  Probe
tagtggttagtactctgcgttgtggccgcagca

SEQ ID NO: 23557 - DNA, 20 bp, Artificial Sequence
  Probe
tagtggttagtatccccgcc

SEQ ID NO: 23558 - DNA, 23 bp, Artificial Sequence
  Probe
tagtggttagtatccccgcctgt

SEQ ID NO: 23559 - DNA, 25 bp, Artificial Sequence
  Probe
tagtggttagtatccccgcctgtca

SEQ ID NO: 23560 - DNA, 27 bp, Artificial Sequence
  Probe
tagtggttagtatccccgcctgtcacg

SEQ ID NO: 23561 - DNA, 28 bp, Artificial Sequence
  Probe
tagtggttagtatccccgcctgtcacgc

SEQ ID NO: 23562 - DNA, 38 bp, Artificial Sequence
  Probe
tagtggttagtatccccgcctgtcacgcgggagaccgg

SEQ ID NO: 23563 - DNA, 42 bp, Artificial Sequence
  Probe
tagtggttatcacgttcgcctaacacgcgaaaggtccccggt

SEQ ID NO: 23564 - DNA, 41 bp, Artificial Sequence
  Probe
tagtggttatcacgttcgcctcacacgcgaaaggtccccgg

SEQ ID NO: 23565 - DNA, 42 bp, Artificial Sequence
  Probe
tagtggttatcacgttcgcctcacacgcgaaaggtccccggt

SEQ ID NO: 23566 - DNA, 25 bp, Artificial Sequence
  Probe
tagtgtagcggttatcacattcgcc

SEQ ID NO: 23567 - DNA, 21 bp, Artificial Sequence
  Probe
tagtgtagtggtcatcacgtt

SEQ ID NO: 23568 - DNA, 24 bp, Artificial Sequence
  Probe
tagtgtagtggtcatcacgttcgc

SEQ ID NO: 23569 - DNA, 16 bp, Artificial Sequence
  Probe
tagtgtagtggttatc

SEQ ID NO: 23570 - DNA, 21 bp, Artificial Sequence
  Probe
tagtgtagtggttatcacgtt

SEQ ID NO: 23571 - DNA, 24 bp, Artificial Sequence
  Probe
tagtgtagtggttatcacgttcgc

SEQ ID NO: 23572 - DNA, 25 bp, Artificial Sequence
  Probe
tagtgtagtggttatcacgttcgcc

SEQ ID NO: 23573 - DNA, 15 bp, Artificial Sequence
  Probe
tatacccacacccac

SEQ ID NO: 23574 - DNA, 16 bp, Artificial Sequence
  Probe
tatacccacacccacc

SEQ ID NO: 23575 - DNA, 17 bp, Artificial Sequence
  Probe
tatacccacacccaccc

SEQ ID NO: 23576 - DNA, 18 bp, Artificial Sequence
  Probe
tatacccacacccaccca

SEQ ID NO: 23577 - DNA, 19 bp, Artificial Sequence
  Probe
tatacccacacccacccaa

SEQ ID NO: 23578 - DNA, 20 bp, Artificial Sequence
  Probe
tatacccacacccacccaag

SEQ ID NO: 23579 - DNA, 21 bp, Artificial Sequence
  Probe
tatacccacacccacccaaga

SEQ ID NO: 23580 - DNA, 22 bp, Artificial Sequence
  Probe
tatacccacacccacccaagaa

SEQ ID NO: 23581 - DNA, 23 bp, Artificial Sequence
  Probe
tatacccacacccacccaagaac

SEQ ID NO: 23582 - DNA, 24 bp, Artificial Sequence
  Probe
tatacccacacccacccaagaaca

SEQ ID NO: 23583 - DNA, 25 bp, Artificial Sequence
  Probe
tatacccacacccacccaagaacag

SEQ ID NO: 23584 - DNA, 26 bp, Artificial Sequence
  Probe
tatacccacacccacccaagaacagg

SEQ ID NO: 23585 - DNA, 27 bp, Artificial Sequence
  Probe
tatacccacacccacccaagaacaggg

SEQ ID NO: 23586 - DNA, 28 bp, Artificial Sequence
  Probe
tatacccacacccacccaagaacagggt

SEQ ID NO: 23587 - DNA, 29 bp, Artificial Sequence
  Probe
tatacccacacccacccaagaacagggtt

SEQ ID NO: 23588 - DNA, 30 bp, Artificial Sequence; identical to SEQ ID NO: 7623
  Probe

SEQ ID NO: 23589 - DNA, 31 bp, Artificial Sequence; identical to SEQ ID NO: 7624
  Probe

SEQ ID NO: 23590 - DNA, 32 bp, Artificial Sequence; identical to SEQ ID NO: 7625
  Probe

SEQ ID NO: 23591 - DNA, 33 bp, Artificial Sequence; identical to SEQ ID NO: 7626
  Probe

SEQ ID NO: 23592 - DNA, 34 bp, Artificial Sequence; identical to SEQ ID NO: 7627
  Probe

SEQ ID NO: 23593 - DNA, 35 bp, Artificial Sequence; identical to SEQ ID NO: 7628
  Probe

SEQ ID NO: 23594 - DNA, 36 bp, Artificial Sequence; identical to SEQ ID NO: 7629
  Probe

SEQ ID NO: 23595 - DNA, 37 bp, Artificial Sequence; identical to SEQ ID NO: 7630
  Probe

SEQ ID NO: 23596 - DNA, 38 bp, Artificial Sequence
  Probe
tatacccacacccacccaagaacagggtttgttaagat

SEQ ID NO: 23597 - DNA, 39 bp, Artificial Sequence; identical to SEQ ID NO: 7631
  Probe

SEQ ID NO: 23598 - DNA, 40 bp, Artificial Sequence; identical to SEQ ID NO: 7632
  Probe

SEQ ID NO: 23599 - DNA, 21 bp, Artificial Sequence
  Probe
tatagtggtgagtatccccgc

SEQ ID NO: 23600 - DNA, 25 bp, Artificial Sequence
  Probe
tatagtggttagtactctgcgttgt

SEQ ID NO: 23601 - DNA, 24 bp, Artificial Sequence
  Probe
tatcattggtcgtggttgtagtcc

SEQ ID NO: 23602 - DNA, 27 bp, Artificial Sequence
  Probe
tatcattggtcgtggttgtagtccgtg

SEQ ID NO: 23603 - DNA, 29 bp, Artificial Sequence
  Probe
tatcattggtcgtggttgtagtccgtgcg

SEQ ID NO: 23604 - DNA, 31 bp, Artificial Sequence
  Probe
tatcattggtcgtggttgtagtccgtgcgag

SEQ ID NO: 23605 - DNA, 32 bp, Artificial Sequence
  Probe
tatcattggtcgtggttgtagtccgtgcgaga

SEQ ID NO: 23606 - DNA, 33 bp, Artificial Sequence
  Probe
tatcattggtcgtggttgtagtccgtgcgagaa

SEQ ID NO: 23607 - DNA, 38 bp, Artificial Sequence; identical to SEQ ID NO: 7637
  Probe

SEQ ID NO: 23608 - DNA, 37 bp, Artificial Sequence
  Probe
tatgaggccccgggttcaatccccggcatctccagac

SEQ ID NO: 23609 - DNA, 31 bp, Artificial Sequence
  Probe
tatgaggccccgggttcgatccccggcatct

SEQ ID NO: 23610 - DNA, 37 bp, Artificial Sequence
  Probe
tatgaggccccgggttcgatccccggcatctccattg

SEQ ID NO: 23611 - DNA, 24 bp, Artificial Sequence
  Probe
tatgataatcatatttaccaaatg

SEQ ID NO: 23612 - DNA, 35 bp, Artificial Sequence
  Probe
tatgattctcgcttagggtgcgagaggtcccgggt

SEQ ID NO: 23613 - DNA, 34 bp, Artificial Sequence
  Probe
tatgattctcgcttcgggtgcgagaggtcccggg

SEQ ID NO: 23614 - DNA, 35 bp, Artificial Sequence
  Probe
tatgattctcgcttcgggtgcgagaggtcccgggt

SEQ ID NO: 23615 - DNA, 36 bp, Artificial Sequence
  Probe
tatgattctcgcttcgggtgcgagaggtcccgggtt

SEQ ID NO: 23616 - DNA, 34 bp, Artificial Sequence
  Probe
tatgattctcgctttgggtgcgagaggtcccggg

SEQ ID NO: 23617 - DNA, 35 bp, Artificial Sequence
  Probe
tatgattctcgctttgggtgcgagaggtcccgggt

SEQ ID NO: 23618 - DNA, 36 bp, Artificial Sequence
  Probe
tatgattctcgctttgggtgcgagaggtcccgggtt

SEQ ID NO: 23619 - DNA, 30 bp, Artificial Sequence
  Probe
tcaaagcaatacactgaaaatgtttagacg

SEQ ID NO: 23620 - DNA, 36 bp, Artificial Sequence
  Probe
tcaaagcaatacactgaaaatgtttagacgggctca

SEQ ID NO: 23621 - DNA, 38 bp, Artificial Sequence
  Probe
tcaaagcaatacactgaaaatgtttagacgggctcaca

SEQ ID NO: 23622 - DNA, 32 bp, Artificial Sequence; identical to SEQ ID NO: 7643
  Probe

SEQ ID NO: 23623 - DNA, 33 bp, Artificial Sequence
  Probe
tcaaagttaaattataggctaaatcctatatat

SEQ ID NO: 23624 - DNA, 34 bp, Artificial Sequence
  Probe
tcaaagttaaattataggctaaatcctatatatc

SEQ ID NO: 23625 - DNA, 35 bp, Artificial Sequence
  Probe
tcaaagttaaattataggctaaatcctatatatct

SEQ ID NO: 23626 - DNA, 36 bp, Artificial Sequence
  Probe
tcaaagttaaattataggctaaatcctatatatctt

SEQ ID NO: 23627 - DNA, 37 bp, Artificial Sequence
  Probe
tcaaagttaaattataggctaaatcctatatatctta

SEQ ID NO: 23628 - DNA, 38 bp, Artificial Sequence
  Probe
tcaaagttaaattataggctaaatcctatatatcttaa

SEQ ID NO: 23629 - DNA, 39 bp, Artificial Sequence
  Probe
tcaaagttaaattataggctaaatcctatatatcttaat

SEQ ID NO: 23630 - DNA, 40 bp, Artificial Sequence
  Probe
tcaaagttaaattataggctaaatcctatatatcttaatg

SEQ ID NO: 23631 - DNA, 42 bp, Artificial Sequence
  Probe
tcaaagttaaattataggctaaatcctatatatcttaatggc

SEQ ID NO: 23632 - DNA, 22 bp, Artificial Sequence
  Probe
tcaaatcccggacgagccccct

SEQ ID NO: 23633 - DNA, 22 bp, Artificial Sequence
  Probe
tcaaatccgggtgccccctcaa

SEQ ID NO: 23634 - DNA, 16 bp, Artificial Sequence
  Probe
tcaacttaacttgacc

SEQ ID NO: 23635 - DNA, 17 bp, Artificial Sequence
  Probe
tcaacttaacttgaccg

SEQ ID NO: 23636 - DNA, 21 bp, Artificial Sequence
  Probe
tcaacttaacttgaccgctct

SEQ ID NO: 23637 - DNA, 23 bp, Artificial Sequence
  Probe
tcaacttaacttgaccgctctga

SEQ ID NO: 23638 - DNA, 24 bp, Artificial Sequence
  Probe
tcaacttaacttgaccgctctgag

SEQ ID NO: 23639 - DNA, 25 bp, Artificial Sequence
  Probe
tcaacttaacttgaccgctctgagc

SEQ ID NO: 23640 - DNA, 26 bp, Artificial Sequence
  Probe
tcaacttaacttgaccgctctgagct

SEQ ID NO: 23641 - DNA, 38 bp, Artificial Sequence
  Probe
tcaagaggtccctggttcaaatccgggtgccccctcaa

SEQ ID NO: 23642 - DNA, 22 bp, Artificial Sequence
  Probe
tcaagtccctgttcgggcggca

SEQ ID NO: 23643 - DNA, 22 bp, Artificial Sequence
  Probe
tcaatccccagcacctccacaa

SEQ ID NO: 23644 - DNA, 16 bp, Artificial Sequence
  Probe
tcaatccccggcacct

SEQ ID NO: 23645 - DNA, 22 bp, Artificial Sequence
  Probe
tcaattccccgacggggaggtg

SEQ ID NO: 23646 - DNA, 22 bp, Artificial Sequence
  Probe
tcaattcccggtcagggaacca

SEQ ID NO: 23647 - DNA, 22 bp, Artificial Sequence
  Probe
tcacaagaactgctaactcatg

SEQ ID NO: 23648 - DNA, 18 bp, Artificial Sequence
  Probe
tcacacgcgaaaggtccc

SEQ ID NO: 23649 - DNA, 19 bp, Artificial Sequence
  Probe
tcacacgcgaaaggtcccc

SEQ ID NO: 23650 - DNA, 21 bp, Artificial Sequence
  Probe
tcacacgcgaaaggtccccgg

SEQ ID NO: 23651 - DNA, 23 bp, Artificial Sequence
  Probe
tcacacgcgaaaggtccccggtt

SEQ ID NO: 23652 - DNA, 24 bp, Artificial Sequence
  Probe
tcacacgcgaaaggtccccggttc

SEQ ID NO: 23653 - DNA, 25 bp, Artificial Sequence
  Probe
tcacacgcgaaaggtccccggttcg

SEQ ID NO: 23654 - DNA, 24 bp, Artificial Sequence
  Probe
tcacacgcgaaaggtccccggttt

SEQ ID NO: 23655 - DNA, 21 bp, Artificial Sequence
  Probe
tcacacggggcacaataattt

SEQ ID NO: 23656 - DNA, 22 bp, Artificial Sequence
  Probe
tcacacggggcacaataatttt

SEQ ID NO: 23657 - DNA, 23 bp, Artificial Sequence
  Probe
tcacacggggcagtctaacgttt

SEQ ID NO: 23658 - DNA, 16 bp, Artificial Sequence
  Probe
tcacatcaccccataa

SEQ ID NO: 23659 - DNA, 17 bp, Artificial Sequence
  Probe
tcacatcaccccataaa

SEQ ID NO: 23660 - DNA, 18 bp, Artificial Sequence
  Probe
tcacatcaccccataaac

SEQ ID NO: 23661 - DNA, 19 bp, Artificial Sequence
  Probe
tcacatcaccccataaaca

SEQ ID NO: 23662 - DNA, 21 bp, Artificial Sequence
  Probe
tcacatcaccccataaacaaa

SEQ ID NO: 23663 - DNA, 22 bp, Artificial Sequence
  Probe
tcacatcaccccataaacaaat

SEQ ID NO: 23664 - DNA, 41 bp, Artificial Sequence; identical to SEQ ID NO: 7674
  Probe

SEQ ID NO: 23665 - DNA, 41 bp, Artificial Sequence; identical to SEQ ID NO: 7677
  Probe

SEQ ID NO: 23666 - DNA, 38 bp, Artificial Sequence
  Probe
tcaccgccgcggcccgggttcgattcccggtcagggaa

SEQ ID NO: 23667 - DNA, 39 bp, Artificial Sequence; identical to SEQ ID NO: 7679
  Probe

SEQ ID NO: 23668 - DNA, 39 bp, Artificial Sequence; identical to SEQ ID NO: 7680
  Probe

SEQ ID NO: 23669 - DNA, 39 bp, Artificial Sequence; identical to SEQ ID NO: 7681
  Probe

SEQ ID NO: 23670 - DNA, 41 bp, Artificial Sequence; identical to SEQ ID NO: 7682
  Probe

SEQ ID NO: 23671 - DNA, 17 bp, Artificial Sequence
  Probe
tcacgcgggagaccggg

SEQ ID NO: 23672 - DNA, 39 bp, Artificial Sequence; identical to SEQ ID NO: 7689
  Probe

SEQ ID NO: 23673 - DNA, 41 bp, Artificial Sequence; identical to SEQ ID NO: 7691
  Probe

SEQ ID NO: 23674 - DNA, 33 bp, Artificial Sequence; identical to SEQ ID NO: 1619
  Probe

SEQ ID NO: 23675 - DNA, 37 bp, Artificial Sequence; identical to SEQ ID NO: 7698
  Probe

SEQ ID NO: 23676 - DNA, 38 bp, Artificial Sequence; identical to SEQ ID NO: 1623
  Probe

SEQ ID NO: 23677 - DNA, 39 bp, Artificial Sequence; identical to SEQ ID NO: 7699
  Probe

SEQ ID NO: 23678 - DNA, 40 bp, Artificial Sequence; identical to SEQ ID NO: 7700
  Probe

SEQ ID NO: 23679 - DNA, 41 bp, Artificial Sequence; identical to SEQ ID NO: 7701
  Probe

SEQ ID NO: 23680 - DNA, 49 bp, Artificial Sequence; identical to SEQ ID NO: 7704
  Probe

SEQ ID NO: 23681 - DNA, 50 bp, Artificial Sequence; identical to SEQ ID NO: 7705
  Probe

SEQ ID NO: 23682 - DNA, 40 bp, Artificial Sequence; identical to SEQ ID NO: 7706
  Probe

SEQ ID NO: 23683 - DNA, 41 bp, Artificial Sequence; identical to SEQ ID NO: 7707
  Probe

SEQ ID NO: 23684 - DNA, 41 bp, Artificial Sequence; identical to SEQ ID NO: 7709
  Probe

SEQ ID NO: 23685 - DNA, 39 bp, Artificial Sequence; identical to SEQ ID NO: 7711
  Probe

SEQ ID NO: 23686 - DNA, 40 bp, Artificial Sequence; identical to SEQ ID NO: 7715
  Probe

SEQ ID NO: 23687 - DNA, 41 bp, Artificial Sequence; identical to SEQ ID NO: 7716
  Probe

SEQ ID NO: 23688 - DNA, 42 bp, Artificial Sequence; identical to SEQ ID NO: 7717
  Probe

SEQ ID NO: 23689 - DNA, 49 bp, Artificial Sequence; identical to SEQ ID NO: 7719
  Probe

SEQ ID NO: 23690 - DNA, 50 bp, Artificial Sequence; identical to SEQ ID NO: 7720
  Probe

SEQ ID NO: 23691 - DNA, 42 bp, Artificial Sequence; identical to SEQ ID NO: 7721
  Probe

SEQ ID NO: 23692 - DNA, 41 bp, Artificial Sequence; identical to SEQ ID NO: 7723
  Probe

SEQ ID NO: 23693 - DNA, 31 bp, Artificial Sequence
  Probe
tcacgttcgcctaacacgcgaaaggtccccg

SEQ ID NO: 23694 - DNA, 31 bp, Artificial Sequence
  Probe
tcacgttcgcctcacacgcgaaaggtccccg

SEQ ID NO: 23695 - DNA, 32 bp, Artificial Sequence
  Probe
tcacgttcgcctcacacgcgaaaggtccccgg

SEQ ID NO: 23696 - DNA, 33 bp, Artificial Sequence
  Probe
tcacgttcgcctcacacgcgaaaggtccccggt

SEQ ID NO: 23697 - DNA, 33 bp, Artificial Sequence; identical to SEQ ID NO: 7728
  Probe

SEQ ID NO: 23698 - DNA, 38 bp, Artificial Sequence; identical to SEQ ID NO: 7729
  Probe

SEQ ID NO: 23699 - DNA, 33 bp, Artificial Sequence
  Probe
tcagaagattgagggttcgagtcccttcgtggt

SEQ ID NO: 23700 - DNA, 33 bp, Artificial Sequence
  Probe
tcagaagattgcaggttcgagtcctgccgcggt

SEQ ID NO: 23701 - DNA, 38 bp, Artificial Sequence
  Probe
tcagaaggctgcgtgttcgaatcacgtcggggtcaaac

SEQ ID NO: 23702 - DNA, 17 bp, Artificial Sequence
  Probe
tcagaaggtctcacttt

SEQ ID NO: 23703 - DNA, 31 bp, Artificial Sequence
  Probe
tcagaaggttgcgtgttcaaatcacgtcggg

SEQ ID NO: 23704 - DNA, 38 bp, Artificial Sequence
  Probe
tcagaaggttgcgtgttcaaatcacgtcggggtcaaac

SEQ ID NO: 23705 - DNA, 38 bp, Artificial Sequence
  Probe
tcagaaggttgcgtgttcaaatcacgtcggggtcaaca

SEQ ID NO: 23706 - DNA, 31 bp, Artificial Sequence
  Probe
tcagaaggttgcgtgttcaagtcacgtcggg

SEQ ID NO: 23707 - DNA, 32 bp, Artificial Sequence
  Probe
tcagaaggttgcgtgttcaagtcacgtcgggg

SEQ ID NO: 23708 - DNA, 22 bp, Artificial Sequence
  Probe
tcagagggggcagctgccattt

SEQ ID NO: 23709 - DNA, 24 bp, Artificial Sequence
  Probe
tcagctaaataagctatcgggccc

SEQ ID NO: 23710 - DNA, 25 bp, Artificial Sequence
  Probe
tcagctaaataagctatcgggccca

SEQ ID NO: 23711 - DNA, 26 bp, Artificial Sequence
  Probe
tcagctaaataagctatcgggcccat

SEQ ID NO: 23712 - DNA, 27 bp, Artificial Sequence
  Probe
tcagctaaataagctatcgggcccata

SEQ ID NO: 23713 - DNA, 28 bp, Artificial Sequence
  Probe
tcagctaaataagctatcgggcccatac

SEQ ID NO: 23714 - DNA, 36 bp, Artificial Sequence; identical to SEQ ID NO: 7736
  Probe

SEQ ID NO: 23715 - DNA, 37 bp, Artificial Sequence; identical to SEQ ID NO: 7737
  Probe

SEQ ID NO: 23716 - DNA, 38 bp, Artificial Sequence
  Probe
tcagctaaataagctatcgggcccataccccgaaaatg

SEQ ID NO: 23717 - DNA, 23 bp, Artificial Sequence
  Probe
tcaggatggccgagcggtctaag

SEQ ID NO: 23718 - DNA, 24 bp, Artificial Sequence
  Probe
tcaggatggccgagtggtctaagg

SEQ ID NO: 23719 - DNA, 27 bp, Artificial Sequence
  Probe
tcagggatgggttcgattctcatagtc

SEQ ID NO: 23720 - DNA, 28 bp, Artificial Sequence
  Probe
tcagggatgggttcgattctcatagtcc

SEQ ID NO: 23721 - DNA, 31 bp, Artificial Sequence
  Probe
tcagggatgggttcgattctcatagtcctag

SEQ ID NO: 23722 - DNA, 32 bp, Artificial Sequence
  Probe
tcagggatgggttcgattctcatagtcctaga

SEQ ID NO: 23723 - DNA, 34 bp, Artificial Sequence
  Probe
tcagggatgggttcgattctcatagtcctagaaa

SEQ ID NO: 23724 - DNA, 31 bp, Artificial Sequence; identical to SEQ ID NO: 7745
  Probe

SEQ ID NO: 23725 - DNA, 22 bp, Artificial Sequence
  Probe
tcagtggtagaattctcgcctg

SEQ ID NO: 23726 - DNA, 32 bp, Artificial Sequence
  Probe
tcagttgatgcagagtggggttttgcagtcct

SEQ ID NO: 23727 - DNA, 34 bp, Artificial Sequence
  Probe
tcagttgatgcagagtggggttttgcagtcctta

SEQ ID NO: 23728 - DNA, 36 bp, Artificial Sequence
  Probe
tcagttgatgcagagtggggttttgcagtccttagc

SEQ ID NO: 23729 - DNA, 37 bp, Artificial Sequence; identical to SEQ ID NO: 7747
  Probe

SEQ ID NO: 23730 - DNA, 40 bp, Artificial Sequence; identical to SEQ ID NO: 7750
  Probe

SEQ ID NO: 23731 - DNA, 41 bp, Artificial Sequence; identical to SEQ ID NO: 7751
  Probe

SEQ ID NO: 23732 - DNA, 15 bp, Artificial Sequence
  Probe
tcatattgaattgca

SEQ ID NO: 23733 - DNA, 30 bp, Artificial Sequence
  Probe
tcatgcaagattcccattcttgcgacccgg

SEQ ID NO: 23734 - DNA, 33 bp, Artificial Sequence
  Probe
tcatgcaagattcccattcttgcgacccgggtt

SEQ ID NO: 23735 - DNA, 34 bp, Artificial Sequence
  Probe
tcatgcaagattcccattcttgcgacccgggttc

SEQ ID NO: 23736 - DNA, 17 bp, Artificial Sequence
  Probe
tcatgcccccatgtcta

SEQ ID NO: 23737 - DNA, 20 bp, Artificial Sequence
  Probe
tcatgcccccatgtctaaca

SEQ ID NO: 23738 - DNA, 27 bp, Artificial Sequence
  Probe
tcatgcccccatgtctaacaacatggc

SEQ ID NO: 23739 - DNA, 28 bp, Artificial Sequence
  Probe
tcatgcccccatgtctaacaacatggct

SEQ ID NO: 23740 - DNA, 29 bp, Artificial Sequence
  Probe
tcatgcccccatgtctaacaacatggctt

SEQ ID NO: 23741 - DNA, 30 bp, Artificial Sequence; identical to SEQ ID NO: 7761
  Probe

SEQ ID NO: 23742 - DNA, 31 bp, Artificial Sequence; identical to SEQ ID NO: 7762
  Probe

SEQ ID NO: 23743 - DNA, 32 bp, Artificial Sequence; identical to SEQ ID NO: 7763
  Probe

SEQ ID NO: 23744 - DNA, 33 bp, Artificial Sequence; identical to SEQ ID NO: 7764
  Probe

SEQ ID NO: 23745 - DNA, 34 bp, Artificial Sequence; identical to SEQ ID NO: 7765
  Probe

SEQ ID NO: 23746 - DNA, 35 bp, Artificial Sequence; identical to SEQ ID NO: 7766
  Probe

SEQ ID NO: 23747 - DNA, 36 bp, Artificial Sequence; identical to SEQ ID NO: 7767
  Probe

SEQ ID NO: 23748 - DNA, 37 bp, Artificial Sequence; identical to SEQ ID NO: 7768
  Probe

SEQ ID NO: 23749 - DNA, 38 bp, Artificial Sequence
  Probe
tcatgcccccatgtctaacaacatggctttctcaactt

SEQ ID NO: 23750 - DNA, 39 bp, Artificial Sequence
  Probe
tcatgcccccatgtctaacaacatggctttctcaacttt

SEQ ID NO: 23751 - DNA, 33 bp, Artificial Sequence; identical to SEQ ID NO: 7769
  Probe

SEQ ID NO: 23752 - DNA, 30 bp, Artificial Sequence
  Probe
tcattggtcgtggttgtagtccgtgcgaga

SEQ ID NO: 23753 - DNA, 31 bp, Artificial Sequence
  Probe
tcattggtcgtggttgtagtccgtgcgagaa

SEQ ID NO: 23754 - DNA, 19 bp, Artificial Sequence
  Probe
tccaagcagttgacccggg

SEQ ID NO: 23755 - DNA, 20 bp, Artificial Sequence
  Probe
tccaagcagttgacccgggt

SEQ ID NO: 23756 - DNA, 21 bp, Artificial Sequence
  Probe
tccaagcagttgacccgggtt

SEQ ID NO: 23757 - DNA, 23 bp, Artificial Sequence
  Probe
tccaagcagttgacccgggttcg

SEQ ID NO: 23758 - DNA, 42 bp, Artificial Sequence
  Probe
tccaagcagttgacccgggttcgattcccggccaacgcaagt

SEQ ID NO: 23759 - DNA, 42 bp, Artificial Sequence
  Probe
tccaagcagttgacccgggttcgattcccggccaacgcagtg

SEQ ID NO: 23760 - DNA, 34 bp, Artificial Sequence
  Probe
tccaatggaggcgtgggttcgaatcccacttctg

SEQ ID NO: 23761 - DNA, 22 bp, Artificial Sequence
  Probe
tccaatgggggttccccgcgca

SEQ ID NO: 23762 - DNA, 23 bp, Artificial Sequence
  Probe
tccaatgggggttccccgcgcag

SEQ ID NO: 23763 - DNA, 24 bp, Artificial Sequence
  Probe
tccaatgggggttccccgcgcagg

SEQ ID NO: 23764 - DNA, 25 bp, Artificial Sequence
  Probe
tccaatgggggttccccgcgcaggt

SEQ ID NO: 23765 - DNA, 26 bp, Artificial Sequence
  Probe
tccaatgggggttccccgcgcaggtt

SEQ ID NO: 23766 - DNA, 27 bp, Artificial Sequence
  Probe
tccaatgggggttccccgcgcaggttc

SEQ ID NO: 23767 - DNA, 22 bp, Artificial Sequence
  Probe
tccaatggggtctccccgcgca

SEQ ID NO: 23768 - DNA, 23 bp, Artificial Sequence
  Probe
tccaatggggtctccccgcgcag

SEQ ID NO: 23769 - DNA, 24 bp, Artificial Sequence
  Probe
tccaatggggtctccccgcgcagg

SEQ ID NO: 23770 - DNA, 26 bp, Artificial Sequence
  Probe
tccaatggggtctccccgcgcaggtt

SEQ ID NO: 23771 - DNA, 27 bp, Artificial Sequence
  Probe
tccaatggggtctccccgcgcaggttc

SEQ ID NO: 23772 - DNA, 28 bp, Artificial Sequence
  Probe
tccaatggggtctccccgcgcaggttcg

SEQ ID NO: 23773 - DNA, 20 bp, Artificial Sequence
  Probe
tccaatggggtttccccgca

SEQ ID NO: 23774 - DNA, 21 bp, Artificial Sequence
  Probe
tccaatggggtttccccgcac

SEQ ID NO: 23775 - DNA, 26 bp, Artificial Sequence
  Probe
tccaatggggtttccccgcacaggtt

SEQ ID NO: 23776 - DNA, 27 bp, Artificial Sequence
  Probe
tccaatggggtttccccgcacaggttc

SEQ ID NO: 23777 - DNA, 28 bp, Artificial Sequence
  Probe
tccaatggggtttccccgcacaggttcg

SEQ ID NO: 23778 - DNA, 38 bp, Artificial Sequence
  Probe
tccaattaactagttttgacaacattcaaaaaagagta

SEQ ID NO: 23779 - DNA, 40 bp, Artificial Sequence; identical to SEQ ID NO: 7776
  Probe

SEQ ID NO: 23780 - DNA, 41 bp, Artificial Sequence; identical to SEQ ID NO: 7777
  Probe

SEQ ID NO: 23781 - DNA, 16 bp, Artificial Sequence
  Probe
tccagcgatccgagtt

SEQ ID NO: 23782 - DNA, 17 bp, Artificial Sequence
  Probe
tccagcgatccgagttc

SEQ ID NO: 23783 - DNA, 18 bp, Artificial Sequence
  Probe
tccagcgatccgagttca

SEQ ID NO: 23784 - DNA, 31 bp, Artificial Sequence
  Probe
tccagcgatccgagttcaaatctcggtggaa

SEQ ID NO: 23785 - DNA, 32 bp, Artificial Sequence; identical to SEQ ID NO: 7779
  Probe

SEQ ID NO: 23786 - DNA, 35 bp, Artificial Sequence
  Probe
tccagcgatccgagttcaaatctcggtggaacctg

SEQ ID NO: 23787 - DNA, 36 bp, Artificial Sequence
  Probe
tccagcgatccgagttcaaatctcggtggaacctgc

SEQ ID NO: 23788 - DNA, 37 bp, Artificial Sequence; identical to SEQ ID NO: 7781
  Probe

SEQ ID NO: 23789 - DNA, 35 bp, Artificial Sequence
  Probe
tccagcgatccgagttcaaatctcggtggaacctt

SEQ ID NO: 23790 - DNA, 31 bp, Artificial Sequence
  Probe
tccagcgatccgagttcaaatctcggtggga

SEQ ID NO: 23791 - DNA, 32 bp, Artificial Sequence
  Probe
tccagcgatccgagttcaaatctcggtgggac

SEQ ID NO: 23792 - DNA, 33 bp, Artificial Sequence
  Probe
tccagcgatccgagttcaaatctcggtgggacc

SEQ ID NO: 23793 - DNA, 37 bp, Artificial Sequence; identical to SEQ ID NO: 7783
  Probe

SEQ ID NO: 23794 - DNA, 34 bp, Artificial Sequence
  Probe
tccagcgatccgagttcgagtctcggtggaacct

SEQ ID NO: 23795 - DNA, 37 bp, Artificial Sequence; identical to SEQ ID NO: 7784
  Probe

SEQ ID NO: 23796 - DNA, 16 bp, Artificial Sequence
  Probe
tccaggtgccccctcc

SEQ ID NO: 23797 - DNA, 21 bp, Artificial Sequence
  Probe
tccagtctcttcgggggcgtg

SEQ ID NO: 23798 - DNA, 46 bp, Artificial Sequence
  Probe
tccagtctcttcgggggcgtgggttcgaatcccaccgctgccaggt

SEQ ID NO: 23799 - DNA, 28 bp, Artificial Sequence
  Probe
tccatagtgtagtggttatcacatctgc

SEQ ID NO: 23800 - DNA, 25 bp, Artificial Sequence
  Probe
tccatagtgtagtggttatcacgtc

SEQ ID NO: 23801 - DNA, 32 bp, Artificial Sequence
  Probe
tccatagtgtagtggttatcacgtctgcttta

SEQ ID NO: 23802 - DNA, 33 bp, Artificial Sequence; identical to SEQ ID NO: 1630
  Probe

SEQ ID NO: 23803 - DNA, 22 bp, Artificial Sequence
  Probe
tccattggggtctccccgcgca

SEQ ID NO: 23804 - DNA, 23 bp, Artificial Sequence
  Probe
tccattggggtctccccgcgcag

SEQ ID NO: 23805 - DNA, 24 bp, Artificial Sequence
  Probe
tccattggggtctccccgcgcagg

SEQ ID NO: 23806 - DNA, 26 bp, Artificial Sequence
  Probe
tccattggggtctccccgcgcaggtt

SEQ ID NO: 23807 - DNA, 27 bp, Artificial Sequence
  Probe
tccattggggtctccccgcgcaggttc

SEQ ID NO: 23808 - DNA, 27 bp, Artificial Sequence
  Probe
tccattggggtttccccgcgcaggttc

SEQ ID NO: 23809 - DNA, 31 bp, Artificial Sequence
  Probe
tccattggggtttccccgcgcaggttcgaat

SEQ ID NO: 23810 - DNA, 38 bp, Artificial Sequence
  Probe
tccattggggtttccccgcgcaggttcgaatcctgccg

SEQ ID NO: 23811 - DNA, 39 bp, Artificial Sequence
  Probe
tccattggggtttccccgcgcaggttcgaatcctgccga

SEQ ID NO: 23812 - DNA, 42 bp, Artificial Sequence
  Probe
tccattggggtttccccgcgcaggttcgaatcctgccgacta

SEQ ID NO: 23813 - DNA, 44 bp, Artificial Sequence
  Probe
tccattggtcttaggccccaaaaattttggtgcaactccaaata

SEQ ID NO: 23814 - DNA, 42 bp, Artificial Sequence
  Probe
tccattgtgctttgcacgcgtgggttcgaatcccatcctcgt

SEQ ID NO: 23815 - DNA, 16 bp, Artificial Sequence
  Probe
tcccacatggtctagc

SEQ ID NO: 23816 - DNA, 17 bp, Artificial Sequence
  Probe
tcccacatggtctagcg

SEQ ID NO: 23817 - DNA, 18 bp, Artificial Sequence
  Probe
tcccacatggtctagcgg

SEQ ID NO: 23818 - DNA, 20 bp, Artificial Sequence
  Probe
tcccacatggtctagcggtt

SEQ ID NO: 23819 - DNA, 22 bp, Artificial Sequence
  Probe
tcccacatggtctagcggttag

SEQ ID NO: 23820 - DNA, 24 bp, Artificial Sequence
  Probe
tcccacatggtctagcggttagga

SEQ ID NO: 23821 - DNA, 25 bp, Artificial Sequence
  Probe
tcccacatggtctagcggttaggat

SEQ ID NO: 23822 - DNA, 38 bp, Artificial Sequence; identical to SEQ ID NO: 7794
  Probe

SEQ ID NO: 23823 - DNA, 42 bp, Artificial Sequence
  Probe
tcccacatggtctagcggttaggattcctggttttcacccag

SEQ ID NO: 23824 - DNA, 44 bp, Artificial Sequence
  Probe
tcccacatggtctagcggttaggattcctggttttcacccaggc

SEQ ID NO: 23825 - DNA, 49 bp, Artificial Sequence; identical to SEQ ID NO: 7797
  Probe

SEQ ID NO: 23826 - DNA, 16 bp, Artificial Sequence
  Probe
tcccaccgctgccaca

SEQ ID NO: 23827 - DNA, 17 bp, Artificial Sequence
  Probe
tcccaccgctgccacac

SEQ ID NO: 23828 - DNA, 23 bp, Artificial Sequence
  Probe
tcccacttctgacacatactttt

SEQ ID NO: 23829 - DNA, 33 bp, Artificial Sequence
  Probe
tcccagggtcgtgggttcgagccccacgttggg

SEQ ID NO: 23830 - DNA, 16 bp, Artificial Sequence
  Probe
tcccatatggtctagc

SEQ ID NO: 23831 - DNA, 23 bp, Artificial Sequence
  Probe
tcccatatggtctagcggttagg

SEQ ID NO: 23832 - DNA, 24 bp, Artificial Sequence
  Probe
tcccatatggtctagcggttagga

SEQ ID NO: 23833 - DNA, 26 bp, Artificial Sequence
  Probe
tcccatatggtctagcggttaggatt

SEQ ID NO: 23834 - DNA, 49 bp, Artificial Sequence
  Probe
tcccatatggtctagcggttaggattcctggttttcacccaggtggccc

SEQ ID NO: 23835 - DNA, 16 bp, Artificial Sequence
  Probe
tccccagcacctccac

SEQ ID NO: 23836 - DNA, 16 bp, Artificial Sequence
  Probe
tccccagtacctccag

SEQ ID NO: 23837 - DNA, 15 bp, Artificial Sequence
  Probe
tcccccctacaattt

SEQ ID NO: 23838 - DNA, 30 bp, Artificial Sequence
  Probe
tccccgcacaggttcgaatcctgttcgtga

SEQ ID NO: 23839 - DNA, 16 bp, Artificial Sequence
  Probe
tccccggcacctccaa

SEQ ID NO: 23840 - DNA, 17 bp, Artificial Sequence
  Probe
tccccggcacctccaaa

SEQ ID NO: 23841 - DNA, 18 bp, Artificial Sequence
  Probe
tccccggcacctccaaac

SEQ ID NO: 23842 - DNA, 19 bp, Artificial Sequence
  Probe
tccccggcacctccaccag

SEQ ID NO: 23843 - DNA, 20 bp, Artificial Sequence
  Probe
tccccggcacctccaccagt

SEQ ID NO: 23844 - DNA, 21 bp, Artificial Sequence
  Probe
tccccggcacctccaccagtt

SEQ ID NO: 23845 - DNA, 22 bp, Artificial Sequence
  Probe
tccccggcacctccaccagttt

SEQ ID NO: 23846 - DNA, 16 bp, Artificial Sequence
  Probe
tccccggcacctccag

SEQ ID NO: 23847 - DNA, 16 bp, Artificial Sequence
  Probe
tccccggcacctccat

SEQ ID NO: 23848 - DNA, 17 bp, Artificial Sequence
  Probe
tccccggcacctccatt

SEQ ID NO: 23849 - DNA, 16 bp, Artificial Sequence
  Probe
tccccggcatctccaa

SEQ ID NO: 23850 - DNA, 17 bp, Artificial Sequence
  Probe
tccccggcatctccaaa

SEQ ID NO: 23851 - DNA, 31 bp, Artificial Sequence
  Probe
tccccggcatctccaaatcagccgacgtttg

SEQ ID NO: 23852 - DNA, 16 bp, Artificial Sequence
  Probe
tccccggcatctccag

SEQ ID NO: 23853 - DNA, 18 bp, Artificial Sequence
  Probe
tccccggcatctccagac

SEQ ID NO: 23854 - DNA, 18 bp, Artificial Sequence
  Probe
tccccggcatctccagtg

SEQ ID NO: 23855 - DNA, 16 bp, Artificial Sequence
  Probe
tccccggcatctccat

SEQ ID NO: 23856 - DNA, 17 bp, Artificial Sequence
  Probe
tccccggcatctccatt

SEQ ID NO: 23857 - DNA, 18 bp, Artificial Sequence
  Probe
tccccggcatctccattg

SEQ ID NO: 23858 - DNA, 28 bp, Artificial Sequence
  Probe
tccccttggtctagtggttaggattcaa

SEQ ID NO: 23859 - DNA, 15 bp, Artificial Sequence
  Probe
tcccgccttttttcc

SEQ ID NO: 23860 - DNA, 16 bp, Artificial Sequence
  Probe
tcccgccttttttccc

SEQ ID NO: 23861 - DNA, 17 bp, Artificial Sequence
  Probe
tcccgccttttttcccg

SEQ ID NO: 23862 - DNA, 18 bp, Artificial Sequence
  Probe
tcccgccttttttcccgg

SEQ ID NO: 23863 - DNA, 19 bp, Artificial Sequence
  Probe
tcccgccttttttcccggc

SEQ ID NO: 23864 - DNA, 20 bp, Artificial Sequence
  Probe
tcccgccttttttcccggcg

SEQ ID NO: 23865 - DNA, 21 bp, Artificial Sequence
  Probe
tcccgccttttttcccggcgg

SEQ ID NO: 23866 - DNA, 22 bp, Artificial Sequence
  Probe
tcccgccttttttcccggcggc

SEQ ID NO: 23867 - DNA, 23 bp, Artificial Sequence
  Probe
tcccgccttttttcccggcggcg

SEQ ID NO: 23868 - DNA, 24 bp, Artificial Sequence
  Probe
tcccgccttttttcccggcggcgg

SEQ ID NO: 23869 - DNA, 25 bp, Artificial Sequence
  Probe
tcccgccttttttcccggcggcggg

SEQ ID NO: 23870 - DNA, 26 bp, Artificial Sequence
  Probe
tcccgccttttttcccggcggcggga

SEQ ID NO: 23871 - DNA, 27 bp, Artificial Sequence
  Probe
tcccgccttttttcccggcggcgggag

SEQ ID NO: 23872 - DNA, 28 bp, Artificial Sequence
  Probe
tcccgccttttttcccggcggcgggaga

SEQ ID NO: 23873 - DNA, 29 bp, Artificial Sequence
  Probe
tcccgccttttttcccggcggcgggagaa

SEQ ID NO: 23874 - DNA, 30 bp, Artificial Sequence; identical to SEQ ID NO: 7829
  Probe

SEQ ID NO: 23875 - DNA, 31 bp, Artificial Sequence; identical to SEQ ID NO: 7830
  Probe

SEQ ID NO: 23876 - DNA, 32 bp, Artificial Sequence; identical to SEQ ID NO: 7831
  Probe

SEQ ID NO: 23877 - DNA, 36 bp, Artificial Sequence
  Probe
tcccgccttttttcccggcggcgggagaagtagatt

SEQ ID NO: 23878 - DNA, 37 bp, Artificial Sequence
  Probe
tcccgccttttttcccggcggcgggagaagtagattg

SEQ ID NO: 23879 - DNA, 16 bp, Artificial Sequence
  Probe
tcccggacgagccccc

SEQ ID NO: 23880 - DNA, 17 bp, Artificial Sequence
  Probe
tcccggacgagccccct

SEQ ID NO: 23881 - DNA, 16 bp, Artificial Sequence
  Probe
tcccggacgagcccct

SEQ ID NO: 23882 - DNA, 17 bp, Artificial Sequence
  Probe
tcccggacgagcccctt

SEQ ID NO: 23883 - DNA, 28 bp, Artificial Sequence
  Probe
tcccggccaacgcatgcggtaccacttt

SEQ ID NO: 23884 - DNA, 27 bp, Artificial Sequence
  Probe
tcccggccaatgcacgagtacagtttt

SEQ ID NO: 23885 - DNA, 30 bp, Artificial Sequence; identical to SEQ ID NO: 7835
  Probe

SEQ ID NO: 23886 - DNA, 16 bp, Artificial Sequence
  Probe
tcccgggtttcggcac

SEQ ID NO: 23887 - DNA, 17 bp, Artificial Sequence
  Probe
tcccgggtttcggcact

SEQ ID NO: 23888 - DNA, 17 bp, Artificial Sequence
  Probe
tcccggtcagggaacca

SEQ ID NO: 23889 - DNA, 23 bp, Artificial Sequence
  Probe
tccctggtctagtggttaggatt

SEQ ID NO: 23890 - DNA, 25 bp, Artificial Sequence
  Probe
tccctggtctagtggttaggattta

SEQ ID NO: 23891 - DNA, 26 bp, Artificial Sequence
  Probe
tccctggtctagtggttaggatttat

SEQ ID NO: 23892 - DNA, 27 bp, Artificial Sequence
  Probe
tccctggtctagtggttaggatttatt

SEQ ID NO: 23893 - DNA, 28 bp, Artificial Sequence
  Probe
tccctggtctagtggttaggatttatta

SEQ ID NO: 23894 - DNA, 29 bp, Artificial Sequence
  Probe
tccctggtctagtggttaggatttattat

SEQ ID NO: 23895 - DNA, 30 bp, Artificial Sequence
  Probe
tccctggtctagtggttaggatttattatt

SEQ ID NO: 23896 - DNA, 31 bp, Artificial Sequence
  Probe
tccctggtctagtggttaggatttattattt

SEQ ID NO: 23897 - DNA, 28 bp, Artificial Sequence
  Probe
tccctggtggtctaatggttaggagtcg

SEQ ID NO: 23898 - DNA, 29 bp, Artificial Sequence
  Probe
tccctggtggtctaatggttaggagtcgg

SEQ ID NO: 23899 - DNA, 16 bp, Artificial Sequence
  Probe
tccctggtggtctagt

SEQ ID NO: 23900 - DNA, 17 bp, Artificial Sequence
  Probe
tccctggtggtctagtg

SEQ ID NO: 23901 - DNA, 18 bp, Artificial Sequence
  Probe
tccctggtggtctagtgg

SEQ ID NO: 23902 - DNA, 20 bp, Artificial Sequence
  Probe
tccctggtggtctagtggct

SEQ ID NO: 23903 - DNA, 21 bp, Artificial Sequence
  Probe
tccctggtggtctagtggcta

SEQ ID NO: 23904 - DNA, 22 bp, Artificial Sequence
  Probe
tccctggtggtctagtggctag

SEQ ID NO: 23905 - DNA, 23 bp, Artificial Sequence
  Probe
tccctggtggtctagtggctagg

SEQ ID NO: 23906 - DNA, 24 bp, Artificial Sequence
  Probe
tccctggtggtctagtggctagga

SEQ ID NO: 23907 - DNA, 25 bp, Artificial Sequence
  Probe
tccctggtggtctagtggctaggat

SEQ ID NO: 23908 - DNA, 26 bp, Artificial Sequence
  Probe
tccctggtggtctagtggctaggatt

SEQ ID NO: 23909 - DNA, 27 bp, Artificial Sequence
  Probe
tccctggtggtctagtggctaggattc

SEQ ID NO: 23910 - DNA, 28 bp, Artificial Sequence
  Probe
tccctggtggtctagtggctaggattcg

SEQ ID NO: 23911 - DNA, 29 bp, Artificial Sequence
  Probe
tccctggtggtctagtggctaggattcgg

SEQ ID NO: 23912 - DNA, 30 bp, Artificial Sequence; identical to SEQ ID NO: 7856
  Probe

SEQ ID NO: 23913 - DNA, 38 bp, Artificial Sequence
  Probe
tccctggtggtctagtggctaggattcggcgctttcac

SEQ ID NO: 23914 - DNA, 41 bp, Artificial Sequence
  Probe
tccctggtggtctagtggctaggattcggcgctttcaccgc

SEQ ID NO: 23915 - DNA, 50 bp, Artificial Sequence; identical to SEQ ID NO: 1678
  Probe

SEQ ID NO: 23916 - DNA, 19 bp, Artificial Sequence
  Probe
tccctggtggtctagtggt

SEQ ID NO: 23917 - DNA, 20 bp, Artificial Sequence
  Probe
tccctggtggtctagtggtt

SEQ ID NO: 23918 - DNA, 21 bp, Artificial Sequence
  Probe
tccctggtggtctagtggtta

SEQ ID NO: 23919 - DNA, 22 bp, Artificial Sequence
  Probe
tccctggtggtctagtggttag

SEQ ID NO: 23920 - DNA, 23 bp, Artificial Sequence
  Probe
tccctggtggtctagtggttagg

SEQ ID NO: 23921 - DNA, 24 bp, Artificial Sequence
  Probe
tccctggtggtctagtggttagga

SEQ ID NO: 23922 - DNA, 25 bp, Artificial Sequence
  Probe
tccctggtggtctagtggttaggat

SEQ ID NO: 23923 - DNA, 26 bp, Artificial Sequence
  Probe
tccctggtggtctagtggttaggatt

SEQ ID NO: 23924 - DNA, 27 bp, Artificial Sequence
  Probe
tccctggtggtctagtggttaggattc

SEQ ID NO: 23925 - DNA, 28 bp, Artificial Sequence
  Probe
tccctggtggtctagtggttaggattcg

SEQ ID NO: 23926 - DNA, 29 bp, Artificial Sequence
  Probe
tccctggtggtctagtggttaggattcgg

SEQ ID NO: 23927 - DNA, 30 bp, Artificial Sequence; identical to SEQ ID NO: 7870
  Probe

SEQ ID NO: 23928 - DNA, 41 bp, Artificial Sequence; identical to SEQ ID NO: 7871
  Probe

SEQ ID NO: 23929 - DNA, 42 bp, Artificial Sequence; identical to SEQ ID NO: 1689
  Probe

SEQ ID NO: 23930 - DNA, 43 bp, Artificial Sequence; identical to SEQ ID NO: 7872
  Probe

SEQ ID NO: 23931 - DNA, 44 bp, Artificial Sequence; identical to SEQ ID NO: 7873
  Probe

SEQ ID NO: 23932 - DNA, 45 bp, Artificial Sequence; identical to SEQ ID NO: 7874
  Probe

SEQ ID NO: 23933 - DNA, 46 bp, Artificial Sequence; identical to SEQ ID NO: 7875
  Probe

SEQ ID NO: 23934 - DNA, 48 bp, Artificial Sequence; identical to SEQ ID NO: 7877
  Probe

SEQ ID NO: 23935 - DNA, 31 bp, Artificial Sequence
  Probe
tcccttcgtggtcgttgccatgttaacgttt

SEQ ID NO: 23936 - DNA, 39 bp, Artificial Sequence
  Probe
tccgagaggtcccgggttcaaatcccggacgagcccctc

SEQ ID NO: 23937 - DNA, 35 bp, Artificial Sequence
  Probe
tccggatggaggcgtgggttcgaatcccacttctg

SEQ ID NO: 23938 - DNA, 28 bp, Artificial Sequence
  Probe
tccggctcgaaggagacaagtgcggttt

SEQ ID NO: 23939 - DNA, 16 bp, Artificial Sequence
  Probe
tccgggtgccccctca

SEQ ID NO: 23940 - DNA, 17 bp, Artificial Sequence
  Probe
tccgggtgccccctcaa

SEQ ID NO: 23941 - DNA, 17 bp, Artificial Sequence
  Probe
tccgggtgccccctcac

SEQ ID NO: 23942 - DNA, 16 bp, Artificial Sequence
  Probe
tccgggtgccccctcg

SEQ ID NO: 23943 - DNA, 17 bp, Artificial Sequence
  Probe
tccgggtgccccctcgg

SEQ ID NO: 23944 - DNA, 16 bp, Artificial Sequence
  Probe
tccgggtgccccctct

SEQ ID NO: 23945 - DNA, 17 bp, Artificial Sequence
  Probe
tccgggtgccccctctg

SEQ ID NO: 23946 - DNA, 17 bp, Artificial Sequence
  Probe
tccgggtgccccctctt

SEQ ID NO: 23947 - DNA, 18 bp, Artificial Sequence
  Probe
tccgggtgccccctcttt

SEQ ID NO: 23948 - DNA, 19 bp, Artificial Sequence
  Probe
tccgggtgccccctctttg

SEQ ID NO: 23949 - DNA, 16 bp, Artificial Sequence
  Probe
tccgggtgccccctga

SEQ ID NO: 23950 - DNA, 17 bp, Artificial Sequence
  Probe
tccgggtgcccccttcc

SEQ ID NO: 23951 - DNA, 30 bp, Artificial Sequence
  Probe
tccgtagtggagtggttatcacgttcgcct

SEQ ID NO: 23952 - DNA, 28 bp, Artificial Sequence
  Probe
tccgtagtgtagcggttatcacattcgc

SEQ ID NO: 23953 - DNA, 31 bp, Artificial Sequence; identical to SEQ ID NO: 7884
  Probe

SEQ ID NO: 23954 - DNA, 32 bp, Artificial Sequence; identical to SEQ ID NO: 7885
  Probe

SEQ ID NO: 23955 - DNA, 33 bp, Artificial Sequence; identical to SEQ ID NO: 7886
  Probe

SEQ ID NO: 23956 - DNA, 20 bp, Artificial Sequence
  Probe
tccgtagtgtagtggttatc

SEQ ID NO: 23957 - DNA, 25 bp, Artificial Sequence
  Probe
tccgtagtgtagtggttatcacgtt

SEQ ID NO: 23958 - DNA, 27 bp, Artificial Sequence
  Probe
tccgtagtgtagtggttatcacgttcg

SEQ ID NO: 23959 - DNA, 28 bp, Artificial Sequence
  Probe
tccgtagtgtagtggttatcacgttcgc

SEQ ID NO: 23960 - DNA, 29 bp, Artificial Sequence
  Probe
tccgtagtgtagtggttatcacgttcgcc

SEQ ID NO: 23961 - DNA, 30 bp, Artificial Sequence; identical to SEQ ID NO: 7893
  Probe

SEQ ID NO: 23962 - DNA, 32 bp, Artificial Sequence
  Probe
tccgtagtgtagtggttatcacgttcgcctaa

SEQ ID NO: 23963 - DNA, 33 bp, Artificial Sequence; identical to SEQ ID NO: 7894
  Probe

SEQ ID NO: 23964 - DNA, 49 bp, Artificial Sequence
  Probe
tccgtagtgtagtggttatcacgttcgcctaacacgcgaaaggtccccg

SEQ ID NO: 23965 - DNA, 50 bp, Artificial Sequence
  Probe
tccgtagtgtagtggttatcacgttcgcctaacacgcgaaaggtccccgg

SEQ ID NO: 23966 - DNA, 31 bp, Artificial Sequence; identical to SEQ ID NO: 7895
  Probe

SEQ ID NO: 23967 - DNA, 32 bp, Artificial Sequence; identical to SEQ ID NO: 7896
  Probe

SEQ ID NO: 23968 - DNA, 33 bp, Artificial Sequence; identical to SEQ ID NO: 7897
  Probe

SEQ ID NO: 23969 - DNA, 34 bp, Artificial Sequence; identical to SEQ ID NO: 7898
  Probe

SEQ ID NO: 23970 - DNA, 36 bp, Artificial Sequence
  Probe
tccgtagtgtagtggttatcacgttcgcctcacacg

SEQ ID NO: 23971 - DNA, 49 bp, Artificial Sequence
  Probe
tccgtagtgtagtggttatcacgttcgcctcacacgcgaaaggtccccg

SEQ ID NO: 23972 - DNA, 33 bp, Artificial Sequence; identical to SEQ ID NO: 7900
  Probe

SEQ ID NO: 23973 - DNA, 34 bp, Artificial Sequence
  Probe
tccgtggtggtctagtggctaggattcggcgctt

SEQ ID NO: 23974 - DNA, 25 bp, Artificial Sequence
  Probe
tccgtggtgtagtggttatcacatt

SEQ ID NO: 23975 - DNA, 28 bp, Artificial Sequence
  Probe
tccgtggtgtagtggttatcacattcgc

SEQ ID NO: 23976 - DNA, 29 bp, Artificial Sequence
  Probe
tccgtggtgtagtggttatcacattcgcc

SEQ ID NO: 23977 - DNA, 30 bp, Artificial Sequence
  Probe
tccgtggtgtagtggttatcacattcgcct

SEQ ID NO: 23978 - DNA, 22 bp, Artificial Sequence
  Probe
tcctaagccagggattgtgggt

SEQ ID NO: 23979 - DNA, 16 bp, Artificial Sequence
  Probe
tcctcaaagcaataca

SEQ ID NO: 23980 - DNA, 19 bp, Artificial Sequence
  Probe
tcctcaaagcaatacactg

SEQ ID NO: 23981 - DNA, 20 bp, Artificial Sequence
  Probe
tcctcaaagcaatacactga

SEQ ID NO: 23982 - DNA, 21 bp, Artificial Sequence
  Probe
tcctcaaagcaatacactgaa

SEQ ID NO: 23983 - DNA, 33 bp, Artificial Sequence
  Probe
tcctcaaagcaatacactgaaaatgtttagacg

SEQ ID NO: 23984 - DNA, 24 bp, Artificial Sequence
  Probe
tcctcacacggggcacaataattt

SEQ ID NO: 23985 - DNA, 33 bp, Artificial Sequence
  Probe
tcctcatcagtatagtggtgagtatccccgcct

SEQ ID NO: 23986 - DNA, 35 bp, Artificial Sequence
  Probe
tcctcatcagtatagtggtgagtatccccgcctgt

SEQ ID NO: 23987 - DNA, 36 bp, Artificial Sequence; identical to SEQ ID NO: 7913
  Probe

SEQ ID NO: 23988 - DNA, 18 bp, Artificial Sequence
  Probe
tcctcgctggggcctcct

SEQ ID NO: 23989 - DNA, 16 bp, Artificial Sequence
  Probe
tcctcgttagtatagt

SEQ ID NO: 23990 - DNA, 17 bp, Artificial Sequence
  Probe
tcctcgttagtatagtg

SEQ ID NO: 23991 - DNA, 19 bp, Artificial Sequence
  Probe
tcctcgttagtatagtggt

SEQ ID NO: 23992 - DNA, 20 bp, Artificial Sequence
  Probe
tcctcgttagtatagtggtg

SEQ ID NO: 23993 - DNA, 21 bp, Artificial Sequence
  Probe
tcctcgttagtatagtggtga

SEQ ID NO: 23994 - DNA, 22 bp, Artificial Sequence
  Probe
tcctcgttagtatagtggtgag

SEQ ID NO: 23995 - DNA, 23 bp, Artificial Sequence
  Probe
tcctcgttagtatagtggtgagt

SEQ ID NO: 23996 - DNA, 24 bp, Artificial Sequence
  Probe
tcctcgttagtatagtggtgagta

SEQ ID NO: 23997 - DNA, 25 bp, Artificial Sequence
  Probe
tcctcgttagtatagtggtgagtat

SEQ ID NO: 23998 - DNA, 38 bp, Artificial Sequence; identical to SEQ ID NO: 1709
  Probe

SEQ ID NO: 23999 - DNA, 32 bp, Artificial Sequence; identical to SEQ ID NO: 1714
  Probe

SEQ ID NO: 24000 - DNA, 33 bp, Artificial Sequence; identical to SEQ ID NO: 1715
  Probe

SEQ ID NO: 24001 - DNA, 37 bp, Artificial Sequence; identical to SEQ ID NO: 1719
  Probe

SEQ ID NO: 24002 - DNA, 41 bp, Artificial Sequence
  Probe
tcctcgttagtatagtggttagtatccccgcctgtcacgcg

SEQ ID NO: 24003 - DNA, 24 bp, Artificial Sequence
  Probe
tcctgctcacagcgtcactagttt

SEQ ID NO: 24004 - DNA, 25 bp, Artificial Sequence
  Probe
tcctgctcacagcgtcactagtttt

SEQ ID NO: 24005 - DNA, 22 bp, Artificial Sequence
  Probe
tcctgtcccgtacggtttttct

SEQ ID NO: 24006 - DNA, 18 bp, Artificial Sequence
  Probe
tccttaggtcgctggttc

SEQ ID NO: 24007 - DNA, 19 bp, Artificial Sequence
  Probe
tccttaggtcgctggttcg

SEQ ID NO: 24008 - DNA, 30 bp, Artificial Sequence
  Probe
tccttaggtcgctggttcgaatccggctcg

SEQ ID NO: 24009 - DNA, 31 bp, Artificial Sequence
  Probe
tccttaggtcgctggttcgaatccggctcga

SEQ ID NO: 24010 - DNA, 32 bp, Artificial Sequence
  Probe
tccttaggtcgctggttcgaatccggctcgaa

SEQ ID NO: 24011 - DNA, 33 bp, Artificial Sequence
  Probe
tccttaggtcgctggttcgaatccggctcgaag

SEQ ID NO: 24012 - DNA, 30 bp, Artificial Sequence
  Probe
tccttaggtcgctggttcgattccggctcg

SEQ ID NO: 24013 - DNA, 31 bp, Artificial Sequence
  Probe
tccttaggtcgctggttcgattccggctcga

SEQ ID NO: 24014 - DNA, 32 bp, Artificial Sequence
  Probe
tccttaggtcgctggttcgattccggctcgaa

SEQ ID NO: 24015 - DNA, 33 bp, Artificial Sequence
  Probe
tccttaggtcgctggttcgattccggctcgaag

SEQ ID NO: 24016 - DNA, 15 bp, Artificial Sequence
  Probe
tccttccccttgtta

SEQ ID NO: 24017 - DNA, 22 bp, Artificial Sequence
  Probe
tcgaaaccatcctctgctaggt

SEQ ID NO: 24018 - DNA, 22 bp, Artificial Sequence
  Probe
tcgaaaccgggcggaaacacct

SEQ ID NO: 24019 - DNA, 22 bp, Artificial Sequence
  Probe
tcgaaccccgtccgtgcctgat

SEQ ID NO: 24020 - DNA, 22 bp, Artificial Sequence
  Probe
tcgaacctcagagggggcagct

SEQ ID NO: 24021 - DNA, 29 bp, Artificial Sequence
  Probe
tcgaagaagcagcttcaaacctgccgggg

SEQ ID NO: 24022 - DNA, 31 bp, Artificial Sequence; identical to SEQ ID NO: 7937
  Probe

SEQ ID NO: 24023 - DNA, 33 bp, Artificial Sequence; identical to SEQ ID NO: 7939
  Probe

SEQ ID NO: 24024 - DNA, 35 bp, Artificial Sequence; identical to SEQ ID NO: 7941
  Probe

SEQ ID NO: 24025 - DNA, 22 bp, Artificial Sequence
  Probe
tcgaatcccaccgctgccacac

SEQ ID NO: 24026 - DNA, 22 bp, Artificial Sequence
  Probe
tcgaatcccaccgctgccaggt

SEQ ID NO: 24027 - DNA, 22 bp, Artificial Sequence
  Probe
tcgaatcccacttctgacacaa

SEQ ID NO: 24028 - DNA, 22 bp, Artificial Sequence
  Probe
tcgaatcccagcggtgcctccg

SEQ ID NO: 24029 - DNA, 19 bp, Artificial Sequence
  Probe
tcgaatccgagtcacggca

SEQ ID NO: 24030 - DNA, 22 bp, Artificial Sequence
  Probe
tcgaatcctgccgactacggca

SEQ ID NO: 24031 - DNA, 22 bp, Artificial Sequence
  Probe
tcgaatcctgccgactacgtca

SEQ ID NO: 24032 - DNA, 22 bp, Artificial Sequence
  Probe
tcgaatcctgctcacagcgtca

SEQ ID NO: 24033 - DNA, 33 bp, Artificial Sequence; identical to SEQ ID NO: 7958
  Probe

SEQ ID NO: 24034 - DNA, 38 bp, Artificial Sequence
  Probe
tcgactcattaaattatgataatcatatttaccaaatg

SEQ ID NO: 24035 - DNA, 22 bp, Artificial Sequence
  Probe
tcgactcccggtatgggaacaa

SEQ ID NO: 24036 - DNA, 22 bp, Artificial Sequence
  Probe
tcgactcccggtatgggaacgc

SEQ ID NO: 24037 - DNA, 20 bp, Artificial Sequence
  Probe
tcgactcccggtgtgggaac

SEQ ID NO: 24038 - DNA, 21 bp, Artificial Sequence
  Probe
tcgactcccggtgtgggaacg

SEQ ID NO: 24039 - DNA, 22 bp, Artificial Sequence
  Probe
tcgactcccggtgtgggaacgc

SEQ ID NO: 24040 - DNA, 22 bp, Artificial Sequence
  Probe
tcgactcccggtgtgggaatga

SEQ ID NO: 24041 - DNA, 22 bp, Artificial Sequence
  Probe
tcgagcccacccagggacgcct

SEQ ID NO: 24042 - DNA, 22 bp, Artificial Sequence
  Probe
tcgagccccagtggaaccacgg

SEQ ID NO: 24043 - DNA, 22 bp, Artificial Sequence
  Probe
tcgagtcccacctggggtgtcg

SEQ ID NO: 24044 - DNA, 22 bp, Artificial Sequence
  Probe
tcgagtcccatctgggtcgcgt

SEQ ID NO: 24045 - DNA, 22 bp, Artificial Sequence
  Probe
tcgagtcccttcgtggtcgttg

SEQ ID NO: 24046 - DNA, 22 bp, Artificial Sequence
  Probe
tcgagtcctgccgcggtcgaag

SEQ ID NO: 24047 - DNA, 22 bp, Artificial Sequence
  Probe
tcgatccccagtacctccaggc

SEQ ID NO: 24048 - DNA, 16 bp, Artificial Sequence
  Probe
tcgatccccggcatct

SEQ ID NO: 24049 - DNA, 22 bp, Artificial Sequence
  Probe
tcgatccccggcatctccagtg

SEQ ID NO: 24050 - DNA, 22 bp, Artificial Sequence
  Probe
tcgatccccggcatctccattg

SEQ ID NO: 24051 - DNA, 22 bp, Artificial Sequence
  Probe
tcgatccccgtacgggccacga

SEQ ID NO: 24052 - DNA, 22 bp, Artificial Sequence
  Probe
tcgatccccgtacgggccactg

SEQ ID NO: 24053 - DNA, 22 bp, Artificial Sequence
  Probe
tcgatccccgtactggccacgt

SEQ ID NO: 24054 - DNA, 22 bp, Artificial Sequence
  Probe
tcgatcccgggcggaaacaggt

SEQ ID NO: 24055 - DNA, 22 bp, Artificial Sequence
  Probe
tcgatcctcacacggggcacaa

SEQ ID NO: 24056 - DNA, 22 bp, Artificial Sequence
  Probe
tcgatcctcgctggggcctcct

SEQ ID NO: 24057 - DNA, 22 bp, Artificial Sequence
  Probe
tcgatgcccgcatcctccactc

SEQ ID NO: 24058 - DNA, 16 bp, Artificial Sequence
  Probe
tcgattccccgacggg

SEQ ID NO: 24059 - DNA, 20 bp, Artificial Sequence
  Probe
tcgattccccgacggggaga

SEQ ID NO: 24060 - DNA, 21 bp, Artificial Sequence
  Probe
tcgattccccgacggggagaa

SEQ ID NO: 24061 - DNA, 22 bp, Artificial Sequence
  Probe
tcgattccccgacggggagaaa

SEQ ID NO: 24062 - DNA, 21 bp, Artificial Sequence
  Probe
tcgattccccgacggggagac

SEQ ID NO: 24063 - DNA, 22 bp, Artificial Sequence
  Probe
tcgattccccgacggggagacg

SEQ ID NO: 24064 - DNA, 22 bp, Artificial Sequence
  Probe
tcgattccccgacggggagagt

SEQ ID NO: 24065 - DNA, 20 bp, Artificial Sequence
  Probe
tcgattccccgacggggagg

SEQ ID NO: 24066 - DNA, 21 bp, Artificial Sequence
  Probe
tcgattccccgacggggaggc

SEQ ID NO: 24067 - DNA, 22 bp, Artificial Sequence
  Probe
tcgattccccgacggggaggca

SEQ ID NO: 24068 - DNA, 22 bp, Artificial Sequence
  Probe
tcgattccccgacggggaggcc

SEQ ID NO: 24069 - DNA, 22 bp, Artificial Sequence
  Probe
tcgattcccggccaacgcaagt

SEQ ID NO: 24070 - DNA, 22 bp, Artificial Sequence
  Probe
tcgattcccggccaacgcagcg

SEQ ID NO: 24071 - DNA, 22 bp, Artificial Sequence
  Probe
tcgattcccggccaacgcagtg

SEQ ID NO: 24072 - DNA, 22 bp, Artificial Sequence
  Probe
tcgattcccggccaatgcaagt

SEQ ID NO: 24073 - DNA, 22 bp, Artificial Sequence
  Probe
tcgattcccggccaatgcacga

SEQ ID NO: 24074 - DNA, 22 bp, Artificial Sequence
  Probe
tcgattcccggccaatgcactt

SEQ ID NO: 24075 - DNA, 22 bp, Artificial Sequence
  Probe
tcgattcccggccaatgcagca

SEQ ID NO: 24076 - DNA, 22 bp, Artificial Sequence
  Probe
tcgattcccggcccatgcagca

SEQ ID NO: 24077 - DNA, 22 bp, Artificial Sequence
  Probe
tcgattcccgggcggcgcactt

SEQ ID NO: 24078 - DNA, 22 bp, Artificial Sequence
  Probe
tcgattcccggtcagggaacaa

SEQ ID NO: 24079 - DNA, 22 bp, Artificial Sequence
  Probe
tcgattcccggtcagggaattg

SEQ ID NO: 24080 - DNA, 22 bp, Artificial Sequence
  Probe
tcgattcccggtcatggaacca

SEQ ID NO: 24081 - DNA, 22 bp, Artificial Sequence
  Probe
tcgattccggctcgaaggactt

SEQ ID NO: 24082 - DNA, 22 bp, Artificial Sequence
  Probe
tcgattcctggtcagggaacca

SEQ ID NO: 24083 - DNA, 21 bp, Artificial Sequence
  Probe
tcgattctcatagtcctagaa

SEQ ID NO: 24084 - DNA, 26 bp, Artificial Sequence
  Probe
tcgcagtctcccctggaggcgtgggt

SEQ ID NO: 24085 - DNA, 27 bp, Artificial Sequence
  Probe
tcgcataaaacttaaaactttacagtc

SEQ ID NO: 24086 - DNA, 28 bp, Artificial Sequence
  Probe
tcgcataaaacttaaaactttacagtca

SEQ ID NO: 24087 - DNA, 30 bp, Artificial Sequence
  Probe
tcgcataaaacttaaaactttacagtcaga

SEQ ID NO: 24088 - DNA, 27 bp, Artificial Sequence
  Probe
tcgcctaacacgcgaaaggtccccggt

SEQ ID NO: 24089 - DNA, 27 bp, Artificial Sequence
  Probe
tcgcctcacacgcgaaaggtccccggt

SEQ ID NO: 24090 - DNA, 28 bp, Artificial Sequence
  Probe
tcgcctgccacgcgggaggcccgggttt

SEQ ID NO: 24091 - DNA, 23 bp, Artificial Sequence
  Probe
tcgccttaattttaataatcaac

SEQ ID NO: 24092 - DNA, 27 bp, Artificial Sequence
  Probe
tcggctgttaaccgaaaggttggtggt

SEQ ID NO: 24093 - DNA, 26 bp, Artificial Sequence
  Probe
tcggctttccctgctaactgggcttt

SEQ ID NO: 24094 - DNA, 27 bp, Artificial Sequence
  Probe
tcggctttccctgctaactgggctttt

SEQ ID NO: 24095 - DNA, 28 bp, Artificial Sequence
  Probe
tcggctttccctgctaactgggcttttt

SEQ ID NO: 24096 - DNA, 29 bp, Artificial Sequence
  Probe
tcggctttccctgctaactgggctttttt

SEQ ID NO: 24097 - DNA, 22 bp, Artificial Sequence
  Probe
tcgggcgggagtggtggctttt

SEQ ID NO: 24098 - DNA, 20 bp, Artificial Sequence
  Probe
tcgggtgcgagaggtcccgg

SEQ ID NO: 24099 - DNA, 21 bp, Artificial Sequence
  Probe
tcgggtgcgagaggtcccggg

SEQ ID NO: 24100 - DNA, 16 bp, Artificial Sequence
  Probe
tcggtagagcatgaga

SEQ ID NO: 24101 - DNA, 34 bp, Artificial Sequence
  Probe
tcggtagagcatgagactcttaatctcagggtcg

SEQ ID NO: 24102 - DNA, 16 bp, Artificial Sequence
  Probe
tcggtagagcatggga

SEQ ID NO: 24103 - DNA, 26 bp, Artificial Sequence
  Probe
tcggtagagcatgggactcttaatcc

SEQ ID NO: 24104 - DNA, 27 bp, Artificial Sequence
  Probe
tcggtagagcatgggactcttaatccc

SEQ ID NO: 24105 - DNA, 34 bp, Artificial Sequence
  Probe
tcggtagagcatgggactcttaatcccagggtcg

SEQ ID NO: 24106 - DNA, 21 bp, Artificial Sequence
  Probe
tcgtaaacaggagatcctggg

SEQ ID NO: 24107 - DNA, 22 bp, Artificial Sequence
  Probe
tcgtaaacaggagatcctgggt

SEQ ID NO: 24108 - DNA, 23 bp, Artificial Sequence
  Probe
tcgtatagtggttagtactctgc

SEQ ID NO: 24109 - DNA, 24 bp, Artificial Sequence
  Probe
tcgtatagtggttagtactctgcg

SEQ ID NO: 24110 - DNA, 16 bp, Artificial Sequence
  Probe
tcgtggctactgtttt

SEQ ID NO: 24111 - DNA, 26 bp, Artificial Sequence
  Probe
tcgtggttgtagtccgtgcgagaata

SEQ ID NO: 24112 - DNA, 29 bp, Artificial Sequence
  Probe
tcgtggttgtagtccgtgcgagaataatg

SEQ ID NO: 24113 - DNA, 28 bp, Artificial Sequence
  Probe
tcgttagtatagtggtgagtatccccgc

SEQ ID NO: 24114 - DNA, 29 bp, Artificial Sequence
  Probe
tcgttagtatagtggtgagtatccccgcc

SEQ ID NO: 24115 - DNA, 30 bp, Artificial Sequence
  Probe
tcgttagtatagtggtgagtatccccgcct

SEQ ID NO: 24116 - DNA, 31 bp, Artificial Sequence
  Probe
tcgttagtatagtggtgagtatccccgcctg

SEQ ID NO: 24117 - DNA, 33 bp, Artificial Sequence; identical to SEQ ID NO: 1725
  Probe

SEQ ID NO: 24118 - DNA, 34 bp, Artificial Sequence
  Probe
tcgttagtatagtggtgagtatccccgcctgtca

SEQ ID NO: 24119 - DNA, 27 bp, Artificial Sequence
  Probe
tcgttggtctaggggtatgattctcgc

SEQ ID NO: 24120 - DNA, 28 bp, Artificial Sequence
  Probe
tcgttggtctaggggtatgattctcgct

SEQ ID NO: 24121 - DNA, 34 bp, Artificial Sequence
  Probe
tctaaagacaggggttaggcctctttttaccagc

SEQ ID NO: 24122 - DNA, 35 bp, Artificial Sequence; identical to SEQ ID NO: 7996
  Probe

SEQ ID NO: 24123 - DNA, 21 bp, Artificial Sequence
  Probe
tctaacaacatggctttctca

SEQ ID NO: 24124 - DNA, 23 bp, Artificial Sequence
  Probe
tctaacaacatggctttctcaac

SEQ ID NO: 24125 - DNA, 24 bp, Artificial Sequence
  Probe
tctaacaacatggctttctcaact

SEQ ID NO: 24126 - DNA, 20 bp, Artificial Sequence
  Probe
tctaggggtatgattctcgc

SEQ ID NO: 24127 - DNA, 21 bp, Artificial Sequence
  Probe
tctaggggtatgattctcgct

SEQ ID NO: 24128 - DNA, 20 bp, Artificial Sequence
  Probe
tctaggggtatgattctcgg

SEQ ID NO: 24129 - DNA, 23 bp, Artificial Sequence
  Probe
tctagtggttaggattcggcgct

SEQ ID NO: 24130 - DNA, 25 bp, Artificial Sequence
  Probe
tctagtggttaggattcggcgctct

SEQ ID NO: 24131 - DNA, 39 bp, Artificial Sequence
  Probe
tctagtggttaggattcggcgctctcaccgccgcggccc

SEQ ID NO: 24132 - DNA, 31 bp, Artificial Sequence
  Probe
tctcagggatgggttcgattctcatagtcct

SEQ ID NO: 24133 - DNA, 33 bp, Artificial Sequence; identical to SEQ ID NO: 1726
  Probe

SEQ ID NO: 24134 - DNA, 36 bp, Artificial Sequence; identical to SEQ ID NO: 8002
  Probe

SEQ ID NO: 24135 - DNA, 33 bp, Artificial Sequence; identical to SEQ ID NO: 8003
  Probe

SEQ ID NO: 24136 - DNA, 24 bp, Artificial Sequence
  Probe
tctcataatctgaaggtcctgagt

SEQ ID NO: 24137 - DNA, 36 bp, Artificial Sequence
  Probe
tctccaatggaggcgtgggttcgaatcccacttctg

SEQ ID NO: 24138 - DNA, 31 bp, Artificial Sequence
  Probe
tctcccgccttttttcccggcggcgggagaa

SEQ ID NO: 24139 - DNA, 37 bp, Artificial Sequence
  Probe
tctccggatggaggcgtgggttcgaatcccacttctg

SEQ ID NO: 24140 - DNA, 38 bp, Artificial Sequence
  Probe
tctccggatggaggcgtgggttcgaatcccacttctga

SEQ ID NO: 24141 - DNA, 28 bp, Artificial Sequence
  Probe
tctcgcctgccacgcgggaggcccgggt

SEQ ID NO: 24142 - DNA, 38 bp, Artificial Sequence
  Probe
tctgaaggtcctgagttcgaacctcagagggggcagct

SEQ ID NO: 24143 - DNA, 35 bp, Artificial Sequence
  Probe
tctgaaggtcgtgagttcgatcctcacacggggca

SEQ ID NO: 24144 - DNA, 38 bp, Artificial Sequence; identical to SEQ ID NO: 8005
  Probe

SEQ ID NO: 24145 - DNA, 37 bp, Artificial Sequence; identical to SEQ ID NO: 8010
  Probe

SEQ ID NO: 24146 - DNA, 16 bp, Artificial Sequence
  Probe
tctgacacatactttt

SEQ ID NO: 24147 - DNA, 22 bp, Artificial Sequence
  Probe
tctgacagagctcaattacttt

SEQ ID NO: 24148 - DNA, 36 bp, Artificial Sequence
  Probe
tctgagggtccagggttcaagtccctgttcgggcgg

SEQ ID NO: 24149 - DNA, 38 bp, Artificial Sequence
  Probe
tctgagggtccagggttcaagtccctgttcgggcggca

SEQ ID NO: 24150 - DNA, 36 bp, Artificial Sequence
  Probe
tctgagggtccagggttcaagtccctgttcgggcgt

SEQ ID NO: 24151 - DNA, 15 bp, Artificial Sequence
  Probe
tctgcccaatactat

SEQ ID NO: 24152 - DNA, 16 bp, Artificial Sequence
  Probe
tctggactctgaatcc

SEQ ID NO: 24153 - DNA, 30 bp, Artificial Sequence
  Probe
tctgtagtgtagtggttatcacgttcgcct

SEQ ID NO: 24154 - DNA, 31 bp, Artificial Sequence
  Probe
tctgtagtgtagtggttatcacgttcgcctc

SEQ ID NO: 24155 - DNA, 16 bp, Artificial Sequence
  Probe
tctgtcacgcgggaga

SEQ ID NO: 24156 - DNA, 17 bp, Artificial Sequence
  Probe
tcttgcgacccgggttc

SEQ ID NO: 24157 - DNA, 21 bp, Artificial Sequence
  Probe
tcttgcgacccgggttcgatt

SEQ ID NO: 24158 - DNA, 22 bp, Artificial Sequence
  Probe
tcttgcgacccgggttcgattc

SEQ ID NO: 24159 - DNA, 32 bp, Artificial Sequence
  Probe
tcttgcgacccgggttcgattcccgggcggcg

SEQ ID NO: 24160 - DNA, 34 bp, Artificial Sequence
  Probe
tcttgcgacccgggttcgattcccgggcggcgca

SEQ ID NO: 24161 - DNA, 35 bp, Artificial Sequence
  Probe
tcttgcgacccgggttcgattcccgggcggcgcac

SEQ ID NO: 24162 - DNA, 36 bp, Artificial Sequence
  Probe
tcttgcgacccgggttcgattcccgggcggcgcact

SEQ ID NO: 24163 - DNA, 37 bp, Artificial Sequence; identical to SEQ ID NO: 8017
  Probe

SEQ ID NO: 24164 - DNA, 30 bp, Artificial Sequence
  Probe
tcttttagtataaatagtaccgttaacttc

SEQ ID NO: 24165 - DNA, 31 bp, Artificial Sequence; identical to SEQ ID NO: 1727
  Probe

SEQ ID NO: 24166 - DNA, 25 bp, Artificial Sequence
  Probe
tgaaaacctttttccaaggacaaat

SEQ ID NO: 24167 - DNA, 40 bp, Artificial Sequence
  Probe
tgaaaatgtttagacgggctcacatcaccccataaacaaa

SEQ ID NO: 24168 - DNA, 41 bp, Artificial Sequence; identical to SEQ ID NO: 8021
  Probe

SEQ ID NO: 24169 - DNA, 42 bp, Artificial Sequence
  Probe
tgaaaatgtttagacgggctcacatcaccccataaacaaata

SEQ ID NO: 24170 - DNA, 43 bp, Artificial Sequence
  Probe
tgaaaatgtttagacgggctcacatcaccccataaacaaatag

SEQ ID NO: 24171 - DNA, 36 bp, Artificial Sequence
  Probe
tgaaggtcctgagttcgaacctcagagggggcaagg

SEQ ID NO: 24172 - DNA, 36 bp, Artificial Sequence
  Probe
tgaaggtcctgagttcgaacctcagagggggcagct

SEQ ID NO: 24173 - DNA, 36 bp, Artificial Sequence
  Probe
tgaaggtcctgagttcgagcctcagagagggcagct

SEQ ID NO: 24174 - DNA, 30 bp, Artificial Sequence
  Probe
tgaaggtcgtgagttcgagcctcacacggg

SEQ ID NO: 24175 - DNA, 33 bp, Artificial Sequence; identical to SEQ ID NO: 8023
  Probe

SEQ ID NO: 24176 - DNA, 36 bp, Artificial Sequence; identical to SEQ ID NO: 8025
  Probe

SEQ ID NO: 24177 - DNA, 21 bp, Artificial Sequence
  Probe
tgaatccagcgatccgagttc

SEQ ID NO: 24178 - DNA, 22 bp, Artificial Sequence
  Probe
tgaatccagcgatccgagttca

SEQ ID NO: 24179 - DNA, 41 bp, Artificial Sequence; identical to SEQ ID NO: 8033
  Probe

SEQ ID NO: 24180 - DNA, 27 bp, Artificial Sequence
  Probe
tgaatctgacaacagaggcttacgacc

SEQ ID NO: 24181 - DNA, 28 bp, Artificial Sequence
  Probe
tgaatctgacaacagaggcttacgaccc

SEQ ID NO: 24182 - DNA, 29 bp, Artificial Sequence
  Probe
tgaatctgacaacagaggcttacgacccc

SEQ ID NO: 24183 - DNA, 30 bp, Artificial Sequence; identical to SEQ ID NO: 1734
  Probe

SEQ ID NO: 24184 - DNA, 31 bp, Artificial Sequence; identical to SEQ ID NO: 1735
  Probe

SEQ ID NO: 24185 - DNA, 33 bp, Artificial Sequence; identical to SEQ ID NO: 1737
  Probe

SEQ ID NO: 24186 - DNA, 34 bp, Artificial Sequence; identical to SEQ ID NO: 1738
  Probe

SEQ ID NO: 24187 - DNA, 35 bp, Artificial Sequence; identical to SEQ ID NO: 1739
  Probe

SEQ ID NO: 24188 - DNA, 37 bp, Artificial Sequence; identical to SEQ ID NO: 1741
  Probe

SEQ ID NO: 24189 - DNA, 39 bp, Artificial Sequence; identical to SEQ ID NO: 8042
  Probe

SEQ ID NO: 24190 - DNA, 40 bp, Artificial Sequence; identical to SEQ ID NO: 8043
  Probe

SEQ ID NO: 24191 - DNA, 41 bp, Artificial Sequence; identical to SEQ ID NO: 8044
  Probe

SEQ ID NO: 24192 - DNA, 42 bp, Artificial Sequence; identical to SEQ ID NO: 8045
  Probe

SEQ ID NO: 24193 - DNA, 46 bp, Artificial Sequence; identical to SEQ ID NO: 8048
  Probe

SEQ ID NO: 24194 - DNA, 49 bp, Artificial Sequence; identical to SEQ ID NO: 8050
  Probe

SEQ ID NO: 24195 - DNA, 30 bp, Artificial Sequence
  Probe
tgacaacagaggcttacgaccccttattta

SEQ ID NO: 24196 - DNA, 31 bp, Artificial Sequence; identical to SEQ ID NO: 1744
  Probe

SEQ ID NO: 24197 - DNA, 32 bp, Artificial Sequence; identical to SEQ ID NO: 1745
  Probe

SEQ ID NO: 24198 - DNA, 33 bp, Artificial Sequence; identical to SEQ ID NO: 8057
  Probe

SEQ ID NO: 24199 - DNA, 34 bp, Artificial Sequence; identical to SEQ ID NO: 8058
  Probe

SEQ ID NO: 24200 - DNA, 35 bp, Artificial Sequence; identical to SEQ ID NO: 8059
  Probe

SEQ ID NO: 24201 - DNA, 22 bp, Artificial Sequence
  Probe
tgacaacattcaaaaaagagta

SEQ ID NO: 24202 - DNA, 23 bp, Artificial Sequence
  Probe
tgacaacattcaaaaaagagtaa

SEQ ID NO: 24203 - DNA, 25 bp, Artificial Sequence
  Probe
tgacacaactatcttattctccttt

SEQ ID NO: 24204 - DNA, 27 bp, Artificial Sequence
  Probe
tgacccgggttcgattcccggccaacg

SEQ ID NO: 24205 - DNA, 32 bp, Artificial Sequence; identical to SEQ ID NO: 8061
  Probe

SEQ ID NO: 24206 - DNA, 32 bp, Artificial Sequence; identical to SEQ ID NO: 8062
  Probe

SEQ ID NO: 24207 - DNA, 20 bp, Artificial Sequence
  Probe
tgagatgttacctagcgttt

SEQ ID NO: 24208 - DNA, 33 bp, Artificial Sequence
  Probe
tgagcatagctgccttccaagcagttgacccgg

SEQ ID NO: 24209 - DNA, 39 bp, Artificial Sequence
  Probe
tgagcccggatagctcagtcggtagagcatcagactttt

SEQ ID NO: 24210 - DNA, 26 bp, Artificial Sequence
  Probe
tgaggccccgggttcgatccccggca

SEQ ID NO: 24211 - DNA, 35 bp, Artificial Sequence
  Probe
tgaggccccgggttcgatccccggcatctccattg

SEQ ID NO: 24212 - DNA, 36 bp, Artificial Sequence
  Probe
tgagggtccagggttcaagtccctgttcgggcggca

SEQ ID NO: 24213 - DNA, 30 bp, Artificial Sequence
  Probe
tgaggtttttctgttttaacctccaaattc

SEQ ID NO: 24214 - DNA, 21 bp, Artificial Sequence
  Probe
tgagtgaagcattggactgta

SEQ ID NO: 24215 - DNA, 22 bp, Artificial Sequence
  Probe
tgataatcatatttaccaaatg

SEQ ID NO: 24216 - DNA, 41 bp, Artificial Sequence
  Probe
tgatagagtaaataataggagcttaaacccccttatttcta

SEQ ID NO: 24217 - DNA, 43 bp, Artificial Sequence; identical to SEQ ID NO: 8070
  Probe

SEQ ID NO: 24218 - DNA, 44 bp, Artificial Sequence; identical to SEQ ID NO: 8071
  Probe

SEQ ID NO: 24219 - DNA, 26 bp, Artificial Sequence
  Probe
tgatcgtatagtggttagtactctgc

SEQ ID NO: 24220 - DNA, 30 bp, Artificial Sequence
  Probe
tgatgcagagtggggttttgcagtccttag

SEQ ID NO: 24221 - DNA, 32 bp, Artificial Sequence; identical to SEQ ID NO: 8074
  Probe

SEQ ID NO: 24222 - DNA, 29 bp, Artificial Sequence
  Probe
tgattctcgcttagggtgcgagaggtccc

SEQ ID NO: 24223 - DNA, 30 bp, Artificial Sequence
  Probe
tgattctcgcttagggtgcgagaggtcccg

SEQ ID NO: 24224 - DNA, 29 bp, Artificial Sequence
  Probe
tgattctcgcttcgggtgcgagaggtccc

SEQ ID NO: 24225 - DNA, 30 bp, Artificial Sequence
  Probe
tgattctcgcttcgggtgcgagaggtcccg

SEQ ID NO: 24226 - DNA, 29 bp, Artificial Sequence
  Probe
tgattctcgctttgggtgcgagaggtccc

SEQ ID NO: 24227 - DNA, 30 bp, Artificial Sequence
  Probe
tgattctcgctttgggtgcgagaggtcccg

SEQ ID NO: 24228 - DNA, 36 bp, Artificial Sequence; identical to SEQ ID NO: 8078
  Probe

SEQ ID NO: 24229 - DNA, 38 bp, Artificial Sequence
  Probe
tgcaaattcgaagaagcagcttcaaacctgccggggct

SEQ ID NO: 24230 - DNA, 41 bp, Artificial Sequence; identical to SEQ ID NO: 8081
  Probe

SEQ ID NO: 24231 - DNA, 42 bp, Artificial Sequence; identical to SEQ ID NO: 8082
  Probe

SEQ ID NO: 24232 - DNA, 15 bp, Artificial Sequence
  Probe
tgcaactataatctt

SEQ ID NO: 24233 - DNA, 20 bp, Artificial Sequence
  Probe
tgcaactccaaataaaagta

SEQ ID NO: 24234 - DNA, 30 bp, Artificial Sequence
  Probe
tgcacgaggccccgggttcaatccccggca

SEQ ID NO: 24235 - DNA, 32 bp, Artificial Sequence
  Probe
tgcacgaggccccgggttcaatccccggcacc

SEQ ID NO: 24236 - DNA, 37 bp, Artificial Sequence
  Probe
tgcacgaggccccgggttcaatccccggcacctccag

SEQ ID NO: 24237 - DNA, 38 bp, Artificial Sequence
  Probe
tgcacgaggccccgggttcaatccccggcacctccagc

SEQ ID NO: 24238 - DNA, 39 bp, Artificial Sequence; identical to SEQ ID NO: 8084
  Probe

SEQ ID NO: 24239 - DNA, 37 bp, Artificial Sequence
  Probe
tgcacgaggccccgggttcaatccccggcacctccat

SEQ ID NO: 24240 - DNA, 38 bp, Artificial Sequence
  Probe
tgcacgaggccccgggttcaatccccggcacctccatt

SEQ ID NO: 24241 - DNA, 39 bp, Artificial Sequence
  Probe
tgcacgaggccccgggttcaatccccggcacctccattc

SEQ ID NO: 24242 - DNA, 39 bp, Artificial Sequence
  Probe
tgcacgaggccctgggttcaatccccagcacctccatgt

SEQ ID NO: 24243 - DNA, 39 bp, Artificial Sequence
  Probe
tgcacgaggtcctgggttcaatccccaatacctccaggt

SEQ ID NO: 24244 - DNA, 38 bp, Artificial Sequence
  Probe
tgcacgaggtcctgggttcgatccccagtacctccagg

SEQ ID NO: 24245 - DNA, 39 bp, Artificial Sequence; identical to SEQ ID NO: 8085
  Probe

SEQ ID NO: 24246 - DNA, 30 bp, Artificial Sequence
  Probe
tgcacgcgtgggttcgaatcccatcctcgt

SEQ ID NO: 24247 - DNA, 29 bp, Artificial Sequence
  Probe
tgcagagtggggttttgcagtccttagct

SEQ ID NO: 24248 - DNA, 36 bp, Artificial Sequence
  Probe
tgcatgaggtcccgggttcgatccccagcatctcca

SEQ ID NO: 24249 - DNA, 38 bp, Artificial Sequence
  Probe
tgcatgaggtcccgggttcgatccccagcatctccagt

SEQ ID NO: 24250 - DNA, 39 bp, Artificial Sequence; identical to SEQ ID NO: 8088
  Probe

SEQ ID NO: 24251 - DNA, 36 bp, Artificial Sequence
  Probe
tgcatgggtggttcagtggtagaattctcgcctgcc

SEQ ID NO: 24252 - DNA, 37 bp, Artificial Sequence
  Probe
tgccacgcgggaggcccgggttcgattcccggccaat

SEQ ID NO: 24253 - DNA, 43 bp, Artificial Sequence
  Probe
tgccacgcgggaggcccgggttcgattcccggccaatgcaagt

SEQ ID NO: 24254 - DNA, 43 bp, Artificial Sequence
  Probe
tgccacgcgggaggcccgggttcgattcccggccaatgcacga

SEQ ID NO: 24255 - DNA, 43 bp, Artificial Sequence
  Probe
tgccacgcgggaggcccgggttcgattcccggccaatgcagca

SEQ ID NO: 24256 - DNA, 43 bp, Artificial Sequence; identical to SEQ ID NO: 8091
  Probe

SEQ ID NO: 24257 - DNA, 23 bp, Artificial Sequence
  Probe
tgccacgcgggaggcccgggttt

SEQ ID NO: 24258 - DNA, 16 bp, Artificial Sequence
  Probe
tgccatgttaacgttt

SEQ ID NO: 24259 - DNA, 17 bp, Artificial Sequence
  Probe
tgccatgttaacgtttt

SEQ ID NO: 24260 - DNA, 27 bp, Artificial Sequence
  Probe
tgccccaactaaatactaccgtatggc

SEQ ID NO: 24261 - DNA, 16 bp, Artificial Sequence
  Probe
tgcccccatgtctaac

SEQ ID NO: 24262 - DNA, 17 bp, Artificial Sequence
  Probe
tgcccccatgtctaaca

SEQ ID NO: 24263 - DNA, 20 bp, Artificial Sequence
  Probe
tgcccccatgtctaacaaca

SEQ ID NO: 24264 - DNA, 22 bp, Artificial Sequence
  Probe
tgcccccatgtctaacaacatg

SEQ ID NO: 24265 - DNA, 23 bp, Artificial Sequence
  Probe
tgcccccatgtctaacaacatgg

SEQ ID NO: 24266 - DNA, 24 bp, Artificial Sequence
  Probe
tgcccccatgtctaacaacatggc

SEQ ID NO: 24267 - DNA, 25 bp, Artificial Sequence
  Probe
tgcccccatgtctaacaacatggct

SEQ ID NO: 24268 - DNA, 26 bp, Artificial Sequence
  Probe
tgcccccatgtctaacaacatggctt

SEQ ID NO: 24269 - DNA, 27 bp, Artificial Sequence
  Probe
tgcccccatgtctaacaacatggcttt

SEQ ID NO: 24270 - DNA, 28 bp, Artificial Sequence
  Probe
tgcccccatgtctaacaacatggctttc

SEQ ID NO: 24271 - DNA, 29 bp, Artificial Sequence
  Probe
tgcccccatgtctaacaacatggctttct

SEQ ID NO: 24272 - DNA, 30 bp, Artificial Sequence; identical to SEQ ID NO: 8103
  Probe

SEQ ID NO: 24273 - DNA, 31 bp, Artificial Sequence; identical to SEQ ID NO: 8104
  Probe

SEQ ID NO: 24274 - DNA, 32 bp, Artificial Sequence; identical to SEQ ID NO: 8105
  Probe

SEQ ID NO: 24275 - DNA, 33 bp, Artificial Sequence; identical to SEQ ID NO: 8106
  Probe

SEQ ID NO: 24276 - DNA, 34 bp, Artificial Sequence; identical to SEQ ID NO: 8107
  Probe

SEQ ID NO: 24277 - DNA, 35 bp, Artificial Sequence
  Probe
tgcccccatgtctaacaacatggctttctcaactt

SEQ ID NO: 24278 - DNA, 38 bp, Artificial Sequence
  Probe
tgcccccatgtctaacaacatggctttctcaactttta

SEQ ID NO: 24279 - DNA, 17 bp, Artificial Sequence
  Probe
tgcccctcatttacata

SEQ ID NO: 24280 - DNA, 28 bp, Artificial Sequence
  Probe
tgcccctcatttacataaatattatact

SEQ ID NO: 24281 - DNA, 29 bp, Artificial Sequence
  Probe
tgcccctcatttacataaatattatacta

SEQ ID NO: 24282 - DNA, 17 bp, Artificial Sequence
  Probe
tgcccgcatcctccact

SEQ ID NO: 24283 - DNA, 18 bp, Artificial Sequence
  Probe
tgcccgcatcctccactc

SEQ ID NO: 24284 - DNA, 16 bp, Artificial Sequence
  Probe
tgcccgcatcctccag

SEQ ID NO: 24285 - DNA, 32 bp, Artificial Sequence
  Probe
tgccgaggttgtgagttcgagcctcacctgga

SEQ ID NO: 24286 - DNA, 38 bp, Artificial Sequence
  Probe
tgccgaggttgtgagttcgagcctcacctggagcattg

SEQ ID NO: 24287 - DNA, 16 bp, Artificial Sequence
  Probe
tgccgtgatcgtatag

SEQ ID NO: 24288 - DNA, 20 bp, Artificial Sequence
  Probe
tgccgtgatcgtatagtggt

SEQ ID NO: 24289 - DNA, 21 bp, Artificial Sequence
  Probe
tgccgtgatcgtatagtggtt

SEQ ID NO: 24290 - DNA, 23 bp, Artificial Sequence
  Probe
tgccgtgatcgtatagtggttag

SEQ ID NO: 24291 - DNA, 24 bp, Artificial Sequence
  Probe
tgccgtgatcgtatagtggttagt

SEQ ID NO: 24292 - DNA, 27 bp, Artificial Sequence
  Probe
tgccgtgatcgtatagtggttagtact

SEQ ID NO: 24293 - DNA, 29 bp, Artificial Sequence
  Probe
tgccgtgatcgtatagtggttagtactct

SEQ ID NO: 24294 - DNA, 30 bp, Artificial Sequence; identical to SEQ ID NO: 12089
  Probe

SEQ ID NO: 24295 - DNA, 31 bp, Artificial Sequence; identical to SEQ ID NO: 8115
  Probe

SEQ ID NO: 24296 - DNA, 32 bp, Artificial Sequence; identical to SEQ ID NO: 8116
  Probe

SEQ ID NO: 24297 - DNA, 33 bp, Artificial Sequence; identical to SEQ ID NO: 1754
  Probe

SEQ ID NO: 24298 - DNA, 34 bp, Artificial Sequence; identical to SEQ ID NO: 8117
  Probe

SEQ ID NO: 24299 - DNA, 35 bp, Artificial Sequence; identical to SEQ ID NO: 1755
  Probe

SEQ ID NO: 24300 - DNA, 36 bp, Artificial Sequence; identical to SEQ ID NO: 1756
  Probe

SEQ ID NO: 24301 - DNA, 37 bp, Artificial Sequence; identical to SEQ ID NO: 1757
  Probe

SEQ ID NO: 24302 - DNA, 38 bp, Artificial Sequence; identical to SEQ ID NO: 8118
  Probe

SEQ ID NO: 24303 - DNA, 40 bp, Artificial Sequence
  Probe
tgccgtgatcgtatagtggttagtactctgcgttgtggcc

SEQ ID NO: 24304 - DNA, 41 bp, Artificial Sequence
  Probe
tgccgtgatcgtatagtggttagtactctgcgttgtggccg

SEQ ID NO: 24305 - DNA, 41 bp, Artificial Sequence
  Probe
tgcctgtcacgcgggagaccggggttcgattccccaacggg

SEQ ID NO: 24306 - DNA, 30 bp, Artificial Sequence
  Probe
tgcgaaactactttcttgattcaggtgttt

SEQ ID NO: 24307 - DNA, 31 bp, Artificial Sequence
  Probe
tgcgacccgggttcgattcccgggcggcgca

SEQ ID NO: 24308 - DNA, 34 bp, Artificial Sequence; identical to SEQ ID NO: 8119
  Probe

SEQ ID NO: 24309 - DNA, 32 bp, Artificial Sequence
  Probe
tgcgagaggtcccgggttcaaatcccggacga

SEQ ID NO: 24310 - DNA, 34 bp, Artificial Sequence
  Probe
tgcgagaggtcccgggttcaaatcccggacgagc

SEQ ID NO: 24311 - DNA, 36 bp, Artificial Sequence
  Probe
tgcgagaggtcccgggttcaaatcccggacgagccc

SEQ ID NO: 24312 - DNA, 38 bp, Artificial Sequence
  Probe
tgcgagaggtcccgggttcaaatcccggacgagccccc

SEQ ID NO: 24313 - DNA, 39 bp, Artificial Sequence; identical to SEQ ID NO: 8121
  Probe

SEQ ID NO: 24314 - DNA, 42 bp, Artificial Sequence
  Probe
tgcgttcagttgatgcagagtggggttttgcagtccttagct

SEQ ID NO: 24315 - DNA, 17 bp, Artificial Sequence
  Probe
tgctaactcatgccccc

SEQ ID NO: 24316 - DNA, 22 bp, Artificial Sequence
  Probe
tgctaactcatgcccccatgtc

SEQ ID NO: 24317 - DNA, 23 bp, Artificial Sequence
  Probe
tgctaactcatgcccccatgtct

SEQ ID NO: 24318 - DNA, 27 bp, Artificial Sequence
  Probe
tgctaactcatgcccccatgtctaaca

SEQ ID NO: 24319 - DNA, 36 bp, Artificial Sequence; identical to SEQ ID NO: 8127
  Probe

SEQ ID NO: 24320 - DNA, 37 bp, Artificial Sequence; identical to SEQ ID NO: 8128
  Probe

SEQ ID NO: 24321 - DNA, 38 bp, Artificial Sequence; identical to SEQ ID NO: 8129
  Probe

SEQ ID NO: 24322 - DNA, 39 bp, Artificial Sequence; identical to SEQ ID NO: 8130
  Probe

SEQ ID NO: 24323 - DNA, 40 bp, Artificial Sequence; identical to SEQ ID NO: 8131
  Probe

SEQ ID NO: 24324 - DNA, 41 bp, Artificial Sequence; identical to SEQ ID NO: 8132
  Probe

SEQ ID NO: 24325 - DNA, 42 bp, Artificial Sequence
  Probe
tgctaactcatgcccccatgtctaacaacatggctttctcaa

SEQ ID NO: 24326 - DNA, 43 bp, Artificial Sequence; identical to SEQ ID NO: 8133
  Probe

SEQ ID NO: 24327 - DNA, 44 bp, Artificial Sequence; identical to SEQ ID NO: 8134
  Probe

SEQ ID NO: 24328 - DNA, 25 bp, Artificial Sequence
  Probe
tgctaataacgccaaggtcgcgggt

SEQ ID NO: 24329 - DNA, 21 bp, Artificial Sequence
  Probe
tgctaatggtggagttaaaga

SEQ ID NO: 24330 - DNA, 36 bp, Artificial Sequence; identical to SEQ ID NO: 8139
  Probe

SEQ ID NO: 24331 - DNA, 38 bp, Artificial Sequence; identical to SEQ ID NO: 8140
  Probe

SEQ ID NO: 24332 - DNA, 39 bp, Artificial Sequence; identical to SEQ ID NO: 8141
  Probe

SEQ ID NO: 24333 - DNA, 40 bp, Artificial Sequence; identical to SEQ ID NO: 8142
  Probe

SEQ ID NO: 24334 - DNA, 41 bp, Artificial Sequence; identical to SEQ ID NO: 8143
  Probe

SEQ ID NO: 24335 - DNA, 42 bp, Artificial Sequence; identical to SEQ ID NO: 8144
  Probe

SEQ ID NO: 24336 - DNA, 43 bp, Artificial Sequence; identical to SEQ ID NO: 8145
  Probe

SEQ ID NO: 24337 - DNA, 44 bp, Artificial Sequence; identical to SEQ ID NO: 8146
  Probe

SEQ ID NO: 24338 - DNA, 16 bp, Artificial Sequence
  Probe
tgctatcggagttttt

SEQ ID NO: 24339 - DNA, 23 bp, Artificial Sequence
  Probe
tggaaagtgcacttggacgaacc

SEQ ID NO: 24340 - DNA, 43 bp, Artificial Sequence
  Probe
tggactgtaaatctaaagacaggggttaggcctctttttacca

SEQ ID NO: 24341 - DNA, 46 bp, Artificial Sequence; identical to SEQ ID NO: 8148
  Probe

SEQ ID NO: 24342 - DNA, 26 bp, Artificial Sequence
  Probe
tggagttaaagactttttctctgatt

SEQ ID NO: 24343 - DNA, 27 bp, Artificial Sequence
  Probe
tggagttaaagactttttctctgattt

SEQ ID NO: 24344 - DNA, 41 bp, Artificial Sequence
  Probe
tggattctcagggatgggttcgattctcatagtcctagaaa

SEQ ID NO: 24345 - DNA, 20 bp, Artificial Sequence
  Probe
tggcccaacccgtcatctac

SEQ ID NO: 24346 - DNA, 23 bp, Artificial Sequence
  Probe
tggcccgggttcgactcccggta

SEQ ID NO: 24347 - DNA, 30 bp, Artificial Sequence
  Probe
tggcccgggttcgactcccggtatgggaac

SEQ ID NO: 24348 - DNA, 32 bp, Artificial Sequence; identical to SEQ ID NO: 8153
  Probe

SEQ ID NO: 24349 - DNA, 31 bp, Artificial Sequence
  Probe
tggccgcccggctagctcagtcggtagagca

SEQ ID NO: 24350 - DNA, 16 bp, Artificial Sequence
  Probe
tggctaggattcggcg

SEQ ID NO: 24351 - DNA, 34 bp, Artificial Sequence
  Probe
tggctaggattcggcgctttcaccgccgcggccc

SEQ ID NO: 24352 - DNA, 23 bp, Artificial Sequence
  Probe
tggctggctcgcgatgtctgttt

SEQ ID NO: 24353 - DNA, 24 bp, Artificial Sequence
  Probe
tggctggctcgcgatgtctgtttt

SEQ ID NO: 24354 - DNA, 30 bp, Artificial Sequence
  Probe
tgggcccataacccagaggtcgatggatcg

SEQ ID NO: 24355 - DNA, 29 bp, Artificial Sequence
  Probe
tggggttcctcgcagcttcgctgcgtgag

SEQ ID NO: 24356 - DNA, 20 bp, Artificial Sequence
  Probe
tggggtttccccgcacaggt

SEQ ID NO: 24357 - DNA, 20 bp, Artificial Sequence
  Probe
tggggtttccccgcgcaggt

SEQ ID NO: 24358 - DNA, 22 bp, Artificial Sequence
  Probe
tggggtttccccgcgcaggttc

SEQ ID NO: 24359 - DNA, 22 bp, Artificial Sequence
  Probe
tggggttttgcagtccttagct

SEQ ID NO: 24360 - DNA, 21 bp, Artificial Sequence
  Probe
tgggtgcgagaggtcccgggt

SEQ ID NO: 24361 - DNA, 22 bp, Artificial Sequence
  Probe
tgggtgcgagaggtcccgggtt

SEQ ID NO: 24362 - DNA, 40 bp, Artificial Sequence; identical to SEQ ID NO: 8164
  Probe

SEQ ID NO: 24363 - DNA, 24 bp, Artificial Sequence
  Probe
tgggtggttcagtggtagaattct

SEQ ID NO: 24364 - DNA, 27 bp, Artificial Sequence
  Probe
tgggtggttcagtggtagaattctcgc

SEQ ID NO: 24365 - DNA, 27 bp, Artificial Sequence
  Probe
tgggttcgagccccacgttgggcggca

SEQ ID NO: 24366 - DNA, 25 bp, Artificial Sequence
  Probe
tgggttcgattctcatagtcctaga

SEQ ID NO: 24367 - DNA, 34 bp, Artificial Sequence
  Probe
tggtaagcatagctgccttccaagcagttgaccc

SEQ ID NO: 24368 - DNA, 16 bp, Artificial Sequence
  Probe
tggtagaattctcgcc

SEQ ID NO: 24369 - DNA, 17 bp, Artificial Sequence
  Probe
tggtagaattctcgcct

SEQ ID NO: 24370 - DNA, 18 bp, Artificial Sequence
  Probe
tggtagaattctcgcctg

SEQ ID NO: 24371 - DNA, 19 bp, Artificial Sequence
  Probe
tggtagaattctcgcctgc

SEQ ID NO: 24372 - DNA, 20 bp, Artificial Sequence
  Probe
tggtagaattctcgcctgcc

SEQ ID NO: 24373 - DNA, 21 bp, Artificial Sequence
  Probe
tggtagaattctcgcctgcca

SEQ ID NO: 24374 - DNA, 22 bp, Artificial Sequence
  Probe
tggtagaattctcgcctgccac

SEQ ID NO: 24375 - DNA, 34 bp, Artificial Sequence
  Probe
tggtagaattctcgcctgccacgcgggaggcccg

SEQ ID NO: 24376 - DNA, 37 bp, Artificial Sequence
  Probe
tggtagaattctcgcctgccacgcgggaggcccgggt

SEQ ID NO: 24377 - DNA, 38 bp, Artificial Sequence
  Probe
tggtagaattctcgcctgccacgcgggaggcccgggtt

SEQ ID NO: 24378 - DNA, 17 bp, Artificial Sequence
  Probe
tggtatagtggtgagca

SEQ ID NO: 24379 - DNA, 23 bp, Artificial Sequence
  Probe
tggtatagtggtgagcatagctg

SEQ ID NO: 24380 - DNA, 24 bp, Artificial Sequence
  Probe
tggtatagtggtgagcatagctgc

SEQ ID NO: 24381 - DNA, 28 bp, Artificial Sequence
  Probe
tggtatagtggtgagcatagctgccttc

SEQ ID NO: 24382 - DNA, 29 bp, Artificial Sequence
  Probe
tggtatagtggtgagcatagctgccttcc

SEQ ID NO: 24383 - DNA, 42 bp, Artificial Sequence
  Probe
tggtatagtggtgagcatagctgccttccaagcagttgaccc

SEQ ID NO: 24384 - DNA, 23 bp, Artificial Sequence
  Probe
tggtatagtggttagcatagctg

SEQ ID NO: 24385 - DNA, 34 bp, Artificial Sequence
  Probe
tggtatagtggttagcatagctgccttccaagca

SEQ ID NO: 24386 - DNA, 42 bp, Artificial Sequence; identical to SEQ ID NO: 1770
  Probe

SEQ ID NO: 24387 - DNA, 28 bp, Artificial Sequence
  Probe
tggtatatagtttaaacaaaacgaatga

SEQ ID NO: 24388 - DNA, 30 bp, Artificial Sequence
  Probe
tggtatatagtttaaacaaaacgaatgatt

SEQ ID NO: 24389 - DNA, 36 bp, Artificial Sequence; identical to SEQ ID NO: 1771
  Probe

SEQ ID NO: 24390 - DNA, 37 bp, Artificial Sequence; identical to SEQ ID NO: 1772
  Probe

SEQ ID NO: 24391 - DNA, 39 bp, Artificial Sequence
  Probe
tggtatatagtttaaacaaaacgaatgatttcgactcat

SEQ ID NO: 24392 - DNA, 50 bp, Artificial Sequence; identical to SEQ ID NO: 1773
  Probe

SEQ ID NO: 24393 - DNA, 33 bp, Artificial Sequence
  Probe
tggtatcatgcaagattcccattcttgcgaccc

SEQ ID NO: 24394 - DNA, 16 bp, Artificial Sequence
  Probe
tggtatgattctcgct

SEQ ID NO: 24395 - DNA, 34 bp, Artificial Sequence
  Probe
tggtatgattctcgctttgggtgcgagaggtccc

SEQ ID NO: 24396 - DNA, 38 bp, Artificial Sequence
  Probe
tggtatgattctcgctttgggtgcgagaggtcccgggt

SEQ ID NO: 24397 - DNA, 23 bp, Artificial Sequence
  Probe
tggtcgtggttgtagtccgtgcg

SEQ ID NO: 24398 - DNA, 25 bp, Artificial Sequence
  Probe
tggtcgtggttgtagtccgtgcgag

SEQ ID NO: 24399 - DNA, 26 bp, Artificial Sequence
  Probe
tggtcgtggttgtagtccgtgcgaga

SEQ ID NO: 24400 - DNA, 27 bp, Artificial Sequence
  Probe
tggtcgtggttgtagtccgtgcgagaa

SEQ ID NO: 24401 - DNA, 30 bp, Artificial Sequence; identical to SEQ ID NO: 12156
  Probe

SEQ ID NO: 24402 - DNA, 32 bp, Artificial Sequence; identical to SEQ ID NO: 8180
  Probe

SEQ ID NO: 24403 - DNA, 24 bp, Artificial Sequence
  Probe
tggtctagcggttaggattcctgg

SEQ ID NO: 24404 - DNA, 24 bp, Artificial Sequence
  Probe
tggtctaggggtatgattctcgct

SEQ ID NO: 24405 - DNA, 24 bp, Artificial Sequence
  Probe
tggtctagtggctaggattcggcg

SEQ ID NO: 24406 - DNA, 19 bp, Artificial Sequence
  Probe
tggtctagtggttaggatt

SEQ ID NO: 24407 - DNA, 23 bp, Artificial Sequence
  Probe
tggtctagtggttaggattcggc

SEQ ID NO: 24408 - DNA, 25 bp, Artificial Sequence
  Probe
tggtctagtggttaggattcggcgc

SEQ ID NO: 24409 - DNA, 28 bp, Artificial Sequence
  Probe
tggtctagtggttaggattcggcgctct

SEQ ID NO: 24410 - DNA, 29 bp, Artificial Sequence
  Probe
tggtctagtggttaggattcggcgctctc

SEQ ID NO: 24411 - DNA, 31 bp, Artificial Sequence
  Probe
tggtctagtggttaggattcggcgctctcac

SEQ ID NO: 24412 - DNA, 42 bp, Artificial Sequence
  Probe
tggtctagtggttaggattcggcgctctcaccgccgcggccc

SEQ ID NO: 24413 - DNA, 22 bp, Artificial Sequence
  Probe
tggtctccggatggaggcgtgg

SEQ ID NO: 24414 - DNA, 38 bp, Artificial Sequence
  Probe
tggtgagcatagctgccttccaagcagttgacccgggt

SEQ ID NO: 24415 - DNA, 16 bp, Artificial Sequence
  Probe
tggtgagtatccccgc

SEQ ID NO: 24416 - DNA, 20 bp, Artificial Sequence
  Probe
tggtgagtatccccgcctgt

SEQ ID NO: 24417 - DNA, 33 bp, Artificial Sequence
  Probe
tggtgagtatccccgcctgtcacgcgggagacc

SEQ ID NO: 24418 - DNA, 36 bp, Artificial Sequence
  Probe
tggtgagtatccccgcctgtcacgcgggagaccggg

SEQ ID NO: 24419 - DNA, 28 bp, Artificial Sequence
  Probe
tggtgctaataacgccaaggtcgcgggt

SEQ ID NO: 24420 - DNA, 30 bp, Artificial Sequence
  Probe
tggtggagttaaagactttttctctgattt

SEQ ID NO: 24421 - DNA, 36 bp, Artificial Sequence
  Probe
tggtggctccgtggcttagctggttaaagcgcctgt

SEQ ID NO: 24422 - DNA, 33 bp, Artificial Sequence
  Probe
tggtggtctagtggctaggattcggcgctttca

SEQ ID NO: 24423 - DNA, 24 bp, Artificial Sequence
  Probe
tggtggtctagtggttaggattcg

SEQ ID NO: 24424 - DNA, 25 bp, Artificial Sequence
  Probe
tggtggtctagtggttaggattcgg

SEQ ID NO: 24425 - DNA, 26 bp, Artificial Sequence
  Probe
tggtggtctagtggttaggattcggc

SEQ ID NO: 24426 - DNA, 28 bp, Artificial Sequence
  Probe
tggtggtctagtggttaggattcggcgc

SEQ ID NO: 24427 - DNA, 23 bp, Artificial Sequence
  Probe
tggtggttcagtggtagaattct

SEQ ID NO: 24428 - DNA, 27 bp, Artificial Sequence
  Probe
tggtggttcagtggtagaattctcgcc

SEQ ID NO: 24429 - DNA, 28 bp, Artificial Sequence
  Probe
tggtggttcagtggtagaattctcgcct

SEQ ID NO: 24430 - DNA, 29 bp, Artificial Sequence
  Probe
tggtggttcagtggtagaattctcgcctg

SEQ ID NO: 24431 - DNA, 30 bp, Artificial Sequence; identical to SEQ ID NO: 8196
  Probe

SEQ ID NO: 24432 - DNA, 31 bp, Artificial Sequence; identical to SEQ ID NO: 8197
  Probe

SEQ ID NO: 24433 - DNA, 20 bp, Artificial Sequence
  Probe
tggtgtagtggtatcatgca

SEQ ID NO: 24434 - DNA, 21 bp, Artificial Sequence
  Probe
tggtgtagtggtatcatgcaa

SEQ ID NO: 24435 - DNA, 25 bp, Artificial Sequence
  Probe
tggtgtagtggtatcatgcaagatt

SEQ ID NO: 24436 - DNA, 27 bp, Artificial Sequence
  Probe
tggtgtagtggtatcatgcaagattcc

SEQ ID NO: 24437 - DNA, 28 bp, Artificial Sequence
  Probe
tggtgtagtggtatcatgcaagattccc

SEQ ID NO: 24438 - DNA, 16 bp, Artificial Sequence
  Probe
tggttagcactctgga

SEQ ID NO: 24439 - DNA, 18 bp, Artificial Sequence
  Probe
tggttagcactctggact

SEQ ID NO: 24440 - DNA, 34 bp, Artificial Sequence
  Probe
tggttagcactctggactctgaatccagcgatcc

SEQ ID NO: 24441 - DNA, 38 bp, Artificial Sequence
  Probe
tggttagcactctggactctgaatccagcgatccgagt

SEQ ID NO: 24442 - DNA, 38 bp, Artificial Sequence
  Probe
tggttagcatagctgccttccaagcagttgacccgggt

SEQ ID NO: 24443 - DNA, 21 bp, Artificial Sequence
  Probe
tggttaggattcggcgctctc

SEQ ID NO: 24444 - DNA, 30 bp, Artificial Sequence
  Probe
tggttaggattcggcgctctcaccgccgcg

SEQ ID NO: 24445 - DNA, 31 bp, Artificial Sequence
  Probe
tggttaggattcggcgctctcaccgccgcgg

SEQ ID NO: 24446 - DNA, 33 bp, Artificial Sequence
  Probe
tggttaggattcggcgctctcaccgccgcggcc

SEQ ID NO: 24447 - DNA, 35 bp, Artificial Sequence
  Probe
tggttaggattcggcgctctcaccgccgcggcccg

SEQ ID NO: 24448 - DNA, 38 bp, Artificial Sequence
  Probe
tggttaggattcggcgctctcaccgccgcggcccgggt

SEQ ID NO: 24449 - DNA, 16 bp, Artificial Sequence
  Probe
tggttagtactctgcg

SEQ ID NO: 24450 - DNA, 19 bp, Artificial Sequence
  Probe
tggttagtactctgcgttg

SEQ ID NO: 24451 - DNA, 38 bp, Artificial Sequence
  Probe
tggttagtatccccgcctgtcacgcgggagaccggggt

SEQ ID NO: 24452 - DNA, 25 bp, Artificial Sequence
  Probe
tggttatacccttcccgtactaatt

SEQ ID NO: 24453 - DNA, 39 bp, Artificial Sequence
  Probe
tggttatcacgtctgctttacacgcagaaggtcctgggt

SEQ ID NO: 24454 - DNA, 16 bp, Artificial Sequence
  Probe
tggttcagtggtagaa

SEQ ID NO: 24455 - DNA, 19 bp, Artificial Sequence
  Probe
tggttcagtggtagaattc

SEQ ID NO: 24456 - DNA, 20 bp, Artificial Sequence
  Probe
tggttcagtggtagaattct

SEQ ID NO: 24457 - DNA, 22 bp, Artificial Sequence
  Probe
tggttcagtggtagaattctcg

SEQ ID NO: 24458 - DNA, 23 bp, Artificial Sequence
  Probe
tggttcagtggtagaattctcgc

SEQ ID NO: 24459 - DNA, 24 bp, Artificial Sequence
  Probe
tggttcagtggtagaattctcgcc

SEQ ID NO: 24460 - DNA, 25 bp, Artificial Sequence
  Probe
tggttcagtggtagaattctcgcct

SEQ ID NO: 24461 - DNA, 26 bp, Artificial Sequence
  Probe
tggttcagtggtagaattctcgcctg

SEQ ID NO: 24462 - DNA, 27 bp, Artificial Sequence
  Probe
tggttcagtggtagaattctcgcctgc

SEQ ID NO: 24463 - DNA, 28 bp, Artificial Sequence
  Probe
tggttcagtggtagaattctcgcctgcc

SEQ ID NO: 24464 - DNA, 32 bp, Artificial Sequence
  Probe
tggttcagtggtagaattctcgcctgccacgc

SEQ ID NO: 24465 - DNA, 33 bp, Artificial Sequence
  Probe
tggttcagtggtagaattctcgcctgccacgcg

SEQ ID NO: 24466 - DNA, 41 bp, Artificial Sequence; identical to SEQ ID NO: 8211
  Probe

SEQ ID NO: 24467 - DNA, 50 bp, Artificial Sequence; identical to SEQ ID NO: 8215
  Probe

SEQ ID NO: 24468 - DNA, 24 bp, Artificial Sequence
  Probe
tggttgtagtccgtgcgagaataa

SEQ ID NO: 24469 - DNA, 26 bp, Artificial Sequence
  Probe
tggttgtagtccgtgcgagaataatg

SEQ ID NO: 24470 - DNA, 21 bp, Artificial Sequence
  Probe
tgtaaacaggagatcctgggt

SEQ ID NO: 24471 - DNA, 38 bp, Artificial Sequence; identical to SEQ ID NO: 8222
  Probe

SEQ ID NO: 24472 - DNA, 27 bp, Artificial Sequence
  Probe
tgtaaatatagtttaaccaaaacatca

SEQ ID NO: 24473 - DNA, 29 bp, Artificial Sequence
  Probe
tgtaaatatagtttaaccaaaacatcaga

SEQ ID NO: 24474 - DNA, 33 bp, Artificial Sequence; identical to SEQ ID NO: 8227
  Probe

SEQ ID NO: 24475 - DNA, 43 bp, Artificial Sequence; identical to SEQ ID NO: 8233
  Probe

SEQ ID NO: 24476 - DNA, 44 bp, Artificial Sequence; identical to SEQ ID NO: 8234
  Probe

SEQ ID NO: 24477 - DNA, 46 bp, Artificial Sequence; identical to SEQ ID NO: 8236
  Probe

SEQ ID NO: 24478 - DNA, 50 bp, Artificial Sequence; identical to SEQ ID NO: 8238
  Probe

SEQ ID NO: 24479 - DNA, 39 bp, Artificial Sequence; identical to SEQ ID NO: 8240
  Probe

SEQ ID NO: 24480 - DNA, 18 bp, Artificial Sequence
  Probe
tgtagcggttatcacatt

SEQ ID NO: 24481 - DNA, 19 bp, Artificial Sequence
  Probe
tgtagtccgtgcgagaata

SEQ ID NO: 24482 - DNA, 20 bp, Artificial Sequence
  Probe
tgtagtccgtgcgagaataa

SEQ ID NO: 24483 - DNA, 22 bp, Artificial Sequence
  Probe
tgtagtccgtgcgagaataatg

SEQ ID NO: 24484 - DNA, 40 bp, Artificial Sequence
  Probe
tgtagtggtatcatgcaagattcccattcttgcgacccgg

SEQ ID NO: 24485 - DNA, 18 bp, Artificial Sequence
  Probe
tgtagtggttatcacgtt

SEQ ID NO: 24486 - DNA, 34 bp, Artificial Sequence
  Probe
tgtatgaggccccgggttcgatccccggcatctc

SEQ ID NO: 24487 - DNA, 36 bp, Artificial Sequence
  Probe
tgtatgaggccccgggttcgatccccggcatctcca

SEQ ID NO: 24488 - DNA, 39 bp, Artificial Sequence
  Probe
tgtatgaggccccgggttcgatccccggcatctccagtg

SEQ ID NO: 24489 - DNA, 38 bp, Artificial Sequence
  Probe
tgtatgaggccccgggttcgatccccggcatctccatt

SEQ ID NO: 24490 - DNA, 39 bp, Artificial Sequence
  Probe
tgtatgaggccccgggttcgatccccggcatctccattg

SEQ ID NO: 24491 - DNA, 45 bp, Artificial Sequence
  Probe
tgtatgaggccccgggttcgatccccggcatctccattgtagttt

SEQ ID NO: 24492 - DNA, 50 bp, Artificial Sequence
  Probe
tgtatgaggccccgggttcgatccccggcatctccattgtagttttgttg

SEQ ID NO: 24493 - DNA, 39 bp, Artificial Sequence
  Probe
tgtatgaggcctcgggttcgatccccgacacctccaagc

SEQ ID NO: 24494 - DNA, 39 bp, Artificial Sequence
  Probe
tgtatgaggtcccgggttcgatccccggcacctccaaac

SEQ ID NO: 24495 - DNA, 36 bp, Artificial Sequence
  Probe
tgtatgaggtcccgggttcgatccccggcatctcca

SEQ ID NO: 24496 - DNA, 38 bp, Artificial Sequence
  Probe
tgtatgaggtcccgggttcgatccccggcatctccaag

SEQ ID NO: 24497 - DNA, 39 bp, Artificial Sequence; identical to SEQ ID NO: 8248
  Probe

SEQ ID NO: 24498 - DNA, 38 bp, Artificial Sequence
  Probe
tgtatgaggtcccgggttcgatccccggcatctccaat

SEQ ID NO: 24499 - DNA, 39 bp, Artificial Sequence
  Probe
tgtatgaggtcccgggttcgatccccggcatctccaata

SEQ ID NO: 24500 - DNA, 31 bp, Artificial Sequence; identical to SEQ ID NO: 8251
  Probe

SEQ ID NO: 24501 - DNA, 37 bp, Artificial Sequence; identical to SEQ ID NO: 8252
  Probe

SEQ ID NO: 24502 - DNA, 34 bp, Artificial Sequence
  Probe
tgtcaaagttaaattataggctaaatcctatata

SEQ ID NO: 24503 - DNA, 16 bp, Artificial Sequence
  Probe
tgtcacgcgggagacc

SEQ ID NO: 24504 - DNA, 18 bp, Artificial Sequence
  Probe
tgtcacgcgggagaccgg

SEQ ID NO: 24505 - DNA, 20 bp, Artificial Sequence
  Probe
tgtcacgcgggagaccgggg

SEQ ID NO: 24506 - DNA, 23 bp, Artificial Sequence
  Probe
tgtcacgcgggagaccggggttc

SEQ ID NO: 24507 - DNA, 24 bp, Artificial Sequence
  Probe
tgtcacgcgggagaccggggttca

SEQ ID NO: 24508 - DNA, 25 bp, Artificial Sequence
  Probe
tgtcacgcgggagaccggggttcaa

SEQ ID NO: 24509 - DNA, 38 bp, Artificial Sequence
  Probe
tgtcacgcgggagaccggggttcaattccccgacgggg

SEQ ID NO: 24510 - DNA, 39 bp, Artificial Sequence
  Probe
tgtcacgcgggagaccggggttcaattccccgacgggga

SEQ ID NO: 24511 - DNA, 43 bp, Artificial Sequence; identical to SEQ ID NO: 8254
  Probe

SEQ ID NO: 24512 - DNA, 24 bp, Artificial Sequence
  Probe
tgtcacgcgggagaccggggttcg

SEQ ID NO: 24513 - DNA, 25 bp, Artificial Sequence
  Probe
tgtcacgcgggagaccggggttcga

SEQ ID NO: 24514 - DNA, 26 bp, Artificial Sequence
  Probe
tgtcacgcgggagaccggggttcgat

SEQ ID NO: 24515 - DNA, 27 bp, Artificial Sequence
  Probe
tgtcacgcgggagaccggggttcgatt

SEQ ID NO: 24516 - DNA, 39 bp, Artificial Sequence
  Probe
tgtcacgcgggagaccggggttcgattccccgacgggga

SEQ ID NO: 24517 - DNA, 41 bp, Artificial Sequence
  Probe
tgtcacgcgggagaccggggttcgattccccgacggggaga

SEQ ID NO: 24518 - DNA, 43 bp, Artificial Sequence
  Probe
tgtcacgcgggagaccggggttcgattccccgacggggagaaa

SEQ ID NO: 24519 - DNA, 43 bp, Artificial Sequence
  Probe
tgtcacgcgggagaccggggttcgattccccgacggggagacg

SEQ ID NO: 24520 - DNA, 43 bp, Artificial Sequence; identical to SEQ ID NO: 8255
  Probe

SEQ ID NO: 24521 - DNA, 41 bp, Artificial Sequence
  Probe
tgtcacgcgggagaccggggttcgattccccgacggggagg

SEQ ID NO: 24522 - DNA, 42 bp, Artificial Sequence
  Probe
tgtcacgcgggagaccggggttcgattccccgacggggaggc

SEQ ID NO: 24523 - DNA, 43 bp, Artificial Sequence; identical to SEQ ID NO: 8257
  Probe

SEQ ID NO: 24524 - DNA, 49 bp, Artificial Sequence; identical to SEQ ID NO: 8258
  Probe

SEQ ID NO: 24525 - DNA, 50 bp, Artificial Sequence; identical to SEQ ID NO: 8259
  Probe

SEQ ID NO: 24526 - DNA, 43 bp, Artificial Sequence
  Probe
tgtcacgcgggagaccggggttcgattccccgacggggaggcc

SEQ ID NO: 24527 - DNA, 50 bp, Artificial Sequence
  Probe
tgtcacgcgggagaccggggttcgattccccgacggggaggccaagtacg

SEQ ID NO: 24528 - DNA, 25 bp, Artificial Sequence
  Probe
tgtctaacaacatggctttctcaac

SEQ ID NO: 24529 - DNA, 29 bp, Artificial Sequence
  Probe
tgtgaatctgacaacagaggcttacgacc

SEQ ID NO: 24530 - DNA, 30 bp, Artificial Sequence
  Probe
tgtgaatctgacaacagaggcttacgaccc

SEQ ID NO: 24531 - DNA, 40 bp, Artificial Sequence
  Probe
tgtgaatctgacaacagaggcttacgaccccttatttacc

SEQ ID NO: 24532 - DNA, 41 bp, Artificial Sequence; identical to SEQ ID NO: 8269
  Probe

SEQ ID NO: 24533 - DNA, 42 bp, Artificial Sequence; identical to SEQ ID NO: 8270
  Probe

SEQ ID NO: 24534 - DNA, 43 bp, Artificial Sequence; identical to SEQ ID NO: 8271
  Probe

SEQ ID NO: 24535 - DNA, 18 bp, Artificial Sequence
  Probe
tgtgctccggagttacct

SEQ ID NO: 24536 - DNA, 20 bp, Artificial Sequence
  Probe
tgtgctccggagttacctcg

SEQ ID NO: 24537 - DNA, 21 bp, Artificial Sequence
  Probe
tgtgctccggagttacctcgt

SEQ ID NO: 24538 - DNA, 22 bp, Artificial Sequence
  Probe
tgtgctccggagttacctcgtt

SEQ ID NO: 24539 - DNA, 23 bp, Artificial Sequence
  Probe
tgtgctccggagttacctcgttt

SEQ ID NO: 24540 - DNA, 24 bp, Artificial Sequence
  Probe
tgtgctccggagttacctcgtttt

SEQ ID NO: 24541 - DNA, 25 bp, Artificial Sequence
  Probe
tgtgctccggagttacctcgttttg

SEQ ID NO: 24542 - DNA, 16 bp, Artificial Sequence
  Probe
tgtggccgcagcaacc

SEQ ID NO: 24543 - DNA, 18 bp, Artificial Sequence
  Probe
tgtgtcaggatggccgag

SEQ ID NO: 24544 - DNA, 38 bp, Artificial Sequence
  Probe
tgttaactaagtgtttgtgggtttaagtcccattggtc

SEQ ID NO: 24545 - DNA, 39 bp, Artificial Sequence
  Probe
tgttaactaagtgtttgtgggtttaagtcccattggtct

SEQ ID NO: 24546 - DNA, 42 bp, Artificial Sequence
  Probe
tgttaactaagtgtttgtgggtttaagtcccattggtctagt

SEQ ID NO: 24547 - DNA, 43 bp, Artificial Sequence; identical to SEQ ID NO: 8277
  Probe

SEQ ID NO: 24548 - DNA, 44 bp, Artificial Sequence; identical to SEQ ID NO: 8278
  Probe

SEQ ID NO: 24549 - DNA, 16 bp, Artificial Sequence
  Probe
tgtttagacgggctca

SEQ ID NO: 24550 - DNA, 18 bp, Artificial Sequence
  Probe
tgtttagacgggctcaca

SEQ ID NO: 24551 - DNA, 19 bp, Artificial Sequence
  Probe
tgtttagacgggctcacat

SEQ ID NO: 24552 - DNA, 21 bp, Artificial Sequence
  Probe
tgtttagacgggctcacatca

SEQ ID NO: 24553 - DNA, 26 bp, Artificial Sequence
  Probe
tgtttagacgggctcacatcacccca

SEQ ID NO: 24554 - DNA, 29 bp, Artificial Sequence
  Probe
tgtttagacgggctcacatcaccccataa

SEQ ID NO: 24555 - DNA, 34 bp, Artificial Sequence; identical to SEQ ID NO: 8288
  Probe

SEQ ID NO: 24556 - DNA, 35 bp, Artificial Sequence; identical to SEQ ID NO: 8289
  Probe

SEQ ID NO: 24557 - DNA, 36 bp, Artificial Sequence; identical to SEQ ID NO: 8290
  Probe

SEQ ID NO: 24558 - DNA, 25 bp, Artificial Sequence
  Probe
tgtttgtgggtttaagtcccattgg

SEQ ID NO: 24559 - DNA, 27 bp, Artificial Sequence
  Probe
tgtttgtgggtttaagtcccattggtc

SEQ ID NO: 24560 - DNA, 28 bp, Artificial Sequence
  Probe
tgtttgtgggtttaagtcccattggtct

SEQ ID NO: 24561 - DNA, 29 bp, Artificial Sequence
  Probe
tgtttgtgggtttaagtcccattggtcta

SEQ ID NO: 24562 - DNA, 31 bp, Artificial Sequence; identical to SEQ ID NO: 8293
  Probe

SEQ ID NO: 24563 - DNA, 32 bp, Artificial Sequence; identical to SEQ ID NO: 8294
  Probe

SEQ ID NO: 24564 - DNA, 36 bp, Artificial Sequence
  Probe
ttaaagattaagagaaccaacacctctttacagtga

SEQ ID NO: 24565 - DNA, 39 bp, Artificial Sequence; identical to SEQ ID NO: 8298
  Probe

SEQ ID NO: 24566 - DNA, 17 bp, Artificial Sequence
  Probe
ttaacacaaagcaccca

SEQ ID NO: 24567 - DNA, 31 bp, Artificial Sequence; identical to SEQ ID NO: 8301
  Probe

SEQ ID NO: 24568 - DNA, 32 bp, Artificial Sequence; identical to SEQ ID NO: 8302
  Probe

SEQ ID NO: 24569 - DNA, 33 bp, Artificial Sequence; identical to SEQ ID NO: 8303
  Probe

SEQ ID NO: 24570 - DNA, 34 bp, Artificial Sequence; identical to SEQ ID NO: 8304
  Probe

SEQ ID NO: 24571 - DNA, 35 bp, Artificial Sequence
  Probe
ttaaccaaaacatcagattgtgaatctgacaacag

SEQ ID NO: 24572 - DNA, 37 bp, Artificial Sequence; identical to SEQ ID NO: 1786
  Probe

SEQ ID NO: 24573 - DNA, 32 bp, Artificial Sequence; identical to SEQ ID NO: 8314
  Probe

SEQ ID NO: 24574 - DNA, 36 bp, Artificial Sequence; identical to SEQ ID NO: 1789
  Probe

SEQ ID NO: 24575 - DNA, 37 bp, Artificial Sequence; identical to SEQ ID NO: 1790
  Probe

SEQ ID NO: 24576 - DNA, 38 bp, Artificial Sequence; identical to SEQ ID NO: 1791
  Probe

SEQ ID NO: 24577 - DNA, 40 bp, Artificial Sequence; identical to SEQ ID NO: 8317
  Probe

SEQ ID NO: 24578 - DNA, 41 bp, Artificial Sequence; identical to SEQ ID NO: 8318
  Probe

SEQ ID NO: 24579 - DNA, 42 bp, Artificial Sequence; identical to SEQ ID NO: 8319
  Probe

SEQ ID NO: 24580 - DNA, 30 bp, Artificial Sequence
  Probe
ttaactagttttgacaacattcaaaaaaga

SEQ ID NO: 24581 - DNA, 36 bp, Artificial Sequence
  Probe
ttaactagttttgacaacattcaaaaaagagtaata

SEQ ID NO: 24582 - DNA, 20 bp, Artificial Sequence
  Probe
ttaacttgaccgctctgagc

SEQ ID NO: 24583 - DNA, 21 bp, Artificial Sequence
  Probe
ttaacttgaccgctctgagct

SEQ ID NO: 24584 - DNA, 30 bp, Artificial Sequence; identical to SEQ ID NO: 12276
  Probe

SEQ ID NO: 24585 - DNA, 32 bp, Artificial Sequence; identical to SEQ ID NO: 8326
  Probe

SEQ ID NO: 24586 - DNA, 44 bp, Artificial Sequence; identical to SEQ ID NO: 8328
  Probe

SEQ ID NO: 24587 - DNA, 38 bp, Artificial Sequence
  Probe
ttacacgcagaaggtcctgggttcgagccccagtggaa

SEQ ID NO: 24588 - DNA, 39 bp, Artificial Sequence
  Probe
ttacacgcagaaggtcctgggttcgagccccagtggaac

SEQ ID NO: 24589 - DNA, 44 bp, Artificial Sequence; identical to SEQ ID NO: 8329
  Probe

SEQ ID NO: 24590 - DNA, 27 bp, Artificial Sequence
  Probe
ttacacttaggagatttcaacttaact

SEQ ID NO: 24591 - DNA, 33 bp, Artificial Sequence; identical to SEQ ID NO: 8333
  Probe

SEQ ID NO: 24592 - DNA, 35 bp, Artificial Sequence; identical to SEQ ID NO: 8334
  Probe

SEQ ID NO: 24593 - DNA, 37 bp, Artificial Sequence; identical to SEQ ID NO: 8335
  Probe

SEQ ID NO: 24594 - DNA, 39 bp, Artificial Sequence; identical to SEQ ID NO: 8336
  Probe

SEQ ID NO: 24595 - DNA, 41 bp, Artificial Sequence; identical to SEQ ID NO: 8338
  Probe

SEQ ID NO: 24596 - DNA, 42 bp, Artificial Sequence; identical to SEQ ID NO: 8339
  Probe

SEQ ID NO: 24597 - DNA, 43 bp, Artificial Sequence; identical to SEQ ID NO: 8340
  Probe

SEQ ID NO: 24598 - DNA, 27 bp, Artificial Sequence
  Probe
ttacagtcagaggttcaattcctcttc

SEQ ID NO: 24599 - DNA, 28 bp, Artificial Sequence
  Probe
ttacagtcagaggttcaattcctcttct

SEQ ID NO: 24600 - DNA, 29 bp, Artificial Sequence
  Probe
ttacagtcagaggttcaattcctcttctt

SEQ ID NO: 24601 - DNA, 30 bp, Artificial Sequence
  Probe
ttacagtcagaggttcaattcctcttctta

SEQ ID NO: 24602 - DNA, 33 bp, Artificial Sequence
  Probe
ttacagtcagaggttcaattcctcttcttaaca

SEQ ID NO: 24603 - DNA, 35 bp, Artificial Sequence
  Probe
ttacagtcagaggttcaattcctcttcttaacaac

SEQ ID NO: 24604 - DNA, 36 bp, Artificial Sequence
  Probe
ttacagtcagaggttcaattcctcttcttaacaaca

SEQ ID NO: 24605 - DNA, 36 bp, Artificial Sequence
  Probe
ttactttgatagagtaaataataggagcttaaaccc

SEQ ID NO: 24606 - DNA, 37 bp, Artificial Sequence; identical to SEQ ID NO: 8347
  Probe

SEQ ID NO: 24607 - DNA, 38 bp, Artificial Sequence
  Probe
ttactttgatagagtaaataataggagcttaaaccccc

SEQ ID NO: 24608 - DNA, 39 bp, Artificial Sequence; identical to SEQ ID NO: 8348
  Probe

SEQ ID NO: 24609 - DNA, 41 bp, Artificial Sequence
  Probe
ttactttgatagagtaaataataggagcttaaaccccctta

SEQ ID NO: 24610 - DNA, 23 bp, Artificial Sequence
  Probe
ttagacgggctcacatcacccca

SEQ ID NO: 24611 - DNA, 24 bp, Artificial Sequence
  Probe
ttagacgggctcacatcaccccat

SEQ ID NO: 24612 - DNA, 25 bp, Artificial Sequence
  Probe
ttagacgggctcacatcaccccata

SEQ ID NO: 24613 - DNA, 26 bp, Artificial Sequence
  Probe
ttagacgggctcacatcaccccataa

SEQ ID NO: 24614 - DNA, 27 bp, Artificial Sequence
  Probe
ttagacgggctcacatcaccccataaa

SEQ ID NO: 24615 - DNA, 29 bp, Artificial Sequence
  Probe
ttagacgggctcacatcaccccataaaca

SEQ ID NO: 24616 - DNA, 30 bp, Artificial Sequence; identical to SEQ ID NO: 8357
  Probe

SEQ ID NO: 24617 - DNA, 31 bp, Artificial Sequence; identical to SEQ ID NO: 8358
  Probe

SEQ ID NO: 24618 - DNA, 32 bp, Artificial Sequence; identical to SEQ ID NO: 8359
  Probe

SEQ ID NO: 24619 - DNA, 36 bp, Artificial Sequence
  Probe
ttagcattaaccttttaagttaaagattaagagaac

SEQ ID NO: 24620 - DNA, 50 bp, Artificial Sequence; identical to SEQ ID NO: 1795
  Probe

SEQ ID NO: 24621 - DNA, 26 bp, Artificial Sequence
  Probe
ttaggagatttcaacttaacttgacc

SEQ ID NO: 24622 - DNA, 29 bp, Artificial Sequence
  Probe
ttaggagatttcaacttaacttgaccgct

SEQ ID NO: 24623 - DNA, 31 bp, Artificial Sequence; identical to SEQ ID NO: 8368
  Probe

SEQ ID NO: 24624 - DNA, 33 bp, Artificial Sequence; identical to SEQ ID NO: 8370
  Probe

SEQ ID NO: 24625 - DNA, 35 bp, Artificial Sequence; identical to SEQ ID NO: 8372
  Probe

SEQ ID NO: 24626 - DNA, 36 bp, Artificial Sequence; identical to SEQ ID NO: 8373
  Probe

SEQ ID NO: 24627 - DNA, 19 bp, Artificial Sequence
  Probe
ttagggtgcgagaggtccc

SEQ ID NO: 24628 - DNA, 20 bp, Artificial Sequence
  Probe
ttagggtgcgagaggtcccg

SEQ ID NO: 24629 - DNA, 22 bp, Artificial Sequence
  Probe
ttagggtgcgagaggtcccggg

SEQ ID NO: 24630 - DNA, 23 bp, Artificial Sequence
  Probe
ttagggtgcgagaggtcccgggt

SEQ ID NO: 24631 - DNA, 24 bp, Artificial Sequence
  Probe
ttagggtgcgagaggtcccgggtt

SEQ ID NO: 24632 - DNA, 38 bp, Artificial Sequence
  Probe
ttagggtgcgagaggtcccgggttcaaatcccggacga

SEQ ID NO: 24633 - DNA, 50 bp, Artificial Sequence; identical to SEQ ID NO: 8377
  Probe

SEQ ID NO: 24634 - DNA, 31 bp, Artificial Sequence
  Probe
ttaggtcgctggttcgattccggctcgaagg

SEQ ID NO: 24635 - DNA, 33 bp, Artificial Sequence
  Probe
ttcaaaggttccgggttcgagtcccggcggagt

SEQ ID NO: 24636 - DNA, 38 bp, Artificial Sequence
  Probe
ttcaaaggttccgggttcgagtcccggcggagtcgtaa

SEQ ID NO: 24637 - DNA, 23 bp, Artificial Sequence
  Probe
ttcaaatcccggacgagccccct

SEQ ID NO: 24638 - DNA, 17 bp, Artificial Sequence
  Probe
ttcaacttaacttgacc

SEQ ID NO: 24639 - DNA, 20 bp, Artificial Sequence
  Probe
ttcaacttaacttgaccgct

SEQ ID NO: 24640 - DNA, 24 bp, Artificial Sequence
  Probe
ttcaacttaacttgaccgctctga

SEQ ID NO: 24641 - DNA, 25 bp, Artificial Sequence
  Probe
ttcaacttaacttgaccgctctgag

SEQ ID NO: 24642 - DNA, 26 bp, Artificial Sequence
  Probe
ttcaacttaacttgaccgctctgagc

SEQ ID NO: 24643 - DNA, 27 bp, Artificial Sequence
  Probe
ttcaacttaacttgaccgctctgagct

SEQ ID NO: 24644 - DNA, 23 bp, Artificial Sequence
  Probe
ttcaagtccctgttcgggcggca

SEQ ID NO: 24645 - DNA, 23 bp, Artificial Sequence
  Probe
ttcaattccccgacggggaggtg

SEQ ID NO: 24646 - DNA, 23 bp, Artificial Sequence
  Probe
ttcaattcccggtcagggaacca

SEQ ID NO: 24647 - DNA, 17 bp, Artificial Sequence
  Probe
ttcaggtcgcagtctcc

SEQ ID NO: 24648 - DNA, 29 bp, Artificial Sequence
  Probe
ttcagttgatgcagagtggggttttgcag

SEQ ID NO: 24649 - DNA, 33 bp, Artificial Sequence; identical to SEQ ID NO: 8394
  Probe

SEQ ID NO: 24650 - DNA, 36 bp, Artificial Sequence; identical to SEQ ID NO: 8396
  Probe

SEQ ID NO: 24651 - DNA, 37 bp, Artificial Sequence; identical to SEQ ID NO: 8397
  Probe

SEQ ID NO: 24652 - DNA, 38 bp, Artificial Sequence; identical to SEQ ID NO: 8398
  Probe

SEQ ID NO: 24653 - DNA, 39 bp, Artificial Sequence; identical to SEQ ID NO: 8399
  Probe

SEQ ID NO: 24654 - DNA, 40 bp, Artificial Sequence; identical to SEQ ID NO: 8400
  Probe

SEQ ID NO: 24655 - DNA, 41 bp, Artificial Sequence
  Probe
ttcagttgatgcagagtggggttttgcagtccttagctgtt

SEQ ID NO: 24656 - DNA, 42 bp, Artificial Sequence
  Probe
ttcagttgatgcagagtggggttttgcagtccttagctgtta

SEQ ID NO: 24657 - DNA, 41 bp, Artificial Sequence; identical to SEQ ID NO: 8401
  Probe

SEQ ID NO: 24658 - DNA, 42 bp, Artificial Sequence; identical to SEQ ID NO: 8402
  Probe

SEQ ID NO: 24659 - DNA, 43 bp, Artificial Sequence
  Probe
ttccaagcagttgacccgggttcgattcccggccaacgcaagt

SEQ ID NO: 24660 - DNA, 43 bp, Artificial Sequence
  Probe
ttccaagcagttgacccgggttcgattcccggccaacgcagtg

SEQ ID NO: 24661 - DNA, 41 bp, Artificial Sequence; identical to SEQ ID NO: 8406
  Probe

SEQ ID NO: 24662 - DNA, 42 bp, Artificial Sequence; identical to SEQ ID NO: 8407
  Probe

SEQ ID NO: 24663 - DNA, 29 bp, Artificial Sequence
  Probe
ttccatagtgtagtggttatcacatctgc

SEQ ID NO: 24664 - DNA, 26 bp, Artificial Sequence
  Probe
ttccatagtgtagtggttatcacgtc

SEQ ID NO: 24665 - DNA, 30 bp, Artificial Sequence
  Probe
ttccatagtgtagtggttatcacgtctgct

SEQ ID NO: 24666 - DNA, 31 bp, Artificial Sequence; identical to SEQ ID NO: 8408
  Probe

SEQ ID NO: 24667 - DNA, 32 bp, Artificial Sequence
  Probe
ttccatagtgtagtggttatcacgtctgcttt

SEQ ID NO: 24668 - DNA, 33 bp, Artificial Sequence
  Probe
ttccatagtgtagtggttatcacgtctgcttta

SEQ ID NO: 24669 - DNA, 34 bp, Artificial Sequence
  Probe
ttccatagtgtagtggttatcacgtctgctttac

SEQ ID NO: 24670 - DNA, 17 bp, Artificial Sequence
  Probe
ttcccattcttgcgacc

SEQ ID NO: 24671 - DNA, 21 bp, Artificial Sequence
  Probe
ttcccattcttgcgacccggg

SEQ ID NO: 24672 - DNA, 23 bp, Artificial Sequence
  Probe
ttcccattcttgcgacccgggtt

SEQ ID NO: 24673 - DNA, 24 bp, Artificial Sequence
  Probe
ttcccattcttgcgacccgggttc

SEQ ID NO: 24674 - DNA, 17 bp, Artificial Sequence
  Probe
ttcccggtcagggaacc

SEQ ID NO: 24675 - DNA, 18 bp, Artificial Sequence
  Probe
ttcccggtcagggaacca

SEQ ID NO: 24676 - DNA, 34 bp, Artificial Sequence
  Probe
ttccctggtggtctagtggttaggattcggcgct

SEQ ID NO: 24677 - DNA, 23 bp, Artificial Sequence
  Probe
ttccggatcagaagattgagggt

SEQ ID NO: 24678 - DNA, 18 bp, Artificial Sequence
  Probe
ttccggctcgaaggaagc

SEQ ID NO: 24679 - DNA, 18 bp, Artificial Sequence
  Probe
ttccggctcgaaggactt

SEQ ID NO: 24680 - DNA, 26 bp, Artificial Sequence
  Probe
ttccgtagtgtagcggttatcacatt

SEQ ID NO: 24681 - DNA, 30 bp, Artificial Sequence
  Probe
ttccgtagtgtagcggttatcacattcgcc

SEQ ID NO: 24682 - DNA, 32 bp, Artificial Sequence; identical to SEQ ID NO: 8419
  Probe

SEQ ID NO: 24683 - DNA, 33 bp, Artificial Sequence; identical to SEQ ID NO: 8420
  Probe

SEQ ID NO: 24684 - DNA, 26 bp, Artificial Sequence
  Probe
ttccgtagtgtagtggtcatcacgtt

SEQ ID NO: 24685 - DNA, 29 bp, Artificial Sequence
  Probe
ttccgtagtgtagtggtcatcacgttcgc

SEQ ID NO: 24686 - DNA, 30 bp, Artificial Sequence
  Probe
ttccgtagtgtagtggtcatcacgttcgcc

SEQ ID NO: 24687 - DNA, 31 bp, Artificial Sequence; identical to SEQ ID NO: 8421
  Probe

SEQ ID NO: 24688 - DNA, 32 bp, Artificial Sequence
  Probe
ttccgtagtgtagtggtcatcacgttcgccta

SEQ ID NO: 24689 - DNA, 33 bp, Artificial Sequence; identical to SEQ ID NO: 8422
  Probe

SEQ ID NO: 24690 - DNA, 34 bp, Artificial Sequence
  Probe
ttccgtagtgtagtggtcatcacgttcgcctaac

SEQ ID NO: 24691 - DNA, 26 bp, Artificial Sequence
  Probe
ttccgtagtgtagtggttatcacgtt

SEQ ID NO: 24692 - DNA, 28 bp, Artificial Sequence
  Probe
ttccgtagtgtagtggttatcacgttcg

SEQ ID NO: 24693 - DNA, 29 bp, Artificial Sequence
  Probe
ttccgtagtgtagtggttatcacgttcgc

SEQ ID NO: 24694 - DNA, 30 bp, Artificial Sequence; identical to SEQ ID NO: 8425
  Probe

SEQ ID NO: 24695 - DNA, 31 bp, Artificial Sequence; identical to SEQ ID NO: 8426
  Probe

SEQ ID NO: 24696 - DNA, 32 bp, Artificial Sequence
  Probe
ttccgtagtgtagtggttatcacgttcgccta

SEQ ID NO: 24697 - DNA, 50 bp, Artificial Sequence
  Probe
ttccgtagtgtagtggttatcacgttcgcctaacacgcgaaaggtccccg

SEQ ID NO: 24698 - DNA, 32 bp, Artificial Sequence; identical to SEQ ID NO: 8427
  Probe

SEQ ID NO: 24699 - DNA, 33 bp, Artificial Sequence; identical to SEQ ID NO: 8428
  Probe

SEQ ID NO: 24700 - DNA, 34 bp, Artificial Sequence; identical to SEQ ID NO: 8429
  Probe

SEQ ID NO: 24701 - DNA, 50 bp, Artificial Sequence
  Probe
ttccgtagtgtagtggttatcacgttcgcctcacacgcgaaaggtccccg

SEQ ID NO: 24702 - DNA, 16 bp, Artificial Sequence
  Probe
ttccgtgggtttgttt

SEQ ID NO: 24703 - DNA, 17 bp, Artificial Sequence
  Probe
ttccgtgggtttgtttt

SEQ ID NO: 24704 - DNA, 18 bp, Artificial Sequence
  Probe
ttccgtgggtttgttttt

SEQ ID NO: 24705 - DNA, 26 bp, Artificial Sequence
  Probe
ttccgtggtgtagtggttatcacatt

SEQ ID NO: 24706 - DNA, 30 bp, Artificial Sequence
  Probe
ttccgtggtgtagtggttatcacattcgcc

SEQ ID NO: 24707 - DNA, 31 bp, Artificial Sequence
  Probe
ttccgtggtgtagtggttatcacattcgcct

SEQ ID NO: 24708 - DNA, 23 bp, Artificial Sequence
  Probe
ttcctgtcccgtacggtttttct

SEQ ID NO: 24709 - DNA, 35 bp, Artificial Sequence; identical to SEQ ID NO: 8437
  Probe

SEQ ID NO: 24710 - DNA, 36 bp, Artificial Sequence; identical to SEQ ID NO: 8438
  Probe

SEQ ID NO: 24711 - DNA, 23 bp, Artificial Sequence
  Probe
ttcgaatcccaccgctgccacac

SEQ ID NO: 24712 - DNA, 23 bp, Artificial Sequence
  Probe
ttcgaatcccagcggtgcctccg

SEQ ID NO: 24713 - DNA, 34 bp, Artificial Sequence
  Probe
ttcgactcattaaattatgataatcatatttacc

SEQ ID NO: 24714 - DNA, 38 bp, Artificial Sequence
  Probe
ttcgactcattaaattatgataatcatatttaccaaat

SEQ ID NO: 24715 - DNA, 39 bp, Artificial Sequence; identical to SEQ ID NO: 8444
  Probe

SEQ ID NO: 24716 - DNA, 23 bp, Artificial Sequence
  Probe
ttcgactcccggtatgggaacaa

SEQ ID NO: 24717 - DNA, 22 bp, Artificial Sequence
  Probe
ttcgactcccggtgtgggaacg

SEQ ID NO: 24718 - DNA, 23 bp, Artificial Sequence
  Probe
ttcgactcccggtgtgggaacgc

SEQ ID NO: 24719 - DNA, 23 bp, Artificial Sequence
  Probe
ttcgagcccacccagggacgcct

SEQ ID NO: 24720 - DNA, 17 bp, Artificial Sequence
  Probe
ttcgatagctcagctgg

SEQ ID NO: 24721 - DNA, 17 bp, Artificial Sequence
  Probe
ttcgatagctcagttgg

SEQ ID NO: 24722 - DNA, 23 bp, Artificial Sequence
  Probe
ttcgatccccggcatctccattg

SEQ ID NO: 24723 - DNA, 23 bp, Artificial Sequence
  Probe
ttcgatccccgtacgggccactg

SEQ ID NO: 24724 - DNA, 23 bp, Artificial Sequence
  Probe
ttcgattccccgacggggaggca

SEQ ID NO: 24725 - DNA, 23 bp, Artificial Sequence
  Probe
ttcgattcccggccaacgcaagt

SEQ ID NO: 24726 - DNA, 23 bp, Artificial Sequence
  Probe
ttcgattcccggccaacgcagtg

SEQ ID NO: 24727 - DNA, 16 bp, Artificial Sequence
  Probe
ttcgattcccggtcag

SEQ ID NO: 24728 - DNA, 17 bp, Artificial Sequence
  Probe
ttcgattcccggtcagg

SEQ ID NO: 24729 - DNA, 22 bp, Artificial Sequence
  Probe
ttcgattcccggtcagggaaca

SEQ ID NO: 24730 - DNA, 23 bp, Artificial Sequence
  Probe
ttcgattcccggtcagggaacaa

SEQ ID NO: 24731 - DNA, 23 bp, Artificial Sequence
  Probe
ttcgattcccggtcatggaacca

SEQ ID NO: 24732 - DNA, 23 bp, Artificial Sequence
  Probe
ttcgattcctggtcagggaacca

SEQ ID NO: 24733 - DNA, 24 bp, Artificial Sequence
  Probe
ttcgccttaattttaataatcaac

SEQ ID NO: 24734 - DNA, 29 bp, Artificial Sequence
  Probe
ttcggcgctctcaccgccgcggcccgggt

SEQ ID NO: 24735 - DNA, 19 bp, Artificial Sequence
  Probe
ttcgggtgcgagaggtccc

SEQ ID NO: 24736 - DNA, 20 bp, Artificial Sequence
  Probe
ttcgggtgcgagaggtcccg

SEQ ID NO: 24737 - DNA, 22 bp, Artificial Sequence
  Probe
ttcgggtgcgagaggtcccggg

SEQ ID NO: 24738 - DNA, 23 bp, Artificial Sequence
  Probe
ttcgggtgcgagaggtcccgggt

SEQ ID NO: 24739 - DNA, 24 bp, Artificial Sequence
  Probe
ttcgggtgcgagaggtcccgggtt

SEQ ID NO: 24740 - DNA, 38 bp, Artificial Sequence
  Probe
ttcgggtgcgagaggtcccgggttcaaatcccggacga

SEQ ID NO: 24741 - DNA, 37 bp, Artificial Sequence; identical to SEQ ID NO: 8466
  Probe

SEQ ID NO: 24742 - DNA, 31 bp, Artificial Sequence
  Probe
ttctgtagtgtagtggttatcacgttcgcct

SEQ ID NO: 24743 - DNA, 33 bp, Artificial Sequence
  Probe
ttctgtagtgtagtggttatcacgttcgcctca

SEQ ID NO: 24744 - DNA, 33 bp, Artificial Sequence
  Probe
ttcttgcgacccgggttcgattcccgggcggcg

SEQ ID NO: 24745 - DNA, 36 bp, Artificial Sequence
  Probe
ttcttgcgacccgggttcgattcccgggcggcgcac

SEQ ID NO: 24746 - DNA, 37 bp, Artificial Sequence; identical to SEQ ID NO: 8467
  Probe

SEQ ID NO: 24747 - DNA, 38 bp, Artificial Sequence; identical to SEQ ID NO: 8468
  Probe

SEQ ID NO: 24748 - DNA, 38 bp, Artificial Sequence
  Probe
ttcttgcgacccgggttcgattcccgggcggcgcatag

SEQ ID NO: 24749 - DNA, 24 bp, Artificial Sequence
  Probe
ttgacaacattcaaaaaagagtaa

SEQ ID NO: 24750 - DNA, 25 bp, Artificial Sequence
  Probe
ttgacaacattcaaaaaagagtaat

SEQ ID NO: 24751 - DNA, 26 bp, Artificial Sequence
  Probe
ttgacaacattcaaaaaagagtaata

SEQ ID NO: 24752 - DNA, 45 bp, Artificial Sequence; identical to SEQ ID NO: 8473
  Probe

SEQ ID NO: 24753 - DNA, 33 bp, Artificial Sequence; identical to SEQ ID NO: 8474
  Probe

SEQ ID NO: 24754 - DNA, 43 bp, Artificial Sequence; identical to SEQ ID NO: 8477
  Probe

SEQ ID NO: 24755 - DNA, 16 bp, Artificial Sequence
  Probe
ttgccatgttaacgtt

SEQ ID NO: 24756 - DNA, 17 bp, Artificial Sequence
  Probe
ttgccatgttaacgttt

SEQ ID NO: 24757 - DNA, 18 bp, Artificial Sequence
  Probe
ttgccatgttaacgtttt

SEQ ID NO: 24758 - DNA, 50 bp, Artificial Sequence; identical to SEQ ID NO: 8478
  Probe

SEQ ID NO: 24759 - DNA, 18 bp, Artificial Sequence
  Probe
ttgggtgcgagaggtccc

SEQ ID NO: 24760 - DNA, 20 bp, Artificial Sequence
  Probe
ttgggtgcgagaggtcccgg

SEQ ID NO: 24761 - DNA, 21 bp, Artificial Sequence
  Probe
ttgggtgcgagaggtcccggg

SEQ ID NO: 24762 - DNA, 23 bp, Artificial Sequence
  Probe
ttgggtgcgagaggtcccgggtt

SEQ ID NO: 24763 - DNA, 41 bp, Artificial Sequence; identical to SEQ ID NO: 8481
  Probe

SEQ ID NO: 24764 - DNA, 28 bp, Artificial Sequence
  Probe
ttggtcgtggttgtagtccgtgcgagaa

SEQ ID NO: 24765 - DNA, 30 bp, Artificial Sequence
  Probe
ttggtcgtggttgtagtccgtgcgagaata

SEQ ID NO: 24766 - DNA, 33 bp, Artificial Sequence; identical to SEQ ID NO: 8484
  Probe

SEQ ID NO: 24767 - DNA, 29 bp, Artificial Sequence
  Probe
ttggtggtatagtggtgagcatagctgcc

SEQ ID NO: 24768 - DNA, 32 bp, Artificial Sequence
  Probe
ttggtggtatagtggtgagcatagctgccttc

SEQ ID NO: 24769 - DNA, 32 bp, Artificial Sequence
  Probe
ttggtggtatagtggttagcatagctgccttc

SEQ ID NO: 24770 - DNA, 24 bp, Artificial Sequence
  Probe
ttggtggttcagtggtagaattct

SEQ ID NO: 24771 - DNA, 26 bp, Artificial Sequence
  Probe
ttggtggttcagtggtagaattctcg

SEQ ID NO: 24772 - DNA, 27 bp, Artificial Sequence
  Probe
ttggtggttcagtggtagaattctcgc

SEQ ID NO: 24773 - DNA, 28 bp, Artificial Sequence
  Probe
ttggtggttcagtggtagaattctcgcc

SEQ ID NO: 24774 - DNA, 29 bp, Artificial Sequence
  Probe
ttggtggttcagtggtagaattctcgcct

SEQ ID NO: 24775 - DNA, 30 bp, Artificial Sequence
  Probe
ttggtggttcagtggtagaattctcgcctc

SEQ ID NO: 24776 - DNA, 30 bp, Artificial Sequence; identical to SEQ ID NO: 8491
  Probe

SEQ ID NO: 24777 - DNA, 31 bp, Artificial Sequence; identical to SEQ ID NO: 8492
  Probe

SEQ ID NO: 24778 - DNA, 32 bp, Artificial Sequence; identical to SEQ ID NO: 8493
  Probe

SEQ ID NO: 24779 - DNA, 21 bp, Artificial Sequence
  Probe
ttgtaaacaggagatcctggg

SEQ ID NO: 24780 - DNA, 22 bp, Artificial Sequence
  Probe
ttgtaaacaggagatcctgggt

SEQ ID NO: 24781 - DNA, 32 bp, Artificial Sequence
  Probe
ttgtaaaccggagatgaaaacctttttccaag

SEQ ID NO: 24782 - DNA, 37 bp, Artificial Sequence; identical to SEQ ID NO: 8497
  Probe

SEQ ID NO: 24783 - DNA, 38 bp, Artificial Sequence; identical to SEQ ID NO: 8498
  Probe

SEQ ID NO: 24784 - DNA, 39 bp, Artificial Sequence; identical to SEQ ID NO: 8499
  Probe

SEQ ID NO: 24785 - DNA, 40 bp, Artificial Sequence; identical to SEQ ID NO: 8500
  Probe

SEQ ID NO: 24786 - DNA, 23 bp, Artificial Sequence
  Probe
ttgtagtccgtgcgagaataatg

SEQ ID NO: 24787 - DNA, 44 bp, Artificial Sequence; identical to SEQ ID NO: 8511
  Probe

SEQ ID NO: 24788 - DNA, 30 bp, Artificial Sequence; identical to SEQ ID NO: 12431
  Probe

SEQ ID NO: 24789 - DNA, 32 bp, Artificial Sequence; identical to SEQ ID NO: 8513
  Probe

SEQ ID NO: 24790 - DNA, 33 bp, Artificial Sequence; identical to SEQ ID NO: 8514
  Probe

SEQ ID NO: 24791 - DNA, 34 bp, Artificial Sequence
  Probe
tttaaccaaaacatcagattgtgaatctgacaac

SEQ ID NO: 24792 - DNA, 35 bp, Artificial Sequence; identical to SEQ ID NO: 8515
  Probe

SEQ ID NO: 24793 - DNA, 45 bp, Artificial Sequence; identical to SEQ ID NO: 8516
  Probe

SEQ ID NO: 24794 - DNA, 50 bp, Artificial Sequence; identical to SEQ ID NO: 8517
  Probe

SEQ ID NO: 24795 - DNA, 18 bp, Artificial Sequence
  Probe
tttacacgcagaaggtcc

SEQ ID NO: 24796 - DNA, 23 bp, Artificial Sequence
  Probe
tttacacgcagaaggtcctgggt

SEQ ID NO: 24797 - DNA, 45 bp, Artificial Sequence
  Probe
tttacacgcagaaggtcctgggttcgagccccagtggaaccacgg

SEQ ID NO: 24798 - DNA, 28 bp, Artificial Sequence
  Probe
tttacagtcagaggttcaattcctcttc

SEQ ID NO: 24799 - DNA, 29 bp, Artificial Sequence
  Probe
tttacagtcagaggttcaattcctcttct

SEQ ID NO: 24800 - DNA, 30 bp, Artificial Sequence
  Probe
tttacagtcagaggttcaattcctcttctt

SEQ ID NO: 24801 - DNA, 31 bp, Artificial Sequence
  Probe
tttacagtcagaggttcaattcctcttctta

SEQ ID NO: 24802 - DNA, 33 bp, Artificial Sequence; identical to SEQ ID NO: 8521
  Probe

SEQ ID NO: 24803 - DNA, 34 bp, Artificial Sequence
  Probe
tttacagtcagaggttcaattcctcttcttaaca

SEQ ID NO: 24804 - DNA, 15 bp, Artificial Sequence
  Probe
tttactgctttctct

SEQ ID NO: 24805 - DNA, 16 bp, Artificial Sequence
  Probe
tttagacgggctcaca

SEQ ID NO: 24806 - DNA, 26 bp, Artificial Sequence
  Probe
tttagacgggctcacatcaccccata

SEQ ID NO: 24807 - DNA, 30 bp, Artificial Sequence
  Probe
tttagacgggctcacatcaccccataaaca

SEQ ID NO: 24808 - DNA, 32 bp, Artificial Sequence; identical to SEQ ID NO: 8526
  Probe

SEQ ID NO: 24809 - DNA, 33 bp, Artificial Sequence; identical to SEQ ID NO: 8527
  Probe

SEQ ID NO: 24810 - DNA, 28 bp, Artificial Sequence
  Probe
tttcaacttaacttgaccgctctgagct

SEQ ID NO: 24811 - DNA, 30 bp, Artificial Sequence
  Probe
tttccgtagtgtagtggtcatcacgttcgc

SEQ ID NO: 24812 - DNA, 27 bp, Artificial Sequence
  Probe
tttccgtagtgtagtggttatcacgtt

SEQ ID NO: 24813 - DNA, 30 bp, Artificial Sequence
  Probe
tttccgtagtgtagtggttatcacgttcgc

SEQ ID NO: 24814 - DNA, 31 bp, Artificial Sequence
  Probe
tttccgtagtgtagtggttatcacgttcgcc

SEQ ID NO: 24815 - DNA, 32 bp, Artificial Sequence
  Probe
tttccgtagtgtagtggttatcacgttcgcct

SEQ ID NO: 24816 - DNA, 50 bp, Artificial Sequence
  Probe
tttccgtagtgtagtggttatcacgttcgcctaacacgcgaaaggtcccc

SEQ ID NO: 24817 - DNA, 33 bp, Artificial Sequence
  Probe
tttccgtagtgtagtggttatcacgttcgcctc

SEQ ID NO: 24818 - DNA, 34 bp, Artificial Sequence
  Probe
tttccgtagtgtagtggttatcacgttcgcctca

SEQ ID NO: 24819 - DNA, 50 bp, Artificial Sequence
  Probe
tttccgtagtgtagtggttatcacgttcgcctcacacgcgaaaggtcccc

SEQ ID NO: 24820 - DNA, 45 bp, Artificial Sequence; identical to SEQ ID NO: 8531
  Probe

SEQ ID NO: 24821 - DNA, 46 bp, Artificial Sequence; identical to SEQ ID NO: 8532
  Probe

SEQ ID NO: 24822 - DNA, 24 bp, Artificial Sequence
  Probe
tttggccttttcgagatactgttt

SEQ ID NO: 24823 - DNA, 25 bp, Artificial Sequence
  Probe
tttggccttttcgagatactgtttt

SEQ ID NO: 24824 - DNA, 19 bp, Artificial Sequence
  Probe
tttgggtgcgagaggtccc

SEQ ID NO: 24825 - DNA, 20 bp, Artificial Sequence
  Probe
tttgggtgcgagaggtcccg

SEQ ID NO: 24826 - DNA, 21 bp, Artificial Sequence
  Probe
tttgggtgcgagaggtcccgg

SEQ ID NO: 24827 - DNA, 22 bp, Artificial Sequence
  Probe
tttgggtgcgagaggtcccggg

SEQ ID NO: 24828 - DNA, 23 bp, Artificial Sequence
  Probe
tttgggtgcgagaggtcccgggt

SEQ ID NO: 24829 - DNA, 24 bp, Artificial Sequence
  Probe
tttgggtgcgagaggtcccgggtt

SEQ ID NO: 24830 - DNA, 38 bp, Artificial Sequence
  Probe
tttgggtgcgagaggtcccgggttcaaatcccggacga

SEQ ID NO: 24831 - DNA, 42 bp, Artificial Sequence
  Probe
tttgggtgctaatggtggagttaaagactttttctctgattt

SEQ ID NO: 24832 - DNA, 30 bp, Artificial Sequence
  Probe
tttgtgggtttaagtcccattggtctagta

SEQ ID NO: 24833 - DNA, 17 bp, Artificial Sequence
  Probe
aaaaagtcatggaggcc

SEQ ID NO: 24834 - DNA, 36 bp, Artificial Sequence; identical to SEQ ID NO: 14480
  Probe

SEQ ID NO: 24835 - DNA, 18 bp, Artificial Sequence
  Probe
aaaatgtttagacgggct

SEQ ID NO: 24836 - DNA, 19 bp, Artificial Sequence
  Probe
aaaatgtttagacgggctc

SEQ ID NO: 24837 - DNA, 20 bp, Artificial Sequence
  Probe
aaaatgtttagacgggctca

SEQ ID NO: 24838 - DNA, 21 bp, Artificial Sequence
  Probe
aaaatgtttagacgggctcac

SEQ ID NO: 24839 - DNA, 22 bp, Artificial Sequence
  Probe
aaaatgtttagacgggctcaca

SEQ ID NO: 24840 - DNA, 27 bp, Artificial Sequence
  Probe
aaaatgtttagacgggctcacatcacc

SEQ ID NO: 24841 - DNA, 28 bp, Artificial Sequence
  Probe
aaaatgtttagacgggctcacatcaccc

SEQ ID NO: 24842 - DNA, 34 bp, Artificial Sequence
  Probe
aaacatcagattgtgaatctgacaacagaggctt

SEQ ID NO: 24843 - DNA, 35 bp, Artificial Sequence
  Probe
aaacatcagattgtgaatctgacaacagaggctta

SEQ ID NO: 24844 - DNA, 36 bp, Artificial Sequence
  Probe
aaacatcagattgtgaatctgacaacagaggcttac

SEQ ID NO: 24845 - DNA, 37 bp, Artificial Sequence; identical to SEQ ID NO: 14525
  Probe

SEQ ID NO: 24846 - DNA, 38 bp, Artificial Sequence; identical to SEQ ID NO: 14526
  Probe

SEQ ID NO: 24847 - DNA, 39 bp, Artificial Sequence
  Probe
aaacatcagattgtgaatctgacaacagaggcttacgac

SEQ ID NO: 24848 - DNA, 40 bp, Artificial Sequence
  Probe
aaacatcagattgtgaatctgacaacagaggcttacgacc

SEQ ID NO: 24849 - DNA, 41 bp, Artificial Sequence
  Probe
aaacatcagattgtgaatctgacaacagaggcttacgaccc

SEQ ID NO: 24850 - DNA, 18 bp, Artificial Sequence
  Probe
aaaccgggcggaaacacc

SEQ ID NO: 24851 - DNA, 19 bp, Artificial Sequence
  Probe
aaagacaggggttaggcct

SEQ ID NO: 24852 - DNA, 20 bp, Artificial Sequence
  Probe
aaagacaggggttaggcctc

SEQ ID NO: 24853 - DNA, 32 bp, Artificial Sequence; identical to SEQ ID NO: 1934
  Probe

SEQ ID NO: 24854 - DNA, 33 bp, Artificial Sequence; identical to SEQ ID NO: 1935
  Probe

SEQ ID NO: 24855 - DNA, 19 bp, Artificial Sequence
  Probe
aaagctcacaagaactgct

SEQ ID NO: 24856 - DNA, 23 bp, Artificial Sequence
  Probe
aaagctcacaagaactgctaact

SEQ ID NO: 24857 - DNA, 36 bp, Artificial Sequence
  Probe
aaagctcacaagaactgctaactcatgcccccatgt

SEQ ID NO: 24858 - DNA, 25 bp, Artificial Sequence
  Probe
aaaggataacagctatccattggtc

SEQ ID NO: 24859 - DNA, 21 bp, Artificial Sequence
  Probe
aaataataggagcttaaaccc

SEQ ID NO: 24860 - DNA, 18 bp, Artificial Sequence
  Probe
aaatacagaccaagagcc

SEQ ID NO: 24861 - DNA, 17 bp, Artificial Sequence
  Probe
aaatgtttagacgggct

SEQ ID NO: 24862 - DNA, 18 bp, Artificial Sequence
  Probe
aaatgtttagacgggctc

SEQ ID NO: 24863 - DNA, 19 bp, Artificial Sequence
  Probe
aaatgtttagacgggctca

SEQ ID NO: 24864 - DNA, 20 bp, Artificial Sequence
  Probe
aaatgtttagacgggctcac

SEQ ID NO: 24865 - DNA, 26 bp, Artificial Sequence
  Probe
aaatgtttagacgggctcacatcacc

SEQ ID NO: 24866 - DNA, 36 bp, Artificial Sequence
  Probe
aaattagaatcttagctttgggtgctaatggtggag

SEQ ID NO: 24867 - DNA, 18 bp, Artificial Sequence
  Probe
aacagctatccattggtc

SEQ ID NO: 24868 - DNA, 19 bp, Artificial Sequence
  Probe
aacagctatccattggtct

SEQ ID NO: 24869 - DNA, 33 bp, Artificial Sequence; identical to SEQ ID NO: 2055
  Probe

SEQ ID NO: 24870 - DNA, 35 bp, Artificial Sequence
  Probe
aacatcagattgtgaatctgacaacagaggcttac

SEQ ID NO: 24871 - DNA, 36 bp, Artificial Sequence
  Probe
aacatcagattgtgaatctgacaacagaggcttacg

SEQ ID NO: 24872 - DNA, 37 bp, Artificial Sequence; identical to SEQ ID NO: 14758
  Probe

SEQ ID NO: 24873 - DNA, 38 bp, Artificial Sequence
  Probe
aacatcagattgtgaatctgacaacagaggcttacgac

SEQ ID NO: 24874 - DNA, 39 bp, Artificial Sequence
  Probe
aacatcagattgtgaatctgacaacagaggcttacgacc

SEQ ID NO: 24875 - DNA, 40 bp, Artificial Sequence
  Probe
aacatcagattgtgaatctgacaacagaggcttacgaccc

SEQ ID NO: 24876 - DNA, 16 bp, Artificial Sequence
  Probe
aaccgggcggaaacac

SEQ ID NO: 24877 - DNA, 17 bp, Artificial Sequence
  Probe
aaccgggcggaaacacc

SEQ ID NO: 24878 - DNA, 36 bp, Artificial Sequence; identical to SEQ ID NO: 56
  Probe

SEQ ID NO: 24879 - DNA, 36 bp, Artificial Sequence
  Probe
aacttagcattaaccttttaagttaaagattaagag

SEQ ID NO: 24880 - DNA, 28 bp, Artificial Sequence
  Probe
aagaactgctaactcatgcccccatgtc

SEQ ID NO: 24881 - DNA, 29 bp, Artificial Sequence
  Probe
aagaactgctaactcatgcccccatgtct

SEQ ID NO: 24882 - DNA, 32 bp, Artificial Sequence; identical to SEQ ID NO: 2224
  Probe

SEQ ID NO: 24883 - DNA, 33 bp, Artificial Sequence; identical to SEQ ID NO: 2225
  Probe

SEQ ID NO: 24884 - DNA, 36 bp, Artificial Sequence
  Probe
aagaactgctaactcatgcccccatgtctaacaaca

SEQ ID NO: 24885 - DNA, 39 bp, Artificial Sequence
  Probe
aagaactgctaactcatgcccccatgtctaacaacatgg

SEQ ID NO: 24886 - DNA, 18 bp, Artificial Sequence
  Probe
aagacaggggttaggcct

SEQ ID NO: 24887 - DNA, 31 bp, Artificial Sequence
  Probe
aagcaatacactgaaaatgtttagacgggct

SEQ ID NO: 24888 - DNA, 32 bp, Artificial Sequence; identical to SEQ ID NO: 15034
  Probe

SEQ ID NO: 24889 - DNA, 36 bp, Artificial Sequence
  Probe
aagcattggactgtaaatctaaagacaggggttagg

SEQ ID NO: 24890 - DNA, 18 bp, Artificial Sequence
  Probe
aagctcacaagaactgct

SEQ ID NO: 24891 - DNA, 22 bp, Artificial Sequence
  Probe
aagctcacaagaactgctaact

SEQ ID NO: 24892 - DNA, 36 bp, Artificial Sequence
  Probe
aagctcacaagaactgctaactcatgcccccatgtc

SEQ ID NO: 24893 - DNA, 24 bp, Artificial Sequence
  Probe
aaggataacagctatccattggtc

SEQ ID NO: 24894 - DNA, 25 bp, Artificial Sequence
  Probe
aaggataacagctatccattggtct

SEQ ID NO: 24895 - DNA, 36 bp, Artificial Sequence
  Probe
aaggtattagaaaaaccatttcataactttgtcaaa

SEQ ID NO: 24896 - DNA, 21 bp, Artificial Sequence
  Probe
aagtgtttgtgggtttaagtc

SEQ ID NO: 24897 - DNA, 22 bp, Artificial Sequence
  Probe
aagtgtttgtgggtttaagtcc

SEQ ID NO: 24898 - DNA, 20 bp, Artificial Sequence
  Probe
aataataggagcttaaaccc

SEQ ID NO: 24899 - DNA, 28 bp, Artificial Sequence
  Probe
aatacactgaaaatgtttagacgggctc

SEQ ID NO: 24900 - DNA, 17 bp, Artificial Sequence
  Probe
aatacagaccaagagcc

SEQ ID NO: 24901 - DNA, 17 bp, Artificial Sequence
  Probe
aataggagcttaaaccc

SEQ ID NO: 24902 - DNA, 18 bp, Artificial Sequence
  Probe
aataggagcttaaacccc

SEQ ID NO: 24903 - DNA, 16 bp, Artificial Sequence
  Probe
aatagtaccgttaact

SEQ ID NO: 24904 - DNA, 19 bp, Artificial Sequence
  Probe
aatagtaccgttaacttcc

SEQ ID NO: 24905 - DNA, 36 bp, Artificial Sequence
  Probe
aatagtaccgttaacttccaattaactagttttgac

SEQ ID NO: 24906 - DNA, 20 bp, Artificial Sequence
  Probe
aatccccggcacctccacca

SEQ ID NO: 24907 - DNA, 36 bp, Artificial Sequence; identical to SEQ ID NO: 111
  Probe

SEQ ID NO: 24908 - DNA, 36 bp, Artificial Sequence
  Probe
aatcttagctttgggtgctaatggtggagttaaaga

SEQ ID NO: 24909 - DNA, 18 bp, Artificial Sequence
  Probe
aatggtggagttaaagac

SEQ ID NO: 24910 - DNA, 26 bp, Artificial Sequence
  Probe
aatggtggagttaaagactttttctc

SEQ ID NO: 24911 - DNA, 26 bp, Artificial Sequence
  Probe
aatggttagcactctggactctgaat

SEQ ID NO: 24912 - DNA, 27 bp, Artificial Sequence
  Probe
aatggttagcactctggactctgaatc

SEQ ID NO: 24913 - DNA, 29 bp, Artificial Sequence
  Probe
aatggttagcactctggactctgaatcca

SEQ ID NO: 24914 - DNA, 36 bp, Artificial Sequence
  Probe
aatggttagcactctggactctgaatccagcgatcc

SEQ ID NO: 24915 - DNA, 16 bp, Artificial Sequence
  Probe
aatgtttagacgggct

SEQ ID NO: 24916 - DNA, 17 bp, Artificial Sequence
  Probe
aatgtttagacgggctc

SEQ ID NO: 24917 - DNA, 18 bp, Artificial Sequence
  Probe
aatgtttagacgggctca

SEQ ID NO: 24918 - DNA, 19 bp, Artificial Sequence
  Probe
aatgtttagacgggctcac

SEQ ID NO: 24919 - DNA, 20 bp, Artificial Sequence
  Probe
aatgtttagacgggctcaca

SEQ ID NO: 24920 - DNA, 25 bp, Artificial Sequence
  Probe
aatgtttagacgggctcacatcacc

SEQ ID NO: 24921 - DNA, 26 bp, Artificial Sequence
  Probe
aatgtttagacgggctcacatcaccc

SEQ ID NO: 24922 - DNA, 32 bp, Artificial Sequence
  Probe
aatgtttagacgggctcacatcaccccataaa

SEQ ID NO: 24923 - DNA, 36 bp, Artificial Sequence
  Probe
aattagaatcttagctttgggtgctaatggtggagt

SEQ ID NO: 24924 - DNA, 17 bp, Artificial Sequence
  Probe
aattctcgcctgccacg

SEQ ID NO: 24925 - DNA, 30 bp, Artificial Sequence; identical to SEQ ID NO: 12515
  Probe

SEQ ID NO: 24926 - DNA, 31 bp, Artificial Sequence; identical to SEQ ID NO: 2584
  Probe

SEQ ID NO: 24927 - DNA, 35 bp, Artificial Sequence; identical to SEQ ID NO: 12517
  Probe

SEQ ID NO: 24928 - DNA, 36 bp, Artificial Sequence; identical to SEQ ID NO: 15369
  Probe

SEQ ID NO: 24929 - DNA, 23 bp, Artificial Sequence
  Probe
acagaccaagagccttcaaagcc

SEQ ID NO: 24930 - DNA, 16 bp, Artificial Sequence
  Probe
acagaggcttacgacc

SEQ ID NO: 24931 - DNA, 17 bp, Artificial Sequence
  Probe
acagaggcttacgaccc

SEQ ID NO: 24932 - DNA, 17 bp, Artificial Sequence
  Probe
acagctatccattggtc

SEQ ID NO: 24933 - DNA, 18 bp, Artificial Sequence
  Probe
acagctatccattggtct

SEQ ID NO: 24934 - DNA, 36 bp, Artificial Sequence
  Probe
acatcagattgtgaatctgacaacagaggcttacga

SEQ ID NO: 24935 - DNA, 32 bp, Artificial Sequence; identical to SEQ ID NO: 12542
  Probe

SEQ ID NO: 24936 - DNA, 36 bp, Artificial Sequence; identical to SEQ ID NO: 150
  Probe

SEQ ID NO: 24937 - DNA, 36 bp, Artificial Sequence; identical to SEQ ID NO: 12559
  Probe

SEQ ID NO: 24938 - DNA, 16 bp, Artificial Sequence
  Probe
accggagatgaaaacc

SEQ ID NO: 24939 - DNA, 16 bp, Artificial Sequence
  Probe
accgggcggaaacacc

SEQ ID NO: 24940 - DNA, 30 bp, Artificial Sequence
  Probe
accgttaacttccaattaactagttttgac

SEQ ID NO: 24941 - DNA, 36 bp, Artificial Sequence
  Probe
acgatggtttttcatatcattggtcgtggttgtagt

SEQ ID NO: 24942 - DNA, 36 bp, Artificial Sequence; identical to SEQ ID NO: 2844
  Probe

SEQ ID NO: 24943 - DNA, 36 bp, Artificial Sequence; identical to SEQ ID NO: 180
  Probe

SEQ ID NO: 24944 - DNA, 36 bp, Artificial Sequence; identical to SEQ ID NO: 188
  Probe

SEQ ID NO: 24945 - DNA, 36 bp, Artificial Sequence; identical to SEQ ID NO: 2880
  Probe

SEQ ID NO: 24946 - DNA, 36 bp, Artificial Sequence; identical to SEQ ID NO: 2894
  Probe

SEQ ID NO: 24947 - DNA, 22 bp, Artificial Sequence
  Probe
actgaaaatgtttagacgggct

SEQ ID NO: 24948 - DNA, 23 bp, Artificial Sequence
  Probe
actgaaaatgtttagacgggctc

SEQ ID NO: 24949 - DNA, 20 bp, Artificial Sequence
  Probe
acttttaaaggataacagct

SEQ ID NO: 24950 - DNA, 31 bp, Artificial Sequence; identical to SEQ ID NO: 210
  Probe

SEQ ID NO: 24951 - DNA, 32 bp, Artificial Sequence; identical to SEQ ID NO: 211
  Probe

SEQ ID NO: 24952 - DNA, 36 bp, Artificial Sequence
  Probe
acttttaaaggataacagctatccattggtcttagg

SEQ ID NO: 24953 - DNA, 21 bp, Artificial Sequence
  Probe
agaaagctcacaagaactgct

SEQ ID NO: 24954 - DNA, 25 bp, Artificial Sequence
  Probe
agaaagctcacaagaactgctaact

SEQ ID NO: 24955 - DNA, 31 bp, Artificial Sequence
  Probe
agaaagctcacaagaactgctaactcatgcc

SEQ ID NO: 24956 - DNA, 36 bp, Artificial Sequence
  Probe
agaaagctcacaagaactgctaactcatgcccccat

SEQ ID NO: 24957 - DNA, 23 bp, Artificial Sequence
  Probe
agaaatttaggttaaatacagac

SEQ ID NO: 24958 - DNA, 27 bp, Artificial Sequence
  Probe
agaactgctaactcatgcccccatgtc

SEQ ID NO: 24959 - DNA, 28 bp, Artificial Sequence
  Probe
agaactgctaactcatgcccccatgtct

SEQ ID NO: 24960 - DNA, 30 bp, Artificial Sequence; identical to SEQ ID NO: 16094
  Probe

SEQ ID NO: 24961 - DNA, 31 bp, Artificial Sequence; identical to SEQ ID NO: 16095
  Probe

SEQ ID NO: 24962 - DNA, 32 bp, Artificial Sequence; identical to SEQ ID NO: 3066
  Probe

SEQ ID NO: 24963 - DNA, 33 bp, Artificial Sequence; identical to SEQ ID NO: 16096
  Probe

SEQ ID NO: 24964 - DNA, 35 bp, Artificial Sequence; identical to SEQ ID NO: 12635
  Probe

SEQ ID NO: 24965 - DNA, 36 bp, Artificial Sequence
  Probe
agaactgctaactcatgcccccatgtctaacaacat

SEQ ID NO: 24966 - DNA, 36 bp, Artificial Sequence
  Probe
agaatcttagctttgggtgctaatggtggagttaaa

SEQ ID NO: 24967 - DNA, 19 bp, Artificial Sequence
  Probe
agaattctcgcctgccacg

SEQ ID NO: 24968 - DNA, 33 bp, Artificial Sequence
  Probe
agattgtgaatctgacaacagaggcttacgacc

SEQ ID NO: 24969 - DNA, 36 bp, Artificial Sequence; identical to SEQ ID NO: 3197
  Probe

SEQ ID NO: 24970 - DNA, 31 bp, Artificial Sequence; identical to SEQ ID NO: 3222
  Probe

SEQ ID NO: 24971 - DNA, 31 bp, Artificial Sequence; identical to SEQ ID NO: 275
  Probe

SEQ ID NO: 24972 - DNA, 32 bp, Artificial Sequence; identical to SEQ ID NO: 276
  Probe

SEQ ID NO: 24973 - DNA, 33 bp, Artificial Sequence; identical to SEQ ID NO: 277
  Probe

SEQ ID NO: 24974 - DNA, 36 bp, Artificial Sequence; identical to SEQ ID NO: 12682
  Probe

SEQ ID NO: 24975 - DNA, 36 bp, Artificial Sequence
  Probe
agcattggactgtaaatctaaagacaggggttaggc

SEQ ID NO: 24976 - DNA, 17 bp, Artificial Sequence
  Probe
agctcacaagaactgct

SEQ ID NO: 24977 - DNA, 21 bp, Artificial Sequence
  Probe
agctcacaagaactgctaact

SEQ ID NO: 24978 - DNA, 36 bp, Artificial Sequence
  Probe
agctcacaagaactgctaactcatgcccccatgtct

SEQ ID NO: 24979 - DNA, 25 bp, Artificial Sequence
  Probe
agctcagtcggtagagcatgggact

SEQ ID NO: 24980 - DNA, 26 bp, Artificial Sequence
  Probe
agctcagtcggtagagcatgggactc

SEQ ID NO: 24981 - DNA, 24 bp, Artificial Sequence
  Probe
agctccgaggtgattttcatattg

SEQ ID NO: 24982 - DNA, 29 bp, Artificial Sequence
  Probe
agctccgaggtgattttcatattgaattg

SEQ ID NO: 24983 - DNA, 30 bp, Artificial Sequence; identical to SEQ ID NO: 314
  Probe

SEQ ID NO: 24984 - DNA, 36 bp, Artificial Sequence
  Probe
agctttgggtgctaatggtggagttaaagacttttt

SEQ ID NO: 24985 - DNA, 23 bp, Artificial Sequence
  Probe
aggataacagctatccattggtc

SEQ ID NO: 24986 - DNA, 21 bp, Artificial Sequence
  Probe
aggatggccgagtggtctaag

SEQ ID NO: 24987 - DNA, 22 bp, Artificial Sequence
  Probe
aggattcggcgctctcaccgcc

SEQ ID NO: 24988 - DNA, 28 bp, Artificial Sequence
  Probe
aggattcggcgctctcaccgccgcggcc

SEQ ID NO: 24989 - DNA, 29 bp, Artificial Sequence
  Probe
aggattcggcgctctcaccgccgcggccc

SEQ ID NO: 24990 - DNA, 18 bp, Artificial Sequence
  Probe
aggggtatgattctcggt

SEQ ID NO: 24991 - DNA, 17 bp, Artificial Sequence
  Probe
agtaaataataggagct

SEQ ID NO: 24992 - DNA, 24 bp, Artificial Sequence
  Probe
agtaaataataggagcttaaaccc

SEQ ID NO: 24993 - DNA, 33 bp, Artificial Sequence
  Probe
agtaccgttaacttccaattaactagttttgac

SEQ ID NO: 24994 - DNA, 33 bp, Artificial Sequence; identical to SEQ ID NO: 16873
  Probe

SEQ ID NO: 24995 - DNA, 18 bp, Artificial Sequence
  Probe
agtcggtagagcatcaga

SEQ ID NO: 24996 - DNA, 19 bp, Artificial Sequence
  Probe
agtcggtagagcatcagac

SEQ ID NO: 24997 - DNA, 20 bp, Artificial Sequence
  Probe
agtcggtagagcatcagact

SEQ ID NO: 24998 - DNA, 19 bp, Artificial Sequence
  Probe
agtcggtagagcatgggac

SEQ ID NO: 24999 - DNA, 21 bp, Artificial Sequence
  Probe
agtcggtagagcatgggactc

SEQ ID NO: 25000 - DNA, 18 bp, Artificial Sequence
  Probe
agtggctaggattcggcg

SEQ ID NO: 25001 - DNA, 18 bp, Artificial Sequence
  Probe
agtggttaggattcggcg

SEQ ID NO: 25002 - DNA, 29 bp, Artificial Sequence
  Probe
agtggttaggattcggcgctctcaccgcc

SEQ ID NO: 25003 - DNA, 36 bp, Artificial Sequence; identical to SEQ ID NO: 361
  Probe

SEQ ID NO: 25004 - DNA, 21 bp, Artificial Sequence
  Probe
agttgattagggtgcttagct

SEQ ID NO: 25005 - DNA, 24 bp, Artificial Sequence
  Probe
agttgattagggtgcttagctgtt

SEQ ID NO: 25006 - DNA, 28 bp, Artificial Sequence
  Probe
agttgattagggtgcttagctgttaact

SEQ ID NO: 25007 - DNA, 36 bp, Artificial Sequence
  Probe
agttgattagggtgcttagctgttaactaagtgttt

SEQ ID NO: 25008 - DNA, 20 bp, Artificial Sequence
  Probe
ataacagctatccattggtc

SEQ ID NO: 25009 - DNA, 21 bp, Artificial Sequence
  Probe
ataacagctatccattggtct

SEQ ID NO: 25010 - DNA, 19 bp, Artificial Sequence
  Probe
ataataggagcttaaaccc

SEQ ID NO: 25011 - DNA, 36 bp, Artificial Sequence
  Probe
ataatctgaaggtcgtgagttcgagcctcacacggg

SEQ ID NO: 25012 - DNA, 26 bp, Artificial Sequence
  Probe
atacactgaaaatgtttagacgggct

SEQ ID NO: 25013 - DNA, 27 bp, Artificial Sequence
  Probe
atacactgaaaatgtttagacgggctc

SEQ ID NO: 25014 - DNA, 16 bp, Artificial Sequence
  Probe
atacagaccaagagcc

SEQ ID NO: 25015 - DNA, 21 bp, Artificial Sequence
  Probe
atagagtaaataataggagct

SEQ ID NO: 25016 - DNA, 28 bp, Artificial Sequence
  Probe
atagagtaaataataggagcttaaaccc

SEQ ID NO: 25017 - DNA, 30 bp, Artificial Sequence; identical to SEQ ID NO: 12797
  Probe

SEQ ID NO: 25018 - DNA, 16 bp, Artificial Sequence
  Probe
ataggagcttaaaccc

SEQ ID NO: 25019 - DNA, 17 bp, Artificial Sequence
  Probe
ataggagcttaaacccc

SEQ ID NO: 25020 - DNA, 18 bp, Artificial Sequence
  Probe
atagtaccgttaacttcc

SEQ ID NO: 25021 - DNA, 24 bp, Artificial Sequence
  Probe
atatcattggtcgtggttgtagtc

SEQ ID NO: 25022 - DNA, 25 bp, Artificial Sequence
  Probe
atatcattggtcgtggttgtagtcc

SEQ ID NO: 25023 - DNA, 26 bp, Artificial Sequence
  Probe
atatcattggtcgtggttgtagtccg

SEQ ID NO: 25024 - DNA, 28 bp, Artificial Sequence
  Probe
atatcattggtcgtggttgtagtccgtg

SEQ ID NO: 25025 - DNA, 30 bp, Artificial Sequence; identical to SEQ ID NO: 3694
  Probe

SEQ ID NO: 25026 - DNA, 31 bp, Artificial Sequence
  Probe
atatcattggtcgtggttgtagtccgtgcga

SEQ ID NO: 25027 - DNA, 32 bp, Artificial Sequence; identical to SEQ ID NO: 17140
  Probe

SEQ ID NO: 25028 - DNA, 33 bp, Artificial Sequence; identical to SEQ ID NO: 12799
  Probe

SEQ ID NO: 25029 - DNA, 34 bp, Artificial Sequence; identical to SEQ ID NO: 12800
  Probe

SEQ ID NO: 25030 - DNA, 36 bp, Artificial Sequence; identical to SEQ ID NO: 372
  Probe

SEQ ID NO: 25031 - DNA, 22 bp, Artificial Sequence
  Probe
atcattggtcgtggttgtagtc

SEQ ID NO: 25032 - DNA, 23 bp, Artificial Sequence
  Probe
atcattggtcgtggttgtagtcc

SEQ ID NO: 25033 - DNA, 30 bp, Artificial Sequence; identical to SEQ ID NO: 8552
  Probe

SEQ ID NO: 25034 - DNA, 31 bp, Artificial Sequence; identical to SEQ ID NO: 17185
  Probe

SEQ ID NO: 25035 - DNA, 32 bp, Artificial Sequence; identical to SEQ ID NO: 17186
  Probe

SEQ ID NO: 25036 - DNA, 33 bp, Artificial Sequence; identical to SEQ ID NO: 17187
  Probe

SEQ ID NO: 25037 - DNA, 18 bp, Artificial Sequence
  Probe
atccattggtcttaggcc

SEQ ID NO: 25038 - DNA, 19 bp, Artificial Sequence
  Probe
atccattggtcttaggccc

SEQ ID NO: 25039 - DNA, 20 bp, Artificial Sequence
  Probe
atccattggtcttaggcccc

SEQ ID NO: 25040 - DNA, 36 bp, Artificial Sequence
  Probe
atccattggtcttaggccccaaaaattttggtgcaa

SEQ ID NO: 25041 - DNA, 16 bp, Artificial Sequence
  Probe
atcccaccgctgccac

SEQ ID NO: 25042 - DNA, 16 bp, Artificial Sequence
  Probe
atcccatcctcgtcgc

SEQ ID NO: 25043 - DNA, 17 bp, Artificial Sequence
  Probe
atccccggcacctccac

SEQ ID NO: 25044 - DNA, 18 bp, Artificial Sequence
  Probe
atccccggcacctccacc

SEQ ID NO: 25045 - DNA, 19 bp, Artificial Sequence
  Probe
atccccggcacctccacca

SEQ ID NO: 25046 - DNA, 16 bp, Artificial Sequence
  Probe
atccggctcgaaggac

SEQ ID NO: 25047 - DNA, 16 bp, Artificial Sequence
  Probe
atccgggtgccccctc

SEQ ID NO: 25048 - DNA, 36 bp, Artificial Sequence
  Probe
atccttaggtcgctggttcgattccggctcgaagga

SEQ ID NO: 25049 - DNA, 36 bp, Artificial Sequence
  Probe
atctgagggtccagggttcaagtccctgttcgggcg

SEQ ID NO: 25050 - DNA, 23 bp, Artificial Sequence
  Probe
atgaaaacctttttccaaggaca

SEQ ID NO: 25051 - DNA, 17 bp, Artificial Sequence
  Probe
atggataaggcgtctga

SEQ ID NO: 25052 - DNA, 29 bp, Artificial Sequence
  Probe
atgggtggttcagtggtagaattctcgcc

SEQ ID NO: 25053 - DNA, 30 bp, Artificial Sequence; identical to SEQ ID NO: 403
  Probe

SEQ ID NO: 25054 - DNA, 33 bp, Artificial Sequence; identical to SEQ ID NO: 406
  Probe

SEQ ID NO: 25055 - DNA, 16 bp, Artificial Sequence
  Probe
atggtagagcgctcgc

SEQ ID NO: 25056 - DNA, 36 bp, Artificial Sequence
  Probe
atggtgtaatggttagcactctggactctgaatcca

SEQ ID NO: 25057 - DNA, 25 bp, Artificial Sequence
  Probe
atggttagcactctggactctgaat

SEQ ID NO: 25058 - DNA, 26 bp, Artificial Sequence
  Probe
atggttagcactctggactctgaatc

SEQ ID NO: 25059 - DNA, 27 bp, Artificial Sequence
  Probe
atggttagcactctggactctgaatcc

SEQ ID NO: 25060 - DNA, 28 bp, Artificial Sequence
  Probe
atggttagcactctggactctgaatcca

SEQ ID NO: 25061 - DNA, 36 bp, Artificial Sequence; identical to SEQ ID NO: 17470
  Probe

SEQ ID NO: 25062 - DNA, 26 bp, Artificial Sequence
  Probe
atggttagcactctggactttgaatc

SEQ ID NO: 25063 - DNA, 27 bp, Artificial Sequence
  Probe
atggttagcactctggactttgaatcc

SEQ ID NO: 25064 - DNA, 36 bp, Artificial Sequence
  Probe
atggtttttcatatcattggtcgtggttgtagtccg

SEQ ID NO: 25065 - DNA, 16 bp, Artificial Sequence
  Probe
atgtttagacgggctc

SEQ ID NO: 25066 - DNA, 17 bp, Artificial Sequence
  Probe
atgtttagacgggctca

SEQ ID NO: 25067 - DNA, 18 bp, Artificial Sequence
  Probe
atgtttagacgggctcac

SEQ ID NO: 25068 - DNA, 19 bp, Artificial Sequence
  Probe
atgtttagacgggctcaca

SEQ ID NO: 25069 - DNA, 20 bp, Artificial Sequence
  Probe
atgtttagacgggctcacat

SEQ ID NO: 25070 - DNA, 21 bp, Artificial Sequence
  Probe
atgtttagacgggctcacatc

SEQ ID NO: 25071 - DNA, 24 bp, Artificial Sequence
  Probe
atgtttagacgggctcacatcacc

SEQ ID NO: 25072 - DNA, 25 bp, Artificial Sequence
  Probe
atgtttagacgggctcacatcaccc

SEQ ID NO: 25073 - DNA, 31 bp, Artificial Sequence; identical to SEQ ID NO: 3863
  Probe

SEQ ID NO: 25074 - DNA, 36 bp, Artificial Sequence
  Probe
attagaatcttagctttgggtgctaatggtggagtt

SEQ ID NO: 25075 - DNA, 23 bp, Artificial Sequence
  Probe
attagggtgcttagctgttaact

SEQ ID NO: 25076 - DNA, 36 bp, Artificial Sequence
  Probe
attagggtgcttagctgttaactaagtgtttgtggg

SEQ ID NO: 25077 - DNA, 36 bp, Artificial Sequence; identical to SEQ ID NO: 17518
  Probe

SEQ ID NO: 25078 - DNA, 36 bp, Artificial Sequence
  Probe
attcaaaggttgtgggttcgaatcccaccagagtcg

SEQ ID NO: 25079 - DNA, 36 bp, Artificial Sequence; identical to SEQ ID NO: 17521
  Probe

SEQ ID NO: 25080 - DNA, 26 bp, Artificial Sequence
  Probe
attcggcgctctcaccgccgcggccc

SEQ ID NO: 25081 - DNA, 30 bp, Artificial Sequence; identical to SEQ ID NO: 17537
  Probe

SEQ ID NO: 25082 - DNA, 31 bp, Artificial Sequence
  Probe
attcggcgctctcaccgccgcggcccgggtt

SEQ ID NO: 25083 - DNA, 36 bp, Artificial Sequence
  Probe
attcggcgctctcaccgccgcggcccgggttcgatt

SEQ ID NO: 25084 - DNA, 36 bp, Artificial Sequence; identical to SEQ ID NO: 17543
  Probe

SEQ ID NO: 25085 - DNA, 36 bp, Artificial Sequence
  Probe
attggactgtaaatctaaagacaggggttaggcctc

SEQ ID NO: 25086 - DNA, 19 bp, Artificial Sequence
  Probe
attggtcgtggttgtagtc

SEQ ID NO: 25087 - DNA, 20 bp, Artificial Sequence
  Probe
attggtcgtggttgtagtcc

SEQ ID NO: 25088 - DNA, 21 bp, Artificial Sequence
  Probe
attggtcgtggttgtagtccg

SEQ ID NO: 25089 - DNA, 23 bp, Artificial Sequence
  Probe
attggtcgtggttgtagtccgtg

SEQ ID NO: 25090 - DNA, 24 bp, Artificial Sequence
  Probe
attggtcgtggttgtagtccgtgc

SEQ ID NO: 25091 - DNA, 25 bp, Artificial Sequence
  Probe
attggtcgtggttgtagtccgtgcg

SEQ ID NO: 25092 - DNA, 26 bp, Artificial Sequence
  Probe
attggtcgtggttgtagtccgtgcga

SEQ ID NO: 25093 - DNA, 27 bp, Artificial Sequence
  Probe
attggtcgtggttgtagtccgtgcgag

SEQ ID NO: 25094 - DNA, 28 bp, Artificial Sequence
  Probe
attggtcgtggttgtagtccgtgcgaga

SEQ ID NO: 25095 - DNA, 29 bp, Artificial Sequence
  Probe
attggtcgtggttgtagtccgtgcgagaa

SEQ ID NO: 25096 - DNA, 30 bp, Artificial Sequence; identical to SEQ ID NO: 9429
  Probe

SEQ ID NO: 25097 - DNA, 31 bp, Artificial Sequence; identical to SEQ ID NO: 426
  Probe

SEQ ID NO: 25098 - DNA, 36 bp, Artificial Sequence; identical to SEQ ID NO: 17572
  Probe

SEQ ID NO: 25099 - DNA, 36 bp, Artificial Sequence
  Probe
attggtggttcagtggtagaattctcgcctgccatg

SEQ ID NO: 25100 - DNA, 28 bp, Artificial Sequence
  Probe
attgtgaatctgacaacagaggcttacg

SEQ ID NO: 25101 - DNA, 31 bp, Artificial Sequence; identical to SEQ ID NO: 3923
  Probe

SEQ ID NO: 25102 - DNA, 32 bp, Artificial Sequence; identical to SEQ ID NO: 3924
  Probe

SEQ ID NO: 25103 - DNA, 33 bp, Artificial Sequence; identical to SEQ ID NO: 3925
  Probe

SEQ ID NO: 25104 - DNA, 36 bp, Artificial Sequence
  Probe
attgtgaatctgacaacagaggcttacgacccctta

SEQ ID NO: 25105 - DNA, 36 bp, Artificial Sequence; identical to SEQ ID NO: 427
  Probe

SEQ ID NO: 25106 - DNA, 33 bp, Artificial Sequence; identical to SEQ ID NO: 12851
  Probe

SEQ ID NO: 25107 - DNA, 36 bp, Artificial Sequence; identical to SEQ ID NO: 3985
  Probe

SEQ ID NO: 25108 - DNA, 19 bp, Artificial Sequence
  Probe
caaatcccggacgagcccc

SEQ ID NO: 25109 - DNA, 29 bp, Artificial Sequence
  Probe
caagaactgctaactcatgcccccatgtc

SEQ ID NO: 25110 - DNA, 30 bp, Artificial Sequence; identical to SEQ ID NO: 12857
  Probe

SEQ ID NO: 25111 - DNA, 33 bp, Artificial Sequence; identical to SEQ ID NO: 17716
  Probe

SEQ ID NO: 25112 - DNA, 34 bp, Artificial Sequence; identical to SEQ ID NO: 12858
  Probe

SEQ ID NO: 25113 - DNA, 36 bp, Artificial Sequence; identical to SEQ ID NO: 17718
  Probe

SEQ ID NO: 25114 - DNA, 37 bp, Artificial Sequence; identical to SEQ ID NO: 12859
  Probe

SEQ ID NO: 25115 - DNA, 29 bp, Artificial Sequence
  Probe
caatacactgaaaatgtttagacgggctc

SEQ ID NO: 25116 - DNA, 21 bp, Artificial Sequence
  Probe
caatccccggcacctccacca

SEQ ID NO: 25117 - DNA, 19 bp, Artificial Sequence
  Probe
cacaagaactgctaactca

SEQ ID NO: 25118 - DNA, 23 bp, Artificial Sequence
  Probe
cacaagaactgctaactcatgcc

SEQ ID NO: 25119 - DNA, 32 bp, Artificial Sequence; identical to SEQ ID NO: 4090
  Probe

SEQ ID NO: 25120 - DNA, 36 bp, Artificial Sequence
  Probe
cacaagaactgctaactcatgcccccatgtctaaca

SEQ ID NO: 25121 - DNA, 30 bp, Artificial Sequence; identical to SEQ ID NO: 469
  Probe

SEQ ID NO: 25122 - DNA, 36 bp, Artificial Sequence
  Probe
cacccaggcggcccgggttcgactcccggtgtggga

SEQ ID NO: 25123 - DNA, 36 bp, Artificial Sequence
  Probe
caccgccgcggcccgggttcgattcccggtcaggga

SEQ ID NO: 25124 - DNA, 36 bp, Artificial Sequence; identical to SEQ ID NO: 477
  Probe

SEQ ID NO: 25125 - DNA, 36 bp, Artificial Sequence; identical to SEQ ID NO: 485
  Probe

SEQ ID NO: 25126 - DNA, 30 bp, Artificial Sequence; identical to SEQ ID NO: 4174
  Probe

SEQ ID NO: 25127 - DNA, 24 bp, Artificial Sequence
  Probe
cactgaaaatgtttagacgggctc

SEQ ID NO: 25128 - DNA, 20 bp, Artificial Sequence
  Probe
cactgtaaagctaacttagc

SEQ ID NO: 25129 - DNA, 24 bp, Artificial Sequence
  Probe
cactgtaaagctaacttagcatta

SEQ ID NO: 25130 - DNA, 26 bp, Artificial Sequence
  Probe
cactgtaaagctaacttagcattaac

SEQ ID NO: 25131 - DNA, 27 bp, Artificial Sequence
  Probe
cactgtaaagctaacttagcattaacc

SEQ ID NO: 25132 - DNA, 28 bp, Artificial Sequence
  Probe
cactgtaaagctaacttagcattaacct

SEQ ID NO: 25133 - DNA, 36 bp, Artificial Sequence; identical to SEQ ID NO: 498
  Probe

SEQ ID NO: 25134 - DNA, 50 bp, Artificial Sequence; identical to SEQ ID NO: 502
  Probe

SEQ ID NO: 25135 - DNA, 24 bp, Artificial Sequence
  Probe
cagagaatagtttaaattagaatc

SEQ ID NO: 25136 - DNA, 30 bp, Artificial Sequence; identical to SEQ ID NO: 519
  Probe

SEQ ID NO: 25137 - DNA, 36 bp, Artificial Sequence; identical to SEQ ID NO: 4233
  Probe

SEQ ID NO: 25138 - DNA, 29 bp, Artificial Sequence
  Probe
cagagtggcgcagcggaagcgtgctgggc

SEQ ID NO: 25139 - DNA, 30 bp, Artificial Sequence; identical to SEQ ID NO: 12883
  Probe

SEQ ID NO: 25140 - DNA, 31 bp, Artificial Sequence; identical to SEQ ID NO: 4247
  Probe

SEQ ID NO: 25141 - DNA, 30 bp, Artificial Sequence; identical to SEQ ID NO: 17910
  Probe

SEQ ID NO: 25142 - DNA, 31 bp, Artificial Sequence
  Probe
cagattgtgaatctgacaacagaggcttacg

SEQ ID NO: 25143 - DNA, 33 bp, Artificial Sequence
  Probe
cagattgtgaatctgacaacagaggcttacgac

SEQ ID NO: 25144 - DNA, 36 bp, Artificial Sequence; identical to SEQ ID NO: 17911
  Probe

SEQ ID NO: 25145 - DNA, 16 bp, Artificial Sequence
  Probe
cagctatccattggtc

SEQ ID NO: 25146 - DNA, 17 bp, Artificial Sequence
  Probe
cagctatccattggtct

SEQ ID NO: 25147 - DNA, 29 bp, Artificial Sequence
  Probe
caggcggcccgggttcgactcccggtgtg

SEQ ID NO: 25148 - DNA, 16 bp, Artificial Sequence
  Probe
cagtcggtagagcatc

SEQ ID NO: 25149 - DNA, 19 bp, Artificial Sequence
  Probe
cagtcggtagagcatcaga

SEQ ID NO: 25150 - DNA, 20 bp, Artificial Sequence
  Probe
cagtcggtagagcatcagac

SEQ ID NO: 25151 - DNA, 20 bp, Artificial Sequence
  Probe
cagtcggtagagcatgggac

SEQ ID NO: 25152 - DNA, 21 bp, Artificial Sequence
  Probe
cagtcggtagagcatgggact

SEQ ID NO: 25153 - DNA, 22 bp, Artificial Sequence
  Probe
cagtcggtagagcatgggactc

SEQ ID NO: 25154 - DNA, 30 bp, Artificial Sequence
  Probe
cagtcggtagagcatgggactcttaatccc

SEQ ID NO: 25155 - DNA, 36 bp, Artificial Sequence
  Probe
cagttgattagggtgcttagctgttaactaagtgtt

SEQ ID NO: 25156 - DNA, 36 bp, Artificial Sequence
  Probe
cataccccgaaaatgttggttatacccttcccgtac

SEQ ID NO: 25157 - DNA, 36 bp, Artificial Sequence; identical to SEQ ID NO: 18061
  Probe

SEQ ID NO: 25158 - DNA, 36 bp, Artificial Sequence
  Probe
catcagattgtgaatctgacaacagaggcttacgac

SEQ ID NO: 25159 - DNA, 31 bp, Artificial Sequence; identical to SEQ ID NO: 4442
  Probe

SEQ ID NO: 25160 - DNA, 36 bp, Artificial Sequence
  Probe
cattggactgtaaatctaaagacaggggttaggcct

SEQ ID NO: 25161 - DNA, 20 bp, Artificial Sequence
  Probe
cattggtcgtggttgtagtc

SEQ ID NO: 25162 - DNA, 21 bp, Artificial Sequence
  Probe
cattggtcgtggttgtagtcc

SEQ ID NO: 25163 - DNA, 26 bp, Artificial Sequence
  Probe
cattggtcgtggttgtagtccgtgcg

SEQ ID NO: 25164 - DNA, 28 bp, Artificial Sequence
  Probe
cattggtcgtggttgtagtccgtgcgag

SEQ ID NO: 25165 - DNA, 29 bp, Artificial Sequence
  Probe
cattggtcgtggttgtagtccgtgcgaga

SEQ ID NO: 25166 - DNA, 30 bp, Artificial Sequence; identical to SEQ ID NO: 18130
  Probe

SEQ ID NO: 25167 - DNA, 31 bp, Artificial Sequence; identical to SEQ ID NO: 18131
  Probe

SEQ ID NO: 25168 - DNA, 32 bp, Artificial Sequence; identical to SEQ ID NO: 548
  Probe

SEQ ID NO: 25169 - DNA, 16 bp, Artificial Sequence
  Probe
cattggtcttaggccc

SEQ ID NO: 25170 - DNA, 17 bp, Artificial Sequence
  Probe
cattggtcttaggcccc

SEQ ID NO: 25171 - DNA, 30 bp, Artificial Sequence
  Probe
catttgactgcagatcaagaggtccccggt

SEQ ID NO: 25172 - DNA, 19 bp, Artificial Sequence
  Probe
ccaattaactagttttgac

SEQ ID NO: 25173 - DNA, 28 bp, Artificial Sequence
  Probe
ccacatggtctagcggttaggattcctg

SEQ ID NO: 25174 - DNA, 31 bp, Artificial Sequence; identical to SEQ ID NO: 563
  Probe

SEQ ID NO: 25175 - DNA, 30 bp, Artificial Sequence; identical to SEQ ID NO: 9659
  Probe

SEQ ID NO: 25176 - DNA, 28 bp, Artificial Sequence
  Probe
ccatatggtctagcggttaggattcctg

SEQ ID NO: 25177 - DNA, 16 bp, Artificial Sequence
  Probe
ccattggtcttaggcc

SEQ ID NO: 25178 - DNA, 17 bp, Artificial Sequence
  Probe
ccattggtcttaggccc

SEQ ID NO: 25179 - DNA, 18 bp, Artificial Sequence
  Probe
ccattggtcttaggcccc

SEQ ID NO: 25180 - DNA, 32 bp, Artificial Sequence; identical to SEQ ID NO: 580
  Probe

SEQ ID NO: 25181 - DNA, 36 bp, Artificial Sequence; identical to SEQ ID NO: 586
  Probe

SEQ ID NO: 25182 - DNA, 17 bp, Artificial Sequence
  Probe
ccccggcacctccacca

SEQ ID NO: 25183 - DNA, 32 bp, Artificial Sequence; identical to SEQ ID NO: 622
  Probe

SEQ ID NO: 25184 - DNA, 33 bp, Artificial Sequence; identical to SEQ ID NO: 623
  Probe

SEQ ID NO: 25185 - DNA, 28 bp, Artificial Sequence
  Probe
cccggctagctcagtcggtagagcatgg

SEQ ID NO: 25186 - DNA, 27 bp, Artificial Sequence
  Probe
cccggtaatcgcataaaacttaaaact

SEQ ID NO: 25187 - DNA, 32 bp, Artificial Sequence; identical to SEQ ID NO: 639
  Probe

SEQ ID NO: 25188 - DNA, 33 bp, Artificial Sequence; identical to SEQ ID NO: 640
  Probe

SEQ ID NO: 25189 - DNA, 32 bp, Artificial Sequence; identical to SEQ ID NO: 13005
  Probe

SEQ ID NO: 25190 - DNA, 32 bp, Artificial Sequence; identical to SEQ ID NO: 659
  Probe

SEQ ID NO: 25191 - DNA, 36 bp, Artificial Sequence; identical to SEQ ID NO: 13027
  Probe

SEQ ID NO: 25192 - DNA, 16 bp, Artificial Sequence
  Probe
ccggagatgaaaacct

SEQ ID NO: 25193 - DNA, 28 bp, Artificial Sequence
  Probe
ccggagatgaaaacctttttccaaggac

SEQ ID NO: 25194 - DNA, 22 bp, Artificial Sequence
  Probe
ccggatagctcagtcggtagag

SEQ ID NO: 25195 - DNA, 23 bp, Artificial Sequence
  Probe
ccggatagctcagtcggtagagc

SEQ ID NO: 25196 - DNA, 26 bp, Artificial Sequence
  Probe
ccggatagctcagtcggtagagcatc

SEQ ID NO: 25197 - DNA, 30 bp, Artificial Sequence; identical to SEQ ID NO: 668
  Probe

SEQ ID NO: 25198 - DNA, 31 bp, Artificial Sequence; identical to SEQ ID NO: 669
  Probe

SEQ ID NO: 25199 - DNA, 21 bp, Artificial Sequence
  Probe
ccggatcagaagattgagggt

SEQ ID NO: 25200 - DNA, 23 bp, Artificial Sequence
  Probe
ccggctagctcagtcggtagagc

SEQ ID NO: 25201 - DNA, 24 bp, Artificial Sequence
  Probe
ccggctagctcagtcggtagagca

SEQ ID NO: 25202 - DNA, 26 bp, Artificial Sequence
  Probe
ccggctagctcagtcggtagagcatg

SEQ ID NO: 25203 - DNA, 28 bp, Artificial Sequence
  Probe
ccggctagctcagtcggtagagcatgag

SEQ ID NO: 25204 - DNA, 30 bp, Artificial Sequence; identical to SEQ ID NO: 675
  Probe

SEQ ID NO: 25205 - DNA, 31 bp, Artificial Sequence; identical to SEQ ID NO: 676
  Probe

SEQ ID NO: 25206 - DNA, 32 bp, Artificial Sequence; identical to SEQ ID NO: 677
  Probe

SEQ ID NO: 25207 - DNA, 33 bp, Artificial Sequence; identical to SEQ ID NO: 4825
  Probe

SEQ ID NO: 25208 - DNA, 36 bp, Artificial Sequence
  Probe
ccggctagctcagtcggtagagcatgagactcttaa

SEQ ID NO: 25209 - DNA, 27 bp, Artificial Sequence
  Probe
ccggctagctcagtcggtagagcatgg

SEQ ID NO: 25210 - DNA, 28 bp, Artificial Sequence
  Probe
ccggctagctcagtcggtagagcatggg

SEQ ID NO: 25211 - DNA, 29 bp, Artificial Sequence
  Probe
ccggctagctcagtcggtagagcatggga

SEQ ID NO: 25212 - DNA, 30 bp, Artificial Sequence; identical to SEQ ID NO: 680
  Probe

SEQ ID NO: 25213 - DNA, 31 bp, Artificial Sequence; identical to SEQ ID NO: 681
  Probe

SEQ ID NO: 25214 - DNA, 32 bp, Artificial Sequence; identical to SEQ ID NO: 682
  Probe

SEQ ID NO: 25215 - DNA, 33 bp, Artificial Sequence; identical to SEQ ID NO: 683
  Probe

SEQ ID NO: 25216 - DNA, 36 bp, Artificial Sequence
  Probe
ccggctagctcagtcggtagagcatgggactcttaa

SEQ ID NO: 25217 - DNA, 28 bp, Artificial Sequence
  Probe
ccgtagtgtagtggtcatcacgttcgcc

SEQ ID NO: 25218 - DNA, 29 bp, Artificial Sequence
  Probe
ccgtagtgtagtggtcatcacgttcgcct

SEQ ID NO: 25219 - DNA, 29 bp, Artificial Sequence
  Probe
ccgtgatcgtatagtggttagtactctgc

SEQ ID NO: 25220 - DNA, 30 bp, Artificial Sequence; identical to SEQ ID NO: 8580
  Probe

SEQ ID NO: 25221 - DNA, 32 bp, Artificial Sequence; identical to SEQ ID NO: 18758
  Probe

SEQ ID NO: 25222 - DNA, 33 bp, Artificial Sequence; identical to SEQ ID NO: 688
  Probe

SEQ ID NO: 25223 - DNA, 29 bp, Artificial Sequence
  Probe
ccgttaacttccaattaactagttttgac

SEQ ID NO: 25224 - DNA, 31 bp, Artificial Sequence; identical to SEQ ID NO: 700
  Probe

SEQ ID NO: 25225 - DNA, 32 bp, Artificial Sequence; identical to SEQ ID NO: 701
  Probe

SEQ ID NO: 25226 - DNA, 33 bp, Artificial Sequence; identical to SEQ ID NO: 702
  Probe

SEQ ID NO: 25227 - DNA, 23 bp, Artificial Sequence
  Probe
cctgtcacgcgggagaccggggt

SEQ ID NO: 25228 - DNA, 19 bp, Artificial Sequence
  Probe
ccttccaagcagttgaccc

SEQ ID NO: 25229 - DNA, 22 bp, Artificial Sequence
  Probe
ccttccaagcagttgacccggg

SEQ ID NO: 25230 - DNA, 23 bp, Artificial Sequence
  Probe
ccttccaagcagttgacccgggt

SEQ ID NO: 25231 - DNA, 24 bp, Artificial Sequence
  Probe
ccttccaagcagttgacccgggtt

SEQ ID NO: 25232 - DNA, 36 bp, Artificial Sequence
  Probe
cgatggtttttcatatcattggtcgtggttgtagtc

SEQ ID NO: 25233 - DNA, 31 bp, Artificial Sequence; identical to SEQ ID NO: 19061
  Probe

SEQ ID NO: 25234 - DNA, 36 bp, Artificial Sequence
  Probe
cgcctgtcacgcgggagaccggggttcgattccccg

SEQ ID NO: 25235 - DNA, 36 bp, Artificial Sequence; identical to SEQ ID NO: 19177
  Probe

SEQ ID NO: 25236 - DNA, 36 bp, Artificial Sequence
  Probe
cgctctcaccgccgcggcccgggttcgattcccggt

SEQ ID NO: 25237 - DNA, 16 bp, Artificial Sequence
  Probe
cggaagcgtgctgggc

SEQ ID NO: 25238 - DNA, 18 bp, Artificial Sequence
  Probe
cggaagcgtgctgggccc

SEQ ID NO: 25239 - DNA, 27 bp, Artificial Sequence
  Probe
cggagatgaaaacctttttccaaggac

SEQ ID NO: 25240 - DNA, 28 bp, Artificial Sequence
  Probe
cggagatgaaaacctttttccaaggaca

SEQ ID NO: 25241 - DNA, 22 bp, Artificial Sequence
  Probe
cggatagctcagtcggtagagc

SEQ ID NO: 25242 - DNA, 23 bp, Artificial Sequence
  Probe
cggatagctcagtcggtagagca

SEQ ID NO: 25243 - DNA, 25 bp, Artificial Sequence
  Probe
cggatagctcagtcggtagagcatc

SEQ ID NO: 25244 - DNA, 29 bp, Artificial Sequence
  Probe
cggatagctcagtcggtagagcatcagac

SEQ ID NO: 25245 - DNA, 30 bp, Artificial Sequence; identical to SEQ ID NO: 762
  Probe

SEQ ID NO: 25246 - DNA, 31 bp, Artificial Sequence; identical to SEQ ID NO: 763
  Probe

SEQ ID NO: 25247 - DNA, 32 bp, Artificial Sequence; identical to SEQ ID NO: 764
  Probe

SEQ ID NO: 25248 - DNA, 33 bp, Artificial Sequence; identical to SEQ ID NO: 765
  Probe

SEQ ID NO: 25249 - DNA, 20 bp, Artificial Sequence
  Probe
cggatcagaagattgagggt

SEQ ID NO: 25250 - DNA, 21 bp, Artificial Sequence
  Probe
cggctagctcagtcggtagag

SEQ ID NO: 25251 - DNA, 25 bp, Artificial Sequence
  Probe
cggctagctcagtcggtagagcatg

SEQ ID NO: 25252 - DNA, 29 bp, Artificial Sequence
  Probe
cggctagctcagtcggtagagcatgagac

SEQ ID NO: 25253 - DNA, 30 bp, Artificial Sequence; identical to SEQ ID NO: 771
  Probe

SEQ ID NO: 25254 - DNA, 31 bp, Artificial Sequence; identical to SEQ ID NO: 772
  Probe

SEQ ID NO: 25255 - DNA, 32 bp, Artificial Sequence; identical to SEQ ID NO: 773
  Probe

SEQ ID NO: 25256 - DNA, 36 bp, Artificial Sequence
  Probe
cggctagctcagtcggtagagcatgagactcttaat

SEQ ID NO: 25257 - DNA, 27 bp, Artificial Sequence
  Probe
cggctagctcagtcggtagagcatggg

SEQ ID NO: 25258 - DNA, 28 bp, Artificial Sequence
  Probe
cggctagctcagtcggtagagcatggga

SEQ ID NO: 25259 - DNA, 29 bp, Artificial Sequence
  Probe
cggctagctcagtcggtagagcatgggac

SEQ ID NO: 25260 - DNA, 30 bp, Artificial Sequence; identical to SEQ ID NO: 778
  Probe

SEQ ID NO: 25261 - DNA, 31 bp, Artificial Sequence; identical to SEQ ID NO: 779
  Probe

SEQ ID NO: 25262 - DNA, 32 bp, Artificial Sequence; identical to SEQ ID NO: 780
  Probe

SEQ ID NO: 25263 - DNA, 33 bp, Artificial Sequence; identical to SEQ ID NO: 781
  Probe

SEQ ID NO: 25264 - DNA, 36 bp, Artificial Sequence
  Probe
cggctagctcagtcggtagagcatgggactcttaat

SEQ ID NO: 25265 - DNA, 25 bp, Artificial Sequence
  Probe
cggctgttaaccgaaaggttggtgg

SEQ ID NO: 25266 - DNA, 26 bp, Artificial Sequence
  Probe
cggctgttaaccgaaaggttggtggt

SEQ ID NO: 25267 - DNA, 36 bp, Artificial Sequence
  Probe
cggctgttaaccgaaaggttggtggttcgagcccac

SEQ ID NO: 25268 - DNA, 32 bp, Artificial Sequence; identical to SEQ ID NO: 788
  Probe

SEQ ID NO: 25269 - DNA, 20 bp, Artificial Sequence
  Probe
cggtaatcgcataaaactta

SEQ ID NO: 25270 - DNA, 25 bp, Artificial Sequence
  Probe
cggtaatcgcataaaacttaaaact

SEQ ID NO: 25271 - DNA, 26 bp, Artificial Sequence
  Probe
cggtaatcgcataaaacttaaaactt

SEQ ID NO: 25272 - DNA, 27 bp, Artificial Sequence
  Probe
cggtaatcgcataaaacttaaaacttt

SEQ ID NO: 25273 - DNA, 30 bp, Artificial Sequence; identical to SEQ ID NO: 19323
  Probe

SEQ ID NO: 25274 - DNA, 36 bp, Artificial Sequence; identical to SEQ ID NO: 19325
  Probe

SEQ ID NO: 25275 - DNA, 16 bp, Artificial Sequence
  Probe
cggtagagcatcagac

SEQ ID NO: 25276 - DNA, 18 bp, Artificial Sequence
  Probe
cggtagagcatgggactc

SEQ ID NO: 25277 - DNA, 23 bp, Artificial Sequence
  Probe
cgtatagtggttagtactctgcg

SEQ ID NO: 25278 - DNA, 28 bp, Artificial Sequence
  Probe
cgtgatcgtatagtggttagtactctgc

SEQ ID NO: 25279 - DNA, 29 bp, Artificial Sequence
  Probe
cgtgatcgtatagtggttagtactctgcg

SEQ ID NO: 25280 - DNA, 31 bp, Artificial Sequence; identical to SEQ ID NO: 19365
  Probe

SEQ ID NO: 25281 - DNA, 23 bp, Artificial Sequence
  Probe
cgtggttgtagtccgtgcgagaa

SEQ ID NO: 25282 - DNA, 24 bp, Artificial Sequence
  Probe
cgtggttgtagtccgtgcgagaat

SEQ ID NO: 25283 - DNA, 25 bp, Artificial Sequence
  Probe
cgtggttgtagtccgtgcgagaata

SEQ ID NO: 25284 - DNA, 20 bp, Artificial Sequence
  Probe
ctaagccagggattgtgggt

SEQ ID NO: 25285 - DNA, 18 bp, Artificial Sequence
  Probe
ctaatggataaggcattg

SEQ ID NO: 25286 - DNA, 27 bp, Artificial Sequence
  Probe
ctagctcagtcggtagagcatgggact

SEQ ID NO: 25287 - DNA, 36 bp, Artificial Sequence
  Probe
ctagtggttaggattcggcgctctcaccgccgcggc

SEQ ID NO: 25288 - DNA, 21 bp, Artificial Sequence
  Probe
ctatccattggtcttaggccc

SEQ ID NO: 25289 - DNA, 22 bp, Artificial Sequence
  Probe
ctatccattggtcttaggcccc

SEQ ID NO: 25290 - DNA, 36 bp, Artificial Sequence
  Probe
ctatcgggcccataccccgaaaatgttggttatacc

SEQ ID NO: 25291 - DNA, 19 bp, Artificial Sequence
  Probe
ctcacaagaactgctaact

SEQ ID NO: 25292 - DNA, 36 bp, Artificial Sequence
  Probe
ctcacaagaactgctaactcatgcccccatgtctaa

SEQ ID NO: 25293 - DNA, 36 bp, Artificial Sequence
  Probe
ctcaccgccgcggcccgggttcgattcccggtcagg

SEQ ID NO: 25294 - DNA, 22 bp, Artificial Sequence
  Probe
ctcagtcggtagagcatcagac

SEQ ID NO: 25295 - DNA, 23 bp, Artificial Sequence
  Probe
ctcagtcggtagagcatgggact

SEQ ID NO: 25296 - DNA, 24 bp, Artificial Sequence
  Probe
ctcagtcggtagagcatgggactc

SEQ ID NO: 25297 - DNA, 22 bp, Artificial Sequence
  Probe
ctccgaggtgattttcatattg

SEQ ID NO: 25298 - DNA, 27 bp, Artificial Sequence
  Probe
ctccgaggtgattttcatattgaattg

SEQ ID NO: 25299 - DNA, 28 bp, Artificial Sequence
  Probe
ctccgaggtgattttcatattgaattgc

SEQ ID NO: 25300 - DNA, 29 bp, Artificial Sequence
  Probe
ctccgaggtgattttcatattgaattgca

SEQ ID NO: 25301 - DNA, 18 bp, Artificial Sequence
  Probe
ctctcaccgccgcggccc

SEQ ID NO: 25302 - DNA, 28 bp, Artificial Sequence
  Probe
ctctggactctgaatccagcgatccgag

SEQ ID NO: 25303 - DNA, 29 bp, Artificial Sequence
  Probe
ctctggactctgaatccagcgatccgagt

SEQ ID NO: 25304 - DNA, 30 bp, Artificial Sequence
  Probe
ctctggactctgaatccagcgatccgagtt

SEQ ID NO: 25305 - DNA, 21 bp, Artificial Sequence
  Probe
ctgaaaatgtttagacgggct

SEQ ID NO: 25306 - DNA, 22 bp, Artificial Sequence
  Probe
ctgaaaatgtttagacgggctc

SEQ ID NO: 25307 - DNA, 19 bp, Artificial Sequence
  Probe
ctgaatccagcgatccgag

SEQ ID NO: 25308 - DNA, 20 bp, Artificial Sequence
  Probe
ctgaatccagcgatccgagt

SEQ ID NO: 25309 - DNA, 21 bp, Artificial Sequence
  Probe
ctgaatccagcgatccgagtt

SEQ ID NO: 25310 - DNA, 22 bp, Artificial Sequence
  Probe
ctgaatccagcgatccgagttc

SEQ ID NO: 25311 - DNA, 23 bp, Artificial Sequence
  Probe
ctgaatccagcgatccgagttca

SEQ ID NO: 25312 - DNA, 27 bp, Artificial Sequence
  Probe
ctggactctgaatccagcgatccgagt

SEQ ID NO: 25313 - DNA, 28 bp, Artificial Sequence
  Probe
ctggactctgaatccagcgatccgagtt

SEQ ID NO: 25314 - DNA, 30 bp, Artificial Sequence; identical to SEQ ID NO: 839
  Probe

SEQ ID NO: 25315 - DNA, 21 bp, Artificial Sequence
  Probe
ctgtcacgcgggagaccgggg

SEQ ID NO: 25316 - DNA, 22 bp, Artificial Sequence
  Probe
ctgtcacgcgggagaccggggt

SEQ ID NO: 25317 - DNA, 23 bp, Artificial Sequence
  Probe
ctgtcacgcgggagaccggggtt

SEQ ID NO: 25318 - DNA, 36 bp, Artificial Sequence; identical to SEQ ID NO: 5376
  Probe

SEQ ID NO: 25319 - DNA, 18 bp, Artificial Sequence
  Probe
cttccaagcagttgaccc

SEQ ID NO: 25320 - DNA, 19 bp, Artificial Sequence
  Probe
cttccaagcagttgacccg

SEQ ID NO: 25321 - DNA, 21 bp, Artificial Sequence
  Probe
cttccaagcagttgacccggg

SEQ ID NO: 25322 - DNA, 22 bp, Artificial Sequence
  Probe
cttccaagcagttgacccgggt

SEQ ID NO: 25323 - DNA, 23 bp, Artificial Sequence
  Probe
cttccaagcagttgacccgggtt

SEQ ID NO: 25324 - DNA, 22 bp, Artificial Sequence
  Probe
cttccaattaactagttttgac

SEQ ID NO: 25325 - DNA, 22 bp, Artificial Sequence
  Probe
ctttcaccgccgcggcccgggt

SEQ ID NO: 25326 - DNA, 21 bp, Artificial Sequence
  Probe
ctttgaatccagcaatccgag

SEQ ID NO: 25327 - DNA, 22 bp, Artificial Sequence
  Probe
ctttgaatccagcaatccgagt

SEQ ID NO: 25328 - DNA, 23 bp, Artificial Sequence
  Probe
ctttgaatccagcaatccgagtt

SEQ ID NO: 25329 - DNA, 21 bp, Artificial Sequence
  Probe
ctttgaatccagcgatccgag

SEQ ID NO: 25330 - DNA, 22 bp, Artificial Sequence
  Probe
ctttgaatccagcgatccgagt

SEQ ID NO: 25331 - DNA, 23 bp, Artificial Sequence
  Probe
ctttgaatccagcgatccgagtt

SEQ ID NO: 25332 - DNA, 26 bp, Artificial Sequence
  Probe
ctttgatagagtaaataataggagct

SEQ ID NO: 25333 - DNA, 36 bp, Artificial Sequence
  Probe
ctttgggtgctaatggtggagttaaagactttttct

SEQ ID NO: 25334 - DNA, 18 bp, Artificial Sequence
  Probe
gaaaaagtcatggaggcc

SEQ ID NO: 25335 - DNA, 19 bp, Artificial Sequence
  Probe
gaaaaagtcatggaggcca

SEQ ID NO: 25336 - DNA, 21 bp, Artificial Sequence
  Probe
gaaaaagtcatggaggccatg

SEQ ID NO: 25337 - DNA, 25 bp, Artificial Sequence
  Probe
gaaaaagtcatggaggccatggggt

SEQ ID NO: 25338 - DNA, 26 bp, Artificial Sequence
  Probe
gaaaaagtcatggaggccatggggtt

SEQ ID NO: 25339 - DNA, 27 bp, Artificial Sequence
  Probe
gaaaaagtcatggaggccatggggttg

SEQ ID NO: 25340 - DNA, 28 bp, Artificial Sequence
  Probe
gaaaaagtcatggaggccatggggttgg

SEQ ID NO: 25341 - DNA, 36 bp, Artificial Sequence
  Probe
gaaaaagtcatggaggccatggggttggcttgaaac

SEQ ID NO: 25342 - DNA, 18 bp, Artificial Sequence
  Probe
gaaaatgtttagacgggc

SEQ ID NO: 25343 - DNA, 19 bp, Artificial Sequence
  Probe
gaaaatgtttagacgggct

SEQ ID NO: 25344 - DNA, 20 bp, Artificial Sequence
  Probe
gaaaatgtttagacgggctc

SEQ ID NO: 25345 - DNA, 21 bp, Artificial Sequence
  Probe
gaaaatgtttagacgggctca

SEQ ID NO: 25346 - DNA, 22 bp, Artificial Sequence
  Probe
gaaaatgtttagacgggctcac

SEQ ID NO: 25347 - DNA, 23 bp, Artificial Sequence
  Probe
gaaaatgtttagacgggctcaca

SEQ ID NO: 25348 - DNA, 25 bp, Artificial Sequence
  Probe
gaaaatgtttagacgggctcacatc

SEQ ID NO: 25349 - DNA, 28 bp, Artificial Sequence
  Probe
gaaaatgtttagacgggctcacatcacc

SEQ ID NO: 25350 - DNA, 29 bp, Artificial Sequence
  Probe
gaaaatgtttagacgggctcacatcaccc

SEQ ID NO: 25351 - DNA, 20 bp, Artificial Sequence
  Probe
gaaagctcacaagaactgct

SEQ ID NO: 25352 - DNA, 24 bp, Artificial Sequence
  Probe
gaaagctcacaagaactgctaact

SEQ ID NO: 25353 - DNA, 36 bp, Artificial Sequence
  Probe
gaaagctcacaagaactgctaactcatgcccccatg

SEQ ID NO: 25354 - DNA, 36 bp, Artificial Sequence; identical to SEQ ID NO: 19987
  Probe

SEQ ID NO: 25355 - DNA, 19 bp, Artificial Sequence
  Probe
gaccgcgtggcctaatgga

SEQ ID NO: 25356 - DNA, 18 bp, Artificial Sequence
  Probe
gagaaagctcacaagaac

SEQ ID NO: 25357 - DNA, 19 bp, Artificial Sequence
  Probe
gagaaagctcacaagaact

SEQ ID NO: 25358 - DNA, 20 bp, Artificial Sequence
  Probe
gagaaagctcacaagaactg

SEQ ID NO: 25359 - DNA, 21 bp, Artificial Sequence
  Probe
gagaaagctcacaagaactgc

SEQ ID NO: 25360 - DNA, 22 bp, Artificial Sequence
  Probe
gagaaagctcacaagaactgct

SEQ ID NO: 25361 - DNA, 23 bp, Artificial Sequence
  Probe
gagaaagctcacaagaactgcta

SEQ ID NO: 25362 - DNA, 24 bp, Artificial Sequence
  Probe
gagaaagctcacaagaactgctaa

SEQ ID NO: 25363 - DNA, 25 bp, Artificial Sequence
  Probe
gagaaagctcacaagaactgctaac

SEQ ID NO: 25364 - DNA, 26 bp, Artificial Sequence
  Probe
gagaaagctcacaagaactgctaact

SEQ ID NO: 25365 - DNA, 27 bp, Artificial Sequence
  Probe
gagaaagctcacaagaactgctaactc

SEQ ID NO: 25366 - DNA, 28 bp, Artificial Sequence
  Probe
gagaaagctcacaagaactgctaactca

SEQ ID NO: 25367 - DNA, 32 bp, Artificial Sequence; identical to SEQ ID NO: 934
  Probe

SEQ ID NO: 25368 - DNA, 33 bp, Artificial Sequence; identical to SEQ ID NO: 935
  Probe

SEQ ID NO: 25369 - DNA, 36 bp, Artificial Sequence; identical to SEQ ID NO: 938
  Probe

SEQ ID NO: 25370 - DNA, 32 bp, Artificial Sequence; identical to SEQ ID NO: 952
  Probe

SEQ ID NO: 25371 - DNA, 30 bp, Artificial Sequence; identical to SEQ ID NO: 960
  Probe

SEQ ID NO: 25372 - DNA, 32 bp, Artificial Sequence; identical to SEQ ID NO: 20309
  Probe

SEQ ID NO: 25373 - DNA, 18 bp, Artificial Sequence
  Probe
gagtaaataataggagct

SEQ ID NO: 25374 - DNA, 21 bp, Artificial Sequence
  Probe
gataacagctatccattggtc

SEQ ID NO: 25375 - DNA, 22 bp, Artificial Sequence
  Probe
gataacagctatccattggtct

SEQ ID NO: 25376 - DNA, 22 bp, Artificial Sequence
  Probe
gatagagtaaataataggagct

SEQ ID NO: 25377 - DNA, 29 bp, Artificial Sequence
  Probe
gatagagtaaataataggagcttaaaccc

SEQ ID NO: 25378 - DNA, 30 bp, Artificial Sequence; identical to SEQ ID NO: 20396
  Probe

SEQ ID NO: 25379 - DNA, 31 bp, Artificial Sequence; identical to SEQ ID NO: 20397
  Probe

SEQ ID NO: 25380 - DNA, 24 bp, Artificial Sequence
  Probe
gatgaaaacctttttccaaggaca

SEQ ID NO: 25381 - DNA, 36 bp, Artificial Sequence
  Probe
gatggtttttcatatcattggtcgtggttgtagtcc

SEQ ID NO: 25382 - DNA, 24 bp, Artificial Sequence
  Probe
gattagggtgcttagctgttaact

SEQ ID NO: 25383 - DNA, 20 bp, Artificial Sequence
  Probe
gattcggcgctctcaccgcc

SEQ ID NO: 25384 - DNA, 27 bp, Artificial Sequence
  Probe
gattcggcgctctcaccgccgcggccc

SEQ ID NO: 25385 - DNA, 31 bp, Artificial Sequence
  Probe
gattcggcgctctcaccgccgcggcccgggt

SEQ ID NO: 25386 - DNA, 32 bp, Artificial Sequence; identical to SEQ ID NO: 5751
  Probe

SEQ ID NO: 25387 - DNA, 33 bp, Artificial Sequence; identical to SEQ ID NO: 982
  Probe

SEQ ID NO: 25388 - DNA, 36 bp, Artificial Sequence; identical to SEQ ID NO: 5753
  Probe

SEQ ID NO: 25389 - DNA, 30 bp, Artificial Sequence
  Probe
gcaatacactgaaaatgtttagacgggctc

SEQ ID NO: 25390 - DNA, 32 bp, Artificial Sequence
  Probe
gcaatacactgaaaatgtttagacgggctcac

SEQ ID NO: 25391 - DNA, 32 bp, Artificial Sequence; identical to SEQ ID NO: 5795
  Probe

SEQ ID NO: 25392 - DNA, 31 bp, Artificial Sequence; identical to SEQ ID NO: 5824
  Probe

SEQ ID NO: 25393 - DNA, 32 bp, Artificial Sequence; identical to SEQ ID NO: 20552
  Probe

SEQ ID NO: 25394 - DNA, 33 bp, Artificial Sequence
  Probe
gcactctggactctgaatccagcgatccgagtt

SEQ ID NO: 25395 - DNA, 32 bp, Artificial Sequence; identical to SEQ ID NO: 991
  Probe

SEQ ID NO: 25396 - DNA, 28 bp, Artificial Sequence
  Probe
gcatgggtggttcagtggtagaattctc

SEQ ID NO: 25397 - DNA, 29 bp, Artificial Sequence
  Probe
gcatgggtggttcagtggtagaattctcg

SEQ ID NO: 25398 - DNA, 30 bp, Artificial Sequence; identical to SEQ ID NO: 1002
  Probe

SEQ ID NO: 25399 - DNA, 31 bp, Artificial Sequence; identical to SEQ ID NO: 1003
  Probe

SEQ ID NO: 25400 - DNA, 32 bp, Artificial Sequence; identical to SEQ ID NO: 1004
  Probe

SEQ ID NO: 25401 - DNA, 33 bp, Artificial Sequence; identical to SEQ ID NO: 1005
  Probe

SEQ ID NO: 25402 - DNA, 34 bp, Artificial Sequence; identical to SEQ ID NO: 1006
  Probe

SEQ ID NO: 25403 - DNA, 35 bp, Artificial Sequence; identical to SEQ ID NO: 1007
  Probe

SEQ ID NO: 25404 - DNA, 36 bp, Artificial Sequence; identical to SEQ ID NO: 1008
  Probe

SEQ ID NO: 25405 - DNA, 36 bp, Artificial Sequence
  Probe
gcattggactgtaaatctaaagacaggggttaggcc

SEQ ID NO: 25406 - DNA, 32 bp, Artificial Sequence; identical to SEQ ID NO: 1013
  Probe

SEQ ID NO: 25407 - DNA, 50 bp, Artificial Sequence
  Probe
gcattggtggttcagtggtagaattctcgcctcccacgcgggagacccgg

SEQ ID NO: 25408 - DNA, 38 bp, Artificial Sequence; identical to SEQ ID NO: 1014
  Probe

SEQ ID NO: 25409 - DNA, 50 bp, Artificial Sequence; identical to SEQ ID NO: 1020
  Probe

SEQ ID NO: 25410 - DNA, 19 bp, Artificial Sequence
  Probe
gcccggatagctcagtcgg

SEQ ID NO: 25411 - DNA, 32 bp, Artificial Sequence; identical to SEQ ID NO: 1040
  Probe

SEQ ID NO: 25412 - DNA, 33 bp, Artificial Sequence; identical to SEQ ID NO: 1041
  Probe

SEQ ID NO: 25413 - DNA, 36 bp, Artificial Sequence; identical to SEQ ID NO: 1044
  Probe

SEQ ID NO: 25414 - DNA, 28 bp, Artificial Sequence
  Probe
gcccggctagctcagtcggtagagcatg

SEQ ID NO: 25415 - DNA, 30 bp, Artificial Sequence; identical to SEQ ID NO: 1062
  Probe

SEQ ID NO: 25416 - DNA, 32 bp, Artificial Sequence; identical to SEQ ID NO: 1064
  Probe

SEQ ID NO: 25417 - DNA, 36 bp, Artificial Sequence; identical to SEQ ID NO: 1068
  Probe

SEQ ID NO: 25418 - DNA, 33 bp, Artificial Sequence; identical to SEQ ID NO: 1070
  Probe

SEQ ID NO: 25419 - DNA, 34 bp, Artificial Sequence; identical to SEQ ID NO: 1071
  Probe

SEQ ID NO: 25420 - DNA, 35 bp, Artificial Sequence; identical to SEQ ID NO: 1072
  Probe

SEQ ID NO: 25421 - DNA, 36 bp, Artificial Sequence; identical to SEQ ID NO: 1073
  Probe

SEQ ID NO: 25422 - DNA, 41 bp, Artificial Sequence; identical to SEQ ID NO: 5997
  Probe

SEQ ID NO: 25423 - DNA, 29 bp, Artificial Sequence
  Probe
gcccggctagctcagtcggtagagcatgg

SEQ ID NO: 25424 - DNA, 30 bp, Artificial Sequence; identical to SEQ ID NO: 1080
  Probe

SEQ ID NO: 25425 - DNA, 32 bp, Artificial Sequence; identical to SEQ ID NO: 1082
  Probe

SEQ ID NO: 25426 - DNA, 33 bp, Artificial Sequence; identical to SEQ ID NO: 1083
  Probe

SEQ ID NO: 25427 - DNA, 34 bp, Artificial Sequence; identical to SEQ ID NO: 1084
  Probe

SEQ ID NO: 25428 - DNA, 35 bp, Artificial Sequence; identical to SEQ ID NO: 1085
  Probe

SEQ ID NO: 25429 - DNA, 36 bp, Artificial Sequence; identical to SEQ ID NO: 1086
  Probe

SEQ ID NO: 25430 - DNA, 41 bp, Artificial Sequence; identical to SEQ ID NO: 6002
  Probe

SEQ ID NO: 25431 - DNA, 33 bp, Artificial Sequence; identical to SEQ ID NO: 1103
  Probe

SEQ ID NO: 25432 - DNA, 30 bp, Artificial Sequence; identical to SEQ ID NO: 1105
  Probe

SEQ ID NO: 25433 - DNA, 31 bp, Artificial Sequence; identical to SEQ ID NO: 1106
  Probe

SEQ ID NO: 25434 - DNA, 32 bp, Artificial Sequence; identical to SEQ ID NO: 1107
  Probe

SEQ ID NO: 25435 - DNA, 33 bp, Artificial Sequence; identical to SEQ ID NO: 1108
  Probe

SEQ ID NO: 25436 - DNA, 34 bp, Artificial Sequence; identical to SEQ ID NO: 1109
  Probe

SEQ ID NO: 25437 - DNA, 36 bp, Artificial Sequence; identical to SEQ ID NO: 1111
  Probe

SEQ ID NO: 25438 - DNA, 32 bp, Artificial Sequence; identical to SEQ ID NO: 1151
  Probe

SEQ ID NO: 25439 - DNA, 33 bp, Artificial Sequence; identical to SEQ ID NO: 1152
  Probe

SEQ ID NO: 25440 - DNA, 35 bp, Artificial Sequence; identical to SEQ ID NO: 1154
  Probe

SEQ ID NO: 25441 - DNA, 36 bp, Artificial Sequence; identical to SEQ ID NO: 1155
  Probe

SEQ ID NO: 25442 - DNA, 50 bp, Artificial Sequence; identical to SEQ ID NO: 1161
  Probe

SEQ ID NO: 25443 - DNA, 36 bp, Artificial Sequence
  Probe
gcgctctcaccgccgcggcccgggttcgattcccgg

SEQ ID NO: 25444 - DNA, 33 bp, Artificial Sequence; identical to SEQ ID NO: 1172
  Probe

SEQ ID NO: 25445 - DNA, 32 bp, Artificial Sequence; identical to SEQ ID NO: 1185
  Probe

SEQ ID NO: 25446 - DNA, 36 bp, Artificial Sequence; identical to SEQ ID NO: 1189
  Probe

SEQ ID NO: 25447 - DNA, 50 bp, Artificial Sequence; identical to SEQ ID NO: 1195
  Probe

SEQ ID NO: 25448 - DNA, 27 bp, Artificial Sequence
  Probe
gctagctcagtcggtagagcatgggac

SEQ ID NO: 25449 - DNA, 28 bp, Artificial Sequence
  Probe
gctagctcagtcggtagagcatgggact

SEQ ID NO: 25450 - DNA, 29 bp, Artificial Sequence
  Probe
gctagctcagtcggtagagcatgggactc

SEQ ID NO: 25451 - DNA, 22 bp, Artificial Sequence
  Probe
gctatccattggtcttaggccc

SEQ ID NO: 25452 - DNA, 20 bp, Artificial Sequence
  Probe
gctcacaagaactgctaact

SEQ ID NO: 25453 - DNA, 36 bp, Artificial Sequence
  Probe
gctcacaagaactgctaactcatgcccccatgtcta

SEQ ID NO: 25454 - DNA, 25 bp, Artificial Sequence
  Probe
gctcagtcggtagagcatgggactc

SEQ ID NO: 25455 - DNA, 23 bp, Artificial Sequence
  Probe
gctccgaggtgattttcatattg

SEQ ID NO: 25456 - DNA, 36 bp, Artificial Sequence
  Probe
gctggtgtagtggtatcatgcaagattcccattctt

SEQ ID NO: 25457 - DNA, 32 bp, Artificial Sequence; identical to SEQ ID NO: 1214
  Probe

SEQ ID NO: 25458 - DNA, 33 bp, Artificial Sequence; identical to SEQ ID NO: 1215
  Probe

SEQ ID NO: 25459 - DNA, 34 bp, Artificial Sequence; identical to SEQ ID NO: 1216
  Probe

SEQ ID NO: 25460 - DNA, 36 bp, Artificial Sequence; identical to SEQ ID NO: 1218
  Probe

SEQ ID NO: 25461 - DNA, 24 bp, Artificial Sequence
  Probe
gctttgcacgtatgaggccccggg

SEQ ID NO: 25462 - DNA, 25 bp, Artificial Sequence
  Probe
gctttgcacgtatgaggccccgggt

SEQ ID NO: 25463 - DNA, 26 bp, Artificial Sequence
  Probe
gctttgcacgtatgaggccccgggtt

SEQ ID NO: 25464 - DNA, 36 bp, Artificial Sequence
  Probe
gctttgggtgctaatggtggagttaaagactttttc

SEQ ID NO: 25465 - DNA, 26 bp, Artificial Sequence
  Probe
ggagatgaaaacctttttccaaggac

SEQ ID NO: 25466 - DNA, 22 bp, Artificial Sequence
  Probe
ggataacagctatccattggtc

SEQ ID NO: 25467 - DNA, 24 bp, Artificial Sequence
  Probe
ggatagctcagtcggtagagcatc

SEQ ID NO: 25468 - DNA, 31 bp, Artificial Sequence; identical to SEQ ID NO: 1252
  Probe

SEQ ID NO: 25469 - DNA, 32 bp, Artificial Sequence; identical to SEQ ID NO: 1253
  Probe

SEQ ID NO: 25470 - DNA, 21 bp, Artificial Sequence
  Probe
ggattcggcgctctcaccgcc

SEQ ID NO: 25471 - DNA, 28 bp, Artificial Sequence
  Probe
ggattcggcgctctcaccgccgcggccc

SEQ ID NO: 25472 - DNA, 36 bp, Artificial Sequence; identical to SEQ ID NO: 1264
  Probe

SEQ ID NO: 25473 - DNA, 18 bp, Artificial Sequence
  Probe
ggctagctcagtcggtag

SEQ ID NO: 25474 - DNA, 20 bp, Artificial Sequence
  Probe
ggctagctcagtcggtagag

SEQ ID NO: 25475 - DNA, 29 bp, Artificial Sequence
  Probe
ggctagctcagtcggtagagcatgagact

SEQ ID NO: 25476 - DNA, 28 bp, Artificial Sequence
  Probe
ggctagctcagtcggtagagcatgggac

SEQ ID NO: 25477 - DNA, 29 bp, Artificial Sequence
  Probe
ggctagctcagtcggtagagcatgggact

SEQ ID NO: 25478 - DNA, 30 bp, Artificial Sequence; identical to SEQ ID NO: 1292
  Probe

SEQ ID NO: 25479 - DNA, 31 bp, Artificial Sequence; identical to SEQ ID NO: 1293
  Probe

SEQ ID NO: 25480 - DNA, 19 bp, Artificial Sequence
  Probe
ggctccgtggcgcaatgga

SEQ ID NO: 25481 - DNA, 27 bp, Artificial Sequence
  Probe
ggctccgtggcgcaatggatagcgcat

SEQ ID NO: 25482 - DNA, 31 bp, Artificial Sequence; identical to SEQ ID NO: 6502
  Probe

SEQ ID NO: 25483 - DNA, 36 bp, Artificial Sequence; identical to SEQ ID NO: 21810
  Probe

SEQ ID NO: 25484 - DNA, 18 bp, Artificial Sequence
  Probe
ggggatgtagctcagtgg

SEQ ID NO: 25485 - DNA, 19 bp, Artificial Sequence
  Probe
ggggatgtagctcagtggt

SEQ ID NO: 25486 - DNA, 22 bp, Artificial Sequence
  Probe
ggggatgtagctcagtggtaga

SEQ ID NO: 25487 - DNA, 23 bp, Artificial Sequence
  Probe
ggggatgtagctcagtggtagag

SEQ ID NO: 25488 - DNA, 36 bp, Artificial Sequence; identical to SEQ ID NO: 21857
  Probe

SEQ ID NO: 25489 - DNA, 30 bp, Artificial Sequence; identical to SEQ ID NO: 1367
  Probe

SEQ ID NO: 25490 - DNA, 32 bp, Artificial Sequence; identical to SEQ ID NO: 1369
  Probe

SEQ ID NO: 25491 - DNA, 17 bp, Artificial Sequence
  Probe
ggggtatgattctcggt

SEQ ID NO: 25492 - DNA, 16 bp, Artificial Sequence
  Probe
gggtatgattctcggt

SEQ ID NO: 25493 - DNA, 22 bp, Artificial Sequence
  Probe
gggttcgattcccggtcaggga

SEQ ID NO: 25494 - DNA, 24 bp, Artificial Sequence
  Probe
ggtaatcgcataaaacttaaaact

SEQ ID NO: 25495 - DNA, 25 bp, Artificial Sequence
  Probe
ggtaatcgcataaaacttaaaactt

SEQ ID NO: 25496 - DNA, 36 bp, Artificial Sequence
  Probe
ggtagaattctcgcctgccacgcgggaggcccgggt

SEQ ID NO: 25497 - DNA, 17 bp, Artificial Sequence
  Probe
ggtagagcatgggactc

SEQ ID NO: 25498 - DNA, 16 bp, Artificial Sequence
  Probe
ggtagcgtggccgagc

SEQ ID NO: 25499 - DNA, 21 bp, Artificial Sequence
  Probe
ggtagcgtggccgagcggtct

SEQ ID NO: 25500 - DNA, 32 bp, Artificial Sequence; identical to SEQ ID NO: 1414
  Probe

SEQ ID NO: 25501 - DNA, 36 bp, Artificial Sequence; identical to SEQ ID NO: 1416
  Probe

SEQ ID NO: 25502 - DNA, 36 bp, Artificial Sequence
  Probe
ggtgagcactctggactctgaatccagcgatccgag

SEQ ID NO: 25503 - DNA, 36 bp, Artificial Sequence
  Probe
ggtgtaatggttagcactctggactctgaatccagc

SEQ ID NO: 25504 - DNA, 23 bp, Artificial Sequence
  Probe
ggttagcactctggactctgaat

SEQ ID NO: 25505 - DNA, 24 bp, Artificial Sequence
  Probe
ggttagcactctggactctgaatc

SEQ ID NO: 25506 - DNA, 25 bp, Artificial Sequence
  Probe
ggttagcactctggactctgaatcc

SEQ ID NO: 25507 - DNA, 32 bp, Artificial Sequence
  Probe
ggttagcactctggactctgaatccagcgatc

SEQ ID NO: 25508 - DNA, 33 bp, Artificial Sequence; identical to SEQ ID NO: 22249
  Probe

SEQ ID NO: 25509 - DNA, 34 bp, Artificial Sequence; identical to SEQ ID NO: 22250
  Probe

SEQ ID NO: 25510 - DNA, 36 bp, Artificial Sequence; identical to SEQ ID NO: 13947
  Probe

SEQ ID NO: 25511 - DNA, 37 bp, Artificial Sequence
  Probe
ggttagcactctggactctgaatccagcgatccgagt

SEQ ID NO: 25512 - DNA, 38 bp, Artificial Sequence; identical to SEQ ID NO: 22251
  Probe

SEQ ID NO: 25513 - DNA, 24 bp, Artificial Sequence
  Probe
ggttagcactctggactttgaatc

SEQ ID NO: 25514 - DNA, 36 bp, Artificial Sequence
  Probe
ggttagcactctggactttgaatccagcaatccgag

SEQ ID NO: 25515 - DNA, 36 bp, Artificial Sequence; identical to SEQ ID NO: 13949
  Probe

SEQ ID NO: 25516 - DNA, 38 bp, Artificial Sequence; identical to SEQ ID NO: 22254
  Probe

SEQ ID NO: 25517 - DNA, 16 bp, Artificial Sequence
  Probe
ggttaggattcggcgc

SEQ ID NO: 25518 - DNA, 18 bp, Artificial Sequence
  Probe
ggttaggattcggcgctc

SEQ ID NO: 25519 - DNA, 26 bp, Artificial Sequence
  Probe
ggttaggattcggcgctctcaccgcc

SEQ ID NO: 25520 - DNA, 33 bp, Artificial Sequence; identical to SEQ ID NO: 22258
  Probe

SEQ ID NO: 25521 - DNA, 36 bp, Artificial Sequence
  Probe
ggttaggattcggcgctctcaccgccgcggcccggg

SEQ ID NO: 25522 - DNA, 16 bp, Artificial Sequence
  Probe
ggttagtactctgcgt

SEQ ID NO: 25523 - DNA, 36 bp, Artificial Sequence; identical to SEQ ID NO: 1436
  Probe

SEQ ID NO: 25524 - DNA, 30 bp, Artificial Sequence; identical to SEQ ID NO: 1451
  Probe

SEQ ID NO: 25525 - DNA, 31 bp, Artificial Sequence; identical to SEQ ID NO: 1452
  Probe

SEQ ID NO: 25526 - DNA, 32 bp, Artificial Sequence; identical to SEQ ID NO: 1453
  Probe

SEQ ID NO: 25527 - DNA, 33 bp, Artificial Sequence; identical to SEQ ID NO: 1454
  Probe

SEQ ID NO: 25528 - DNA, 36 bp, Artificial Sequence; identical to SEQ ID NO: 1456
  Probe

SEQ ID NO: 25529 - DNA, 32 bp, Artificial Sequence; identical to SEQ ID NO: 6827
  Probe

SEQ ID NO: 25530 - DNA, 33 bp, Artificial Sequence; identical to SEQ ID NO: 1458
  Probe

SEQ ID NO: 25531 - DNA, 34 bp, Artificial Sequence; identical to SEQ ID NO: 1459
  Probe

SEQ ID NO: 25532 - DNA, 36 bp, Artificial Sequence; identical to SEQ ID NO: 1460
  Probe

SEQ ID NO: 25533 - DNA, 50 bp, Artificial Sequence
  Probe
ggttccatggtgtaatggttagcactctggactctgaatccagcgatccg

SEQ ID NO: 25534 - DNA, 32 bp, Artificial Sequence; identical to SEQ ID NO: 22374
  Probe

SEQ ID NO: 25535 - DNA, 33 bp, Artificial Sequence; identical to SEQ ID NO: 6869
  Probe

SEQ ID NO: 25536 - DNA, 36 bp, Artificial Sequence; identical to SEQ ID NO: 6870
  Probe

SEQ ID NO: 25537 - DNA, 41 bp, Artificial Sequence
  Probe
ggtttttcatatcattggtcgtggttgtagtccgtgcgaga

SEQ ID NO: 25538 - DNA, 42 bp, Artificial Sequence
  Probe
ggtttttcatatcattggtcgtggttgtagtccgtgcgagaa

SEQ ID NO: 25539 - DNA, 20 bp, Artificial Sequence
  Probe
gtaaaccaggggtcgcgagt

SEQ ID NO: 25540 - DNA, 20 bp, Artificial Sequence
  Probe
gtaaaccgaagatcgcgggt

SEQ ID NO: 25541 - DNA, 36 bp, Artificial Sequence
  Probe
gtaatggttagcactctggactctgaatccagcgat

SEQ ID NO: 25542 - DNA, 32 bp, Artificial Sequence; identical to SEQ ID NO: 22428
  Probe

SEQ ID NO: 25543 - DNA, 36 bp, Artificial Sequence; identical to SEQ ID NO: 22439
  Probe

SEQ ID NO: 25544 - DNA, 31 bp, Artificial Sequence; identical to SEQ ID NO: 22440
  Probe

SEQ ID NO: 25545 - DNA, 33 bp, Artificial Sequence
  Probe
gtagaattctcgcctgccacgcgggaggcccgg

SEQ ID NO: 25546 - DNA, 34 bp, Artificial Sequence
  Probe
gtagaattctcgcctgccacgcgggaggcccggg

SEQ ID NO: 25547 - DNA, 35 bp, Artificial Sequence; identical to SEQ ID NO: 22441
  Probe

SEQ ID NO: 25548 - DNA, 36 bp, Artificial Sequence; identical to SEQ ID NO: 14013
  Probe

SEQ ID NO: 25549 - DNA, 16 bp, Artificial Sequence
  Probe
gtagtcgtggccgagt

SEQ ID NO: 25550 - DNA, 18 bp, Artificial Sequence
  Probe
gtagtcgtggccgagtgg

SEQ ID NO: 25551 - DNA, 23 bp, Artificial Sequence
  Probe
gtagtcgtggccgagtggttaag

SEQ ID NO: 25552 - DNA, 24 bp, Artificial Sequence
  Probe
gtagtcgtggccgagtggttaagg

SEQ ID NO: 25553 - DNA, 36 bp, Artificial Sequence; identical to SEQ ID NO: 14022
  Probe

SEQ ID NO: 25554 - DNA, 25 bp, Artificial Sequence
  Probe
gtcaggatggccgagtggtctaagg

SEQ ID NO: 25555 - DNA, 26 bp, Artificial Sequence
  Probe
gtcaggatggccgagtggtctaaggc

SEQ ID NO: 25556 - DNA, 17 bp, Artificial Sequence
  Probe
gtcggtagagcatcaga

SEQ ID NO: 25557 - DNA, 18 bp, Artificial Sequence
  Probe
gtcggtagagcatcagac

SEQ ID NO: 25558 - DNA, 17 bp, Artificial Sequence
  Probe
gtcggtagagcatggga

SEQ ID NO: 25559 - DNA, 18 bp, Artificial Sequence
  Probe
gtcggtagagcatgggac

SEQ ID NO: 25560 - DNA, 19 bp, Artificial Sequence
  Probe
gtcggtagagcatgggact

SEQ ID NO: 25561 - DNA, 20 bp, Artificial Sequence
  Probe
gtcggtagagcatgggactc

SEQ ID NO: 25562 - DNA, 28 bp, Artificial Sequence
  Probe
gtcggtagagcatgggactcttaatccc

SEQ ID NO: 25563 - DNA, 24 bp, Artificial Sequence
  Probe
gtcgtggttgtagtccgtgcgaga

SEQ ID NO: 25564 - DNA, 25 bp, Artificial Sequence
  Probe
gtcgtggttgtagtccgtgcgagaa

SEQ ID NO: 25565 - DNA, 36 bp, Artificial Sequence; identical to SEQ ID NO: 22708
  Probe

SEQ ID NO: 25566 - DNA, 19 bp, Artificial Sequence
  Probe
gtgagtatccccgcctgtc

SEQ ID NO: 25567 - DNA, 28 bp, Artificial Sequence
  Probe
gtggttaggattcggcgctctcaccgcc

SEQ ID NO: 25568 - DNA, 35 bp, Artificial Sequence; identical to SEQ ID NO: 14107
  Probe

SEQ ID NO: 25569 - DNA, 36 bp, Artificial Sequence; identical to SEQ ID NO: 22856
  Probe

SEQ ID NO: 25570 - DNA, 19 bp, Artificial Sequence
  Probe
gtggttagtactctgcgtt

SEQ ID NO: 25571 - DNA, 21 bp, Artificial Sequence
  Probe
gtggttgtagtccgtgcgaga

SEQ ID NO: 25572 - DNA, 22 bp, Artificial Sequence
  Probe
gtggttgtagtccgtgcgagaa

SEQ ID NO: 25573 - DNA, 23 bp, Artificial Sequence
  Probe
gtggttgtagtccgtgcgagaat

SEQ ID NO: 25574 - DNA, 24 bp, Artificial Sequence
  Probe
gtggttgtagtccgtgcgagaata

SEQ ID NO: 25575 - DNA, 36 bp, Artificial Sequence
  Probe
gtgtaatggttagcactctggactctgaatccagcg

SEQ ID NO: 25576 - DNA, 36 bp, Artificial Sequence
  Probe
gttaactaagtgtttgtgggtttaagtcccattggt

SEQ ID NO: 25577 - DNA, 21 bp, Artificial Sequence
  Probe
gttaagatggcagagcccggt

SEQ ID NO: 25578 - DNA, 22 bp, Artificial Sequence
  Probe
gttaagatggcagagcccggta

SEQ ID NO: 25579 - DNA, 24 bp, Artificial Sequence
  Probe
gttaagatggcagagcccggtaat

SEQ ID NO: 25580 - DNA, 25 bp, Artificial Sequence
  Probe
gttaagatggcagagcccggtaatc

SEQ ID NO: 25581 - DNA, 26 bp, Artificial Sequence
  Probe
gttaagatggcagagcccggtaatcg

SEQ ID NO: 25582 - DNA, 28 bp, Artificial Sequence
  Probe
gttaagatggcagagcccggtaatcgca

SEQ ID NO: 25583 - DNA, 29 bp, Artificial Sequence
  Probe
gttaagatggcagagcccggtaatcgcat

SEQ ID NO: 25584 - DNA, 30 bp, Artificial Sequence; identical to SEQ ID NO: 1521
  Probe

SEQ ID NO: 25585 - DNA, 31 bp, Artificial Sequence; identical to SEQ ID NO: 22952
  Probe

SEQ ID NO: 25586 - DNA, 32 bp, Artificial Sequence; identical to SEQ ID NO: 7138
  Probe

SEQ ID NO: 25587 - DNA, 33 bp, Artificial Sequence; identical to SEQ ID NO: 22954
  Probe

SEQ ID NO: 25588 - DNA, 34 bp, Artificial Sequence; identical to SEQ ID NO: 1522
  Probe

SEQ ID NO: 25589 - DNA, 35 bp, Artificial Sequence; identical to SEQ ID NO: 7139
  Probe

SEQ ID NO: 25590 - DNA, 36 bp, Artificial Sequence; identical to SEQ ID NO: 22957
  Probe

SEQ ID NO: 25591 - DNA, 37 bp, Artificial Sequence; identical to SEQ ID NO: 1523
  Probe

SEQ ID NO: 25592 - DNA, 41 bp, Artificial Sequence; identical to SEQ ID NO: 7142
  Probe

SEQ ID NO: 25593 - DNA, 42 bp, Artificial Sequence; identical to SEQ ID NO: 1524
  Probe

SEQ ID NO: 25594 - DNA, 43 bp, Artificial Sequence; identical to SEQ ID NO: 7143
  Probe

SEQ ID NO: 25595 - DNA, 36 bp, Artificial Sequence
  Probe
gttagcactctggactctgaatccagcgatccgagt

SEQ ID NO: 25596 - DNA, 36 bp, Artificial Sequence
  Probe
gttagcactctggactttgaatccagcgatccgagt

SEQ ID NO: 25597 - DNA, 17 bp, Artificial Sequence
  Probe
gttaggattcggcgctc

SEQ ID NO: 25598 - DNA, 25 bp, Artificial Sequence
  Probe
gttaggattcggcgctctcaccgcc

SEQ ID NO: 25599 - DNA, 31 bp, Artificial Sequence
  Probe
gttaggattcggcgctctcaccgccgcggcc

SEQ ID NO: 25600 - DNA, 32 bp, Artificial Sequence; identical to SEQ ID NO: 22966
  Probe

SEQ ID NO: 25601 - DNA, 36 bp, Artificial Sequence
  Probe
gttaggattcggcgctctcaccgccgcggcccgggt

SEQ ID NO: 25602 - DNA, 36 bp, Artificial Sequence
  Probe
gttccatggtgtaatggttagcactctggactctga

SEQ ID NO: 25603 - DNA, 36 bp, Artificial Sequence
  Probe
gttgaaatacaacgatggtttttcatatcattggtc

SEQ ID NO: 25604 - DNA, 27 bp, Artificial Sequence
  Probe
gttgattagggtgcttagctgttaact

SEQ ID NO: 25605 - DNA, 36 bp, Artificial Sequence
  Probe
gttgattagggtgcttagctgttaactaagtgtttg

SEQ ID NO: 25606 - DNA, 27 bp, Artificial Sequence
  Probe
gtttaaacaaaacgaatgatttcgact

SEQ ID NO: 25607 - DNA, 17 bp, Artificial Sequence
  Probe
gtttatgtagcttacct

SEQ ID NO: 25608 - DNA, 18 bp, Artificial Sequence
  Probe
gtttatgtagcttacctc

SEQ ID NO: 25609 - DNA, 19 bp, Artificial Sequence
  Probe
gtttatgtagcttacctcc

SEQ ID NO: 25610 - DNA, 20 bp, Artificial Sequence
  Probe
gtttatgtagcttacctcct

SEQ ID NO: 25611 - DNA, 21 bp, Artificial Sequence
  Probe
gtttatgtagcttacctcctc

SEQ ID NO: 25612 - DNA, 22 bp, Artificial Sequence
  Probe
gtttatgtagcttacctcctca

SEQ ID NO: 25613 - DNA, 36 bp, Artificial Sequence; identical to SEQ ID NO: 1540
  Probe

SEQ ID NO: 25614 - DNA, 33 bp, Artificial Sequence; identical to SEQ ID NO: 7252
  Probe

SEQ ID NO: 25615 - DNA, 32 bp, Artificial Sequence; identical to SEQ ID NO: 1548
  Probe

SEQ ID NO: 25616 - DNA, 33 bp, Artificial Sequence; identical to SEQ ID NO: 1549
  Probe

SEQ ID NO: 25617 - DNA, 34 bp, Artificial Sequence; identical to SEQ ID NO: 1550
  Probe

SEQ ID NO: 25618 - DNA, 36 bp, Artificial Sequence; identical to SEQ ID NO: 1552
  Probe

SEQ ID NO: 25619 - DNA, 23 bp, Artificial Sequence
  Probe
gtttccgtagtgtagtggtcatc

SEQ ID NO: 25620 - DNA, 32 bp, Artificial Sequence; identical to SEQ ID NO: 1560
  Probe

SEQ ID NO: 25621 - DNA, 33 bp, Artificial Sequence; identical to SEQ ID NO: 1561
  Probe

SEQ ID NO: 25622 - DNA, 50 bp, Artificial Sequence; identical to SEQ ID NO: 1564
  Probe

SEQ ID NO: 25623 - DNA, 33 bp, Artificial Sequence; identical to SEQ ID NO: 23139
  Probe

SEQ ID NO: 25624 - DNA, 32 bp, Artificial Sequence
  Probe
gtttttcatatcattggtcgtggttgtagtcc

SEQ ID NO: 25625 - DNA, 36 bp, Artificial Sequence
  Probe
gtttttcatatcattggtcgtggttgtagtccgtgc

SEQ ID NO: 25626 - DNA, 24 bp, Artificial Sequence
  Probe
taaacaaaacgaatgatttcgact

SEQ ID NO: 25627 - DNA, 25 bp, Artificial Sequence
  Probe
taaacaaaacgaatgatttcgactc

SEQ ID NO: 25628 - DNA, 36 bp, Artificial Sequence; identical to SEQ ID NO: 23185
  Probe

SEQ ID NO: 25629 - DNA, 19 bp, Artificial Sequence
  Probe
taaagacaggggttaggcc

SEQ ID NO: 25630 - DNA, 20 bp, Artificial Sequence
  Probe
taaagacaggggttaggcct

SEQ ID NO: 25631 - DNA, 26 bp, Artificial Sequence
  Probe
taaaggataacagctatccattggtc

SEQ ID NO: 25632 - DNA, 22 bp, Artificial Sequence
  Probe
taaataataggagcttaaaccc

SEQ ID NO: 25633 - DNA, 19 bp, Artificial Sequence
  Probe
taaatacagaccaagagcc

SEQ ID NO: 25634 - DNA, 20 bp, Artificial Sequence
  Probe
taaatacagaccaagagcct

SEQ ID NO: 25635 - DNA, 32 bp, Artificial Sequence
  Probe
taaattagaatcttagctttgggtgctaatgg

SEQ ID NO: 25636 - DNA, 19 bp, Artificial Sequence
  Probe
taacagctatccattggtc

SEQ ID NO: 25637 - DNA, 20 bp, Artificial Sequence
  Probe
taacagctatccattggtct

SEQ ID NO: 25638 - DNA, 36 bp, Artificial Sequence
  Probe
taagatggcagagcccggtaatcgcataaaacttaa

SEQ ID NO: 25639 - DNA, 18 bp, Artificial Sequence
  Probe
taataggagcttaaaccc

SEQ ID NO: 25640 - DNA, 36 bp, Artificial Sequence
  Probe
taatctgaaggtcgtgagttcgagcctcacacgggg

SEQ ID NO: 25641 - DNA, 36 bp, Artificial Sequence
  Probe
taatggttagcactctggactctgaatccagcgatc

SEQ ID NO: 25642 - DNA, 36 bp, Artificial Sequence; identical to SEQ ID NO: 1577
  Probe

SEQ ID NO: 25643 - DNA, 31 bp, Artificial Sequence
  Probe
taccgttaacttccaattaactagttttgac

SEQ ID NO: 25644 - DNA, 23 bp, Artificial Sequence
  Probe
tacctcctcaaagcaatacactg

SEQ ID NO: 25645 - DNA, 36 bp, Artificial Sequence
  Probe
tagaatcttagctttgggtgctaatggtggagttaa

SEQ ID NO: 25646 - DNA, 20 bp, Artificial Sequence
  Probe
tagaattctcgcctgccacg

SEQ ID NO: 25647 - DNA, 21 bp, Artificial Sequence
  Probe
tagaattctcgcctgccacgc

SEQ ID NO: 25648 - DNA, 20 bp, Artificial Sequence
  Probe
tagagtaaataataggagct

SEQ ID NO: 25649 - DNA, 33 bp, Artificial Sequence; identical to SEQ ID NO: 23436
  Probe

SEQ ID NO: 25650 - DNA, 36 bp, Artificial Sequence; identical to SEQ ID NO: 7555
  Probe

SEQ ID NO: 25651 - DNA, 33 bp, Artificial Sequence; identical to SEQ ID NO: 23444
  Probe

SEQ ID NO: 25652 - DNA, 36 bp, Artificial Sequence; identical to SEQ ID NO: 1584
  Probe

SEQ ID NO: 25653 - DNA, 26 bp, Artificial Sequence
  Probe
tagctcagtcggtagagcatcagact

SEQ ID NO: 25654 - DNA, 28 bp, Artificial Sequence
  Probe
tagctcagtcggtagagcatcagacttt

SEQ ID NO: 25655 - DNA, 29 bp, Artificial Sequence
  Probe
tagctcagtcggtagagcatcagactttt

SEQ ID NO: 25656 - DNA, 25 bp, Artificial Sequence
  Probe
tagctcagtcggtagagcatgggac

SEQ ID NO: 25657 - DNA, 26 bp, Artificial Sequence
  Probe
tagctcagtcggtagagcatgggact

SEQ ID NO: 25658 - DNA, 27 bp, Artificial Sequence
  Probe
tagctcagtcggtagagcatgggactc

SEQ ID NO: 25659 - DNA, 36 bp, Artificial Sequence
  Probe
tagctgttaactaagtgtttgtgggtttaagtccca

SEQ ID NO: 25660 - DNA, 36 bp, Artificial Sequence
  Probe
tagctttgggtgctaatggtggagttaaagactttt

SEQ ID NO: 25661 - DNA, 16 bp, Artificial Sequence
  Probe
taggagcttaaacccc

SEQ ID NO: 25662 - DNA, 19 bp, Artificial Sequence
  Probe
taggatggggtgtgatagg

SEQ ID NO: 25663 - DNA, 20 bp, Artificial Sequence
  Probe
taggatggggtgtgataggt

SEQ ID NO: 25664 - DNA, 21 bp, Artificial Sequence
  Probe
taggatggggtgtgataggtg

SEQ ID NO: 25665 - DNA, 22 bp, Artificial Sequence
  Probe
taggatggggtgtgataggtgg

SEQ ID NO: 25666 - DNA, 23 bp, Artificial Sequence
  Probe
taggatggggtgtgataggtggc

SEQ ID NO: 25667 - DNA, 24 bp, Artificial Sequence
  Probe
taggatggggtgtgataggtggca

SEQ ID NO: 25668 - DNA, 25 bp, Artificial Sequence
  Probe
taggatggggtgtgataggtggcac

SEQ ID NO: 25669 - DNA, 26 bp, Artificial Sequence
  Probe
taggatggggtgtgataggtggcacg

SEQ ID NO: 25670 - DNA, 27 bp, Artificial Sequence
  Probe
taggatggggtgtgataggtggcacgg

SEQ ID NO: 25671 - DNA, 28 bp, Artificial Sequence
  Probe
taggatggggtgtgataggtggcacgga

SEQ ID NO: 25672 - DNA, 29 bp, Artificial Sequence
  Probe
taggatggggtgtgataggtggcacggag

SEQ ID NO: 25673 - DNA, 30 bp, Artificial Sequence; identical to SEQ ID NO: 1592
  Probe

SEQ ID NO: 25674 - DNA, 31 bp, Artificial Sequence; identical to SEQ ID NO: 7585
  Probe

SEQ ID NO: 25675 - DNA, 32 bp, Artificial Sequence; identical to SEQ ID NO: 1593
  Probe

SEQ ID NO: 25676 - DNA, 33 bp, Artificial Sequence; identical to SEQ ID NO: 1594
  Probe

SEQ ID NO: 25677 - DNA, 34 bp, Artificial Sequence; identical to SEQ ID NO: 7586
  Probe

SEQ ID NO: 25678 - DNA, 35 bp, Artificial Sequence; identical to SEQ ID NO: 7587
  Probe

SEQ ID NO: 25679 - DNA, 36 bp, Artificial Sequence; identical to SEQ ID NO: 1595
  Probe

SEQ ID NO: 25680 - DNA, 41 bp, Artificial Sequence
  Probe
taggatggggtgtgataggtggcacggagaattttggattc

SEQ ID NO: 25681 - DNA, 30 bp, Artificial Sequence; identical to SEQ ID NO: 23497
  Probe

SEQ ID NO: 25682 - DNA, 30 bp, Artificial Sequence; identical to SEQ ID NO: 23547
  Probe

SEQ ID NO: 25683 - DNA, 36 bp, Artificial Sequence; identical to SEQ ID NO: 23550
  Probe

SEQ ID NO: 25684 - DNA, 37 bp, Artificial Sequence; identical to SEQ ID NO: 14220
  Probe

SEQ ID NO: 25685 - DNA, 19 bp, Artificial Sequence
  Probe
tagtggttagtactctgcg

SEQ ID NO: 25686 - DNA, 21 bp, Artificial Sequence
  Probe
tagtggttagtactctgcgtt

SEQ ID NO: 25687 - DNA, 23 bp, Artificial Sequence
  Probe
tatcattggtcgtggttgtagtc

SEQ ID NO: 25688 - DNA, 24 bp, Artificial Sequence
  Probe
tatcattggtcgtggttgtagtcc

SEQ ID NO: 25689 - DNA, 25 bp, Artificial Sequence
  Probe
tatcattggtcgtggttgtagtccg

SEQ ID NO: 25690 - DNA, 27 bp, Artificial Sequence
  Probe
tatcattggtcgtggttgtagtccgtg

SEQ ID NO: 25691 - DNA, 29 bp, Artificial Sequence
  Probe
tatcattggtcgtggttgtagtccgtgcg

SEQ ID NO: 25692 - DNA, 30 bp, Artificial Sequence
  Probe
tatcattggtcgtggttgtagtccgtgcga

SEQ ID NO: 25693 - DNA, 31 bp, Artificial Sequence; identical to SEQ ID NO: 23604
  Probe

SEQ ID NO: 25694 - DNA, 32 bp, Artificial Sequence; identical to SEQ ID NO: 23605
  Probe

SEQ ID NO: 25695 - DNA, 33 bp, Artificial Sequence; identical to SEQ ID NO: 23606
  Probe

SEQ ID NO: 25696 - DNA, 20 bp, Artificial Sequence
  Probe
tatccattggtcttaggccc

SEQ ID NO: 25697 - DNA, 21 bp, Artificial Sequence
  Probe
tatccattggtcttaggcccc

SEQ ID NO: 25698 - DNA, 36 bp, Artificial Sequence
  Probe
tatcgggcccataccccgaaaatgttggttataccc

SEQ ID NO: 25699 - DNA, 35 bp, Artificial Sequence; identical to SEQ ID NO: 23614
  Probe

SEQ ID NO: 25700 - DNA, 35 bp, Artificial Sequence
  Probe
tatgattctcgcttcgggtgtgagaggtcccgggt

SEQ ID NO: 25701 - DNA, 35 bp, Artificial Sequence; identical to SEQ ID NO: 23617
  Probe

SEQ ID NO: 25702 - DNA, 36 bp, Artificial Sequence; identical to SEQ ID NO: 23618
  Probe

SEQ ID NO: 25703 - DNA, 36 bp, Artificial Sequence; identical to SEQ ID NO: 23620
  Probe

SEQ ID NO: 25704 - DNA, 20 bp, Artificial Sequence
  Probe
tcaaatcccggacgagcccc

SEQ ID NO: 25705 - DNA, 21 bp, Artificial Sequence
  Probe
tcaaatcccggacgagccccc

SEQ ID NO: 25706 - DNA, 22 bp, Artificial Sequence
  Probe
tcaatccccggcacctccacca

SEQ ID NO: 25707 - DNA, 18 bp, Artificial Sequence
  Probe
tcacaagaactgctaact

SEQ ID NO: 25708 - DNA, 36 bp, Artificial Sequence
  Probe
tcacaagaactgctaactcatgcccccatgtctaac

SEQ ID NO: 25709 - DNA, 36 bp, Artificial Sequence
  Probe
tcaccgccgcggcccgggttcgattcccggtcaggg

SEQ ID NO: 25710 - DNA, 36 bp, Artificial Sequence; identical to SEQ ID NO: 1616
  Probe

SEQ ID NO: 25711 - DNA, 36 bp, Artificial Sequence; identical to SEQ ID NO: 1622
  Probe

SEQ ID NO: 25712 - DNA, 36 bp, Artificial Sequence
  Probe
tcagattgtgaatctgacaacagaggcttacgaccc

SEQ ID NO: 25713 - DNA, 17 bp, Artificial Sequence
  Probe
tcagtcggtagagcatc

SEQ ID NO: 25714 - DNA, 21 bp, Artificial Sequence
  Probe
tcagtcggtagagcatcagac

SEQ ID NO: 25715 - DNA, 25 bp, Artificial Sequence
  Probe
tcagtcggtagagcatcagactttt

SEQ ID NO: 25716 - DNA, 22 bp, Artificial Sequence
  Probe
tcagtcggtagagcatgggact

SEQ ID NO: 25717 - DNA, 36 bp, Artificial Sequence
  Probe
tcatatcattggtcgtggttgtagtccgtgcgagaa

SEQ ID NO: 25718 - DNA, 21 bp, Artificial Sequence
  Probe
tcattggtcgtggttgtagtc

SEQ ID NO: 25719 - DNA, 22 bp, Artificial Sequence
  Probe
tcattggtcgtggttgtagtcc

SEQ ID NO: 25720 - DNA, 29 bp, Artificial Sequence
  Probe
tcattggtcgtggttgtagtccgtgcgag

SEQ ID NO: 25721 - DNA, 30 bp, Artificial Sequence; identical to SEQ ID NO: 23752
  Probe

SEQ ID NO: 25722 - DNA, 31 bp, Artificial Sequence; identical to SEQ ID NO: 23753
  Probe

SEQ ID NO: 25723 - DNA, 32 bp, Artificial Sequence
  Probe
tcattggtcgtggttgtagtccgtgcgagaat

SEQ ID NO: 25724 - DNA, 33 bp, Artificial Sequence; identical to SEQ ID NO: 7770
  Probe

SEQ ID NO: 25725 - DNA, 18 bp, Artificial Sequence
  Probe
tccattggtcttaggccc

SEQ ID NO: 25726 - DNA, 19 bp, Artificial Sequence
  Probe
tccattggtcttaggcccc

SEQ ID NO: 25727 - DNA, 25 bp, Artificial Sequence
  Probe
tcccacatggtctagcggttaggat

SEQ ID NO: 25728 - DNA, 26 bp, Artificial Sequence
  Probe
tcccacatggtctagcggttaggatt

SEQ ID NO: 25729 - DNA, 28 bp, Artificial Sequence
  Probe
tcccacatggtctagcggttaggattcc

SEQ ID NO: 25730 - DNA, 29 bp, Artificial Sequence
  Probe
tcccacatggtctagcggttaggattcct

SEQ ID NO: 25731 - DNA, 30 bp, Artificial Sequence; identical to SEQ ID NO: 1643
  Probe

SEQ ID NO: 25732 - DNA, 31 bp, Artificial Sequence; identical to SEQ ID NO: 1644
  Probe

SEQ ID NO: 25733 - DNA, 32 bp, Artificial Sequence; identical to SEQ ID NO: 1645
  Probe

SEQ ID NO: 25734 - DNA, 33 bp, Artificial Sequence; identical to SEQ ID NO: 1646
  Probe

SEQ ID NO: 25735 - DNA, 34 bp, Artificial Sequence; identical to SEQ ID NO: 1647
  Probe

SEQ ID NO: 25736 - DNA, 35 bp, Artificial Sequence; identical to SEQ ID NO: 1648
  Probe

SEQ ID NO: 25737 - DNA, 36 bp, Artificial Sequence; identical to SEQ ID NO: 1649
  Probe

SEQ ID NO: 25738 - DNA, 50 bp, Artificial Sequence; identical to SEQ ID NO: 7798
  Probe

SEQ ID NO: 25739 - DNA, 28 bp, Artificial Sequence
  Probe
tcccatatggtctagcggttaggattcc

SEQ ID NO: 25740 - DNA, 29 bp, Artificial Sequence
  Probe
tcccatatggtctagcggttaggattcct

SEQ ID NO: 25741 - DNA, 30 bp, Artificial Sequence; identical to SEQ ID NO: 1659
  Probe

SEQ ID NO: 25742 - DNA, 32 bp, Artificial Sequence; identical to SEQ ID NO: 1661
  Probe

SEQ ID NO: 25743 - DNA, 33 bp, Artificial Sequence; identical to SEQ ID NO: 1662
  Probe

SEQ ID NO: 25744 - DNA, 36 bp, Artificial Sequence; identical to SEQ ID NO: 1665
  Probe

SEQ ID NO: 25745 - DNA, 16 bp, Artificial Sequence
  Probe
tccccggcacctccac

SEQ ID NO: 25746 - DNA, 17 bp, Artificial Sequence
  Probe
tccccggcacctccacc

SEQ ID NO: 25747 - DNA, 18 bp, Artificial Sequence
  Probe
tccccggcacctccacca

SEQ ID NO: 25748 - DNA, 31 bp, Artificial Sequence; identical to SEQ ID NO: 1671
  Probe

SEQ ID NO: 25749 - DNA, 32 bp, Artificial Sequence; identical to SEQ ID NO: 1672
  Probe

SEQ ID NO: 25750 - DNA, 33 bp, Artificial Sequence; identical to SEQ ID NO: 1673
  Probe

SEQ ID NO: 25751 - DNA, 34 bp, Artificial Sequence; identical to SEQ ID NO: 1674
  Probe

SEQ ID NO: 25752 - DNA, 35 bp, Artificial Sequence; identical to SEQ ID NO: 1675
  Probe

SEQ ID NO: 25753 - DNA, 36 bp, Artificial Sequence; identical to SEQ ID NO: 1676
  Probe

SEQ ID NO: 25754 - DNA, 39 bp, Artificial Sequence; identical to SEQ ID NO: 7857
  Probe

SEQ ID NO: 25755 - DNA, 31 bp, Artificial Sequence; identical to SEQ ID NO: 1679
  Probe

SEQ ID NO: 25756 - DNA, 32 bp, Artificial Sequence; identical to SEQ ID NO: 1680
  Probe

SEQ ID NO: 25757 - DNA, 33 bp, Artificial Sequence; identical to SEQ ID NO: 1681
  Probe

SEQ ID NO: 25758 - DNA, 34 bp, Artificial Sequence; identical to SEQ ID NO: 1682
  Probe

SEQ ID NO: 25759 - DNA, 35 bp, Artificial Sequence; identical to SEQ ID NO: 1683
  Probe

SEQ ID NO: 25760 - DNA, 36 bp, Artificial Sequence; identical to SEQ ID NO: 1684
  Probe

SEQ ID NO: 25761 - DNA, 37 bp, Artificial Sequence; identical to SEQ ID NO: 1685
  Probe

SEQ ID NO: 25762 - DNA, 39 bp, Artificial Sequence; identical to SEQ ID NO: 1687
  Probe

SEQ ID NO: 25763 - DNA, 50 bp, Artificial Sequence; identical to SEQ ID NO: 1691
  Probe

SEQ ID NO: 25764 - DNA, 29 bp, Artificial Sequence
  Probe
tccgtagtgtagtggtcatcacgttcgcc

SEQ ID NO: 25765 - DNA, 30 bp, Artificial Sequence; identical to SEQ ID NO: 14328
  Probe

SEQ ID NO: 25766 - DNA, 32 bp, Artificial Sequence; identical to SEQ ID NO: 1703
  Probe

SEQ ID NO: 25767 - DNA, 33 bp, Artificial Sequence; identical to SEQ ID NO: 1704
  Probe

SEQ ID NO: 25768 - DNA, 36 bp, Artificial Sequence; identical to SEQ ID NO: 1707
  Probe

SEQ ID NO: 25769 - DNA, 26 bp, Artificial Sequence
  Probe
tcgcctgccacgcgggaggcccgggt

SEQ ID NO: 25770 - DNA, 24 bp, Artificial Sequence
  Probe
tcggcgctctcaccgccgcggccc

SEQ ID NO: 25771 - DNA, 25 bp, Artificial Sequence
  Probe
tcggcgctctcaccgccgcggcccg

SEQ ID NO: 25772 - DNA, 25 bp, Artificial Sequence
  Probe
tcggctgttaaccgaaaggttggtg

SEQ ID NO: 25773 - DNA, 26 bp, Artificial Sequence
  Probe
tcggctgttaaccgaaaggttggtgg

SEQ ID NO: 25774 - DNA, 27 bp, Artificial Sequence
  Probe
tcggctgttaaccgaaaggttggtggt

SEQ ID NO: 25775 - DNA, 18 bp, Artificial Sequence
  Probe
tcgggtgcgagaggtccc

SEQ ID NO: 25776 - DNA, 21 bp, Artificial Sequence
  Probe
tcgggtgcgagaggtcccggg

SEQ ID NO: 25777 - DNA, 22 bp, Artificial Sequence
  Probe
tcgggtgcgagaggtcccgggt

SEQ ID NO: 25778 - DNA, 23 bp, Artificial Sequence
  Probe
tcgggtgcgagaggtcccgggtt

SEQ ID NO: 25779 - DNA, 16 bp, Artificial Sequence
  Probe
tcggtagagcatcaga

SEQ ID NO: 25780 - DNA, 17 bp, Artificial Sequence
  Probe
tcggtagagcatcagac

SEQ ID NO: 25781 - DNA, 18 bp, Artificial Sequence
  Probe
tcggtagagcatcagact

SEQ ID NO: 25782 - DNA, 19 bp, Artificial Sequence
  Probe
tcggtagagcatgagaccc

SEQ ID NO: 25783 - DNA, 17 bp, Artificial Sequence
  Probe
tcggtagagcatgggac

SEQ ID NO: 25784 - DNA, 18 bp, Artificial Sequence
  Probe
tcggtagagcatgggact

SEQ ID NO: 25785 - DNA, 19 bp, Artificial Sequence
  Probe
tcggtagagcatgggactc

SEQ ID NO: 25786 - DNA, 26 bp, Artificial Sequence
  Probe
tcggtagagcatgggactcttaatcc

SEQ ID NO: 25787 - DNA, 27 bp, Artificial Sequence
  Probe
tcggtagagcatgggactcttaatccc

SEQ ID NO: 25788 - DNA, 22 bp, Artificial Sequence
  Probe
tcgtaaaccgaagatcgcgggt

SEQ ID NO: 25789 - DNA, 24 bp, Artificial Sequence
  Probe
tcgtatagtggttagtactctgcg

SEQ ID NO: 25790 - DNA, 23 bp, Artificial Sequence
  Probe
tcgtggttgtagtccgtgcgaga

SEQ ID NO: 25791 - DNA, 24 bp, Artificial Sequence
  Probe
tcgtggttgtagtccgtgcgagaa

SEQ ID NO: 25792 - DNA, 36 bp, Artificial Sequence
  Probe
tctagtggttaggattcggcgctctcaccgccgcgg

SEQ ID NO: 25793 - DNA, 36 bp, Artificial Sequence
  Probe
tctcagggtcgtgggttcgagccccacgttgggcgc

SEQ ID NO: 25794 - DNA, 36 bp, Artificial Sequence
  Probe
tctgaaggtcgtgagttcgatcctcacacggggcac

SEQ ID NO: 25795 - DNA, 20 bp, Artificial Sequence
  Probe
tctgaatccagcgatccgag

SEQ ID NO: 25796 - DNA, 21 bp, Artificial Sequence
  Probe
tctgaatccagcgatccgagt

SEQ ID NO: 25797 - DNA, 22 bp, Artificial Sequence
  Probe
tctgaatccagcgatccgagtt

SEQ ID NO: 25798 - DNA, 28 bp, Artificial Sequence
  Probe
tctggactctgaatccagcgatccgagt

SEQ ID NO: 25799 - DNA, 29 bp, Artificial Sequence
  Probe
tctggactctgaatccagcgatccgagtt

SEQ ID NO: 25800 - DNA, 36 bp, Artificial Sequence
  Probe
tcttagctttgggtgctaatggtggagttaaagact

SEQ ID NO: 25801 - DNA, 21 bp, Artificial Sequence
  Probe
tgaaaacctttttccaaggac

SEQ ID NO: 25802 - DNA, 22 bp, Artificial Sequence
  Probe
tgaaaacctttttccaaggaca

SEQ ID NO: 25803 - DNA, 18 bp, Artificial Sequence
  Probe
tgaatccagcgatccgag

SEQ ID NO: 25804 - DNA, 19 bp, Artificial Sequence
  Probe
tgaatccagcgatccgagt

SEQ ID NO: 25805 - DNA, 20 bp, Artificial Sequence
  Probe
tgaatccagcgatccgagtt

SEQ ID NO: 25806 - DNA, 28 bp, Artificial Sequence
  Probe
tgaatctgacaacagaggcttacgaccc

SEQ ID NO: 25807 - DNA, 29 bp, Artificial Sequence
  Probe
tgaatctgacaacagaggcttacgacccc

SEQ ID NO: 25808 - DNA, 30 bp, Artificial Sequence; identical to SEQ ID NO: 1734
  Probe

SEQ ID NO: 25809 - DNA, 31 bp, Artificial Sequence; identical to SEQ ID NO: 1735
  Probe

SEQ ID NO: 25810 - DNA, 32 bp, Artificial Sequence; identical to SEQ ID NO: 1736
  Probe

SEQ ID NO: 25811 - DNA, 36 bp, Artificial Sequence; identical to SEQ ID NO: 1740
  Probe

SEQ ID NO: 25812 - DNA, 26 bp, Artificial Sequence
  Probe
tgactgcagatcaagaggtccccggt

SEQ ID NO: 25813 - DNA, 25 bp, Artificial Sequence
  Probe
tggactctgaatccagcgatccgag

SEQ ID NO: 25814 - DNA, 26 bp, Artificial Sequence
  Probe
tggactctgaatccagcgatccgagt

SEQ ID NO: 25815 - DNA, 27 bp, Artificial Sequence
  Probe
tggactctgaatccagcgatccgagtt

SEQ ID NO: 25816 - DNA, 16 bp, Artificial Sequence
  Probe
tggataaggcgtctga

SEQ ID NO: 25817 - DNA, 21 bp, Artificial Sequence
  Probe
tgggtgcgagaggtcccgggt

SEQ ID NO: 25818 - DNA, 32 bp, Artificial Sequence; identical to SEQ ID NO: 1767
  Probe

SEQ ID NO: 25819 - DNA, 23 bp, Artificial Sequence
  Probe
tggtagaattctcgcctgccacg

SEQ ID NO: 25820 - DNA, 24 bp, Artificial Sequence
  Probe
tggtagaattctcgcctgccacgc

SEQ ID NO: 25821 - DNA, 25 bp, Artificial Sequence
  Probe
tggtagaattctcgcctgccacgcg

SEQ ID NO: 25822 - DNA, 26 bp, Artificial Sequence
  Probe
tggtagaattctcgcctgccacgcgg

SEQ ID NO: 25823 - DNA, 28 bp, Artificial Sequence
  Probe
tggtagaattctcgcctgccacgcggga

SEQ ID NO: 25824 - DNA, 33 bp, Artificial Sequence; identical to SEQ ID NO: 1768
  Probe

SEQ ID NO: 25825 - DNA, 36 bp, Artificial Sequence
  Probe
tggtagaattctcgcctgccacgcgggaggcccggg

SEQ ID NO: 25826 - DNA, 36 bp, Artificial Sequence; identical to SEQ ID NO: 1771
  Probe

SEQ ID NO: 25827 - DNA, 26 bp, Artificial Sequence
  Probe
tggtcgtggttgtagtccgtgcgaga

SEQ ID NO: 25828 - DNA, 27 bp, Artificial Sequence
  Probe
tggtcgtggttgtagtccgtgcgagaa

SEQ ID NO: 25829 - DNA, 28 bp, Artificial Sequence
  Probe
tggtcgtggttgtagtccgtgcgagaat

SEQ ID NO: 25830 - DNA, 29 bp, Artificial Sequence
  Probe
tggtcgtggttgtagtccgtgcgagaata

SEQ ID NO: 25831 - DNA, 32 bp, Artificial Sequence
  Probe
tggtgtaatggttagcactctggactctgaat

SEQ ID NO: 25832 - DNA, 33 bp, Artificial Sequence
  Probe
tggtgtaatggttagcactctggactctgaatc

SEQ ID NO: 25833 - DNA, 36 bp, Artificial Sequence
  Probe
tggtgtaatggttagcactctggactctgaatccag

SEQ ID NO: 25834 - DNA, 33 bp, Artificial Sequence
  Probe
tggtgtaatggttagcactctggactttgaatc

SEQ ID NO: 25835 - DNA, 24 bp, Artificial Sequence
  Probe
tggttagcactctggactctgaat

SEQ ID NO: 25836 - DNA, 25 bp, Artificial Sequence
  Probe
tggttagcactctggactctgaatc

SEQ ID NO: 25837 - DNA, 36 bp, Artificial Sequence
  Probe
tggttagcactctggactctgaatccagcgatccga

SEQ ID NO: 25838 - DNA, 16 bp, Artificial Sequence
  Probe
tggttaggattcggcg

SEQ ID NO: 25839 - DNA, 17 bp, Artificial Sequence
  Probe
tggttaggattcggcgc

SEQ ID NO: 25840 - DNA, 18 bp, Artificial Sequence
  Probe
tggttaggattcggcgct

SEQ ID NO: 25841 - DNA, 19 bp, Artificial Sequence
  Probe
tggttaggattcggcgctc

SEQ ID NO: 25842 - DNA, 24 bp, Artificial Sequence
  Probe
tggttaggattcggcgctctcacc

SEQ ID NO: 25843 - DNA, 27 bp, Artificial Sequence
  Probe
tggttaggattcggcgctctcaccgcc

SEQ ID NO: 25844 - DNA, 34 bp, Artificial Sequence; identical to SEQ ID NO: 14437
  Probe

SEQ ID NO: 25845 - DNA, 36 bp, Artificial Sequence
  Probe
tggttaggattcggcgctctcaccgccgcggcccgg

SEQ ID NO: 25846 - DNA, 17 bp, Artificial Sequence
  Probe
tggttagtactctgcgt

SEQ ID NO: 25847 - DNA, 18 bp, Artificial Sequence
  Probe
tggttagtactctgcgtt

SEQ ID NO: 25848 - DNA, 16 bp, Artificial Sequence
  Probe
tggttatcacgtctgc

SEQ ID NO: 25849 - DNA, 20 bp, Artificial Sequence
  Probe
tggttgtagtccgtgcgaga

SEQ ID NO: 25850 - DNA, 21 bp, Artificial Sequence
  Probe
tggttgtagtccgtgcgagaa

SEQ ID NO: 25851 - DNA, 22 bp, Artificial Sequence
  Probe
tggttgtagtccgtgcgagaat

SEQ ID NO: 25852 - DNA, 23 bp, Artificial Sequence
  Probe
tggttgtagtccgtgcgagaata

SEQ ID NO: 25853 - DNA, 36 bp, Artificial Sequence
  Probe
tggtttttcatatcattggtcgtggttgtagtccgt

SEQ ID NO: 25854 - DNA, 21 bp, Artificial Sequence
  Probe
tgtaaaccggagatgaaaacc

SEQ ID NO: 25855 - DNA, 29 bp, Artificial Sequence
  Probe
tgtaatggttagcactctggactctgaat

SEQ ID NO: 25856 - DNA, 30 bp, Artificial Sequence
  Probe
tgtaatggttagcactctggactctgaatc

SEQ ID NO: 25857 - DNA, 31 bp, Artificial Sequence
  Probe
tgtaatggttagcactctggactctgaatcc

SEQ ID NO: 25858 - DNA, 32 bp, Artificial Sequence
  Probe
tgtaatggttagcactctggactctgaatcca

SEQ ID NO: 25859 - DNA, 36 bp, Artificial Sequence
  Probe
tgtaatggttagcactctggactctgaatccagcga

SEQ ID NO: 25860 - DNA, 30 bp, Artificial Sequence
  Probe
tgtaatggttagcactctggactttgaatc

SEQ ID NO: 25861 - DNA, 17 bp, Artificial Sequence
  Probe
tgtcacgcgggagaccg

SEQ ID NO: 25862 - DNA, 36 bp, Artificial Sequence
  Probe
tgtgaatctgacaacagaggcttacgaccccttatt

SEQ ID NO: 25863 - DNA, 27 bp, Artificial Sequence
  Probe
ttaaaggataacagctatccattggtc

SEQ ID NO: 25864 - DNA, 36 bp, Artificial Sequence
  Probe
ttaaccgaaaggttggtggttcgagcccacccaggg

SEQ ID NO: 25865 - DNA, 36 bp, Artificial Sequence; identical to SEQ ID NO: 1789
  Probe

SEQ ID NO: 25866 - DNA, 26 bp, Artificial Sequence
  Probe
ttaacttccaattaactagttttgac

SEQ ID NO: 25867 - DNA, 21 bp, Artificial Sequence
  Probe
ttacagtcagaggttcaattc

SEQ ID NO: 25868 - DNA, 22 bp, Artificial Sequence
  Probe
ttagcactctggactctgaatc

SEQ ID NO: 25869 - DNA, 34 bp, Artificial Sequence
  Probe
ttagcactctggactctgaatccagcgatccgag

SEQ ID NO: 25870 - DNA, 35 bp, Artificial Sequence
  Probe
ttagcactctggactctgaatccagcgatccgagt

SEQ ID NO: 25871 - DNA, 36 bp, Artificial Sequence
  Probe
ttagcactctggactctgaatccagcgatccgagtt

SEQ ID NO: 25872 - DNA, 36 bp, Artificial Sequence
  Probe
ttagcactctggactttgaatccagcgatccgagtt

SEQ ID NO: 25873 - DNA, 36 bp, Artificial Sequence; identical to SEQ ID NO: 24619
  Probe

SEQ ID NO: 25874 - DNA, 36 bp, Artificial Sequence
  Probe
ttagctgttaactaagtgtttgtgggtttaagtccc

SEQ ID NO: 25875 - DNA, 16 bp, Artificial Sequence
  Probe
ttaggattcggcgctc

SEQ ID NO: 25876 - DNA, 24 bp, Artificial Sequence
  Probe
ttaggattcggcgctctcaccgcc

SEQ ID NO: 25877 - DNA, 30 bp, Artificial Sequence
  Probe
ttaggattcggcgctctcaccgccgcggcc

SEQ ID NO: 25878 - DNA, 31 bp, Artificial Sequence
  Probe
ttaggattcggcgctctcaccgccgcggccc

SEQ ID NO: 25879 - DNA, 36 bp, Artificial Sequence
  Probe
ttaggattcggcgctctcaccgccgcggcccgggtt

SEQ ID NO: 25880 - DNA, 36 bp, Artificial Sequence
  Probe
ttagggtgcttagctgttaactaagtgtttgtgggt

SEQ ID NO: 25881 - DNA, 36 bp, Artificial Sequence
  Probe
ttcaaaggttgtgggttcgagtcccaccagagtcgc

SEQ ID NO: 25882 - DNA, 18 bp, Artificial Sequence
  Probe
ttcaggtcgcagtctccc

SEQ ID NO: 25883 - DNA, 36 bp, Artificial Sequence
  Probe
ttcatatcattggtcgtggttgtagtccgtgcgaga

SEQ ID NO: 25884 - DNA, 21 bp, Artificial Sequence
  Probe
ttccaattaactagttttgac

SEQ ID NO: 25885 - DNA, 16 bp, Artificial Sequence
  Probe
ttccggctcgaaggac

SEQ ID NO: 25886 - DNA, 30 bp, Artificial Sequence; identical to SEQ ID NO: 24686
  Probe

SEQ ID NO: 25887 - DNA, 31 bp, Artificial Sequence; identical to SEQ ID NO: 8421
  Probe

SEQ ID NO: 25888 - DNA, 25 bp, Artificial Sequence
  Probe
ttcggcgctctcaccgccgcggccc

SEQ ID NO: 25889 - DNA, 29 bp, Artificial Sequence
  Probe
ttcggcgctctcaccgccgcggcccgggt

SEQ ID NO: 25890 - DNA, 30 bp, Artificial Sequence
  Probe
ttcggcgctctcaccgccgcggcccgggtt

SEQ ID NO: 25891 - DNA, 36 bp, Artificial Sequence
  Probe
ttcggcgctctcaccgccgcggcccgggttcgattc

SEQ ID NO: 25892 - DNA, 36 bp, Artificial Sequence
  Probe
ttctggtctccggatggaggcgtgggttcgaatccc

SEQ ID NO: 25893 - DNA, 30 bp, Artificial Sequence
  Probe
ttctgtagtgtagtggttatcacgttcgcc

SEQ ID NO: 25894 - DNA, 31 bp, Artificial Sequence; identical to SEQ ID NO: 24742
  Probe

SEQ ID NO: 25895 - DNA, 27 bp, Artificial Sequence
  Probe
ttgactgcagatcaagaggtccccggt

SEQ ID NO: 25896 - DNA, 24 bp, Artificial Sequence
  Probe
ttgatagagtaaataataggagct

SEQ ID NO: 25897 - DNA, 31 bp, Artificial Sequence
  Probe
ttgatagagtaaataataggagcttaaaccc

SEQ ID NO: 25898 - DNA, 36 bp, Artificial Sequence
  Probe
ttgattagggtgcttagctgttaactaagtgtttgt

SEQ ID NO: 25899 - DNA, 22 bp, Artificial Sequence
  Probe
ttgcacgtatgaggccccgggt

SEQ ID NO: 25900 - DNA, 36 bp, Artificial Sequence
  Probe
ttggactgtaaatctaaagacaggggttaggcctct

SEQ ID NO: 25901 - DNA, 16 bp, Artificial Sequence
  Probe
ttggggggttcgattc

SEQ ID NO: 25902 - DNA, 18 bp, Artificial Sequence
  Probe
ttgggtgcgagaggtccc

SEQ ID NO: 25903 - DNA, 21 bp, Artificial Sequence
  Probe
ttgggtgcgagaggtcccggg

SEQ ID NO: 25904 - DNA, 22 bp, Artificial Sequence
  Probe
ttgggtgcgagaggtcccgggt

SEQ ID NO: 25905 - DNA, 23 bp, Artificial Sequence
  Probe
ttgggtgcgagaggtcccgggtt

SEQ ID NO: 25906 - DNA, 36 bp, Artificial Sequence
  Probe
ttgggtgctaatggtggagttaaagactttttctct

SEQ ID NO: 25907 - DNA, 18 bp, Artificial Sequence
  Probe
ttggtcgtggttgtagtc

SEQ ID NO: 25908 - DNA, 19 bp, Artificial Sequence
  Probe
ttggtcgtggttgtagtcc

SEQ ID NO: 25909 - DNA, 20 bp, Artificial Sequence
  Probe
ttggtcgtggttgtagtccg

SEQ ID NO: 25910 - DNA, 22 bp, Artificial Sequence
  Probe
ttggtcgtggttgtagtccgtg

SEQ ID NO: 25911 - DNA, 23 bp, Artificial Sequence
  Probe
ttggtcgtggttgtagtccgtgc

SEQ ID NO: 25912 - DNA, 24 bp, Artificial Sequence
  Probe
ttggtcgtggttgtagtccgtgcg

SEQ ID NO: 25913 - DNA, 25 bp, Artificial Sequence
  Probe
ttggtcgtggttgtagtccgtgcga

SEQ ID NO: 25914 - DNA, 26 bp, Artificial Sequence
  Probe
ttggtcgtggttgtagtccgtgcgag

SEQ ID NO: 25915 - DNA, 27 bp, Artificial Sequence
  Probe
ttggtcgtggttgtagtccgtgcgaga

SEQ ID NO: 25916 - DNA, 28 bp, Artificial Sequence
  Probe
ttggtcgtggttgtagtccgtgcgagaa

SEQ ID NO: 25917 - DNA, 29 bp, Artificial Sequence
  Probe
ttggtcgtggttgtagtccgtgcgagaat

SEQ ID NO: 25918 - DNA, 30 bp, Artificial Sequence; identical to SEQ ID NO: 24765
  Probe

SEQ ID NO: 25919 - DNA, 36 bp, Artificial Sequence
  Probe
ttggtggttcagtggtagaattctcgcctgccacgc

SEQ ID NO: 25920 - DNA, 22 bp, Artificial Sequence
  Probe
ttgtaaaccggagatgaaaacc

SEQ ID NO: 25921 - DNA, 23 bp, Artificial Sequence
  Probe
ttgtaaaccggagatgaaaacct

SEQ ID NO: 25922 - DNA, 36 bp, Artificial Sequence; identical to SEQ ID NO: 1800
  Probe

SEQ ID NO: 25923 - DNA, 30 bp, Artificial Sequence; identical to SEQ ID NO: 12419
  Probe

SEQ ID NO: 25924 - DNA, 31 bp, Artificial Sequence
  Probe
ttgtgaatctgacaacagaggcttacgaccc

SEQ ID NO: 25925 - DNA, 32 bp, Artificial Sequence; identical to SEQ ID NO: 8509
  Probe

SEQ ID NO: 25926 - DNA, 33 bp, Artificial Sequence
  Probe
ttgtgaatctgacaacagaggcttacgacccct

SEQ ID NO: 25927 - DNA, 36 bp, Artificial Sequence
  Probe
ttgtgaatctgacaacagaggcttacgaccccttat

SEQ ID NO: 25928 - DNA, 28 bp, Artificial Sequence
  Probe
tttaaaggataacagctatccattggtc

SEQ ID NO: 25929 - DNA, 36 bp, Artificial Sequence
  Probe
tttcatatcattggtcgtggttgtagtccgtgcgag

SEQ ID NO: 25930 - DNA, 31 bp, Artificial Sequence
  Probe
tttccgtagtgtagtggtcatcacgttcgcc

SEQ ID NO: 25931 - DNA, 32 bp, Artificial Sequence
  Probe
tttccgtagtgtagtggtcatcacgttcgcct

SEQ ID NO: 25932 - DNA, 25 bp, Artificial Sequence
  Probe
tttgatagagtaaataataggagct

SEQ ID NO: 25933 - DNA, 32 bp, Artificial Sequence
  Probe
tttgatagagtaaataataggagcttaaaccc

SEQ ID NO: 25934 - DNA, 19 bp, Artificial Sequence
  Probe
tttgcacgtatgaggcccc

SEQ ID NO: 25935 - DNA, 23 bp, Artificial Sequence
  Probe
tttgcacgtatgaggccccgggt

SEQ ID NO: 25936 - DNA, 24 bp, Artificial Sequence
  Probe
tttgcacgtatgaggccccgggtt

SEQ ID NO: 25937 - DNA, 19 bp, Artificial Sequence
  Probe
tttgggtgcgagaggtccc

SEQ ID NO: 25938 - DNA, 22 bp, Artificial Sequence
  Probe
tttgggtgcgagaggtcccggg

SEQ ID NO: 25939 - DNA, 23 bp, Artificial Sequence
  Probe
tttgggtgcgagaggtcccgggt

SEQ ID NO: 25940 - DNA, 24 bp, Artificial Sequence
  Probe
tttgggtgcgagaggtcccgggtt

SEQ ID NO: 25941 - DNA, 36 bp, Artificial Sequence
  Probe
tttgggtgctaatggtggagttaaagactttttctc

SEQ ID NO: 25942 - DNA, 29 bp, Artificial Sequence
  Probe
ttttaaaggataacagctatccattggtc

SEQ ID NO: 25943 - DNA, 36 bp, Artificial Sequence
  Probe
ttttcacccaggcggcccgggttcgactcccggtgt

SEQ ID NO: 25944 - DNA, 36 bp, Artificial Sequence
  Probe
ttttcatatcattggtcgtggttgtagtccgtgcga

SEQ ID NO: 25945 - DNA, 36 bp, Artificial Sequence
  Probe
tttttcatatcattggtcgtggttgtagtccgtgcg

SEQ ID NO: 25946 - DNA, 15 bp, Artificial Sequence
  Probe
aaaaaggattagact

SEQ ID NO: 25947 - DNA, 20 bp, Artificial Sequence
  Probe
aaaaaggattagactgaacc

SEQ ID NO: 25948 - DNA, 24 bp, Artificial Sequence
  Probe
aaaaaggattagactgaaccgaat

SEQ ID NO: 25949 - DNA, 16 bp, Artificial Sequence
  Probe
aaaaagtcatggaggc

SEQ ID NO: 25950 - DNA, 22 bp, Artificial Sequence
  Probe
aaaaagtctttaactccaccat

SEQ ID NO: 25951 - DNA, 18 bp, Artificial Sequence
  Probe
aaaaattttggtgcaact

SEQ ID NO: 25952 - DNA, 19 bp, Artificial Sequence
  Probe
aaaaattttggtgcaactc

SEQ ID NO: 25953 - DNA, 20 bp, Artificial Sequence
  Probe
aaaaattttggtgcaactcc

SEQ ID NO: 25954 - DNA, 21 bp, Artificial Sequence
  Probe
aaaaattttggtgcaactcca

SEQ ID NO: 25955 - DNA, 15 bp, Artificial Sequence
  Probe
aaaacatcagattgt

SEQ ID NO: 25956 - DNA, 20 bp, Artificial Sequence
  Probe
aaaacatcagattgtgaatc

SEQ ID NO: 25957 - DNA, 21 bp, Artificial Sequence
  Probe
aaaacatcagattgtgaatct

SEQ ID NO: 25958 - DNA, 30 bp, Artificial Sequence
  Probe
aaaacatcagattgtgaatctgacaacaga

SEQ ID NO: 25959 - DNA, 33 bp, Artificial Sequence; identical to SEQ ID NO: 1805
  Probe

SEQ ID NO: 25960 - DNA, 34 bp, Artificial Sequence; identical to SEQ ID NO: 1806
  Probe

SEQ ID NO: 25961 - DNA, 35 bp, Artificial Sequence; identical to SEQ ID NO: 1807
  Probe

SEQ ID NO: 25962 - DNA, 37 bp, Artificial Sequence
  Probe
aaaacatcagattgtgaatctgacaacagaggcttac

SEQ ID NO: 25963 - DNA, 38 bp, Artificial Sequence; identical to SEQ ID NO: 1808
  Probe

SEQ ID NO: 25964 - DNA, 39 bp, Artificial Sequence
  Probe
aaaacatcagattgtgaatctgacaacagaggcttacga

SEQ ID NO: 25965 - DNA, 40 bp, Artificial Sequence; identical to SEQ ID NO: 1809
  Probe

SEQ ID NO: 25966 - DNA, 41 bp, Artificial Sequence
  Probe
aaaacatcagattgtgaatctgacaacagaggcttacgacc

SEQ ID NO: 25967 - DNA, 42 bp, Artificial Sequence; identical to SEQ ID NO: 14481
  Probe

SEQ ID NO: 25968 - DNA, 43 bp, Artificial Sequence; identical to SEQ ID NO: 1
  Probe

SEQ ID NO: 25969 - DNA, 50 bp, Artificial Sequence; identical to SEQ ID NO: 4
  Probe

SEQ ID NO: 25970 - DNA, 19 bp, Artificial Sequence
  Probe
aaaacgaatgatttcgact

SEQ ID NO: 25971 - DNA, 20 bp, Artificial Sequence
  Probe
aaaacgaatgatttcgactc

SEQ ID NO: 25972 - DNA, 21 bp, Artificial Sequence
  Probe
aaaacgaatgatttcgactca

SEQ ID NO: 25973 - DNA, 36 bp, Artificial Sequence
  Probe
aaaacgaatgatttcgactcattaaattatgataat

SEQ ID NO: 25974 - DNA, 45 bp, Artificial Sequence
  Probe
aaaacgaatgatttcgactcattaaattatgataatcatatttac

SEQ ID NO: 25975 - DNA, 25 bp, Artificial Sequence
  Probe
aaaacttaaaactttacagtcagag

SEQ ID NO: 25976 - DNA, 26 bp, Artificial Sequence
  Probe
aaaacttaaaactttacagtcagagg

SEQ ID NO: 25977 - DNA, 36 bp, Artificial Sequence
  Probe
aaaacttaaaactttacagtcagaggttcaattcct

SEQ ID NO: 25978 - DNA, 36 bp, Artificial Sequence
  Probe
aaaagaacctgggtagctcagtaggtagaacatcag

SEQ ID NO: 25979 - DNA, 36 bp, Artificial Sequence
  Probe
aaaagagttactttgatagagtaaataataggagct

SEQ ID NO: 25980 - DNA, 18 bp, Artificial Sequence
  Probe
aaaaggattagactgaac

SEQ ID NO: 25981 - DNA, 19 bp, Artificial Sequence
  Probe
aaaaggattagactgaacc

SEQ ID NO: 25982 - DNA, 20 bp, Artificial Sequence
  Probe
aaaaggattagactgaaccg

SEQ ID NO: 25983 - DNA, 23 bp, Artificial Sequence
  Probe
aaaaggattagactgaaccgaat

SEQ ID NO: 25984 - DNA, 15 bp, Artificial Sequence
  Probe
aaaagtcatggaggc

SEQ ID NO: 25985 - DNA, 16 bp, Artificial Sequence
  Probe
aaaagtcatggaggcc

SEQ ID NO: 25986 - DNA, 21 bp, Artificial Sequence
  Probe
aaaagtctttaactccaccat

SEQ ID NO: 25987 - DNA, 18 bp, Artificial Sequence
  Probe
aaaatactcaaatgggcc

SEQ ID NO: 25988 - DNA, 26 bp, Artificial Sequence
  Probe
aaaatggctgagtgaagcattggact

SEQ ID NO: 25989 - DNA, 16 bp, Artificial Sequence
  Probe
aaaatgttggttatac

SEQ ID NO: 25990 - DNA, 17 bp, Artificial Sequence
  Probe
aaaatgttggttatacc

SEQ ID NO: 25991 - DNA, 18 bp, Artificial Sequence
  Probe
aaaatgttggttataccc

SEQ ID NO: 25992 - DNA, 17 bp, Artificial Sequence
  Probe
aaaatgtttagacgggc

SEQ ID NO: 25993 - DNA, 24 bp, Artificial Sequence
  Probe
aaaatgtttagacgggctcacatc

SEQ ID NO: 25994 - DNA, 25 bp, Artificial Sequence
  Probe
aaaatgtttagacgggctcacatca

SEQ ID NO: 25995 - DNA, 29 bp, Artificial Sequence
  Probe
aaaatgtttagacgggctcacatcacccc

SEQ ID NO: 25996 - DNA, 32 bp, Artificial Sequence
  Probe
aaaatgtttagacgggctcacatcaccccata

SEQ ID NO: 25997 - DNA, 34 bp, Artificial Sequence
  Probe
aaaatgtttagacgggctcacatcaccccataaa

SEQ ID NO: 25998 - DNA, 36 bp, Artificial Sequence
  Probe
aaaatgtttagacgggctcacatcaccccataaaca

SEQ ID NO: 25999 - DNA, 18 bp, Artificial Sequence
  Probe
aaaattttggtgcaactc

SEQ ID NO: 26000 - DNA, 19 bp, Artificial Sequence
  Probe
aaaattttggtgcaactcc

SEQ ID NO: 26001 - DNA, 22 bp, Artificial Sequence
  Probe
aaacaaaacgaatgatttcgac

SEQ ID NO: 26002 - DNA, 23 bp, Artificial Sequence
  Probe
aaacaaaacgaatgatttcgact

SEQ ID NO: 26003 - DNA, 24 bp, Artificial Sequence
  Probe
aaacaaaacgaatgatttcgactc

SEQ ID NO: 26004 - DNA, 25 bp, Artificial Sequence
  Probe
aaacaaaacgaatgatttcgactca

SEQ ID NO: 26005 - DNA, 36 bp, Artificial Sequence
  Probe
aaacaaaacgaatgatttcgactcattaaattatga

SEQ ID NO: 26006 - DNA, 19 bp, Artificial Sequence
  Probe
aaacatcagattgtgaatc

SEQ ID NO: 26007 - DNA, 20 bp, Artificial Sequence
  Probe
aaacatcagattgtgaatct

SEQ ID NO: 26008 - DNA, 29 bp, Artificial Sequence
  Probe
aaacatcagattgtgaatctgacaacaga

SEQ ID NO: 26009 - DNA, 31 bp, Artificial Sequence
  Probe
aaacatcagattgtgaatctgacaacagagg

SEQ ID NO: 26010 - DNA, 32 bp, Artificial Sequence; identical to SEQ ID NO: 1850
  Probe

SEQ ID NO: 26011 - DNA, 33 bp, Artificial Sequence
  Probe
aaacatcagattgtgaatctgacaacagaggct

SEQ ID NO: 26012 - DNA, 42 bp, Artificial Sequence; identical to SEQ ID NO: 14527
  Probe

SEQ ID NO: 26013 - DNA, 43 bp, Artificial Sequence; identical to SEQ ID NO: 1851
  Probe

SEQ ID NO: 26014 - DNA, 44 bp, Artificial Sequence; identical to SEQ ID NO: 12
  Probe

SEQ ID NO: 26015 - DNA, 45 bp, Artificial Sequence; identical to SEQ ID NO: 13
  Probe

SEQ ID NO: 26016 - DNA, 50 bp, Artificial Sequence; identical to SEQ ID NO: 14
  Probe

SEQ ID NO: 26017 - DNA, 15 bp, Artificial Sequence
  Probe
aaacccactccacct

SEQ ID NO: 26018 - DNA, 36 bp, Artificial Sequence
  Probe
aaacccccttatttctaggactatgagaatcgaacc

SEQ ID NO: 26019 - DNA, 18 bp, Artificial Sequence
  Probe
aaaccgggcagaagcaac

SEQ ID NO: 26020 - DNA, 17 bp, Artificial Sequence
  Probe
aaaccgggcggaaacac

SEQ ID NO: 26021 - DNA, 19 bp, Artificial Sequence
  Probe
aaaccgggcggaaacacct

SEQ ID NO: 26022 - DNA, 17 bp, Artificial Sequence
  Probe
aaacctagccccaaacc

SEQ ID NO: 26023 - DNA, 18 bp, Artificial Sequence
  Probe
aaacctagccccaaaccc

SEQ ID NO: 26024 - DNA, 23 bp, Artificial Sequence
  Probe
aaacctagccccaaacccactcc

SEQ ID NO: 26025 - DNA, 25 bp, Artificial Sequence
  Probe
aaacctagccccaaacccactccac

SEQ ID NO: 26026 - DNA, 26 bp, Artificial Sequence
  Probe
aaacctagccccaaacccactccacc

SEQ ID NO: 26027 - DNA, 27 bp, Artificial Sequence
  Probe
aaacctagccccaaacccactccacct

SEQ ID NO: 26028 - DNA, 15 bp, Artificial Sequence
  Probe
aaacctgccggggct

SEQ ID NO: 26029 - DNA, 18 bp, Artificial Sequence
  Probe
aaacctgccggggcttct

SEQ ID NO: 26030 - DNA, 17 bp, Artificial Sequence
  Probe
aaacgaatgatttcgac

SEQ ID NO: 26031 - DNA, 18 bp, Artificial Sequence
  Probe
aaacgaatgatttcgact

SEQ ID NO: 26032 - DNA, 19 bp, Artificial Sequence
  Probe
aaacgaatgatttcgactc

SEQ ID NO: 26033 - DNA, 20 bp, Artificial Sequence
  Probe
aaacgaatgatttcgactca

SEQ ID NO: 26034 - DNA, 21 bp, Artificial Sequence
  Probe
aaacgaatgatttcgactcat

SEQ ID NO: 26035 - DNA, 36 bp, Artificial Sequence
  Probe
aaacgaatgatttcgactcattaaattatgataatc

SEQ ID NO: 26036 - DNA, 24 bp, Artificial Sequence
  Probe
aaacttaaaactttacagtcagag

SEQ ID NO: 26037 - DNA, 36 bp, Artificial Sequence
  Probe
aaacttaaaactttacagtcagaggttcaattcctc

SEQ ID NO: 26038 - DNA, 21 bp, Artificial Sequence
  Probe
aaactttacagtcagaggttc

SEQ ID NO: 26039 - DNA, 28 bp, Artificial Sequence
  Probe
aaagaacagagaatagtttaaattagaa

SEQ ID NO: 26040 - DNA, 36 bp, Artificial Sequence; identical to SEQ ID NO: 14569
  Probe

SEQ ID NO: 26041 - DNA, 36 bp, Artificial Sequence
  Probe
aaagaacctgggtagctcagtaggtagaacatcaga

SEQ ID NO: 26042 - DNA, 16 bp, Artificial Sequence
  Probe
aaagacaccccccaca

SEQ ID NO: 26043 - DNA, 28 bp, Artificial Sequence
  Probe
aaagacaccccccacagtttatgtagct

SEQ ID NO: 26044 - DNA, 31 bp, Artificial Sequence; identical to SEQ ID NO: 14583
  Probe

SEQ ID NO: 26045 - DNA, 32 bp, Artificial Sequence; identical to SEQ ID NO: 1908
  Probe

SEQ ID NO: 26046 - DNA, 33 bp, Artificial Sequence; identical to SEQ ID NO: 1909
  Probe

SEQ ID NO: 26047 - DNA, 34 bp, Artificial Sequence; identical to SEQ ID NO: 14586
  Probe

SEQ ID NO: 26048 - DNA, 35 bp, Artificial Sequence; identical to SEQ ID NO: 1910
  Probe

SEQ ID NO: 26049 - DNA, 36 bp, Artificial Sequence; identical to SEQ ID NO: 1911
  Probe

SEQ ID NO: 26050 - DNA, 17 bp, Artificial Sequence
  Probe
aaagacaggggttaggc

SEQ ID NO: 26051 - DNA, 18 bp, Artificial Sequence
  Probe
aaagacaggggttaggcc

SEQ ID NO: 26052 - DNA, 28 bp, Artificial Sequence
  Probe
aaagacaggggttaggcctctttttacc

SEQ ID NO: 26053 - DNA, 31 bp, Artificial Sequence; identical to SEQ ID NO: 1924
  Probe

SEQ ID NO: 26054 - DNA, 15 bp, Artificial Sequence
  Probe
aaagactttttctct

SEQ ID NO: 26055 - DNA, 16 bp, Artificial Sequence
  Probe
aaagaggagttgtttt

SEQ ID NO: 26056 - DNA, 20 bp, Artificial Sequence
  Probe
aaagagttactttgatagag

SEQ ID NO: 26057 - DNA, 35 bp, Artificial Sequence
  Probe
aaagagttactttgatagagtaaataataggagct

SEQ ID NO: 26058 - DNA, 36 bp, Artificial Sequence
  Probe
aaagagttactttgatagagtaaataataggagctt

SEQ ID NO: 26059 - DNA, 15 bp, Artificial Sequence
  Probe
aaagattaagagaac

SEQ ID NO: 26060 - DNA, 16 bp, Artificial Sequence
  Probe
aaagattaagagaacc

SEQ ID NO: 26061 - DNA, 17 bp, Artificial Sequence
  Probe
aaagattaagagaacca

SEQ ID NO: 26062 - DNA, 19 bp, Artificial Sequence
  Probe
aaagattaagagaaccaac

SEQ ID NO: 26063 - DNA, 20 bp, Artificial Sequence
  Probe
aaagattaagagaaccaaca

SEQ ID NO: 26064 - DNA, 21 bp, Artificial Sequence
  Probe
aaagattaagagaaccaacac

SEQ ID NO: 26065 - DNA, 22 bp, Artificial Sequence
  Probe
aaagattaagagaaccaacacc

SEQ ID NO: 26066 - DNA, 23 bp, Artificial Sequence
  Probe
aaagattaagagaaccaacacct

SEQ ID NO: 26067 - DNA, 24 bp, Artificial Sequence
  Probe
aaagattaagagaaccaacacctc

SEQ ID NO: 26068 - DNA, 25 bp, Artificial Sequence
  Probe
aaagattaagagaaccaacacctct

SEQ ID NO: 26069 - DNA, 35 bp, Artificial Sequence; identical to SEQ ID NO: 1928
  Probe

SEQ ID NO: 26070 - DNA, 31 bp, Artificial Sequence; identical to SEQ ID NO: 1933
  Probe

SEQ ID NO: 26071 - DNA, 34 bp, Artificial Sequence; identical to SEQ ID NO: 20
  Probe

SEQ ID NO: 26072 - DNA, 36 bp, Artificial Sequence; identical to SEQ ID NO: 21
  Probe

SEQ ID NO: 26073 - DNA, 41 bp, Artificial Sequence
  Probe
aaagcaatacactgaaaatgtttagacgggctcacatcacc

SEQ ID NO: 26074 - DNA, 36 bp, Artificial Sequence; identical to SEQ ID NO: 14628
  Probe

SEQ ID NO: 26075 - DNA, 50 bp, Artificial Sequence; identical to SEQ ID NO: 1962
  Probe

SEQ ID NO: 26076 - DNA, 16 bp, Artificial Sequence
  Probe
aaagctcacaagaact

SEQ ID NO: 26077 - DNA, 17 bp, Artificial Sequence
  Probe
aaagctcacaagaactg

SEQ ID NO: 26078 - DNA, 27 bp, Artificial Sequence
  Probe
aaagctcacaagaactgctaactcatg

SEQ ID NO: 26079 - DNA, 29 bp, Artificial Sequence
  Probe
aaagctcacaagaactgctaactcatgcc

SEQ ID NO: 26080 - DNA, 30 bp, Artificial Sequence
  Probe
aaagctcacaagaactgctaactcatgccc

SEQ ID NO: 26081 - DNA, 42 bp, Artificial Sequence
  Probe
aaagctcacaagaactgctaactcatgcccccatgtctaaca

SEQ ID NO: 26082 - DNA, 24 bp, Artificial Sequence
  Probe
aaaggataacagctatccattggt

SEQ ID NO: 26083 - DNA, 26 bp, Artificial Sequence
  Probe
aaaggataacagctatccattggtct

SEQ ID NO: 26084 - DNA, 27 bp, Artificial Sequence
  Probe
aaaggataacagctatccattggtctt

SEQ ID NO: 26085 - DNA, 28 bp, Artificial Sequence
  Probe
aaaggataacagctatccattggtctta

SEQ ID NO: 26086 - DNA, 29 bp, Artificial Sequence
  Probe
aaaggataacagctatccattggtcttag

SEQ ID NO: 26087 - DNA, 32 bp, Artificial Sequence
  Probe
aaaggataacagctatccattggtcttaggcc

SEQ ID NO: 26088 - DNA, 33 bp, Artificial Sequence
  Probe
aaaggataacagctatccattggtcttaggccc

SEQ ID NO: 26089 - DNA, 34 bp, Artificial Sequence
  Probe
aaaggataacagctatccattggtcttaggcccc

SEQ ID NO: 26090 - DNA, 36 bp, Artificial Sequence
  Probe
aaaggataacagctatccattggtcttaggccccaa

SEQ ID NO: 26091 - DNA, 18 bp, Artificial Sequence
  Probe
aaaggattagactgaacc

SEQ ID NO: 26092 - DNA, 36 bp, Artificial Sequence
  Probe
aaagggagggggatgtagctcagtggtagagcgcat

SEQ ID NO: 26093 - DNA, 30 bp, Artificial Sequence
  Probe
aaagggtctttttcaccccgctgttgctct

SEQ ID NO: 26094 - DNA, 15 bp, Artificial Sequence
  Probe
aaagtcatggaggcc

SEQ ID NO: 26095 - DNA, 23 bp, Artificial Sequence
  Probe
aaagtcatggaggccatggggtt

SEQ ID NO: 26096 - DNA, 20 bp, Artificial Sequence
  Probe
aaagtctttaactccaccat

SEQ ID NO: 26097 - DNA, 15 bp, Artificial Sequence
  Probe
aaagtgcacttggac

SEQ ID NO: 26098 - DNA, 16 bp, Artificial Sequence
  Probe
aaagtgcacttggacg

SEQ ID NO: 26099 - DNA, 20 bp, Artificial Sequence
  Probe
aaagtgcacttggacgaacc

SEQ ID NO: 26100 - DNA, 15 bp, Artificial Sequence
  Probe
aaagtggctgatttg

SEQ ID NO: 26101 - DNA, 16 bp, Artificial Sequence
  Probe
aaagtggctgatttgc

SEQ ID NO: 26102 - DNA, 36 bp, Artificial Sequence; identical to SEQ ID NO: 14651
  Probe

SEQ ID NO: 26103 - DNA, 18 bp, Artificial Sequence
  Probe
aaagttaaattataggct

SEQ ID NO: 26104 - DNA, 16 bp, Artificial Sequence
  Probe
aaataagctatcgggc

SEQ ID NO: 26105 - DNA, 17 bp, Artificial Sequence
  Probe
aaataagctatcgggcc

SEQ ID NO: 26106 - DNA, 18 bp, Artificial Sequence
  Probe
aaataagctatcgggccc

SEQ ID NO: 26107 - DNA, 19 bp, Artificial Sequence
  Probe
aaataagctatcgggccca

SEQ ID NO: 26108 - DNA, 20 bp, Artificial Sequence
  Probe
aaataagctatcgggcccat

SEQ ID NO: 26109 - DNA, 21 bp, Artificial Sequence
  Probe
aaataagctatcgggcccata

SEQ ID NO: 26110 - DNA, 23 bp, Artificial Sequence
  Probe
aaataagctatcgggcccatacc

SEQ ID NO: 26111 - DNA, 24 bp, Artificial Sequence
  Probe
aaataagctatcgggcccataccc

SEQ ID NO: 26112 - DNA, 25 bp, Artificial Sequence
  Probe
aaataagctatcgggcccatacccc

SEQ ID NO: 26113 - DNA, 27 bp, Artificial Sequence
  Probe
aaataagctatcgggcccataccccga

SEQ ID NO: 26114 - DNA, 28 bp, Artificial Sequence
  Probe
aaataagctatcgggcccataccccgaa

SEQ ID NO: 26115 - DNA, 29 bp, Artificial Sequence
  Probe
aaataagctatcgggcccataccccgaaa

SEQ ID NO: 26116 - DNA, 33 bp, Artificial Sequence; identical to SEQ ID NO: 1985
  Probe

SEQ ID NO: 26117 - DNA, 38 bp, Artificial Sequence; identical to SEQ ID NO: 14670
  Probe

SEQ ID NO: 26118 - DNA, 20 bp, Artificial Sequence
  Probe
aaataagggggtttaagctc

SEQ ID NO: 26119 - DNA, 15 bp, Artificial Sequence
  Probe
aaataataggagctt

SEQ ID NO: 26120 - DNA, 20 bp, Artificial Sequence
  Probe
aaataataggagcttaaacc

SEQ ID NO: 26121 - DNA, 22 bp, Artificial Sequence
  Probe
aaataataggagcttaaacccc

SEQ ID NO: 26122 - DNA, 33 bp, Artificial Sequence
  Probe
aaatacaacgatggtttttcatatcattggtcg

SEQ ID NO: 26123 - DNA, 35 bp, Artificial Sequence
  Probe
aaatacaacgatggtttttcatatcattggtcgtg

SEQ ID NO: 26124 - DNA, 36 bp, Artificial Sequence
  Probe
aaatacaacgatggtttttcatatcattggtcgtgg

SEQ ID NO: 26125 - DNA, 44 bp, Artificial Sequence
  Probe
aaatacaacgatggtttttcatatcattggtcgtggttgtagtc

SEQ ID NO: 26126 - DNA, 45 bp, Artificial Sequence
  Probe
aaatacaacgatggtttttcatatcattggtcgtggttgtagtcc

SEQ ID NO: 26127 - DNA, 50 bp, Artificial Sequence
  Probe
aaatacaacgatggtttttcatatcattggtcgtggttgtagtccgtgcg

SEQ ID NO: 26128 - DNA, 19 bp, Artificial Sequence
  Probe
aaatacagaccaagagcct

SEQ ID NO: 26129 - DNA, 27 bp, Artificial Sequence
  Probe
aaatacagaccaagagccttcaaagcc

SEQ ID NO: 26130 - DNA, 17 bp, Artificial Sequence
  Probe
aaatactaccgtatggc

SEQ ID NO: 26131 - DNA, 17 bp, Artificial Sequence
  Probe
aaatactcaaatgggcc

SEQ ID NO: 26132 - DNA, 18 bp, Artificial Sequence
  Probe
aaatactcaaatgggcct

SEQ ID NO: 26133 - DNA, 19 bp, Artificial Sequence
  Probe
aaatactcaaatgggcctg

SEQ ID NO: 26134 - DNA, 16 bp, Artificial Sequence
  Probe
aaatagtaccgttaac

SEQ ID NO: 26135 - DNA, 17 bp, Artificial Sequence
  Probe
aaatagtaccgttaact

SEQ ID NO: 26136 - DNA, 19 bp, Artificial Sequence
  Probe
aaatagtaccgttaacttc

SEQ ID NO: 26137 - DNA, 20 bp, Artificial Sequence
  Probe
aaatagtaccgttaacttcc

SEQ ID NO: 26138 - DNA, 36 bp, Artificial Sequence
  Probe
aaatagtaccgttaacttccaattaactagttttga

SEQ ID NO: 26139 - DNA, 15 bp, Artificial Sequence
  Probe
aaatcccggacgagc

SEQ ID NO: 26140 - DNA, 16 bp, Artificial Sequence
  Probe
aaatcccggacgagcc

SEQ ID NO: 26141 - DNA, 17 bp, Artificial Sequence
  Probe
aaatcccggacgagccc

SEQ ID NO: 26142 - DNA, 19 bp, Artificial Sequence
  Probe
aaatcccggacgagcccac

SEQ ID NO: 26143 - DNA, 20 bp, Artificial Sequence
  Probe
aaatcccggacgagcccaca

SEQ ID NO: 26144 - DNA, 20 bp, Artificial Sequence
  Probe
aaatcccggacgagcccact

SEQ ID NO: 26145 - DNA, 21 bp, Artificial Sequence
  Probe
aaatcccggacgagcccactt

SEQ ID NO: 26146 - DNA, 22 bp, Artificial Sequence
  Probe
aaatcccggacgagcccacttc

SEQ ID NO: 26147 - DNA, 23 bp, Artificial Sequence
  Probe
aaatcccggacgagcccacttca

SEQ ID NO: 26148 - DNA, 24 bp, Artificial Sequence
  Probe
aaatcccggacgagcccacttcat

SEQ ID NO: 26149 - DNA, 22 bp, Artificial Sequence
  Probe
aaatcccggacgagcccacttt

SEQ ID NO: 26150 - DNA, 23 bp, Artificial Sequence
  Probe
aaatcccggacgagcccactttt

SEQ ID NO: 26151 - DNA, 18 bp, Artificial Sequence
  Probe
aaatcccggacgagcccc

SEQ ID NO: 26152 - DNA, 19 bp, Artificial Sequence
  Probe
aaatcccggacgagccccc

SEQ ID NO: 26153 - DNA, 20 bp, Artificial Sequence
  Probe
aaatcccggacgagccccct

SEQ ID NO: 26154 - DNA, 20 bp, Artificial Sequence
  Probe
aaatcccggacgagccctca

SEQ ID NO: 26155 - DNA, 25 bp, Artificial Sequence
  Probe
aaatctaaagacaggggttaggcct

SEQ ID NO: 26156 - DNA, 20 bp, Artificial Sequence
  Probe
aaatctcggtggaacctgca

SEQ ID NO: 26157 - DNA, 24 bp, Artificial Sequence
  Probe
aaatggctgagtgaagcattggac

SEQ ID NO: 26158 - DNA, 25 bp, Artificial Sequence
  Probe
aaatggctgagtgaagcattggact

SEQ ID NO: 26159 - DNA, 28 bp, Artificial Sequence
  Probe
aaatggctgagtgaagcattggactgta

SEQ ID NO: 26160 - DNA, 29 bp, Artificial Sequence
  Probe
aaatggctgagtgaagcattggactgtaa

SEQ ID NO: 26161 - DNA, 30 bp, Artificial Sequence
  Probe
aaatggctgagtgaagcattggactgtaaa

SEQ ID NO: 26162 - DNA, 36 bp, Artificial Sequence
  Probe
aaatggctgagtgaagcattggactgtaaatctaaa

SEQ ID NO: 26163 - DNA, 18 bp, Artificial Sequence
  Probe
aaatggtagagcgctcgc

SEQ ID NO: 26164 - DNA, 16 bp, Artificial Sequence
  Probe
aaatgttggttatacc

SEQ ID NO: 26165 - DNA, 16 bp, Artificial Sequence
  Probe
aaatgtttagacgggc

SEQ ID NO: 26166 - DNA, 21 bp, Artificial Sequence
  Probe
aaatgtttagacgggctcaca

SEQ ID NO: 26167 - DNA, 23 bp, Artificial Sequence
  Probe
aaatgtttagacgggctcacatc

SEQ ID NO: 26168 - DNA, 24 bp, Artificial Sequence
  Probe
aaatgtttagacgggctcacatca

SEQ ID NO: 26169 - DNA, 25 bp, Artificial Sequence
  Probe
aaatgtttagacgggctcacatcac

SEQ ID NO: 26170 - DNA, 27 bp, Artificial Sequence
  Probe
aaatgtttagacgggctcacatcaccc

SEQ ID NO: 26171 - DNA, 28 bp, Artificial Sequence
  Probe
aaatgtttagacgggctcacatcacccc

SEQ ID NO: 26172 - DNA, 29 bp, Artificial Sequence
  Probe
aaatgtttagacgggctcacatcacccca

SEQ ID NO: 26173 - DNA, 31 bp, Artificial Sequence
  Probe
aaatgtttagacgggctcacatcaccccata

SEQ ID NO: 26174 - DNA, 32 bp, Artificial Sequence
  Probe
aaatgtttagacgggctcacatcaccccataa

SEQ ID NO: 26175 - DNA, 33 bp, Artificial Sequence
  Probe
aaatgtttagacgggctcacatcaccccataaa

SEQ ID NO: 26176 - DNA, 21 bp, Artificial Sequence
  Probe
aaattagaatcttagctttgg

SEQ ID NO: 26177 - DNA, 45 bp, Artificial Sequence
  Probe
aaattagaatcttagctttgggtgctaatggtggagttaaagact

SEQ ID NO: 26178 - DNA, 50 bp, Artificial Sequence; identical to SEQ ID NO: 36
  Probe

SEQ ID NO: 26179 - DNA, 36 bp, Artificial Sequence
  Probe
aaattcgaagaagcagcttcaaacctgccggggctt

SEQ ID NO: 26180 - DNA, 17 bp, Artificial Sequence
  Probe
aaattttggtgcaactc

SEQ ID NO: 26181 - DNA, 18 bp, Artificial Sequence
  Probe
aaattttggtgcaactcc

SEQ ID NO: 26182 - DNA, 22 bp, Artificial Sequence
  Probe
aacaaaacgaatgatttcgact

SEQ ID NO: 26183 - DNA, 23 bp, Artificial Sequence
  Probe
aacaaaacgaatgatttcgactc

SEQ ID NO: 26184 - DNA, 24 bp, Artificial Sequence
  Probe
aacaaaacgaatgatttcgactca

SEQ ID NO: 26185 - DNA, 36 bp, Artificial Sequence
  Probe
aacaaaacgaatgatttcgactcattaaattatgat

SEQ ID NO: 26186 - DNA, 17 bp, Artificial Sequence
  Probe
aacaacatggctttctc

SEQ ID NO: 26187 - DNA, 20 bp, Artificial Sequence
  Probe
aacaacatggctttctcaac

SEQ ID NO: 26188 - DNA, 15 bp, Artificial Sequence
  Probe
aacaagactgtgttt

SEQ ID NO: 26189 - DNA, 16 bp, Artificial Sequence
  Probe
aacaagactgtgtttt

SEQ ID NO: 26190 - DNA, 24 bp, Artificial Sequence
  Probe
aacacaaagcacccaacttacact

SEQ ID NO: 26191 - DNA, 26 bp, Artificial Sequence
  Probe
aacacaaagcacccaacttacactta

SEQ ID NO: 26192 - DNA, 27 bp, Artificial Sequence
  Probe
aacacaaagcacccaacttacacttag

SEQ ID NO: 26193 - DNA, 36 bp, Artificial Sequence; identical to SEQ ID NO: 2031
  Probe

SEQ ID NO: 26194 - DNA, 50 bp, Artificial Sequence; identical to SEQ ID NO: 39
  Probe

SEQ ID NO: 26195 - DNA, 19 bp, Artificial Sequence
  Probe
aacacctctttacagtgaa

SEQ ID NO: 26196 - DNA, 16 bp, Artificial Sequence
  Probe
aacagaggcttacgac

SEQ ID NO: 26197 - DNA, 17 bp, Artificial Sequence
  Probe
aacagaggcttacgacc

SEQ ID NO: 26198 - DNA, 18 bp, Artificial Sequence
  Probe
aacagaggcttacgaccc

SEQ ID NO: 26199 - DNA, 20 bp, Artificial Sequence
  Probe
aacagccggctccatagctc

SEQ ID NO: 26200 - DNA, 23 bp, Artificial Sequence
  Probe
aacagccggctccatagctcagg

SEQ ID NO: 26201 - DNA, 36 bp, Artificial Sequence
  Probe
aacagccggctccatagctcaggggttagagcactg

SEQ ID NO: 26202 - DNA, 40 bp, Artificial Sequence
  Probe
aacagccggctccatagctcaggggttagagcactggtct

SEQ ID NO: 26203 - DNA, 29 bp, Artificial Sequence
  Probe
aacagcgccgctggtgtagtggtatcatg

SEQ ID NO: 26204 - DNA, 36 bp, Artificial Sequence; identical to SEQ ID NO: 14728
  Probe

SEQ ID NO: 26205 - DNA, 15 bp, Artificial Sequence
  Probe
aacagctaaggactg

SEQ ID NO: 26206 - DNA, 16 bp, Artificial Sequence
  Probe
aacagctaaggactgc

SEQ ID NO: 26207 - DNA, 17 bp, Artificial Sequence
  Probe
aacagctaaggactgca

SEQ ID NO: 26208 - DNA, 21 bp, Artificial Sequence
  Probe
aacagctaaggactgcaaaac

SEQ ID NO: 26209 - DNA, 22 bp, Artificial Sequence
  Probe
aacagctaaggactgcaaaacc

SEQ ID NO: 26210 - DNA, 23 bp, Artificial Sequence
  Probe
aacagctaaggactgcaaaaccc

SEQ ID NO: 26211 - DNA, 24 bp, Artificial Sequence
  Probe
aacagctaaggactgcaaaacccc

SEQ ID NO: 26212 - DNA, 25 bp, Artificial Sequence
  Probe
aacagctaaggactgcaaaacccca

SEQ ID NO: 26213 - DNA, 26 bp, Artificial Sequence
  Probe
aacagctaaggactgcaaaaccccac

SEQ ID NO: 26214 - DNA, 27 bp, Artificial Sequence
  Probe
aacagctaaggactgcaaaaccccact

SEQ ID NO: 26215 - DNA, 28 bp, Artificial Sequence
  Probe
aacagctaaggactgcaaaaccccactc

SEQ ID NO: 26216 - DNA, 29 bp, Artificial Sequence
  Probe
aacagctaaggactgcaaaaccccactct

SEQ ID NO: 26217 - DNA, 17 bp, Artificial Sequence
  Probe
aacagctatccattggt

SEQ ID NO: 26218 - DNA, 20 bp, Artificial Sequence
  Probe
aacagctatccattggtctt

SEQ ID NO: 26219 - DNA, 21 bp, Artificial Sequence
  Probe
aacagctatccattggtctta

SEQ ID NO: 26220 - DNA, 26 bp, Artificial Sequence
  Probe
aacagctatccattggtcttaggccc

SEQ ID NO: 26221 - DNA, 27 bp, Artificial Sequence
  Probe
aacagctatccattggtcttaggcccc

SEQ ID NO: 26222 - DNA, 28 bp, Artificial Sequence
  Probe
aacagctatccattggtcttaggcccca

SEQ ID NO: 26223 - DNA, 36 bp, Artificial Sequence
  Probe
aacagctatccattggtcttaggccccaaaaatttt

SEQ ID NO: 26224 - DNA, 36 bp, Artificial Sequence
  Probe
aacagctggttccatgggttaatggtgagcaccctg

SEQ ID NO: 26225 - DNA, 15 bp, Artificial Sequence
  Probe
aacagggtttgttaa

SEQ ID NO: 26226 - DNA, 31 bp, Artificial Sequence
  Probe
aacatacccatggccaacctcctactcctca

SEQ ID NO: 26227 - DNA, 18 bp, Artificial Sequence
  Probe
aacatcagattgtgaatc

SEQ ID NO: 26228 - DNA, 19 bp, Artificial Sequence
  Probe
aacatcagattgtgaatct

SEQ ID NO: 26229 - DNA, 30 bp, Artificial Sequence; identical to SEQ ID NO: 8902
  Probe

SEQ ID NO: 26230 - DNA, 31 bp, Artificial Sequence
  Probe
aacatcagattgtgaatctgacaacagaggc

SEQ ID NO: 26231 - DNA, 32 bp, Artificial Sequence; identical to SEQ ID NO: 2054
  Probe

SEQ ID NO: 26232 - DNA, 34 bp, Artificial Sequence
  Probe
aacatcagattgtgaatctgacaacagaggctta

SEQ ID NO: 26233 - DNA, 41 bp, Artificial Sequence; identical to SEQ ID NO: 2056
  Probe

SEQ ID NO: 26234 - DNA, 42 bp, Artificial Sequence; identical to SEQ ID NO: 2057
  Probe

SEQ ID NO: 26235 - DNA, 43 bp, Artificial Sequence; identical to SEQ ID NO: 40
  Probe

SEQ ID NO: 26236 - DNA, 44 bp, Artificial Sequence; identical to SEQ ID NO: 41
  Probe

SEQ ID NO: 26237 - DNA, 17 bp, Artificial Sequence
  Probe
aacatggctttctcaac

SEQ ID NO: 26238 - DNA, 19 bp, Artificial Sequence
  Probe
aaccaaaacatcagattgt

SEQ ID NO: 26239 - DNA, 23 bp, Artificial Sequence
  Probe
aaccaaaacatcagattgtgaat

SEQ ID NO: 26240 - DNA, 24 bp, Artificial Sequence
  Probe
aaccaaaacatcagattgtgaatc

SEQ ID NO: 26241 - DNA, 25 bp, Artificial Sequence
  Probe
aaccaaaacatcagattgtgaatct

SEQ ID NO: 26242 - DNA, 31 bp, Artificial Sequence; identical to SEQ ID NO: 2064
  Probe

SEQ ID NO: 26243 - DNA, 32 bp, Artificial Sequence; identical to SEQ ID NO: 2065
  Probe

SEQ ID NO: 26244 - DNA, 33 bp, Artificial Sequence; identical to SEQ ID NO: 2066
  Probe

SEQ ID NO: 26245 - DNA, 34 bp, Artificial Sequence; identical to SEQ ID NO: 14767
  Probe

SEQ ID NO: 26246 - DNA, 35 bp, Artificial Sequence; identical to SEQ ID NO: 14768
  Probe

SEQ ID NO: 26247 - DNA, 36 bp, Artificial Sequence; identical to SEQ ID NO: 2067
  Probe

SEQ ID NO: 26248 - DNA, 38 bp, Artificial Sequence; identical to SEQ ID NO: 2069
  Probe

SEQ ID NO: 26249 - DNA, 39 bp, Artificial Sequence; identical to SEQ ID NO: 2070
  Probe

SEQ ID NO: 26250 - DNA, 46 bp, Artificial Sequence; identical to SEQ ID NO: 45
  Probe

SEQ ID NO: 26251 - DNA, 47 bp, Artificial Sequence; identical to SEQ ID NO: 2071
  Probe

SEQ ID NO: 26252 - DNA, 23 bp, Artificial Sequence
  Probe
aaccaacacctctttacagtgaa

SEQ ID NO: 26253 - DNA, 29 bp, Artificial Sequence
  Probe
aaccagagtgtagcttaacacaaagcacc

SEQ ID NO: 26254 - DNA, 30 bp, Artificial Sequence
  Probe
aaccagagtgtagcttaacacaaagcaccc

SEQ ID NO: 26255 - DNA, 31 bp, Artificial Sequence
  Probe
aaccagagtgtagcttaacacaaagcaccca

SEQ ID NO: 26256 - DNA, 36 bp, Artificial Sequence
  Probe
aaccagagtgtagcttaacacaaagcacccaactta

SEQ ID NO: 26257 - DNA, 28 bp, Artificial Sequence
  Probe
aaccatgcacactactataaccacccta

SEQ ID NO: 26258 - DNA, 20 bp, Artificial Sequence
  Probe
aacccagaggtcgatggatc

SEQ ID NO: 26259 - DNA, 21 bp, Artificial Sequence
  Probe
aacccagaggtcgatggatcg

SEQ ID NO: 26260 - DNA, 22 bp, Artificial Sequence
  Probe
aacccagaggtcgatggatcga

SEQ ID NO: 26261 - DNA, 15 bp, Artificial Sequence
  Probe
aacccatccctgaga

SEQ ID NO: 26262 - DNA, 35 bp, Artificial Sequence
  Probe
aacccccttatttctaggactatgagaatcgaacc

SEQ ID NO: 26263 - DNA, 36 bp, Artificial Sequence
  Probe
aacccccttatttctaggactatgagaatcgaaccc

SEQ ID NO: 26264 - DNA, 36 bp, Artificial Sequence
  Probe
aacccgggaccacgtggcctaatggataaggcgtct

SEQ ID NO: 26265 - DNA, 36 bp, Artificial Sequence
  Probe
aaccgaaaggttggtggttcgagcccacccagggac

SEQ ID NO: 26266 - DNA, 36 bp, Artificial Sequence
  Probe
aaccgacgggccgcgtggcctaatggataaggcgtc

SEQ ID NO: 26267 - DNA, 39 bp, Artificial Sequence
  Probe
aaccgacgggccgcgtggcctaatggataaggcgtctga

SEQ ID NO: 26268 - DNA, 15 bp, Artificial Sequence
  Probe
aaccgagcgtccaag

SEQ ID NO: 26269 - DNA, 16 bp, Artificial Sequence
  Probe
aaccgagcgtccaagc

SEQ ID NO: 26270 - DNA, 17 bp, Artificial Sequence
  Probe
aaccgagcgtccaagct

SEQ ID NO: 26271 - DNA, 18 bp, Artificial Sequence
  Probe
aaccgagcgtccaagctc

SEQ ID NO: 26272 - DNA, 24 bp, Artificial Sequence
  Probe
aaccgagcgtccaagctctttcca

SEQ ID NO: 26273 - DNA, 25 bp, Artificial Sequence
  Probe
aaccgagcgtccaagctctttccat

SEQ ID NO: 26274 - DNA, 26 bp, Artificial Sequence
  Probe
aaccgagcgtccaagctctttccatt

SEQ ID NO: 26275 - DNA, 27 bp, Artificial Sequence
  Probe
aaccgagcgtccaagctctttccattt

SEQ ID NO: 26276 - DNA, 28 bp, Artificial Sequence
  Probe
aaccgagcgtccaagctctttccatttt

SEQ ID NO: 26277 - DNA, 29 bp, Artificial Sequence
  Probe
aaccgagcgtccaagctctttccattttt

SEQ ID NO: 26278 - DNA, 16 bp, Artificial Sequence
  Probe
aaccggagatgaaaac

SEQ ID NO: 26279 - DNA, 17 bp, Artificial Sequence
  Probe
aaccggagatgaaaacc

SEQ ID NO: 26280 - DNA, 18 bp, Artificial Sequence
  Probe
aaccggagatgaaaacct

SEQ ID NO: 26281 - DNA, 17 bp, Artificial Sequence
  Probe
aaccgggcagaagcaac

SEQ ID NO: 26282 - DNA, 15 bp, Artificial Sequence
  Probe
aaccgggcggaaaca

SEQ ID NO: 26283 - DNA, 18 bp, Artificial Sequence
  Probe
aaccgggcggaaacaaga

SEQ ID NO: 26284 - DNA, 17 bp, Artificial Sequence
  Probe
aaccgggcggaaacaca

SEQ ID NO: 26285 - DNA, 18 bp, Artificial Sequence
  Probe
aaccgggcggaaacacac

SEQ ID NO: 26286 - DNA, 27 bp, Artificial Sequence
  Probe
aaccgggcggaaacacactaaaaaatc

SEQ ID NO: 26287 - DNA, 30 bp, Artificial Sequence
  Probe
aaccgggcggaaacacactaaaaaatccct

SEQ ID NO: 26288 - DNA, 18 bp, Artificial Sequence
  Probe
aaccgggcggaaacacct

SEQ ID NO: 26289 - DNA, 17 bp, Artificial Sequence
  Probe
aaccgggcggaaacacg

SEQ ID NO: 26290 - DNA, 18 bp, Artificial Sequence
  Probe
aaccgggcggaaacacgt

SEQ ID NO: 26291 - DNA, 20 bp, Artificial Sequence
  Probe
aaccgggcggaaacacgttt

SEQ ID NO: 26292 - DNA, 18 bp, Artificial Sequence
  Probe
aaccgggcggaaacagaa

SEQ ID NO: 26293 - DNA, 17 bp, Artificial Sequence
  Probe
aaccgggcggaaacagt

SEQ ID NO: 26294 - DNA, 18 bp, Artificial Sequence
  Probe
aaccgggcggaaacataa

SEQ ID NO: 26295 - DNA, 25 bp, Artificial Sequence
  Probe
aaccgttggtttccgtagtgtagtg

SEQ ID NO: 26296 - DNA, 36 bp, Artificial Sequence
  Probe
aaccgttggtttccgtagtgtagtggttatcacgtt

SEQ ID NO: 26297 - DNA, 41 bp, Artificial Sequence
  Probe
aaccgttggtttccgtagtgtagtggttatcacgttcgcct

SEQ ID NO: 26298 - DNA, 25 bp, Artificial Sequence
  Probe
aacctagccccaaacccactccacc

SEQ ID NO: 26299 - DNA, 26 bp, Artificial Sequence
  Probe
aacctagccccaaacccactccacct

SEQ ID NO: 26300 - DNA, 16 bp, Artificial Sequence
  Probe
aacctcctactcctca

SEQ ID NO: 26301 - DNA, 23 bp, Artificial Sequence
  Probe
aaccttcagctatagggtggaga

SEQ ID NO: 26302 - DNA, 29 bp, Artificial Sequence
  Probe
aaccttttaagttaaagattaagagaacc

SEQ ID NO: 26303 - DNA, 35 bp, Artificial Sequence
  Probe
aaccttttaagttaaagattaagagaaccaacacc

SEQ ID NO: 26304 - DNA, 36 bp, Artificial Sequence
  Probe
aaccttttaagttaaagattaagagaaccaacacct

SEQ ID NO: 26305 - DNA, 17 bp, Artificial Sequence
  Probe
aacgaatgatttcgact

SEQ ID NO: 26306 - DNA, 18 bp, Artificial Sequence
  Probe
aacgaatgatttcgactc

SEQ ID NO: 26307 - DNA, 19 bp, Artificial Sequence
  Probe
aacgaatgatttcgactca

SEQ ID NO: 26308 - DNA, 20 bp, Artificial Sequence
  Probe
aacgaatgatttcgactcat

SEQ ID NO: 26309 - DNA, 36 bp, Artificial Sequence
  Probe
aacgaatgatttcgactcattaaattatgataatca

SEQ ID NO: 26310 - DNA, 36 bp, Artificial Sequence
  Probe
aacgactcctcgttagtatagtggttagtatccccg

SEQ ID NO: 26311 - DNA, 32 bp, Artificial Sequence
  Probe
aacgatggtttttcatatcattggtcgtggtt

SEQ ID NO: 26312 - DNA, 33 bp, Artificial Sequence
  Probe
aacgatggtttttcatatcattggtcgtggttg

SEQ ID NO: 26313 - DNA, 34 bp, Artificial Sequence
  Probe
aacgatggtttttcatatcattggtcgtggttgt

SEQ ID NO: 26314 - DNA, 35 bp, Artificial Sequence
  Probe
aacgatggtttttcatatcattggtcgtggttgta

SEQ ID NO: 26315 - DNA, 36 bp, Artificial Sequence
  Probe
aacgatggtttttcatatcattggtcgtggttgtag

SEQ ID NO: 26316 - DNA, 38 bp, Artificial Sequence
  Probe
aacgatggtttttcatatcattggtcgtggttgtagtc

SEQ ID NO: 26317 - DNA, 39 bp, Artificial Sequence
  Probe
aacgatggtttttcatatcattggtcgtggttgtagtcc

SEQ ID NO: 26318 - DNA, 40 bp, Artificial Sequence
  Probe
aacgatggtttttcatatcattggtcgtggttgtagtccg

SEQ ID NO: 26319 - DNA, 50 bp, Artificial Sequence
  Probe
aacgatggtttttcatatcattggtcgtggttgtagtccgtgcgagaata

SEQ ID NO: 26320 - DNA, 36 bp, Artificial Sequence
  Probe
aacgcaggcgcggtggccaagtggtaaggcgtcggt

SEQ ID NO: 26321 - DNA, 36 bp, Artificial Sequence
  Probe
aacggctgccgaaatagctcagttgggagagcgtta

SEQ ID NO: 26322 - DNA, 19 bp, Artificial Sequence
  Probe
aacggtagcgcgtctgact

SEQ ID NO: 26323 - DNA, 21 bp, Artificial Sequence
  Probe
aactaaatactaccgtatggc

SEQ ID NO: 26324 - DNA, 17 bp, Artificial Sequence
  Probe
aactaagtgtttgtggg

SEQ ID NO: 26325 - DNA, 18 bp, Artificial Sequence
  Probe
aactaagtgtttgtgggt

SEQ ID NO: 26326 - DNA, 19 bp, Artificial Sequence
  Probe
aactaagtgtttgtgggtt

SEQ ID NO: 26327 - DNA, 20 bp, Artificial Sequence
  Probe
aactaagtgtttgtgggttt

SEQ ID NO: 26328 - DNA, 25 bp, Artificial Sequence
  Probe
aactaagtgtttgtgggtttaagtc

SEQ ID NO: 26329 - DNA, 26 bp, Artificial Sequence
  Probe
aactaagtgtttgtgggtttaagtcc

SEQ ID NO: 26330 - DNA, 27 bp, Artificial Sequence
  Probe
aactaagtgtttgtgggtttaagtccc

SEQ ID NO: 26331 - DNA, 40 bp, Artificial Sequence; identical to SEQ ID NO: 2131
  Probe

SEQ ID NO: 26332 - DNA, 36 bp, Artificial Sequence
  Probe
aactagacagccggctcgttggtctaggggtatgat

SEQ ID NO: 26333 - DNA, 16 bp, Artificial Sequence
  Probe
aactagttttgacaac

SEQ ID NO: 26334 - DNA, 18 bp, Artificial Sequence
  Probe
aactcatgcccccatgtc

SEQ ID NO: 26335 - DNA, 19 bp, Artificial Sequence
  Probe
aactcatgcccccatgtct

SEQ ID NO: 26336 - DNA, 22 bp, Artificial Sequence
  Probe
aactcatgcccccatgtctaac

SEQ ID NO: 26337 - DNA, 23 bp, Artificial Sequence
  Probe
aactcatgcccccatgtctaaca

SEQ ID NO: 26338 - DNA, 26 bp, Artificial Sequence
  Probe
aactcatgcccccatgtctaacaaca

SEQ ID NO: 26339 - DNA, 31 bp, Artificial Sequence; identical to SEQ ID NO: 2140
  Probe

SEQ ID NO: 26340 - DNA, 36 bp, Artificial Sequence; identical to SEQ ID NO: 2145
  Probe

SEQ ID NO: 26341 - DNA, 39 bp, Artificial Sequence; identical to SEQ ID NO: 2148
  Probe

SEQ ID NO: 26342 - DNA, 40 bp, Artificial Sequence; identical to SEQ ID NO: 2149
  Probe

SEQ ID NO: 26343 - DNA, 36 bp, Artificial Sequence; identical to SEQ ID NO: 14879
  Probe

SEQ ID NO: 26344 - DNA, 37 bp, Artificial Sequence; identical to SEQ ID NO: 2152
  Probe

SEQ ID NO: 26345 - DNA, 38 bp, Artificial Sequence
  Probe
aactgcccggctagctcagtcggtagagcatgggactc

SEQ ID NO: 26346 - DNA, 15 bp, Artificial Sequence
  Probe
aactgctaactcatg

SEQ ID NO: 26347 - DNA, 17 bp, Artificial Sequence
  Probe
aactgctaactcatgcc

SEQ ID NO: 26348 - DNA, 18 bp, Artificial Sequence
  Probe
aactgctaactcatgccc

SEQ ID NO: 26349 - DNA, 19 bp, Artificial Sequence
  Probe
aactgctaactcatgcccc

SEQ ID NO: 26350 - DNA, 20 bp, Artificial Sequence
  Probe
aactgctaactcatgccccc

SEQ ID NO: 26351 - DNA, 21 bp, Artificial Sequence
  Probe
aactgctaactcatgccccca

SEQ ID NO: 26352 - DNA, 23 bp, Artificial Sequence
  Probe
aactgctaactcatgcccccatg

SEQ ID NO: 26353 - DNA, 25 bp, Artificial Sequence
  Probe
aactgctaactcatgcccccatgtc

SEQ ID NO: 26354 - DNA, 26 bp, Artificial Sequence
  Probe
aactgctaactcatgcccccatgtct

SEQ ID NO: 26355 - DNA, 28 bp, Artificial Sequence
  Probe
aactgctaactcatgcccccatgtctaa

SEQ ID NO: 26356 - DNA, 29 bp, Artificial Sequence
  Probe
aactgctaactcatgcccccatgtctaac

SEQ ID NO: 26357 - DNA, 30 bp, Artificial Sequence; identical to SEQ ID NO: 14885
  Probe

SEQ ID NO: 26358 - DNA, 32 bp, Artificial Sequence
  Probe
aactgctaactcatgcccccatgtctaacaac

SEQ ID NO: 26359 - DNA, 33 bp, Artificial Sequence; identical to SEQ ID NO: 14887
  Probe

SEQ ID NO: 26360 - DNA, 34 bp, Artificial Sequence
  Probe
aactgctaactcatgcccccatgtctaacaacat

SEQ ID NO: 26361 - DNA, 35 bp, Artificial Sequence
  Probe
aactgctaactcatgcccccatgtctaacaacatg

SEQ ID NO: 26362 - DNA, 36 bp, Artificial Sequence
  Probe
aactgctaactcatgcccccatgtctaacaacatgg

SEQ ID NO: 26363 - DNA, 38 bp, Artificial Sequence; identical to SEQ ID NO: 2157
  Probe

SEQ ID NO: 26364 - DNA, 46 bp, Artificial Sequence; identical to SEQ ID NO: 2165
  Probe

SEQ ID NO: 26365 - DNA, 47 bp, Artificial Sequence
  Probe
aactgctaactcatgcccccatgtctaacaacatggctttctcaact

SEQ ID NO: 26366 - DNA, 20 bp, Artificial Sequence
  Probe
aactgggtctctgtggcgca

SEQ ID NO: 26367 - DNA, 32 bp, Artificial Sequence
  Probe
aactgggtctctgtggcgcaatcggttagcgc

SEQ ID NO: 26368 - DNA, 33 bp, Artificial Sequence
  Probe
aactgggtctctgtggcgcaatcggttagcgcg

SEQ ID NO: 26369 - DNA, 36 bp, Artificial Sequence
  Probe
aactgggtctctgtggcgcaatcggttagcgcgttc

SEQ ID NO: 26370 - DNA, 36 bp, Artificial Sequence
  Probe
aacttaaaactttacagtcagaggttcaattcctct

SEQ ID NO: 26371 - DNA, 38 bp, Artificial Sequence; identical to SEQ ID NO: 61
  Probe

SEQ ID NO: 26372 - DNA, 15 bp, Artificial Sequence
  Probe
aacttaacttgaccg

SEQ ID NO: 26373 - DNA, 17 bp, Artificial Sequence
  Probe
aacttaacttgaccgct

SEQ ID NO: 26374 - DNA, 18 bp, Artificial Sequence
  Probe
aacttaacttgaccgctc

SEQ ID NO: 26375 - DNA, 19 bp, Artificial Sequence
  Probe
aacttaacttgaccgctct

SEQ ID NO: 26376 - DNA, 20 bp, Artificial Sequence
  Probe
aacttaacttgaccgctctg

SEQ ID NO: 26377 - DNA, 21 bp, Artificial Sequence
  Probe
aacttaacttgaccgctctga

SEQ ID NO: 26378 - DNA, 22 bp, Artificial Sequence
  Probe
aacttaacttgaccgctctgag

SEQ ID NO: 26379 - DNA, 23 bp, Artificial Sequence
  Probe
aacttaacttgaccgctctgagc

SEQ ID NO: 26380 - DNA, 24 bp, Artificial Sequence
  Probe
aacttaacttgaccgctctgagct

SEQ ID NO: 26381 - DNA, 29 bp, Artificial Sequence
  Probe
aacttaacttgaccgctctgagctaaacc

SEQ ID NO: 26382 - DNA, 30 bp, Artificial Sequence
  Probe
aacttaacttgaccgctctgagctaaacct

SEQ ID NO: 26383 - DNA, 36 bp, Artificial Sequence
  Probe
aacttaacttgaccgctctgagctaaacctagcccc

SEQ ID NO: 26384 - DNA, 16 bp, Artificial Sequence
  Probe
aacttacacttaggag

SEQ ID NO: 26385 - DNA, 21 bp, Artificial Sequence
  Probe
aacttacacttaggagatttc

SEQ ID NO: 26386 - DNA, 22 bp, Artificial Sequence
  Probe
aacttacacttaggagatttca

SEQ ID NO: 26387 - DNA, 24 bp, Artificial Sequence
  Probe
aacttacacttaggagatttcaac

SEQ ID NO: 26388 - DNA, 25 bp, Artificial Sequence
  Probe
aacttacacttaggagatttcaact

SEQ ID NO: 26389 - DNA, 26 bp, Artificial Sequence
  Probe
aacttacacttaggagatttcaactt

SEQ ID NO: 26390 - DNA, 27 bp, Artificial Sequence
  Probe
aacttacacttaggagatttcaactta

SEQ ID NO: 26391 - DNA, 30 bp, Artificial Sequence; identical to SEQ ID NO: 14931
  Probe

SEQ ID NO: 26392 - DNA, 31 bp, Artificial Sequence; identical to SEQ ID NO: 14932
  Probe

SEQ ID NO: 26393 - DNA, 35 bp, Artificial Sequence; identical to SEQ ID NO: 14934
  Probe

SEQ ID NO: 26394 - DNA, 36 bp, Artificial Sequence; identical to SEQ ID NO: 2188
  Probe

SEQ ID NO: 26395 - DNA, 38 bp, Artificial Sequence; identical to SEQ ID NO: 2190
  Probe

SEQ ID NO: 26396 - DNA, 39 bp, Artificial Sequence; identical to SEQ ID NO: 2191
  Probe

SEQ ID NO: 26397 - DNA, 40 bp, Artificial Sequence; identical to SEQ ID NO: 14939
  Probe

SEQ ID NO: 26398 - DNA, 43 bp, Artificial Sequence; identical to SEQ ID NO: 2193
  Probe

SEQ ID NO: 26399 - DNA, 44 bp, Artificial Sequence; identical to SEQ ID NO: 2194
  Probe

SEQ ID NO: 26400 - DNA, 45 bp, Artificial Sequence; identical to SEQ ID NO: 2195
  Probe

SEQ ID NO: 26401 - DNA, 50 bp, Artificial Sequence; identical to SEQ ID NO: 2197
  Probe

SEQ ID NO: 26402 - DNA, 40 bp, Artificial Sequence; identical to SEQ ID NO: 12486
  Probe

SEQ ID NO: 26403 - DNA, 47 bp, Artificial Sequence
  Probe
aacttagcattaaccttttaagttaaagattaagagaaccaacacct

SEQ ID NO: 26404 - DNA, 24 bp, Artificial Sequence
  Probe
aacttccaattaactagttttgac

SEQ ID NO: 26405 - DNA, 27 bp, Artificial Sequence
  Probe
aacttcgccttaattttaataatcaac

SEQ ID NO: 26406 - DNA, 15 bp, Artificial Sequence
  Probe
aacttgaccgctctg

SEQ ID NO: 26407 - DNA, 16 bp, Artificial Sequence
  Probe
aacttgaccgctctga

SEQ ID NO: 26408 - DNA, 17 bp, Artificial Sequence
  Probe
aacttgaccgctctgag

SEQ ID NO: 26409 - DNA, 18 bp, Artificial Sequence
  Probe
aacttgaccgctctgagc

SEQ ID NO: 26410 - DNA, 19 bp, Artificial Sequence
  Probe
aacttgaccgctctgagct

SEQ ID NO: 26411 - DNA, 24 bp, Artificial Sequence
  Probe
aacttgaccgctctgagctaaacc

SEQ ID NO: 26412 - DNA, 25 bp, Artificial Sequence
  Probe
aacttgaccgctctgagctaaacct

SEQ ID NO: 26413 - DNA, 29 bp, Artificial Sequence
  Probe
aacttgaccgctctgagctaaacctagcc

SEQ ID NO: 26414 - DNA, 30 bp, Artificial Sequence
  Probe
aacttgaccgctctgagctaaacctagccc

SEQ ID NO: 26415 - DNA, 31 bp, Artificial Sequence
  Probe
aacttgaccgctctgagctaaacctagcccc

SEQ ID NO: 26416 - DNA, 32 bp, Artificial Sequence
  Probe
aacttgaccgctctgagctaaacctagcccca

SEQ ID NO: 26417 - DNA, 36 bp, Artificial Sequence
  Probe
aacttgaccgctctgagctaaacctagccccaaacc

SEQ ID NO: 26418 - DNA, 32 bp, Artificial Sequence
  Probe
aacttggccccatggtgtaatggtcagcactc

SEQ ID NO: 26419 - DNA, 20 bp, Artificial Sequence
  Probe
aactttacagtcagaggttc

SEQ ID NO: 26420 - DNA, 25 bp, Artificial Sequence
  Probe
aactttacagtcagaggttcaattc

SEQ ID NO: 26421 - DNA, 27 bp, Artificial Sequence
  Probe
aactttgtcaaagttaaattataggct

SEQ ID NO: 26422 - DNA, 36 bp, Artificial Sequence
  Probe
aagaacagagaatagtttaaattagaatcttagctt

SEQ ID NO: 26423 - DNA, 15 bp, Artificial Sequence
  Probe
aagaacagggtttgt

SEQ ID NO: 26424 - DNA, 16 bp, Artificial Sequence
  Probe
aagaacagggtttgtt

SEQ ID NO: 26425 - DNA, 17 bp, Artificial Sequence
  Probe
aagaacagggtttgtta

SEQ ID NO: 26426 - DNA, 18 bp, Artificial Sequence
  Probe
aagaacagggtttgttaa

SEQ ID NO: 26427 - DNA, 19 bp, Artificial Sequence
  Probe
aagaacagggtttgttaag

SEQ ID NO: 26428 - DNA, 20 bp, Artificial Sequence
  Probe
aagaacagggtttgttaaga

SEQ ID NO: 26429 - DNA, 21 bp, Artificial Sequence
  Probe
aagaacagggtttgttaagat

SEQ ID NO: 26430 - DNA, 15 bp, Artificial Sequence
  Probe
aagaactgctaactc

SEQ ID NO: 26431 - DNA, 16 bp, Artificial Sequence
  Probe
aagaactgctaactca

SEQ ID NO: 26432 - DNA, 18 bp, Artificial Sequence
  Probe
aagaactgctaactcatg

SEQ ID NO: 26433 - DNA, 19 bp, Artificial Sequence
  Probe
aagaactgctaactcatgc

SEQ ID NO: 26434 - DNA, 20 bp, Artificial Sequence
  Probe
aagaactgctaactcatgcc

SEQ ID NO: 26435 - DNA, 21 bp, Artificial Sequence
  Probe
aagaactgctaactcatgccc

SEQ ID NO: 26436 - DNA, 22 bp, Artificial Sequence
  Probe
aagaactgctaactcatgcccc

SEQ ID NO: 26437 - DNA, 23 bp, Artificial Sequence
  Probe
aagaactgctaactcatgccccc

SEQ ID NO: 26438 - DNA, 24 bp, Artificial Sequence
  Probe
aagaactgctaactcatgccccca

SEQ ID NO: 26439 - DNA, 25 bp, Artificial Sequence
  Probe
aagaactgctaactcatgcccccat

SEQ ID NO: 26440 - DNA, 26 bp, Artificial Sequence
  Probe
aagaactgctaactcatgcccccatg

SEQ ID NO: 26441 - DNA, 27 bp, Artificial Sequence
  Probe
aagaactgctaactcatgcccccatgt

SEQ ID NO: 26442 - DNA, 30 bp, Artificial Sequence; identical to SEQ ID NO: 2223
  Probe

SEQ ID NO: 26443 - DNA, 31 bp, Artificial Sequence
  Probe
aagaactgctaactcatgcccccatgtctaa

SEQ ID NO: 26444 - DNA, 34 bp, Artificial Sequence
  Probe
aagaactgctaactcatgcccccatgtctaacaa

SEQ ID NO: 26445 - DNA, 35 bp, Artificial Sequence
  Probe
aagaactgctaactcatgcccccatgtctaacaac

SEQ ID NO: 26446 - DNA, 37 bp, Artificial Sequence
  Probe
aagaactgctaactcatgcccccatgtctaacaacat

SEQ ID NO: 26447 - DNA, 38 bp, Artificial Sequence
  Probe
aagaactgctaactcatgcccccatgtctaacaacatg

SEQ ID NO: 26448 - DNA, 40 bp, Artificial Sequence; identical to SEQ ID NO: 2226
  Probe

SEQ ID NO: 26449 - DNA, 41 bp, Artificial Sequence; identical to SEQ ID NO: 66
  Probe

SEQ ID NO: 26450 - DNA, 42 bp, Artificial Sequence; identical to SEQ ID NO: 2227
  Probe

SEQ ID NO: 26451 - DNA, 43 bp, Artificial Sequence; identical to SEQ ID NO: 67
  Probe

SEQ ID NO: 26452 - DNA, 44 bp, Artificial Sequence; identical to SEQ ID NO: 68
  Probe

SEQ ID NO: 26453 - DNA, 45 bp, Artificial Sequence; identical to SEQ ID NO: 69
  Probe

SEQ ID NO: 26454 - DNA, 50 bp, Artificial Sequence; identical to SEQ ID NO: 2230
  Probe

SEQ ID NO: 26455 - DNA, 36 bp, Artificial Sequence
  Probe
aagaacttggccccatggtgtaatggtcagcactct

SEQ ID NO: 26456 - DNA, 27 bp, Artificial Sequence
  Probe
aagaagcagcttcaaacctgccggggc

SEQ ID NO: 26457 - DNA, 28 bp, Artificial Sequence
  Probe
aagaagcagcttcaaacctgccggggct

SEQ ID NO: 26458 - DNA, 29 bp, Artificial Sequence
  Probe
aagaagcagcttcaaacctgccggggctt

SEQ ID NO: 26459 - DNA, 30 bp, Artificial Sequence; identical to SEQ ID NO: 14981
  Probe

SEQ ID NO: 26460 - DNA, 31 bp, Artificial Sequence; identical to SEQ ID NO: 2232
  Probe

SEQ ID NO: 26461 - DNA, 31 bp, Artificial Sequence
  Probe
aagaagcctggatagctcagttggtagagca

SEQ ID NO: 26462 - DNA, 15 bp, Artificial Sequence
  Probe
aagacaccccccaca

SEQ ID NO: 26463 - DNA, 31 bp, Artificial Sequence; identical to SEQ ID NO: 2236
  Probe

SEQ ID NO: 26464 - DNA, 32 bp, Artificial Sequence; identical to SEQ ID NO: 2237
  Probe

SEQ ID NO: 26465 - DNA, 33 bp, Artificial Sequence; identical to SEQ ID NO: 2238
  Probe

SEQ ID NO: 26466 - DNA, 36 bp, Artificial Sequence; identical to SEQ ID NO: 14995
  Probe

SEQ ID NO: 26467 - DNA, 17 bp, Artificial Sequence
  Probe
aagacaggggttaggcc

SEQ ID NO: 26468 - DNA, 19 bp, Artificial Sequence
  Probe
aagacaggggttaggcctc

SEQ ID NO: 26469 - DNA, 27 bp, Artificial Sequence
  Probe
aagacaggggttaggcctctttttacc

SEQ ID NO: 26470 - DNA, 30 bp, Artificial Sequence; identical to SEQ ID NO: 2246
  Probe

SEQ ID NO: 26471 - DNA, 15 bp, Artificial Sequence
  Probe
aagagaaccaacacc

SEQ ID NO: 26472 - DNA, 16 bp, Artificial Sequence
  Probe
aagagaaccaacacct

SEQ ID NO: 26473 - DNA, 28 bp, Artificial Sequence
  Probe
aagagaaccaacacctctttacagtgaa

SEQ ID NO: 26474 - DNA, 29 bp, Artificial Sequence
  Probe
aagagaaccaacacctctttacagtgaaa

SEQ ID NO: 26475 - DNA, 15 bp, Artificial Sequence
  Probe
aagagagtcgctttt

SEQ ID NO: 26476 - DNA, 16 bp, Artificial Sequence
  Probe
aagagagtcgcttttt

SEQ ID NO: 26477 - DNA, 17 bp, Artificial Sequence
  Probe
aagagagtcgctttttt

SEQ ID NO: 26478 - DNA, 18 bp, Artificial Sequence
  Probe
aagagagtcgcttttttt

SEQ ID NO: 26479 - DNA, 19 bp, Artificial Sequence
  Probe
aagagagtcgctttttttt

SEQ ID NO: 26480 - DNA, 23 bp, Artificial Sequence
  Probe
aagagcccggatagctcagtcgg

SEQ ID NO: 26481 - DNA, 24 bp, Artificial Sequence
  Probe
aagagcccggatagctcagtcggt

SEQ ID NO: 26482 - DNA, 25 bp, Artificial Sequence
  Probe
aagagcccggatagctcagtcggta

SEQ ID NO: 26483 - DNA, 26 bp, Artificial Sequence
  Probe
aagagcccggatagctcagtcggtag

SEQ ID NO: 26484 - DNA, 27 bp, Artificial Sequence
  Probe
aagagcccggatagctcagtcggtaga

SEQ ID NO: 26485 - DNA, 28 bp, Artificial Sequence
  Probe
aagagcccggatagctcagtcggtagag

SEQ ID NO: 26486 - DNA, 29 bp, Artificial Sequence
  Probe
aagagcccggatagctcagtcggtagagc

SEQ ID NO: 26487 - DNA, 30 bp, Artificial Sequence
  Probe
aagagcccggatagctcagtcggtagagca

SEQ ID NO: 26488 - DNA, 31 bp, Artificial Sequence
  Probe
aagagcccggatagctcagtcggtagagcat

SEQ ID NO: 26489 - DNA, 32 bp, Artificial Sequence
  Probe
aagagcccggatagctcagtcggtagagcatc

SEQ ID NO: 26490 - DNA, 33 bp, Artificial Sequence
  Probe
aagagcccggatagctcagtcggtagagcatca

SEQ ID NO: 26491 - DNA, 34 bp, Artificial Sequence
  Probe
aagagcccggatagctcagtcggtagagcatcag

SEQ ID NO: 26492 - DNA, 35 bp, Artificial Sequence; identical to SEQ ID NO: 15010
  Probe

SEQ ID NO: 26493 - DNA, 36 bp, Artificial Sequence; identical to SEQ ID NO: 15011
  Probe

SEQ ID NO: 26494 - DNA, 37 bp, Artificial Sequence; identical to SEQ ID NO: 15012
  Probe

SEQ ID NO: 26495 - DNA, 38 bp, Artificial Sequence; identical to SEQ ID NO: 15013
  Probe

SEQ ID NO: 26496 - DNA, 39 bp, Artificial Sequence; identical to SEQ ID NO: 15014
  Probe

SEQ ID NO: 26497 - DNA, 40 bp, Artificial Sequence; identical to SEQ ID NO: 15015
  Probe

SEQ ID NO: 26498 - DNA, 41 bp, Artificial Sequence
  Probe
aagagcccggatagctcagtcggtagagcatcagactttta

SEQ ID NO: 26499 - DNA, 42 bp, Artificial Sequence
  Probe
aagagcccggatagctcagtcggtagagcatcagacttttaa

SEQ ID NO: 26500 - DNA, 15 bp, Artificial Sequence
  Probe
aagaggagttgtttt

SEQ ID NO: 26501 - DNA, 16 bp, Artificial Sequence
  Probe
aagaggagttgttttt

SEQ ID NO: 26502 - DNA, 30 bp, Artificial Sequence
  Probe
aagaggagttgtttttcctggcaaaaacct

SEQ ID NO: 26503 - DNA, 15 bp, Artificial Sequence
  Probe
aagaggtccctggtt

SEQ ID NO: 26504 - DNA, 34 bp, Artificial Sequence
  Probe
aagagttactttgatagagtaaataataggagct

SEQ ID NO: 26505 - DNA, 36 bp, Artificial Sequence
  Probe
aagagttactttgatagagtaaataataggagctta

SEQ ID NO: 26506 - DNA, 15 bp, Artificial Sequence
  Probe
aagatggcagagccc

SEQ ID NO: 26507 - DNA, 27 bp, Artificial Sequence
  Probe
aagatggcagagcccggtaatcgcata

SEQ ID NO: 26508 - DNA, 36 bp, Artificial Sequence
  Probe
aagatggcagagcccggtaatcgcataaaacttaaa

SEQ ID NO: 26509 - DNA, 39 bp, Artificial Sequence
  Probe
aagatggcagagcccggtaatcgcataaaacttaaaact

SEQ ID NO: 26510 - DNA, 15 bp, Artificial Sequence
  Probe
aagattaagagaacc

SEQ ID NO: 26511 - DNA, 16 bp, Artificial Sequence
  Probe
aagattaagagaacca

SEQ ID NO: 26512 - DNA, 18 bp, Artificial Sequence
  Probe
aagattaagagaaccaac

SEQ ID NO: 26513 - DNA, 19 bp, Artificial Sequence
  Probe
aagattaagagaaccaaca

SEQ ID NO: 26514 - DNA, 20 bp, Artificial Sequence
  Probe
aagattaagagaaccaacac

SEQ ID NO: 26515 - DNA, 21 bp, Artificial Sequence
  Probe
aagattaagagaaccaacacc

SEQ ID NO: 26516 - DNA, 22 bp, Artificial Sequence
  Probe
aagattaagagaaccaacacct

SEQ ID NO: 26517 - DNA, 23 bp, Artificial Sequence
  Probe
aagattaagagaaccaacacctc

SEQ ID NO: 26518 - DNA, 24 bp, Artificial Sequence
  Probe
aagattaagagaaccaacacctct

SEQ ID NO: 26519 - DNA, 32 bp, Artificial Sequence; identical to SEQ ID NO: 2257
  Probe

SEQ ID NO: 26520 - DNA, 34 bp, Artificial Sequence; identical to SEQ ID NO: 2259
  Probe

SEQ ID NO: 26521 - DNA, 30 bp, Artificial Sequence
  Probe
aagcaatacactgaaaatgtttagacgggc

SEQ ID NO: 26522 - DNA, 33 bp, Artificial Sequence
  Probe
aagcaatacactgaaaatgtttagacgggctca

SEQ ID NO: 26523 - DNA, 34 bp, Artificial Sequence; identical to SEQ ID NO: 2267
  Probe

SEQ ID NO: 26524 - DNA, 36 bp, Artificial Sequence
  Probe
aagcaatacactgaaaatgtttagacgggctcacat

SEQ ID NO: 26525 - DNA, 36 bp, Artificial Sequence; identical to SEQ ID NO: 15055
  Probe

SEQ ID NO: 26526 - DNA, 50 bp, Artificial Sequence; identical to SEQ ID NO: 2283
  Probe

SEQ ID NO: 26527 - DNA, 20 bp, Artificial Sequence
  Probe
aagcaccttgcctgcgggct

SEQ ID NO: 26528 - DNA, 24 bp, Artificial Sequence
  Probe
aagcagcttcaaacctgccggggc

SEQ ID NO: 26529 - DNA, 25 bp, Artificial Sequence
  Probe
aagcagcttcaaacctgccggggct

SEQ ID NO: 26530 - DNA, 26 bp, Artificial Sequence
  Probe
aagcagcttcaaacctgccggggctt

SEQ ID NO: 26531 - DNA, 27 bp, Artificial Sequence
  Probe
aagcagcttcaaacctgccggggcttc

SEQ ID NO: 26532 - DNA, 28 bp, Artificial Sequence
  Probe
aagcagcttcaaacctgccggggcttct

SEQ ID NO: 26533 - DNA, 32 bp, Artificial Sequence
  Probe
aagcaggctctgtggcgcaatggatagcgcat

SEQ ID NO: 26534 - DNA, 15 bp, Artificial Sequence
  Probe
aagcaggcttatagg

SEQ ID NO: 26535 - DNA, 16 bp, Artificial Sequence
  Probe
aagcaggcttataggt

SEQ ID NO: 26536 - DNA, 17 bp, Artificial Sequence
  Probe
aagcaggcttataggtg

SEQ ID NO: 26537 - DNA, 18 bp, Artificial Sequence
  Probe
aagcaggcttataggtgg

SEQ ID NO: 26538 - DNA, 36 bp, Artificial Sequence
  Probe
aagcaggcttataggtggccccatggtgtaatggtt

SEQ ID NO: 26539 - DNA, 16 bp, Artificial Sequence
  Probe
aagcagtcaggatggc

SEQ ID NO: 26540 - DNA, 31 bp, Artificial Sequence
  Probe
aagcagtcaggatggccgagcggtctaaggc

SEQ ID NO: 26541 - DNA, 36 bp, Artificial Sequence
  Probe
aagcagtcaggatggccgagcggtctaaggcgctgc

SEQ ID NO: 26542 - DNA, 36 bp, Artificial Sequence; identical to SEQ ID NO: 15067
  Probe

SEQ ID NO: 26543 - DNA, 15 bp, Artificial Sequence
  Probe
aagcattggactgta

SEQ ID NO: 26544 - DNA, 16 bp, Artificial Sequence
  Probe
aagcattggactgtaa

SEQ ID NO: 26545 - DNA, 17 bp, Artificial Sequence
  Probe
aagcattggactgtaaa

SEQ ID NO: 26546 - DNA, 19 bp, Artificial Sequence
  Probe
aagcattggactgtaaatc

SEQ ID NO: 26547 - DNA, 20 bp, Artificial Sequence
  Probe
aagcattggactgtaaatct

SEQ ID NO: 26548 - DNA, 22 bp, Artificial Sequence
  Probe
aagcattggactgtaaatctaa

SEQ ID NO: 26549 - DNA, 34 bp, Artificial Sequence
  Probe
aagcattggtggttcagtggtagaattctcgcct

SEQ ID NO: 26550 - DNA, 36 bp, Artificial Sequence
  Probe
aagccagggattgtgggttcgagtcccacccggggt

SEQ ID NO: 26551 - DNA, 36 bp, Artificial Sequence
  Probe
aagccagggattgtgggttcgagtcccatctggggt

SEQ ID NO: 26552 - DNA, 39 bp, Artificial Sequence; identical to SEQ ID NO: 2294
  Probe

SEQ ID NO: 26553 - DNA, 40 bp, Artificial Sequence; identical to SEQ ID NO: 2295
  Probe

SEQ ID NO: 26554 - DNA, 33 bp, Artificial Sequence
  Probe
aagccagttgattagggtgcttagctgttaact

SEQ ID NO: 26555 - DNA, 25 bp, Artificial Sequence
  Probe
aagccgcgcattggtggttcagtgg

SEQ ID NO: 26556 - DNA, 37 bp, Artificial Sequence
  Probe
aagccgcgcattggtggttcagtggtagaattctcgc

SEQ ID NO: 26557 - DNA, 38 bp, Artificial Sequence
  Probe
aagccgcgcattggtggttcagtggtagaattctcgcc

SEQ ID NO: 26558 - DNA, 39 bp, Artificial Sequence
  Probe
aagccgcgcattggtggttcagtggtagaattctcgcct

SEQ ID NO: 26559 - DNA, 36 bp, Artificial Sequence
  Probe
aagccggtttccgtagtgtagtggttatcacgttcg

SEQ ID NO: 26560 - DNA, 36 bp, Artificial Sequence
  Probe
aagcctcgtagtcgtggccgagtggttaaggcgatg

SEQ ID NO: 26561 - DNA, 24 bp, Artificial Sequence
  Probe
aagcgagtttccgtagtgtagtgg

SEQ ID NO: 26562 - DNA, 17 bp, Artificial Sequence
  Probe
aagcgcgtcaggatggc

SEQ ID NO: 26563 - DNA, 32 bp, Artificial Sequence
  Probe
aagcgcgtcaggatggccgagcggtctaaggc

SEQ ID NO: 26564 - DNA, 33 bp, Artificial Sequence; identical to SEQ ID NO: 15087
  Probe

SEQ ID NO: 26565 - DNA, 34 bp, Artificial Sequence
  Probe
aagcgcgtcaggatggccgagcggtctaaggcgc

SEQ ID NO: 26566 - DNA, 36 bp, Artificial Sequence
  Probe
aagcgcgtcaggatggccgagcggtctaaggcgctg

SEQ ID NO: 26567 - DNA, 37 bp, Artificial Sequence
  Probe
aagcgcgtcaggatggccgagcggtctaaggcgctgc

SEQ ID NO: 26568 - DNA, 36 bp, Artificial Sequence
  Probe
aagcggcggctcgttggtctaggggtatgattctcg

SEQ ID NO: 26569 - DNA, 17 bp, Artificial Sequence
  Probe
aagcgggtgctcttatt

SEQ ID NO: 26570 - DNA, 18 bp, Artificial Sequence
  Probe
aagcgggtgctcttattt

SEQ ID NO: 26571 - DNA, 19 bp, Artificial Sequence
  Probe
aagcgggtgctcttatttt

SEQ ID NO: 26572 - DNA, 20 bp, Artificial Sequence
  Probe
aagcgggtgctcttattttt

SEQ ID NO: 26573 - DNA, 15 bp, Artificial Sequence
  Probe
aagcgtgctgggccc

SEQ ID NO: 26574 - DNA, 36 bp, Artificial Sequence
  Probe
aagctaacttagcattaaccttttaagttaaagatt

SEQ ID NO: 26575 - DNA, 15 bp, Artificial Sequence
  Probe
aagctatcgggccca

SEQ ID NO: 26576 - DNA, 16 bp, Artificial Sequence
  Probe
aagctatcgggcccat

SEQ ID NO: 26577 - DNA, 17 bp, Artificial Sequence
  Probe
aagctatcgggcccata

SEQ ID NO: 26578 - DNA, 19 bp, Artificial Sequence
  Probe
aagctatcgggcccatacc

SEQ ID NO: 26579 - DNA, 20 bp, Artificial Sequence
  Probe
aagctatcgggcccataccc

SEQ ID NO: 26580 - DNA, 34 bp, Artificial Sequence; identical to SEQ ID NO: 2310
  Probe

SEQ ID NO: 26581 - DNA, 15 bp, Artificial Sequence
  Probe
aagctcacaagaact

SEQ ID NO: 26582 - DNA, 16 bp, Artificial Sequence
  Probe
aagctcacaagaactg

SEQ ID NO: 26583 - DNA, 26 bp, Artificial Sequence
  Probe
aagctcacaagaactgctaactcatg

SEQ ID NO: 26584 - DNA, 28 bp, Artificial Sequence
  Probe
aagctcacaagaactgctaactcatgcc

SEQ ID NO: 26585 - DNA, 29 bp, Artificial Sequence
  Probe
aagctcacaagaactgctaactcatgccc

SEQ ID NO: 26586 - DNA, 41 bp, Artificial Sequence
  Probe
aagctcacaagaactgctaactcatgcccccatgtctaaca

SEQ ID NO: 26587 - DNA, 44 bp, Artificial Sequence
  Probe
aagctcacaagaactgctaactcatgcccccatgtctaacaaca

SEQ ID NO: 26588 - DNA, 36 bp, Artificial Sequence
  Probe
aaggaagcccggctagctcagtcgatagagcatgag

SEQ ID NO: 26589 - DNA, 36 bp, Artificial Sequence
  Probe
aaggacaaatcagagaaaaagtctttaactccacca

SEQ ID NO: 26590 - DNA, 15 bp, Artificial Sequence
  Probe
aaggactgcaaaacc

SEQ ID NO: 26591 - DNA, 16 bp, Artificial Sequence
  Probe
aaggactgcaaaaccc

SEQ ID NO: 26592 - DNA, 17 bp, Artificial Sequence
  Probe
aaggactgcaaaacccc

SEQ ID NO: 26593 - DNA, 20 bp, Artificial Sequence
  Probe
aaggactgcaaaaccccact

SEQ ID NO: 26594 - DNA, 22 bp, Artificial Sequence
  Probe
aaggactgcaaaaccccactct

SEQ ID NO: 26595 - DNA, 30 bp, Artificial Sequence
  Probe
aaggagcctgggtagctcagtcggtagagc

SEQ ID NO: 26596 - DNA, 31 bp, Artificial Sequence
  Probe
aaggagcctgggtagctcagtcggtagagca

SEQ ID NO: 26597 - DNA, 33 bp, Artificial Sequence
  Probe
aaggagcctgggtagctcagtcggtagagcatc

SEQ ID NO: 26598 - DNA, 34 bp, Artificial Sequence
  Probe
aaggagcctgggtagctcagtcggtagagcatca

SEQ ID NO: 26599 - DNA, 36 bp, Artificial Sequence
  Probe
aaggagcctgggtagctcagtcggtagagcatcaga

SEQ ID NO: 26600 - DNA, 37 bp, Artificial Sequence
  Probe
aaggagcctgggtagctcagtcggtagagcatcagac

SEQ ID NO: 26601 - DNA, 38 bp, Artificial Sequence
  Probe
aaggagcctgggtagctcagtcggtagagcatcagact

SEQ ID NO: 26602 - DNA, 40 bp, Artificial Sequence
  Probe
aaggagcctgggtagctcagtcggtagagcatcagacttt

SEQ ID NO: 26603 - DNA, 36 bp, Artificial Sequence
  Probe
aaggaggccggttagctcagttggttagagcgtggt

SEQ ID NO: 26604 - DNA, 23 bp, Artificial Sequence
  Probe
aaggataacagctatccattggt

SEQ ID NO: 26605 - DNA, 26 bp, Artificial Sequence
  Probe
aaggataacagctatccattggtctt

SEQ ID NO: 26606 - DNA, 27 bp, Artificial Sequence
  Probe
aaggataacagctatccattggtctta

SEQ ID NO: 26607 - DNA, 28 bp, Artificial Sequence
  Probe
aaggataacagctatccattggtcttag

SEQ ID NO: 26608 - DNA, 30 bp, Artificial Sequence
  Probe
aaggataacagctatccattggtcttaggc

SEQ ID NO: 26609 - DNA, 31 bp, Artificial Sequence
  Probe
aaggataacagctatccattggtcttaggcc

SEQ ID NO: 26610 - DNA, 32 bp, Artificial Sequence
  Probe
aaggataacagctatccattggtcttaggccc

SEQ ID NO: 26611 - DNA, 33 bp, Artificial Sequence
  Probe
aaggataacagctatccattggtcttaggcccc

SEQ ID NO: 26612 - DNA, 36 bp, Artificial Sequence
  Probe
aaggataacagctatccattggtcttaggccccaaa

SEQ ID NO: 26613 - DNA, 17 bp, Artificial Sequence
  Probe
aaggattagactgaacc

SEQ ID NO: 26614 - DNA, 33 bp, Artificial Sequence
  Probe
aagggaacctgggtagcttagttggtagagcat

SEQ ID NO: 26615 - DNA, 17 bp, Artificial Sequence
  Probe
aagggaggttatgatta

SEQ ID NO: 26616 - DNA, 20 bp, Artificial Sequence
  Probe
aagggaggttatgattaact

SEQ ID NO: 26617 - DNA, 21 bp, Artificial Sequence
  Probe
aagggaggttatgattaactt

SEQ ID NO: 26618 - DNA, 22 bp, Artificial Sequence
  Probe
aagggaggttatgattaacttt

SEQ ID NO: 26619 - DNA, 23 bp, Artificial Sequence
  Probe
aagggaggttatgattaactttt

SEQ ID NO: 26620 - DNA, 16 bp, Artificial Sequence
  Probe
aagggcttagcttaat

SEQ ID NO: 26621 - DNA, 17 bp, Artificial Sequence
  Probe
aagggcttagcttaatt

SEQ ID NO: 26622 - DNA, 18 bp, Artificial Sequence
  Probe
aagggcttagcttaatta

SEQ ID NO: 26623 - DNA, 21 bp, Artificial Sequence
  Probe
aagggcttagcttaattaaag

SEQ ID NO: 26624 - DNA, 22 bp, Artificial Sequence
  Probe
aagggcttagcttaattaaagt

SEQ ID NO: 26625 - DNA, 23 bp, Artificial Sequence
  Probe
aagggcttagcttaattaaagtg

SEQ ID NO: 26626 - DNA, 25 bp, Artificial Sequence
  Probe
aagggcttagcttaattaaagtggc

SEQ ID NO: 26627 - DNA, 26 bp, Artificial Sequence
  Probe
aagggcttagcttaattaaagtggct

SEQ ID NO: 26628 - DNA, 29 bp, Artificial Sequence
  Probe
aagggcttagcttaattaaagtggctgat

SEQ ID NO: 26629 - DNA, 30 bp, Artificial Sequence
  Probe
aagggcttagcttaattaaagtggctgatt

SEQ ID NO: 26630 - DNA, 33 bp, Artificial Sequence; identical to SEQ ID NO: 2327
  Probe

SEQ ID NO: 26631 - DNA, 36 bp, Artificial Sequence; identical to SEQ ID NO: 15125
  Probe

SEQ ID NO: 26632 - DNA, 40 bp, Artificial Sequence
  Probe
aagggcttagcttaattaaagtggctgatttgcgttcagt

SEQ ID NO: 26633 - DNA, 41 bp, Artificial Sequence
  Probe
aagggcttagcttaattaaagtggctgatttgcgttcagtt

SEQ ID NO: 26634 - DNA, 36 bp, Artificial Sequence
  Probe
aaggggtaggggatgtagctcagtggtagagcgcat

SEQ ID NO: 26635 - DNA, 16 bp, Artificial Sequence
  Probe
aaggtattagaaaaac

SEQ ID NO: 26636 - DNA, 17 bp, Artificial Sequence
  Probe
aaggtattagaaaaacc

SEQ ID NO: 26637 - DNA, 33 bp, Artificial Sequence; identical to SEQ ID NO: 2331
  Probe

SEQ ID NO: 26638 - DNA, 40 bp, Artificial Sequence
  Probe
aaggtattagaaaaaccatttcataactttgtcaaagtta

SEQ ID NO: 26639 - DNA, 50 bp, Artificial Sequence
  Probe
aaggtattagaaaaaccatttcataactttgtcaaagttaaattataggc

SEQ ID NO: 26640 - DNA, 27 bp, Artificial Sequence
  Probe
aaggtcagctaaataagctatcgggcc

SEQ ID NO: 26641 - DNA, 28 bp, Artificial Sequence
  Probe
aaggtcagctaaataagctatcgggccc

SEQ ID NO: 26642 - DNA, 29 bp, Artificial Sequence
  Probe
aaggtcagctaaataagctatcgggccca

SEQ ID NO: 26643 - DNA, 36 bp, Artificial Sequence
  Probe
aaggtcagctaaataagctatcgggcccataccccg

SEQ ID NO: 26644 - DNA, 30 bp, Artificial Sequence
  Probe
aaggtcgcgggttcgatccccgtacgggcc

SEQ ID NO: 26645 - DNA, 36 bp, Artificial Sequence
  Probe
aaggttccgggttcgagtcccggcggagtcgtaacg

SEQ ID NO: 26646 - DNA, 36 bp, Artificial Sequence
  Probe
aaggttgtgggttcgagtcccaccagagtcgctttt

SEQ ID NO: 26647 - DNA, 32 bp, Artificial Sequence
  Probe
aagtaaggtcagctaaataagctatcgggccc

SEQ ID NO: 26648 - DNA, 33 bp, Artificial Sequence
  Probe
aagtagggttccatggtgtaatggttagcactc

SEQ ID NO: 26649 - DNA, 22 bp, Artificial Sequence
  Probe
aagtcatggaggccatggggtt

SEQ ID NO: 26650 - DNA, 17 bp, Artificial Sequence
  Probe
aagtccctgttcgggcg

SEQ ID NO: 26651 - DNA, 26 bp, Artificial Sequence
  Probe
aagtccctgttcgggcggatgctgtt

SEQ ID NO: 26652 - DNA, 27 bp, Artificial Sequence
  Probe
aagtccctgttcgggcggatgctgttt

SEQ ID NO: 26653 - DNA, 29 bp, Artificial Sequence
  Probe
aagtccctgttcgggcgggagtggtggct

SEQ ID NO: 26654 - DNA, 31 bp, Artificial Sequence
  Probe
aagtccctgttcgggcgggagtggtggcttt

SEQ ID NO: 26655 - DNA, 28 bp, Artificial Sequence
  Probe
aagtcgcattttgtgaaccctgggtttt

SEQ ID NO: 26656 - DNA, 36 bp, Artificial Sequence
  Probe
aagtcggggccagtggcgcaatggataacgcgtctg

SEQ ID NO: 26657 - DNA, 36 bp, Artificial Sequence
  Probe
aagtcttcctcgttagtatagtggtgagtgtccccg

SEQ ID NO: 26658 - DNA, 19 bp, Artificial Sequence
  Probe
aagtctttaactccaccat

SEQ ID NO: 26659 - DNA, 15 bp, Artificial Sequence
  Probe
aagtgcacttggacg

SEQ ID NO: 26660 - DNA, 18 bp, Artificial Sequence
  Probe
aagtgcacttggacgaac

SEQ ID NO: 26661 - DNA, 19 bp, Artificial Sequence
  Probe
aagtgcacttggacgaacc

SEQ ID NO: 26662 - DNA, 36 bp, Artificial Sequence
  Probe
aagtggctcgttggtctaggggtatgattctcgctt

SEQ ID NO: 26663 - DNA, 15 bp, Artificial Sequence
  Probe
aagtggctgatttgc

SEQ ID NO: 26664 - DNA, 15 bp, Artificial Sequence
  Probe
aagtggttcccgttt

SEQ ID NO: 26665 - DNA, 16 bp, Artificial Sequence
  Probe
aagtggttcccgtttt

SEQ ID NO: 26666 - DNA, 17 bp, Artificial Sequence
  Probe
aagtggttcccgttttt

SEQ ID NO: 26667 - DNA, 15 bp, Artificial Sequence
  Probe
aagtgtactggaaag

SEQ ID NO: 26668 - DNA, 16 bp, Artificial Sequence
  Probe
aagtgtactggaaagt

SEQ ID NO: 26669 - DNA, 17 bp, Artificial Sequence
  Probe
aagtgtactggaaagtg

SEQ ID NO: 26670 - DNA, 18 bp, Artificial Sequence
  Probe
aagtgtactggaaagtgc

SEQ ID NO: 26671 - DNA, 19 bp, Artificial Sequence
  Probe
aagtgtactggaaagtgca

SEQ ID NO: 26672 - DNA, 20 bp, Artificial Sequence
  Probe
aagtgtactggaaagtgcac

SEQ ID NO: 26673 - DNA, 21 bp, Artificial Sequence
  Probe
aagtgtactggaaagtgcact

SEQ ID NO: 26674 - DNA, 22 bp, Artificial Sequence
  Probe
aagtgtactggaaagtgcactt

SEQ ID NO: 26675 - DNA, 23 bp, Artificial Sequence
  Probe
aagtgtactggaaagtgcacttg

SEQ ID NO: 26676 - DNA, 26 bp, Artificial Sequence
  Probe
aagtgtactggaaagtgcacttggac

SEQ ID NO: 26677 - DNA, 27 bp, Artificial Sequence
  Probe
aagtgtactggaaagtgcacttggacg

SEQ ID NO: 26678 - DNA, 28 bp, Artificial Sequence
  Probe
aagtgtactggaaagtgcacttggacga

SEQ ID NO: 26679 - DNA, 29 bp, Artificial Sequence
  Probe
aagtgtactggaaagtgcacttggacgaa

SEQ ID NO: 26680 - DNA, 30 bp, Artificial Sequence; identical to SEQ ID NO: 2379
  Probe

SEQ ID NO: 26681 - DNA, 31 bp, Artificial Sequence; identical to SEQ ID NO: 2380
  Probe

SEQ ID NO: 26682 - DNA, 32 bp, Artificial Sequence; identical to SEQ ID NO: 2381
  Probe

SEQ ID NO: 26683 - DNA, 33 bp, Artificial Sequence; identical to SEQ ID NO: 2382
  Probe

SEQ ID NO: 26684 - DNA, 34 bp, Artificial Sequence; identical to SEQ ID NO: 2383
  Probe

SEQ ID NO: 26685 - DNA, 15 bp, Artificial Sequence
  Probe
aagtgtttgtgggtt

SEQ ID NO: 26686 - DNA, 16 bp, Artificial Sequence
  Probe
aagtgtttgtgggttt

SEQ ID NO: 26687 - DNA, 17 bp, Artificial Sequence
  Probe
aagtgtttgtgggttta

SEQ ID NO: 26688 - DNA, 19 bp, Artificial Sequence
  Probe
aagtgtttgtgggtttaag

SEQ ID NO: 26689 - DNA, 20 bp, Artificial Sequence
  Probe
aagtgtttgtgggtttaagt

SEQ ID NO: 26690 - DNA, 23 bp, Artificial Sequence
  Probe
aagtgtttgtgggtttaagtccc

SEQ ID NO: 26691 - DNA, 25 bp, Artificial Sequence
  Probe
aagtgtttgtgggtttaagtcccat

SEQ ID NO: 26692 - DNA, 30 bp, Artificial Sequence; identical to SEQ ID NO: 2390
  Probe

SEQ ID NO: 26693 - DNA, 31 bp, Artificial Sequence; identical to SEQ ID NO: 86
  Probe

SEQ ID NO: 26694 - DNA, 32 bp, Artificial Sequence; identical to SEQ ID NO: 2391
  Probe

SEQ ID NO: 26695 - DNA, 36 bp, Artificial Sequence; identical to SEQ ID NO: 15184
  Probe

SEQ ID NO: 26696 - DNA, 21 bp, Artificial Sequence
  Probe
aagttaaagattaagagaacc

SEQ ID NO: 26697 - DNA, 26 bp, Artificial Sequence
  Probe
aagttaaagattaagagaaccaacac

SEQ ID NO: 26698 - DNA, 27 bp, Artificial Sequence
  Probe
aagttaaagattaagagaaccaacacc

SEQ ID NO: 26699 - DNA, 28 bp, Artificial Sequence
  Probe
aagttaaagattaagagaaccaacacct

SEQ ID NO: 26700 - DNA, 36 bp, Artificial Sequence
  Probe
aagttaaagattaagagaaccaacacctctttacag

SEQ ID NO: 26701 - DNA, 40 bp, Artificial Sequence; identical to SEQ ID NO: 2397
  Probe

SEQ ID NO: 26702 - DNA, 41 bp, Artificial Sequence; identical to SEQ ID NO: 2398
  Probe

SEQ ID NO: 26703 - DNA, 17 bp, Artificial Sequence
  Probe
aagttaaattataggct

SEQ ID NO: 26704 - DNA, 36 bp, Artificial Sequence; identical to SEQ ID NO: 15195
  Probe

SEQ ID NO: 26705 - DNA, 30 bp, Artificial Sequence
  Probe
aagttgctcgtctgggtagtcagctgatcc

SEQ ID NO: 26706 - DNA, 35 bp, Artificial Sequence
  Probe
aagtttccgtagtgtagtggttatcacgttcgcct

SEQ ID NO: 26707 - DNA, 36 bp, Artificial Sequence
  Probe
aagtttccgtagtgtagtggttatcacgttcgccta

SEQ ID NO: 26708 - DNA, 15 bp, Artificial Sequence
  Probe
aataacgccaaggtc

SEQ ID NO: 26709 - DNA, 15 bp, Artificial Sequence
  Probe
aataagctatcgggc

SEQ ID NO: 26710 - DNA, 16 bp, Artificial Sequence
  Probe
aataagctatcgggcc

SEQ ID NO: 26711 - DNA, 17 bp, Artificial Sequence
  Probe
aataagctatcgggccc

SEQ ID NO: 26712 - DNA, 18 bp, Artificial Sequence
  Probe
aataagctatcgggccca

SEQ ID NO: 26713 - DNA, 19 bp, Artificial Sequence
  Probe
aataagctatcgggcccat

SEQ ID NO: 26714 - DNA, 22 bp, Artificial Sequence
  Probe
aataagctatcgggcccatacc

SEQ ID NO: 26715 - DNA, 23 bp, Artificial Sequence
  Probe
aataagctatcgggcccataccc

SEQ ID NO: 26716 - DNA, 27 bp, Artificial Sequence
  Probe
aataagctatcgggcccataccccgaa

SEQ ID NO: 26717 - DNA, 36 bp, Artificial Sequence
  Probe
aataagctatcgggcccataccccgaaaatgttggt

SEQ ID NO: 26718 - DNA, 37 bp, Artificial Sequence
  Probe
aataagctatcgggcccataccccgaaaatgttggtt

SEQ ID NO: 26719 - DNA, 19 bp, Artificial Sequence
  Probe
aataataggagcttaaacc

SEQ ID NO: 26720 - DNA, 21 bp, Artificial Sequence
  Probe
aataataggagcttaaacccc

SEQ ID NO: 26721 - DNA, 22 bp, Artificial Sequence
  Probe
aataataggagcttaaaccccc

SEQ ID NO: 26722 - DNA, 32 bp, Artificial Sequence
  Probe
aatacaacgatggtttttcatatcattggtcg

SEQ ID NO: 26723 - DNA, 33 bp, Artificial Sequence
  Probe
aatacaacgatggtttttcatatcattggtcgt

SEQ ID NO: 26724 - DNA, 36 bp, Artificial Sequence
  Probe
aatacaacgatggtttttcatatcattggtcgtggt

SEQ ID NO: 26725 - DNA, 44 bp, Artificial Sequence
  Probe
aatacaacgatggtttttcatatcattggtcgtggttgtagtcc

SEQ ID NO: 26726 - DNA, 50 bp, Artificial Sequence
  Probe
aatacaacgatggtttttcatatcattggtcgtggttgtagtccgtgcga

SEQ ID NO: 26727 - DNA, 27 bp, Artificial Sequence
  Probe
aatacactgaaaatgtttagacgggct

SEQ ID NO: 26728 - DNA, 29 bp, Artificial Sequence
  Probe
aatacactgaaaatgtttagacgggctca

SEQ ID NO: 26729 - DNA, 30 bp, Artificial Sequence
  Probe
aatacactgaaaatgtttagacgggctcac

SEQ ID NO: 26730 - DNA, 31 bp, Artificial Sequence
  Probe
aatacactgaaaatgtttagacgggctcaca

SEQ ID NO: 26731 - DNA, 33 bp, Artificial Sequence
  Probe
aatacactgaaaatgtttagacgggctcacatc

SEQ ID NO: 26732 - DNA, 36 bp, Artificial Sequence
  Probe
aatacactgaaaatgtttagacgggctcacatcacc

SEQ ID NO: 26733 - DNA, 18 bp, Artificial Sequence
  Probe
aatacagaccaagagcct

SEQ ID NO: 26734 - DNA, 26 bp, Artificial Sequence
  Probe
aatacagaccaagagccttcaaagcc

SEQ ID NO: 26735 - DNA, 16 bp, Artificial Sequence
  Probe
aatactaccgtatggc

SEQ ID NO: 26736 - DNA, 16 bp, Artificial Sequence
  Probe
aatactcaaatgggcc

SEQ ID NO: 26737 - DNA, 17 bp, Artificial Sequence
  Probe
aatactcaaatgggcct

SEQ ID NO: 26738 - DNA, 36 bp, Artificial Sequence
  Probe
aatagctcagttgggagagcgttagactgaagatct

SEQ ID NO: 26739 - DNA, 16 bp, Artificial Sequence
  Probe
aataggagcttaaacc

SEQ ID NO: 26740 - DNA, 19 bp, Artificial Sequence
  Probe
aataggagcttaaaccccc

SEQ ID NO: 26741 - DNA, 36 bp, Artificial Sequence
  Probe
aataggagcttaaacccccttatttctaggactatg

SEQ ID NO: 26742 - DNA, 15 bp, Artificial Sequence
  Probe
aataggtttggtcct

SEQ ID NO: 26743 - DNA, 24 bp, Artificial Sequence
  Probe
aataggtttggtcctagcctttct

SEQ ID NO: 26744 - DNA, 30 bp, Artificial Sequence; identical to SEQ ID NO: 2424
  Probe

SEQ ID NO: 26745 - DNA, 15 bp, Artificial Sequence
  Probe
aatagtaccgttaac

SEQ ID NO: 26746 - DNA, 18 bp, Artificial Sequence
  Probe
aatagtaccgttaacttc

SEQ ID NO: 26747 - DNA, 36 bp, Artificial Sequence
  Probe
aatatagtttaaccaaaacatcagattgtgaatctg

SEQ ID NO: 26748 - DNA, 29 bp, Artificial Sequence
  Probe
aatcacgtcggggtcaaacaaaacattgt

SEQ ID NO: 26749 - DNA, 30 bp, Artificial Sequence
  Probe
aatcacgtcggggtcaaacaaaacattgtt

SEQ ID NO: 26750 - DNA, 19 bp, Artificial Sequence
  Probe
aatcacgtcggggtcaaca

SEQ ID NO: 26751 - DNA, 23 bp, Artificial Sequence
  Probe
aatcagagaaaaagtctttaact

SEQ ID NO: 26752 - DNA, 24 bp, Artificial Sequence
  Probe
aatcagagaaaaagtctttaactc

SEQ ID NO: 26753 - DNA, 25 bp, Artificial Sequence
  Probe
aatcagagaaaaagtctttaactcc

SEQ ID NO: 26754 - DNA, 28 bp, Artificial Sequence
  Probe
aatcagagaaaaagtctttaactccacc

SEQ ID NO: 26755 - DNA, 30 bp, Artificial Sequence; identical to SEQ ID NO: 15218
  Probe

SEQ ID NO: 26756 - DNA, 20 bp, Artificial Sequence
  Probe
aatcagtgcccggctagctc

SEQ ID NO: 26757 - DNA, 25 bp, Artificial Sequence
  Probe
aatcagtgcccggctagctcagtcg

SEQ ID NO: 26758 - DNA, 36 bp, Artificial Sequence
  Probe
aatcagtgcccggctagctcagtcggtagagcatga

SEQ ID NO: 26759 - DNA, 19 bp, Artificial Sequence
  Probe
aatccagcgatccgagttc

SEQ ID NO: 26760 - DNA, 23 bp, Artificial Sequence
  Probe
aatccagcgatccgagttcaaat

SEQ ID NO: 26761 - DNA, 36 bp, Artificial Sequence; identical to SEQ ID NO: 93
  Probe

SEQ ID NO: 26762 - DNA, 36 bp, Artificial Sequence; identical to SEQ ID NO: 15234
  Probe

SEQ ID NO: 26763 - DNA, 18 bp, Artificial Sequence
  Probe
aatcccaccgctgccaca

SEQ ID NO: 26764 - DNA, 18 bp, Artificial Sequence
  Probe
aatcccaccgctgccagc

SEQ ID NO: 26765 - DNA, 19 bp, Artificial Sequence
  Probe
aatcccagcggtgcctcaa

SEQ ID NO: 26766 - DNA, 19 bp, Artificial Sequence
  Probe
aatcccagcggtgcctccg

SEQ ID NO: 26767 - DNA, 18 bp, Artificial Sequence
  Probe
aatcccatcctcgtcgct

SEQ ID NO: 26768 - DNA, 18 bp, Artificial Sequence
  Probe
aatcccatcctcgtcggc

SEQ ID NO: 26769 - DNA, 36 bp, Artificial Sequence
  Probe
aatcccatcctcgtcggctgcatagcaagccttttg

SEQ ID NO: 26770 - DNA, 15 bp, Artificial Sequence
  Probe
aatccccggcacctc

SEQ ID NO: 26771 - DNA, 19 bp, Artificial Sequence
  Probe
aatccccggcacctccacc

SEQ ID NO: 26772 - DNA, 17 bp, Artificial Sequence
  Probe
aatcccctggcccaacc

SEQ ID NO: 26773 - DNA, 18 bp, Artificial Sequence
  Probe
aatcccctggcccaaccc

SEQ ID NO: 26774 - DNA, 19 bp, Artificial Sequence
  Probe
aatcccctggcccaacccg

SEQ ID NO: 26775 - DNA, 21 bp, Artificial Sequence
  Probe
aatcccctggcccaacccgtc

SEQ ID NO: 26776 - DNA, 27 bp, Artificial Sequence
  Probe
aatcccctggcccaacccgtcatctac

SEQ ID NO: 26777 - DNA, 15 bp, Artificial Sequence
  Probe
aatcccggacgagcc

SEQ ID NO: 26778 - DNA, 16 bp, Artificial Sequence
  Probe
aatcccggacgagccc

SEQ ID NO: 26779 - DNA, 17 bp, Artificial Sequence
  Probe
aatcccggacgagccca

SEQ ID NO: 26780 - DNA, 19 bp, Artificial Sequence
  Probe
aatcccggacgagcccaca

SEQ ID NO: 26781 - DNA, 19 bp, Artificial Sequence
  Probe
aatcccggacgagcccact

SEQ ID NO: 26782 - DNA, 20 bp, Artificial Sequence
  Probe
aatcccggacgagcccactt

SEQ ID NO: 26783 - DNA, 21 bp, Artificial Sequence
  Probe
aatcccggacgagcccacttc

SEQ ID NO: 26784 - DNA, 22 bp, Artificial Sequence
  Probe
aatcccggacgagcccacttca

SEQ ID NO: 26785 - DNA, 21 bp, Artificial Sequence
  Probe
aatcccggacgagcccacttt

SEQ ID NO: 26786 - DNA, 22 bp, Artificial Sequence
  Probe
aatcccggacgagcccactttt

SEQ ID NO: 26787 - DNA, 23 bp, Artificial Sequence
  Probe
aatcccggacgagcccaggcttt

SEQ ID NO: 26788 - DNA, 17 bp, Artificial Sequence
  Probe
aatcccggacgagcccc

SEQ ID NO: 26789 - DNA, 18 bp, Artificial Sequence
  Probe
aatcccggacgagccccc

SEQ ID NO: 26790 - DNA, 19 bp, Artificial Sequence
  Probe
aatcccggacgagccccct

SEQ ID NO: 26791 - DNA, 18 bp, Artificial Sequence
  Probe
aatcccggacgagcccct

SEQ ID NO: 26792 - DNA, 22 bp, Artificial Sequence
  Probe
aatcccggacgagcccctcttt

SEQ ID NO: 26793 - DNA, 17 bp, Artificial Sequence
  Probe
aatcccggacgagccct

SEQ ID NO: 26794 - DNA, 18 bp, Artificial Sequence
  Probe
aatcccggacgagccctc

SEQ ID NO: 26795 - DNA, 19 bp, Artificial Sequence
  Probe
aatcccggacgagccctca

SEQ ID NO: 26796 - DNA, 20 bp, Artificial Sequence
  Probe
aatcccggacgagccctcat

SEQ ID NO: 26797 - DNA, 21 bp, Artificial Sequence
  Probe
aatcccggacgagccctcatt

SEQ ID NO: 26798 - DNA, 22 bp, Artificial Sequence
  Probe
aatcccggacgagccctcattt

SEQ ID NO: 26799 - DNA, 23 bp, Artificial Sequence
  Probe
aatcccggacgagccctcatttt

SEQ ID NO: 26800 - DNA, 24 bp, Artificial Sequence
  Probe
aatcccggacgagccctcattttc

SEQ ID NO: 26801 - DNA, 25 bp, Artificial Sequence
  Probe
aatcccggacgagccctcattttct

SEQ ID NO: 26802 - DNA, 26 bp, Artificial Sequence
  Probe
aatcccggacgagccctcattttctt

SEQ ID NO: 26803 - DNA, 27 bp, Artificial Sequence
  Probe
aatcccggacgagccctcattttcttt

SEQ ID NO: 26804 - DNA, 19 bp, Artificial Sequence
  Probe
aatcccggacgagccctcg

SEQ ID NO: 26805 - DNA, 19 bp, Artificial Sequence
  Probe
aatcccggacgagccctgt

SEQ ID NO: 26806 - DNA, 20 bp, Artificial Sequence
  Probe
aatcccggacgagccctgtt

SEQ ID NO: 26807 - DNA, 21 bp, Artificial Sequence
  Probe
aatcccggacgagccctgttt

SEQ ID NO: 26808 - DNA, 22 bp, Artificial Sequence
  Probe
aatcccggacgagccctgtttt

SEQ ID NO: 26809 - DNA, 17 bp, Artificial Sequence
  Probe
aatccgggtgccccctc

SEQ ID NO: 26810 - DNA, 19 bp, Artificial Sequence
  Probe
aatccgggtgccccctcaa

SEQ ID NO: 26811 - DNA, 19 bp, Artificial Sequence
  Probe
aatcctgccgactacggca

SEQ ID NO: 26812 - DNA, 19 bp, Artificial Sequence
  Probe
aatcctgccgactacgtca

SEQ ID NO: 26813 - DNA, 20 bp, Artificial Sequence
  Probe
aatcgaacccatccctgaga

SEQ ID NO: 26814 - DNA, 36 bp, Artificial Sequence; identical to SEQ ID NO: 100
  Probe

SEQ ID NO: 26815 - DNA, 27 bp, Artificial Sequence
  Probe
aatcggttagcgcgttcggctgttaac

SEQ ID NO: 26816 - DNA, 24 bp, Artificial Sequence
  Probe
aatctaaagacaggggttaggcct

SEQ ID NO: 26817 - DNA, 36 bp, Artificial Sequence; identical to SEQ ID NO: 2466
  Probe

SEQ ID NO: 26818 - DNA, 36 bp, Artificial Sequence
  Probe
aatctcagggtcgtgggttcgagccccacgttgggc

SEQ ID NO: 26819 - DNA, 40 bp, Artificial Sequence
  Probe
aatctcagggtcgtgggttcgagccccacgttgggcggca

SEQ ID NO: 26820 - DNA, 19 bp, Artificial Sequence
  Probe
aatctcggtggaacctgca

SEQ ID NO: 26821 - DNA, 27 bp, Artificial Sequence
  Probe
aatctcggtggaacctgcattggtttt

SEQ ID NO: 26822 - DNA, 36 bp, Artificial Sequence
  Probe
aatctgaaggtcctgagttcgaacctcagagggggc

SEQ ID NO: 26823 - DNA, 40 bp, Artificial Sequence
  Probe
aatctgaaggtcctgagttcgaacctcagagggggcagct

SEQ ID NO: 26824 - DNA, 36 bp, Artificial Sequence
  Probe
aatctgaaggtcgtgagttcgagcctcacacggggc

SEQ ID NO: 26825 - DNA, 36 bp, Artificial Sequence
  Probe
aatctgaaggtcgtgagttcgatcctcacacggggc

SEQ ID NO: 26826 - DNA, 40 bp, Artificial Sequence; identical to SEQ ID NO: 2472
  Probe

SEQ ID NO: 26827 - DNA, 26 bp, Artificial Sequence
  Probe
aatctgacaacagaggcttacgaccc

SEQ ID NO: 26828 - DNA, 38 bp, Artificial Sequence; identical to SEQ ID NO: 2479
  Probe

SEQ ID NO: 26829 - DNA, 36 bp, Artificial Sequence
  Probe
aatctgagggtccagggttcaagtccctgttcgggc

SEQ ID NO: 26830 - DNA, 39 bp, Artificial Sequence
  Probe
aatctgagggtccagggttcaagtccctgttcgggcggc

SEQ ID NO: 26831 - DNA, 40 bp, Artificial Sequence
  Probe
aatctgagggtccagggttcaagtccctgttcgggcggca

SEQ ID NO: 26832 - DNA, 39 bp, Artificial Sequence
  Probe
aatctgagggtccagggttcaagtccctgttcgggcgtc

SEQ ID NO: 26833 - DNA, 37 bp, Artificial Sequence
  Probe
aatcttagctttgggtgctaatggtggagttaaagac

SEQ ID NO: 26834 - DNA, 38 bp, Artificial Sequence
  Probe
aatcttagctttgggtgctaatggtggagttaaagact

SEQ ID NO: 26835 - DNA, 50 bp, Artificial Sequence; identical to SEQ ID NO: 2483
  Probe

SEQ ID NO: 26836 - DNA, 36 bp, Artificial Sequence
  Probe
aatgacatccttcgatagctcagctggtagagcgga

SEQ ID NO: 26837 - DNA, 15 bp, Artificial Sequence
  Probe
aatgatttcgactca

SEQ ID NO: 26838 - DNA, 16 bp, Artificial Sequence
  Probe
aatgatttcgactcat

SEQ ID NO: 26839 - DNA, 17 bp, Artificial Sequence
  Probe
aatgatttcgactcatt

SEQ ID NO: 26840 - DNA, 36 bp, Artificial Sequence
  Probe
aatgatttcgactcattaaattatgataatcatatt

SEQ ID NO: 26841 - DNA, 19 bp, Artificial Sequence
  Probe
aatgccccaactaaatact

SEQ ID NO: 26842 - DNA, 22 bp, Artificial Sequence
  Probe
aatgccccaactaaatactacc

SEQ ID NO: 26843 - DNA, 23 bp, Artificial Sequence
  Probe
aatgccccaactaaatactaccg

SEQ ID NO: 26844 - DNA, 29 bp, Artificial Sequence
  Probe
aatgccccaactaaatactaccgtatggc

SEQ ID NO: 26845 - DNA, 36 bp, Artificial Sequence
  Probe
aatggaggcgtgggttcgaatcccacttctgacaca

SEQ ID NO: 26846 - DNA, 20 bp, Artificial Sequence
  Probe
aatggataacgcgtctgact

SEQ ID NO: 26847 - DNA, 27 bp, Artificial Sequence
  Probe
aatggataacgcgtctgactacggatc

SEQ ID NO: 26848 - DNA, 16 bp, Artificial Sequence
  Probe
aatggataaggcactg

SEQ ID NO: 26849 - DNA, 18 bp, Artificial Sequence
  Probe
aatggataaggcactggc

SEQ ID NO: 26850 - DNA, 16 bp, Artificial Sequence
  Probe
aatggataaggcattg

SEQ ID NO: 26851 - DNA, 18 bp, Artificial Sequence
  Probe
aatggataaggcattggc

SEQ ID NO: 26852 - DNA, 18 bp, Artificial Sequence
  Probe
aatggataaggcgtctga

SEQ ID NO: 26853 - DNA, 20 bp, Artificial Sequence
  Probe
aatggataaggcgtctgact

SEQ ID NO: 26854 - DNA, 18 bp, Artificial Sequence
  Probe
aatggatagcgcattgga

SEQ ID NO: 26855 - DNA, 19 bp, Artificial Sequence
  Probe
aatggatagcgcattggac

SEQ ID NO: 26856 - DNA, 20 bp, Artificial Sequence
  Probe
aatggatagcgcattggact

SEQ ID NO: 26857 - DNA, 20 bp, Artificial Sequence
  Probe
aatggcacggcaaggggctc

SEQ ID NO: 26858 - DNA, 23 bp, Artificial Sequence
  Probe
aatggctgagtgaagcattggac

SEQ ID NO: 26859 - DNA, 24 bp, Artificial Sequence
  Probe
aatggctgagtgaagcattggact

SEQ ID NO: 26860 - DNA, 27 bp, Artificial Sequence
  Probe
aatggctgagtgaagcattggactgta

SEQ ID NO: 26861 - DNA, 28 bp, Artificial Sequence
  Probe
aatggctgagtgaagcattggactgtaa

SEQ ID NO: 26862 - DNA, 29 bp, Artificial Sequence
  Probe
aatggctgagtgaagcattggactgtaaa

SEQ ID NO: 26863 - DNA, 36 bp, Artificial Sequence
  Probe
aatggctgagtgaagcattggactgtaaatctaaag

SEQ ID NO: 26864 - DNA, 15 bp, Artificial Sequence
  Probe
aatggcttggttttt

SEQ ID NO: 26865 - DNA, 17 bp, Artificial Sequence
  Probe
aatggtagagcgctcgc

SEQ ID NO: 26866 - DNA, 19 bp, Artificial Sequence
  Probe
aatggtagcgcgtctgact

SEQ ID NO: 26867 - DNA, 18 bp, Artificial Sequence
  Probe
aatggtgagcactctgga

SEQ ID NO: 26868 - DNA, 15 bp, Artificial Sequence
  Probe
aatggtggagttaaa

SEQ ID NO: 26869 - DNA, 16 bp, Artificial Sequence
  Probe
aatggtggagttaaag

SEQ ID NO: 26870 - DNA, 17 bp, Artificial Sequence
  Probe
aatggtggagttaaaga

SEQ ID NO: 26871 - DNA, 19 bp, Artificial Sequence
  Probe
aatggtggagttaaagact

SEQ ID NO: 26872 - DNA, 20 bp, Artificial Sequence
  Probe
aatggtggagttaaagactt

SEQ ID NO: 26873 - DNA, 21 bp, Artificial Sequence
  Probe
aatggtggagttaaagacttt

SEQ ID NO: 26874 - DNA, 27 bp, Artificial Sequence
  Probe
aatggtggagttaaagactttttctct

SEQ ID NO: 26875 - DNA, 28 bp, Artificial Sequence
  Probe
aatggtggagttaaagactttttctctg

SEQ ID NO: 26876 - DNA, 30 bp, Artificial Sequence; identical to SEQ ID NO: 8969
  Probe

SEQ ID NO: 26877 - DNA, 31 bp, Artificial Sequence; identical to SEQ ID NO: 2497
  Probe

SEQ ID NO: 26878 - DNA, 17 bp, Artificial Sequence
  Probe
aatggttagcactctgg

SEQ ID NO: 26879 - DNA, 18 bp, Artificial Sequence
  Probe
aatggttagcactctgga

SEQ ID NO: 26880 - DNA, 19 bp, Artificial Sequence
  Probe
aatggttagcactctggac

SEQ ID NO: 26881 - DNA, 20 bp, Artificial Sequence
  Probe
aatggttagcactctggact

SEQ ID NO: 26882 - DNA, 21 bp, Artificial Sequence
  Probe
aatggttagcactctggactc

SEQ ID NO: 26883 - DNA, 24 bp, Artificial Sequence
  Probe
aatggttagcactctggactctga

SEQ ID NO: 26884 - DNA, 25 bp, Artificial Sequence
  Probe
aatggttagcactctggactctgaa

SEQ ID NO: 26885 - DNA, 28 bp, Artificial Sequence
  Probe
aatggttagcactctggactctgaatcc

SEQ ID NO: 26886 - DNA, 39 bp, Artificial Sequence
  Probe
aatggttagcactctggactctgaatccagcgatccgag

SEQ ID NO: 26887 - DNA, 40 bp, Artificial Sequence
  Probe
aatggttagcactctggactctgaatccagcgatccgagt

SEQ ID NO: 26888 - DNA, 41 bp, Artificial Sequence
  Probe
aatggttagcactctggactctgaatccagcgatccgagtt

SEQ ID NO: 26889 - DNA, 26 bp, Artificial Sequence
  Probe
aatggttagcactctggactttgaat

SEQ ID NO: 26890 - DNA, 27 bp, Artificial Sequence
  Probe
aatggttagcactctggactttgaatc

SEQ ID NO: 26891 - DNA, 28 bp, Artificial Sequence
  Probe
aatggttagcactctggactttgaatcc

SEQ ID NO: 26892 - DNA, 29 bp, Artificial Sequence
  Probe
aatggttagcactctggactttgaatcca

SEQ ID NO: 26893 - DNA, 36 bp, Artificial Sequence
  Probe
aatggttagcactctggactttgaatccagcgatcc

SEQ ID NO: 26894 - DNA, 41 bp, Artificial Sequence
  Probe
aatggttagcactctggactttgaatccagcgatccgagtt

SEQ ID NO: 26895 - DNA, 15 bp, Artificial Sequence
  Probe
aatgttggttatacc

SEQ ID NO: 26896 - DNA, 16 bp, Artificial Sequence
  Probe
aatgttggttataccc

SEQ ID NO: 26897 - DNA, 15 bp, Artificial Sequence
  Probe
aatgtttagacgggc

SEQ ID NO: 26898 - DNA, 22 bp, Artificial Sequence
  Probe
aatgtttagacgggctcacatc

SEQ ID NO: 26899 - DNA, 23 bp, Artificial Sequence
  Probe
aatgtttagacgggctcacatca

SEQ ID NO: 26900 - DNA, 27 bp, Artificial Sequence
  Probe
aatgtttagacgggctcacatcacccc

SEQ ID NO: 26901 - DNA, 30 bp, Artificial Sequence
  Probe
aatgtttagacgggctcacatcaccccata

SEQ ID NO: 26902 - DNA, 16 bp, Artificial Sequence
  Probe
aattaaagtggctgat

SEQ ID NO: 26903 - DNA, 17 bp, Artificial Sequence
  Probe
aattaaagtggctgatt

SEQ ID NO: 26904 - DNA, 20 bp, Artificial Sequence
  Probe
aattaaagtggctgatttgc

SEQ ID NO: 26905 - DNA, 17 bp, Artificial Sequence
  Probe
aattaactagttttgac

SEQ ID NO: 26906 - DNA, 20 bp, Artificial Sequence
  Probe
aattaactagttttgacaac

SEQ ID NO: 26907 - DNA, 21 bp, Artificial Sequence
  Probe
aattaactagttttgacaaca

SEQ ID NO: 26908 - DNA, 36 bp, Artificial Sequence; identical to SEQ ID NO: 15306
  Probe

SEQ ID NO: 26909 - DNA, 21 bp, Artificial Sequence
  Probe
aattaatcccctggcccaacc

SEQ ID NO: 26910 - DNA, 22 bp, Artificial Sequence
  Probe
aattaatcccctggcccaaccc

SEQ ID NO: 26911 - DNA, 31 bp, Artificial Sequence
  Probe
aattaatcccctggcccaacccgtcatctac

SEQ ID NO: 26912 - DNA, 16 bp, Artificial Sequence
  Probe
aattagaatcttagct

SEQ ID NO: 26913 - DNA, 17 bp, Artificial Sequence
  Probe
aattagaatcttagctt

SEQ ID NO: 26914 - DNA, 20 bp, Artificial Sequence
  Probe
aattagaatcttagctttgg

SEQ ID NO: 26915 - DNA, 25 bp, Artificial Sequence
  Probe
aattagaatcttagctttgggtgct

SEQ ID NO: 26916 - DNA, 44 bp, Artificial Sequence
  Probe
aattagaatcttagctttgggtgctaatggtggagttaaagact

SEQ ID NO: 26917 - DNA, 50 bp, Artificial Sequence; identical to SEQ ID NO: 113
  Probe

SEQ ID NO: 26918 - DNA, 33 bp, Artificial Sequence
  Probe
aattcgaagaagcagcttcaaacctgccggggc

SEQ ID NO: 26919 - DNA, 34 bp, Artificial Sequence
  Probe
aattcgaagaagcagcttcaaacctgccggggct

SEQ ID NO: 26920 - DNA, 35 bp, Artificial Sequence
  Probe
aattcgaagaagcagcttcaaacctgccggggctt

SEQ ID NO: 26921 - DNA, 36 bp, Artificial Sequence
  Probe
aattcgaagaagcagcttcaaacctgccggggcttc

SEQ ID NO: 26922 - DNA, 37 bp, Artificial Sequence; identical to SEQ ID NO: 2507
  Probe

SEQ ID NO: 26923 - DNA, 15 bp, Artificial Sequence
  Probe
aattctcgcctgcca

SEQ ID NO: 26924 - DNA, 16 bp, Artificial Sequence
  Probe
aattctcgcctgccac

SEQ ID NO: 26925 - DNA, 18 bp, Artificial Sequence
  Probe
aattctcgcctgccacgc

SEQ ID NO: 26926 - DNA, 28 bp, Artificial Sequence
  Probe
aattgaaaacaaaatactcaaatgggcc

SEQ ID NO: 26927 - DNA, 29 bp, Artificial Sequence
  Probe
aattgaaaacaaaatactcaaatgggcct

SEQ ID NO: 26928 - DNA, 36 bp, Artificial Sequence; identical to SEQ ID NO: 2512
  Probe

SEQ ID NO: 26929 - DNA, 36 bp, Artificial Sequence
  Probe
aattttggattctcagggatgggttcgattctcata

SEQ ID NO: 26930 - DNA, 41 bp, Artificial Sequence
  Probe
aattttggattctcagggatgggttcgattctcatagtcct

SEQ ID NO: 26931 - DNA, 16 bp, Artificial Sequence
  Probe
aattttggtgcaactc

SEQ ID NO: 26932 - DNA, 17 bp, Artificial Sequence
  Probe
aattttggtgcaactcc

SEQ ID NO: 26933 - DNA, 17 bp, Artificial Sequence
  Probe
acaaaaaggattagact

SEQ ID NO: 26934 - DNA, 22 bp, Artificial Sequence
  Probe
acaaaaaggattagactgaacc

SEQ ID NO: 26935 - DNA, 23 bp, Artificial Sequence
  Probe
acaaaaaggattagactgaaccg

SEQ ID NO: 26936 - DNA, 26 bp, Artificial Sequence
  Probe
acaaaaaggattagactgaaccgaat

SEQ ID NO: 26937 - DNA, 21 bp, Artificial Sequence
  Probe
acaaaacgaatgatttcgact

SEQ ID NO: 26938 - DNA, 22 bp, Artificial Sequence
  Probe
acaaaacgaatgatttcgactc

SEQ ID NO: 26939 - DNA, 23 bp, Artificial Sequence
  Probe
acaaaacgaatgatttcgactca

SEQ ID NO: 26940 - DNA, 36 bp, Artificial Sequence
  Probe
acaaaacgaatgatttcgactcattaaattatgata

SEQ ID NO: 26941 - DNA, 36 bp, Artificial Sequence; identical to SEQ ID NO: 15324
  Probe

SEQ ID NO: 26942 - DNA, 50 bp, Artificial Sequence; identical to SEQ ID NO: 117
  Probe

SEQ ID NO: 26943 - DNA, 15 bp, Artificial Sequence
  Probe
acaacagaggcttac

SEQ ID NO: 26944 - DNA, 16 bp, Artificial Sequence
  Probe
acaacagaggcttacg

SEQ ID NO: 26945 - DNA, 17 bp, Artificial Sequence
  Probe
acaacagaggcttacga

SEQ ID NO: 26946 - DNA, 18 bp, Artificial Sequence
  Probe
acaacagaggcttacgac

SEQ ID NO: 26947 - DNA, 19 bp, Artificial Sequence
  Probe
acaacagaggcttacgacc

SEQ ID NO: 26948 - DNA, 20 bp, Artificial Sequence
  Probe
acaacagaggcttacgaccc

SEQ ID NO: 26949 - DNA, 21 bp, Artificial Sequence
  Probe
acaacagaggcttacgacccc

SEQ ID NO: 26950 - DNA, 22 bp, Artificial Sequence
  Probe
acaacagaggcttacgacccct

SEQ ID NO: 26951 - DNA, 23 bp, Artificial Sequence
  Probe
acaacagaggcttacgacccctt

SEQ ID NO: 26952 - DNA, 24 bp, Artificial Sequence
  Probe
acaacagaggcttacgacccctta

SEQ ID NO: 26953 - DNA, 25 bp, Artificial Sequence
  Probe
acaacagaggcttacgaccccttat

SEQ ID NO: 26954 - DNA, 26 bp, Artificial Sequence
  Probe
acaacagaggcttacgaccccttatt

SEQ ID NO: 26955 - DNA, 27 bp, Artificial Sequence
  Probe
acaacagaggcttacgaccccttattt

SEQ ID NO: 26956 - DNA, 28 bp, Artificial Sequence
  Probe
acaacagaggcttacgaccccttattta

SEQ ID NO: 26957 - DNA, 29 bp, Artificial Sequence
  Probe
acaacagaggcttacgaccccttatttac

SEQ ID NO: 26958 - DNA, 30 bp, Artificial Sequence; identical to SEQ ID NO: 2562
  Probe

SEQ ID NO: 26959 - DNA, 31 bp, Artificial Sequence; identical to SEQ ID NO: 2563
  Probe

SEQ ID NO: 26960 - DNA, 32 bp, Artificial Sequence; identical to SEQ ID NO: 2564
  Probe

SEQ ID NO: 26961 - DNA, 19 bp, Artificial Sequence
  Probe
acaacatggctttctcaac

SEQ ID NO: 26962 - DNA, 35 bp, Artificial Sequence
  Probe
acaacgatggtttttcatatcattggtcgtggttg

SEQ ID NO: 26963 - DNA, 36 bp, Artificial Sequence
  Probe
acaacgatggtttttcatatcattggtcgtggttgt

SEQ ID NO: 26964 - DNA, 40 bp, Artificial Sequence
  Probe
acaacgatggtttttcatatcattggtcgtggttgtagtc

SEQ ID NO: 26965 - DNA, 50 bp, Artificial Sequence; identical to SEQ ID NO: 118
  Probe

SEQ ID NO: 26966 - DNA, 15 bp, Artificial Sequence
  Probe
acaagaactgctaac

SEQ ID NO: 26967 - DNA, 16 bp, Artificial Sequence
  Probe
acaagaactgctaact

SEQ ID NO: 26968 - DNA, 17 bp, Artificial Sequence
  Probe
acaagaactgctaactc

SEQ ID NO: 26969 - DNA, 18 bp, Artificial Sequence
  Probe
acaagaactgctaactca

SEQ ID NO: 26970 - DNA, 20 bp, Artificial Sequence
  Probe
acaagaactgctaactcatg

SEQ ID NO: 26971 - DNA, 21 bp, Artificial Sequence
  Probe
acaagaactgctaactcatgc

SEQ ID NO: 26972 - DNA, 22 bp, Artificial Sequence
  Probe
acaagaactgctaactcatgcc

SEQ ID NO: 26973 - DNA, 23 bp, Artificial Sequence
  Probe
acaagaactgctaactcatgccc

SEQ ID NO: 26974 - DNA, 24 bp, Artificial Sequence
  Probe
acaagaactgctaactcatgcccc

SEQ ID NO: 26975 - DNA, 25 bp, Artificial Sequence
  Probe
acaagaactgctaactcatgccccc

SEQ ID NO: 26976 - DNA, 26 bp, Artificial Sequence
  Probe
acaagaactgctaactcatgccccca

SEQ ID NO: 26977 - DNA, 29 bp, Artificial Sequence
  Probe
acaagaactgctaactcatgcccccatgt

SEQ ID NO: 26978 - DNA, 33 bp, Artificial Sequence; identical to SEQ ID NO: 15367
  Probe

SEQ ID NO: 26979 - DNA, 34 bp, Artificial Sequence; identical to SEQ ID NO: 15368
  Probe

SEQ ID NO: 26980 - DNA, 38 bp, Artificial Sequence; identical to SEQ ID NO: 12518
  Probe

SEQ ID NO: 26981 - DNA, 39 bp, Artificial Sequence; identical to SEQ ID NO: 15370
  Probe

SEQ ID NO: 26982 - DNA, 40 bp, Artificial Sequence
  Probe
acaagaactgctaactcatgcccccatgtctaacaacatg

SEQ ID NO: 26983 - DNA, 41 bp, Artificial Sequence
  Probe
acaagaactgctaactcatgcccccatgtctaacaacatgg

SEQ ID NO: 26984 - DNA, 42 bp, Artificial Sequence
  Probe
acaagaactgctaactcatgcccccatgtctaacaacatggc

SEQ ID NO: 26985 - DNA, 43 bp, Artificial Sequence; identical to SEQ ID NO: 119
  Probe

SEQ ID NO: 26986 - DNA, 44 bp, Artificial Sequence; identical to SEQ ID NO: 120
  Probe

SEQ ID NO: 26987 - DNA, 46 bp, Artificial Sequence; identical to SEQ ID NO: 122
  Probe

SEQ ID NO: 26988 - DNA, 47 bp, Artificial Sequence
  Probe
acaagaactgctaactcatgcccccatgtctaacaacatggctttct

SEQ ID NO: 26989 - DNA, 50 bp, Artificial Sequence; identical to SEQ ID NO: 2588
  Probe

SEQ ID NO: 26990 - DNA, 15 bp, Artificial Sequence
  Probe
acaagtgcggttttt

SEQ ID NO: 26991 - DNA, 16 bp, Artificial Sequence
  Probe
acaagtgcggtttttt

SEQ ID NO: 26992 - DNA, 17 bp, Artificial Sequence
  Probe
acaagtgcggttttttt

SEQ ID NO: 26993 - DNA, 18 bp, Artificial Sequence
  Probe
acaagtgcggtttttttc

SEQ ID NO: 26994 - DNA, 23 bp, Artificial Sequence
  Probe
acacaaagcacccaacttacact

SEQ ID NO: 26995 - DNA, 36 bp, Artificial Sequence
  Probe
acacaaagcacccaacttacacttaggagatttcaa

SEQ ID NO: 26996 - DNA, 50 bp, Artificial Sequence; identical to SEQ ID NO: 124
  Probe

SEQ ID NO: 26997 - DNA, 36 bp, Artificial Sequence
  Probe
acacagccagtagtcgtggccgagtggttaaggcga

SEQ ID NO: 26998 - DNA, 16 bp, Artificial Sequence
  Probe
acacccacccaagaac

SEQ ID NO: 26999 - DNA, 17 bp, Artificial Sequence
  Probe
acacccacccaagaaca

SEQ ID NO: 27000 - DNA, 24 bp, Artificial Sequence
  Probe
acacccacccaagaacagggtttg

SEQ ID NO: 27001 - DNA, 27 bp, Artificial Sequence
  Probe
acacccacccaagaacagggtttgtta

SEQ ID NO: 27002 - DNA, 30 bp, Artificial Sequence; identical to SEQ ID NO: 15398
  Probe

SEQ ID NO: 27003 - DNA, 36 bp, Artificial Sequence
  Probe
acaccgaagtctctgtggcgcaatcggttagcgcgt

SEQ ID NO: 27004 - DNA, 18 bp, Artificial Sequence
  Probe
acacctctttacagtgaa

SEQ ID NO: 27005 - DNA, 17 bp, Artificial Sequence
  Probe
acacgcagaaggtcctg

SEQ ID NO: 27006 - DNA, 31 bp, Artificial Sequence
  Probe
acacgcagaaggtcctgggttcgagccccag

SEQ ID NO: 27007 - DNA, 41 bp, Artificial Sequence; identical to SEQ ID NO: 15408
  Probe

SEQ ID NO: 27008 - DNA, 36 bp, Artificial Sequence
  Probe
acacgtcccttcgatagctcagctggtagagcggag

SEQ ID NO: 27009 - DNA, 20 bp, Artificial Sequence
  Probe
acactactataaccacccta

SEQ ID NO: 27010 - DNA, 24 bp, Artificial Sequence
  Probe
acactgaaaatgtttagacgggct

SEQ ID NO: 27011 - DNA, 25 bp, Artificial Sequence
  Probe
acactgaaaatgtttagacgggctc

SEQ ID NO: 27012 - DNA, 27 bp, Artificial Sequence
  Probe
acactgaaaatgtttagacgggctcac

SEQ ID NO: 27013 - DNA, 33 bp, Artificial Sequence
  Probe
acactgaaaatgtttagacgggctcacatcacc

SEQ ID NO: 27014 - DNA, 20 bp, Artificial Sequence
  Probe
acacttaggagatttcaact

SEQ ID NO: 27015 - DNA, 21 bp, Artificial Sequence
  Probe
acacttaggagatttcaactt

SEQ ID NO: 27016 - DNA, 25 bp, Artificial Sequence
  Probe
acacttaggagatttcaacttaact

SEQ ID NO: 27017 - DNA, 30 bp, Artificial Sequence; identical to SEQ ID NO: 8999
  Probe

SEQ ID NO: 27018 - DNA, 33 bp, Artificial Sequence; identical to SEQ ID NO: 2627
  Probe

SEQ ID NO: 27019 - DNA, 34 bp, Artificial Sequence; identical to SEQ ID NO: 2628
  Probe

SEQ ID NO: 27020 - DNA, 35 bp, Artificial Sequence; identical to SEQ ID NO: 15431
  Probe

SEQ ID NO: 27021 - DNA, 36 bp, Artificial Sequence
  Probe
acacttaggagatttcaacttaacttgaccgctctg

SEQ ID NO: 27022 - DNA, 38 bp, Artificial Sequence; identical to SEQ ID NO: 2630
  Probe

SEQ ID NO: 27023 - DNA, 39 bp, Artificial Sequence; identical to SEQ ID NO: 2631
  Probe

SEQ ID NO: 27024 - DNA, 40 bp, Artificial Sequence; identical to SEQ ID NO: 2632
  Probe

SEQ ID NO: 27025 - DNA, 16 bp, Artificial Sequence
  Probe
acagaatcagcacggc

SEQ ID NO: 27026 - DNA, 15 bp, Artificial Sequence
  Probe
acagaccaagagcct

SEQ ID NO: 27027 - DNA, 17 bp, Artificial Sequence
  Probe
acagaccaagagccttc

SEQ ID NO: 27028 - DNA, 18 bp, Artificial Sequence
  Probe
acagaccaagagccttca

SEQ ID NO: 27029 - DNA, 24 bp, Artificial Sequence
  Probe
acagaccaagagccttcaaagccc

SEQ ID NO: 27030 - DNA, 27 bp, Artificial Sequence
  Probe
acagaccaagagccttcaaagccctca

SEQ ID NO: 27031 - DNA, 30 bp, Artificial Sequence
  Probe
acagaccaagagccttcaaagccctcagta

SEQ ID NO: 27032 - DNA, 36 bp, Artificial Sequence; identical to SEQ ID NO: 15442
  Probe

SEQ ID NO: 27033 - DNA, 15 bp, Artificial Sequence
  Probe
acagaggcttacgac

SEQ ID NO: 27034 - DNA, 36 bp, Artificial Sequence
  Probe
acagccagtagtcgtggccgagtggttaaggcgatg

SEQ ID NO: 27035 - DNA, 21 bp, Artificial Sequence
  Probe
acagctaaggactgcaaaacc

SEQ ID NO: 27036 - DNA, 22 bp, Artificial Sequence
  Probe
acagctaaggactgcaaaaccc

SEQ ID NO: 27037 - DNA, 23 bp, Artificial Sequence
  Probe
acagctaaggactgcaaaacccc

SEQ ID NO: 27038 - DNA, 26 bp, Artificial Sequence
  Probe
acagctaaggactgcaaaaccccact

SEQ ID NO: 27039 - DNA, 28 bp, Artificial Sequence
  Probe
acagctaaggactgcaaaaccccactct

SEQ ID NO: 27040 - DNA, 16 bp, Artificial Sequence
  Probe
acagctatccattggt

SEQ ID NO: 27041 - DNA, 19 bp, Artificial Sequence
  Probe
acagctatccattggtctt

SEQ ID NO: 27042 - DNA, 20 bp, Artificial Sequence
  Probe
acagctatccattggtctta

SEQ ID NO: 27043 - DNA, 25 bp, Artificial Sequence
  Probe
acagctatccattggtcttaggccc

SEQ ID NO: 27044 - DNA, 26 bp, Artificial Sequence
  Probe
acagctatccattggtcttaggcccc

SEQ ID NO: 27045 - DNA, 27 bp, Artificial Sequence
  Probe
acagctatccattggtcttaggcccca

SEQ ID NO: 27046 - DNA, 36 bp, Artificial Sequence
  Probe
acagctatccattggtcttaggccccaaaaattttg

SEQ ID NO: 27047 - DNA, 33 bp, Artificial Sequence
  Probe
acagctgtagtcgtggccgagtggttaaggcga

SEQ ID NO: 27048 - DNA, 36 bp, Artificial Sequence; identical to SEQ ID NO: 15460
  Probe

SEQ ID NO: 27049 - DNA, 33 bp, Artificial Sequence; identical to SEQ ID NO: 2645
  Probe

SEQ ID NO: 27050 - DNA, 36 bp, Artificial Sequence; identical to SEQ ID NO: 15467
  Probe

SEQ ID NO: 27051 - DNA, 36 bp, Artificial Sequence
  Probe
acaggagatcctgggttcgaatcccagcggtgcctt

SEQ ID NO: 27052 - DNA, 15 bp, Artificial Sequence
  Probe
acaggggttaggcct

SEQ ID NO: 27053 - DNA, 16 bp, Artificial Sequence
  Probe
acaggggttaggcctc

SEQ ID NO: 27054 - DNA, 27 bp, Artificial Sequence
  Probe
acaggggttaggcctctttttaccagc

SEQ ID NO: 27055 - DNA, 36 bp, Artificial Sequence; identical to SEQ ID NO: 15472
  Probe

SEQ ID NO: 27056 - DNA, 36 bp, Artificial Sequence
  Probe
acagtagcattggtggttcagtggtagaattctcgc

SEQ ID NO: 27057 - DNA, 38 bp, Artificial Sequence
  Probe
acagtagcattggtggttcagtggtagaattctcgcct

SEQ ID NO: 27058 - DNA, 19 bp, Artificial Sequence
  Probe
acagtcagaggttcaattc

SEQ ID NO: 27059 - DNA, 33 bp, Artificial Sequence
  Probe
acagtggctcgttggtctaggggtatgattctc

SEQ ID NO: 27060 - DNA, 36 bp, Artificial Sequence; identical to SEQ ID NO: 15489
  Probe

SEQ ID NO: 27061 - DNA, 17 bp, Artificial Sequence
  Probe
acagtgtcaggatggcc

SEQ ID NO: 27062 - DNA, 36 bp, Artificial Sequence
  Probe
acagtgtcaggatggccgagtggtctaaggcgccag

SEQ ID NO: 27063 - DNA, 19 bp, Artificial Sequence
  Probe
acagtttatgtagcttacc

SEQ ID NO: 27064 - DNA, 22 bp, Artificial Sequence
  Probe
acagtttatgtagcttacctcc

SEQ ID NO: 27065 - DNA, 23 bp, Artificial Sequence
  Probe
acagtttatgtagcttacctcct

SEQ ID NO: 27066 - DNA, 15 bp, Artificial Sequence
  Probe
acatacccatggcca

SEQ ID NO: 27067 - DNA, 16 bp, Artificial Sequence
  Probe
acatacccatggccaa

SEQ ID NO: 27068 - DNA, 17 bp, Artificial Sequence
  Probe
acatacccatggccaac

SEQ ID NO: 27069 - DNA, 18 bp, Artificial Sequence
  Probe
acatacccatggccaacc

SEQ ID NO: 27070 - DNA, 19 bp, Artificial Sequence
  Probe
acatacccatggccaacct

SEQ ID NO: 27071 - DNA, 20 bp, Artificial Sequence
  Probe
acatacccatggccaacctc

SEQ ID NO: 27072 - DNA, 21 bp, Artificial Sequence
  Probe
acatacccatggccaacctcc

SEQ ID NO: 27073 - DNA, 22 bp, Artificial Sequence
  Probe
acatacccatggccaacctcct

SEQ ID NO: 27074 - DNA, 23 bp, Artificial Sequence
  Probe
acatacccatggccaacctccta

SEQ ID NO: 27075 - DNA, 24 bp, Artificial Sequence
  Probe
acatacccatggccaacctcctac

SEQ ID NO: 27076 - DNA, 25 bp, Artificial Sequence
  Probe
acatacccatggccaacctcctact

SEQ ID NO: 27077 - DNA, 26 bp, Artificial Sequence
  Probe
acatacccatggccaacctcctactc

SEQ ID NO: 27078 - DNA, 27 bp, Artificial Sequence
  Probe
acatacccatggccaacctcctactcc

SEQ ID NO: 27079 - DNA, 28 bp, Artificial Sequence
  Probe
acatacccatggccaacctcctactcct

SEQ ID NO: 27080 - DNA, 29 bp, Artificial Sequence
  Probe
acatacccatggccaacctcctactcctc

SEQ ID NO: 27081 - DNA, 30 bp, Artificial Sequence; identical to SEQ ID NO: 2668
  Probe

SEQ ID NO: 27082 - DNA, 17 bp, Artificial Sequence
  Probe
acatcagattgtgaatc

SEQ ID NO: 27083 - DNA, 18 bp, Artificial Sequence
  Probe
acatcagattgtgaatct

SEQ ID NO: 27084 - DNA, 30 bp, Artificial Sequence
  Probe
acatcagattgtgaatctgacaacagaggc

SEQ ID NO: 27085 - DNA, 31 bp, Artificial Sequence; identical to SEQ ID NO: 2676
  Probe

SEQ ID NO: 27086 - DNA, 32 bp, Artificial Sequence; identical to SEQ ID NO: 2677
  Probe

SEQ ID NO: 27087 - DNA, 37 bp, Artificial Sequence
  Probe
acatcagattgtgaatctgacaacagaggcttacgac

SEQ ID NO: 27088 - DNA, 38 bp, Artificial Sequence
  Probe
acatcagattgtgaatctgacaacagaggcttacgacc

SEQ ID NO: 27089 - DNA, 39 bp, Artificial Sequence; identical to SEQ ID NO: 2679
  Probe

SEQ ID NO: 27090 - DNA, 26 bp, Artificial Sequence
  Probe
acatggtctagcggttaggattcctg

SEQ ID NO: 27091 - DNA, 29 bp, Artificial Sequence
  Probe
acatggtctagcggttaggattcctggtt

SEQ ID NO: 27092 - DNA, 36 bp, Artificial Sequence
  Probe
acatggtctagcggttaggattcctggttttcaccc

SEQ ID NO: 27093 - DNA, 23 bp, Artificial Sequence
  Probe
accaaaacatcagattgtgaatc

SEQ ID NO: 27094 - DNA, 24 bp, Artificial Sequence
  Probe
accaaaacatcagattgtgaatct

SEQ ID NO: 27095 - DNA, 31 bp, Artificial Sequence; identical to SEQ ID NO: 2695
  Probe

SEQ ID NO: 27096 - DNA, 33 bp, Artificial Sequence; identical to SEQ ID NO: 15520
  Probe

SEQ ID NO: 27097 - DNA, 36 bp, Artificial Sequence; identical to SEQ ID NO: 15522
  Probe

SEQ ID NO: 27098 - DNA, 37 bp, Artificial Sequence; identical to SEQ ID NO: 2697
  Probe

SEQ ID NO: 27099 - DNA, 45 bp, Artificial Sequence; identical to SEQ ID NO: 2700
  Probe

SEQ ID NO: 27100 - DNA, 21 bp, Artificial Sequence
  Probe
accaaggaggccggttagctc

SEQ ID NO: 27101 - DNA, 36 bp, Artificial Sequence
  Probe
accaaggaggccggttagctcagttggttagagcgt

SEQ ID NO: 27102 - DNA, 36 bp, Artificial Sequence
  Probe
accagccctccctggtggtctagtggctaggattcg

SEQ ID NO: 27103 - DNA, 15 bp, Artificial Sequence
  Probe
accaggatggccgag

SEQ ID NO: 27104 - DNA, 16 bp, Artificial Sequence
  Probe
accaggatggccgagt

SEQ ID NO: 27105 - DNA, 17 bp, Artificial Sequence
  Probe
accaggatggccgagtg

SEQ ID NO: 27106 - DNA, 18 bp, Artificial Sequence
  Probe
accaggatggccgagtgg

SEQ ID NO: 27107 - DNA, 23 bp, Artificial Sequence
  Probe
accaggatggccgagtggttaag

SEQ ID NO: 27108 - DNA, 24 bp, Artificial Sequence
  Probe
accaggatggccgagtggttaagg

SEQ ID NO: 27109 - DNA, 25 bp, Artificial Sequence
  Probe
accaggatggccgagtggttaaggc

SEQ ID NO: 27110 - DNA, 32 bp, Artificial Sequence
  Probe
accaggatggccgagtggttaaggcgttggac

SEQ ID NO: 27111 - DNA, 36 bp, Artificial Sequence
  Probe
accaggatggccgagtggttaaggcgttggacttaa

SEQ ID NO: 27112 - DNA, 50 bp, Artificial Sequence
  Probe
accaggatggccgagtggttaaggcgttggacttaagatccaatggacat

SEQ ID NO: 27113 - DNA, 27 bp, Artificial Sequence
  Probe
accatgcacactactataaccacccta

SEQ ID NO: 27114 - DNA, 35 bp, Artificial Sequence
  Probe
acccaacttacacttaggagatttcaacttaactt

SEQ ID NO: 27115 - DNA, 36 bp, Artificial Sequence
  Probe
acccaacttacacttaggagatttcaacttaacttg

SEQ ID NO: 27116 - DNA, 47 bp, Artificial Sequence
  Probe
acccaacttacacttaggagatttcaacttaacttgaccgctctgag

SEQ ID NO: 27117 - DNA, 50 bp, Artificial Sequence; identical to SEQ ID NO: 2749
  Probe

SEQ ID NO: 27118 - DNA, 18 bp, Artificial Sequence
  Probe
acccagaggcgtcgctga

SEQ ID NO: 27119 - DNA, 19 bp, Artificial Sequence
  Probe
acccagaggcgtcgctgat

SEQ ID NO: 27120 - DNA, 20 bp, Artificial Sequence
  Probe
acccagaggcgtcgctgata

SEQ ID NO: 27121 - DNA, 20 bp, Artificial Sequence
  Probe
acccagaggcgtcgctgatc

SEQ ID NO: 27122 - DNA, 21 bp, Artificial Sequence
  Probe
acccagaggcgtcgctgatct

SEQ ID NO: 27123 - DNA, 22 bp, Artificial Sequence
  Probe
acccagaggcgtcgctgatctt

SEQ ID NO: 27124 - DNA, 23 bp, Artificial Sequence
  Probe
acccagaggcgtcgctgatcttt

SEQ ID NO: 27125 - DNA, 19 bp, Artificial Sequence
  Probe
acccagaggtcgatggatc

SEQ ID NO: 27126 - DNA, 20 bp, Artificial Sequence
  Probe
acccagaggtcgatggatcg

SEQ ID NO: 27127 - DNA, 37 bp, Artificial Sequence; identical to SEQ ID NO: 151
  Probe

SEQ ID NO: 27128 - DNA, 38 bp, Artificial Sequence; identical to SEQ ID NO: 15595
  Probe

SEQ ID NO: 27129 - DNA, 39 bp, Artificial Sequence; identical to SEQ ID NO: 2764
  Probe

SEQ ID NO: 27130 - DNA, 39 bp, Artificial Sequence
  Probe
acccaggcggcccgggttcgactcccggtgtgggaatga

SEQ ID NO: 27131 - DNA, 25 bp, Artificial Sequence
  Probe
acccagggacgcctctttgagcttt

SEQ ID NO: 27132 - DNA, 26 bp, Artificial Sequence
  Probe
acccagggacgcctctttgagctttt

SEQ ID NO: 27133 - DNA, 21 bp, Artificial Sequence
  Probe
acccagggacgctatgacctt

SEQ ID NO: 27134 - DNA, 24 bp, Artificial Sequence
  Probe
acccagggacgcttattggaactt

SEQ ID NO: 27135 - DNA, 25 bp, Artificial Sequence
  Probe
acccagggacgcttattggaacttt

SEQ ID NO: 27136 - DNA, 26 bp, Artificial Sequence
  Probe
acccagggacgcttattggaactttt

SEQ ID NO: 27137 - DNA, 24 bp, Artificial Sequence
  Probe
acccagggacgcttgtttgagctt

SEQ ID NO: 27138 - DNA, 25 bp, Artificial Sequence
  Probe
acccagggacgcttgtttgagcttt

SEQ ID NO: 27139 - DNA, 36 bp, Artificial Sequence
  Probe
acccagggcctggatagctcagttggtagaacatca

SEQ ID NO: 27140 - DNA, 43 bp, Artificial Sequence
  Probe
acccagggcctggatagctcagttggtagaacatcagactttt

SEQ ID NO: 27141 - DNA, 44 bp, Artificial Sequence
  Probe
acccagggcctggatagctcagttggtagaacatcagactttta

SEQ ID NO: 27142 - DNA, 15 bp, Artificial Sequence
  Probe
acccatggccaacct

SEQ ID NO: 27143 - DNA, 17 bp, Artificial Sequence
  Probe
acccatggccaacctcc

SEQ ID NO: 27144 - DNA, 26 bp, Artificial Sequence
  Probe
acccatggccaacctcctactcctca

SEQ ID NO: 27145 - DNA, 15 bp, Artificial Sequence
  Probe
accccactcctggta

SEQ ID NO: 27146 - DNA, 18 bp, Artificial Sequence
  Probe
accccactcctggtagct

SEQ ID NO: 27147 - DNA, 28 bp, Artificial Sequence
  Probe
accccccacagtttatgtagcttacctc

SEQ ID NO: 27148 - DNA, 36 bp, Artificial Sequence; identical to SEQ ID NO: 2771
  Probe

SEQ ID NO: 27149 - DNA, 16 bp, Artificial Sequence
  Probe
accccgacatcattac

SEQ ID NO: 27150 - DNA, 17 bp, Artificial Sequence
  Probe
accccgacatcattacc

SEQ ID NO: 27151 - DNA, 18 bp, Artificial Sequence
  Probe
accccgacatcattaccg

SEQ ID NO: 27152 - DNA, 27 bp, Artificial Sequence
  Probe
accccgacatcattaccgggttttcct

SEQ ID NO: 27153 - DNA, 15 bp, Artificial Sequence
  Probe
accccgtccgtgcct

SEQ ID NO: 27154 - DNA, 16 bp, Artificial Sequence
  Probe
accccgtccgtgcctg

SEQ ID NO: 27155 - DNA, 16 bp, Artificial Sequence
  Probe
accctgctcgctgcgg

SEQ ID NO: 27156 - DNA, 18 bp, Artificial Sequence
  Probe
accctgtggtctagtggc

SEQ ID NO: 27157 - DNA, 19 bp, Artificial Sequence
  Probe
accctgtggtctagtggct

SEQ ID NO: 27158 - DNA, 15 bp, Artificial Sequence
  Probe
acccttcccgtacta

SEQ ID NO: 27159 - DNA, 20 bp, Artificial Sequence
  Probe
accgaagtctctgtggcgca

SEQ ID NO: 27160 - DNA, 23 bp, Artificial Sequence
  Probe
accgaagtctctgtggcgcaatc

SEQ ID NO: 27161 - DNA, 24 bp, Artificial Sequence
  Probe
accgaagtctctgtggcgcaatcg

SEQ ID NO: 27162 - DNA, 33 bp, Artificial Sequence
  Probe
accgaagtctctgtggcgcaatcggttagcgcg

SEQ ID NO: 27163 - DNA, 36 bp, Artificial Sequence; identical to SEQ ID NO: 15647
  Probe

SEQ ID NO: 27164 - DNA, 50 bp, Artificial Sequence
  Probe
accgaagtctctgtggcgcaatcggttagcgcgttcggctgttaaccgaa

SEQ ID NO: 27165 - DNA, 36 bp, Artificial Sequence
  Probe
accgacgggccgcgtggcctaatggataaggcgtct

SEQ ID NO: 27166 - DNA, 26 bp, Artificial Sequence
  Probe
accgagcgtccaagctctttccattt

SEQ ID NO: 27167 - DNA, 27 bp, Artificial Sequence
  Probe
accgagcgtccaagctctttccatttt

SEQ ID NO: 27168 - DNA, 39 bp, Artificial Sequence; identical to SEQ ID NO: 2791
  Probe

SEQ ID NO: 27169 - DNA, 16 bp, Artificial Sequence
  Probe
accgccgcggcccggg

SEQ ID NO: 27170 - DNA, 18 bp, Artificial Sequence
  Probe
accgccgcggcccgggtt

SEQ ID NO: 27171 - DNA, 19 bp, Artificial Sequence
  Probe
accgccgcggcccgggttc

SEQ ID NO: 27172 - DNA, 36 bp, Artificial Sequence; identical to SEQ ID NO: 15656
  Probe

SEQ ID NO: 27173 - DNA, 29 bp, Artificial Sequence
  Probe
accgccgcggcccgggttcgattcccggt

SEQ ID NO: 27174 - DNA, 30 bp, Artificial Sequence; identical to SEQ ID NO: 9032
  Probe

SEQ ID NO: 27175 - DNA, 32 bp, Artificial Sequence
  Probe
accgccgcggcccgggttcgattcccggtcag

SEQ ID NO: 27176 - DNA, 33 bp, Artificial Sequence; identical to SEQ ID NO: 12557
  Probe

SEQ ID NO: 27177 - DNA, 34 bp, Artificial Sequence; identical to SEQ ID NO: 15659
  Probe

SEQ ID NO: 27178 - DNA, 35 bp, Artificial Sequence; identical to SEQ ID NO: 12558
  Probe

SEQ ID NO: 27179 - DNA, 37 bp, Artificial Sequence; identical to SEQ ID NO: 2792
  Probe

SEQ ID NO: 27180 - DNA, 39 bp, Artificial Sequence; identical to SEQ ID NO: 15662
  Probe

SEQ ID NO: 27181 - DNA, 37 bp, Artificial Sequence; identical to SEQ ID NO: 2793
  Probe

SEQ ID NO: 27182 - DNA, 38 bp, Artificial Sequence; identical to SEQ ID NO: 15664
  Probe

SEQ ID NO: 27183 - DNA, 39 bp, Artificial Sequence; identical to SEQ ID NO: 2794
  Probe

SEQ ID NO: 27184 - DNA, 37 bp, Artificial Sequence; identical to SEQ ID NO: 2796
  Probe

SEQ ID NO: 27185 - DNA, 39 bp, Artificial Sequence; identical to SEQ ID NO: 15670
  Probe

SEQ ID NO: 27186 - DNA, 36 bp, Artificial Sequence; identical to SEQ ID NO: 15674
  Probe

SEQ ID NO: 27187 - DNA, 19 bp, Artificial Sequence
  Probe
accgctctgagctaaacct

SEQ ID NO: 27188 - DNA, 36 bp, Artificial Sequence
  Probe
accgcttgccttgtggcccgccgtgatcgtatagtg

SEQ ID NO: 27189 - DNA, 15 bp, Artificial Sequence
  Probe
accggagatgaaaac

SEQ ID NO: 27190 - DNA, 17 bp, Artificial Sequence
  Probe
accggagatgaaaacct

SEQ ID NO: 27191 - DNA, 29 bp, Artificial Sequence
  Probe
accggagatgaaaacctttttccaaggac

SEQ ID NO: 27192 - DNA, 32 bp, Artificial Sequence
  Probe
accgggacgaggtggccgagtggttaaggcga

SEQ ID NO: 27193 - DNA, 16 bp, Artificial Sequence
  Probe
accgggcggaaacaaa

SEQ ID NO: 27194 - DNA, 17 bp, Artificial Sequence
  Probe
accgggcggaaacaaga

SEQ ID NO: 27195 - DNA, 25 bp, Artificial Sequence
  Probe
accgggcggaaacaagactgtgttt

SEQ ID NO: 27196 - DNA, 26 bp, Artificial Sequence
  Probe
accgggcggaaacaagactgtgtttt

SEQ ID NO: 27197 - DNA, 27 bp, Artificial Sequence
  Probe
accgggcggaaacaagactgtgttttc

SEQ ID NO: 27198 - DNA, 15 bp, Artificial Sequence
  Probe
accgggcggaaacac

SEQ ID NO: 27199 - DNA, 16 bp, Artificial Sequence
  Probe
accgggcggaaacaca

SEQ ID NO: 27200 - DNA, 17 bp, Artificial Sequence
  Probe
accgggcggaaacacac

SEQ ID NO: 27201 - DNA, 25 bp, Artificial Sequence
  Probe
accgggcggaaacacactaaaaaat

SEQ ID NO: 27202 - DNA, 26 bp, Artificial Sequence
  Probe
accgggcggaaacacactaaaaaatc

SEQ ID NO: 27203 - DNA, 27 bp, Artificial Sequence
  Probe
accgggcggaaacacactaaaaaatcc

SEQ ID NO: 27204 - DNA, 29 bp, Artificial Sequence
  Probe
accgggcggaaacacactaaaaaatccct

SEQ ID NO: 27205 - DNA, 17 bp, Artificial Sequence
  Probe
accgggcggaaacacct

SEQ ID NO: 27206 - DNA, 16 bp, Artificial Sequence
  Probe
accgggcggaaacacg

SEQ ID NO: 27207 - DNA, 17 bp, Artificial Sequence
  Probe
accgggcggaaacacgt

SEQ ID NO: 27208 - DNA, 17 bp, Artificial Sequence
  Probe
accgggcggaaacagaa

SEQ ID NO: 27209 - DNA, 29 bp, Artificial Sequence
  Probe
accggggttcgattccccgacggggagac

SEQ ID NO: 27210 - DNA, 29 bp, Artificial Sequence
  Probe
accggggttcgattccccgacggggaggc

SEQ ID NO: 27211 - DNA, 30 bp, Artificial Sequence; identical to SEQ ID NO: 2811
  Probe

SEQ ID NO: 27212 - DNA, 15 bp, Artificial Sequence
  Probe
accggtccctgggct

SEQ ID NO: 27213 - DNA, 16 bp, Artificial Sequence
  Probe
accggtccctgggctg

SEQ ID NO: 27214 - DNA, 36 bp, Artificial Sequence
  Probe
accgtgagcccggatagctcagtcggtagagcatca

SEQ ID NO: 27215 - DNA, 36 bp, Artificial Sequence
  Probe
accgttaacttccaattaactagttttgacaacatt

SEQ ID NO: 27216 - DNA, 24 bp, Artificial Sequence
  Probe
acctagccccaaacccactccacc

SEQ ID NO: 27217 - DNA, 25 bp, Artificial Sequence
  Probe
acctagccccaaacccactccacct

SEQ ID NO: 27218 - DNA, 15 bp, Artificial Sequence
  Probe
acctattctcaaact

SEQ ID NO: 27219 - DNA, 16 bp, Artificial Sequence
  Probe
acctattctcaaactt

SEQ ID NO: 27220 - DNA, 17 bp, Artificial Sequence
  Probe
acctattctcaaacttt

SEQ ID NO: 27221 - DNA, 18 bp, Artificial Sequence
  Probe
acctattctcaaacttta

SEQ ID NO: 27222 - DNA, 19 bp, Artificial Sequence
  Probe
acctattctcaaactttaa

SEQ ID NO: 27223 - DNA, 20 bp, Artificial Sequence
  Probe
acctattctcaaactttaaa

SEQ ID NO: 27224 - DNA, 21 bp, Artificial Sequence
  Probe
acctattctcaaactttaaat

SEQ ID NO: 27225 - DNA, 22 bp, Artificial Sequence
  Probe
acctattctcaaactttaaatg

SEQ ID NO: 27226 - DNA, 23 bp, Artificial Sequence
  Probe
acctattctcaaactttaaatgg

SEQ ID NO: 27227 - DNA, 24 bp, Artificial Sequence
  Probe
acctattctcaaactttaaatggg

SEQ ID NO: 27228 - DNA, 25 bp, Artificial Sequence
  Probe
acctattctcaaactttaaatgggc

SEQ ID NO: 27229 - DNA, 26 bp, Artificial Sequence
  Probe
acctattctcaaactttaaatgggca

SEQ ID NO: 27230 - DNA, 27 bp, Artificial Sequence
  Probe
acctattctcaaactttaaatgggcaa

SEQ ID NO: 27231 - DNA, 28 bp, Artificial Sequence
  Probe
acctattctcaaactttaaatgggcaag

SEQ ID NO: 27232 - DNA, 30 bp, Artificial Sequence
  Probe
acctattctcaaactttaaatgggcaagaa

SEQ ID NO: 27233 - DNA, 31 bp, Artificial Sequence; identical to SEQ ID NO: 15733
  Probe

SEQ ID NO: 27234 - DNA, 32 bp, Artificial Sequence; identical to SEQ ID NO: 2827
  Probe

SEQ ID NO: 27235 - DNA, 33 bp, Artificial Sequence; identical to SEQ ID NO: 2828
  Probe

SEQ ID NO: 27236 - DNA, 34 bp, Artificial Sequence; identical to SEQ ID NO: 15736
  Probe

SEQ ID NO: 27237 - DNA, 37 bp, Artificial Sequence; identical to SEQ ID NO: 2830
  Probe

SEQ ID NO: 27238 - DNA, 38 bp, Artificial Sequence; identical to SEQ ID NO: 15740
  Probe

SEQ ID NO: 27239 - DNA, 17 bp, Artificial Sequence
  Probe
acctcagaaggtctcac

SEQ ID NO: 27240 - DNA, 18 bp, Artificial Sequence
  Probe
acctcagaaggtctcact

SEQ ID NO: 27241 - DNA, 19 bp, Artificial Sequence
  Probe
acctcagaaggtctcactt

SEQ ID NO: 27242 - DNA, 20 bp, Artificial Sequence
  Probe
acctcagaaggtctcacttt

SEQ ID NO: 27243 - DNA, 21 bp, Artificial Sequence
  Probe
acctcagaaggtctcactttt

SEQ ID NO: 27244 - DNA, 22 bp, Artificial Sequence
  Probe
acctcagaaggtctcacttttc

SEQ ID NO: 27245 - DNA, 16 bp, Artificial Sequence
  Probe
acctgtctctgtggcg

SEQ ID NO: 27246 - DNA, 17 bp, Artificial Sequence
  Probe
acctgtctctgtggcgc

SEQ ID NO: 27247 - DNA, 18 bp, Artificial Sequence
  Probe
acctgtctctgtggcgca

SEQ ID NO: 27248 - DNA, 23 bp, Artificial Sequence
  Probe
acctgtctctgtggcgcaatcgg

SEQ ID NO: 27249 - DNA, 28 bp, Artificial Sequence
  Probe
acctgtctctgtggcgcaatcggttagc

SEQ ID NO: 27250 - DNA, 31 bp, Artificial Sequence
  Probe
acctgtctctgtggcgcaatcggttagcgca

SEQ ID NO: 27251 - DNA, 36 bp, Artificial Sequence
  Probe
acctgtctctgtggcgcaatcggttagcgcattcgg

SEQ ID NO: 27252 - DNA, 31 bp, Artificial Sequence; identical to SEQ ID NO: 15754
  Probe

SEQ ID NO: 27253 - DNA, 36 bp, Artificial Sequence; identical to SEQ ID NO: 15758
  Probe

SEQ ID NO: 27254 - DNA, 22 bp, Artificial Sequence
  Probe
accttcagctatagggtggaga

SEQ ID NO: 27255 - DNA, 15 bp, Artificial Sequence
  Probe
accttgcctgcgggc

SEQ ID NO: 27256 - DNA, 28 bp, Artificial Sequence
  Probe
accttttaagttaaagattaagagaacc

SEQ ID NO: 27257 - DNA, 33 bp, Artificial Sequence
  Probe
accttttaagttaaagattaagagaaccaacac

SEQ ID NO: 27258 - DNA, 34 bp, Artificial Sequence
  Probe
accttttaagttaaagattaagagaaccaacacc

SEQ ID NO: 27259 - DNA, 35 bp, Artificial Sequence
  Probe
accttttaagttaaagattaagagaaccaacacct

SEQ ID NO: 27260 - DNA, 36 bp, Artificial Sequence
  Probe
accttttaagttaaagattaagagaaccaacacctc

SEQ ID NO: 27261 - DNA, 16 bp, Artificial Sequence
  Probe
acgaatgatttcgact

SEQ ID NO: 27262 - DNA, 17 bp, Artificial Sequence
  Probe
acgaatgatttcgactc

SEQ ID NO: 27263 - DNA, 18 bp, Artificial Sequence
  Probe
acgaatgatttcgactca

SEQ ID NO: 27264 - DNA, 36 bp, Artificial Sequence
  Probe
acgaatgatttcgactcattaaattatgataatcat

SEQ ID NO: 27265 - DNA, 36 bp, Artificial Sequence
  Probe
acgagggaggttccatggtgtaatggttagcactct

SEQ ID NO: 27266 - DNA, 25 bp, Artificial Sequence
  Probe
acgatggtttttcatatcattggtc

SEQ ID NO: 27267 - DNA, 31 bp, Artificial Sequence
  Probe
acgatggtttttcatatcattggtcgtggtt

SEQ ID NO: 27268 - DNA, 32 bp, Artificial Sequence
  Probe
acgatggtttttcatatcattggtcgtggttg

SEQ ID NO: 27269 - DNA, 33 bp, Artificial Sequence
  Probe
acgatggtttttcatatcattggtcgtggttgt

SEQ ID NO: 27270 - DNA, 34 bp, Artificial Sequence
  Probe
acgatggtttttcatatcattggtcgtggttgta

SEQ ID NO: 27271 - DNA, 35 bp, Artificial Sequence
  Probe
acgatggtttttcatatcattggtcgtggttgtag

SEQ ID NO: 27272 - DNA, 37 bp, Artificial Sequence
  Probe
acgatggtttttcatatcattggtcgtggttgtagtc

SEQ ID NO: 27273 - DNA, 38 bp, Artificial Sequence
  Probe
acgatggtttttcatatcattggtcgtggttgtagtcc

SEQ ID NO: 27274 - DNA, 39 bp, Artificial Sequence
  Probe
acgatggtttttcatatcattggtcgtggttgtagtccg

SEQ ID NO: 27275 - DNA, 46 bp, Artificial Sequence
  Probe
acgatggtttttcatatcattggtcgtggttgtagtccgtgcgaga

SEQ ID NO: 27276 - DNA, 47 bp, Artificial Sequence
  Probe
acgatggtttttcatatcattggtcgtggttgtagtccgtgcgagaa

SEQ ID NO: 27277 - DNA, 50 bp, Artificial Sequence; identical to SEQ ID NO: 2843
  Probe

SEQ ID NO: 27278 - DNA, 15 bp, Artificial Sequence
  Probe
acgcagaaggtcctg

SEQ ID NO: 27279 - DNA, 39 bp, Artificial Sequence; identical to SEQ ID NO: 2845
  Probe

SEQ ID NO: 27280 - DNA, 26 bp, Artificial Sequence
  Probe
acgcagaggcattggtggttcagtgg

SEQ ID NO: 27281 - DNA, 18 bp, Artificial Sequence
  Probe
acgccggtagtcgactcg

SEQ ID NO: 27282 - DNA, 18 bp, Artificial Sequence
  Probe
acgcgaaaggtccccggt

SEQ ID NO: 27283 - DNA, 25 bp, Artificial Sequence
  Probe
acgcgaggcattggtggttcagtgg

SEQ ID NO: 27284 - DNA, 32 bp, Artificial Sequence
  Probe
acgcggctgtgatggccgagtggttaaggcgt

SEQ ID NO: 27285 - DNA, 36 bp, Artificial Sequence; identical to SEQ ID NO: 15805
  Probe

SEQ ID NO: 27286 - DNA, 17 bp, Artificial Sequence
  Probe
acgcgggagaccggggt

SEQ ID NO: 27287 - DNA, 33 bp, Artificial Sequence; identical to SEQ ID NO: 185
  Probe

SEQ ID NO: 27288 - DNA, 34 bp, Artificial Sequence; identical to SEQ ID NO: 186
  Probe

SEQ ID NO: 27289 - DNA, 35 bp, Artificial Sequence; identical to SEQ ID NO: 187
  Probe

SEQ ID NO: 27290 - DNA, 37 bp, Artificial Sequence; identical to SEQ ID NO: 2865
  Probe

SEQ ID NO: 27291 - DNA, 38 bp, Artificial Sequence; identical to SEQ ID NO: 2869
  Probe

SEQ ID NO: 27292 - DNA, 37 bp, Artificial Sequence; identical to SEQ ID NO: 2872
  Probe

SEQ ID NO: 27293 - DNA, 38 bp, Artificial Sequence; identical to SEQ ID NO: 2873
  Probe

SEQ ID NO: 27294 - DNA, 39 bp, Artificial Sequence; identical to SEQ ID NO: 2874
  Probe

SEQ ID NO: 27295 - DNA, 17 bp, Artificial Sequence
  Probe
acgcgggaggcccgggt

SEQ ID NO: 27296 - DNA, 30 bp, Artificial Sequence; identical to SEQ ID NO: 15846
  Probe

SEQ ID NO: 27297 - DNA, 34 bp, Artificial Sequence; identical to SEQ ID NO: 15849
  Probe

SEQ ID NO: 27298 - DNA, 38 bp, Artificial Sequence; identical to SEQ ID NO: 15852
  Probe

SEQ ID NO: 27299 - DNA, 38 bp, Artificial Sequence; identical to SEQ ID NO: 15856
  Probe

SEQ ID NO: 27300 - DNA, 39 bp, Artificial Sequence; identical to SEQ ID NO: 2882
  Probe

SEQ ID NO: 27301 - DNA, 38 bp, Artificial Sequence; identical to SEQ ID NO: 15858
  Probe

SEQ ID NO: 27302 - DNA, 38 bp, Artificial Sequence
  Probe
acgcgggaggcccgggttcgattcccggccaatgcagc

SEQ ID NO: 27303 - DNA, 39 bp, Artificial Sequence; identical to SEQ ID NO: 2883
  Probe

SEQ ID NO: 27304 - DNA, 34 bp, Artificial Sequence; identical to SEQ ID NO: 2884
  Probe

SEQ ID NO: 27305 - DNA, 36 bp, Artificial Sequence; identical to SEQ ID NO: 15864
  Probe

SEQ ID NO: 27306 - DNA, 39 bp, Artificial Sequence; identical to SEQ ID NO: 2886
  Probe

SEQ ID NO: 27307 - DNA, 22 bp, Artificial Sequence
  Probe
acggatcagaagattctaggtt

SEQ ID NO: 27308 - DNA, 33 bp, Artificial Sequence
  Probe
acggatcagaagattctaggttcgactcctggc

SEQ ID NO: 27309 - DNA, 36 bp, Artificial Sequence
  Probe
acggcagccgaaatagctcagttgggagagcgttag

SEQ ID NO: 27310 - DNA, 36 bp, Artificial Sequence
  Probe
acggcattgtgaggacaatggcacggcaaggggagt

SEQ ID NO: 27311 - DNA, 36 bp, Artificial Sequence
  Probe
acggcattgtgggaacaatggcacggcaaggggctc

SEQ ID NO: 27312 - DNA, 36 bp, Artificial Sequence; identical to SEQ ID NO: 15871
  Probe

SEQ ID NO: 27313 - DNA, 40 bp, Artificial Sequence
  Probe
acggcttgtcctcgttagtatagtggtgagtatccccgcc

SEQ ID NO: 27314 - DNA, 41 bp, Artificial Sequence
  Probe
acggcttgtcctcgttagtatagtggtgagtatccccgcct

SEQ ID NO: 27315 - DNA, 19 bp, Artificial Sequence
  Probe
acgggagcccggatagctc

SEQ ID NO: 27316 - DNA, 25 bp, Artificial Sequence
  Probe
acgggagcccggatagctcagtcgg

SEQ ID NO: 27317 - DNA, 26 bp, Artificial Sequence
  Probe
acgggagcccggatagctcagtcggt

SEQ ID NO: 27318 - DNA, 27 bp, Artificial Sequence
  Probe
acgggagcccggatagctcagtcggta

SEQ ID NO: 27319 - DNA, 28 bp, Artificial Sequence
  Probe
acgggagcccggatagctcagtcggtag

SEQ ID NO: 27320 - DNA, 29 bp, Artificial Sequence
  Probe
acgggagcccggatagctcagtcggtaga

SEQ ID NO: 27321 - DNA, 30 bp, Artificial Sequence; identical to SEQ ID NO: 15874
  Probe

SEQ ID NO: 27322 - DNA, 31 bp, Artificial Sequence
  Probe
acgggagcccggatagctcagtcggtagagc

SEQ ID NO: 27323 - DNA, 32 bp, Artificial Sequence
  Probe
acgggagcccggatagctcagtcggtagagca

SEQ ID NO: 27324 - DNA, 34 bp, Artificial Sequence
  Probe
acgggagcccggatagctcagtcggtagagcatc

SEQ ID NO: 27325 - DNA, 35 bp, Artificial Sequence
  Probe
acgggagcccggatagctcagtcggtagagcatca

SEQ ID NO: 27326 - DNA, 36 bp, Artificial Sequence; identical to SEQ ID NO: 15875
  Probe

SEQ ID NO: 27327 - DNA, 37 bp, Artificial Sequence; identical to SEQ ID NO: 15876
  Probe

SEQ ID NO: 27328 - DNA, 38 bp, Artificial Sequence; identical to SEQ ID NO: 15877
  Probe

SEQ ID NO: 27329 - DNA, 39 bp, Artificial Sequence
  Probe
acgggagcccggatagctcagtcggtagagcatcagact

SEQ ID NO: 27330 - DNA, 40 bp, Artificial Sequence
  Probe
acgggagcccggatagctcagtcggtagagcatcagactt

SEQ ID NO: 27331 - DNA, 41 bp, Artificial Sequence; identical to SEQ ID NO: 15878
  Probe

SEQ ID NO: 27332 - DNA, 42 bp, Artificial Sequence; identical to SEQ ID NO: 15879
  Probe

SEQ ID NO: 27333 - DNA, 43 bp, Artificial Sequence; identical to SEQ ID NO: 15880
  Probe

SEQ ID NO: 27334 - DNA, 44 bp, Artificial Sequence
  Probe
acgggagcccggatagctcagtcggtagagcatcagacttttaa

SEQ ID NO: 27335 - DNA, 45 bp, Artificial Sequence
  Probe
acgggagcccggatagctcagtcggtagagcatcagacttttaat

SEQ ID NO: 27336 - DNA, 36 bp, Artificial Sequence
  Probe
acgggaggctcgttggtctaggggtatgattctcgc

SEQ ID NO: 27337 - DNA, 17 bp, Artificial Sequence
  Probe
acgggccaactttgttt

SEQ ID NO: 27338 - DNA, 18 bp, Artificial Sequence
  Probe
acgggccaactttgtttt

SEQ ID NO: 27339 - DNA, 19 bp, Artificial Sequence
  Probe
acgggccaggattgaaact

SEQ ID NO: 27340 - DNA, 20 bp, Artificial Sequence
  Probe
acgggccaggattgaaactt

SEQ ID NO: 27341 - DNA, 21 bp, Artificial Sequence
  Probe
acgggccaggattgaaacttt

SEQ ID NO: 27342 - DNA, 22 bp, Artificial Sequence
  Probe
acgggccaggattgaaactttt

SEQ ID NO: 27343 - DNA, 15 bp, Artificial Sequence
  Probe
acgggctcacatcac

SEQ ID NO: 27344 - DNA, 16 bp, Artificial Sequence
  Probe
acgggctcacatcacc

SEQ ID NO: 27345 - DNA, 17 bp, Artificial Sequence
  Probe
acgggctcacatcaccc

SEQ ID NO: 27346 - DNA, 23 bp, Artificial Sequence
  Probe
acggggaggcacagtaattgttt

SEQ ID NO: 27347 - DNA, 17 bp, Artificial Sequence
  Probe
acggggcacaataattt

SEQ ID NO: 27348 - DNA, 36 bp, Artificial Sequence
  Probe
acgggggtgtagctcagtggtagagcgcgtgcttag

SEQ ID NO: 27349 - DNA, 16 bp, Artificial Sequence
  Probe
acgggtccccggtagc

SEQ ID NO: 27350 - DNA, 17 bp, Artificial Sequence
  Probe
acgggtccccggtagct

SEQ ID NO: 27351 - DNA, 18 bp, Artificial Sequence
  Probe
acgggtccccggtagctc

SEQ ID NO: 27352 - DNA, 19 bp, Artificial Sequence
  Probe
acgggtccccggtagctcg

SEQ ID NO: 27353 - DNA, 21 bp, Artificial Sequence
  Probe
acgggtccccggtagctcgcc

SEQ ID NO: 27354 - DNA, 33 bp, Artificial Sequence
  Probe
acgggtccccggtagctcgccgtgatcgtatag

SEQ ID NO: 27355 - DNA, 20 bp, Artificial Sequence
  Probe
acggtagcgcgtctgactcc

SEQ ID NO: 27356 - DNA, 36 bp, Artificial Sequence
  Probe
acggtggccgagatagctcagttgggagagcgttag

SEQ ID NO: 27357 - DNA, 33 bp, Artificial Sequence
  Probe
acgtaggacgaggtggccgagtggttaaggcga

SEQ ID NO: 27358 - DNA, 18 bp, Artificial Sequence
  Probe
acgtatgaggccccgggt

SEQ ID NO: 27359 - DNA, 36 bp, Artificial Sequence
  Probe
acgtcccttcgatagctcagctggtagagcggagga

SEQ ID NO: 27360 - DNA, 44 bp, Artificial Sequence
  Probe
acgtcccttcgatagctcagctggtagagcggaggactgtagct

SEQ ID NO: 27361 - DNA, 47 bp, Artificial Sequence
  Probe
acgtcccttcgatagctcagctggtagagcggaggactgtagctact

SEQ ID NO: 27362 - DNA, 36 bp, Artificial Sequence
  Probe
acgtgggctccatagctcagtggttagagcactggt

SEQ ID NO: 27363 - DNA, 20 bp, Artificial Sequence
  Probe
actaaatactaccgtatggc

SEQ ID NO: 27364 - DNA, 16 bp, Artificial Sequence
  Probe
actaagtgtttgtggg

SEQ ID NO: 27365 - DNA, 18 bp, Artificial Sequence
  Probe
actaagtgtttgtgggtt

SEQ ID NO: 27366 - DNA, 19 bp, Artificial Sequence
  Probe
actaagtgtttgtgggttt

SEQ ID NO: 27367 - DNA, 24 bp, Artificial Sequence
  Probe
actaagtgtttgtgggtttaagtc

SEQ ID NO: 27368 - DNA, 33 bp, Artificial Sequence; identical to SEQ ID NO: 191
  Probe

SEQ ID NO: 27369 - DNA, 38 bp, Artificial Sequence; identical to SEQ ID NO: 2896
  Probe

SEQ ID NO: 27370 - DNA, 39 bp, Artificial Sequence; identical to SEQ ID NO: 2897
  Probe

SEQ ID NO: 27371 - DNA, 25 bp, Artificial Sequence
  Probe
actacaaaaaggattagactgaacc

SEQ ID NO: 27372 - DNA, 18 bp, Artificial Sequence
  Probe
actactataaccacccta

SEQ ID NO: 27373 - DNA, 18 bp, Artificial Sequence
  Probe
actagtctggtgttattt

SEQ ID NO: 27374 - DNA, 15 bp, Artificial Sequence
  Probe
actagttttgacaac

SEQ ID NO: 27375 - DNA, 15 bp, Artificial Sequence
  Probe
actataaccacccta

SEQ ID NO: 27376 - DNA, 16 bp, Artificial Sequence
  Probe
actatgagaatcgaac

SEQ ID NO: 27377 - DNA, 17 bp, Artificial Sequence
  Probe
actatgagaatcgaacc

SEQ ID NO: 27378 - DNA, 18 bp, Artificial Sequence
  Probe
actatgagaatcgaaccc

SEQ ID NO: 27379 - DNA, 20 bp, Artificial Sequence
  Probe
actatgagaatcgaacccat

SEQ ID NO: 27380 - DNA, 23 bp, Artificial Sequence
  Probe
actatgagaatcgaacccatccc

SEQ ID NO: 27381 - DNA, 27 bp, Artificial Sequence
  Probe
actatgagaatcgaacccatccctgag

SEQ ID NO: 27382 - DNA, 28 bp, Artificial Sequence
  Probe
actatgagaatcgaacccatccctgaga

SEQ ID NO: 27383 - DNA, 18 bp, Artificial Sequence
  Probe
actcatgcccccatgtct

SEQ ID NO: 27384 - DNA, 22 bp, Artificial Sequence
  Probe
actcatgcccccatgtctaaca

SEQ ID NO: 27385 - DNA, 36 bp, Artificial Sequence; identical to SEQ ID NO: 2912
  Probe

SEQ ID NO: 27386 - DNA, 39 bp, Artificial Sequence; identical to SEQ ID NO: 2915
  Probe

SEQ ID NO: 27387 - DNA, 18 bp, Artificial Sequence
  Probe
actcccggtgtgggaacg

SEQ ID NO: 27388 - DNA, 21 bp, Artificial Sequence
  Probe
actcctgacagttcgtacttt

SEQ ID NO: 27389 - DNA, 16 bp, Artificial Sequence
  Probe
actctgcgttgtggcc

SEQ ID NO: 27390 - DNA, 15 bp, Artificial Sequence
  Probe
actctggactctgaa

SEQ ID NO: 27391 - DNA, 16 bp, Artificial Sequence
  Probe
actctggactctgaat

SEQ ID NO: 27392 - DNA, 17 bp, Artificial Sequence
  Probe
actctggactctgaatc

SEQ ID NO: 27393 - DNA, 18 bp, Artificial Sequence
  Probe
actctggactctgaatcc

SEQ ID NO: 27394 - DNA, 19 bp, Artificial Sequence
  Probe
actctggactctgaatcca

SEQ ID NO: 27395 - DNA, 21 bp, Artificial Sequence
  Probe
actctggactctgaatccagc

SEQ ID NO: 27396 - DNA, 29 bp, Artificial Sequence
  Probe
actctggactctgaatccagcgatccgag

SEQ ID NO: 27397 - DNA, 30 bp, Artificial Sequence
  Probe
actctggactctgaatccagcgatccgagt

SEQ ID NO: 27398 - DNA, 31 bp, Artificial Sequence
  Probe
actctggactctgaatccagcgatccgagtt

SEQ ID NO: 27399 - DNA, 32 bp, Artificial Sequence
  Probe
actctggactctgaatccagcgatccgagttc

SEQ ID NO: 27400 - DNA, 17 bp, Artificial Sequence
  Probe
actctggactttgaatc

SEQ ID NO: 27401 - DNA, 18 bp, Artificial Sequence
  Probe
actctggactttgaatcc

SEQ ID NO: 27402 - DNA, 29 bp, Artificial Sequence
  Probe
actcttttagtataaatagtaccgttaac

SEQ ID NO: 27403 - DNA, 30 bp, Artificial Sequence; identical to SEQ ID NO: 2927
  Probe

SEQ ID NO: 27404 - DNA, 31 bp, Artificial Sequence; identical to SEQ ID NO: 2928
  Probe

SEQ ID NO: 27405 - DNA, 32 bp, Artificial Sequence; identical to SEQ ID NO: 195
  Probe

SEQ ID NO: 27406 - DNA, 33 bp, Artificial Sequence; identical to SEQ ID NO: 196
  Probe

SEQ ID NO: 27407 - DNA, 34 bp, Artificial Sequence; identical to SEQ ID NO: 197
  Probe

SEQ ID NO: 27408 - DNA, 36 bp, Artificial Sequence
  Probe
actcttttagtataaatagtaccgttaacttccaat

SEQ ID NO: 27409 - DNA, 50 bp, Artificial Sequence; identical to SEQ ID NO: 199
  Probe

SEQ ID NO: 27410 - DNA, 24 bp, Artificial Sequence
  Probe
actgaaaatgtttagacgggctca

SEQ ID NO: 27411 - DNA, 25 bp, Artificial Sequence
  Probe
actgaaaatgtttagacgggctcac

SEQ ID NO: 27412 - DNA, 26 bp, Artificial Sequence
  Probe
actgaaaatgtttagacgggctcaca

SEQ ID NO: 27413 - DNA, 28 bp, Artificial Sequence
  Probe
actgaaaatgtttagacgggctcacatc

SEQ ID NO: 27414 - DNA, 31 bp, Artificial Sequence
  Probe
actgaaaatgtttagacgggctcacatcacc

SEQ ID NO: 27415 - DNA, 32 bp, Artificial Sequence
  Probe
actgaaaatgtttagacgggctcacatcaccc

SEQ ID NO: 27416 - DNA, 22 bp, Artificial Sequence
  Probe
actgactagtctggtgttattt

SEQ ID NO: 27417 - DNA, 36 bp, Artificial Sequence
  Probe
actgcccggctagctcagtcggtagagcatgggact

SEQ ID NO: 27418 - DNA, 16 bp, Artificial Sequence
  Probe
actgctaactcatgcc

SEQ ID NO: 27419 - DNA, 17 bp, Artificial Sequence
  Probe
actgctaactcatgccc

SEQ ID NO: 27420 - DNA, 29 bp, Artificial Sequence
  Probe
actgctaactcatgcccccatgtctaaca

SEQ ID NO: 27421 - DNA, 32 bp, Artificial Sequence
  Probe
actgctaactcatgcccccatgtctaacaaca

SEQ ID NO: 27422 - DNA, 36 bp, Artificial Sequence
  Probe
actgctaactcatgcccccatgtctaacaacatggc

SEQ ID NO: 27423 - DNA, 20 bp, Artificial Sequence
  Probe
actggaaagtgcacttggac

SEQ ID NO: 27424 - DNA, 21 bp, Artificial Sequence
  Probe
actggaaagtgcacttggacg

SEQ ID NO: 27425 - DNA, 22 bp, Artificial Sequence
  Probe
actggaaagtgcacttggacga

SEQ ID NO: 27426 - DNA, 23 bp, Artificial Sequence
  Probe
actggaaagtgcacttggacgaa

SEQ ID NO: 27427 - DNA, 24 bp, Artificial Sequence
  Probe
actggaaagtgcacttggacgaac

SEQ ID NO: 27428 - DNA, 25 bp, Artificial Sequence
  Probe
actggaaagtgcacttggacgaacc

SEQ ID NO: 27429 - DNA, 26 bp, Artificial Sequence
  Probe
actggaaagtgcacttggacgaacca

SEQ ID NO: 27430 - DNA, 30 bp, Artificial Sequence
  Probe
actggtggttcagtggtagaattctcgcct

SEQ ID NO: 27431 - DNA, 36 bp, Artificial Sequence
  Probe
actgtaaagctaacttagcattaaccttttaagtta

SEQ ID NO: 27432 - DNA, 50 bp, Artificial Sequence
  Probe
actgtaaagctaacttagcattaaccttttaagttaaagattaagagaac

SEQ ID NO: 27433 - DNA, 36 bp, Artificial Sequence
  Probe
actgtaaatctaaagacaggggttaggcctcttttt

SEQ ID NO: 27434 - DNA, 36 bp, Artificial Sequence
  Probe
acttaaaactttacagtcagaggttcaattcctctt

SEQ ID NO: 27435 - DNA, 16 bp, Artificial Sequence
  Probe
acttaacttgaccgct

SEQ ID NO: 27436 - DNA, 17 bp, Artificial Sequence
  Probe
acttaacttgaccgctc

SEQ ID NO: 27437 - DNA, 18 bp, Artificial Sequence
  Probe
acttaacttgaccgctct

SEQ ID NO: 27438 - DNA, 19 bp, Artificial Sequence
  Probe
acttaacttgaccgctctg

SEQ ID NO: 27439 - DNA, 20 bp, Artificial Sequence
  Probe
acttaacttgaccgctctga

SEQ ID NO: 27440 - DNA, 21 bp, Artificial Sequence
  Probe
acttaacttgaccgctctgag

SEQ ID NO: 27441 - DNA, 22 bp, Artificial Sequence
  Probe
acttaacttgaccgctctgagc

SEQ ID NO: 27442 - DNA, 23 bp, Artificial Sequence
  Probe
acttaacttgaccgctctgagct

SEQ ID NO: 27443 - DNA, 28 bp, Artificial Sequence
  Probe
acttaacttgaccgctctgagctaaacc

SEQ ID NO: 27444 - DNA, 29 bp, Artificial Sequence
  Probe
acttaacttgaccgctctgagctaaacct

SEQ ID NO: 27445 - DNA, 33 bp, Artificial Sequence
  Probe
acttaacttgaccgctctgagctaaacctagcc

SEQ ID NO: 27446 - DNA, 34 bp, Artificial Sequence
  Probe
acttaacttgaccgctctgagctaaacctagccc

SEQ ID NO: 27447 - DNA, 35 bp, Artificial Sequence
  Probe
acttaacttgaccgctctgagctaaacctagcccc

SEQ ID NO: 27448 - DNA, 36 bp, Artificial Sequence
  Probe
acttaacttgaccgctctgagctaaacctagcccca

SEQ ID NO: 27449 - DNA, 15 bp, Artificial Sequence
  Probe
acttacacttaggag

SEQ ID NO: 27450 - DNA, 21 bp, Artificial Sequence
  Probe
acttacacttaggagatttca

SEQ ID NO: 27451 - DNA, 23 bp, Artificial Sequence
  Probe
acttacacttaggagatttcaac

SEQ ID NO: 27452 - DNA, 24 bp, Artificial Sequence
  Probe
acttacacttaggagatttcaact

SEQ ID NO: 27453 - DNA, 25 bp, Artificial Sequence
  Probe
acttacacttaggagatttcaactt

SEQ ID NO: 27454 - DNA, 29 bp, Artificial Sequence
  Probe
acttacacttaggagatttcaacttaact

SEQ ID NO: 27455 - DNA, 30 bp, Artificial Sequence
  Probe
acttacacttaggagatttcaacttaactt

SEQ ID NO: 27456 - DNA, 34 bp, Artificial Sequence; identical to SEQ ID NO: 16000
  Probe

SEQ ID NO: 27457 - DNA, 35 bp, Artificial Sequence; identical to SEQ ID NO: 2982
  Probe

SEQ ID NO: 27458 - DNA, 36 bp, Artificial Sequence; identical to SEQ ID NO: 2983
  Probe

SEQ ID NO: 27459 - DNA, 37 bp, Artificial Sequence; identical to SEQ ID NO: 2984
  Probe

SEQ ID NO: 27460 - DNA, 38 bp, Artificial Sequence; identical to SEQ ID NO: 16004
  Probe

SEQ ID NO: 27461 - DNA, 39 bp, Artificial Sequence; identical to SEQ ID NO: 2985
  Probe

SEQ ID NO: 27462 - DNA, 40 bp, Artificial Sequence; identical to SEQ ID NO: 2986
  Probe

SEQ ID NO: 27463 - DNA, 43 bp, Artificial Sequence; identical to SEQ ID NO: 2989
  Probe

SEQ ID NO: 27464 - DNA, 44 bp, Artificial Sequence; identical to SEQ ID NO: 2990
  Probe

SEQ ID NO: 27465 - DNA, 36 bp, Artificial Sequence; identical to SEQ ID NO: 16011
  Probe

SEQ ID NO: 27466 - DNA, 39 bp, Artificial Sequence; identical to SEQ ID NO: 12625
  Probe

SEQ ID NO: 27467 - DNA, 19 bp, Artificial Sequence
  Probe
acttaggagatttcaactt

SEQ ID NO: 27468 - DNA, 23 bp, Artificial Sequence
  Probe
acttaggagatttcaacttaact

SEQ ID NO: 27469 - DNA, 28 bp, Artificial Sequence
  Probe
acttaggagatttcaacttaacttgacc

SEQ ID NO: 27470 - DNA, 29 bp, Artificial Sequence
  Probe
acttaggagatttcaacttaacttgaccg

SEQ ID NO: 27471 - DNA, 31 bp, Artificial Sequence; identical to SEQ ID NO: 2999
  Probe

SEQ ID NO: 27472 - DNA, 32 bp, Artificial Sequence; identical to SEQ ID NO: 3000
  Probe

SEQ ID NO: 27473 - DNA, 33 bp, Artificial Sequence; identical to SEQ ID NO: 3001
  Probe

SEQ ID NO: 27474 - DNA, 36 bp, Artificial Sequence; identical to SEQ ID NO: 3003
  Probe

SEQ ID NO: 27475 - DNA, 37 bp, Artificial Sequence; identical to SEQ ID NO: 3004
  Probe

SEQ ID NO: 27476 - DNA, 38 bp, Artificial Sequence; identical to SEQ ID NO: 3005
  Probe

SEQ ID NO: 27477 - DNA, 23 bp, Artificial Sequence
  Probe
acttccaattaactagttttgac

SEQ ID NO: 27478 - DNA, 22 bp, Artificial Sequence
  Probe
acttctgacacagcctgatctt

SEQ ID NO: 27479 - DNA, 23 bp, Artificial Sequence
  Probe
acttctgacacagcctgatcttt

SEQ ID NO: 27480 - DNA, 25 bp, Artificial Sequence
  Probe
acttctgacagagctcaattacttt

SEQ ID NO: 27481 - DNA, 15 bp, Artificial Sequence
  Probe
acttgaccgctctga

SEQ ID NO: 27482 - DNA, 16 bp, Artificial Sequence
  Probe
acttgaccgctctgag

SEQ ID NO: 27483 - DNA, 17 bp, Artificial Sequence
  Probe
acttgaccgctctgagc

SEQ ID NO: 27484 - DNA, 18 bp, Artificial Sequence
  Probe
acttgaccgctctgagct

SEQ ID NO: 27485 - DNA, 23 bp, Artificial Sequence
  Probe
acttgaccgctctgagctaaacc

SEQ ID NO: 27486 - DNA, 24 bp, Artificial Sequence
  Probe
acttgaccgctctgagctaaacct

SEQ ID NO: 27487 - DNA, 28 bp, Artificial Sequence
  Probe
acttgaccgctctgagctaaacctagcc

SEQ ID NO: 27488 - DNA, 29 bp, Artificial Sequence
  Probe
acttgaccgctctgagctaaacctagccc

SEQ ID NO: 27489 - DNA, 30 bp, Artificial Sequence
  Probe
acttgaccgctctgagctaaacctagcccc

SEQ ID NO: 27490 - DNA, 31 bp, Artificial Sequence
  Probe
acttgaccgctctgagctaaacctagcccca

SEQ ID NO: 27491 - DNA, 36 bp, Artificial Sequence
  Probe
acttgaccgctctgagctaaacctagccccaaaccc

SEQ ID NO: 27492 - DNA, 36 bp, Artificial Sequence
  Probe
acttggacgaaccagagtgtagcttaacacaaagca

SEQ ID NO: 27493 - DNA, 36 bp, Artificial Sequence
  Probe
acttggccccatggtgtaatggtcagcactctggac

SEQ ID NO: 27494 - DNA, 18 bp, Artificial Sequence
  Probe
actttacagtcagaggtt

SEQ ID NO: 27495 - DNA, 19 bp, Artificial Sequence
  Probe
actttacagtcagaggttc

SEQ ID NO: 27496 - DNA, 24 bp, Artificial Sequence
  Probe
actttacagtcagaggttcaattc

SEQ ID NO: 27497 - DNA, 22 bp, Artificial Sequence
  Probe
actttgaatccagcaatccgag

SEQ ID NO: 27498 - DNA, 23 bp, Artificial Sequence
  Probe
actttgaatccagcaatccgagt

SEQ ID NO: 27499 - DNA, 24 bp, Artificial Sequence
  Probe
actttgaatccagcaatccgagtt

SEQ ID NO: 27500 - DNA, 22 bp, Artificial Sequence
  Probe
actttgaatccagcgatccgag

SEQ ID NO: 27501 - DNA, 23 bp, Artificial Sequence
  Probe
actttgaatccagcgatccgagt

SEQ ID NO: 27502 - DNA, 24 bp, Artificial Sequence
  Probe
actttgaatccagcgatccgagtt

SEQ ID NO: 27503 - DNA, 27 bp, Artificial Sequence
  Probe
actttgatagagtaaataataggagct

SEQ ID NO: 27504 - DNA, 28 bp, Artificial Sequence
  Probe
actttgatagagtaaataataggagctt

SEQ ID NO: 27505 - DNA, 33 bp, Artificial Sequence; identical to SEQ ID NO: 3022
  Probe

SEQ ID NO: 27506 - DNA, 34 bp, Artificial Sequence; identical to SEQ ID NO: 3023
  Probe

SEQ ID NO: 27507 - DNA, 36 bp, Artificial Sequence; identical to SEQ ID NO: 3025
  Probe

SEQ ID NO: 27508 - DNA, 26 bp, Artificial Sequence
  Probe
actttgtcaaagttaaattataggct

SEQ ID NO: 27509 - DNA, 28 bp, Artificial Sequence
  Probe
actttgtcaaagttaaattataggctaa

SEQ ID NO: 27510 - DNA, 36 bp, Artificial Sequence
  Probe
actttgtcaaagttaaattataggctaaatcctata

SEQ ID NO: 27511 - DNA, 16 bp, Artificial Sequence
  Probe
acttttaaaggataac

SEQ ID NO: 27512 - DNA, 19 bp, Artificial Sequence
  Probe
acttttaaaggataacagc

SEQ ID NO: 27513 - DNA, 30 bp, Artificial Sequence; identical to SEQ ID NO: 209
  Probe

SEQ ID NO: 27514 - DNA, 33 bp, Artificial Sequence; identical to SEQ ID NO: 3035
  Probe

SEQ ID NO: 27515 - DNA, 34 bp, Artificial Sequence; identical to SEQ ID NO: 212
  Probe

SEQ ID NO: 27516 - DNA, 37 bp, Artificial Sequence
  Probe
acttttaaaggataacagctatccattggtcttaggc

SEQ ID NO: 27517 - DNA, 38 bp, Artificial Sequence; identical to SEQ ID NO: 16055
  Probe

SEQ ID NO: 27518 - DNA, 39 bp, Artificial Sequence; identical to SEQ ID NO: 3036
  Probe

SEQ ID NO: 27519 - DNA, 40 bp, Artificial Sequence; identical to SEQ ID NO: 16056
  Probe

SEQ ID NO: 27520 - DNA, 41 bp, Artificial Sequence; identical to SEQ ID NO: 3037
  Probe

SEQ ID NO: 27521 - DNA, 42 bp, Artificial Sequence; identical to SEQ ID NO: 16058
  Probe

SEQ ID NO: 27522 - DNA, 50 bp, Artificial Sequence; identical to SEQ ID NO: 3039
  Probe

SEQ ID NO: 27523 - DNA, 24 bp, Artificial Sequence
  Probe
agaaaaagtctttaactccaccat

SEQ ID NO: 27524 - DNA, 18 bp, Artificial Sequence
  Probe
agaaagctcacaagaact

SEQ ID NO: 27525 - DNA, 19 bp, Artificial Sequence
  Probe
agaaagctcacaagaactg

SEQ ID NO: 27526 - DNA, 26 bp, Artificial Sequence
  Probe
agaaagctcacaagaactgctaactc

SEQ ID NO: 27527 - DNA, 29 bp, Artificial Sequence
  Probe
agaaagctcacaagaactgctaactcatg

SEQ ID NO: 27528 - DNA, 32 bp, Artificial Sequence; identical to SEQ ID NO: 3040
  Probe

SEQ ID NO: 27529 - DNA, 33 bp, Artificial Sequence; identical to SEQ ID NO: 3041
  Probe

SEQ ID NO: 27530 - DNA, 34 bp, Artificial Sequence
  Probe
agaaagctcacaagaactgctaactcatgccccc

SEQ ID NO: 27531 - DNA, 47 bp, Artificial Sequence
  Probe
agaaagctcacaagaactgctaactcatgcccccatgtctaacaaca

SEQ ID NO: 27532 - DNA, 15 bp, Artificial Sequence
  Probe
agaaaggccgaattt

SEQ ID NO: 27533 - DNA, 16 bp, Artificial Sequence
  Probe
agaaaggccgaatttt

SEQ ID NO: 27534 - DNA, 15 bp, Artificial Sequence
  Probe
agaaatatgtctgat

SEQ ID NO: 27535 - DNA, 32 bp, Artificial Sequence
  Probe
agaaatatgtctgataaaagagttactttgat

SEQ ID NO: 27536 - DNA, 36 bp, Artificial Sequence
  Probe
agaaatatgtctgataaaagagttactttgatagag

SEQ ID NO: 27537 - DNA, 50 bp, Artificial Sequence; identical to SEQ ID NO: 217
  Probe

SEQ ID NO: 27538 - DNA, 24 bp, Artificial Sequence
  Probe
agaaatttaggttaaatacagacc

SEQ ID NO: 27539 - DNA, 31 bp, Artificial Sequence; identical to SEQ ID NO: 3044
  Probe

SEQ ID NO: 27540 - DNA, 36 bp, Artificial Sequence
  Probe
agaaatttaggttaaatacagaccaagagccttcaa

SEQ ID NO: 27541 - DNA, 36 bp, Artificial Sequence
  Probe
agaacagcagagtggcgcagcggaagcgtgctgggc

SEQ ID NO: 27542 - DNA, 15 bp, Artificial Sequence
  Probe
agaacagggtttgtt

SEQ ID NO: 27543 - DNA, 16 bp, Artificial Sequence
  Probe
agaacagggtttgtta

SEQ ID NO: 27544 - DNA, 17 bp, Artificial Sequence
  Probe
agaacagggtttgttaa

SEQ ID NO: 27545 - DNA, 19 bp, Artificial Sequence
  Probe
agaacagggtttgttaaga

SEQ ID NO: 27546 - DNA, 25 bp, Artificial Sequence
  Probe
agaaccaacacctctttacagtgaa

SEQ ID NO: 27547 - DNA, 36 bp, Artificial Sequence
  Probe
agaacctgggtagctcagtaggtagaacatcagact

SEQ ID NO: 27548 - DNA, 15 bp, Artificial Sequence
  Probe
agaactgctaactca

SEQ ID NO: 27549 - DNA, 17 bp, Artificial Sequence
  Probe
agaactgctaactcatg

SEQ ID NO: 27550 - DNA, 18 bp, Artificial Sequence
  Probe
agaactgctaactcatgc

SEQ ID NO: 27551 - DNA, 19 bp, Artificial Sequence
  Probe
agaactgctaactcatgcc

SEQ ID NO: 27552 - DNA, 20 bp, Artificial Sequence
  Probe
agaactgctaactcatgccc

SEQ ID NO: 27553 - DNA, 21 bp, Artificial Sequence
  Probe
agaactgctaactcatgcccc

SEQ ID NO: 27554 - DNA, 22 bp, Artificial Sequence
  Probe
agaactgctaactcatgccccc

SEQ ID NO: 27555 - DNA, 23 bp, Artificial Sequence
  Probe
agaactgctaactcatgccccca

SEQ ID NO: 27556 - DNA, 24 bp, Artificial Sequence
  Probe
agaactgctaactcatgcccccat

SEQ ID NO: 27557 - DNA, 25 bp, Artificial Sequence
  Probe
agaactgctaactcatgcccccatg

SEQ ID NO: 27558 - DNA, 26 bp, Artificial Sequence
  Probe
agaactgctaactcatgcccccatgt

SEQ ID NO: 27559 - DNA, 29 bp, Artificial Sequence
  Probe
agaactgctaactcatgcccccatgtcta

SEQ ID NO: 27560 - DNA, 34 bp, Artificial Sequence; identical to SEQ ID NO: 16097
  Probe

SEQ ID NO: 27561 - DNA, 37 bp, Artificial Sequence
  Probe
agaactgctaactcatgcccccatgtctaacaacatg

SEQ ID NO: 27562 - DNA, 38 bp, Artificial Sequence
  Probe
agaactgctaactcatgcccccatgtctaacaacatgg

SEQ ID NO: 27563 - DNA, 39 bp, Artificial Sequence; identical to SEQ ID NO: 3067
  Probe

SEQ ID NO: 27564 - DNA, 40 bp, Artificial Sequence; identical to SEQ ID NO: 218
  Probe

SEQ ID NO: 27565 - DNA, 41 bp, Artificial Sequence; identical to SEQ ID NO: 219
  Probe

SEQ ID NO: 27566 - DNA, 42 bp, Artificial Sequence; identical to SEQ ID NO: 220
  Probe

SEQ ID NO: 27567 - DNA, 44 bp, Artificial Sequence; identical to SEQ ID NO: 222
  Probe

SEQ ID NO: 27568 - DNA, 50 bp, Artificial Sequence; identical to SEQ ID NO: 3070
  Probe

SEQ ID NO: 27569 - DNA, 15 bp, Artificial Sequence
  Probe
agaagattctaggtt

SEQ ID NO: 27570 - DNA, 32 bp, Artificial Sequence; identical to SEQ ID NO: 3074
  Probe

SEQ ID NO: 27571 - DNA, 36 bp, Artificial Sequence; identical to SEQ ID NO: 3076
  Probe

SEQ ID NO: 27572 - DNA, 15 bp, Artificial Sequence
  Probe
agaagattgagggtt

SEQ ID NO: 27573 - DNA, 15 bp, Artificial Sequence
  Probe
agaagattgcaggtt

SEQ ID NO: 27574 - DNA, 36 bp, Artificial Sequence; identical to SEQ ID NO: 3087
  Probe

SEQ ID NO: 27575 - DNA, 26 bp, Artificial Sequence
  Probe
agaagcagcttcaaacctgccggggc

SEQ ID NO: 27576 - DNA, 27 bp, Artificial Sequence
  Probe
agaagcagcttcaaacctgccggggct

SEQ ID NO: 27577 - DNA, 28 bp, Artificial Sequence
  Probe
agaagcagcttcaaacctgccggggctt

SEQ ID NO: 27578 - DNA, 29 bp, Artificial Sequence
  Probe
agaagcagcttcaaacctgccggggcttc

SEQ ID NO: 27579 - DNA, 30 bp, Artificial Sequence; identical to SEQ ID NO: 3090
  Probe

SEQ ID NO: 27580 - DNA, 32 bp, Artificial Sequence
  Probe
agaaggacgaggtggccgagtggttaaggcga

SEQ ID NO: 27581 - DNA, 15 bp, Artificial Sequence
  Probe
agaaggtctcacttt

SEQ ID NO: 27582 - DNA, 16 bp, Artificial Sequence
  Probe
agaaggtctcactttt

SEQ ID NO: 27583 - DNA, 22 bp, Artificial Sequence
  Probe
agaatcgaacccatccctgaga

SEQ ID NO: 27584 - DNA, 33 bp, Artificial Sequence; identical to SEQ ID NO: 16127
  Probe

SEQ ID NO: 27585 - DNA, 39 bp, Artificial Sequence
  Probe
agaatcttagctttgggtgctaatggtggagttaaagac

SEQ ID NO: 27586 - DNA, 40 bp, Artificial Sequence
  Probe
agaatcttagctttgggtgctaatggtggagttaaagact

SEQ ID NO: 27587 - DNA, 50 bp, Artificial Sequence; identical to SEQ ID NO: 235
  Probe

SEQ ID NO: 27588 - DNA, 16 bp, Artificial Sequence
  Probe
agaattctcgcctgcc

SEQ ID NO: 27589 - DNA, 18 bp, Artificial Sequence
  Probe
agaattctcgcctgccac

SEQ ID NO: 27590 - DNA, 36 bp, Artificial Sequence
  Probe
agacagccggctcgttggtctaggggtatgattctc

SEQ ID NO: 27591 - DNA, 16 bp, Artificial Sequence
  Probe
agacaggggttaggcc

SEQ ID NO: 27592 - DNA, 17 bp, Artificial Sequence
  Probe
agacaggggttaggcct

SEQ ID NO: 27593 - DNA, 29 bp, Artificial Sequence
  Probe
agacaggggttaggcctctttttaccagc

SEQ ID NO: 27594 - DNA, 21 bp, Artificial Sequence
  Probe
agaccaagagccttcaaagcc

SEQ ID NO: 27595 - DNA, 24 bp, Artificial Sequence
  Probe
agacccgaggtagggctttggctg

SEQ ID NO: 27596 - DNA, 26 bp, Artificial Sequence
  Probe
agacccgaggtagggctttggctgtg

SEQ ID NO: 27597 - DNA, 27 bp, Artificial Sequence
  Probe
agacccgaggtagggctttggctgtgg

SEQ ID NO: 27598 - DNA, 29 bp, Artificial Sequence
  Probe
agacccgaggtagggctttggctgtgggg

SEQ ID NO: 27599 - DNA, 32 bp, Artificial Sequence; identical to SEQ ID NO: 3122
  Probe

SEQ ID NO: 27600 - DNA, 36 bp, Artificial Sequence
  Probe
agacgagggctccatagctcaggggttagagcgctg

SEQ ID NO: 27601 - DNA, 15 bp, Artificial Sequence
  Probe
agacgggctcacatc

SEQ ID NO: 27602 - DNA, 16 bp, Artificial Sequence
  Probe
agacgggctcacatca

SEQ ID NO: 27603 - DNA, 17 bp, Artificial Sequence
  Probe
agacgggctcacatcac

SEQ ID NO: 27604 - DNA, 18 bp, Artificial Sequence
  Probe
agacgggctcacatcacc

SEQ ID NO: 27605 - DNA, 19 bp, Artificial Sequence
  Probe
agacgggctcacatcaccc

SEQ ID NO: 27606 - DNA, 36 bp, Artificial Sequence
  Probe
agacttttaatctgagggtccagggttcaagtccct

SEQ ID NO: 27607 - DNA, 50 bp, Artificial Sequence
  Probe
agacttttaatctgagggtccagggttcaagtccctgttcgggcggcatg

SEQ ID NO: 27608 - DNA, 36 bp, Artificial Sequence
  Probe
agacttttaatctgagggtccagggttcatgtccct

SEQ ID NO: 27609 - DNA, 26 bp, Artificial Sequence
  Probe
agagaaaaagtctttaactccaccat

SEQ ID NO: 27610 - DNA, 15 bp, Artificial Sequence
  Probe
agagaaccaacacct

SEQ ID NO: 27611 - DNA, 27 bp, Artificial Sequence
  Probe
agagaaccaacacctctttacagtgaa

SEQ ID NO: 27612 - DNA, 26 bp, Artificial Sequence
  Probe
agagagaggcactggtggttcagtgg

SEQ ID NO: 27613 - DNA, 36 bp, Artificial Sequence
  Probe
agagagaggcactggtggttcagtggtagaattctc

SEQ ID NO: 27614 - DNA, 39 bp, Artificial Sequence
  Probe
agagagaggcactggtggttcagtggtagaattctcgcc

SEQ ID NO: 27615 - DNA, 40 bp, Artificial Sequence
  Probe
agagagaggcactggtggttcagtggtagaattctcgcct

SEQ ID NO: 27616 - DNA, 30 bp, Artificial Sequence
  Probe
agagagcctggatagctcagtcggtagagc

SEQ ID NO: 27617 - DNA, 31 bp, Artificial Sequence
  Probe
agagagcctggatagctcagtcggtagagca

SEQ ID NO: 27618 - DNA, 32 bp, Artificial Sequence
  Probe
agagagcctggatagctcagtcggtagagcat

SEQ ID NO: 27619 - DNA, 33 bp, Artificial Sequence
  Probe
agagagcctggatagctcagtcggtagagcatc

SEQ ID NO: 27620 - DNA, 34 bp, Artificial Sequence
  Probe
agagagcctggatagctcagtcggtagagcatca

SEQ ID NO: 27621 - DNA, 35 bp, Artificial Sequence
  Probe
agagagcctggatagctcagtcggtagagcatcag

SEQ ID NO: 27622 - DNA, 36 bp, Artificial Sequence
  Probe
agagagcctggatagctcagtcggtagagcatcaga

SEQ ID NO: 27623 - DNA, 37 bp, Artificial Sequence
  Probe
agagagcctggatagctcagtcggtagagcatcagac

SEQ ID NO: 27624 - DNA, 38 bp, Artificial Sequence
  Probe
agagagcctggatagctcagtcggtagagcatcagact

SEQ ID NO: 27625 - DNA, 36 bp, Artificial Sequence
  Probe
agagaggcactggtggttcagtggtagaattctcgc

SEQ ID NO: 27626 - DNA, 38 bp, Artificial Sequence
  Probe
agagaggcactggtggttcagtggtagaattctcgcct

SEQ ID NO: 27627 - DNA, 36 bp, Artificial Sequence
  Probe
agagaggcgttggtggtttagtggtagaattctcgc

SEQ ID NO: 27628 - DNA, 37 bp, Artificial Sequence
  Probe
agagaggcgttggtggtttagtggtagaattctcgcc

SEQ ID NO: 27629 - DNA, 38 bp, Artificial Sequence
  Probe
agagaggcgttggtggtttagtggtagaattctcgcct

SEQ ID NO: 27630 - DNA, 15 bp, Artificial Sequence
  Probe
agagcatttgactgc

SEQ ID NO: 27631 - DNA, 18 bp, Artificial Sequence
  Probe
agagcccactgtaaagct

SEQ ID NO: 27632 - DNA, 36 bp, Artificial Sequence
  Probe
agagcccagtgtagagagcctggatagctcagtcgg

SEQ ID NO: 27633 - DNA, 26 bp, Artificial Sequence
  Probe
agagcccggatagctcagtcggtaga

SEQ ID NO: 27634 - DNA, 27 bp, Artificial Sequence
  Probe
agagcccggatagctcagtcggtagag

SEQ ID NO: 27635 - DNA, 28 bp, Artificial Sequence
  Probe
agagcccggatagctcagtcggtagagc

SEQ ID NO: 27636 - DNA, 29 bp, Artificial Sequence
  Probe
agagcccggatagctcagtcggtagagca

SEQ ID NO: 27637 - DNA, 31 bp, Artificial Sequence
  Probe
agagcccggatagctcagtcggtagagcatc

SEQ ID NO: 27638 - DNA, 32 bp, Artificial Sequence
  Probe
agagcccggatagctcagtcggtagagcatca

SEQ ID NO: 27639 - DNA, 34 bp, Artificial Sequence; identical to SEQ ID NO: 16213
  Probe

SEQ ID NO: 27640 - DNA, 35 bp, Artificial Sequence
  Probe
agagcccggatagctcagtcggtagagcatcagac

SEQ ID NO: 27641 - DNA, 36 bp, Artificial Sequence; identical to SEQ ID NO: 16214
  Probe

SEQ ID NO: 27642 - DNA, 37 bp, Artificial Sequence
  Probe
agagcccggatagctcagtcggtagagcatcagactt

SEQ ID NO: 27643 - DNA, 38 bp, Artificial Sequence; identical to SEQ ID NO: 16215
  Probe

SEQ ID NO: 27644 - DNA, 39 bp, Artificial Sequence
  Probe
agagcccggatagctcagtcggtagagcatcagactttt

SEQ ID NO: 27645 - DNA, 31 bp, Artificial Sequence; identical to SEQ ID NO: 248
  Probe

SEQ ID NO: 27646 - DNA, 28 bp, Artificial Sequence
  Probe
agagcctggatagctcagtcggtagagc

SEQ ID NO: 27647 - DNA, 29 bp, Artificial Sequence
  Probe
agagcctggatagctcagtcggtagagca

SEQ ID NO: 27648 - DNA, 31 bp, Artificial Sequence
  Probe
agagcctggatagctcagtcggtagagcatc

SEQ ID NO: 27649 - DNA, 32 bp, Artificial Sequence
  Probe
agagcctggatagctcagtcggtagagcatca

SEQ ID NO: 27650 - DNA, 33 bp, Artificial Sequence
  Probe
agagcctggatagctcagtcggtagagcatcag

SEQ ID NO: 27651 - DNA, 34 bp, Artificial Sequence
  Probe
agagcctggatagctcagtcggtagagcatcaga

SEQ ID NO: 27652 - DNA, 36 bp, Artificial Sequence
  Probe
agagcctggatagctcagtcggtagagcatcagact

SEQ ID NO: 27653 - DNA, 38 bp, Artificial Sequence; identical to SEQ ID NO: 16225
  Probe

SEQ ID NO: 27654 - DNA, 16 bp, Artificial Sequence
  Probe
agagcggaggactgta

SEQ ID NO: 27655 - DNA, 17 bp, Artificial Sequence
  Probe
agagcggaggactgtag

SEQ ID NO: 27656 - DNA, 36 bp, Artificial Sequence; identical to SEQ ID NO: 16229
  Probe

SEQ ID NO: 27657 - DNA, 29 bp, Artificial Sequence
  Probe
agaggagttgtttttcctggcaaaaacct

SEQ ID NO: 27658 - DNA, 35 bp, Artificial Sequence
  Probe
agaggcactggtggttcagtggtagaattctcgcc

SEQ ID NO: 27659 - DNA, 36 bp, Artificial Sequence
  Probe
agaggcactggtggttcagtggtagaattctcgcct

SEQ ID NO: 27660 - DNA, 33 bp, Artificial Sequence
  Probe
agaggcattggtggttcagtggtagaattctcg

SEQ ID NO: 27661 - DNA, 34 bp, Artificial Sequence
  Probe
agaggcattggtggttcagtggtagaattctcgc

SEQ ID NO: 27662 - DNA, 35 bp, Artificial Sequence
  Probe
agaggcattggtggttcagtggtagaattctcgcc

SEQ ID NO: 27663 - DNA, 36 bp, Artificial Sequence
  Probe
agaggcattggtggttcagtggtagaattctcgcct

SEQ ID NO: 27664 - DNA, 36 bp, Artificial Sequence
  Probe
agaggccttggtggtgcagtggtagaattctcgcct

SEQ ID NO: 27665 - DNA, 15 bp, Artificial Sequence
  Probe
agaggcttacgaccc

SEQ ID NO: 27666 - DNA, 27 bp, Artificial Sequence
  Probe
agaggggctgtgctcgcaaggtttctt

SEQ ID NO: 27667 - DNA, 30 bp, Artificial Sequence; identical to SEQ ID NO: 16236
  Probe

SEQ ID NO: 27668 - DNA, 18 bp, Artificial Sequence
  Probe
agaggtatgattctcgct

SEQ ID NO: 27669 - DNA, 15 bp, Artificial Sequence
  Probe
agaggtcgatggatc

SEQ ID NO: 27670 - DNA, 21 bp, Artificial Sequence
  Probe
agaggtcgatggatcgaaacc

SEQ ID NO: 27671 - DNA, 18 bp, Artificial Sequence
  Probe
agagtaaataataggagc

SEQ ID NO: 27672 - DNA, 19 bp, Artificial Sequence
  Probe
agagtaaataataggagct

SEQ ID NO: 27673 - DNA, 20 bp, Artificial Sequence
  Probe
agagtaaataataggagctt

SEQ ID NO: 27674 - DNA, 26 bp, Artificial Sequence
  Probe
agagtaaataataggagcttaaaccc

SEQ ID NO: 27675 - DNA, 36 bp, Artificial Sequence
  Probe
agagtgccaggatagttcaggtggtagagcatcaga

SEQ ID NO: 27676 - DNA, 28 bp, Artificial Sequence
  Probe
agagtggcgcagcggaagcgtgctgggc

SEQ ID NO: 27677 - DNA, 29 bp, Artificial Sequence
  Probe
agagtggcgcagcggaagcgtgctgggcc

SEQ ID NO: 27678 - DNA, 30 bp, Artificial Sequence; identical to SEQ ID NO: 12668
  Probe

SEQ ID NO: 27679 - DNA, 26 bp, Artificial Sequence
  Probe
agagtgtagcttaacacaaagcaccc

SEQ ID NO: 27680 - DNA, 36 bp, Artificial Sequence
  Probe
agagtgtagcttaacacaaagcacccaacttacact

SEQ ID NO: 27681 - DNA, 36 bp, Artificial Sequence; identical to SEQ ID NO: 16268
  Probe

SEQ ID NO: 27682 - DNA, 19 bp, Artificial Sequence
  Probe
agatcaagaggtccccggt

SEQ ID NO: 27683 - DNA, 25 bp, Artificial Sequence
  Probe
agatgaaaacctttttccaaggaca

SEQ ID NO: 27684 - DNA, 36 bp, Artificial Sequence
  Probe
agatgcgttggtggtatagtggtgagcatagctgcc

SEQ ID NO: 27685 - DNA, 36 bp, Artificial Sequence
  Probe
agatggcagagcccggtaatcgcataaaacttaaaa

SEQ ID NO: 27686 - DNA, 38 bp, Artificial Sequence
  Probe
agatggcagagcccggtaatcgcataaaacttaaaact

SEQ ID NO: 27687 - DNA, 27 bp, Artificial Sequence
  Probe
agatggctcgttggtctaggggtatga

SEQ ID NO: 27688 - DNA, 32 bp, Artificial Sequence
  Probe
agatggctcgttggtctaggggtatgattctc

SEQ ID NO: 27689 - DNA, 36 bp, Artificial Sequence; identical to SEQ ID NO: 16285
  Probe

SEQ ID NO: 27690 - DNA, 19 bp, Artificial Sequence
  Probe
agattaagagaaccaacac

SEQ ID NO: 27691 - DNA, 20 bp, Artificial Sequence
  Probe
agattaagagaaccaacacc

SEQ ID NO: 27692 - DNA, 21 bp, Artificial Sequence
  Probe
agattaagagaaccaacacct

SEQ ID NO: 27693 - DNA, 22 bp, Artificial Sequence
  Probe
agattaagagaaccaacacctc

SEQ ID NO: 27694 - DNA, 23 bp, Artificial Sequence
  Probe
agattaagagaaccaacacctct

SEQ ID NO: 27695 - DNA, 33 bp, Artificial Sequence; identical to SEQ ID NO: 3177
  Probe

SEQ ID NO: 27696 - DNA, 16 bp, Artificial Sequence
  Probe
agattgtgaatctgac

SEQ ID NO: 27697 - DNA, 17 bp, Artificial Sequence
  Probe
agattgtgaatctgaca

SEQ ID NO: 27698 - DNA, 19 bp, Artificial Sequence
  Probe
agattgtgaatctgacaac

SEQ ID NO: 27699 - DNA, 20 bp, Artificial Sequence
  Probe
agattgtgaatctgacaaca

SEQ ID NO: 27700 - DNA, 22 bp, Artificial Sequence
  Probe
agattgtgaatctgacaacaga

SEQ ID NO: 27701 - DNA, 24 bp, Artificial Sequence
  Probe
agattgtgaatctgacaacagagg

SEQ ID NO: 27702 - DNA, 25 bp, Artificial Sequence
  Probe
agattgtgaatctgacaacagaggc

SEQ ID NO: 27703 - DNA, 26 bp, Artificial Sequence
  Probe
agattgtgaatctgacaacagaggct

SEQ ID NO: 27704 - DNA, 27 bp, Artificial Sequence
  Probe
agattgtgaatctgacaacagaggctt

SEQ ID NO: 27705 - DNA, 28 bp, Artificial Sequence
  Probe
agattgtgaatctgacaacagaggctta

SEQ ID NO: 27706 - DNA, 29 bp, Artificial Sequence
  Probe
agattgtgaatctgacaacagaggcttac

SEQ ID NO: 27707 - DNA, 30 bp, Artificial Sequence
  Probe
agattgtgaatctgacaacagaggcttacg

SEQ ID NO: 27708 - DNA, 31 bp, Artificial Sequence
  Probe
agattgtgaatctgacaacagaggcttacga

SEQ ID NO: 27709 - DNA, 32 bp, Artificial Sequence
  Probe
agattgtgaatctgacaacagaggcttacgac

SEQ ID NO: 27710 - DNA, 34 bp, Artificial Sequence
  Probe
agattgtgaatctgacaacagaggcttacgaccc

SEQ ID NO: 27711 - DNA, 35 bp, Artificial Sequence; identical to SEQ ID NO: 3196
  Probe

SEQ ID NO: 27712 - DNA, 37 bp, Artificial Sequence; identical to SEQ ID NO: 266
  Probe

SEQ ID NO: 27713 - DNA, 44 bp, Artificial Sequence; identical to SEQ ID NO: 3202
  Probe

SEQ ID NO: 27714 - DNA, 45 bp, Artificial Sequence
  Probe
agattgtgaatctgacaacagaggcttacgaccccttatttaccg

SEQ ID NO: 27715 - DNA, 46 bp, Artificial Sequence; identical to SEQ ID NO: 3203
  Probe

SEQ ID NO: 27716 - DNA, 24 bp, Artificial Sequence
  Probe
agatttcaacttaacttgaccgct

SEQ ID NO: 27717 - DNA, 25 bp, Artificial Sequence
  Probe
agatttcaacttaacttgaccgctc

SEQ ID NO: 27718 - DNA, 26 bp, Artificial Sequence
  Probe
agatttcaacttaacttgaccgctct

SEQ ID NO: 27719 - DNA, 27 bp, Artificial Sequence
  Probe
agatttcaacttaacttgaccgctctg

SEQ ID NO: 27720 - DNA, 28 bp, Artificial Sequence
  Probe
agatttcaacttaacttgaccgctctga

SEQ ID NO: 27721 - DNA, 29 bp, Artificial Sequence
  Probe
agatttcaacttaacttgaccgctctgag

SEQ ID NO: 27722 - DNA, 30 bp, Artificial Sequence; identical to SEQ ID NO: 3214
  Probe

SEQ ID NO: 27723 - DNA, 31 bp, Artificial Sequence; identical to SEQ ID NO: 3215
  Probe

SEQ ID NO: 27724 - DNA, 36 bp, Artificial Sequence
  Probe
agatttcaacttaacttgaccgctctgagctaaacc

SEQ ID NO: 27725 - DNA, 30 bp, Artificial Sequence
  Probe
agcaatacactgaaaatgtttagacgggct

SEQ ID NO: 27726 - DNA, 32 bp, Artificial Sequence; identical to SEQ ID NO: 3223
  Probe

SEQ ID NO: 27727 - DNA, 33 bp, Artificial Sequence; identical to SEQ ID NO: 3224
  Probe

SEQ ID NO: 27728 - DNA, 36 bp, Artificial Sequence
  Probe
agcaatacactgaaaatgtttagacgggctcacatc

SEQ ID NO: 27729 - DNA, 36 bp, Artificial Sequence; identical to SEQ ID NO: 3244
  Probe

SEQ ID NO: 27730 - DNA, 50 bp, Artificial Sequence; identical to SEQ ID NO: 3251
  Probe

SEQ ID NO: 27731 - DNA, 17 bp, Artificial Sequence
  Probe
agcactctggactctga

SEQ ID NO: 27732 - DNA, 18 bp, Artificial Sequence
  Probe
agcactctggactctgaa

SEQ ID NO: 27733 - DNA, 19 bp, Artificial Sequence
  Probe
agcactctggactctgaat

SEQ ID NO: 27734 - DNA, 20 bp, Artificial Sequence
  Probe
agcactctggactctgaatc

SEQ ID NO: 27735 - DNA, 21 bp, Artificial Sequence
  Probe
agcactctggactctgaatcc

SEQ ID NO: 27736 - DNA, 22 bp, Artificial Sequence
  Probe
agcactctggactctgaatcca

SEQ ID NO: 27737 - DNA, 25 bp, Artificial Sequence
  Probe
agcactctggactctgaatccagcg

SEQ ID NO: 27738 - DNA, 32 bp, Artificial Sequence; identical to SEQ ID NO: 3254
  Probe

SEQ ID NO: 27739 - DNA, 33 bp, Artificial Sequence
  Probe
agcactctggactctgaatccagcgatccgagt

SEQ ID NO: 27740 - DNA, 34 bp, Artificial Sequence
  Probe
agcactctggactctgaatccagcgatccgagtt

SEQ ID NO: 27741 - DNA, 36 bp, Artificial Sequence
  Probe
agcactctggactctgaatccagcgatccgagttca

SEQ ID NO: 27742 - DNA, 36 bp, Artificial Sequence
  Probe
agcactctggactctgaatccagcgatccgagttcg

SEQ ID NO: 27743 - DNA, 20 bp, Artificial Sequence
  Probe
agcactctggactttgaatc

SEQ ID NO: 27744 - DNA, 21 bp, Artificial Sequence
  Probe
agcactctggactttgaatcc

SEQ ID NO: 27745 - DNA, 33 bp, Artificial Sequence; identical to SEQ ID NO: 12675
  Probe

SEQ ID NO: 27746 - DNA, 34 bp, Artificial Sequence
  Probe
agcactctggactttgaatccagcgatccgagtt

SEQ ID NO: 27747 - DNA, 36 bp, Artificial Sequence
  Probe
agcacttcccatatggtctagcggttaggattcctg

SEQ ID NO: 27748 - DNA, 39 bp, Artificial Sequence
  Probe
agcacttcccatatggtctagcggttaggattcctggtt

SEQ ID NO: 27749 - DNA, 40 bp, Artificial Sequence; identical to SEQ ID NO: 16359
  Probe

SEQ ID NO: 27750 - DNA, 41 bp, Artificial Sequence; identical to SEQ ID NO: 16360
  Probe

SEQ ID NO: 27751 - DNA, 36 bp, Artificial Sequence
  Probe
agcagagctccagtggcgcaatcggttagcgcgcgg

SEQ ID NO: 27752 - DNA, 19 bp, Artificial Sequence
  Probe
agcagagtggcgcagcgga

SEQ ID NO: 27753 - DNA, 21 bp, Artificial Sequence
  Probe
agcagagtggcgcagcggaag

SEQ ID NO: 27754 - DNA, 23 bp, Artificial Sequence
  Probe
agcagagtggcgcagcggaagcg

SEQ ID NO: 27755 - DNA, 30 bp, Artificial Sequence; identical to SEQ ID NO: 8539
  Probe

SEQ ID NO: 27756 - DNA, 34 bp, Artificial Sequence; identical to SEQ ID NO: 278
  Probe

SEQ ID NO: 27757 - DNA, 35 bp, Artificial Sequence; identical to SEQ ID NO: 279
  Probe

SEQ ID NO: 27758 - DNA, 50 bp, Artificial Sequence; identical to SEQ ID NO: 3258
  Probe

SEQ ID NO: 27759 - DNA, 23 bp, Artificial Sequence
  Probe
agcagcttcaaacctgccggggc

SEQ ID NO: 27760 - DNA, 24 bp, Artificial Sequence
  Probe
agcagcttcaaacctgccggggct

SEQ ID NO: 27761 - DNA, 25 bp, Artificial Sequence
  Probe
agcagcttcaaacctgccggggctt

SEQ ID NO: 27762 - DNA, 27 bp, Artificial Sequence
  Probe
agcagcttcaaacctgccggggcttct

SEQ ID NO: 27763 - DNA, 15 bp, Artificial Sequence
  Probe
agcaggcttataggt

SEQ ID NO: 27764 - DNA, 36 bp, Artificial Sequence
  Probe
agcagggttgtttccgtagtgtagtggttatcacgt

SEQ ID NO: 27765 - DNA, 36 bp, Artificial Sequence
  Probe
agcaggtcccatggtgtaatggttagcactctggac

SEQ ID NO: 27766 - DNA, 50 bp, Artificial Sequence
  Probe
agcaggtcccatggtgtaatggttagcactctggactttgaatccagcga

SEQ ID NO: 27767 - DNA, 15 bp, Artificial Sequence
  Probe
agcagtcaggatggc

SEQ ID NO: 27768 - DNA, 25 bp, Artificial Sequence
  Probe
agcagtcaggatggccgagcggtct

SEQ ID NO: 27769 - DNA, 28 bp, Artificial Sequence
  Probe
agcagtcaggatggccgagcggtctaag

SEQ ID NO: 27770 - DNA, 30 bp, Artificial Sequence
  Probe
agcagtcaggatggccgagcggtctaaggc

SEQ ID NO: 27771 - DNA, 32 bp, Artificial Sequence
  Probe
agcagtcaggatggccgagcggtctaaggcgc

SEQ ID NO: 27772 - DNA, 36 bp, Artificial Sequence
  Probe
agcagtcaggatggccgagcggtctaaggcgctgcg

SEQ ID NO: 27773 - DNA, 36 bp, Artificial Sequence
  Probe
agcagttcccatatggtctagcggttaggattcctg

SEQ ID NO: 27774 - DNA, 39 bp, Artificial Sequence; identical to SEQ ID NO: 16375
  Probe

SEQ ID NO: 27775 - DNA, 19 bp, Artificial Sequence
  Probe
agcatgagactcttaatct

SEQ ID NO: 27776 - DNA, 17 bp, Artificial Sequence
  Probe
agcatgggactcttaat

SEQ ID NO: 27777 - DNA, 18 bp, Artificial Sequence
  Probe
agcatgggactcttaatc

SEQ ID NO: 27778 - DNA, 19 bp, Artificial Sequence
  Probe
agcatgggactcttaatcc

SEQ ID NO: 27779 - DNA, 35 bp, Artificial Sequence; identical to SEQ ID NO: 280
  Probe

SEQ ID NO: 27780 - DNA, 36 bp, Artificial Sequence; identical to SEQ ID NO: 281
  Probe

SEQ ID NO: 27781 - DNA, 42 bp, Artificial Sequence; identical to SEQ ID NO: 284
  Probe

SEQ ID NO: 27782 - DNA, 15 bp, Artificial Sequence
  Probe
agcattggactgtaa

SEQ ID NO: 27783 - DNA, 16 bp, Artificial Sequence
  Probe
agcattggactgtaaa

SEQ ID NO: 27784 - DNA, 18 bp, Artificial Sequence
  Probe
agcattggactgtaaatc

SEQ ID NO: 27785 - DNA, 33 bp, Artificial Sequence; identical to SEQ ID NO: 3282
  Probe

SEQ ID NO: 27786 - DNA, 36 bp, Artificial Sequence; identical to SEQ ID NO: 16406
  Probe

SEQ ID NO: 27787 - DNA, 36 bp, Artificial Sequence; identical to SEQ ID NO: 16409
  Probe

SEQ ID NO: 27788 - DNA, 36 bp, Artificial Sequence; identical to SEQ ID NO: 288
  Probe

SEQ ID NO: 27789 - DNA, 38 bp, Artificial Sequence; identical to SEQ ID NO: 16418
  Probe

SEQ ID NO: 27790 - DNA, 39 bp, Artificial Sequence; identical to SEQ ID NO: 3287
  Probe

SEQ ID NO: 27791 - DNA, 32 bp, Artificial Sequence
  Probe
agccagtagtcgtggccgagtggttaaggcga

SEQ ID NO: 27792 - DNA, 17 bp, Artificial Sequence
  Probe
agccccaaacccactcc

SEQ ID NO: 27793 - DNA, 19 bp, Artificial Sequence
  Probe
agccccaaacccactccac

SEQ ID NO: 27794 - DNA, 20 bp, Artificial Sequence
  Probe
agccccaaacccactccacc

SEQ ID NO: 27795 - DNA, 21 bp, Artificial Sequence
  Probe
agccccaaacccactccacct

SEQ ID NO: 27796 - DNA, 36 bp, Artificial Sequence; identical to SEQ ID NO: 16429
  Probe

SEQ ID NO: 27797 - DNA, 34 bp, Artificial Sequence
  Probe
agcccggctagctcagtcggtagagcatgagact

SEQ ID NO: 27798 - DNA, 36 bp, Artificial Sequence
  Probe
agcccggctagctcagtcggtagagcatgagactct

SEQ ID NO: 27799 - DNA, 34 bp, Artificial Sequence; identical to SEQ ID NO: 289
  Probe

SEQ ID NO: 27800 - DNA, 36 bp, Artificial Sequence
  Probe
agcccggctagctcagtcggtagagcatgggactct

SEQ ID NO: 27801 - DNA, 29 bp, Artificial Sequence
  Probe
agcccggtaatcgcataaaacttaaaact

SEQ ID NO: 27802 - DNA, 36 bp, Artificial Sequence
  Probe
agccctccctggtggtctagtggctaggattcggcg

SEQ ID NO: 27803 - DNA, 26 bp, Artificial Sequence
  Probe
agccgcccggctagctcagtcggtag

SEQ ID NO: 27804 - DNA, 27 bp, Artificial Sequence
  Probe
agccgcccggctagctcagtcggtaga

SEQ ID NO: 27805 - DNA, 28 bp, Artificial Sequence
  Probe
agccgcccggctagctcagtcggtagag

SEQ ID NO: 27806 - DNA, 36 bp, Artificial Sequence
  Probe
agccgcgcattggtggttcagtggtagaattctcgc

SEQ ID NO: 27807 - DNA, 37 bp, Artificial Sequence
  Probe
agccgcgcattggtggttcagtggtagaattctcgcc

SEQ ID NO: 27808 - DNA, 38 bp, Artificial Sequence
  Probe
agccgcgcattggtggttcagtggtagaattctcgcct

SEQ ID NO: 27809 - DNA, 36 bp, Artificial Sequence
  Probe
agccggagaccgcgtggcctaatggataaggcgtct

SEQ ID NO: 27810 - DNA, 20 bp, Artificial Sequence
  Probe
agccggctcgttggtctagg

SEQ ID NO: 27811 - DNA, 29 bp, Artificial Sequence
  Probe
agccggctcgttggtctaggggtatgatt

SEQ ID NO: 27812 - DNA, 32 bp, Artificial Sequence
  Probe
agccggctcgttggtctaggggtatgattctc

SEQ ID NO: 27813 - DNA, 33 bp, Artificial Sequence; identical to SEQ ID NO: 16454
  Probe

SEQ ID NO: 27814 - DNA, 34 bp, Artificial Sequence; identical to SEQ ID NO: 16455
  Probe

SEQ ID NO: 27815 - DNA, 35 bp, Artificial Sequence
  Probe
agccggctcgttggtctaggggtatgattctcgct

SEQ ID NO: 27816 - DNA, 36 bp, Artificial Sequence
  Probe
agccggctcgttggtctaggggtatgattctcgctt

SEQ ID NO: 27817 - DNA, 37 bp, Artificial Sequence; identical to SEQ ID NO: 16456
  Probe

SEQ ID NO: 27818 - DNA, 23 bp, Artificial Sequence
  Probe
agccggctctgtggcgcaatgga

SEQ ID NO: 27819 - DNA, 30 bp, Artificial Sequence
  Probe
agccggctctgtggcgcaatggatagcgca

SEQ ID NO: 27820 - DNA, 31 bp, Artificial Sequence
  Probe
agccggctctgtggcgcaatggatagcgcat

SEQ ID NO: 27821 - DNA, 36 bp, Artificial Sequence
  Probe
agccggctctgtggcgcaatggatagcgcattggac

SEQ ID NO: 27822 - DNA, 18 bp, Artificial Sequence
  Probe
agccgtaaggcggctgtt

SEQ ID NO: 27823 - DNA, 36 bp, Artificial Sequence
  Probe
agccttcaaagccctcagtaagttgcaatacttaat

SEQ ID NO: 27824 - DNA, 15 bp, Artificial Sequence
  Probe
agcctttctattagc

SEQ ID NO: 27825 - DNA, 19 bp, Artificial Sequence
  Probe
agcgcaagtaggtctacaa

SEQ ID NO: 27826 - DNA, 36 bp, Artificial Sequence
  Probe
agcgcccggatagctcagtcggtagagcatcagact

SEQ ID NO: 27827 - DNA, 25 bp, Artificial Sequence
  Probe
agcgcgttcggctgttaaccgaaag

SEQ ID NO: 27828 - DNA, 36 bp, Artificial Sequence
  Probe
agcgcgttcggctgttaaccgaaaggttggtggttc

SEQ ID NO: 27829 - DNA, 19 bp, Artificial Sequence
  Probe
agcggaagcgtgctgggcc

SEQ ID NO: 27830 - DNA, 20 bp, Artificial Sequence
  Probe
agcggaagcgtgctgggccc

SEQ ID NO: 27831 - DNA, 18 bp, Artificial Sequence
  Probe
agcggagccttcgatagc

SEQ ID NO: 27832 - DNA, 20 bp, Artificial Sequence
  Probe
agcggagccttcgatagctc

SEQ ID NO: 27833 - DNA, 36 bp, Artificial Sequence; identical to SEQ ID NO: 16492
  Probe

SEQ ID NO: 27834 - DNA, 39 bp, Artificial Sequence; identical to SEQ ID NO: 16494
  Probe

SEQ ID NO: 27835 - DNA, 40 bp, Artificial Sequence
  Probe
agcggagccttcgatagctcagttggtagagcggaggact

SEQ ID NO: 27836 - DNA, 43 bp, Artificial Sequence; identical to SEQ ID NO: 16496
  Probe

SEQ ID NO: 27837 - DNA, 15 bp, Artificial Sequence
  Probe
agcggcctctggtgg

SEQ ID NO: 27838 - DNA, 33 bp, Artificial Sequence
  Probe
agcggcctctggtggcgtgccgtgatcgtatag

SEQ ID NO: 27839 - DNA, 17 bp, Artificial Sequence
  Probe
agcgggtgctcttattt

SEQ ID NO: 27840 - DNA, 18 bp, Artificial Sequence
  Probe
agcgggtgctcttatttt

SEQ ID NO: 27841 - DNA, 31 bp, Artificial Sequence; identical to SEQ ID NO: 3315
  Probe

SEQ ID NO: 27842 - DNA, 20 bp, Artificial Sequence
  Probe
agctaaataagctatcgggc

SEQ ID NO: 27843 - DNA, 21 bp, Artificial Sequence
  Probe
agctaaataagctatcgggcc

SEQ ID NO: 27844 - DNA, 22 bp, Artificial Sequence
  Probe
agctaaataagctatcgggccc

SEQ ID NO: 27845 - DNA, 23 bp, Artificial Sequence
  Probe
agctaaataagctatcgggccca

SEQ ID NO: 27846 - DNA, 24 bp, Artificial Sequence
  Probe
agctaaataagctatcgggcccat

SEQ ID NO: 27847 - DNA, 27 bp, Artificial Sequence
  Probe
agctaaataagctatcgggcccatacc

SEQ ID NO: 27848 - DNA, 19 bp, Artificial Sequence
  Probe
agctaaggactgcaaaacc

SEQ ID NO: 27849 - DNA, 20 bp, Artificial Sequence
  Probe
agctaaggactgcaaaaccc

SEQ ID NO: 27850 - DNA, 21 bp, Artificial Sequence
  Probe
agctaaggactgcaaaacccc

SEQ ID NO: 27851 - DNA, 24 bp, Artificial Sequence
  Probe
agctaaggactgcaaaaccccact

SEQ ID NO: 27852 - DNA, 26 bp, Artificial Sequence
  Probe
agctaaggactgcaaaaccccactct

SEQ ID NO: 27853 - DNA, 36 bp, Artificial Sequence
  Probe
agctacagtggctcgttggtctaggggtatgattct

SEQ ID NO: 27854 - DNA, 16 bp, Artificial Sequence
  Probe
agctatagggtggaga

SEQ ID NO: 27855 - DNA, 15 bp, Artificial Sequence
  Probe
agctatccattggtc

SEQ ID NO: 27856 - DNA, 16 bp, Artificial Sequence
  Probe
agctatccattggtct

SEQ ID NO: 27857 - DNA, 23 bp, Artificial Sequence
  Probe
agctatccattggtcttaggccc

SEQ ID NO: 27858 - DNA, 24 bp, Artificial Sequence
  Probe
agctatccattggtcttaggcccc

SEQ ID NO: 27859 - DNA, 36 bp, Artificial Sequence
  Probe
agctatccattggtcttaggccccaaaaattttggt

SEQ ID NO: 27860 - DNA, 15 bp, Artificial Sequence
  Probe
agctatcgggcccat

SEQ ID NO: 27861 - DNA, 16 bp, Artificial Sequence
  Probe
agctatcgggcccata

SEQ ID NO: 27862 - DNA, 18 bp, Artificial Sequence
  Probe
agctatcgggcccatacc

SEQ ID NO: 27863 - DNA, 19 bp, Artificial Sequence
  Probe
agctatcgggcccataccc

SEQ ID NO: 27864 - DNA, 20 bp, Artificial Sequence
  Probe
agctatcgggcccatacccc

SEQ ID NO: 27865 - DNA, 33 bp, Artificial Sequence; identical to SEQ ID NO: 3340
  Probe

SEQ ID NO: 27866 - DNA, 36 bp, Artificial Sequence
  Probe
agctatcgggcccataccccgaaaatgttggttata

SEQ ID NO: 27867 - DNA, 15 bp, Artificial Sequence
  Probe
agctcacaagaactg

SEQ ID NO: 27868 - DNA, 25 bp, Artificial Sequence
  Probe
agctcacaagaactgctaactcatg

SEQ ID NO: 27869 - DNA, 27 bp, Artificial Sequence
  Probe
agctcacaagaactgctaactcatgcc

SEQ ID NO: 27870 - DNA, 40 bp, Artificial Sequence
  Probe
agctcacaagaactgctaactcatgcccccatgtctaaca

SEQ ID NO: 27871 - DNA, 36 bp, Artificial Sequence
  Probe
agctcagctggtagagcggaggactgtagcctgtag

SEQ ID NO: 27872 - DNA, 25 bp, Artificial Sequence
  Probe
agctcaggggttagagcactggtct

SEQ ID NO: 27873 - DNA, 15 bp, Artificial Sequence
  Probe
agctcagtcggtaga

SEQ ID NO: 27874 - DNA, 16 bp, Artificial Sequence
  Probe
agctcagtcggtagag

SEQ ID NO: 27875 - DNA, 17 bp, Artificial Sequence
  Probe
agctcagtcggtagagc

SEQ ID NO: 27876 - DNA, 25 bp, Artificial Sequence
  Probe
agctcagtcggtagagcatcagact

SEQ ID NO: 27877 - DNA, 24 bp, Artificial Sequence
  Probe
agctcagtcggtagagcatgagac

SEQ ID NO: 27878 - DNA, 25 bp, Artificial Sequence
  Probe
agctcagtcggtagagcatgagact

SEQ ID NO: 27879 - DNA, 27 bp, Artificial Sequence
  Probe
agctcagtcggtagagcatgagactct

SEQ ID NO: 27880 - DNA, 24 bp, Artificial Sequence
  Probe
agctcagtcggtagagcatgggac

SEQ ID NO: 27881 - DNA, 27 bp, Artificial Sequence
  Probe
agctcagtcggtagagcatgggactct

SEQ ID NO: 27882 - DNA, 19 bp, Artificial Sequence
  Probe
agctccgaggtgattttca

SEQ ID NO: 27883 - DNA, 31 bp, Artificial Sequence; identical to SEQ ID NO: 315
  Probe

SEQ ID NO: 27884 - DNA, 36 bp, Artificial Sequence; identical to SEQ ID NO: 16561
  Probe

SEQ ID NO: 27885 - DNA, 25 bp, Artificial Sequence
  Probe
agctggagcattggtggttcagtgg

SEQ ID NO: 27886 - DNA, 36 bp, Artificial Sequence; identical to SEQ ID NO: 16572
  Probe

SEQ ID NO: 27887 - DNA, 38 bp, Artificial Sequence
  Probe
agctggggattgtgggttcgagtcccatctgggtcgcg

SEQ ID NO: 27888 - DNA, 33 bp, Artificial Sequence
  Probe
agctgggtagcgtggccgagcggtctaaggcgc

SEQ ID NO: 27889 - DNA, 19 bp, Artificial Sequence
  Probe
agctgtagtcgtggccgag

SEQ ID NO: 27890 - DNA, 21 bp, Artificial Sequence
  Probe
agctgtagtcgtggccgagtg

SEQ ID NO: 27891 - DNA, 36 bp, Artificial Sequence
  Probe
agctgtagtcgtggccgagtggttaaggcgatggac

SEQ ID NO: 27892 - DNA, 36 bp, Artificial Sequence
  Probe
agctgttaactaagtgtttgtgggtttaagtcccat

SEQ ID NO: 27893 - DNA, 36 bp, Artificial Sequence; identical to SEQ ID NO: 16596
  Probe

SEQ ID NO: 27894 - DNA, 15 bp, Artificial Sequence
  Probe
agctttggggggttc

SEQ ID NO: 27895 - DNA, 16 bp, Artificial Sequence
  Probe
agctttggggggttcg

SEQ ID NO: 27896 - DNA, 19 bp, Artificial Sequence
  Probe
agctttggggggttcgatt

SEQ ID NO: 27897 - DNA, 20 bp, Artificial Sequence
  Probe
agctttggggggttcgattc

SEQ ID NO: 27898 - DNA, 21 bp, Artificial Sequence
  Probe
agctttggggggttcgattcc

SEQ ID NO: 27899 - DNA, 22 bp, Artificial Sequence
  Probe
agctttggggggttcgattcct

SEQ ID NO: 27900 - DNA, 32 bp, Artificial Sequence
  Probe
agctttgggtgctaatggtggagttaaagact

SEQ ID NO: 27901 - DNA, 22 bp, Artificial Sequence
  Probe
aggaaagagagctagcaccgga

SEQ ID NO: 27902 - DNA, 36 bp, Artificial Sequence
  Probe
aggaagcccggctagctcagtcgatagagcatgaga

SEQ ID NO: 27903 - DNA, 36 bp, Artificial Sequence
  Probe
aggaagggggtgtagctcagtggtagagcgcatgct

SEQ ID NO: 27904 - DNA, 36 bp, Artificial Sequence
  Probe
aggaagtcaggatggccgagcggtctaaggcgctgc

SEQ ID NO: 27905 - DNA, 16 bp, Artificial Sequence
  Probe
aggaagtcctgtgctc

SEQ ID NO: 27906 - DNA, 36 bp, Artificial Sequence
  Probe
aggacaaatcagagaaaaagtctttaactccaccat

SEQ ID NO: 27907 - DNA, 36 bp, Artificial Sequence; identical to SEQ ID NO: 16617
  Probe

SEQ ID NO: 27908 - DNA, 36 bp, Artificial Sequence
  Probe
aggacgaggtggccgagtggttaaggcgatggactg

SEQ ID NO: 27909 - DNA, 15 bp, Artificial Sequence
  Probe
aggactatgagaatc

SEQ ID NO: 27910 - DNA, 16 bp, Artificial Sequence
  Probe
aggactatgagaatcg

SEQ ID NO: 27911 - DNA, 19 bp, Artificial Sequence
  Probe
aggactatgagaatcgaac

SEQ ID NO: 27912 - DNA, 20 bp, Artificial Sequence
  Probe
aggactatgagaatcgaacc

SEQ ID NO: 27913 - DNA, 21 bp, Artificial Sequence
  Probe
aggactatgagaatcgaaccc

SEQ ID NO: 27914 - DNA, 24 bp, Artificial Sequence
  Probe
aggactatgagaatcgaacccatc

SEQ ID NO: 27915 - DNA, 25 bp, Artificial Sequence
  Probe
aggactatgagaatcgaacccatcc

SEQ ID NO: 27916 - DNA, 26 bp, Artificial Sequence
  Probe
aggactatgagaatcgaacccatccc

SEQ ID NO: 27917 - DNA, 31 bp, Artificial Sequence
  Probe
aggactatgagaatcgaacccatccctgaga

SEQ ID NO: 27918 - DNA, 15 bp, Artificial Sequence
  Probe
aggactgcaaaaccc

SEQ ID NO: 27919 - DNA, 16 bp, Artificial Sequence
  Probe
aggactgcaaaacccc

SEQ ID NO: 27920 - DNA, 21 bp, Artificial Sequence
  Probe
aggactgcaaaaccccactct

SEQ ID NO: 27921 - DNA, 15 bp, Artificial Sequence
  Probe
aggagatcctgggtt

SEQ ID NO: 27922 - DNA, 24 bp, Artificial Sequence
  Probe
aggagatttcaacttaacttgacc

SEQ ID NO: 27923 - DNA, 25 bp, Artificial Sequence
  Probe
aggagatttcaacttaacttgaccg

SEQ ID NO: 27924 - DNA, 27 bp, Artificial Sequence
  Probe
aggagatttcaacttaacttgaccgct

SEQ ID NO: 27925 - DNA, 28 bp, Artificial Sequence
  Probe
aggagatttcaacttaacttgaccgctc

SEQ ID NO: 27926 - DNA, 29 bp, Artificial Sequence
  Probe
aggagatttcaacttaacttgaccgctct

SEQ ID NO: 27927 - DNA, 30 bp, Artificial Sequence; identical to SEQ ID NO: 3410
  Probe

SEQ ID NO: 27928 - DNA, 31 bp, Artificial Sequence; identical to SEQ ID NO: 3411
  Probe

SEQ ID NO: 27929 - DNA, 32 bp, Artificial Sequence; identical to SEQ ID NO: 3412
  Probe

SEQ ID NO: 27930 - DNA, 33 bp, Artificial Sequence; identical to SEQ ID NO: 3413
  Probe

SEQ ID NO: 27931 - DNA, 36 bp, Artificial Sequence
  Probe
aggagatttcaacttaacttgaccgctctgagctaa

SEQ ID NO: 27932 - DNA, 32 bp, Artificial Sequence
  Probe
aggagcctgggtagctcagtcggtagagcatc

SEQ ID NO: 27933 - DNA, 33 bp, Artificial Sequence
  Probe
aggagcctgggtagctcagtcggtagagcatca

SEQ ID NO: 27934 - DNA, 36 bp, Artificial Sequence
  Probe
aggagcctgggtagctcagtcggtagagcatcagac

SEQ ID NO: 27935 - DNA, 39 bp, Artificial Sequence
  Probe
aggagcctgggtagctcagtcggtagagcatcagacttt

SEQ ID NO: 27936 - DNA, 15 bp, Artificial Sequence
  Probe
aggagcttaaacccc

SEQ ID NO: 27937 - DNA, 36 bp, Artificial Sequence
  Probe
aggagcttaaacccccttatttctaggactatgaga

SEQ ID NO: 27938 - DNA, 22 bp, Artificial Sequence
  Probe
aggataacagctatccattggt

SEQ ID NO: 27939 - DNA, 24 bp, Artificial Sequence
  Probe
aggataacagctatccattggtct

SEQ ID NO: 27940 - DNA, 25 bp, Artificial Sequence
  Probe
aggataacagctatccattggtctt

SEQ ID NO: 27941 - DNA, 26 bp, Artificial Sequence
  Probe
aggataacagctatccattggtctta

SEQ ID NO: 27942 - DNA, 27 bp, Artificial Sequence
  Probe
aggataacagctatccattggtcttag

SEQ ID NO: 27943 - DNA, 30 bp, Artificial Sequence
  Probe
aggataacagctatccattggtcttaggcc

SEQ ID NO: 27944 - DNA, 31 bp, Artificial Sequence
  Probe
aggataacagctatccattggtcttaggccc

SEQ ID NO: 27945 - DNA, 32 bp, Artificial Sequence
  Probe
aggataacagctatccattggtcttaggcccc

SEQ ID NO: 27946 - DNA, 36 bp, Artificial Sequence
  Probe
aggataacagctatccattggtcttaggccccaaaa

SEQ ID NO: 27947 - DNA, 17 bp, Artificial Sequence
  Probe
aggatggccgagcggtc

SEQ ID NO: 27948 - DNA, 18 bp, Artificial Sequence
  Probe
aggatggccgagcggtct

SEQ ID NO: 27949 - DNA, 19 bp, Artificial Sequence
  Probe
aggatggccgagcggtcta

SEQ ID NO: 27950 - DNA, 21 bp, Artificial Sequence
  Probe
aggatggccgagcggtctaag

SEQ ID NO: 27951 - DNA, 23 bp, Artificial Sequence
  Probe
aggatggccgagcggtctaaggc

SEQ ID NO: 27952 - DNA, 28 bp, Artificial Sequence
  Probe
aggatggccgagcggtctaaggcgctgc

SEQ ID NO: 27953 - DNA, 29 bp, Artificial Sequence
  Probe
aggatggggtgtgataggtggcacggaga

SEQ ID NO: 27954 - DNA, 30 bp, Artificial Sequence
  Probe
aggatggggtgtgataggtggcacggagaa

SEQ ID NO: 27955 - DNA, 31 bp, Artificial Sequence
  Probe
aggatggggtgtgataggtggcacggagaat

SEQ ID NO: 27956 - DNA, 32 bp, Artificial Sequence
  Probe
aggatggggtgtgataggtggcacggagaatt

SEQ ID NO: 27957 - DNA, 35 bp, Artificial Sequence; identical to SEQ ID NO: 16657
  Probe

SEQ ID NO: 27958 - DNA, 36 bp, Artificial Sequence
  Probe
aggatggggtgtgataggtggcacggagaattttgg

SEQ ID NO: 27959 - DNA, 16 bp, Artificial Sequence
  Probe
aggattagactgaacc

SEQ ID NO: 27960 - DNA, 15 bp, Artificial Sequence
  Probe
aggattcggcgctct

SEQ ID NO: 27961 - DNA, 16 bp, Artificial Sequence
  Probe
aggattcggcgctctc

SEQ ID NO: 27962 - DNA, 19 bp, Artificial Sequence
  Probe
aggattcggcgctctcacc

SEQ ID NO: 27963 - DNA, 30 bp, Artificial Sequence; identical to SEQ ID NO: 16665
  Probe

SEQ ID NO: 27964 - DNA, 32 bp, Artificial Sequence
  Probe
aggattcggcgctctcaccgccgcggcccggg

SEQ ID NO: 27965 - DNA, 33 bp, Artificial Sequence
  Probe
aggattcggcgctctcaccgccgcggcccgggt

SEQ ID NO: 27966 - DNA, 36 bp, Artificial Sequence
  Probe
aggattcggcgctctcaccgccgcggcccgggttcg

SEQ ID NO: 27967 - DNA, 21 bp, Artificial Sequence
  Probe
aggcaggggccagtggcgcaa

SEQ ID NO: 27968 - DNA, 32 bp, Artificial Sequence
  Probe
aggcattggtggttcagtggtagaattctcgc

SEQ ID NO: 27969 - DNA, 36 bp, Artificial Sequence
  Probe
aggcctcgtggcgcaacggtagcgcgtctgactcca

SEQ ID NO: 27970 - DNA, 16 bp, Artificial Sequence
  Probe
aggcgatcacgtagat

SEQ ID NO: 27971 - DNA, 17 bp, Artificial Sequence
  Probe
aggcgatcacgtagatt

SEQ ID NO: 27972 - DNA, 18 bp, Artificial Sequence
  Probe
aggcgatcacgtagattt

SEQ ID NO: 27973 - DNA, 19 bp, Artificial Sequence
  Probe
aggcgatcacgtagatttt

SEQ ID NO: 27974 - DNA, 20 bp, Artificial Sequence
  Probe
aggcgatcacgtagattttg

SEQ ID NO: 27975 - DNA, 26 bp, Artificial Sequence
  Probe
aggcgcccggctagctcagtcggtag

SEQ ID NO: 27976 - DNA, 36 bp, Artificial Sequence; identical to SEQ ID NO: 16675
  Probe

SEQ ID NO: 27977 - DNA, 50 bp, Artificial Sequence
  Probe
aggcgcccggctagctcagtcggtagagcatgggactcttaatcccaggg

SEQ ID NO: 27978 - DNA, 28 bp, Artificial Sequence
  Probe
aggcggcccgggttcgactcccggtgtg

SEQ ID NO: 27979 - DNA, 33 bp, Artificial Sequence; identical to SEQ ID NO: 327
  Probe

SEQ ID NO: 27980 - DNA, 34 bp, Artificial Sequence; identical to SEQ ID NO: 16680
  Probe

SEQ ID NO: 27981 - DNA, 20 bp, Artificial Sequence
  Probe
aggcggccggttagctcagt

SEQ ID NO: 27982 - DNA, 23 bp, Artificial Sequence
  Probe
aggcggccggttagctcagttgg

SEQ ID NO: 27983 - DNA, 36 bp, Artificial Sequence
  Probe
aggcggccggttagctcagttggttagagcgtggtg

SEQ ID NO: 27984 - DNA, 36 bp, Artificial Sequence
  Probe
aggcggctcgttggtctaggggtatgattctcgctt

SEQ ID NO: 27985 - DNA, 17 bp, Artificial Sequence
  Probe
aggctgtcagctcttcc

SEQ ID NO: 27986 - DNA, 23 bp, Artificial Sequence
  Probe
aggcttacgaccccttatttacc

SEQ ID NO: 27987 - DNA, 24 bp, Artificial Sequence
  Probe
aggcttacgaccccttatttaccg

SEQ ID NO: 27988 - DNA, 24 bp, Artificial Sequence
  Probe
agggagcccggatagctcagtcgg

SEQ ID NO: 27989 - DNA, 25 bp, Artificial Sequence
  Probe
agggagcccggatagctcagtcggt

SEQ ID NO: 27990 - DNA, 26 bp, Artificial Sequence
  Probe
agggagcccggatagctcagtcggta

SEQ ID NO: 27991 - DNA, 27 bp, Artificial Sequence
  Probe
agggagcccggatagctcagtcggtag

SEQ ID NO: 27992 - DNA, 28 bp, Artificial Sequence
  Probe
agggagcccggatagctcagtcggtaga

SEQ ID NO: 27993 - DNA, 29 bp, Artificial Sequence
  Probe
agggagcccggatagctcagtcggtagag

SEQ ID NO: 27994 - DNA, 30 bp, Artificial Sequence; identical to SEQ ID NO: 16688
  Probe

SEQ ID NO: 27995 - DNA, 31 bp, Artificial Sequence; identical to SEQ ID NO: 16689
  Probe

SEQ ID NO: 27996 - DNA, 33 bp, Artificial Sequence
  Probe
agggagcccggatagctcagtcggtagagcatc

SEQ ID NO: 27997 - DNA, 34 bp, Artificial Sequence
  Probe
agggagcccggatagctcagtcggtagagcatca

SEQ ID NO: 27998 - DNA, 35 bp, Artificial Sequence
  Probe
agggagcccggatagctcagtcggtagagcatcag

SEQ ID NO: 27999 - DNA, 36 bp, Artificial Sequence; identical to SEQ ID NO: 16690
  Probe

SEQ ID NO: 28000 - DNA, 37 bp, Artificial Sequence; identical to SEQ ID NO: 16691
  Probe

SEQ ID NO: 28001 - DNA, 38 bp, Artificial Sequence; identical to SEQ ID NO: 16692
  Probe

SEQ ID NO: 28002 - DNA, 39 bp, Artificial Sequence
  Probe
agggagcccggatagctcagtcggtagagcatcagactt

SEQ ID NO: 28003 - DNA, 40 bp, Artificial Sequence; identical to SEQ ID NO: 16693
  Probe

SEQ ID NO: 28004 - DNA, 41 bp, Artificial Sequence; identical to SEQ ID NO: 16694
  Probe

SEQ ID NO: 28005 - DNA, 42 bp, Artificial Sequence; identical to SEQ ID NO: 16695
  Probe

SEQ ID NO: 28006 - DNA, 43 bp, Artificial Sequence
  Probe
agggagcccggatagctcagtcggtagagcatcagacttttaa

SEQ ID NO: 28007 - DNA, 44 bp, Artificial Sequence
  Probe
agggagcccggatagctcagtcggtagagcatcagacttttaat

SEQ ID NO: 28008 - DNA, 45 bp, Artificial Sequence
  Probe
agggagcccggatagctcagtcggtagagcatcagacttttaatc

SEQ ID NO: 28009 - DNA, 15 bp, Artificial Sequence
  Probe
agggaggttatgatt

SEQ ID NO: 28010 - DNA, 16 bp, Artificial Sequence
  Probe
agggaggttatgatta

SEQ ID NO: 28011 - DNA, 19 bp, Artificial Sequence
  Probe
agggaggttatgattaact

SEQ ID NO: 28012 - DNA, 20 bp, Artificial Sequence
  Probe
agggaggttatgattaactt

SEQ ID NO: 28013 - DNA, 21 bp, Artificial Sequence
  Probe
agggaggttatgattaacttt

SEQ ID NO: 28014 - DNA, 22 bp, Artificial Sequence
  Probe
agggaggttatgattaactttt

SEQ ID NO: 28015 - DNA, 32 bp, Artificial Sequence
  Probe
agggaggttccatggtgtaatggttagcactc

SEQ ID NO: 28016 - DNA, 26 bp, Artificial Sequence
  Probe
agggatgggttcgattctcatagtcc

SEQ ID NO: 28017 - DNA, 27 bp, Artificial Sequence
  Probe
agggatgggttcgattctcatagtcct

SEQ ID NO: 28018 - DNA, 32 bp, Artificial Sequence
  Probe
agggattgtgggttcgagtcccacccggggta

SEQ ID NO: 28019 - DNA, 32 bp, Artificial Sequence
  Probe
agggattgtgggttcgagtcccacctggggta

SEQ ID NO: 28020 - DNA, 34 bp, Artificial Sequence
  Probe
agggattgtgggttcgagtcccatctggggtggc

SEQ ID NO: 28021 - DNA, 36 bp, Artificial Sequence
  Probe
agggcctggatagctcagttggtagaacatcagact

SEQ ID NO: 28022 - DNA, 35 bp, Artificial Sequence
  Probe
agggcttctgtagtgtagtggttatcacgttcgcc

SEQ ID NO: 28023 - DNA, 36 bp, Artificial Sequence
  Probe
agggcttctgtagtgtagtggttatcacgttcgcct

SEQ ID NO: 28024 - DNA, 17 bp, Artificial Sequence
  Probe
aggggcccggatagctc

SEQ ID NO: 28025 - DNA, 23 bp, Artificial Sequence
  Probe
aggggcccggatagctcagtcgg

SEQ ID NO: 28026 - DNA, 24 bp, Artificial Sequence
  Probe
aggggcccggatagctcagtcggt

SEQ ID NO: 28027 - DNA, 25 bp, Artificial Sequence
  Probe
aggggcccggatagctcagtcggta

SEQ ID NO: 28028 - DNA, 26 bp, Artificial Sequence
  Probe
aggggcccggatagctcagtcggtag

SEQ ID NO: 28029 - DNA, 27 bp, Artificial Sequence
  Probe
aggggcccggatagctcagtcggtaga

SEQ ID NO: 28030 - DNA, 28 bp, Artificial Sequence
  Probe
aggggcccggatagctcagtcggtagag

SEQ ID NO: 28031 - DNA, 29 bp, Artificial Sequence
  Probe
aggggcccggatagctcagtcggtagagc

SEQ ID NO: 28032 - DNA, 30 bp, Artificial Sequence; identical to SEQ ID NO: 16710
  Probe

SEQ ID NO: 28033 - DNA, 32 bp, Artificial Sequence
  Probe
aggggcccggatagctcagtcggtagagcatc

SEQ ID NO: 28034 - DNA, 33 bp, Artificial Sequence
  Probe
aggggcccggatagctcagtcggtagagcatca

SEQ ID NO: 28035 - DNA, 34 bp, Artificial Sequence
  Probe
aggggcccggatagctcagtcggtagagcatcag

SEQ ID NO: 28036 - DNA, 35 bp, Artificial Sequence; identical to SEQ ID NO: 16711
  Probe

SEQ ID NO: 28037 - DNA, 36 bp, Artificial Sequence; identical to SEQ ID NO: 16712
  Probe

SEQ ID NO: 28038 - DNA, 37 bp, Artificial Sequence; identical to SEQ ID NO: 16713
  Probe

SEQ ID NO: 28039 - DNA, 38 bp, Artificial Sequence; identical to SEQ ID NO: 16714
  Probe

SEQ ID NO: 28040 - DNA, 39 bp, Artificial Sequence; identical to SEQ ID NO: 16715
  Probe

SEQ ID NO: 28041 - DNA, 40 bp, Artificial Sequence; identical to SEQ ID NO: 16716
  Probe

SEQ ID NO: 28042 - DNA, 41 bp, Artificial Sequence; identical to SEQ ID NO: 16717
  Probe

SEQ ID NO: 28043 - DNA, 42 bp, Artificial Sequence
  Probe
aggggcccggatagctcagtcggtagagcatcagacttttaa

SEQ ID NO: 28044 - DNA, 43 bp, Artificial Sequence
  Probe
aggggcccggatagctcagtcggtagagcatcagacttttaat

SEQ ID NO: 28045 - DNA, 44 bp, Artificial Sequence
  Probe
aggggcccggatagctcagtcggtagagcatcagacttttaatc

SEQ ID NO: 28046 - DNA, 15 bp, Artificial Sequence
  Probe
aggggtatgattctc

SEQ ID NO: 28047 - DNA, 17 bp, Artificial Sequence
  Probe
aggggtatgattctcgc

SEQ ID NO: 28048 - DNA, 18 bp, Artificial Sequence
  Probe
aggggtatgattctcgct

SEQ ID NO: 28049 - DNA, 19 bp, Artificial Sequence
  Probe
aggggtatgattctcgctt

SEQ ID NO: 28050 - DNA, 17 bp, Artificial Sequence
  Probe
aggggtatgattctcgg

SEQ ID NO: 28051 - DNA, 25 bp, Artificial Sequence
  Probe
aggggttaggcctctttttaccagc

SEQ ID NO: 28052 - DNA, 36 bp, Artificial Sequence
  Probe
agggtaggggatgtagctcagtggtagagcgcatgc

SEQ ID NO: 28053 - DNA, 21 bp, Artificial Sequence
  Probe
agggtgcgagaggtcccgggt

SEQ ID NO: 28054 - DNA, 22 bp, Artificial Sequence
  Probe
agggtgcgagaggtcccgggtt

SEQ ID NO: 28055 - DNA, 20 bp, Artificial Sequence
  Probe
agggtgcttagctgttaact

SEQ ID NO: 28056 - DNA, 36 bp, Artificial Sequence
  Probe
agggtgcttagctgttaactaagtgtttgtgggttt

SEQ ID NO: 28057 - DNA, 15 bp, Artificial Sequence
  Probe
agggtgtgcgtgttt

SEQ ID NO: 28058 - DNA, 16 bp, Artificial Sequence
  Probe
agggtgtgcgtgtttt

SEQ ID NO: 28059 - DNA, 17 bp, Artificial Sequence
  Probe
agggtgtgcgtgttttt

SEQ ID NO: 28060 - DNA, 18 bp, Artificial Sequence
  Probe
agggtgtgcgtgtttttt

SEQ ID NO: 28061 - DNA, 19 bp, Artificial Sequence
  Probe
agggtgtgcgtgttttttt

SEQ ID NO: 28062 - DNA, 20 bp, Artificial Sequence
  Probe
agggtgtgcgtgtttttttt

SEQ ID NO: 28063 - DNA, 21 bp, Artificial Sequence
  Probe
agggtgtgcgtgttttttttt

SEQ ID NO: 28064 - DNA, 36 bp, Artificial Sequence
  Probe
agggttcaagtccctgttcaggcgaacttcagaagt

SEQ ID NO: 28065 - DNA, 23 bp, Artificial Sequence
  Probe
agggttcaagtccctgttcgggc

SEQ ID NO: 28066 - DNA, 24 bp, Artificial Sequence
  Probe
agggttcaagtccctgttcgggcg

SEQ ID NO: 28067 - DNA, 27 bp, Artificial Sequence
  Probe
agggttcaagtccctgttcgggcggca

SEQ ID NO: 28068 - DNA, 36 bp, Artificial Sequence
  Probe
agggttcaagtccctgttcgggcgtttgtagttttc

SEQ ID NO: 28069 - DNA, 15 bp, Artificial Sequence
  Probe
agggttgctgtcttt

SEQ ID NO: 28070 - DNA, 16 bp, Artificial Sequence
  Probe
agggttgctgtctttt

SEQ ID NO: 28071 - DNA, 36 bp, Artificial Sequence
  Probe
agggttgtttccgtagtgtagtggttatcacgttcg

SEQ ID NO: 28072 - DNA, 33 bp, Artificial Sequence
  Probe
aggtaaaatggctgagtgaagcattggactgta

SEQ ID NO: 28073 - DNA, 25 bp, Artificial Sequence
  Probe
aggtcagctaaataagctatcgggc

SEQ ID NO: 28074 - DNA, 26 bp, Artificial Sequence
  Probe
aggtcagctaaataagctatcgggcc

SEQ ID NO: 28075 - DNA, 27 bp, Artificial Sequence
  Probe
aggtcagctaaataagctatcgggccc

SEQ ID NO: 28076 - DNA, 28 bp, Artificial Sequence
  Probe
aggtcagctaaataagctatcgggccca

SEQ ID NO: 28077 - DNA, 36 bp, Artificial Sequence; identical to SEQ ID NO: 3460
  Probe

SEQ ID NO: 28078 - DNA, 33 bp, Artificial Sequence; identical to SEQ ID NO: 16762
  Probe

SEQ ID NO: 28079 - DNA, 36 bp, Artificial Sequence
  Probe
aggtccctcctcgttagtatagtggtgagtatcccc

SEQ ID NO: 28080 - DNA, 36 bp, Artificial Sequence
  Probe
aggtcctgagttcgaacctcagagggggcaaggcgt

SEQ ID NO: 28081 - DNA, 36 bp, Artificial Sequence
  Probe
aggtcctgagttcgaacctcagagggggcagctgcc

SEQ ID NO: 28082 - DNA, 36 bp, Artificial Sequence
  Probe
aggtcctgagttcgagcctcagagagggcagctgtt

SEQ ID NO: 28083 - DNA, 36 bp, Artificial Sequence
  Probe
aggtcctgagttcgagcctcagagagggcagctttt

SEQ ID NO: 28084 - DNA, 15 bp, Artificial Sequence
  Probe
aggtgcctcgttagc

SEQ ID NO: 28085 - DNA, 27 bp, Artificial Sequence
  Probe
aggtgcctcgttagcgcagtaggtagc

SEQ ID NO: 28086 - DNA, 32 bp, Artificial Sequence; identical to SEQ ID NO: 16791
  Probe

SEQ ID NO: 28087 - DNA, 33 bp, Artificial Sequence; identical to SEQ ID NO: 16792
  Probe

SEQ ID NO: 28088 - DNA, 36 bp, Artificial Sequence; identical to SEQ ID NO: 16795
  Probe

SEQ ID NO: 28089 - DNA, 36 bp, Artificial Sequence
  Probe
aggtggccccatggtgtaatggttagcactctggac

SEQ ID NO: 28090 - DNA, 31 bp, Artificial Sequence
  Probe
aggtggctccgtggcgcaatggatagcgcat

SEQ ID NO: 28091 - DNA, 36 bp, Artificial Sequence
  Probe
aggtggctccgtggcgcaatggatagcgcattggac

SEQ ID NO: 28092 - DNA, 50 bp, Artificial Sequence
  Probe
aggtggctccgtggcgcaatggatagcgcattggacttctagaggctgaa

SEQ ID NO: 28093 - DNA, 36 bp, Artificial Sequence
  Probe
aggtggctcgttggtctaggggtatgattctcgctt

SEQ ID NO: 28094 - DNA, 36 bp, Artificial Sequence
  Probe
aggtggggatgtagctcagtggtagagcgcatgctt

SEQ ID NO: 28095 - DNA, 16 bp, Artificial Sequence
  Probe
aggtgtcaggatggcc

SEQ ID NO: 28096 - DNA, 30 bp, Artificial Sequence
  Probe
aggtgtcaggatggccgagtggtctaaggc

SEQ ID NO: 28097 - DNA, 33 bp, Artificial Sequence
  Probe
aggtgtcaggatggccgagtggtctaaggcgcc

SEQ ID NO: 28098 - DNA, 36 bp, Artificial Sequence
  Probe
aggtgtcaggatggccgagtggtctaaggcgccaga

SEQ ID NO: 28099 - DNA, 39 bp, Artificial Sequence; identical to SEQ ID NO: 16815
  Probe

SEQ ID NO: 28100 - DNA, 36 bp, Artificial Sequence; identical to SEQ ID NO: 16817
  Probe

SEQ ID NO: 28101 - DNA, 29 bp, Artificial Sequence
  Probe
aggttccgggttcgagtcccggcggagtc

SEQ ID NO: 28102 - DNA, 22 bp, Artificial Sequence
  Probe
aggttcgactcctggctggctc

SEQ ID NO: 28103 - DNA, 15 bp, Artificial Sequence
  Probe
aggttgggttttttt

SEQ ID NO: 28104 - DNA, 16 bp, Artificial Sequence
  Probe
aggttgggtttttttt

SEQ ID NO: 28105 - DNA, 27 bp, Artificial Sequence
  Probe
aggtttggtcctagcctttctattagc

SEQ ID NO: 28106 - DNA, 36 bp, Artificial Sequence
  Probe
agtaaacaggagatcctgggttcgaatcccagcggg

SEQ ID NO: 28107 - DNA, 39 bp, Artificial Sequence
  Probe
agtaaacaggagatcctgggttcgaatcccagcggggcc

SEQ ID NO: 28108 - DNA, 40 bp, Artificial Sequence
  Probe
agtaaacaggagatcctgggttcgaatcccagcggggcct

SEQ ID NO: 28109 - DNA, 36 bp, Artificial Sequence
  Probe
agtaaacaggagatcctgggttcgaatcccagcggt

SEQ ID NO: 28110 - DNA, 16 bp, Artificial Sequence
  Probe
agtaaataataggagc

SEQ ID NO: 28111 - DNA, 18 bp, Artificial Sequence
  Probe
agtaaataataggagctt

SEQ ID NO: 28112 - DNA, 23 bp, Artificial Sequence
  Probe
agtaaataataggagcttaaacc

SEQ ID NO: 28113 - DNA, 25 bp, Artificial Sequence
  Probe
agtaaataataggagcttaaacccc

SEQ ID NO: 28114 - DNA, 15 bp, Artificial Sequence
  Probe
agtaaggtcagctaa

SEQ ID NO: 28115 - DNA, 16 bp, Artificial Sequence
  Probe
agtaaggtcagctaaa

SEQ ID NO: 28116 - DNA, 17 bp, Artificial Sequence
  Probe
agtaaggtcagctaaat

SEQ ID NO: 28117 - DNA, 18 bp, Artificial Sequence
  Probe
agtaaggtcagctaaata

SEQ ID NO: 28118 - DNA, 19 bp, Artificial Sequence
  Probe
agtaaggtcagctaaataa

SEQ ID NO: 28119 - DNA, 20 bp, Artificial Sequence
  Probe
agtaaggtcagctaaataag

SEQ ID NO: 28120 - DNA, 21 bp, Artificial Sequence
  Probe
agtaaggtcagctaaataagc

SEQ ID NO: 28121 - DNA, 22 bp, Artificial Sequence
  Probe
agtaaggtcagctaaataagct

SEQ ID NO: 28122 - DNA, 25 bp, Artificial Sequence
  Probe
agtaaggtcagctaaataagctatc

SEQ ID NO: 28123 - DNA, 28 bp, Artificial Sequence
  Probe
agtaaggtcagctaaataagctatcggg

SEQ ID NO: 28124 - DNA, 29 bp, Artificial Sequence
  Probe
agtaaggtcagctaaataagctatcgggc

SEQ ID NO: 28125 - DNA, 30 bp, Artificial Sequence; identical to SEQ ID NO: 3514
  Probe

SEQ ID NO: 28126 - DNA, 31 bp, Artificial Sequence; identical to SEQ ID NO: 3515
  Probe

SEQ ID NO: 28127 - DNA, 32 bp, Artificial Sequence; identical to SEQ ID NO: 3516
  Probe

SEQ ID NO: 28128 - DNA, 33 bp, Artificial Sequence; identical to SEQ ID NO: 3517
  Probe

SEQ ID NO: 28129 - DNA, 34 bp, Artificial Sequence; identical to SEQ ID NO: 3518
  Probe

SEQ ID NO: 28130 - DNA, 35 bp, Artificial Sequence; identical to SEQ ID NO: 3519
  Probe

SEQ ID NO: 28131 - DNA, 36 bp, Artificial Sequence; identical to SEQ ID NO: 3520
  Probe

SEQ ID NO: 28132 - DNA, 37 bp, Artificial Sequence; identical to SEQ ID NO: 3521
  Probe

SEQ ID NO: 28133 - DNA, 38 bp, Artificial Sequence; identical to SEQ ID NO: 3522
  Probe

SEQ ID NO: 28134 - DNA, 39 bp, Artificial Sequence; identical to SEQ ID NO: 3523
  Probe

SEQ ID NO: 28135 - DNA, 40 bp, Artificial Sequence; identical to SEQ ID NO: 3524
  Probe

SEQ ID NO: 28136 - DNA, 41 bp, Artificial Sequence; identical to SEQ ID NO: 3525
  Probe

SEQ ID NO: 28137 - DNA, 42 bp, Artificial Sequence; identical to SEQ ID NO: 3526
  Probe

SEQ ID NO: 28138 - DNA, 43 bp, Artificial Sequence; identical to SEQ ID NO: 3527
  Probe

SEQ ID NO: 28139 - DNA, 45 bp, Artificial Sequence; identical to SEQ ID NO: 3529
  Probe

SEQ ID NO: 28140 - DNA, 46 bp, Artificial Sequence; identical to SEQ ID NO: 3530
  Probe

SEQ ID NO: 28141 - DNA, 47 bp, Artificial Sequence; identical to SEQ ID NO: 3531
  Probe

SEQ ID NO: 28142 - DNA, 50 bp, Artificial Sequence; identical to SEQ ID NO: 3534
  Probe

SEQ ID NO: 28143 - DNA, 16 bp, Artificial Sequence
  Probe
agtaccgttaacttcc

SEQ ID NO: 28144 - DNA, 36 bp, Artificial Sequence
  Probe
agtacctgtctctgtggcgcaatcggttagcgcgtt

SEQ ID NO: 28145 - DNA, 36 bp, Artificial Sequence; identical to SEQ ID NO: 16871
  Probe

SEQ ID NO: 28146 - DNA, 34 bp, Artificial Sequence
  Probe
agtactctgcgttgtggccgcagcaacctcggtt

SEQ ID NO: 28147 - DNA, 36 bp, Artificial Sequence
  Probe
agtactctgcgttgtggccgcagcaacctcggttcg

SEQ ID NO: 28148 - DNA, 18 bp, Artificial Sequence
  Probe
agtagaactgacagtacc

SEQ ID NO: 28149 - DNA, 19 bp, Artificial Sequence
  Probe
agtagaactgacagtacct

SEQ ID NO: 28150 - DNA, 36 bp, Artificial Sequence
  Probe
agtagcattggtggttcagtggtagaattctcgcct

SEQ ID NO: 28151 - DNA, 19 bp, Artificial Sequence
  Probe
agtaggtagcgcatcagtc

SEQ ID NO: 28152 - DNA, 20 bp, Artificial Sequence
  Probe
agtaggtagcgcatcagtct

SEQ ID NO: 28153 - DNA, 19 bp, Artificial Sequence
  Probe
agtaggtagcgcgtcagtc

SEQ ID NO: 28154 - DNA, 20 bp, Artificial Sequence
  Probe
agtaggtagcgcgtcagtct

SEQ ID NO: 28155 - DNA, 36 bp, Artificial Sequence
  Probe
agtaggtggggatgtagctcagtggtagagcgcatg

SEQ ID NO: 28156 - DNA, 36 bp, Artificial Sequence
  Probe
agtataaatagtaccgttaacttccaattaactagt

SEQ ID NO: 28157 - DNA, 16 bp, Artificial Sequence
  Probe
agtatccccgcctgtc

SEQ ID NO: 28158 - DNA, 16 bp, Artificial Sequence
  Probe
agtattctctgtggct

SEQ ID NO: 28159 - DNA, 17 bp, Artificial Sequence
  Probe
agtattctctgtggctt

SEQ ID NO: 28160 - DNA, 18 bp, Artificial Sequence
  Probe
agtattctctgtggcttt

SEQ ID NO: 28161 - DNA, 19 bp, Artificial Sequence
  Probe
agtattctctgtggctttt

SEQ ID NO: 28162 - DNA, 36 bp, Artificial Sequence
  Probe
agtcaccgggatggccgagtggttaaggcgttggac

SEQ ID NO: 28163 - DNA, 20 bp, Artificial Sequence
  Probe
agtcggctagagcgtggtgc

SEQ ID NO: 28164 - DNA, 15 bp, Artificial Sequence
  Probe
agtcggtagagcatc

SEQ ID NO: 28165 - DNA, 17 bp, Artificial Sequence
  Probe
agtcggtagagcatcag

SEQ ID NO: 28166 - DNA, 15 bp, Artificial Sequence
  Probe
agtcggtagagcatg

SEQ ID NO: 28167 - DNA, 18 bp, Artificial Sequence
  Probe
agtcggtagagcatgaga

SEQ ID NO: 28168 - DNA, 19 bp, Artificial Sequence
  Probe
agtcggtagagcatgagac

SEQ ID NO: 28169 - DNA, 20 bp, Artificial Sequence
  Probe
agtcggtagagcatgagacc

SEQ ID NO: 28170 - DNA, 21 bp, Artificial Sequence
  Probe
agtcggtagagcatgagaccc

SEQ ID NO: 28171 - DNA, 20 bp, Artificial Sequence
  Probe
agtcggtagagcatgagact

SEQ ID NO: 28172 - DNA, 21 bp, Artificial Sequence
  Probe
agtcggtagagcatgagactc

SEQ ID NO: 28173 - DNA, 17 bp, Artificial Sequence
  Probe
agtcggtagagcatggg

SEQ ID NO: 28174 - DNA, 18 bp, Artificial Sequence
  Probe
agtcggtagagcatggga

SEQ ID NO: 28175 - DNA, 20 bp, Artificial Sequence
  Probe
agtcggtagagcatgggact

SEQ ID NO: 28176 - DNA, 28 bp, Artificial Sequence
  Probe
agtcggtagagcatgggactcttaatcc

SEQ ID NO: 28177 - DNA, 29 bp, Artificial Sequence
  Probe
agtcggtagagcatgggactcttaatccc

SEQ ID NO: 28178 - DNA, 26 bp, Artificial Sequence
  Probe
agtcttgtaaaccggagatgaaaacc

SEQ ID NO: 28179 - DNA, 27 bp, Artificial Sequence
  Probe
agtcttgtaaaccggagatgaaaacct

SEQ ID NO: 28180 - DNA, 36 bp, Artificial Sequence
  Probe
agtcttgtaaaccggagatgaaaacctttttccaag

SEQ ID NO: 28181 - DNA, 18 bp, Artificial Sequence
  Probe
agtctttaactccaccat

SEQ ID NO: 28182 - DNA, 15 bp, Artificial Sequence
  Probe
agtgaagcattggac

SEQ ID NO: 28183 - DNA, 16 bp, Artificial Sequence
  Probe
agtgaagcattggact

SEQ ID NO: 28184 - DNA, 18 bp, Artificial Sequence
  Probe
agtgaagcattggactgt

SEQ ID NO: 28185 - DNA, 19 bp, Artificial Sequence
  Probe
agtgaagcattggactgta

SEQ ID NO: 28186 - DNA, 20 bp, Artificial Sequence
  Probe
agtgaagcattggactgtaa

SEQ ID NO: 28187 - DNA, 21 bp, Artificial Sequence
  Probe
agtgaagcattggactgtaaa

SEQ ID NO: 28188 - DNA, 22 bp, Artificial Sequence
  Probe
agtgaagcattggactgtaaat

SEQ ID NO: 28189 - DNA, 23 bp, Artificial Sequence
  Probe
agtgaagcattggactgtaaatc

SEQ ID NO: 28190 - DNA, 24 bp, Artificial Sequence
  Probe
agtgaagcattggactgtaaatct

SEQ ID NO: 28191 - DNA, 25 bp, Artificial Sequence
  Probe
agtgaagcattggactgtaaatcta

SEQ ID NO: 28192 - DNA, 26 bp, Artificial Sequence
  Probe
agtgaagcattggactgtaaatctaa

SEQ ID NO: 28193 - DNA, 36 bp, Artificial Sequence
  Probe
agtgaagcattggactgtaaatctaaagacaggggt

SEQ ID NO: 28194 - DNA, 15 bp, Artificial Sequence
  Probe
agtgcacttggacga

SEQ ID NO: 28195 - DNA, 17 bp, Artificial Sequence
  Probe
agtgcacttggacgaac

SEQ ID NO: 28196 - DNA, 18 bp, Artificial Sequence
  Probe
agtgcacttggacgaacc

SEQ ID NO: 28197 - DNA, 16 bp, Artificial Sequence
  Probe
agtgcccggctagctc

SEQ ID NO: 28198 - DNA, 31 bp, Artificial Sequence
  Probe
agtgcccggctagctcagtcggtagagcatg

SEQ ID NO: 28199 - DNA, 36 bp, Artificial Sequence; identical to SEQ ID NO: 16918
  Probe

SEQ ID NO: 28200 - DNA, 37 bp, Artificial Sequence
  Probe
agtgcccggctagctcagtcggtagagcatgagactc

SEQ ID NO: 28201 - DNA, 36 bp, Artificial Sequence
  Probe
agtggccggttagctcagttggttagagcgtggtgc

SEQ ID NO: 28202 - DNA, 26 bp, Artificial Sequence
  Probe
agtggcgcagcggaagcgtgctgggc

SEQ ID NO: 28203 - DNA, 17 bp, Artificial Sequence
  Probe
agtggctaggattcggc

SEQ ID NO: 28204 - DNA, 36 bp, Artificial Sequence
  Probe
agtggctcgttggtctaggggtatgattctcgctta

SEQ ID NO: 28205 - DNA, 36 bp, Artificial Sequence
  Probe
agtggctcgttggtctaggggtatgattctcgcttt

SEQ ID NO: 28206 - DNA, 36 bp, Artificial Sequence
  Probe
agtggggtttccgtagtgtagtggttatcacgttcg

SEQ ID NO: 28207 - DNA, 39 bp, Artificial Sequence
  Probe
agtggggtttccgtagtgtagtggttatcacgttcgcct

SEQ ID NO: 28208 - DNA, 36 bp, Artificial Sequence
  Probe
agtgggtttccgtagtgtagtggttatcacgttcgc

SEQ ID NO: 28209 - DNA, 37 bp, Artificial Sequence
  Probe
agtgggtttccgtagtgtagtggttatcacgttcgcc

SEQ ID NO: 28210 - DNA, 38 bp, Artificial Sequence
  Probe
agtgggtttccgtagtgtagtggttatcacgttcgcct

SEQ ID NO: 28211 - DNA, 17 bp, Artificial Sequence
  Probe
agtggtagaattctcgc

SEQ ID NO: 28212 - DNA, 18 bp, Artificial Sequence
  Probe
agtggtagaattctcgcc

SEQ ID NO: 28213 - DNA, 19 bp, Artificial Sequence
  Probe
agtggtagaattctcgcct

SEQ ID NO: 28214 - DNA, 36 bp, Artificial Sequence
  Probe
agtggtagaattctcgcctcccacgcgggagacccg

SEQ ID NO: 28215 - DNA, 21 bp, Artificial Sequence
  Probe
agtggtagaattctcgcctgc

SEQ ID NO: 28216 - DNA, 22 bp, Artificial Sequence
  Probe
agtggtagaattctcgcctgcc

SEQ ID NO: 28217 - DNA, 23 bp, Artificial Sequence
  Probe
agtggtagaattctcgcctgcca

SEQ ID NO: 28218 - DNA, 36 bp, Artificial Sequence
  Probe
agtggtagaattctcgcctgccacgcgggaggcccg

SEQ ID NO: 28219 - DNA, 19 bp, Artificial Sequence
  Probe
agtggtagagcatttgact

SEQ ID NO: 28220 - DNA, 21 bp, Artificial Sequence
  Probe
agtggtagagcatttgactgc

SEQ ID NO: 28221 - DNA, 17 bp, Artificial Sequence
  Probe
agtggtatgattctcgc

SEQ ID NO: 28222 - DNA, 18 bp, Artificial Sequence
  Probe
agtggtatgattctcgct

SEQ ID NO: 28223 - DNA, 19 bp, Artificial Sequence
  Probe
agtggtcatcacgttcgcc

SEQ ID NO: 28224 - DNA, 15 bp, Artificial Sequence
  Probe
agtggtctaaggcgc

SEQ ID NO: 28225 - DNA, 18 bp, Artificial Sequence
  Probe
agtggtgagtatccccgc

SEQ ID NO: 28226 - DNA, 17 bp, Artificial Sequence
  Probe
agtggttaggattcggc

SEQ ID NO: 28227 - DNA, 19 bp, Artificial Sequence
  Probe
agtggttaggattcggcgc

SEQ ID NO: 28228 - DNA, 20 bp, Artificial Sequence
  Probe
agtggttaggattcggcgct

SEQ ID NO: 28229 - DNA, 21 bp, Artificial Sequence
  Probe
agtggttaggattcggcgctc

SEQ ID NO: 28230 - DNA, 22 bp, Artificial Sequence
  Probe
agtggttaggattcggcgctct

SEQ ID NO: 28231 - DNA, 26 bp, Artificial Sequence
  Probe
agtggttaggattcggcgctctcacc

SEQ ID NO: 28232 - DNA, 31 bp, Artificial Sequence; identical to SEQ ID NO: 16956
  Probe

SEQ ID NO: 28233 - DNA, 32 bp, Artificial Sequence; identical to SEQ ID NO: 16957
  Probe

SEQ ID NO: 28234 - DNA, 33 bp, Artificial Sequence; identical to SEQ ID NO: 16958
  Probe

SEQ ID NO: 28235 - DNA, 34 bp, Artificial Sequence
  Probe
agtggttaggattcggcgctctcaccgccgcggc

SEQ ID NO: 28236 - DNA, 35 bp, Artificial Sequence; identical to SEQ ID NO: 12776
  Probe

SEQ ID NO: 28237 - DNA, 37 bp, Artificial Sequence; identical to SEQ ID NO: 12778
  Probe

SEQ ID NO: 28238 - DNA, 40 bp, Artificial Sequence; identical to SEQ ID NO: 12779
  Probe

SEQ ID NO: 28239 - DNA, 17 bp, Artificial Sequence
  Probe
agtggttagtactctgc

SEQ ID NO: 28240 - DNA, 18 bp, Artificial Sequence
  Probe
agtggttagtactctgcg

SEQ ID NO: 28241 - DNA, 19 bp, Artificial Sequence
  Probe
agtggttagtactctgcgt

SEQ ID NO: 28242 - DNA, 20 bp, Artificial Sequence
  Probe
agtggttagtactctgcgtt

SEQ ID NO: 28243 - DNA, 19 bp, Artificial Sequence
  Probe
agtggttatcacattcgcc

SEQ ID NO: 28244 - DNA, 18 bp, Artificial Sequence
  Probe
agtggttatcacgtctgc

SEQ ID NO: 28245 - DNA, 19 bp, Artificial Sequence
  Probe
agtggttatcacgttcgcc

SEQ ID NO: 28246 - DNA, 25 bp, Artificial Sequence
  Probe
agtgtactggaaagtgcacttggac

SEQ ID NO: 28247 - DNA, 36 bp, Artificial Sequence
  Probe
agtgtagagagcctggatagctcagtcggtagagca

SEQ ID NO: 28248 - DNA, 39 bp, Artificial Sequence
  Probe
agtgtagagagcctggatagctcagtcggtagagcatca

SEQ ID NO: 28249 - DNA, 25 bp, Artificial Sequence
  Probe
agtgtagtggtcatcacgttcgcct

SEQ ID NO: 28250 - DNA, 24 bp, Artificial Sequence
  Probe
agtgtagtggttatcacgttcgcc

SEQ ID NO: 28251 - DNA, 36 bp, Artificial Sequence
  Probe
agtgtcgtctctgtggcgcaatcggttagcgcgttc

SEQ ID NO: 28252 - DNA, 17 bp, Artificial Sequence
  Probe
agtgtgtcaggatggcc

SEQ ID NO: 28253 - DNA, 36 bp, Artificial Sequence; identical to SEQ ID NO: 16982
  Probe

SEQ ID NO: 28254 - DNA, 40 bp, Artificial Sequence; identical to SEQ ID NO: 16986
  Probe

SEQ ID NO: 28255 - DNA, 20 bp, Artificial Sequence
  Probe
agtgtttgtgggtttaagtc

SEQ ID NO: 28256 - DNA, 21 bp, Artificial Sequence
  Probe
agtgtttgtgggtttaagtcc

SEQ ID NO: 28257 - DNA, 29 bp, Artificial Sequence
  Probe
agtgtttgtgggtttaagtcccattggtc

SEQ ID NO: 28258 - DNA, 33 bp, Artificial Sequence; identical to SEQ ID NO: 16996
  Probe

SEQ ID NO: 28259 - DNA, 19 bp, Artificial Sequence
  Probe
agttaaagactttttctct

SEQ ID NO: 28260 - DNA, 22 bp, Artificial Sequence
  Probe
agttaaagactttttctctgat

SEQ ID NO: 28261 - DNA, 19 bp, Artificial Sequence
  Probe
agttaaagattaagagaac

SEQ ID NO: 28262 - DNA, 20 bp, Artificial Sequence
  Probe
agttaaagattaagagaacc

SEQ ID NO: 28263 - DNA, 25 bp, Artificial Sequence
  Probe
agttaaagattaagagaaccaacac

SEQ ID NO: 28264 - DNA, 26 bp, Artificial Sequence
  Probe
agttaaagattaagagaaccaacacc

SEQ ID NO: 28265 - DNA, 27 bp, Artificial Sequence
  Probe
agttaaagattaagagaaccaacacct

SEQ ID NO: 28266 - DNA, 29 bp, Artificial Sequence
  Probe
agttaaagattaagagaaccaacacctct

SEQ ID NO: 28267 - DNA, 36 bp, Artificial Sequence
  Probe
agttaaagattaagagaaccaacacctctttacagt

SEQ ID NO: 28268 - DNA, 16 bp, Artificial Sequence
  Probe
agttaaattataggct

SEQ ID NO: 28269 - DNA, 36 bp, Artificial Sequence
  Probe
agttaccagaatggccgagtggttaaggcgttggac

SEQ ID NO: 28270 - DNA, 22 bp, Artificial Sequence
  Probe
agttagcggggagtgatatatt

SEQ ID NO: 28271 - DNA, 23 bp, Artificial Sequence
  Probe
agttagcggggagtgatatatta

SEQ ID NO: 28272 - DNA, 25 bp, Artificial Sequence
  Probe
agttagcggggagtgatatattatt

SEQ ID NO: 28273 - DNA, 36 bp, Artificial Sequence
  Probe
agttcccatatggtctagcggttaggattcctggtt

SEQ ID NO: 28274 - DNA, 36 bp, Artificial Sequence
  Probe
agttctggctcgttggtctagtggtatgattctcgc

SEQ ID NO: 28275 - DNA, 37 bp, Artificial Sequence
  Probe
agttctggctcgttggtctagtggtatgattctcgct

SEQ ID NO: 28276 - DNA, 38 bp, Artificial Sequence
  Probe
agttctggctcgttggtctagtggtatgattctcgctt

SEQ ID NO: 28277 - DNA, 39 bp, Artificial Sequence; identical to SEQ ID NO: 17012
  Probe

SEQ ID NO: 28278 - DNA, 36 bp, Artificial Sequence
  Probe
agttgaaatacaacgatggtttttcatatcattggt

SEQ ID NO: 28279 - DNA, 28 bp, Artificial Sequence
  Probe
agttgatgcagagtggggttttgcagtc

SEQ ID NO: 28280 - DNA, 29 bp, Artificial Sequence
  Probe
agttgatgcagagtggggttttgcagtcc

SEQ ID NO: 28281 - DNA, 30 bp, Artificial Sequence; identical to SEQ ID NO: 12788
  Probe

SEQ ID NO: 28282 - DNA, 36 bp, Artificial Sequence
  Probe
agttgatgcagagtggggttttgcagtccttagctg

SEQ ID NO: 28283 - DNA, 16 bp, Artificial Sequence
  Probe
agttgattagggtgct

SEQ ID NO: 28284 - DNA, 17 bp, Artificial Sequence
  Probe
agttgattagggtgctt

SEQ ID NO: 28285 - DNA, 18 bp, Artificial Sequence
  Probe
agttgattagggtgctta

SEQ ID NO: 28286 - DNA, 20 bp, Artificial Sequence
  Probe
agttgattagggtgcttagc

SEQ ID NO: 28287 - DNA, 23 bp, Artificial Sequence
  Probe
agttgattagggtgcttagctgt

SEQ ID NO: 28288 - DNA, 27 bp, Artificial Sequence
  Probe
agttgattagggtgcttagctgttaac

SEQ ID NO: 28289 - DNA, 29 bp, Artificial Sequence
  Probe
agttgattagggtgcttagctgttaacta

SEQ ID NO: 28290 - DNA, 30 bp, Artificial Sequence
  Probe
agttgattagggtgcttagctgttaactaa

SEQ ID NO: 28291 - DNA, 31 bp, Artificial Sequence
  Probe
agttgattagggtgcttagctgttaactaag

SEQ ID NO: 28292 - DNA, 33 bp, Artificial Sequence
  Probe
agttgattagggtgcttagctgttaactaagtg

SEQ ID NO: 28293 - DNA, 43 bp, Artificial Sequence; identical to SEQ ID NO: 364
  Probe

SEQ ID NO: 28294 - DNA, 44 bp, Artificial Sequence; identical to SEQ ID NO: 3617
  Probe

SEQ ID NO: 28295 - DNA, 36 bp, Artificial Sequence
  Probe
agttgcctccttagcgcagtaggcagcgcgtcagtc

SEQ ID NO: 28296 - DNA, 22 bp, Artificial Sequence
  Probe
agttgggagagcgttagactga

SEQ ID NO: 28297 - DNA, 23 bp, Artificial Sequence
  Probe
agttgggagagcgttagactgaa

SEQ ID NO: 28298 - DNA, 15 bp, Artificial Sequence
  Probe
agttggtagagcatc

SEQ ID NO: 28299 - DNA, 18 bp, Artificial Sequence
  Probe
agttggtagagcggagga

SEQ ID NO: 28300 - DNA, 19 bp, Artificial Sequence
  Probe
agttggtagagcggaggac

SEQ ID NO: 28301 - DNA, 23 bp, Artificial Sequence
  Probe
agttggtagagcggaggactgta

SEQ ID NO: 28302 - DNA, 20 bp, Artificial Sequence
  Probe
agttggttagagcgtggtgc

SEQ ID NO: 28303 - DNA, 28 bp, Artificial Sequence
  Probe
agtttaaacaaaacgaatgatttcgact

SEQ ID NO: 28304 - DNA, 29 bp, Artificial Sequence
  Probe
agtttaaacaaaacgaatgatttcgactc

SEQ ID NO: 28305 - DNA, 30 bp, Artificial Sequence
  Probe
agtttaaacaaaacgaatgatttcgactca

SEQ ID NO: 28306 - DNA, 26 bp, Artificial Sequence
  Probe
agtttaaattagaatcttagctttgg

SEQ ID NO: 28307 - DNA, 33 bp, Artificial Sequence
  Probe
agtttaaattagaatcttagctttgggtgctaa

SEQ ID NO: 28308 - DNA, 36 bp, Artificial Sequence
  Probe
agtttaaccaaaacatcagattgtgaatctgacaac

SEQ ID NO: 28309 - DNA, 43 bp, Artificial Sequence
  Probe
agtttaaccaaaacatcagattgtgaatctgacaacagaggct

SEQ ID NO: 28310 - DNA, 18 bp, Artificial Sequence
  Probe
agtttatgtagcttacct

SEQ ID NO: 28311 - DNA, 20 bp, Artificial Sequence
  Probe
agtttatgtagcttacctcc

SEQ ID NO: 28312 - DNA, 21 bp, Artificial Sequence
  Probe
agtttatgtagcttacctcct

SEQ ID NO: 28313 - DNA, 34 bp, Artificial Sequence
  Probe
agtttccgtagtgtagtggttatcacgttcgcct

SEQ ID NO: 28314 - DNA, 36 bp, Artificial Sequence
  Probe
ataaaagagttactttgatagagtaaataataggag

SEQ ID NO: 28315 - DNA, 27 bp, Artificial Sequence
  Probe
ataaacttcgccttaattttaataatc

SEQ ID NO: 28316 - DNA, 30 bp, Artificial Sequence; identical to SEQ ID NO: 3625
  Probe

SEQ ID NO: 28317 - DNA, 17 bp, Artificial Sequence
  Probe
ataacagctatccattg

SEQ ID NO: 28318 - DNA, 19 bp, Artificial Sequence
  Probe
ataacagctatccattggt

SEQ ID NO: 28319 - DNA, 22 bp, Artificial Sequence
  Probe
ataacagctatccattggtctt

SEQ ID NO: 28320 - DNA, 23 bp, Artificial Sequence
  Probe
ataacagctatccattggtctta

SEQ ID NO: 28321 - DNA, 27 bp, Artificial Sequence
  Probe
ataacagctatccattggtcttaggcc

SEQ ID NO: 28322 - DNA, 28 bp, Artificial Sequence
  Probe
ataacagctatccattggtcttaggccc

SEQ ID NO: 28323 - DNA, 29 bp, Artificial Sequence
  Probe
ataacagctatccattggtcttaggcccc

SEQ ID NO: 28324 - DNA, 30 bp, Artificial Sequence
  Probe
ataacagctatccattggtcttaggcccca

SEQ ID NO: 28325 - DNA, 36 bp, Artificial Sequence
  Probe
ataacagctatccattggtcttaggccccaaaaatt

SEQ ID NO: 28326 - DNA, 18 bp, Artificial Sequence
  Probe
ataaccatgcacactact

SEQ ID NO: 28327 - DNA, 19 bp, Artificial Sequence
  Probe
ataaccatgcacactacta

SEQ ID NO: 28328 - DNA, 20 bp, Artificial Sequence
  Probe
ataaccatgcacactactat

SEQ ID NO: 28329 - DNA, 21 bp, Artificial Sequence
  Probe
ataaccatgcacactactata

SEQ ID NO: 28330 - DNA, 24 bp, Artificial Sequence
  Probe
ataaccatgcacactactataacc

SEQ ID NO: 28331 - DNA, 25 bp, Artificial Sequence
  Probe
ataaccatgcacactactataacca

SEQ ID NO: 28332 - DNA, 26 bp, Artificial Sequence
  Probe
ataaccatgcacactactataaccac

SEQ ID NO: 28333 - DNA, 27 bp, Artificial Sequence
  Probe
ataaccatgcacactactataaccacc

SEQ ID NO: 28334 - DNA, 28 bp, Artificial Sequence
  Probe
ataaccatgcacactactataaccaccc

SEQ ID NO: 28335 - DNA, 29 bp, Artificial Sequence
  Probe
ataaccatgcacactactataaccaccct

SEQ ID NO: 28336 - DNA, 30 bp, Artificial Sequence; identical to SEQ ID NO: 3631
  Probe

SEQ ID NO: 28337 - DNA, 22 bp, Artificial Sequence
  Probe
ataacccagaggtcgatggatc

SEQ ID NO: 28338 - DNA, 23 bp, Artificial Sequence
  Probe
ataacccagaggtcgatggatcg

SEQ ID NO: 28339 - DNA, 24 bp, Artificial Sequence
  Probe
ataacccagaggtcgatggatcga

SEQ ID NO: 28340 - DNA, 20 bp, Artificial Sequence
  Probe
ataacgccaaggtcgcgggt

SEQ ID NO: 28341 - DNA, 29 bp, Artificial Sequence
  Probe
ataactttgtcaaagttaaattataggct

SEQ ID NO: 28342 - DNA, 33 bp, Artificial Sequence; identical to SEQ ID NO: 17058
  Probe

SEQ ID NO: 28343 - DNA, 34 bp, Artificial Sequence
  Probe
ataagcattggtggttcagtggtagaattctcgc

SEQ ID NO: 28344 - DNA, 35 bp, Artificial Sequence; identical to SEQ ID NO: 17059
  Probe

SEQ ID NO: 28345 - DNA, 36 bp, Artificial Sequence; identical to SEQ ID NO: 17060
  Probe

SEQ ID NO: 28346 - DNA, 37 bp, Artificial Sequence; identical to SEQ ID NO: 17061
  Probe

SEQ ID NO: 28347 - DNA, 38 bp, Artificial Sequence; identical to SEQ ID NO: 17062
  Probe

SEQ ID NO: 28348 - DNA, 15 bp, Artificial Sequence
  Probe
ataagctatcgggcc

SEQ ID NO: 28349 - DNA, 16 bp, Artificial Sequence
  Probe
ataagctatcgggccc

SEQ ID NO: 28350 - DNA, 17 bp, Artificial Sequence
  Probe
ataagctatcgggccca

SEQ ID NO: 28351 - DNA, 18 bp, Artificial Sequence
  Probe
ataagctatcgggcccat

SEQ ID NO: 28352 - DNA, 21 bp, Artificial Sequence
  Probe
ataagctatcgggcccatacc

SEQ ID NO: 28353 - DNA, 22 bp, Artificial Sequence
  Probe
ataagctatcgggcccataccc

SEQ ID NO: 28354 - DNA, 36 bp, Artificial Sequence; identical to SEQ ID NO: 3648
  Probe

SEQ ID NO: 28355 - DNA, 18 bp, Artificial Sequence
  Probe
ataataggagcttaaacc

SEQ ID NO: 28356 - DNA, 20 bp, Artificial Sequence
  Probe
ataataggagcttaaacccc

SEQ ID NO: 28357 - DNA, 20 bp, Artificial Sequence
  Probe
ataatctgaaggtcctgagt

SEQ ID NO: 28358 - DNA, 36 bp, Artificial Sequence
  Probe
ataatctgaaggtcctgagttcgaacctcagagggg

SEQ ID NO: 28359 - DNA, 36 bp, Artificial Sequence
  Probe
ataatctgaaggtcgtgagttcgatcctcacacggg

SEQ ID NO: 28360 - DNA, 42 bp, Artificial Sequence
  Probe
ataatctgaaggtcgtgagttcgatcctcacacggggcacaa

SEQ ID NO: 28361 - DNA, 31 bp, Artificial Sequence; identical to SEQ ID NO: 17084
  Probe

SEQ ID NO: 28362 - DNA, 32 bp, Artificial Sequence
  Probe
atacaacgatggtttttcatatcattggtcgt

SEQ ID NO: 28363 - DNA, 36 bp, Artificial Sequence
  Probe
atacaacgatggtttttcatatcattggtcgtggtt

SEQ ID NO: 28364 - DNA, 42 bp, Artificial Sequence; identical to SEQ ID NO: 17085
  Probe

SEQ ID NO: 28365 - DNA, 43 bp, Artificial Sequence
  Probe
atacaacgatggtttttcatatcattggtcgtggttgtagtcc

SEQ ID NO: 28366 - DNA, 50 bp, Artificial Sequence
  Probe
atacaacgatggtttttcatatcattggtcgtggttgtagtccgtgcgag

SEQ ID NO: 28367 - DNA, 22 bp, Artificial Sequence
  Probe
atacactgaaaatgtttagacg

SEQ ID NO: 28368 - DNA, 25 bp, Artificial Sequence
  Probe
atacactgaaaatgtttagacgggc

SEQ ID NO: 28369 - DNA, 28 bp, Artificial Sequence
  Probe
atacactgaaaatgtttagacgggctca

SEQ ID NO: 28370 - DNA, 29 bp, Artificial Sequence
  Probe
atacactgaaaatgtttagacgggctcac

SEQ ID NO: 28371 - DNA, 30 bp, Artificial Sequence; identical to SEQ ID NO: 17086
  Probe

SEQ ID NO: 28372 - DNA, 32 bp, Artificial Sequence
  Probe
atacactgaaaatgtttagacgggctcacatc

SEQ ID NO: 28373 - DNA, 35 bp, Artificial Sequence
  Probe
atacactgaaaatgtttagacgggctcacatcacc

SEQ ID NO: 28374 - DNA, 36 bp, Artificial Sequence
  Probe
atacactgaaaatgtttagacgggctcacatcaccc

SEQ ID NO: 28375 - DNA, 15 bp, Artificial Sequence
  Probe
atacagaccaagagc

SEQ ID NO: 28376 - DNA, 17 bp, Artificial Sequence
  Probe
atacagaccaagagcct

SEQ ID NO: 28377 - DNA, 25 bp, Artificial Sequence
  Probe
atacagaccaagagccttcaaagcc

SEQ ID NO: 28378 - DNA, 16 bp, Artificial Sequence
  Probe
atacccacacccaccc

SEQ ID NO: 28379 - DNA, 30 bp, Artificial Sequence; identical to SEQ ID NO: 3660
  Probe

SEQ ID NO: 28380 - DNA, 33 bp, Artificial Sequence; identical to SEQ ID NO: 3663
  Probe

SEQ ID NO: 28381 - DNA, 16 bp, Artificial Sequence
  Probe
atacccatggccaacc

SEQ ID NO: 28382 - DNA, 17 bp, Artificial Sequence
  Probe
atacccatggccaacct

SEQ ID NO: 28383 - DNA, 19 bp, Artificial Sequence
  Probe
atacccatggccaacctcc

SEQ ID NO: 28384 - DNA, 23 bp, Artificial Sequence
  Probe
atacccatggccaacctcctact

SEQ ID NO: 28385 - DNA, 28 bp, Artificial Sequence
  Probe
atacccatggccaacctcctactcctca

SEQ ID NO: 28386 - DNA, 36 bp, Artificial Sequence; identical to SEQ ID NO: 17099
  Probe

SEQ ID NO: 28387 - DNA, 16 bp, Artificial Sequence
  Probe
atacccttcccgtact

SEQ ID NO: 28388 - DNA, 15 bp, Artificial Sequence
  Probe
atactaccgtatggc

SEQ ID NO: 28389 - DNA, 15 bp, Artificial Sequence
  Probe
atactcaaatgggcc

SEQ ID NO: 28390 - DNA, 24 bp, Artificial Sequence
  Probe
atactgactagtctggtgttattt

SEQ ID NO: 28391 - DNA, 36 bp, Artificial Sequence
  Probe
atagagcagagtggcgcagcggaagcgtgctgggcc

SEQ ID NO: 28392 - DNA, 20 bp, Artificial Sequence
  Probe
atagagtaaataataggagc

SEQ ID NO: 28393 - DNA, 22 bp, Artificial Sequence
  Probe
atagagtaaataataggagctt

SEQ ID NO: 28394 - DNA, 27 bp, Artificial Sequence
  Probe
atagagtaaataataggagcttaaacc

SEQ ID NO: 28395 - DNA, 29 bp, Artificial Sequence
  Probe
atagagtaaataataggagcttaaacccc

SEQ ID NO: 28396 - DNA, 25 bp, Artificial Sequence
  Probe
atagccgcccggctagctcagtcgg

SEQ ID NO: 28397 - DNA, 26 bp, Artificial Sequence
  Probe
atagccgcccggctagctcagtcggt

SEQ ID NO: 28398 - DNA, 27 bp, Artificial Sequence
  Probe
atagccgcccggctagctcagtcggta

SEQ ID NO: 28399 - DNA, 28 bp, Artificial Sequence
  Probe
atagccgcccggctagctcagtcggtag

SEQ ID NO: 28400 - DNA, 29 bp, Artificial Sequence
  Probe
atagccgcccggctagctcagtcggtaga

SEQ ID NO: 28401 - DNA, 36 bp, Artificial Sequence
  Probe
atagccgcccggctagctcagtcggtagagcatgag

SEQ ID NO: 28402 - DNA, 39 bp, Artificial Sequence
  Probe
atagccgcccggctagctcagtcggtagagcatgagacc

SEQ ID NO: 28403 - DNA, 43 bp, Artificial Sequence
  Probe
atagccgcccggctagctcagtcggtagagcatgagaccctta

SEQ ID NO: 28404 - DNA, 18 bp, Artificial Sequence
  Probe
atagctcagtcggtagag

SEQ ID NO: 28405 - DNA, 26 bp, Artificial Sequence
  Probe
atagctcagtcggtagagcatcagac

SEQ ID NO: 28406 - DNA, 27 bp, Artificial Sequence
  Probe
atagctcagtcggtagagcatcagact

SEQ ID NO: 28407 - DNA, 28 bp, Artificial Sequence
  Probe
atagctcagtcggtagagcatcagactt

SEQ ID NO: 28408 - DNA, 29 bp, Artificial Sequence
  Probe
atagctcagtcggtagagcatcagacttt

SEQ ID NO: 28409 - DNA, 31 bp, Artificial Sequence; identical to SEQ ID NO: 12798
  Probe

SEQ ID NO: 28410 - DNA, 15 bp, Artificial Sequence
  Probe
ataggagcttaaacc

SEQ ID NO: 28411 - DNA, 18 bp, Artificial Sequence
  Probe
ataggagcttaaaccccc

SEQ ID NO: 28412 - DNA, 36 bp, Artificial Sequence
  Probe
ataggagcttaaacccccttatttctaggactatga

SEQ ID NO: 28413 - DNA, 15 bp, Artificial Sequence
  Probe
ataggtattaaggtt

SEQ ID NO: 28414 - DNA, 16 bp, Artificial Sequence
  Probe
ataggtattaaggttt

SEQ ID NO: 28415 - DNA, 17 bp, Artificial Sequence
  Probe
ataggtattaaggtttt

SEQ ID NO: 28416 - DNA, 22 bp, Artificial Sequence
  Probe
ataggtggcacggagaattttg

SEQ ID NO: 28417 - DNA, 36 bp, Artificial Sequence
  Probe
ataggtggcacggagaattttggattctcagggatg

SEQ ID NO: 28418 - DNA, 38 bp, Artificial Sequence
  Probe
ataggtggcacggagaattttggattctcagggatggg

SEQ ID NO: 28419 - DNA, 36 bp, Artificial Sequence
  Probe
ataggtggctcgttggtctaggggtatgattctcgc

SEQ ID NO: 28420 - DNA, 15 bp, Artificial Sequence
  Probe
ataggtttggtccta

SEQ ID NO: 28421 - DNA, 17 bp, Artificial Sequence
  Probe
ataggtttggtcctagc

SEQ ID NO: 28422 - DNA, 18 bp, Artificial Sequence
  Probe
ataggtttggtcctagcc

SEQ ID NO: 28423 - DNA, 19 bp, Artificial Sequence
  Probe
ataggtttggtcctagcct

SEQ ID NO: 28424 - DNA, 22 bp, Artificial Sequence
  Probe
ataggtttggtcctagcctttc

SEQ ID NO: 28425 - DNA, 23 bp, Artificial Sequence
  Probe
ataggtttggtcctagcctttct

SEQ ID NO: 28426 - DNA, 24 bp, Artificial Sequence
  Probe
ataggtttggtcctagcctttcta

SEQ ID NO: 28427 - DNA, 25 bp, Artificial Sequence
  Probe
ataggtttggtcctagcctttctat

SEQ ID NO: 28428 - DNA, 26 bp, Artificial Sequence
  Probe
ataggtttggtcctagcctttctatt

SEQ ID NO: 28429 - DNA, 27 bp, Artificial Sequence
  Probe
ataggtttggtcctagcctttctatta

SEQ ID NO: 28430 - DNA, 29 bp, Artificial Sequence
  Probe
ataggtttggtcctagcctttctattagc

SEQ ID NO: 28431 - DNA, 15 bp, Artificial Sequence
  Probe
atagtaccgttaact

SEQ ID NO: 28432 - DNA, 17 bp, Artificial Sequence
  Probe
atagtaccgttaacttc

SEQ ID NO: 28433 - DNA, 35 bp, Artificial Sequence
  Probe
atagtaccgttaacttccaattaactagttttgac

SEQ ID NO: 28434 - DNA, 36 bp, Artificial Sequence; identical to SEQ ID NO: 17131
  Probe

SEQ ID NO: 28435 - DNA, 22 bp, Artificial Sequence
  Probe
atagtggttagtactctgcgtt

SEQ ID NO: 28436 - DNA, 30 bp, Artificial Sequence
  Probe
atagtttaaacaaaacgaatgatttcgact

SEQ ID NO: 28437 - DNA, 36 bp, Artificial Sequence; identical to SEQ ID NO: 3688
  Probe

SEQ ID NO: 28438 - DNA, 32 bp, Artificial Sequence
  Probe
atatagtttaaacaaaacgaatgatttcgact

SEQ ID NO: 28439 - DNA, 36 bp, Artificial Sequence
  Probe
atatagtttaaccaaaacatcagattgtgaatctga

SEQ ID NO: 28440 - DNA, 36 bp, Artificial Sequence
  Probe
atatcaggagaggcctggccgagtggttaaggcgat

SEQ ID NO: 28441 - DNA, 27 bp, Artificial Sequence
  Probe
atatcattggtcgtggttgtagtccgt

SEQ ID NO: 28442 - DNA, 29 bp, Artificial Sequence
  Probe
atatcattggtcgtggttgtagtccgtgc

SEQ ID NO: 28443 - DNA, 35 bp, Artificial Sequence; identical to SEQ ID NO: 12801
  Probe

SEQ ID NO: 28444 - DNA, 38 bp, Artificial Sequence; identical to SEQ ID NO: 17142
  Probe

SEQ ID NO: 28445 - DNA, 39 bp, Artificial Sequence; identical to SEQ ID NO: 3695
  Probe

SEQ ID NO: 28446 - DNA, 26 bp, Artificial Sequence
  Probe
atatccaaccttcagctatagggtgg

SEQ ID NO: 28447 - DNA, 29 bp, Artificial Sequence
  Probe
atatccaaccttcagctatagggtggaga

SEQ ID NO: 28448 - DNA, 26 bp, Artificial Sequence
  Probe
atatgcagtttctgtggtgtagtggt

SEQ ID NO: 28449 - DNA, 27 bp, Artificial Sequence
  Probe
atatgcagtttctgtggtgtagtggtt

SEQ ID NO: 28450 - DNA, 31 bp, Artificial Sequence
  Probe
atatgcagtttctgtggtgtagtggttatta

SEQ ID NO: 28451 - DNA, 32 bp, Artificial Sequence
  Probe
atatgcagtttctgtggtgtagtggttattat

SEQ ID NO: 28452 - DNA, 33 bp, Artificial Sequence
  Probe
atatgcagtttctgtggtgtagtggttattatg

SEQ ID NO: 28453 - DNA, 20 bp, Artificial Sequence
  Probe
atatgtgttttccgtcctta

SEQ ID NO: 28454 - DNA, 22 bp, Artificial Sequence
  Probe
atatgtgttttccgtccttact

SEQ ID NO: 28455 - DNA, 23 bp, Artificial Sequence
  Probe
atatgtgttttccgtccttactt

SEQ ID NO: 28456 - DNA, 24 bp, Artificial Sequence
  Probe
atatgtgttttccgtccttacttt

SEQ ID NO: 28457 - DNA, 25 bp, Artificial Sequence
  Probe
atatgtgttttccgtccttactttt

SEQ ID NO: 28458 - DNA, 36 bp, Artificial Sequence
  Probe
atattgaattgcaaattcgaagaagcagcttcaaac

SEQ ID NO: 28459 - DNA, 32 bp, Artificial Sequence
  Probe
atcaagacgaggtggccgagtggttaaggcga

SEQ ID NO: 28460 - DNA, 15 bp, Artificial Sequence
  Probe
atcacgtcggggtca

SEQ ID NO: 28461 - DNA, 28 bp, Artificial Sequence
  Probe
atcacgtcggggtcaaacaaaacattgt

SEQ ID NO: 28462 - DNA, 29 bp, Artificial Sequence
  Probe
atcacgtcggggtcaaacaaaacattgtt

SEQ ID NO: 28463 - DNA, 30 bp, Artificial Sequence
  Probe
atcacgtcggggtcaaacaaaacattgttt

SEQ ID NO: 28464 - DNA, 18 bp, Artificial Sequence
  Probe
atcacgtcggggtcagcg

SEQ ID NO: 28465 - DNA, 19 bp, Artificial Sequence
  Probe
atcacgttcgcctaacacg

SEQ ID NO: 28466 - DNA, 19 bp, Artificial Sequence
  Probe
atcacgttcgcctcacacg

SEQ ID NO: 28467 - DNA, 35 bp, Artificial Sequence
  Probe
atcagaagattctaggttcgactcctggctggctc

SEQ ID NO: 28468 - DNA, 36 bp, Artificial Sequence; identical to SEQ ID NO: 12805
  Probe

SEQ ID NO: 28469 - DNA, 38 bp, Artificial Sequence; identical to SEQ ID NO: 17162
  Probe

SEQ ID NO: 28470 - DNA, 39 bp, Artificial Sequence; identical to SEQ ID NO: 3707
  Probe

SEQ ID NO: 28471 - DNA, 38 bp, Artificial Sequence; identical to SEQ ID NO: 17164
  Probe

SEQ ID NO: 28472 - DNA, 36 bp, Artificial Sequence; identical to SEQ ID NO: 17166
  Probe

SEQ ID NO: 28473 - DNA, 38 bp, Artificial Sequence
  Probe
atcagaagattgagggttcgagtcccttcgtggtcgtc

SEQ ID NO: 28474 - DNA, 36 bp, Artificial Sequence
  Probe
atcagaagattgcaggttcgagtcctgccgcggtcg

SEQ ID NO: 28475 - DNA, 36 bp, Artificial Sequence; identical to SEQ ID NO: 17171
  Probe

SEQ ID NO: 28476 - DNA, 23 bp, Artificial Sequence
  Probe
atcagagaaaaagtctttaactc

SEQ ID NO: 28477 - DNA, 29 bp, Artificial Sequence
  Probe
atcagagaaaaagtctttaactccaccat

SEQ ID NO: 28478 - DNA, 15 bp, Artificial Sequence
  Probe
atcagattgtgaatc

SEQ ID NO: 28479 - DNA, 29 bp, Artificial Sequence
  Probe
atcagattgtgaatctgacaacagaggct

SEQ ID NO: 28480 - DNA, 36 bp, Artificial Sequence
  Probe
atcagattgtgaatctgacaacagaggcttacgacc

SEQ ID NO: 28481 - DNA, 33 bp, Artificial Sequence
  Probe
atcaggagaggcctggccgagtggttaaggcga

SEQ ID NO: 28482 - DNA, 36 bp, Artificial Sequence; identical to SEQ ID NO: 17179
  Probe

SEQ ID NO: 28483 - DNA, 19 bp, Artificial Sequence
  Probe
atcattggtcgtggttgta

SEQ ID NO: 28484 - DNA, 24 bp, Artificial Sequence
  Probe
atcattggtcgtggttgtagtccg

SEQ ID NO: 28485 - DNA, 26 bp, Artificial Sequence
  Probe
atcattggtcgtggttgtagtccgtg

SEQ ID NO: 28486 - DNA, 27 bp, Artificial Sequence
  Probe
atcattggtcgtggttgtagtccgtgc

SEQ ID NO: 28487 - DNA, 28 bp, Artificial Sequence
  Probe
atcattggtcgtggttgtagtccgtgcg

SEQ ID NO: 28488 - DNA, 29 bp, Artificial Sequence
  Probe
atcattggtcgtggttgtagtccgtgcga

SEQ ID NO: 28489 - DNA, 34 bp, Artificial Sequence; identical to SEQ ID NO: 12808
  Probe

SEQ ID NO: 28490 - DNA, 35 bp, Artificial Sequence
  Probe
atcattggtcgtggttgtagtccgtgcgagaataa

SEQ ID NO: 28491 - DNA, 36 bp, Artificial Sequence
  Probe
atcattggtcgtggttgtagtccgtgcgagaataat

SEQ ID NO: 28492 - DNA, 15 bp, Artificial Sequence
  Probe
atccaatggacatat

SEQ ID NO: 28493 - DNA, 18 bp, Artificial Sequence
  Probe
atccagcgatccgagttc

SEQ ID NO: 28494 - DNA, 18 bp, Artificial Sequence
  Probe
atccaggtgccccctaca

SEQ ID NO: 28495 - DNA, 16 bp, Artificial Sequence
  Probe
atccaggtgccccctc

SEQ ID NO: 28496 - DNA, 17 bp, Artificial Sequence
  Probe
atccaggtgccccctcc

SEQ ID NO: 28497 - DNA, 18 bp, Artificial Sequence
  Probe
atccaggtgccccctccc

SEQ ID NO: 28498 - DNA, 36 bp, Artificial Sequence
  Probe
atccattggggtttccccgcgcaggttcgaatcctg

SEQ ID NO: 28499 - DNA, 15 bp, Artificial Sequence
  Probe
atccattggtcttag

SEQ ID NO: 28500 - DNA, 17 bp, Artificial Sequence
  Probe
atccattggtcttaggc

SEQ ID NO: 28501 - DNA, 21 bp, Artificial Sequence
  Probe
atccattggtcttaggcccca

SEQ ID NO: 28502 - DNA, 24 bp, Artificial Sequence
  Probe
atccattggtcttaggccccaaaa

SEQ ID NO: 28503 - DNA, 25 bp, Artificial Sequence
  Probe
atccattggtcttaggccccaaaaa

SEQ ID NO: 28504 - DNA, 26 bp, Artificial Sequence
  Probe
atccattggtcttaggccccaaaaat

SEQ ID NO: 28505 - DNA, 31 bp, Artificial Sequence
  Probe
atccattggtcttaggccccaaaaattttgg

SEQ ID NO: 28506 - DNA, 33 bp, Artificial Sequence
  Probe
atccattggtcttaggccccaaaaattttggtg

SEQ ID NO: 28507 - DNA, 38 bp, Artificial Sequence
  Probe
atccattggtcttaggccccaaaaattttggtgcaact

SEQ ID NO: 28508 - DNA, 39 bp, Artificial Sequence
  Probe
atccattggtcttaggccccaaaaattttggtgcaactc

SEQ ID NO: 28509 - DNA, 40 bp, Artificial Sequence
  Probe
atccattggtcttaggccccaaaaattttggtgcaactcc

SEQ ID NO: 28510 - DNA, 41 bp, Artificial Sequence
  Probe
atccattggtcttaggccccaaaaattttggtgcaactcca

SEQ ID NO: 28511 - DNA, 45 bp, Artificial Sequence; identical to SEQ ID NO: 3727
  Probe

SEQ ID NO: 28512 - DNA, 50 bp, Artificial Sequence
  Probe
atccattggtcttaggccccaaaaattttggtgcaactccaaataaaagt

SEQ ID NO: 28513 - DNA, 15 bp, Artificial Sequence
  Probe
atcccaccactgcca

SEQ ID NO: 28514 - DNA, 16 bp, Artificial Sequence
  Probe
atcccaccagagtcga

SEQ ID NO: 28515 - DNA, 28 bp, Artificial Sequence
  Probe
atcccacccagggacggaagtcgcattt

SEQ ID NO: 28516 - DNA, 16 bp, Artificial Sequence
  Probe
atcccaccctcgtcgg

SEQ ID NO: 28517 - DNA, 15 bp, Artificial Sequence
  Probe
atcccaccgctgcca

SEQ ID NO: 28518 - DNA, 16 bp, Artificial Sequence
  Probe
atcccaccgctgccaa

SEQ ID NO: 28519 - DNA, 17 bp, Artificial Sequence
  Probe
atcccaccgctgccaca

SEQ ID NO: 28520 - DNA, 18 bp, Artificial Sequence
  Probe
atcccaccgctgccacac

SEQ ID NO: 28521 - DNA, 17 bp, Artificial Sequence
  Probe
atcccaccgctgccagc

SEQ ID NO: 28522 - DNA, 18 bp, Artificial Sequence
  Probe
atcccaccgctgccagct

SEQ ID NO: 28523 - DNA, 17 bp, Artificial Sequence
  Probe
atcccaccgctgccagt

SEQ ID NO: 28524 - DNA, 16 bp, Artificial Sequence
  Probe
atcccaccttcgtcga

SEQ ID NO: 28525 - DNA, 17 bp, Artificial Sequence
  Probe
atcccaccttcgtcgac

SEQ ID NO: 28526 - DNA, 15 bp, Artificial Sequence
  Probe
atcccactcctgaca

SEQ ID NO: 28527 - DNA, 17 bp, Artificial Sequence
  Probe
atcccactcctgacaat

SEQ ID NO: 28528 - DNA, 18 bp, Artificial Sequence
  Probe
atcccactcctgacaata

SEQ ID NO: 28529 - DNA, 17 bp, Artificial Sequence
  Probe
atcccactcctgacagt

SEQ ID NO: 28530 - DNA, 15 bp, Artificial Sequence
  Probe
atcccacttctgaca

SEQ ID NO: 28531 - DNA, 16 bp, Artificial Sequence
  Probe
atcccacttctgacac

SEQ ID NO: 28532 - DNA, 17 bp, Artificial Sequence
  Probe
atcccacttctgacaca

SEQ ID NO: 28533 - DNA, 18 bp, Artificial Sequence
  Probe
atcccacttctgacacaa

SEQ ID NO: 28534 - DNA, 19 bp, Artificial Sequence
  Probe
atcccacttctgacacata

SEQ ID NO: 28535 - DNA, 19 bp, Artificial Sequence
  Probe
atcccacttctgacacatt

SEQ ID NO: 28536 - DNA, 16 bp, Artificial Sequence
  Probe
atcccagcggtgcctc

SEQ ID NO: 28537 - DNA, 18 bp, Artificial Sequence
  Probe
atcccagcggtgcctcaa

SEQ ID NO: 28538 - DNA, 17 bp, Artificial Sequence
  Probe
atcccagcggtgcctcc

SEQ ID NO: 28539 - DNA, 18 bp, Artificial Sequence
  Probe
atcccagcggtgcctccg

SEQ ID NO: 28540 - DNA, 36 bp, Artificial Sequence
  Probe
atcccagggtcgtgggttcgagccccacgttgggcg

SEQ ID NO: 28541 - DNA, 15 bp, Artificial Sequence
  Probe
atcccagtagagcct

SEQ ID NO: 28542 - DNA, 16 bp, Artificial Sequence
  Probe
atcccagtagagcctt

SEQ ID NO: 28543 - DNA, 17 bp, Artificial Sequence
  Probe
atcccatcctcgtcgct

SEQ ID NO: 28544 - DNA, 17 bp, Artificial Sequence
  Probe
atcccatcctcgtcggc

SEQ ID NO: 28545 - DNA, 18 bp, Artificial Sequence
  Probe
atcccatcctcgtcggct

SEQ ID NO: 28546 - DNA, 19 bp, Artificial Sequence
  Probe
atccccagcacctccacaa

SEQ ID NO: 28547 - DNA, 17 bp, Artificial Sequence
  Probe
atccccggcatctccaa

SEQ ID NO: 28548 - DNA, 17 bp, Artificial Sequence
  Probe
atccccggcatctccag

SEQ ID NO: 28549 - DNA, 17 bp, Artificial Sequence
  Probe
atccccggcatctccat

SEQ ID NO: 28550 - DNA, 15 bp, Artificial Sequence
  Probe
atccccgtacgggcc

SEQ ID NO: 28551 - DNA, 29 bp, Artificial Sequence
  Probe
atccccgtacgggccaggattgaaacttt

SEQ ID NO: 28552 - DNA, 30 bp, Artificial Sequence
  Probe
atccccgtacgggccaggattgaaactttt

SEQ ID NO: 28553 - DNA, 16 bp, Artificial Sequence
  Probe
atcccctggcccaacc

SEQ ID NO: 28554 - DNA, 17 bp, Artificial Sequence
  Probe
atcccctggcccaaccc

SEQ ID NO: 28555 - DNA, 18 bp, Artificial Sequence
  Probe
atcccctggcccaacccg

SEQ ID NO: 28556 - DNA, 20 bp, Artificial Sequence
  Probe
atcccctggcccaacccgtc

SEQ ID NO: 28557 - DNA, 26 bp, Artificial Sequence
  Probe
atcccctggcccaacccgtcatctac

SEQ ID NO: 28558 - DNA, 15 bp, Artificial Sequence
  Probe
atcccggacgagccc

SEQ ID NO: 28559 - DNA, 16 bp, Artificial Sequence
  Probe
atcccggacgagccca

SEQ ID NO: 28560 - DNA, 17 bp, Artificial Sequence
  Probe
atcccggacgagcccac

SEQ ID NO: 28561 - DNA, 18 bp, Artificial Sequence
  Probe
atcccggacgagcccaca

SEQ ID NO: 28562 - DNA, 18 bp, Artificial Sequence
  Probe
atcccggacgagcccact

SEQ ID NO: 28563 - DNA, 19 bp, Artificial Sequence
  Probe
atcccggacgagcccactt

SEQ ID NO: 28564 - DNA, 20 bp, Artificial Sequence
  Probe
atcccggacgagcccacttc

SEQ ID NO: 28565 - DNA, 21 bp, Artificial Sequence
  Probe
atcccggacgagcccacttca

SEQ ID NO: 28566 - DNA, 20 bp, Artificial Sequence
  Probe
atcccggacgagcccacttt

SEQ ID NO: 28567 - DNA, 21 bp, Artificial Sequence
  Probe
atcccggacgagcccactttt

SEQ ID NO: 28568 - DNA, 17 bp, Artificial Sequence
  Probe
atcccggacgagcccag

SEQ ID NO: 28569 - DNA, 22 bp, Artificial Sequence
  Probe
atcccggacgagcccaggcttt

SEQ ID NO: 28570 - DNA, 16 bp, Artificial Sequence
  Probe
atcccggacgagcccc

SEQ ID NO: 28571 - DNA, 17 bp, Artificial Sequence
  Probe
atcccggacgagccccc

SEQ ID NO: 28572 - DNA, 18 bp, Artificial Sequence
  Probe
atcccggacgagccccct

SEQ ID NO: 28573 - DNA, 19 bp, Artificial Sequence
  Probe
atcccggacgagccccctt

SEQ ID NO: 28574 - DNA, 20 bp, Artificial Sequence
  Probe
atcccggacgagcccccttt

SEQ ID NO: 28575 - DNA, 21 bp, Artificial Sequence
  Probe
atcccggacgagccccctttt

SEQ ID NO: 28576 - DNA, 17 bp, Artificial Sequence
  Probe
atcccggacgagcccct

SEQ ID NO: 28577 - DNA, 18 bp, Artificial Sequence
  Probe
atcccggacgagcccctc

SEQ ID NO: 28578 - DNA, 21 bp, Artificial Sequence
  Probe
atcccggacgagcccctcttt

SEQ ID NO: 28579 - DNA, 18 bp, Artificial Sequence
  Probe
atcccggacgagcccctt

SEQ ID NO: 28580 - DNA, 19 bp, Artificial Sequence
  Probe
atcccggacgagccccttt

SEQ ID NO: 28581 - DNA, 16 bp, Artificial Sequence
  Probe
atcccggacgagcccg

SEQ ID NO: 28582 - DNA, 17 bp, Artificial Sequence
  Probe
atcccggacgagcccgc

SEQ ID NO: 28583 - DNA, 18 bp, Artificial Sequence
  Probe
atcccggacgagcccgct

SEQ ID NO: 28584 - DNA, 16 bp, Artificial Sequence
  Probe
atcccggacgagccct

SEQ ID NO: 28585 - DNA, 17 bp, Artificial Sequence
  Probe
atcccggacgagcccta

SEQ ID NO: 28586 - DNA, 17 bp, Artificial Sequence
  Probe
atcccggacgagccctc

SEQ ID NO: 28587 - DNA, 18 bp, Artificial Sequence
  Probe
atcccggacgagccctca

SEQ ID NO: 28588 - DNA, 19 bp, Artificial Sequence
  Probe
atcccggacgagccctcat

SEQ ID NO: 28589 - DNA, 20 bp, Artificial Sequence
  Probe
atcccggacgagccctcatt

SEQ ID NO: 28590 - DNA, 21 bp, Artificial Sequence
  Probe
atcccggacgagccctcattt

SEQ ID NO: 28591 - DNA, 22 bp, Artificial Sequence
  Probe
atcccggacgagccctcatttt

SEQ ID NO: 28592 - DNA, 23 bp, Artificial Sequence
  Probe
atcccggacgagccctcattttc

SEQ ID NO: 28593 - DNA, 24 bp, Artificial Sequence
  Probe
atcccggacgagccctcattttct

SEQ ID NO: 28594 - DNA, 18 bp, Artificial Sequence
  Probe
atcccggacgagccctcc

SEQ ID NO: 28595 - DNA, 22 bp, Artificial Sequence
  Probe
atcccggacgagccctccttta

SEQ ID NO: 28596 - DNA, 18 bp, Artificial Sequence
  Probe
atcccggacgagccctcg

SEQ ID NO: 28597 - DNA, 19 bp, Artificial Sequence
  Probe
atcccggacgagccctcgc

SEQ ID NO: 28598 - DNA, 19 bp, Artificial Sequence
  Probe
atcccggacgagccctcgt

SEQ ID NO: 28599 - DNA, 17 bp, Artificial Sequence
  Probe
atcccggacgagccctg

SEQ ID NO: 28600 - DNA, 18 bp, Artificial Sequence
  Probe
atcccggacgagccctgt

SEQ ID NO: 28601 - DNA, 19 bp, Artificial Sequence
  Probe
atcccggacgagccctgtt

SEQ ID NO: 28602 - DNA, 20 bp, Artificial Sequence
  Probe
atcccggacgagccctgttt

SEQ ID NO: 28603 - DNA, 21 bp, Artificial Sequence
  Probe
atcccggacgagccctgtttt

SEQ ID NO: 28604 - DNA, 17 bp, Artificial Sequence
  Probe
atcccgggtttcggcac

SEQ ID NO: 28605 - DNA, 18 bp, Artificial Sequence
  Probe
atcccgggtttcggcact

SEQ ID NO: 28606 - DNA, 18 bp, Artificial Sequence
  Probe
atcccgggtttcggcagc

SEQ ID NO: 28607 - DNA, 17 bp, Artificial Sequence
  Probe
atccggccggttagctc

SEQ ID NO: 28608 - DNA, 18 bp, Artificial Sequence
  Probe
atccggccggttagctca

SEQ ID NO: 28609 - DNA, 20 bp, Artificial Sequence
  Probe
atccggccggttagctcagt

SEQ ID NO: 28610 - DNA, 28 bp, Artificial Sequence
  Probe
atccggccggttagctcagttggttaga

SEQ ID NO: 28611 - DNA, 34 bp, Artificial Sequence
  Probe
atccggccggttagctcagttggttagagcgtgg

SEQ ID NO: 28612 - DNA, 35 bp, Artificial Sequence
  Probe
atccggccggttagctcagttggttagagcgtggt

SEQ ID NO: 28613 - DNA, 36 bp, Artificial Sequence
  Probe
atccggccggttagctcagttggttagagcgtggtg

SEQ ID NO: 28614 - DNA, 42 bp, Artificial Sequence
  Probe
atccggccggttagctcagttggttagagcgtggtgctaata

SEQ ID NO: 28615 - DNA, 15 bp, Artificial Sequence
  Probe
atccggctcgaagga

SEQ ID NO: 28616 - DNA, 17 bp, Artificial Sequence
  Probe
atccggctcgaaggacg

SEQ ID NO: 28617 - DNA, 18 bp, Artificial Sequence
  Probe
atccggctcgaaggacga

SEQ ID NO: 28618 - DNA, 16 bp, Artificial Sequence
  Probe
atccggctcggaggac

SEQ ID NO: 28619 - DNA, 17 bp, Artificial Sequence
  Probe
atccggctcggaggacg

SEQ ID NO: 28620 - DNA, 15 bp, Artificial Sequence
  Probe
atccgggtgccccct

SEQ ID NO: 28621 - DNA, 17 bp, Artificial Sequence
  Probe
atccgggtgccccctca

SEQ ID NO: 28622 - DNA, 18 bp, Artificial Sequence
  Probe
atccgggtgccccctcaa

SEQ ID NO: 28623 - DNA, 17 bp, Artificial Sequence
  Probe
atccgggtgccccctcg

SEQ ID NO: 28624 - DNA, 18 bp, Artificial Sequence
  Probe
atccgggtgccccctcgg

SEQ ID NO: 28625 - DNA, 17 bp, Artificial Sequence
  Probe
atccgggtgccccctct

SEQ ID NO: 28626 - DNA, 18 bp, Artificial Sequence
  Probe
atccgggtgccccctctg

SEQ ID NO: 28627 - DNA, 17 bp, Artificial Sequence
  Probe
atccgggtgccccctgc

SEQ ID NO: 28628 - DNA, 17 bp, Artificial Sequence
  Probe
atccgggtgcccccttc

SEQ ID NO: 28629 - DNA, 15 bp, Artificial Sequence
  Probe
atcctgccgactacg

SEQ ID NO: 28630 - DNA, 16 bp, Artificial Sequence
  Probe
atcctgccgactacga

SEQ ID NO: 28631 - DNA, 16 bp, Artificial Sequence
  Probe
atcctgccgactacgg

SEQ ID NO: 28632 - DNA, 17 bp, Artificial Sequence
  Probe
atcctgccgactacggc

SEQ ID NO: 28633 - DNA, 18 bp, Artificial Sequence
  Probe
atcctgccgactacggca

SEQ ID NO: 28634 - DNA, 18 bp, Artificial Sequence
  Probe
atcctgccgactacggcg

SEQ ID NO: 28635 - DNA, 18 bp, Artificial Sequence
  Probe
atcctgccgactacggga

SEQ ID NO: 28636 - DNA, 16 bp, Artificial Sequence
  Probe
atcctgccgactacgt

SEQ ID NO: 28637 - DNA, 17 bp, Artificial Sequence
  Probe
atcctgccgactacgtc

SEQ ID NO: 28638 - DNA, 18 bp, Artificial Sequence
  Probe
atcctgccgactacgtca

SEQ ID NO: 28639 - DNA, 16 bp, Artificial Sequence
  Probe
atcctgtcggctacgg

SEQ ID NO: 28640 - DNA, 15 bp, Artificial Sequence
  Probe
atccttaggtcgctg

SEQ ID NO: 28641 - DNA, 17 bp, Artificial Sequence
  Probe
atccttaggtcgctggt

SEQ ID NO: 28642 - DNA, 23 bp, Artificial Sequence
  Probe
atccttaggtcgctggttcgatt

SEQ ID NO: 28643 - DNA, 30 bp, Artificial Sequence
  Probe
atccttaggtcgctggttcgattccggctc

SEQ ID NO: 28644 - DNA, 35 bp, Artificial Sequence
  Probe
atccttaggtcgctggttcgattccggctcgaagg

SEQ ID NO: 28645 - DNA, 50 bp, Artificial Sequence; identical to SEQ ID NO: 3753
  Probe

SEQ ID NO: 28646 - DNA, 19 bp, Artificial Sequence
  Probe
atcgaaaccatcctctgct

SEQ ID NO: 28647 - DNA, 19 bp, Artificial Sequence
  Probe
atcgaacccatccctgaga

SEQ ID NO: 28648 - DNA, 31 bp, Artificial Sequence; identical to SEQ ID NO: 17315
  Probe

SEQ ID NO: 28649 - DNA, 36 bp, Artificial Sequence
  Probe
atcgcataaaacttaaaactttacagtcagaggttc

SEQ ID NO: 28650 - DNA, 36 bp, Artificial Sequence; identical to SEQ ID NO: 17323
  Probe

SEQ ID NO: 28651 - DNA, 36 bp, Artificial Sequence
  Probe
atcgggaggtagcgtggccgagtggtctaaggcgct

SEQ ID NO: 28652 - DNA, 15 bp, Artificial Sequence
  Probe
atcgggcccataccc

SEQ ID NO: 28653 - DNA, 29 bp, Artificial Sequence
  Probe
atcgggcccataccccgaaaatgttggtt

SEQ ID NO: 28654 - DNA, 36 bp, Artificial Sequence
  Probe
atcgggcccataccccgaaaatgttggttataccct

SEQ ID NO: 28655 - DNA, 26 bp, Artificial Sequence
  Probe
atcgggcgcccggctagctcagtcgg

SEQ ID NO: 28656 - DNA, 27 bp, Artificial Sequence
  Probe
atcgggcgcccggctagctcagtcggt

SEQ ID NO: 28657 - DNA, 28 bp, Artificial Sequence
  Probe
atcgggcgcccggctagctcagtcggta

SEQ ID NO: 28658 - DNA, 30 bp, Artificial Sequence
  Probe
atcgggcgcccggctagctcagtcggtaga

SEQ ID NO: 28659 - DNA, 31 bp, Artificial Sequence
  Probe
atcgggcgcccggctagctcagtcggtagag

SEQ ID NO: 28660 - DNA, 36 bp, Artificial Sequence
  Probe
atcgggcgcccggctagctcagtcggtagagcatga

SEQ ID NO: 28661 - DNA, 38 bp, Artificial Sequence
  Probe
atcgggcgcccggctagctcagtcggtagagcatgaga

SEQ ID NO: 28662 - DNA, 39 bp, Artificial Sequence
  Probe
atcgggcgcccggctagctcagtcggtagagcatgagac

SEQ ID NO: 28663 - DNA, 40 bp, Artificial Sequence
  Probe
atcgggcgcccggctagctcagtcggtagagcatgagact

SEQ ID NO: 28664 - DNA, 41 bp, Artificial Sequence
  Probe
atcgggcgcccggctagctcagtcggtagagcatgagactc

SEQ ID NO: 28665 - DNA, 44 bp, Artificial Sequence
  Probe
atcgggcgcccggctagctcagtcggtagagcatgagactctta

SEQ ID NO: 28666 - DNA, 22 bp, Artificial Sequence
  Probe
atcggtgcatgggtggttcagt

SEQ ID NO: 28667 - DNA, 23 bp, Artificial Sequence
  Probe
atcggtgcatgggtggttcagtg

SEQ ID NO: 28668 - DNA, 24 bp, Artificial Sequence
  Probe
atcggtgcatgggtggttcagtgg

SEQ ID NO: 28669 - DNA, 25 bp, Artificial Sequence
  Probe
atcggtgcatgggtggttcagtggt

SEQ ID NO: 28670 - DNA, 26 bp, Artificial Sequence
  Probe
atcggtgcatgggtggttcagtggta

SEQ ID NO: 28671 - DNA, 27 bp, Artificial Sequence
  Probe
atcggtgcatgggtggttcagtggtag

SEQ ID NO: 28672 - DNA, 28 bp, Artificial Sequence
  Probe
atcggtgcatgggtggttcagtggtaga

SEQ ID NO: 28673 - DNA, 29 bp, Artificial Sequence
  Probe
atcggtgcatgggtggttcagtggtagaa

SEQ ID NO: 28674 - DNA, 30 bp, Artificial Sequence; identical to SEQ ID NO: 17334
  Probe

SEQ ID NO: 28675 - DNA, 31 bp, Artificial Sequence; identical to SEQ ID NO: 17335
  Probe

SEQ ID NO: 28676 - DNA, 32 bp, Artificial Sequence; identical to SEQ ID NO: 17336
  Probe

SEQ ID NO: 28677 - DNA, 33 bp, Artificial Sequence; identical to SEQ ID NO: 17337
  Probe

SEQ ID NO: 28678 - DNA, 35 bp, Artificial Sequence; identical to SEQ ID NO: 17338
  Probe

SEQ ID NO: 28679 - DNA, 36 bp, Artificial Sequence; identical to SEQ ID NO: 17339
  Probe

SEQ ID NO: 28680 - DNA, 37 bp, Artificial Sequence; identical to SEQ ID NO: 17340
  Probe

SEQ ID NO: 28681 - DNA, 38 bp, Artificial Sequence; identical to SEQ ID NO: 17341
  Probe

SEQ ID NO: 28682 - DNA, 39 bp, Artificial Sequence
  Probe
atcggtgcatgggtggttcagtggtagaattctcgcctg

SEQ ID NO: 28683 - DNA, 19 bp, Artificial Sequence
  Probe
atcggttagcgcattcggc

SEQ ID NO: 28684 - DNA, 19 bp, Artificial Sequence
  Probe
atcggttagcgccttcggc

SEQ ID NO: 28685 - DNA, 19 bp, Artificial Sequence
  Probe
atcggttagcgcgttcggc

SEQ ID NO: 28686 - DNA, 26 bp, Artificial Sequence
  Probe
atcggttagcgcgttcggctgttaac

SEQ ID NO: 28687 - DNA, 36 bp, Artificial Sequence
  Probe
atcgtggccctgtagctcagcggttggagcgctggt

SEQ ID NO: 28688 - DNA, 23 bp, Artificial Sequence
  Probe
atctaaagacaggggttaggcct

SEQ ID NO: 28689 - DNA, 35 bp, Artificial Sequence; identical to SEQ ID NO: 3765
  Probe

SEQ ID NO: 28690 - DNA, 36 bp, Artificial Sequence; identical to SEQ ID NO: 3766
  Probe

SEQ ID NO: 28691 - DNA, 36 bp, Artificial Sequence; identical to SEQ ID NO: 393
  Probe

SEQ ID NO: 28692 - DNA, 37 bp, Artificial Sequence; identical to SEQ ID NO: 394
  Probe

SEQ ID NO: 28693 - DNA, 17 bp, Artificial Sequence
  Probe
atctattgatgagggtc

SEQ ID NO: 28694 - DNA, 18 bp, Artificial Sequence
  Probe
atctattgatgagggtct

SEQ ID NO: 28695 - DNA, 36 bp, Artificial Sequence
  Probe
atctcagggccagtggcgcaatggataacgcgtctg

SEQ ID NO: 28696 - DNA, 39 bp, Artificial Sequence
  Probe
atctcagggccagtggcgcaatggataacgcgtctgact

SEQ ID NO: 28697 - DNA, 36 bp, Artificial Sequence
  Probe
atctcagggtcgtgggttcgagccccacgttgggcg

SEQ ID NO: 28698 - DNA, 39 bp, Artificial Sequence
  Probe
atctcagggtcgtgggttcgagccccacgttgggcggca

SEQ ID NO: 28699 - DNA, 18 bp, Artificial Sequence
  Probe
atctccagcattccccct

SEQ ID NO: 28700 - DNA, 19 bp, Artificial Sequence
  Probe
atctccagcattccccctc

SEQ ID NO: 28701 - DNA, 20 bp, Artificial Sequence
  Probe
atctccagcattccccctca

SEQ ID NO: 28702 - DNA, 24 bp, Artificial Sequence
  Probe
atctccagcattccccctcaaacc

SEQ ID NO: 28703 - DNA, 25 bp, Artificial Sequence
  Probe
atctccagcattccccctcaaacct

SEQ ID NO: 28704 - DNA, 15 bp, Artificial Sequence
  Probe
atctcgctggggcct

SEQ ID NO: 28705 - DNA, 16 bp, Artificial Sequence
  Probe
atctcgctggggcctc

SEQ ID NO: 28706 - DNA, 15 bp, Artificial Sequence
  Probe
atctcggtggaacct

SEQ ID NO: 28707 - DNA, 16 bp, Artificial Sequence
  Probe
atctcggtggaacctg

SEQ ID NO: 28708 - DNA, 17 bp, Artificial Sequence
  Probe
atctcggtggaacctgc

SEQ ID NO: 28709 - DNA, 18 bp, Artificial Sequence
  Probe
atctcggtggaacctgca

SEQ ID NO: 28710 - DNA, 26 bp, Artificial Sequence
  Probe
atctcggtggaacctgcattggtttt

SEQ ID NO: 28711 - DNA, 16 bp, Artificial Sequence
  Probe
atctcggtggaacctt

SEQ ID NO: 28712 - DNA, 15 bp, Artificial Sequence
  Probe
atctcggtgggacct

SEQ ID NO: 28713 - DNA, 16 bp, Artificial Sequence
  Probe
atctcggtgggacctc

SEQ ID NO: 28714 - DNA, 22 bp, Artificial Sequence
  Probe
atctcggtgggacctcacgaga

SEQ ID NO: 28715 - DNA, 24 bp, Artificial Sequence
  Probe
atctcggtgggacctcacgagact

SEQ ID NO: 28716 - DNA, 17 bp, Artificial Sequence
  Probe
atctcggtgggacctgt

SEQ ID NO: 28717 - DNA, 36 bp, Artificial Sequence
  Probe
atctgaaggtcctgagttcgaacctcagagggggca

SEQ ID NO: 28718 - DNA, 39 bp, Artificial Sequence; identical to SEQ ID NO: 3780
  Probe

SEQ ID NO: 28719 - DNA, 36 bp, Artificial Sequence
  Probe
atctgaaggtcgtgagttcgagcctcacacggggca

SEQ ID NO: 28720 - DNA, 36 bp, Artificial Sequence; identical to SEQ ID NO: 17365
  Probe

SEQ ID NO: 28721 - DNA, 38 bp, Artificial Sequence
  Probe
atctgaaggtcgtgagttcgatcctcacacggggcaca

SEQ ID NO: 28722 - DNA, 39 bp, Artificial Sequence; identical to SEQ ID NO: 3783
  Probe

SEQ ID NO: 28723 - DNA, 27 bp, Artificial Sequence
  Probe
atctgacaacagaggcttacgacccct

SEQ ID NO: 28724 - DNA, 36 bp, Artificial Sequence; identical to SEQ ID NO: 3790
  Probe

SEQ ID NO: 28725 - DNA, 36 bp, Artificial Sequence
  Probe
atctgagggtccagggttcaagtccctgtccaggcg

SEQ ID NO: 28726 - DNA, 39 bp, Artificial Sequence
  Probe
atctgagggtccagggttcaagtccctgtccaggcgcta

SEQ ID NO: 28727 - DNA, 36 bp, Artificial Sequence
  Probe
atctgagggtccagggttcaagtccctgttcaggcg

SEQ ID NO: 28728 - DNA, 38 bp, Artificial Sequence
  Probe
atctgagggtccagggttcaagtccctgttcgggcggc

SEQ ID NO: 28729 - DNA, 39 bp, Artificial Sequence; identical to SEQ ID NO: 3794
  Probe

SEQ ID NO: 28730 - DNA, 38 bp, Artificial Sequence
  Probe
atctgagggtccagggttcaagtccctgttcgggcgtc

SEQ ID NO: 28731 - DNA, 20 bp, Artificial Sequence
  Probe
atctggggtggcctgtgact

SEQ ID NO: 28732 - DNA, 17 bp, Artificial Sequence
  Probe
atctgtagtcgtggccg

SEQ ID NO: 28733 - DNA, 18 bp, Artificial Sequence
  Probe
atctgtagtcgtggccga

SEQ ID NO: 28734 - DNA, 19 bp, Artificial Sequence
  Probe
atctgtagtcgtggccgag

SEQ ID NO: 28735 - DNA, 20 bp, Artificial Sequence
  Probe
atctgtagtcgtggccgagt

SEQ ID NO: 28736 - DNA, 21 bp, Artificial Sequence
  Probe
atctgtagtcgtggccgagtg

SEQ ID NO: 28737 - DNA, 36 bp, Artificial Sequence
  Probe
atctgtagtcgtggccgagtggttaaggcgatggac

SEQ ID NO: 28738 - DNA, 36 bp, Artificial Sequence
  Probe
atctgtttccgtagtgtagtggttatcacgttcgcc

SEQ ID NO: 28739 - DNA, 37 bp, Artificial Sequence
  Probe
atctgtttccgtagtgtagtggttatcacgttcgcct

SEQ ID NO: 28740 - DNA, 36 bp, Artificial Sequence
  Probe
atcttagctttgggtgctaatggtggagttaaagac

SEQ ID NO: 28741 - DNA, 22 bp, Artificial Sequence
  Probe
atgaaaacctttttccaaggac

SEQ ID NO: 28742 - DNA, 24 bp, Artificial Sequence
  Probe
atgaaaacctttttccaaggacaa

SEQ ID NO: 28743 - DNA, 15 bp, Artificial Sequence
  Probe
atgagaatcgaaccc

SEQ ID NO: 28744 - DNA, 20 bp, Artificial Sequence
  Probe
atgagaatcgaacccatccc

SEQ ID NO: 28745 - DNA, 23 bp, Artificial Sequence
  Probe
atgagaatcgaacccatccctga

SEQ ID NO: 28746 - DNA, 24 bp, Artificial Sequence
  Probe
atgagaatcgaacccatccctgag

SEQ ID NO: 28747 - DNA, 25 bp, Artificial Sequence
  Probe
atgagaatcgaacccatccctgaga

SEQ ID NO: 28748 - DNA, 15 bp, Artificial Sequence
  Probe
atgaggccccgggtt

SEQ ID NO: 28749 - DNA, 16 bp, Artificial Sequence
  Probe
atgaggccccgggttc

SEQ ID NO: 28750 - DNA, 17 bp, Artificial Sequence
  Probe
atgatgtatgctttgtt

SEQ ID NO: 28751 - DNA, 18 bp, Artificial Sequence
  Probe
atgatgtatgctttgttt

SEQ ID NO: 28752 - DNA, 19 bp, Artificial Sequence
  Probe
atgatgtatgctttgtttc

SEQ ID NO: 28753 - DNA, 20 bp, Artificial Sequence
  Probe
atgatgtatgctttgtttct

SEQ ID NO: 28754 - DNA, 21 bp, Artificial Sequence
  Probe
atgatgtatgctttgtttctg

SEQ ID NO: 28755 - DNA, 23 bp, Artificial Sequence
  Probe
atgatgtatgctttgtttctgtt

SEQ ID NO: 28756 - DNA, 24 bp, Artificial Sequence
  Probe
atgatgtatgctttgtttctgttg

SEQ ID NO: 28757 - DNA, 26 bp, Artificial Sequence
  Probe
atgatgtatgctttgtttctgttgag

SEQ ID NO: 28758 - DNA, 27 bp, Artificial Sequence
  Probe
atgatgtatgctttgtttctgttgagt

SEQ ID NO: 28759 - DNA, 28 bp, Artificial Sequence
  Probe
atgatgtatgctttgtttctgttgagtg

SEQ ID NO: 28760 - DNA, 29 bp, Artificial Sequence
  Probe
atgatgtatgctttgtttctgttgagtgt

SEQ ID NO: 28761 - DNA, 30 bp, Artificial Sequence; identical to SEQ ID NO: 17384
  Probe

SEQ ID NO: 28762 - DNA, 34 bp, Artificial Sequence
  Probe
atgattctcgcttagggtgcgagaggtcccgggt

SEQ ID NO: 28763 - DNA, 34 bp, Artificial Sequence; identical to SEQ ID NO: 17389
  Probe

SEQ ID NO: 28764 - DNA, 34 bp, Artificial Sequence
  Probe
atgattctcgctttgggtgcgagaggtcccgggt

SEQ ID NO: 28765 - DNA, 36 bp, Artificial Sequence
  Probe
atgatttcgactcattaaattatgataatcatattt

SEQ ID NO: 28766 - DNA, 21 bp, Artificial Sequence
  Probe
atgcacactactataaccacc

SEQ ID NO: 28767 - DNA, 22 bp, Artificial Sequence
  Probe
atgcacactactataaccaccc

SEQ ID NO: 28768 - DNA, 23 bp, Artificial Sequence
  Probe
atgcacactactataaccaccct

SEQ ID NO: 28769 - DNA, 24 bp, Artificial Sequence
  Probe
atgcacactactataaccacccta

SEQ ID NO: 28770 - DNA, 36 bp, Artificial Sequence
  Probe
atgcaggtttccgtagtgtagtggttatcacgttcg

SEQ ID NO: 28771 - DNA, 36 bp, Artificial Sequence
  Probe
atgcatccttcgatagctcagctggtagagcggagg

SEQ ID NO: 28772 - DNA, 28 bp, Artificial Sequence
  Probe
atgccccaactaaatactaccgtatggc

SEQ ID NO: 28773 - DNA, 17 bp, Artificial Sequence
  Probe
atgcccccatgtctaac

SEQ ID NO: 28774 - DNA, 18 bp, Artificial Sequence
  Probe
atgcccccatgtctaaca

SEQ ID NO: 28775 - DNA, 34 bp, Artificial Sequence; identical to SEQ ID NO: 3822
  Probe

SEQ ID NO: 28776 - DNA, 16 bp, Artificial Sequence
  Probe
atgcccctcatttaca

SEQ ID NO: 28777 - DNA, 17 bp, Artificial Sequence
  Probe
atgcccctcatttacat

SEQ ID NO: 28778 - DNA, 18 bp, Artificial Sequence
  Probe
atgcccctcatttacata

SEQ ID NO: 28779 - DNA, 30 bp, Artificial Sequence; identical to SEQ ID NO: 3825
  Probe

SEQ ID NO: 28780 - DNA, 19 bp, Artificial Sequence
  Probe
atgccgaggttgtgagttc

SEQ ID NO: 28781 - DNA, 36 bp, Artificial Sequence; identical to SEQ ID NO: 17435
  Probe

SEQ ID NO: 28782 - DNA, 17 bp, Artificial Sequence
  Probe
atggaggccatggggtt

SEQ ID NO: 28783 - DNA, 28 bp, Artificial Sequence
  Probe
atggaggccatggggttggcttgaaacc

SEQ ID NO: 28784 - DNA, 36 bp, Artificial Sequence
  Probe
atggaggcgtgggttcgaatcccacttctgacacaa

SEQ ID NO: 28785 - DNA, 36 bp, Artificial Sequence
  Probe
atggaggcgtgggttcgaatcccacttctgacacat

SEQ ID NO: 28786 - DNA, 19 bp, Artificial Sequence
  Probe
atggataacgcgtctgact

SEQ ID NO: 28787 - DNA, 22 bp, Artificial Sequence
  Probe
atggataacgcgtctgactacg

SEQ ID NO: 28788 - DNA, 23 bp, Artificial Sequence
  Probe
atggataacgcgtctgactacgg

SEQ ID NO: 28789 - DNA, 24 bp, Artificial Sequence
  Probe
atggataacgcgtctgactacgga

SEQ ID NO: 28790 - DNA, 26 bp, Artificial Sequence
  Probe
atggataacgcgtctgactacggatc

SEQ ID NO: 28791 - DNA, 30 bp, Artificial Sequence
  Probe
atggataacgcgtctgactacggatcagaa

SEQ ID NO: 28792 - DNA, 32 bp, Artificial Sequence
  Probe
atggataacgcgtctgactacggatcagaaga

SEQ ID NO: 28793 - DNA, 15 bp, Artificial Sequence
  Probe
atggataaggcactg

SEQ ID NO: 28794 - DNA, 17 bp, Artificial Sequence
  Probe
atggataaggcactggc

SEQ ID NO: 28795 - DNA, 15 bp, Artificial Sequence
  Probe
atggataaggcatca

SEQ ID NO: 28796 - DNA, 17 bp, Artificial Sequence
  Probe
atggataaggcatcagc

SEQ ID NO: 28797 - DNA, 19 bp, Artificial Sequence
  Probe
atggataaggcatcagcct

SEQ ID NO: 28798 - DNA, 36 bp, Artificial Sequence
  Probe
atggataaggcatcagcctccggagctggggattgt

SEQ ID NO: 28799 - DNA, 15 bp, Artificial Sequence
  Probe
atggataaggcattg

SEQ ID NO: 28800 - DNA, 17 bp, Artificial Sequence
  Probe
atggataaggcattggc

SEQ ID NO: 28801 - DNA, 18 bp, Artificial Sequence
  Probe
atggataaggcattggcc

SEQ ID NO: 28802 - DNA, 20 bp, Artificial Sequence
  Probe
atggataaggcattggcctc

SEQ ID NO: 28803 - DNA, 16 bp, Artificial Sequence
  Probe
atggataaggcgtctg

SEQ ID NO: 28804 - DNA, 19 bp, Artificial Sequence
  Probe
atggataaggcgtctgact

SEQ ID NO: 28805 - DNA, 36 bp, Artificial Sequence
  Probe
atggataaggcgtctgacttcggatcagaagattga

SEQ ID NO: 28806 - DNA, 40 bp, Artificial Sequence
  Probe
atggataaggcgtctgacttcggatcagaagattgagggt

SEQ ID NO: 28807 - DNA, 41 bp, Artificial Sequence
  Probe
atggataaggcgtctgacttcggatcagaagattgagggtt

SEQ ID NO: 28808 - DNA, 16 bp, Artificial Sequence
  Probe
atggatagcgcattgg

SEQ ID NO: 28809 - DNA, 17 bp, Artificial Sequence
  Probe
atggatagcgcattgga

SEQ ID NO: 28810 - DNA, 18 bp, Artificial Sequence
  Probe
atggatagcgcattggac

SEQ ID NO: 28811 - DNA, 19 bp, Artificial Sequence
  Probe
atggatagcgcattggact

SEQ ID NO: 28812 - DNA, 16 bp, Artificial Sequence
  Probe
atggcacatgcagcgc

SEQ ID NO: 28813 - DNA, 23 bp, Artificial Sequence
  Probe
atggcacatgcagcgcaagtagg

SEQ ID NO: 28814 - DNA, 24 bp, Artificial Sequence
  Probe
atggcacatgcagcgcaagtaggt

SEQ ID NO: 28815 - DNA, 25 bp, Artificial Sequence
  Probe
atggcacatgcagcgcaagtaggtc

SEQ ID NO: 28816 - DNA, 26 bp, Artificial Sequence
  Probe
atggcacatgcagcgcaagtaggtct

SEQ ID NO: 28817 - DNA, 27 bp, Artificial Sequence
  Probe
atggcacatgcagcgcaagtaggtcta

SEQ ID NO: 28818 - DNA, 28 bp, Artificial Sequence
  Probe
atggcacatgcagcgcaagtaggtctac

SEQ ID NO: 28819 - DNA, 29 bp, Artificial Sequence
  Probe
atggcacatgcagcgcaagtaggtctaca

SEQ ID NO: 28820 - DNA, 30 bp, Artificial Sequence; identical to SEQ ID NO: 3841
  Probe

SEQ ID NO: 28821 - DNA, 19 bp, Artificial Sequence
  Probe
atggcacggcaaggggagt

SEQ ID NO: 28822 - DNA, 19 bp, Artificial Sequence
  Probe
atggcacggcaaggggctc

SEQ ID NO: 28823 - DNA, 20 bp, Artificial Sequence
  Probe
atggcagagcccggtaatcg

SEQ ID NO: 28824 - DNA, 24 bp, Artificial Sequence
  Probe
atggcagagcccggtaatcgcata

SEQ ID NO: 28825 - DNA, 36 bp, Artificial Sequence
  Probe
atggcagagcccggtaatcgcataaaacttaaaact

SEQ ID NO: 28826 - DNA, 20 bp, Artificial Sequence
  Probe
atggccaacctcctactcct

SEQ ID NO: 28827 - DNA, 22 bp, Artificial Sequence
  Probe
atggccaacctcctactcctca

SEQ ID NO: 28828 - DNA, 16 bp, Artificial Sequence
  Probe
atggccgcatatattt

SEQ ID NO: 28829 - DNA, 17 bp, Artificial Sequence
  Probe
atggccgcatatatttt

SEQ ID NO: 28830 - DNA, 18 bp, Artificial Sequence
  Probe
atggccgcatatatttta

SEQ ID NO: 28831 - DNA, 25 bp, Artificial Sequence
  Probe
atggccgcccggctagctcagtcgg

SEQ ID NO: 28832 - DNA, 28 bp, Artificial Sequence
  Probe
atggccgcccggctagctcagtcggtag

SEQ ID NO: 28833 - DNA, 29 bp, Artificial Sequence
  Probe
atggccgcccggctagctcagtcggtaga

SEQ ID NO: 28834 - DNA, 30 bp, Artificial Sequence
  Probe
atggccgcccggctagctcagtcggtagag

SEQ ID NO: 28835 - DNA, 36 bp, Artificial Sequence
  Probe
atggccgcccggctagctcagtcggtagagcatgag

SEQ ID NO: 28836 - DNA, 39 bp, Artificial Sequence
  Probe
atggccgcccggctagctcagtcggtagagcatgagact

SEQ ID NO: 28837 - DNA, 40 bp, Artificial Sequence
  Probe
atggccgcccggctagctcagtcggtagagcatgagactc

SEQ ID NO: 28838 - DNA, 41 bp, Artificial Sequence
  Probe
atggccgcccggctagctcagtcggtagagcatgagactct

SEQ ID NO: 28839 - DNA, 43 bp, Artificial Sequence
  Probe
atggccgcccggctagctcagtcggtagagcatgagactctta

SEQ ID NO: 28840 - DNA, 50 bp, Artificial Sequence
  Probe
atggccgcccggctagctcagtcggtagagcatgagactcttaatctcag

SEQ ID NO: 28841 - DNA, 15 bp, Artificial Sequence
  Probe
atggcctccatgact

SEQ ID NO: 28842 - DNA, 21 bp, Artificial Sequence
  Probe
atggcctccatgactttttca

SEQ ID NO: 28843 - DNA, 23 bp, Artificial Sequence
  Probe
atggcctccatgactttttcaaa

SEQ ID NO: 28844 - DNA, 24 bp, Artificial Sequence
  Probe
atggcctccatgactttttcaaaa

SEQ ID NO: 28845 - DNA, 25 bp, Artificial Sequence
  Probe
atggcctccatgactttttcaaaaa

SEQ ID NO: 28846 - DNA, 26 bp, Artificial Sequence
  Probe
atggcctccatgactttttcaaaaag

SEQ ID NO: 28847 - DNA, 22 bp, Artificial Sequence
  Probe
atggctgagtgaagcattggac

SEQ ID NO: 28848 - DNA, 23 bp, Artificial Sequence
  Probe
atggctgagtgaagcattggact

SEQ ID NO: 28849 - DNA, 25 bp, Artificial Sequence
  Probe
atggctgagtgaagcattggactgt

SEQ ID NO: 28850 - DNA, 26 bp, Artificial Sequence
  Probe
atggctgagtgaagcattggactgta

SEQ ID NO: 28851 - DNA, 27 bp, Artificial Sequence
  Probe
atggctgagtgaagcattggactgtaa

SEQ ID NO: 28852 - DNA, 28 bp, Artificial Sequence
  Probe
atggctgagtgaagcattggactgtaaa

SEQ ID NO: 28853 - DNA, 29 bp, Artificial Sequence
  Probe
atggctgagtgaagcattggactgtaaat

SEQ ID NO: 28854 - DNA, 36 bp, Artificial Sequence
  Probe
atggctgagtgaagcattggactgtaaatctaaaga

SEQ ID NO: 28855 - DNA, 36 bp, Artificial Sequence
  Probe
atgggaccacgtggcctaatggataaggcgtctgac

SEQ ID NO: 28856 - DNA, 16 bp, Artificial Sequence
  Probe
atgggcggtcctcgtt

SEQ ID NO: 28857 - DNA, 19 bp, Artificial Sequence
  Probe
atgggcggtcctcgttagt

SEQ ID NO: 28858 - DNA, 26 bp, Artificial Sequence
  Probe
atgggcggtcctcgttagtatagtgg

SEQ ID NO: 28859 - DNA, 31 bp, Artificial Sequence
  Probe
atgggcggtcctcgttagtatagtggtgagt

SEQ ID NO: 28860 - DNA, 34 bp, Artificial Sequence
  Probe
atgggcggtcctcgttagtatagtggtgagtatc

SEQ ID NO: 28861 - DNA, 36 bp, Artificial Sequence
  Probe
atgggcggtcctcgttagtatagtggtgagtatccc

SEQ ID NO: 28862 - DNA, 26 bp, Artificial Sequence
  Probe
atggggtgtgataggtggcacggaga

SEQ ID NO: 28863 - DNA, 32 bp, Artificial Sequence
  Probe
atggggtgtgataggtggcacggagaattttg

SEQ ID NO: 28864 - DNA, 19 bp, Artificial Sequence
  Probe
atggggttggcttgaaacc

SEQ ID NO: 28865 - DNA, 36 bp, Artificial Sequence
  Probe
atggggttggcttgaaaccagctttggggggttcga

SEQ ID NO: 28866 - DNA, 28 bp, Artificial Sequence
  Probe
atgggtggttcagtggtagaattctcgc

SEQ ID NO: 28867 - DNA, 31 bp, Artificial Sequence; identical to SEQ ID NO: 404
  Probe

SEQ ID NO: 28868 - DNA, 32 bp, Artificial Sequence; identical to SEQ ID NO: 405
  Probe

SEQ ID NO: 28869 - DNA, 34 bp, Artificial Sequence; identical to SEQ ID NO: 407
  Probe

SEQ ID NO: 28870 - DNA, 36 bp, Artificial Sequence
  Probe
atgggtggttcagtggtagaattctcgcctgccacg

SEQ ID NO: 28871 - DNA, 15 bp, Artificial Sequence
  Probe
atggtagagcgctcg

SEQ ID NO: 28872 - DNA, 17 bp, Artificial Sequence
  Probe
atggtagagcgctcgct

SEQ ID NO: 28873 - DNA, 36 bp, Artificial Sequence
  Probe
atggtctagcggttaggattcctggttttcacccag

SEQ ID NO: 28874 - DNA, 17 bp, Artificial Sequence
  Probe
atggtgagcactctgga

SEQ ID NO: 28875 - DNA, 28 bp, Artificial Sequence
  Probe
atggtgagcactctggactctgaatcca

SEQ ID NO: 28876 - DNA, 36 bp, Artificial Sequence
  Probe
atggtgagcactctggactctgaatccagcgatccg

SEQ ID NO: 28877 - DNA, 17 bp, Artificial Sequence
  Probe
atggtggagttaaagac

SEQ ID NO: 28878 - DNA, 29 bp, Artificial Sequence
  Probe
atggtggagttaaagactttttctctgat

SEQ ID NO: 28879 - DNA, 27 bp, Artificial Sequence
  Probe
atggtggttcagtggtagaattctcgc

SEQ ID NO: 28880 - DNA, 28 bp, Artificial Sequence
  Probe
atggtggttcagtggtagaattctcgcc

SEQ ID NO: 28881 - DNA, 29 bp, Artificial Sequence
  Probe
atggtggttcagtggtagaattctcgcct

SEQ ID NO: 28882 - DNA, 50 bp, Artificial Sequence
  Probe
atggtgtaatggtaagcactctggactctgaatccagcgatccgagttcg

SEQ ID NO: 28883 - DNA, 50 bp, Artificial Sequence
  Probe
atggtgtaatggtgagcactctggactctgaatccagcgatccgagttcg

SEQ ID NO: 28884 - DNA, 27 bp, Artificial Sequence
  Probe
atggtgtaatggttagcactctggact

SEQ ID NO: 28885 - DNA, 28 bp, Artificial Sequence
  Probe
atggtgtaatggttagcactctggactc

SEQ ID NO: 28886 - DNA, 30 bp, Artificial Sequence
  Probe
atggtgtaatggttagcactctggactctg

SEQ ID NO: 28887 - DNA, 50 bp, Artificial Sequence
  Probe
atggtgtaatggttagcactctggactctgaatccagcgatccgagttca

SEQ ID NO: 28888 - DNA, 36 bp, Artificial Sequence
  Probe
atggtgtaatggttagcactctggactttgaatcca

SEQ ID NO: 28889 - DNA, 15 bp, Artificial Sequence
  Probe
atggttagcactctg

SEQ ID NO: 28890 - DNA, 16 bp, Artificial Sequence
  Probe
atggttagcactctgg

SEQ ID NO: 28891 - DNA, 17 bp, Artificial Sequence
  Probe
atggttagcactctgga

SEQ ID NO: 28892 - DNA, 18 bp, Artificial Sequence
  Probe
atggttagcactctggac

SEQ ID NO: 28893 - DNA, 19 bp, Artificial Sequence
  Probe
atggttagcactctggact

SEQ ID NO: 28894 - DNA, 20 bp, Artificial Sequence
  Probe
atggttagcactctggactc

SEQ ID NO: 28895 - DNA, 21 bp, Artificial Sequence
  Probe
atggttagcactctggactct

SEQ ID NO: 28896 - DNA, 23 bp, Artificial Sequence
  Probe
atggttagcactctggactctga

SEQ ID NO: 28897 - DNA, 24 bp, Artificial Sequence
  Probe
atggttagcactctggactctgaa

SEQ ID NO: 28898 - DNA, 30 bp, Artificial Sequence; identical to SEQ ID NO: 9399
  Probe

SEQ ID NO: 28899 - DNA, 38 bp, Artificial Sequence; identical to SEQ ID NO: 17471
  Probe

SEQ ID NO: 28900 - DNA, 39 bp, Artificial Sequence; identical to SEQ ID NO: 17472
  Probe

SEQ ID NO: 28901 - DNA, 40 bp, Artificial Sequence
  Probe
atggttagcactctggactctgaatccagcgatccgagtt

SEQ ID NO: 28902 - DNA, 23 bp, Artificial Sequence
  Probe
atggttagcactctggactttga

SEQ ID NO: 28903 - DNA, 24 bp, Artificial Sequence
  Probe
atggttagcactctggactttgaa

SEQ ID NO: 28904 - DNA, 25 bp, Artificial Sequence
  Probe
atggttagcactctggactttgaat

SEQ ID NO: 28905 - DNA, 28 bp, Artificial Sequence
  Probe
atggttagcactctggactttgaatcca

SEQ ID NO: 28906 - DNA, 36 bp, Artificial Sequence
  Probe
atggttagcactctggactttgaatccagcgatccg

SEQ ID NO: 28907 - DNA, 39 bp, Artificial Sequence
  Probe
atggttagcactctggactttgaatccagcgatccgagt

SEQ ID NO: 28908 - DNA, 40 bp, Artificial Sequence
  Probe
atggttagcactctggactttgaatccagcgatccgagtt

SEQ ID NO: 28909 - DNA, 22 bp, Artificial Sequence
  Probe
atggtttttcatatcattggtc

SEQ ID NO: 28910 - DNA, 23 bp, Artificial Sequence
  Probe
atggtttttcatatcattggtcg

SEQ ID NO: 28911 - DNA, 30 bp, Artificial Sequence; identical to SEQ ID NO: 9405
  Probe

SEQ ID NO: 28912 - DNA, 31 bp, Artificial Sequence
  Probe
atggtttttcatatcattggtcgtggttgta

SEQ ID NO: 28913 - DNA, 32 bp, Artificial Sequence
  Probe
atggtttttcatatcattggtcgtggttgtag

SEQ ID NO: 28914 - DNA, 33 bp, Artificial Sequence
  Probe
atggtttttcatatcattggtcgtggttgtagt

SEQ ID NO: 28915 - DNA, 34 bp, Artificial Sequence
  Probe
atggtttttcatatcattggtcgtggttgtagtc

SEQ ID NO: 28916 - DNA, 35 bp, Artificial Sequence
  Probe
atggtttttcatatcattggtcgtggttgtagtcc

SEQ ID NO: 28917 - DNA, 44 bp, Artificial Sequence
  Probe
atggtttttcatatcattggtcgtggttgtagtccgtgcgagaa

SEQ ID NO: 28918 - DNA, 45 bp, Artificial Sequence
  Probe
atggtttttcatatcattggtcgtggttgtagtccgtgcgagaat

SEQ ID NO: 28919 - DNA, 46 bp, Artificial Sequence
  Probe
atggtttttcatatcattggtcgtggttgtagtccgtgcgagaata

SEQ ID NO: 28920 - DNA, 15 bp, Artificial Sequence
  Probe
atgtagcttacctcc

SEQ ID NO: 28921 - DNA, 16 bp, Artificial Sequence
  Probe
atgtagcttacctcct

SEQ ID NO: 28922 - DNA, 26 bp, Artificial Sequence
  Probe
atgtagcttacctcctcaaagcaata

SEQ ID NO: 28923 - DNA, 36 bp, Artificial Sequence
  Probe
atgtaggctctatggcttagttggttaaagcgcctg

SEQ ID NO: 28924 - DNA, 27 bp, Artificial Sequence
  Probe
atgtatgctttgtttctgttgagtgtg

SEQ ID NO: 28925 - DNA, 22 bp, Artificial Sequence
  Probe
atgtcgttagtctaggctgtca

SEQ ID NO: 28926 - DNA, 24 bp, Artificial Sequence
  Probe
atgtcgttagtctaggctgtcagc

SEQ ID NO: 28927 - DNA, 25 bp, Artificial Sequence
  Probe
atgtcgttagtctaggctgtcagct

SEQ ID NO: 28928 - DNA, 30 bp, Artificial Sequence; identical to SEQ ID NO: 9409
  Probe

SEQ ID NO: 28929 - DNA, 36 bp, Artificial Sequence
  Probe
atgtctctgtggcgcaatcggctagcgcgtttggct

SEQ ID NO: 28930 - DNA, 33 bp, Artificial Sequence
  Probe
atgtctgtagtcgtggccgagtggttaaggtga

SEQ ID NO: 28931 - DNA, 36 bp, Artificial Sequence
  Probe
atgtcttccctggtggtctagtggttaggattcggc

SEQ ID NO: 28932 - DNA, 36 bp, Artificial Sequence
  Probe
atgtgacgaggtggccgagtggttaaggcgatggac

SEQ ID NO: 28933 - DNA, 15 bp, Artificial Sequence
  Probe
atgtggtggcttact

SEQ ID NO: 28934 - DNA, 16 bp, Artificial Sequence
  Probe
atgtggtggcttactt

SEQ ID NO: 28935 - DNA, 17 bp, Artificial Sequence
  Probe
atgtggtggcttacttt

SEQ ID NO: 28936 - DNA, 18 bp, Artificial Sequence
  Probe
atgtggtggcttactttt

SEQ ID NO: 28937 - DNA, 19 bp, Artificial Sequence
  Probe
atgtggtggcttacttttg

SEQ ID NO: 28938 - DNA, 36 bp, Artificial Sequence
  Probe
atgtgtcaggatggccgagcggtctaaggcgctgcg

SEQ ID NO: 28939 - DNA, 15 bp, Artificial Sequence
  Probe
atgtttagacgggct

SEQ ID NO: 28940 - DNA, 22 bp, Artificial Sequence
  Probe
atgtttagacgggctcacatca

SEQ ID NO: 28941 - DNA, 23 bp, Artificial Sequence
  Probe
atgtttagacgggctcacatcac

SEQ ID NO: 28942 - DNA, 26 bp, Artificial Sequence
  Probe
atgtttagacgggctcacatcacccc

SEQ ID NO: 28943 - DNA, 27 bp, Artificial Sequence
  Probe
atgtttagacgggctcacatcacccca

SEQ ID NO: 28944 - DNA, 29 bp, Artificial Sequence
  Probe
atgtttagacgggctcacatcaccccata

SEQ ID NO: 28945 - DNA, 30 bp, Artificial Sequence; identical to SEQ ID NO: 419
  Probe

SEQ ID NO: 28946 - DNA, 15 bp, Artificial Sequence
  Probe
attaaagtggctgat

SEQ ID NO: 28947 - DNA, 16 bp, Artificial Sequence
  Probe
attaaagtggctgatt

SEQ ID NO: 28948 - DNA, 19 bp, Artificial Sequence
  Probe
attaaagtggctgatttgc

SEQ ID NO: 28949 - DNA, 26 bp, Artificial Sequence
  Probe
attaaattatgataatcatatttacc

SEQ ID NO: 28950 - DNA, 32 bp, Artificial Sequence
  Probe
attaaccttttaagttaaagattaagagaacc

SEQ ID NO: 28951 - DNA, 36 bp, Artificial Sequence
  Probe
attaaccttttaagttaaagattaagagaaccaaca

SEQ ID NO: 28952 - DNA, 16 bp, Artificial Sequence
  Probe
attaactagttttgac

SEQ ID NO: 28953 - DNA, 19 bp, Artificial Sequence
  Probe
attaactagttttgacaac

SEQ ID NO: 28954 - DNA, 17 bp, Artificial Sequence
  Probe
attaagagaaccaacac

SEQ ID NO: 28955 - DNA, 18 bp, Artificial Sequence
  Probe
attaagagaaccaacacc

SEQ ID NO: 28956 - DNA, 19 bp, Artificial Sequence
  Probe
attaagagaaccaacacct

SEQ ID NO: 28957 - DNA, 31 bp, Artificial Sequence
  Probe
attaagagaaccaacacctctttacagtgaa

SEQ ID NO: 28958 - DNA, 15 bp, Artificial Sequence
  Probe
attaatcccctggcc

SEQ ID NO: 28959 - DNA, 16 bp, Artificial Sequence
  Probe
attaatcccctggccc

SEQ ID NO: 28960 - DNA, 17 bp, Artificial Sequence
  Probe
attaatcccctggccca

SEQ ID NO: 28961 - DNA, 18 bp, Artificial Sequence
  Probe
attaatcccctggcccaa

SEQ ID NO: 28962 - DNA, 19 bp, Artificial Sequence
  Probe
attaatcccctggcccaac

SEQ ID NO: 28963 - DNA, 20 bp, Artificial Sequence
  Probe
attaatcccctggcccaacc

SEQ ID NO: 28964 - DNA, 21 bp, Artificial Sequence
  Probe
attaatcccctggcccaaccc

SEQ ID NO: 28965 - DNA, 22 bp, Artificial Sequence
  Probe
attaatcccctggcccaacccg

SEQ ID NO: 28966 - DNA, 23 bp, Artificial Sequence
  Probe
attaatcccctggcccaacccgt

SEQ ID NO: 28967 - DNA, 24 bp, Artificial Sequence
  Probe
attaatcccctggcccaacccgtc

SEQ ID NO: 28968 - DNA, 25 bp, Artificial Sequence
  Probe
attaatcccctggcccaacccgtca

SEQ ID NO: 28969 - DNA, 26 bp, Artificial Sequence
  Probe
attaatcccctggcccaacccgtcat

SEQ ID NO: 28970 - DNA, 27 bp, Artificial Sequence
  Probe
attaatcccctggcccaacccgtcatc

SEQ ID NO: 28971 - DNA, 28 bp, Artificial Sequence
  Probe
attaatcccctggcccaacccgtcatct

SEQ ID NO: 28972 - DNA, 29 bp, Artificial Sequence
  Probe
attaatcccctggcccaacccgtcatcta

SEQ ID NO: 28973 - DNA, 30 bp, Artificial Sequence; identical to SEQ ID NO: 3877
  Probe

SEQ ID NO: 28974 - DNA, 15 bp, Artificial Sequence
  Probe
attagaatcttagct

SEQ ID NO: 28975 - DNA, 16 bp, Artificial Sequence
  Probe
attagaatcttagctt

SEQ ID NO: 28976 - DNA, 18 bp, Artificial Sequence
  Probe
attagaatcttagctttg

SEQ ID NO: 28977 - DNA, 19 bp, Artificial Sequence
  Probe
attagaatcttagctttgg

SEQ ID NO: 28978 - DNA, 24 bp, Artificial Sequence
  Probe
attagaatcttagctttgggtgct

SEQ ID NO: 28979 - DNA, 43 bp, Artificial Sequence
  Probe
attagaatcttagctttgggtgctaatggtggagttaaagact

SEQ ID NO: 28980 - DNA, 19 bp, Artificial Sequence
  Probe
attagggtgcttagctgtt

SEQ ID NO: 28981 - DNA, 37 bp, Artificial Sequence
  Probe
attagggtgcttagctgttaactaagtgtttgtgggt

SEQ ID NO: 28982 - DNA, 17 bp, Artificial Sequence
  Probe
attcaaaggttccgggt

SEQ ID NO: 28983 - DNA, 43 bp, Artificial Sequence
  Probe
attcaaaggttccgggttcgagtcccggcggagtcgtaacgct

SEQ ID NO: 28984 - DNA, 44 bp, Artificial Sequence
  Probe
attcaaaggttccgggttcgagtcccggcggagtcgtaacgctt

SEQ ID NO: 28985 - DNA, 45 bp, Artificial Sequence
  Probe
attcaaaggttccgggttcgagtcccggcggagtcgtaacgcttt

SEQ ID NO: 28986 - DNA, 46 bp, Artificial Sequence
  Probe
attcaaaggttccgggttcgagtcccggcggagtcgtaacgctttt

SEQ ID NO: 28987 - DNA, 16 bp, Artificial Sequence
  Probe
attcaaaggttgtggg

SEQ ID NO: 28988 - DNA, 38 bp, Artificial Sequence
  Probe
attcaaaggttgtgggttcgagtcccaccagagtcgct

SEQ ID NO: 28989 - DNA, 36 bp, Artificial Sequence
  Probe
attcccattcttgcgacccgggttcgattcccgggc

SEQ ID NO: 28990 - DNA, 16 bp, Artificial Sequence
  Probe
attccccgacggggag

SEQ ID NO: 28991 - DNA, 19 bp, Artificial Sequence
  Probe
attccccgacggggaggca

SEQ ID NO: 28992 - DNA, 18 bp, Artificial Sequence
  Probe
attcccggccaacgcagc

SEQ ID NO: 28993 - DNA, 28 bp, Artificial Sequence
  Probe
attcccggccaacgcagcgggcggacct

SEQ ID NO: 28994 - DNA, 27 bp, Artificial Sequence
  Probe
attcccggccaatgcaacgatgacgtt

SEQ ID NO: 28995 - DNA, 28 bp, Artificial Sequence
  Probe
attcccggccaatgcaacgatgacgttt

SEQ ID NO: 28996 - DNA, 29 bp, Artificial Sequence
  Probe
attcccggccaatgcaacgatgacgtttt

SEQ ID NO: 28997 - DNA, 30 bp, Artificial Sequence
  Probe
attcccggccaatgcaacgatgacgtttta

SEQ ID NO: 28998 - DNA, 17 bp, Artificial Sequence
  Probe
attcccggccaatgcac

SEQ ID NO: 28999 - DNA, 19 bp, Artificial Sequence
  Probe
attcccggcccatgcagca

SEQ ID NO: 29000 - DNA, 18 bp, Artificial Sequence
  Probe
attcccggtcagggaacc

SEQ ID NO: 29001 - DNA, 17 bp, Artificial Sequence
  Probe
attccggctcgaaggac

SEQ ID NO: 29002 - DNA, 18 bp, Artificial Sequence
  Probe
attccggctcgaaggact

SEQ ID NO: 29003 - DNA, 23 bp, Artificial Sequence
  Probe
attccggctcgaaggacttcgtc

SEQ ID NO: 29004 - DNA, 18 bp, Artificial Sequence
  Probe
attccggctcgaaggagc

SEQ ID NO: 29005 - DNA, 18 bp, Artificial Sequence
  Probe
attccttccttttttgtc

SEQ ID NO: 29006 - DNA, 32 bp, Artificial Sequence
  Probe
attcgaagaagcagcttcaaacctgccggggc

SEQ ID NO: 29007 - DNA, 33 bp, Artificial Sequence; identical to SEQ ID NO: 3885
  Probe

SEQ ID NO: 29008 - DNA, 34 bp, Artificial Sequence
  Probe
attcgaagaagcagcttcaaacctgccggggctt

SEQ ID NO: 29009 - DNA, 35 bp, Artificial Sequence; identical to SEQ ID NO: 3886
  Probe

SEQ ID NO: 29010 - DNA, 36 bp, Artificial Sequence; identical to SEQ ID NO: 3887
  Probe

SEQ ID NO: 29011 - DNA, 16 bp, Artificial Sequence
  Probe
attcggcgctctcacc

SEQ ID NO: 29012 - DNA, 18 bp, Artificial Sequence
  Probe
attcggcgctctcaccgc

SEQ ID NO: 29013 - DNA, 19 bp, Artificial Sequence
  Probe
attcggcgctctcaccgcc

SEQ ID NO: 29014 - DNA, 25 bp, Artificial Sequence
  Probe
attcggcgctctcaccgccgcggcc

SEQ ID NO: 29015 - DNA, 27 bp, Artificial Sequence
  Probe
attcggcgctctcaccgccgcggcccg

SEQ ID NO: 29016 - DNA, 28 bp, Artificial Sequence
  Probe
attcggcgctctcaccgccgcggcccgg

SEQ ID NO: 29017 - DNA, 29 bp, Artificial Sequence
  Probe
attcggcgctctcaccgccgcggcccggg

SEQ ID NO: 29018 - DNA, 32 bp, Artificial Sequence
  Probe
attcggcgctctcaccgccgcggcccgggttc

SEQ ID NO: 29019 - DNA, 50 bp, Artificial Sequence
  Probe
attcggcgctctcaccgccgcggcccgggttcgattcccggtcagggaaa

SEQ ID NO: 29020 - DNA, 50 bp, Artificial Sequence
  Probe
attcggcgctctcaccgccgcggcccgggttcgattcccggtcagggaag

SEQ ID NO: 29021 - DNA, 50 bp, Artificial Sequence
  Probe
attcggcgctctcaccgccgcggcccgggttcgattcccggtcagggaat

SEQ ID NO: 29022 - DNA, 26 bp, Artificial Sequence
  Probe
attcggcgctttcaccgccgcggccc

SEQ ID NO: 29023 - DNA, 33 bp, Artificial Sequence
  Probe
attctcagggatgggttcgattctcatagtcct

SEQ ID NO: 29024 - DNA, 36 bp, Artificial Sequence; identical to SEQ ID NO: 17538
  Probe

SEQ ID NO: 29025 - DNA, 15 bp, Artificial Sequence
  Probe
attctcgcctgccac

SEQ ID NO: 29026 - DNA, 16 bp, Artificial Sequence
  Probe
attctcgcctgccacg

SEQ ID NO: 29027 - DNA, 17 bp, Artificial Sequence
  Probe
attctcgcctgccacgc

SEQ ID NO: 29028 - DNA, 33 bp, Artificial Sequence; identical to SEQ ID NO: 17541
  Probe

SEQ ID NO: 29029 - DNA, 34 bp, Artificial Sequence; identical to SEQ ID NO: 17542
  Probe

SEQ ID NO: 29030 - DNA, 38 bp, Artificial Sequence; identical to SEQ ID NO: 3895
  Probe

SEQ ID NO: 29031 - DNA, 39 bp, Artificial Sequence; identical to SEQ ID NO: 3896
  Probe

SEQ ID NO: 29032 - DNA, 28 bp, Artificial Sequence
  Probe
attgaaaacaaaatactcaaatgggcct

SEQ ID NO: 29033 - DNA, 36 bp, Artificial Sequence
  Probe
attgaagccagttgattagggtgcttagctgttaac

SEQ ID NO: 29034 - DNA, 36 bp, Artificial Sequence
  Probe
attgcaaattcgaagaagcagcttcaaacctgccgg

SEQ ID NO: 29035 - DNA, 36 bp, Artificial Sequence
  Probe
attgcgaggttccatggtgtaatggttagcactctg

SEQ ID NO: 29036 - DNA, 15 bp, Artificial Sequence
  Probe
attggtcgtggttgt

SEQ ID NO: 29037 - DNA, 16 bp, Artificial Sequence
  Probe
attggtcgtggttgta

SEQ ID NO: 29038 - DNA, 17 bp, Artificial Sequence
  Probe
attggtcgtggttgtag

SEQ ID NO: 29039 - DNA, 18 bp, Artificial Sequence
  Probe
attggtcgtggttgtagt

SEQ ID NO: 29040 - DNA, 22 bp, Artificial Sequence
  Probe
attggtcgtggttgtagtccgt

SEQ ID NO: 29041 - DNA, 32 bp, Artificial Sequence; identical to SEQ ID NO: 17555
  Probe

SEQ ID NO: 29042 - DNA, 33 bp, Artificial Sequence; identical to SEQ ID NO: 3910
  Probe

SEQ ID NO: 29043 - DNA, 36 bp, Artificial Sequence
  Probe
attggtcgtggttgtagtccgtgcgagaataatgat

SEQ ID NO: 29044 - DNA, 15 bp, Artificial Sequence
  Probe
attggtcttaggccc

SEQ ID NO: 29045 - DNA, 16 bp, Artificial Sequence
  Probe
attggtcttaggcccc

SEQ ID NO: 29046 - DNA, 35 bp, Artificial Sequence
  Probe
attggtcttaggccccaaaaattttggtgcaactc

SEQ ID NO: 29047 - DNA, 36 bp, Artificial Sequence
  Probe
attggtcttaggccccaaaaattttggtgcaactcc

SEQ ID NO: 29048 - DNA, 26 bp, Artificial Sequence
  Probe
attggtggttcagtggtagaattctc

SEQ ID NO: 29049 - DNA, 28 bp, Artificial Sequence
  Probe
attggtggttcagtggtagaattctcgc

SEQ ID NO: 29050 - DNA, 29 bp, Artificial Sequence
  Probe
attggtggttcagtggtagaattctcgcc

SEQ ID NO: 29051 - DNA, 30 bp, Artificial Sequence; identical to SEQ ID NO: 3916
  Probe

SEQ ID NO: 29052 - DNA, 36 bp, Artificial Sequence
  Probe
attggtggttcagtggtagaattctcgcctcccacg

SEQ ID NO: 29053 - DNA, 31 bp, Artificial Sequence; identical to SEQ ID NO: 3919
  Probe

SEQ ID NO: 29054 - DNA, 32 bp, Artificial Sequence; identical to SEQ ID NO: 3920
  Probe

SEQ ID NO: 29055 - DNA, 33 bp, Artificial Sequence; identical to SEQ ID NO: 3921
  Probe

SEQ ID NO: 29056 - DNA, 34 bp, Artificial Sequence; identical to SEQ ID NO: 3922
  Probe

SEQ ID NO: 29057 - DNA, 50 bp, Artificial Sequence
  Probe
attggtggttcagtggtagaattctcgcctgccacgcgggaggcccgggt

SEQ ID NO: 29058 - DNA, 21 bp, Artificial Sequence
  Probe
attgtacagacatttgcggac

SEQ ID NO: 29059 - DNA, 15 bp, Artificial Sequence
  Probe
attgtgaatctgaca

SEQ ID NO: 29060 - DNA, 16 bp, Artificial Sequence
  Probe
attgtgaatctgacaa

SEQ ID NO: 29061 - DNA, 17 bp, Artificial Sequence
  Probe
attgtgaatctgacaac

SEQ ID NO: 29062 - DNA, 18 bp, Artificial Sequence
  Probe
attgtgaatctgacaaca

SEQ ID NO: 29063 - DNA, 20 bp, Artificial Sequence
  Probe
attgtgaatctgacaacaga

SEQ ID NO: 29064 - DNA, 23 bp, Artificial Sequence
  Probe
attgtgaatctgacaacagaggc

SEQ ID NO: 29065 - DNA, 24 bp, Artificial Sequence
  Probe
attgtgaatctgacaacagaggct

SEQ ID NO: 29066 - DNA, 25 bp, Artificial Sequence
  Probe
attgtgaatctgacaacagaggctt

SEQ ID NO: 29067 - DNA, 26 bp, Artificial Sequence
  Probe
attgtgaatctgacaacagaggctta

SEQ ID NO: 29068 - DNA, 29 bp, Artificial Sequence
  Probe
attgtgaatctgacaacagaggcttacga

SEQ ID NO: 29069 - DNA, 34 bp, Artificial Sequence; identical to SEQ ID NO: 3926
  Probe

SEQ ID NO: 29070 - DNA, 35 bp, Artificial Sequence; identical to SEQ ID NO: 3927
  Probe

SEQ ID NO: 29071 - DNA, 42 bp, Artificial Sequence; identical to SEQ ID NO: 3929
  Probe

SEQ ID NO: 29072 - DNA, 43 bp, Artificial Sequence; identical to SEQ ID NO: 3930
  Probe

SEQ ID NO: 29073 - DNA, 44 bp, Artificial Sequence; identical to SEQ ID NO: 3931
  Probe

SEQ ID NO: 29074 - DNA, 31 bp, Artificial Sequence
  Probe
attgtgaggacaatggcacggcaaggggagt

SEQ ID NO: 29075 - DNA, 36 bp, Artificial Sequence
  Probe
attgtgctttgcacgcgtgggttcgaatcccatcct

SEQ ID NO: 29076 - DNA, 43 bp, Artificial Sequence
  Probe
attgtgctttgcacgcgtgggttcgaatcccatcctcgtcggc

SEQ ID NO: 29077 - DNA, 31 bp, Artificial Sequence
  Probe
attgtgggaacaatggcacggcaaggggctc

SEQ ID NO: 29078 - DNA, 22 bp, Artificial Sequence
  Probe
atttcaacttaacttgaccgct

SEQ ID NO: 29079 - DNA, 23 bp, Artificial Sequence
  Probe
atttcaacttaacttgaccgctc

SEQ ID NO: 29080 - DNA, 24 bp, Artificial Sequence
  Probe
atttcaacttaacttgaccgctct

SEQ ID NO: 29081 - DNA, 26 bp, Artificial Sequence
  Probe
atttcaacttaacttgaccgctctga

SEQ ID NO: 29082 - DNA, 27 bp, Artificial Sequence
  Probe
atttcaacttaacttgaccgctctgag

SEQ ID NO: 29083 - DNA, 28 bp, Artificial Sequence
  Probe
atttcaacttaacttgaccgctctgagc

SEQ ID NO: 29084 - DNA, 36 bp, Artificial Sequence
  Probe
atttcaacttaacttgaccgctctgagctaaaccta

SEQ ID NO: 29085 - DNA, 34 bp, Artificial Sequence
  Probe
atttcataactttgtcaaagttaaattataggct

SEQ ID NO: 29086 - DNA, 17 bp, Artificial Sequence
  Probe
atttcgactcattaaat

SEQ ID NO: 29087 - DNA, 35 bp, Artificial Sequence
  Probe
atttcgactcattaaattatgataatcatatttac

SEQ ID NO: 29088 - DNA, 36 bp, Artificial Sequence; identical to SEQ ID NO: 17588
  Probe

SEQ ID NO: 29089 - DNA, 26 bp, Artificial Sequence
  Probe
atttctaggactatgagaatcgaacc

SEQ ID NO: 29090 - DNA, 27 bp, Artificial Sequence
  Probe
atttctaggactatgagaatcgaaccc

SEQ ID NO: 29091 - DNA, 19 bp, Artificial Sequence
  Probe
attttcatattgaattgca

SEQ ID NO: 29092 - DNA, 36 bp, Artificial Sequence
  Probe
attttcatattgaattgcaaattcgaagaagcagct

SEQ ID NO: 29093 - DNA, 36 bp, Artificial Sequence
  Probe
attttggattctcagggatgggttcgattctcatag

SEQ ID NO: 29094 - DNA, 40 bp, Artificial Sequence
  Probe
attttggattctcagggatgggttcgattctcatagtcct

SEQ ID NO: 29095 - DNA, 45 bp, Artificial Sequence
  Probe
attttggattctcagggatgggttcgattctcatagtcctagaaa

SEQ ID NO: 29096 - DNA, 15 bp, Artificial Sequence
  Probe
attttggtgcaactc

SEQ ID NO: 29097 - DNA, 16 bp, Artificial Sequence
  Probe
attttggtgcaactcc

SEQ ID NO: 29098 - DNA, 21 bp, Artificial Sequence
  Probe
caaaaaggattagactgaacc

SEQ ID NO: 29099 - DNA, 19 bp, Artificial Sequence
  Probe
caaaaattttggtgcaact

SEQ ID NO: 29100 - DNA, 20 bp, Artificial Sequence
  Probe
caaaaattttggtgcaactc

SEQ ID NO: 29101 - DNA, 21 bp, Artificial Sequence
  Probe
caaaaattttggtgcaactcc

SEQ ID NO: 29102 - DNA, 22 bp, Artificial Sequence
  Probe
caaaaattttggtgcaactcca

SEQ ID NO: 29103 - DNA, 18 bp, Artificial Sequence
  Probe
caaaacatcagattgtga

SEQ ID NO: 29104 - DNA, 21 bp, Artificial Sequence
  Probe
caaaacatcagattgtgaatc

SEQ ID NO: 29105 - DNA, 22 bp, Artificial Sequence
  Probe
caaaacatcagattgtgaatct

SEQ ID NO: 29106 - DNA, 35 bp, Artificial Sequence; identical to SEQ ID NO: 3952
  Probe

SEQ ID NO: 29107 - DNA, 39 bp, Artificial Sequence; identical to SEQ ID NO: 429
  Probe

SEQ ID NO: 29108 - DNA, 40 bp, Artificial Sequence; identical to SEQ ID NO: 430
  Probe

SEQ ID NO: 29109 - DNA, 43 bp, Artificial Sequence; identical to SEQ ID NO: 433
  Probe

SEQ ID NO: 29110 - DNA, 20 bp, Artificial Sequence
  Probe
caaaacgaatgatttcgact

SEQ ID NO: 29111 - DNA, 21 bp, Artificial Sequence
  Probe
caaaacgaatgatttcgactc

SEQ ID NO: 29112 - DNA, 36 bp, Artificial Sequence
  Probe
caaaacgaatgatttcgactcattaaattatgataa

SEQ ID NO: 29113 - DNA, 36 bp, Artificial Sequence
  Probe
caaaagaacctgggtagctcagtaggtagaacatca

SEQ ID NO: 29114 - DNA, 19 bp, Artificial Sequence
  Probe
caaaatactcaaatgggcc

SEQ ID NO: 29115 - DNA, 15 bp, Artificial Sequence
  Probe
caaacccactccacc

SEQ ID NO: 29116 - DNA, 16 bp, Artificial Sequence
  Probe
caaacccactccacct

SEQ ID NO: 29117 - DNA, 33 bp, Artificial Sequence; identical to SEQ ID NO: 3961
  Probe

SEQ ID NO: 29118 - DNA, 34 bp, Artificial Sequence; identical to SEQ ID NO: 17617
  Probe

SEQ ID NO: 29119 - DNA, 35 bp, Artificial Sequence
  Probe
caaagacaccccccacagtttatgtagcttacctc

SEQ ID NO: 29120 - DNA, 36 bp, Artificial Sequence; identical to SEQ ID NO: 3962
  Probe

SEQ ID NO: 29121 - DNA, 37 bp, Artificial Sequence; identical to SEQ ID NO: 3963
  Probe

SEQ ID NO: 29122 - DNA, 15 bp, Artificial Sequence
  Probe
caaagcaatacactg

SEQ ID NO: 29123 - DNA, 32 bp, Artificial Sequence
  Probe
caaagcaatacactgaaaatgtttagacgggc

SEQ ID NO: 29124 - DNA, 34 bp, Artificial Sequence
  Probe
caaagcaatacactgaaaatgtttagacgggctc

SEQ ID NO: 29125 - DNA, 35 bp, Artificial Sequence; identical to SEQ ID NO: 438
  Probe

SEQ ID NO: 29126 - DNA, 36 bp, Artificial Sequence; identical to SEQ ID NO: 17625
  Probe

SEQ ID NO: 29127 - DNA, 18 bp, Artificial Sequence
  Probe
caaagcacccaacttaca

SEQ ID NO: 29128 - DNA, 20 bp, Artificial Sequence
  Probe
caaagcacccaacttacact

SEQ ID NO: 29129 - DNA, 24 bp, Artificial Sequence
  Probe
caaagcacccaacttacacttagg

SEQ ID NO: 29130 - DNA, 25 bp, Artificial Sequence
  Probe
caaagcacccaacttacacttagga

SEQ ID NO: 29131 - DNA, 27 bp, Artificial Sequence
  Probe
caaagcacccaacttacacttaggaga

SEQ ID NO: 29132 - DNA, 33 bp, Artificial Sequence; identical to SEQ ID NO: 3982
  Probe

SEQ ID NO: 29133 - DNA, 35 bp, Artificial Sequence; identical to SEQ ID NO: 3984
  Probe

SEQ ID NO: 29134 - DNA, 50 bp, Artificial Sequence; identical to SEQ ID NO: 447
  Probe

SEQ ID NO: 29135 - DNA, 36 bp, Artificial Sequence
  Probe
caaaggttccgggttcgagtcccggcggagtcgtaa

SEQ ID NO: 29136 - DNA, 36 bp, Artificial Sequence
  Probe
caaaggttgtgggttcgagtcccaccagagtcgctt

SEQ ID NO: 29137 - DNA, 36 bp, Artificial Sequence
  Probe
caaagtggggtttccgtagtgtagtggttatcacgt

SEQ ID NO: 29138 - DNA, 16 bp, Artificial Sequence
  Probe
caaatcccggacgagc

SEQ ID NO: 29139 - DNA, 17 bp, Artificial Sequence
  Probe
caaatcccggacgagcc

SEQ ID NO: 29140 - DNA, 18 bp, Artificial Sequence
  Probe
caaatcccggacgagccc

SEQ ID NO: 29141 - DNA, 19 bp, Artificial Sequence
  Probe
caaatcccggacgagccca

SEQ ID NO: 29142 - DNA, 20 bp, Artificial Sequence
  Probe
caaatcccggacgagcccac

SEQ ID NO: 29143 - DNA, 21 bp, Artificial Sequence
  Probe
caaatcccggacgagcccaca

SEQ ID NO: 29144 - DNA, 23 bp, Artificial Sequence
  Probe
caaatcccggacgagcccacttt

SEQ ID NO: 29145 - DNA, 24 bp, Artificial Sequence
  Probe
caaatcccggacgagcccactttt

SEQ ID NO: 29146 - DNA, 25 bp, Artificial Sequence
  Probe
caaatcccggacgagcccaggcttt

SEQ ID NO: 29147 - DNA, 20 bp, Artificial Sequence
  Probe
caaatcccggacgagccccc

SEQ ID NO: 29148 - DNA, 21 bp, Artificial Sequence
  Probe
caaatcccggacgagccccct

SEQ ID NO: 29149 - DNA, 19 bp, Artificial Sequence
  Probe
caaatcccggacgagcccg

SEQ ID NO: 29150 - DNA, 19 bp, Artificial Sequence
  Probe
caaatcccggacgagccct

SEQ ID NO: 29151 - DNA, 20 bp, Artificial Sequence
  Probe
caaatcccggacgagccctc

SEQ ID NO: 29152 - DNA, 21 bp, Artificial Sequence
  Probe
caaatcccggacgagccctca

SEQ ID NO: 29153 - DNA, 23 bp, Artificial Sequence
  Probe
caaatcccggacgagccctcatt

SEQ ID NO: 29154 - DNA, 24 bp, Artificial Sequence
  Probe
caaatcccggacgagccctcattt

SEQ ID NO: 29155 - DNA, 23 bp, Artificial Sequence
  Probe
caaatcccggacgagccctgttt

SEQ ID NO: 29156 - DNA, 21 bp, Artificial Sequence
  Probe
caaatctcggtggaacctgca

SEQ ID NO: 29157 - DNA, 36 bp, Artificial Sequence; identical to SEQ ID NO: 3992
  Probe

SEQ ID NO: 29158 - DNA, 17 bp, Artificial Sequence
  Probe
caacagaggcttacgac

SEQ ID NO: 29159 - DNA, 18 bp, Artificial Sequence
  Probe
caacagaggcttacgacc

SEQ ID NO: 29160 - DNA, 18 bp, Artificial Sequence
  Probe
caacatggctttctcaac

SEQ ID NO: 29161 - DNA, 16 bp, Artificial Sequence
  Probe
caaccccatggcctcc

SEQ ID NO: 29162 - DNA, 15 bp, Artificial Sequence
  Probe
caacccgtcatctac

SEQ ID NO: 29163 - DNA, 28 bp, Artificial Sequence
  Probe
caaccgagcgtccaagctctttccattt

SEQ ID NO: 29164 - DNA, 29 bp, Artificial Sequence
  Probe
caaccgagcgtccaagctctttccatttt

SEQ ID NO: 29165 - DNA, 24 bp, Artificial Sequence
  Probe
caaccttcagctatagggtggaga

SEQ ID NO: 29166 - DNA, 36 bp, Artificial Sequence
  Probe
caacgatggtttttcatatcattggtcgtggttgta

SEQ ID NO: 29167 - DNA, 39 bp, Artificial Sequence
  Probe
caacgatggtttttcatatcattggtcgtggttgtagtc

SEQ ID NO: 29168 - DNA, 40 bp, Artificial Sequence
  Probe
caacgatggtttttcatatcattggtcgtggttgtagtcc

SEQ ID NO: 29169 - DNA, 50 bp, Artificial Sequence; identical to SEQ ID NO: 4011
  Probe

SEQ ID NO: 29170 - DNA, 22 bp, Artificial Sequence
  Probe
caactaaatactaccgtatggc

SEQ ID NO: 29171 - DNA, 15 bp, Artificial Sequence
  Probe
caacttaacttgacc

SEQ ID NO: 29172 - DNA, 16 bp, Artificial Sequence
  Probe
caacttaacttgaccg

SEQ ID NO: 29173 - DNA, 18 bp, Artificial Sequence
  Probe
caacttaacttgaccgct

SEQ ID NO: 29174 - DNA, 19 bp, Artificial Sequence
  Probe
caacttaacttgaccgctc

SEQ ID NO: 29175 - DNA, 20 bp, Artificial Sequence
  Probe
caacttaacttgaccgctct

SEQ ID NO: 29176 - DNA, 21 bp, Artificial Sequence
  Probe
caacttaacttgaccgctctg

SEQ ID NO: 29177 - DNA, 22 bp, Artificial Sequence
  Probe
caacttaacttgaccgctctga

SEQ ID NO: 29178 - DNA, 23 bp, Artificial Sequence
  Probe
caacttaacttgaccgctctgag

SEQ ID NO: 29179 - DNA, 24 bp, Artificial Sequence
  Probe
caacttaacttgaccgctctgagc

SEQ ID NO: 29180 - DNA, 30 bp, Artificial Sequence
  Probe
caacttaacttgaccgctctgagctaaacc

SEQ ID NO: 29181 - DNA, 31 bp, Artificial Sequence
  Probe
caacttaacttgaccgctctgagctaaacct

SEQ ID NO: 29182 - DNA, 36 bp, Artificial Sequence
  Probe
caacttaacttgaccgctctgagctaaacctagccc

SEQ ID NO: 29183 - DNA, 17 bp, Artificial Sequence
  Probe
caacttacacttaggag

SEQ ID NO: 29184 - DNA, 23 bp, Artificial Sequence
  Probe
caacttacacttaggagatttca

SEQ ID NO: 29185 - DNA, 26 bp, Artificial Sequence
  Probe
caacttacacttaggagatttcaact

SEQ ID NO: 29186 - DNA, 27 bp, Artificial Sequence
  Probe
caacttacacttaggagatttcaactt

SEQ ID NO: 29187 - DNA, 31 bp, Artificial Sequence; identical to SEQ ID NO: 17688
  Probe

SEQ ID NO: 29188 - DNA, 32 bp, Artificial Sequence; identical to SEQ ID NO: 17689
  Probe

SEQ ID NO: 29189 - DNA, 34 bp, Artificial Sequence
  Probe
caacttacacttaggagatttcaacttaacttga

SEQ ID NO: 29190 - DNA, 35 bp, Artificial Sequence; identical to SEQ ID NO: 4025
  Probe

SEQ ID NO: 29191 - DNA, 36 bp, Artificial Sequence; identical to SEQ ID NO: 17692
  Probe

SEQ ID NO: 29192 - DNA, 39 bp, Artificial Sequence; identical to SEQ ID NO: 4027
  Probe

SEQ ID NO: 29193 - DNA, 40 bp, Artificial Sequence
  Probe
caacttacacttaggagatttcaacttaacttgaccgctc

SEQ ID NO: 29194 - DNA, 41 bp, Artificial Sequence; identical to SEQ ID NO: 4028
  Probe

SEQ ID NO: 29195 - DNA, 42 bp, Artificial Sequence; identical to SEQ ID NO: 17697
  Probe

SEQ ID NO: 29196 - DNA, 43 bp, Artificial Sequence; identical to SEQ ID NO: 4029
  Probe

SEQ ID NO: 29197 - DNA, 44 bp, Artificial Sequence; identical to SEQ ID NO: 4030
  Probe

SEQ ID NO: 29198 - DNA, 45 bp, Artificial Sequence; identical to SEQ ID NO: 4031
  Probe

SEQ ID NO: 29199 - DNA, 46 bp, Artificial Sequence; identical to SEQ ID NO: 4032
  Probe

SEQ ID NO: 29200 - DNA, 15 bp, Artificial Sequence
  Probe
caagaacagggtttg

SEQ ID NO: 29201 - DNA, 16 bp, Artificial Sequence
  Probe
caagaacagggtttgt

SEQ ID NO: 29202 - DNA, 17 bp, Artificial Sequence
  Probe
caagaacagggtttgtt

SEQ ID NO: 29203 - DNA, 18 bp, Artificial Sequence
  Probe
caagaacagggtttgtta

SEQ ID NO: 29204 - DNA, 19 bp, Artificial Sequence
  Probe
caagaacagggtttgttaa

SEQ ID NO: 29205 - DNA, 20 bp, Artificial Sequence
  Probe
caagaacagggtttgttaag

SEQ ID NO: 29206 - DNA, 21 bp, Artificial Sequence
  Probe
caagaacagggtttgttaaga

SEQ ID NO: 29207 - DNA, 15 bp, Artificial Sequence
  Probe
caagaactgctaact

SEQ ID NO: 29208 - DNA, 16 bp, Artificial Sequence
  Probe
caagaactgctaactc

SEQ ID NO: 29209 - DNA, 17 bp, Artificial Sequence
  Probe
caagaactgctaactca

SEQ ID NO: 29210 - DNA, 19 bp, Artificial Sequence
  Probe
caagaactgctaactcatg

SEQ ID NO: 29211 - DNA, 20 bp, Artificial Sequence
  Probe
caagaactgctaactcatgc

SEQ ID NO: 29212 - DNA, 21 bp, Artificial Sequence
  Probe
caagaactgctaactcatgcc

SEQ ID NO: 29213 - DNA, 22 bp, Artificial Sequence
  Probe
caagaactgctaactcatgccc

SEQ ID NO: 29214 - DNA, 23 bp, Artificial Sequence
  Probe
caagaactgctaactcatgcccc

SEQ ID NO: 29215 - DNA, 24 bp, Artificial Sequence
  Probe
caagaactgctaactcatgccccc

SEQ ID NO: 29216 - DNA, 25 bp, Artificial Sequence
  Probe
caagaactgctaactcatgccccca

SEQ ID NO: 29217 - DNA, 26 bp, Artificial Sequence
  Probe
caagaactgctaactcatgcccccat

SEQ ID NO: 29218 - DNA, 27 bp, Artificial Sequence
  Probe
caagaactgctaactcatgcccccatg

SEQ ID NO: 29219 - DNA, 28 bp, Artificial Sequence
  Probe
caagaactgctaactcatgcccccatgt

SEQ ID NO: 29220 - DNA, 31 bp, Artificial Sequence; identical to SEQ ID NO: 4039
  Probe

SEQ ID NO: 29221 - DNA, 32 bp, Artificial Sequence
  Probe
caagaactgctaactcatgcccccatgtctaa

SEQ ID NO: 29222 - DNA, 35 bp, Artificial Sequence; identical to SEQ ID NO: 17717
  Probe

SEQ ID NO: 29223 - DNA, 38 bp, Artificial Sequence
  Probe
caagaactgctaactcatgcccccatgtctaacaacat

SEQ ID NO: 29224 - DNA, 39 bp, Artificial Sequence
  Probe
caagaactgctaactcatgcccccatgtctaacaacatg

SEQ ID NO: 29225 - DNA, 40 bp, Artificial Sequence
  Probe
caagaactgctaactcatgcccccatgtctaacaacatgg

SEQ ID NO: 29226 - DNA, 41 bp, Artificial Sequence; identical to SEQ ID NO: 4040
  Probe

SEQ ID NO: 29227 - DNA, 42 bp, Artificial Sequence; identical to SEQ ID NO: 449
  Probe

SEQ ID NO: 29228 - DNA, 45 bp, Artificial Sequence; identical to SEQ ID NO: 451
  Probe

SEQ ID NO: 29229 - DNA, 46 bp, Artificial Sequence; identical to SEQ ID NO: 452
  Probe

SEQ ID NO: 29230 - DNA, 50 bp, Artificial Sequence; identical to SEQ ID NO: 4044
  Probe

SEQ ID NO: 29231 - DNA, 15 bp, Artificial Sequence
  Probe
caagaggtccccggt

SEQ ID NO: 29232 - DNA, 18 bp, Artificial Sequence
  Probe
caagcagttgacccgggt

SEQ ID NO: 29233 - DNA, 16 bp, Artificial Sequence
  Probe
caagctctttccattt

SEQ ID NO: 29234 - DNA, 21 bp, Artificial Sequence
  Probe
caaggcgatcacgtagatttt

SEQ ID NO: 29235 - DNA, 24 bp, Artificial Sequence
  Probe
caaggcgatcacgtagattttgtt

SEQ ID NO: 29236 - DNA, 25 bp, Artificial Sequence
  Probe
caaggcgatcacgtagattttgttt

SEQ ID NO: 29237 - DNA, 26 bp, Artificial Sequence
  Probe
caaggcgatcacgtagattttgttta

SEQ ID NO: 29238 - DNA, 31 bp, Artificial Sequence
  Probe
caaggtcgcgggttcgatccccgtacgggcc

SEQ ID NO: 29239 - DNA, 15 bp, Artificial Sequence
  Probe
caagtaggtctacaa

SEQ ID NO: 29240 - DNA, 21 bp, Artificial Sequence
  Probe
caagtccctgttcgggcggca

SEQ ID NO: 29241 - DNA, 28 bp, Artificial Sequence
  Probe
caatacactgaaaatgtttagacgggct

SEQ ID NO: 29242 - DNA, 30 bp, Artificial Sequence
  Probe
caatacactgaaaatgtttagacgggctca

SEQ ID NO: 29243 - DNA, 31 bp, Artificial Sequence
  Probe
caatacactgaaaatgtttagacgggctcac

SEQ ID NO: 29244 - DNA, 32 bp, Artificial Sequence; identical to SEQ ID NO: 17733
  Probe

SEQ ID NO: 29245 - DNA, 36 bp, Artificial Sequence
  Probe
caatacactgaaaatgtttagacgggctcacatcac

SEQ ID NO: 29246 - DNA, 21 bp, Artificial Sequence
  Probe
caatccccagcacctccacaa

SEQ ID NO: 29247 - DNA, 20 bp, Artificial Sequence
  Probe
caatccccggcacctccacc

SEQ ID NO: 29248 - DNA, 21 bp, Artificial Sequence
  Probe
caatgccgaggttgtgagttc

SEQ ID NO: 29249 - DNA, 16 bp, Artificial Sequence
  Probe
caatggaggcgtgggt

SEQ ID NO: 29250 - DNA, 36 bp, Artificial Sequence
  Probe
caatggaggcgtgggttcgaatcccacttctgacac

SEQ ID NO: 29251 - DNA, 21 bp, Artificial Sequence
  Probe
caatggataacgcgtctgact

SEQ ID NO: 29252 - DNA, 36 bp, Artificial Sequence
  Probe
caatggataacgcgtctgactacggatcagaagatt

SEQ ID NO: 29253 - DNA, 21 bp, Artificial Sequence
  Probe
caatggcacggcaaggggctc

SEQ ID NO: 29254 - DNA, 18 bp, Artificial Sequence
  Probe
caattaactagttttgac

SEQ ID NO: 29255 - DNA, 36 bp, Artificial Sequence; identical to SEQ ID NO: 4078
  Probe

SEQ ID NO: 29256 - DNA, 50 bp, Artificial Sequence; identical to SEQ ID NO: 462
  Probe

SEQ ID NO: 29257 - DNA, 16 bp, Artificial Sequence
  Probe
cacaagaactgctaac

SEQ ID NO: 29258 - DNA, 17 bp, Artificial Sequence
  Probe
cacaagaactgctaact

SEQ ID NO: 29259 - DNA, 18 bp, Artificial Sequence
  Probe
cacaagaactgctaactc

SEQ ID NO: 29260 - DNA, 21 bp, Artificial Sequence
  Probe
cacaagaactgctaactcatg

SEQ ID NO: 29261 - DNA, 22 bp, Artificial Sequence
  Probe
cacaagaactgctaactcatgc

SEQ ID NO: 29262 - DNA, 24 bp, Artificial Sequence
  Probe
cacaagaactgctaactcatgccc

SEQ ID NO: 29263 - DNA, 25 bp, Artificial Sequence
  Probe
cacaagaactgctaactcatgcccc

SEQ ID NO: 29264 - DNA, 26 bp, Artificial Sequence
  Probe
cacaagaactgctaactcatgccccc

SEQ ID NO: 29265 - DNA, 27 bp, Artificial Sequence
  Probe
cacaagaactgctaactcatgccccca

SEQ ID NO: 29266 - DNA, 31 bp, Artificial Sequence; identical to SEQ ID NO: 4089
  Probe

SEQ ID NO: 29267 - DNA, 39 bp, Artificial Sequence
  Probe
cacaagaactgctaactcatgcccccatgtctaacaaca

SEQ ID NO: 29268 - DNA, 42 bp, Artificial Sequence
  Probe
cacaagaactgctaactcatgcccccatgtctaacaacatgg

SEQ ID NO: 29269 - DNA, 44 bp, Artificial Sequence; identical to SEQ ID NO: 463
  Probe

SEQ ID NO: 29270 - DNA, 50 bp, Artificial Sequence; identical to SEQ ID NO: 466
  Probe

SEQ ID NO: 29271 - DNA, 15 bp, Artificial Sequence
  Probe
cacacccacccaaga

SEQ ID NO: 29272 - DNA, 16 bp, Artificial Sequence
  Probe
cacacccacccaagaa

SEQ ID NO: 29273 - DNA, 17 bp, Artificial Sequence
  Probe
cacacccacccaagaac

SEQ ID NO: 29274 - DNA, 18 bp, Artificial Sequence
  Probe
cacacccacccaagaaca

SEQ ID NO: 29275 - DNA, 25 bp, Artificial Sequence
  Probe
cacacccacccaagaacagggtttg

SEQ ID NO: 29276 - DNA, 28 bp, Artificial Sequence
  Probe
cacacccacccaagaacagggtttgtta

SEQ ID NO: 29277 - DNA, 20 bp, Artificial Sequence
  Probe
cacacggggcacaataattt

SEQ ID NO: 29278 - DNA, 21 bp, Artificial Sequence
  Probe
cacactactataaccacccta

SEQ ID NO: 29279 - DNA, 36 bp, Artificial Sequence
  Probe
cacagtgtcaggatggccgagtggtctaaggcgcca

SEQ ID NO: 29280 - DNA, 20 bp, Artificial Sequence
  Probe
cacagtttatgtagcttacc

SEQ ID NO: 29281 - DNA, 21 bp, Artificial Sequence
  Probe
cacagtttatgtagcttacct

SEQ ID NO: 29282 - DNA, 22 bp, Artificial Sequence
  Probe
cacagtttatgtagcttacctc

SEQ ID NO: 29283 - DNA, 23 bp, Artificial Sequence
  Probe
cacagtttatgtagcttacctcc

SEQ ID NO: 29284 - DNA, 24 bp, Artificial Sequence
  Probe
cacagtttatgtagcttacctcct

SEQ ID NO: 29285 - DNA, 25 bp, Artificial Sequence
  Probe
cacagtttatgtagcttacctcctc

SEQ ID NO: 29286 - DNA, 26 bp, Artificial Sequence
  Probe
cacatggtctagcggttaggattcct

SEQ ID NO: 29287 - DNA, 27 bp, Artificial Sequence
  Probe
cacatggtctagcggttaggattcctg

SEQ ID NO: 29288 - DNA, 29 bp, Artificial Sequence
  Probe
cacatggtctagcggttaggattcctggt

SEQ ID NO: 29289 - DNA, 31 bp, Artificial Sequence; identical to SEQ ID NO: 470
  Probe

SEQ ID NO: 29290 - DNA, 32 bp, Artificial Sequence; identical to SEQ ID NO: 471
  Probe

SEQ ID NO: 29291 - DNA, 33 bp, Artificial Sequence; identical to SEQ ID NO: 472
  Probe

SEQ ID NO: 29292 - DNA, 36 bp, Artificial Sequence
  Probe
cacccaacttacacttaggagatttcaacttaactt

SEQ ID NO: 29293 - DNA, 44 bp, Artificial Sequence
  Probe
cacccaacttacacttaggagatttcaacttaacttgaccgctc

SEQ ID NO: 29294 - DNA, 45 bp, Artificial Sequence
  Probe
cacccaacttacacttaggagatttcaacttaacttgaccgctct

SEQ ID NO: 29295 - DNA, 50 bp, Artificial Sequence; identical to SEQ ID NO: 4114
  Probe

SEQ ID NO: 29296 - DNA, 19 bp, Artificial Sequence
  Probe
cacccaagaacagggtttg

SEQ ID NO: 29297 - DNA, 20 bp, Artificial Sequence
  Probe
cacccaagaacagggtttgt

SEQ ID NO: 29298 - DNA, 22 bp, Artificial Sequence
  Probe
cacccaagaacagggtttgtta

SEQ ID NO: 29299 - DNA, 15 bp, Artificial Sequence
  Probe
cacccacccaagaac

SEQ ID NO: 29300 - DNA, 16 bp, Artificial Sequence
  Probe
cacccacccaagaaca

SEQ ID NO: 29301 - DNA, 23 bp, Artificial Sequence
  Probe
cacccacccaagaacagggtttg

SEQ ID NO: 29302 - DNA, 15 bp, Artificial Sequence
  Probe
cacccaggcggcccg

SEQ ID NO: 29303 - DNA, 33 bp, Artificial Sequence
  Probe
cacccaggcggcccgggttcgactcccggtgtg

SEQ ID NO: 29304 - DNA, 39 bp, Artificial Sequence
  Probe
cacccaggcggcccgggttcgactcccggtgtgggaacg

SEQ ID NO: 29305 - DNA, 40 bp, Artificial Sequence
  Probe
cacccaggcggcccgggttcgactcccggtgtgggaacgc

SEQ ID NO: 29306 - DNA, 40 bp, Artificial Sequence
  Probe
cacccaggcggcccgggttcgactcccggtgtgggaatga

SEQ ID NO: 29307 - DNA, 26 bp, Artificial Sequence
  Probe
cacccagggacgcctctttgagcttt

SEQ ID NO: 29308 - DNA, 27 bp, Artificial Sequence
  Probe
cacccagggacgcctctttgagctttt

SEQ ID NO: 29309 - DNA, 22 bp, Artificial Sequence
  Probe
cacccagggacgctatgacctt

SEQ ID NO: 29310 - DNA, 23 bp, Artificial Sequence
  Probe
cacccagggacgctatgaccttt

SEQ ID NO: 29311 - DNA, 25 bp, Artificial Sequence
  Probe
cacccagggacgcttattggaactt

SEQ ID NO: 29312 - DNA, 26 bp, Artificial Sequence
  Probe
cacccagggacgcttattggaacttt

SEQ ID NO: 29313 - DNA, 27 bp, Artificial Sequence
  Probe
cacccagggacgcttattggaactttt

SEQ ID NO: 29314 - DNA, 25 bp, Artificial Sequence
  Probe
cacccagggacgcttgtttgagctt

SEQ ID NO: 29315 - DNA, 26 bp, Artificial Sequence
  Probe
cacccagggacgcttgtttgagcttt

SEQ ID NO: 29316 - DNA, 40 bp, Artificial Sequence
  Probe
caccgccgcagcccgggttcgattcccggtcatggaacca

SEQ ID NO: 29317 - DNA, 15 bp, Artificial Sequence
  Probe
caccgccgcggcccg

SEQ ID NO: 29318 - DNA, 17 bp, Artificial Sequence
  Probe
caccgccgcggcccggg

SEQ ID NO: 29319 - DNA, 18 bp, Artificial Sequence
  Probe
caccgccgcggcccgggt

SEQ ID NO: 29320 - DNA, 19 bp, Artificial Sequence
  Probe
caccgccgcggcccgggtt

SEQ ID NO: 29321 - DNA, 20 bp, Artificial Sequence
  Probe
caccgccgcggcccgggttc

SEQ ID NO: 29322 - DNA, 29 bp, Artificial Sequence
  Probe
caccgccgcggcccgggttcgattcccgg

SEQ ID NO: 29323 - DNA, 36 bp, Artificial Sequence
  Probe
caccgccgcggcccgggttcgattcccggccaggga

SEQ ID NO: 29324 - DNA, 31 bp, Artificial Sequence
  Probe
caccgccgcggcccgggttcgattcccggtc

SEQ ID NO: 29325 - DNA, 33 bp, Artificial Sequence
  Probe
caccgccgcggcccgggttcgattcccggtcag

SEQ ID NO: 29326 - DNA, 35 bp, Artificial Sequence
  Probe
caccgccgcggcccgggttcgattcccggtcaggg

SEQ ID NO: 29327 - DNA, 37 bp, Artificial Sequence
  Probe
caccgccgcggcccgggttcgattcccggtcagggaa

SEQ ID NO: 29328 - DNA, 38 bp, Artificial Sequence
  Probe
caccgccgcggcccgggttcgattcccggtcagggaaa

SEQ ID NO: 29329 - DNA, 40 bp, Artificial Sequence
  Probe
caccgccgcggcccgggttcgattcccggtcagggaaaga

SEQ ID NO: 29330 - DNA, 38 bp, Artificial Sequence
  Probe
caccgccgcggcccgggttcgattcccggtcagggaag

SEQ ID NO: 29331 - DNA, 39 bp, Artificial Sequence
  Probe
caccgccgcggcccgggttcgattcccggtcagggaagc

SEQ ID NO: 29332 - DNA, 40 bp, Artificial Sequence
  Probe
caccgccgcggcccgggttcgattcccggtcagggaagcc

SEQ ID NO: 29333 - DNA, 38 bp, Artificial Sequence
  Probe
caccgccgcggcccgggttcgattcccggtcagggaat

SEQ ID NO: 29334 - DNA, 40 bp, Artificial Sequence
  Probe
caccgccgcggcccgggttcgattcccggtcagggaatga

SEQ ID NO: 29335 - DNA, 21 bp, Artificial Sequence
  Probe
cacctcagaaggtctcacttt

SEQ ID NO: 29336 - DNA, 22 bp, Artificial Sequence
  Probe
cacctcagaaggtctcactttt

SEQ ID NO: 29337 - DNA, 17 bp, Artificial Sequence
  Probe
cacctctttacagtgaa

SEQ ID NO: 29338 - DNA, 18 bp, Artificial Sequence
  Probe
cacctggagcaagaccct

SEQ ID NO: 29339 - DNA, 16 bp, Artificial Sequence
  Probe
cacgcagaaggtcctg

SEQ ID NO: 29340 - DNA, 36 bp, Artificial Sequence
  Probe
cacgcagaaggtcctgggttcgagccccagtggaac

SEQ ID NO: 29341 - DNA, 40 bp, Artificial Sequence; identical to SEQ ID NO: 4121
  Probe

SEQ ID NO: 29342 - DNA, 19 bp, Artificial Sequence
  Probe
cacgcgaaaggtccccggt

SEQ ID NO: 29343 - DNA, 36 bp, Artificial Sequence
  Probe
cacgcgggagacccgggttcaattcccggccaatgc

SEQ ID NO: 29344 - DNA, 32 bp, Artificial Sequence; identical to SEQ ID NO: 481
  Probe

SEQ ID NO: 29345 - DNA, 33 bp, Artificial Sequence; identical to SEQ ID NO: 482
  Probe

SEQ ID NO: 29346 - DNA, 34 bp, Artificial Sequence; identical to SEQ ID NO: 483
  Probe

SEQ ID NO: 29347 - DNA, 35 bp, Artificial Sequence; identical to SEQ ID NO: 484
  Probe

SEQ ID NO: 29348 - DNA, 37 bp, Artificial Sequence; identical to SEQ ID NO: 486
  Probe

SEQ ID NO: 29349 - DNA, 38 bp, Artificial Sequence; identical to SEQ ID NO: 4137
  Probe

SEQ ID NO: 29350 - DNA, 39 bp, Artificial Sequence; identical to SEQ ID NO: 4144
  Probe

SEQ ID NO: 29351 - DNA, 40 bp, Artificial Sequence; identical to SEQ ID NO: 4145
  Probe

SEQ ID NO: 29352 - DNA, 38 bp, Artificial Sequence; identical to SEQ ID NO: 4149
  Probe

SEQ ID NO: 29353 - DNA, 39 bp, Artificial Sequence; identical to SEQ ID NO: 4154
  Probe

SEQ ID NO: 29354 - DNA, 40 bp, Artificial Sequence; identical to SEQ ID NO: 4155
  Probe

SEQ ID NO: 29355 - DNA, 36 bp, Artificial Sequence
  Probe
cacgcgggaggcccgggttcgattcccggccaatgc

SEQ ID NO: 29356 - DNA, 39 bp, Artificial Sequence
  Probe
cacgcgggaggcccgggttcgattcccggccaatgcaac

SEQ ID NO: 29357 - DNA, 39 bp, Artificial Sequence
  Probe
cacgcgggaggcccgggttcgattcccggccaatgcacg

SEQ ID NO: 29358 - DNA, 40 bp, Artificial Sequence
  Probe
cacgcgggaggcccgggttcgattcccggccaatgcacga

SEQ ID NO: 29359 - DNA, 39 bp, Artificial Sequence
  Probe
cacgcgggaggcccgggttcgattcccggccaatgcact

SEQ ID NO: 29360 - DNA, 39 bp, Artificial Sequence
  Probe
cacgcgggaggcccgggttcgattcccggccaatgcagc

SEQ ID NO: 29361 - DNA, 40 bp, Artificial Sequence
  Probe
cacgcgggaggcccgggttcgattcccggccaatgcagca

SEQ ID NO: 29362 - DNA, 36 bp, Artificial Sequence
  Probe
cacgcgggaggcccgggttcgattcccggcccatgc

SEQ ID NO: 29363 - DNA, 40 bp, Artificial Sequence
  Probe
cacgcgggaggcccgggttcgattcccggcccatgcagca

SEQ ID NO: 29364 - DNA, 36 bp, Artificial Sequence
  Probe
cacggagaattttggattctcagggatgggttcgat

SEQ ID NO: 29365 - DNA, 15 bp, Artificial Sequence
  Probe
cacggcaaggggagt

SEQ ID NO: 29366 - DNA, 15 bp, Artificial Sequence
  Probe
cacggcaaggggctc

SEQ ID NO: 29367 - DNA, 36 bp, Artificial Sequence
  Probe
cacggcattgtgaggacaatggcacggcaaggggag

SEQ ID NO: 29368 - DNA, 19 bp, Artificial Sequence
  Probe
cacgtatgaggccccgggt

SEQ ID NO: 29369 - DNA, 17 bp, Artificial Sequence
  Probe
cacgtctgctttacacg

SEQ ID NO: 29370 - DNA, 17 bp, Artificial Sequence
  Probe
cactactataaccaccc

SEQ ID NO: 29371 - DNA, 19 bp, Artificial Sequence
  Probe
cactactataaccacccta

SEQ ID NO: 29372 - DNA, 15 bp, Artificial Sequence
  Probe
cactctggactctga

SEQ ID NO: 29373 - DNA, 16 bp, Artificial Sequence
  Probe
cactctggactctgaa

SEQ ID NO: 29374 - DNA, 17 bp, Artificial Sequence
  Probe
cactctggactctgaat

SEQ ID NO: 29375 - DNA, 18 bp, Artificial Sequence
  Probe
cactctggactctgaatc

SEQ ID NO: 29376 - DNA, 19 bp, Artificial Sequence
  Probe
cactctggactctgaatcc

SEQ ID NO: 29377 - DNA, 20 bp, Artificial Sequence
  Probe
cactctggactctgaatcca

SEQ ID NO: 29378 - DNA, 31 bp, Artificial Sequence
  Probe
cactctggactctgaatccagcgatccgagt

SEQ ID NO: 29379 - DNA, 32 bp, Artificial Sequence
  Probe
cactctggactctgaatccagcgatccgagtt

SEQ ID NO: 29380 - DNA, 15 bp, Artificial Sequence
  Probe
cactctggactttga

SEQ ID NO: 29381 - DNA, 16 bp, Artificial Sequence
  Probe
cactctggactttgaa

SEQ ID NO: 29382 - DNA, 17 bp, Artificial Sequence
  Probe
cactctggactttgaat

SEQ ID NO: 29383 - DNA, 18 bp, Artificial Sequence
  Probe
cactctggactttgaatc

SEQ ID NO: 29384 - DNA, 19 bp, Artificial Sequence
  Probe
cactctggactttgaatcc

SEQ ID NO: 29385 - DNA, 23 bp, Artificial Sequence
  Probe
cactgaaaatgtttagacgggct

SEQ ID NO: 29386 - DNA, 25 bp, Artificial Sequence
  Probe
cactgaaaatgtttagacgggctca

SEQ ID NO: 29387 - DNA, 26 bp, Artificial Sequence
  Probe
cactgaaaatgtttagacgggctcac

SEQ ID NO: 29388 - DNA, 27 bp, Artificial Sequence
  Probe
cactgaaaatgtttagacgggctcaca

SEQ ID NO: 29389 - DNA, 32 bp, Artificial Sequence
  Probe
cactgaaaatgtttagacgggctcacatcacc

SEQ ID NO: 29390 - DNA, 33 bp, Artificial Sequence
  Probe
cactgaaaatgtttagacgggctcacatcaccc

SEQ ID NO: 29391 - DNA, 36 bp, Artificial Sequence
  Probe
cactgaaaatgtttagacgggctcacatcaccccat

SEQ ID NO: 29392 - DNA, 15 bp, Artificial Sequence
  Probe
cactgtaaagctaac

SEQ ID NO: 29393 - DNA, 16 bp, Artificial Sequence
  Probe
cactgtaaagctaact

SEQ ID NO: 29394 - DNA, 17 bp, Artificial Sequence
  Probe
cactgtaaagctaactt

SEQ ID NO: 29395 - DNA, 18 bp, Artificial Sequence
  Probe
cactgtaaagctaactta

SEQ ID NO: 29396 - DNA, 19 bp, Artificial Sequence
  Probe
cactgtaaagctaacttag

SEQ ID NO: 29397 - DNA, 21 bp, Artificial Sequence
  Probe
cactgtaaagctaacttagca

SEQ ID NO: 29398 - DNA, 23 bp, Artificial Sequence
  Probe
cactgtaaagctaacttagcatt

SEQ ID NO: 29399 - DNA, 25 bp, Artificial Sequence
  Probe
cactgtaaagctaacttagcattaa

SEQ ID NO: 29400 - DNA, 29 bp, Artificial Sequence
  Probe
cactgtaaagctaacttagcattaacctt

SEQ ID NO: 29401 - DNA, 30 bp, Artificial Sequence; identical to SEQ ID NO: 493
  Probe

SEQ ID NO: 29402 - DNA, 31 bp, Artificial Sequence; identical to SEQ ID NO: 494
  Probe

SEQ ID NO: 29403 - DNA, 32 bp, Artificial Sequence; identical to SEQ ID NO: 495
  Probe

SEQ ID NO: 29404 - DNA, 33 bp, Artificial Sequence; identical to SEQ ID NO: 4180
  Probe

SEQ ID NO: 29405 - DNA, 34 bp, Artificial Sequence; identical to SEQ ID NO: 496
  Probe

SEQ ID NO: 29406 - DNA, 35 bp, Artificial Sequence; identical to SEQ ID NO: 497
  Probe

SEQ ID NO: 29407 - DNA, 37 bp, Artificial Sequence; identical to SEQ ID NO: 4181
  Probe

SEQ ID NO: 29408 - DNA, 38 bp, Artificial Sequence; identical to SEQ ID NO: 17810
  Probe

SEQ ID NO: 29409 - DNA, 42 bp, Artificial Sequence; identical to SEQ ID NO: 4183
  Probe

SEQ ID NO: 29410 - DNA, 43 bp, Artificial Sequence; identical to SEQ ID NO: 501
  Probe

SEQ ID NO: 29411 - DNA, 44 bp, Artificial Sequence; identical to SEQ ID NO: 4184
  Probe

SEQ ID NO: 29412 - DNA, 45 bp, Artificial Sequence; identical to SEQ ID NO: 4185
  Probe

SEQ ID NO: 29413 - DNA, 46 bp, Artificial Sequence
  Probe
cactgtaaagctaacttagcattaaccttttaagttaaagattaag

SEQ ID NO: 29414 - DNA, 47 bp, Artificial Sequence
  Probe
cactgtaaagctaacttagcattaaccttttaagttaaagattaaga

SEQ ID NO: 29415 - DNA, 19 bp, Artificial Sequence
  Probe
cacttaggagatttcaact

SEQ ID NO: 29416 - DNA, 20 bp, Artificial Sequence
  Probe
cacttaggagatttcaactt

SEQ ID NO: 29417 - DNA, 24 bp, Artificial Sequence
  Probe
cacttaggagatttcaacttaact

SEQ ID NO: 29418 - DNA, 29 bp, Artificial Sequence
  Probe
cacttaggagatttcaacttaacttgacc

SEQ ID NO: 29419 - DNA, 30 bp, Artificial Sequence; identical to SEQ ID NO: 4195
  Probe

SEQ ID NO: 29420 - DNA, 32 bp, Artificial Sequence; identical to SEQ ID NO: 4197
  Probe

SEQ ID NO: 29421 - DNA, 33 bp, Artificial Sequence; identical to SEQ ID NO: 4198
  Probe

SEQ ID NO: 29422 - DNA, 34 bp, Artificial Sequence; identical to SEQ ID NO: 4199
  Probe

SEQ ID NO: 29423 - DNA, 36 bp, Artificial Sequence; identical to SEQ ID NO: 4201
  Probe

SEQ ID NO: 29424 - DNA, 38 bp, Artificial Sequence; identical to SEQ ID NO: 4203
  Probe

SEQ ID NO: 29425 - DNA, 39 bp, Artificial Sequence; identical to SEQ ID NO: 4204
  Probe

SEQ ID NO: 29426 - DNA, 20 bp, Artificial Sequence
  Probe
cacttctgacacaactatct

SEQ ID NO: 29427 - DNA, 23 bp, Artificial Sequence
  Probe
cacttctgacacagcctgatctt

SEQ ID NO: 29428 - DNA, 24 bp, Artificial Sequence
  Probe
cacttctgacacagcctgatcttt

SEQ ID NO: 29429 - DNA, 20 bp, Artificial Sequence
  Probe
cacttctgacacattcgttt

SEQ ID NO: 29430 - DNA, 26 bp, Artificial Sequence
  Probe
cacttctgacagagctcaattacttt

SEQ ID NO: 29431 - DNA, 33 bp, Artificial Sequence; identical to SEQ ID NO: 4211
  Probe

SEQ ID NO: 29432 - DNA, 36 bp, Artificial Sequence; identical to SEQ ID NO: 17827
  Probe

SEQ ID NO: 29433 - DNA, 36 bp, Artificial Sequence; identical to SEQ ID NO: 17829
  Probe

SEQ ID NO: 29434 - DNA, 15 bp, Artificial Sequence
  Probe
cagaagattgagggt

SEQ ID NO: 29435 - DNA, 16 bp, Artificial Sequence
  Probe
cagaagattgagggtt

SEQ ID NO: 29436 - DNA, 15 bp, Artificial Sequence
  Probe
cagaagattgcaggt

SEQ ID NO: 29437 - DNA, 16 bp, Artificial Sequence
  Probe
cagaagattgcaggtt

SEQ ID NO: 29438 - DNA, 15 bp, Artificial Sequence
  Probe
cagaaggtctcactt

SEQ ID NO: 29439 - DNA, 16 bp, Artificial Sequence
  Probe
cagaaggtctcacttt

SEQ ID NO: 29440 - DNA, 17 bp, Artificial Sequence
  Probe
cagaaggtctcactttt

SEQ ID NO: 29441 - DNA, 16 bp, Artificial Sequence
  Probe
cagaccaagagccttc

SEQ ID NO: 29442 - DNA, 20 bp, Artificial Sequence
  Probe
cagaccaagagccttcaaag

SEQ ID NO: 29443 - DNA, 22 bp, Artificial Sequence
  Probe
cagaccaagagccttcaaagcc

SEQ ID NO: 29444 - DNA, 36 bp, Artificial Sequence; identical to SEQ ID NO: 513
  Probe

SEQ ID NO: 29445 - DNA, 27 bp, Artificial Sequence
  Probe
cagagaaaaagtctttaactccaccat

SEQ ID NO: 29446 - DNA, 17 bp, Artificial Sequence
  Probe
cagagaatagtttaaat

SEQ ID NO: 29447 - DNA, 18 bp, Artificial Sequence
  Probe
cagagaatagtttaaatt

SEQ ID NO: 29448 - DNA, 19 bp, Artificial Sequence
  Probe
cagagaatagtttaaatta

SEQ ID NO: 29449 - DNA, 20 bp, Artificial Sequence
  Probe
cagagaatagtttaaattag

SEQ ID NO: 29450 - DNA, 21 bp, Artificial Sequence
  Probe
cagagaatagtttaaattaga

SEQ ID NO: 29451 - DNA, 22 bp, Artificial Sequence
  Probe
cagagaatagtttaaattagaa

SEQ ID NO: 29452 - DNA, 23 bp, Artificial Sequence
  Probe
cagagaatagtttaaattagaat

SEQ ID NO: 29453 - DNA, 25 bp, Artificial Sequence
  Probe
cagagaatagtttaaattagaatct

SEQ ID NO: 29454 - DNA, 26 bp, Artificial Sequence
  Probe
cagagaatagtttaaattagaatctt

SEQ ID NO: 29455 - DNA, 27 bp, Artificial Sequence
  Probe
cagagaatagtttaaattagaatctta

SEQ ID NO: 29456 - DNA, 29 bp, Artificial Sequence
  Probe
cagagaatagtttaaattagaatcttagc

SEQ ID NO: 29457 - DNA, 31 bp, Artificial Sequence; identical to SEQ ID NO: 520
  Probe

SEQ ID NO: 29458 - DNA, 32 bp, Artificial Sequence; identical to SEQ ID NO: 521
  Probe

SEQ ID NO: 29459 - DNA, 33 bp, Artificial Sequence; identical to SEQ ID NO: 522
  Probe

SEQ ID NO: 29460 - DNA, 34 bp, Artificial Sequence; identical to SEQ ID NO: 523
  Probe

SEQ ID NO: 29461 - DNA, 35 bp, Artificial Sequence; identical to SEQ ID NO: 4232
  Probe

SEQ ID NO: 29462 - DNA, 39 bp, Artificial Sequence; identical to SEQ ID NO: 4236
  Probe

SEQ ID NO: 29463 - DNA, 44 bp, Artificial Sequence; identical to SEQ ID NO: 4237
  Probe

SEQ ID NO: 29464 - DNA, 50 bp, Artificial Sequence; identical to SEQ ID NO: 526
  Probe

SEQ ID NO: 29465 - DNA, 16 bp, Artificial Sequence
  Probe
cagagcccggtaatcg

SEQ ID NO: 29466 - DNA, 32 bp, Artificial Sequence; identical to SEQ ID NO: 17870
  Probe

SEQ ID NO: 29467 - DNA, 15 bp, Artificial Sequence
  Probe
cagaggcttacgacc

SEQ ID NO: 29468 - DNA, 16 bp, Artificial Sequence
  Probe
cagaggcttacgaccc

SEQ ID NO: 29469 - DNA, 27 bp, Artificial Sequence
  Probe
cagaggcttacgaccccttatttaccg

SEQ ID NO: 29470 - DNA, 15 bp, Artificial Sequence
  Probe
cagaggtcgatggat

SEQ ID NO: 29471 - DNA, 16 bp, Artificial Sequence
  Probe
cagaggtcgatggatc

SEQ ID NO: 29472 - DNA, 32 bp, Artificial Sequence; identical to SEQ ID NO: 527
  Probe

SEQ ID NO: 29473 - DNA, 33 bp, Artificial Sequence; identical to SEQ ID NO: 528
  Probe

SEQ ID NO: 29474 - DNA, 20 bp, Artificial Sequence
  Probe
cagagtggggttttgcagtc

SEQ ID NO: 29475 - DNA, 22 bp, Artificial Sequence
  Probe
cagagtggggttttgcagtcct

SEQ ID NO: 29476 - DNA, 16 bp, Artificial Sequence
  Probe
cagagtgtagcttaac

SEQ ID NO: 29477 - DNA, 17 bp, Artificial Sequence
  Probe
cagagtgtagcttaaca

SEQ ID NO: 29478 - DNA, 18 bp, Artificial Sequence
  Probe
cagagtgtagcttaacac

SEQ ID NO: 29479 - DNA, 19 bp, Artificial Sequence
  Probe
cagagtgtagcttaacaca

SEQ ID NO: 29480 - DNA, 23 bp, Artificial Sequence
  Probe
cagagtgtagcttaacacaaagc

SEQ ID NO: 29481 - DNA, 25 bp, Artificial Sequence
  Probe
cagagtgtagcttaacacaaagcac

SEQ ID NO: 29482 - DNA, 26 bp, Artificial Sequence
  Probe
cagagtgtagcttaacacaaagcacc

SEQ ID NO: 29483 - DNA, 27 bp, Artificial Sequence
  Probe
cagagtgtagcttaacacaaagcaccc

SEQ ID NO: 29484 - DNA, 28 bp, Artificial Sequence
  Probe
cagagtgtagcttaacacaaagcaccca

SEQ ID NO: 29485 - DNA, 29 bp, Artificial Sequence
  Probe
cagagtgtagcttaacacaaagcacccaa

SEQ ID NO: 29486 - DNA, 30 bp, Artificial Sequence; identical to SEQ ID NO: 4262
  Probe

SEQ ID NO: 29487 - DNA, 31 bp, Artificial Sequence; identical to SEQ ID NO: 4263
  Probe

SEQ ID NO: 29488 - DNA, 32 bp, Artificial Sequence; identical to SEQ ID NO: 4264
  Probe

SEQ ID NO: 29489 - DNA, 33 bp, Artificial Sequence; identical to SEQ ID NO: 4265
  Probe

SEQ ID NO: 29490 - DNA, 34 bp, Artificial Sequence; identical to SEQ ID NO: 4266
  Probe

SEQ ID NO: 29491 - DNA, 35 bp, Artificial Sequence; identical to SEQ ID NO: 4267
  Probe

SEQ ID NO: 29492 - DNA, 36 bp, Artificial Sequence; identical to SEQ ID NO: 4268
  Probe

SEQ ID NO: 29493 - DNA, 37 bp, Artificial Sequence; identical to SEQ ID NO: 4269
  Probe

SEQ ID NO: 29494 - DNA, 38 bp, Artificial Sequence; identical to SEQ ID NO: 4270
  Probe

SEQ ID NO: 29495 - DNA, 39 bp, Artificial Sequence; identical to SEQ ID NO: 4271
  Probe

SEQ ID NO: 29496 - DNA, 40 bp, Artificial Sequence; identical to SEQ ID NO: 4272
  Probe

SEQ ID NO: 29497 - DNA, 41 bp, Artificial Sequence; identical to SEQ ID NO: 4273
  Probe

SEQ ID NO: 29498 - DNA, 42 bp, Artificial Sequence; identical to SEQ ID NO: 4274
  Probe

SEQ ID NO: 29499 - DNA, 43 bp, Artificial Sequence; identical to SEQ ID NO: 4275
  Probe

SEQ ID NO: 29500 - DNA, 44 bp, Artificial Sequence; identical to SEQ ID NO: 4276
  Probe

SEQ ID NO: 29501 - DNA, 45 bp, Artificial Sequence; identical to SEQ ID NO: 4277
  Probe

SEQ ID NO: 29502 - DNA, 46 bp, Artificial Sequence; identical to SEQ ID NO: 4278
  Probe

SEQ ID NO: 29503 - DNA, 47 bp, Artificial Sequence
  Probe
cagagtgtagcttaacacaaagcacccaacttacacttaggagattt

SEQ ID NO: 29504 - DNA, 50 bp, Artificial Sequence; identical to SEQ ID NO: 4281
  Probe

SEQ ID NO: 29505 - DNA, 17 bp, Artificial Sequence
  Probe
cagattgtgaatctgac

SEQ ID NO: 29506 - DNA, 18 bp, Artificial Sequence
  Probe
cagattgtgaatctgaca

SEQ ID NO: 29507 - DNA, 20 bp, Artificial Sequence
  Probe
cagattgtgaatctgacaac

SEQ ID NO: 29508 - DNA, 21 bp, Artificial Sequence
  Probe
cagattgtgaatctgacaaca

SEQ ID NO: 29509 - DNA, 23 bp, Artificial Sequence
  Probe
cagattgtgaatctgacaacaga

SEQ ID NO: 29510 - DNA, 25 bp, Artificial Sequence
  Probe
cagattgtgaatctgacaacagagg

SEQ ID NO: 29511 - DNA, 26 bp, Artificial Sequence
  Probe
cagattgtgaatctgacaacagaggc

SEQ ID NO: 29512 - DNA, 27 bp, Artificial Sequence
  Probe
cagattgtgaatctgacaacagaggct

SEQ ID NO: 29513 - DNA, 28 bp, Artificial Sequence
  Probe
cagattgtgaatctgacaacagaggctt

SEQ ID NO: 29514 - DNA, 29 bp, Artificial Sequence
  Probe
cagattgtgaatctgacaacagaggctta

SEQ ID NO: 29515 - DNA, 32 bp, Artificial Sequence
  Probe
cagattgtgaatctgacaacagaggcttacga

SEQ ID NO: 29516 - DNA, 34 bp, Artificial Sequence
  Probe
cagattgtgaatctgacaacagaggcttacgacc

SEQ ID NO: 29517 - DNA, 35 bp, Artificial Sequence; identical to SEQ ID NO: 12886
  Probe

SEQ ID NO: 29518 - DNA, 37 bp, Artificial Sequence
  Probe
cagattgtgaatctgacaacagaggcttacgacccct

SEQ ID NO: 29519 - DNA, 38 bp, Artificial Sequence; identical to SEQ ID NO: 4282
  Probe

SEQ ID NO: 29520 - DNA, 45 bp, Artificial Sequence
  Probe
cagattgtgaatctgacaacagaggcttacgaccccttatttacc

SEQ ID NO: 29521 - DNA, 46 bp, Artificial Sequence
  Probe
cagattgtgaatctgacaacagaggcttacgaccccttatttaccg

SEQ ID NO: 29522 - DNA, 47 bp, Artificial Sequence
  Probe
cagattgtgaatctgacaacagaggcttacgaccccttatttaccga

SEQ ID NO: 29523 - DNA, 15 bp, Artificial Sequence
  Probe
cagcaacctcggttc

SEQ ID NO: 29524 - DNA, 32 bp, Artificial Sequence
  Probe
cagcaggtcccatggtgtaatggttagcactc

SEQ ID NO: 29525 - DNA, 18 bp, Artificial Sequence
  Probe
cagcagtacatgcagagc

SEQ ID NO: 29526 - DNA, 15 bp, Artificial Sequence
  Probe
cagcgatccgagttc

SEQ ID NO: 29527 - DNA, 21 bp, Artificial Sequence
  Probe
cagcggaagcgtgctgggccc

SEQ ID NO: 29528 - DNA, 21 bp, Artificial Sequence
  Probe
cagcggagccttcgatagctc

SEQ ID NO: 29529 - DNA, 36 bp, Artificial Sequence
  Probe
cagcggagccttcgatagctcagttggtagagcgga

SEQ ID NO: 29530 - DNA, 21 bp, Artificial Sequence
  Probe
cagctaaataagctatcgggc

SEQ ID NO: 29531 - DNA, 22 bp, Artificial Sequence
  Probe
cagctaaataagctatcgggcc

SEQ ID NO: 29532 - DNA, 23 bp, Artificial Sequence
  Probe
cagctaaataagctatcgggccc

SEQ ID NO: 29533 - DNA, 24 bp, Artificial Sequence
  Probe
cagctaaataagctatcgggccca

SEQ ID NO: 29534 - DNA, 25 bp, Artificial Sequence
  Probe
cagctaaataagctatcgggcccat

SEQ ID NO: 29535 - DNA, 26 bp, Artificial Sequence
  Probe
cagctaaataagctatcgggcccata

SEQ ID NO: 29536 - DNA, 28 bp, Artificial Sequence
  Probe
cagctaaataagctatcgggcccatacc

SEQ ID NO: 29537 - DNA, 36 bp, Artificial Sequence; identical to SEQ ID NO: 4312
  Probe

SEQ ID NO: 29538 - DNA, 20 bp, Artificial Sequence
  Probe
cagctaaggactgcaaaacc

SEQ ID NO: 29539 - DNA, 21 bp, Artificial Sequence
  Probe
cagctaaggactgcaaaaccc

SEQ ID NO: 29540 - DNA, 22 bp, Artificial Sequence
  Probe
cagctaaggactgcaaaacccc

SEQ ID NO: 29541 - DNA, 25 bp, Artificial Sequence
  Probe
cagctaaggactgcaaaaccccact

SEQ ID NO: 29542 - DNA, 27 bp, Artificial Sequence
  Probe
cagctaaggactgcaaaaccccactct

SEQ ID NO: 29543 - DNA, 30 bp, Artificial Sequence; identical to SEQ ID NO: 17948
  Probe

SEQ ID NO: 29544 - DNA, 32 bp, Artificial Sequence
  Probe
cagctagctcagtcggtagagcatgagactct

SEQ ID NO: 29545 - DNA, 17 bp, Artificial Sequence
  Probe
cagctatagggtggaga

SEQ ID NO: 29546 - DNA, 15 bp, Artificial Sequence
  Probe
cagctatccattggt

SEQ ID NO: 29547 - DNA, 18 bp, Artificial Sequence
  Probe
cagctatccattggtctt

SEQ ID NO: 29548 - DNA, 19 bp, Artificial Sequence
  Probe
cagctatccattggtctta

SEQ ID NO: 29549 - DNA, 24 bp, Artificial Sequence
  Probe
cagctatccattggtcttaggccc

SEQ ID NO: 29550 - DNA, 25 bp, Artificial Sequence
  Probe
cagctatccattggtcttaggcccc

SEQ ID NO: 29551 - DNA, 26 bp, Artificial Sequence
  Probe
cagctatccattggtcttaggcccca

SEQ ID NO: 29552 - DNA, 27 bp, Artificial Sequence
  Probe
cagctatccattggtcttaggccccaa

SEQ ID NO: 29553 - DNA, 28 bp, Artificial Sequence
  Probe
cagctatccattggtcttaggccccaaa

SEQ ID NO: 29554 - DNA, 29 bp, Artificial Sequence
  Probe
cagctatccattggtcttaggccccaaaa

SEQ ID NO: 29555 - DNA, 33 bp, Artificial Sequence
  Probe
cagctatccattggtcttaggccccaaaaattt

SEQ ID NO: 29556 - DNA, 50 bp, Artificial Sequence
  Probe
cagctatccattggtcttaggccccaaaaattttggtgcaactccaaata

SEQ ID NO: 29557 - DNA, 21 bp, Artificial Sequence
  Probe
cagctggtagagcggaggact

SEQ ID NO: 29558 - DNA, 18 bp, Artificial Sequence
  Probe
caggaacagggtttgtta

SEQ ID NO: 29559 - DNA, 34 bp, Artificial Sequence; identical to SEQ ID NO: 17965
  Probe

SEQ ID NO: 29560 - DNA, 36 bp, Artificial Sequence
  Probe
caggagatcctgggttcgaatcccagcggggccttg

SEQ ID NO: 29561 - DNA, 36 bp, Artificial Sequence
  Probe
caggagatcctgggttcgaatcccagcggtgcctcc

SEQ ID NO: 29562 - DNA, 22 bp, Artificial Sequence
  Probe
caggatggccgagcggtctaag

SEQ ID NO: 29563 - DNA, 23 bp, Artificial Sequence
  Probe
caggatggccgagcggtctaagg

SEQ ID NO: 29564 - DNA, 24 bp, Artificial Sequence
  Probe
caggatggccgagcggtctaaggc

SEQ ID NO: 29565 - DNA, 21 bp, Artificial Sequence
  Probe
caggatggccgagtggttaag

SEQ ID NO: 29566 - DNA, 23 bp, Artificial Sequence
  Probe
caggatggccgagtggttaaggc

SEQ ID NO: 29567 - DNA, 25 bp, Artificial Sequence
  Probe
caggcggcccgggttcgactcccgg

SEQ ID NO: 29568 - DNA, 26 bp, Artificial Sequence
  Probe
caggcggcccgggttcgactcccggt

SEQ ID NO: 29569 - DNA, 27 bp, Artificial Sequence
  Probe
caggcggcccgggttcgactcccggtg

SEQ ID NO: 29570 - DNA, 33 bp, Artificial Sequence; identical to SEQ ID NO: 4339
  Probe

SEQ ID NO: 29571 - DNA, 34 bp, Artificial Sequence; identical to SEQ ID NO: 533
  Probe

SEQ ID NO: 29572 - DNA, 35 bp, Artificial Sequence; identical to SEQ ID NO: 17978
  Probe

SEQ ID NO: 29573 - DNA, 18 bp, Artificial Sequence
  Probe
cagggatgggttcgattc

SEQ ID NO: 29574 - DNA, 20 bp, Artificial Sequence
  Probe
cagggatgggttcgattctc

SEQ ID NO: 29575 - DNA, 26 bp, Artificial Sequence
  Probe
cagggatgggttcgattctcatagtc

SEQ ID NO: 29576 - DNA, 27 bp, Artificial Sequence
  Probe
cagggatgggttcgattctcatagtcc

SEQ ID NO: 29577 - DNA, 28 bp, Artificial Sequence
  Probe
cagggatgggttcgattctcatagtcct

SEQ ID NO: 29578 - DNA, 33 bp, Artificial Sequence
  Probe
cagggattgtgggttcgagtcccacccggggta

SEQ ID NO: 29579 - DNA, 36 bp, Artificial Sequence
  Probe
cagggcctggatagctcagttggtagaacatcagac

SEQ ID NO: 29580 - DNA, 29 bp, Artificial Sequence
  Probe
caggggcccggatagctcagtcggtagag

SEQ ID NO: 29581 - DNA, 36 bp, Artificial Sequence
  Probe
caggggcccggatagctcagtcggtagagcatcaga

SEQ ID NO: 29582 - DNA, 38 bp, Artificial Sequence
  Probe
caggggcccggatagctcagtcggtagagcatcagact

SEQ ID NO: 29583 - DNA, 40 bp, Artificial Sequence
  Probe
caggggcccggatagctcagtcggtagagcatcagacttt

SEQ ID NO: 29584 - DNA, 41 bp, Artificial Sequence
  Probe
caggggcccggatagctcagtcggtagagcatcagactttt

SEQ ID NO: 29585 - DNA, 42 bp, Artificial Sequence
  Probe
caggggcccggatagctcagtcggtagagcatcagactttta

SEQ ID NO: 29586 - DNA, 21 bp, Artificial Sequence
  Probe
caggggttagagcactggtct

SEQ ID NO: 29587 - DNA, 15 bp, Artificial Sequence
  Probe
caggggttaggcctc

SEQ ID NO: 29588 - DNA, 26 bp, Artificial Sequence
  Probe
caggggttaggcctctttttaccagc

SEQ ID NO: 29589 - DNA, 33 bp, Artificial Sequence; identical to SEQ ID NO: 17996
  Probe

SEQ ID NO: 29590 - DNA, 28 bp, Artificial Sequence
  Probe
cagggttcaagtccctgttcgggcggca

SEQ ID NO: 29591 - DNA, 15 bp, Artificial Sequence
  Probe
cagggtttgttaaga

SEQ ID NO: 29592 - DNA, 25 bp, Artificial Sequence
  Probe
cagggtttgttaagatggcagagcc

SEQ ID NO: 29593 - DNA, 15 bp, Artificial Sequence
  Probe
caggtcgcagtctcc

SEQ ID NO: 29594 - DNA, 16 bp, Artificial Sequence
  Probe
caggtcgcagtctccc

SEQ ID NO: 29595 - DNA, 18 bp, Artificial Sequence
  Probe
cagtcagaggttcaattc

SEQ ID NO: 29596 - DNA, 21 bp, Artificial Sequence
  Probe
cagtcggctagagcgtggtgc

SEQ ID NO: 29597 - DNA, 15 bp, Artificial Sequence
  Probe
cagtcggtagagcat

SEQ ID NO: 29598 - DNA, 17 bp, Artificial Sequence
  Probe
cagtcggtagagcatca

SEQ ID NO: 29599 - DNA, 18 bp, Artificial Sequence
  Probe
cagtcggtagagcatcag

SEQ ID NO: 29600 - DNA, 21 bp, Artificial Sequence
  Probe
cagtcggtagagcatcagact

SEQ ID NO: 29601 - DNA, 23 bp, Artificial Sequence
  Probe
cagtcggtagagcatcagacttt

SEQ ID NO: 29602 - DNA, 24 bp, Artificial Sequence
  Probe
cagtcggtagagcatcagactttt

SEQ ID NO: 29603 - DNA, 30 bp, Artificial Sequence
  Probe
cagtcggtagagcatcagacttttaatctg

SEQ ID NO: 29604 - DNA, 31 bp, Artificial Sequence
  Probe
cagtcggtagagcatcagacttttaatctga

SEQ ID NO: 29605 - DNA, 16 bp, Artificial Sequence
  Probe
cagtcggtagagcatg

SEQ ID NO: 29606 - DNA, 19 bp, Artificial Sequence
  Probe
cagtcggtagagcatgaga

SEQ ID NO: 29607 - DNA, 20 bp, Artificial Sequence
  Probe
cagtcggtagagcatgagac

SEQ ID NO: 29608 - DNA, 22 bp, Artificial Sequence
  Probe
cagtcggtagagcatgagaccc

SEQ ID NO: 29609 - DNA, 21 bp, Artificial Sequence
  Probe
cagtcggtagagcatgagact

SEQ ID NO: 29610 - DNA, 22 bp, Artificial Sequence
  Probe
cagtcggtagagcatgagactc

SEQ ID NO: 29611 - DNA, 30 bp, Artificial Sequence
  Probe
cagtcggtagagcatgagactcttaatctc

SEQ ID NO: 29612 - DNA, 31 bp, Artificial Sequence
  Probe
cagtcggtagagcatgagactcttaatctca

SEQ ID NO: 29613 - DNA, 36 bp, Artificial Sequence
  Probe
cagtcggtagagcatgagactcttaatctcagggtc

SEQ ID NO: 29614 - DNA, 18 bp, Artificial Sequence
  Probe
cagtcggtagagcatggg

SEQ ID NO: 29615 - DNA, 19 bp, Artificial Sequence
  Probe
cagtcggtagagcatggga

SEQ ID NO: 29616 - DNA, 23 bp, Artificial Sequence
  Probe
cagtcggtagagcatgggactct

SEQ ID NO: 29617 - DNA, 28 bp, Artificial Sequence
  Probe
cagtcggtagagcatgggactcttaatc

SEQ ID NO: 29618 - DNA, 31 bp, Artificial Sequence
  Probe
cagtcggtagagcatgggactcttaatccca

SEQ ID NO: 29619 - DNA, 36 bp, Artificial Sequence
  Probe
cagtcggtagagcatgggactcttaatcccagggtc

SEQ ID NO: 29620 - DNA, 21 bp, Artificial Sequence
  Probe
cagtcggtagagctatcagac

SEQ ID NO: 29621 - DNA, 18 bp, Artificial Sequence
  Probe
cagtggtagaattctcgc

SEQ ID NO: 29622 - DNA, 19 bp, Artificial Sequence
  Probe
cagtggtagaattctcgcc

SEQ ID NO: 29623 - DNA, 20 bp, Artificial Sequence
  Probe
cagtggtagaattctcgcct

SEQ ID NO: 29624 - DNA, 21 bp, Artificial Sequence
  Probe
cagtggtagaattctcgcctc

SEQ ID NO: 29625 - DNA, 36 bp, Artificial Sequence
  Probe
cagtggtagaattctcgcctcccacgcgggagaccc

SEQ ID NO: 29626 - DNA, 22 bp, Artificial Sequence
  Probe
cagtggtagaattctcgcctgc

SEQ ID NO: 29627 - DNA, 23 bp, Artificial Sequence
  Probe
cagtggtagaattctcgcctgcc

SEQ ID NO: 29628 - DNA, 25 bp, Artificial Sequence
  Probe
cagtggtagaattctcgcctgccac

SEQ ID NO: 29629 - DNA, 31 bp, Artificial Sequence
  Probe
cagtggtagaattctcgcctgccacgcggga

SEQ ID NO: 29630 - DNA, 36 bp, Artificial Sequence; identical to SEQ ID NO: 18033
  Probe

SEQ ID NO: 29631 - DNA, 15 bp, Artificial Sequence
  Probe
cagtggtagagcatt

SEQ ID NO: 29632 - DNA, 20 bp, Artificial Sequence
  Probe
cagtggtagagcatttgact

SEQ ID NO: 29633 - DNA, 22 bp, Artificial Sequence
  Probe
cagtggtagagcatttgactgc

SEQ ID NO: 29634 - DNA, 15 bp, Artificial Sequence
  Probe
cagtggtagagcgca

SEQ ID NO: 29635 - DNA, 16 bp, Artificial Sequence
  Probe
cagtgtcaggatggcc

SEQ ID NO: 29636 - DNA, 36 bp, Artificial Sequence
  Probe
cagttctggctcgttggtctagtggtatgattctcg

SEQ ID NO: 29637 - DNA, 29 bp, Artificial Sequence
  Probe
cagttgatgcagagtggggttttgcagtc

SEQ ID NO: 29638 - DNA, 30 bp, Artificial Sequence
  Probe
cagttgatgcagagtggggttttgcagtcc

SEQ ID NO: 29639 - DNA, 31 bp, Artificial Sequence; identical to SEQ ID NO: 18035
  Probe

SEQ ID NO: 29640 - DNA, 36 bp, Artificial Sequence; identical to SEQ ID NO: 4381
  Probe

SEQ ID NO: 29641 - DNA, 22 bp, Artificial Sequence
  Probe
cagttgattagggtgcttagct

SEQ ID NO: 29642 - DNA, 29 bp, Artificial Sequence
  Probe
cagttgattagggtgcttagctgttaact

SEQ ID NO: 29643 - DNA, 45 bp, Artificial Sequence
  Probe
cagttgattagggtgcttagctgttaactaagtgtttgtgggttt

SEQ ID NO: 29644 - DNA, 16 bp, Artificial Sequence
  Probe
cagttggtagagcatc

SEQ ID NO: 29645 - DNA, 19 bp, Artificial Sequence
  Probe
cagttggtagagcggagga

SEQ ID NO: 29646 - DNA, 24 bp, Artificial Sequence
  Probe
cagttggtagagcggaggactgta

SEQ ID NO: 29647 - DNA, 21 bp, Artificial Sequence
  Probe
cagttggttagagcgtggtgc

SEQ ID NO: 29648 - DNA, 18 bp, Artificial Sequence
  Probe
cagtttatgtagcttacc

SEQ ID NO: 29649 - DNA, 19 bp, Artificial Sequence
  Probe
cagtttatgtagcttacct

SEQ ID NO: 29650 - DNA, 21 bp, Artificial Sequence
  Probe
cagtttatgtagcttacctcc

SEQ ID NO: 29651 - DNA, 22 bp, Artificial Sequence
  Probe
cagtttatgtagcttacctcct

SEQ ID NO: 29652 - DNA, 28 bp, Artificial Sequence
  Probe
cataaaacttaaaactttacagtcagag

SEQ ID NO: 29653 - DNA, 29 bp, Artificial Sequence
  Probe
cataaaacttaaaactttacagtcagagg

SEQ ID NO: 29654 - DNA, 30 bp, Artificial Sequence
  Probe
cataaaacttaaaactttacagtcagaggt

SEQ ID NO: 29655 - DNA, 31 bp, Artificial Sequence
  Probe
cataaaacttaaaactttacagtcagaggtt

SEQ ID NO: 29656 - DNA, 32 bp, Artificial Sequence
  Probe
cataaaacttaaaactttacagtcagaggttc

SEQ ID NO: 29657 - DNA, 36 bp, Artificial Sequence
  Probe
cataaaacttaaaactttacagtcagaggttcaatt

SEQ ID NO: 29658 - DNA, 23 bp, Artificial Sequence
  Probe
cataacccagaggtcgatggatc

SEQ ID NO: 29659 - DNA, 30 bp, Artificial Sequence
  Probe
cataactttgtcaaagttaaattataggct

SEQ ID NO: 29660 - DNA, 17 bp, Artificial Sequence
  Probe
cataatctgaaggtcct

SEQ ID NO: 29661 - DNA, 20 bp, Artificial Sequence
  Probe
cataatctgaaggtcctgag

SEQ ID NO: 29662 - DNA, 21 bp, Artificial Sequence
  Probe
cataatctgaaggtcctgagt

SEQ ID NO: 29663 - DNA, 22 bp, Artificial Sequence
  Probe
cataatctgaaggtcctgagtt

SEQ ID NO: 29664 - DNA, 23 bp, Artificial Sequence
  Probe
cataatctgaaggtcctgagttc

SEQ ID NO: 29665 - DNA, 36 bp, Artificial Sequence
  Probe
cataatctgaaggtcctgagttcgaacctcagaggg

SEQ ID NO: 29666 - DNA, 43 bp, Artificial Sequence
  Probe
cataatctgaaggtcctgagttcgaacctcagagggggcagct

SEQ ID NO: 29667 - DNA, 36 bp, Artificial Sequence
  Probe
cataatctgaaggtcctgagttcgagcctcagagag

SEQ ID NO: 29668 - DNA, 21 bp, Artificial Sequence
  Probe
cataatctgaaggtcgtgagt

SEQ ID NO: 29669 - DNA, 36 bp, Artificial Sequence
  Probe
cataatctgaaggtcgtgagttcgagcctcacacgg

SEQ ID NO: 29670 - DNA, 36 bp, Artificial Sequence
  Probe
cataatctgaaggtcgtgagttcgatcctcacacgg

SEQ ID NO: 29671 - DNA, 43 bp, Artificial Sequence; identical to SEQ ID NO: 4392
  Probe

SEQ ID NO: 29672 - DNA, 18 bp, Artificial Sequence
  Probe
catacccatggccaacct

SEQ ID NO: 29673 - DNA, 29 bp, Artificial Sequence
  Probe
catacccatggccaacctcctactcctca

SEQ ID NO: 29674 - DNA, 25 bp, Artificial Sequence
  Probe
catatcattggtcgtggttgtagtc

SEQ ID NO: 29675 - DNA, 26 bp, Artificial Sequence
  Probe
catatcattggtcgtggttgtagtcc

SEQ ID NO: 29676 - DNA, 27 bp, Artificial Sequence
  Probe
catatcattggtcgtggttgtagtccg

SEQ ID NO: 29677 - DNA, 29 bp, Artificial Sequence
  Probe
catatcattggtcgtggttgtagtccgtg

SEQ ID NO: 29678 - DNA, 30 bp, Artificial Sequence; identical to SEQ ID NO: 9619
  Probe

SEQ ID NO: 29679 - DNA, 31 bp, Artificial Sequence; identical to SEQ ID NO: 540
  Probe

SEQ ID NO: 29680 - DNA, 33 bp, Artificial Sequence; identical to SEQ ID NO: 18059
  Probe

SEQ ID NO: 29681 - DNA, 34 bp, Artificial Sequence
  Probe
catatcattggtcgtggttgtagtccgtgcgaga

SEQ ID NO: 29682 - DNA, 35 bp, Artificial Sequence; identical to SEQ ID NO: 18060
  Probe

SEQ ID NO: 29683 - DNA, 39 bp, Artificial Sequence; identical to SEQ ID NO: 4401
  Probe

SEQ ID NO: 29684 - DNA, 30 bp, Artificial Sequence
  Probe
catatggtctagcggttaggattcctggtt

SEQ ID NO: 29685 - DNA, 36 bp, Artificial Sequence
  Probe
catattgaattgcaaattcgaagaagcagcttcaaa

SEQ ID NO: 29686 - DNA, 16 bp, Artificial Sequence
  Probe
catcagattgtgaatc

SEQ ID NO: 29687 - DNA, 17 bp, Artificial Sequence
  Probe
catcagattgtgaatct

SEQ ID NO: 29688 - DNA, 29 bp, Artificial Sequence
  Probe
catcagattgtgaatctgacaacagaggc

SEQ ID NO: 29689 - DNA, 30 bp, Artificial Sequence
  Probe
catcagattgtgaatctgacaacagaggct

SEQ ID NO: 29690 - DNA, 31 bp, Artificial Sequence
  Probe
catcagattgtgaatctgacaacagaggctt

SEQ ID NO: 29691 - DNA, 37 bp, Artificial Sequence
  Probe
catcagattgtgaatctgacaacagaggcttacgacc

SEQ ID NO: 29692 - DNA, 38 bp, Artificial Sequence
  Probe
catcagattgtgaatctgacaacagaggcttacgaccc

SEQ ID NO: 29693 - DNA, 24 bp, Artificial Sequence
  Probe
catcctctgctatagactcccttt

SEQ ID NO: 29694 - DNA, 21 bp, Artificial Sequence
  Probe
catctggggtggcctgtgact

SEQ ID NO: 29695 - DNA, 16 bp, Artificial Sequence
  Probe
catgagactcttaatc

SEQ ID NO: 29696 - DNA, 17 bp, Artificial Sequence
  Probe
catgagactcttaatct

SEQ ID NO: 29697 - DNA, 25 bp, Artificial Sequence
  Probe
catgcacactactataaccacccta

SEQ ID NO: 29698 - DNA, 19 bp, Artificial Sequence
  Probe
catgcacgaggccccgggt

SEQ ID NO: 29699 - DNA, 19 bp, Artificial Sequence
  Probe
catgcagcgcaagtaggtc

SEQ ID NO: 29700 - DNA, 20 bp, Artificial Sequence
  Probe
catgcagcgcaagtaggtct

SEQ ID NO: 29701 - DNA, 24 bp, Artificial Sequence
  Probe
catgcagcgcaagtaggtctacaa

SEQ ID NO: 29702 - DNA, 15 bp, Artificial Sequence
  Probe
catgcccccatgtct

SEQ ID NO: 29703 - DNA, 18 bp, Artificial Sequence
  Probe
catgcccccatgtctaac

SEQ ID NO: 29704 - DNA, 19 bp, Artificial Sequence
  Probe
catgcccccatgtctaaca

SEQ ID NO: 29705 - DNA, 21 bp, Artificial Sequence
  Probe
catgcccccatgtctaacaac

SEQ ID NO: 29706 - DNA, 22 bp, Artificial Sequence
  Probe
catgcccccatgtctaacaaca

SEQ ID NO: 29707 - DNA, 27 bp, Artificial Sequence
  Probe
catgcccccatgtctaacaacatggct

SEQ ID NO: 29708 - DNA, 31 bp, Artificial Sequence; identical to SEQ ID NO: 4434
  Probe

SEQ ID NO: 29709 - DNA, 33 bp, Artificial Sequence; identical to SEQ ID NO: 4436
  Probe

SEQ ID NO: 29710 - DNA, 35 bp, Artificial Sequence; identical to SEQ ID NO: 4438
  Probe

SEQ ID NO: 29711 - DNA, 36 bp, Artificial Sequence; identical to SEQ ID NO: 4439
  Probe

SEQ ID NO: 29712 - DNA, 15 bp, Artificial Sequence
  Probe
catggaggcgtgggt

SEQ ID NO: 29713 - DNA, 21 bp, Artificial Sequence
  Probe
catggccaacctcctactcct

SEQ ID NO: 29714 - DNA, 23 bp, Artificial Sequence
  Probe
catggccaacctcctactcctca

SEQ ID NO: 29715 - DNA, 15 bp, Artificial Sequence
  Probe
catgggactcttaat

SEQ ID NO: 29716 - DNA, 16 bp, Artificial Sequence
  Probe
catgggactcttaatc

SEQ ID NO: 29717 - DNA, 17 bp, Artificial Sequence
  Probe
catgggactcttaatcc

SEQ ID NO: 29718 - DNA, 17 bp, Artificial Sequence
  Probe
catgggtggttcagtgg

SEQ ID NO: 29719 - DNA, 19 bp, Artificial Sequence
  Probe
catgggtggttcagtggta

SEQ ID NO: 29720 - DNA, 20 bp, Artificial Sequence
  Probe
catgggtggttcagtggtag

SEQ ID NO: 29721 - DNA, 30 bp, Artificial Sequence; identical to SEQ ID NO: 9630
  Probe

SEQ ID NO: 29722 - DNA, 32 bp, Artificial Sequence; identical to SEQ ID NO: 4443
  Probe

SEQ ID NO: 29723 - DNA, 34 bp, Artificial Sequence; identical to SEQ ID NO: 4444
  Probe

SEQ ID NO: 29724 - DNA, 36 bp, Artificial Sequence
  Probe
catgggtggttcagtggtagaattctcgcctgccac

SEQ ID NO: 29725 - DNA, 36 bp, Artificial Sequence
  Probe
catggtctagcggttaggattcctggttttcaccca

SEQ ID NO: 29726 - DNA, 36 bp, Artificial Sequence
  Probe
catggtgtaatggttagcactctggactctgaatcc

SEQ ID NO: 29727 - DNA, 47 bp, Artificial Sequence
  Probe
catggtgtaatggttagcactctggactctgaatccagcgatccgag

SEQ ID NO: 29728 - DNA, 50 bp, Artificial Sequence
  Probe
catggtgtaatggttagcactctggactctgaatccagcgatccgagttc

SEQ ID NO: 29729 - DNA, 19 bp, Artificial Sequence
  Probe
catgtatgaggccccgggt

SEQ ID NO: 29730 - DNA, 27 bp, Artificial Sequence
  Probe
cattaaattatgataatcatatttacc

SEQ ID NO: 29731 - DNA, 33 bp, Artificial Sequence
  Probe
cattaaccttttaagttaaagattaagagaacc

SEQ ID NO: 29732 - DNA, 36 bp, Artificial Sequence
  Probe
cattaaccttttaagttaaagattaagagaaccaac

SEQ ID NO: 29733 - DNA, 36 bp, Artificial Sequence
  Probe
cattcttgcgacccgggttcgattcccgggcggcgc

SEQ ID NO: 29734 - DNA, 39 bp, Artificial Sequence; identical to SEQ ID NO: 4450
  Probe

SEQ ID NO: 29735 - DNA, 16 bp, Artificial Sequence
  Probe
cattggactgtaaatc

SEQ ID NO: 29736 - DNA, 37 bp, Artificial Sequence
  Probe
cattggactgtaaatctaaagacaggggttaggcctc

SEQ ID NO: 29737 - DNA, 16 bp, Artificial Sequence
  Probe
cattggtcgtggttgt

SEQ ID NO: 29738 - DNA, 17 bp, Artificial Sequence
  Probe
cattggtcgtggttgta

SEQ ID NO: 29739 - DNA, 18 bp, Artificial Sequence
  Probe
cattggtcgtggttgtag

SEQ ID NO: 29740 - DNA, 19 bp, Artificial Sequence
  Probe
cattggtcgtggttgtagt

SEQ ID NO: 29741 - DNA, 22 bp, Artificial Sequence
  Probe
cattggtcgtggttgtagtccg

SEQ ID NO: 29742 - DNA, 23 bp, Artificial Sequence
  Probe
cattggtcgtggttgtagtccgt

SEQ ID NO: 29743 - DNA, 24 bp, Artificial Sequence
  Probe
cattggtcgtggttgtagtccgtg

SEQ ID NO: 29744 - DNA, 25 bp, Artificial Sequence
  Probe
cattggtcgtggttgtagtccgtgc

SEQ ID NO: 29745 - DNA, 27 bp, Artificial Sequence
  Probe
cattggtcgtggttgtagtccgtgcga

SEQ ID NO: 29746 - DNA, 33 bp, Artificial Sequence; identical to SEQ ID NO: 4460
  Probe

SEQ ID NO: 29747 - DNA, 36 bp, Artificial Sequence
  Probe
cattggtcgtggttgtagtccgtgcgagaataatga

SEQ ID NO: 29748 - DNA, 15 bp, Artificial Sequence
  Probe
cattggtcttaggcc

SEQ ID NO: 29749 - DNA, 28 bp, Artificial Sequence
  Probe
cattggtcttaggccccaaaaattttgg

SEQ ID NO: 29750 - DNA, 31 bp, Artificial Sequence
  Probe
cattggtcttaggccccaaaaattttggtgc

SEQ ID NO: 29751 - DNA, 32 bp, Artificial Sequence
  Probe
cattggtcttaggccccaaaaattttggtgca

SEQ ID NO: 29752 - DNA, 36 bp, Artificial Sequence
  Probe
cattggtcttaggccccaaaaattttggtgcaactc

SEQ ID NO: 29753 - DNA, 37 bp, Artificial Sequence
  Probe
cattggtcttaggccccaaaaattttggtgcaactcc

SEQ ID NO: 29754 - DNA, 20 bp, Artificial Sequence
  Probe
cattggtggttcagtggtag

SEQ ID NO: 29755 - DNA, 29 bp, Artificial Sequence
  Probe
cattggtggttcagtggtagaattctcgc

SEQ ID NO: 29756 - DNA, 30 bp, Artificial Sequence; identical to SEQ ID NO: 4462
  Probe

SEQ ID NO: 29757 - DNA, 31 bp, Artificial Sequence; identical to SEQ ID NO: 4463
  Probe

SEQ ID NO: 29758 - DNA, 36 bp, Artificial Sequence
  Probe
cattggtggttcagtggtagaattctcgcctcccac

SEQ ID NO: 29759 - DNA, 32 bp, Artificial Sequence; identical to SEQ ID NO: 4464
  Probe

SEQ ID NO: 29760 - DNA, 34 bp, Artificial Sequence; identical to SEQ ID NO: 4466
  Probe

SEQ ID NO: 29761 - DNA, 36 bp, Artificial Sequence
  Probe
cattggtggttcagtggtagaattctcgcctgccac

SEQ ID NO: 29762 - DNA, 50 bp, Artificial Sequence; identical to SEQ ID NO: 18141
  Probe

SEQ ID NO: 29763 - DNA, 36 bp, Artificial Sequence
  Probe
cattgtgctttgcacgcgtgggttcgaatcccatcc

SEQ ID NO: 29764 - DNA, 44 bp, Artificial Sequence
  Probe
cattgtgctttgcacgcgtgggttcgaatcccatcctcgtcggc

SEQ ID NO: 29765 - DNA, 45 bp, Artificial Sequence
  Probe
cattgtgctttgcacgcgtgggttcgaatcccatcctcgtcggcc

SEQ ID NO: 29766 - DNA, 35 bp, Artificial Sequence
  Probe
catttcataactttgtcaaagttaaattataggct

SEQ ID NO: 29767 - DNA, 36 bp, Artificial Sequence
  Probe
catttcataactttgtcaaagttaaattataggcta

SEQ ID NO: 29768 - DNA, 29 bp, Artificial Sequence
  Probe
catttgactgcagatcaagaggtccccgg

SEQ ID NO: 29769 - DNA, 31 bp, Artificial Sequence
  Probe
catttgactgcagatcaagaggtccccggtt

SEQ ID NO: 29770 - DNA, 30 bp, Artificial Sequence
  Probe
catttgactgcagatcaagaggtccctggt

SEQ ID NO: 29771 - DNA, 31 bp, Artificial Sequence
  Probe
catttgactgcagatcaagaggtccctggtt

SEQ ID NO: 29772 - DNA, 21 bp, Artificial Sequence
  Probe
ccaaaaattttggtgcaactc

SEQ ID NO: 29773 - DNA, 22 bp, Artificial Sequence
  Probe
ccaaaaattttggtgcaactcc

SEQ ID NO: 29774 - DNA, 17 bp, Artificial Sequence
  Probe
ccaaaacatcagattgt

SEQ ID NO: 29775 - DNA, 19 bp, Artificial Sequence
  Probe
ccaaaacatcagattgtga

SEQ ID NO: 29776 - DNA, 22 bp, Artificial Sequence
  Probe
ccaaaacatcagattgtgaatc

SEQ ID NO: 29777 - DNA, 23 bp, Artificial Sequence
  Probe
ccaaaacatcagattgtgaatct

SEQ ID NO: 29778 - DNA, 36 bp, Artificial Sequence; identical to SEQ ID NO: 4479
  Probe

SEQ ID NO: 29779 - DNA, 16 bp, Artificial Sequence
  Probe
ccaaacccactccacc

SEQ ID NO: 29780 - DNA, 17 bp, Artificial Sequence
  Probe
ccaaacccactccacct

SEQ ID NO: 29781 - DNA, 38 bp, Artificial Sequence; identical to SEQ ID NO: 18167
  Probe

SEQ ID NO: 29782 - DNA, 16 bp, Artificial Sequence
  Probe
ccaacccgtcatctac

SEQ ID NO: 29783 - DNA, 23 bp, Artificial Sequence
  Probe
ccaactaaatactaccgtatggc

SEQ ID NO: 29784 - DNA, 18 bp, Artificial Sequence
  Probe
ccaacttacacttaggag

SEQ ID NO: 29785 - DNA, 28 bp, Artificial Sequence
  Probe
ccaacttacacttaggagatttcaactt

SEQ ID NO: 29786 - DNA, 35 bp, Artificial Sequence; identical to SEQ ID NO: 4500
  Probe

SEQ ID NO: 29787 - DNA, 36 bp, Artificial Sequence; identical to SEQ ID NO: 4501
  Probe

SEQ ID NO: 29788 - DNA, 43 bp, Artificial Sequence; identical to SEQ ID NO: 4504
  Probe

SEQ ID NO: 29789 - DNA, 44 bp, Artificial Sequence; identical to SEQ ID NO: 4505
  Probe

SEQ ID NO: 29790 - DNA, 45 bp, Artificial Sequence; identical to SEQ ID NO: 4506
  Probe

SEQ ID NO: 29791 - DNA, 46 bp, Artificial Sequence; identical to SEQ ID NO: 4507
  Probe

SEQ ID NO: 29792 - DNA, 47 bp, Artificial Sequence
  Probe
ccaacttacacttaggagatttcaacttaacttgaccgctctgagct

SEQ ID NO: 29793 - DNA, 15 bp, Artificial Sequence
  Probe
ccaagaacagggttt

SEQ ID NO: 29794 - DNA, 16 bp, Artificial Sequence
  Probe
ccaagaacagggtttg

SEQ ID NO: 29795 - DNA, 17 bp, Artificial Sequence
  Probe
ccaagaacagggtttgt

SEQ ID NO: 29796 - DNA, 18 bp, Artificial Sequence
  Probe
ccaagaacagggtttgtt

SEQ ID NO: 29797 - DNA, 19 bp, Artificial Sequence
  Probe
ccaagaacagggtttgtta

SEQ ID NO: 29798 - DNA, 20 bp, Artificial Sequence
  Probe
ccaagaacagggtttgttaa

SEQ ID NO: 29799 - DNA, 21 bp, Artificial Sequence
  Probe
ccaagaacagggtttgttaag

SEQ ID NO: 29800 - DNA, 22 bp, Artificial Sequence
  Probe
ccaagaacagggtttgttaaga

SEQ ID NO: 29801 - DNA, 19 bp, Artificial Sequence
  Probe
ccaagcagttgacccgggt

SEQ ID NO: 29802 - DNA, 17 bp, Artificial Sequence
  Probe
ccaagctctttccattt

SEQ ID NO: 29803 - DNA, 18 bp, Artificial Sequence
  Probe
ccaagctctttccatttt

SEQ ID NO: 29804 - DNA, 26 bp, Artificial Sequence
  Probe
ccaaggcgatcacgtagattttgttt

SEQ ID NO: 29805 - DNA, 17 bp, Artificial Sequence
  Probe
ccaatggaggcgtgggt

SEQ ID NO: 29806 - DNA, 36 bp, Artificial Sequence
  Probe
ccaatggaggcgtgggttcgaatcccacttctgaca

SEQ ID NO: 29807 - DNA, 17 bp, Artificial Sequence
  Probe
ccacacccacccaagaa

SEQ ID NO: 29808 - DNA, 18 bp, Artificial Sequence
  Probe
ccacacccacccaagaac

SEQ ID NO: 29809 - DNA, 19 bp, Artificial Sequence
  Probe
ccacacccacccaagaaca

SEQ ID NO: 29810 - DNA, 17 bp, Artificial Sequence
  Probe
ccacagtttatgtagct

SEQ ID NO: 29811 - DNA, 21 bp, Artificial Sequence
  Probe
ccacagtttatgtagcttacc

SEQ ID NO: 29812 - DNA, 22 bp, Artificial Sequence
  Probe
ccacagtttatgtagcttacct

SEQ ID NO: 29813 - DNA, 24 bp, Artificial Sequence
  Probe
ccacagtttatgtagcttacctcc

SEQ ID NO: 29814 - DNA, 25 bp, Artificial Sequence
  Probe
ccacagtttatgtagcttacctcct

SEQ ID NO: 29815 - DNA, 27 bp, Artificial Sequence
  Probe
ccacatggtctagcggttaggattcct

SEQ ID NO: 29816 - DNA, 32 bp, Artificial Sequence; identical to SEQ ID NO: 564
  Probe

SEQ ID NO: 29817 - DNA, 33 bp, Artificial Sequence; identical to SEQ ID NO: 565
  Probe

SEQ ID NO: 29818 - DNA, 34 bp, Artificial Sequence; identical to SEQ ID NO: 566
  Probe

SEQ ID NO: 29819 - DNA, 36 bp, Artificial Sequence
  Probe
ccacatggtctagcggttaggattcctggttttcac

SEQ ID NO: 29820 - DNA, 23 bp, Artificial Sequence
  Probe
ccacccaagaacagggtttgtta

SEQ ID NO: 29821 - DNA, 15 bp, Artificial Sequence
  Probe
ccacccagggacgcc

SEQ ID NO: 29822 - DNA, 23 bp, Artificial Sequence
  Probe
ccacccagggacgctatgacctt

SEQ ID NO: 29823 - DNA, 36 bp, Artificial Sequence
  Probe
ccacgcgggagacccgggttcaattcccggccaatg

SEQ ID NO: 29824 - DNA, 36 bp, Artificial Sequence
  Probe
ccacgcgggaggcccgggttcgattcccggccaatg

SEQ ID NO: 29825 - DNA, 40 bp, Artificial Sequence
  Probe
ccacgcgggaggcccgggttcgattcccggccaatgcaac

SEQ ID NO: 29826 - DNA, 40 bp, Artificial Sequence
  Probe
ccacgcgggaggcccgggttcgattcccggccaatgcacg

SEQ ID NO: 29827 - DNA, 41 bp, Artificial Sequence; identical to SEQ ID NO: 4531
  Probe

SEQ ID NO: 29828 - DNA, 40 bp, Artificial Sequence
  Probe
ccacgcgggaggcccgggttcgattcccggccaatgcact

SEQ ID NO: 29829 - DNA, 40 bp, Artificial Sequence
  Probe
ccacgcgggaggcccgggttcgattcccggccaatgcagc

SEQ ID NO: 29830 - DNA, 41 bp, Artificial Sequence; identical to SEQ ID NO: 4532
  Probe

SEQ ID NO: 29831 - DNA, 36 bp, Artificial Sequence
  Probe
ccacgcgggaggcccgggttcgattcccggcccatg

SEQ ID NO: 29832 - DNA, 28 bp, Artificial Sequence
  Probe
ccactgtaaagctaacttagcattaacc

SEQ ID NO: 29833 - DNA, 29 bp, Artificial Sequence
  Probe
ccactgtaaagctaacttagcattaacct

SEQ ID NO: 29834 - DNA, 36 bp, Artificial Sequence
  Probe
ccactgtaaagctaacttagcattaaccttttaagt

SEQ ID NO: 29835 - DNA, 50 bp, Artificial Sequence; identical to SEQ ID NO: 18241
  Probe

SEQ ID NO: 29836 - DNA, 21 bp, Artificial Sequence
  Probe
ccacttctgacacattcgttt

SEQ ID NO: 29837 - DNA, 27 bp, Artificial Sequence
  Probe
ccagagtgtagcttaacacaaagcacc

SEQ ID NO: 29838 - DNA, 28 bp, Artificial Sequence
  Probe
ccagagtgtagcttaacacaaagcaccc

SEQ ID NO: 29839 - DNA, 15 bp, Artificial Sequence
  Probe
ccagatcagaaggct

SEQ ID NO: 29840 - DNA, 23 bp, Artificial Sequence
  Probe
ccagctagctcagtcggtagagc

SEQ ID NO: 29841 - DNA, 31 bp, Artificial Sequence; identical to SEQ ID NO: 18262
  Probe

SEQ ID NO: 29842 - DNA, 32 bp, Artificial Sequence
  Probe
ccagctagctcagtcggtagagcatgagactc

SEQ ID NO: 29843 - DNA, 36 bp, Artificial Sequence; identical to SEQ ID NO: 4559
  Probe

SEQ ID NO: 29844 - DNA, 24 bp, Artificial Sequence
  Probe
ccaggatggccgagtggttaaggc

SEQ ID NO: 29845 - DNA, 26 bp, Artificial Sequence
  Probe
ccaggcggcccgggttcgactcccgg

SEQ ID NO: 29846 - DNA, 27 bp, Artificial Sequence
  Probe
ccaggcggcccgggttcgactcccggt

SEQ ID NO: 29847 - DNA, 28 bp, Artificial Sequence
  Probe
ccaggcggcccgggttcgactcccggtg

SEQ ID NO: 29848 - DNA, 33 bp, Artificial Sequence; identical to SEQ ID NO: 18272
  Probe

SEQ ID NO: 29849 - DNA, 34 bp, Artificial Sequence; identical to SEQ ID NO: 4562
  Probe

SEQ ID NO: 29850 - DNA, 35 bp, Artificial Sequence; identical to SEQ ID NO: 572
  Probe

SEQ ID NO: 29851 - DNA, 36 bp, Artificial Sequence; identical to SEQ ID NO: 18273
  Probe

SEQ ID NO: 29852 - DNA, 36 bp, Artificial Sequence
  Probe
ccaggcggcccgggttcgactcccggtgtgggaatg

SEQ ID NO: 29853 - DNA, 15 bp, Artificial Sequence
  Probe
ccagggattgtgggt

SEQ ID NO: 29854 - DNA, 36 bp, Artificial Sequence
  Probe
ccagggattgtgggttcgagtcccatctggggtggc

SEQ ID NO: 29855 - DNA, 29 bp, Artificial Sequence
  Probe
ccagggttcaagtccctgttcgggcggca

SEQ ID NO: 29856 - DNA, 36 bp, Artificial Sequence
  Probe
ccaggtggcccgggttcgactcccggtatgggaaca

SEQ ID NO: 29857 - DNA, 36 bp, Artificial Sequence; identical to SEQ ID NO: 18287
  Probe

SEQ ID NO: 29858 - DNA, 23 bp, Artificial Sequence
  Probe
ccataacccagaggtcgatggat

SEQ ID NO: 29859 - DNA, 36 bp, Artificial Sequence; identical to SEQ ID NO: 18297
  Probe

SEQ ID NO: 29860 - DNA, 31 bp, Artificial Sequence; identical to SEQ ID NO: 4582
  Probe

SEQ ID NO: 29861 - DNA, 29 bp, Artificial Sequence
  Probe
ccatgatcgtatagtggttagtactctgc

SEQ ID NO: 29862 - DNA, 30 bp, Artificial Sequence
  Probe
ccatgatcgtatagtggttagtactctgcg

SEQ ID NO: 29863 - DNA, 36 bp, Artificial Sequence
  Probe
ccatggtgtaatggttagcactctggactctgaatc

SEQ ID NO: 29864 - DNA, 50 bp, Artificial Sequence
  Probe
ccatggtgtaatggttagcactctggactctgaatccagcgatccgagtt

SEQ ID NO: 29865 - DNA, 36 bp, Artificial Sequence
  Probe
ccatggtgtaatggttagcactctggactttgaatc

SEQ ID NO: 29866 - DNA, 36 bp, Artificial Sequence
  Probe
ccattcttgcgacccgggttcgattcccgggcggcg

SEQ ID NO: 29867 - DNA, 19 bp, Artificial Sequence
  Probe
ccattggtcttaggcccca

SEQ ID NO: 29868 - DNA, 29 bp, Artificial Sequence
  Probe
ccattggtcttaggccccaaaaattttgg

SEQ ID NO: 29869 - DNA, 36 bp, Artificial Sequence
  Probe
ccattggtcttaggccccaaaaattttggtgcaact

SEQ ID NO: 29870 - DNA, 37 bp, Artificial Sequence
  Probe
ccattggtcttaggccccaaaaattttggtgcaactc

SEQ ID NO: 29871 - DNA, 38 bp, Artificial Sequence
  Probe
ccattggtcttaggccccaaaaattttggtgcaactcc

SEQ ID NO: 29872 - DNA, 50 bp, Artificial Sequence
  Probe
ccattggtcttaggccccaaaaattttggtgcaactccaaataaaagtaa

SEQ ID NO: 29873 - DNA, 36 bp, Artificial Sequence
  Probe
ccatttcataactttgtcaaagttaaattataggct

SEQ ID NO: 29874 - DNA, 18 bp, Artificial Sequence
  Probe
cccaaacccactccacct

SEQ ID NO: 29875 - DNA, 17 bp, Artificial Sequence
  Probe
cccaacccgtcatctac

SEQ ID NO: 29876 - DNA, 19 bp, Artificial Sequence
  Probe
cccaacttacacttaggag

SEQ ID NO: 29877 - DNA, 29 bp, Artificial Sequence
  Probe
cccaacttacacttaggagatttcaactt

SEQ ID NO: 29878 - DNA, 34 bp, Artificial Sequence
  Probe
cccaacttacacttaggagatttcaacttaactt

SEQ ID NO: 29879 - DNA, 35 bp, Artificial Sequence
  Probe
cccaacttacacttaggagatttcaacttaacttg

SEQ ID NO: 29880 - DNA, 36 bp, Artificial Sequence
  Probe
cccaacttacacttaggagatttcaacttaacttga

SEQ ID NO: 29881 - DNA, 45 bp, Artificial Sequence; identical to SEQ ID NO: 4609
  Probe

SEQ ID NO: 29882 - DNA, 46 bp, Artificial Sequence; identical to SEQ ID NO: 4610
  Probe

SEQ ID NO: 29883 - DNA, 47 bp, Artificial Sequence
  Probe
cccaacttacacttaggagatttcaacttaacttgaccgctctgagc

SEQ ID NO: 29884 - DNA, 17 bp, Artificial Sequence
  Probe
cccaagaacagggtttg

SEQ ID NO: 29885 - DNA, 18 bp, Artificial Sequence
  Probe
cccaagaacagggtttgt

SEQ ID NO: 29886 - DNA, 19 bp, Artificial Sequence
  Probe
cccaagaacagggtttgtt

SEQ ID NO: 29887 - DNA, 20 bp, Artificial Sequence
  Probe
cccaagaacagggtttgtta

SEQ ID NO: 29888 - DNA, 21 bp, Artificial Sequence
  Probe
cccaagaacagggtttgttaa

SEQ ID NO: 29889 - DNA, 23 bp, Artificial Sequence
  Probe
cccaagaacagggtttgttaaga

SEQ ID NO: 29890 - DNA, 18 bp, Artificial Sequence
  Probe
cccacacccacccaagaa

SEQ ID NO: 29891 - DNA, 20 bp, Artificial Sequence
  Probe
cccacacccacccaagaaca

SEQ ID NO: 29892 - DNA, 27 bp, Artificial Sequence
  Probe
cccacacccacccaagaacagggtttg

SEQ ID NO: 29893 - DNA, 30 bp, Artificial Sequence; identical to SEQ ID NO: 4619
  Probe

SEQ ID NO: 29894 - DNA, 18 bp, Artificial Sequence
  Probe
cccacagtttatgtagct

SEQ ID NO: 29895 - DNA, 22 bp, Artificial Sequence
  Probe
cccacagtttatgtagcttacc

SEQ ID NO: 29896 - DNA, 23 bp, Artificial Sequence
  Probe
cccacagtttatgtagcttacct

SEQ ID NO: 29897 - DNA, 25 bp, Artificial Sequence
  Probe
cccacagtttatgtagcttacctcc

SEQ ID NO: 29898 - DNA, 26 bp, Artificial Sequence
  Probe
cccacagtttatgtagcttacctcct

SEQ ID NO: 29899 - DNA, 29 bp, Artificial Sequence
  Probe
cccacatggtctagcggttaggattcctg

SEQ ID NO: 29900 - DNA, 21 bp, Artificial Sequence
  Probe
cccacccaagaacagggtttg

SEQ ID NO: 29901 - DNA, 24 bp, Artificial Sequence
  Probe
cccacccaagaacagggtttgtta

SEQ ID NO: 29902 - DNA, 16 bp, Artificial Sequence
  Probe
cccacccagggacgcc

SEQ ID NO: 29903 - DNA, 26 bp, Artificial Sequence
  Probe
cccacttctgacacagcctgatcttt

SEQ ID NO: 29904 - DNA, 22 bp, Artificial Sequence
  Probe
cccacttctgacacattcgttt

SEQ ID NO: 29905 - DNA, 22 bp, Artificial Sequence
  Probe
cccagaggcgtcgctgatcttt

SEQ ID NO: 29906 - DNA, 17 bp, Artificial Sequence
  Probe
cccagaggtcgatggat

SEQ ID NO: 29907 - DNA, 18 bp, Artificial Sequence
  Probe
cccagaggtcgatggatc

SEQ ID NO: 29908 - DNA, 37 bp, Artificial Sequence; identical to SEQ ID NO: 4631
  Probe

SEQ ID NO: 29909 - DNA, 38 bp, Artificial Sequence; identical to SEQ ID NO: 4632
  Probe

SEQ ID NO: 29910 - DNA, 38 bp, Artificial Sequence
  Probe
cccaggcggcccgggttcgactcccggtgtgggaatga

SEQ ID NO: 29911 - DNA, 24 bp, Artificial Sequence
  Probe
cccagggacgcctctttgagcttt

SEQ ID NO: 29912 - DNA, 24 bp, Artificial Sequence
  Probe
cccagggacgcttgtttgagcttt

SEQ ID NO: 29913 - DNA, 15 bp, Artificial Sequence
  Probe
cccataccccgaaaa

SEQ ID NO: 29914 - DNA, 36 bp, Artificial Sequence; identical to SEQ ID NO: 18411
  Probe

SEQ ID NO: 29915 - DNA, 32 bp, Artificial Sequence; identical to SEQ ID NO: 590
  Probe

SEQ ID NO: 29916 - DNA, 25 bp, Artificial Sequence
  Probe
cccatggccaacctcctactcctca

SEQ ID NO: 29917 - DNA, 36 bp, Artificial Sequence
  Probe
cccatggtgtaatggttagcactctggactttgaat

SEQ ID NO: 29918 - DNA, 15 bp, Artificial Sequence
  Probe
cccatgtctaacaac

SEQ ID NO: 29919 - DNA, 36 bp, Artificial Sequence; identical to SEQ ID NO: 4652
  Probe

SEQ ID NO: 29920 - DNA, 29 bp, Artificial Sequence
  Probe
ccccaaaaattttggtgcaactccaaata

SEQ ID NO: 29921 - DNA, 36 bp, Artificial Sequence; identical to SEQ ID NO: 18442
  Probe

SEQ ID NO: 29922 - DNA, 38 bp, Artificial Sequence; identical to SEQ ID NO: 4673
  Probe

SEQ ID NO: 29923 - DNA, 39 bp, Artificial Sequence
  Probe
ccccaaaaattttggtgcaactccaaataaaagtaataa

SEQ ID NO: 29924 - DNA, 18 bp, Artificial Sequence
  Probe
ccccaaacccactccacc

SEQ ID NO: 29925 - DNA, 19 bp, Artificial Sequence
  Probe
ccccaaacccactccacct

SEQ ID NO: 29926 - DNA, 23 bp, Artificial Sequence
  Probe
ccccacagtttatgtagcttacc

SEQ ID NO: 29927 - DNA, 27 bp, Artificial Sequence
  Probe
ccccacagtttatgtagcttacctcct

SEQ ID NO: 29928 - DNA, 15 bp, Artificial Sequence
  Probe
ccccacgttgggcgc

SEQ ID NO: 29929 - DNA, 36 bp, Artificial Sequence
  Probe
ccccatggtgtaatggttagcactctggactttgaa

SEQ ID NO: 29930 - DNA, 16 bp, Artificial Sequence
  Probe
ccccatgtctaacaac

SEQ ID NO: 29931 - DNA, 30 bp, Artificial Sequence; identical to SEQ ID NO: 4683
  Probe

SEQ ID NO: 29932 - DNA, 18 bp, Artificial Sequence
  Probe
cccccatgtctaacaaca

SEQ ID NO: 29933 - DNA, 21 bp, Artificial Sequence
  Probe
cccccatgtctaacaacatgg

SEQ ID NO: 29934 - DNA, 31 bp, Artificial Sequence; identical to SEQ ID NO: 4695
  Probe

SEQ ID NO: 29935 - DNA, 34 bp, Artificial Sequence
  Probe
ccccgcgcaggttcgaatcctgccgactacggca

SEQ ID NO: 29936 - DNA, 34 bp, Artificial Sequence
  Probe
ccccgcgcaggttcgaatcctgccgactacgtca

SEQ ID NO: 29937 - DNA, 15 bp, Artificial Sequence
  Probe
ccccggcacctccac

SEQ ID NO: 29938 - DNA, 16 bp, Artificial Sequence
  Probe
ccccggcacctccacc

SEQ ID NO: 29939 - DNA, 36 bp, Artificial Sequence
  Probe
ccccgggttcgatccccggcatctccattgtagttt

SEQ ID NO: 29940 - DNA, 26 bp, Artificial Sequence
  Probe
ccccgtacgggccaggattgaaactt

SEQ ID NO: 29941 - DNA, 27 bp, Artificial Sequence
  Probe
ccccgtacgggccaggattgaaacttt

SEQ ID NO: 29942 - DNA, 28 bp, Artificial Sequence
  Probe
ccccgtacgggccaggattgaaactttt

SEQ ID NO: 29943 - DNA, 16 bp, Artificial Sequence
  Probe
ccccgtctgtcacgcg

SEQ ID NO: 29944 - DNA, 24 bp, Artificial Sequence
  Probe
cccctggcccaacccgtcatctac

SEQ ID NO: 29945 - DNA, 33 bp, Artificial Sequence; identical to SEQ ID NO: 4723
  Probe

SEQ ID NO: 29946 - DNA, 34 bp, Artificial Sequence; identical to SEQ ID NO: 4724
  Probe

SEQ ID NO: 29947 - DNA, 36 bp, Artificial Sequence; identical to SEQ ID NO: 4726
  Probe

SEQ ID NO: 29948 - DNA, 18 bp, Artificial Sequence
  Probe
cccgaaaatgttggttat

SEQ ID NO: 29949 - DNA, 20 bp, Artificial Sequence
  Probe
cccgaaaatgttggttatac

SEQ ID NO: 29950 - DNA, 21 bp, Artificial Sequence
  Probe
cccgaaaatgttggttatacc

SEQ ID NO: 29951 - DNA, 22 bp, Artificial Sequence
  Probe
cccgaaaatgttggttataccc

SEQ ID NO: 29952 - DNA, 24 bp, Artificial Sequence
  Probe
cccgaaaatgttggttataccctt

SEQ ID NO: 29953 - DNA, 25 bp, Artificial Sequence
  Probe
cccgaaaatgttggttatacccttc

SEQ ID NO: 29954 - DNA, 26 bp, Artificial Sequence
  Probe
cccgaaaatgttggttatacccttcc

SEQ ID NO: 29955 - DNA, 27 bp, Artificial Sequence
  Probe
cccgaaaatgttggttatacccttccc

SEQ ID NO: 29956 - DNA, 30 bp, Artificial Sequence; identical to SEQ ID NO: 611
  Probe

SEQ ID NO: 29957 - DNA, 32 bp, Artificial Sequence; identical to SEQ ID NO: 613
  Probe

SEQ ID NO: 29958 - DNA, 34 bp, Artificial Sequence; identical to SEQ ID NO: 4734
  Probe

SEQ ID NO: 29959 - DNA, 16 bp, Artificial Sequence
  Probe
cccggacgagcccact

SEQ ID NO: 29960 - DNA, 20 bp, Artificial Sequence
  Probe
cccggacgagcccaggcttt

SEQ ID NO: 29961 - DNA, 15 bp, Artificial Sequence
  Probe
cccggacgagccccc

SEQ ID NO: 29962 - DNA, 16 bp, Artificial Sequence
  Probe
cccggacgagccccct

SEQ ID NO: 29963 - DNA, 15 bp, Artificial Sequence
  Probe
cccggacgagcccct

SEQ ID NO: 29964 - DNA, 15 bp, Artificial Sequence
  Probe
cccggacgagccctc

SEQ ID NO: 29965 - DNA, 16 bp, Artificial Sequence
  Probe
cccggacgagccctca

SEQ ID NO: 29966 - DNA, 17 bp, Artificial Sequence
  Probe
cccggacgagccctcat

SEQ ID NO: 29967 - DNA, 18 bp, Artificial Sequence
  Probe
cccggacgagccctcatt

SEQ ID NO: 29968 - DNA, 19 bp, Artificial Sequence
  Probe
cccggacgagccctcattt

SEQ ID NO: 29969 - DNA, 20 bp, Artificial Sequence
  Probe
cccggacgagccctcatttt

SEQ ID NO: 29970 - DNA, 21 bp, Artificial Sequence
  Probe
cccggacgagccctcattttc

SEQ ID NO: 29971 - DNA, 22 bp, Artificial Sequence
  Probe
cccggacgagccctcgctcttt

SEQ ID NO: 29972 - DNA, 17 bp, Artificial Sequence
  Probe
cccggacgagccctgtt

SEQ ID NO: 29973 - DNA, 18 bp, Artificial Sequence
  Probe
cccggacgagccctgttt

SEQ ID NO: 29974 - DNA, 19 bp, Artificial Sequence
  Probe
cccggacgagccctgtttt

SEQ ID NO: 29975 - DNA, 15 bp, Artificial Sequence
  Probe
cccggatagctcagt

SEQ ID NO: 29976 - DNA, 18 bp, Artificial Sequence
  Probe
cccggatagctcagtcgg

SEQ ID NO: 29977 - DNA, 22 bp, Artificial Sequence
  Probe
cccggatagctcagtcggtaga

SEQ ID NO: 29978 - DNA, 23 bp, Artificial Sequence
  Probe
cccggatagctcagtcggtagag

SEQ ID NO: 29979 - DNA, 31 bp, Artificial Sequence; identical to SEQ ID NO: 616
  Probe

SEQ ID NO: 29980 - DNA, 32 bp, Artificial Sequence; identical to SEQ ID NO: 617
  Probe

SEQ ID NO: 29981 - DNA, 33 bp, Artificial Sequence; identical to SEQ ID NO: 618
  Probe

SEQ ID NO: 29982 - DNA, 34 bp, Artificial Sequence; identical to SEQ ID NO: 619
  Probe

SEQ ID NO: 29983 - DNA, 35 bp, Artificial Sequence; identical to SEQ ID NO: 620
  Probe

SEQ ID NO: 29984 - DNA, 36 bp, Artificial Sequence; identical to SEQ ID NO: 12964
  Probe

SEQ ID NO: 29985 - DNA, 15 bp, Artificial Sequence
  Probe
cccggcacctccacc

SEQ ID NO: 29986 - DNA, 16 bp, Artificial Sequence
  Probe
cccggcacctccacca

SEQ ID NO: 29987 - DNA, 27 bp, Artificial Sequence
  Probe
cccggccaacgcatgcggtaccacttt

SEQ ID NO: 29988 - DNA, 24 bp, Artificial Sequence
  Probe
cccggccaatgcaacgatgacgtt

SEQ ID NO: 29989 - DNA, 25 bp, Artificial Sequence
  Probe
cccggccaatgcaacgatgacgttt

SEQ ID NO: 29990 - DNA, 26 bp, Artificial Sequence
  Probe
cccggccaatgcaacgatgacgtttt

SEQ ID NO: 29991 - DNA, 27 bp, Artificial Sequence
  Probe
cccggccaatgcaacgatgacgtttta

SEQ ID NO: 29992 - DNA, 25 bp, Artificial Sequence
  Probe
cccggccaatgcacgagtacagttt

SEQ ID NO: 29993 - DNA, 26 bp, Artificial Sequence
  Probe
cccggccaatgcacgagtacagtttt

SEQ ID NO: 29994 - DNA, 16 bp, Artificial Sequence
  Probe
cccggcggcgggagaa

SEQ ID NO: 29995 - DNA, 17 bp, Artificial Sequence
  Probe
cccggctagctcagtcg

SEQ ID NO: 29996 - DNA, 27 bp, Artificial Sequence
  Probe
cccggctagctcagtcggtagagcatg

SEQ ID NO: 29997 - DNA, 29 bp, Artificial Sequence
  Probe
cccggctagctcagtcggtagagcatgag

SEQ ID NO: 29998 - DNA, 31 bp, Artificial Sequence; identical to SEQ ID NO: 621
  Probe

SEQ ID NO: 29999 - DNA, 34 bp, Artificial Sequence; identical to SEQ ID NO: 624
  Probe

SEQ ID NO: 30000 - DNA, 36 bp, Artificial Sequence; identical to SEQ ID NO: 18557
  Probe

SEQ ID NO: 30001 - DNA, 31 bp, Artificial Sequence; identical to SEQ ID NO: 626
  Probe

SEQ ID NO: 30002 - DNA, 32 bp, Artificial Sequence; identical to SEQ ID NO: 627
  Probe

SEQ ID NO: 30003 - DNA, 33 bp, Artificial Sequence; identical to SEQ ID NO: 628
  Probe

SEQ ID NO: 30004 - DNA, 34 bp, Artificial Sequence; identical to SEQ ID NO: 629
  Probe

SEQ ID NO: 30005 - DNA, 36 bp, Artificial Sequence; identical to SEQ ID NO: 18560
  Probe

SEQ ID NO: 30006 - DNA, 23 bp, Artificial Sequence
  Probe
cccgggcggaaacaggtcagctg

SEQ ID NO: 30007 - DNA, 20 bp, Artificial Sequence
  Probe
cccgggcggcgcacttagtt

SEQ ID NO: 30008 - DNA, 21 bp, Artificial Sequence
  Probe
cccgggcggcgcacttagttt

SEQ ID NO: 30009 - DNA, 22 bp, Artificial Sequence
  Probe
cccgggcggcgcacttagtttt

SEQ ID NO: 30010 - DNA, 23 bp, Artificial Sequence
  Probe
cccgggcggcgcacttagttttt

SEQ ID NO: 30011 - DNA, 15 bp, Artificial Sequence
  Probe
cccgggtttcggcac

SEQ ID NO: 30012 - DNA, 16 bp, Artificial Sequence
  Probe
cccgggtttcggcact

SEQ ID NO: 30013 - DNA, 17 bp, Artificial Sequence
  Probe
cccgggtttcggcactt

SEQ ID NO: 30014 - DNA, 15 bp, Artificial Sequence
  Probe
cccgggtttcggcag

SEQ ID NO: 30015 - DNA, 19 bp, Artificial Sequence
  Probe
cccggtaatcgcataaaac

SEQ ID NO: 30016 - DNA, 22 bp, Artificial Sequence
  Probe
cccggtaatcgcataaaactta

SEQ ID NO: 30017 - DNA, 28 bp, Artificial Sequence
  Probe
cccggtaatcgcataaaacttaaaactt

SEQ ID NO: 30018 - DNA, 32 bp, Artificial Sequence; identical to SEQ ID NO: 18572
  Probe

SEQ ID NO: 30019 - DNA, 36 bp, Artificial Sequence; identical to SEQ ID NO: 4758
  Probe

SEQ ID NO: 30020 - DNA, 15 bp, Artificial Sequence
  Probe
cccggtcagggaacc

SEQ ID NO: 30021 - DNA, 16 bp, Artificial Sequence
  Probe
cccggtcagggaacca

SEQ ID NO: 30022 - DNA, 24 bp, Artificial Sequence
  Probe
cccgtacgggccaggattgaaact

SEQ ID NO: 30023 - DNA, 25 bp, Artificial Sequence
  Probe
cccgtacgggccaggattgaaactt

SEQ ID NO: 30024 - DNA, 26 bp, Artificial Sequence
  Probe
cccgtacgggccaggattgaaacttt

SEQ ID NO: 30025 - DNA, 27 bp, Artificial Sequence
  Probe
cccgtacgggccaggattgaaactttt

SEQ ID NO: 30026 - DNA, 30 bp, Artificial Sequence
  Probe
ccctcagtaagttgcaatacttaatttctg

SEQ ID NO: 30027 - DNA, 23 bp, Artificial Sequence
  Probe
ccctggcccaacccgtcatctac

SEQ ID NO: 30028 - DNA, 32 bp, Artificial Sequence; identical to SEQ ID NO: 634
  Probe

SEQ ID NO: 30029 - DNA, 33 bp, Artificial Sequence; identical to SEQ ID NO: 4764
  Probe

SEQ ID NO: 30030 - DNA, 31 bp, Artificial Sequence; identical to SEQ ID NO: 638
  Probe

SEQ ID NO: 30031 - DNA, 34 bp, Artificial Sequence; identical to SEQ ID NO: 641
  Probe

SEQ ID NO: 30032 - DNA, 36 bp, Artificial Sequence; identical to SEQ ID NO: 643
  Probe

SEQ ID NO: 30033 - DNA, 38 bp, Artificial Sequence; identical to SEQ ID NO: 12998
  Probe

SEQ ID NO: 30034 - DNA, 16 bp, Artificial Sequence
  Probe
ccctgttcgggcggca

SEQ ID NO: 30035 - DNA, 31 bp, Artificial Sequence
  Probe
cccttatttctaggactatgagaatcgaacc

SEQ ID NO: 30036 - DNA, 32 bp, Artificial Sequence
  Probe
cccttatttctaggactatgagaatcgaaccc

SEQ ID NO: 30037 - DNA, 36 bp, Artificial Sequence
  Probe
cccttatttctaggactatgagaatcgaacccatcc

SEQ ID NO: 30038 - DNA, 18 bp, Artificial Sequence
  Probe
cccttcgtggtcgttgcc

SEQ ID NO: 30039 - DNA, 19 bp, Artificial Sequence
  Probe
ccgaaaatgttggttatac

SEQ ID NO: 30040 - DNA, 20 bp, Artificial Sequence
  Probe
ccgaaaatgttggttatacc

SEQ ID NO: 30041 - DNA, 21 bp, Artificial Sequence
  Probe
ccgaaaatgttggttataccc

SEQ ID NO: 30042 - DNA, 36 bp, Artificial Sequence; identical to SEQ ID NO: 18606
  Probe

SEQ ID NO: 30043 - DNA, 37 bp, Artificial Sequence; identical to SEQ ID NO: 4785
  Probe

SEQ ID NO: 30044 - DNA, 38 bp, Artificial Sequence; identical to SEQ ID NO: 18607
  Probe

SEQ ID NO: 30045 - DNA, 38 bp, Artificial Sequence
  Probe
ccgaaaggttggtggttcgagcccacccagggacgcta

SEQ ID NO: 30046 - DNA, 22 bp, Artificial Sequence
  Probe
ccgaaatagctcagttgggaga

SEQ ID NO: 30047 - DNA, 15 bp, Artificial Sequence
  Probe
ccgaagatcacgggt

SEQ ID NO: 30048 - DNA, 15 bp, Artificial Sequence
  Probe
ccgaagatcgcgggt

SEQ ID NO: 30049 - DNA, 16 bp, Artificial Sequence
  Probe
ccgagcggtctaaggc

SEQ ID NO: 30050 - DNA, 18 bp, Artificial Sequence
  Probe
ccgagcggtctaaggcgc

SEQ ID NO: 30051 - DNA, 25 bp, Artificial Sequence
  Probe
ccgaggtgattttcatattgaattg

SEQ ID NO: 30052 - DNA, 16 bp, Artificial Sequence
  Probe
ccgaggttgtgagttc

SEQ ID NO: 30053 - DNA, 23 bp, Artificial Sequence
  Probe
ccgagtggttaaggcgatggact

SEQ ID NO: 30054 - DNA, 26 bp, Artificial Sequence
  Probe
ccgagtggttaaggcgatggactgct

SEQ ID NO: 30055 - DNA, 18 bp, Artificial Sequence
  Probe
ccgcagcaacctcggttc

SEQ ID NO: 30056 - DNA, 19 bp, Artificial Sequence
  Probe
ccgcagcaacctcggttcg

SEQ ID NO: 30057 - DNA, 36 bp, Artificial Sequence; identical to SEQ ID NO: 18620
  Probe

SEQ ID NO: 30058 - DNA, 36 bp, Artificial Sequence; identical to SEQ ID NO: 18622
  Probe

SEQ ID NO: 30059 - DNA, 38 bp, Artificial Sequence
  Probe
ccgcagcaacctcggttcgaatccgagtcacggcagga

SEQ ID NO: 30060 - DNA, 38 bp, Artificial Sequence
  Probe
ccgcagcaacctcggttcgaatccgagtcacggcagta

SEQ ID NO: 30061 - DNA, 36 bp, Artificial Sequence; identical to SEQ ID NO: 18625
  Probe

SEQ ID NO: 30062 - DNA, 36 bp, Artificial Sequence
  Probe
ccgcccggctagctcagtcggtagagcatgagactc

SEQ ID NO: 30063 - DNA, 38 bp, Artificial Sequence; identical to SEQ ID NO: 18630
  Probe

SEQ ID NO: 30064 - DNA, 15 bp, Artificial Sequence
  Probe
ccgccgcggcccggg

SEQ ID NO: 30065 - DNA, 16 bp, Artificial Sequence
  Probe
ccgccgcggcccgggt

SEQ ID NO: 30066 - DNA, 17 bp, Artificial Sequence
  Probe
ccgccgcggcccgggtt

SEQ ID NO: 30067 - DNA, 29 bp, Artificial Sequence
  Probe
ccgccgcggcccgggttcgattcccggtc

SEQ ID NO: 30068 - DNA, 31 bp, Artificial Sequence; identical to SEQ ID NO: 18633
  Probe

SEQ ID NO: 30069 - DNA, 33 bp, Artificial Sequence; identical to SEQ ID NO: 13006
  Probe

SEQ ID NO: 30070 - DNA, 35 bp, Artificial Sequence; identical to SEQ ID NO: 13008
  Probe

SEQ ID NO: 30071 - DNA, 36 bp, Artificial Sequence; identical to SEQ ID NO: 4797
  Probe

SEQ ID NO: 30072 - DNA, 38 bp, Artificial Sequence; identical to SEQ ID NO: 18636
  Probe

SEQ ID NO: 30073 - DNA, 36 bp, Artificial Sequence; identical to SEQ ID NO: 4798
  Probe

SEQ ID NO: 30074 - DNA, 37 bp, Artificial Sequence; identical to SEQ ID NO: 4799
  Probe

SEQ ID NO: 30075 - DNA, 38 bp, Artificial Sequence; identical to SEQ ID NO: 18639
  Probe

SEQ ID NO: 30076 - DNA, 36 bp, Artificial Sequence; identical to SEQ ID NO: 4800
  Probe

SEQ ID NO: 30077 - DNA, 38 bp, Artificial Sequence; identical to SEQ ID NO: 18645
  Probe

SEQ ID NO: 30078 - DNA, 24 bp, Artificial Sequence
  Probe
ccgcctgtcacgcgggagaccggg

SEQ ID NO: 30079 - DNA, 26 bp, Artificial Sequence
  Probe
ccgcctgtcacgcgggagaccggggt

SEQ ID NO: 30080 - DNA, 31 bp, Artificial Sequence
  Probe
ccgcctgtcacgcgggagaccggggttcgat

SEQ ID NO: 30081 - DNA, 32 bp, Artificial Sequence; identical to SEQ ID NO: 18653
  Probe

SEQ ID NO: 30082 - DNA, 33 bp, Artificial Sequence; identical to SEQ ID NO: 18654
  Probe

SEQ ID NO: 30083 - DNA, 36 bp, Artificial Sequence
  Probe
ccgcctgtcacgcgggagaccggggttcgattcccc

SEQ ID NO: 30084 - DNA, 20 bp, Artificial Sequence
  Probe
ccgcgcaggttcgaatcctg

SEQ ID NO: 30085 - DNA, 28 bp, Artificial Sequence
  Probe
ccgcgtggcctaatggataaggcgtctg

SEQ ID NO: 30086 - DNA, 29 bp, Artificial Sequence
  Probe
ccgcgtggcctaatggataaggcgtctga

SEQ ID NO: 30087 - DNA, 31 bp, Artificial Sequence; identical to SEQ ID NO: 658
  Probe

SEQ ID NO: 30088 - DNA, 21 bp, Artificial Sequence
  Probe
ccggacgagccctcgctcttt

SEQ ID NO: 30089 - DNA, 15 bp, Artificial Sequence
  Probe
ccggagatgaaaacc

SEQ ID NO: 30090 - DNA, 25 bp, Artificial Sequence
  Probe
ccggagatgaaaacctttttccaag

SEQ ID NO: 30091 - DNA, 29 bp, Artificial Sequence
  Probe
ccggagatgaaaacctttttccaaggaca

SEQ ID NO: 30092 - DNA, 15 bp, Artificial Sequence
  Probe
ccggatagctcagtc

SEQ ID NO: 30093 - DNA, 17 bp, Artificial Sequence
  Probe
ccggatagctcagtcgg

SEQ ID NO: 30094 - DNA, 20 bp, Artificial Sequence
  Probe
ccggatagctcagtcggtag

SEQ ID NO: 30095 - DNA, 21 bp, Artificial Sequence
  Probe
ccggatagctcagtcggtaga

SEQ ID NO: 30096 - DNA, 24 bp, Artificial Sequence
  Probe
ccggatagctcagtcggtagagca

SEQ ID NO: 30097 - DNA, 25 bp, Artificial Sequence
  Probe
ccggatagctcagtcggtagagcat

SEQ ID NO: 30098 - DNA, 27 bp, Artificial Sequence
  Probe
ccggatagctcagtcggtagagcatca

SEQ ID NO: 30099 - DNA, 28 bp, Artificial Sequence
  Probe
ccggatagctcagtcggtagagcatcag

SEQ ID NO: 30100 - DNA, 29 bp, Artificial Sequence
  Probe
ccggatagctcagtcggtagagcatcaga

SEQ ID NO: 30101 - DNA, 33 bp, Artificial Sequence; identical to SEQ ID NO: 671
  Probe

SEQ ID NO: 30102 - DNA, 36 bp, Artificial Sequence; identical to SEQ ID NO: 18694
  Probe

SEQ ID NO: 30103 - DNA, 17 bp, Artificial Sequence
  Probe
ccggatcagaagattga

SEQ ID NO: 30104 - DNA, 19 bp, Artificial Sequence
  Probe
ccggatcagaagattgagg

SEQ ID NO: 30105 - DNA, 22 bp, Artificial Sequence
  Probe
ccggatcagaagattgagggtt

SEQ ID NO: 30106 - DNA, 18 bp, Artificial Sequence
  Probe
ccggatggaggcgtgggt

SEQ ID NO: 30107 - DNA, 15 bp, Artificial Sequence
  Probe
ccggcacctccacca

SEQ ID NO: 30108 - DNA, 28 bp, Artificial Sequence
  Probe
ccggccaacgcagtgtcagtttttctct

SEQ ID NO: 30109 - DNA, 26 bp, Artificial Sequence
  Probe
ccggccaacgcatgcggtaccacttt

SEQ ID NO: 30110 - DNA, 22 bp, Artificial Sequence
  Probe
ccggccaatgcaacgatgacgt

SEQ ID NO: 30111 - DNA, 15 bp, Artificial Sequence
  Probe
ccggcggcgggagaa

SEQ ID NO: 30112 - DNA, 16 bp, Artificial Sequence
  Probe
ccggcggcgggagaag

SEQ ID NO: 30113 - DNA, 17 bp, Artificial Sequence
  Probe
ccggcggcgggagaagt

SEQ ID NO: 30114 - DNA, 18 bp, Artificial Sequence
  Probe
ccggcggcgggagaagta

SEQ ID NO: 30115 - DNA, 15 bp, Artificial Sequence
  Probe
ccggctagctcagtc

SEQ ID NO: 30116 - DNA, 16 bp, Artificial Sequence
  Probe
ccggctagctcagtcg

SEQ ID NO: 30117 - DNA, 22 bp, Artificial Sequence
  Probe
ccggctagctcagtcggtagag

SEQ ID NO: 30118 - DNA, 27 bp, Artificial Sequence
  Probe
ccggctagctcagtcggtagagcatga

SEQ ID NO: 30119 - DNA, 29 bp, Artificial Sequence
  Probe
ccggctagctcagtcggtagagcatgaga

SEQ ID NO: 30120 - DNA, 31 bp, Artificial Sequence; identical to SEQ ID NO: 13043
  Probe

SEQ ID NO: 30121 - DNA, 32 bp, Artificial Sequence; identical to SEQ ID NO: 18710
  Probe

SEQ ID NO: 30122 - DNA, 33 bp, Artificial Sequence
  Probe
ccggctagctcagtcggtagagcatgagaccct

SEQ ID NO: 30123 - DNA, 40 bp, Artificial Sequence
  Probe
ccggctagctcagtcggtagagcatgagactcttaatctc

SEQ ID NO: 30124 - DNA, 34 bp, Artificial Sequence; identical to SEQ ID NO: 684
  Probe

SEQ ID NO: 30125 - DNA, 40 bp, Artificial Sequence
  Probe
ccggctagctcagtcggtagagcatgggactcttaatccc

SEQ ID NO: 30126 - DNA, 15 bp, Artificial Sequence
  Probe
ccggctcgaaggact

SEQ ID NO: 30127 - DNA, 25 bp, Artificial Sequence
  Probe
ccgggcggaaacaagactgtgtttt

SEQ ID NO: 30128 - DNA, 26 bp, Artificial Sequence
  Probe
ccgggcggaaacaagactgtgttttc

SEQ ID NO: 30129 - DNA, 15 bp, Artificial Sequence
  Probe
ccgggcggaaacacc

SEQ ID NO: 30130 - DNA, 16 bp, Artificial Sequence
  Probe
ccgggcggaaacacct

SEQ ID NO: 30131 - DNA, 26 bp, Artificial Sequence
  Probe
ccgggcggaaacaggtcagctgtttt

SEQ ID NO: 30132 - DNA, 36 bp, Artificial Sequence
  Probe
ccgggctcgattcccgcccaacgcatcgggcggacc

SEQ ID NO: 30133 - DNA, 28 bp, Artificial Sequence
  Probe
ccggggttcgattccccgacggggagac

SEQ ID NO: 30134 - DNA, 28 bp, Artificial Sequence
  Probe
ccggggttcgattccccgacggggaggc

SEQ ID NO: 30135 - DNA, 29 bp, Artificial Sequence
  Probe
ccggggttcgattccccgacggggaggca

SEQ ID NO: 30136 - DNA, 18 bp, Artificial Sequence
  Probe
ccggtaatcgcataaaac

SEQ ID NO: 30137 - DNA, 26 bp, Artificial Sequence
  Probe
ccggtaatcgcataaaacttaaaact

SEQ ID NO: 30138 - DNA, 27 bp, Artificial Sequence
  Probe
ccggtaatcgcataaaacttaaaactt

SEQ ID NO: 30139 - DNA, 28 bp, Artificial Sequence
  Probe
ccggtaatcgcataaaacttaaaacttt

SEQ ID NO: 30140 - DNA, 31 bp, Artificial Sequence
  Probe
ccggtaatcgcataaaacttaaaactttaca

SEQ ID NO: 30141 - DNA, 36 bp, Artificial Sequence
  Probe
ccggtaatcgcataaaacttaaaactttacagtcag

SEQ ID NO: 30142 - DNA, 15 bp, Artificial Sequence
  Probe
ccggtcagggaacca

SEQ ID NO: 30143 - DNA, 23 bp, Artificial Sequence
  Probe
ccgtacgggccaggattgaaact

SEQ ID NO: 30144 - DNA, 24 bp, Artificial Sequence
  Probe
ccgtacgggccaggattgaaactt

SEQ ID NO: 30145 - DNA, 25 bp, Artificial Sequence
  Probe
ccgtacgggccaggattgaaacttt

SEQ ID NO: 30146 - DNA, 28 bp, Artificial Sequence
  Probe
ccgtagtgtagcggttatcacattcgcc

SEQ ID NO: 30147 - DNA, 29 bp, Artificial Sequence
  Probe
ccgtagtgtagcggttatcacattcgcct

SEQ ID NO: 30148 - DNA, 19 bp, Artificial Sequence
  Probe
ccgtagtgtagtggttatc

SEQ ID NO: 30149 - DNA, 28 bp, Artificial Sequence
  Probe
ccgtagtgtagtggttatcacgttcgcc

SEQ ID NO: 30150 - DNA, 29 bp, Artificial Sequence
  Probe
ccgtagtgtagtggttatcacgttcgcct

SEQ ID NO: 30151 - DNA, 30 bp, Artificial Sequence; identical to SEQ ID NO: 4843
  Probe

SEQ ID NO: 30152 - DNA, 32 bp, Artificial Sequence; identical to SEQ ID NO: 4845
  Probe

SEQ ID NO: 30153 - DNA, 36 bp, Artificial Sequence; identical to SEQ ID NO: 18750
  Probe

SEQ ID NO: 30154 - DNA, 36 bp, Artificial Sequence
  Probe
ccgtgagcccggatagctcagtcggtagagcatcag

SEQ ID NO: 30155 - DNA, 15 bp, Artificial Sequence
  Probe
ccgtgatcgtatagt

SEQ ID NO: 30156 - DNA, 20 bp, Artificial Sequence
  Probe
ccgtgatcgtatagtggtta

SEQ ID NO: 30157 - DNA, 23 bp, Artificial Sequence
  Probe
ccgtgatcgtatagtggttagta

SEQ ID NO: 30158 - DNA, 24 bp, Artificial Sequence
  Probe
ccgtgatcgtatagtggttagtac

SEQ ID NO: 30159 - DNA, 25 bp, Artificial Sequence
  Probe
ccgtgatcgtatagtggttagtact

SEQ ID NO: 30160 - DNA, 26 bp, Artificial Sequence
  Probe
ccgtgatcgtatagtggttagtactc

SEQ ID NO: 30161 - DNA, 27 bp, Artificial Sequence
  Probe
ccgtgatcgtatagtggttagtactct

SEQ ID NO: 30162 - DNA, 28 bp, Artificial Sequence
  Probe
ccgtgatcgtatagtggttagtactctg

SEQ ID NO: 30163 - DNA, 31 bp, Artificial Sequence; identical to SEQ ID NO: 687
  Probe

SEQ ID NO: 30164 - DNA, 35 bp, Artificial Sequence; identical to SEQ ID NO: 690
  Probe

SEQ ID NO: 30165 - DNA, 36 bp, Artificial Sequence; identical to SEQ ID NO: 18760
  Probe

SEQ ID NO: 30166 - DNA, 43 bp, Artificial Sequence
  Probe
ccgtgatcgtatagtggttagtactctgcgttgtggccgcagc

SEQ ID NO: 30167 - DNA, 47 bp, Artificial Sequence
  Probe
ccgtgatcgtatagtggttagtactctgcgttgtggccgcagcaacc

SEQ ID NO: 30168 - DNA, 50 bp, Artificial Sequence
  Probe
ccgtgatcgtatagtggttagtactctgcgttgtggccgcagcaacctcg

SEQ ID NO: 30169 - DNA, 28 bp, Artificial Sequence
  Probe
ccgtggtgtagtggttatcacattcgcc

SEQ ID NO: 30170 - DNA, 36 bp, Artificial Sequence
  Probe
ccgtgtccttcgatagctcagttggtagagcggagg

SEQ ID NO: 30171 - DNA, 30 bp, Artificial Sequence; identical to SEQ ID NO: 4854
  Probe

SEQ ID NO: 30172 - DNA, 36 bp, Artificial Sequence
  Probe
cctaagccagggattgtgggttcgagtcccacccgg

SEQ ID NO: 30173 - DNA, 33 bp, Artificial Sequence
  Probe
cctaagccagggattgtgggttcgagtcccatc

SEQ ID NO: 30174 - DNA, 42 bp, Artificial Sequence
  Probe
cctaagccagggattgtgggttcgagtcccatctggggtggc

SEQ ID NO: 30175 - DNA, 18 bp, Artificial Sequence
  Probe
cctagccccaaacccact

SEQ ID NO: 30176 - DNA, 21 bp, Artificial Sequence
  Probe
cctagccccaaacccactcca

SEQ ID NO: 30177 - DNA, 23 bp, Artificial Sequence
  Probe
cctagccccaaacccactccacc

SEQ ID NO: 30178 - DNA, 24 bp, Artificial Sequence
  Probe
cctagccccaaacccactccacct

SEQ ID NO: 30179 - DNA, 18 bp, Artificial Sequence
  Probe
cctagcctttctattagc

SEQ ID NO: 30180 - DNA, 18 bp, Artificial Sequence
  Probe
cctcaaagcaatacactg

SEQ ID NO: 30181 - DNA, 36 bp, Artificial Sequence
  Probe
cctcaaagcaatacactgaaaatgtttagacgggct

SEQ ID NO: 30182 - DNA, 22 bp, Artificial Sequence
  Probe
cctcacctggagcatgttttct

SEQ ID NO: 30183 - DNA, 18 bp, Artificial Sequence
  Probe
cctcagaaggtctcactt

SEQ ID NO: 30184 - DNA, 19 bp, Artificial Sequence
  Probe
cctcagaaggtctcacttt

SEQ ID NO: 30185 - DNA, 20 bp, Artificial Sequence
  Probe
cctcagaaggtctcactttt

SEQ ID NO: 30186 - DNA, 16 bp, Artificial Sequence
  Probe
cctcgcagcttcgctg

SEQ ID NO: 30187 - DNA, 15 bp, Artificial Sequence
  Probe
cctcgctggggcctc

SEQ ID NO: 30188 - DNA, 16 bp, Artificial Sequence
  Probe
cctcgctggggcctcc

SEQ ID NO: 30189 - DNA, 17 bp, Artificial Sequence
  Probe
cctcgtggctactgttt

SEQ ID NO: 30190 - DNA, 21 bp, Artificial Sequence
  Probe
cctgctcacagcgtcactagt

SEQ ID NO: 30191 - DNA, 22 bp, Artificial Sequence
  Probe
cctgctcacagcgtcactagtt

SEQ ID NO: 30192 - DNA, 23 bp, Artificial Sequence
  Probe
cctgctcacagcgtcactagttt

SEQ ID NO: 30193 - DNA, 24 bp, Artificial Sequence
  Probe
cctgctcacagcgtcactagtttt

SEQ ID NO: 30194 - DNA, 15 bp, Artificial Sequence
  Probe
cctggagcaagaccc

SEQ ID NO: 30195 - DNA, 16 bp, Artificial Sequence
  Probe
cctggagcaagaccct

SEQ ID NO: 30196 - DNA, 17 bp, Artificial Sequence
  Probe
cctggagcaagaccctt

SEQ ID NO: 30197 - DNA, 18 bp, Artificial Sequence
  Probe
cctggagcaagacccttt

SEQ ID NO: 30198 - DNA, 19 bp, Artificial Sequence
  Probe
cctggagcaagaccctttt

SEQ ID NO: 30199 - DNA, 22 bp, Artificial Sequence
  Probe
cctggcccaacccgtcatctac

SEQ ID NO: 30200 - DNA, 18 bp, Artificial Sequence
  Probe
cctggctggctcgttcga

SEQ ID NO: 30201 - DNA, 31 bp, Artificial Sequence; identical to SEQ ID NO: 4873
  Probe

SEQ ID NO: 30202 - DNA, 34 bp, Artificial Sequence; identical to SEQ ID NO: 697
  Probe

SEQ ID NO: 30203 - DNA, 26 bp, Artificial Sequence
  Probe
cctggtggtctagtggttaggattcg

SEQ ID NO: 30204 - DNA, 28 bp, Artificial Sequence
  Probe
cctggtggtctagtggttaggattcggc

SEQ ID NO: 30205 - DNA, 29 bp, Artificial Sequence
  Probe
cctggtggtctagtggttaggattcggcg

SEQ ID NO: 30206 - DNA, 30 bp, Artificial Sequence; identical to SEQ ID NO: 699
  Probe

SEQ ID NO: 30207 - DNA, 34 bp, Artificial Sequence; identical to SEQ ID NO: 703
  Probe

SEQ ID NO: 30208 - DNA, 36 bp, Artificial Sequence; identical to SEQ ID NO: 4877
  Probe

SEQ ID NO: 30209 - DNA, 36 bp, Artificial Sequence
  Probe
cctggttttcacccaggcggcccgggttcgactccc

SEQ ID NO: 30210 - DNA, 15 bp, Artificial Sequence
  Probe
cctgtcacgcgggag

SEQ ID NO: 30211 - DNA, 16 bp, Artificial Sequence
  Probe
cctgtcacgcgggaga

SEQ ID NO: 30212 - DNA, 22 bp, Artificial Sequence
  Probe
cctgtcacgcgggagaccgggg

SEQ ID NO: 30213 - DNA, 24 bp, Artificial Sequence
  Probe
cctgtcacgcgggagaccggggtt

SEQ ID NO: 30214 - DNA, 36 bp, Artificial Sequence; identical to SEQ ID NO: 18828
  Probe

SEQ ID NO: 30215 - DNA, 45 bp, Artificial Sequence; identical to SEQ ID NO: 4886
  Probe

SEQ ID NO: 30216 - DNA, 15 bp, Artificial Sequence
  Probe
cctgttggcttactt

SEQ ID NO: 30217 - DNA, 16 bp, Artificial Sequence
  Probe
cctgttggcttacttt

SEQ ID NO: 30218 - DNA, 17 bp, Artificial Sequence
  Probe
cctgttggcttactttt

SEQ ID NO: 30219 - DNA, 18 bp, Artificial Sequence
  Probe
cctgttggcttactttta

SEQ ID NO: 30220 - DNA, 29 bp, Artificial Sequence
  Probe
ccttatttctaggactatgagaatcgaac

SEQ ID NO: 30221 - DNA, 30 bp, Artificial Sequence
  Probe
ccttatttctaggactatgagaatcgaacc

SEQ ID NO: 30222 - DNA, 31 bp, Artificial Sequence
  Probe
ccttatttctaggactatgagaatcgaaccc

SEQ ID NO: 30223 - DNA, 36 bp, Artificial Sequence
  Probe
ccttatttctaggactatgagaatcgaacccatccc

SEQ ID NO: 30224 - DNA, 36 bp, Artificial Sequence
  Probe
ccttcaaagccctcagtaagttgcaatacttaattt

SEQ ID NO: 30225 - DNA, 20 bp, Artificial Sequence
  Probe
ccttcagctatagggtggag

SEQ ID NO: 30226 - DNA, 21 bp, Artificial Sequence
  Probe
ccttcagctatagggtggaga

SEQ ID NO: 30227 - DNA, 17 bp, Artificial Sequence
  Probe
ccttccaagcagttgac

SEQ ID NO: 30228 - DNA, 18 bp, Artificial Sequence
  Probe
ccttccaagcagttgacc

SEQ ID NO: 30229 - DNA, 20 bp, Artificial Sequence
  Probe
ccttccaagcagttgacccg

SEQ ID NO: 30230 - DNA, 21 bp, Artificial Sequence
  Probe
ccttccaagcagttgacccgg

SEQ ID NO: 30231 - DNA, 23 bp, Artificial Sequence
  Probe
ccttccaagcagttgacccgggc

SEQ ID NO: 30232 - DNA, 25 bp, Artificial Sequence
  Probe
ccttccaagcagttgacccgggttc

SEQ ID NO: 30233 - DNA, 29 bp, Artificial Sequence
  Probe
ccttccttcgttggctctgcctgccaact

SEQ ID NO: 30234 - DNA, 15 bp, Artificial Sequence
  Probe
ccttcgatagctcag

SEQ ID NO: 30235 - DNA, 16 bp, Artificial Sequence
  Probe
ccttcgatagctcagc

SEQ ID NO: 30236 - DNA, 25 bp, Artificial Sequence
  Probe
ccttcgatagctcagctggtagagc

SEQ ID NO: 30237 - DNA, 25 bp, Artificial Sequence
  Probe
ccttcgatagctcagttggtagagc

SEQ ID NO: 30238 - DNA, 25 bp, Artificial Sequence
  Probe
ccttcgttggctctgcctgccaact

SEQ ID NO: 30239 - DNA, 32 bp, Artificial Sequence; identical to SEQ ID NO: 18862
  Probe

SEQ ID NO: 30240 - DNA, 25 bp, Artificial Sequence
  Probe
ccttggaaaaaggttttcatctccg

SEQ ID NO: 30241 - DNA, 27 bp, Artificial Sequence
  Probe
ccttttaagttaaagattaagagaacc

SEQ ID NO: 30242 - DNA, 32 bp, Artificial Sequence
  Probe
ccttttaagttaaagattaagagaaccaacac

SEQ ID NO: 30243 - DNA, 33 bp, Artificial Sequence
  Probe
ccttttaagttaaagattaagagaaccaacacc

SEQ ID NO: 30244 - DNA, 34 bp, Artificial Sequence
  Probe
ccttttaagttaaagattaagagaaccaacacct

SEQ ID NO: 30245 - DNA, 36 bp, Artificial Sequence
  Probe
ccttttaagttaaagattaagagaaccaacacctct

SEQ ID NO: 30246 - DNA, 18 bp, Artificial Sequence
  Probe
ccttttcgagatactgtt

SEQ ID NO: 30247 - DNA, 19 bp, Artificial Sequence
  Probe
ccttttcgagatactgttt

SEQ ID NO: 30248 - DNA, 20 bp, Artificial Sequence
  Probe
ccttttcgagatactgtttt

SEQ ID NO: 30249 - DNA, 21 bp, Artificial Sequence
  Probe
ccttttcgagatactgttttt

SEQ ID NO: 30250 - DNA, 17 bp, Artificial Sequence
  Probe
ccttttttcccggcggc

SEQ ID NO: 30251 - DNA, 24 bp, Artificial Sequence
  Probe
ccttttttcccggcggcgggagaa

SEQ ID NO: 30252 - DNA, 16 bp, Artificial Sequence
  Probe
cgaaaatgttggttat

SEQ ID NO: 30253 - DNA, 17 bp, Artificial Sequence
  Probe
cgaaaatgttggttata

SEQ ID NO: 30254 - DNA, 18 bp, Artificial Sequence
  Probe
cgaaaatgttggttatac

SEQ ID NO: 30255 - DNA, 19 bp, Artificial Sequence
  Probe
cgaaaatgttggttatacc

SEQ ID NO: 30256 - DNA, 20 bp, Artificial Sequence
  Probe
cgaaaatgttggttataccc

SEQ ID NO: 30257 - DNA, 23 bp, Artificial Sequence
  Probe
cgaaaatgttggttatacccttc

SEQ ID NO: 30258 - DNA, 28 bp, Artificial Sequence
  Probe
cgaaaccatcctctgctagggagcgttt

SEQ ID NO: 30259 - DNA, 30 bp, Artificial Sequence
  Probe
cgaaaccatcctctgctatagactcccttt

SEQ ID NO: 30260 - DNA, 21 bp, Artificial Sequence
  Probe
cgaaaccgggcggaaacacct

SEQ ID NO: 30261 - DNA, 15 bp, Artificial Sequence
  Probe
cgaaaggtccccggt

SEQ ID NO: 30262 - DNA, 36 bp, Artificial Sequence; identical to SEQ ID NO: 18883
  Probe

SEQ ID NO: 30263 - DNA, 37 bp, Artificial Sequence; identical to SEQ ID NO: 4923
  Probe

SEQ ID NO: 30264 - DNA, 37 bp, Artificial Sequence
  Probe
cgaaaggttggtggttcgagcccacccagggacgcta

SEQ ID NO: 30265 - DNA, 17 bp, Artificial Sequence
  Probe
cgaacccatccctgaga

SEQ ID NO: 30266 - DNA, 19 bp, Artificial Sequence
  Probe
cgaaccccgtccgtgcctg

SEQ ID NO: 30267 - DNA, 20 bp, Artificial Sequence
  Probe
cgaaccccgtccgtgcctga

SEQ ID NO: 30268 - DNA, 29 bp, Artificial Sequence
  Probe
cgaagaagcagcttcaaacctgccggggc

SEQ ID NO: 30269 - DNA, 30 bp, Artificial Sequence; identical to SEQ ID NO: 4930
  Probe

SEQ ID NO: 30270 - DNA, 31 bp, Artificial Sequence; identical to SEQ ID NO: 4931
  Probe

SEQ ID NO: 30271 - DNA, 32 bp, Artificial Sequence; identical to SEQ ID NO: 4932
  Probe

SEQ ID NO: 30272 - DNA, 33 bp, Artificial Sequence; identical to SEQ ID NO: 4933
  Probe

SEQ ID NO: 30273 - DNA, 20 bp, Artificial Sequence
  Probe
cgaatcacgtcggggtcaaa

SEQ ID NO: 30274 - DNA, 21 bp, Artificial Sequence
  Probe
cgaatcccacttctgacacaa

SEQ ID NO: 30275 - DNA, 19 bp, Artificial Sequence
  Probe
cgaatcccagcggggcctg

SEQ ID NO: 30276 - DNA, 18 bp, Artificial Sequence
  Probe
cgaatcccagtagagcct

SEQ ID NO: 30277 - DNA, 19 bp, Artificial Sequence
  Probe
cgaatcccagtagagcctt

SEQ ID NO: 30278 - DNA, 20 bp, Artificial Sequence
  Probe
cgaatcccatcctcgtcgat

SEQ ID NO: 30279 - DNA, 19 bp, Artificial Sequence
  Probe
cgaatcccatcctcgtcgg

SEQ ID NO: 30280 - DNA, 20 bp, Artificial Sequence
  Probe
cgaatcccatcctcgtcggc

SEQ ID NO: 30281 - DNA, 20 bp, Artificial Sequence
  Probe
cgaatccggctcgaaggacg

SEQ ID NO: 30282 - DNA, 21 bp, Artificial Sequence
  Probe
cgaatcctgccgactacggca

SEQ ID NO: 30283 - DNA, 21 bp, Artificial Sequence
  Probe
cgaatcctgccgactacgtca

SEQ ID NO: 30284 - DNA, 15 bp, Artificial Sequence
  Probe
cgaatgatttcgact

SEQ ID NO: 30285 - DNA, 16 bp, Artificial Sequence
  Probe
cgaatgatttcgactc

SEQ ID NO: 30286 - DNA, 17 bp, Artificial Sequence
  Probe
cgaatgatttcgactca

SEQ ID NO: 30287 - DNA, 36 bp, Artificial Sequence
  Probe
cgaatgatttcgactcattaaattatgataatcata

SEQ ID NO: 30288 - DNA, 31 bp, Artificial Sequence
  Probe
cgactcattaaattatgataatcatatttac

SEQ ID NO: 30289 - DNA, 32 bp, Artificial Sequence; identical to SEQ ID NO: 4942
  Probe

SEQ ID NO: 30290 - DNA, 20 bp, Artificial Sequence
  Probe
cgactcctggctggctcgcg

SEQ ID NO: 30291 - DNA, 21 bp, Artificial Sequence
  Probe
cgactcctggctggctcgcga

SEQ ID NO: 30292 - DNA, 20 bp, Artificial Sequence
  Probe
cgactcctggctggctcgct

SEQ ID NO: 30293 - DNA, 21 bp, Artificial Sequence
  Probe
cgagaaagctcacaagaactg

SEQ ID NO: 30294 - DNA, 23 bp, Artificial Sequence
  Probe
cgagaaagctcacaagaactgct

SEQ ID NO: 30295 - DNA, 27 bp, Artificial Sequence
  Probe
cgagaaagctcacaagaactgctaact

SEQ ID NO: 30296 - DNA, 28 bp, Artificial Sequence
  Probe
cgagaggggctgtgctcgcaaggtttct

SEQ ID NO: 30297 - DNA, 29 bp, Artificial Sequence
  Probe
cgagaggggctgtgctcgcaaggtttctt

SEQ ID NO: 30298 - DNA, 20 bp, Artificial Sequence
  Probe
cgagccccagtggaaccacg

SEQ ID NO: 30299 - DNA, 15 bp, Artificial Sequence
  Probe
cgagcggtctaaggc

SEQ ID NO: 30300 - DNA, 31 bp, Artificial Sequence; identical to SEQ ID NO: 18966
  Probe

SEQ ID NO: 30301 - DNA, 36 bp, Artificial Sequence
  Probe
cgaggtggccgagtggttaaggcgatggactgctaa

SEQ ID NO: 30302 - DNA, 30 bp, Artificial Sequence; identical to SEQ ID NO: 18972
  Probe

SEQ ID NO: 30303 - DNA, 26 bp, Artificial Sequence
  Probe
cgagtcccggcggagtcgtaacgctt

SEQ ID NO: 30304 - DNA, 20 bp, Artificial Sequence
  Probe
cgagtcccttcgtggtcgtc

SEQ ID NO: 30305 - DNA, 25 bp, Artificial Sequence
  Probe
cgagtggttaaggcgatggactgct

SEQ ID NO: 30306 - DNA, 29 bp, Artificial Sequence
  Probe
cgatagctcagttggtagagcggaggact

SEQ ID NO: 30307 - DNA, 25 bp, Artificial Sequence
  Probe
cgatccccagcatctccagtgtttt

SEQ ID NO: 30308 - DNA, 19 bp, Artificial Sequence
  Probe
cgatcccgggtttcggcac

SEQ ID NO: 30309 - DNA, 19 bp, Artificial Sequence
  Probe
cgatcccgggtttcggcag

SEQ ID NO: 30310 - DNA, 20 bp, Artificial Sequence
  Probe
cgatcccgggtttcggcagc

SEQ ID NO: 30311 - DNA, 37 bp, Artificial Sequence
  Probe
cgatggtttttcatatcattggtcgtggttgtagtcc

SEQ ID NO: 30312 - DNA, 50 bp, Artificial Sequence
  Probe
cgatggtttttcatatcattggtcgtggttgtagtccgtgcgagaataat

SEQ ID NO: 30313 - DNA, 21 bp, Artificial Sequence
  Probe
cgattccccgacggggaggca

SEQ ID NO: 30314 - DNA, 29 bp, Artificial Sequence
  Probe
cgattcccggccaatgcaacgatgacgtt

SEQ ID NO: 30315 - DNA, 30 bp, Artificial Sequence
  Probe
cgattcccggccaatgcaacgatgacgttt

SEQ ID NO: 30316 - DNA, 31 bp, Artificial Sequence
  Probe
cgattcccggccaatgcaacgatgacgtttt

SEQ ID NO: 30317 - DNA, 21 bp, Artificial Sequence
  Probe
cgattcccggccaatgcacga

SEQ ID NO: 30318 - DNA, 21 bp, Artificial Sequence
  Probe
cgattcccggccaatgcagca

SEQ ID NO: 30319 - DNA, 21 bp, Artificial Sequence
  Probe
cgattcccggcccatgcagca

SEQ ID NO: 30320 - DNA, 19 bp, Artificial Sequence
  Probe
cgattcccgggcggcgcac

SEQ ID NO: 30321 - DNA, 20 bp, Artificial Sequence
  Probe
cgattcccgggcggcgcact

SEQ ID NO: 30322 - DNA, 15 bp, Artificial Sequence
  Probe
cgattcccggtcagg

SEQ ID NO: 30323 - DNA, 20 bp, Artificial Sequence
  Probe
cgattccggctcgaaggact

SEQ ID NO: 30324 - DNA, 20 bp, Artificial Sequence
  Probe
cgattccggctcgaaggagc

SEQ ID NO: 30325 - DNA, 36 bp, Artificial Sequence; identical to SEQ ID NO: 13097
  Probe

SEQ ID NO: 30326 - DNA, 38 bp, Artificial Sequence; identical to SEQ ID NO: 4966
  Probe

SEQ ID NO: 30327 - DNA, 15 bp, Artificial Sequence
  Probe
cgcagcaacctcggt

SEQ ID NO: 30328 - DNA, 22 bp, Artificial Sequence
  Probe
cgcagcggaagcgtgctgggcc

SEQ ID NO: 30329 - DNA, 23 bp, Artificial Sequence
  Probe
cgcagcggaagcgtgctgggccc

SEQ ID NO: 30330 - DNA, 22 bp, Artificial Sequence
  Probe
cgcagcggagccttcgatagct

SEQ ID NO: 30331 - DNA, 23 bp, Artificial Sequence
  Probe
cgcagcggagccttcgatagctc

SEQ ID NO: 30332 - DNA, 17 bp, Artificial Sequence
  Probe
cgcaggttcgaatcctg

SEQ ID NO: 30333 - DNA, 18 bp, Artificial Sequence
  Probe
cgcataaaacttaaaact

SEQ ID NO: 30334 - DNA, 30 bp, Artificial Sequence
  Probe
cgcataaaacttaaaactttacagtcagag

SEQ ID NO: 30335 - DNA, 32 bp, Artificial Sequence
  Probe
cgcataaaacttaaaactttacagtcagaggt

SEQ ID NO: 30336 - DNA, 33 bp, Artificial Sequence; identical to SEQ ID NO: 716
  Probe

SEQ ID NO: 30337 - DNA, 36 bp, Artificial Sequence
  Probe
cgcataaaacttaaaactttacagtcagaggttcaa

SEQ ID NO: 30338 - DNA, 33 bp, Artificial Sequence; identical to SEQ ID NO: 4982
  Probe

SEQ ID NO: 30339 - DNA, 36 bp, Artificial Sequence
  Probe
cgcattggtggttcagtggtagaattctcgcctgcc

SEQ ID NO: 30340 - DNA, 36 bp, Artificial Sequence; identical to SEQ ID NO: 19057
  Probe

SEQ ID NO: 30341 - DNA, 34 bp, Artificial Sequence
  Probe
cgcccggctagctcagtcggtagagcatgagact

SEQ ID NO: 30342 - DNA, 35 bp, Artificial Sequence
  Probe
cgcccggctagctcagtcggtagagcatgagactc

SEQ ID NO: 30343 - DNA, 36 bp, Artificial Sequence
  Probe
cgcccggctagctcagtcggtagagcatgagactct

SEQ ID NO: 30344 - DNA, 34 bp, Artificial Sequence; identical to SEQ ID NO: 721
  Probe

SEQ ID NO: 30345 - DNA, 36 bp, Artificial Sequence
  Probe
cgcccggctagctcagtcggtagagcatgggactct

SEQ ID NO: 30346 - DNA, 16 bp, Artificial Sequence
  Probe
cgccgcggcccgggtt

SEQ ID NO: 30347 - DNA, 27 bp, Artificial Sequence
  Probe
cgccgcggcccgggttcgattcccggt

SEQ ID NO: 30348 - DNA, 28 bp, Artificial Sequence
  Probe
cgccgcggcccgggttcgattcccggtc

SEQ ID NO: 30349 - DNA, 29 bp, Artificial Sequence
  Probe
cgccgcggcccgggttcgattcccggtca

SEQ ID NO: 30350 - DNA, 30 bp, Artificial Sequence; identical to SEQ ID NO: 9788
  Probe

SEQ ID NO: 30351 - DNA, 32 bp, Artificial Sequence
  Probe
cgccgcggcccgggttcgattcccggtcaggg

SEQ ID NO: 30352 - DNA, 33 bp, Artificial Sequence; identical to SEQ ID NO: 13103
  Probe

SEQ ID NO: 30353 - DNA, 34 bp, Artificial Sequence; identical to SEQ ID NO: 19062
  Probe

SEQ ID NO: 30354 - DNA, 35 bp, Artificial Sequence; identical to SEQ ID NO: 4985
  Probe

SEQ ID NO: 30355 - DNA, 35 bp, Artificial Sequence; identical to SEQ ID NO: 4986
  Probe

SEQ ID NO: 30356 - DNA, 36 bp, Artificial Sequence
  Probe
cgccgcggcccgggttcgattcccggtcagggaagc

SEQ ID NO: 30357 - DNA, 36 bp, Artificial Sequence
  Probe
cgccgcggcccgggttcgattcccggtcagggaagt

SEQ ID NO: 30358 - DNA, 35 bp, Artificial Sequence; identical to SEQ ID NO: 4989
  Probe

SEQ ID NO: 30359 - DNA, 36 bp, Artificial Sequence
  Probe
cgccgcggcccgggttcgattcccggtcagggaatg

SEQ ID NO: 30360 - DNA, 36 bp, Artificial Sequence
  Probe
cgccgcggcccgggttcgattcccggtcagggaatt

SEQ ID NO: 30361 - DNA, 34 bp, Artificial Sequence; identical to SEQ ID NO: 724
  Probe

SEQ ID NO: 30362 - DNA, 36 bp, Artificial Sequence
  Probe
cgccgctggtgtagtggtatcatgcaagattcccat

SEQ ID NO: 30363 - DNA, 15 bp, Artificial Sequence
  Probe
cgccgtgatcgtata

SEQ ID NO: 30364 - DNA, 22 bp, Artificial Sequence
  Probe
cgccgtgatcgtatagtggtta

SEQ ID NO: 30365 - DNA, 27 bp, Artificial Sequence
  Probe
cgccgtgatcgtatagtggttagtact

SEQ ID NO: 30366 - DNA, 28 bp, Artificial Sequence
  Probe
cgccgtgatcgtatagtggttagtactc

SEQ ID NO: 30367 - DNA, 29 bp, Artificial Sequence
  Probe
cgccgtgatcgtatagtggttagtactct

SEQ ID NO: 30368 - DNA, 30 bp, Artificial Sequence; identical to SEQ ID NO: 9798
  Probe

SEQ ID NO: 30369 - DNA, 31 bp, Artificial Sequence; identical to SEQ ID NO: 19077
  Probe

SEQ ID NO: 30370 - DNA, 32 bp, Artificial Sequence; identical to SEQ ID NO: 4998
  Probe

SEQ ID NO: 30371 - DNA, 33 bp, Artificial Sequence; identical to SEQ ID NO: 4999
  Probe

SEQ ID NO: 30372 - DNA, 34 bp, Artificial Sequence; identical to SEQ ID NO: 5000
  Probe

SEQ ID NO: 30373 - DNA, 35 bp, Artificial Sequence; identical to SEQ ID NO: 5001
  Probe

SEQ ID NO: 30374 - DNA, 36 bp, Artificial Sequence; identical to SEQ ID NO: 5002
  Probe

SEQ ID NO: 30375 - DNA, 37 bp, Artificial Sequence; identical to SEQ ID NO: 5003
  Probe

SEQ ID NO: 30376 - DNA, 38 bp, Artificial Sequence; identical to SEQ ID NO: 5004
  Probe

SEQ ID NO: 30377 - DNA, 40 bp, Artificial Sequence; identical to SEQ ID NO: 19086
  Probe

SEQ ID NO: 30378 - DNA, 50 bp, Artificial Sequence
  Probe
cgccgtgatcgtatagtggttagtactctgcgttgtggccgcagcaacct

SEQ ID NO: 30379 - DNA, 25 bp, Artificial Sequence
  Probe
cgcctgccacgcgggaggcccgggt

SEQ ID NO: 30380 - DNA, 36 bp, Artificial Sequence
  Probe
cgcctgccacgcgggaggcccgggttcgattcccgg

SEQ ID NO: 30381 - DNA, 15 bp, Artificial Sequence
  Probe
cgcctgtcacgcggg

SEQ ID NO: 30382 - DNA, 36 bp, Artificial Sequence
  Probe
cgcctgtcacgcgggagaccggggttcaattccccg

SEQ ID NO: 30383 - DNA, 47 bp, Artificial Sequence
  Probe
cgcctgtcacgcgggagaccggggttcgattccccgacggggaggca

SEQ ID NO: 30384 - DNA, 26 bp, Artificial Sequence
  Probe
cgccttttttcccggcggcgggagaa

SEQ ID NO: 30385 - DNA, 17 bp, Artificial Sequence
  Probe
cgcgaaaggtccccggt

SEQ ID NO: 30386 - DNA, 33 bp, Artificial Sequence
  Probe
cgcgcattggtggttcagtggtagaattctcgc

SEQ ID NO: 30387 - DNA, 34 bp, Artificial Sequence
  Probe
cgcgcattggtggttcagtggtagaattctcgcc

SEQ ID NO: 30388 - DNA, 35 bp, Artificial Sequence
  Probe
cgcgcattggtggttcagtggtagaattctcgcct

SEQ ID NO: 30389 - DNA, 36 bp, Artificial Sequence
  Probe
cgcgcattggtggttcagtggtagaattctcgcctg

SEQ ID NO: 30390 - DNA, 36 bp, Artificial Sequence; identical to SEQ ID NO: 5025
  Probe

SEQ ID NO: 30391 - DNA, 32 bp, Artificial Sequence; identical to SEQ ID NO: 732
  Probe

SEQ ID NO: 30392 - DNA, 33 bp, Artificial Sequence; identical to SEQ ID NO: 733
  Probe

SEQ ID NO: 30393 - DNA, 34 bp, Artificial Sequence; identical to SEQ ID NO: 734
  Probe

SEQ ID NO: 30394 - DNA, 35 bp, Artificial Sequence; identical to SEQ ID NO: 735
  Probe

SEQ ID NO: 30395 - DNA, 36 bp, Artificial Sequence; identical to SEQ ID NO: 5028
  Probe

SEQ ID NO: 30396 - DNA, 37 bp, Artificial Sequence; identical to SEQ ID NO: 5031
  Probe

SEQ ID NO: 30397 - DNA, 36 bp, Artificial Sequence; identical to SEQ ID NO: 5034
  Probe

SEQ ID NO: 30398 - DNA, 37 bp, Artificial Sequence; identical to SEQ ID NO: 5036
  Probe

SEQ ID NO: 30399 - DNA, 38 bp, Artificial Sequence; identical to SEQ ID NO: 5037
  Probe

SEQ ID NO: 30400 - DNA, 16 bp, Artificial Sequence
  Probe
cgcgggaggcccgggt

SEQ ID NO: 30401 - DNA, 33 bp, Artificial Sequence; identical to SEQ ID NO: 19171
  Probe

SEQ ID NO: 30402 - DNA, 37 bp, Artificial Sequence; identical to SEQ ID NO: 19174
  Probe

SEQ ID NO: 30403 - DNA, 37 bp, Artificial Sequence; identical to SEQ ID NO: 5041
  Probe

SEQ ID NO: 30404 - DNA, 38 bp, Artificial Sequence; identical to SEQ ID NO: 19179
  Probe

SEQ ID NO: 30405 - DNA, 37 bp, Artificial Sequence; identical to SEQ ID NO: 5042
  Probe

SEQ ID NO: 30406 - DNA, 37 bp, Artificial Sequence
  Probe
cgcgggaggcccgggttcgattcccggccaatgcagc

SEQ ID NO: 30407 - DNA, 38 bp, Artificial Sequence; identical to SEQ ID NO: 5043
  Probe

SEQ ID NO: 30408 - DNA, 33 bp, Artificial Sequence; identical to SEQ ID NO: 19184
  Probe

SEQ ID NO: 30409 - DNA, 25 bp, Artificial Sequence
  Probe
cgcgggttcgatccccgtacgggcc

SEQ ID NO: 30410 - DNA, 36 bp, Artificial Sequence
  Probe
cgcgggttcgatccccgtacgggccaactttgtttt

SEQ ID NO: 30411 - DNA, 36 bp, Artificial Sequence
  Probe
cgcgggttcgatccccgtacgggccaggattgaaac

SEQ ID NO: 30412 - DNA, 16 bp, Artificial Sequence
  Probe
cgcgtctgactacgga

SEQ ID NO: 30413 - DNA, 18 bp, Artificial Sequence
  Probe
cgcgtctgactacggatc

SEQ ID NO: 30414 - DNA, 36 bp, Artificial Sequence
  Probe
cgcgtctgactacggatcagaagattccaggttcga

SEQ ID NO: 30415 - DNA, 36 bp, Artificial Sequence
  Probe
cgcgtctgactacggatcagaagattctaggttcga

SEQ ID NO: 30416 - DNA, 36 bp, Artificial Sequence
  Probe
cgctcccttcgatagctcagctggtagagcggagga

SEQ ID NO: 30417 - DNA, 20 bp, Artificial Sequence
  Probe
cgctctcaccgccgcggccc

SEQ ID NO: 30418 - DNA, 46 bp, Artificial Sequence
  Probe
cgctctcaccgccgcggcccgggttcgattcccggtcagggaaaga

SEQ ID NO: 30419 - DNA, 46 bp, Artificial Sequence; identical to SEQ ID NO: 19193
  Probe

SEQ ID NO: 30420 - DNA, 46 bp, Artificial Sequence
  Probe
cgctctcaccgccgcggcccgggttcgattcccggtcagggaatga

SEQ ID NO: 30421 - DNA, 17 bp, Artificial Sequence
  Probe
cgctctgagctaaacct

SEQ ID NO: 30422 - DNA, 19 bp, Artificial Sequence
  Probe
cggaaacaagactgtgttt

SEQ ID NO: 30423 - DNA, 20 bp, Artificial Sequence
  Probe
cggaaacaagactgtgtttt

SEQ ID NO: 30424 - DNA, 15 bp, Artificial Sequence
  Probe
cggaagcgtgctggg

SEQ ID NO: 30425 - DNA, 17 bp, Artificial Sequence
  Probe
cggaagcgtgctgggcc

SEQ ID NO: 30426 - DNA, 25 bp, Artificial Sequence
  Probe
cggagaattttggattctcagggat

SEQ ID NO: 30427 - DNA, 32 bp, Artificial Sequence
  Probe
cggagaattttggattctcagggatgggttcg

SEQ ID NO: 30428 - DNA, 36 bp, Artificial Sequence
  Probe
cggagaattttggattctcagggatgggttcgattc

SEQ ID NO: 30429 - DNA, 38 bp, Artificial Sequence
  Probe
cggagaattttggattctcagggatgggttcgattctc

SEQ ID NO: 30430 - DNA, 15 bp, Artificial Sequence
  Probe
cggagatgaaaacct

SEQ ID NO: 30431 - DNA, 24 bp, Artificial Sequence
  Probe
cggagatgaaaacctttttccaag

SEQ ID NO: 30432 - DNA, 25 bp, Artificial Sequence
  Probe
cggagatgaaaacctttttccaagg

SEQ ID NO: 30433 - DNA, 29 bp, Artificial Sequence
  Probe
cggagatgaaaacctttttccaaggacaa

SEQ ID NO: 30434 - DNA, 18 bp, Artificial Sequence
  Probe
cggagccttcgatagctc

SEQ ID NO: 30435 - DNA, 30 bp, Artificial Sequence
  Probe
cggagccttcgatagctcagttggtagagc

SEQ ID NO: 30436 - DNA, 20 bp, Artificial Sequence
  Probe
cggagctggggattgtgggt

SEQ ID NO: 30437 - DNA, 15 bp, Artificial Sequence
  Probe
cggatagctcagtcg

SEQ ID NO: 30438 - DNA, 16 bp, Artificial Sequence
  Probe
cggatagctcagtcgg

SEQ ID NO: 30439 - DNA, 19 bp, Artificial Sequence
  Probe
cggatagctcagtcggtag

SEQ ID NO: 30440 - DNA, 20 bp, Artificial Sequence
  Probe
cggatagctcagtcggtaga

SEQ ID NO: 30441 - DNA, 21 bp, Artificial Sequence
  Probe
cggatagctcagtcggtagag

SEQ ID NO: 30442 - DNA, 24 bp, Artificial Sequence
  Probe
cggatagctcagtcggtagagcat

SEQ ID NO: 30443 - DNA, 27 bp, Artificial Sequence
  Probe
cggatagctcagtcggtagagcatcag

SEQ ID NO: 30444 - DNA, 28 bp, Artificial Sequence
  Probe
cggatagctcagtcggtagagcatcaga

SEQ ID NO: 30445 - DNA, 34 bp, Artificial Sequence; identical to SEQ ID NO: 13180
  Probe

SEQ ID NO: 30446 - DNA, 36 bp, Artificial Sequence
  Probe
cggatagctcagtcggtagagcatcagacttttaat

SEQ ID NO: 30447 - DNA, 21 bp, Artificial Sequence
  Probe
cggatcagaagattgagggtt

SEQ ID NO: 30448 - DNA, 21 bp, Artificial Sequence
  Probe
cggatcagaagattgcaggtt

SEQ ID NO: 30449 - DNA, 17 bp, Artificial Sequence
  Probe
cggatggaggcgtgggt

SEQ ID NO: 30450 - DNA, 35 bp, Artificial Sequence
  Probe
cggcattgtgaggacaatggcacggcaaggggagt

SEQ ID NO: 30451 - DNA, 22 bp, Artificial Sequence
  Probe
cggcgctctcaccgccgcggcc

SEQ ID NO: 30452 - DNA, 23 bp, Artificial Sequence
  Probe
cggcgctctcaccgccgcggccc

SEQ ID NO: 30453 - DNA, 15 bp, Artificial Sequence
  Probe
cggcggcgggagaag

SEQ ID NO: 30454 - DNA, 17 bp, Artificial Sequence
  Probe
cggcggcgggagaagta

SEQ ID NO: 30455 - DNA, 19 bp, Artificial Sequence
  Probe
cggctagctcagtcggtag

SEQ ID NO: 30456 - DNA, 22 bp, Artificial Sequence
  Probe
cggctagctcagtcggtagagc

SEQ ID NO: 30457 - DNA, 23 bp, Artificial Sequence
  Probe
cggctagctcagtcggtagagca

SEQ ID NO: 30458 - DNA, 26 bp, Artificial Sequence
  Probe
cggctagctcagtcggtagagcatga

SEQ ID NO: 30459 - DNA, 27 bp, Artificial Sequence
  Probe
cggctagctcagtcggtagagcatgag

SEQ ID NO: 30460 - DNA, 30 bp, Artificial Sequence; identical to SEQ ID NO: 13189
  Probe

SEQ ID NO: 30461 - DNA, 31 bp, Artificial Sequence; identical to SEQ ID NO: 13190
  Probe

SEQ ID NO: 30462 - DNA, 32 bp, Artificial Sequence
  Probe
cggctagctcagtcggtagagcatgagaccct

SEQ ID NO: 30463 - DNA, 33 bp, Artificial Sequence; identical to SEQ ID NO: 774
  Probe

SEQ ID NO: 30464 - DNA, 26 bp, Artificial Sequence
  Probe
cggctagctcagtcggtagagcatgg

SEQ ID NO: 30465 - DNA, 39 bp, Artificial Sequence; identical to SEQ ID NO: 19247
  Probe

SEQ ID NO: 30466 - DNA, 21 bp, Artificial Sequence
  Probe
cggctcgaaggacgaaagttt

SEQ ID NO: 30467 - DNA, 22 bp, Artificial Sequence
  Probe
cggctcgaaggacgaaagtttt

SEQ ID NO: 30468 - DNA, 19 bp, Artificial Sequence
  Probe
cggctcgaaggacttcgtc

SEQ ID NO: 30469 - DNA, 28 bp, Artificial Sequence
  Probe
cggctcgaaggacttcgtctgtaatttt

SEQ ID NO: 30470 - DNA, 27 bp, Artificial Sequence
  Probe
cggctcgaaggagacaagtgcggtttt

SEQ ID NO: 30471 - DNA, 28 bp, Artificial Sequence
  Probe
cggctcgaaggagacaagtgcggttttt

SEQ ID NO: 30472 - DNA, 18 bp, Artificial Sequence
  Probe
cggctgtaggaatacttt

SEQ ID NO: 30473 - DNA, 19 bp, Artificial Sequence
  Probe
cggctgtaggaatactttt

SEQ ID NO: 30474 - DNA, 30 bp, Artificial Sequence
  Probe
cggctgtaggaatacttttcccaagcaaaa

SEQ ID NO: 30475 - DNA, 19 bp, Artificial Sequence
  Probe
cggctgttaaccgaaaggt

SEQ ID NO: 30476 - DNA, 21 bp, Artificial Sequence
  Probe
cggctgttaaccgaaaggttg

SEQ ID NO: 30477 - DNA, 22 bp, Artificial Sequence
  Probe
cggctgttaaccgaaaggttgg

SEQ ID NO: 30478 - DNA, 23 bp, Artificial Sequence
  Probe
cggctgttaaccgaaaggttggt

SEQ ID NO: 30479 - DNA, 24 bp, Artificial Sequence
  Probe
cggctgttaaccgaaaggttggtg

SEQ ID NO: 30480 - DNA, 27 bp, Artificial Sequence
  Probe
cggctgttaaccgaaaggttggtggtt

SEQ ID NO: 30481 - DNA, 50 bp, Artificial Sequence
  Probe
cggctgttaaccgaaaggttggtggttcgagcccacccagggacgctatg

SEQ ID NO: 30482 - DNA, 25 bp, Artificial Sequence
  Probe
cggctgttaactgaaaggttggtgg

SEQ ID NO: 30483 - DNA, 26 bp, Artificial Sequence
  Probe
cggctgttaactgaaaggttggtggt

SEQ ID NO: 30484 - DNA, 27 bp, Artificial Sequence
  Probe
cggctgttaactgaaaggttggtggtt

SEQ ID NO: 30485 - DNA, 36 bp, Artificial Sequence
  Probe
cggctgttaactgaaaggttggtggttcgagcccac

SEQ ID NO: 30486 - DNA, 18 bp, Artificial Sequence
  Probe
cggcttagcctgtggctc

SEQ ID NO: 30487 - DNA, 21 bp, Artificial Sequence
  Probe
cggcttagcctgtggctcgcc

SEQ ID NO: 30488 - DNA, 36 bp, Artificial Sequence
  Probe
cgggacgaggtggccgagtggttaaggcgatggact

SEQ ID NO: 30489 - DNA, 31 bp, Artificial Sequence; identical to SEQ ID NO: 787
  Probe

SEQ ID NO: 30490 - DNA, 33 bp, Artificial Sequence; identical to SEQ ID NO: 789
  Probe

SEQ ID NO: 30491 - DNA, 34 bp, Artificial Sequence; identical to SEQ ID NO: 5079
  Probe

SEQ ID NO: 30492 - DNA, 35 bp, Artificial Sequence; identical to SEQ ID NO: 5081
  Probe

SEQ ID NO: 30493 - DNA, 34 bp, Artificial Sequence; identical to SEQ ID NO: 5082
  Probe

SEQ ID NO: 30494 - DNA, 35 bp, Artificial Sequence; identical to SEQ ID NO: 5083
  Probe

SEQ ID NO: 30495 - DNA, 36 bp, Artificial Sequence; identical to SEQ ID NO: 5084
  Probe

SEQ ID NO: 30496 - DNA, 18 bp, Artificial Sequence
  Probe
cgggagcccggatagctc

SEQ ID NO: 30497 - DNA, 36 bp, Artificial Sequence; identical to SEQ ID NO: 19271
  Probe

SEQ ID NO: 30498 - DNA, 39 bp, Artificial Sequence; identical to SEQ ID NO: 19273
  Probe

SEQ ID NO: 30499 - DNA, 40 bp, Artificial Sequence
  Probe
cgggagcccggatagctcagtcggtagagcatcagacttt

SEQ ID NO: 30500 - DNA, 41 bp, Artificial Sequence; identical to SEQ ID NO: 19274
  Probe

SEQ ID NO: 30501 - DNA, 26 bp, Artificial Sequence
  Probe
cgggagcgcccggatagctcagtcgg

SEQ ID NO: 30502 - DNA, 27 bp, Artificial Sequence
  Probe
cgggagcgcccggatagctcagtcggt

SEQ ID NO: 30503 - DNA, 28 bp, Artificial Sequence
  Probe
cgggagcgcccggatagctcagtcggta

SEQ ID NO: 30504 - DNA, 29 bp, Artificial Sequence
  Probe
cgggagcgcccggatagctcagtcggtag

SEQ ID NO: 30505 - DNA, 30 bp, Artificial Sequence
  Probe
cgggagcgcccggatagctcagtcggtaga

SEQ ID NO: 30506 - DNA, 31 bp, Artificial Sequence; identical to SEQ ID NO: 19275
  Probe

SEQ ID NO: 30507 - DNA, 32 bp, Artificial Sequence
  Probe
cgggagcgcccggatagctcagtcggtagagc

SEQ ID NO: 30508 - DNA, 33 bp, Artificial Sequence; identical to SEQ ID NO: 19276
  Probe

SEQ ID NO: 30509 - DNA, 34 bp, Artificial Sequence
  Probe
cgggagcgcccggatagctcagtcggtagagcat

SEQ ID NO: 30510 - DNA, 35 bp, Artificial Sequence
  Probe
cgggagcgcccggatagctcagtcggtagagcatc

SEQ ID NO: 30511 - DNA, 36 bp, Artificial Sequence
  Probe
cgggagcgcccggatagctcagtcggtagagcatca

SEQ ID NO: 30512 - DNA, 40 bp, Artificial Sequence; identical to SEQ ID NO: 19278
  Probe

SEQ ID NO: 30513 - DNA, 41 bp, Artificial Sequence; identical to SEQ ID NO: 19279
  Probe

SEQ ID NO: 30514 - DNA, 42 bp, Artificial Sequence; identical to SEQ ID NO: 19280
  Probe

SEQ ID NO: 30515 - DNA, 43 bp, Artificial Sequence; identical to SEQ ID NO: 19281
  Probe

SEQ ID NO: 30516 - DNA, 44 bp, Artificial Sequence; identical to SEQ ID NO: 19282
  Probe

SEQ ID NO: 30517 - DNA, 45 bp, Artificial Sequence
  Probe
cgggagcgcccggatagctcagtcggtagagcatcagacttttaa

SEQ ID NO: 30518 - DNA, 15 bp, Artificial Sequence
  Probe
cgggaggcccgggtt

SEQ ID NO: 30519 - DNA, 27 bp, Artificial Sequence
  Probe
cgggaggcccgggttcgattcccggcc

SEQ ID NO: 30520 - DNA, 31 bp, Artificial Sequence
  Probe
cgggaggcccgggttcgattcccggccaatg

SEQ ID NO: 30521 - DNA, 18 bp, Artificial Sequence
  Probe
cgggccaggattgaaact

SEQ ID NO: 30522 - DNA, 20 bp, Artificial Sequence
  Probe
cgggccaggattgaaacttt

SEQ ID NO: 30523 - DNA, 21 bp, Artificial Sequence
  Probe
cgggccaggattgaaactttt

SEQ ID NO: 30524 - DNA, 36 bp, Artificial Sequence
  Probe
cgggcccataccccgaaaatgttggttatacccttc

SEQ ID NO: 30525 - DNA, 36 bp, Artificial Sequence
  Probe
cgggcgcccggctagctcagtcggtagagcatgaga

SEQ ID NO: 30526 - DNA, 23 bp, Artificial Sequence
  Probe
cgggcggaaacaagactgtgttt

SEQ ID NO: 30527 - DNA, 25 bp, Artificial Sequence
  Probe
cgggcggaaacaggtcagctgtttt

SEQ ID NO: 30528 - DNA, 18 bp, Artificial Sequence
  Probe
cgggcgggagtggtggct

SEQ ID NO: 30529 - DNA, 15 bp, Artificial Sequence
  Probe
cgggctcacatcacc

SEQ ID NO: 30530 - DNA, 36 bp, Artificial Sequence
  Probe
cgggctcgattcccgcccaacgcatcgggcggacct

SEQ ID NO: 30531 - DNA, 22 bp, Artificial Sequence
  Probe
cggggacgcttgctctagcttt

SEQ ID NO: 30532 - DNA, 17 bp, Artificial Sequence
  Probe
cgggtccccggtagctc

SEQ ID NO: 30533 - DNA, 17 bp, Artificial Sequence
  Probe
cgggtgcgagaggtccc

SEQ ID NO: 30534 - DNA, 21 bp, Artificial Sequence
  Probe
cgggtgcgagaggtcccgggt

SEQ ID NO: 30535 - DNA, 22 bp, Artificial Sequence
  Probe
cgggtgcgagaggtcccgggtt

SEQ ID NO: 30536 - DNA, 15 bp, Artificial Sequence
  Probe
cgggtgctcttattt

SEQ ID NO: 30537 - DNA, 16 bp, Artificial Sequence
  Probe
cgggtgctcttatttt

SEQ ID NO: 30538 - DNA, 25 bp, Artificial Sequence
  Probe
cgggttcaattcccggtcagggaac

SEQ ID NO: 30539 - DNA, 27 bp, Artificial Sequence
  Probe
cgggttcaattcccggtcagggaacca

SEQ ID NO: 30540 - DNA, 25 bp, Artificial Sequence
  Probe
cgggttcgaaccccgtccgtgcctg

SEQ ID NO: 30541 - DNA, 25 bp, Artificial Sequence
  Probe
cgggttcgactcccggtgtgggaac

SEQ ID NO: 30542 - DNA, 22 bp, Artificial Sequence
  Probe
cgggttcgatccccgtacgggc

SEQ ID NO: 30543 - DNA, 23 bp, Artificial Sequence
  Probe
cgggttcgatccccgtacgggcc

SEQ ID NO: 30544 - DNA, 21 bp, Artificial Sequence
  Probe
cgggttcgattcccgggcggc

SEQ ID NO: 30545 - DNA, 22 bp, Artificial Sequence
  Probe
cgggttcgattcccgggcggcg

SEQ ID NO: 30546 - DNA, 25 bp, Artificial Sequence
  Probe
cgggttcgattcccggtcagggaaa

SEQ ID NO: 30547 - DNA, 25 bp, Artificial Sequence
  Probe
cgggttcgattcccggtcagggaag

SEQ ID NO: 30548 - DNA, 26 bp, Artificial Sequence
  Probe
cgggttcgattcccggtcagggaagc

SEQ ID NO: 30549 - DNA, 25 bp, Artificial Sequence
  Probe
cgggttcgattcccggtcagggaat

SEQ ID NO: 30550 - DNA, 25 bp, Artificial Sequence
  Probe
cgggttcgattcccggtcatggaac

SEQ ID NO: 30551 - DNA, 27 bp, Artificial Sequence
  Probe
cgggttcgattcccggtcatggaacca

SEQ ID NO: 30552 - DNA, 17 bp, Artificial Sequence
  Probe
cggtaatcgcataaaac

SEQ ID NO: 30553 - DNA, 18 bp, Artificial Sequence
  Probe
cggtaatcgcataaaact

SEQ ID NO: 30554 - DNA, 21 bp, Artificial Sequence
  Probe
cggtaatcgcataaaacttaa

SEQ ID NO: 30555 - DNA, 22 bp, Artificial Sequence
  Probe
cggtaatcgcataaaacttaaa

SEQ ID NO: 30556 - DNA, 23 bp, Artificial Sequence
  Probe
cggtaatcgcataaaacttaaaa

SEQ ID NO: 30557 - DNA, 24 bp, Artificial Sequence
  Probe
cggtaatcgcataaaacttaaaac

SEQ ID NO: 30558 - DNA, 28 bp, Artificial Sequence
  Probe
cggtaatcgcataaaacttaaaacttta

SEQ ID NO: 30559 - DNA, 29 bp, Artificial Sequence
  Probe
cggtaatcgcataaaacttaaaactttac

SEQ ID NO: 30560 - DNA, 31 bp, Artificial Sequence
  Probe
cggtaatcgcataaaacttaaaactttacag

SEQ ID NO: 30561 - DNA, 33 bp, Artificial Sequence; identical to SEQ ID NO: 19324
  Probe

SEQ ID NO: 30562 - DNA, 41 bp, Artificial Sequence; identical to SEQ ID NO: 19327
  Probe

SEQ ID NO: 30563 - DNA, 50 bp, Artificial Sequence; identical to SEQ ID NO: 791
  Probe

SEQ ID NO: 30564 - DNA, 15 bp, Artificial Sequence
  Probe
cggtagagcatcaga

SEQ ID NO: 30565 - DNA, 17 bp, Artificial Sequence
  Probe
cggtagagcatcagact

SEQ ID NO: 30566 - DNA, 18 bp, Artificial Sequence
  Probe
cggtagagcatcagactt

SEQ ID NO: 30567 - DNA, 19 bp, Artificial Sequence
  Probe
cggtagagcatcagacttt

SEQ ID NO: 30568 - DNA, 20 bp, Artificial Sequence
  Probe
cggtagagcatcagactttt

SEQ ID NO: 30569 - DNA, 15 bp, Artificial Sequence
  Probe
cggtagagcatgaga

SEQ ID NO: 30570 - DNA, 16 bp, Artificial Sequence
  Probe
cggtagagcatgagac

SEQ ID NO: 30571 - DNA, 18 bp, Artificial Sequence
  Probe
cggtagagcatgagaccc

SEQ ID NO: 30572 - DNA, 17 bp, Artificial Sequence
  Probe
cggtagagcatgagact

SEQ ID NO: 30573 - DNA, 18 bp, Artificial Sequence
  Probe
cggtagagcatgagactc

SEQ ID NO: 30574 - DNA, 15 bp, Artificial Sequence
  Probe
cggtagagcatggga

SEQ ID NO: 30575 - DNA, 16 bp, Artificial Sequence
  Probe
cggtagagcatgggac

SEQ ID NO: 30576 - DNA, 17 bp, Artificial Sequence
  Probe
cggtagagcatgggact

SEQ ID NO: 30577 - DNA, 25 bp, Artificial Sequence
  Probe
cggtagagcatgggactcttaatcc

SEQ ID NO: 30578 - DNA, 26 bp, Artificial Sequence
  Probe
cggtagagcatgggactcttaatccc

SEQ ID NO: 30579 - DNA, 15 bp, Artificial Sequence
  Probe
cggtagagcgcgtgc

SEQ ID NO: 30580 - DNA, 20 bp, Artificial Sequence
  Probe
cggtagagcgcgtgcttagc

SEQ ID NO: 30581 - DNA, 15 bp, Artificial Sequence
  Probe
cggtagcgcgtctga

SEQ ID NO: 30582 - DNA, 16 bp, Artificial Sequence
  Probe
cggtagcgcgtctgac

SEQ ID NO: 30583 - DNA, 17 bp, Artificial Sequence
  Probe
cggtagcgcgtctgact

SEQ ID NO: 30584 - DNA, 19 bp, Artificial Sequence
  Probe
cggtagcgcgtctgactcc

SEQ ID NO: 30585 - DNA, 22 bp, Artificial Sequence
  Probe
cggtcagggaaagagtaacatc

SEQ ID NO: 30586 - DNA, 15 bp, Artificial Sequence
  Probe
cggtctaaggcgctg

SEQ ID NO: 30587 - DNA, 17 bp, Artificial Sequence
  Probe
cggtctaaggcgctgcg

SEQ ID NO: 30588 - DNA, 17 bp, Artificial Sequence
  Probe
cggtctaaggcgctgga

SEQ ID NO: 30589 - DNA, 22 bp, Artificial Sequence
  Probe
cggtggaacctgcattggtttt

SEQ ID NO: 30590 - DNA, 36 bp, Artificial Sequence
  Probe
cggtggaacctgctcgaagatatatgtatatatcct

SEQ ID NO: 30591 - DNA, 18 bp, Artificial Sequence
  Probe
cggtgggacctcacgaga

SEQ ID NO: 30592 - DNA, 20 bp, Artificial Sequence
  Probe
cggtgggacctcacgagact

SEQ ID NO: 30593 - DNA, 21 bp, Artificial Sequence
  Probe
cggtgggacctcacgagactt

SEQ ID NO: 30594 - DNA, 23 bp, Artificial Sequence
  Probe
cggtgggacctcacgagactttt

SEQ ID NO: 30595 - DNA, 24 bp, Artificial Sequence
  Probe
cggttagcgcgttcggctgttaac

SEQ ID NO: 30596 - DNA, 17 bp, Artificial Sequence
  Probe
cggttagctcagtcggc

SEQ ID NO: 30597 - DNA, 30 bp, Artificial Sequence
  Probe
cggttagctcagtcggctagagcgtggtgc

SEQ ID NO: 30598 - DNA, 16 bp, Artificial Sequence
  Probe
cggttatcacgtctgc

SEQ ID NO: 30599 - DNA, 17 bp, Artificial Sequence
  Probe
cggttatcacgtctgct

SEQ ID NO: 30600 - DNA, 24 bp, Artificial Sequence
  Probe
cggttatcacgtctgctttacacg

SEQ ID NO: 30601 - DNA, 36 bp, Artificial Sequence
  Probe
cgtaaacaggagatcctgggttcgaatcccagcggg

SEQ ID NO: 30602 - DNA, 39 bp, Artificial Sequence
  Probe
cgtaaacaggagatcctgggttcgaatcccagcggggcc

SEQ ID NO: 30603 - DNA, 40 bp, Artificial Sequence
  Probe
cgtaaacaggagatcctgggttcgaatcccagcggggcct

SEQ ID NO: 30604 - DNA, 15 bp, Artificial Sequence
  Probe
cgtaaggcggctgtt

SEQ ID NO: 30605 - DNA, 16 bp, Artificial Sequence
  Probe
cgtaaggcggctgttt

SEQ ID NO: 30606 - DNA, 17 bp, Artificial Sequence
  Probe
cgtaaggcggctgtttt

SEQ ID NO: 30607 - DNA, 18 bp, Artificial Sequence
  Probe
cgtaaggcggctgttttt

SEQ ID NO: 30608 - DNA, 22 bp, Artificial Sequence
  Probe
cgtacgggccaggattgaaact

SEQ ID NO: 30609 - DNA, 23 bp, Artificial Sequence
  Probe
cgtacgggccaggattgaaactt

SEQ ID NO: 30610 - DNA, 24 bp, Artificial Sequence
  Probe
cgtacgggccaggattgaaacttt

SEQ ID NO: 30611 - DNA, 25 bp, Artificial Sequence
  Probe
cgtacgggccaggattgaaactttt

SEQ ID NO: 30612 - DNA, 16 bp, Artificial Sequence
  Probe
cgtagtcgtggccgag

SEQ ID NO: 30613 - DNA, 27 bp, Artificial Sequence
  Probe
cgtagtgtagtggtcatcacgttcgcc

SEQ ID NO: 30614 - DNA, 18 bp, Artificial Sequence
  Probe
cgtagtgtagtggttatc

SEQ ID NO: 30615 - DNA, 27 bp, Artificial Sequence
  Probe
cgtagtgtagtggttatcacgttcgcc

SEQ ID NO: 30616 - DNA, 28 bp, Artificial Sequence
  Probe
cgtagtgtagtggttatcacgttcgcct

SEQ ID NO: 30617 - DNA, 22 bp, Artificial Sequence
  Probe
cgtatagtggttagtactctgc

SEQ ID NO: 30618 - DNA, 25 bp, Artificial Sequence
  Probe
cgtatagtggttagtactctgcgtt

SEQ ID NO: 30619 - DNA, 36 bp, Artificial Sequence
  Probe
cgtatagtggttagtactctgcgttgtggccgcagc

SEQ ID NO: 30620 - DNA, 41 bp, Artificial Sequence
  Probe
cgtatagtggttagtactctgcgttgtggccgcagcaacct

SEQ ID NO: 30621 - DNA, 16 bp, Artificial Sequence
  Probe
cgtatgaggccccggg

SEQ ID NO: 30622 - DNA, 17 bp, Artificial Sequence
  Probe
cgtatgaggccccgggt

SEQ ID NO: 30623 - DNA, 18 bp, Artificial Sequence
  Probe
cgtatgaggccccgggtt

SEQ ID NO: 30624 - DNA, 19 bp, Artificial Sequence
  Probe
cgtatgaggccccgggttc

SEQ ID NO: 30625 - DNA, 36 bp, Artificial Sequence
  Probe
cgtcggctcgttggtctaggggtatgattctcgctt

SEQ ID NO: 30626 - DNA, 36 bp, Artificial Sequence
  Probe
cgtgagcccggatagctcagtcggtagagcatcaga

SEQ ID NO: 30627 - DNA, 40 bp, Artificial Sequence
  Probe
cgtgagcccggatagctcagtcggtagagcatcagacttt

SEQ ID NO: 30628 - DNA, 23 bp, Artificial Sequence
  Probe
cgtgatcgtatagtggttagtac

SEQ ID NO: 30629 - DNA, 24 bp, Artificial Sequence
  Probe
cgtgatcgtatagtggttagtact

SEQ ID NO: 30630 - DNA, 25 bp, Artificial Sequence
  Probe
cgtgatcgtatagtggttagtactc

SEQ ID NO: 30631 - DNA, 26 bp, Artificial Sequence
  Probe
cgtgatcgtatagtggttagtactct

SEQ ID NO: 30632 - DNA, 32 bp, Artificial Sequence; identical to SEQ ID NO: 794
  Probe

SEQ ID NO: 30633 - DNA, 36 bp, Artificial Sequence; identical to SEQ ID NO: 19367
  Probe

SEQ ID NO: 30634 - DNA, 28 bp, Artificial Sequence
  Probe
cgtggccgagtggttaaggcgatggact

SEQ ID NO: 30635 - DNA, 19 bp, Artificial Sequence
  Probe
cgtggcgtcccggtagctc

SEQ ID NO: 30636 - DNA, 25 bp, Artificial Sequence
  Probe
cgtgggttcgagccccacgttgggc

SEQ ID NO: 30637 - DNA, 27 bp, Artificial Sequence
  Probe
cgtgggttcgagccccacgttgggcgc

SEQ ID NO: 30638 - DNA, 36 bp, Artificial Sequence
  Probe
cgtgggttcgagccccacgttgggcgcgggttgtaa

SEQ ID NO: 30639 - DNA, 15 bp, Artificial Sequence
  Probe
cgtggttgtagtccg

SEQ ID NO: 30640 - DNA, 19 bp, Artificial Sequence
  Probe
cgtggttgtagtccgtgcg

SEQ ID NO: 30641 - DNA, 21 bp, Artificial Sequence
  Probe
cgtggttgtagtccgtgcgag

SEQ ID NO: 30642 - DNA, 22 bp, Artificial Sequence
  Probe
cgtggttgtagtccgtgcgaga

SEQ ID NO: 30643 - DNA, 26 bp, Artificial Sequence
  Probe
cgtggttgtagtccgtgcgagaataa

SEQ ID NO: 30644 - DNA, 36 bp, Artificial Sequence
  Probe
cgtggttgtagtccgtgcgagaataatgatgtatgc

SEQ ID NO: 30645 - DNA, 36 bp, Artificial Sequence
  Probe
cgtgtccttcgatagctcagttggtagagcggagga

SEQ ID NO: 30646 - DNA, 28 bp, Artificial Sequence
  Probe
cgttaacttccaattaactagttttgac

SEQ ID NO: 30647 - DNA, 26 bp, Artificial Sequence
  Probe
cgttagtctaggctgtcagctcttcc

SEQ ID NO: 30648 - DNA, 16 bp, Artificial Sequence
  Probe
cgttcaggtcgcagtc

SEQ ID NO: 30649 - DNA, 17 bp, Artificial Sequence
  Probe
cgttcaggtcgcagtct

SEQ ID NO: 30650 - DNA, 18 bp, Artificial Sequence
  Probe
cgttcaggtcgcagtctc

SEQ ID NO: 30651 - DNA, 19 bp, Artificial Sequence
  Probe
cgttcaggtcgcagtctcc

SEQ ID NO: 30652 - DNA, 20 bp, Artificial Sequence
  Probe
cgttcaggtcgcagtctccc

SEQ ID NO: 30653 - DNA, 15 bp, Artificial Sequence
  Probe
cgttggtctaggggt

SEQ ID NO: 30654 - DNA, 16 bp, Artificial Sequence
  Probe
cgttggtctaggggta

SEQ ID NO: 30655 - DNA, 17 bp, Artificial Sequence
  Probe
cgttggtctaggggtat

SEQ ID NO: 30656 - DNA, 19 bp, Artificial Sequence
  Probe
cgttggtctaggggtatga

SEQ ID NO: 30657 - DNA, 24 bp, Artificial Sequence
  Probe
cgttggtctaggggtatgattctc

SEQ ID NO: 30658 - DNA, 27 bp, Artificial Sequence
  Probe
cgttggtctaggggtatgattctcgct

SEQ ID NO: 30659 - DNA, 36 bp, Artificial Sequence
  Probe
cgttggtggtatagtggtaagcatagctgccttcca

SEQ ID NO: 30660 - DNA, 36 bp, Artificial Sequence
  Probe
cgttggtggtatagtggtgagcatagctgccttcca

SEQ ID NO: 30661 - DNA, 50 bp, Artificial Sequence; identical to SEQ ID NO: 19395
  Probe

SEQ ID NO: 30662 - DNA, 19 bp, Artificial Sequence
  Probe
ctaaacctagccccaaacc

SEQ ID NO: 30663 - DNA, 28 bp, Artificial Sequence
  Probe
ctaaacctagccccaaacccactccacc

SEQ ID NO: 30664 - DNA, 29 bp, Artificial Sequence
  Probe
ctaaacctagccccaaacccactccacct

SEQ ID NO: 30665 - DNA, 15 bp, Artificial Sequence
  Probe
ctaaagacaggggtt

SEQ ID NO: 30666 - DNA, 16 bp, Artificial Sequence
  Probe
ctaaagacaggggtta

SEQ ID NO: 30667 - DNA, 17 bp, Artificial Sequence
  Probe
ctaaagacaggggttag

SEQ ID NO: 30668 - DNA, 18 bp, Artificial Sequence
  Probe
ctaaagacaggggttagg

SEQ ID NO: 30669 - DNA, 19 bp, Artificial Sequence
  Probe
ctaaagacaggggttaggc

SEQ ID NO: 30670 - DNA, 20 bp, Artificial Sequence
  Probe
ctaaagacaggggttaggcc

SEQ ID NO: 30671 - DNA, 21 bp, Artificial Sequence
  Probe
ctaaagacaggggttaggcct

SEQ ID NO: 30672 - DNA, 22 bp, Artificial Sequence
  Probe
ctaaagacaggggttaggcctc

SEQ ID NO: 30673 - DNA, 23 bp, Artificial Sequence
  Probe
ctaaagacaggggttaggcctct

SEQ ID NO: 30674 - DNA, 24 bp, Artificial Sequence
  Probe
ctaaagacaggggttaggcctctt

SEQ ID NO: 30675 - DNA, 25 bp, Artificial Sequence
  Probe
ctaaagacaggggttaggcctcttt

SEQ ID NO: 30676 - DNA, 26 bp, Artificial Sequence
  Probe
ctaaagacaggggttaggcctctttt

SEQ ID NO: 30677 - DNA, 27 bp, Artificial Sequence
  Probe
ctaaagacaggggttaggcctcttttt

SEQ ID NO: 30678 - DNA, 28 bp, Artificial Sequence
  Probe
ctaaagacaggggttaggcctcttttta

SEQ ID NO: 30679 - DNA, 29 bp, Artificial Sequence
  Probe
ctaaagacaggggttaggcctctttttac

SEQ ID NO: 30680 - DNA, 30 bp, Artificial Sequence; identical to SEQ ID NO: 5141
  Probe

SEQ ID NO: 30681 - DNA, 31 bp, Artificial Sequence; identical to SEQ ID NO: 5142
  Probe

SEQ ID NO: 30682 - DNA, 32 bp, Artificial Sequence; identical to SEQ ID NO: 5143
  Probe

SEQ ID NO: 30683 - DNA, 33 bp, Artificial Sequence; identical to SEQ ID NO: 5144
  Probe

SEQ ID NO: 30684 - DNA, 34 bp, Artificial Sequence; identical to SEQ ID NO: 5145
  Probe

SEQ ID NO: 30685 - DNA, 15 bp, Artificial Sequence
  Probe
ctaaaggtccctggt

SEQ ID NO: 30686 - DNA, 16 bp, Artificial Sequence
  Probe
ctaaaggtccctggtt

SEQ ID NO: 30687 - DNA, 18 bp, Artificial Sequence
  Probe
ctaaataagctatcgggc

SEQ ID NO: 30688 - DNA, 19 bp, Artificial Sequence
  Probe
ctaaataagctatcgggcc

SEQ ID NO: 30689 - DNA, 20 bp, Artificial Sequence
  Probe
ctaaataagctatcgggccc

SEQ ID NO: 30690 - DNA, 21 bp, Artificial Sequence
  Probe
ctaaataagctatcgggccca

SEQ ID NO: 30691 - DNA, 22 bp, Artificial Sequence
  Probe
ctaaataagctatcgggcccat

SEQ ID NO: 30692 - DNA, 25 bp, Artificial Sequence
  Probe
ctaaataagctatcgggcccatacc

SEQ ID NO: 30693 - DNA, 36 bp, Artificial Sequence
  Probe
ctaaataagctatcgggcccataccccgaaaatgtt

SEQ ID NO: 30694 - DNA, 19 bp, Artificial Sequence
  Probe
ctaaatactaccgtatggc

SEQ ID NO: 30695 - DNA, 15 bp, Artificial Sequence
  Probe
ctaacaacatggctt

SEQ ID NO: 30696 - DNA, 19 bp, Artificial Sequence
  Probe
ctaacaacatggctttctc

SEQ ID NO: 30697 - DNA, 22 bp, Artificial Sequence
  Probe
ctaacaacatggctttctcaac

SEQ ID NO: 30698 - DNA, 23 bp, Artificial Sequence
  Probe
ctaacacgcgaaaggtccccggt

SEQ ID NO: 30699 - DNA, 15 bp, Artificial Sequence
  Probe
ctaactcatgccccc

SEQ ID NO: 30700 - DNA, 20 bp, Artificial Sequence
  Probe
ctaactcatgcccccatgtc

SEQ ID NO: 30701 - DNA, 21 bp, Artificial Sequence
  Probe
ctaactcatgcccccatgtct

SEQ ID NO: 30702 - DNA, 24 bp, Artificial Sequence
  Probe
ctaactcatgcccccatgtctaac

SEQ ID NO: 30703 - DNA, 25 bp, Artificial Sequence
  Probe
ctaactcatgcccccatgtctaaca

SEQ ID NO: 30704 - DNA, 28 bp, Artificial Sequence
  Probe
ctaactcatgcccccatgtctaacaaca

SEQ ID NO: 30705 - DNA, 33 bp, Artificial Sequence; identical to SEQ ID NO: 5158
  Probe

SEQ ID NO: 30706 - DNA, 36 bp, Artificial Sequence; identical to SEQ ID NO: 5161
  Probe

SEQ ID NO: 30707 - DNA, 41 bp, Artificial Sequence; identical to SEQ ID NO: 5166
  Probe

SEQ ID NO: 30708 - DNA, 42 bp, Artificial Sequence; identical to SEQ ID NO: 5167
  Probe

SEQ ID NO: 30709 - DNA, 36 bp, Artificial Sequence
  Probe
ctaacttagcattaaccttttaagttaaagattaag

SEQ ID NO: 30710 - DNA, 19 bp, Artificial Sequence
  Probe
ctaagccagggattgtggg

SEQ ID NO: 30711 - DNA, 21 bp, Artificial Sequence
  Probe
ctaagccagggattgtgggtt

SEQ ID NO: 30712 - DNA, 36 bp, Artificial Sequence
  Probe
ctaagccagggattgtgggttcgagtcccacctggg

SEQ ID NO: 30713 - DNA, 36 bp, Artificial Sequence
  Probe
ctaagccagggattgtgggttcgagtcccatctggg

SEQ ID NO: 30714 - DNA, 41 bp, Artificial Sequence
  Probe
ctaagccagggattgtgggttcgagtcccatctggggtggc

SEQ ID NO: 30715 - DNA, 42 bp, Artificial Sequence
  Probe
ctaagccagggattgtgggttcgagtcccatctggggtggcc

SEQ ID NO: 30716 - DNA, 17 bp, Artificial Sequence
  Probe
ctaaggactgcaaaacc

SEQ ID NO: 30717 - DNA, 18 bp, Artificial Sequence
  Probe
ctaaggactgcaaaaccc

SEQ ID NO: 30718 - DNA, 19 bp, Artificial Sequence
  Probe
ctaaggactgcaaaacccc

SEQ ID NO: 30719 - DNA, 24 bp, Artificial Sequence
  Probe
ctaaggactgcaaaaccccactct

SEQ ID NO: 30720 - DNA, 18 bp, Artificial Sequence
  Probe
ctaagtgtttgtgggttt

SEQ ID NO: 30721 - DNA, 23 bp, Artificial Sequence
  Probe
ctaagtgtttgtgggtttaagtc

SEQ ID NO: 30722 - DNA, 36 bp, Artificial Sequence; identical to SEQ ID NO: 19446
  Probe

SEQ ID NO: 30723 - DNA, 36 bp, Artificial Sequence
  Probe
ctaatccattgtgctttgcacgcgtgggttcgaatc

SEQ ID NO: 30724 - DNA, 50 bp, Artificial Sequence
  Probe
ctaatccattgtgctttgcacgcgtgggttcgaatcccatcctcgtcggc

SEQ ID NO: 30725 - DNA, 16 bp, Artificial Sequence
  Probe
ctaatggataaggcac

SEQ ID NO: 30726 - DNA, 17 bp, Artificial Sequence
  Probe
ctaatggataaggcact

SEQ ID NO: 30727 - DNA, 18 bp, Artificial Sequence
  Probe
ctaatggataaggcactg

SEQ ID NO: 30728 - DNA, 19 bp, Artificial Sequence
  Probe
ctaatggataaggcactgg

SEQ ID NO: 30729 - DNA, 15 bp, Artificial Sequence
  Probe
ctaatggtggagtta

SEQ ID NO: 30730 - DNA, 20 bp, Artificial Sequence
  Probe
ctaatggtggagttaaagac

SEQ ID NO: 30731 - DNA, 32 bp, Artificial Sequence
  Probe
ctaatggtggagttaaagactttttctctgat

SEQ ID NO: 30732 - DNA, 17 bp, Artificial Sequence
  Probe
ctaccccctctagagcc

SEQ ID NO: 30733 - DNA, 36 bp, Artificial Sequence
  Probe
ctacgggagcccggatagctcagtcggtagagcatc

SEQ ID NO: 30734 - DNA, 17 bp, Artificial Sequence
  Probe
ctactataaccacccta

SEQ ID NO: 30735 - DNA, 22 bp, Artificial Sequence
  Probe
ctagccccaaacccactccacc

SEQ ID NO: 30736 - DNA, 23 bp, Artificial Sequence
  Probe
ctagccccaaacccactccacct

SEQ ID NO: 30737 - DNA, 17 bp, Artificial Sequence
  Probe
ctagcctttctattagc

SEQ ID NO: 30738 - DNA, 18 bp, Artificial Sequence
  Probe
ctagctcagtcggtagag

SEQ ID NO: 30739 - DNA, 26 bp, Artificial Sequence
  Probe
ctagctcagtcggtagagcatgagac

SEQ ID NO: 30740 - DNA, 27 bp, Artificial Sequence
  Probe
ctagctcagtcggtagagcatgagact

SEQ ID NO: 30741 - DNA, 29 bp, Artificial Sequence
  Probe
ctagctcagtcggtagagcatgggactct

SEQ ID NO: 30742 - DNA, 22 bp, Artificial Sequence
  Probe
ctaggactatgagaatcgaacc

SEQ ID NO: 30743 - DNA, 23 bp, Artificial Sequence
  Probe
ctaggactatgagaatcgaaccc

SEQ ID NO: 30744 - DNA, 17 bp, Artificial Sequence
  Probe
ctaggggtatgattctc

SEQ ID NO: 30745 - DNA, 20 bp, Artificial Sequence
  Probe
ctaggggtatgattctcgct

SEQ ID NO: 30746 - DNA, 21 bp, Artificial Sequence
  Probe
ctaggggtatgattctcgctt

SEQ ID NO: 30747 - DNA, 23 bp, Artificial Sequence
  Probe
ctagtaaacaggagatcctgggt

SEQ ID NO: 30748 - DNA, 38 bp, Artificial Sequence; identical to SEQ ID NO: 13244
  Probe

SEQ ID NO: 30749 - DNA, 36 bp, Artificial Sequence
  Probe
ctataagcattggtggttcagtggtagaattctcgc

SEQ ID NO: 30750 - DNA, 37 bp, Artificial Sequence
  Probe
ctataagcattggtggttcagtggtagaattctcgcc

SEQ ID NO: 30751 - DNA, 38 bp, Artificial Sequence
  Probe
ctataagcattggtggttcagtggtagaattctcgcct

SEQ ID NO: 30752 - DNA, 16 bp, Artificial Sequence
  Probe
ctatagcaccccctct

SEQ ID NO: 30753 - DNA, 19 bp, Artificial Sequence
  Probe
ctatagcaccccctctacc

SEQ ID NO: 30754 - DNA, 20 bp, Artificial Sequence
  Probe
ctatagcaccccctctaccc

SEQ ID NO: 30755 - DNA, 21 bp, Artificial Sequence
  Probe
ctatagcaccccctctacccc

SEQ ID NO: 30756 - DNA, 22 bp, Artificial Sequence
  Probe
ctatagcaccccctctaccccc

SEQ ID NO: 30757 - DNA, 23 bp, Artificial Sequence
  Probe
ctatagcaccccctctaccccct

SEQ ID NO: 30758 - DNA, 25 bp, Artificial Sequence
  Probe
ctatagcaccccctctaccccctct

SEQ ID NO: 30759 - DNA, 26 bp, Artificial Sequence
  Probe
ctatagcaccccctctaccccctcta

SEQ ID NO: 30760 - DNA, 28 bp, Artificial Sequence
  Probe
ctatagcaccccctctaccccctctaga

SEQ ID NO: 30761 - DNA, 31 bp, Artificial Sequence
  Probe
ctatagcaccccctctaccccctctagagcc

SEQ ID NO: 30762 - DNA, 15 bp, Artificial Sequence
  Probe
ctatccattggtctt

SEQ ID NO: 30763 - DNA, 16 bp, Artificial Sequence
  Probe
ctatccattggtctta

SEQ ID NO: 30764 - DNA, 17 bp, Artificial Sequence
  Probe
ctatccattggtcttag

SEQ ID NO: 30765 - DNA, 20 bp, Artificial Sequence
  Probe
ctatccattggtcttaggcc

SEQ ID NO: 30766 - DNA, 23 bp, Artificial Sequence
  Probe
ctatccattggtcttaggcccca

SEQ ID NO: 30767 - DNA, 36 bp, Artificial Sequence
  Probe
ctatccattggtcttaggccccaaaaattttggtgc

SEQ ID NO: 30768 - DNA, 15 bp, Artificial Sequence
  Probe
ctatcgggcccatac

SEQ ID NO: 30769 - DNA, 16 bp, Artificial Sequence
  Probe
ctatcgggcccatacc

SEQ ID NO: 30770 - DNA, 17 bp, Artificial Sequence
  Probe
ctatcgggcccataccc

SEQ ID NO: 30771 - DNA, 31 bp, Artificial Sequence
  Probe
ctatcgggcccataccccgaaaatgttggtt

SEQ ID NO: 30772 - DNA, 17 bp, Artificial Sequence
  Probe
ctatctccccttttata

SEQ ID NO: 30773 - DNA, 18 bp, Artificial Sequence
  Probe
ctatctccccttttatac

SEQ ID NO: 30774 - DNA, 19 bp, Artificial Sequence
  Probe
ctatctccccttttatact

SEQ ID NO: 30775 - DNA, 23 bp, Artificial Sequence
  Probe
ctatctccccttttatactaata

SEQ ID NO: 30776 - DNA, 15 bp, Artificial Sequence
  Probe
ctatgagaatcgaac

SEQ ID NO: 30777 - DNA, 16 bp, Artificial Sequence
  Probe
ctatgagaatcgaacc

SEQ ID NO: 30778 - DNA, 17 bp, Artificial Sequence
  Probe
ctatgagaatcgaaccc

SEQ ID NO: 30779 - DNA, 25 bp, Artificial Sequence
  Probe
ctatgagaatcgaacccatccctga

SEQ ID NO: 30780 - DNA, 26 bp, Artificial Sequence
  Probe
ctatgagaatcgaacccatccctgag

SEQ ID NO: 30781 - DNA, 27 bp, Artificial Sequence
  Probe
ctatgagaatcgaacccatccctgaga

SEQ ID NO: 30782 - DNA, 35 bp, Artificial Sequence
  Probe
ctcaaagcaatacactgaaaatgtttagacgggct

SEQ ID NO: 30783 - DNA, 36 bp, Artificial Sequence
  Probe
ctcaaagcaatacactgaaaatgtttagacgggctc

SEQ ID NO: 30784 - DNA, 15 bp, Artificial Sequence
  Probe
ctcacaagaactgct

SEQ ID NO: 30785 - DNA, 20 bp, Artificial Sequence
  Probe
ctcacaagaactgctaactc

SEQ ID NO: 30786 - DNA, 21 bp, Artificial Sequence
  Probe
ctcacaagaactgctaactca

SEQ ID NO: 30787 - DNA, 23 bp, Artificial Sequence
  Probe
ctcacaagaactgctaactcatg

SEQ ID NO: 30788 - DNA, 25 bp, Artificial Sequence
  Probe
ctcacaagaactgctaactcatgcc

SEQ ID NO: 30789 - DNA, 26 bp, Artificial Sequence
  Probe
ctcacaagaactgctaactcatgccc

SEQ ID NO: 30790 - DNA, 28 bp, Artificial Sequence
  Probe
ctcacaagaactgctaactcatgccccc

SEQ ID NO: 30791 - DNA, 33 bp, Artificial Sequence
  Probe
ctcacaagaactgctaactcatgcccccatgtc

SEQ ID NO: 30792 - DNA, 38 bp, Artificial Sequence
  Probe
ctcacaagaactgctaactcatgcccccatgtctaaca

SEQ ID NO: 30793 - DNA, 23 bp, Artificial Sequence
  Probe
ctcacacgcgaaaggtccccggt

SEQ ID NO: 30794 - DNA, 22 bp, Artificial Sequence
  Probe
ctcaccgccgcagcccgggttt

SEQ ID NO: 30795 - DNA, 15 bp, Artificial Sequence
  Probe
ctcaccgccgcggcc

SEQ ID NO: 30796 - DNA, 16 bp, Artificial Sequence
  Probe
ctcaccgccgcggccc

SEQ ID NO: 30797 - DNA, 17 bp, Artificial Sequence
  Probe
ctcaccgccgcggcccg

SEQ ID NO: 30798 - DNA, 20 bp, Artificial Sequence
  Probe
ctcaccgccgcggcccgggt

SEQ ID NO: 30799 - DNA, 21 bp, Artificial Sequence
  Probe
ctcaccgccgcggcccgggtt

SEQ ID NO: 30800 - DNA, 22 bp, Artificial Sequence
  Probe
ctcaccgccgcggcccgggttc

SEQ ID NO: 30801 - DNA, 40 bp, Artificial Sequence
  Probe
ctcaccgccgcggcccgggttcgattcccggtcagggaaa

SEQ ID NO: 30802 - DNA, 42 bp, Artificial Sequence; identical to SEQ ID NO: 19506
  Probe

SEQ ID NO: 30803 - DNA, 40 bp, Artificial Sequence
  Probe
ctcaccgccgcggcccgggttcgattcccggtcagggaag

SEQ ID NO: 30804 - DNA, 41 bp, Artificial Sequence
  Probe
ctcaccgccgcggcccgggttcgattcccggtcagggaagc

SEQ ID NO: 30805 - DNA, 42 bp, Artificial Sequence; identical to SEQ ID NO: 19507
  Probe

SEQ ID NO: 30806 - DNA, 40 bp, Artificial Sequence
  Probe
ctcaccgccgcggcccgggttcgattcccggtcagggaat

SEQ ID NO: 30807 - DNA, 42 bp, Artificial Sequence; identical to SEQ ID NO: 19509
  Probe

SEQ ID NO: 30808 - DNA, 18 bp, Artificial Sequence
  Probe
ctcacctggagcatgttt

SEQ ID NO: 30809 - DNA, 19 bp, Artificial Sequence
  Probe
ctcacctggagcatgtttt

SEQ ID NO: 30810 - DNA, 20 bp, Artificial Sequence
  Probe
ctcacctggagcatgttttc

SEQ ID NO: 30811 - DNA, 21 bp, Artificial Sequence
  Probe
ctcacctggagcatgttttct

SEQ ID NO: 30812 - DNA, 22 bp, Artificial Sequence
  Probe
ctcacctggagcatgttttctt

SEQ ID NO: 30813 - DNA, 17 bp, Artificial Sequence
  Probe
ctcagaaggtctcactt

SEQ ID NO: 30814 - DNA, 18 bp, Artificial Sequence
  Probe
ctcagaaggtctcacttt

SEQ ID NO: 30815 - DNA, 19 bp, Artificial Sequence
  Probe
ctcagaaggtctcactttt

SEQ ID NO: 30816 - DNA, 22 bp, Artificial Sequence
  Probe
ctcagggatgggttcgattctc

SEQ ID NO: 30817 - DNA, 29 bp, Artificial Sequence
  Probe
ctcagggatgggttcgattctcatagtcc

SEQ ID NO: 30818 - DNA, 30 bp, Artificial Sequence; identical to SEQ ID NO: 13248
  Probe

SEQ ID NO: 30819 - DNA, 23 bp, Artificial Sequence
  Probe
ctcaggggttagagcactggtct

SEQ ID NO: 30820 - DNA, 19 bp, Artificial Sequence
  Probe
ctcagtaagttgcaatact

SEQ ID NO: 30821 - DNA, 28 bp, Artificial Sequence
  Probe
ctcagtaagttgcaatacttaatttctg

SEQ ID NO: 30822 - DNA, 23 bp, Artificial Sequence
  Probe
ctcagtcggctagagcgtggtgc

SEQ ID NO: 30823 - DNA, 15 bp, Artificial Sequence
  Probe
ctcagtcggtagagc

SEQ ID NO: 30824 - DNA, 18 bp, Artificial Sequence
  Probe
ctcagtcggtagagcatc

SEQ ID NO: 30825 - DNA, 23 bp, Artificial Sequence
  Probe
ctcagtcggtagagcatgagact

SEQ ID NO: 30826 - DNA, 25 bp, Artificial Sequence
  Probe
ctcagtcggtagagcatgagactct

SEQ ID NO: 30827 - DNA, 22 bp, Artificial Sequence
  Probe
ctcagtcggtagagcatgggac

SEQ ID NO: 30828 - DNA, 25 bp, Artificial Sequence
  Probe
ctcagtcggtagagcatgggactct

SEQ ID NO: 30829 - DNA, 32 bp, Artificial Sequence
  Probe
ctcagtcggtagagcatgggactcttaatccc

SEQ ID NO: 30830 - DNA, 23 bp, Artificial Sequence
  Probe
ctcataatctgaaggtcctgagt

SEQ ID NO: 30831 - DNA, 21 bp, Artificial Sequence
  Probe
ctcatgcccccatgtctaaca

SEQ ID NO: 30832 - DNA, 24 bp, Artificial Sequence
  Probe
ctcatgcccccatgtctaacaaca

SEQ ID NO: 30833 - DNA, 36 bp, Artificial Sequence; identical to SEQ ID NO: 5242
  Probe

SEQ ID NO: 30834 - DNA, 38 bp, Artificial Sequence; identical to SEQ ID NO: 5244
  Probe

SEQ ID NO: 30835 - DNA, 17 bp, Artificial Sequence
  Probe
ctccagatcagaaggct

SEQ ID NO: 30836 - DNA, 22 bp, Artificial Sequence
  Probe
ctccagatcagaaggctgcgtg

SEQ ID NO: 30837 - DNA, 15 bp, Artificial Sequence
  Probe
ctcccgccttttttc

SEQ ID NO: 30838 - DNA, 16 bp, Artificial Sequence
  Probe
ctcccgccttttttcc

SEQ ID NO: 30839 - DNA, 17 bp, Artificial Sequence
  Probe
ctcccgccttttttccc

SEQ ID NO: 30840 - DNA, 18 bp, Artificial Sequence
  Probe
ctcccgccttttttcccg

SEQ ID NO: 30841 - DNA, 19 bp, Artificial Sequence
  Probe
ctcccgccttttttcccgg

SEQ ID NO: 30842 - DNA, 20 bp, Artificial Sequence
  Probe
ctcccgccttttttcccggc

SEQ ID NO: 30843 - DNA, 21 bp, Artificial Sequence
  Probe
ctcccgccttttttcccggcg

SEQ ID NO: 30844 - DNA, 25 bp, Artificial Sequence
  Probe
ctcccgccttttttcccggcggcgg

SEQ ID NO: 30845 - DNA, 26 bp, Artificial Sequence
  Probe
ctcccgccttttttcccggcggcggg

SEQ ID NO: 30846 - DNA, 28 bp, Artificial Sequence
  Probe
ctcccgccttttttcccggcggcgggag

SEQ ID NO: 30847 - DNA, 30 bp, Artificial Sequence; identical to SEQ ID NO: 5265
  Probe

SEQ ID NO: 30848 - DNA, 17 bp, Artificial Sequence
  Probe
ctcccggtatgggaaca

SEQ ID NO: 30849 - DNA, 17 bp, Artificial Sequence
  Probe
ctcccggtatgggaacg

SEQ ID NO: 30850 - DNA, 16 bp, Artificial Sequence
  Probe
ctcccggtgtgggaac

SEQ ID NO: 30851 - DNA, 17 bp, Artificial Sequence
  Probe
ctcccggtgtgggaacg

SEQ ID NO: 30852 - DNA, 34 bp, Artificial Sequence; identical to SEQ ID NO: 5267
  Probe

SEQ ID NO: 30853 - DNA, 35 bp, Artificial Sequence
  Probe
ctccctggtggtctagtggttaggattcggcgctc

SEQ ID NO: 30854 - DNA, 36 bp, Artificial Sequence
  Probe
ctccctggtggtctagtggttaggattcggcgctct

SEQ ID NO: 30855 - DNA, 19 bp, Artificial Sequence
  Probe
ctccgaggtgattttcata

SEQ ID NO: 30856 - DNA, 15 bp, Artificial Sequence
  Probe
ctccgtgccacctat

SEQ ID NO: 30857 - DNA, 16 bp, Artificial Sequence
  Probe
ctccgtgccacctatc

SEQ ID NO: 30858 - DNA, 17 bp, Artificial Sequence
  Probe
ctccgtgccacctatca

SEQ ID NO: 30859 - DNA, 19 bp, Artificial Sequence
  Probe
ctccgtgccacctatcaca

SEQ ID NO: 30860 - DNA, 20 bp, Artificial Sequence
  Probe
ctccgtgccacctatcacac

SEQ ID NO: 30861 - DNA, 21 bp, Artificial Sequence
  Probe
ctccgtgccacctatcacacc

SEQ ID NO: 30862 - DNA, 22 bp, Artificial Sequence
  Probe
ctccgtgccacctatcacaccc

SEQ ID NO: 30863 - DNA, 23 bp, Artificial Sequence
  Probe
ctccgtgccacctatcacacccc

SEQ ID NO: 30864 - DNA, 24 bp, Artificial Sequence
  Probe
ctccgtgccacctatcacacccca

SEQ ID NO: 30865 - DNA, 25 bp, Artificial Sequence
  Probe
ctccgtgccacctatcacaccccat

SEQ ID NO: 30866 - DNA, 26 bp, Artificial Sequence
  Probe
ctccgtgccacctatcacaccccatc

SEQ ID NO: 30867 - DNA, 27 bp, Artificial Sequence
  Probe
ctccgtgccacctatcacaccccatcc

SEQ ID NO: 30868 - DNA, 28 bp, Artificial Sequence
  Probe
ctccgtgccacctatcacaccccatcct

SEQ ID NO: 30869 - DNA, 29 bp, Artificial Sequence
  Probe
ctccgtgccacctatcacaccccatccta

SEQ ID NO: 30870 - DNA, 30 bp, Artificial Sequence
  Probe
ctccgtgccacctatcacaccccatcctaa

SEQ ID NO: 30871 - DNA, 31 bp, Artificial Sequence
  Probe
ctccgtgccacctatcacaccccatcctaaa

SEQ ID NO: 30872 - DNA, 32 bp, Artificial Sequence
  Probe
ctccgtgccacctatcacaccccatcctaaag

SEQ ID NO: 30873 - DNA, 15 bp, Artificial Sequence
  Probe
ctcctggctggctcg

SEQ ID NO: 30874 - DNA, 16 bp, Artificial Sequence
  Probe
ctcctggctggctcgc

SEQ ID NO: 30875 - DNA, 18 bp, Artificial Sequence
  Probe
ctcctggctggctcgcga

SEQ ID NO: 30876 - DNA, 18 bp, Artificial Sequence
  Probe
ctcctggctggctcgctt

SEQ ID NO: 30877 - DNA, 20 bp, Artificial Sequence
  Probe
ctcctggctggctcgttcga

SEQ ID NO: 30878 - DNA, 21 bp, Artificial Sequence
  Probe
ctcctggctggctcgttcgac

SEQ ID NO: 30879 - DNA, 22 bp, Artificial Sequence
  Probe
ctcctggctggctcgttcgact

SEQ ID NO: 30880 - DNA, 20 bp, Artificial Sequence
  Probe
ctcgaagatatatgtatata

SEQ ID NO: 30881 - DNA, 15 bp, Artificial Sequence
  Probe
ctcgcagcttcgctg

SEQ ID NO: 30882 - DNA, 16 bp, Artificial Sequence
  Probe
ctcgcgatgtctgttt

SEQ ID NO: 30883 - DNA, 15 bp, Artificial Sequence
  Probe
ctcgctggggcctcc

SEQ ID NO: 30884 - DNA, 23 bp, Artificial Sequence
  Probe
ctcggctttccctgctaactggg

SEQ ID NO: 30885 - DNA, 24 bp, Artificial Sequence
  Probe
ctcggctttccctgctaactgggc

SEQ ID NO: 30886 - DNA, 25 bp, Artificial Sequence
  Probe
ctcggctttccctgctaactgggct

SEQ ID NO: 30887 - DNA, 26 bp, Artificial Sequence
  Probe
ctcggctttccctgctaactgggctt

SEQ ID NO: 30888 - DNA, 27 bp, Artificial Sequence
  Probe
ctcggctttccctgctaactgggcttt

SEQ ID NO: 30889 - DNA, 28 bp, Artificial Sequence
  Probe
ctcggctttccctgctaactgggctttt

SEQ ID NO: 30890 - DNA, 29 bp, Artificial Sequence
  Probe
ctcggctttccctgctaactgggcttttt

SEQ ID NO: 30891 - DNA, 30 bp, Artificial Sequence; identical to SEQ ID NO: 19581
  Probe

SEQ ID NO: 30892 - DNA, 24 bp, Artificial Sequence
  Probe
ctcggtggaacctgcattggtttt

SEQ ID NO: 30893 - DNA, 28 bp, Artificial Sequence
  Probe
ctcggtggaaccttgaagcttttctttt

SEQ ID NO: 30894 - DNA, 23 bp, Artificial Sequence
  Probe
ctcgtaaacaggagatcctgggt

SEQ ID NO: 30895 - DNA, 16 bp, Artificial Sequence
  Probe
ctcgtcggccctgttt

SEQ ID NO: 30896 - DNA, 18 bp, Artificial Sequence
  Probe
ctcgtcggccctgtttta

SEQ ID NO: 30897 - DNA, 31 bp, Artificial Sequence; identical to SEQ ID NO: 13259
  Probe

SEQ ID NO: 30898 - DNA, 33 bp, Artificial Sequence; identical to SEQ ID NO: 819
  Probe

SEQ ID NO: 30899 - DNA, 34 bp, Artificial Sequence; identical to SEQ ID NO: 820
  Probe

SEQ ID NO: 30900 - DNA, 29 bp, Artificial Sequence
  Probe
ctcgttggtctaggggtatgattctcgct

SEQ ID NO: 30901 - DNA, 19 bp, Artificial Sequence
  Probe
ctctaccccctctagagcc

SEQ ID NO: 30902 - DNA, 36 bp, Artificial Sequence
  Probe
ctctagagcccactgtaaagctaacttagcattaac

SEQ ID NO: 30903 - DNA, 16 bp, Artificial Sequence
  Probe
ctctcaccgccgcggc

SEQ ID NO: 30904 - DNA, 17 bp, Artificial Sequence
  Probe
ctctcaccgccgcggcc

SEQ ID NO: 30905 - DNA, 19 bp, Artificial Sequence
  Probe
ctctcaccgccgcggcccg

SEQ ID NO: 30906 - DNA, 22 bp, Artificial Sequence
  Probe
ctctcaccgccgcggcccgggt

SEQ ID NO: 30907 - DNA, 36 bp, Artificial Sequence
  Probe
ctctcaccgccgcggcccgggttcgattcccggtca

SEQ ID NO: 30908 - DNA, 44 bp, Artificial Sequence
  Probe
ctctcaccgccgcggcccgggttcgattcccggtcagggaaaga

SEQ ID NO: 30909 - DNA, 44 bp, Artificial Sequence; identical to SEQ ID NO: 19591
  Probe

SEQ ID NO: 30910 - DNA, 44 bp, Artificial Sequence
  Probe
ctctcaccgccgcggcccgggttcgattcccggtcagggaatga

SEQ ID NO: 30911 - DNA, 15 bp, Artificial Sequence
  Probe
ctctgaatccagcga

SEQ ID NO: 30912 - DNA, 18 bp, Artificial Sequence
  Probe
ctctgaatccagcgatcc

SEQ ID NO: 30913 - DNA, 20 bp, Artificial Sequence
  Probe
ctctgaatccagcgatccga

SEQ ID NO: 30914 - DNA, 21 bp, Artificial Sequence
  Probe
ctctgaatccagcgatccgag

SEQ ID NO: 30915 - DNA, 22 bp, Artificial Sequence
  Probe
ctctgaatccagcgatccgagt

SEQ ID NO: 30916 - DNA, 23 bp, Artificial Sequence
  Probe
ctctgaatccagcgatccgagtt

SEQ ID NO: 30917 - DNA, 33 bp, Artificial Sequence
  Probe
ctctgaatccagcgatccgagttcaaatctcgg

SEQ ID NO: 30918 - DNA, 33 bp, Artificial Sequence
  Probe
ctctgaatccagcgatccgagttcgagtctcgg

SEQ ID NO: 30919 - DNA, 15 bp, Artificial Sequence
  Probe
ctctgcgttgtggcc

SEQ ID NO: 30920 - DNA, 20 bp, Artificial Sequence
  Probe
ctctgctatagactcccttt

SEQ ID NO: 30921 - DNA, 15 bp, Artificial Sequence
  Probe
ctctggactctgaat

SEQ ID NO: 30922 - DNA, 16 bp, Artificial Sequence
  Probe
ctctggactctgaatc

SEQ ID NO: 30923 - DNA, 17 bp, Artificial Sequence
  Probe
ctctggactctgaatcc

SEQ ID NO: 30924 - DNA, 31 bp, Artificial Sequence
  Probe
ctctggactctgaatccagcgatccgagttc

SEQ ID NO: 30925 - DNA, 16 bp, Artificial Sequence
  Probe
ctctggactttgaatc

SEQ ID NO: 30926 - DNA, 17 bp, Artificial Sequence
  Probe
ctctggactttgaatcc

SEQ ID NO: 30927 - DNA, 20 bp, Artificial Sequence
  Probe
ctgaaaatgtttagacgggc

SEQ ID NO: 30928 - DNA, 23 bp, Artificial Sequence
  Probe
ctgaaaatgtttagacgggctca

SEQ ID NO: 30929 - DNA, 24 bp, Artificial Sequence
  Probe
ctgaaaatgtttagacgggctcac

SEQ ID NO: 30930 - DNA, 25 bp, Artificial Sequence
  Probe
ctgaaaatgtttagacgggctcaca

SEQ ID NO: 30931 - DNA, 27 bp, Artificial Sequence
  Probe
ctgaaaatgtttagacgggctcacatc

SEQ ID NO: 30932 - DNA, 30 bp, Artificial Sequence
  Probe
ctgaaaatgtttagacgggctcacatcacc

SEQ ID NO: 30933 - DNA, 31 bp, Artificial Sequence
  Probe
ctgaaaatgtttagacgggctcacatcaccc

SEQ ID NO: 30934 - DNA, 36 bp, Artificial Sequence
  Probe
ctgaaaatgtttagacgggctcacatcaccccataa

SEQ ID NO: 30935 - DNA, 15 bp, Artificial Sequence
  Probe
ctgaaggtcctgagt

SEQ ID NO: 30936 - DNA, 36 bp, Artificial Sequence
  Probe
ctgaaggtcctgagttcgaacctcagagggggcagc

SEQ ID NO: 30937 - DNA, 15 bp, Artificial Sequence
  Probe
ctgaaggtcgtgagt

SEQ ID NO: 30938 - DNA, 16 bp, Artificial Sequence
  Probe
ctgaatccagcgatcc

SEQ ID NO: 30939 - DNA, 17 bp, Artificial Sequence
  Probe
ctgaatccagcgatccg

SEQ ID NO: 30940 - DNA, 18 bp, Artificial Sequence
  Probe
ctgaatccagcgatccga

SEQ ID NO: 30941 - DNA, 31 bp, Artificial Sequence
  Probe
ctgaatccagcgatccgagttcaaatctcgg

SEQ ID NO: 30942 - DNA, 15 bp, Artificial Sequence
  Probe
ctgacaacagaggct

SEQ ID NO: 30943 - DNA, 20 bp, Artificial Sequence
  Probe
ctgactagtctggtgttatt

SEQ ID NO: 30944 - DNA, 21 bp, Artificial Sequence
  Probe
ctgactagtctggtgttattt

SEQ ID NO: 30945 - DNA, 27 bp, Artificial Sequence
  Probe
ctgacttcggatcagaagattgagggt

SEQ ID NO: 30946 - DNA, 36 bp, Artificial Sequence
  Probe
ctgagggtccagggttcaagtccctgttcgggcggc

SEQ ID NO: 30947 - DNA, 37 bp, Artificial Sequence; identical to SEQ ID NO: 5304
  Probe

SEQ ID NO: 30948 - DNA, 36 bp, Artificial Sequence
  Probe
ctgagggtccagggttcaagtccctgttcgggcgtc

SEQ ID NO: 30949 - DNA, 18 bp, Artificial Sequence
  Probe
ctgagtgaagcattggac

SEQ ID NO: 30950 - DNA, 19 bp, Artificial Sequence
  Probe
ctgagtgaagcattggact

SEQ ID NO: 30951 - DNA, 21 bp, Artificial Sequence
  Probe
ctgagtgaagcattggactgt

SEQ ID NO: 30952 - DNA, 22 bp, Artificial Sequence
  Probe
ctgagtgaagcattggactgta

SEQ ID NO: 30953 - DNA, 23 bp, Artificial Sequence
  Probe
ctgagtgaagcattggactgtaa

SEQ ID NO: 30954 - DNA, 24 bp, Artificial Sequence
  Probe
ctgagtgaagcattggactgtaaa

SEQ ID NO: 30955 - DNA, 25 bp, Artificial Sequence
  Probe
ctgagtgaagcattggactgtaaat

SEQ ID NO: 30956 - DNA, 27 bp, Artificial Sequence
  Probe
ctgagtgaagcattggactgtaaatct

SEQ ID NO: 30957 - DNA, 36 bp, Artificial Sequence
  Probe
ctgagtgaagcattggactgtaaatctaaagacagg

SEQ ID NO: 30958 - DNA, 22 bp, Artificial Sequence
  Probe
ctgccacgcgggaggcccgggt

SEQ ID NO: 30959 - DNA, 36 bp, Artificial Sequence
  Probe
ctgcccggctagctcagtcggtagagcatgggactc

SEQ ID NO: 30960 - DNA, 15 bp, Artificial Sequence
  Probe
ctgctaactcatgcc

SEQ ID NO: 30961 - DNA, 16 bp, Artificial Sequence
  Probe
ctgctaactcatgccc

SEQ ID NO: 30962 - DNA, 17 bp, Artificial Sequence
  Probe
ctgctaactcatgcccc

SEQ ID NO: 30963 - DNA, 18 bp, Artificial Sequence
  Probe
ctgctaactcatgccccc

SEQ ID NO: 30964 - DNA, 19 bp, Artificial Sequence
  Probe
ctgctaactcatgccccca

SEQ ID NO: 30965 - DNA, 23 bp, Artificial Sequence
  Probe
ctgctaactcatgcccccatgtc

SEQ ID NO: 30966 - DNA, 24 bp, Artificial Sequence
  Probe
ctgctaactcatgcccccatgtct

SEQ ID NO: 30967 - DNA, 27 bp, Artificial Sequence
  Probe
ctgctaactcatgcccccatgtctaac

SEQ ID NO: 30968 - DNA, 28 bp, Artificial Sequence
  Probe
ctgctaactcatgcccccatgtctaaca

SEQ ID NO: 30969 - DNA, 30 bp, Artificial Sequence
  Probe
ctgctaactcatgcccccatgtctaacaac

SEQ ID NO: 30970 - DNA, 31 bp, Artificial Sequence; identical to SEQ ID NO: 5313
  Probe

SEQ ID NO: 30971 - DNA, 33 bp, Artificial Sequence
  Probe
ctgctaactcatgcccccatgtctaacaacatg

SEQ ID NO: 30972 - DNA, 36 bp, Artificial Sequence; identical to SEQ ID NO: 5314
  Probe

SEQ ID NO: 30973 - DNA, 45 bp, Artificial Sequence; identical to SEQ ID NO: 5323
  Probe

SEQ ID NO: 30974 - DNA, 15 bp, Artificial Sequence
  Probe
ctgctatcggagttt

SEQ ID NO: 30975 - DNA, 16 bp, Artificial Sequence
  Probe
ctgctatcggagtttt

SEQ ID NO: 30976 - DNA, 17 bp, Artificial Sequence
  Probe
ctgctatcggagttttt

SEQ ID NO: 30977 - DNA, 18 bp, Artificial Sequence
  Probe
ctgctatcggagtttttt

SEQ ID NO: 30978 - DNA, 19 bp, Artificial Sequence
  Probe
ctggaaagtgcacttggac

SEQ ID NO: 30979 - DNA, 20 bp, Artificial Sequence
  Probe
ctggaaagtgcacttggacg

SEQ ID NO: 30980 - DNA, 21 bp, Artificial Sequence
  Probe
ctggaaagtgcacttggacga

SEQ ID NO: 30981 - DNA, 22 bp, Artificial Sequence
  Probe
ctggaaagtgcacttggacgaa

SEQ ID NO: 30982 - DNA, 23 bp, Artificial Sequence
  Probe
ctggaaagtgcacttggacgaac

SEQ ID NO: 30983 - DNA, 24 bp, Artificial Sequence
  Probe
ctggaaagtgcacttggacgaacc

SEQ ID NO: 30984 - DNA, 25 bp, Artificial Sequence
  Probe
ctggaaagtgcacttggacgaacca

SEQ ID NO: 30985 - DNA, 15 bp, Artificial Sequence
  Probe
ctggactctgaatcc

SEQ ID NO: 30986 - DNA, 26 bp, Artificial Sequence
  Probe
ctggactctgaatccagcgatccgag

SEQ ID NO: 30987 - DNA, 29 bp, Artificial Sequence
  Probe
ctggactctgaatccagcgatccgagttc

SEQ ID NO: 30988 - DNA, 15 bp, Artificial Sequence
  Probe
ctggactttgaatcc

SEQ ID NO: 30989 - DNA, 15 bp, Artificial Sequence
  Probe
ctggagcaagaccct

SEQ ID NO: 30990 - DNA, 16 bp, Artificial Sequence
  Probe
ctggagcaagaccctt

SEQ ID NO: 30991 - DNA, 17 bp, Artificial Sequence
  Probe
ctggagcaagacccttt

SEQ ID NO: 30992 - DNA, 18 bp, Artificial Sequence
  Probe
ctggagcaagaccctttt

SEQ ID NO: 30993 - DNA, 21 bp, Artificial Sequence
  Probe
ctggcccaacccgtcatctac

SEQ ID NO: 30994 - DNA, 20 bp, Artificial Sequence
  Probe
ctggctcgcgatgtctgttt

SEQ ID NO: 30995 - DNA, 15 bp, Artificial Sequence
  Probe
ctggggattgtgggt

SEQ ID NO: 30996 - DNA, 29 bp, Artificial Sequence
  Probe
ctggtggtctagtggttaggattcggcgc

SEQ ID NO: 30997 - DNA, 31 bp, Artificial Sequence; identical to SEQ ID NO: 840
  Probe

SEQ ID NO: 30998 - DNA, 32 bp, Artificial Sequence; identical to SEQ ID NO: 841
  Probe

SEQ ID NO: 30999 - DNA, 33 bp, Artificial Sequence; identical to SEQ ID NO: 842
  Probe

SEQ ID NO: 31000 - DNA, 36 bp, Artificial Sequence; identical to SEQ ID NO: 19658
  Probe

SEQ ID NO: 31001 - DNA, 36 bp, Artificial Sequence
  Probe
ctggtgtagtggtatcatgcaagattcccattcttg

SEQ ID NO: 31002 - DNA, 36 bp, Artificial Sequence
  Probe
ctgtaaagctaacttagcattaaccttttaagttaa

SEQ ID NO: 31003 - DNA, 50 bp, Artificial Sequence; identical to SEQ ID NO: 844
  Probe

SEQ ID NO: 31004 - DNA, 28 bp, Artificial Sequence
  Probe
ctgtagtgtagtggttatcacgttcgcc

SEQ ID NO: 31005 - DNA, 29 bp, Artificial Sequence
  Probe
ctgtagtgtagtggttatcacgttcgcct

SEQ ID NO: 31006 - DNA, 15 bp, Artificial Sequence
  Probe
ctgtcacgcgggaga

SEQ ID NO: 31007 - DNA, 16 bp, Artificial Sequence
  Probe
ctgtcacgcgggagac

SEQ ID NO: 31008 - DNA, 17 bp, Artificial Sequence
  Probe
ctgtcacgcgggagacc

SEQ ID NO: 31009 - DNA, 18 bp, Artificial Sequence
  Probe
ctgtcacgcgggagaccg

SEQ ID NO: 31010 - DNA, 19 bp, Artificial Sequence
  Probe
ctgtcacgcgggagaccgg

SEQ ID NO: 31011 - DNA, 20 bp, Artificial Sequence
  Probe
ctgtcacgcgggagaccggg

SEQ ID NO: 31012 - DNA, 24 bp, Artificial Sequence
  Probe
ctgtcacgcgggagaccggggttc

SEQ ID NO: 31013 - DNA, 36 bp, Artificial Sequence; identical to SEQ ID NO: 19676
  Probe

SEQ ID NO: 31014 - DNA, 22 bp, Artificial Sequence
  Probe
ctgtgctccggagttacctcgt

SEQ ID NO: 31015 - DNA, 23 bp, Artificial Sequence
  Probe
ctgtgctccggagttacctcgtt

SEQ ID NO: 31016 - DNA, 24 bp, Artificial Sequence
  Probe
ctgtgctccggagttacctcgttt

SEQ ID NO: 31017 - DNA, 25 bp, Artificial Sequence
  Probe
ctgtgctccggagttacctcgtttt

SEQ ID NO: 31018 - DNA, 17 bp, Artificial Sequence
  Probe
ctgtgtccctagtagct

SEQ ID NO: 31019 - DNA, 18 bp, Artificial Sequence
  Probe
ctgtgtccctagtagctc

SEQ ID NO: 31020 - DNA, 23 bp, Artificial Sequence
  Probe
ctgttaaccgaaaggttggtggt

SEQ ID NO: 31021 - DNA, 36 bp, Artificial Sequence
  Probe
ctgttaactaagtgtttgtgggtttaagtcccattg

SEQ ID NO: 31022 - DNA, 36 bp, Artificial Sequence
  Probe
cttaaaactttacagtcagaggttcaattcctcttc

SEQ ID NO: 31023 - DNA, 16 bp, Artificial Sequence
  Probe
cttaacacaaagcacc

SEQ ID NO: 31024 - DNA, 17 bp, Artificial Sequence
  Probe
cttaacacaaagcaccc

SEQ ID NO: 31025 - DNA, 18 bp, Artificial Sequence
  Probe
cttaacacaaagcaccca

SEQ ID NO: 31026 - DNA, 19 bp, Artificial Sequence
  Probe
cttaacacaaagcacccaa

SEQ ID NO: 31027 - DNA, 25 bp, Artificial Sequence
  Probe
cttaacacaaagcacccaacttaca

SEQ ID NO: 31028 - DNA, 26 bp, Artificial Sequence
  Probe
cttaacacaaagcacccaacttacac

SEQ ID NO: 31029 - DNA, 27 bp, Artificial Sequence
  Probe
cttaacacaaagcacccaacttacact

SEQ ID NO: 31030 - DNA, 28 bp, Artificial Sequence
  Probe
cttaacacaaagcacccaacttacactt

SEQ ID NO: 31031 - DNA, 29 bp, Artificial Sequence
  Probe
cttaacacaaagcacccaacttacactta

SEQ ID NO: 31032 - DNA, 30 bp, Artificial Sequence
  Probe
cttaacacaaagcacccaacttacacttag

SEQ ID NO: 31033 - DNA, 32 bp, Artificial Sequence
  Probe
cttaacacaaagcacccaacttacacttagga

SEQ ID NO: 31034 - DNA, 36 bp, Artificial Sequence
  Probe
cttaacacaaagcacccaacttacacttaggagatt

SEQ ID NO: 31035 - DNA, 16 bp, Artificial Sequence
  Probe
cttaacttgaccgctc

SEQ ID NO: 31036 - DNA, 17 bp, Artificial Sequence
  Probe
cttaacttgaccgctct

SEQ ID NO: 31037 - DNA, 18 bp, Artificial Sequence
  Probe
cttaacttgaccgctctg

SEQ ID NO: 31038 - DNA, 19 bp, Artificial Sequence
  Probe
cttaacttgaccgctctga

SEQ ID NO: 31039 - DNA, 20 bp, Artificial Sequence
  Probe
cttaacttgaccgctctgag

SEQ ID NO: 31040 - DNA, 21 bp, Artificial Sequence
  Probe
cttaacttgaccgctctgagc

SEQ ID NO: 31041 - DNA, 36 bp, Artificial Sequence
  Probe
cttaacttgaccgctctgagctaaacctagccccaa

SEQ ID NO: 31042 - DNA, 36 bp, Artificial Sequence
  Probe
cttaatctcagggtcgtgggttcgagccccacgttg

SEQ ID NO: 31043 - DNA, 42 bp, Artificial Sequence
  Probe
cttaatctcagggtcgtgggttcgagccccacgttgggcgac

SEQ ID NO: 31044 - DNA, 42 bp, Artificial Sequence
  Probe
cttaatctcagggtcgtgggttcgagccccacgttgggcgct

SEQ ID NO: 31045 - DNA, 42 bp, Artificial Sequence
  Probe
cttaatctcagggtcgtgggttcgagccccacgttgggcggc

SEQ ID NO: 31046 - DNA, 43 bp, Artificial Sequence
  Probe
cttaatctcagggtcgtgggttcgagccccacgttgggcggca

SEQ ID NO: 31047 - DNA, 19 bp, Artificial Sequence
  Probe
cttaattaaagtggctgat

SEQ ID NO: 31048 - DNA, 28 bp, Artificial Sequence
  Probe
cttacacttaggagatttcaacttaact

SEQ ID NO: 31049 - DNA, 33 bp, Artificial Sequence
  Probe
cttacacttaggagatttcaacttaacttgacc

SEQ ID NO: 31050 - DNA, 36 bp, Artificial Sequence; identical to SEQ ID NO: 5368
  Probe

SEQ ID NO: 31051 - DNA, 42 bp, Artificial Sequence; identical to SEQ ID NO: 5371
  Probe

SEQ ID NO: 31052 - DNA, 43 bp, Artificial Sequence; identical to SEQ ID NO: 5372
  Probe

SEQ ID NO: 31053 - DNA, 20 bp, Artificial Sequence
  Probe
cttacgaccccttatttacc

SEQ ID NO: 31054 - DNA, 24 bp, Artificial Sequence
  Probe
cttactgcttcctgtgttcgggtc

SEQ ID NO: 31055 - DNA, 38 bp, Artificial Sequence; identical to SEQ ID NO: 19725
  Probe

SEQ ID NO: 31056 - DNA, 18 bp, Artificial Sequence
  Probe
cttagcctgtggctcgcc

SEQ ID NO: 31057 - DNA, 36 bp, Artificial Sequence
  Probe
cttagctgttaactaagtgtttgtgggtttaagtcc

SEQ ID NO: 31058 - DNA, 36 bp, Artificial Sequence
  Probe
cttagctttgggtgctaatggtggagttaaagactt

SEQ ID NO: 31059 - DNA, 16 bp, Artificial Sequence
  Probe
cttaggagatttcaac

SEQ ID NO: 31060 - DNA, 17 bp, Artificial Sequence
  Probe
cttaggagatttcaact

SEQ ID NO: 31061 - DNA, 18 bp, Artificial Sequence
  Probe
cttaggagatttcaactt

SEQ ID NO: 31062 - DNA, 22 bp, Artificial Sequence
  Probe
cttaggagatttcaacttaact

SEQ ID NO: 31063 - DNA, 23 bp, Artificial Sequence
  Probe
cttaggagatttcaacttaactt

SEQ ID NO: 31064 - DNA, 24 bp, Artificial Sequence
  Probe
cttaggagatttcaacttaacttg

SEQ ID NO: 31065 - DNA, 26 bp, Artificial Sequence
  Probe
cttaggagatttcaacttaacttgac

SEQ ID NO: 31066 - DNA, 27 bp, Artificial Sequence
  Probe
cttaggagatttcaacttaacttgacc

SEQ ID NO: 31067 - DNA, 28 bp, Artificial Sequence
  Probe
cttaggagatttcaacttaacttgaccg

SEQ ID NO: 31068 - DNA, 29 bp, Artificial Sequence
  Probe
cttaggagatttcaacttaacttgaccgc

SEQ ID NO: 31069 - DNA, 30 bp, Artificial Sequence; identical to SEQ ID NO: 5384
  Probe

SEQ ID NO: 31070 - DNA, 31 bp, Artificial Sequence; identical to SEQ ID NO: 5385
  Probe

SEQ ID NO: 31071 - DNA, 32 bp, Artificial Sequence; identical to SEQ ID NO: 5386
  Probe

SEQ ID NO: 31072 - DNA, 33 bp, Artificial Sequence; identical to SEQ ID NO: 5387
  Probe

SEQ ID NO: 31073 - DNA, 35 bp, Artificial Sequence; identical to SEQ ID NO: 5389
  Probe

SEQ ID NO: 31074 - DNA, 36 bp, Artificial Sequence; identical to SEQ ID NO: 5390
  Probe

SEQ ID NO: 31075 - DNA, 37 bp, Artificial Sequence; identical to SEQ ID NO: 5391
  Probe

SEQ ID NO: 31076 - DNA, 36 bp, Artificial Sequence
  Probe
cttaggccccaaaaattttggtgcaactccaaataa

SEQ ID NO: 31077 - DNA, 23 bp, Artificial Sequence
  Probe
cttagttggttaaagcgcctgtc

SEQ ID NO: 31078 - DNA, 24 bp, Artificial Sequence
  Probe
cttagttggttaaagcgcctgtct

SEQ ID NO: 31079 - DNA, 25 bp, Artificial Sequence
  Probe
cttatttctaggactatgagaatcg

SEQ ID NO: 31080 - DNA, 28 bp, Artificial Sequence
  Probe
cttatttctaggactatgagaatcgaac

SEQ ID NO: 31081 - DNA, 29 bp, Artificial Sequence
  Probe
cttatttctaggactatgagaatcgaacc

SEQ ID NO: 31082 - DNA, 30 bp, Artificial Sequence
  Probe
cttatttctaggactatgagaatcgaaccc

SEQ ID NO: 31083 - DNA, 31 bp, Artificial Sequence
  Probe
cttatttctaggactatgagaatcgaaccca

SEQ ID NO: 31084 - DNA, 33 bp, Artificial Sequence
  Probe
cttatttctaggactatgagaatcgaacccatc

SEQ ID NO: 31085 - DNA, 34 bp, Artificial Sequence
  Probe
cttatttctaggactatgagaatcgaacccatcc

SEQ ID NO: 31086 - DNA, 36 bp, Artificial Sequence
  Probe
cttatttctaggactatgagaatcgaacccatccct

SEQ ID NO: 31087 - DNA, 19 bp, Artificial Sequence
  Probe
cttcaaacctgccggggct

SEQ ID NO: 31088 - DNA, 36 bp, Artificial Sequence
  Probe
cttcaaagccctcagtaagttgcaatacttaatttc

SEQ ID NO: 31089 - DNA, 20 bp, Artificial Sequence
  Probe
cttcagctatagggtggaga

SEQ ID NO: 31090 - DNA, 36 bp, Artificial Sequence
  Probe
cttcaggggcccggatagctcagtcggtagagcatc

SEQ ID NO: 31091 - DNA, 16 bp, Artificial Sequence
  Probe
cttccaagcagttgac

SEQ ID NO: 31092 - DNA, 17 bp, Artificial Sequence
  Probe
cttccaagcagttgacc

SEQ ID NO: 31093 - DNA, 20 bp, Artificial Sequence
  Probe
cttccaagcagttgacccgg

SEQ ID NO: 31094 - DNA, 22 bp, Artificial Sequence
  Probe
cttccaagcagttgacccgggc

SEQ ID NO: 31095 - DNA, 24 bp, Artificial Sequence
  Probe
cttccaagcagttgacccgggttc

SEQ ID NO: 31096 - DNA, 36 bp, Artificial Sequence
  Probe
cttccaattaactagttttgacaacattcaaaaaag

SEQ ID NO: 31097 - DNA, 36 bp, Artificial Sequence
  Probe
cttccctggtggtctagtggttaggattcggcgctc

SEQ ID NO: 31098 - DNA, 23 bp, Artificial Sequence
  Probe
cttcggatcagaagattgagggt

SEQ ID NO: 31099 - DNA, 20 bp, Artificial Sequence
  Probe
cttcgggtgcgagaggtccc

SEQ ID NO: 31100 - DNA, 24 bp, Artificial Sequence
  Probe
cttcgggtgcgagaggtcccgggt

SEQ ID NO: 31101 - DNA, 24 bp, Artificial Sequence
  Probe
cttcgttggctctgcctgccaact

SEQ ID NO: 31102 - DNA, 31 bp, Artificial Sequence
  Probe
cttctgtagtgtagtggttatcacgttcgcc

SEQ ID NO: 31103 - DNA, 32 bp, Artificial Sequence
  Probe
cttctgtagtgtagtggttatcacgttcgcct

SEQ ID NO: 31104 - DNA, 36 bp, Artificial Sequence
  Probe
cttctgtagtgtagtggttatcacgttcgcctcaca

SEQ ID NO: 31105 - DNA, 23 bp, Artificial Sequence
  Probe
cttgaccgctctgagctaaacct

SEQ ID NO: 31106 - DNA, 36 bp, Artificial Sequence
  Probe
cttggacgaaccagagtgtagcttaacacaaagcac

SEQ ID NO: 31107 - DNA, 22 bp, Artificial Sequence
  Probe
cttggcttcctcgtgttgagga

SEQ ID NO: 31108 - DNA, 23 bp, Artificial Sequence
  Probe
cttgtaaacaggagatcctgggt

SEQ ID NO: 31109 - DNA, 23 bp, Artificial Sequence
  Probe
cttgtaaaccaggggtcgcgagt

SEQ ID NO: 31110 - DNA, 22 bp, Artificial Sequence
  Probe
cttgtaaaccggagatgaaaac

SEQ ID NO: 31111 - DNA, 23 bp, Artificial Sequence
  Probe
cttgtaaaccggagatgaaaacc

SEQ ID NO: 31112 - DNA, 24 bp, Artificial Sequence
  Probe
cttgtaaaccggagatgaaaacct

SEQ ID NO: 31113 - DNA, 36 bp, Artificial Sequence
  Probe
cttgtaaaccggagatgaaaacctttttccaaggac

SEQ ID NO: 31114 - DNA, 15 bp, Artificial Sequence
  Probe
cttgttcgagctttt

SEQ ID NO: 31115 - DNA, 15 bp, Artificial Sequence
  Probe
ctttaactccaccat

SEQ ID NO: 31116 - DNA, 16 bp, Artificial Sequence
  Probe
ctttacagtcagaggt

SEQ ID NO: 31117 - DNA, 17 bp, Artificial Sequence
  Probe
ctttacagtcagaggtt

SEQ ID NO: 31118 - DNA, 18 bp, Artificial Sequence
  Probe
ctttacagtcagaggttc

SEQ ID NO: 31119 - DNA, 24 bp, Artificial Sequence
  Probe
ctttacagtcagaggttcaattcc

SEQ ID NO: 31120 - DNA, 29 bp, Artificial Sequence
  Probe
ctttacagtcagaggttcaattcctcttc

SEQ ID NO: 31121 - DNA, 15 bp, Artificial Sequence
  Probe
ctttcaccgccgcgg

SEQ ID NO: 31122 - DNA, 16 bp, Artificial Sequence
  Probe
ctttcaccgccgcggc

SEQ ID NO: 31123 - DNA, 17 bp, Artificial Sequence
  Probe
ctttcaccgccgcggcc

SEQ ID NO: 31124 - DNA, 18 bp, Artificial Sequence
  Probe
ctttcaccgccgcggccc

SEQ ID NO: 31125 - DNA, 19 bp, Artificial Sequence
  Probe
ctttcaccgccgcggcccg

SEQ ID NO: 31126 - DNA, 36 bp, Artificial Sequence
  Probe
ctttcaccgccgcggcccgggttcgattcccggtca

SEQ ID NO: 31127 - DNA, 24 bp, Artificial Sequence
  Probe
ctttgaatccagcaatccgagttc

SEQ ID NO: 31128 - DNA, 15 bp, Artificial Sequence
  Probe
ctttgaatccagcga

SEQ ID NO: 31129 - DNA, 16 bp, Artificial Sequence
  Probe
ctttgaatccagcgat

SEQ ID NO: 31130 - DNA, 18 bp, Artificial Sequence
  Probe
ctttgaatccagcgatcc

SEQ ID NO: 31131 - DNA, 19 bp, Artificial Sequence
  Probe
ctttgaatccagcgatccg

SEQ ID NO: 31132 - DNA, 20 bp, Artificial Sequence
  Probe
ctttgaatccagcgatccga

SEQ ID NO: 31133 - DNA, 24 bp, Artificial Sequence
  Probe
ctttgaatccagcgatccgagttc

SEQ ID NO: 31134 - DNA, 27 bp, Artificial Sequence
  Probe
ctttgatagagtaaataataggagctt

SEQ ID NO: 31135 - DNA, 33 bp, Artificial Sequence
  Probe
ctttgatagagtaaataataggagcttaaaccc

SEQ ID NO: 31136 - DNA, 24 bp, Artificial Sequence
  Probe
ctttgcacgtatgaggccccgggt

SEQ ID NO: 31137 - DNA, 25 bp, Artificial Sequence
  Probe
ctttgcacgtatgaggccccgggtt

SEQ ID NO: 31138 - DNA, 26 bp, Artificial Sequence
  Probe
ctttgcacgtatgaggccccgggttc

SEQ ID NO: 31139 - DNA, 24 bp, Artificial Sequence
  Probe
ctttgcatgtatgaggccccgggt

SEQ ID NO: 31140 - DNA, 20 bp, Artificial Sequence
  Probe
ctttgggtgcgagaggtccc

SEQ ID NO: 31141 - DNA, 23 bp, Artificial Sequence
  Probe
ctttgggtgctaatggtggagtt

SEQ ID NO: 31142 - DNA, 24 bp, Artificial Sequence
  Probe
ctttgggtgctaatggtggagtta

SEQ ID NO: 31143 - DNA, 42 bp, Artificial Sequence
  Probe
ctttgggtgctaatggtggagttaaagactttttctctgatt

SEQ ID NO: 31144 - DNA, 25 bp, Artificial Sequence
  Probe
ctttgtcaaagttaaattataggct

SEQ ID NO: 31145 - DNA, 27 bp, Artificial Sequence
  Probe
ctttgtcaaagttaaattataggctaa

SEQ ID NO: 31146 - DNA, 36 bp, Artificial Sequence
  Probe
ctttgtcaaagttaaattataggctaaatcctatat

SEQ ID NO: 31147 - DNA, 29 bp, Artificial Sequence
  Probe
cttttaaaggataacagctatccattggt

SEQ ID NO: 31148 - DNA, 30 bp, Artificial Sequence
  Probe
cttttaaaggataacagctatccattggtc

SEQ ID NO: 31149 - DNA, 31 bp, Artificial Sequence
  Probe
cttttaaaggataacagctatccattggtct

SEQ ID NO: 31150 - DNA, 25 bp, Artificial Sequence
  Probe
cttttaagttaaagattaagagaac

SEQ ID NO: 31151 - DNA, 26 bp, Artificial Sequence
  Probe
cttttaagttaaagattaagagaacc

SEQ ID NO: 31152 - DNA, 27 bp, Artificial Sequence
  Probe
cttttaagttaaagattaagagaacca

SEQ ID NO: 31153 - DNA, 31 bp, Artificial Sequence
  Probe
cttttaagttaaagattaagagaaccaacac

SEQ ID NO: 31154 - DNA, 32 bp, Artificial Sequence
  Probe
cttttaagttaaagattaagagaaccaacacc

SEQ ID NO: 31155 - DNA, 33 bp, Artificial Sequence
  Probe
cttttaagttaaagattaagagaaccaacacct

SEQ ID NO: 31156 - DNA, 34 bp, Artificial Sequence
  Probe
cttttaagttaaagattaagagaaccaacacctc

SEQ ID NO: 31157 - DNA, 36 bp, Artificial Sequence
  Probe
cttttaagttaaagattaagagaaccaacacctctt

SEQ ID NO: 31158 - DNA, 45 bp, Artificial Sequence
  Probe
cttttaagttaaagattaagagaaccaacacctctttacagtgaa

SEQ ID NO: 31159 - DNA, 46 bp, Artificial Sequence
  Probe
cttttaagttaaagattaagagaaccaacacctctttacagtgaaa

SEQ ID NO: 31160 - DNA, 18 bp, Artificial Sequence
  Probe
cttttaatctgagggtcc

SEQ ID NO: 31161 - DNA, 19 bp, Artificial Sequence
  Probe
cttttaatctgagggtcca

SEQ ID NO: 31162 - DNA, 30 bp, Artificial Sequence; identical to SEQ ID NO: 19779
  Probe

SEQ ID NO: 31163 - DNA, 18 bp, Artificial Sequence
  Probe
cttttcgagatactgttt

SEQ ID NO: 31164 - DNA, 15 bp, Artificial Sequence
  Probe
ctttttccaaggaca

SEQ ID NO: 31165 - DNA, 16 bp, Artificial Sequence
  Probe
cttttttcccggcggc

SEQ ID NO: 31166 - DNA, 23 bp, Artificial Sequence
  Probe
cttttttcccggcggcgggagaa

SEQ ID NO: 31167 - DNA, 24 bp, Artificial Sequence
  Probe
cttttttcccggcggcgggagaag

SEQ ID NO: 31168 - DNA, 15 bp, Artificial Sequence
  Probe
gaaaaagtcatggag

SEQ ID NO: 31169 - DNA, 16 bp, Artificial Sequence
  Probe
gaaaaagtcatggagg

SEQ ID NO: 31170 - DNA, 17 bp, Artificial Sequence
  Probe
gaaaaagtcatggaggc

SEQ ID NO: 31171 - DNA, 20 bp, Artificial Sequence
  Probe
gaaaaagtcatggaggccat

SEQ ID NO: 31172 - DNA, 23 bp, Artificial Sequence
  Probe
gaaaaagtcatggaggccatggg

SEQ ID NO: 31173 - DNA, 24 bp, Artificial Sequence
  Probe
gaaaaagtcatggaggccatgggg

SEQ ID NO: 31174 - DNA, 29 bp, Artificial Sequence
  Probe
gaaaaagtcatggaggccatggggttggc

SEQ ID NO: 31175 - DNA, 30 bp, Artificial Sequence; identical to SEQ ID NO: 10057
  Probe

SEQ ID NO: 31176 - DNA, 31 bp, Artificial Sequence; identical to SEQ ID NO: 5416
  Probe

SEQ ID NO: 31177 - DNA, 32 bp, Artificial Sequence; identical to SEQ ID NO: 5417
  Probe

SEQ ID NO: 31178 - DNA, 33 bp, Artificial Sequence; identical to SEQ ID NO: 5418
  Probe

SEQ ID NO: 31179 - DNA, 37 bp, Artificial Sequence
  Probe
gaaaaagtcatggaggccatggggttggcttgaaacc

SEQ ID NO: 31180 - DNA, 50 bp, Artificial Sequence; identical to SEQ ID NO: 5419
  Probe

SEQ ID NO: 31181 - DNA, 23 bp, Artificial Sequence
  Probe
gaaaaagtctttaactccaccat

SEQ ID NO: 31182 - DNA, 18 bp, Artificial Sequence
  Probe
gaaaatgttggttatacc

SEQ ID NO: 31183 - DNA, 19 bp, Artificial Sequence
  Probe
gaaaatgttggttataccc

SEQ ID NO: 31184 - DNA, 26 bp, Artificial Sequence
  Probe
gaaaatgtttagacgggctcacatca

SEQ ID NO: 31185 - DNA, 27 bp, Artificial Sequence
  Probe
gaaaatgtttagacgggctcacatcac

SEQ ID NO: 31186 - DNA, 30 bp, Artificial Sequence; identical to SEQ ID NO: 861
  Probe

SEQ ID NO: 31187 - DNA, 31 bp, Artificial Sequence; identical to SEQ ID NO: 862
  Probe

SEQ ID NO: 31188 - DNA, 33 bp, Artificial Sequence; identical to SEQ ID NO: 864
  Probe

SEQ ID NO: 31189 - DNA, 34 bp, Artificial Sequence
  Probe
gaaaatgtttagacgggctcacatcaccccataa

SEQ ID NO: 31190 - DNA, 35 bp, Artificial Sequence
  Probe
gaaaatgtttagacgggctcacatcaccccataaa

SEQ ID NO: 31191 - DNA, 36 bp, Artificial Sequence
  Probe
gaaaatgtttagacgggctcacatcaccccataaac

SEQ ID NO: 31192 - DNA, 20 bp, Artificial Sequence
  Probe
gaaaccgggcggaaacacct

SEQ ID NO: 31193 - DNA, 29 bp, Artificial Sequence
  Probe
gaaagaacagagaatagtttaaattagaa

SEQ ID NO: 31194 - DNA, 36 bp, Artificial Sequence
  Probe
gaaagaacagagaatagtttaaattagaatcttagc

SEQ ID NO: 31195 - DNA, 19 bp, Artificial Sequence
  Probe
gaaagcatgctccagtggc

SEQ ID NO: 31196 - DNA, 20 bp, Artificial Sequence
  Probe
gaaagcatgctccagtggcg

SEQ ID NO: 31197 - DNA, 21 bp, Artificial Sequence
  Probe
gaaagcatgctccagtggcgc

SEQ ID NO: 31198 - DNA, 17 bp, Artificial Sequence
  Probe
gaaagctcacaagaact

SEQ ID NO: 31199 - DNA, 18 bp, Artificial Sequence
  Probe
gaaagctcacaagaactg

SEQ ID NO: 31200 - DNA, 19 bp, Artificial Sequence
  Probe
gaaagctcacaagaactgc

SEQ ID NO: 31201 - DNA, 25 bp, Artificial Sequence
  Probe
gaaagctcacaagaactgctaactc

SEQ ID NO: 31202 - DNA, 28 bp, Artificial Sequence
  Probe
gaaagctcacaagaactgctaactcatg

SEQ ID NO: 31203 - DNA, 30 bp, Artificial Sequence
  Probe
gaaagctcacaagaactgctaactcatgcc

SEQ ID NO: 31204 - DNA, 31 bp, Artificial Sequence; identical to SEQ ID NO: 876
  Probe

SEQ ID NO: 31205 - DNA, 36 bp, Artificial Sequence
  Probe
gaaagggagggggatgtagctcagtggtagagcgca

SEQ ID NO: 31206 - DNA, 16 bp, Artificial Sequence
  Probe
gaaagtgcacttggac

SEQ ID NO: 31207 - DNA, 17 bp, Artificial Sequence
  Probe
gaaagtgcacttggacg

SEQ ID NO: 31208 - DNA, 21 bp, Artificial Sequence
  Probe
gaaagtgcacttggacgaacc

SEQ ID NO: 31209 - DNA, 34 bp, Artificial Sequence; identical to SEQ ID NO: 19838
  Probe

SEQ ID NO: 31210 - DNA, 35 bp, Artificial Sequence
  Probe
gaaatacaacgatggtttttcatatcattggtcgt

SEQ ID NO: 31211 - DNA, 36 bp, Artificial Sequence; identical to SEQ ID NO: 19839
  Probe

SEQ ID NO: 31212 - DNA, 45 bp, Artificial Sequence; identical to SEQ ID NO: 19841
  Probe

SEQ ID NO: 31213 - DNA, 46 bp, Artificial Sequence
  Probe
gaaatacaacgatggtttttcatatcattggtcgtggttgtagtcc

SEQ ID NO: 31214 - DNA, 47 bp, Artificial Sequence
  Probe
gaaatacaacgatggtttttcatatcattggtcgtggttgtagtccg

SEQ ID NO: 31215 - DNA, 50 bp, Artificial Sequence; identical to SEQ ID NO: 5440
  Probe

SEQ ID NO: 31216 - DNA, 17 bp, Artificial Sequence
  Probe
gaacacagtacggcttg

SEQ ID NO: 31217 - DNA, 15 bp, Artificial Sequence
  Probe
gaacagggtttgtta

SEQ ID NO: 31218 - DNA, 24 bp, Artificial Sequence
  Probe
gaaccaacacctctttacagtgaa

SEQ ID NO: 31219 - DNA, 36 bp, Artificial Sequence
  Probe
gaacctgggtagctcagtaggtagaacatcagactt

SEQ ID NO: 31220 - DNA, 16 bp, Artificial Sequence
  Probe
gaactgctaactcatg

SEQ ID NO: 31221 - DNA, 17 bp, Artificial Sequence
  Probe
gaactgctaactcatgc

SEQ ID NO: 31222 - DNA, 18 bp, Artificial Sequence
  Probe
gaactgctaactcatgcc

SEQ ID NO: 31223 - DNA, 19 bp, Artificial Sequence
  Probe
gaactgctaactcatgccc

SEQ ID NO: 31224 - DNA, 20 bp, Artificial Sequence
  Probe
gaactgctaactcatgcccc

SEQ ID NO: 31225 - DNA, 21 bp, Artificial Sequence
  Probe
gaactgctaactcatgccccc

SEQ ID NO: 31226 - DNA, 22 bp, Artificial Sequence
  Probe
gaactgctaactcatgccccca

SEQ ID NO: 31227 - DNA, 26 bp, Artificial Sequence
  Probe
gaactgctaactcatgcccccatgtc

SEQ ID NO: 31228 - DNA, 27 bp, Artificial Sequence
  Probe
gaactgctaactcatgcccccatgtct

SEQ ID NO: 31229 - DNA, 29 bp, Artificial Sequence
  Probe
gaactgctaactcatgcccccatgtctaa

SEQ ID NO: 31230 - DNA, 30 bp, Artificial Sequence; identical to SEQ ID NO: 19861
  Probe

SEQ ID NO: 31231 - DNA, 31 bp, Artificial Sequence; identical to SEQ ID NO: 19862
  Probe

SEQ ID NO: 31232 - DNA, 33 bp, Artificial Sequence
  Probe
gaactgctaactcatgcccccatgtctaacaac

SEQ ID NO: 31233 - DNA, 34 bp, Artificial Sequence; identical to SEQ ID NO: 19863
  Probe

SEQ ID NO: 31234 - DNA, 35 bp, Artificial Sequence
  Probe
gaactgctaactcatgcccccatgtctaacaacat

SEQ ID NO: 31235 - DNA, 36 bp, Artificial Sequence
  Probe
gaactgctaactcatgcccccatgtctaacaacatg

SEQ ID NO: 31236 - DNA, 37 bp, Artificial Sequence
  Probe
gaactgctaactcatgcccccatgtctaacaacatgg

SEQ ID NO: 31237 - DNA, 38 bp, Artificial Sequence
  Probe
gaactgctaactcatgcccccatgtctaacaacatggc

SEQ ID NO: 31238 - DNA, 39 bp, Artificial Sequence; identical to SEQ ID NO: 5463
  Probe

SEQ ID NO: 31239 - DNA, 47 bp, Artificial Sequence
  Probe
gaactgctaactcatgcccccatgtctaacaacatggctttctcaac

SEQ ID NO: 31240 - DNA, 28 bp, Artificial Sequence
  Probe
gaagaagcagcttcaaacctgccggggc

SEQ ID NO: 31241 - DNA, 29 bp, Artificial Sequence
  Probe
gaagaagcagcttcaaacctgccggggct

SEQ ID NO: 31242 - DNA, 30 bp, Artificial Sequence; identical to SEQ ID NO: 5478
  Probe

SEQ ID NO: 31243 - DNA, 31 bp, Artificial Sequence; identical to SEQ ID NO: 5479
  Probe

SEQ ID NO: 31244 - DNA, 32 bp, Artificial Sequence; identical to SEQ ID NO: 5480
  Probe

SEQ ID NO: 31245 - DNA, 24 bp, Artificial Sequence
  Probe
gaagagcccggatagctcagtcgg

SEQ ID NO: 31246 - DNA, 25 bp, Artificial Sequence
  Probe
gaagagcccggatagctcagtcggt

SEQ ID NO: 31247 - DNA, 26 bp, Artificial Sequence
  Probe
gaagagcccggatagctcagtcggta

SEQ ID NO: 31248 - DNA, 27 bp, Artificial Sequence
  Probe
gaagagcccggatagctcagtcggtag

SEQ ID NO: 31249 - DNA, 28 bp, Artificial Sequence
  Probe
gaagagcccggatagctcagtcggtaga

SEQ ID NO: 31250 - DNA, 29 bp, Artificial Sequence
  Probe
gaagagcccggatagctcagtcggtagag

SEQ ID NO: 31251 - DNA, 30 bp, Artificial Sequence; identical to SEQ ID NO: 19886
  Probe

SEQ ID NO: 31252 - DNA, 31 bp, Artificial Sequence; identical to SEQ ID NO: 19887
  Probe

SEQ ID NO: 31253 - DNA, 32 bp, Artificial Sequence; identical to SEQ ID NO: 19888
  Probe

SEQ ID NO: 31254 - DNA, 33 bp, Artificial Sequence
  Probe
gaagagcccggatagctcagtcggtagagcatc

SEQ ID NO: 31255 - DNA, 34 bp, Artificial Sequence; identical to SEQ ID NO: 19889
  Probe

SEQ ID NO: 31256 - DNA, 35 bp, Artificial Sequence
  Probe
gaagagcccggatagctcagtcggtagagcatcag

SEQ ID NO: 31257 - DNA, 36 bp, Artificial Sequence; identical to SEQ ID NO: 19890
  Probe

SEQ ID NO: 31258 - DNA, 37 bp, Artificial Sequence; identical to SEQ ID NO: 19891
  Probe

SEQ ID NO: 31259 - DNA, 38 bp, Artificial Sequence; identical to SEQ ID NO: 19892
  Probe

SEQ ID NO: 31260 - DNA, 39 bp, Artificial Sequence; identical to SEQ ID NO: 19893
  Probe

SEQ ID NO: 31261 - DNA, 40 bp, Artificial Sequence; identical to SEQ ID NO: 19894
  Probe

SEQ ID NO: 31262 - DNA, 41 bp, Artificial Sequence; identical to SEQ ID NO: 19895
  Probe

SEQ ID NO: 31263 - DNA, 42 bp, Artificial Sequence; identical to SEQ ID NO: 19896
  Probe

SEQ ID NO: 31264 - DNA, 43 bp, Artificial Sequence
  Probe
gaagagcccggatagctcagtcggtagagcatcagacttttaa

SEQ ID NO: 31265 - DNA, 44 bp, Artificial Sequence; identical to SEQ ID NO: 19897
  Probe

SEQ ID NO: 31266 - DNA, 31 bp, Artificial Sequence; identical to SEQ ID NO: 884
  Probe

SEQ ID NO: 31267 - DNA, 34 bp, Artificial Sequence; identical to SEQ ID NO: 19911
  Probe

SEQ ID NO: 31268 - DNA, 25 bp, Artificial Sequence
  Probe
gaagcagcttcaaacctgccggggc

SEQ ID NO: 31269 - DNA, 26 bp, Artificial Sequence
  Probe
gaagcagcttcaaacctgccggggct

SEQ ID NO: 31270 - DNA, 27 bp, Artificial Sequence
  Probe
gaagcagcttcaaacctgccggggctt

SEQ ID NO: 31271 - DNA, 29 bp, Artificial Sequence
  Probe
gaagcagcttcaaacctgccggggcttct

SEQ ID NO: 31272 - DNA, 15 bp, Artificial Sequence
  Probe
gaagcattggactgt

SEQ ID NO: 31273 - DNA, 16 bp, Artificial Sequence
  Probe
gaagcattggactgta

SEQ ID NO: 31274 - DNA, 17 bp, Artificial Sequence
  Probe
gaagcattggactgtaa

SEQ ID NO: 31275 - DNA, 18 bp, Artificial Sequence
  Probe
gaagcattggactgtaaa

SEQ ID NO: 31276 - DNA, 20 bp, Artificial Sequence
  Probe
gaagcattggactgtaaatc

SEQ ID NO: 31277 - DNA, 36 bp, Artificial Sequence
  Probe
gaagcattggactgtaaatctaaagacaggggttag

SEQ ID NO: 31278 - DNA, 36 bp, Artificial Sequence; identical to SEQ ID NO: 19919
  Probe

SEQ ID NO: 31279 - DNA, 33 bp, Artificial Sequence
  Probe
gaagccttccttcgttggctctgcctgccaact

SEQ ID NO: 31280 - DNA, 15 bp, Artificial Sequence
  Probe
gaagcgggtgctctt

SEQ ID NO: 31281 - DNA, 16 bp, Artificial Sequence
  Probe
gaagcgggtgctctta

SEQ ID NO: 31282 - DNA, 17 bp, Artificial Sequence
  Probe
gaagcgggtgctcttat

SEQ ID NO: 31283 - DNA, 18 bp, Artificial Sequence
  Probe
gaagcgggtgctcttatt

SEQ ID NO: 31284 - DNA, 19 bp, Artificial Sequence
  Probe
gaagcgggtgctcttattt

SEQ ID NO: 31285 - DNA, 20 bp, Artificial Sequence
  Probe
gaagcgggtgctcttatttt

SEQ ID NO: 31286 - DNA, 21 bp, Artificial Sequence
  Probe
gaagcgggtgctcttattttt

SEQ ID NO: 31287 - DNA, 22 bp, Artificial Sequence
  Probe
gaagcgggtgctcttatttttt

SEQ ID NO: 31288 - DNA, 23 bp, Artificial Sequence
  Probe
gaagcgggtgctcttattttttc

SEQ ID NO: 31289 - DNA, 32 bp, Artificial Sequence; identical to SEQ ID NO: 19946
  Probe

SEQ ID NO: 31290 - DNA, 29 bp, Artificial Sequence
  Probe
gaagtcgcattttgtgaaccctgggtttt

SEQ ID NO: 31291 - DNA, 20 bp, Artificial Sequence
  Probe
gaatccagcgatccgagttc

SEQ ID NO: 31292 - DNA, 36 bp, Artificial Sequence
  Probe
gaatcccatcctcgtcggctaaggaagtcctgtgct

SEQ ID NO: 31293 - DNA, 21 bp, Artificial Sequence
  Probe
gaatcgaacccatccctgaga

SEQ ID NO: 31294 - DNA, 36 bp, Artificial Sequence
  Probe
gaatctgacaacagaggcttacgaccccttatttac

SEQ ID NO: 31295 - DNA, 50 bp, Artificial Sequence; identical to SEQ ID NO: 5541
  Probe

SEQ ID NO: 31296 - DNA, 15 bp, Artificial Sequence
  Probe
gaatgatttcgactc

SEQ ID NO: 31297 - DNA, 16 bp, Artificial Sequence
  Probe
gaatgatttcgactca

SEQ ID NO: 31298 - DNA, 36 bp, Artificial Sequence
  Probe
gaatgatttcgactcattaaattatgataatcatat

SEQ ID NO: 31299 - DNA, 15 bp, Artificial Sequence
  Probe
gaattctcgcctgcc

SEQ ID NO: 31300 - DNA, 17 bp, Artificial Sequence
  Probe
gaattctcgcctgccac

SEQ ID NO: 31301 - DNA, 18 bp, Artificial Sequence
  Probe
gaattctcgcctgccacg

SEQ ID NO: 31302 - DNA, 36 bp, Artificial Sequence
  Probe
gaattgcaaattcgaagaagcagcttcaaacctgcc

SEQ ID NO: 31303 - DNA, 19 bp, Artificial Sequence
  Probe
gacaacagaggcttacgac

SEQ ID NO: 31304 - DNA, 20 bp, Artificial Sequence
  Probe
gacaacagaggcttacgacc

SEQ ID NO: 31305 - DNA, 21 bp, Artificial Sequence
  Probe
gacaacagaggcttacgaccc

SEQ ID NO: 31306 - DNA, 15 bp, Artificial Sequence
  Probe
gacaagtgcggtttt

SEQ ID NO: 31307 - DNA, 16 bp, Artificial Sequence
  Probe
gacaagtgcggttttt

SEQ ID NO: 31308 - DNA, 17 bp, Artificial Sequence
  Probe
gacaagtgcggtttttt

SEQ ID NO: 31309 - DNA, 36 bp, Artificial Sequence
  Probe
gacaccgaagtctctgtggcgcaatcggttagcgcg

SEQ ID NO: 31310 - DNA, 36 bp, Artificial Sequence
  Probe
gacagccggctcgttggtctaggggtatgattctcg

SEQ ID NO: 31311 - DNA, 15 bp, Artificial Sequence
  Probe
gacaggggttaggcc

SEQ ID NO: 31312 - DNA, 16 bp, Artificial Sequence
  Probe
gacaggggttaggcct

SEQ ID NO: 31313 - DNA, 28 bp, Artificial Sequence
  Probe
gacaggggttaggcctctttttaccagc

SEQ ID NO: 31314 - DNA, 36 bp, Artificial Sequence; identical to SEQ ID NO: 20034
  Probe

SEQ ID NO: 31315 - DNA, 25 bp, Artificial Sequence
  Probe
gacagtagcattggtggttcagtgg

SEQ ID NO: 31316 - DNA, 36 bp, Artificial Sequence; identical to SEQ ID NO: 20046
  Probe

SEQ ID NO: 31317 - DNA, 37 bp, Artificial Sequence; identical to SEQ ID NO: 20047
  Probe

SEQ ID NO: 31318 - DNA, 38 bp, Artificial Sequence; identical to SEQ ID NO: 20048
  Probe

SEQ ID NO: 31319 - DNA, 39 bp, Artificial Sequence; identical to SEQ ID NO: 20049
  Probe

SEQ ID NO: 31320 - DNA, 40 bp, Artificial Sequence; identical to SEQ ID NO: 20050
  Probe

SEQ ID NO: 31321 - DNA, 36 bp, Artificial Sequence
  Probe
gacatccttcgatagctcagctggtagagcggagga

SEQ ID NO: 31322 - DNA, 19 bp, Artificial Sequence
  Probe
gaccacgtggcctaatgga

SEQ ID NO: 31323 - DNA, 19 bp, Artificial Sequence
  Probe
gacccagtggcctaatgga

SEQ ID NO: 31324 - DNA, 23 bp, Artificial Sequence
  Probe
gacccagtggcctaatggataag

SEQ ID NO: 31325 - DNA, 33 bp, Artificial Sequence; identical to SEQ ID NO: 906
  Probe

SEQ ID NO: 31326 - DNA, 35 bp, Artificial Sequence; identical to SEQ ID NO: 908
  Probe

SEQ ID NO: 31327 - DNA, 36 bp, Artificial Sequence; identical to SEQ ID NO: 909
  Probe

SEQ ID NO: 31328 - DNA, 16 bp, Artificial Sequence
  Probe
gaccccttatttaccg

SEQ ID NO: 31329 - DNA, 33 bp, Artificial Sequence
  Probe
gaccgcgtggcctaatggataaggcgtctgact

SEQ ID NO: 31330 - DNA, 36 bp, Artificial Sequence
  Probe
gaccgcgtggcctaatggataaggcgtctgacttcg

SEQ ID NO: 31331 - DNA, 20 bp, Artificial Sequence
  Probe
gaccgctctgagctaaacct

SEQ ID NO: 31332 - DNA, 31 bp, Artificial Sequence; identical to SEQ ID NO: 5580
  Probe

SEQ ID NO: 31333 - DNA, 17 bp, Artificial Sequence
  Probe
gacctcgtggcgcaacg

SEQ ID NO: 31334 - DNA, 18 bp, Artificial Sequence
  Probe
gacctcgtggcgcaacgg

SEQ ID NO: 31335 - DNA, 32 bp, Artificial Sequence
  Probe
gacctcgtggcgcaacggtagcgcgtctgact

SEQ ID NO: 31336 - DNA, 34 bp, Artificial Sequence
  Probe
gacctcgtggcgcaacggtagcgcgtctgactcc

SEQ ID NO: 31337 - DNA, 36 bp, Artificial Sequence
  Probe
gacctcgtggcgcaacggtagcgcgtctgactccag

SEQ ID NO: 31338 - DNA, 15 bp, Artificial Sequence
  Probe
gacgaggtggccgag

SEQ ID NO: 31339 - DNA, 16 bp, Artificial Sequence
  Probe
gacgaggtggccgagt

SEQ ID NO: 31340 - DNA, 18 bp, Artificial Sequence
  Probe
gacgaggtggccgagtgg

SEQ ID NO: 31341 - DNA, 32 bp, Artificial Sequence
  Probe
gacgaggtggccgagtggttaaggcgatggac

SEQ ID NO: 31342 - DNA, 36 bp, Artificial Sequence
  Probe
gacgaggtggccgagtggttaaggcgatggactgct

SEQ ID NO: 31343 - DNA, 36 bp, Artificial Sequence
  Probe
gacggctcgttggtctaggggtatgattctcgctta

SEQ ID NO: 31344 - DNA, 36 bp, Artificial Sequence
  Probe
gacgggccagtggcgcaatggataacgcgtctgact

SEQ ID NO: 31345 - DNA, 36 bp, Artificial Sequence
  Probe
gacgggccgcgtggcctaatggataaggcgtctgac

SEQ ID NO: 31346 - DNA, 15 bp, Artificial Sequence
  Probe
gacgggctcacatca

SEQ ID NO: 31347 - DNA, 17 bp, Artificial Sequence
  Probe
gacgggctcacatcacc

SEQ ID NO: 31348 - DNA, 18 bp, Artificial Sequence
  Probe
gacgggctcacatcaccc

SEQ ID NO: 31349 - DNA, 15 bp, Artificial Sequence
  Probe
gactacaaaaaggat

SEQ ID NO: 31350 - DNA, 16 bp, Artificial Sequence
  Probe
gactacaaaaaggatt

SEQ ID NO: 31351 - DNA, 17 bp, Artificial Sequence
  Probe
gactacaaaaaggatta

SEQ ID NO: 31352 - DNA, 18 bp, Artificial Sequence
  Probe
gactacaaaaaggattag

SEQ ID NO: 31353 - DNA, 19 bp, Artificial Sequence
  Probe
gactacaaaaaggattaga

SEQ ID NO: 31354 - DNA, 21 bp, Artificial Sequence
  Probe
gactacaaaaaggattagact

SEQ ID NO: 31355 - DNA, 22 bp, Artificial Sequence
  Probe
gactacaaaaaggattagactg

SEQ ID NO: 31356 - DNA, 23 bp, Artificial Sequence
  Probe
gactacaaaaaggattagactga

SEQ ID NO: 31357 - DNA, 24 bp, Artificial Sequence
  Probe
gactacaaaaaggattagactgaa

SEQ ID NO: 31358 - DNA, 25 bp, Artificial Sequence
  Probe
gactacaaaaaggattagactgaac

SEQ ID NO: 31359 - DNA, 26 bp, Artificial Sequence
  Probe
gactacaaaaaggattagactgaacc

SEQ ID NO: 31360 - DNA, 27 bp, Artificial Sequence
  Probe
gactacaaaaaggattagactgaaccg

SEQ ID NO: 31361 - DNA, 29 bp, Artificial Sequence
  Probe
gactacaaaaaggattagactgaaccgaa

SEQ ID NO: 31362 - DNA, 30 bp, Artificial Sequence
  Probe
gactacaaaaaggattagactgaaccgaat

SEQ ID NO: 31363 - DNA, 31 bp, Artificial Sequence
  Probe
gactacaaaaaggattagactgaaccgaatt

SEQ ID NO: 31364 - DNA, 19 bp, Artificial Sequence
  Probe
gactagtctggtgttattt

SEQ ID NO: 31365 - DNA, 17 bp, Artificial Sequence
  Probe
gactatgagaatcgaac

SEQ ID NO: 31366 - DNA, 18 bp, Artificial Sequence
  Probe
gactatgagaatcgaacc

SEQ ID NO: 31367 - DNA, 19 bp, Artificial Sequence
  Probe
gactatgagaatcgaaccc

SEQ ID NO: 31368 - DNA, 20 bp, Artificial Sequence
  Probe
gactatgagaatcgaaccca

SEQ ID NO: 31369 - DNA, 21 bp, Artificial Sequence
  Probe
gactatgagaatcgaacccat

SEQ ID NO: 31370 - DNA, 22 bp, Artificial Sequence
  Probe
gactatgagaatcgaacccatc

SEQ ID NO: 31371 - DNA, 23 bp, Artificial Sequence
  Probe
gactatgagaatcgaacccatcc

SEQ ID NO: 31372 - DNA, 24 bp, Artificial Sequence
  Probe
gactatgagaatcgaacccatccc

SEQ ID NO: 31373 - DNA, 25 bp, Artificial Sequence
  Probe
gactatgagaatcgaacccatccct

SEQ ID NO: 31374 - DNA, 26 bp, Artificial Sequence
  Probe
gactatgagaatcgaacccatccctg

SEQ ID NO: 31375 - DNA, 27 bp, Artificial Sequence
  Probe
gactatgagaatcgaacccatccctga

SEQ ID NO: 31376 - DNA, 28 bp, Artificial Sequence
  Probe
gactatgagaatcgaacccatccctgag

SEQ ID NO: 31377 - DNA, 29 bp, Artificial Sequence
  Probe
gactatgagaatcgaacccatccctgaga

SEQ ID NO: 31378 - DNA, 33 bp, Artificial Sequence
  Probe
gactcggtctctgtggcgcaatcggttagcgcg

SEQ ID NO: 31379 - DNA, 36 bp, Artificial Sequence; identical to SEQ ID NO: 20138
  Probe

SEQ ID NO: 31380 - DNA, 16 bp, Artificial Sequence
  Probe
gactggacctttcttt

SEQ ID NO: 31381 - DNA, 17 bp, Artificial Sequence
  Probe
gactggacctttctttt

SEQ ID NO: 31382 - DNA, 25 bp, Artificial Sequence
  Probe
gagaaaaagtctttaactccaccat

SEQ ID NO: 31383 - DNA, 15 bp, Artificial Sequence
  Probe
gagaaagctcacaag

SEQ ID NO: 31384 - DNA, 16 bp, Artificial Sequence
  Probe
gagaaagctcacaaga

SEQ ID NO: 31385 - DNA, 17 bp, Artificial Sequence
  Probe
gagaaagctcacaagaa

SEQ ID NO: 31386 - DNA, 30 bp, Artificial Sequence; identical to SEQ ID NO: 932
  Probe

SEQ ID NO: 31387 - DNA, 34 bp, Artificial Sequence; identical to SEQ ID NO: 936
  Probe

SEQ ID NO: 31388 - DNA, 35 bp, Artificial Sequence; identical to SEQ ID NO: 937
  Probe

SEQ ID NO: 31389 - DNA, 38 bp, Artificial Sequence; identical to SEQ ID NO: 940
  Probe

SEQ ID NO: 31390 - DNA, 40 bp, Artificial Sequence; identical to SEQ ID NO: 942
  Probe

SEQ ID NO: 31391 - DNA, 41 bp, Artificial Sequence; identical to SEQ ID NO: 943
  Probe

SEQ ID NO: 31392 - DNA, 42 bp, Artificial Sequence; identical to SEQ ID NO: 944
  Probe

SEQ ID NO: 31393 - DNA, 43 bp, Artificial Sequence; identical to SEQ ID NO: 945
  Probe

SEQ ID NO: 31394 - DNA, 44 bp, Artificial Sequence; identical to SEQ ID NO: 946
  Probe

SEQ ID NO: 31395 - DNA, 45 bp, Artificial Sequence; identical to SEQ ID NO: 947
  Probe

SEQ ID NO: 31396 - DNA, 46 bp, Artificial Sequence; identical to SEQ ID NO: 948
  Probe

SEQ ID NO: 31397 - DNA, 47 bp, Artificial Sequence
  Probe
gagaaagctcacaagaactgctaactcatgcccccatgtctaacaac

SEQ ID NO: 31398 - DNA, 50 bp, Artificial Sequence; identical to SEQ ID NO: 950
  Probe

SEQ ID NO: 31399 - DNA, 31 bp, Artificial Sequence; identical to SEQ ID NO: 951
  Probe

SEQ ID NO: 31400 - DNA, 23 bp, Artificial Sequence
  Probe
gagaatcgaacccatccctgaga

SEQ ID NO: 31401 - DNA, 25 bp, Artificial Sequence
  Probe
gagacccgaggtagggctttggctg

SEQ ID NO: 31402 - DNA, 27 bp, Artificial Sequence
  Probe
gagacccgaggtagggctttggctgtg

SEQ ID NO: 31403 - DNA, 28 bp, Artificial Sequence
  Probe
gagacccgaggtagggctttggctgtgg

SEQ ID NO: 31404 - DNA, 30 bp, Artificial Sequence; identical to SEQ ID NO: 20156
  Probe

SEQ ID NO: 31405 - DNA, 33 bp, Artificial Sequence; identical to SEQ ID NO: 5626
  Probe

SEQ ID NO: 31406 - DNA, 25 bp, Artificial Sequence
  Probe
gagagaggcactggtggttcagtgg

SEQ ID NO: 31407 - DNA, 38 bp, Artificial Sequence
  Probe
gagagaggcactggtggttcagtggtagaattctcgcc

SEQ ID NO: 31408 - DNA, 39 bp, Artificial Sequence
  Probe
gagagaggcactggtggttcagtggtagaattctcgcct

SEQ ID NO: 31409 - DNA, 29 bp, Artificial Sequence
  Probe
gagagcctggatagctcagtcggtagagc

SEQ ID NO: 31410 - DNA, 30 bp, Artificial Sequence
  Probe
gagagcctggatagctcagtcggtagagca

SEQ ID NO: 31411 - DNA, 31 bp, Artificial Sequence
  Probe
gagagcctggatagctcagtcggtagagcat

SEQ ID NO: 31412 - DNA, 32 bp, Artificial Sequence
  Probe
gagagcctggatagctcagtcggtagagcatc

SEQ ID NO: 31413 - DNA, 33 bp, Artificial Sequence
  Probe
gagagcctggatagctcagtcggtagagcatca

SEQ ID NO: 31414 - DNA, 34 bp, Artificial Sequence
  Probe
gagagcctggatagctcagtcggtagagcatcag

SEQ ID NO: 31415 - DNA, 35 bp, Artificial Sequence
  Probe
gagagcctggatagctcagtcggtagagcatcaga

SEQ ID NO: 31416 - DNA, 36 bp, Artificial Sequence
  Probe
gagagcctggatagctcagtcggtagagcatcagac

SEQ ID NO: 31417 - DNA, 37 bp, Artificial Sequence
  Probe
gagagcctggatagctcagtcggtagagcatcagact

SEQ ID NO: 31418 - DNA, 39 bp, Artificial Sequence
  Probe
gagagcctggatagctcagtcggtagagcatcagacttt

SEQ ID NO: 31419 - DNA, 16 bp, Artificial Sequence
  Probe
gagagcgctcggtttt

SEQ ID NO: 31420 - DNA, 17 bp, Artificial Sequence
  Probe
gagagcgctcggttttt

SEQ ID NO: 31421 - DNA, 18 bp, Artificial Sequence
  Probe
gagagcgctcggtttttt

SEQ ID NO: 31422 - DNA, 19 bp, Artificial Sequence
  Probe
gagagcgctcggttttttg

SEQ ID NO: 31423 - DNA, 36 bp, Artificial Sequence; identical to SEQ ID NO: 20181
  Probe

SEQ ID NO: 31424 - DNA, 23 bp, Artificial Sequence
  Probe
gagaggcactggtggttcagtgg

SEQ ID NO: 31425 - DNA, 30 bp, Artificial Sequence; identical to SEQ ID NO: 20184
  Probe

SEQ ID NO: 31426 - DNA, 31 bp, Artificial Sequence
  Probe
gagaggcactggtggttcagtggtagaattc

SEQ ID NO: 31427 - DNA, 32 bp, Artificial Sequence; identical to SEQ ID NO: 20185
  Probe

SEQ ID NO: 31428 - DNA, 36 bp, Artificial Sequence
  Probe
gagaggcactggtggttcagtggtagaattctcgcc

SEQ ID NO: 31429 - DNA, 37 bp, Artificial Sequence
  Probe
gagaggcactggtggttcagtggtagaattctcgcct

SEQ ID NO: 31430 - DNA, 38 bp, Artificial Sequence
  Probe
gagaggcactggtggttcagtggtagaattctcgcctc

SEQ ID NO: 31431 - DNA, 36 bp, Artificial Sequence
  Probe
gagaggcgttggtggtttagtggtagaattctcgcc

SEQ ID NO: 31432 - DNA, 28 bp, Artificial Sequence
  Probe
gagaggggctgtgctcgcaaggtttctt

SEQ ID NO: 31433 - DNA, 15 bp, Artificial Sequence
  Probe
gagaggtcccgggtt

SEQ ID NO: 31434 - DNA, 36 bp, Artificial Sequence
  Probe
gagagtgccaggatagttcaggtggtagagcatcag

SEQ ID NO: 31435 - DNA, 25 bp, Artificial Sequence
  Probe
gagatgaaaacctttttccaaggac

SEQ ID NO: 31436 - DNA, 26 bp, Artificial Sequence
  Probe
gagatgaaaacctttttccaaggaca

SEQ ID NO: 31437 - DNA, 17 bp, Artificial Sequence
  Probe
gagatgttacctagcgt

SEQ ID NO: 31438 - DNA, 19 bp, Artificial Sequence
  Probe
gagatgttacctagcgttt

SEQ ID NO: 31439 - DNA, 29 bp, Artificial Sequence
  Probe
gagatgttacctagcgttttgtgagccag

SEQ ID NO: 31440 - DNA, 25 bp, Artificial Sequence
  Probe
gagatttcaacttaacttgaccgct

SEQ ID NO: 31441 - DNA, 27 bp, Artificial Sequence
  Probe
gagatttcaacttaacttgaccgctct

SEQ ID NO: 31442 - DNA, 28 bp, Artificial Sequence
  Probe
gagatttcaacttaacttgaccgctctg

SEQ ID NO: 31443 - DNA, 29 bp, Artificial Sequence
  Probe
gagatttcaacttaacttgaccgctctga

SEQ ID NO: 31444 - DNA, 30 bp, Artificial Sequence; identical to SEQ ID NO: 5641
  Probe

SEQ ID NO: 31445 - DNA, 31 bp, Artificial Sequence; identical to SEQ ID NO: 5642
  Probe

SEQ ID NO: 31446 - DNA, 36 bp, Artificial Sequence
  Probe
gagatttcaacttaacttgaccgctctgagctaaac

SEQ ID NO: 31447 - DNA, 36 bp, Artificial Sequence
  Probe
gagcaactagacagccggctcgttggtctaggggta

SEQ ID NO: 31448 - DNA, 36 bp, Artificial Sequence; identical to SEQ ID NO: 20226
  Probe

SEQ ID NO: 31449 - DNA, 15 bp, Artificial Sequence
  Probe
gagcccggatagctc

SEQ ID NO: 31450 - DNA, 36 bp, Artificial Sequence; identical to SEQ ID NO: 20244
  Probe

SEQ ID NO: 31451 - DNA, 18 bp, Artificial Sequence
  Probe
gagcccggtaatcgcata

SEQ ID NO: 31452 - DNA, 25 bp, Artificial Sequence
  Probe
gagcccggtaatcgcataaaactta

SEQ ID NO: 31453 - DNA, 29 bp, Artificial Sequence
  Probe
gagcccggtaatcgcataaaacttaaaac

SEQ ID NO: 31454 - DNA, 31 bp, Artificial Sequence; identical to SEQ ID NO: 961
  Probe

SEQ ID NO: 31455 - DNA, 36 bp, Artificial Sequence
  Probe
gagcccggtaatcgcataaaacttaaaactttacag

SEQ ID NO: 31456 - DNA, 24 bp, Artificial Sequence
  Probe
gagcctcacctggagcaagaccct

SEQ ID NO: 31457 - DNA, 30 bp, Artificial Sequence
  Probe
gagcctggatagctcagtcggtagagcatc

SEQ ID NO: 31458 - DNA, 36 bp, Artificial Sequence
  Probe
gagcctggatagctcagtcggtagagcatcagactt

SEQ ID NO: 31459 - DNA, 20 bp, Artificial Sequence
  Probe
gagcgacggctcgttggtct

SEQ ID NO: 31460 - DNA, 36 bp, Artificial Sequence; identical to SEQ ID NO: 20274
  Probe

SEQ ID NO: 31461 - DNA, 36 bp, Artificial Sequence
  Probe
gagcgcccggatagctcagtcggtagagcatcagac

SEQ ID NO: 31462 - DNA, 36 bp, Artificial Sequence
  Probe
gagcgttagactgaagatctaaaggtccctggttcg

SEQ ID NO: 31463 - DNA, 26 bp, Artificial Sequence
  Probe
gaggacaatggcacggcaaggggagt

SEQ ID NO: 31464 - DNA, 35 bp, Artificial Sequence
  Probe
gaggcactggtggttcagtggtagaattctcgcct

SEQ ID NO: 31465 - DNA, 36 bp, Artificial Sequence
  Probe
gaggcactggtggttcagtggtagaattctcgcctc

SEQ ID NO: 31466 - DNA, 33 bp, Artificial Sequence
  Probe
gaggcattggtggttcagtggtagaattctcgc

SEQ ID NO: 31467 - DNA, 34 bp, Artificial Sequence
  Probe
gaggcattggtggttcagtggtagaattctcgcc

SEQ ID NO: 31468 - DNA, 35 bp, Artificial Sequence
  Probe
gaggcattggtggttcagtggtagaattctcgcct

SEQ ID NO: 31469 - DNA, 36 bp, Artificial Sequence
  Probe
gaggcattggtggttcagtggtagaattctcgcctc

SEQ ID NO: 31470 - DNA, 36 bp, Artificial Sequence
  Probe
gaggcattggtggttcagtggtagaattctcgcctg

SEQ ID NO: 31471 - DNA, 15 bp, Artificial Sequence
  Probe
gaggcttaaactttt

SEQ ID NO: 31472 - DNA, 24 bp, Artificial Sequence
  Probe
gaggcttacgaccccttatttacc

SEQ ID NO: 31473 - DNA, 25 bp, Artificial Sequence
  Probe
gaggcttacgaccccttatttaccg

SEQ ID NO: 31474 - DNA, 33 bp, Artificial Sequence
  Probe
gagggaggttccatggtgtaatggttagcactc

SEQ ID NO: 31475 - DNA, 17 bp, Artificial Sequence
  Probe
gagggccagtggcgcaa

SEQ ID NO: 31476 - DNA, 36 bp, Artificial Sequence
  Probe
gagggctgtctgcagacgaggtggccgagtggttaa

SEQ ID NO: 31477 - DNA, 26 bp, Artificial Sequence
  Probe
gaggggctgtgctcgcaaggtttctt

SEQ ID NO: 31478 - DNA, 36 bp, Artificial Sequence
  Probe
gagggtccagggttcaagtccctgttcaggcgaact

SEQ ID NO: 31479 - DNA, 31 bp, Artificial Sequence
  Probe
gagggtccagggttcaagtccctgttcgggc

SEQ ID NO: 31480 - DNA, 33 bp, Artificial Sequence; identical to SEQ ID NO: 5670
  Probe

SEQ ID NO: 31481 - DNA, 36 bp, Artificial Sequence
  Probe
gagggtccagggttcaagtccctgttcgggcggcat

SEQ ID NO: 31482 - DNA, 37 bp, Artificial Sequence
  Probe
gagggtccagggttcaagtccctgttcgggcggcatg

SEQ ID NO: 31483 - DNA, 36 bp, Artificial Sequence
  Probe
gagggtccagggttcaagtccctgttcgggcgggag

SEQ ID NO: 31484 - DNA, 36 bp, Artificial Sequence
  Probe
gagggtccagggttcaagtccctgttcgggcggtat

SEQ ID NO: 31485 - DNA, 39 bp, Artificial Sequence
  Probe
gagggtccagggttcaagtccctgttcgggcggtatctt

SEQ ID NO: 31486 - DNA, 40 bp, Artificial Sequence; identical to SEQ ID NO: 20312
  Probe

SEQ ID NO: 31487 - DNA, 41 bp, Artificial Sequence; identical to SEQ ID NO: 20313
  Probe

SEQ ID NO: 31488 - DNA, 33 bp, Artificial Sequence; identical to SEQ ID NO: 5671
  Probe

SEQ ID NO: 31489 - DNA, 36 bp, Artificial Sequence
  Probe
gagggtccagggttcaagtccctgttcgggcgtctt

SEQ ID NO: 31490 - DNA, 36 bp, Artificial Sequence
  Probe
gagggtccagggttcaagtccctgttcgggcgtttg

SEQ ID NO: 31491 - DNA, 41 bp, Artificial Sequence
  Probe
gagggtccagggttcaagtccctgttcgggcgtttgtagtt

SEQ ID NO: 31492 - DNA, 42 bp, Artificial Sequence
  Probe
gagggtccagggttcaagtccctgttcgggcgtttgtagttt

SEQ ID NO: 31493 - DNA, 43 bp, Artificial Sequence
  Probe
gagggtccagggttcaagtccctgttcgggcgtttgtagtttt

SEQ ID NO: 31494 - DNA, 36 bp, Artificial Sequence
  Probe
gagggtccggggttcaagtccctgttcgggcggatg

SEQ ID NO: 31495 - DNA, 39 bp, Artificial Sequence
  Probe
gagggtccggggttcaagtccctgttcgggcggatgctg

SEQ ID NO: 31496 - DNA, 41 bp, Artificial Sequence
  Probe
gagggtccggggttcaagtccctgttcgggcggatgctgtt

SEQ ID NO: 31497 - DNA, 42 bp, Artificial Sequence
  Probe
gagggtccggggttcaagtccctgttcgggcggatgctgttt

SEQ ID NO: 31498 - DNA, 43 bp, Artificial Sequence
  Probe
gagggtccggggttcaagtccctgttcgggcggatgctgtttt

SEQ ID NO: 31499 - DNA, 36 bp, Artificial Sequence
  Probe
gagggtctagggttcaagtccctgtccaggcgttga

SEQ ID NO: 31500 - DNA, 45 bp, Artificial Sequence
  Probe
gagggtctagggttcaagtccctgtccaggcgttgagtgtagttt

SEQ ID NO: 31501 - DNA, 28 bp, Artificial Sequence
  Probe
gagggttctcaccttctctctccgattt

SEQ ID NO: 31502 - DNA, 29 bp, Artificial Sequence
  Probe
gagggttctcaccttctctctccgatttt

SEQ ID NO: 31503 - DNA, 18 bp, Artificial Sequence
  Probe
gaggtagggctttggctg

SEQ ID NO: 31504 - DNA, 24 bp, Artificial Sequence
  Probe
gaggtcctgtgtccctagtagctc

SEQ ID NO: 31505 - DNA, 15 bp, Artificial Sequence
  Probe
gaggtcgatggatct

SEQ ID NO: 31506 - DNA, 36 bp, Artificial Sequence
  Probe
gaggttccatggtgtaatggtgagcactctggactc

SEQ ID NO: 31507 - DNA, 15 bp, Artificial Sequence
  Probe
gaggtttttctgttt

SEQ ID NO: 31508 - DNA, 17 bp, Artificial Sequence
  Probe
gagtaaataataggagc

SEQ ID NO: 31509 - DNA, 19 bp, Artificial Sequence
  Probe
gagtaaataataggagctt

SEQ ID NO: 31510 - DNA, 20 bp, Artificial Sequence
  Probe
gagtaaataataggagctta

SEQ ID NO: 31511 - DNA, 25 bp, Artificial Sequence
  Probe
gagtaaataataggagcttaaaccc

SEQ ID NO: 31512 - DNA, 15 bp, Artificial Sequence
  Probe
gagtgaagcattgga

SEQ ID NO: 31513 - DNA, 16 bp, Artificial Sequence
  Probe
gagtgaagcattggac

SEQ ID NO: 31514 - DNA, 17 bp, Artificial Sequence
  Probe
gagtgaagcattggact

SEQ ID NO: 31515 - DNA, 18 bp, Artificial Sequence
  Probe
gagtgaagcattggactg

SEQ ID NO: 31516 - DNA, 19 bp, Artificial Sequence
  Probe
gagtgaagcattggactgt

SEQ ID NO: 31517 - DNA, 20 bp, Artificial Sequence
  Probe
gagtgaagcattggactgta

SEQ ID NO: 31518 - DNA, 21 bp, Artificial Sequence
  Probe
gagtgaagcattggactgtaa

SEQ ID NO: 31519 - DNA, 22 bp, Artificial Sequence
  Probe
gagtgaagcattggactgtaaa

SEQ ID NO: 31520 - DNA, 23 bp, Artificial Sequence
  Probe
gagtgaagcattggactgtaaat

SEQ ID NO: 31521 - DNA, 24 bp, Artificial Sequence
  Probe
gagtgaagcattggactgtaaatc

SEQ ID NO: 31522 - DNA, 25 bp, Artificial Sequence
  Probe
gagtgaagcattggactgtaaatct

SEQ ID NO: 31523 - DNA, 26 bp, Artificial Sequence
  Probe
gagtgaagcattggactgtaaatcta

SEQ ID NO: 31524 - DNA, 27 bp, Artificial Sequence
  Probe
gagtgaagcattggactgtaaatctaa

SEQ ID NO: 31525 - DNA, 28 bp, Artificial Sequence
  Probe
gagtgaagcattggactgtaaatctaaa

SEQ ID NO: 31526 - DNA, 29 bp, Artificial Sequence
  Probe
gagtgaagcattggactgtaaatctaaag

SEQ ID NO: 31527 - DNA, 30 bp, Artificial Sequence
  Probe
gagtgaagcattggactgtaaatctaaaga

SEQ ID NO: 31528 - DNA, 32 bp, Artificial Sequence
  Probe
gagtgaagcattggactgtaaatctaaagaca

SEQ ID NO: 31529 - DNA, 36 bp, Artificial Sequence
  Probe
gagtgaagcattggactgtaaatctaaagacagggg

SEQ ID NO: 31530 - DNA, 44 bp, Artificial Sequence
  Probe
gagtgaagcattggactgtaaatctaaagacaggggttaggcct

SEQ ID NO: 31531 - DNA, 45 bp, Artificial Sequence
  Probe
gagtgaagcattggactgtaaatctaaagacaggggttaggcctc

SEQ ID NO: 31532 - DNA, 36 bp, Artificial Sequence
  Probe
gagtgccaggatagttcaggtggtagagcatcagac

SEQ ID NO: 31533 - DNA, 27 bp, Artificial Sequence
  Probe
gagtggcgcagcggaagcgtgctgggc

SEQ ID NO: 31534 - DNA, 29 bp, Artificial Sequence
  Probe
gagtggcgcagcggaagcgtgctgggccc

SEQ ID NO: 31535 - DNA, 36 bp, Artificial Sequence
  Probe
gagtggcgcagcggaagcgtgctgggcccataaccc

SEQ ID NO: 31536 - DNA, 25 bp, Artificial Sequence
  Probe
gagtgtagcttaacacaaagcaccc

SEQ ID NO: 31537 - DNA, 15 bp, Artificial Sequence
  Probe
gagtgtcaggatggc

SEQ ID NO: 31538 - DNA, 16 bp, Artificial Sequence
  Probe
gagtgtcaggatggcc

SEQ ID NO: 31539 - DNA, 17 bp, Artificial Sequence
  Probe
gagtgtcaggatggccg

SEQ ID NO: 31540 - DNA, 24 bp, Artificial Sequence
  Probe
gagtgtcaggatggccgagtggtc

SEQ ID NO: 31541 - DNA, 25 bp, Artificial Sequence
  Probe
gagtgtcaggatggccgagtggtct

SEQ ID NO: 31542 - DNA, 26 bp, Artificial Sequence
  Probe
gagtgtcaggatggccgagtggtcta

SEQ ID NO: 31543 - DNA, 28 bp, Artificial Sequence
  Probe
gagtgtcaggatggccgagtggtctaag

SEQ ID NO: 31544 - DNA, 29 bp, Artificial Sequence
  Probe
gagtgtcaggatggccgagtggtctaagg

SEQ ID NO: 31545 - DNA, 30 bp, Artificial Sequence
  Probe
gagtgtcaggatggccgagtggtctaaggc

SEQ ID NO: 31546 - DNA, 36 bp, Artificial Sequence; identical to SEQ ID NO: 20368
  Probe

SEQ ID NO: 31547 - DNA, 23 bp, Artificial Sequence
  Probe
gagttaaagactttttctctgat

SEQ ID NO: 31548 - DNA, 21 bp, Artificial Sequence
  Probe
gagttagcggggagtgatata

SEQ ID NO: 31549 - DNA, 22 bp, Artificial Sequence
  Probe
gagttagcggggagtgatatat

SEQ ID NO: 31550 - DNA, 23 bp, Artificial Sequence
  Probe
gagttagcggggagtgatatatt

SEQ ID NO: 31551 - DNA, 24 bp, Artificial Sequence
  Probe
gagttagcggggagtgatatatta

SEQ ID NO: 31552 - DNA, 25 bp, Artificial Sequence
  Probe
gagttagcggggagtgatatattat

SEQ ID NO: 31553 - DNA, 26 bp, Artificial Sequence
  Probe
gagttagcggggagtgatatattatt

SEQ ID NO: 31554 - DNA, 27 bp, Artificial Sequence
  Probe
gagttagcggggagtgatatattattg

SEQ ID NO: 31555 - DNA, 24 bp, Artificial Sequence
  Probe
gataaaagagttactttgatagag

SEQ ID NO: 31556 - DNA, 36 bp, Artificial Sequence
  Probe
gataaaagagttactttgatagagtaaataatagga

SEQ ID NO: 31557 - DNA, 39 bp, Artificial Sequence
  Probe
gataaaagagttactttgatagagtaaataataggagct

SEQ ID NO: 31558 - DNA, 40 bp, Artificial Sequence
  Probe
gataaaagagttactttgatagagtaaataataggagctt

SEQ ID NO: 31559 - DNA, 20 bp, Artificial Sequence
  Probe
gataacagctatccattggt

SEQ ID NO: 31560 - DNA, 23 bp, Artificial Sequence
  Probe
gataacagctatccattggtctt

SEQ ID NO: 31561 - DNA, 24 bp, Artificial Sequence
  Probe
gataacagctatccattggtctta

SEQ ID NO: 31562 - DNA, 28 bp, Artificial Sequence
  Probe
gataacagctatccattggtcttaggcc

SEQ ID NO: 31563 - DNA, 29 bp, Artificial Sequence
  Probe
gataacagctatccattggtcttaggccc

SEQ ID NO: 31564 - DNA, 30 bp, Artificial Sequence
  Probe
gataacagctatccattggtcttaggcccc

SEQ ID NO: 31565 - DNA, 31 bp, Artificial Sequence; identical to SEQ ID NO: 20382
  Probe

SEQ ID NO: 31566 - DNA, 36 bp, Artificial Sequence
  Probe
gataacagctatccattggtcttaggccccaaaaat

SEQ ID NO: 31567 - DNA, 21 bp, Artificial Sequence
  Probe
gatagagtaaataataggagc

SEQ ID NO: 31568 - DNA, 23 bp, Artificial Sequence
  Probe
gatagagtaaataataggagctt

SEQ ID NO: 31569 - DNA, 28 bp, Artificial Sequence
  Probe
gatagagtaaataataggagcttaaacc

SEQ ID NO: 31570 - DNA, 30 bp, Artificial Sequence
  Probe
gatagagtaaataataggagcttaaacccc

SEQ ID NO: 31571 - DNA, 36 bp, Artificial Sequence
  Probe
gatagctcagctggtagagcggaggactgtagcctg

SEQ ID NO: 31572 - DNA, 36 bp, Artificial Sequence
  Probe
gatagctcagctggtagagcggaggactgtagtact

SEQ ID NO: 31573 - DNA, 19 bp, Artificial Sequence
  Probe
gatagctcagtcggtagag

SEQ ID NO: 31574 - DNA, 21 bp, Artificial Sequence
  Probe
gatagctcagtcggtagagca

SEQ ID NO: 31575 - DNA, 27 bp, Artificial Sequence
  Probe
gatagctcagtcggtagagcatcagac

SEQ ID NO: 31576 - DNA, 28 bp, Artificial Sequence
  Probe
gatagctcagtcggtagagcatcagact

SEQ ID NO: 31577 - DNA, 29 bp, Artificial Sequence
  Probe
gatagctcagtcggtagagcatcagactt

SEQ ID NO: 31578 - DNA, 32 bp, Artificial Sequence; identical to SEQ ID NO: 20398
  Probe

SEQ ID NO: 31579 - DNA, 27 bp, Artificial Sequence
  Probe
gatagctcagttggtagagcggaggac

SEQ ID NO: 31580 - DNA, 36 bp, Artificial Sequence
  Probe
gataggtggcacggagaattttggattctcagggat

SEQ ID NO: 31581 - DNA, 20 bp, Artificial Sequence
  Probe
gatatccaaccttcagctat

SEQ ID NO: 31582 - DNA, 26 bp, Artificial Sequence
  Probe
gatatccaaccttcagctatagggtg

SEQ ID NO: 31583 - DNA, 27 bp, Artificial Sequence
  Probe
gatatccaaccttcagctatagggtgg

SEQ ID NO: 31584 - DNA, 30 bp, Artificial Sequence; identical to SEQ ID NO: 20401
  Probe

SEQ ID NO: 31585 - DNA, 36 bp, Artificial Sequence
  Probe
gatcagaagattctaggttcgactcctggctggctc

SEQ ID NO: 31586 - DNA, 39 bp, Artificial Sequence
  Probe
gatcagaagattctaggttcgactcctggctggctcgcg

SEQ ID NO: 31587 - DNA, 40 bp, Artificial Sequence
  Probe
gatcagaagattctaggttcgactcctggctggctcgcga

SEQ ID NO: 31588 - DNA, 39 bp, Artificial Sequence
  Probe
gatcagaagattctaggttcgactcctggctggctcgct

SEQ ID NO: 31589 - DNA, 36 bp, Artificial Sequence
  Probe
gatcagaaggttgcgtgttcaagtcacgtcggggtc

SEQ ID NO: 31590 - DNA, 24 bp, Artificial Sequence
  Probe
gatccccagcatctccagtgtttt

SEQ ID NO: 31591 - DNA, 28 bp, Artificial Sequence
  Probe
gatccccagtacctccaggccgtgtttt

SEQ ID NO: 31592 - DNA, 18 bp, Artificial Sequence
  Probe
gatcccgggtttcggcac

SEQ ID NO: 31593 - DNA, 36 bp, Artificial Sequence
  Probe
gatcgggaggtagcgtggccgagtggtctaaggcgc

SEQ ID NO: 31594 - DNA, 23 bp, Artificial Sequence
  Probe
gatgaaaacctttttccaaggac

SEQ ID NO: 31595 - DNA, 25 bp, Artificial Sequence
  Probe
gatgaaaacctttttccaaggacaa

SEQ ID NO: 31596 - DNA, 36 bp, Artificial Sequence
  Probe
gatggcagagcccggtaatcgcataaaacttaaaac

SEQ ID NO: 31597 - DNA, 27 bp, Artificial Sequence
  Probe
gatggggtgtgataggtggcacggaga

SEQ ID NO: 31598 - DNA, 33 bp, Artificial Sequence; identical to SEQ ID NO: 5734
  Probe

SEQ ID NO: 31599 - DNA, 23 bp, Artificial Sequence
  Probe
gatggtttttcatatcattggtc

SEQ ID NO: 31600 - DNA, 31 bp, Artificial Sequence
  Probe
gatggtttttcatatcattggtcgtggttgt

SEQ ID NO: 31601 - DNA, 32 bp, Artificial Sequence
  Probe
gatggtttttcatatcattggtcgtggttgta

SEQ ID NO: 31602 - DNA, 33 bp, Artificial Sequence
  Probe
gatggtttttcatatcattggtcgtggttgtag

SEQ ID NO: 31603 - DNA, 35 bp, Artificial Sequence
  Probe
gatggtttttcatatcattggtcgtggttgtagtc

SEQ ID NO: 31604 - DNA, 45 bp, Artificial Sequence
  Probe
gatggtttttcatatcattggtcgtggttgtagtccgtgcgagaa

SEQ ID NO: 31605 - DNA, 19 bp, Artificial Sequence
  Probe
gattaagagaaccaacacc

SEQ ID NO: 31606 - DNA, 20 bp, Artificial Sequence
  Probe
gattaagagaaccaacacct

SEQ ID NO: 31607 - DNA, 32 bp, Artificial Sequence; identical to SEQ ID NO: 5737
  Probe

SEQ ID NO: 31608 - DNA, 17 bp, Artificial Sequence
  Probe
gattagggtgcttagct

SEQ ID NO: 31609 - DNA, 19 bp, Artificial Sequence
  Probe
gattagggtgcttagctgt

SEQ ID NO: 31610 - DNA, 20 bp, Artificial Sequence
  Probe
gattagggtgcttagctgtt

SEQ ID NO: 31611 - DNA, 23 bp, Artificial Sequence
  Probe
gattagggtgcttagctgttaac

SEQ ID NO: 31612 - DNA, 25 bp, Artificial Sequence
  Probe
gattagggtgcttagctgttaacta

SEQ ID NO: 31613 - DNA, 33 bp, Artificial Sequence
  Probe
gattagggtgcttagctgttaactaagtgtttg

SEQ ID NO: 31614 - DNA, 20 bp, Artificial Sequence
  Probe
gattccccgacggggaggca

SEQ ID NO: 31615 - DNA, 28 bp, Artificial Sequence
  Probe
gattcccggccaatgcaacgatgacgtt

SEQ ID NO: 31616 - DNA, 29 bp, Artificial Sequence
  Probe
gattcccggccaatgcaacgatgacgttt

SEQ ID NO: 31617 - DNA, 18 bp, Artificial Sequence
  Probe
gattccggctcgaaggac

SEQ ID NO: 31618 - DNA, 19 bp, Artificial Sequence
  Probe
gattccggctcgaaggact

SEQ ID NO: 31619 - DNA, 19 bp, Artificial Sequence
  Probe
gattccggctcgaaggagc

SEQ ID NO: 31620 - DNA, 17 bp, Artificial Sequence
  Probe
gattcggcgctctcacc

SEQ ID NO: 31621 - DNA, 28 bp, Artificial Sequence
  Probe
gattcggcgctctcaccgccgcggcccg

SEQ ID NO: 31622 - DNA, 30 bp, Artificial Sequence
  Probe
gattcggcgctctcaccgccgcggcccggg

SEQ ID NO: 31623 - DNA, 32 bp, Artificial Sequence
  Probe
gattcggcgctctcaccgccgcggcccgggtt

SEQ ID NO: 31624 - DNA, 36 bp, Artificial Sequence
  Probe
gattcggcgctctcaccgccgcggcccgggttcgat

SEQ ID NO: 31625 - DNA, 27 bp, Artificial Sequence
  Probe
gattcggcgctttcaccgccgcggccc

SEQ ID NO: 31626 - DNA, 34 bp, Artificial Sequence
  Probe
gattctcagggatgggttcgattctcatagtcct

SEQ ID NO: 31627 - DNA, 36 bp, Artificial Sequence
  Probe
gattctcagggatgggttcgattctcatagtcctag

SEQ ID NO: 31628 - DNA, 29 bp, Artificial Sequence
  Probe
gattgaaacttttcgaaagtacgattact

SEQ ID NO: 31629 - DNA, 36 bp, Artificial Sequence
  Probe
gattgaagccagttgattagggtgcttagctgttaa

SEQ ID NO: 31630 - DNA, 15 bp, Artificial Sequence
  Probe
gattgtgaatctgac

SEQ ID NO: 31631 - DNA, 16 bp, Artificial Sequence
  Probe
gattgtgaatctgaca

SEQ ID NO: 31632 - DNA, 18 bp, Artificial Sequence
  Probe
gattgtgaatctgacaac

SEQ ID NO: 31633 - DNA, 19 bp, Artificial Sequence
  Probe
gattgtgaatctgacaaca

SEQ ID NO: 31634 - DNA, 21 bp, Artificial Sequence
  Probe
gattgtgaatctgacaacaga

SEQ ID NO: 31635 - DNA, 25 bp, Artificial Sequence
  Probe
gattgtgaatctgacaacagaggct

SEQ ID NO: 31636 - DNA, 26 bp, Artificial Sequence
  Probe
gattgtgaatctgacaacagaggctt

SEQ ID NO: 31637 - DNA, 29 bp, Artificial Sequence
  Probe
gattgtgaatctgacaacagaggcttacg

SEQ ID NO: 31638 - DNA, 34 bp, Artificial Sequence; identical to SEQ ID NO: 983
  Probe

SEQ ID NO: 31639 - DNA, 35 bp, Artificial Sequence; identical to SEQ ID NO: 5752
  Probe

SEQ ID NO: 31640 - DNA, 43 bp, Artificial Sequence; identical to SEQ ID NO: 988
  Probe

SEQ ID NO: 31641 - DNA, 44 bp, Artificial Sequence; identical to SEQ ID NO: 5755
  Probe

SEQ ID NO: 31642 - DNA, 45 bp, Artificial Sequence; identical to SEQ ID NO: 5756
  Probe

SEQ ID NO: 31643 - DNA, 23 bp, Artificial Sequence
  Probe
gatttcaacttaacttgaccgct

SEQ ID NO: 31644 - DNA, 24 bp, Artificial Sequence
  Probe
gatttcaacttaacttgaccgctc

SEQ ID NO: 31645 - DNA, 25 bp, Artificial Sequence
  Probe
gatttcaacttaacttgaccgctct

SEQ ID NO: 31646 - DNA, 27 bp, Artificial Sequence
  Probe
gatttcaacttaacttgaccgctctga

SEQ ID NO: 31647 - DNA, 28 bp, Artificial Sequence
  Probe
gatttcaacttaacttgaccgctctgag

SEQ ID NO: 31648 - DNA, 29 bp, Artificial Sequence
  Probe
gatttcaacttaacttgaccgctctgagc

SEQ ID NO: 31649 - DNA, 36 bp, Artificial Sequence
  Probe
gatttcaacttaacttgaccgctctgagctaaacct

SEQ ID NO: 31650 - DNA, 18 bp, Artificial Sequence
  Probe
gatttcgactcattaaat

SEQ ID NO: 31651 - DNA, 36 bp, Artificial Sequence
  Probe
gatttcgactcattaaattatgataatcatatttac

SEQ ID NO: 31652 - DNA, 21 bp, Artificial Sequence
  Probe
gatttctgtaccttacacatt

SEQ ID NO: 31653 - DNA, 22 bp, Artificial Sequence
  Probe
gatttctgtaccttacacattt

SEQ ID NO: 31654 - DNA, 23 bp, Artificial Sequence
  Probe
gatttctgtaccttacacatttt

SEQ ID NO: 31655 - DNA, 15 bp, Artificial Sequence
  Probe
gcaaaaccccactct

SEQ ID NO: 31656 - DNA, 36 bp, Artificial Sequence
  Probe
gcaaattcgaagaagcagcttcaaacctgccggggc

SEQ ID NO: 31657 - DNA, 15 bp, Artificial Sequence
  Probe
gcaactggtcgtttt

SEQ ID NO: 31658 - DNA, 16 bp, Artificial Sequence
  Probe
gcaactggtcgtttta

SEQ ID NO: 31659 - DNA, 17 bp, Artificial Sequence
  Probe
gcaactggtcgttttag

SEQ ID NO: 31660 - DNA, 18 bp, Artificial Sequence
  Probe
gcaactggtcgttttagt

SEQ ID NO: 31661 - DNA, 24 bp, Artificial Sequence
  Probe
gcaagccgggccctgaagccgcct

SEQ ID NO: 31662 - DNA, 29 bp, Artificial Sequence
  Probe
gcaatacactgaaaatgtttagacgggct

SEQ ID NO: 31663 - DNA, 31 bp, Artificial Sequence; identical to SEQ ID NO: 5789
  Probe

SEQ ID NO: 31664 - DNA, 33 bp, Artificial Sequence; identical to SEQ ID NO: 989
  Probe

SEQ ID NO: 31665 - DNA, 36 bp, Artificial Sequence
  Probe
gcaatacactgaaaatgtttagacgggctcacatca

SEQ ID NO: 31666 - DNA, 18 bp, Artificial Sequence
  Probe
gcaatggatagcgcattg

SEQ ID NO: 31667 - DNA, 30 bp, Artificial Sequence; identical to SEQ ID NO: 10262
  Probe

SEQ ID NO: 31668 - DNA, 31 bp, Artificial Sequence; identical to SEQ ID NO: 5794
  Probe

SEQ ID NO: 31669 - DNA, 33 bp, Artificial Sequence; identical to SEQ ID NO: 20499
  Probe

SEQ ID NO: 31670 - DNA, 36 bp, Artificial Sequence
  Probe
gcacacgtgggttcgaatcccatcctcgtcggctgc

SEQ ID NO: 31671 - DNA, 22 bp, Artificial Sequence
  Probe
gcacactactataaccacccta

SEQ ID NO: 31672 - DNA, 36 bp, Artificial Sequence
  Probe
gcacatgtaggctctatggcttagttggttaaagcg

SEQ ID NO: 31673 - DNA, 36 bp, Artificial Sequence
  Probe
gcaccaggatggccgagtggttaaggcgttggactt

SEQ ID NO: 31674 - DNA, 36 bp, Artificial Sequence; identical to SEQ ID NO: 20519
  Probe

SEQ ID NO: 31675 - DNA, 50 bp, Artificial Sequence; identical to SEQ ID NO: 5820
  Probe

SEQ ID NO: 31676 - DNA, 36 bp, Artificial Sequence
  Probe
gcacccttcgatagctcagctggtagagcggaggac

SEQ ID NO: 31677 - DNA, 16 bp, Artificial Sequence
  Probe
gcacgaggccccgggt

SEQ ID NO: 31678 - DNA, 36 bp, Artificial Sequence; identical to SEQ ID NO: 20529
  Probe

SEQ ID NO: 31679 - DNA, 36 bp, Artificial Sequence; identical to SEQ ID NO: 20532
  Probe

SEQ ID NO: 31680 - DNA, 15 bp, Artificial Sequence
  Probe
gcacgccctcccatt

SEQ ID NO: 31681 - DNA, 16 bp, Artificial Sequence
  Probe
gcacgccctcccattt

SEQ ID NO: 31682 - DNA, 17 bp, Artificial Sequence
  Probe
gcacgccctcccatttt

SEQ ID NO: 31683 - DNA, 16 bp, Artificial Sequence
  Probe
gcacggcaaggggagt

SEQ ID NO: 31684 - DNA, 16 bp, Artificial Sequence
  Probe
gcacggcaaggggctc

SEQ ID NO: 31685 - DNA, 16 bp, Artificial Sequence
  Probe
gcactctggactctga

SEQ ID NO: 31686 - DNA, 17 bp, Artificial Sequence
  Probe
gcactctggactctgaa

SEQ ID NO: 31687 - DNA, 18 bp, Artificial Sequence
  Probe
gcactctggactctgaat

SEQ ID NO: 31688 - DNA, 19 bp, Artificial Sequence
  Probe
gcactctggactctgaatc

SEQ ID NO: 31689 - DNA, 20 bp, Artificial Sequence
  Probe
gcactctggactctgaatcc

SEQ ID NO: 31690 - DNA, 21 bp, Artificial Sequence
  Probe
gcactctggactctgaatcca

SEQ ID NO: 31691 - DNA, 23 bp, Artificial Sequence
  Probe
gcactctggactctgaatccagc

SEQ ID NO: 31692 - DNA, 34 bp, Artificial Sequence
  Probe
gcactctggactctgaatccagcgatccgagttc

SEQ ID NO: 31693 - DNA, 17 bp, Artificial Sequence
  Probe
gcactctggactttgaa

SEQ ID NO: 31694 - DNA, 18 bp, Artificial Sequence
  Probe
gcactctggactttgaat

SEQ ID NO: 31695 - DNA, 19 bp, Artificial Sequence
  Probe
gcactctggactttgaatc

SEQ ID NO: 31696 - DNA, 20 bp, Artificial Sequence
  Probe
gcactctggactttgaatcc

SEQ ID NO: 31697 - DNA, 30 bp, Artificial Sequence; identical to SEQ ID NO: 8615
  Probe

SEQ ID NO: 31698 - DNA, 31 bp, Artificial Sequence; identical to SEQ ID NO: 5827
  Probe

SEQ ID NO: 31699 - DNA, 33 bp, Artificial Sequence; identical to SEQ ID NO: 5828
  Probe

SEQ ID NO: 31700 - DNA, 34 bp, Artificial Sequence; identical to SEQ ID NO: 5829
  Probe

SEQ ID NO: 31701 - DNA, 35 bp, Artificial Sequence; identical to SEQ ID NO: 20565
  Probe

SEQ ID NO: 31702 - DNA, 36 bp, Artificial Sequence
  Probe
gcactggtggttcagtggtagaattctcgcctccca

SEQ ID NO: 31703 - DNA, 36 bp, Artificial Sequence; identical to SEQ ID NO: 993
  Probe

SEQ ID NO: 31704 - DNA, 37 bp, Artificial Sequence; identical to SEQ ID NO: 5830
  Probe

SEQ ID NO: 31705 - DNA, 36 bp, Artificial Sequence
  Probe
gcagacgaggtggccgagtggttaaggcgatggact

SEQ ID NO: 31706 - DNA, 33 bp, Artificial Sequence; identical to SEQ ID NO: 20574
  Probe

SEQ ID NO: 31707 - DNA, 36 bp, Artificial Sequence
  Probe
gcagaggcattggtggttcagtggtagaattctcgc

SEQ ID NO: 31708 - DNA, 38 bp, Artificial Sequence
  Probe
gcagaggcattggtggttcagtggtagaattctcgcct

SEQ ID NO: 31709 - DNA, 30 bp, Artificial Sequence; identical to SEQ ID NO: 8617
  Probe

SEQ ID NO: 31710 - DNA, 15 bp, Artificial Sequence
  Probe
gcagccgtgcttttt

SEQ ID NO: 31711 - DNA, 15 bp, Artificial Sequence
  Probe
gcagcgatggccgag

SEQ ID NO: 31712 - DNA, 18 bp, Artificial Sequence
  Probe
gcagcgatggccgagtgg

SEQ ID NO: 31713 - DNA, 22 bp, Artificial Sequence
  Probe
gcagcggaagcgtgctgggccc

SEQ ID NO: 31714 - DNA, 36 bp, Artificial Sequence
  Probe
gcagcggagccttcgatagctcagttggtagagcgg

SEQ ID NO: 31715 - DNA, 45 bp, Artificial Sequence; identical to SEQ ID NO: 20602
  Probe

SEQ ID NO: 31716 - DNA, 36 bp, Artificial Sequence
  Probe
gcagctgggtagcgtggccgagcggtctaaggcgct

SEQ ID NO: 31717 - DNA, 36 bp, Artificial Sequence
  Probe
gcagggagcccggatagctcagtcggtagagcatca

SEQ ID NO: 31718 - DNA, 36 bp, Artificial Sequence
  Probe
gcagggccagtggcgcaatggataacgcgtctgact

SEQ ID NO: 31719 - DNA, 36 bp, Artificial Sequence
  Probe
gcagggccgcgtggcctaatggataaggcgtctgat

SEQ ID NO: 31720 - DNA, 36 bp, Artificial Sequence
  Probe
gcaggtttccgtagtgtagtggttatcacgttcgcc

SEQ ID NO: 31721 - DNA, 33 bp, Artificial Sequence; identical to SEQ ID NO: 5847
  Probe

SEQ ID NO: 31722 - DNA, 31 bp, Artificial Sequence; identical to SEQ ID NO: 5857
  Probe

SEQ ID NO: 31723 - DNA, 32 bp, Artificial Sequence; identical to SEQ ID NO: 5858
  Probe

SEQ ID NO: 31724 - DNA, 33 bp, Artificial Sequence; identical to SEQ ID NO: 5859
  Probe

SEQ ID NO: 31725 - DNA, 36 bp, Artificial Sequence
  Probe
gcataggtggttcagtggtagaattcttgcctgcca

SEQ ID NO: 31726 - DNA, 27 bp, Artificial Sequence
  Probe
gcatctccaaggcgatcacgtagattt

SEQ ID NO: 31727 - DNA, 28 bp, Artificial Sequence
  Probe
gcatctccaaggcgatcacgtagatttt

SEQ ID NO: 31728 - DNA, 20 bp, Artificial Sequence
  Probe
gcatgcacgaggccccgggt

SEQ ID NO: 31729 - DNA, 17 bp, Artificial Sequence
  Probe
gcatgggactcttaatc

SEQ ID NO: 31730 - DNA, 18 bp, Artificial Sequence
  Probe
gcatgggactcttaatcc

SEQ ID NO: 31731 - DNA, 15 bp, Artificial Sequence
  Probe
gcatgggtggttcag

SEQ ID NO: 31732 - DNA, 16 bp, Artificial Sequence
  Probe
gcatgggtggttcagt

SEQ ID NO: 31733 - DNA, 18 bp, Artificial Sequence
  Probe
gcatgggtggttcagtgg

SEQ ID NO: 31734 - DNA, 19 bp, Artificial Sequence
  Probe
gcatgggtggttcagtggt

SEQ ID NO: 31735 - DNA, 20 bp, Artificial Sequence
  Probe
gcatgggtggttcagtggta

SEQ ID NO: 31736 - DNA, 21 bp, Artificial Sequence
  Probe
gcatgggtggttcagtggtag

SEQ ID NO: 31737 - DNA, 22 bp, Artificial Sequence
  Probe
gcatgggtggttcagtggtaga

SEQ ID NO: 31738 - DNA, 23 bp, Artificial Sequence
  Probe
gcatgggtggttcagtggtagaa

SEQ ID NO: 31739 - DNA, 24 bp, Artificial Sequence
  Probe
gcatgggtggttcagtggtagaat

SEQ ID NO: 31740 - DNA, 25 bp, Artificial Sequence
  Probe
gcatgggtggttcagtggtagaatt

SEQ ID NO: 31741 - DNA, 26 bp, Artificial Sequence
  Probe
gcatgggtggttcagtggtagaattc

SEQ ID NO: 31742 - DNA, 27 bp, Artificial Sequence
  Probe
gcatgggtggttcagtggtagaattct

SEQ ID NO: 31743 - DNA, 38 bp, Artificial Sequence; identical to SEQ ID NO: 1009
  Probe

SEQ ID NO: 31744 - DNA, 43 bp, Artificial Sequence; identical to SEQ ID NO: 5873
  Probe

SEQ ID NO: 31745 - DNA, 50 bp, Artificial Sequence; identical to SEQ ID NO: 1010
  Probe

SEQ ID NO: 31746 - DNA, 34 bp, Artificial Sequence; identical to SEQ ID NO: 1011
  Probe

SEQ ID NO: 31747 - DNA, 36 bp, Artificial Sequence; identical to SEQ ID NO: 20661
  Probe

SEQ ID NO: 31748 - DNA, 41 bp, Artificial Sequence
  Probe
gcattaaccttttaagttaaagattaagagaaccaacacct

SEQ ID NO: 31749 - DNA, 15 bp, Artificial Sequence
  Probe
gcattggactgtaaa

SEQ ID NO: 31750 - DNA, 17 bp, Artificial Sequence
  Probe
gcattggactgtaaatc

SEQ ID NO: 31751 - DNA, 18 bp, Artificial Sequence
  Probe
gcattggactgtaaatct

SEQ ID NO: 31752 - DNA, 19 bp, Artificial Sequence
  Probe
gcattggactgtaaatcta

SEQ ID NO: 31753 - DNA, 20 bp, Artificial Sequence
  Probe
gcattggactgtaaatctaa

SEQ ID NO: 31754 - DNA, 37 bp, Artificial Sequence
  Probe
gcattggactgtaaatctaaagacaggggttaggcct

SEQ ID NO: 31755 - DNA, 38 bp, Artificial Sequence
  Probe
gcattggactgtaaatctaaagacaggggttaggcctc

SEQ ID NO: 31756 - DNA, 50 bp, Artificial Sequence; identical to SEQ ID NO: 5882
  Probe

SEQ ID NO: 31757 - DNA, 30 bp, Artificial Sequence; identical to SEQ ID NO: 10328
  Probe

SEQ ID NO: 31758 - DNA, 31 bp, Artificial Sequence; identical to SEQ ID NO: 5884
  Probe

SEQ ID NO: 31759 - DNA, 33 bp, Artificial Sequence; identical to SEQ ID NO: 5885
  Probe

SEQ ID NO: 31760 - DNA, 36 bp, Artificial Sequence
  Probe
gcattggtggttcaatggtagaattctcgcctccca

SEQ ID NO: 31761 - DNA, 15 bp, Artificial Sequence
  Probe
gcattggtggttcag

SEQ ID NO: 31762 - DNA, 16 bp, Artificial Sequence
  Probe
gcattggtggttcagt

SEQ ID NO: 31763 - DNA, 17 bp, Artificial Sequence
  Probe
gcattggtggttcagtg

SEQ ID NO: 31764 - DNA, 18 bp, Artificial Sequence
  Probe
gcattggtggttcagtgg

SEQ ID NO: 31765 - DNA, 19 bp, Artificial Sequence
  Probe
gcattggtggttcagtggt

SEQ ID NO: 31766 - DNA, 20 bp, Artificial Sequence
  Probe
gcattggtggttcagtggta

SEQ ID NO: 31767 - DNA, 21 bp, Artificial Sequence
  Probe
gcattggtggttcagtggtag

SEQ ID NO: 31768 - DNA, 22 bp, Artificial Sequence
  Probe
gcattggtggttcagtggtaga

SEQ ID NO: 31769 - DNA, 23 bp, Artificial Sequence
  Probe
gcattggtggttcagtggtagaa

SEQ ID NO: 31770 - DNA, 24 bp, Artificial Sequence
  Probe
gcattggtggttcagtggtagaat

SEQ ID NO: 31771 - DNA, 25 bp, Artificial Sequence
  Probe
gcattggtggttcagtggtagaatt

SEQ ID NO: 31772 - DNA, 26 bp, Artificial Sequence
  Probe
gcattggtggttcagtggtagaattc

SEQ ID NO: 31773 - DNA, 27 bp, Artificial Sequence
  Probe
gcattggtggttcagtggtagaattct

SEQ ID NO: 31774 - DNA, 28 bp, Artificial Sequence
  Probe
gcattggtggttcagtggtagaattctc

SEQ ID NO: 31775 - DNA, 29 bp, Artificial Sequence
  Probe
gcattggtggttcagtggtagaattctcg

SEQ ID NO: 31776 - DNA, 30 bp, Artificial Sequence; identical to SEQ ID NO: 5900
  Probe

SEQ ID NO: 31777 - DNA, 31 bp, Artificial Sequence; identical to SEQ ID NO: 5901
  Probe

SEQ ID NO: 31778 - DNA, 32 bp, Artificial Sequence; identical to SEQ ID NO: 5902
  Probe

SEQ ID NO: 31779 - DNA, 33 bp, Artificial Sequence; identical to SEQ ID NO: 5903
  Probe

SEQ ID NO: 31780 - DNA, 34 bp, Artificial Sequence; identical to SEQ ID NO: 5904
  Probe

SEQ ID NO: 31781 - DNA, 35 bp, Artificial Sequence; identical to SEQ ID NO: 5905
  Probe

SEQ ID NO: 31782 - DNA, 36 bp, Artificial Sequence; identical to SEQ ID NO: 5906
  Probe

SEQ ID NO: 31783 - DNA, 33 bp, Artificial Sequence; identical to SEQ ID NO: 5908
  Probe

SEQ ID NO: 31784 - DNA, 34 bp, Artificial Sequence; identical to SEQ ID NO: 5909
  Probe

SEQ ID NO: 31785 - DNA, 35 bp, Artificial Sequence; identical to SEQ ID NO: 5910
  Probe

SEQ ID NO: 31786 - DNA, 36 bp, Artificial Sequence; identical to SEQ ID NO: 5911
  Probe

SEQ ID NO: 31787 - DNA, 37 bp, Artificial Sequence; identical to SEQ ID NO: 5912
  Probe

SEQ ID NO: 31788 - DNA, 39 bp, Artificial Sequence; identical to SEQ ID NO: 1015
  Probe

SEQ ID NO: 31789 - DNA, 40 bp, Artificial Sequence; identical to SEQ ID NO: 1016
  Probe

SEQ ID NO: 31790 - DNA, 41 bp, Artificial Sequence; identical to SEQ ID NO: 1017
  Probe

SEQ ID NO: 31791 - DNA, 42 bp, Artificial Sequence; identical to SEQ ID NO: 5913
  Probe

SEQ ID NO: 31792 - DNA, 43 bp, Artificial Sequence; identical to SEQ ID NO: 5914
  Probe

SEQ ID NO: 31793 - DNA, 44 bp, Artificial Sequence; identical to SEQ ID NO: 1018
  Probe

SEQ ID NO: 31794 - DNA, 47 bp, Artificial Sequence; identical to SEQ ID NO: 5917
  Probe

SEQ ID NO: 31795 - DNA, 48 bp, Artificial Sequence; identical to SEQ ID NO: 5918
  Probe

SEQ ID NO: 31796 - DNA, 33 bp, Artificial Sequence
  Probe
gcattgtgaggacaatggcacggcaaggggagt

SEQ ID NO: 31797 - DNA, 15 bp, Artificial Sequence
  Probe
gccaaggtcgcgggt

SEQ ID NO: 31798 - DNA, 36 bp, Artificial Sequence
  Probe
gccacgcgggaggcccgggttcgattcccggccaat

SEQ ID NO: 31799 - DNA, 36 bp, Artificial Sequence
  Probe
gccagggattgtgggttcgagtcccatctggggtgg

SEQ ID NO: 31800 - DNA, 38 bp, Artificial Sequence; identical to SEQ ID NO: 5932
  Probe

SEQ ID NO: 31801 - DNA, 27 bp, Artificial Sequence
  Probe
gccatcggtgcatgggtggttcagtgg

SEQ ID NO: 31802 - DNA, 28 bp, Artificial Sequence
  Probe
gccatgatcgtatagtggttagtactct

SEQ ID NO: 31803 - DNA, 29 bp, Artificial Sequence
  Probe
gccatgatcgtatagtggttagtactctg

SEQ ID NO: 31804 - DNA, 30 bp, Artificial Sequence; identical to SEQ ID NO: 10348
  Probe

SEQ ID NO: 31805 - DNA, 31 bp, Artificial Sequence
  Probe
gccatgatcgtatagtggttagtactctgcg

SEQ ID NO: 31806 - DNA, 32 bp, Artificial Sequence
  Probe
gccatgatcgtatagtggttagtactctgcgc

SEQ ID NO: 31807 - DNA, 17 bp, Artificial Sequence
  Probe
gcccacccagggacgcc

SEQ ID NO: 31808 - DNA, 33 bp, Artificial Sequence; identical to SEQ ID NO: 5938
  Probe

SEQ ID NO: 31809 - DNA, 36 bp, Artificial Sequence; identical to SEQ ID NO: 5940
  Probe

SEQ ID NO: 31810 - DNA, 36 bp, Artificial Sequence
  Probe
gcccataccccgaaaatgttggttatacccttcccg

SEQ ID NO: 31811 - DNA, 19 bp, Artificial Sequence
  Probe
gccccaaacccactccacc

SEQ ID NO: 31812 - DNA, 20 bp, Artificial Sequence
  Probe
gccccaaacccactccacct

SEQ ID NO: 31813 - DNA, 19 bp, Artificial Sequence
  Probe
gccccagtggcctaatgga

SEQ ID NO: 31814 - DNA, 15 bp, Artificial Sequence
  Probe
gcccccatgtctaac

SEQ ID NO: 31815 - DNA, 16 bp, Artificial Sequence
  Probe
gcccccatgtctaaca

SEQ ID NO: 31816 - DNA, 17 bp, Artificial Sequence
  Probe
gcccccatgtctaacaa

SEQ ID NO: 31817 - DNA, 18 bp, Artificial Sequence
  Probe
gcccccatgtctaacaac

SEQ ID NO: 31818 - DNA, 19 bp, Artificial Sequence
  Probe
gcccccatgtctaacaaca

SEQ ID NO: 31819 - DNA, 20 bp, Artificial Sequence
  Probe
gcccccatgtctaacaacat

SEQ ID NO: 31820 - DNA, 21 bp, Artificial Sequence
  Probe
gcccccatgtctaacaacatg

SEQ ID NO: 31821 - DNA, 22 bp, Artificial Sequence
  Probe
gcccccatgtctaacaacatgg

SEQ ID NO: 31822 - DNA, 23 bp, Artificial Sequence
  Probe
gcccccatgtctaacaacatggc

SEQ ID NO: 31823 - DNA, 24 bp, Artificial Sequence
  Probe
gcccccatgtctaacaacatggct

SEQ ID NO: 31824 - DNA, 25 bp, Artificial Sequence
  Probe
gcccccatgtctaacaacatggctt

SEQ ID NO: 31825 - DNA, 26 bp, Artificial Sequence
  Probe
gcccccatgtctaacaacatggcttt

SEQ ID NO: 31826 - DNA, 27 bp, Artificial Sequence
  Probe
gcccccatgtctaacaacatggctttc

SEQ ID NO: 31827 - DNA, 28 bp, Artificial Sequence
  Probe
gcccccatgtctaacaacatggctttct

SEQ ID NO: 31828 - DNA, 29 bp, Artificial Sequence
  Probe
gcccccatgtctaacaacatggctttctc

SEQ ID NO: 31829 - DNA, 30 bp, Artificial Sequence; identical to SEQ ID NO: 5966
  Probe

SEQ ID NO: 31830 - DNA, 31 bp, Artificial Sequence; identical to SEQ ID NO: 5967
  Probe

SEQ ID NO: 31831 - DNA, 32 bp, Artificial Sequence; identical to SEQ ID NO: 5968
  Probe

SEQ ID NO: 31832 - DNA, 33 bp, Artificial Sequence; identical to SEQ ID NO: 5969
  Probe

SEQ ID NO: 31833 - DNA, 34 bp, Artificial Sequence; identical to SEQ ID NO: 5970
  Probe

SEQ ID NO: 31834 - DNA, 36 bp, Artificial Sequence
  Probe
gccccgggttcgatccccggcatctccaaggcgatc

SEQ ID NO: 31835 - DNA, 15 bp, Artificial Sequence
  Probe
gcccgcatcctccac

SEQ ID NO: 31836 - DNA, 36 bp, Artificial Sequence
  Probe
gcccgctcccttcgatagctcagctggtagagcgga

SEQ ID NO: 31837 - DNA, 15 bp, Artificial Sequence
  Probe
gcccggatagctcag

SEQ ID NO: 31838 - DNA, 17 bp, Artificial Sequence
  Probe
gcccggatagctcagtc

SEQ ID NO: 31839 - DNA, 18 bp, Artificial Sequence
  Probe
gcccggatagctcagtcg

SEQ ID NO: 31840 - DNA, 21 bp, Artificial Sequence
  Probe
gcccggatagctcagtcggta

SEQ ID NO: 31841 - DNA, 22 bp, Artificial Sequence
  Probe
gcccggatagctcagtcggtag

SEQ ID NO: 31842 - DNA, 23 bp, Artificial Sequence
  Probe
gcccggatagctcagtcggtaga

SEQ ID NO: 31843 - DNA, 24 bp, Artificial Sequence
  Probe
gcccggatagctcagtcggtagag

SEQ ID NO: 31844 - DNA, 26 bp, Artificial Sequence
  Probe
gcccggatagctcagtcggtagagca

SEQ ID NO: 31845 - DNA, 28 bp, Artificial Sequence
  Probe
gcccggatagctcagtcggtagagcatc

SEQ ID NO: 31846 - DNA, 31 bp, Artificial Sequence; identical to SEQ ID NO: 1039
  Probe

SEQ ID NO: 31847 - DNA, 34 bp, Artificial Sequence; identical to SEQ ID NO: 1042
  Probe

SEQ ID NO: 31848 - DNA, 35 bp, Artificial Sequence; identical to SEQ ID NO: 1043
  Probe

SEQ ID NO: 31849 - DNA, 15 bp, Artificial Sequence
  Probe
gcccggctagctcag

SEQ ID NO: 31850 - DNA, 17 bp, Artificial Sequence
  Probe
gcccggctagctcagtc

SEQ ID NO: 31851 - DNA, 18 bp, Artificial Sequence
  Probe
gcccggctagctcagtcg

SEQ ID NO: 31852 - DNA, 32 bp, Artificial Sequence; identical to SEQ ID NO: 5994
  Probe

SEQ ID NO: 31853 - DNA, 33 bp, Artificial Sequence; identical to SEQ ID NO: 1051
  Probe

SEQ ID NO: 31854 - DNA, 36 bp, Artificial Sequence; identical to SEQ ID NO: 5996
  Probe

SEQ ID NO: 31855 - DNA, 19 bp, Artificial Sequence
  Probe
gcccggctagctcagtcgg

SEQ ID NO: 31856 - DNA, 22 bp, Artificial Sequence
  Probe
gcccggctagctcagtcggtag

SEQ ID NO: 31857 - DNA, 23 bp, Artificial Sequence
  Probe
gcccggctagctcagtcggtaga

SEQ ID NO: 31858 - DNA, 24 bp, Artificial Sequence
  Probe
gcccggctagctcagtcggtagag

SEQ ID NO: 31859 - DNA, 25 bp, Artificial Sequence
  Probe
gcccggctagctcagtcggtagagc

SEQ ID NO: 31860 - DNA, 26 bp, Artificial Sequence
  Probe
gcccggctagctcagtcggtagagca

SEQ ID NO: 31861 - DNA, 27 bp, Artificial Sequence
  Probe
gcccggctagctcagtcggtagagcat

SEQ ID NO: 31862 - DNA, 29 bp, Artificial Sequence
  Probe
gcccggctagctcagtcggtagagcatga

SEQ ID NO: 31863 - DNA, 31 bp, Artificial Sequence; identical to SEQ ID NO: 1063
  Probe

SEQ ID NO: 31864 - DNA, 33 bp, Artificial Sequence; identical to SEQ ID NO: 1065
  Probe

SEQ ID NO: 31865 - DNA, 34 bp, Artificial Sequence; identical to SEQ ID NO: 1066
  Probe

SEQ ID NO: 31866 - DNA, 40 bp, Artificial Sequence; identical to SEQ ID NO: 1076
  Probe

SEQ ID NO: 31867 - DNA, 50 bp, Artificial Sequence; identical to SEQ ID NO: 1078
  Probe

SEQ ID NO: 31868 - DNA, 31 bp, Artificial Sequence; identical to SEQ ID NO: 1081
  Probe

SEQ ID NO: 31869 - DNA, 39 bp, Artificial Sequence; identical to SEQ ID NO: 6001
  Probe

SEQ ID NO: 31870 - DNA, 40 bp, Artificial Sequence; identical to SEQ ID NO: 1088
  Probe

SEQ ID NO: 31871 - DNA, 42 bp, Artificial Sequence; identical to SEQ ID NO: 1089
  Probe

SEQ ID NO: 31872 - DNA, 50 bp, Artificial Sequence; identical to SEQ ID NO: 1091
  Probe

SEQ ID NO: 31873 - DNA, 50 bp, Artificial Sequence; identical to SEQ ID NO: 6007
  Probe

SEQ ID NO: 31874 - DNA, 31 bp, Artificial Sequence
  Probe
gcccgtctctgtggcgcaatcggttagcgcg

SEQ ID NO: 31875 - DNA, 36 bp, Artificial Sequence
  Probe
gcccgtctctgtggcgcaatcggttagcgcgttcgg

SEQ ID NO: 31876 - DNA, 19 bp, Artificial Sequence
  Probe
gcccgtttctgtagcgcga

SEQ ID NO: 31877 - DNA, 21 bp, Artificial Sequence
  Probe
gcccgtttctgtagcgcgatc

SEQ ID NO: 31878 - DNA, 29 bp, Artificial Sequence
  Probe
gcccgtttctgtagcgcgatcggttagcg

SEQ ID NO: 31879 - DNA, 36 bp, Artificial Sequence
  Probe
gcccgtttctgtagcgcgatcggttagcgccttcgg

SEQ ID NO: 31880 - DNA, 41 bp, Artificial Sequence
  Probe
gcccgtttctgtagcgcgatcggttagcgccttcggctgtt

SEQ ID NO: 31881 - DNA, 29 bp, Artificial Sequence
  Probe
gccgaaattttagactggcgttcagtcga

SEQ ID NO: 31882 - DNA, 36 bp, Artificial Sequence
  Probe
gccgcagcaacctcggttcgaatccgagtcacggca

SEQ ID NO: 31883 - DNA, 39 bp, Artificial Sequence
  Probe
gccgcagcaacctcggttcgaatccgagtcacggcagga

SEQ ID NO: 31884 - DNA, 39 bp, Artificial Sequence
  Probe
gccgcagcaacctcggttcgaatccgagtcacggcagta

SEQ ID NO: 31885 - DNA, 35 bp, Artificial Sequence
  Probe
gccgcgcattggtggttcagtggtagaattctcgc

SEQ ID NO: 31886 - DNA, 36 bp, Artificial Sequence
  Probe
gccgcgcattggtggttcagtggtagaattctcgcc

SEQ ID NO: 31887 - DNA, 32 bp, Artificial Sequence; identical to SEQ ID NO: 1102
  Probe

SEQ ID NO: 31888 - DNA, 36 bp, Artificial Sequence
  Probe
gccggctcgttggtctaggggtatgattctcgcttt

SEQ ID NO: 31889 - DNA, 16 bp, Artificial Sequence
  Probe
gccgggtactttcgta

SEQ ID NO: 31890 - DNA, 18 bp, Artificial Sequence
  Probe
gccgggtactttcgtatt

SEQ ID NO: 31891 - DNA, 19 bp, Artificial Sequence
  Probe
gccgggtactttcgtattt

SEQ ID NO: 31892 - DNA, 20 bp, Artificial Sequence
  Probe
gccgggtactttcgtatttt

SEQ ID NO: 31893 - DNA, 21 bp, Artificial Sequence
  Probe
gccgggtactttcgtattttt

SEQ ID NO: 31894 - DNA, 22 bp, Artificial Sequence
  Probe
gccgggtactttcgtattttta

SEQ ID NO: 31895 - DNA, 16 bp, Artificial Sequence
  Probe
gccggtagtcgactcg

SEQ ID NO: 31896 - DNA, 17 bp, Artificial Sequence
  Probe
gccggtagtcgactcgg

SEQ ID NO: 31897 - DNA, 33 bp, Artificial Sequence; identical to SEQ ID NO: 20890
  Probe

SEQ ID NO: 31898 - DNA, 36 bp, Artificial Sequence
  Probe
gccgtcgtcctcgttagtatagtggtgagtatcccc

SEQ ID NO: 31899 - DNA, 36 bp, Artificial Sequence
  Probe
gccgtctcccacatggtctagcggttaggattcctg

SEQ ID NO: 31900 - DNA, 15 bp, Artificial Sequence
  Probe
gccgtgatcgtatag

SEQ ID NO: 31901 - DNA, 16 bp, Artificial Sequence
  Probe
gccgtgatcgtatagt

SEQ ID NO: 31902 - DNA, 21 bp, Artificial Sequence
  Probe
gccgtgatcgtatagtggtta

SEQ ID NO: 31903 - DNA, 23 bp, Artificial Sequence
  Probe
gccgtgatcgtatagtggttagt

SEQ ID NO: 31904 - DNA, 24 bp, Artificial Sequence
  Probe
gccgtgatcgtatagtggttagta

SEQ ID NO: 31905 - DNA, 25 bp, Artificial Sequence
  Probe
gccgtgatcgtatagtggttagtac

SEQ ID NO: 31906 - DNA, 26 bp, Artificial Sequence
  Probe
gccgtgatcgtatagtggttagtact

SEQ ID NO: 31907 - DNA, 27 bp, Artificial Sequence
  Probe
gccgtgatcgtatagtggttagtactc

SEQ ID NO: 31908 - DNA, 28 bp, Artificial Sequence
  Probe
gccgtgatcgtatagtggttagtactct

SEQ ID NO: 31909 - DNA, 29 bp, Artificial Sequence
  Probe
gccgtgatcgtatagtggttagtactctg

SEQ ID NO: 31910 - DNA, 35 bp, Artificial Sequence; identical to SEQ ID NO: 1110
  Probe

SEQ ID NO: 31911 - DNA, 37 bp, Artificial Sequence; identical to SEQ ID NO: 6039
  Probe

SEQ ID NO: 31912 - DNA, 39 bp, Artificial Sequence; identical to SEQ ID NO: 13591
  Probe

SEQ ID NO: 31913 - DNA, 50 bp, Artificial Sequence; identical to SEQ ID NO: 6040
  Probe

SEQ ID NO: 31914 - DNA, 15 bp, Artificial Sequence
  Probe
gcctcgttagcgcag

SEQ ID NO: 31915 - DNA, 19 bp, Artificial Sequence
  Probe
gcctcgttagcgcagtagg

SEQ ID NO: 31916 - DNA, 36 bp, Artificial Sequence
  Probe
gcctctccctggtggtctagtggttaggattcggcg

SEQ ID NO: 31917 - DNA, 19 bp, Artificial Sequence
  Probe
gcctggatagctcagtcgg

SEQ ID NO: 31918 - DNA, 32 bp, Artificial Sequence; identical to SEQ ID NO: 1116
  Probe

SEQ ID NO: 31919 - DNA, 33 bp, Artificial Sequence; identical to SEQ ID NO: 1117
  Probe

SEQ ID NO: 31920 - DNA, 33 bp, Artificial Sequence; identical to SEQ ID NO: 1128
  Probe

SEQ ID NO: 31921 - DNA, 36 bp, Artificial Sequence; identical to SEQ ID NO: 13618
  Probe

SEQ ID NO: 31922 - DNA, 22 bp, Artificial Sequence
  Probe
gcctgtccttgtagtataaact

SEQ ID NO: 31923 - DNA, 15 bp, Artificial Sequence
  Probe
gcctgtgacttttgt

SEQ ID NO: 31924 - DNA, 36 bp, Artificial Sequence
  Probe
gccttcaaagccctcagtaagttgcaatacttaatt

SEQ ID NO: 31925 - DNA, 16 bp, Artificial Sequence
  Probe
gccttccttcgttggc

SEQ ID NO: 31926 - DNA, 22 bp, Artificial Sequence
  Probe
gccttccttcgttggctctgcc

SEQ ID NO: 31927 - DNA, 23 bp, Artificial Sequence
  Probe
gccttccttcgttggctctgcct

SEQ ID NO: 31928 - DNA, 24 bp, Artificial Sequence
  Probe
gccttccttcgttggctctgcctg

SEQ ID NO: 31929 - DNA, 26 bp, Artificial Sequence
  Probe
gccttccttcgttggctctgcctgcc

SEQ ID NO: 31930 - DNA, 30 bp, Artificial Sequence; identical to SEQ ID NO: 20987
  Probe

SEQ ID NO: 31931 - DNA, 30 bp, Artificial Sequence; identical to SEQ ID NO: 10435
  Probe

SEQ ID NO: 31932 - DNA, 31 bp, Artificial Sequence
  Probe
gccttggtggtgcagtggtagaattctcgcc

SEQ ID NO: 31933 - DNA, 32 bp, Artificial Sequence; identical to SEQ ID NO: 6071
  Probe

SEQ ID NO: 31934 - DNA, 36 bp, Artificial Sequence
  Probe
gccttggtggtgcagtggtagaattctcgcctccca

SEQ ID NO: 31935 - DNA, 25 bp, Artificial Sequence
  Probe
gccttttttcccggcggcgggagaa

SEQ ID NO: 31936 - DNA, 16 bp, Artificial Sequence
  Probe
gcgagaggtagcggga

SEQ ID NO: 31937 - DNA, 16 bp, Artificial Sequence
  Probe
gcgagaggtcccgggt

SEQ ID NO: 31938 - DNA, 34 bp, Artificial Sequence; identical to SEQ ID NO: 21014
  Probe

SEQ ID NO: 31939 - DNA, 36 bp, Artificial Sequence
  Probe
gcgaggcattggtggttcagtggtagaattctcgcc

SEQ ID NO: 31940 - DNA, 37 bp, Artificial Sequence
  Probe
gcgaggcattggtggttcagtggtagaattctcgcct

SEQ ID NO: 31941 - DNA, 28 bp, Artificial Sequence
  Probe
gcgatccgagttcaaatctcggtgggac

SEQ ID NO: 31942 - DNA, 18 bp, Artificial Sequence
  Probe
gcgcaagtaggtctacaa

SEQ ID NO: 31943 - DNA, 36 bp, Artificial Sequence; identical to SEQ ID NO: 21023
  Probe

SEQ ID NO: 31944 - DNA, 32 bp, Artificial Sequence
  Probe
gcgcattggtggttcagtggtagaattctcgc

SEQ ID NO: 31945 - DNA, 33 bp, Artificial Sequence; identical to SEQ ID NO: 21025
  Probe

SEQ ID NO: 31946 - DNA, 34 bp, Artificial Sequence
  Probe
gcgcattggtggttcagtggtagaattctcgcct

SEQ ID NO: 31947 - DNA, 36 bp, Artificial Sequence
  Probe
gcgcattggtggttcagtggtagaattctcgcctgc

SEQ ID NO: 31948 - DNA, 15 bp, Artificial Sequence
  Probe
gcgcccggatagctc

SEQ ID NO: 31949 - DNA, 36 bp, Artificial Sequence
  Probe
gcgcccttcgatagctcagctggtagagcggaggac

SEQ ID NO: 31950 - DNA, 27 bp, Artificial Sequence
  Probe
gcgccgctggtgtagtggtatcatgca

SEQ ID NO: 31951 - DNA, 29 bp, Artificial Sequence
  Probe
gcgccgctggtgtagtggtatcatgcaag

SEQ ID NO: 31952 - DNA, 30 bp, Artificial Sequence; identical to SEQ ID NO: 1149
  Probe

SEQ ID NO: 31953 - DNA, 34 bp, Artificial Sequence; identical to SEQ ID NO: 1153
  Probe

SEQ ID NO: 31954 - DNA, 36 bp, Artificial Sequence
  Probe
gcgcgttcggctgttaaccgaaaggttggtggttcg

SEQ ID NO: 31955 - DNA, 36 bp, Artificial Sequence
  Probe
gcgcgtttggctgttaactaaaaggttggtggttcg

SEQ ID NO: 31956 - DNA, 21 bp, Artificial Sequence
  Probe
gcgctctcaccgccgcggccc

SEQ ID NO: 31957 - DNA, 47 bp, Artificial Sequence
  Probe
gcgctctcaccgccgcggcccgggttcgattcccggtcagggaaaga

SEQ ID NO: 31958 - DNA, 47 bp, Artificial Sequence
  Probe
gcgctctcaccgccgcggcccgggttcgattcccggtcagggaagcc

SEQ ID NO: 31959 - DNA, 47 bp, Artificial Sequence
  Probe
gcgctctcaccgccgcggcccgggttcgattcccggtcagggaatga

SEQ ID NO: 31960 - DNA, 19 bp, Artificial Sequence
  Probe
gcggaagcgtgctgggccc

SEQ ID NO: 31961 - DNA, 36 bp, Artificial Sequence
  Probe
gcggagccttcgatagctcagttggtagagcggagg

SEQ ID NO: 31962 - DNA, 36 bp, Artificial Sequence
  Probe
gcggctgtgatggccgagtggttaaggcgttggact

SEQ ID NO: 31963 - DNA, 18 bp, Artificial Sequence
  Probe
gcggcttagcctgtggct

SEQ ID NO: 31964 - DNA, 19 bp, Artificial Sequence
  Probe
gcggcttagcctgtggctc

SEQ ID NO: 31965 - DNA, 20 bp, Artificial Sequence
  Probe
gcggcttagcctgtggctcg

SEQ ID NO: 31966 - DNA, 36 bp, Artificial Sequence
  Probe
gcggcttagcctgtggctcgccgtgatcgtatagtg

SEQ ID NO: 31967 - DNA, 15 bp, Artificial Sequence
  Probe
gcgggagaccggggt

SEQ ID NO: 31968 - DNA, 32 bp, Artificial Sequence; identical to SEQ ID NO: 6106
  Probe

SEQ ID NO: 31969 - DNA, 36 bp, Artificial Sequence; identical to SEQ ID NO: 21073
  Probe

SEQ ID NO: 31970 - DNA, 25 bp, Artificial Sequence
  Probe
gcgggagaccggggttcgattcccc

SEQ ID NO: 31971 - DNA, 26 bp, Artificial Sequence
  Probe
gcgggagaccggggttcgattcccca

SEQ ID NO: 31972 - DNA, 32 bp, Artificial Sequence
  Probe
gcgggagaccggggttcgattccccaacgggg

SEQ ID NO: 31973 - DNA, 26 bp, Artificial Sequence
  Probe
gcgggagaccggggttcgattccccg

SEQ ID NO: 31974 - DNA, 29 bp, Artificial Sequence
  Probe
gcgggagaccggggttcgattccccgacg

SEQ ID NO: 31975 - DNA, 30 bp, Artificial Sequence; identical to SEQ ID NO: 1169
  Probe

SEQ ID NO: 31976 - DNA, 31 bp, Artificial Sequence; identical to SEQ ID NO: 1170
  Probe

SEQ ID NO: 31977 - DNA, 32 bp, Artificial Sequence; identical to SEQ ID NO: 1171
  Probe

SEQ ID NO: 31978 - DNA, 34 bp, Artificial Sequence; identical to SEQ ID NO: 1173
  Probe

SEQ ID NO: 31979 - DNA, 35 bp, Artificial Sequence; identical to SEQ ID NO: 6112
  Probe

SEQ ID NO: 31980 - DNA, 36 bp, Artificial Sequence; identical to SEQ ID NO: 6115
  Probe

SEQ ID NO: 31981 - DNA, 36 bp, Artificial Sequence; identical to SEQ ID NO: 21086
  Probe

SEQ ID NO: 31982 - DNA, 35 bp, Artificial Sequence; identical to SEQ ID NO: 6118
  Probe

SEQ ID NO: 31983 - DNA, 36 bp, Artificial Sequence; identical to SEQ ID NO: 6120
  Probe

SEQ ID NO: 31984 - DNA, 37 bp, Artificial Sequence; identical to SEQ ID NO: 6121
  Probe

SEQ ID NO: 31985 - DNA, 15 bp, Artificial Sequence
  Probe
gcgggaggcccgggt

SEQ ID NO: 31986 - DNA, 16 bp, Artificial Sequence
  Probe
gcgggaggcccgggtt

SEQ ID NO: 31987 - DNA, 32 bp, Artificial Sequence; identical to SEQ ID NO: 21098
  Probe

SEQ ID NO: 31988 - DNA, 15 bp, Artificial Sequence
  Probe
gcgggcggacctttt

SEQ ID NO: 31989 - DNA, 16 bp, Artificial Sequence
  Probe
gcgggcggaccttttg

SEQ ID NO: 31990 - DNA, 15 bp, Artificial Sequence
  Probe
gcgggtgctcttatt

SEQ ID NO: 31991 - DNA, 16 bp, Artificial Sequence
  Probe
gcgggtgctcttattt

SEQ ID NO: 31992 - DNA, 17 bp, Artificial Sequence
  Probe
gcgggtgctcttatttt

SEQ ID NO: 31993 - DNA, 22 bp, Artificial Sequence
  Probe
gcggtcggccggttagctcagt

SEQ ID NO: 31994 - DNA, 24 bp, Artificial Sequence
  Probe
gcgttcgattcccggtcagggaac

SEQ ID NO: 31995 - DNA, 15 bp, Artificial Sequence
  Probe
gcgttggtggtatag

SEQ ID NO: 31996 - DNA, 28 bp, Artificial Sequence
  Probe
gcgttggtggtatagtggtaagcatagc

SEQ ID NO: 31997 - DNA, 30 bp, Artificial Sequence; identical to SEQ ID NO: 1183
  Probe

SEQ ID NO: 31998 - DNA, 31 bp, Artificial Sequence; identical to SEQ ID NO: 1184
  Probe

SEQ ID NO: 31999 - DNA, 33 bp, Artificial Sequence; identical to SEQ ID NO: 1186
  Probe

SEQ ID NO: 32000 - DNA, 50 bp, Artificial Sequence; identical to SEQ ID NO: 1192
  Probe

SEQ ID NO: 32001 - DNA, 28 bp, Artificial Sequence
  Probe
gcgttggtggtatagtggtgagcatagc

SEQ ID NO: 32002 - DNA, 29 bp, Artificial Sequence
  Probe
gcgttggtggtatagtggtgagcatagct

SEQ ID NO: 32003 - DNA, 30 bp, Artificial Sequence; identical to SEQ ID NO: 6150
  Probe

SEQ ID NO: 32004 - DNA, 31 bp, Artificial Sequence; identical to SEQ ID NO: 6151
  Probe

SEQ ID NO: 32005 - DNA, 32 bp, Artificial Sequence; identical to SEQ ID NO: 6152
  Probe

SEQ ID NO: 32006 - DNA, 33 bp, Artificial Sequence; identical to SEQ ID NO: 6153
  Probe

SEQ ID NO: 32007 - DNA, 34 bp, Artificial Sequence; identical to SEQ ID NO: 6154
  Probe

SEQ ID NO: 32008 - DNA, 35 bp, Artificial Sequence; identical to SEQ ID NO: 6155
  Probe

SEQ ID NO: 32009 - DNA, 36 bp, Artificial Sequence; identical to SEQ ID NO: 6156
  Probe

SEQ ID NO: 32010 - DNA, 28 bp, Artificial Sequence
  Probe
gcgttggtggtatagtggttagcatagc

SEQ ID NO: 32011 - DNA, 29 bp, Artificial Sequence
  Probe
gcgttggtggtatagtggttagcatagct

SEQ ID NO: 32012 - DNA, 30 bp, Artificial Sequence; identical to SEQ ID NO: 6172
  Probe

SEQ ID NO: 32013 - DNA, 31 bp, Artificial Sequence; identical to SEQ ID NO: 6173
  Probe

SEQ ID NO: 32014 - DNA, 32 bp, Artificial Sequence; identical to SEQ ID NO: 6174
  Probe

SEQ ID NO: 32015 - DNA, 33 bp, Artificial Sequence; identical to SEQ ID NO: 6175
  Probe

SEQ ID NO: 32016 - DNA, 36 bp, Artificial Sequence; identical to SEQ ID NO: 6178
  Probe

SEQ ID NO: 32017 - DNA, 50 bp, Artificial Sequence; identical to SEQ ID NO: 1197
  Probe

SEQ ID NO: 32018 - DNA, 30 bp, Artificial Sequence; identical to SEQ ID NO: 10512
  Probe

SEQ ID NO: 32019 - DNA, 31 bp, Artificial Sequence; identical to SEQ ID NO: 6187
  Probe

SEQ ID NO: 32020 - DNA, 32 bp, Artificial Sequence; identical to SEQ ID NO: 6188
  Probe

SEQ ID NO: 32021 - DNA, 33 bp, Artificial Sequence; identical to SEQ ID NO: 21178
  Probe

SEQ ID NO: 32022 - DNA, 36 bp, Artificial Sequence
  Probe
gcgttggtggtttagtggtagaattctcgcctccca

SEQ ID NO: 32023 - DNA, 15 bp, Artificial Sequence
  Probe
gctaaacctagcccc

SEQ ID NO: 32024 - DNA, 16 bp, Artificial Sequence
  Probe
gctaaacctagcccca

SEQ ID NO: 32025 - DNA, 18 bp, Artificial Sequence
  Probe
gctaaacctagccccaaa

SEQ ID NO: 32026 - DNA, 19 bp, Artificial Sequence
  Probe
gctaaacctagccccaaac

SEQ ID NO: 32027 - DNA, 20 bp, Artificial Sequence
  Probe
gctaaacctagccccaaacc

SEQ ID NO: 32028 - DNA, 21 bp, Artificial Sequence
  Probe
gctaaacctagccccaaaccc

SEQ ID NO: 32029 - DNA, 22 bp, Artificial Sequence
  Probe
gctaaacctagccccaaaccca

SEQ ID NO: 32030 - DNA, 23 bp, Artificial Sequence
  Probe
gctaaacctagccccaaacccac

SEQ ID NO: 32031 - DNA, 24 bp, Artificial Sequence
  Probe
gctaaacctagccccaaacccact

SEQ ID NO: 32032 - DNA, 25 bp, Artificial Sequence
  Probe
gctaaacctagccccaaacccactc

SEQ ID NO: 32033 - DNA, 26 bp, Artificial Sequence
  Probe
gctaaacctagccccaaacccactcc

SEQ ID NO: 32034 - DNA, 27 bp, Artificial Sequence
  Probe
gctaaacctagccccaaacccactcca

SEQ ID NO: 32035 - DNA, 28 bp, Artificial Sequence
  Probe
gctaaacctagccccaaacccactccac

SEQ ID NO: 32036 - DNA, 29 bp, Artificial Sequence
  Probe
gctaaacctagccccaaacccactccacc

SEQ ID NO: 32037 - DNA, 30 bp, Artificial Sequence; identical to SEQ ID NO: 6203
  Probe

SEQ ID NO: 32038 - DNA, 19 bp, Artificial Sequence
  Probe
gctaaataagctatcgggc

SEQ ID NO: 32039 - DNA, 20 bp, Artificial Sequence
  Probe
gctaaataagctatcgggcc

SEQ ID NO: 32040 - DNA, 21 bp, Artificial Sequence
  Probe
gctaaataagctatcgggccc

SEQ ID NO: 32041 - DNA, 22 bp, Artificial Sequence
  Probe
gctaaataagctatcgggccca

SEQ ID NO: 32042 - DNA, 23 bp, Artificial Sequence
  Probe
gctaaataagctatcgggcccat

SEQ ID NO: 32043 - DNA, 26 bp, Artificial Sequence
  Probe
gctaaataagctatcgggcccatacc

SEQ ID NO: 32044 - DNA, 16 bp, Artificial Sequence
  Probe
gctaactcatgccccc

SEQ ID NO: 32045 - DNA, 21 bp, Artificial Sequence
  Probe
gctaactcatgcccccatgtc

SEQ ID NO: 32046 - DNA, 22 bp, Artificial Sequence
  Probe
gctaactcatgcccccatgtct

SEQ ID NO: 32047 - DNA, 25 bp, Artificial Sequence
  Probe
gctaactcatgcccccatgtctaac

SEQ ID NO: 32048 - DNA, 26 bp, Artificial Sequence
  Probe
gctaactcatgcccccatgtctaaca

SEQ ID NO: 32049 - DNA, 29 bp, Artificial Sequence
  Probe
gctaactcatgcccccatgtctaacaaca

SEQ ID NO: 32050 - DNA, 36 bp, Artificial Sequence; identical to SEQ ID NO: 6219
  Probe

SEQ ID NO: 32051 - DNA, 42 bp, Artificial Sequence; identical to SEQ ID NO: 6225
  Probe

SEQ ID NO: 32052 - DNA, 43 bp, Artificial Sequence; identical to SEQ ID NO: 6226
  Probe

SEQ ID NO: 32053 - DNA, 24 bp, Artificial Sequence
  Probe
gctaaggaagtcctgtgctcagtt

SEQ ID NO: 32054 - DNA, 25 bp, Artificial Sequence
  Probe
gctaaggaagtcctgtgctcagttt

SEQ ID NO: 32055 - DNA, 26 bp, Artificial Sequence
  Probe
gctaaggaagtcctgtgctcagtttt

SEQ ID NO: 32056 - DNA, 27 bp, Artificial Sequence
  Probe
gctaaggaagtcctgtgctcagttttg

SEQ ID NO: 32057 - DNA, 18 bp, Artificial Sequence
  Probe
gctaaggactgcaaaacc

SEQ ID NO: 32058 - DNA, 19 bp, Artificial Sequence
  Probe
gctaaggactgcaaaaccc

SEQ ID NO: 32059 - DNA, 20 bp, Artificial Sequence
  Probe
gctaaggactgcaaaacccc

SEQ ID NO: 32060 - DNA, 23 bp, Artificial Sequence
  Probe
gctaaggactgcaaaaccccact

SEQ ID NO: 32061 - DNA, 25 bp, Artificial Sequence
  Probe
gctaaggactgcaaaaccccactct

SEQ ID NO: 32062 - DNA, 50 bp, Artificial Sequence
  Probe
gctaatccattgtgctctgcacgcgtgggttcgaatcccatcctcgtcgc

SEQ ID NO: 32063 - DNA, 15 bp, Artificial Sequence
  Probe
gctaatggtggagtt

SEQ ID NO: 32064 - DNA, 16 bp, Artificial Sequence
  Probe
gctaatggtggagtta

SEQ ID NO: 32065 - DNA, 17 bp, Artificial Sequence
  Probe
gctaatggtggagttaa

SEQ ID NO: 32066 - DNA, 21 bp, Artificial Sequence
  Probe
gctaatggtggagttaaagac

SEQ ID NO: 32067 - DNA, 33 bp, Artificial Sequence; identical to SEQ ID NO: 6232
  Probe

SEQ ID NO: 32068 - DNA, 19 bp, Artificial Sequence
  Probe
gctagctcagtcggtagag

SEQ ID NO: 32069 - DNA, 29 bp, Artificial Sequence
  Probe
gctagctcagtcggtagagcatgagaccc

SEQ ID NO: 32070 - DNA, 28 bp, Artificial Sequence
  Probe
gctagctcagtcggtagagcatgagact

SEQ ID NO: 32071 - DNA, 29 bp, Artificial Sequence
  Probe
gctagctcagtcggtagagcatgagactc

SEQ ID NO: 32072 - DNA, 36 bp, Artificial Sequence
  Probe
gctagctcagtcggtagagcatgagactcttaatct

SEQ ID NO: 32073 - DNA, 30 bp, Artificial Sequence; identical to SEQ ID NO: 21246
  Probe

SEQ ID NO: 32074 - DNA, 25 bp, Artificial Sequence
  Probe
gctataagcattggtggttcagtgg

SEQ ID NO: 32075 - DNA, 15 bp, Artificial Sequence
  Probe
gctatagggtggaga

SEQ ID NO: 32076 - DNA, 15 bp, Artificial Sequence
  Probe
gctatccattggtct

SEQ ID NO: 32077 - DNA, 16 bp, Artificial Sequence
  Probe
gctatccattggtctt

SEQ ID NO: 32078 - DNA, 17 bp, Artificial Sequence
  Probe
gctatccattggtctta

SEQ ID NO: 32079 - DNA, 21 bp, Artificial Sequence
  Probe
gctatccattggtcttaggcc

SEQ ID NO: 32080 - DNA, 23 bp, Artificial Sequence
  Probe
gctatccattggtcttaggcccc

SEQ ID NO: 32081 - DNA, 36 bp, Artificial Sequence
  Probe
gctatccattggtcttaggccccaaaaattttggtg

SEQ ID NO: 32082 - DNA, 15 bp, Artificial Sequence
  Probe
gctatcggagttttt

SEQ ID NO: 32083 - DNA, 15 bp, Artificial Sequence
  Probe
gctatcgggcccata

SEQ ID NO: 32084 - DNA, 16 bp, Artificial Sequence
  Probe
gctatcgggcccatac

SEQ ID NO: 32085 - DNA, 17 bp, Artificial Sequence
  Probe
gctatcgggcccatacc

SEQ ID NO: 32086 - DNA, 18 bp, Artificial Sequence
  Probe
gctatcgggcccataccc

SEQ ID NO: 32087 - DNA, 19 bp, Artificial Sequence
  Probe
gctatcgggcccatacccc

SEQ ID NO: 32088 - DNA, 32 bp, Artificial Sequence; identical to SEQ ID NO: 21263
  Probe

SEQ ID NO: 32089 - DNA, 36 bp, Artificial Sequence
  Probe
gctatcgggcccataccccgaaaatgttggttatac

SEQ ID NO: 32090 - DNA, 16 bp, Artificial Sequence
  Probe
gctcacaagaactgct

SEQ ID NO: 32091 - DNA, 19 bp, Artificial Sequence
  Probe
gctcacaagaactgctaac

SEQ ID NO: 32092 - DNA, 21 bp, Artificial Sequence
  Probe
gctcacaagaactgctaactc

SEQ ID NO: 32093 - DNA, 22 bp, Artificial Sequence
  Probe
gctcacaagaactgctaactca

SEQ ID NO: 32094 - DNA, 24 bp, Artificial Sequence
  Probe
gctcacaagaactgctaactcatg

SEQ ID NO: 32095 - DNA, 26 bp, Artificial Sequence
  Probe
gctcacaagaactgctaactcatgcc

SEQ ID NO: 32096 - DNA, 15 bp, Artificial Sequence
  Probe
gctcagtcggtagag

SEQ ID NO: 32097 - DNA, 24 bp, Artificial Sequence
  Probe
gctcagtcggtagagcatcagact

SEQ ID NO: 32098 - DNA, 26 bp, Artificial Sequence
  Probe
gctcagtcggtagagcatcagacttt

SEQ ID NO: 32099 - DNA, 27 bp, Artificial Sequence
  Probe
gctcagtcggtagagcatcagactttt

SEQ ID NO: 32100 - DNA, 24 bp, Artificial Sequence
  Probe
gctcagtcggtagagcatgagact

SEQ ID NO: 32101 - DNA, 31 bp, Artificial Sequence
  Probe
gctcagtcggtagagcatgggactcttaatc

SEQ ID NO: 32102 - DNA, 32 bp, Artificial Sequence
  Probe
gctcagtcggtagagcatgggactcttaatcc

SEQ ID NO: 32103 - DNA, 36 bp, Artificial Sequence
  Probe
gctcccttcgatagctcagctggtagagcggaggac

SEQ ID NO: 32104 - DNA, 50 bp, Artificial Sequence
  Probe
gctcccttcgatagctcagctggtagagcggaggactgtaggcgcgcgcc

SEQ ID NO: 32105 - DNA, 28 bp, Artificial Sequence
  Probe
gctccgaggtgattttcatattgaattg

SEQ ID NO: 32106 - DNA, 30 bp, Artificial Sequence; identical to SEQ ID NO: 1206
  Probe

SEQ ID NO: 32107 - DNA, 36 bp, Artificial Sequence
  Probe
gctccgaggtgattttcatattgaattgcaaattcg

SEQ ID NO: 32108 - DNA, 30 bp, Artificial Sequence
  Probe
gctcgaagatatatgtatatatcctcttcc

SEQ ID NO: 32109 - DNA, 23 bp, Artificial Sequence
  Probe
gctcgaaggacttcgtctgtaat

SEQ ID NO: 32110 - DNA, 30 bp, Artificial Sequence; identical to SEQ ID NO: 21297
  Probe

SEQ ID NO: 32111 - DNA, 17 bp, Artificial Sequence
  Probe
gctctcaccgccgcggc

SEQ ID NO: 32112 - DNA, 19 bp, Artificial Sequence
  Probe
gctctcaccgccgcggccc

SEQ ID NO: 32113 - DNA, 23 bp, Artificial Sequence
  Probe
gctctcaccgccgcggcccgggt

SEQ ID NO: 32114 - DNA, 36 bp, Artificial Sequence
  Probe
gctctcaccgccgcggcccgggttcgattcccggtc

SEQ ID NO: 32115 - DNA, 29 bp, Artificial Sequence
  Probe
gctctccttttatgagctggtcgcgggaa

SEQ ID NO: 32116 - DNA, 19 bp, Artificial Sequence
  Probe
gctgagtgaagcattggac

SEQ ID NO: 32117 - DNA, 20 bp, Artificial Sequence
  Probe
gctgagtgaagcattggact

SEQ ID NO: 32118 - DNA, 22 bp, Artificial Sequence
  Probe
gctgagtgaagcattggactgt

SEQ ID NO: 32119 - DNA, 23 bp, Artificial Sequence
  Probe
gctgagtgaagcattggactgta

SEQ ID NO: 32120 - DNA, 24 bp, Artificial Sequence
  Probe
gctgagtgaagcattggactgtaa

SEQ ID NO: 32121 - DNA, 25 bp, Artificial Sequence
  Probe
gctgagtgaagcattggactgtaaa

SEQ ID NO: 32122 - DNA, 26 bp, Artificial Sequence
  Probe
gctgagtgaagcattggactgtaaat

SEQ ID NO: 32123 - DNA, 27 bp, Artificial Sequence
  Probe
gctgagtgaagcattggactgtaaatc

SEQ ID NO: 32124 - DNA, 28 bp, Artificial Sequence
  Probe
gctgagtgaagcattggactgtaaatct

SEQ ID NO: 32125 - DNA, 36 bp, Artificial Sequence
  Probe
gctgagtgaagcattggactgtaaatctaaagacag

SEQ ID NO: 32126 - DNA, 36 bp, Artificial Sequence; identical to SEQ ID NO: 21307
  Probe

SEQ ID NO: 32127 - DNA, 36 bp, Artificial Sequence
  Probe
gctgttaactaagtgtttgtgggtttaagtcccatt

SEQ ID NO: 32128 - DNA, 30 bp, Artificial Sequence; identical to SEQ ID NO: 6308
  Probe

SEQ ID NO: 32129 - DNA, 16 bp, Artificial Sequence
  Probe
gcttagcctgtggctc

SEQ ID NO: 32130 - DNA, 25 bp, Artificial Sequence
  Probe
gcttagttggttaaagcgcctgtct

SEQ ID NO: 32131 - DNA, 36 bp, Artificial Sequence
  Probe
gcttccttcgatagctcagctggtagagcggaggac

SEQ ID NO: 32132 - DNA, 33 bp, Artificial Sequence; identical to SEQ ID NO: 6322
  Probe

SEQ ID NO: 32133 - DNA, 36 bp, Artificial Sequence
  Probe
gcttctgtaatgtagtggttatcacattcgcctcac

SEQ ID NO: 32134 - DNA, 15 bp, Artificial Sequence
  Probe
gcttctgtagtgtag

SEQ ID NO: 32135 - DNA, 30 bp, Artificial Sequence; identical to SEQ ID NO: 8646
  Probe

SEQ ID NO: 32136 - DNA, 31 bp, Artificial Sequence; identical to SEQ ID NO: 1213
  Probe

SEQ ID NO: 32137 - DNA, 35 bp, Artificial Sequence; identical to SEQ ID NO: 1217
  Probe

SEQ ID NO: 32138 - DNA, 37 bp, Artificial Sequence; identical to SEQ ID NO: 6324
  Probe

SEQ ID NO: 32139 - DNA, 50 bp, Artificial Sequence; identical to SEQ ID NO: 1219
  Probe

SEQ ID NO: 32140 - DNA, 22 bp, Artificial Sequence
  Probe
gcttgttgtgattcctccattt

SEQ ID NO: 32141 - DNA, 23 bp, Artificial Sequence
  Probe
gcttgttgtgattcctccatttt

SEQ ID NO: 32142 - DNA, 19 bp, Artificial Sequence
  Probe
gctttcaccgccgcggccc

SEQ ID NO: 32143 - DNA, 21 bp, Artificial Sequence
  Probe
gctttgcacgtatgaggcccc

SEQ ID NO: 32144 - DNA, 23 bp, Artificial Sequence
  Probe
gctttgcacgtatgaggccccgg

SEQ ID NO: 32145 - DNA, 27 bp, Artificial Sequence
  Probe
gctttgcacgtatgaggccccgggttc

SEQ ID NO: 32146 - DNA, 15 bp, Artificial Sequence
  Probe
gctttggggggttcg

SEQ ID NO: 32147 - DNA, 16 bp, Artificial Sequence
  Probe
gctttggggggttcga

SEQ ID NO: 32148 - DNA, 18 bp, Artificial Sequence
  Probe
gctttggggggttcgatt

SEQ ID NO: 32149 - DNA, 19 bp, Artificial Sequence
  Probe
gctttggggggttcgattc

SEQ ID NO: 32150 - DNA, 20 bp, Artificial Sequence
  Probe
gctttggggggttcgattcc

SEQ ID NO: 32151 - DNA, 21 bp, Artificial Sequence
  Probe
gctttggggggttcgattcct

SEQ ID NO: 32152 - DNA, 42 bp, Artificial Sequence
  Probe
gctttgggtgctaatggtggagttaaagactttttctctgat

SEQ ID NO: 32153 - DNA, 43 bp, Artificial Sequence; identical to SEQ ID NO: 6331
  Probe

SEQ ID NO: 32154 - DNA, 17 bp, Artificial Sequence
  Probe
ggaaagtgcacttggac

SEQ ID NO: 32155 - DNA, 18 bp, Artificial Sequence
  Probe
ggaaagtgcacttggacg

SEQ ID NO: 32156 - DNA, 21 bp, Artificial Sequence
  Probe
ggaaagtgcacttggacgaac

SEQ ID NO: 32157 - DNA, 22 bp, Artificial Sequence
  Probe
ggaaagtgcacttggacgaacc

SEQ ID NO: 32158 - DNA, 15 bp, Artificial Sequence
  Probe
ggaagcgtgctgggc

SEQ ID NO: 32159 - DNA, 17 bp, Artificial Sequence
  Probe
ggaagcgtgctgggccc

SEQ ID NO: 32160 - DNA, 28 bp, Artificial Sequence
  Probe
ggaagtcaggatggccgagcggtctaag

SEQ ID NO: 32161 - DNA, 15 bp, Artificial Sequence
  Probe
ggaatgtcagctttt

SEQ ID NO: 32162 - DNA, 15 bp, Artificial Sequence
  Probe
ggactatgagaatcg

SEQ ID NO: 32163 - DNA, 17 bp, Artificial Sequence
  Probe
ggactatgagaatcgaa

SEQ ID NO: 32164 - DNA, 18 bp, Artificial Sequence
  Probe
ggactatgagaatcgaac

SEQ ID NO: 32165 - DNA, 19 bp, Artificial Sequence
  Probe
ggactatgagaatcgaacc

SEQ ID NO: 32166 - DNA, 20 bp, Artificial Sequence
  Probe
ggactatgagaatcgaaccc

SEQ ID NO: 32167 - DNA, 21 bp, Artificial Sequence
  Probe
ggactatgagaatcgaaccca

SEQ ID NO: 32168 - DNA, 22 bp, Artificial Sequence
  Probe
ggactatgagaatcgaacccat

SEQ ID NO: 32169 - DNA, 23 bp, Artificial Sequence
  Probe
ggactatgagaatcgaacccatc

SEQ ID NO: 32170 - DNA, 24 bp, Artificial Sequence
  Probe
ggactatgagaatcgaacccatcc

SEQ ID NO: 32171 - DNA, 25 bp, Artificial Sequence
  Probe
ggactatgagaatcgaacccatccc

SEQ ID NO: 32172 - DNA, 26 bp, Artificial Sequence
  Probe
ggactatgagaatcgaacccatccct

SEQ ID NO: 32173 - DNA, 27 bp, Artificial Sequence
  Probe
ggactatgagaatcgaacccatccctg

SEQ ID NO: 32174 - DNA, 28 bp, Artificial Sequence
  Probe
ggactatgagaatcgaacccatccctga

SEQ ID NO: 32175 - DNA, 29 bp, Artificial Sequence
  Probe
ggactatgagaatcgaacccatccctgag

SEQ ID NO: 32176 - DNA, 30 bp, Artificial Sequence; identical to SEQ ID NO: 6337
  Probe

SEQ ID NO: 32177 - DNA, 24 bp, Artificial Sequence
  Probe
ggactctgaatccagcgatccgag

SEQ ID NO: 32178 - DNA, 25 bp, Artificial Sequence
  Probe
ggactctgaatccagcgatccgagt

SEQ ID NO: 32179 - DNA, 36 bp, Artificial Sequence
  Probe
ggagaggcactggtggttcagtggtagaattctcgc

SEQ ID NO: 32180 - DNA, 38 bp, Artificial Sequence
  Probe
ggagaggcactggtggttcagtggtagaattctcgcct

SEQ ID NO: 32181 - DNA, 27 bp, Artificial Sequence
  Probe
ggagatgaaaacctttttccaaggaca

SEQ ID NO: 32182 - DNA, 28 bp, Artificial Sequence
  Probe
ggagatgaaaacctttttccaaggacaa

SEQ ID NO: 32183 - DNA, 26 bp, Artificial Sequence
  Probe
ggagatttcaacttaacttgaccgct

SEQ ID NO: 32184 - DNA, 27 bp, Artificial Sequence
  Probe
ggagatttcaacttaacttgaccgctc

SEQ ID NO: 32185 - DNA, 31 bp, Artificial Sequence; identical to SEQ ID NO: 6373
  Probe

SEQ ID NO: 32186 - DNA, 32 bp, Artificial Sequence; identical to SEQ ID NO: 6374
  Probe

SEQ ID NO: 32187 - DNA, 36 bp, Artificial Sequence
  Probe
ggagatttcaacttaacttgaccgctctgagctaaa

SEQ ID NO: 32188 - DNA, 16 bp, Artificial Sequence
  Probe
ggagcccggatagctc

SEQ ID NO: 32189 - DNA, 31 bp, Artificial Sequence
  Probe
ggagcccggatagctcagtcggtagagcatc

SEQ ID NO: 32190 - DNA, 36 bp, Artificial Sequence
  Probe
ggagcccggatagctcagtcggtagagcatcagact

SEQ ID NO: 32191 - DNA, 38 bp, Artificial Sequence
  Probe
ggagcccggatagctcagtcggtagagcatcagacttt

SEQ ID NO: 32192 - DNA, 39 bp, Artificial Sequence; identical to SEQ ID NO: 21433
  Probe

SEQ ID NO: 32193 - DNA, 26 bp, Artificial Sequence
  Probe
ggagcgcccggatagctcagtcggta

SEQ ID NO: 32194 - DNA, 27 bp, Artificial Sequence
  Probe
ggagcgcccggatagctcagtcggtag

SEQ ID NO: 32195 - DNA, 28 bp, Artificial Sequence
  Probe
ggagcgcccggatagctcagtcggtaga

SEQ ID NO: 32196 - DNA, 29 bp, Artificial Sequence
  Probe
ggagcgcccggatagctcagtcggtagag

SEQ ID NO: 32197 - DNA, 33 bp, Artificial Sequence
  Probe
ggagcgcccggatagctcagtcggtagagcatc

SEQ ID NO: 32198 - DNA, 36 bp, Artificial Sequence; identical to SEQ ID NO: 21436
  Probe

SEQ ID NO: 32199 - DNA, 40 bp, Artificial Sequence; identical to SEQ ID NO: 21439
  Probe

SEQ ID NO: 32200 - DNA, 41 bp, Artificial Sequence; identical to SEQ ID NO: 21440
  Probe

SEQ ID NO: 32201 - DNA, 36 bp, Artificial Sequence
  Probe
ggagctccagtggcgcaatcggttagcgcgcggtac

SEQ ID NO: 32202 - DNA, 21 bp, Artificial Sequence
  Probe
ggataacagctatccattggt

SEQ ID NO: 32203 - DNA, 23 bp, Artificial Sequence
  Probe
ggataacagctatccattggtct

SEQ ID NO: 32204 - DNA, 24 bp, Artificial Sequence
  Probe
ggataacagctatccattggtctt

SEQ ID NO: 32205 - DNA, 26 bp, Artificial Sequence
  Probe
ggataacagctatccattggtcttag

SEQ ID NO: 32206 - DNA, 30 bp, Artificial Sequence
  Probe
ggataacagctatccattggtcttaggccc

SEQ ID NO: 32207 - DNA, 31 bp, Artificial Sequence
  Probe
ggataacagctatccattggtcttaggcccc

SEQ ID NO: 32208 - DNA, 17 bp, Artificial Sequence
  Probe
ggataacgcgtctgact

SEQ ID NO: 32209 - DNA, 15 bp, Artificial Sequence
  Probe
ggataaggcactggc

SEQ ID NO: 32210 - DNA, 15 bp, Artificial Sequence
  Probe
ggataaggcattggc

SEQ ID NO: 32211 - DNA, 15 bp, Artificial Sequence
  Probe
ggataaggcgtctga

SEQ ID NO: 32212 - DNA, 17 bp, Artificial Sequence
  Probe
ggataaggcgtctgact

SEQ ID NO: 32213 - DNA, 15 bp, Artificial Sequence
  Probe
ggatagcgcattgga

SEQ ID NO: 32214 - DNA, 16 bp, Artificial Sequence
  Probe
ggatagcgcattggac

SEQ ID NO: 32215 - DNA, 18 bp, Artificial Sequence
  Probe
ggatagctcagtcggtag

SEQ ID NO: 32216 - DNA, 19 bp, Artificial Sequence
  Probe
ggatagctcagtcggtaga

SEQ ID NO: 32217 - DNA, 20 bp, Artificial Sequence
  Probe
ggatagctcagtcggtagag

SEQ ID NO: 32218 - DNA, 21 bp, Artificial Sequence
  Probe
ggatagctcagtcggtagagc

SEQ ID NO: 32219 - DNA, 22 bp, Artificial Sequence
  Probe
ggatagctcagtcggtagagca

SEQ ID NO: 32220 - DNA, 28 bp, Artificial Sequence
  Probe
ggatagctcagtcggtagagcatcagac

SEQ ID NO: 32221 - DNA, 29 bp, Artificial Sequence
  Probe
ggatagctcagtcggtagagcatcagact

SEQ ID NO: 32222 - DNA, 30 bp, Artificial Sequence; identical to SEQ ID NO: 6383
  Probe

SEQ ID NO: 32223 - DNA, 33 bp, Artificial Sequence; identical to SEQ ID NO: 21472
  Probe

SEQ ID NO: 32224 - DNA, 36 bp, Artificial Sequence
  Probe
ggatcagaagattctaggttcgactcctggctggct

SEQ ID NO: 32225 - DNA, 40 bp, Artificial Sequence
  Probe
ggatcagaagattctaggttcgactcctggctggctcgcg

SEQ ID NO: 32226 - DNA, 41 bp, Artificial Sequence
  Probe
ggatcagaagattctaggttcgactcctggctggctcgcga

SEQ ID NO: 32227 - DNA, 40 bp, Artificial Sequence
  Probe
ggatcagaagattctaggttcgactcctggctggctcgct

SEQ ID NO: 32228 - DNA, 19 bp, Artificial Sequence
  Probe
ggatcagaagattgagggt

SEQ ID NO: 32229 - DNA, 20 bp, Artificial Sequence
  Probe
ggatcagaagattgagggtt

SEQ ID NO: 32230 - DNA, 34 bp, Artificial Sequence; identical to SEQ ID NO: 1254
  Probe

SEQ ID NO: 32231 - DNA, 18 bp, Artificial Sequence
  Probe
ggattcggcgctctcacc

SEQ ID NO: 32232 - DNA, 27 bp, Artificial Sequence
  Probe
ggattcggcgctctcaccgccgcggcc

SEQ ID NO: 32233 - DNA, 32 bp, Artificial Sequence; identical to SEQ ID NO: 21493
  Probe

SEQ ID NO: 32234 - DNA, 28 bp, Artificial Sequence
  Probe
ggcacatgcagcgcaagtaggtctacaa

SEQ ID NO: 32235 - DNA, 18 bp, Artificial Sequence
  Probe
ggcagagcccggtaatcg

SEQ ID NO: 32236 - DNA, 34 bp, Artificial Sequence
  Probe
ggcagagcccggtaatcgcataaaacttaaaact

SEQ ID NO: 32237 - DNA, 36 bp, Artificial Sequence
  Probe
ggcagagcccggtaatcgcataaaacttaaaacttt

SEQ ID NO: 32238 - DNA, 36 bp, Artificial Sequence; identical to SEQ ID NO: 21505
  Probe

SEQ ID NO: 32239 - DNA, 31 bp, Artificial Sequence
  Probe
ggcattggtggttcagtggtagaattctcgc

SEQ ID NO: 32240 - DNA, 32 bp, Artificial Sequence
  Probe
ggcattggtggttcagtggtagaattctcgcc

SEQ ID NO: 32241 - DNA, 33 bp, Artificial Sequence; identical to SEQ ID NO: 6396
  Probe

SEQ ID NO: 32242 - DNA, 34 bp, Artificial Sequence; identical to SEQ ID NO: 21510
  Probe

SEQ ID NO: 32243 - DNA, 36 bp, Artificial Sequence; identical to SEQ ID NO: 21511
  Probe

SEQ ID NO: 32244 - DNA, 18 bp, Artificial Sequence
  Probe
ggccaggattgaaacttt

SEQ ID NO: 32245 - DNA, 25 bp, Artificial Sequence
  Probe
ggcccataccccgaaaatgttggtt

SEQ ID NO: 32246 - DNA, 36 bp, Artificial Sequence; identical to SEQ ID NO: 6417
  Probe

SEQ ID NO: 32247 - DNA, 36 bp, Artificial Sequence
  Probe
ggccccaaaaattttggtgcaactccaaataaaagt

SEQ ID NO: 32248 - DNA, 36 bp, Artificial Sequence; identical to SEQ ID NO: 1260
  Probe

SEQ ID NO: 32249 - DNA, 32 bp, Artificial Sequence; identical to SEQ ID NO: 1262
  Probe

SEQ ID NO: 32250 - DNA, 33 bp, Artificial Sequence; identical to SEQ ID NO: 1263
  Probe

SEQ ID NO: 32251 - DNA, 50 bp, Artificial Sequence; identical to SEQ ID NO: 6427
  Probe

SEQ ID NO: 32252 - DNA, 36 bp, Artificial Sequence
  Probe
ggcccgccgtgatcgtatagtggttagtactctgcg

SEQ ID NO: 32253 - DNA, 26 bp, Artificial Sequence
  Probe
ggccgcccggctagctcagtcggtag

SEQ ID NO: 32254 - DNA, 27 bp, Artificial Sequence
  Probe
ggccgcccggctagctcagtcggtaga

SEQ ID NO: 32255 - DNA, 28 bp, Artificial Sequence
  Probe
ggccgcccggctagctcagtcggtagag

SEQ ID NO: 32256 - DNA, 36 bp, Artificial Sequence
  Probe
ggccgcccggctagctcagtcggtagagcatgagac

SEQ ID NO: 32257 - DNA, 19 bp, Artificial Sequence
  Probe
ggccgcgtggcctaatgga

SEQ ID NO: 32258 - DNA, 30 bp, Artificial Sequence; identical to SEQ ID NO: 8656
  Probe

SEQ ID NO: 32259 - DNA, 15 bp, Artificial Sequence
  Probe
ggccggttagctcag

SEQ ID NO: 32260 - DNA, 20 bp, Artificial Sequence
  Probe
ggccggttagctcagtcggc

SEQ ID NO: 32261 - DNA, 18 bp, Artificial Sequence
  Probe
ggcctcgtggcgcaacgg

SEQ ID NO: 32262 - DNA, 15 bp, Artificial Sequence
  Probe
ggcgatcacgtagat

SEQ ID NO: 32263 - DNA, 16 bp, Artificial Sequence
  Probe
ggcgatcacgtagatt

SEQ ID NO: 32264 - DNA, 17 bp, Artificial Sequence
  Probe
ggcgatcacgtagattt

SEQ ID NO: 32265 - DNA, 18 bp, Artificial Sequence
  Probe
ggcgatcacgtagatttt

SEQ ID NO: 32266 - DNA, 19 bp, Artificial Sequence
  Probe
ggcgatcacgtagattttg

SEQ ID NO: 32267 - DNA, 22 bp, Artificial Sequence
  Probe
ggcgctctcaccgccgcggccc

SEQ ID NO: 32268 - DNA, 36 bp, Artificial Sequence
  Probe
ggcggctcgttggtctaggggtatgattctcgcttt

SEQ ID NO: 32269 - DNA, 15 bp, Artificial Sequence
  Probe
ggctagctcagtcgg

SEQ ID NO: 32270 - DNA, 19 bp, Artificial Sequence
  Probe
ggctagctcagtcggtaga

SEQ ID NO: 32271 - DNA, 30 bp, Artificial Sequence; identical to SEQ ID NO: 1285
  Probe

SEQ ID NO: 32272 - DNA, 31 bp, Artificial Sequence; identical to SEQ ID NO: 1286
  Probe

SEQ ID NO: 32273 - DNA, 36 bp, Artificial Sequence
  Probe
ggctagctcagtcggtagagcatgagactcttaatc

SEQ ID NO: 32274 - DNA, 32 bp, Artificial Sequence; identical to SEQ ID NO: 1294
  Probe

SEQ ID NO: 32275 - DNA, 36 bp, Artificial Sequence
  Probe
ggctagctcagtcggtagagcatgggactcttaatc

SEQ ID NO: 32276 - DNA, 27 bp, Artificial Sequence
  Probe
ggctccagtctcttcgggggcgtgggt

SEQ ID NO: 32277 - DNA, 33 bp, Artificial Sequence; identical to SEQ ID NO: 6484
  Probe

SEQ ID NO: 32278 - DNA, 18 bp, Artificial Sequence
  Probe
ggctccgtggcgcaatgg

SEQ ID NO: 32279 - DNA, 32 bp, Artificial Sequence; identical to SEQ ID NO: 1304
  Probe

SEQ ID NO: 32280 - DNA, 33 bp, Artificial Sequence; identical to SEQ ID NO: 6492
  Probe

SEQ ID NO: 32281 - DNA, 36 bp, Artificial Sequence
  Probe
ggctccgtggcgcaatggatagcgcattggacttct

SEQ ID NO: 32282 - DNA, 50 bp, Artificial Sequence
  Probe
ggctccgtggcgcaatggatagcgcattggacttctagaggctgaaggca

SEQ ID NO: 32283 - DNA, 18 bp, Artificial Sequence
  Probe
ggctcgaaggacttcgtc

SEQ ID NO: 32284 - DNA, 21 bp, Artificial Sequence
  Probe
ggctcgaaggacttcgtctgt

SEQ ID NO: 32285 - DNA, 22 bp, Artificial Sequence
  Probe
ggctcgaaggacttcgtctgta

SEQ ID NO: 32286 - DNA, 23 bp, Artificial Sequence
  Probe
ggctcgaaggacttcgtctgtaa

SEQ ID NO: 32287 - DNA, 24 bp, Artificial Sequence
  Probe
ggctcgaaggacttcgtctgtaat

SEQ ID NO: 32288 - DNA, 25 bp, Artificial Sequence
  Probe
ggctcgaaggacttcgtctgtaatt

SEQ ID NO: 32289 - DNA, 27 bp, Artificial Sequence
  Probe
ggctcgaaggacttcgtctgtaatttt

SEQ ID NO: 32290 - DNA, 15 bp, Artificial Sequence
  Probe
ggctcgttggtctag

SEQ ID NO: 32291 - DNA, 18 bp, Artificial Sequence
  Probe
ggctcgttggtctagggg

SEQ ID NO: 32292 - DNA, 20 bp, Artificial Sequence
  Probe
ggctcgttggtctaggggta

SEQ ID NO: 32293 - DNA, 24 bp, Artificial Sequence
  Probe
ggctcgttggtctaggggtatgat

SEQ ID NO: 32294 - DNA, 26 bp, Artificial Sequence
  Probe
ggctcgttggtctaggggtatgattc

SEQ ID NO: 32295 - DNA, 27 bp, Artificial Sequence
  Probe
ggctcgttggtctaggggtatgattct

SEQ ID NO: 32296 - DNA, 28 bp, Artificial Sequence
  Probe
ggctcgttggtctaggggtatgattctc

SEQ ID NO: 32297 - DNA, 29 bp, Artificial Sequence
  Probe
ggctcgttggtctaggggtatgattctcg

SEQ ID NO: 32298 - DNA, 30 bp, Artificial Sequence; identical to SEQ ID NO: 6496
  Probe

SEQ ID NO: 32299 - DNA, 31 bp, Artificial Sequence; identical to SEQ ID NO: 6497
  Probe

SEQ ID NO: 32300 - DNA, 32 bp, Artificial Sequence; identical to SEQ ID NO: 6498
  Probe

SEQ ID NO: 32301 - DNA, 33 bp, Artificial Sequence; identical to SEQ ID NO: 6499
  Probe

SEQ ID NO: 32302 - DNA, 36 bp, Artificial Sequence
  Probe
ggctcgttggtctaggggtatgattctcgcttaggg

SEQ ID NO: 32303 - DNA, 50 bp, Artificial Sequence
  Probe
ggctcgttggtctaggggtatgattctcgcttagggtgcgagaggtcccg

SEQ ID NO: 32304 - DNA, 33 bp, Artificial Sequence; identical to SEQ ID NO: 1306
  Probe

SEQ ID NO: 32305 - DNA, 36 bp, Artificial Sequence
  Probe
ggctcgttggtctaggggtatgattctcgcttcggg

SEQ ID NO: 32306 - DNA, 50 bp, Artificial Sequence
  Probe
ggctcgttggtctaggggtatgattctcgcttcgggtgcgagaggtcccg

SEQ ID NO: 32307 - DNA, 33 bp, Artificial Sequence; identical to SEQ ID NO: 1307
  Probe

SEQ ID NO: 32308 - DNA, 34 bp, Artificial Sequence
  Probe
ggctcgttggtctaggggtatgattctcgctttg

SEQ ID NO: 32309 - DNA, 36 bp, Artificial Sequence
  Probe
ggctcgttggtctaggggtatgattctcgctttggg

SEQ ID NO: 32310 - DNA, 50 bp, Artificial Sequence
  Probe
ggctcgttggtctaggggtatgattctcgctttgggtgcgagaggtcccg

SEQ ID NO: 32311 - DNA, 30 bp, Artificial Sequence; identical to SEQ ID NO: 8665
  Probe

SEQ ID NO: 32312 - DNA, 32 bp, Artificial Sequence; identical to SEQ ID NO: 1308
  Probe

SEQ ID NO: 32313 - DNA, 34 bp, Artificial Sequence; identical to SEQ ID NO: 21662
  Probe

SEQ ID NO: 32314 - DNA, 36 bp, Artificial Sequence
  Probe
ggctcgttggtctaggggtatgattctcggtttggg

SEQ ID NO: 32315 - DNA, 28 bp, Artificial Sequence
  Probe
ggctcgttggtctagtggtatgattctc

SEQ ID NO: 32316 - DNA, 31 bp, Artificial Sequence
  Probe
ggctcgttggtctagtggtatgattctcgct

SEQ ID NO: 32317 - DNA, 19 bp, Artificial Sequence
  Probe
ggctctgtggcgcaatgga

SEQ ID NO: 32318 - DNA, 27 bp, Artificial Sequence
  Probe
ggctctgtggcgcaatggatagcgcat

SEQ ID NO: 32319 - DNA, 33 bp, Artificial Sequence
  Probe
ggctctgtggcgcaatggatagcgcattggact

SEQ ID NO: 32320 - DNA, 20 bp, Artificial Sequence
  Probe
ggctgagtgaagcattggac

SEQ ID NO: 32321 - DNA, 21 bp, Artificial Sequence
  Probe
ggctgagtgaagcattggact

SEQ ID NO: 32322 - DNA, 23 bp, Artificial Sequence
  Probe
ggctgagtgaagcattggactgt

SEQ ID NO: 32323 - DNA, 24 bp, Artificial Sequence
  Probe
ggctgagtgaagcattggactgta

SEQ ID NO: 32324 - DNA, 25 bp, Artificial Sequence
  Probe
ggctgagtgaagcattggactgtaa

SEQ ID NO: 32325 - DNA, 26 bp, Artificial Sequence
  Probe
ggctgagtgaagcattggactgtaaa

SEQ ID NO: 32326 - DNA, 28 bp, Artificial Sequence
  Probe
ggctgagtgaagcattggactgtaaatc

SEQ ID NO: 32327 - DNA, 36 bp, Artificial Sequence
  Probe
ggctgagtgaagcattggactgtaaatctaaagaca

SEQ ID NO: 32328 - DNA, 36 bp, Artificial Sequence
  Probe
ggctgccgaaatagctcagttgggagagcgttagac

SEQ ID NO: 32329 - DNA, 18 bp, Artificial Sequence
  Probe
ggctgggggatgtagctc

SEQ ID NO: 32330 - DNA, 36 bp, Artificial Sequence
  Probe
ggctgggggatgtagctcagtggtagagcgcgcgct

SEQ ID NO: 32331 - DNA, 16 bp, Artificial Sequence
  Probe
ggctgtaggaatactt

SEQ ID NO: 32332 - DNA, 17 bp, Artificial Sequence
  Probe
ggctgtaggaatacttt

SEQ ID NO: 32333 - DNA, 18 bp, Artificial Sequence
  Probe
ggctgtaggaatactttt

SEQ ID NO: 32334 - DNA, 19 bp, Artificial Sequence
  Probe
ggctgtaggaatacttttc

SEQ ID NO: 32335 - DNA, 17 bp, Artificial Sequence
  Probe
ggcttagcctgtggctc

SEQ ID NO: 32336 - DNA, 34 bp, Artificial Sequence
  Probe
ggcttctgtagtgtagtggttatcacgttcgcct

SEQ ID NO: 32337 - DNA, 36 bp, Artificial Sequence; identical to SEQ ID NO: 21679
  Probe

SEQ ID NO: 32338 - DNA, 36 bp, Artificial Sequence
  Probe
gggacgaggtggccgagtggttaaggcgatggactg

SEQ ID NO: 32339 - DNA, 31 bp, Artificial Sequence; identical to SEQ ID NO: 1316
  Probe

SEQ ID NO: 32340 - DNA, 35 bp, Artificial Sequence; identical to SEQ ID NO: 6520
  Probe

SEQ ID NO: 32341 - DNA, 25 bp, Artificial Sequence
  Probe
gggagaggcactggtggttcagtgg

SEQ ID NO: 32342 - DNA, 17 bp, Artificial Sequence
  Probe
gggagcccggatagctc

SEQ ID NO: 32343 - DNA, 23 bp, Artificial Sequence
  Probe
gggagcccggatagctcagtcgg

SEQ ID NO: 32344 - DNA, 24 bp, Artificial Sequence
  Probe
gggagcccggatagctcagtcggt

SEQ ID NO: 32345 - DNA, 25 bp, Artificial Sequence
  Probe
gggagcccggatagctcagtcggta

SEQ ID NO: 32346 - DNA, 26 bp, Artificial Sequence
  Probe
gggagcccggatagctcagtcggtag

SEQ ID NO: 32347 - DNA, 27 bp, Artificial Sequence
  Probe
gggagcccggatagctcagtcggtaga

SEQ ID NO: 32348 - DNA, 28 bp, Artificial Sequence
  Probe
gggagcccggatagctcagtcggtagag

SEQ ID NO: 32349 - DNA, 29 bp, Artificial Sequence
  Probe
gggagcccggatagctcagtcggtagagc

SEQ ID NO: 32350 - DNA, 30 bp, Artificial Sequence; identical to SEQ ID NO: 21718
  Probe

SEQ ID NO: 32351 - DNA, 31 bp, Artificial Sequence
  Probe
gggagcccggatagctcagtcggtagagcat

SEQ ID NO: 32352 - DNA, 32 bp, Artificial Sequence
  Probe
gggagcccggatagctcagtcggtagagcatc

SEQ ID NO: 32353 - DNA, 33 bp, Artificial Sequence; identical to SEQ ID NO: 21719
  Probe

SEQ ID NO: 32354 - DNA, 34 bp, Artificial Sequence; identical to SEQ ID NO: 21720
  Probe

SEQ ID NO: 32355 - DNA, 35 bp, Artificial Sequence; identical to SEQ ID NO: 21721
  Probe

SEQ ID NO: 32356 - DNA, 36 bp, Artificial Sequence; identical to SEQ ID NO: 21722
  Probe

SEQ ID NO: 32357 - DNA, 37 bp, Artificial Sequence; identical to SEQ ID NO: 21723
  Probe

SEQ ID NO: 32358 - DNA, 38 bp, Artificial Sequence; identical to SEQ ID NO: 21724
  Probe

SEQ ID NO: 32359 - DNA, 39 bp, Artificial Sequence; identical to SEQ ID NO: 21725
  Probe

SEQ ID NO: 32360 - DNA, 40 bp, Artificial Sequence; identical to SEQ ID NO: 21726
  Probe

SEQ ID NO: 32361 - DNA, 41 bp, Artificial Sequence; identical to SEQ ID NO: 21727
  Probe

SEQ ID NO: 32362 - DNA, 42 bp, Artificial Sequence; identical to SEQ ID NO: 21728
  Probe

SEQ ID NO: 32363 - DNA, 43 bp, Artificial Sequence
  Probe
gggagcccggatagctcagtcggtagagcatcagacttttaat

SEQ ID NO: 32364 - DNA, 44 bp, Artificial Sequence
  Probe
gggagcccggatagctcagtcggtagagcatcagacttttaatc

SEQ ID NO: 32365 - DNA, 25 bp, Artificial Sequence
  Probe
gggagcgcccggatagctcagtcgg

SEQ ID NO: 32366 - DNA, 26 bp, Artificial Sequence
  Probe
gggagcgcccggatagctcagtcggt

SEQ ID NO: 32367 - DNA, 27 bp, Artificial Sequence
  Probe
gggagcgcccggatagctcagtcggta

SEQ ID NO: 32368 - DNA, 28 bp, Artificial Sequence
  Probe
gggagcgcccggatagctcagtcggtag

SEQ ID NO: 32369 - DNA, 29 bp, Artificial Sequence
  Probe
gggagcgcccggatagctcagtcggtaga

SEQ ID NO: 32370 - DNA, 30 bp, Artificial Sequence; identical to SEQ ID NO: 21733
  Probe

SEQ ID NO: 32371 - DNA, 31 bp, Artificial Sequence; identical to SEQ ID NO: 21734
  Probe

SEQ ID NO: 32372 - DNA, 32 bp, Artificial Sequence; identical to SEQ ID NO: 21735
  Probe

SEQ ID NO: 32373 - DNA, 33 bp, Artificial Sequence; identical to SEQ ID NO: 21736
  Probe

SEQ ID NO: 32374 - DNA, 34 bp, Artificial Sequence
  Probe
gggagcgcccggatagctcagtcggtagagcatc

SEQ ID NO: 32375 - DNA, 35 bp, Artificial Sequence; identical to SEQ ID NO: 21737
  Probe

SEQ ID NO: 32376 - DNA, 36 bp, Artificial Sequence; identical to SEQ ID NO: 21738
  Probe

SEQ ID NO: 32377 - DNA, 37 bp, Artificial Sequence; identical to SEQ ID NO: 21739
  Probe

SEQ ID NO: 32378 - DNA, 38 bp, Artificial Sequence; identical to SEQ ID NO: 21740
  Probe

SEQ ID NO: 32379 - DNA, 39 bp, Artificial Sequence; identical to SEQ ID NO: 6522
  Probe

SEQ ID NO: 32380 - DNA, 40 bp, Artificial Sequence; identical to SEQ ID NO: 21742
  Probe

SEQ ID NO: 32381 - DNA, 41 bp, Artificial Sequence; identical to SEQ ID NO: 21743
  Probe

SEQ ID NO: 32382 - DNA, 42 bp, Artificial Sequence; identical to SEQ ID NO: 21744
  Probe

SEQ ID NO: 32383 - DNA, 43 bp, Artificial Sequence; identical to SEQ ID NO: 21745
  Probe

SEQ ID NO: 32384 - DNA, 44 bp, Artificial Sequence; identical to SEQ ID NO: 21746
  Probe

SEQ ID NO: 32385 - DNA, 45 bp, Artificial Sequence; identical to SEQ ID NO: 21747
  Probe

SEQ ID NO: 32386 - DNA, 46 bp, Artificial Sequence
  Probe
gggagcgcccggatagctcagtcggtagagcatcagacttttaatc

SEQ ID NO: 32387 - DNA, 32 bp, Artificial Sequence
  Probe
gggaggtagcgtggccgagtggtctaaggcgc

SEQ ID NO: 32388 - DNA, 18 bp, Artificial Sequence
  Probe
gggccaggattgaaactt

SEQ ID NO: 32389 - DNA, 19 bp, Artificial Sequence
  Probe
gggccaggattgaaacttt

SEQ ID NO: 32390 - DNA, 19 bp, Artificial Sequence
  Probe
gggccagtggcgcaatgga

SEQ ID NO: 32391 - DNA, 20 bp, Artificial Sequence
  Probe
gggccagtggcgcaatggat

SEQ ID NO: 32392 - DNA, 33 bp, Artificial Sequence
  Probe
gggccagtggcgcaatggataacgcgtctgact

SEQ ID NO: 32393 - DNA, 26 bp, Artificial Sequence
  Probe
gggcccataccccgaaaatgttggtt

SEQ ID NO: 32394 - DNA, 27 bp, Artificial Sequence
  Probe
gggcccataccccgaaaatgttggtta

SEQ ID NO: 32395 - DNA, 28 bp, Artificial Sequence
  Probe
gggcccataccccgaaaatgttggttat

SEQ ID NO: 32396 - DNA, 31 bp, Artificial Sequence; identical to SEQ ID NO: 6549
  Probe

SEQ ID NO: 32397 - DNA, 32 bp, Artificial Sequence; identical to SEQ ID NO: 6550
  Probe

SEQ ID NO: 32398 - DNA, 15 bp, Artificial Sequence
  Probe
gggcccggatagctc

SEQ ID NO: 32399 - DNA, 36 bp, Artificial Sequence
  Probe
gggcgcccggctagctcagtcggtagagcatgagac

SEQ ID NO: 32400 - DNA, 36 bp, Artificial Sequence
  Probe
ggggacagcagagtggcgcagcggaagcgtgctggg

SEQ ID NO: 32401 - DNA, 36 bp, Artificial Sequence; identical to SEQ ID NO: 21839
  Probe

SEQ ID NO: 32402 - DNA, 26 bp, Artificial Sequence
  Probe
ggggagaggcactggtggttcagtgg

SEQ ID NO: 32403 - DNA, 39 bp, Artificial Sequence
  Probe
ggggagaggcactggtggttcagtggtagaattctcgcc

SEQ ID NO: 32404 - DNA, 15 bp, Artificial Sequence
  Probe
ggggatgtagctcag

SEQ ID NO: 32405 - DNA, 16 bp, Artificial Sequence
  Probe
ggggatgtagctcagt

SEQ ID NO: 32406 - DNA, 20 bp, Artificial Sequence
  Probe
ggggatgtagctcagtggta

SEQ ID NO: 32407 - DNA, 21 bp, Artificial Sequence
  Probe
ggggatgtagctcagtggtag

SEQ ID NO: 32408 - DNA, 24 bp, Artificial Sequence
  Probe
ggggatgtagctcagtggtagagc

SEQ ID NO: 32409 - DNA, 30 bp, Artificial Sequence; identical to SEQ ID NO: 1335
  Probe

SEQ ID NO: 32410 - DNA, 50 bp, Artificial Sequence
  Probe
ggggatgtagctcagtggtagagcgcatgctttgcacgtatgaggccccg

SEQ ID NO: 32411 - DNA, 36 bp, Artificial Sequence; identical to SEQ ID NO: 21867
  Probe

SEQ ID NO: 32412 - DNA, 15 bp, Artificial Sequence
  Probe
gggggattagctcaa

SEQ ID NO: 32413 - DNA, 16 bp, Artificial Sequence
  Probe
gggggattagctcaaa

SEQ ID NO: 32414 - DNA, 23 bp, Artificial Sequence
  Probe
gggggattagctcaaatggtaga

SEQ ID NO: 32415 - DNA, 32 bp, Artificial Sequence; identical to SEQ ID NO: 6576
  Probe

SEQ ID NO: 32416 - DNA, 33 bp, Artificial Sequence; identical to SEQ ID NO: 6577
  Probe

SEQ ID NO: 32417 - DNA, 36 bp, Artificial Sequence
  Probe
gggggattagctcaaatggtagagcgctcgcttagc

SEQ ID NO: 32418 - DNA, 15 bp, Artificial Sequence
  Probe
gggggtatagctcag

SEQ ID NO: 32419 - DNA, 30 bp, Artificial Sequence
  Probe
gggggtatagctcagcggtagagcgcgtgc

SEQ ID NO: 32420 - DNA, 17 bp, Artificial Sequence
  Probe
gggggtatagctcaggg

SEQ ID NO: 32421 - DNA, 18 bp, Artificial Sequence
  Probe
gggggtatagctcagtgg

SEQ ID NO: 32422 - DNA, 24 bp, Artificial Sequence
  Probe
gggggtatagctcagtggtagagc

SEQ ID NO: 32423 - DNA, 32 bp, Artificial Sequence; identical to SEQ ID NO: 6600
  Probe

SEQ ID NO: 32424 - DNA, 33 bp, Artificial Sequence; identical to SEQ ID NO: 6601
  Probe

SEQ ID NO: 32425 - DNA, 34 bp, Artificial Sequence; identical to SEQ ID NO: 6602
  Probe

SEQ ID NO: 32426 - DNA, 35 bp, Artificial Sequence; identical to SEQ ID NO: 6603
  Probe

SEQ ID NO: 32427 - DNA, 36 bp, Artificial Sequence; identical to SEQ ID NO: 13864
  Probe

SEQ ID NO: 32428 - DNA, 15 bp, Artificial Sequence
  Probe
gggggtgtagctcag

SEQ ID NO: 32429 - DNA, 16 bp, Artificial Sequence
  Probe
gggggtgtagctcagt

SEQ ID NO: 32430 - DNA, 18 bp, Artificial Sequence
  Probe
gggggtgtagctcagtgg

SEQ ID NO: 32431 - DNA, 19 bp, Artificial Sequence
  Probe
gggggtgtagctcagtggt

SEQ ID NO: 32432 - DNA, 20 bp, Artificial Sequence
  Probe
gggggtgtagctcagtggta

SEQ ID NO: 32433 - DNA, 21 bp, Artificial Sequence
  Probe
gggggtgtagctcagtggtag

SEQ ID NO: 32434 - DNA, 22 bp, Artificial Sequence
  Probe
gggggtgtagctcagtggtaga

SEQ ID NO: 32435 - DNA, 23 bp, Artificial Sequence
  Probe
gggggtgtagctcagtggtagag

SEQ ID NO: 32436 - DNA, 24 bp, Artificial Sequence
  Probe
gggggtgtagctcagtggtagagc

SEQ ID NO: 32437 - DNA, 36 bp, Artificial Sequence
  Probe
gggggtgtagctcagtggtagagcacatgctttgca

SEQ ID NO: 32438 - DNA, 32 bp, Artificial Sequence; identical to SEQ ID NO: 1365
  Probe

SEQ ID NO: 32439 - DNA, 36 bp, Artificial Sequence
  Probe
gggggtgtagctcagtggtagagcatttgactgcag

SEQ ID NO: 32440 - DNA, 27 bp, Artificial Sequence
  Probe
gggggtgtagctcagtggtagagcgcg

SEQ ID NO: 32441 - DNA, 28 bp, Artificial Sequence
  Probe
gggggtgtagctcagtggtagagcgcgt

SEQ ID NO: 32442 - DNA, 29 bp, Artificial Sequence
  Probe
gggggtgtagctcagtggtagagcgcgtg

SEQ ID NO: 32443 - DNA, 31 bp, Artificial Sequence; identical to SEQ ID NO: 1368
  Probe

SEQ ID NO: 32444 - DNA, 33 bp, Artificial Sequence; identical to SEQ ID NO: 6616
  Probe

SEQ ID NO: 32445 - DNA, 33 bp, Artificial Sequence; identical to SEQ ID NO: 6617
  Probe

SEQ ID NO: 32446 - DNA, 16 bp, Artificial Sequence
  Probe
ggggtatagctcaggg

SEQ ID NO: 32447 - DNA, 16 bp, Artificial Sequence
  Probe
ggggtatgattctcgc

SEQ ID NO: 32448 - DNA, 17 bp, Artificial Sequence
  Probe
ggggtatgattctcgct

SEQ ID NO: 32449 - DNA, 19 bp, Artificial Sequence
  Probe
ggggtatgattctcgctta

SEQ ID NO: 32450 - DNA, 19 bp, Artificial Sequence
  Probe
ggggtatgattctcgcttc

SEQ ID NO: 32451 - DNA, 19 bp, Artificial Sequence
  Probe
ggggtatgattctcgcttt

SEQ ID NO: 32452 - DNA, 24 bp, Artificial Sequence
  Probe
ggggttaggcctctttttaccagc

SEQ ID NO: 32453 - DNA, 25 bp, Artificial Sequence
  Probe
ggggttcgattccccgacggggaga

SEQ ID NO: 32454 - DNA, 26 bp, Artificial Sequence
  Probe
ggggttcgattccccgacggggagac

SEQ ID NO: 32455 - DNA, 25 bp, Artificial Sequence
  Probe
ggggttcgattccccgacggggagg

SEQ ID NO: 32456 - DNA, 26 bp, Artificial Sequence
  Probe
ggggttcgattccccgacggggaggc

SEQ ID NO: 32457 - DNA, 27 bp, Artificial Sequence
  Probe
ggggttcgattccccgacggggaggca

SEQ ID NO: 32458 - DNA, 20 bp, Artificial Sequence
  Probe
gggtagctcagtcggtagag

SEQ ID NO: 32459 - DNA, 28 bp, Artificial Sequence
  Probe
gggtatagctcagcggtagagcgcgtgc

SEQ ID NO: 32460 - DNA, 15 bp, Artificial Sequence
  Probe
gggtatagctcaggg

SEQ ID NO: 32461 - DNA, 16 bp, Artificial Sequence
  Probe
gggtatagctcagggg

SEQ ID NO: 32462 - DNA, 32 bp, Artificial Sequence; identical to SEQ ID NO: 6645
  Probe

SEQ ID NO: 32463 - DNA, 15 bp, Artificial Sequence
  Probe
gggtatgattctcgc

SEQ ID NO: 32464 - DNA, 16 bp, Artificial Sequence
  Probe
gggtatgattctcgct

SEQ ID NO: 32465 - DNA, 17 bp, Artificial Sequence
  Probe
gggtatgattctcgctt

SEQ ID NO: 32466 - DNA, 18 bp, Artificial Sequence
  Probe
gggtatgattctcgctta

SEQ ID NO: 32467 - DNA, 18 bp, Artificial Sequence
  Probe
gggtatgattctcgcttc

SEQ ID NO: 32468 - DNA, 18 bp, Artificial Sequence
  Probe
gggtatgattctcgcttt

SEQ ID NO: 32469 - DNA, 19 bp, Artificial Sequence
  Probe
gggtatgattctcgctttg

SEQ ID NO: 32470 - DNA, 15 bp, Artificial Sequence
  Probe
gggtatgattctcgg

SEQ ID NO: 32471 - DNA, 15 bp, Artificial Sequence
  Probe
gggtccccggtagct

SEQ ID NO: 32472 - DNA, 16 bp, Artificial Sequence
  Probe
gggtccccggtagctc

SEQ ID NO: 32473 - DNA, 36 bp, Artificial Sequence
  Probe
gggtccccggtagctcgccgtgatcgtatagtggtt

SEQ ID NO: 32474 - DNA, 36 bp, Artificial Sequence
  Probe
gggtgagcccggctagctcagtcggtagagcatgag

SEQ ID NO: 32475 - DNA, 20 bp, Artificial Sequence
  Probe
gggtgcgagaggtcccgggt

SEQ ID NO: 32476 - DNA, 21 bp, Artificial Sequence
  Probe
gggtgcgagaggtcccgggtt

SEQ ID NO: 32477 - DNA, 36 bp, Artificial Sequence
  Probe
gggtgctaatggtggagttaaagactttttctctga

SEQ ID NO: 32478 - DNA, 23 bp, Artificial Sequence
  Probe
gggtggctctgtggcgcaatgga

SEQ ID NO: 32479 - DNA, 31 bp, Artificial Sequence
  Probe
gggtggctctgtggcgcaatggatagcgcat

SEQ ID NO: 32480 - DNA, 36 bp, Artificial Sequence
  Probe
gggtggctctgtggcgcaatggatagcgcattggac

SEQ ID NO: 32481 - DNA, 15 bp, Artificial Sequence
  Probe
gggtggttgcgtttt

SEQ ID NO: 32482 - DNA, 29 bp, Artificial Sequence
  Probe
gggtgtgataggtggcacggagaattttg

SEQ ID NO: 32483 - DNA, 23 bp, Artificial Sequence
  Probe
gggttaggcctctttttaccagc

SEQ ID NO: 32484 - DNA, 24 bp, Artificial Sequence
  Probe
gggttcaattcccggtcagggaac

SEQ ID NO: 32485 - DNA, 25 bp, Artificial Sequence
  Probe
gggttcaattcccggtcagggaacc

SEQ ID NO: 32486 - DNA, 26 bp, Artificial Sequence
  Probe
gggttcaattcccggtcagggaacca

SEQ ID NO: 32487 - DNA, 36 bp, Artificial Sequence
  Probe
gggttccatggtgtaatggttagcactctggactct

SEQ ID NO: 32488 - DNA, 50 bp, Artificial Sequence
  Probe
gggttccatggtgtaatggttagcactctggactctgaatccagcgatcc

SEQ ID NO: 32489 - DNA, 23 bp, Artificial Sequence
  Probe
gggttcgactcccggtgtgggaa

SEQ ID NO: 32490 - DNA, 24 bp, Artificial Sequence
  Probe
gggttcgactcccggtgtgggaac

SEQ ID NO: 32491 - DNA, 36 bp, Artificial Sequence
  Probe
gggttcgagccccacgttgggcggcaactggtcgtt

SEQ ID NO: 32492 - DNA, 24 bp, Artificial Sequence
  Probe
gggttcgattccccgacggggaga

SEQ ID NO: 32493 - DNA, 25 bp, Artificial Sequence
  Probe
gggttcgattccccgacggggagac

SEQ ID NO: 32494 - DNA, 24 bp, Artificial Sequence
  Probe
gggttcgattccccgacggggagg

SEQ ID NO: 32495 - DNA, 25 bp, Artificial Sequence
  Probe
gggttcgattccccgacggggaggc

SEQ ID NO: 32496 - DNA, 26 bp, Artificial Sequence
  Probe
gggttcgattccccgacggggaggca

SEQ ID NO: 32497 - DNA, 21 bp, Artificial Sequence
  Probe
gggttcgattcccggtcaggg

SEQ ID NO: 32498 - DNA, 23 bp, Artificial Sequence
  Probe
gggttcgattcccggtcagggaa

SEQ ID NO: 32499 - DNA, 24 bp, Artificial Sequence
  Probe
gggttcgattcccggtcagggaaa

SEQ ID NO: 32500 - DNA, 24 bp, Artificial Sequence
  Probe
gggttcgattcccggtcagggaag

SEQ ID NO: 32501 - DNA, 25 bp, Artificial Sequence
  Probe
gggttcgattcccggtcagggaagc

SEQ ID NO: 32502 - DNA, 24 bp, Artificial Sequence
  Probe
gggttcgattcccggtcagggaat

SEQ ID NO: 32503 - DNA, 24 bp, Artificial Sequence
  Probe
gggttcgattcccggtcatggaac

SEQ ID NO: 32504 - DNA, 25 bp, Artificial Sequence
  Probe
gggttcgattcccggtcatggaacc

SEQ ID NO: 32505 - DNA, 26 bp, Artificial Sequence
  Probe
gggttcgattcccggtcatggaacca

SEQ ID NO: 32506 - DNA, 15 bp, Artificial Sequence
  Probe
gggttgctgtctttt

SEQ ID NO: 32507 - DNA, 36 bp, Artificial Sequence
  Probe
gggtttgttaagatggcagagcccggtaatcgcata

SEQ ID NO: 32508 - DNA, 17 bp, Artificial Sequence
  Probe
ggtaaaatggctgagtg

SEQ ID NO: 32509 - DNA, 19 bp, Artificial Sequence
  Probe
ggtaaaatggctgagtgaa

SEQ ID NO: 32510 - DNA, 20 bp, Artificial Sequence
  Probe
ggtaaaatggctgagtgaag

SEQ ID NO: 32511 - DNA, 21 bp, Artificial Sequence
  Probe
ggtaaaatggctgagtgaagc

SEQ ID NO: 32512 - DNA, 23 bp, Artificial Sequence
  Probe
ggtaaaatggctgagtgaagcat

SEQ ID NO: 32513 - DNA, 25 bp, Artificial Sequence
  Probe
ggtaaaatggctgagtgaagcattg

SEQ ID NO: 32514 - DNA, 28 bp, Artificial Sequence
  Probe
ggtaaaatggctgagtgaagcattggac

SEQ ID NO: 32515 - DNA, 29 bp, Artificial Sequence
  Probe
ggtaaaatggctgagtgaagcattggact

SEQ ID NO: 32516 - DNA, 30 bp, Artificial Sequence; identical to SEQ ID NO: 6688
  Probe

SEQ ID NO: 32517 - DNA, 31 bp, Artificial Sequence; identical to SEQ ID NO: 6689
  Probe

SEQ ID NO: 32518 - DNA, 32 bp, Artificial Sequence; identical to SEQ ID NO: 6690
  Probe

SEQ ID NO: 32519 - DNA, 33 bp, Artificial Sequence; identical to SEQ ID NO: 6691
  Probe

SEQ ID NO: 32520 - DNA, 34 bp, Artificial Sequence; identical to SEQ ID NO: 6692
  Probe

SEQ ID NO: 32521 - DNA, 35 bp, Artificial Sequence; identical to SEQ ID NO: 6693
  Probe

SEQ ID NO: 32522 - DNA, 36 bp, Artificial Sequence; identical to SEQ ID NO: 6694
  Probe

SEQ ID NO: 32523 - DNA, 37 bp, Artificial Sequence; identical to SEQ ID NO: 6695
  Probe

SEQ ID NO: 32524 - DNA, 38 bp, Artificial Sequence; identical to SEQ ID NO: 6696
  Probe

SEQ ID NO: 32525 - DNA, 50 bp, Artificial Sequence
  Probe
ggtaaaatggctgagtgaagcattggactgtaaatctaaagacaggggtt

SEQ ID NO: 32526 - DNA, 36 bp, Artificial Sequence
  Probe
ggtaagcactctggactctgaatccagcgatccgag

SEQ ID NO: 32527 - DNA, 19 bp, Artificial Sequence
  Probe
ggtaatcgcataaaactta

SEQ ID NO: 32528 - DNA, 26 bp, Artificial Sequence
  Probe
ggtaatcgcataaaacttaaaacttt

SEQ ID NO: 32529 - DNA, 29 bp, Artificial Sequence
  Probe
ggtaatcgcataaaacttaaaactttaca

SEQ ID NO: 32530 - DNA, 30 bp, Artificial Sequence
  Probe
ggtaatcgcataaaacttaaaactttacag

SEQ ID NO: 32531 - DNA, 36 bp, Artificial Sequence
  Probe
ggtaatcgcataaaacttaaaactttacagtcagag

SEQ ID NO: 32532 - DNA, 15 bp, Artificial Sequence
  Probe
ggtagaattctcgcc

SEQ ID NO: 32533 - DNA, 16 bp, Artificial Sequence
  Probe
ggtagaattctcgcct

SEQ ID NO: 32534 - DNA, 18 bp, Artificial Sequence
  Probe
ggtagaattctcgcctcc

SEQ ID NO: 32535 - DNA, 36 bp, Artificial Sequence
  Probe
ggtagaattctcgcctcccacgcgggagacccgggt

SEQ ID NO: 32536 - DNA, 17 bp, Artificial Sequence
  Probe
ggtagaattctcgcctg

SEQ ID NO: 32537 - DNA, 18 bp, Artificial Sequence
  Probe
ggtagaattctcgcctgc

SEQ ID NO: 32538 - DNA, 19 bp, Artificial Sequence
  Probe
ggtagaattctcgcctgcc

SEQ ID NO: 32539 - DNA, 27 bp, Artificial Sequence
  Probe
ggtagaattctcgcctgccacgcggga

SEQ ID NO: 32540 - DNA, 32 bp, Artificial Sequence; identical to SEQ ID NO: 6703
  Probe

SEQ ID NO: 32541 - DNA, 37 bp, Artificial Sequence; identical to SEQ ID NO: 22066
  Probe

SEQ ID NO: 32542 - DNA, 15 bp, Artificial Sequence
  Probe
ggtagagcatcagac

SEQ ID NO: 32543 - DNA, 16 bp, Artificial Sequence
  Probe
ggtagagcatcagact

SEQ ID NO: 32544 - DNA, 15 bp, Artificial Sequence
  Probe
ggtagagcatgagac

SEQ ID NO: 32545 - DNA, 17 bp, Artificial Sequence
  Probe
ggtagagcatgagaccc

SEQ ID NO: 32546 - DNA, 16 bp, Artificial Sequence
  Probe
ggtagagcatgagact

SEQ ID NO: 32547 - DNA, 17 bp, Artificial Sequence
  Probe
ggtagagcatgagactc

SEQ ID NO: 32548 - DNA, 15 bp, Artificial Sequence
  Probe
ggtagagcatgggac

SEQ ID NO: 32549 - DNA, 16 bp, Artificial Sequence
  Probe
ggtagagcatgggact

SEQ ID NO: 32550 - DNA, 24 bp, Artificial Sequence
  Probe
ggtagagcatgggactcttaatcc

SEQ ID NO: 32551 - DNA, 25 bp, Artificial Sequence
  Probe
ggtagagcatgggactcttaatccc

SEQ ID NO: 32552 - DNA, 16 bp, Artificial Sequence
  Probe
ggtagagcatttgact

SEQ ID NO: 32553 - DNA, 18 bp, Artificial Sequence
  Probe
ggtagagcatttgactgc

SEQ ID NO: 32554 - DNA, 15 bp, Artificial Sequence
  Probe
ggtagagcggaggac

SEQ ID NO: 32555 - DNA, 16 bp, Artificial Sequence
  Probe
ggtagcgcgtctgact

SEQ ID NO: 32556 - DNA, 15 bp, Artificial Sequence
  Probe
ggtagcgtggccgag

SEQ ID NO: 32557 - DNA, 18 bp, Artificial Sequence
  Probe
ggtagcgtggccgagcgg

SEQ ID NO: 32558 - DNA, 20 bp, Artificial Sequence
  Probe
ggtagcgtggccgagcggtc

SEQ ID NO: 32559 - DNA, 22 bp, Artificial Sequence
  Probe
ggtagcgtggccgagcggtcta

SEQ ID NO: 32560 - DNA, 26 bp, Artificial Sequence
  Probe
ggtagcgtggccgagcggtctaaggc

SEQ ID NO: 32561 - DNA, 34 bp, Artificial Sequence; identical to SEQ ID NO: 22077
  Probe

SEQ ID NO: 32562 - DNA, 36 bp, Artificial Sequence; identical to SEQ ID NO: 6709
  Probe

SEQ ID NO: 32563 - DNA, 21 bp, Artificial Sequence
  Probe
ggtagcgtggccgagtggtct

SEQ ID NO: 32564 - DNA, 16 bp, Artificial Sequence
  Probe
ggtagtgtggccgagc

SEQ ID NO: 32565 - DNA, 20 bp, Artificial Sequence
  Probe
ggtagtgtggccgagcggtc

SEQ ID NO: 32566 - DNA, 21 bp, Artificial Sequence
  Probe
ggtagtgtggccgagcggtct

SEQ ID NO: 32567 - DNA, 36 bp, Artificial Sequence
  Probe
ggtagtgtggccgagcggtctaaggcgctggattta

SEQ ID NO: 32568 - DNA, 35 bp, Artificial Sequence
  Probe
ggtatatagtttaaacaaaacgaatgatttcgact

SEQ ID NO: 32569 - DNA, 36 bp, Artificial Sequence
  Probe
ggtatatagtttaaacaaaacgaatgatttcgactc

SEQ ID NO: 32570 - DNA, 15 bp, Artificial Sequence
  Probe
ggtatgattctcgct

SEQ ID NO: 32571 - DNA, 16 bp, Artificial Sequence
  Probe
ggtatgattctcgctt

SEQ ID NO: 32572 - DNA, 36 bp, Artificial Sequence
  Probe
ggtatgattctcgcttagggtgcgagaggtcccggg

SEQ ID NO: 32573 - DNA, 37 bp, Artificial Sequence; identical to SEQ ID NO: 22109
  Probe

SEQ ID NO: 32574 - DNA, 17 bp, Artificial Sequence
  Probe
ggtatgattctcgcttc

SEQ ID NO: 32575 - DNA, 36 bp, Artificial Sequence
  Probe
ggtatgattctcgcttcgggtgcgagaggtcccggg

SEQ ID NO: 32576 - DNA, 37 bp, Artificial Sequence; identical to SEQ ID NO: 22112
  Probe

SEQ ID NO: 32577 - DNA, 19 bp, Artificial Sequence
  Probe
ggtatgattctcgctttgg

SEQ ID NO: 32578 - DNA, 36 bp, Artificial Sequence; identical to SEQ ID NO: 22116
  Probe

SEQ ID NO: 32579 - DNA, 37 bp, Artificial Sequence; identical to SEQ ID NO: 22117
  Probe

SEQ ID NO: 32580 - DNA, 15 bp, Artificial Sequence
  Probe
ggtatgattctcggt

SEQ ID NO: 32581 - DNA, 24 bp, Artificial Sequence
  Probe
ggtcagctaaataagctatcgggc

SEQ ID NO: 32582 - DNA, 25 bp, Artificial Sequence
  Probe
ggtcagctaaataagctatcgggcc

SEQ ID NO: 32583 - DNA, 26 bp, Artificial Sequence
  Probe
ggtcagctaaataagctatcgggccc

SEQ ID NO: 32584 - DNA, 27 bp, Artificial Sequence
  Probe
ggtcagctaaataagctatcgggccca

SEQ ID NO: 32585 - DNA, 36 bp, Artificial Sequence
  Probe
ggtcagctaaataagctatcgggcccataccccgaa

SEQ ID NO: 32586 - DNA, 29 bp, Artificial Sequence
  Probe
ggtcccatggtgtaatggttagcactctg

SEQ ID NO: 32587 - DNA, 31 bp, Artificial Sequence; identical to SEQ ID NO: 22145
  Probe

SEQ ID NO: 32588 - DNA, 33 bp, Artificial Sequence; identical to SEQ ID NO: 1415
  Probe

SEQ ID NO: 32589 - DNA, 50 bp, Artificial Sequence
  Probe
ggtcccatggtgtaatggttagcactctggactttgaatccagcaatccg

SEQ ID NO: 32590 - DNA, 50 bp, Artificial Sequence; identical to SEQ ID NO: 1417
  Probe

SEQ ID NO: 32591 - DNA, 36 bp, Artificial Sequence
  Probe
ggtcccatggtgtaatggttagcactctgggctttg

SEQ ID NO: 32592 - DNA, 15 bp, Artificial Sequence
  Probe
ggtccctgggctgtc

SEQ ID NO: 32593 - DNA, 21 bp, Artificial Sequence
  Probe
ggtcctagcctttctattagc

SEQ ID NO: 32594 - DNA, 36 bp, Artificial Sequence
  Probe
ggtcgctggttcgaatccggctcggaggacggtagt

SEQ ID NO: 32595 - DNA, 31 bp, Artificial Sequence; identical to SEQ ID NO: 22170
  Probe

SEQ ID NO: 32596 - DNA, 20 bp, Artificial Sequence
  Probe
ggtcggccggttagctcagt

SEQ ID NO: 32597 - DNA, 28 bp, Artificial Sequence
  Probe
ggtcgtgggttcgagccccacgttgggc

SEQ ID NO: 32598 - DNA, 29 bp, Artificial Sequence
  Probe
ggtcgtgggttcgagccccacgttgggcg

SEQ ID NO: 32599 - DNA, 30 bp, Artificial Sequence
  Probe
ggtcgtgggttcgagccccacgttgggcgc

SEQ ID NO: 32600 - DNA, 25 bp, Artificial Sequence
  Probe
ggtcgtggttgtagtccgtgcgaga

SEQ ID NO: 32601 - DNA, 26 bp, Artificial Sequence
  Probe
ggtcgtggttgtagtccgtgcgagaa

SEQ ID NO: 32602 - DNA, 18 bp, Artificial Sequence
  Probe
ggtctaggggtatgattc

SEQ ID NO: 32603 - DNA, 20 bp, Artificial Sequence
  Probe
ggtctaggggtatgattctc

SEQ ID NO: 32604 - DNA, 22 bp, Artificial Sequence
  Probe
ggtctaggggtatgattctcgc

SEQ ID NO: 32605 - DNA, 23 bp, Artificial Sequence
  Probe
ggtctaggggtatgattctcgct

SEQ ID NO: 32606 - DNA, 26 bp, Artificial Sequence
  Probe
ggtctcgtaaaccgaagatcacgggt

SEQ ID NO: 32607 - DNA, 26 bp, Artificial Sequence
  Probe
ggtctcgtaaaccgaagatcgcgggt

SEQ ID NO: 32608 - DNA, 15 bp, Artificial Sequence
  Probe
ggtgagcactctgga

SEQ ID NO: 32609 - DNA, 34 bp, Artificial Sequence
  Probe
ggtgagcactctggactctgaatccagcgatccg

SEQ ID NO: 32610 - DNA, 37 bp, Artificial Sequence
  Probe
ggtgagcactctggactctgaatccagcgatccgagt

SEQ ID NO: 32611 - DNA, 38 bp, Artificial Sequence
  Probe
ggtgagcactctggactctgaatccagcgatccgagtt

SEQ ID NO: 32612 - DNA, 15 bp, Artificial Sequence
  Probe
ggtgagtatccccgc

SEQ ID NO: 32613 - DNA, 20 bp, Artificial Sequence
  Probe
ggtgagtatccccgcctgtc

SEQ ID NO: 32614 - DNA, 36 bp, Artificial Sequence
  Probe
ggtgagtatccccgcctgtcacgcgggagaccgggg

SEQ ID NO: 32615 - DNA, 33 bp, Artificial Sequence
  Probe
ggtgcatgggtggttcagtggtagaattctcgc

SEQ ID NO: 32616 - DNA, 35 bp, Artificial Sequence
  Probe
ggtgcatgggtggttcagtggtagaattctcgcct

SEQ ID NO: 32617 - DNA, 36 bp, Artificial Sequence; identical to SEQ ID NO: 22203
  Probe

SEQ ID NO: 32618 - DNA, 18 bp, Artificial Sequence
  Probe
ggtgcgagaggtcccggg

SEQ ID NO: 32619 - DNA, 19 bp, Artificial Sequence
  Probe
ggtgcgagaggtcccgggt

SEQ ID NO: 32620 - DNA, 20 bp, Artificial Sequence
  Probe
ggtgcgagaggtcccgggtt

SEQ ID NO: 32621 - DNA, 27 bp, Artificial Sequence
  Probe
ggtgctaataacgccaaggtcgcgggt

SEQ ID NO: 32622 - DNA, 36 bp, Artificial Sequence
  Probe
ggtgctaatggtggagttaaagactttttctctgat

SEQ ID NO: 32623 - DNA, 36 bp, Artificial Sequence
  Probe
ggtgcttagctgttaactaagtgtttgtgggtttaa

SEQ ID NO: 32624 - DNA, 27 bp, Artificial Sequence
  Probe
ggtggagttaaagactttttctctgat

SEQ ID NO: 32625 - DNA, 36 bp, Artificial Sequence
  Probe
ggtggccgagatagctcagttgggagagcgttagac

SEQ ID NO: 32626 - DNA, 16 bp, Artificial Sequence
  Probe
ggtggcctgtgacttt

SEQ ID NO: 32627 - DNA, 17 bp, Artificial Sequence
  Probe
ggtggcctgtgactttt

SEQ ID NO: 32628 - DNA, 28 bp, Artificial Sequence
  Probe
ggtggtctagtggttaggattcggcgct

SEQ ID NO: 32629 - DNA, 36 bp, Artificial Sequence
  Probe
ggtggtctagtggttaggattcggcgctctcaccgc

SEQ ID NO: 32630 - DNA, 25 bp, Artificial Sequence
  Probe
ggtggttcagtggtagaattctcgc

SEQ ID NO: 32631 - DNA, 26 bp, Artificial Sequence
  Probe
ggtggttcagtggtagaattctcgcc

SEQ ID NO: 32632 - DNA, 27 bp, Artificial Sequence
  Probe
ggtggttcagtggtagaattctcgcct

SEQ ID NO: 32633 - DNA, 30 bp, Artificial Sequence; identical to SEQ ID NO: 6787
  Probe

SEQ ID NO: 32634 - DNA, 16 bp, Artificial Sequence
  Probe
ggtggttctaacttgc

SEQ ID NO: 32635 - DNA, 30 bp, Artificial Sequence; identical to SEQ ID NO: 22239
  Probe

SEQ ID NO: 32636 - DNA, 23 bp, Artificial Sequence
  Probe
ggtgtaatggttagcactctgga

SEQ ID NO: 32637 - DNA, 24 bp, Artificial Sequence
  Probe
ggtgtaatggttagcactctggac

SEQ ID NO: 32638 - DNA, 25 bp, Artificial Sequence
  Probe
ggtgtaatggttagcactctggact

SEQ ID NO: 32639 - DNA, 26 bp, Artificial Sequence
  Probe
ggtgtaatggttagcactctggactc

SEQ ID NO: 32640 - DNA, 30 bp, Artificial Sequence
  Probe
ggtgtaatggttagcactctggactctgaa

SEQ ID NO: 32641 - DNA, 31 bp, Artificial Sequence
  Probe
ggtgtaatggttagcactctggactctgaat

SEQ ID NO: 32642 - DNA, 32 bp, Artificial Sequence
  Probe
ggtgtaatggttagcactctggactctgaatc

SEQ ID NO: 32643 - DNA, 33 bp, Artificial Sequence
  Probe
ggtgtaatggttagcactctggactctgaatcc

SEQ ID NO: 32644 - DNA, 44 bp, Artificial Sequence
  Probe
ggtgtaatggttagcactctggactctgaatccagcgatccgag

SEQ ID NO: 32645 - DNA, 45 bp, Artificial Sequence
  Probe
ggtgtaatggttagcactctggactctgaatccagcgatccgagt

SEQ ID NO: 32646 - DNA, 46 bp, Artificial Sequence
  Probe
ggtgtaatggttagcactctggactctgaatccagcgatccgagtt

SEQ ID NO: 32647 - DNA, 32 bp, Artificial Sequence
  Probe
ggtgtaatggttagcactctggactttgaatc

SEQ ID NO: 32648 - DNA, 33 bp, Artificial Sequence
  Probe
ggtgtaatggttagcactctggactttgaatcc

SEQ ID NO: 32649 - DNA, 36 bp, Artificial Sequence
  Probe
ggtgtaatggttagcactctggactttgaatccagc

SEQ ID NO: 32650 - DNA, 15 bp, Artificial Sequence
  Probe
ggtgtggtctgttgt

SEQ ID NO: 32651 - DNA, 16 bp, Artificial Sequence
  Probe
ggtgtggtctgttgtt

SEQ ID NO: 32652 - DNA, 17 bp, Artificial Sequence
  Probe
ggtgtggtctgttgttt

SEQ ID NO: 32653 - DNA, 18 bp, Artificial Sequence
  Probe
ggtgtggtctgttgtttt

SEQ ID NO: 32654 - DNA, 19 bp, Artificial Sequence
  Probe
ggtgtggtctgttgttttc

SEQ ID NO: 32655 - DNA, 16 bp, Artificial Sequence
  Probe
ggttaaggcattggac

SEQ ID NO: 32656 - DNA, 19 bp, Artificial Sequence
  Probe
ggttaaggcattggactta

SEQ ID NO: 32657 - DNA, 16 bp, Artificial Sequence
  Probe
ggttaaggcgatggac

SEQ ID NO: 32658 - DNA, 16 bp, Artificial Sequence
  Probe
ggttaaggcgttggac

SEQ ID NO: 32659 - DNA, 17 bp, Artificial Sequence
  Probe
ggttaaggcgttggact

SEQ ID NO: 32660 - DNA, 19 bp, Artificial Sequence
  Probe
ggttaaggcgttggactta

SEQ ID NO: 32661 - DNA, 15 bp, Artificial Sequence
  Probe
ggttagcactctgga

SEQ ID NO: 32662 - DNA, 16 bp, Artificial Sequence
  Probe
ggttagcactctggac

SEQ ID NO: 32663 - DNA, 17 bp, Artificial Sequence
  Probe
ggttagcactctggact

SEQ ID NO: 32664 - DNA, 18 bp, Artificial Sequence
  Probe
ggttagcactctggactc

SEQ ID NO: 32665 - DNA, 19 bp, Artificial Sequence
  Probe
ggttagcactctggactct

SEQ ID NO: 32666 - DNA, 20 bp, Artificial Sequence
  Probe
ggttagcactctggactctg

SEQ ID NO: 32667 - DNA, 21 bp, Artificial Sequence
  Probe
ggttagcactctggactctga

SEQ ID NO: 32668 - DNA, 22 bp, Artificial Sequence
  Probe
ggttagcactctggactctgaa

SEQ ID NO: 32669 - DNA, 26 bp, Artificial Sequence
  Probe
ggttagcactctggactctgaatcca

SEQ ID NO: 32670 - DNA, 28 bp, Artificial Sequence
  Probe
ggttagcactctggactctgaatccagc

SEQ ID NO: 32671 - DNA, 29 bp, Artificial Sequence
  Probe
ggttagcactctggactctgaatccagcg

SEQ ID NO: 32672 - DNA, 35 bp, Artificial Sequence; identical to SEQ ID NO: 13946
  Probe

SEQ ID NO: 32673 - DNA, 39 bp, Artificial Sequence
  Probe
ggttagcactctggactctgaatccagcgatccgagttc

SEQ ID NO: 32674 - DNA, 40 bp, Artificial Sequence
  Probe
ggttagcactctggactctgaatccagcgatccgagttca

SEQ ID NO: 32675 - DNA, 41 bp, Artificial Sequence
  Probe
ggttagcactctggactctgaatccagcgatccgagttcaa

SEQ ID NO: 32676 - DNA, 22 bp, Artificial Sequence
  Probe
ggttagcactctggactttgaa

SEQ ID NO: 32677 - DNA, 23 bp, Artificial Sequence
  Probe
ggttagcactctggactttgaat

SEQ ID NO: 32678 - DNA, 25 bp, Artificial Sequence
  Probe
ggttagcactctggactttgaatcc

SEQ ID NO: 32679 - DNA, 37 bp, Artificial Sequence
  Probe
ggttagcactctggactttgaatccagcaatccgagt

SEQ ID NO: 32680 - DNA, 38 bp, Artificial Sequence
  Probe
ggttagcactctggactttgaatccagcaatccgagtt

SEQ ID NO: 32681 - DNA, 39 bp, Artificial Sequence
  Probe
ggttagcactctggactttgaatccagcaatccgagttc

SEQ ID NO: 32682 - DNA, 40 bp, Artificial Sequence
  Probe
ggttagcactctggactttgaatccagcaatccgagttcg

SEQ ID NO: 32683 - DNA, 37 bp, Artificial Sequence; identical to SEQ ID NO: 22253
  Probe

SEQ ID NO: 32684 - DNA, 39 bp, Artificial Sequence; identical to SEQ ID NO: 22255
  Probe

SEQ ID NO: 32685 - DNA, 40 bp, Artificial Sequence
  Probe
ggttagcactctggactttgaatccagcgatccgagttca

SEQ ID NO: 32686 - DNA, 16 bp, Artificial Sequence
  Probe
ggttagcgcgcggtac

SEQ ID NO: 32687 - DNA, 23 bp, Artificial Sequence
  Probe
ggttagcgcgttcggctgttaac

SEQ ID NO: 32688 - DNA, 16 bp, Artificial Sequence
  Probe
ggttagctcagtcggc

SEQ ID NO: 32689 - DNA, 29 bp, Artificial Sequence
  Probe
ggttagctcagtcggctagagcgtggtgc

SEQ ID NO: 32690 - DNA, 15 bp, Artificial Sequence
  Probe
ggttaggattcggcg

SEQ ID NO: 32691 - DNA, 17 bp, Artificial Sequence
  Probe
ggttaggattcggcgct

SEQ ID NO: 32692 - DNA, 19 bp, Artificial Sequence
  Probe
ggttaggattcggcgctct

SEQ ID NO: 32693 - DNA, 23 bp, Artificial Sequence
  Probe
ggttaggattcggcgctctcacc

SEQ ID NO: 32694 - DNA, 32 bp, Artificial Sequence
  Probe
ggttaggattcggcgctctcaccgccgcggcc

SEQ ID NO: 32695 - DNA, 37 bp, Artificial Sequence; identical to SEQ ID NO: 22259
  Probe

SEQ ID NO: 32696 - DNA, 22 bp, Artificial Sequence
  Probe
ggttaggcctctttttaccagc

SEQ ID NO: 32697 - DNA, 15 bp, Artificial Sequence
  Probe
ggttagtactctgcg

SEQ ID NO: 32698 - DNA, 17 bp, Artificial Sequence
  Probe
ggttagtactctgcgtt

SEQ ID NO: 32699 - DNA, 15 bp, Artificial Sequence
  Probe
ggttagtatccccgc

SEQ ID NO: 32700 - DNA, 20 bp, Artificial Sequence
  Probe
ggttatacccttcccgtact

SEQ ID NO: 32701 - DNA, 15 bp, Artificial Sequence
  Probe
ggttatcacgtctgc

SEQ ID NO: 32702 - DNA, 16 bp, Artificial Sequence
  Probe
ggttatcacgtctgct

SEQ ID NO: 32703 - DNA, 16 bp, Artificial Sequence
  Probe
ggttatcacgttcgcc

SEQ ID NO: 32704 - DNA, 23 bp, Artificial Sequence
  Probe
ggttatcacgttcgcctaacacg

SEQ ID NO: 32705 - DNA, 23 bp, Artificial Sequence
  Probe
ggttatcacgttcgcctcacacg

SEQ ID NO: 32706 - DNA, 20 bp, Artificial Sequence
  Probe
ggttcaaatcccggacgagc

SEQ ID NO: 32707 - DNA, 24 bp, Artificial Sequence
  Probe
ggttcaattcccggtcagggaacc

SEQ ID NO: 32708 - DNA, 25 bp, Artificial Sequence
  Probe
ggttcaattcccggtcagggaacca

SEQ ID NO: 32709 - DNA, 23 bp, Artificial Sequence
  Probe
ggttcagtggtagaattctcgcc

SEQ ID NO: 32710 - DNA, 24 bp, Artificial Sequence
  Probe
ggttcagtggtagaattctcgcct

SEQ ID NO: 32711 - DNA, 27 bp, Artificial Sequence
  Probe
ggttcagtggtagaattctcgcctgcc

SEQ ID NO: 32712 - DNA, 29 bp, Artificial Sequence
  Probe
ggttcagtggtagaattctcgcctgccac

SEQ ID NO: 32713 - DNA, 15 bp, Artificial Sequence
  Probe
ggttccatagtgtag

SEQ ID NO: 32714 - DNA, 19 bp, Artificial Sequence
  Probe
ggttccatagtgtagcggt

SEQ ID NO: 32715 - DNA, 30 bp, Artificial Sequence; identical to SEQ ID NO: 8720
  Probe

SEQ ID NO: 32716 - DNA, 31 bp, Artificial Sequence; identical to SEQ ID NO: 1432
  Probe

SEQ ID NO: 32717 - DNA, 19 bp, Artificial Sequence
  Probe
ggttccatagtgtagtggt

SEQ ID NO: 32718 - DNA, 23 bp, Artificial Sequence
  Probe
ggttccatagtgtagtggttatc

SEQ ID NO: 32719 - DNA, 36 bp, Artificial Sequence; identical to SEQ ID NO: 6816
  Probe

SEQ ID NO: 32720 - DNA, 34 bp, Artificial Sequence; identical to SEQ ID NO: 1455
  Probe

SEQ ID NO: 32721 - DNA, 35 bp, Artificial Sequence; identical to SEQ ID NO: 6817
  Probe

SEQ ID NO: 32722 - DNA, 43 bp, Artificial Sequence
  Probe
ggttccatagtgtagtggttatcacgtctgctttacacgcaga

SEQ ID NO: 32723 - DNA, 36 bp, Artificial Sequence
  Probe
ggttccatggtgtaatggtaagcactctggactctg

SEQ ID NO: 32724 - DNA, 50 bp, Artificial Sequence
  Probe
ggttccatggtgtaatggtaagcactctggactctgaatccagcgatccg

SEQ ID NO: 32725 - DNA, 36 bp, Artificial Sequence
  Probe
ggttccatggtgtaatggtgagcactctggactctg

SEQ ID NO: 32726 - DNA, 50 bp, Artificial Sequence
  Probe
ggttccatggtgtaatggtgagcactctggactctgaatccagcgatccg

SEQ ID NO: 32727 - DNA, 27 bp, Artificial Sequence
  Probe
ggttccatggtgtaatggttagcactc

SEQ ID NO: 32728 - DNA, 29 bp, Artificial Sequence
  Probe
ggttccatggtgtaatggttagcactctg

SEQ ID NO: 32729 - DNA, 31 bp, Artificial Sequence; identical to SEQ ID NO: 22321
  Probe

SEQ ID NO: 32730 - DNA, 35 bp, Artificial Sequence; identical to SEQ ID NO: 6828
  Probe

SEQ ID NO: 32731 - DNA, 41 bp, Artificial Sequence
  Probe
ggttccatggtgtaatggttagcactctggactctgaatcc

SEQ ID NO: 32732 - DNA, 42 bp, Artificial Sequence
  Probe
ggttccatggtgtaatggttagcactctggactctgaatcca

SEQ ID NO: 32733 - DNA, 15 bp, Artificial Sequence
  Probe
ggttcgaaaccgggc

SEQ ID NO: 32734 - DNA, 25 bp, Artificial Sequence
  Probe
ggttcgattccccgacggggaggca

SEQ ID NO: 32735 - DNA, 16 bp, Artificial Sequence
  Probe
ggttcgattcccggcc

SEQ ID NO: 32736 - DNA, 16 bp, Artificial Sequence
  Probe
ggttcgattcccggtc

SEQ ID NO: 32737 - DNA, 24 bp, Artificial Sequence
  Probe
ggttcgattcccggtcagggaagc

SEQ ID NO: 32738 - DNA, 24 bp, Artificial Sequence
  Probe
ggttcgattcccggtcatggaacc

SEQ ID NO: 32739 - DNA, 25 bp, Artificial Sequence
  Probe
ggttcgattcccggtcatggaacca

SEQ ID NO: 32740 - DNA, 36 bp, Artificial Sequence
  Probe
ggttcgattccggctcgaaggacttcgtctgtaatt

SEQ ID NO: 32741 - DNA, 24 bp, Artificial Sequence
  Probe
ggttcgattcctggtcagggaacc

SEQ ID NO: 32742 - DNA, 25 bp, Artificial Sequence
  Probe
ggttcgattcctggtcagggaacca

SEQ ID NO: 32743 - DNA, 15 bp, Artificial Sequence
  Probe
ggttgctgtcttttt

SEQ ID NO: 32744 - DNA, 36 bp, Artificial Sequence
  Probe
ggttggtcccatggtgtaatggttagcactctggac

SEQ ID NO: 32745 - DNA, 20 bp, Artificial Sequence
  Probe
ggttgtagtccgtgcgagaa

(The sequence listing continues in the following parts.)

What is claimed is:

1. A method of identifying a subject in need of therapeutic intervention to treat a disease or condition, disease recurrence, or disease progression comprising:
isolating fragments of tRNAs from a sample obtained from the subject; and
characterizing the tRNA fragments and their relative abundance in the sample to identify a signature, wherein when the signature is indicative of a diagnosis of the disease treatment of the subject is recommended.

2. The method of claim 1, wherein the sample is isolated from a cell, tissue or body fluid obtained from the subject.

3. The method of claim 2, wherein the body fluid is selected from the group consisting of amniotic fluid, aqueous humour and vitreous humour, bile, blood serum, breast milk, cerebrospinal fluid, cerumen, chyle, chyme, endolymph and perilymph, exudates, feces, female ejaculate, gastric acid, gastric juice, lymph, mucus, pericardial fluid, peritoneal fluid, pleural fluid, pus, rheum, saliva, sebum, serous fluid, semen, smegma, sputum, synovial fluid, sweat, tears, urine, vaginal secretion, and vomit.

4. The method of claim 1, wherein the sample is selected from the group consisting of a peripheral blood cell, a tumor cell, a circulating tumor cell, an exosome, a bone marrow cell, a breast cell, a lung cell, and a pancreatic cell.

5. The method of claim 1, wherein the tRNA fragments are isolated by a method selected from the group consisting of size selection, sequencing, and amplification.

6. The method of claim 1, wherein isolating the tRNA fragments comprises isolating tRNA fragments with a length in the range of about 15 nucleotides to about 80 nucleotides.

7. The method of claim 1, wherein isolating the tRNA fragments comprises isolating tRNA fragments having a predominant length of 16, 17, 26, or 29 nucleotides is indicative of a breast cancer subtype.

8. The method of claim 1, wherein the signature is obtained through sequence-specific methods that preserve at least one terminus of the tRNA fragments.

9. The method of claim 1, wherein the signature is obtained by hybridization to a panel of oligonucleotides.

10. The method of claim 9, wherein the tRNA fragments are enriched prior to the hybridization.

11. The method of claim 9, wherein the oligonucleotide panel comprises at least two or more polynucleotides that selectively hybridize to the tRNA fragments.

12. The method of claim 1, wherein the signature comprises at least one sequence with identifiers selected from the group consisting of SEQ ID NOs: 1-1802 to analyze brain; SEQ ID NOs: 8538-8852 to analzye breast tissue; SEQ ID NOs: 12462-14475 to analyze blood cells; SEQ ID NOs: 24833-25945 to analyze blood cells; SEQ ID NOs: 36100-37466 to analyze pancreatic cancer; SEQ ID NOs: 42349-43721 to analyze prostate tissue; and SEQ ID NOs: 51286-51793 to analyze platelets.

13. The method of claim 1, wherein the signature comprises at least one sequence with identifiers selected from the group consisting of SEQ ID NOs: 11, 18, 19, 28, 31, 34, 43, 51, 59, 83, 189, 194, 209, 268, 305, 306, 307, 316, 320, 398, 404, 611, 632, 653, 696, 751, 768, 816, 817, 860, 869, 870, 871, 920, 921, 925, 951, 960, 967, 989, 1005, 1030, 1133, 1201, 1202, 1223, 1229, 1230, 1231, 1240, 1248, 1298, 1318, 1406, 1412, 1421, 1425, 1453, 1510, 1577, 1582, 1631, 1637, 1645, 1661, 1695, 1727 and 1794 to distinguish Alzheimer's disease brain from normal brain.

14. The method of claim 1, wherein the signature comprises at least one sequence with identifiers selected from the group consisting of SEQ ID NO:8613 and SEQ ID NO: 8823 to distinguish triple negative breast cancer from HER2+ breast cancer.

15. The method of claim 1, wherein the signature comprises at least one sequence with identifiers selected from the group consisting of SEQ ID NOs: 8542, 8543, 8566, 8579, 8582, 8587, 8589, 8590, 8594, 8671-8673, 8707, 8731, 8774-8778, 8803, 8827-8828, 8831-8832, 8837-8838, and 8852 to distinguish triple negative breast cancer from normal.

16. The method of claim 1, wherein the signature comprises at least one sequence with identifiers selected from the group consisting of SEQ ID NOs: 8596, 8601, 8622, 8657, 8664, and 8811 to distinguish triple positive breast cancer from triple negative breast cancer.

17. The method of claim 1, wherein the signature comprises at least one sequence with identifiers selected from the group consisting of SEQ ID NOs: 8582, 8599-8601, 8622-8623, 8634, 8657, 8663-8665, 8676, 8698, 8703-8706, 8718-8720, 8722, 8724, 8738, 8745, 8758, 8761, 8767-8772, and 8840 to distinguish breast cancer from normal tissue.

18. The method of claim 1, wherein the signature comprises at least one sequence with identifiers selected from the group consisting of SEQ ID NOs: 12462, 12463, 12464, 12465, 12466, 12467, 12468, 12469, 12470, 12471, 12472, 12473, 12474, 12475, 12476, 12477, 12478, 12479, 12480, 12481, 12482, 12483, 12484, 12485, 12486, 12487, 12488, 12489, 12490, 12492, 12493, 12494, 12495, 12496, 12497, 12498, 12499, 12500, 12501, 12502, 12503, 12504, 12505, 12506, 12507, 12508, 12509, 12510, 12511, 12512, 12513, 12514, 12515, 12516, 12517, 12518, 12519, 12520, 12522, 12523, 12524, 12525, 12526, 12527, 12529, 12530, 12531, 12532, 12533, 12534, 12536, 12537, 12538, 12540, 12541, 12542, 12543, 12544, 12545, 12546, 12547, 12548, 12549, 12550, 12551, 12552, 12553, 12554, 12555, 12556, 12557, 12558, 12559, 12560, 12561, 12562, 12563, 12564, 12565, 12566, 12567, 12568, 12569, 12570, 12572, 12573, 12574, 12575, 12576, 12577, 12578, 12580, 12581, 12582, 12584, 12585, 12586, 12587, 12588, 12589, 12590, 12591, 12592, 12593, 12594, 12595, 12596, 12597, 12598, 12599, 12600, 12601, 12602, 12603, 12604, 12607, 12608, 12609, 12614, 12615, 12616, 12617, 12618, 12619, 12620, 12621, 12622, 12623, 12624, 12625, 12626, 12627, 12628, 12629, 12631, 12632, 12633, 12634, 12635, 12636, 12637, 12638, 12639, 12640, 12641, 12642, 12643, 12645, 12647, 12648, 12649, 12652, 12653, 12654, 12655, 12657, 12658, 12659, 12660, 12661, 12663, 12664, 12665, 12666, 12667, 12668, 12669, 12670, 12671, 12672, 12674, 12677, 12678, 12679, 12680, 12682, 12684, 12685, 12686, 12687, 12688, 12689, 12690, 12691, 12692, 12693, 12694, 12695, 12696, 12697, 12698, 12699, 12700, 12703, 12704, 12705, 12706, 12708, 12710, 12711, 12712, 12713, 12714, 12715, 12716, 12717, 12718, 12719, 12720, 12721, 12724, 12726, 12727, 12728, 12729, 12730, 12731, 12732, 12733, 12734, 12736, 12738, 12739, 12740, 12741, 12742, 12743, 12744, 12745, 12746, 12747, 12749, 12750, 12751, 12754, 12756, 12758, 12760, 12761, 12763, 12764, 12765, 12766, 12767, 12768, 12769, 12770, 12771, 12773, 12774, 12776, 12777, 12779, 12780, 12781, 12782, 12783, 12785, 12786, 12788, 12789, 12790, 12791, 12792, 12795, 12799, 12800, 12801, 12802, 12803, 12804, 12805, 12806, 12807, 12809, 12811, 12812, 12813, 12814, 12815, 12817, 12818, 12819, 12820, 12821, 12824, 12825, 12826, 12827, 12828, 12829, 12831, 12832, 12833, 12834, 12835, 12836, 12837, 12838, 12840, 12841, 12842, 12843, 12844, 12846, 12847, 12848, 12849, 12850, 12851, 12852, 12853, 12854, 12855, 12856, 12857, 12858, 12859, 12860, 12861, 12864, 12865, 12867, 12868, 12869, 12870, 12871, 12872, 12873, 12874, 12875, 12876, 12877, 12878, 12879, 12880, 12881, 12882, 12883, 12884, 12885, 12886, 12887, 12888, 12889, 12890, 12891, 12892, 12893, 12894, 12895, 12896, 12897, 12899, 12900, 12901, 12902, 12903, 12904, 12905, 12906, 12907, 12909, 12910, 12911, 12912, 12913, 12914, 12916, 12918, 12919, 12920, 12922, 12923, 12924, 12925, 12926, 12927, 12928, 12929, 12930, 12931, 12932, 12933, 12934, 12935, 12936, 12937, 12938, 12939, 12940, 12941, 12942, 12943, 12944, 12946, 12947, 12948, 12949, 12950, 12951, 12954, 12955, 12956, 12957, 12958, 12959, 12960, 12961, 12962, 12963, 12965, 12966, 12967, 12968, 12969, 12970, 12971, 12972, 12973, 12974, 12975, 12978, 12979, 12980, 12981, 12982, 12983, 12984, 12985, 12986, 12987, 12988, 12990, 12991, 12992, 12993, 12994, 12996, 12997, 12998, 12999, 13000, 13001, 13002, 13003, 13004, 13005, 13006, 13007, 13008, 13009, 13011, 13012, 13013, 13014, 13016, 13017, 13018, 13019, 13020, 13021, 13022, 13023, 13024, 13025, 13028, 13029, 13030, 13031, 13033, 13034, 13035, 13036, 13037, 13038, 13039, 13040, 13044, 13045, 13046, 13047, 13049, 13050, 13051, 13052, 13053, 13054, 13055, 13056, 13057, 13058, 13059, 13061, 13063, 13065, 13066, 13067, 13068, 13069, 13070, 13071, 13072, 13073, 13074, 13075, 13076, 13077, 13078, 13079, 13080, 13081, 13082, 13083, 13084, 13085, 13086, 13087, 13088, 13089, 13090, 13091, 13092, 13093, 13094, 13095, 13096, 13097, 13098, 13100, 13101, 13102, 13103, 13104, 13105, 13106, 13107, 13110, 13112, 13113, 13114, 13117, 13118, 13119, 13120, 13121, 13122, 13123, 13124, 13125, 13127, 13128, 13129, 13130, 13131, 13132, 13133, 13134, 13135, 13136, 13137, 13138, 13139, 13140, 13141, 13142, 13143, 13145, 13146, 13148, 13149, 13150, 13151, 13152, 13153, 13154, 13155, 13157, 13158, 13159, 13160, 13161, 13162, 13163, 13164, 13165, 13166, 13167, 13168, 13169, 13170, 13171, 13174, 13175, 13177, 13178, 13179, 13181, 13182, 13183, 13184, 13185, 13186, 13187, 13189, 13190, 13191, 13193, 13195, 13196, 13198, 13199, 13200, 13201, 13202, 13203, 13204, 13205, 13206, 13207, 13208, 13209, 13210, 13211, 13212, 13213, 13214, 13215, 13216, 13217, 13218, 13219, 13221, 13222, 13223, 13225, 13228, 13230, 13231, 13232, 13233, 13234, 13236, 13237, 13238, 13239, 13240, 13241, 13242, 13243, 13245, 13246, 13247, 13248, 13249, 13250, 13251, 13252, 13253, 13255, 13256, 13257, 13258, 13259, 13260, 13261, 13262, 13263, 13264, 13268, 13269, 13270, 13271, 13273, 13274, 13275, 13276, 13277, 13278, 13279, 13280, 13281, 13283, 13285, 13286, 13287, 13288, 13289, 13290, 13292, 13293, 13294, 13295, 13296, 13297, 13298, 13299, 13300, 13301, 13302, 13303, 13304, 13306, 13309, 13310, 13312, 13313, 13314, 13315, 13316, 13317, 13318, 13319, 13320, 13323, 13324, 13325, 13326, 13327, 13328, 13329, 13330, 13331, 13332, 13333, 13334, 13335, 13336, 13337, 13338, 13339, 13340, 13341, 13342, 13343, 13345, 13346, 13347, 13348, 13349, 13350, 13351, 13352, 13353, 13354, 13355, 13357, 13358, 13359, 13360, 13361, 13362, 13363, 13364, 13365, 13366, 13367, 13369, 13370, 13371, 13372, 13373, 13374, 13375, 13376, 13377, 13378, 13379, 13380, 13381, 13382, 13383, 13384, 13385, 13386, 13387, 13388, 13389, 13390, 13391, 13392, 13393, 13394, 13395, 13396, 13397, 13398, 13399, 13400, 13401, 13402, 13403, 13404, 13405, 13406, 13407, 13408, 13409, 13410, 13411, 13412, 13413, 13414, 13415, 13416, 13417, 13421, 13422, 13424, 13426, 13427, 13428, 13429, 13430, 13431, 13432, 13433, 13434, 13436, 13437, 13438, 13439, 13440, 13441, 13442, 13443, 13445, 13446, 13447, 13448, 13449, 13450, 13452, 13453, 13454, 13455, 13456, 13457, 13458, 13459, 13460, 13461, 13462, 13463, 13464, 13465, 13466, 13467, 13468, 13469, 13470, 13471, 13472, 13473, 13474, 13475, 13476, 13477, 13478, 13479, 13480, 13481, 13482, 13484, 13485, 13486, 13488, 13489, 13491, 13492, 13493, 13494, 13495, 13496, 13498, 13500, 13501, 13503, 13504, 13505, 13506, 13507, 13508, 13509, 13510, 13511, 13512, 13513, 13514, 13516, 13517, 13519, 13520, 13522, 13523, 13524, 13525, 13528, 13529, 13530, 13531, 13532, 13533, 13534, 13535, 13536, 13537, 13538, 13539, 13540, 13541, 13542, 13543, 13544, 13545, 13546, 13547, 13548, 13550, 13551, 13552, 13553, 13554, 13556, 13557, 13558, 13559, 13560, 13561, 13562, 13563, 13567, 13568, 13569, 13570, 13571, 13572, 13573, 13574, 13576, 13577, 13578, 13579, 13580, 13581, 13582, 13583, 13584, 13585, 13586, 13587, 13588, 13589, 13590, 13591, 13592, 13593, 13594, 13595, 13596, 13597, 13598, 13599, 13600, 13601, 13602, 13603, 13604, 13605, 13606, 13607, 13608, 13609, 13610, 13611, 13612, 13613, 13614, 13615, 13616, 13617, 13619, 13620, 13621, 13622, 13623, 13624, 13626, 13627, 13628, 13629, 13632, 13633, 13634, 13635, 13636, 13637, 13638, 13639, 13640, 13641, 13642, 13643, 13644, 13645, 13646, 13647, 13648, 13649, 13650, 13651, 13654, 13655, 13656, 13657, 13658, 13659, 13660, 13661, 13662, 13663, 13664, 13665, 13666, 13667, 13668, 13669, 13670, 13671, 13672, 13673, 13674, 13675, 13676, 13677, 13678, 13679, 13680, 13681, 13682, 13683, 13684, 13685, 13687, 13688, 13690, 13691, 13693, 13695, 13696, 13697, 13699, 13700, 13702, 13703, 13704, 13706, 13707, 13708, 13709, 13710, 13711, 13712, 13713, 13714, 13716, 13717, 13718, 13719, 13720, 13721, 13722, 13723, 13724, 13725, 13726, 13727, 13728, 13729, 13730, 13731, 13732, 13733, 13734, 13735, 13737, 13738, 13739, 13740, 13741, 13742, 13743, 13744, 13745, 13746, 13747, 13748, 13749, 13750, 13751, 13752, 13754, 13755, 13756, 13757, 13758, 13759, 13760, 13762, 13763, 13764, 13765, 13766, 13767, 13768, 13769, 13770, 13771, 13772, 13774, 13775, 13776, 13777, 13778, 13779, 13780, 13781, 13782, 13783, 13784, 13785, 13786, 13787, 13788, 13789, 13790, 13792, 13793, 13794, 13795, 13796, 13799, 13801, 13802, 13803, 13804, 13806, 13807, 13808, 13809, 13810, 13811, 13812, 13813, 13815, 13816, 13817, 13818, 13819, 13820, 13821, 13822, 13823, 13824, 13825, 13826, 13827, 13828, 13829, 13830, 13831, 13833, 13834, 13835, 13836, 13837, 13838, 13839, 13841, 13842, 13843, 13844, 13845, 13846, 13849, 13850, 13851, 13852, 13853, 13854, 13855, 13856, 13857, 13858, 13859, 13860, 13861, 13862, 13863, 13864, 13865, 13866, 13868, 13869, 13870, 13871, 13873, 13874, 13875, 13876, 13878, 13879, 13880, 13881, 13882, 13884, 13885, 13887, 13888, 13889, 13890, 13893, 13895, 13896, 13897, 13898, 13899, 13900, 13901, 13902, 13903, 13904, 13905, 13906, 13908, 13909, 13910, 13911, 13912, 13914, 13915, 13916, 13917, 13919, 13920, 13921, 13922, 13923, 13924, 13925, 13926, 13928, 13929, 13930, 13931, 13932, 13933, 13934, 13935, 13936, 13937, 13938, 13939, 13940, 13941, 13942, 13944, 13945, 13946, 13948, 13950, 13952, 13953, 13954, 13955, 13956, 13960, 13961, 13962, 13963, 13964, 13965, 13966, 13967, 13968, 13970, 13971, 13972, 13973, 13974, 13975, 13976, 13977, 13978, 13979, 13980, 13982, 13983, 13984, 13985, 13986, 13987, 13988, 13989, 13990, 13991, 13992, 13993, 13994, 13995, 13996, 13997, 13998, 13999, 14000, 14001, 14002, 14003, 14004, 14005, 14006, 14007, 14008, 14010, 14011, 14012, 14013, 14014, 14015, 14016, 14017, 14018, 14019, 14020, 14021, 14022, 14023, 14024, 14025, 14026, 14027, 14028, 14030, 14031, 14032, 14034, 14035, 14037, 14038, 14039, 14040, 14041, 14042, 14043, 14044, 14045, 14046, 14047, 14048, 14049, 14050, 14051, 14052, 14053, 14055, 14059, 14060, 14061, 14062, 14064, 14065, 14067, 14068, 14069, 14070, 14071, 14072, 14073, 14074, 14075, 14076, 14077, 14078, 14079, 14080, 14082, 14084, 14085, 14086, 14088, 14089, 14090, 14092, 14093, 14095, 14096, 14097, 14098, 14099, 14100, 14103, 14104, 14105, 14108, 14109, 14110, 14111, 14112, 14113, 14116, 14117, 14118, 14119, 14121, 14122, 14123, 14124, 14125, 14126, 14127, 14128, 14129, 14130, 14131, 14132, 14133, 14135, 14136, 14137, 14139, 14141, 14142, 14143, 14144, 14145, 14146, 14147, 14148, 14151, 14152, 14153, 14154, 14155, 14156, 14157, 14158, 14159, 14160, 14161, 14162, 14163, 14166, 14167, 14168, 14169, 14170, 14171, 14172, 14173, 14175, 14176, 14177, 14178, 14179, 14180, 14181, 14182, 14183, 14185, 14186, 14187, 14188, 14190, 14191, 14192, 14193, 14194, 14195, 14197, 14198, 14199, 14201, 14204, 14205, 14207, 14208, 14212, 14213, 14215, 14216, 14217, 14218, 14219, 14222, 14223, 14224, 14225, 14226, 14227, 14228, 14229, 14230, 14231, 14232, 14233, 14234, 14235, 14236, 14237, 14238, 14239, 14240, 14241, 14242, 14243, 14244, 14245, 14246, 14247, 14248, 14249, 14250, 14251, 14252, 14253, 14254, 14255, 14256, 14257, 14258, 14259, 14260, 14261, 14262, 14263, 14265, 14266, 14267, 14268, 14271, 14273, 14274, 14276, 14280, 14281, 14282, 14283, 14284, 14285, 14287, 14288, 14290, 14292, 14293, 14294, 14295, 14296, 14297, 14298, 14299, 14300, 14301, 14302, 14303, 14304, 14305, 14306, 14307, 14308, 14309, 14310, 14311, 14313, 14314, 14315, 14316, 14317, 14320, 14321, 14322, 14323, 14324, 14325, 14326, 14328, 14329, 14330, 14331, 14332, 14333, 14334, 14335, 14336, 14338, 14339, 14340, 14342, 14343, 14344, 14346, 14347, 14348, 14349, 14350, 14351, 14353, 14354, 14355, 14356, 14357, 14358, 14359, 14360, 14361, 14363, 14365, 14366, 14367, 14368, 14369, 14370, 14371, 14372, 14373, 14374, 14375, 14376, 14377, 14378, 14379, 14380, 14382, 14383, 14384, 14385, 14386, 14389, 14390, 14391, 14392, 14393, 14394, 14395, 14396, 14397, 14399, 14400, 14401, 14402, 14403, 14404, 14405, 14406, 14407, 14408, 14409, 14410, 14411, 14412, 14413, 14415, 14416, 14417, 14418, 14419, 14420, 14421, 14422, 14424, 14427, 14428, 14429, 14430, 14432, 14434, 14435, 14436, 14437, 14438, 14440, 14441, 14442, 14443, 14444, 14445, 14446, 14447, 14448, 14450, 14451, 14452, 14453, 14454, 14455, 14456, 14457, 14458, 14459, 14460, 14461, 14463, 14465, 14467, 14469, 14470, 14471, 14473, 14475 to distinguish chronic lymphocytic leukemia from normal B-cells.

19. The method of claim 1, wherein the signature comprises at least one sequence with identifiers selected from the group consisting of SEQ ID NOs: 24995-24996, 25025, 25031, 25033, 25087-25091, 25093-25094, 25128, 25150, 25161-25162, 25165, 25182, 25219-25220, 25230, 25277-25278, 25284, 25316, 25356-25357, 25359-25360, 25363-25364, 25397-25398, 25415, 25424, 25432, 25480, 25484-25486, 25498-25499, 25505, 25524, 25550-25552, 25570, 25580, 25583, 25609-25610, 25619, 25646-25647, 25685-25687, 25691, 25714, 25720, 25727-25728, 25731, 25741, 25746-25747, 25846-25847, 25868, 25882, 25904, 25908-25912, and 25914-25915 to distinguish B-cells from breast cells.

20. The method of claim 1, wherein the signature comprises at least one sequence with identifiers selected from the group consisting of SEQ ID NOs: 24880-24883, 24896-24897, 24959-24963, 24965, 24973, 25006, 25027, 25052, 25054, 25102-25103, 25110-25111, 25118, 25123, 25150, 25152-25153, 25183-25184, 25188, 25198, 25202, 25204-25206, 25210, 25212-25214, 25224-25225, 25245, 25252-25254, 25257, 25259-25261, 25270, 25273, 25286, 25294, 25296, 25313-25314, 25334, 25416, 25425, 25449-25450, 25454, 25476-25478, 25583, 25609-25612, 25665, 25667, 25705, 25714, 25786, 25894, and 25896-25897 to distinguish B-cells from white people from B-cells from black people.

21. The method of claim 1, wherein the signature comprises at least one sequence with identifiers selected from the group consisting of SEQ ID NO: 24881, 24926, 24952, 24981, 24990, 24995, 24998, 25010, 25047, 25051, 25075, 25101-25102, 2511 25111, 25118, 25121, 25149, 25211, 25218, 25238, 25309, 25359, 25373, 25376, 25386-25387, 25402, 25410, 25415-25416, 25420-25421, 25468, 25474, 25476, 25484-25487, 25493, 25524, 25536, 25560, 25596, 25604, 25620, 25631, 25651, 25662, 25664, 25714, 25723, 25803, 25829, 25850-25851, 25886-25887, 25898, 25902-25903, 25905, 25914, 25921, 25923, 25937 to distinguish B-cells from men from B-cells from women.

22. The method of claim 1, wherein the signature comprises at least one sequence with identifiers selected from the group consisting of SEQ ID NOs: 36100, 36101, 36105, 36107, 36111, 36112, 36114, 36115, 36116, 36119, 36120, 36121, 36122, 36123, 36139, 36143, 36146, 36147, 36148, 36149, 36155, 36156, 36157, 36163, 36171, 36173, 36176, 36177, 36178, 36179, 36180, 36181, 36182, 36183, 36188, 36189, 36194, 36197, 36200, 36203, 36204, 36215, 36217, 36218, 36219, 36222, 36223, 36227, 36228, 36230, 36231, 36234, 36238, 36239, 36240, 36241, 36242, 36243, 36246, 36248, 36252, 36254, 36262, 36265, 36266, 36269, 36270, 36271, 36272, 36273, 36276, 36278, 36279, 36282, 36285, 36287, 36288, 36289, 36293, 36294, 36295, 36296, 36297, 36298, 36299, 36303, 36304, 36305, 36306, 36307, 36308, 36313, 36319, 36320, 36322, 36323, 36326, 36327, 36331, 36332, 36333, 36335, 36336, 36338, 36339, 36341, 36342, 36344, 36347, 36355, 36356, 36357, 36372, 36373, 36374, 36375, 36376, 36378, 36381, 36384, 36387, 36391, 36392, 36395, 36397, 36399, 36400, 36401, 36405, 36406, 36408, 36409, 36428, 36429, 36430, 36431, 36432, 36433, 36435, 36436, 36437, 36444, 36450, 36451, 36452, 36453, 36455, 36456, 36457, 36460, 36461, 36462, 36463, 36464, 36465, 36466, 36467, 36468, 36469, 36470, 36471, 36472, 36478, 36485, 36490, 36491, 36498, 36499, 36504, 36505, 36506, 36507, 36508, 36509, 36510, 36511, 36512, 36513, 36517, 36520, 36521, 36523, 36524, 36529, 36530, 36533, 36534, 36535, 36538, 36539, 36541, 36542, 36543, 36544, 36545, 36546, 36547, 36550, 36553, 36554, 36561, 36562, 36572, 36573, 36574, 36575, 36578, 36579, 36580, 36581, 36582, 36584, 36586, 36589, 36590, 36591, 36593, 36594, 36597, 36599, 36600, 36601, 36607, 36608, 36609, 36610, 36611, 36612, 36614, 36615, 36616, 36617, 36618, 36619, 36620, 36621, 36627, 36628, 36629, 36637, 36638, 36639, 36640, 36641, 36642, 36643, 36644, 36645, 36646, 36647, 36649, 36650, 36658, 36665, 36669, 36670, 36671, 36673, 36674, 36675, 36676, 36677, 36678, 36679, 36680, 36682, 36683, 36684, 36689, 36690, 36691, 36692, 36693, 36694, 36695, 36696, 36697, 36698, 36701, 36702, 36703, 36705, 36706, 36707, 36708, 36709, 36710, 36711, 36712, 36714, 36715, 36716, 36718, 36719, 36720, 36721, 36722, 36726, 36727, 36728, 36729, 36730, 36731, 36732, 36733, 36734, 36735, 36738, 36739, 36741, 36742, 36744, 36745, 36746, 36747, 36749, 36751, 36754, 36755, 36756, 36757, 36759, 36760, 36761, 36762, 36763, 36764, 36765, 36768, 36769, 36770, 36771, 36772, 36775, 36776, 36777, 36778, 36788, 36789, 36793, 36794, 36796, 36797, 36798, 36799, 36800, 36803, 36805, 36806, 36809, 36810, 36812, 36814, 36817, 36825, 36826, 36827, 36829, 36830, 36831, 36832, 36834, 36835, 36838, 36839, 36841, 36844, 36846, 36848, 36849, 36851, 36854, 36855, 36857, 36859, 36860, 36861, 36862, 36863, 36864, 36868, 36869, 36871, 36872, 36877, 36878, 36879, 36880, 36881, 36883, 36884, 36885, 36886, 36887, 36889, 36890, 36891, 36892, 36895, 36897, 36901, 36902, 36903, 36904, 36905, 36907, 36909, 36910, 36911, 36913, 36914, 36915, 36916, 36917, 36918, 36919, 36925, 36931, 36938, 36939, 36941, 36942, 36945, 36946, 36948, 36952, 36953, 36955, 36956, 36957, 36958, 36961, 36963, 36964, 36965, 36967, 36968, 36973, 36976, 36977, 36978, 36979, 36980, 36981, 36982, 36983, 36985, 36988, 36989, 36990, 36991, 36992, 36997, 36998, 36999, 37001, 37004, 37005, 37008, 37009, 37012, 37013, 37014, 37021, 37022, 37023, 37024, 37025, 37026, 37029, 37032, 37033, 37036, 37039, 37044, 37046, 37048, 37049, 37050, 37051, 37054, 37055, 37056, 37057, 37058, 37059, 37060, 37063, 37065, 37066, 37075, 37077, 37078, 37079, 37080, 37081, 37083, 37087, 37088, 37089, 37090, 37091, 37094, 37095, 37099, 37100, 37101, 37110, 37115, 37116, 37117, 37119, 37120, 37121, 37123, 37124, 37125, 37127, 37132, 37133, 37134, 37135, 37137, 37138, 37139, 37141, 37142, 37143, 37144, 37145, 37146, 37149, 37150, 37151, 37152, 37155, 37157, 37160, 37161, 37162, 37163, 37164, 37165, 37166, 37167, 37168, 37169, 37171, 37174, 37175, 37177, 37178, 37181, 37182, 37183, 37184, 37185, 37187, 37193, 37194, 37195, 37196, 37197, 37198, 37199, 37201, 37202, 37203, 37206, 37207, 37208, 37209, 37211, 37213, 37214, 37216, 37217, 37226, 37227, 37228, 37229, 37230, 37231, 37234, 37235, 37237, 37244, 37245, 37247, 37248, 37249, 37251, 37253, 37254, 37255, 37261, 37262, 37265, 37271, 37272, 37273, 37274, 37278, 37279, 37283, 37303, 37304, 37305, 37306, 37307, 37308, 37312, 37316, 37319, 37321, 37323, 37324, 37325, 37326, 37327, 37334, 37335, 37336, 37337, 37338, 37339, 37340, 37341, 37342, 37348, 37356, 37363, 37365, 37368, 37369, 37370, 37372, 37374, 37375, 37376, 37382, 37383, 37385, 37386, 37388, 37391, 37394, 37395, 37398, 37400, 37401, 37402, 37403, 37404, 37405, 37407, 37408, 37410, 37419, 37420, 37422, 37423, 37424, 37425, 37426, 37429, 37430, 37431, 37432, 37433, 37445, 37446, 37448, 37449, 37453, 37454, 37456, 37461, 37462, 37463, 37464, and 37466 to distinguish normal pancreas from pancreatic cancer.

23. The method of claim 1, wherein the signature comprises at least one sequence with identifiers selected from the group consisting of SEQ ID NOs: 51377-51378, 51406, 51438, 51496, 51565, 51691, 51699, 51736-51737, 51745, and 51759 to distinguish platelets from people with a propensity to clot vs. platelets from people with a propensity to hemorrhage.

24. The method of claim 1, wherein the signature comprises at least one sequence with identifiers selected from the group consisting of SEQ ID NOs: 42434, 42520, 42537, 42577, 42751, 42979, 43019, 43090, 43128, 43156, 43310, 43352, 43398, 43426, 43437 to distinguish normal prostate from prostate cancer.

25. The method of claim 1, wherein characterizing the tRNA fragments comprises at least one assessment selected from the group consisting of sequencing the tRNA fragments, measuring overall abundance of one of the tRNA fragments mapped to the genome, measuring a relative abundance of the one tRNA fragment to a reference, assessing a length of the one tRNA fragment, identifying starting and ending points of the one tRNA fragment, identifying genomic origin of the one tRNA fragment, and identifying a terminal modification of the one tRNA fragment.

26. The method of claim 1, wherein the disease or condition, disease recurrence, or disease progression is selected from the group consisting of a cancer, and genetically predisposed disease or condition.

27. A method of diagnosing, identifying or monitoring breast cancer in a subject in need thereof, the method comprising:
isolating tRNA fragments from a cell obtained from the subject;
hybridizing the tRNA fragments to a panel of oligonucleotides engineered to detect tRNA fragments;
analyzing levels of the tRNA fragments present in the cell; wherein a differential in the measured tRNA fragments' levels to the reference is indicative of a diagnosis or identification of breast cancer in the subject; and
providing a treatment regimen to the subject dependent on the differential in measured tRNA fragments' levels to the reference.

28. A panel of engineered oligonucleotides comprising a mixture of oligonucleotides that are about 15 to about 40 nucleotides in length and capable of hybridizing tRNA fragments, wherein the tRNAs are less than 80 nucleotides in length.

29. A kit for high-throughput analysis of tRNAs fragments in a sample comprising:
the panel of engineered oligonucleotides of claim 28;
hybridization reagents; and
tRNA isolation reagents.

30. A method of identifying a cell's tissue of origin to treat a disease or condition, disease recurrence, or disease progression in a subject in need thereof comprising:
isolating fragments of tRNAs from a cell obtained from the subject;
characterizing the identity of the tRNA fragments and their relative abundance in the cell to identify a signature, wherein the signature is indicative of the cell's tissue of origin; and
providing a treatment regimen to the subject dependent on the cell's tissue of origin.

31. A method for identifying tRNA fragments comprising:
defining tRNA loci;
sequencing a population of RNA fragments;
mapping the sequenced RNA fragments to at least one tRNA genomic loci comprising:
disregarding mapped RNA fragments that differ in sequence from the tRNA genomic loci by at least an insertion, deletion, or replacement of a nucleotide;
adding back mapped RNA fragments that are post-transcriptionally modified that differ in sequence from the tRNA genomic loci only at the post-transcriptional modification;
excluding mapped RNA fragments that map to locations in the genome outside of the tRNA genomic loci; and
disregarding mapped RNA fragments with tRNA intron sequences; and
characterizing the mapped RNA fragments.

32. The method of claim 31, wherein the tRNA genomic loci comprise mitochondrial tRNA sequences from the mitochondrial genome, nuclear tRNA sequences from the nuclear genome, and mitochondria tRNA sequences from the nuclear genome.

33. The method of claim 31, wherein the mapped RNA fragments post-transcriptionally modified comprises at least one modified with a CCA trinucleotide at a 3′ end.

34. The method of claim 31, wherein characterizing the mapped RNA fragments comprises at least one assessment selected from the group consisting of identifying one or more of the mapped RNA fragments in a population, measuring an overall abundance of one or more of the mapped RNA fragments, measuring a relative abundance of one or more of the mapped RNA fragments to a reference, assessing a length of one or more of the mapped RNA fragments, identifying starting and ending points of one or more of the mapped RNA fragments, identifying genomic origin of one or more of the mapped RNA fragments, and identifying a terminal modification of one or more of the mapped RNA fragments.

35. A system for identifying tRNA fragments according to the method of claim 31 comprising a processor capable of analyzing the tRNA fragments.
